United States Patent Application Publication US 2014/0004565 A1 - sequence listing, part 59

SEQ ID NO: 1411822 - RNA, 19 nt, Artificial Sequence
  Description of Artificial Sequence: Synthetic oligonucleotide
augagaauccugaaauaua

SEQ ID NO: 1411823 - RNA, 19 nt, Artificial Sequence
  Description of Artificial Sequence: Synthetic oligonucleotide
aguggcuaauugugguuau

SEQ ID NO: 1411824 - RNA, 19 nt, Artificial Sequence
  Description of Artificial Sequence: Synthetic oligonucleotide
caaacgguucugaaguucu

SEQ ID NO: 1411825 - RNA, 19 nt, Artificial Sequence
  Description of Artificial Sequence: Synthetic oligonucleotide
aaacgguucugaaguucug

SEQ ID NO: 1411826 - RNA, 19 nt, Artificial Sequence
  Description of Artificial Sequence: Synthetic oligonucleotide
guguaugacaaucuucuuu

SEQ ID NO: 1411827 - RNA, 19 nt, Artificial Sequence
  Description of Artificial Sequence: Synthetic oligonucleotide
uccuuacuucucucacagc

SEQ ID NO: 1411828 - RNA, 19 nt, Artificial Sequence
  Description of Artificial Sequence: Synthetic oligonucleotide
gagccacuauauaccaaug

SEQ ID NO: 1411829 - RNA, 19 nt, Artificial Sequence
  Description of Artificial Sequence: Synthetic oligonucleotide
caggagucgaucauauucu

SEQ ID NO: 1411830 - RNA, 19 nt, Artificial Sequence
  Description of Artificial Sequence: Synthetic oligonucleotide
accagugcauguauacuga

SEQ ID NO: 1411831 - RNA, 19 nt, Artificial Sequence
  Description of Artificial Sequence: Synthetic oligonucleotide
ugugugcucauaggcacua

SEQ ID NO: 1411832 - RNA, 19 nt, Artificial Sequence
  Description of Artificial Sequence: Synthetic oligonucleotide
ccucuacaugaauauuugc

SEQ ID NO: 1411833 - RNA, 19 nt, Artificial Sequence
  Description of Artificial Sequence: Synthetic oligonucleotide
gcuaauugugguuauuuau

SEQ ID NO: 1411834 - RNA, 19 nt, Artificial Sequence
  Description of Artificial Sequence: Synthetic oligonucleotide
ggaccuaaagagcuucauc

SEQ ID NO: 1411835 - RNA, 19 nt, Artificial Sequence
  Description of Artificial Sequence: Synthetic oligonucleotide
ugaguccuaucucggcaua

SEQ ID NO: 1411836 - RNA, 19 nt, Artificial Sequence
  Description of Artificial Sequence: Synthetic oligonucleotide
auagaacgauuaauaguau

SEQ ID NO: 1411837 - RNA, 19 nt, Artificial Sequence
  Description of Artificial Sequence: Synthetic oligonucleotide
guuacgacuguuacacaaa

SEQ ID NO: 1411838 - RNA, 19 nt, Artificial Sequence
  Description of Artificial Sequence: Synthetic oligonucleotide
gccacuauauaccaaugcu

SEQ ID NO: 1411839 - RNA, 19 nt, Artificial Sequence
  Description of Artificial Sequence: Synthetic oligonucleotide
uccaaacgguucugaaguu

SEQ ID NO: 1411840 - RNA, 19 nt, Artificial Sequence
  Description of Artificial Sequence: Synthetic oligonucleotide
auauggcauucacaugcuu

SEQ ID NO: 1411841 - RNA, 19 nt, Artificial Sequence
  Description of Artificial Sequence: Synthetic oligonucleotide
auguuacgacuguuacaca

SEQ ID NO: 1411842 - RNA, 19 nt, Artificial Sequence
  Description of Artificial Sequence: Synthetic oligonucleotide
guuaccacaucguuuuguu

SEQ ID NO: 1411843 - RNA, 19 nt, Artificial Sequence
  Description of Artificial Sequence: Synthetic oligonucleotide
gcugaguaauaagcgaaac

SEQ ID NO: 1411844 - RNA, 19 nt, Artificial Sequence
  Description of Artificial Sequence: Synthetic oligonucleotide
acacgguguaugacaaucu

SEQ ID NO: 1411845 - RNA, 19 nt, Artificial Sequence
  Description of Artificial Sequence: Synthetic oligonucleotide
cugagguaauuaauauaua

SEQ ID NO: 1411846 - RNA, 19 nt, Artificial Sequence
  Description of Artificial Sequence: Synthetic oligonucleotide
uggcaaccgcugcccauug

SEQ ID NO: 1411847 - RNA, 19 nt, Artificial Sequence
  Description of Artificial Sequence: Synthetic oligonucleotide
aaaacacaucaaagcuuuu

SEQ ID NO: 1411848 - RNA, 19 nt, Artificial Sequence
  Description of Artificial Sequence: Synthetic oligonucleotide
ccagacgucucaacacuag

SEQ ID NO: 1411849 - RNA, 19 nt, Artificial Sequence
  Description of Artificial Sequence: Synthetic oligonucleotide
guauacugagguaauuaau

SEQ ID NO: 1411850 - RNA, 19 nt, Artificial Sequence
  Description of Artificial Sequence: Synthetic oligonucleotide
auuuuagaccagacacuaa

SEQ ID NO: 1411851 - RNA, 19 nt, Artificial Sequence
  Description of Artificial Sequence: Synthetic oligonucleotide
uucaggagucgaucauauu

SEQ ID NO: 1411852 - RNA, 19 nt, Artificial Sequence
  Description of Artificial Sequence: Synthetic oligonucleotide
cuucucucacagcaucuaa

SEQ ID NO: 1411853 - RNA, 19 nt, Artificial Sequence
  Description of Artificial Sequence: Synthetic oligonucleotide
ccagcugaguaauaagcga

SEQ ID NO: 1411854 - RNA, 19 nt, Artificial Sequence
  Description of Artificial Sequence: Synthetic oligonucleotide
cucugacucuccucuauua

SEQ ID NO: 1411855 - RNA, 19 nt, Artificial Sequence
  Description of Artificial Sequence: Synthetic oligonucleotide
gcaaccgcugcccauugga

SEQ ID NO: 1411856 - RNA, 19 nt, Artificial Sequence
  Description of Artificial Sequence: Synthetic oligonucleotide
ccagugcauguauacugag

SEQ ID NO: 1411857 - RNA, 19 nt, Artificial Sequence
  Description of Artificial Sequence: Synthetic oligonucleotide
gucucaacacuagccaaaa

SEQ ID NO: 1411858 - RNA, 19 nt, Artificial Sequence
  Description of Artificial Sequence: Synthetic oligonucleotide
ggcuaauugugguuauuua

SEQ ID NO: 1411859 - RNA, 19 nt, Artificial Sequence
  Description of Artificial Sequence: Synthetic oligonucleotide
ugacacgguguaugacaau

SEQ ID NO: 1411860 - RNA, 19 nt, Artificial Sequence
  Description of Artificial Sequence: Synthetic oligonucleotide
guacccauuuuagcuuuuc

SEQ ID NO: 1411861 - RNA, 19 nt, Artificial Sequence
  Description of Artificial Sequence: Synthetic oligonucleotide
gaguggaggaauacuuccu

SEQ ID NO: 1411862 - RNA, 19 nt, Artificial Sequence
  Description of Artificial Sequence: Synthetic oligonucleotide
cugacucuccucuauuaau

SEQ ID NO: 1411863 - RNA, 19 nt, Artificial Sequence
  Description of Artificial Sequence: Synthetic oligonucleotide
uucugacucugaguaccau

SEQ ID NO: 1411864 - RNA, 19 nt, Artificial Sequence
  Description of Artificial Sequence: Synthetic oligonucleotide
guugagagaucuguuugau

SEQ ID NO: 1411865 - RNA, 19 nt, Artificial Sequence
  Description of Artificial Sequence: Synthetic oligonucleotide
ccuacggccauuguuuuca

SEQ ID NO: 1411866 - RNA, 19 nt, Artificial Sequence
  Description of Artificial Sequence: Synthetic oligonucleotide
cuaucucggcauacagaaa

SEQ ID NO: 1411867 - RNA, 19 nt, Artificial Sequence
  Description of Artificial Sequence: Synthetic oligonucleotide
gccuuuaaaagggcaucug

SEQ ID NO: 1411868 - RNA, 19 nt, Artificial Sequence
  Description of Artificial Sequence: Synthetic oligonucleotide
cuguuugauaccagugcau

SEQ ID NO: 1411869 - RNA, 19 nt, Artificial Sequence
  Description of Artificial Sequence: Synthetic oligonucleotide
ccacugauuauuacugaaa

SEQ ID NO: 1411870 - RNA, 19 nt, Artificial Sequence
  Description of Artificial Sequence: Synthetic oligonucleotide
caguggcuaauugugguua

SEQ ID NO: 1411871 - RNA, 19 nt, Artificial Sequence
  Description of Artificial Sequence: Synthetic oligonucleotide
acccuacggccauuguuuu

SEQ ID NO: 1411872 - RNA, 19 nt, Artificial Sequence
  Description of Artificial Sequence: Synthetic oligonucleotide
ccaaacgguucugaaguuc

SEQ ID NO: 1411873 - RNA, 19 nt, Artificial Sequence
  Description of Artificial Sequence: Synthetic oligonucleotide
gggauaaagggcagacaga

SEQ ID NO: 1411874 - RNA, 19 nt, Artificial Sequence
  Description of Artificial Sequence: Synthetic oligonucleotide
cgguguaugacaaucuucu

SEQ ID NO: 1411875 - RNA, 19 nt, Artificial Sequence
  Description of Artificial Sequence: Synthetic oligonucleotide
cauaggcacuaggccugcc

SEQ ID NO: 1411876 - RNA, 19 nt, Artificial Sequence
  Description of Artificial Sequence: Synthetic oligonucleotide
gugugcucauaggcacuag

SEQ ID NO: 1411877 - RNA, 19 nt, Artificial Sequence
  Description of Artificial Sequence: Synthetic oligonucleotide
acuaggccugccggcugag

SEQ ID NO: 1411878 - RNA, 19 nt, Artificial Sequence
  Description of Artificial Sequence: Synthetic oligonucleotide
cguugagagaucuguuuga

SEQ ID NO: 1411879 - RNA, 19 nt, Artificial Sequence
  Description of Artificial Sequence: Synthetic oligonucleotide
cgacuguuacacaaaugga

SEQ ID NO: 1411880 - RNA, 19 nt, Artificial Sequence
  Description of Artificial Sequence: Synthetic oligonucleotide
cacaucguuuuguugccuu

SEQ ID NO: 1411881 - RNA, 19 nt, Artificial Sequence
  Description of Artificial Sequence: Synthetic oligonucleotide
gcaaauggcuagugaauuu

SEQ ID NO: 1411882 - RNA, 19 nt, Artificial Sequence
  Description of Artificial Sequence: Synthetic oligonucleotide
gggcagacagaagauuaaa

SEQ ID NO: 1411883 - RNA, 19 nt, Artificial Sequence
  Description of Artificial Sequence: Synthetic oligonucleotide
cauguauacugagguaauu

SEQ ID NO: 1411884 - RNA, 19 nt, Artificial Sequence
  Description of Artificial Sequence: Synthetic oligonucleotide
uggcagccuuauugguauu

SEQ ID NO: 1411885 - RNA, 19 nt, Artificial Sequence
  Description of Artificial Sequence: Synthetic oligonucleotide
augcaacuucagaacuauu

SEQ ID NO: 1411886 - RNA, 19 nt, Artificial Sequence
  Description of Artificial Sequence: Synthetic oligonucleotide
cugcccauuggauggucau

SEQ ID NO: 1411887 - RNA, 19 nt, Artificial Sequence
  Description of Artificial Sequence: Synthetic oligonucleotide
gagcugaaauugacacggu

SEQ ID NO: 1411888 - RNA, 19 nt, Artificial Sequence
  Description of Artificial Sequence: Synthetic oligonucleotide
caaccgcugcccauuggau

SEQ ID NO: 1411889 - RNA, 19 nt, Artificial Sequence
  Description of Artificial Sequence: Synthetic oligonucleotide
gguguaugacaaucuucuu

SEQ ID NO: 1411890 - RNA, 19 nt, Artificial Sequence
  Description of Artificial Sequence: Synthetic oligonucleotide
cccuacggccauuguuuuc

SEQ ID NO: 1411891 - RNA, 19 nt, Artificial Sequence
  Description of Artificial Sequence: Synthetic oligonucleotide
gcauguauacugagguaau

SEQ ID NO: 1411892 - RNA, 19 nt, Artificial Sequence
  Description of Artificial Sequence: Synthetic oligonucleotide
gcgaaaccagacgucucaa

SEQ ID NO: 1411893 - RNA, 19 nt, Artificial Sequence
  Description of Artificial Sequence: Synthetic oligonucleotide
ggcacuaggccugccggcu

SEQ ID NO: 1411894 - RNA, 19 nt, Artificial Sequence
  Description of Artificial Sequence: Synthetic oligonucleotide
cuggcaaccgcugcccauu

SEQ ID NO: 1411895 - RNA, 19 nt, Artificial Sequence
  Description of Artificial Sequence: Synthetic oligonucleotide
guggcuaauugugguuauu

SEQ ID NO: 1411896 - RNA, 19 nt, Artificial Sequence
  Description of Artificial Sequence: Synthetic oligonucleotide
gggaccuaaagagcuucau

SEQ ID NO: 1411897 - RNA, 19 nt, Artificial Sequence
  Description of Artificial Sequence: Synthetic oligonucleotide
cuacggccauuguuuucau

SEQ ID NO: 1411898 - RNA, 19 nt, Artificial Sequence
  Description of Artificial Sequence: Synthetic oligonucleotide
cggccauuguuuucauugu

SEQ ID NO: 1411899 - RNA, 19 nt, Artificial Sequence
  Description of Artificial Sequence: Synthetic oligonucleotide
auuguaauuaacuugcugc

SEQ ID NO: 1411900 - RNA, 19 nt, Artificial Sequence
  Description of Artificial Sequence: Synthetic oligonucleotide
auuuacaucacauaagggc

SEQ ID NO: 1411901 - RNA, 19 nt, Artificial Sequence
  Description of Artificial Sequence: Synthetic oligonucleotide
uuaaaggagaaacauaugg

SEQ ID NO: 1411902 - RNA, 19 nt, Artificial Sequence
  Description of Artificial Sequence: Synthetic oligonucleotide
uguauuuugaguauuaugu

SEQ ID NO: 1411903 - RNA, 19 nt, Artificial Sequence
  Description of Artificial Sequence: Synthetic oligonucleotide
aaaugccuuauauauaggc

SEQ ID NO: 1411904 - RNA, 19 nt, Artificial Sequence
  Description of Artificial Sequence: Synthetic oligonucleotide
cauuauuuuaucaucagcg

SEQ ID NO: 1411905 - RNA, 19 nt, Artificial Sequence
  Description of Artificial Sequence: Synthetic oligonucleotide
aauaauuguauuuugagua

SEQ ID NO: 1411906 - RNA, 19 nt, Artificial Sequence
  Description of Artificial Sequence: Synthetic oligonucleotide
aauuucugcauucucuugc

SEQ ID NO: 1411907 - RNA, 19 nt, Artificial Sequence
  Description of Artificial Sequence: Synthetic oligonucleotide
aauuaaauacugcaacugg

SEQ ID NO: 1411908 - RNA, 19 nt, Artificial Sequence
  Description of Artificial Sequence: Synthetic oligonucleotide
aaaucaaaaccauauauga

SEQ ID NO: 1411909 - RNA, 19 nt, Artificial Sequence
  Description of Artificial Sequence: Synthetic oligonucleotide
uacauguucaacaauauug

SEQ ID NO: 1411910 - RNA, 19 nt, Artificial Sequence
  Description of Artificial Sequence: Synthetic oligonucleotide
uguucaucaacauuuaucc

SEQ ID NO: 1411911 - RNA, 19 nt, Artificial Sequence
  Description of Artificial Sequence: Synthetic oligonucleotide
uuauauauaggcaaaggca

SEQ ID NO: 1411912 - RNA, 19 nt, Artificial Sequence
  Description of Artificial Sequence: Synthetic oligonucleotide
aaucuuauuaaacgauagc

SEQ ID NO: 1411913 - RNA, 19 nt, Artificial Sequence
  Description of Artificial Sequence: Synthetic oligonucleotide
aaauaguaaaaccacugag

SEQ ID NO: 1411914 - RNA, 19 nt, Artificial Sequence
  Description of Artificial Sequence: Synthetic oligonucleotide
auauucauacaauaauagc

SEQ ID NO: 1411915 - RNA, 19 nt, Artificial Sequence
  Description of Artificial Sequence: Synthetic oligonucleotide
aauaguaaaaccacugagg

SEQ ID NO: 1411916 - RNA, 19 nt, Artificial Sequence
  Description of Artificial Sequence: Synthetic oligonucleotide
ucaaaagccauuaaaugcc

SEQ ID NO: 1411917 - RNA, 19 nt, Artificial Sequence
  Description of Artificial Sequence: Synthetic oligonucleotide
agcauuaugcuccaauucc

SEQ ID NO: 1411918 - RNA, 19 nt, Artificial Sequence
  Description of Artificial Sequence: Synthetic oligonucleotide
uagauauuucacuauauag

SEQ ID NO: 1411919 - RNA, 19 nt, Artificial Sequence
  Description of Artificial Sequence: Synthetic oligonucleotide
aaaggagaaacauauggca

SEQ ID NO: 1411920 - RNA, 19 nt, Artificial Sequence
  Description of Artificial Sequence: Synthetic oligonucleotide
aaugccauucucuacagca

SEQ ID NO: 1411921 - RNA, 19 nt, Artificial Sequence
  Description of Artificial Sequence: Synthetic oligonucleotide
uuuacaucacauaagggcu

SEQ ID NO: 1411922 - RNA, 19 nt, Artificial Sequence
  Description of Artificial Sequence: Synthetic oligonucleotide
aauaugugcucauuucagg

SEQ ID NO: 1411923 - RNA, 19 nt, Artificial Sequence
  Description of Artificial Sequence: Synthetic oligonucleotide
ugaauuguggcccaguucu

SEQ ID NO: 1411924 - RNA, 19 nt, Artificial Sequence
  Description of Artificial Sequence: Synthetic oligonucleotide
uugaaaguaccacacacag

SEQ ID NO: 1411925 - RNA, 19 nt, Artificial Sequence
  Description of Artificial Sequence: Synthetic oligonucleotide
cuuauauauaggcaaaggc

SEQ ID NO: 1411926 - RNA, 19 nt, Artificial Sequence
  Description of Artificial Sequence: Synthetic oligonucleotide
uuauuauuuugaaaguacc

SEQ ID NO: 1411927 - RNA, 19 nt, Artificial Sequence
  Description of Artificial Sequence: Synthetic oligonucleotide
uuccauaucaacaacugug

SEQ ID NO: 1411928 - RNA, 19 nt, Artificial Sequence
  Description of Artificial Sequence: Synthetic oligonucleotide
uuugauuuaugguuacugg

SEQ ID NO: 1411929 - RNA, 19 nt, Artificial Sequence
  Description of Artificial Sequence: Synthetic oligonucleotide
uggaguuucuaucauauug

SEQ ID NO: 1411930 - RNA, 19 nt, Artificial Sequence
  Description of Artificial Sequence: Synthetic oligonucleotide
aacugggacauuaaaauac

SEQ ID NO: 1411931 - RNA, 19 nt, Artificial Sequence
  Description of Artificial Sequence: Synthetic oligonucleotide
uaaacgauagcauugccug

SEQ ID NO: 1411932 - RNA, 19 nt, Artificial Sequence
  Description of Artificial Sequence: Synthetic oligonucleotide
acauuuauccuccugcugg

SEQ ID NO: 1411933 - RNA, 19 nt, Artificial Sequence
  Description of Artificial Sequence: Synthetic oligonucleotide
auuauuuugaaaguaccac

SEQ ID NO: 1411934 - RNA, 19 nt, Artificial Sequence
  Description of Artificial Sequence: Synthetic oligonucleotide
agcauuguaauuaacuugc

SEQ ID NO: 1411935 - RNA, 19 nt, Artificial Sequence
  Description of Artificial Sequence: Synthetic oligonucleotide
uaaucuuauuaaacgauag

SEQ ID NO: 1411936 - RNA, 19 nt, Artificial Sequence
  Description of Artificial Sequence: Synthetic oligonucleotide
aguaaaaccacugagggug

SEQ ID NO: 1411937 - RNA, 19 nt, Artificial Sequence
  Description of Artificial Sequence: Synthetic oligonucleotide
aucaaaaccauauaugagu

SEQ ID NO: 1411938 - RNA, 19 nt, Artificial Sequence
  Description of Artificial Sequence: Synthetic oligonucleotide
aauuuaccaaaauaauugu

SEQ ID NO: 1411939 - RNA, 19 nt, Artificial Sequence
  Description of Artificial Sequence: Synthetic oligonucleotide
agaaauaaucuuauuaaac

SEQ ID NO: 1411940 - RNA, 19 nt, Artificial Sequence
  Description of Artificial Sequence: Synthetic oligonucleotide
uuacugguaauccacaaca

SEQ ID NO: 1411941 - RNA, 19 nt, Artificial Sequence
  Description of Artificial Sequence: Synthetic oligonucleotide
aaaaccauauaugagugug

SEQ ID NO: 1411942 - RNA, 19 nt, Artificial Sequence
  Description of Artificial Sequence: Synthetic oligonucleotide
ugaauuuuccccuaaggga

SEQ ID NO: 1411943 - RNA, 19 nt, Artificial Sequence
  Description of Artificial Sequence: Synthetic oligonucleotide
uuugggaugggcaucaucu

SEQ ID NO: 1411944 - RNA, 19 nt, Artificial Sequence
  Description of Artificial Sequence: Synthetic oligonucleotide
uauuauuauucaaaagcca

SEQ ID NO: 1411945 - RNA, 19 nt, Artificial Sequence
  Description of Artificial Sequence: Synthetic oligonucleotide
uccaaacuaaaauaugugc

SEQ ID NO: 1411946 - RNA, 19 nt, Artificial Sequence
  Description of Artificial Sequence: Synthetic oligonucleotide
ucaaaaccauauaugagug

SEQ ID NO: 1411947 - RNA, 19 nt, Artificial Sequence
  Description of Artificial Sequence: Synthetic oligonucleotide
uaugcacacacacacauac

SEQ ID NO: 1411948 - RNA, 19 nt, Artificial Sequence
  Description of Artificial Sequence: Synthetic oligonucleotide
uugaguauuauguacaaua

SEQ ID NO: 1411949 - RNA, 19 nt, Artificial Sequence
  Description of Artificial Sequence: Synthetic oligonucleotide
auugcuauagauauuucac

SEQ ID NO: 1411950 - RNA, 19 nt, Artificial Sequence
  Description of Artificial Sequence: Synthetic oligonucleotide
uauuuugaguauuauguac

SEQ ID NO: 1411951 - RNA, 19 nt, Artificial Sequence
  Description of Artificial Sequence: Synthetic oligonucleotide
auucaaaagccauuaaaug

SEQ ID NO: 1411952 - RNA, 19 nt, Artificial Sequence
  Description of Artificial Sequence: Synthetic oligonucleotide
cacauaagggcuuuuauac

SEQ ID NO: 1411953 - RNA, 19 nt, Artificial Sequence
  Description of Artificial Sequence: Synthetic oligonucleotide
guauuauuauucaaaagcc

SEQ ID NO: 1411954 - RNA, 19 nt, Artificial Sequence
  Description of Artificial Sequence: Synthetic oligonucleotide
uucacuauauaguucugag

SEQ ID NO: 1411955 - RNA, 19 nt, Artificial Sequence
  Description of Artificial Sequence: Synthetic oligonucleotide
aagggauguauuauuauuc

SEQ ID NO: 1411956 - RNA, 19 nt, Artificial Sequence
  Description of Artificial Sequence: Synthetic oligonucleotide
uacagcauuguaauuaacu

SEQ ID NO: 1411957 - RNA, 19 nt, Artificial Sequence
  Description of Artificial Sequence: Synthetic oligonucleotide
uuaaacgauagcauugccu

SEQ ID NO: 1411958 - RNA, 19 nt, Artificial Sequence
  Description of Artificial Sequence: Synthetic oligonucleotide
uauugcuauagauauuuca

SEQ ID NO: 1411959 - RNA, 19 nt, Artificial Sequence
  Description of Artificial Sequence: Synthetic oligonucleotide
uauuuuaucaucagcguuu

SEQ ID NO: 1411960 - RNA, 19 nt, Artificial Sequence
  Description of Artificial Sequence: Synthetic oligonucleotide
auaguucugagaaauaauc

SEQ ID NO: 1411961 - RNA, 19 nt, Artificial Sequence
  Description of Artificial Sequence: Synthetic oligonucleotide
uuuaugcacacacacacau

SEQ ID NO: 1411962 - RNA, 19 nt, Artificial Sequence
  Description of Artificial Sequence: Synthetic oligonucleotide
uuguaauuaacuugcugcc

SEQ ID NO: 1411963 - RNA, 19 nt, Artificial Sequence
  Description of Artificial Sequence: Synthetic oligonucleotide
aauuucgugacugccuugg

SEQ ID NO: 1411964 - RNA, 19 nt, Artificial Sequence
  Description of Artificial Sequence: Synthetic oligonucleotide
auuaacuugcugccguagc

SEQ ID NO: 1411965 - RNA, 19 nt, Artificial Sequence
  Description of Artificial Sequence: Synthetic oligonucleotide
uuugaaaguaccacacaca

SEQ ID NO: 1411966 - RNA, 19 nt, Artificial Sequence
  Description of Artificial Sequence: Synthetic oligonucleotide
aucuuauuaaacgauagca

SEQ ID NO: 1411967 - RNA, 19 nt, Artificial Sequence
  Description of Artificial Sequence: Synthetic oligonucleotide
auuaaauacugcaacuggg

SEQ ID NO: 1411968 - RNA, 19 nt, Artificial Sequence
  Description of Artificial Sequence: Synthetic oligonucleotide
gaaaguaccacacacagau

SEQ ID NO: 1411969 - RNA, 19 nt, Artificial Sequence
  Description of Artificial Sequence: Synthetic oligonucleotide
cauaauguuccucucuucc

SEQ ID NO: 1411970 - RNA, 19 nt, Artificial Sequence
  Description of Artificial Sequence: Synthetic oligonucleotide
cuggguaaauaguaaaacc

SEQ ID NO: 1411971 - RNA, 19 nt, Artificial Sequence
  Description of Artificial Sequence: Synthetic oligonucleotide
auuaaacgauagcauugcc

SEQ ID NO: 1411972 - RNA, 19 nt, Artificial Sequence
  Description of Artificial Sequence: Synthetic oligonucleotide
agggcggccauccagaagg

SEQ ID NO: 1411973 - RNA, 19 nt, Artificial Sequence
  Description of Artificial Sequence: Synthetic oligonucleotide
aaucaaaaccauauaugag

SEQ ID NO: 1411974 - RNA, 19 nt, Artificial Sequence
  Description of Artificial Sequence: Synthetic oligonucleotide
ucugcauucucuugcuucg

SEQ ID NO: 1411975 - RNA, 19 nt, Artificial Sequence
  Description of Artificial Sequence: Synthetic oligonucleotide
gauccaaaugguuacauaa

SEQ ID NO: 1411976 - RNA, 19 nt, Artificial Sequence
  Description of Artificial Sequence: Synthetic oligonucleotide
uucuacauguucaacaaua

SEQ ID NO: 1411977 - RNA, 19 nt, Artificial Sequence
  Description of Artificial Sequence: Synthetic oligonucleotide
aaugguccaccucagcuug

SEQ ID NO: 1411978 - RNA, 19 nt, Artificial Sequence
  Description of Artificial Sequence: Synthetic oligonucleotide
gauagcauugccuguuucc

SEQ ID NO: 1411979 - RNA, 19 nt, Artificial Sequence
  Description of Artificial Sequence: Synthetic oligonucleotide
uucgccaucauuauuuuau

SEQ ID NO: 1411980 - RNA, 19 nt, Artificial Sequence
  Description of Artificial Sequence: Synthetic oligonucleotide
uauuauacauuuacaucac

SEQ ID NO: 1411981 - RNA, 19 nt, Artificial Sequence
  Description of Artificial Sequence: Synthetic oligonucleotide
ugcacacacacacauacac

SEQ ID NO: 1411982 - RNA, 19 nt, Artificial Sequence
  Description of Artificial Sequence: Synthetic oligonucleotide
uauuaaacgauagcauugc

SEQ ID NO: 1411983 - RNA, 19 nt, Artificial Sequence
  Description of Artificial Sequence: Synthetic oligonucleotide
uugauuuaugguuacuggu

SEQ ID NO: 1411984 - RNA, 19 nt, Artificial Sequence
  Description of Artificial Sequence: Synthetic oligonucleotide
ucuaucauauugcuauaga

SEQ ID NO: 1411985 - RNA, 19 nt, Artificial Sequence
  Description of Artificial Sequence: Synthetic oligonucleotide
agauauuucacuauauagu

SEQ ID NO: 1411986 - RNA, 19 nt, Artificial Sequence
  Description of Artificial Sequence: Synthetic oligonucleotide
uucauggauucccuggucc

SEQ ID NO: 1411987 - RNA, 19 nt, Artificial Sequence
  Description of Artificial Sequence: Synthetic oligonucleotide
ugauuuaugguuacuggua

SEQ ID NO: 1411988 - RNA, 19 nt, Artificial Sequence
  Description of Artificial Sequence: Synthetic oligonucleotide
aaacauauggcaacagcug

SEQ ID NO: 1411989 - RNA, 19 nt, Artificial Sequence
  Description of Artificial Sequence: Synthetic oligonucleotide
agcguuuucaccauagguc

SEQ ID NO: 1411990 - RNA, 19 nt, Artificial Sequence
  Description of Artificial Sequence: Synthetic oligonucleotide
cauuuacaucacauaaggg

SEQ ID NO: 1411991 - RNA, 19 nt, Artificial Sequence
  Description of Artificial Sequence: Synthetic oligonucleotide
uaaaugccuuauauauagg

SEQ ID NO: 1411992 - RNA, 19 nt, Artificial Sequence
  Description of Artificial Sequence: Synthetic oligonucleotide
aacauuuauccuccugcug

SEQ ID NO: 1411993 - RNA, 19 nt, Artificial Sequence
  Description of Artificial Sequence: Synthetic oligonucleotide
cauaucaacaacugugauc

SEQ ID NO: 1411994 - RNA, 19 nt, Artificial Sequence
  Description of Artificial Sequence: Synthetic oligonucleotide
aaugccuuauauauaggca

SEQ ID NO: 1411995 - RNA, 19 nt, Artificial Sequence
  Description of Artificial Sequence: Synthetic oligonucleotide
aauuguggcccaguucuac

SEQ ID NO: 1411996 - RNA, 19 nt, Artificial Sequence
  Description of Artificial Sequence: Synthetic oligonucleotide
acauacacaauugcucagc

SEQ ID NO: 1411997 - RNA, 19 nt, Artificial Sequence
  Description of Artificial Sequence: Synthetic oligonucleotide
aaagccauuaaaugccuua

SEQ ID NO: 1411998 - RNA, 19 nt, Artificial Sequence
  Description of Artificial Sequence: Synthetic oligonucleotide
uucgugacugccuuggugu

SEQ ID NO: 1411999 - RNA, 19 nt, Artificial Sequence
  Description of Artificial Sequence: Synthetic oligonucleotide
aaaggcaggucaauucugg

SEQ ID NO: 1412000 - RNA, 19 nt, Artificial Sequence
  Description of Artificial Sequence: Synthetic oligonucleotide
uuuauguccuccacagcug

SEQ ID NO: 1412001 - RNA, 19 nt, Artificial Sequence
  Description of Artificial Sequence: Synthetic oligonucleotide
uucagggaaaauuuccacu

SEQ ID NO: 1412002 - RNA, 19 nt, Artificial Sequence
  Description of Artificial Sequence: Synthetic oligonucleotide
uuaucaucagcguuuucac

SEQ ID NO: 1412003 - RNA, 19 nt, Artificial Sequence
  Description of Artificial Sequence: Synthetic oligonucleotide
ucuggguaaauaguaaaac

SEQ ID NO: 1412004 - RNA, 19 nt, Artificial Sequence
  Description of Artificial Sequence: Synthetic oligonucleotide
ugggacauuaaaauacaaa

SEQ ID NO: 1412005 - RNA, 19 nt, Artificial Sequence
  Description of Artificial Sequence: Synthetic oligonucleotide
gauauuucacuauauaguu

SEQ ID NO: 1412006 - RNA, 19 nt, Artificial Sequence
  Description of Artificial Sequence: Synthetic oligonucleotide
uuaugguuacugguaaucc

SEQ ID NO: 1412007 - RNA, 19 nt, Artificial Sequence
  Description of Artificial Sequence: Synthetic oligonucleotide
auaauuguauuuugaguau

SEQ ID NO: 1412008 - RNA, 19 nt, Artificial Sequence
  Description of Artificial Sequence: Synthetic oligonucleotide
ugguuacauaacaaggcac

SEQ ID NO: 1412009 - RNA, 19 nt, Artificial Sequence
  Description of Artificial Sequence: Synthetic oligonucleotide
uauggggaucggaauuucg

SEQ ID NO: 1412010 - RNA, 19 nt, Artificial Sequence
  Description of Artificial Sequence: Synthetic oligonucleotide
aauucaucuuccccuuuga

SEQ ID NO: 1412011 - RNA, 19 nt, Artificial Sequence
  Description of Artificial Sequence: Synthetic oligonucleotide
uugcuauagauauuucacu

SEQ ID NO: 1412012 - RNA, 19 nt, Artificial Sequence
  Description of Artificial Sequence: Synthetic oligonucleotide
ugcccuaucugccucagcu

SEQ ID NO: 1412013 - RNA, 19 nt, Artificial Sequence
  Description of Artificial Sequence: Synthetic oligonucleotide
auuuugaguauuauguaca

SEQ ID NO: 1412014 - RNA, 19 nt, Artificial Sequence
  Description of Artificial Sequence: Synthetic oligonucleotide
cagagcuuaaaggagaaac

SEQ ID NO: 1412015 - RNA, 19 nt, Artificial Sequence
  Description of Artificial Sequence: Synthetic oligonucleotide
uuuuaugcacacacacaca

SEQ ID NO: 1412016 - RNA, 19 nt, Artificial Sequence
  Description of Artificial Sequence: Synthetic oligonucleotide
aguucuacauguucaacaa

SEQ ID NO: 1412017 - RNA, 19 nt, Artificial Sequence
  Description of Artificial Sequence: Synthetic oligonucleotide
augccuuauauauaggcaa

SEQ ID NO: 1412018 - RNA, 19 nt, Artificial Sequence
  Description of Artificial Sequence: Synthetic oligonucleotide
aauuaacuugcugccguag

SEQ ID NO: 1412019 - RNA, 19 nt, Artificial Sequence
  Description of Artificial Sequence: Synthetic oligonucleotide
uuuaugguuacugguaauc

SEQ ID NO: 1412020 - RNA, 19 nt, Artificial Sequence
  Description of Artificial Sequence: Synthetic oligonucleotide
uucuaucauauugcuauag

SEQ ID NO: 1412021 - RNA, 19 nt, Artificial Sequence
  Description of Artificial Sequence: Synthetic oligonucleotide
ucuacagcauuguaauuaa

SEQ ID NO: 1412022 - RNA, 19 nt, Artificial Sequence
  Description of Artificial Sequence: Synthetic oligonucleotide
acagcauuguaauuaacuu

SEQ ID NO: 1412023 - RNA, 19 nt, Artificial Sequence
  Description of Artificial Sequence: Synthetic oligonucleotide
aaccauauaugaguguggu

SEQ ID NO: 1412024 - RNA, 19 nt, Artificial Sequence
  Description of Artificial Sequence: Synthetic oligonucleotide
augguuacugguaauccac

SEQ ID NO: 1412025 - RNA, 19 nt, Artificial Sequence
  Description of Artificial Sequence: Synthetic oligonucleotide
uaagggauguauuauuauu

SEQ ID NO: 1412026 - RNA, 19 nt, Artificial Sequence
  Description of Artificial Sequence: Synthetic oligonucleotide
gauuuaugguuacugguaa

SEQ ID NO: 1412027 - RNA, 19 nt, Artificial Sequence
  Description of Artificial Sequence: Synthetic oligonucleotide
uaugagugugguuauuaaa

SEQ ID NO: 1412028 - RNA, 19 nt, Artificial Sequence
  Description of Artificial Sequence: Synthetic oligonucleotide
agggauguauuauuauuca

SEQ ID NO: 1412029 - RNA, 19 nt, Artificial Sequence
  Description of Artificial Sequence: Synthetic oligonucleotide
cauuguaauuaacuugcug

SEQ ID NO: 1412030 - RNA, 19 nt, Artificial Sequence
  Description of Artificial Sequence: Synthetic oligonucleotide
ugccuugguguaauggucc

SEQ ID NO: 1412031 - RNA, 19 nt, Artificial Sequence
  Description of Artificial Sequence: Synthetic oligonucleotide
cugagaaauaaucuuauua

SEQ ID NO: 1412032 - RNA, 19 nt, Artificial Sequence
  Description of Artificial Sequence: Synthetic oligonucleotide
acugguaauccacaacaca

SEQ ID NO: 1412033 - RNA, 19 nt, Artificial Sequence
  Description of Artificial Sequence: Synthetic oligonucleotide
uuucgugacugccuuggug

SEQ ID NO: 1412034 - RNA, 19 nt, Artificial Sequence
  Description of Artificial Sequence: Synthetic oligonucleotide
acauauggcaacagcugcc

SEQ ID NO: 1412035 - RNA, 19 nt, Artificial Sequence
  Description of Artificial Sequence: Synthetic oligonucleotide
gaaacauauggcaacagcu

SEQ ID NO: 1412036 - RNA, 19 nt, Artificial Sequence
  Description of Artificial Sequence: Synthetic oligonucleotide
uucauacaauaauagcaaa

SEQ ID NO: 1412037 - RNA, 19 nt, Artificial Sequence
  Description of Artificial Sequence: Synthetic oligonucleotide
ucagcguuuucaccauagg

SEQ ID NO: 1412038 - RNA, 19 nt, Artificial Sequence
  Description of Artificial Sequence: Synthetic oligonucleotide
ucacauaagggcuuuuaua

SEQ ID NO: 1412039 - RNA, 19 nt, Artificial Sequence
  Description of Artificial Sequence: Synthetic oligonucleotide
guuuauguccuccacagcu

SEQ ID NO: 1412040 - RNA, 19 nt, Artificial Sequence
  Description of Artificial Sequence: Synthetic oligonucleotide
auuuugaaaguaccacaca

SEQ ID NO: 1412041 - RNA, 19 nt, Artificial Sequence
  Description of Artificial Sequence: Synthetic oligonucleotide
auaauguuccucucuuccu

SEQ ID NO: 1412042 - RNA, 19 nt, Artificial Sequence
  Description of Artificial Sequence: Synthetic oligonucleotide
uauggcaacagcugcccca

SEQ ID NO: 1412043 - RNA, 19 nt, Artificial Sequence
  Description of Artificial Sequence: Synthetic oligonucleotide
ucauauggggaucggaauu

SEQ ID NO: 1412044 - RNA, 19 nt, Artificial Sequence
  Description of Artificial Sequence: Synthetic oligonucleotide
uggguuuauguccuccaca

SEQ ID NO: 1412045 - RNA, 19 nt, Artificial Sequence
  Description of Artificial Sequence: Synthetic oligonucleotide
uguugguuaucucuuucau

SEQ ID NO: 1412046 - RNA, 19 nt, Artificial Sequence
  Description of Artificial Sequence: Synthetic oligonucleotide
cuugguguaaugguccacc

SEQ ID NO: 1412047 - RNA, 19 nt, Artificial Sequence
  Description of Artificial Sequence: Synthetic oligonucleotide
ucuggauucccugccauca

SEQ ID NO: 1412048 - RNA, 19 nt, Artificial Sequence
  Description of Artificial Sequence: Synthetic oligonucleotide
gguguaaugguccaccuca

SEQ ID NO: 1412049 - RNA, 19 nt, Artificial Sequence
  Description of Artificial Sequence: Synthetic oligonucleotide
gaucggaauuucgugacug

SEQ ID NO: 1412050 - RNA, 19 nt, Artificial Sequence
  Description of Artificial Sequence: Synthetic oligonucleotide
guaauccacaacacauucg

SEQ ID NO: 1412051 - RNA, 19 nt, Artificial Sequence
  Description of Artificial Sequence: Synthetic oligonucleotide
uguaaugguccaccucagc

SEQ ID NO: 1412052 - RNA, 19 nt, Artificial Sequence
  Description of Artificial Sequence: Synthetic oligonucleotide
aaacgauagcauugccugu

SEQ ID NO: 1412053 - RNA, 19 nt, Artificial Sequence
  Description of Artificial Sequence: Synthetic oligonucleotide
auccaaaugguuacauaac

SEQ ID NO: 1412054 - RNA, 19 nt, Artificial Sequence
  Description of Artificial Sequence: Synthetic oligonucleotide
aaggagaaacauauggcaa

SEQ ID NO: 1412055 - RNA, 19 nt, Artificial Sequence
  Description of Artificial Sequence: Synthetic oligonucleotide
auauggcaacagcugcccc

SEQ ID NO: 1412056 - RNA, 19 nt, Artificial Sequence
  Description of Artificial Sequence: Synthetic oligonucleotide
ucagcucccugcacaaugc

SEQ ID NO: 1412057 - RNA, 19 nt, Artificial Sequence
  Description of Artificial Sequence: Synthetic oligonucleotide
aauuguauuuugaguauua

SEQ ID NO: 1412058 - RNA, 19 nt, Artificial Sequence
  Description of Artificial Sequence: Synthetic oligonucleotide
ggguuuauguccuccacag

SEQ ID NO: 1412059 - RNA, 19 nt, Artificial Sequence
  Description of Artificial Sequence: Synthetic oligonucleotide
acauaagggcuuuuauaca

SEQ ID NO: 1412060 - RNA, 19 nt, Artificial Sequence
  Description of Artificial Sequence: Synthetic oligonucleotide
aauuugauuuaugguuacu

SEQ ID NO: 1412061 - RNA, 19 nt, Artificial Sequence
  Description of Artificial Sequence: Synthetic oligonucleotide
uaguaaaaccacugagggu

SEQ ID NO: 1412062 - RNA, 19 nt, Artificial Sequence
  Description of Artificial Sequence: Synthetic oligonucleotide
ucagcauuaugcuccaauu

SEQ ID NO: 1412063 - RNA, 19 nt, Artificial Sequence
  Description of Artificial Sequence: Synthetic oligonucleotide
guuacugguaauccacaac

SEQ ID NO: 1412064 - RNA, 19 nt, Artificial Sequence
  Description of Artificial Sequence: Synthetic oligonucleotide
aaaaccacugaggguggag

SEQ ID NO: 1412065 - RNA, 19 nt, Artificial Sequence
  Description of Artificial Sequence: Synthetic oligonucleotide
caguucuacauguucaaca

SEQ ID NO: 1412066 - RNA, 19 nt, Artificial Sequence
  Description of Artificial Sequence: Synthetic oligonucleotide
uacugguaauccacaacac

SEQ ID NO: 1412067 - RNA, 19 nt, Artificial Sequence
  Description of Artificial Sequence: Synthetic oligonucleotide
uggggaucggaauuucgug

SEQ ID NO: 1412068 - RNA, 19 nt, Artificial Sequence
  Description of Artificial Sequence: Synthetic oligonucleotide
cacacacacacauacacaa

SEQ ID NO: 1412069 - RNA, 19 nt, Artificial Sequence
  Description of Artificial Sequence: Synthetic oligonucleotide
ugccuuauauauaggcaaa

SEQ ID NO: 1412070 - RNA, 19 nt, Artificial Sequence
  Description of Artificial Sequence: Synthetic oligonucleotide
gaggguggaguuucuauca

SEQ ID NO: 1412071 - RNA, 19 nt, Artificial Sequence
  Description of Artificial Sequence: Synthetic oligonucleotide
uggauucccugccaucacc

SEQ ID NO: 1412072 - RNA, 19 nt, Artificial Sequence
  Description of Artificial Sequence: Synthetic oligonucleotide
auuucagggaaaauuucca

SEQ ID NO: 1412073 - RNA, 19 nt, Artificial Sequence
  Description of Artificial Sequence: Synthetic oligonucleotide
auccaaacuaaaauaugug

SEQ ID NO: 1412074 - RNA, 19 nt, Artificial Sequence
  Description of Artificial Sequence: Synthetic oligonucleotide
acuauauaguucugagaaa

SEQ ID NO: 1412075 - RNA, 19 nt, Artificial Sequence
  Description of Artificial Sequence: Synthetic oligonucleotide
gguaauccacaacacauuc

SEQ ID NO: 1412076 - RNA, 19 nt, Artificial Sequence
  Description of Artificial Sequence: Synthetic oligonucleotide
uaccacacacagaugaauu

SEQ ID NO: 1412077 - RNA, 19 nt, Artificial Sequence
  Description of Artificial Sequence: Synthetic oligonucleotide
auaaucuuauuaaacgaua

SEQ ID NO: 1412078 - RNA, 19 nt, Artificial Sequence
  Description of Artificial Sequence: Synthetic oligonucleotide
ugauuguuggggucaucug

SEQ ID NO: 1412079 - RNA, 19 nt, Artificial Sequence
  Description of Artificial Sequence: Synthetic oligonucleotide
auaugagugugguuauuaa

SEQ ID NO: 1412080 - RNA, 19 nt, Artificial Sequence
  Description of Artificial Sequence: Synthetic oligonucleotide
aaaccacugaggguggagu

SEQ ID NO: 1412081 - RNA, 19 nt, Artificial Sequence
  Description of Artificial Sequence: Synthetic oligonucleotide
uugguguugguuaucucuu

SEQ ID NO: 1412082 - RNA, 19 nt, Artificial Sequence
  Description of Artificial Sequence: Synthetic oligonucleotide
uugagggcggccauccaga

SEQ ID NO: 1412083 - RNA, 19 nt, Artificial Sequence
  Description of Artificial Sequence: Synthetic oligonucleotide
uuacaucacauaagggcuu

SEQ ID NO: 1412084 - RNA, 19 nt, Artificial Sequence
  Description of Artificial Sequence: Synthetic oligonucleotide
auacacaauugcucagcug

SEQ ID NO: 1412085 - RNA, 19 nt, Artificial Sequence
  Description of Artificial Sequence: Synthetic oligonucleotide
uaaugguccaccucagcuu

SEQ ID NO: 1412086 - RNA, 19 nt, Artificial Sequence
  Description of Artificial Sequence: Synthetic oligonucleotide
guaauuaacuugcugccgu

SEQ ID NO: 1412087 - RNA, 19 nt, Artificial Sequence
  Description of Artificial Sequence: Synthetic oligonucleotide
guauuuugaguauuaugua

SEQ ID NO: 1412088 - RNA, 19 nt, Artificial Sequence
  Description of Artificial Sequence: Synthetic oligonucleotide
gaauuuuccccuaagggau

SEQ ID NO: 1412089 - RNA, 19 nt, Artificial Sequence
  Description of Artificial Sequence: Synthetic oligonucleotide
acaauugcucagcugggaa

SEQ ID NO: 1412090 - RNA, 19 nt, Artificial Sequence
  Description of Artificial Sequence: Synthetic oligonucleotide
agcuugagggcggccaucc

SEQ ID NO: 1412091 - RNA, 19 nt, Artificial Sequence
  Description of Artificial Sequence: Synthetic oligonucleotide
ugguaauccacaacacauu

SEQ ID NO: 1412092 - RNA, 19 nt, Artificial Sequence
  Description of Artificial Sequence: Synthetic oligonucleotide
auauaggcaaaggcagguc

SEQ ID NO: 1412093 - RNA, 19 nt, Artificial Sequence
  Description of Artificial Sequence: Synthetic oligonucleotide
guaaugguccaccucagcu

SEQ ID NO: 1412094 - RNA, 19 nt, Artificial Sequence
  Description of Artificial Sequence: Synthetic oligonucleotide
aacgauagcauugccuguu

SEQ ID NO: 1412095 - RNA, 19 nt, Artificial Sequence
  Description of Artificial Sequence: Synthetic oligonucleotide
uagcugcuccucauauggg

SEQ ID NO: 1412096 - RNA, 19 nt, Artificial Sequence
  Description of Artificial Sequence: Synthetic oligonucleotide
gcaaauuuucuucucucac

SEQ ID NO: 1412097 - RNA, 19 nt, Artificial Sequence
  Description of Artificial Sequence: Synthetic oligonucleotide
uguggcccaguucuacaug

SEQ ID NO: 1412098 - RNA, 19 nt, Artificial Sequence
  Description of Artificial Sequence: Synthetic oligonucleotide
acugugauccaaaugguua

SEQ ID NO: 1412099 - RNA, 19 nt, Artificial Sequence
  Description of Artificial Sequence: Synthetic oligonucleotide
ugcauucucuugcuucgcu

SEQ ID NO: 1412100 - RNA, 19 nt, Artificial Sequence
  Description of Artificial Sequence: Synthetic oligonucleotide
uaauuguauuuugaguauu

SEQ ID NO: 1412101 - RNA, 19 nt, Artificial Sequence
  Description of Artificial Sequence: Synthetic oligonucleotide
cagcauuaugcuccaauuc

SEQ ID NO: 1412102 - RNA, 19 nt, Artificial Sequence
  Description of Artificial Sequence: Synthetic oligonucleotide
uccccuaagggauguauua

SEQ ID NO: 1412103 - RNA, 19 nt, Artificial Sequence
  Description of Artificial Sequence: Synthetic oligonucleotide
acuuuccucgggcaaauuu

SEQ ID NO: 1412104 - RNA, 19 nt, Artificial Sequence
  Description of Artificial Sequence: Synthetic oligonucleotide
cuugguguugguuaucucu

SEQ ID NO: 1412105 - RNA, 19 nt, Artificial Sequence
  Description of Artificial Sequence: Synthetic oligonucleotide
ggguaaauaguaaaaccac

SEQ ID NO: 1412106 - RNA, 19 nt, Artificial Sequence
  Description of Artificial Sequence: Synthetic oligonucleotide
ugccuguuuccauaucaac

SEQ ID NO: 1412107 - RNA, 19 nt, Artificial Sequence
  Description of Artificial Sequence: Synthetic oligonucleotide
gaauuucgugacugccuug

SEQ ID NO: 1412108 - RNA, 19 nt, Artificial Sequence
  Description of Artificial Sequence: Synthetic oligonucleotide
gguuacauaacaaggcaca

SEQ ID NO: 1412109 - RNA, 19 nt, Artificial Sequence
  Description of Artificial Sequence: Synthetic oligonucleotide
ccuuauauauaggcaaagg

SEQ ID NO: 1412110 - RNA, 19 nt, Artificial Sequence
  Description of Artificial Sequence: Synthetic oligonucleotide
uuaugcacacacacacaua

SEQ ID NO: 1412111 - RNA, 19 nt, Artificial Sequence
  Description of Artificial Sequence: Synthetic oligonucleotide
auuuaccaaaauaauugua

SEQ ID NO: 1412112 - RNA, 19 nt, Artificial Sequence
  Description of Artificial Sequence: Synthetic oligonucleotide
uuugaguauuauguacaau

SEQ ID NO: 1412113 - RNA, 19 nt, Artificial Sequence
  Description of Artificial Sequence: Synthetic oligonucleotide
uaauuaacuugcugccgua

SEQ ID NO: 1412114 - RNA, 19 nt, Artificial Sequence
  Description of Artificial Sequence: Synthetic oligonucleotide
auugaugauccaaacuaaa

SEQ ID NO: 1412115 - RNA, 19 nt, Artificial Sequence
  Description of Artificial Sequence: Synthetic oligonucleotide
uugguguaaugguccaccu

SEQ ID NO: 1412116 - RNA, 19 nt, Artificial Sequence
  Description of Artificial Sequence: Synthetic oligonucleotide
cugguaauccacaacacau

SEQ ID NO: 1412117 - RNA, 19 nt, Artificial Sequence
  Description of Artificial Sequence: Synthetic oligonucleotide
uuucuaucauauugcuaua

SEQ ID NO: 1412118 - RNA, 19 nt, Artificial Sequence
  Description of Artificial Sequence: Synthetic oligonucleotide
acugggacauuaaaauaca

SEQ ID NO: 1412119 - RNA, 19 nt, Artificial Sequence
  Description of Artificial Sequence: Synthetic oligonucleotide
cauaagggcuuuuauacau

SEQ ID NO: 1412120 - RNA, 19 nt, Artificial Sequence
  Description of Artificial Sequence: Synthetic oligonucleotide
guguugguuaucucuuuca

SEQ ID NO: 1412121 - RNA, 19 nt, Artificial Sequence
  Description of Artificial Sequence: Synthetic oligonucleotide
acacauucgaacagaacau

SEQ ID NO: 1412122 - RNA, 19 nt, Artificial Sequence
  Description of Artificial Sequence: Synthetic oligonucleotide
aucaacaacugugauccaa

SEQ ID NO: 1412123 - RNA, 19 nt, Artificial Sequence
  Description of Artificial Sequence: Synthetic oligonucleotide
cugguacuguucaucaaca

SEQ ID NO: 1412124 - RNA, 19 nt, Artificial Sequence
  Description of Artificial Sequence: Synthetic oligonucleotide
agcauugccuguuuccaua

SEQ ID NO: 1412125 - RNA, 19 nt, Artificial Sequence
  Description of Artificial Sequence: Synthetic oligonucleotide
auauggggaucggaauuuc

SEQ ID NO: 1412126 - RNA, 19 nt, Artificial Sequence
  Description of Artificial Sequence: Synthetic oligonucleotide
uucacuuuccucgggcaaa

SEQ ID NO: 1412127 - RNA, 19 nt, Artificial Sequence
  Description of Artificial Sequence: Synthetic oligonucleotide
ugguguaaugguccaccuc

SEQ ID NO: 1412128 - RNA, 19 nt, Artificial Sequence
  Description of Artificial Sequence: Synthetic oligonucleotide
cugccuugguguaaugguc

SEQ ID NO: 1412129 - RNA, 19 nt, Artificial Sequence
  Description of Artificial Sequence: Synthetic oligonucleotide
ucgccaucauuauuuuauc

SEQ ID NO: 1412130 - RNA, 19 nt, Artificial Sequence
  Description of Artificial Sequence: Synthetic oligonucleotide
uuccucgggcaaauuuucu

SEQ ID NO: 1412131 - RNA, 19 nt, Artificial Sequence
  Description of Artificial Sequence: Synthetic oligonucleotide
cuacagcauuguaauuaac

SEQ ID NO: 1412132 - RNA, 19 nt, Artificial Sequence
  Description of Artificial Sequence: Synthetic oligonucleotide
cagucaaaucuuccugaac

SEQ ID NO: 1412133 - RNA, 19 nt, Artificial Sequence
  Description of Artificial Sequence: Synthetic oligonucleotide
gcuuaaaggagaaacauau

SEQ ID NO: 1412134 - RNA, 19 nt, Artificial Sequence
  Description of Artificial Sequence: Synthetic oligonucleotide
guugguuaucucuuucaua

SEQ ID NO: 1412135 - RNA, 19 nt, Artificial Sequence
  Description of Artificial Sequence: Synthetic oligonucleotide
uccucauaauguuccucuc

SEQ ID NO: 1412136 - RNA, 19 nt, Artificial Sequence
  Description of Artificial Sequence: Synthetic oligonucleotide
auuuuaucaucagcguuuu

SEQ ID NO: 1412137 - RNA, 19 nt, Artificial Sequence
  Description of Artificial Sequence: Synthetic oligonucleotide
cugguguucucugagccuc

SEQ ID NO: 1412138 - RNA, 19 nt, Artificial Sequence
  Description of Artificial Sequence: Synthetic oligonucleotide
cuucgcuucaccuuguuuu

SEQ ID NO: 1412139 - RNA, 19 nt, Artificial Sequence
  Description of Artificial Sequence: Synthetic oligonucleotide
uuuccccuaagggauguau

SEQ ID NO: 1412140 - RNA, 19 nt, Artificial Sequence
  Description of Artificial Sequence: Synthetic oligonucleotide
ccaaacuaaaauaugugcu

SEQ ID NO: 1412141 - RNA, 19 nt, Artificial Sequence
  Description of Artificial Sequence: Synthetic oligonucleotide
gcaacugggacauuaaaau

SEQ ID NO: 1412142 - RNA, 19 nt, Artificial Sequence
  Description of Artificial Sequence: Synthetic oligonucleotide
cucaugcccugcuugcuuc

SEQ ID NO: 1412143 - RNA, 19 nt, Artificial Sequence
  Description of Artificial Sequence: Synthetic oligonucleotide
gggaaaaucaaaaccauau

SEQ ID NO: 1412144 - RNA, 19 nt, Artificial Sequence
  Description of Artificial Sequence: Synthetic oligonucleotide
gcauuaugcuccaauuccc

SEQ ID NO: 1412145 - RNA, 19 nt, Artificial Sequence
  Description of Artificial Sequence: Synthetic oligonucleotide
uguugcccgggucuccuuc

SEQ ID NO: 1412146 - RNA, 19 nt, Artificial Sequence
  Description of Artificial Sequence: Synthetic oligonucleotide
gcggccauccagaaggugg

SEQ ID NO: 1412147 - RNA, 19 nt, Artificial Sequence
  Description of Artificial Sequence: Synthetic oligonucleotide
uuccccuaagggauguauu

SEQ ID NO: 1412148 - RNA, 19 nt, Artificial Sequence
  Description of Artificial Sequence: Synthetic oligonucleotide
cuggguuuauguccuccac

SEQ ID NO: 1412149 - RNA, 19 nt, Artificial Sequence
  Description of Artificial Sequence: Synthetic oligonucleotide
auggggaucggaauuucgu

SEQ ID NO: 1412150 - RNA, 19 nt, Artificial Sequence
  Description of Artificial Sequence: Synthetic oligonucleotide
ucuucgccaucauuauuuu

SEQ ID NO: 1412151 - RNA, 19 nt, Artificial Sequence
  Description of Artificial Sequence: Synthetic oligonucleotide
gggaucggaauuucgugac

SEQ ID NO: 1412152 - RNA, 19 nt, Artificial Sequence
  Description of Artificial Sequence: Synthetic oligonucleotide
acauucgaacagaacauuu

SEQ ID NO: 1412153 - RNA, 19 nt, Artificial Sequence
  Description of Artificial Sequence: Synthetic oligonucleotide
uccucauauggggaucgga

SEQ ID NO: 1412154 - RNA, 19 nt, Artificial Sequence
  Description of Artificial Sequence: Synthetic oligonucleotide
ugcucagcuuccucaaauu

SEQ ID NO: 1412155 - RNA, 19 nt, Artificial Sequence
  Description of Artificial Sequence: Synthetic oligonucleotide
ucgggcaaauuuucuucuc

SEQ ID NO: 1412156 - RNA, 19 nt, Artificial Sequence
  Description of Artificial Sequence: Synthetic oligonucleotide
auuuuccccuaagggaugu

SEQ ID NO: 1412157 - RNA, 19 nt, Artificial Sequence
  Description of Artificial Sequence: Synthetic oligonucleotide
gaugaauuguggcccaguu

SEQ ID NO: 1412158 - RNA, 19 nt, Artificial Sequence
  Description of Artificial Sequence: Synthetic oligonucleotide
caauugcucagcugggaaa

SEQ ID NO: 1412159 - RNA, 19 nt, Artificial Sequence
  Description of Artificial Sequence: Synthetic oligonucleotide
cacaacacauucgaacaga

SEQ ID NO: 1412160 - RNA, 19 nt, Artificial Sequence
  Description of Artificial Sequence: Synthetic oligonucleotide
agcuuaaaggagaaacaua

SEQ ID NO: 1412161 - RNA, 19 nt, Artificial Sequence
  Description of Artificial Sequence: Synthetic oligonucleotide
cugugucagcuucuuggug

SEQ ID NO: 1412162 - RNA, 19 nt, Artificial Sequence
  Description of Artificial Sequence: Synthetic oligonucleotide
uagcauugccuguuuccau

SEQ ID NO: 1412163 - RNA, 19 nt, Artificial Sequence
  Description of Artificial Sequence: Synthetic oligonucleotide
ggcaggucaauucugggua

SEQ ID NO: 1412164 - RNA, 19 nt, Artificial Sequence
  Description of Artificial Sequence: Synthetic oligonucleotide
agccauuaaaugccuuaua

SEQ ID NO: 1412165 - RNA, 19 nt, Artificial Sequence
  Description of Artificial Sequence: Synthetic oligonucleotide
ggggaucggaauuucguga

SEQ ID NO: 1412166 - RNA, 19 nt, Artificial Sequence
  Description of Artificial Sequence: Synthetic oligonucleotide
auuucgugacugccuuggu

SEQ ID NO: 1412167 - RNA, 19 nt, Artificial Sequence
  Description of Artificial Sequence: Synthetic oligonucleotide
aguuucuaucauauugcua

SEQ ID NO: 1412168 - RNA, 19 nt, Artificial Sequence
  Description of Artificial Sequence: Synthetic oligonucleotide
ugccaucaccaagugcuca

SEQ ID NO: 1412169 - RNA, 19 nt, Artificial Sequence
  Description of Artificial Sequence: Synthetic oligonucleotide
cauuaugcuccaauucccu

SEQ ID NO: 1412170 - RNA, 19 nt, Artificial Sequence
  Description of Artificial Sequence: Synthetic oligonucleotide
agaugaauuguggcccagu

SEQ ID NO: 1412171 - RNA, 19 nt, Artificial Sequence
  Description of Artificial Sequence: Synthetic oligonucleotide
gccuuauauauaggcaaag

SEQ ID NO: 1412172 - RNA, 19 nt, Artificial Sequence
  Description of Artificial Sequence: Synthetic oligonucleotide
gccauuaaaugccuuauau

SEQ ID NO: 1412173 - RNA, 19 nt, Artificial Sequence
  Description of Artificial Sequence: Synthetic oligonucleotide
ucaucucgagcuccuuguu

SEQ ID NO: 1412174 - RNA, 19 nt, Artificial Sequence
  Description of Artificial Sequence: Synthetic oligonucleotide
guguaaugguccaccucag

SEQ ID NO: 1412175 - RNA, 19 nt, Artificial Sequence
  Description of Artificial Sequence: Synthetic oligonucleotide
ucaugcccugcuugcuucu

SEQ ID NO: 1412176 - RNA, 19 nt, Artificial Sequence
  Description of Artificial Sequence: Synthetic oligonucleotide
caaaagccauuaaaugccu

SEQ ID NO: 1412177 - RNA, 19 nt, Artificial Sequence
  Description of Artificial Sequence: Synthetic oligonucleotide
gcguuuucaccauaggucu

SEQ ID NO: 1412178 - RNA, 19 nt, Artificial Sequence
  Description of Artificial Sequence: Synthetic oligonucleotide
ccaagugcucaucaauuuc

SEQ ID NO: 1412179 - RNA, 19 nt, Artificial Sequence
  Description of Artificial Sequence: Synthetic oligonucleotide
aggguggaguuucuaucau

SEQ ID NO: 1412180 - RNA, 19 nt, Artificial Sequence
  Description of Artificial Sequence: Synthetic oligonucleotide
cuaagggauguauuauuau

SEQ ID NO: 1412181 - RNA, 19 nt, Artificial Sequence
  Description of Artificial Sequence: Synthetic oligonucleotide
ccaaaugguuacauaacaa

SEQ ID NO: 1412182 - RNA, 19 nt, Artificial Sequence
  Description of Artificial Sequence: Synthetic oligonucleotide
cauacacaauugcucagcu

SEQ ID NO: 1412183 - RNA, 19 nt, Artificial Sequence
  Description of Artificial Sequence: Synthetic oligonucleotide
cugggacauuaaaauacaa

SEQ ID NO: 1412184 - RNA, 19 nt, Artificial Sequence
  Description of Artificial Sequence: Synthetic oligonucleotide
auaacaaggcacagagcuu

SEQ ID NO: 1412185 - RNA, 19 nt, Artificial Sequence
  Description of Artificial Sequence: Synthetic oligonucleotide
ugguguucucugagccucu

SEQ ID NO: 1412186 - RNA, 19 nt, Artificial Sequence
  Description of Artificial Sequence: Synthetic oligonucleotide
gggaaaauuuccacuuuga

SEQ ID NO: 1412187 - RNA, 19 nt, Artificial Sequence
  Description of Artificial Sequence: Synthetic oligonucleotide
uugcccgggucuccuucag

SEQ ID NO: 1412188 - RNA, 19 nt, Artificial Sequence
  Description of Artificial Sequence: Synthetic oligonucleotide
aguaccacacacagaugaa

SEQ ID NO: 1412189 - RNA, 19 nt, Artificial Sequence
  Description of Artificial Sequence: Synthetic oligonucleotide
ugguguugguuaucucuuu

SEQ ID NO: 1412190 - RNA, 19 nt, Artificial Sequence
  Description of Artificial Sequence: Synthetic oligonucleotide
cauucgaacagaacauuuu

SEQ ID NO: 1412191 - RNA, 19 nt, Artificial Sequence
  Description of Artificial Sequence: Synthetic oligonucleotide
gcuccucauauggggaucg

SEQ ID NO: 1412192 - RNA, 19 nt, Artificial Sequence
  Description of Artificial Sequence: Synthetic oligonucleotide
ccucgggcaaauuuucuuc

SEQ ID NO: 1412193 - RNA, 19 nt, Artificial Sequence
  Description of Artificial Sequence: Synthetic oligonucleotide
ggaugggcaucaucucgag

SEQ ID NO: 1412194 - RNA, 19 nt, Artificial Sequence
  Description of Artificial Sequence: Synthetic oligonucleotide
cucauaauguuccucucuu

SEQ ID NO: 1412195 - RNA, 19 nt, Artificial Sequence
  Description of Artificial Sequence: Synthetic oligonucleotide
cugggaaaaucaaaaccau

SEQ ID NO: 1412196 - RNA, 19 nt, Artificial Sequence
  Description of Artificial Sequence: Synthetic oligonucleotide
uugcuucgcuucaccuugu

SEQ ID NO: 1412197 - RNA, 19 nt, Artificial Sequence
  Description of Artificial Sequence: Synthetic oligonucleotide
auaagggcuuuuauacaua

SEQ ID NO: 1412198 - RNA, 19 nt, Artificial Sequence
  Description of Artificial Sequence: Synthetic oligonucleotide
cagcguuuucaccauaggu

SEQ ID NO: 1412199 - RNA, 19 nt, Artificial Sequence
  Description of Artificial Sequence: Synthetic oligonucleotide
ccauccagaaggugggcug

SEQ ID NO: 1412200 - RNA, 19 nt, Artificial Sequence
  Description of Artificial Sequence: Synthetic oligonucleotide
gcuauagauauuucacuau

SEQ ID NO: 1412201 - RNA, 19 nt, Artificial Sequence
  Description of Artificial Sequence: Synthetic oligonucleotide
ucccugcacaaugccauuc

SEQ ID NO: 1412202 - RNA, 19 nt, Artificial Sequence
  Description of Artificial Sequence: Synthetic oligonucleotide
ccauuaaaugccuuauaua

SEQ ID NO: 1412203 - RNA, 19 nt, Artificial Sequence
  Description of Artificial Sequence: Synthetic oligonucleotide
aacaaggcacagagcuuaa

SEQ ID NO: 1412204 - RNA, 19 nt, Artificial Sequence
  Description of Artificial Sequence: Synthetic oligonucleotide
ugagggcggccauccagaa

SEQ ID NO: 1412205 - RNA, 19 nt, Artificial Sequence
  Description of Artificial Sequence: Synthetic oligonucleotide
ugacugccuugguguaaug

SEQ ID NO: 1412206 - RNA, 19 nt, Artificial Sequence
  Description of Artificial Sequence: Synthetic oligonucleotide
ccuaagggauguauuauua

SEQ ID NO: 1412207 - RNA, 19 nt, Artificial Sequence
  Description of Artificial Sequence: Synthetic oligonucleotide
acgauagcauugccuguuu

SEQ ID NO: 1412208 - RNA, 19 nt, Artificial Sequence
  Description of Artificial Sequence: Synthetic oligonucleotide
cauucucuacagcauugua

SEQ ID NO: 1412209 - RNA, 19 nt, Artificial Sequence
  Description of Artificial Sequence: Synthetic oligonucleotide
uuugauuguuggggucauc

SEQ ID NO: 1412210 - RNA, 19 nt, Artificial Sequence
  Description of Artificial Sequence: Synthetic oligonucleotide
cauuuauccuccugcuggu

SEQ ID NO: 1412211 - RNA, 19 nt, Artificial Sequence
  Description of Artificial Sequence: Synthetic oligonucleotide
cagaugaauuguggcccag

SEQ ID NO: 1412212 - RNA, 19 nt, Artificial Sequence
  Description of Artificial Sequence: Synthetic oligonucleotide
cucauauggggaucggaau

SEQ ID NO: 1412213 - RNA, 19 nt, Artificial Sequence
  Description of Artificial Sequence: Synthetic oligonucleotide
caacugugauccaaauggu

SEQ ID NO: 1412214 - RNA, 19 nt, Artificial Sequence
  Description of Artificial Sequence: Synthetic oligonucleotide
ucgugacugccuuggugua

SEQ ID NO: 1412215 - RNA, 19 nt, Artificial Sequence
  Description of Artificial Sequence: Synthetic oligonucleotide
gguacuguucaucaacauu

SEQ ID NO: 1412216 - RNA, 19 nt, Artificial Sequence
  Description of Artificial Sequence: Synthetic oligonucleotide
ccucauauggggaucggaa

SEQ ID NO: 1412217 - RNA, 19 nt, Artificial Sequence
  Description of Artificial Sequence: Synthetic oligonucleotide
ggcccaguucuacauguuc

SEQ ID NO: 1412218 - RNA, 19 nt, Artificial Sequence
  Description of Artificial Sequence: Synthetic oligonucleotide
cacaauugcucagcuggga

SEQ ID NO: 1412219 - RNA, 19 nt, Artificial Sequence
  Description of Artificial Sequence: Synthetic oligonucleotide
agcucccugcacaaugcca

SEQ ID NO: 1412220 - RNA, 19 nt, Artificial Sequence
  Description of Artificial Sequence: Synthetic oligonucleotide
gguguccugguucaugacu

SEQ ID NO: 1412221 - RNA, 19 nt, Artificial Sequence
  Description of Artificial Sequence: Synthetic oligonucleotide
guugcccgggucuccuuca

SEQ ID NO: 1412222 - RNA, 19 nt, Artificial Sequence
  Description of Artificial Sequence: Synthetic oligonucleotide
augcacacacacacauaca

SEQ ID NO: 1412223 - RNA, 19 nt, Artificial Sequence
  Description of Artificial Sequence: Synthetic oligonucleotide
gcuggguuuauguccucca

SEQ ID NO: 1412224 - RNA, 19 nt, Artificial Sequence
  Description of Artificial Sequence: Synthetic oligonucleotide
ccucaucccuccucgcugc

SEQ ID NO: 1412225 - RNA, 19 nt, Artificial Sequence
  Description of Artificial Sequence: Synthetic oligonucleotide
uggggucaucugcuggguu

SEQ ID NO: 1412226 - RNA, 19 nt, Artificial Sequence
  Description of Artificial Sequence: Synthetic oligonucleotide
acacacacacauacacaau

SEQ ID NO: 1412227 - RNA, 19 nt, Artificial Sequence
  Description of Artificial Sequence: Synthetic oligonucleotide
cuccucauauggggaucgg

SEQ ID NO: 1412228 - RNA, 19 nt, Artificial Sequence
  Description of Artificial Sequence: Synthetic oligonucleotide
cucaucccuccucgcugcc

SEQ ID NO: 1412229 - RNA, 19 nt, Artificial Sequence
  Description of Artificial Sequence: Synthetic oligonucleotide
gcucauuucagggaaaauu

SEQ ID NO: 1412230 - RNA, 19 nt, Artificial Sequence
  Description of Artificial Sequence: Synthetic oligonucleotide
caccaagugcucaucaauu

SEQ ID NO: 1412231 - RNA, 19 nt, Artificial Sequence
  Description of Artificial Sequence: Synthetic oligonucleotide
gugcucauuucagggaaaa

SEQ ID NO: 1412232 - RNA, 19 nt, Artificial Sequence
  Description of Artificial Sequence: Synthetic oligonucleotide
ggucaauucuggguaaaua

SEQ ID NO: 1412233 - RNA, 19 nt, Artificial Sequence
  Description of Artificial Sequence: Synthetic oligonucleotide
gggaugggcaucaucucga

SEQ ID NO: 1412234 - RNA, 19 nt, Artificial Sequence
  Description of Artificial Sequence: Synthetic oligonucleotide
cuucgccaucauuauuuua

SEQ ID NO: 1412235 - RNA, 19 nt, Artificial Sequence
  Description of Artificial Sequence: Synthetic oligonucleotide
uccuccugcuggucuggau

SEQ ID NO: 1412236 - RNA, 19 nt, Artificial Sequence
  Description of Artificial Sequence: Synthetic oligonucleotide
cugaggguggaguuucuau

SEQ ID NO: 1412237 - RNA, 19 nt, Artificial Sequence
  Description of Artificial Sequence: Synthetic oligonucleotide
acaaggcacagagcuuaaa

SEQ ID NO: 1412238 - RNA, 19 nt, Artificial Sequence
  Description of Artificial Sequence: Synthetic oligonucleotide
guaccacacacagaugaau

SEQ ID NO: 1412239 - RNA, 19 nt, Artificial Sequence
  Description of Artificial Sequence: Synthetic oligonucleotide
gcacacacacacauacaca

SEQ ID NO: 1412240 - RNA, 19 nt, Artificial Sequence
  Description of Artificial Sequence: Synthetic oligonucleotide
gaauuguggcccaguucua

SEQ ID NO: 1412241 - RNA, 19 nt, Artificial Sequence
  Description of Artificial Sequence: Synthetic oligonucleotide
cggccauccagaagguggg

SEQ ID NO: 1412242 - RNA, 19 nt, Artificial Sequence
  Description of Artificial Sequence: Synthetic oligonucleotide
cauauggggaucggaauuu

SEQ ID NO: 1412243 - RNA, 19 nt, Artificial Sequence
  Description of Artificial Sequence: Synthetic oligonucleotide
gugauccaaaugguuacau

SEQ ID NO: 1412244 - RNA, 19 nt, Artificial Sequence
  Description of Artificial Sequence: Synthetic oligonucleotide
uuuuccccuaagggaugua

SEQ ID NO: 1412245 - RNA, 19 nt, Artificial Sequence
  Description of Artificial Sequence: Synthetic oligonucleotide
ccaguucuacauguucaac

SEQ ID NO: 1412246 - RNA, 19 nt, Artificial Sequence
  Description of Artificial Sequence: Synthetic oligonucleotide
gcaggucaauucuggguaa

SEQ ID NO: 1412247 - RNA, 19 nt, Artificial Sequence
  Description of Artificial Sequence: Synthetic oligonucleotide
ggguggaguuucuaucaua

SEQ ID NO: 1412248 - RNA, 19 nt, Artificial Sequence
  Description of Artificial Sequence: Synthetic oligonucleotide
gguguucucugagccucug

SEQ ID NO: 1412249 - RNA, 19 nt, Artificial Sequence
  Description of Artificial Sequence: Synthetic oligonucleotide
gugacugccuugguguaau

SEQ ID NO: 1412250 - RNA, 19 nt, Artificial Sequence
  Description of Artificial Sequence: Synthetic oligonucleotide
cacauucgaacagaacauu

SEQ ID NO: 1412251 - RNA, 19 nt, Artificial Sequence
  Description of Artificial Sequence: Synthetic oligonucleotide
ccucauaauguuccucucu

SEQ ID NO: 1412252 - RNA, 19 nt, Artificial Sequence
  Description of Artificial Sequence: Synthetic oligonucleotide
ggaucggaauuucgugacu

SEQ ID NO: 1412253 - RNA, 19 nt, Artificial Sequence
  Description of Artificial Sequence: Synthetic oligonucleotide
caucagcguuuucaccaua

SEQ ID NO: 1412254 - RNA, 19 nt, Artificial Sequence
  Description of Artificial Sequence: Synthetic oligonucleotide
ggggucaucugcuggguuu

SEQ ID NO: 1412255 - RNA, 19 nt, Artificial Sequence
  Description of Artificial Sequence: Synthetic oligonucleotide
cagcuugagggcggccauc

SEQ ID NO: 1412256 - RNA, 19 nt, Artificial Sequence
  Description of Artificial Sequence: Synthetic oligonucleotide
gcauuguaauuaacuugcu

SEQ ID NO: 1412257 - RNA, 19 nt, Artificial Sequence
  Description of Artificial Sequence: Synthetic oligonucleotide
ccauaucaacaacugugau

SEQ ID NO: 1412258 - RNA, 19 nt, Artificial Sequence
  Description of Artificial Sequence: Synthetic oligonucleotide
ggcggccauccagaaggug

SEQ ID NO: 1412259 - RNA, 19 nt, Artificial Sequence
  Description of Artificial Sequence: Synthetic oligonucleotide
cccuaagggauguauuauu

SEQ ID NO: 1412260 - RNA, 19 nt, Artificial Sequence
  Description of Artificial Sequence: Synthetic oligonucleotide
ccccuuugauuguuggggu

SEQ ID NO: 1412261 - RNA, 19 nt, Artificial Sequence
  Description of Artificial Sequence: Synthetic oligonucleotide
gcuucgcuucaccuuguuu

SEQ ID NO: 1412262 - RNA, 19 nt, Artificial Sequence
  Description of Artificial Sequence: Synthetic oligonucleotide
cucccugcacaaugccauu

SEQ ID NO: 1412263 - RNA, 19 nt, Artificial Sequence
  Description of Artificial Sequence: Synthetic oligonucleotide
ccccuaagggauguauuau

SEQ ID NO: 1412264 - RNA, 19 nt, Artificial Sequence
  Description of Artificial Sequence: Synthetic oligonucleotide
ccucaugcccugcuugcuu

SEQ ID NO: 1412265 - RNA, 19 nt, Artificial Sequence
  Description of Artificial Sequence: Synthetic oligonucleotide
gggcggccauccagaaggu

SEQ ID NO: 1412266 - RNA, 19 nt, Artificial Sequence
  Description of Artificial Sequence: Synthetic oligonucleotide
cccgggucuccuucagcuu

SEQ ID NO: 1412267 - RNA, 19 nt, Artificial Sequence
  Description of Artificial Sequence: Synthetic oligonucleotide
uuuauuauuauuauuauua

SEQ ID NO: 1412268 - RNA, 19 nt, Artificial Sequence
  Description of Artificial Sequence: Synthetic oligonucleotide
uuauuuauuauuauuauua

SEQ ID NO: 1412269 - RNA, 19 nt, Artificial Sequence
  Description of Artificial Sequence: Synthetic oligonucleotide
aaugaugagccuaauaaac

SEQ ID NO: 1412270 - RNA, 19 nt, Artificial Sequence
  Description of Artificial Sequence: Synthetic oligonucleotide
agaagaguuauccucaggg

SEQ ID NO: 1412271 - RNA, 19 nt, Artificial Sequence
  Description of Artificial Sequence: Synthetic oligonucleotide
uuagacacagcuuaggaca

SEQ ID NO: 1412272 - RNA, 19 nt, Artificial Sequence
  Description of Artificial Sequence: Synthetic oligonucleotide
uguucucucagcaacaccc

SEQ ID NO: 1412273 - RNA, 19 nt, Artificial Sequence
  Description of Artificial Sequence: Synthetic oligonucleotide
uucaaaucuggcuagaaga

SEQ ID NO: 1412274 - RNA, 19 nt, Artificial Sequence
  Description of Artificial Sequence: Synthetic oligonucleotide
uaggccauaaugcaguggg

SEQ ID NO: 1412275 - RNA, 19 nt, Artificial Sequence
  Description of Artificial Sequence: Synthetic oligonucleotide
uguacauucuacaccaaag

SEQ ID NO: 1412276 - RNA, 19 nt, Artificial Sequence
  Description of Artificial Sequence: Synthetic oligonucleotide
acaaugaagugucuugacc

SEQ ID NO: 1412277 - RNA, 19 nt, Artificial Sequence
  Description of Artificial Sequence: Synthetic oligonucleotide
auuauuauuauuauuauuu

SEQ ID NO: 1412278 - RNA, 19 nt, Artificial Sequence
  Description of Artificial Sequence: Synthetic oligonucleotide
uaugguagcacucccacgc

SEQ ID NO: 1412279 - RNA, 19 nt, Artificial Sequence
  Description of Artificial Sequence: Synthetic oligonucleotide
cauucuacaccaaaggccc

SEQ ID NO: 1412280 - RNA, 19 nt, Artificial Sequence
  Description of Artificial Sequence: Synthetic oligonucleotide
aaugaagugucuugaccgg

SEQ ID NO: 1412281 - RNA, 19 nt, Artificial Sequence
  Description of Artificial Sequence: Synthetic oligonucleotide
acauucuacaccaaaggcc

SEQ ID NO: 1412282 - RNA, 19 nt, Artificial Sequence
  Description of Artificial Sequence: Synthetic oligonucleotide
ucaaaucuggcuagaagag

SEQ ID NO: 1412283 - RNA, 19 nt, Artificial Sequence
  Description of Artificial Sequence: Synthetic oligonucleotide
ugauaggaagcucucggcg

SEQ ID NO: 1412284 - RNA, 19 nt, Artificial Sequence
  Description of Artificial Sequence: Synthetic oligonucleotide
acuacacgaacacucuucc

SEQ ID NO: 1412285 - RNA, 19 nt, Artificial Sequence
  Description of Artificial Sequence: Synthetic oligonucleotide
aagaguuauccucagggca

SEQ ID NO: 1412286 - RNA, 19 nt, Artificial Sequence
  Description of Artificial Sequence: Synthetic oligonucleotide
uguacaaugaagugucuug

SEQ ID NO: 1412287 - RNA, 19 nt, Artificial Sequence
  Description of Artificial Sequence: Synthetic oligonucleotide
uacauucuacaccaaaggc

SEQ ID NO: 1412288 - RNA, 19 nt, Artificial Sequence
  Description of Artificial Sequence: Synthetic oligonucleotide
ucccaauaacuguugaacg

SEQ ID NO: 1412289 - RNA, 19 nt, Artificial Sequence
  Description of Artificial Sequence: Synthetic oligonucleotide
gauaggaagcucucggcgg

SEQ ID NO: 1412290 - RNA, 19 nt, Artificial Sequence
  Description of Artificial Sequence: Synthetic oligonucleotide
uucaaaccaacauagcuuc

SEQ ID NO: 1412291 - RNA, 19 nt, Artificial Sequence
  Description of Artificial Sequence: Synthetic oligonucleotide
ugcuguguugcccggaugg

SEQ ID NO: 1412292 - RNA, 19 nt, Artificial Sequence
  Description of Artificial Sequence: Synthetic oligonucleotide
uauuuauuauuauuauuau

SEQ ID NO: 1412293 - RNA, 19 nt, Artificial Sequence
  Description of Artificial Sequence: Synthetic oligonucleotide
uuauuauuauuauuauuau

SEQ ID NO: 1412294 - RNA, 19 nt, Artificial Sequence
  Description of Artificial Sequence: Synthetic oligonucleotide
uacacgaacacucuuccgu

SEQ ID NO: 1412295 - RNA, 19 nt, Artificial Sequence
  Description of Artificial Sequence: Synthetic oligonucleotide
cuucuugugagcuggaaug

SEQ ID NO: 1412296 - RNA, 19 nt, Artificial Sequence
  Description of Artificial Sequence: Synthetic oligonucleotide
aucccaauaacuguugaac

SEQ ID NO: 1412297 - RNA, 19 nt, Artificial Sequence
  Description of Artificial Sequence: Synthetic oligonucleotide
uagcaugugucgcagaaug

SEQ ID NO: 1412298 - RNA, 19 nt, Artificial Sequence
  Description of Artificial Sequence: Synthetic oligonucleotide
auguguuacaacagaaggc

SEQ ID NO: 1412299 - RNA, 19 nt, Artificial Sequence
  Description of Artificial Sequence: Synthetic oligonucleotide
acuaguguugggcugcagg

SEQ ID NO: 1412300 - RNA, 19 nt, Artificial Sequence
  Description of Artificial Sequence: Synthetic oligonucleotide
auggcuaccuauuaugcug

SEQ ID NO: 1412301 - RNA, 19 nt, Artificial Sequence
  Description of Artificial Sequence: Synthetic oligonucleotide
aauggcuaccuauuaugcu

SEQ ID NO: 1412302 - RNA, 19 nt, Artificial Sequence
  Description of Artificial Sequence: Synthetic oligonucleotide
guaaaccugcugcugaagg

SEQ ID NO: 1412303 - RNA, 19 nt, Artificial Sequence
  Description of Artificial Sequence: Synthetic oligonucleotide
uuauuauuauuauuauuuu

SEQ ID NO: 1412304 - RNA, 19 nt, Artificial Sequence
  Description of Artificial Sequence: Synthetic oligonucleotide
uauuauuauuauuauuauu

SEQ ID NO: 1412305 - RNA, 19 nt, Artificial Sequence
  Description of Artificial Sequence: Synthetic oligonucleotide
uccuaaggcagcauaggcc

SEQ ID NO: 1412306 - RNA, 19 nt, Artificial Sequence
  Description of Artificial Sequence: Synthetic oligonucleotide
ucuaguuuaccaucucuga

SEQ ID NO: 1412307 - RNA, 19 nt, Artificial Sequence
  Description of Artificial Sequence: Synthetic oligonucleotide
cuggcuagaagaguuaucc

SEQ ID NO: 1412308 - RNA, 19 nt, Artificial Sequence
  Description of Artificial Sequence: Synthetic oligonucleotide
aacuacacgaacacucuuc

SEQ ID NO: 1412309 - RNA, 19 nt, Artificial Sequence
  Description of Artificial Sequence: Synthetic oligonucleotide
auuuauuauuauuauuauu

SEQ ID NO: 1412310 - RNA, 19 nt, Artificial Sequence
  Description of Artificial Sequence: Synthetic oligonucleotide
uucucuaggccauaaugca

SEQ ID NO: 1412311 - RNA, 19 nt, Artificial Sequence
  Description of Artificial Sequence: Synthetic oligonucleotide
gaugagccuaauaaacagg

SEQ ID NO: 1412312 - RNA, 19 nt, Artificial Sequence
  Description of Artificial Sequence: Synthetic oligonucleotide
uaccagucuccucacaaag

SEQ ID NO: 1412313 - RNA, 19 nt, Artificial Sequence
  Description of Artificial Sequence: Synthetic oligonucleotide
ucucuaggccauaaugcag

SEQ ID NO: 1412314 - RNA, 19 nt, Artificial Sequence
  Description of Artificial Sequence: Synthetic oligonucleotide
uucugggccauguaaaccu

SEQ ID NO: 1412315 - RNA, 19 nt, Artificial Sequence
  Description of Artificial Sequence: Synthetic oligonucleotide
ucaacuacacgaacacucu

SEQ ID NO: 1412316 - RNA, 19 nt, Artificial Sequence
  Description of Artificial Sequence: Synthetic oligonucleotide
cuaguuuaccaucucugag

SEQ ID NO: 1412317 - RNA, 19 nt, Artificial Sequence
  Description of Artificial Sequence: Synthetic oligonucleotide
aauccgagguggucccugc

SEQ ID NO: 1412318 - RNA, 19 nt, Artificial Sequence
  Description of Artificial Sequence: Synthetic oligonucleotide
aacccauugaacaggaccu

SEQ ID NO: 1412319 - RNA, 19 nt, Artificial Sequence
  Description of Artificial Sequence: Synthetic oligonucleotide
ucagacaucggugacagua

SEQ ID NO: 1412320 - RNA, 19 nt, Artificial Sequence
  Description of Artificial Sequence: Synthetic oligonucleotide
ugacguucucgccugagca

SEQ ID NO: 1412321 - RNA, 19 nt, Artificial Sequence
  Description of Artificial Sequence: Synthetic oligonucleotide
acaaagcauccuuacaacu

SEQ ID NO: 1412322 - RNA, 19 nt, Artificial Sequence
  Description of Artificial Sequence: Synthetic oligonucleotide
cugagcauugcacugcagc

SEQ ID NO: 1412323 - RNA, 19 nt, Artificial Sequence
  Description of Artificial Sequence: Synthetic oligonucleotide
cuucaaaucuggcuagaag

SEQ ID NO: 1412324 - RNA, 19 nt, Artificial Sequence
  Description of Artificial Sequence: Synthetic oligonucleotide
aggcccauagcagugacac

SEQ ID NO: 1412325 - RNA, 19 nt, Artificial Sequence
  Description of Artificial Sequence: Synthetic oligonucleotide
guucucuaggccauaaugc

SEQ ID NO: 1412326 - RNA, 19 nt, Artificial Sequence
  Description of Artificial Sequence: Synthetic oligonucleotide
ugcucugagcgucucagug

SEQ ID NO: 1412327 - RNA, 19 nt, Artificial Sequence
  Description of Artificial Sequence: Synthetic oligonucleotide
uguugaacggcuuucucua

SEQ ID NO: 1412328 - RNA, 19 nt, Artificial Sequence
  Description of Artificial Sequence: Synthetic oligonucleotide
uuucugaucugcuguguug

SEQ ID NO: 1412329 - RNA, 19 nt, Artificial Sequence
  Description of Artificial Sequence: Synthetic oligonucleotide
agaguucccuucuugugag

SEQ ID NO: 1412330 - RNA, 19 nt, Artificial Sequence
  Description of Artificial Sequence: Synthetic oligonucleotide
ugcauguguuacaacagaa

SEQ ID NO: 1412331 - RNA, 19 nt, Artificial Sequence
  Description of Artificial Sequence: Synthetic oligonucleotide
  modified_base (14)..(14): a, c, u, g, unknown or other
gcuguuuucuacunucccc

SEQ ID NO: 1412332 - RNA, 19 nt, Artificial Sequence
  Description of Artificial Sequence: Synthetic oligonucleotide
aaaucuggcuagaagaguu

SEQ ID NO: 1412333 - RNA, 19 nt, Artificial Sequence
  Description of Artificial Sequence: Synthetic oligonucleotide
agggcaacauggcagaaga

SEQ ID NO: 1412334 - RNA, 19 nt, Artificial Sequence
  Description of Artificial Sequence: Synthetic oligonucleotide
agcaacacccauccggcuc

SEQ ID NO: 1412335 - RNA, 19 nt, Artificial Sequence
  Description of Artificial Sequence: Synthetic oligonucleotide
guaaugacguucucgccug

SEQ ID NO: 1412336 - RNA, 19 nt, Artificial Sequence
  Description of Artificial Sequence: Synthetic oligonucleotide
aaugcaguggggcguuucu

SEQ ID NO: 1412337 - RNA, 19 nt, Artificial Sequence
  Description of Artificial Sequence: Synthetic oligonucleotide
accggauucuucuuuucag

SEQ ID NO: 1412338 - RNA, 19 nt, Artificial Sequence
  Description of Artificial Sequence: Synthetic oligonucleotide
gcugauaggaagcucucgg

SEQ ID NO: 1412339 - RNA, 19 nt, Artificial Sequence
  Description of Artificial Sequence: Synthetic oligonucleotide
aaaccaacauagcuucuuu

SEQ ID NO: 1412340 - RNA, 19 nt, Artificial Sequence
  Description of Artificial Sequence: Synthetic oligonucleotide
ucuccuaaggcagcauagg

SEQ ID NO: 1412341 - RNA, 19 nt, Artificial Sequence
  Description of Artificial Sequence: Synthetic oligonucleotide
guugcagcucaguacauca

SEQ ID NO: 1412342 - RNA, 19 nt, Artificial Sequence
  Description of Artificial Sequence: Synthetic oligonucleotide
aagaccccaagugugagaa

SEQ ID NO: 1412343 - RNA, 19 nt, Artificial Sequence
  Description of Artificial Sequence: Synthetic oligonucleotide
gacagugcuagugaaggac

SEQ ID NO: 1412344 - RNA, 19 nt, Artificial Sequence
  Description of Artificial Sequence: Synthetic oligonucleotide
cugauaggaagcucucggc

SEQ ID NO: 1412345 - RNA, 19 nt, Artificial Sequence
  Description of Artificial Sequence: Synthetic oligonucleotide
ucggugacaguagaggucu

SEQ ID NO: 1412346 - RNA, 19 nt, Artificial Sequence
  Description of Artificial Sequence: Synthetic oligonucleotide
acuguugaacggcuuucuc

SEQ ID NO: 1412347 - RNA, 19 nt, Artificial Sequence
  Description of Artificial Sequence: Synthetic oligonucleotide
uuucagguagacagaugcu

SEQ ID NO: 1412348 - RNA, 19 nt, Artificial Sequence
  Description of Artificial Sequence: Synthetic oligonucleotide
uaucccacuuguucucuag

SEQ ID NO: 1412349 - RNA, 19 nt, Artificial Sequence
  Description of Artificial Sequence: Synthetic oligonucleotide
auaacuguugaacggcuuu

SEQ ID NO: 1412350 - RNA, 19 nt, Artificial Sequence
  Description of Artificial Sequence: Synthetic oligonucleotide
ccgauuucaacacuggaag

SEQ ID NO: 1412351 - RNA, 19 nt, Artificial Sequence
  Description of Artificial Sequence: Synthetic oligonucleotide
augagccuaauaaacagga

SEQ ID NO: 1412352 - RNA, 19 nt, Artificial Sequence
  Description of Artificial Sequence: Synthetic oligonucleotide
agauuuguuguugcagcuc

SEQ ID NO: 1412353 - RNA, 19 nt, Artificial Sequence
  Description of Artificial Sequence: Synthetic oligonucleotide
ugugucgcagaauggcuac

SEQ ID NO: 1412354 - RNA, 19 nt, Artificial Sequence
  Description of Artificial Sequence: Synthetic oligonucleotide
cccaauaacuguugaacgg

SEQ ID NO: 1412355 - RNA, 19 nt, Artificial Sequence
  Description of Artificial Sequence: Synthetic oligonucleotide
gguagcagacguuugccag

SEQ ID NO: 1412356 - RNA, 19 nt, Artificial Sequence
  Description of Artificial Sequence: Synthetic oligonucleotide
gcgagcuucaacuacacga

SEQ ID NO: 1412357 - RNA, 19 nt, Artificial Sequence
  Description of Artificial Sequence: Synthetic oligonucleotide
uugaacggcuuucucuagu

SEQ ID NO: 1412358 - RNA, 19 nt, Artificial Sequence
  Description of Artificial Sequence: Synthetic oligonucleotide
  modified_base (18)..(18): a, c, u, g, unknown or other
uuaugcuguuuucuacunu

SEQ ID NO: 1412359 - RNA, 19 nt, Artificial Sequence
  Description of Artificial Sequence: Synthetic oligonucleotide
uuuguacaaugaagugucu

SEQ ID NO: 1412360 - RNA, 19 nt, Artificial Sequence
  Description of Artificial Sequence: Synthetic oligonucleotide
  modified_base (19)..(19): a, c, u, g, unknown or other
auuaugcuguuuucuacun

SEQ ID NO: 1412361 - RNA, 19 nt, Artificial Sequence
  Description of Artificial Sequence: Synthetic oligonucleotide
cuaugguagcacucccacg

SEQ ID NO: 1412362 - RNA, 19 nt, Artificial Sequence
  Description of Artificial Sequence: Synthetic oligonucleotide
uucuuucugaugacaacuu

SEQ ID NO: 1412363 - RNA, 19 nt, Artificial Sequence
  Description of Artificial Sequence: Synthetic oligonucleotide
uggcuaccuauuaugcugu

SEQ ID NO: 1412364 - RNA, 19 nt, Artificial Sequence
  Description of Artificial Sequence: Synthetic oligonucleotide
augaugagccuaauaaaca

SEQ ID NO: 1412365 - RNA, 19 nt, Artificial Sequence
  Description of Artificial Sequence: Synthetic oligonucleotide
aaccaacauagcuucuuua

SEQ ID NO: 1412366 - RNA, 19 nt, Artificial Sequence
  Description of Artificial Sequence: Synthetic oligonucleotide
agccuaauaaacaggauuu

SEQ ID NO: 1412367 - RNA, 19 nt, Artificial Sequence
  Description of Artificial Sequence: Synthetic oligonucleotide
gacucugguaucccacuug

SEQ ID NO: 1412368 - RNA, 19 nt, Artificial Sequence
  Description of Artificial Sequence: Synthetic oligonucleotide
ugcuaugguagcacuccca

SEQ ID NO: 1412369 - RNA, 19 nt, Artificial Sequence
  Description of Artificial Sequence: Synthetic oligonucleotide
acagauucugugcaagauu

SEQ ID NO: 1412370 - RNA, 19 nt, Artificial Sequence
  Description of Artificial Sequence: Synthetic oligonucleotide
ucaguacaucauuucccug

SEQ ID NO: 1412371 - RNA, 19 nt, Artificial Sequence
  Description of Artificial Sequence: Synthetic oligonucleotide
acguuugccagucuccuaa

SEQ ID NO: 1412372 - RNA, 19 nt, Artificial Sequence
  Description of Artificial Sequence: Synthetic oligonucleotide
uucaggaggcugacaacga

SEQ ID NO: 1412373 - RNA, 19 nt, Artificial Sequence
  Description of Artificial Sequence: Synthetic oligonucleotide
cagacaucggugacaguag

SEQ ID NO: 1412374 - RNA, 19 nt, Artificial Sequence
  Description of Artificial Sequence: Synthetic oligonucleotide
aaugacguucucgccugag

SEQ ID NO: 1412375 - RNA, 19 nt, Artificial Sequence
  Description of Artificial Sequence: Synthetic oligonucleotide
ugaagugucuugaccggau

SEQ ID NO: 1412376 - RNA, 19 nt, Artificial Sequence
  Description of Artificial Sequence: Synthetic oligonucleotide
uguaaaccugcugcugaag

SEQ ID NO: 1412377 - RNA, 19 nt, Artificial Sequence
  Description of Artificial Sequence: Synthetic oligonucleotide
ucucgccugagcauugcac

SEQ ID NO: 1412378 - RNA, 19 nt, Artificial Sequence
  Description of Artificial Sequence: Synthetic oligonucleotide
ccgacuuuguacaaugaag

SEQ ID NO: 1412379 - RNA, 19 nt, Artificial Sequence
  Description of Artificial Sequence: Synthetic oligonucleotide
ggcuagaagaguuauccuc

SEQ ID NO: 1412380 - RNA, 19 nt, Artificial Sequence
  Description of Artificial Sequence: Synthetic oligonucleotide
ucuaggccauaaugcagug

SEQ ID NO: 1412381 - RNA, 19 nt, Artificial Sequence
  Description of Artificial Sequence: Synthetic oligonucleotide
guuaccagucuccucacaa

SEQ ID NO: 1412382 - RNA, 19 nt, Artificial Sequence
  Description of Artificial Sequence: Synthetic oligonucleotide
uucagguagacagaugcuu

SEQ ID NO: 1412383 - RNA, 19 nt, Artificial Sequence
  Description of Artificial Sequence: Synthetic oligonucleotide
cuacacgaacacucuuccg

SEQ ID NO: 1412384 - RNA, 19 nt, Artificial Sequence
  Description of Artificial Sequence: Synthetic oligonucleotide
aaagugugcuucagacauc

SEQ ID NO: 1412385 - RNA, 19 nt, Artificial Sequence
  Description of Artificial Sequence: Synthetic oligonucleotide
accuauuaugcuguuuucu

SEQ ID NO: 1412386 - RNA, 19 nt, Artificial Sequence
  Description of Artificial Sequence: Synthetic oligonucleotide
gcuucaacuacacgaacac

SEQ ID NO: 1412387 - RNA, 19 nt, Artificial Sequence
  Description of Artificial Sequence: Synthetic oligonucleotide
gccaaagugugcuucagac

SEQ ID NO: 1412388 - RNA, 19 nt, Artificial Sequence
  Description of Artificial Sequence: Synthetic oligonucleotide
gccauaaugcaguggggcg

SEQ ID NO: 1412389 - RNA, 19 nt, Artificial Sequence
  Description of Artificial Sequence: Synthetic oligonucleotide
aauaucuggcauagcugca

SEQ ID NO: 1412390 - RNA, 19 nt, Artificial Sequence
  Description of Artificial Sequence: Synthetic oligonucleotide
cauggcgagcuucaacuac

SEQ ID NO: 1412391 - RNA, 19 nt, Artificial Sequence
  Description of Artificial Sequence: Synthetic oligonucleotide
agcgcucugcauguguuac

SEQ ID NO: 1412392 - RNA, 19 nt, Artificial Sequence
  Description of Artificial Sequence: Synthetic oligonucleotide
gcucucaugaggcccauag

SEQ ID NO: 1412393 - RNA, 19 nt, Artificial Sequence
  Description of Artificial Sequence: Synthetic oligonucleotide
agugucuugaccggauucu

SEQ ID NO: 1412394 - RNA, 19 nt, Artificial Sequence
  Description of Artificial Sequence: Synthetic oligonucleotide
uuaccagucuccucacaaa

SEQ ID NO: 1412395 - RNA, 19 nt, Artificial Sequence
  Description of Artificial Sequence: Synthetic oligonucleotide
acccauccggcucucauga

SEQ ID NO: 1412396 - RNA, 19 nt, Artificial Sequence
  Description of Artificial Sequence: Synthetic oligonucleotide
uccucacaaagcauccuua

SEQ ID NO: 1412397 - RNA, 19 nt, Artificial Sequence
  Description of Artificial Sequence: Synthetic oligonucleotide
uccuggaccucaucgcucu

SEQ ID NO: 1412398 - RNA, 19 nt, Artificial Sequence
  Description of Artificial Sequence: Synthetic oligonucleotide
aaggcgaaccugccugcug

SEQ ID NO: 1412399 - RNA, 19 nt, Artificial Sequence
  Description of Artificial Sequence: Synthetic oligonucleotide
aagaugccugguggcaagg

SEQ ID NO: 1412400 - RNA, 19 nt, Artificial Sequence
  Description of Artificial Sequence: Synthetic oligonucleotide
ucuggcuagaagaguuauc

SEQ ID NO: 1412401 - RNA, 19 nt, Artificial Sequence
  Description of Artificial Sequence: Synthetic oligonucleotide
augaaugaugagccuaaua

SEQ ID NO: 1412402 - RNA, 19 nt, Artificial Sequence
  Description of Artificial Sequence: Synthetic oligonucleotide
gcugcaauaucuggcauag

SEQ ID NO: 1412403 - RNA, 19 nt, Artificial Sequence
  Description of Artificial Sequence: Synthetic oligonucleotide
guagacagaugcuuuguua

SEQ ID NO: 1412404 - RNA, 19 nt, Artificial Sequence
  Description of Artificial Sequence: Synthetic oligonucleotide
uccgagguggucccugcug

SEQ ID NO: 1412405 - RNA, 19 nt, Artificial Sequence
  Description of Artificial Sequence: Synthetic oligonucleotide
gcgacagugcuagugaagg

SEQ ID NO: 1412406 - RNA, 19 nt, Artificial Sequence
  Description of Artificial Sequence: Synthetic oligonucleotide
gagcucauggccgauuuca

SEQ ID NO: 1412407 - RNA, 19 nt, Artificial Sequence
  Description of Artificial Sequence: Synthetic oligonucleotide
cacacuaguguugggcugc

SEQ ID NO: 1412408 - RNA, 19 nt, Artificial Sequence
  Description of Artificial Sequence: Synthetic oligonucleotide
gcaagauuuguuguugcag

SEQ ID NO: 1412409 - RNA, 19 nt, Artificial Sequence
  Description of Artificial Sequence: Synthetic oligonucleotide
augcagucaaagaaguacu

SEQ ID NO: 1412410 - RNA, 19 nt, Artificial Sequence
  Description of Artificial Sequence: Synthetic oligonucleotide
acgaacacucuuccguaca

SEQ ID NO: 1412411 - RNA, 19 nt, Artificial Sequence
  Description of Artificial Sequence: Synthetic oligonucleotide
ugaacggcuuucucuaguu

SEQ ID NO: 1412412 - RNA, 19 nt, Artificial Sequence
  Description of Artificial Sequence: Synthetic oligonucleotide
agggccacagugaaccaac

SEQ ID NO: 1412413 - RNA, 19 nt, Artificial Sequence
  Description of Artificial Sequence: Synthetic oligonucleotide
ccaacauagcuucuuuacc

SEQ ID NO: 1412414 - RNA, 19 nt, Artificial Sequence
  Description of Artificial Sequence: Synthetic oligonucleotide
ccaauaacuguugaacggc

SEQ ID NO: 1412415 - RNA, 19 nt, Artificial Sequence
  Description of Artificial Sequence: Synthetic oligonucleotide
guugaacggcuuucucuag

SEQ ID NO: 1412416 - RNA, 19 nt, Artificial Sequence
  Description of Artificial Sequence: Synthetic oligonucleotide
cuucaaaccaacauagcuu

SEQ ID NO: 1412417 - RNA, 19 nt, Artificial Sequence
  Description of Artificial Sequence: Synthetic oligonucleotide
agaguuauccucagggcaa

SEQ ID NO: 1412418 - RNA, 19 nt, Artificial Sequence
  Description of Artificial Sequence: Synthetic oligonucleotide
gaucuuuucugcuuuccau

SEQ ID NO: 1412419 - RNA, 19 nt, Artificial Sequence
  Description of Artificial Sequence: Synthetic oligonucleotide
ucuuccguacauggguagc

SEQ ID NO: 1412420 - RNA, 19 nt, Artificial Sequence
  Description of Artificial Sequence: Synthetic oligonucleotide
aauaacuguugaacggcuu

SEQ ID NO: 1412421 - RNA, 19 nt, Artificial Sequence
  Description of Artificial Sequence: Synthetic oligonucleotide
gaccggauucuucuuuuca

SEQ ID NO: 1412422 - RNA, 19 nt, Artificial Sequence
  Description of Artificial Sequence: Synthetic oligonucleotide
uacugagaacucagcuucu

SEQ ID NO: 1412423 - RNA, 19 nt, Artificial Sequence
  Description of Artificial Sequence: Synthetic oligonucleotide
uccguacauggguagcaga

SEQ ID NO: 1412424 - RNA, 19 nt, Artificial Sequence
  Description of Artificial Sequence: Synthetic oligonucleotide
agagcucauggccgauuuc

SEQ ID NO: 1412425 - RNA, 19 nt, Artificial Sequence
  Description of Artificial Sequence: Synthetic oligonucleotide
uaccuauuaugcuguuuuc

SEQ ID NO: 1412426 - RNA, 19 nt, Artificial Sequence
  Description of Artificial Sequence: Synthetic oligonucleotide
agaugccugguggcaaggc

SEQ ID NO: 1412427 - RNA, 19 nt, Artificial Sequence
  Description of Artificial Sequence: Synthetic oligonucleotide
ucgccugagcauugcacug

SEQ ID NO: 1412428 - RNA, 19 nt, Artificial Sequence
  Description of Artificial Sequence: Synthetic oligonucleotide
aggcgaaccugccugcugu

SEQ ID NO: 1412429 - RNA, 19 nt, Artificial Sequence
  Description of Artificial Sequence: Synthetic oligonucleotide
ugguagguccuguucuuuc

SEQ ID NO: 1412430 - RNA, 19 nt, Artificial Sequence
  Description of Artificial Sequence: Synthetic oligonucleotide
cuguucuuucugaugacaa

SEQ ID NO: 1412431 - RNA, 19 nt, Artificial Sequence
  Description of Artificial Sequence: Synthetic oligonucleotide
uuccguacauggguagcag

SEQ ID NO: 1412432 - RNA, 19 nt, Artificial Sequence
  Description of Artificial Sequence: Synthetic oligonucleotide
guacuguggccaaagugug

SEQ ID NO: 1412433 - RNA, 19 nt, Artificial Sequence
  Description of Artificial Sequence: Synthetic oligonucleotide
ugguaucccacuuguucuc

SEQ ID NO: 1412434 - RNA, 19 nt, Artificial Sequence
  Description of Artificial Sequence: Synthetic oligonucleotide
ggguacuguggccaaagug

SEQ ID NO: 1412435 - RNA, 19 nt, Artificial Sequence
  Description of Artificial Sequence: Synthetic oligonucleotide
auguaaaccugcugcugaa

SEQ ID NO: 1412436 - RNA, 19 nt, Artificial Sequence
  Description of Artificial Sequence: Synthetic oligonucleotide
uugaccggauucuucuuuu

SEQ ID NO: 1412437 - RNA, 19 nt, Artificial Sequence
  Description of Artificial Sequence: Synthetic oligonucleotide
cuucaggcacugccaaccc

SEQ ID NO: 1412438 - RNA, 19 nt, Artificial Sequence
  Description of Artificial Sequence: Synthetic oligonucleotide
agcaugugucgcagaaugg

SEQ ID NO: 1412439 - RNA, 19 nt, Artificial Sequence
  Description of Artificial Sequence: Synthetic oligonucleotide
gguacuguggccaaagugu

SEQ ID NO: 1412440 - RNA, 19 nt, Artificial Sequence
  Description of Artificial Sequence: Synthetic oligonucleotide
gcuaugguagcacucccac

SEQ ID NO: 1412441 - RNA, 19 nt, Artificial Sequence
  Description of Artificial Sequence: Synthetic oligonucleotide
cugaucugcuguguugccc

SEQ ID NO: 1412442 - RNA, 19 nt, Artificial Sequence
  Description of Artificial Sequence: Synthetic oligonucleotide
acagugcuagugaaggaca

SEQ ID NO: 1412443 - RNA, 19 nt, Artificial Sequence
  Description of Artificial Sequence: Synthetic oligonucleotide
auccggcucucaugaggcc

SEQ ID NO: 1412444 - RNA, 19 nt, Artificial Sequence
  Description of Artificial Sequence: Synthetic oligonucleotide
acacgaacacucuuccgua

SEQ ID NO: 1412445 - RNA, 19 nt, Artificial Sequence
  Description of Artificial Sequence: Synthetic oligonucleotide
cugggccauguaaaccugc

SEQ ID NO: 1412446 - RNA, 19 nt, Artificial Sequence
  Description of Artificial Sequence: Synthetic oligonucleotide
ccggauucuucuuuucagg

SEQ ID NO: 1412447 - RNA, 19 nt, Artificial Sequence
  Description of Artificial Sequence: Synthetic oligonucleotide
augagcgcucugcaugugu

SEQ ID NO: 1412448 - RNA, 19 nt, Artificial Sequence
  Description of Artificial Sequence: Synthetic oligonucleotide
gugcuucagacaucgguga

SEQ ID NO: 1412449 - RNA, 19 nt, Artificial Sequence
  Description of Artificial Sequence: Synthetic oligonucleotide
cacgaacacucuuccguac

SEQ ID NO: 1412450 - RNA, 19 nt, Artificial Sequence
  Description of Artificial Sequence: Synthetic oligonucleotide
uucucgccugagcauugca

SEQ ID NO: 1412451 - RNA, 19 nt, Artificial Sequence
  Description of Artificial Sequence: Synthetic oligonucleotide
uggugacucugguauccca

SEQ ID NO: 1412452 - RNA, 19 nt, Artificial Sequence
  Description of Artificial Sequence: Synthetic oligonucleotide
cugagcgucucagugugac

SEQ ID NO: 1412453 - RNA, 19 nt, Artificial Sequence
  Description of Artificial Sequence: Synthetic oligonucleotide
cauuucccugcaugagcgc

SEQ ID NO: 1412454 - RNA, 19 nt, Artificial Sequence
  Description of Artificial Sequence: Synthetic oligonucleotide
gcaugugucgcagaauggc

SEQ ID NO: 1412455 - RNA, 19 nt, Artificial Sequence
  Description of Artificial Sequence: Synthetic oligonucleotide
gguggcaaggcgaaccugc

SEQ ID NO: 1412456 - RNA, 19 nt, Artificial Sequence
  Description of Artificial Sequence: Synthetic oligonucleotide
ggccauaaugcaguggggc

SEQ ID NO: 1412457 - RNA, 19 nt, Artificial Sequence
  Description of Artificial Sequence: Synthetic oligonucleotide
cagcucaguacaucauuuc

SEQ ID NO: 1412458 - RNA, 19 nt, Artificial Sequence
  Description of Artificial Sequence: Synthetic oligonucleotide
agcgucucagugugacaag

SEQ ID NO: 1412459 - RNA, 19 nt, Artificial Sequence
  Description of Artificial Sequence: Synthetic oligonucleotide
acacucuuccguacauggg

SEQ ID NO: 1412460 - RNA, 19 nt, Artificial Sequence
  Description of Artificial Sequence: Synthetic oligonucleotide
cucuaggccauaaugcagu

SEQ ID NO: 1412461 - RNA, 19 nt, Artificial Sequence
  Description of Artificial Sequence: Synthetic oligonucleotide
uggcgagcuucaacuacac

SEQ ID NO: 1412462 - RNA, 19 nt, Artificial Sequence
  Description of Artificial Sequence: Synthetic oligonucleotide
agacguuugccagucuccu

SEQ ID NO: 1412463 - RNA, 19 nt, Artificial Sequence
  Description of Artificial Sequence: Synthetic oligonucleotide
ugagcgucucagugugaca

SEQ ID NO: 1412464 - RNA, 19 nt, Artificial Sequence
  Description of Artificial Sequence: Synthetic oligonucleotide
uaaugacguucucgccuga

SEQ ID NO: 1412465 - RNA, 19 nt, Artificial Sequence
  Description of Artificial Sequence: Synthetic oligonucleotide
cuguugaacggcuuucucu

SEQ ID NO: 1412466 - RNA, 19 nt, Artificial Sequence
  Description of Artificial Sequence: Synthetic oligonucleotide
gugcuaugguagcacuccc

SEQ ID NO: 1412467 - RNA, 19 nt, Artificial Sequence
  Description of Artificial Sequence: Synthetic oligonucleotide
aggcugacaacgagggaag

SEQ ID NO: 1412468 - RNA, 19 nt, Artificial Sequence
  Description of Artificial Sequence: Synthetic oligonucleotide
cccggcaucccaauaacug

SEQ ID NO: 1412469 - RNA, 19 nt, Artificial Sequence
  Description of Artificial Sequence: Synthetic oligonucleotide
ugaccggauucuucuuuuc

SEQ ID NO: 1412470 - RNA, 19 nt, Artificial Sequence
  Description of Artificial Sequence: Synthetic oligonucleotide
uggcaaggcgaaccugccu

SEQ ID NO: 1412471 - RNA, 19 nt, Artificial Sequence
  Description of Artificial Sequence: Synthetic oligonucleotide
caggguacuguggccaaag

SEQ ID NO: 1412472 - RNA, 19 nt, Artificial Sequence
  Description of Artificial Sequence: Synthetic oligonucleotide
gaguuauccucagggcaac

SEQ ID NO: 1412473 - RNA, 19 nt, Artificial Sequence
  Description of Artificial Sequence: Synthetic oligonucleotide
acagcuuaggacagcuggu

SEQ ID NO: 1412474 - RNA, 19 nt, Artificial Sequence
  Description of Artificial Sequence: Synthetic oligonucleotide
uacauggguagcagacguu

SEQ ID NO: 1412475 - RNA, 19 nt, Artificial Sequence
  Description of Artificial Sequence: Synthetic oligonucleotide
ccguacauggguagcagac

SEQ ID NO: 1412476 - RNA, 19 nt, Artificial Sequence
  Description of Artificial Sequence: Synthetic oligonucleotide
ccuagaggacacucugugc

SEQ ID NO: 1412477 - RNA, 19 nt, Artificial Sequence
  Description of Artificial Sequence: Synthetic oligonucleotide
ucugagcgucucaguguga

SEQ ID NO: 1412478 - RNA, 19 nt, Artificial Sequence
  Description of Artificial Sequence: Synthetic oligonucleotide
ggcacugccaacccauuga

SEQ ID NO: 1412479 - RNA, 19 nt, Artificial Sequence
  Description of Artificial Sequence: Synthetic oligonucleotide
aucuggcuagaagaguuau

SEQ ID NO: 1412480 - RNA, 19 nt, Artificial Sequence
  Description of Artificial Sequence: Synthetic oligonucleotide
ccucacaaagcauccuuac

SEQ ID NO: 1412481 - RNA, 19 nt, Artificial Sequence
  Description of Artificial Sequence: Synthetic oligonucleotide
uccgggaggcgggaauccg

SEQ ID NO: 1412482 - RNA, 19 nt, Artificial Sequence
  Description of Artificial Sequence: Synthetic oligonucleotide
gaguucccuucuugugagc

SEQ ID NO: 1412483 - RNA, 19 nt, Artificial Sequence
  Description of Artificial Sequence: Synthetic oligonucleotide
cacucuuccguacaugggu

SEQ ID NO: 1412484 - RNA, 19 nt, Artificial Sequence
  Description of Artificial Sequence: Synthetic oligonucleotide
caauaacuguugaacggcu

SEQ ID NO: 1412485 - RNA, 19 nt, Artificial Sequence
  Description of Artificial Sequence: Synthetic oligonucleotide
gugacaguagaggucucca

SEQ ID NO: 1412486 - RNA, 19 nt, Artificial Sequence
  Description of Artificial Sequence: Synthetic oligonucleotide
cagcuguagcaugugucgc

SEQ ID NO: 1412487 - RNA, 19 nt, Artificial Sequence
  Description of Artificial Sequence: Synthetic oligonucleotide
cacccauccggcucucaug

SEQ ID NO: 1412488 - RNA, 19 nt, Artificial Sequence
  Description of Artificial Sequence: Synthetic oligonucleotide
uaaugcaguggggcguuuc

SEQ ID NO: 1412489 - RNA, 19 nt, Artificial Sequence
  Description of Artificial Sequence: Synthetic oligonucleotide
ccuuacaacucugucaaca

SEQ ID NO: 1412490 - RNA, 19 nt, Artificial Sequence
  Description of Artificial Sequence: Synthetic oligonucleotide
uccuuacaacucugucaac

SEQ ID NO: 1412491 - RNA, 19 nt, Artificial Sequence
  Description of Artificial Sequence: Synthetic oligonucleotide
gggaauccgaggugguccc

SEQ ID NO: 1412492 - RNA, 19 nt, Artificial Sequence
  Description of Artificial Sequence: Synthetic oligonucleotide
agcauccuuacaacucugu

SEQ ID NO: 1412493 - RNA, 19 nt, Artificial Sequence
  Description of Artificial Sequence: Synthetic oligonucleotide
ggugacaguagaggucucc

SEQ ID NO: 1412494 - RNA, 19 nt, Artificial Sequence
  Description of Artificial Sequence: Synthetic oligonucleotide
cuccuggaccucaucgcuc

SEQ ID NO: 1412495 - RNA, 19 nt, Artificial Sequence
  Description of Artificial Sequence: Synthetic oligonucleotide
caugugucgcagaauggcu

SEQ ID NO: 1412496 - RNA, 19 nt, Artificial Sequence
  Description of Artificial Sequence: Synthetic oligonucleotide
cuguguugcccggauggug

SEQ ID NO: 1412497 - RNA, 19 nt, Artificial Sequence
  Description of Artificial Sequence: Synthetic oligonucleotide
gcauccuuacaacucuguc

SEQ ID NO: 1412498 - RNA, 19 nt, Artificial Sequence
  Description of Artificial Sequence: Synthetic oligonucleotide
aggccauaaugcagugggg

SEQ ID NO: 1412499 - RNA, 19 nt, Artificial Sequence
  Description of Artificial Sequence: Synthetic oligonucleotide
acccauugaacaggaccug

SEQ ID NO: 1412500 - RNA, 19 nt, Artificial Sequence
  Description of Artificial Sequence: Synthetic oligonucleotide
guagcagacguuugccagu

SEQ ID NO: 1412501 - RNA, 19 nt, Artificial Sequence
  Description of Artificial Sequence: Synthetic oligonucleotide
ggcgagcuucaacuacacg

SEQ ID NO: 1412502 - RNA, 19 nt, Artificial Sequence
  Description of Artificial Sequence: Synthetic oligonucleotide
cucgccugagcauugcacu

SEQ ID NO: 1412503 - RNA, 19 nt, Artificial Sequence
  Description of Artificial Sequence: Synthetic oligonucleotide
uuaggacagcugguagguc

SEQ ID NO: 1412504 - RNA, 19 nt, Artificial Sequence
  Description of Artificial Sequence: Synthetic oligonucleotide
ugcuguugguaaugacguu

SEQ ID NO: 1412505 - RNA, 19 nt, Artificial Sequence
  Description of Artificial Sequence: Synthetic oligonucleotide
augugucgcagaauggcua

SEQ ID NO: 1412506 - RNA, 19 nt, Artificial Sequence
  Description of Artificial Sequence: Synthetic oligonucleotide
cucaucgcucucagggcca

SEQ ID NO: 1412507 - RNA, 19 nt, Artificial Sequence
  Description of Artificial Sequence: Synthetic oligonucleotide
uaccaucucugagaagcuu

SEQ ID NO: 1412508 - RNA, 19 nt, Artificial Sequence
  Description of Artificial Sequence: Synthetic oligonucleotide
gcucauggccgauuucaac

SEQ ID NO: 1412509 - RNA, 19 nt, Artificial Sequence
  Description of Artificial Sequence: Synthetic oligonucleotide
cgaaccugccugcuguugg

SEQ ID NO: 1412510 - RNA, 19 nt, Artificial Sequence
  Description of Artificial Sequence: Synthetic oligonucleotide
caguggggcguuucuccug

SEQ ID NO: 1412511 - RNA, 19 nt, Artificial Sequence
  Description of Artificial Sequence: Synthetic oligonucleotide
guagcacucccacgccuuc

SEQ ID NO: 1412512 - RNA, 19 nt, Artificial Sequence
  Description of Artificial Sequence: Synthetic oligonucleotide
gccgauuucaacacuggaa

SEQ ID NO: 1412513 - RNA, 19 nt, Artificial Sequence
  Description of Artificial Sequence: Synthetic oligonucleotide
acguucucgccugagcauu

SEQ ID NO: 1412514 - RNA, 19 nt, Artificial Sequence
  Description of Artificial Sequence: Synthetic oligonucleotide
ccaaagugugcuucagaca

SEQ ID NO: 1412515 - RNA, 19 nt, Artificial Sequence
  Description of Artificial Sequence: Synthetic oligonucleotide
ucaucgcucucagggccac

SEQ ID NO: 1412516 - RNA, 19 nt, Artificial Sequence
  Description of Artificial Sequence: Synthetic oligonucleotide
ggcgacagugcuagugaag

SEQ ID NO: 1412517 - RNA, 19 nt, Artificial Sequence
  Description of Artificial Sequence: Synthetic oligonucleotide
uucagacaucggugacagu

SEQ ID NO: 1412518 - RNA, 19 nt, Artificial Sequence
  Description of Artificial Sequence: Synthetic oligonucleotide
cagaauggcuaccuauuau

SEQ ID NO: 1412519 - RNA, 19 nt, Artificial Sequence
  Description of Artificial Sequence: Synthetic oligonucleotide
caaaucuggcuagaagagu

SEQ ID NO: 1412520 - RNA, 19 nt, Artificial Sequence
  Description of Artificial Sequence: Synthetic oligonucleotide
gacguuugccagucuccua

SEQ ID NO: 1412521 - RNA, 19 nt, Artificial Sequence
  Description of Artificial Sequence: Synthetic oligonucleotide
guugcccggaugguggcga

SEQ ID NO: 1412522 - RNA, 19 nt, Artificial Sequence
  Description of Artificial Sequence: Synthetic oligonucleotide
gcgucucagugugacaagc

SEQ ID NO: 1412523 - RNA, 19 nt, Artificial Sequence
  Description of Artificial Sequence: Synthetic oligonucleotide
auccgagguggucccugcu

SEQ ID NO: 1412524 - RNA, 19 nt, Artificial Sequence
  Description of Artificial Sequence: Synthetic oligonucleotide
ucggcggccucccggcauc

SEQ ID NO: 1412525 - RNA, 19 nt, Artificial Sequence
  Description of Artificial Sequence: Synthetic oligonucleotide
accccaagugugagaagca

SEQ ID NO: 1412526 - RNA, 19 nt, Artificial Sequence
  Description of Artificial Sequence: Synthetic oligonucleotide
ggccgauuucaacacugga

SEQ ID NO: 1412527 - RNA, 19 nt, Artificial Sequence
  Description of Artificial Sequence: Synthetic oligonucleotide
ggaccucaucgcucucagg

SEQ ID NO: 1412528 - RNA, 19 nt, Artificial Sequence
  Description of Artificial Sequence: Synthetic oligonucleotide
ggcugcaauaucuggcaua

SEQ ID NO: 1412529 - RNA, 19 nt, Artificial Sequence
  Description of Artificial Sequence: Synthetic oligonucleotide
cugcuguguugcccggaug

SEQ ID NO: 1412530 - RNA, 19 nt, Artificial Sequence
  Description of Artificial Sequence: Synthetic oligonucleotide
agguccgggaggcgggaau

SEQ ID NO: 1412531 - RNA, 19 nt, Artificial Sequence
  Description of Artificial Sequence: Synthetic oligonucleotide
agcagacguuugccagucu

SEQ ID NO: 1412532 - RNA, 19 nt, Artificial Sequence
  Description of Artificial Sequence: Synthetic oligonucleotide
aacacccauccggcucuca

SEQ ID NO: 1412533 - RNA, 19 nt, Artificial Sequence
  Description of Artificial Sequence: Synthetic oligonucleotide
gagcgcucugcauguguua

SEQ ID NO: 1412534 - RNA, 19 nt, Artificial Sequence
  Description of Artificial Sequence: Synthetic oligonucleotide
cuugaccggauucuucuuu

SEQ ID NO: 1412535 - RNA, 19 nt, Artificial Sequence
  Description of Artificial Sequence: Synthetic oligonucleotide
gccauguaaaccugcugcu

SEQ ID NO: 1412536 - RNA, 19 nt, Artificial Sequence
  Description of Artificial Sequence: Synthetic oligonucleotide
guggggcguuucuccuggg

SEQ ID NO: 1412537 - RNA, 19 nt, Artificial Sequence
  Description of Artificial Sequence: Synthetic oligonucleotide
cuucaacuacacgaacacu

SEQ ID NO: 1412538 - RNA, 19 nt, Artificial Sequence
  Description of Artificial Sequence: Synthetic oligonucleotide
acacuaguguugggcugca

SEQ ID NO: 1412539 - RNA, 19 nt, Artificial Sequence
  Description of Artificial Sequence: Synthetic oligonucleotide
guccgggaggcgggaaucc

SEQ ID NO: 1412540 - RNA, 19 nt, Artificial Sequence
  Description of Artificial Sequence: Synthetic oligonucleotide
uugcccggaugguggcgac

SEQ ID NO: 1412541 - RNA, 19 nt, Artificial Sequence
  Description of Artificial Sequence: Synthetic oligonucleotide
gaacggcuuucucuaguuu

SEQ ID NO: 1412542 - RNA, 19 nt, Artificial Sequence
  Description of Artificial Sequence: Synthetic oligonucleotide
cacagugaaccaacaggau

SEQ ID NO: 1412543 - RNA, 19 nt, Artificial Sequence
  Description of Artificial Sequence: Synthetic oligonucleotide
caugagcgcucugcaugug

SEQ ID NO: 1412544 - RNA, 19 nt, Artificial Sequence
  Description of Artificial Sequence: Synthetic oligonucleotide
gcaacacccauccggcucu

SEQ ID NO: 1412545 - RNA, 19 nt, Artificial Sequence
  Description of Artificial Sequence: Synthetic oligonucleotide
cacaggguacuguggccaa

SEQ ID NO: 1412546 - RNA, 19 nt, Artificial Sequence
  Description of Artificial Sequence: Synthetic oligonucleotide
cuccucacaaagcauccuu

SEQ ID NO: 1412547 - RNA, 19 nt, Artificial Sequence
  Description of Artificial Sequence: Synthetic oligonucleotide
gcaugagcgcucugcaugu

SEQ ID NO: 1412548 - RNA, 19 nt, Artificial Sequence
  Description of Artificial Sequence: Synthetic oligonucleotide
cccgacuuuguacaaugaa

SEQ ID NO: 1412549 - RNA, 19 nt, Artificial Sequence
  Description of Artificial Sequence: Synthetic oligonucleotide
cacuaguguugggcugcag

SEQ ID NO: 1412550 - RNA, 19 nt, Artificial Sequence
  Description of Artificial Sequence: Synthetic oligonucleotide
gguagacagaugcuuuguu

SEQ ID NO: 1412551 - RNA, 19 nt, Artificial Sequence
  Description of Artificial Sequence: Synthetic oligonucleotide
gcucugagcgucucagugu

SEQ ID NO: 1412552 - RNA, 19 nt, Artificial Sequence
  Description of Artificial Sequence: Synthetic oligonucleotide
cauggccgauuucaacacu

SEQ ID NO: 1412553 - RNA, 19 nt, Artificial Sequence
  Description of Artificial Sequence: Synthetic oligonucleotide
acaggguacuguggccaaa

SEQ ID NO: 1412554 - RNA, 19 nt, Artificial Sequence
  Description of Artificial Sequence: Synthetic oligonucleotide
cguuugccagucuccuaag

SEQ ID NO: 1412555 - RNA, 19 nt, Artificial Sequence
  Description of Artificial Sequence: Synthetic oligonucleotide
caacuacacgaacacucuu

SEQ ID NO: 1412556 - RNA, 19 nt, Artificial Sequence
  Description of Artificial Sequence: Synthetic oligonucleotide
ccacaggguacuguggcca

SEQ ID NO: 1412557 - RNA, 19 nt, Artificial Sequence
  Description of Artificial Sequence: Synthetic oligonucleotide
auaaugcaguggggcguuu

SEQ ID NO: 1412558 - RNA, 19 nt, Artificial Sequence
  Description of Artificial Sequence: Synthetic oligonucleotide
gguccgggaggcgggaauc

SEQ ID NO: 1412559 - RNA, 19 nt, Artificial Sequence
  Description of Artificial Sequence: Synthetic oligonucleotide
gcgaaccugccugcuguug

SEQ ID NO: 1412560 - RNA, 19 nt, Artificial Sequence
  Description of Artificial Sequence: Synthetic oligonucleotide
gguaucccacuuguucucu

SEQ ID NO: 1412561 - RNA, 19 nt, Artificial Sequence
  Description of Artificial Sequence: Synthetic oligonucleotide
cguucucgccugagcauug

SEQ ID NO: 1412562 - RNA, 19 nt, Artificial Sequence
  Description of Artificial Sequence: Synthetic oligonucleotide
ccggcaucccaauaacugu

SEQ ID NO: 1412563 - RNA, 19 nt, Artificial Sequence
  Description of Artificial Sequence: Synthetic oligonucleotide
ggcguuucuccuggguuaa

SEQ ID NO: 1412564 - RNA, 19 nt, Artificial Sequence
  Description of Artificial Sequence: Synthetic oligonucleotide
ccuucuugugagcuggaau

SEQ ID NO: 1412565 - RNA, 19 nt, Artificial Sequence
  Description of Artificial Sequence: Synthetic oligonucleotide
gcgcucugcauguguuaca

SEQ ID NO: 1412566 - RNA, 19 nt, Artificial Sequence
  Description of Artificial Sequence: Synthetic oligonucleotide
ggggcguuucuccuggguu

SEQ ID NO: 1412567 - RNA, 19 nt, Artificial Sequence
  Description of Artificial Sequence: Synthetic oligonucleotide
ggcugacaacgagggaaga

SEQ ID NO: 1412568 - RNA, 19 nt, Artificial Sequence
  Description of Artificial Sequence: Synthetic oligonucleotide
cagcaacacccauccggcu

SEQ ID NO: 1412569 - RNA, 19 nt, Artificial Sequence
  Description of Artificial Sequence: Synthetic oligonucleotide
cccauagcagugacaccaa

SEQ ID NO: 1412570 - RNA, 19 nt, Artificial Sequence
  Description of Artificial Sequence: Synthetic oligonucleotide
gcgggaauccgaggugguc

SEQ ID NO: 1412571 - RNA, 19 nt, Artificial Sequence
  Description of Artificial Sequence: Synthetic oligonucleotide
ccccgacuuuguacaauga

SEQ ID NO: 1412572 - RNA, 19 nt, Artificial Sequence
  Description of Artificial Sequence: Synthetic oligonucleotide
gcguuucuccuggguuaag

SEQ ID NO: 1412573 - RNA, 19 nt, Artificial Sequence
  Description of Artificial Sequence: Synthetic oligonucleotide
ccgggaggcgggaauccga

SEQ ID NO: 1412574 - RNA, 19 nt, Artificial Sequence
  Description of Artificial Sequence: Synthetic oligonucleotide
gcuaccuauuaugcuguuu

SEQ ID NO: 1412575 - RNA, 19 nt, Artificial Sequence
  Description of Artificial Sequence: Synthetic oligonucleotide
cgcucugcauguguuacaa

SEQ ID NO: 1412576 - RNA, 19 nt, Artificial Sequence
  Description of Artificial Sequence: Synthetic oligonucleotide
cugguagguccuguucuuu

SEQ ID NO: 1412577 - RNA, 19 nt, Artificial Sequence
  Description of Artificial Sequence: Synthetic oligonucleotide
cgcagaauggcuaccuauu

SEQ ID NO: 1412578 - RNA, 19 nt, Artificial Sequence
  Description of Artificial Sequence: Synthetic oligonucleotide
cgucucagugugacaagcu

SEQ ID NO: 1412579 - RNA, 19 nt, Artificial Sequence
  Description of Artificial Sequence: Synthetic oligonucleotide
ccuggaccucaucgcucuc

SEQ ID NO: 1412580 - RNA, 19 nt, Artificial Sequence
  Description of Artificial Sequence: Synthetic oligonucleotide
caggcacugccaacccauu

SEQ ID NO: 1412581 - RNA, 19 nt, Artificial Sequence
  Description of Artificial Sequence: Synthetic oligonucleotide
ggcuaccuauuaugcuguu

SEQ ID NO: 1412582 - RNA, 19 nt, Artificial Sequence
  Description of Artificial Sequence: Synthetic oligonucleotide
gccugguggcaaggcgaac

SEQ ID NO: 1412583 - RNA, 19 nt, Artificial Sequence
  Description of Artificial Sequence: Synthetic oligonucleotide
ggaauccgagguggucccu

SEQ ID NO: 1412584 - RNA, 19 nt, Artificial Sequence
  Description of Artificial Sequence: Synthetic oligonucleotide
gccucccggcaucccaaua

SEQ ID NO: 1412585 - RNA, 19 nt, Artificial Sequence
  Description of Artificial Sequence: Synthetic oligonucleotide
ggcgggaauccgagguggu

SEQ ID NO: 1412586 - RNA, 19 nt, Artificial Sequence
  Description of Artificial Sequence: Synthetic oligonucleotide
gcauugcacugcagcugua

SEQ ID NO: 1412587 - RNA, 19 nt, Artificial Sequence
  Description of Artificial Sequence: Synthetic oligonucleotide
ggcucucaugaggcccaua

SEQ ID NO: 1412588 - RNA, 19 nt, Artificial Sequence
  Description of Artificial Sequence: Synthetic oligonucleotide
ccacgccuucugcaugcau

SEQ ID NO: 1412589 - RNA, 19 nt, Artificial Sequence
  Description of Artificial Sequence: Synthetic oligonucleotide
aaaucccuuucucagaaac

SEQ ID NO: 1412590 - RNA, 19 nt, Artificial Sequence
  Description of Artificial Sequence: Synthetic oligonucleotide
auacgauucccauuggucc

SEQ ID NO: 1412591 - RNA, 19 nt, Artificial Sequence
  Description of Artificial Sequence: Synthetic oligonucleotide
gauacaaggaugucgcugg

SEQ ID NO: 1412592 - RNA, 19 nt, Artificial Sequence
  Description of Artificial Sequence: Synthetic oligonucleotide
uuuaggggaacauucaggc

SEQ ID NO: 1412593 - RNA, 19 nt, Artificial Sequence
  Description of Artificial Sequence: Synthetic oligonucleotide
agaacugauguccacuggc

SEQ ID NO: 1412594 - RNA, 19 nt, Artificial Sequence
  Description of Artificial Sequence: Synthetic oligonucleotide
aggaaguuaaaacagccag

SEQ ID NO: 1412595 - RNA, 19 nt, Artificial Sequence
  Description of Artificial Sequence: Synthetic oligonucleotide
gguggaauaggauacaagg

SEQ ID NO: 1412596 - RNA, 19 nt, Artificial Sequence
  Description of Artificial Sequence: Synthetic oligonucleotide
agcguagcaggccagaccc

SEQ ID NO: 1412597 - RNA, 19 nt, Artificial Sequence
  Description of Artificial Sequence: Synthetic oligonucleotide
uacuucgcaagaaugaagc

SEQ ID NO: 1412598 - RNA, 19 nt, Artificial Sequence
  Description of Artificial Sequence: Synthetic oligonucleotide
uucgcaagaaugaagccag

SEQ ID NO: 1412599 - RNA, 19 nt, Artificial Sequence
  Description of Artificial Sequence: Synthetic oligonucleotide
aaggucucuauguaccagg

SEQ ID NO: 1412600 - RNA, 19 nt, Artificial Sequence
  Description of Artificial Sequence: Synthetic oligonucleotide
uuuagcagccucuggaucc

SEQ ID NO: 1412601 - RNA, 19 nt, Artificial Sequence
  Description of Artificial Sequence: Synthetic oligonucleotide
uggaauaggauacaaggau

SEQ ID NO: 1412602 - RNA, 19 nt, Artificial Sequence
  Description of Artificial Sequence: Synthetic oligonucleotide
augaagaacagcuucggcu

SEQ ID NO: 1412603 - RNA, 19 nt, Artificial Sequence
  Description of Artificial Sequence: Synthetic oligonucleotide
uccaaggucucuauguacc

SEQ ID NO: 1412604 - RNA, 19 nt, Artificial Sequence
  Description of Artificial Sequence: Synthetic oligonucleotide
auguaugccauaucugcac

SEQ ID NO: 1412605 - RNA, 19 nt, Artificial Sequence
  Description of Artificial Sequence: Synthetic oligonucleotide
uccggaggaaguuaaaaca

SEQ ID NO: 1412606 - RNA, 19 nt, Artificial Sequence
  Description of Artificial Sequence: Synthetic oligonucleotide
aucuucucgaccgacacgg

SEQ ID NO: 1412607 - RNA, 19 nt, Artificial Sequence
  Description of Artificial Sequence: Synthetic oligonucleotide
gaaucuguuuauaaauccc

SEQ ID NO: 1412608 - RNA, 19 nt, Artificial Sequence
  Description of Artificial Sequence: Synthetic oligonucleotide
gucucauuaaguuuuaaaa

SEQ ID NO: 1412609 - RNA, 19 nt, Artificial Sequence
  Description of Artificial Sequence: Synthetic oligonucleotide
auguccucgaucauguccc

SEQ ID NO: 1412610 - RNA, 19 nt, Artificial Sequence
  Description of Artificial Sequence: Synthetic oligonucleotide
agaucugugaccagcugcc

SEQ ID NO: 1412611 - RNA, 19 nt, Artificial Sequence
  Description of Artificial Sequence: Synthetic oligonucleotide
cuugaucccgccgagaccc

SEQ ID NO: 1412612 - RNA, 19 nt, Artificial Sequence
  Description of Artificial Sequence: Synthetic oligonucleotide
aauaggauacaaggauguc

SEQ ID NO: 1412613 - RNA, 19 nt, Artificial Sequence
  Description of Artificial Sequence: Synthetic oligonucleotide
auaaaucccuuucucagaa

SEQ ID NO: 1412614 - RNA, 19 nt, Artificial Sequence
  Description of Artificial Sequence: Synthetic oligonucleotide
aacuugacacggcauccag

SEQ ID NO: 1412615 - RNA, 19 nt, Artificial Sequence
  Description of Artificial Sequence: Synthetic oligonucleotide
ugcuccuuugauacgauuc

SEQ ID NO: 1412616 - RNA, 19 nt, Artificial Sequence
  Description of Artificial Sequence: Synthetic oligonucleotide
uucucgaccgacacggagc

SEQ ID NO: 1412617 - RNA, 19 nt, Artificial Sequence
  Description of Artificial Sequence: Synthetic oligonucleotide
uccgucugugccauagacg

SEQ ID NO: 1412618 - RNA, 19 nt, Artificial Sequence
  Description of Artificial Sequence: Synthetic oligonucleotide
aaagccgcgaccauuuucu

SEQ ID NO: 1412619 - RNA, 19 nt, Artificial Sequence
  Description of Artificial Sequence: Synthetic oligonucleotide
ucugcucgccaccacaggc

SEQ ID NO: 1412620 - RNA, 19 nt, Artificial Sequence
  Description of Artificial Sequence: Synthetic oligonucleotide
uaagucccugccucgagag

SEQ ID NO: 1412621 - RNA, 19 nt, Artificial Sequence
  Description of Artificial Sequence: Synthetic oligonucleotide
uccuuugauacgauuccca

SEQ ID NO: 1412622 - RNA, 19 nt, Artificial Sequence
  Description of Artificial Sequence: Synthetic oligonucleotide
aucugcacuacuccugauc

SEQ ID NO: 1412623 - RNA, 19 nt, Artificial Sequence
  Description of Artificial Sequence: Synthetic oligonucleotide
cauaucugcacuacuccug

SEQ ID NO: 1412624 - RNA, 19 nt, Artificial Sequence
  Description of Artificial Sequence: Synthetic oligonucleotide
gauacgauucccauugguc

SEQ ID NO: 1412625 - RNA, 19 nt, Artificial Sequence
  Description of Artificial Sequence: Synthetic oligonucleotide
acaguccagucucagucac

SEQ ID NO: 1412626 - RNA, 19 nt, Artificial Sequence
  Description of Artificial Sequence: Synthetic oligonucleotide
aacugauguccacuggccu

SEQ ID NO: 1412627 - RNA, 19 nt, Artificial Sequence
  Description of Artificial Sequence: Synthetic oligonucleotide
uugccgacuacuucgcaag

SEQ ID NO: 1412628 - RNA, 19 nt, Artificial Sequence
  Description of Artificial Sequence: Synthetic oligonucleotide
uacgauucccauugguccc

SEQ ID NO: 1412629 - RNA, 19 nt, Artificial Sequence
  Description of Artificial Sequence: Synthetic oligonucleotide
uuccggaggaaguuaaaac

SEQ ID NO: 1412630 - RNA, 19 nt, Artificial Sequence
  Description of Artificial Sequence: Synthetic oligonucleotide
cacgguuccaaaacccugg

SEQ ID NO: 1412631 - RNA, 19 nt, Artificial Sequence
  Description of Artificial Sequence: Synthetic oligonucleotide
ugauacgauucccauuggu

SEQ ID NO: 1412632 - RNA, 19 nt, Artificial Sequence
  Description of Artificial Sequence: Synthetic oligonucleotide
uguaugccauaucugcacu

SEQ ID NO: 1412633 - RNA, 19 nt, Artificial Sequence
  Description of Artificial Sequence: Synthetic oligonucleotide
agugcgugugccgagcccc

SEQ ID NO: 1412634 - RNA, 19 nt, Artificial Sequence
  Description of Artificial Sequence: Synthetic oligonucleotide
agucucauuaaguuuuaaa

SEQ ID NO: 1412635 - RNA, 19 nt, Artificial Sequence
  Description of Artificial Sequence: Synthetic oligonucleotide
ugucuaagucccugccucg

SEQ ID NO: 1412636 - RNA, 19 nt, Artificial Sequence
  Description of Artificial Sequence: Synthetic oligonucleotide
ugccauaucugcacuacuc

SEQ ID NO: 1412637 - RNA, 19 nt, Artificial Sequence
  Description of Artificial Sequence: Synthetic oligonucleotide
cuacuucgcaagaaugaag

SEQ ID NO: 1412638 - RNA, 19 nt, Artificial Sequence
  Description of Artificial Sequence: Synthetic oligonucleotide
cucgagaggaagugcaggc

SEQ ID NO: 1412639 - RNA, 19 nt, Artificial Sequence
  Description of Artificial Sequence: Synthetic oligonucleotide
auaucugcacuacuccuga

SEQ ID NO: 1412640 - RNA, 19 nt, Artificial Sequence
  Description of Artificial Sequence: Synthetic oligonucleotide
ucuauguaccaggagccgc

SEQ ID NO: 1412641 - RNA, 19 nt, Artificial Sequence
  Description of Artificial Sequence: Synthetic oligonucleotide
uaaaacagccaggaaucug

SEQ ID NO: 1412642 - RNA, 19 nt, Artificial Sequence
  Description of Artificial Sequence: Synthetic oligonucleotide
gaaacugcaugggcgaccc

SEQ ID NO: 1412643 - RNA, 19 nt, Artificial Sequence
  Description of Artificial Sequence: Synthetic oligonucleotide
uugauacgauucccauugg

SEQ ID NO: 1412644 - RNA, 19 nt, Artificial Sequence
  Description of Artificial Sequence: Synthetic oligonucleotide
gugggcaaacuugacacgg

SEQ ID NO: 1412645 - RNA, 19 nt, Artificial Sequence
  Description of Artificial Sequence: Synthetic oligonucleotide
ugccacgguuccaaaaccc

SEQ ID NO: 1412646 - RNA, 19 nt, Artificial Sequence
  Description of Artificial Sequence: Synthetic oligonucleotide
ucucgaccgacacggagca

SEQ ID NO: 1412647 - RNA, 19 nt, Artificial Sequence
  Description of Artificial Sequence: Synthetic oligonucleotide
ugagguuucccagggcagg

SEQ ID NO: 1412648 - RNA, 19 nt, Artificial Sequence
  Description of Artificial Sequence: Synthetic oligonucleotide
caaacuugacacggcaucc

SEQ ID NO: 1412649 - RNA, 19 nt, Artificial Sequence
  Description of Artificial Sequence: Synthetic oligonucleotide
ucuaagucccugccucgag

SEQ ID NO: 1412650 - RNA, 19 nt, Artificial Sequence
  Description of Artificial Sequence: Synthetic oligonucleotide
gccgcgaccauuuucuugg

SEQ ID NO: 1412651 - RNA, 19 nt, Artificial Sequence
  Description of Artificial Sequence: Synthetic oligonucleotide
acgguuccaaaacccuggc

SEQ ID NO: 1412652 - RNA, 19 nt, Artificial Sequence
  Description of Artificial Sequence: Synthetic oligonucleotide
ugccucgagaggaagugca

SEQ ID NO: 1412653 - RNA, 19 nt, Artificial Sequence
  Description of Artificial Sequence: Synthetic oligonucleotide
caaaacccuggcuuugcag

SEQ ID NO: 1412654 - RNA, 19 nt, Artificial Sequence
  Description of Artificial Sequence: Synthetic oligonucleotide
uaugccauaucugcacuac

SEQ ID NO: 1412655 - RNA, 19 nt, Artificial Sequence
  Description of Artificial Sequence: Synthetic oligonucleotide
gaacugauguccacuggcc

SEQ ID NO: 1412656 - RNA, 19 nt, Artificial Sequence
  Description of Artificial Sequence: Synthetic oligonucleotide
gacuacuucgcaagaauga

SEQ ID NO: 1412657 - RNA, 19 nt, Artificial Sequence
  Description of Artificial Sequence: Synthetic oligonucleotide
cugucuaagucccugccuc

SEQ ID NO: 1412658 - RNA, 19 nt, Artificial Sequence
  Description of Artificial Sequence: Synthetic oligonucleotide
uuaggggaacauucaggca

SEQ ID NO: 1412659 - RNA, 19 nt, Artificial Sequence
  Description of Artificial Sequence: Synthetic oligonucleotide
uuaaaacagccaggaaucu

SEQ ID NO: 1412660 - RNA, 19 nt, Artificial Sequence
  Description of Artificial Sequence: Synthetic oligonucleotide
gaauaggauacaaggaugu

SEQ ID NO: 1412661 - RNA, 19 nt, Artificial Sequence
  Description of Artificial Sequence: Synthetic oligonucleotide
cuacuccugaucuucucug

SEQ ID NO: 1412662 - RNA, 19 nt, Artificial Sequence
  Description of Artificial Sequence: Synthetic oligonucleotide
ugcacuacuccugaucuuc

SEQ ID NO: 1412663 - RNA, 19 nt, Artificial Sequence
  Description of Artificial Sequence: Synthetic oligonucleotide
ggaauaggauacaaggaug

SEQ ID NO: 1412664 - RNA, 19 nt, Artificial Sequence
  Description of Artificial Sequence: Synthetic oligonucleotide
acuggggugagguuuccca

SEQ ID NO: 1412665 - RNA, 19 nt, Artificial Sequence
  Description of Artificial Sequence: Synthetic oligonucleotide
gccauggucuuucugcucg

SEQ ID NO: 1412666 - RNA, 19 nt, Artificial Sequence
  Description of Artificial Sequence: Synthetic oligonucleotide
caugaagugcagccagcgg

SEQ ID NO: 1412667 - RNA, 19 nt, Artificial Sequence
  Description of Artificial Sequence: Synthetic oligonucleotide
aggcgcacccgacaucgcc

SEQ ID NO: 1412668 - RNA, 19 nt, Artificial Sequence
  Description of Artificial Sequence: Synthetic oligonucleotide
gucucaagaucugugacca

SEQ ID NO: 1412669 - RNA, 19 nt, Artificial Sequence
  Description of Artificial Sequence: Synthetic oligonucleotide
cagagcgucccagagcucg

SEQ ID NO: 1412670 - RNA, 19 nt, Artificial Sequence
  Description of Artificial Sequence: Synthetic oligonucleotide
uacaaggaugucgcugggg

SEQ ID NO: 1412671 - RNA, 19 nt, Artificial Sequence
  Description of Artificial Sequence: Synthetic oligonucleotide
ucacugucuaagucccugc

SEQ ID NO: 1412672 - RNA, 19 nt, Artificial Sequence
  Description of Artificial Sequence: Synthetic oligonucleotide
aagucccugccucgagagg

SEQ ID NO: 1412673 - RNA, 19 nt, Artificial Sequence
  Description of Artificial Sequence: Synthetic oligonucleotide
aaucccuuucucagaaacu

SEQ ID NO: 1412674 - RNA, 19 nt, Artificial Sequence
  Description of Artificial Sequence: Synthetic oligonucleotide
guccgcuucguccauggcc

SEQ ID NO: 1412675 - RNA, 19 nt, Artificial Sequence
  Description of Artificial Sequence: Synthetic oligonucleotide
acuugacacggcauccagc

SEQ ID NO: 1412676 - RNA, 19 nt, Artificial Sequence
  Description of Artificial Sequence: Synthetic oligonucleotide
uuuccggaggaaguuaaaa

SEQ ID NO: 1412677 - RNA, 19 nt, Artificial Sequence
  Description of Artificial Sequence: Synthetic oligonucleotide
auacaaggaugucgcuggg

SEQ ID NO: 1412678 - RNA, 19 nt, Artificial Sequence
  Description of Artificial Sequence: Synthetic oligonucleotide
uucugcucgccaccacagg

SEQ ID NO: 1412679 - RNA, 19 nt, Artificial Sequence
  Description of Artificial Sequence: Synthetic oligonucleotide
aguccagucucagucaccu

SEQ ID NO: 1412680 - RNA, 19 nt, Artificial Sequence
  Description of Artificial Sequence: Synthetic oligonucleotide
cuucgcaagaaugaagcca

SEQ ID NO: 1412681 - RNA, 19 nt, Artificial Sequence
  Description of Artificial Sequence: Synthetic oligonucleotide
ucgcucaccaggcgcaccc

SEQ ID NO: 1412682 - RNA, 19 nt, Artificial Sequence
  Description of Artificial Sequence: Synthetic oligonucleotide
agaggaagugcaggccacc

SEQ ID NO: 1412683 - RNA, 19 nt, Artificial Sequence
  Description of Artificial Sequence: Synthetic oligonucleotide
cuucucgaccgacacggag

SEQ ID NO: 1412684 - RNA, 19 nt, Artificial Sequence
  Description of Artificial Sequence: Synthetic oligonucleotide
acuacuucgcaagaaugaa

SEQ ID NO: 1412685 - RNA, 19 nt, Artificial Sequence
  Description of Artificial Sequence: Synthetic oligonucleotide
aaccugggaagguggaaua

SEQ ID NO: 1412686 - RNA, 19 nt, Artificial Sequence
  Description of Artificial Sequence: Synthetic oligonucleotide
cuugacacggcauccagcu

SEQ ID NO: 1412687 - RNA, 19 nt, Artificial Sequence
  Description of Artificial Sequence: Synthetic oligonucleotide
cucggcgaccugcagcucg

SEQ ID NO: 1412688 - RNA, 19 nt, Artificial Sequence
  Description of Artificial Sequence: Synthetic oligonucleotide
gaagcggaacugaagcuuc

SEQ ID NO: 1412689 - RNA, 19 nt, Artificial Sequence
  Description of Artificial Sequence: Synthetic oligonucleotide
ucgcaagaaugaagccagg

SEQ ID NO: 1412690 - RNA, 19 nt, Artificial Sequence
  Description of Artificial Sequence: Synthetic oligonucleotide
cacugucuaagucccugcc

SEQ ID NO: 1412691 - RNA, 19 nt, Artificial Sequence
  Description of Artificial Sequence: Synthetic oligonucleotide
ugcuugccgacuacuucgc

SEQ ID NO: 1412692 - RNA, 19 nt, Artificial Sequence
  Description of Artificial Sequence: Synthetic oligonucleotide
gacacggagcauccgucug

SEQ ID NO: 1412693 - RNA, 19 nt, Artificial Sequence
  Description of Artificial Sequence: Synthetic oligonucleotide
gccauaucugcacuacucc

SEQ ID NO: 1412694 - RNA, 19 nt, Artificial Sequence
  Description of Artificial Sequence: Synthetic oligonucleotide
ucucgacucagcagagcgu

SEQ ID NO: 1412695 - RNA, 19 nt, Artificial Sequence
  Description of Artificial Sequence: Synthetic oligonucleotide
cucuauguaccaggagccg

SEQ ID NO: 1412696 - RNA, 19 nt, Artificial Sequence
  Description of Artificial Sequence: Synthetic oligonucleotide
cuucccucgggucucaaga

SEQ ID NO: 1412697 - RNA, 19 nt, Artificial Sequence
  Description of Artificial Sequence: Synthetic oligonucleotide
ugaagguuuaggggaacau

SEQ ID NO: 1412698 - RNA, 19 nt, Artificial Sequence
  Description of Artificial Sequence: Synthetic oligonucleotide
ggauacaaggaugucgcug

SEQ ID NO: 1412699 - RNA, 19 nt, Artificial Sequence
  Description of Artificial Sequence: Synthetic oligonucleotide
gcaaacuugacacggcauc

SEQ ID NO: 1412700 - RNA, 19 nt, Artificial Sequence
  Description of Artificial Sequence: Synthetic oligonucleotide
ugcaugggcgacccugaga

SEQ ID NO: 1412701 - RNA, 19 nt, Artificial Sequence
  Description of Artificial Sequence: Synthetic oligonucleotide
ucgaccgacacggagcauc

SEQ ID NO: 1412702 - RNA, 19 nt, Artificial Sequence
  Description of Artificial Sequence: Synthetic oligonucleotide
uuuuccggaggaaguuaaa

SEQ ID NO: 1412703 - RNA, 19 nt, Artificial Sequence
  Description of Artificial Sequence: Synthetic oligonucleotide
cugccgguccgcuucgucc

SEQ ID NO: 1412704 - RNA, 19 nt, Artificial Sequence
  Description of Artificial Sequence: Synthetic oligonucleotide
cuggggugagguuucccag

SEQ ID NO: 1412705 - RNA, 19 nt, Artificial Sequence
  Description of Artificial Sequence: Synthetic oligonucleotide
cuccuuugauacgauuccc

SEQ ID NO: 1412706 - RNA, 19 nt, Artificial Sequence
  Description of Artificial Sequence: Synthetic oligonucleotide
cugccacgguuccaaaacc

SEQ ID NO: 1412707 - RNA, 19 nt, Artificial Sequence
  Description of Artificial Sequence: Synthetic oligonucleotide
cucgacucagcagagcguc

SEQ ID NO: 1412708 - RNA, 19 nt, Artificial Sequence
  Description of Artificial Sequence: Synthetic oligonucleotide
acaucgccgcaggagcugc

SEQ ID NO: 1412709 - RNA, 19 nt, Artificial Sequence
  Description of Artificial Sequence: Synthetic oligonucleotide
caggccagaccccuuccgg

SEQ ID NO: 1412710 - RNA, 19 nt, Artificial Sequence
  Description of Artificial Sequence: Synthetic oligonucleotide
gagaaccucuggucugagc

SEQ ID NO: 1412711 - RNA, 19 nt, Artificial Sequence
  Description of Artificial Sequence: Synthetic oligonucleotide
uaaaucccuuucucagaaa

SEQ ID NO: 1412712 - RNA, 19 nt, Artificial Sequence
  Description of Artificial Sequence: Synthetic oligonucleotide
acggcauccagcuggucaa

SEQ ID NO: 1412713 - RNA, 19 nt, Artificial Sequence
  Description of Artificial Sequence: Synthetic oligonucleotide
agcgucccagagcucggcg

SEQ ID NO: 1412714 - RNA, 19 nt, Artificial Sequence
  Description of Artificial Sequence: Synthetic oligonucleotide
cacagacaucauagguacc

SEQ ID NO: 1412715 - RNA, 19 nt, Artificial Sequence
  Description of Artificial Sequence: Synthetic oligonucleotide
caaagcaguccagggcacg

SEQ ID NO: 1412716 - RNA, 19 nt, Artificial Sequence
  Description of Artificial Sequence: Synthetic oligonucleotide
agccgcgaccauuuucuug

SEQ ID NO: 1412717 - RNA, 19 nt, Artificial Sequence
  Description of Artificial Sequence: Synthetic oligonucleotide
accccuuccggccccagca

SEQ ID NO: 1412718 - RNA, 19 nt, Artificial Sequence
  Description of Artificial Sequence: Synthetic oligonucleotide
gcaugggcgacccugagaa

SEQ ID NO: 1412719 - RNA, 19 nt, Artificial Sequence
  Description of Artificial Sequence: Synthetic oligonucleotide
aggacaguccagucucagu

SEQ ID NO: 1412720 - RNA, 19 nt, Artificial Sequence
  Description of Artificial Sequence: Synthetic oligonucleotide
augccauaucugcacuacu

SEQ ID NO: 1412721 - RNA, 19 nt, Artificial Sequence
  Description of Artificial Sequence: Synthetic oligonucleotide
cuugccgacuacuucgcaa

SEQ ID NO: 1412722 - RNA, 19 nt, Artificial Sequence
  Description of Artificial Sequence: Synthetic oligonucleotide
cacggcauccagcugguca

SEQ ID NO: 1412723 - RNA, 19 nt, Artificial Sequence
  Description of Artificial Sequence: Synthetic oligonucleotide
gucugagcguagcaggcca

SEQ ID NO: 1412724 - RNA, 19 nt, Artificial Sequence
  Description of Artificial Sequence: Synthetic oligonucleotide
acggagcauccgucugugc

SEQ ID NO: 1412725 - RNA, 19 nt, Artificial Sequence
  Description of Artificial Sequence: Synthetic oligonucleotide
gacggcaccugggaacugc

SEQ ID NO: 1412726 - RNA, 19 nt, Artificial Sequence
  Description of Artificial Sequence: Synthetic oligonucleotide
aucccgccgagacccagag

SEQ ID NO: 1412727 - RNA, 19 nt, Artificial Sequence
  Description of Artificial Sequence: Synthetic oligonucleotide
aggauacaaggaugucgcu

SEQ ID NO: 1412728 - RNA, 19 nt, Artificial Sequence
  Description of Artificial Sequence: Synthetic oligonucleotide
aucaaagccgcgaccauuu

SEQ ID NO: 1412729 - RNA, 19 nt, Artificial Sequence
  Description of Artificial Sequence: Synthetic oligonucleotide
aggggaacauucaggcaag

SEQ ID NO: 1412730 - RNA, 19 nt, Artificial Sequence
  Description of Artificial Sequence: Synthetic oligonucleotide
aaagggccuugggccuucc

SEQ ID NO: 1412731 - RNA, 19 nt, Artificial Sequence
  Description of Artificial Sequence: Synthetic oligonucleotide
ugccgacuacuucgcaaga

SEQ ID NO: 1412732 - RNA, 19 nt, Artificial Sequence
  Description of Artificial Sequence: Synthetic oligonucleotide
ucggcgaccugcagcucgc

SEQ ID NO: 1412733 - RNA, 19 nt, Artificial Sequence
  Description of Artificial Sequence: Synthetic oligonucleotide
ucgauggcuccaacuucac

SEQ ID NO: 1412734 - RNA, 19 nt, Artificial Sequence
  Description of Artificial Sequence: Synthetic oligonucleotide
uggguguuucuggucugag

SEQ ID NO: 1412735 - RNA, 19 nt, Artificial Sequence
  Description of Artificial Sequence: Synthetic oligonucleotide
agcggaacugaagcuucuc

SEQ ID NO: 1412736 - RNA, 19 nt, Artificial Sequence
  Description of Artificial Sequence: Synthetic oligonucleotide
auggccggccgauugcgga

SEQ ID NO: 1412737 - RNA, 19 nt, Artificial Sequence
  Description of Artificial Sequence: Synthetic oligonucleotide
ugugccgagccccgaggaa

SEQ ID NO: 1412738 - RNA, 19 nt, Artificial Sequence
  Description of Artificial Sequence: Synthetic oligonucleotide
cuaagucccugccucgaga

SEQ ID NO: 1412739 - RNA, 19 nt, Artificial Sequence
  Description of Artificial Sequence: Synthetic oligonucleotide
cucccaggcuaggacagcc

SEQ ID NO: 1412740 - RNA, 19 nt, Artificial Sequence
  Description of Artificial Sequence: Synthetic oligonucleotide
ccugccacgguuccaaaac

SEQ ID NO: 1412741 - RNA, 19 nt, Artificial Sequence
  Description of Artificial Sequence: Synthetic oligonucleotide
ucuucucgaccgacacgga

SEQ ID NO: 1412742 - RNA, 19 nt, Artificial Sequence
  Description of Artificial Sequence: Synthetic oligonucleotide
ggagccagugcgugugccg

SEQ ID NO: 1412743 - RNA, 19 nt, Artificial Sequence
  Description of Artificial Sequence: Synthetic oligonucleotide
ugagcguagcaggccagac

SEQ ID NO: 1412744 - RNA, 19 nt, Artificial Sequence
  Description of Artificial Sequence: Synthetic oligonucleotide
uucccucgggucucaagau

SEQ ID NO: 1412745 - RNA, 19 nt, Artificial Sequence
  Description of Artificial Sequence: Synthetic oligonucleotide
agggguuuagcagccucug

SEQ ID NO: 1412746 - RNA, 19 nt, Artificial Sequence
  Description of Artificial Sequence: Synthetic oligonucleotide
cauggccggccgauugcgg

SEQ ID NO: 1412747 - RNA, 19 nt, Artificial Sequence
  Description of Artificial Sequence: Synthetic oligonucleotide
gacaucgccgcaggagcug

SEQ ID NO: 1412748 - RNA, 19 nt, Artificial Sequence
  Description of Artificial Sequence: Synthetic oligonucleotide
cuucguccauggccggccg

SEQ ID NO: 1412749 - RNA, 19 nt, Artificial Sequence
  Description of Artificial Sequence: Synthetic oligonucleotide
ccaugaagugcagccagcg

SEQ ID NO: 1412750 - RNA, 19 nt, Artificial Sequence
  Description of Artificial Sequence: Synthetic oligonucleotide
cuauguaccaggagccgcu

SEQ ID NO: 1412751 - RNA, 19 nt, Artificial Sequence
  Description of Artificial Sequence: Synthetic oligonucleotide
accaggcgcacccgacauc

SEQ ID NO: 1412752 - RNA, 19 nt, Artificial Sequence
  Description of Artificial Sequence: Synthetic oligonucleotide
ccgacaucgccgcaggagc

SEQ ID NO: 1412753 - RNA, 19 nt, Artificial Sequence
  Description of Artificial Sequence: Synthetic oligonucleotide
cacccgacaucgccgcagg

SEQ ID NO: 1412754 - RNA, 19 nt, Artificial Sequence
  Description of Artificial Sequence: Synthetic oligonucleotide
ccaggcgcacccgacaucg

SEQ ID NO: 1412755 - RNA, 19 nt, Artificial Sequence
  Description of Artificial Sequence: Synthetic oligonucleotide
guaugccauaucugcacua

SEQ ID NO: 1412756 - RNA, 19 nt, Artificial Sequence
  Description of Artificial Sequence: Synthetic oligonucleotide
aggucucuauguaccagga

SEQ ID NO: 1412757 - RNA, 19 nt, Artificial Sequence
  Description of Artificial Sequence: Synthetic oligonucleotide
aguucacauuguugaugau

SEQ ID NO: 1412758 - RNA, 19 nt, Artificial Sequence
  Description of Artificial Sequence: Synthetic oligonucleotide
aagcggaacugaagcuucu

SEQ ID NO: 1412759 - RNA, 19 nt, Artificial Sequence
  Description of Artificial Sequence: Synthetic oligonucleotide
ucccagggcaggcuucgau

SEQ ID NO: 1412760 - RNA, 19 nt, Artificial Sequence
  Description of Artificial Sequence: Synthetic oligonucleotide
gaggaagggccugcuuccc

SEQ ID NO: 1412761 - RNA, 19 nt, Artificial Sequence
  Description of Artificial Sequence: Synthetic oligonucleotide
uauguaccaggagccgcuc

SEQ ID NO: 1412762 - RNA, 19 nt, Artificial Sequence
  Description of Artificial Sequence: Synthetic oligonucleotide
cgacuacuucgcaagaaug

SEQ ID NO: 1412763 - RNA, 19 nt, Artificial Sequence
  Description of Artificial Sequence: Synthetic oligonucleotide
gucaaagggccuugggccu

SEQ ID NO: 1412764 - RNA, 19 nt, Artificial Sequence
  Description of Artificial Sequence: Synthetic oligonucleotide
cccgagaagagcucucgac

SEQ ID NO: 1412765 - RNA, 19 nt, Artificial Sequence
  Description of Artificial Sequence: Synthetic oligonucleotide
cggaacugaagcuucucac

SEQ ID NO: 1412766 - RNA, 19 nt, Artificial Sequence
  Description of Artificial Sequence: Synthetic oligonucleotide
cagaaacugcaugggcgac

SEQ ID NO: 1412767 - RNA, 19 nt, Artificial Sequence
  Description of Artificial Sequence: Synthetic oligonucleotide
acgauucccauugguccca

SEQ ID NO: 1412768 - RNA, 19 nt, Artificial Sequence
  Description of Artificial Sequence: Synthetic oligonucleotide
uccugguaugggacagcau

SEQ ID NO: 1412769 - RNA, 19 nt, Artificial Sequence
  Description of Artificial Sequence: Synthetic oligonucleotide
cuuugauacgauucccauu

SEQ ID NO: 1412770 - RNA, 19 nt, Artificial Sequence
  Description of Artificial Sequence: Synthetic oligonucleotide
gcgaccugcagcucgcuca

SEQ ID NO: 1412771 - RNA, 19 nt, Artificial Sequence
  Description of Artificial Sequence: Synthetic oligonucleotide
cugccucgagaggaagugc

SEQ ID NO: 1412772 - RNA, 19 nt, Artificial Sequence
  Description of Artificial Sequence: Synthetic oligonucleotide
ggcgacccugagaaggagg

SEQ ID NO: 1412773 - RNA, 19 nt, Artificial Sequence
  Description of Artificial Sequence: Synthetic oligonucleotide
ccucgagaggaagugcagg

SEQ ID NO: 1412774 - RNA, 19 nt, Artificial Sequence
  Description of Artificial Sequence: Synthetic oligonucleotide
agcucucgacucagcagag

SEQ ID NO: 1412775 - RNA, 19 nt, Artificial Sequence
  Description of Artificial Sequence: Synthetic oligonucleotide
ggcgcacccgacaucgccg

SEQ ID NO: 1412776 - RNA, 19 nt, Artificial Sequence
  Description of Artificial Sequence: Synthetic oligonucleotide
cuaggacagccagucccac

SEQ ID NO: 1412777 - RNA, 19 nt, Artificial Sequence
  Description of Artificial Sequence: Synthetic oligonucleotide
aagccgcgaccauuuucuu

SEQ ID NO: 1412778 - RNA, 19 nt, Artificial Sequence
  Description of Artificial Sequence: Synthetic oligonucleotide
gcggaacugaagcuucuca

SEQ ID NO: 1412779 - RNA, 19 nt, Artificial Sequence
  Description of Artificial Sequence: Synthetic oligonucleotide
uccaggccaugaagguuua

SEQ ID NO: 1412780 - RNA, 19 nt, Artificial Sequence
  Description of Artificial Sequence: Synthetic oligonucleotide
cagggcacgguggucccgc

SEQ ID NO: 1412781 - RNA, 19 nt, Artificial Sequence
  Description of Artificial Sequence: Synthetic oligonucleotide
gucuaagucccugccucga

SEQ ID NO: 1412782 - RNA, 19 nt, Artificial Sequence
  Description of Artificial Sequence: Synthetic oligonucleotide
aggggucugcauccaggau

SEQ ID NO: 1412783 - RNA, 19 nt, Artificial Sequence
  Description of Artificial Sequence: Synthetic oligonucleotide
gugccauagacggcaccug

SEQ ID NO: 1412784 - RNA, 19 nt, Artificial Sequence
  Description of Artificial Sequence: Synthetic oligonucleotide
caucgccgcaggagcugcc

SEQ ID NO: 1412785 - RNA, 19 nt, Artificial Sequence
  Description of Artificial Sequence: Synthetic oligonucleotide
uuccggccccagcaccacu

SEQ ID NO: 1412786 - RNA, 19 nt, Artificial Sequence
  Description of Artificial Sequence: Synthetic oligonucleotide
uggcuugaucccgccgaga

SEQ ID NO: 1412787 - RNA, 19 nt, Artificial Sequence
  Description of Artificial Sequence: Synthetic oligonucleotide
gggaacauucaggcaagga

SEQ ID NO: 1412788 - RNA, 19 nt, Artificial Sequence
  Description of Artificial Sequence: Synthetic oligonucleotide
ucccgccgagacccagagc

SEQ ID NO: 1412789 - RNA, 19 nt, Artificial Sequence
  Description of Artificial Sequence: Synthetic oligonucleotide
gaagugcaggccaccucaa

SEQ ID NO: 1412790 - RNA, 19 nt, Artificial Sequence
  Description of Artificial Sequence: Synthetic oligonucleotide
gagcgucccagagcucggc

SEQ ID NO: 1412791 - RNA, 19 nt, Artificial Sequence
  Description of Artificial Sequence: Synthetic oligonucleotide
ccuggcuugaucccgccga

SEQ ID NO: 1412792 - RNA, 19 nt, Artificial Sequence
  Description of Artificial Sequence: Synthetic oligonucleotide
gcuucccucgggucucaag

SEQ ID NO: 1412793 - RNA, 19 nt, Artificial Sequence
  Description of Artificial Sequence: Synthetic oligonucleotide
ccaaggucucuauguacca

SEQ ID NO: 1412794 - RNA, 19 nt, Artificial Sequence
  Description of Artificial Sequence: Synthetic oligonucleotide
gaucccgccgagacccaga

SEQ ID NO: 1412795 - RNA, 19 nt, Artificial Sequence
  Description of Artificial Sequence: Synthetic oligonucleotide
cucgcucaccaggcgcacc

SEQ ID NO: 1412796 - RNA, 19 nt, Artificial Sequence
  Description of Artificial Sequence: Synthetic oligonucleotide
ccaugaagguuuaggggaa

SEQ ID NO: 1412797 - RNA, 19 nt, Artificial Sequence
  Description of Artificial Sequence: Synthetic oligonucleotide
cagcuucggcuucccuccc

SEQ ID NO: 1412798 - RNA, 19 nt, Artificial Sequence
  Description of Artificial Sequence: Synthetic oligonucleotide
ccagggguuuagcagccuc

SEQ ID NO: 1412799 - RNA, 19 nt, Artificial Sequence
  Description of Artificial Sequence: Synthetic oligonucleotide
cuucccucccaggcuagga

SEQ ID NO: 1412800 - RNA, 19 nt, Artificial Sequence
  Description of Artificial Sequence: Synthetic oligonucleotide
cuuggccuguguccucuaa

SEQ ID NO: 1412801 - RNA, 19 nt, Artificial Sequence
  Description of Artificial Sequence: Synthetic oligonucleotide
cgaccgacacggagcaucc

SEQ ID NO: 1412802 - RNA, 19 nt, Artificial Sequence
  Description of Artificial Sequence: Synthetic oligonucleotide
gcacccgacaucgccgcag

SEQ ID NO: 1412803 - RNA, 19 nt, Artificial Sequence
  Description of Artificial Sequence: Synthetic oligonucleotide
ccgcucuucuugucucucc

SEQ ID NO: 1412804 - RNA, 19 nt, Artificial Sequence
  Description of Artificial Sequence: Synthetic oligonucleotide
caggcgcacccgacaucgc

SEQ ID NO: 1412805 - RNA, 19 nt, Artificial Sequence
  Description of Artificial Sequence: Synthetic oligonucleotide
ccagugcgugugccgagcc

SEQ ID NO: 1412806 - RNA, 19 nt, Artificial Sequence
  Description of Artificial Sequence: Synthetic oligonucleotide
caaagggccuugggccuuc

SEQ ID NO: 1412807 - RNA, 19 nt, Artificial Sequence
  Description of Artificial Sequence: Synthetic oligonucleotide
cugagcguagcaggccaga

SEQ ID NO: 1412808 - RNA, 19 nt, Artificial Sequence
  Description of Artificial Sequence: Synthetic oligonucleotide
acggcaccugggaacugca

SEQ ID NO: 1412809 - RNA, 19 nt, Artificial Sequence
  Description of Artificial Sequence: Synthetic oligonucleotide
gaucugugaccagcugccu

SEQ ID NO: 1412810 - RNA, 19 nt, Artificial Sequence
  Description of Artificial Sequence: Synthetic oligonucleotide
acccgacaucgccgcagga

SEQ ID NO: 1412811 - RNA, 19 nt, Artificial Sequence
  Description of Artificial Sequence: Synthetic oligonucleotide
gcgcacccgacaucgccgc

SEQ ID NO: 1412812 - RNA, 19 nt, Artificial Sequence
  Description of Artificial Sequence: Synthetic oligonucleotide
cccuggcuuugcaggacag

SEQ ID NO: 1412813 - RNA, 19 nt, Artificial Sequence
  Description of Artificial Sequence: Synthetic oligonucleotide
ccuuugauacgauucccau

SEQ ID NO: 1412814 - RNA, 19 nt, Artificial Sequence
  Description of Artificial Sequence: Synthetic oligonucleotide
cgguccgcuucguccaugg

SEQ ID NO: 1412815 - RNA, 19 nt, Artificial Sequence
  Description of Artificial Sequence: Synthetic oligonucleotide
gcgugugccgagccccgag

SEQ ID NO: 1412816 - RNA, 19 nt, Artificial Sequence
  Description of Artificial Sequence: Synthetic oligonucleotide
gccccagucucauuaaguu

SEQ ID NO: 1412817 - RNA, 19 nt, Artificial Sequence
  Description of Artificial Sequence: Synthetic oligonucleotide
cagucucauuaaguuuuaa

SEQ ID NO: 1412818 - RNA, 19 nt, Artificial Sequence
  Description of Artificial Sequence: Synthetic oligonucleotide
cgugugccgagccccgagg

SEQ ID NO: 1412819 - RNA, 19 nt, Artificial Sequence
  Description of Artificial Sequence: Synthetic oligonucleotide
gaccugcagcucgcucacc

SEQ ID NO: 1412820 - RNA, 19 nt, Artificial Sequence
  Description of Artificial Sequence: Synthetic oligonucleotide
gguggucccgcccugccau

SEQ ID NO: 1412821 - RNA, 19 nt, Artificial Sequence
  Description of Artificial Sequence: Synthetic oligonucleotide
gguccgcuucguccauggc

SEQ ID NO: 1412822 - RNA, 19 nt, Artificial Sequence
  Description of Artificial Sequence: Synthetic oligonucleotide
gcucucgacucagcagagc

SEQ ID NO: 1412823 - RNA, 19 nt, Artificial Sequence
  Description of Artificial Sequence: Synthetic oligonucleotide
ccucuaagcaggagaugaa

SEQ ID NO: 1412824 - RNA, 19 nt, Artificial Sequence
  Description of Artificial Sequence: Synthetic oligonucleotide
cgagccccgaggaaggaca

SEQ ID NO: 1412825 - RNA, 19 nt, Artificial Sequence
  Description of Artificial Sequence: Synthetic oligonucleotide
gcuucccucccaggcuagg

SEQ ID NO: 1412826 - RNA, 19 nt, Artificial Sequence
  Description of Artificial Sequence: Synthetic oligonucleotide
caggagccgcucuucuugu

SEQ ID NO: 1412827 - RNA, 19 nt, Artificial Sequence
  Description of Artificial Sequence: Synthetic oligonucleotide
ccagaccccuuccggcccc

SEQ ID NO: 1412828 - RNA, 19 nt, Artificial Sequence
  Description of Artificial Sequence: Synthetic oligonucleotide
gcuugccgacuacuucgca

SEQ ID NO: 1412829 - RNA, 19 nt, Artificial Sequence
  Description of Artificial Sequence: Synthetic oligonucleotide
ggcgaccugcagcucgcuc

SEQ ID NO: 1412830 - RNA, 19 nt, Artificial Sequence
  Description of Artificial Sequence: Synthetic oligonucleotide
gggcacgguggucccgccc

SEQ ID NO: 1412831 - RNA, 19 nt, Artificial Sequence
  Description of Artificial Sequence: Synthetic oligonucleotide
agccccgaggaaggacaga

SEQ ID NO: 1412832 - RNA, 19 nt, Artificial Sequence
  Description of Artificial Sequence: Synthetic oligonucleotide
gccgacuacuucgcaagaa

SEQ ID NO: 1412833 - RNA, 19 nt, Artificial Sequence
  Description of Artificial Sequence: Synthetic oligonucleotide
gccgagacccagagccugc

SEQ ID NO: 1412834 - RNA, 19 nt, Artificial Sequence
  Description of Artificial Sequence: Synthetic oligonucleotide
caccauccaaggucucuau

SEQ ID NO: 1412835 - RNA, 19 nt, Artificial Sequence
  Description of Artificial Sequence: Synthetic oligonucleotide
ccagucucauuaaguuuua

SEQ ID NO: 1412836 - RNA, 19 nt, Artificial Sequence
  Description of Artificial Sequence: Synthetic oligonucleotide
gccacgguuccaaaacccu

SEQ ID NO: 1412837 - RNA, 19 nt, Artificial Sequence
  Description of Artificial Sequence: Synthetic oligonucleotide
cggccgauugcggaccccg

SEQ ID NO: 1412838 - RNA, 19 nt, Artificial Sequence
  Description of Artificial Sequence: Synthetic oligonucleotide
ccgacuacuucgcaagaau

SEQ ID NO: 1412839 - RNA, 19 nt, Artificial Sequence
  Description of Artificial Sequence: Synthetic oligonucleotide
ccauuggucccaggaccac

SEQ ID NO: 1412840 - RNA, 19 nt, Artificial Sequence
  Description of Artificial Sequence: Synthetic oligonucleotide
ccgcgaccauuuucuuggc

SEQ ID NO: 1412841 - RNA, 19 nt, Artificial Sequence
  Description of Artificial Sequence: Synthetic oligonucleotide
gucccugccucgagaggaa

SEQ ID NO: 1412842 - RNA, 19 nt, Artificial Sequence
  Description of Artificial Sequence: Synthetic oligonucleotide
cugcuccuuugauacgauu

SEQ ID NO: 1412843 - RNA, 19 nt, Artificial Sequence
  Description of Artificial Sequence: Synthetic oligonucleotide
gccggccgauugcggaccc

SEQ ID NO: 1412844 - RNA, 19 nt, Artificial Sequence
  Description of Artificial Sequence: Synthetic oligonucleotide
gcguagcaggccagacccc

SEQ ID NO: 1412845 - RNA, 19 nt, Artificial Sequence
  Description of Artificial Sequence: Synthetic oligonucleotide
ccgagccccgaggaaggac

SEQ ID NO: 1412846 - RNA, 19 nt, Artificial Sequence
  Description of Artificial Sequence: Synthetic oligonucleotide
ccgcccugccaucuccauc

SEQ ID NO: 1412847 - RNA, 19 nt, Artificial Sequence
  Description of Artificial Sequence: Synthetic oligonucleotide
ccaggacaccauccaaggu

SEQ ID NO: 1412848 - RNA, 19 nt, Artificial Sequence
  Description of Artificial Sequence: Synthetic oligonucleotide
ccccagucucauuaaguuu

SEQ ID NO: 1412849 - RNA, 19 nt, Artificial Sequence
  Description of Artificial Sequence: Synthetic oligonucleotide
ccaggcuaggacagccagu

SEQ ID NO: 1412850 - RNA, 19 nt, Artificial Sequence
  Description of Artificial Sequence: Synthetic oligonucleotide
cggaagcggaacugaagcu

SEQ ID NO: 1412851 - RNA, 19 nt, Artificial Sequence
  Description of Artificial Sequence: Synthetic oligonucleotide
cgcgaccauuuucuuggca

SEQ ID NO: 1412852 - RNA, 19 nt, Artificial Sequence
  Description of Artificial Sequence: Synthetic oligonucleotide
guagcaggccagaccccuu

SEQ ID NO: 1412853 - RNA, 19 nt, Artificial Sequence
  Description of Artificial Sequence: Synthetic oligonucleotide
cgcuucguccauggccggc

SEQ ID NO: 1412854 - RNA, 19 nt, Artificial Sequence
  Description of Artificial Sequence: Synthetic oligonucleotide
cagaccccuuccggcccca

SEQ ID NO: 1412855 - RNA, 19 nt, Artificial Sequence
  Description of Artificial Sequence: Synthetic oligonucleotide
cguagcaggccagaccccu

SEQ ID NO: 1412856 - RNA, 19 nt, Artificial Sequence
  Description of Artificial Sequence: Synthetic oligonucleotide
cgacaucgccgcaggagcu

SEQ ID NO: 1412857 - RNA, 19 nt, Artificial Sequence
  Description of Artificial Sequence: Synthetic oligonucleotide
ccggccgauugcggacccc

SEQ ID NO: 1412858 - RNA, 19 nt, Artificial Sequence
  Description of Artificial Sequence: Synthetic oligonucleotide
cucgaccgacacggagcau

SEQ ID NO: 1412859 - RNA, 19 nt, Artificial Sequence
  Description of Artificial Sequence: Synthetic oligonucleotide
ccagggugucuuggccugu

SEQ ID NO: 1412860 - RNA, 19 nt, Artificial Sequence
  Description of Artificial Sequence: Synthetic oligonucleotide
cggcgaccugcagcucgcu

SEQ ID NO: 1412861 - RNA, 19 nt, Artificial Sequence
  Description of Artificial Sequence: Synthetic oligonucleotide
guauguaucuucaugaugg

SEQ ID NO: 1412862 - RNA, 19 nt, Artificial Sequence
  Description of Artificial Sequence: Synthetic oligonucleotide
ugaaguauacaccaggcac

SEQ ID NO: 1412863 - RNA, 19 nt, Artificial Sequence
  Description of Artificial Sequence: Synthetic oligonucleotide
aacguauguaucuucauga

SEQ ID NO: 1412864 - RNA, 19 nt, Artificial Sequence
  Description of Artificial Sequence: Synthetic oligonucleotide
gauggaggcagcuacgggg

SEQ ID NO: 1412865 - RNA, 19 nt, Artificial Sequence
  Description of Artificial Sequence: Synthetic oligonucleotide
uauucaggagagcugcucg

SEQ ID NO: 1412866 - RNA, 19 nt, Artificial Sequence
  Description of Artificial Sequence: Synthetic oligonucleotide
ucuacugcuacuagugucc

SEQ ID NO: 1412867 - RNA, 19 nt, Artificial Sequence
  Description of Artificial Sequence: Synthetic oligonucleotide
gacgguaugacacagcgca

SEQ ID NO: 1412868 - RNA, 19 nt, Artificial Sequence
  Description of Artificial Sequence: Synthetic oligonucleotide
uccagucuagccaaggcag

SEQ ID NO: 1412869 - RNA, 19 nt, Artificial Sequence
  Description of Artificial Sequence: Synthetic oligonucleotide
aagccgauggcuucgaaga

SEQ ID NO: 1412870 - RNA, 19 nt, Artificial Sequence
  Description of Artificial Sequence: Synthetic oligonucleotide
auagaagguccccugcagc

SEQ ID NO: 1412871 - RNA, 19 nt, Artificial Sequence
  Description of Artificial Sequence: Synthetic oligonucleotide
gaagcaucccaggagaagg

SEQ ID NO: 1412872 - RNA, 19 nt, Artificial Sequence
  Description of Artificial Sequence: Synthetic oligonucleotide
augaauguuguccagguau

SEQ ID NO: 1412873 - RNA, 19 nt, Artificial Sequence
  Description of Artificial Sequence: Synthetic oligonucleotide
agggcauagguguacuugc

SEQ ID NO: 1412874 - RNA, 19 nt, Artificial Sequence
  Description of Artificial Sequence: Synthetic oligonucleotide
gagagauuuccucuuuggg

SEQ ID NO: 1412875 - RNA, 19 nt, Artificial Sequence
  Description of Artificial Sequence: Synthetic oligonucleotide
acauagaacuccucagaac

SEQ ID NO: 1412876 - RNA, 19 nt, Artificial Sequence
  Description of Artificial Sequence: Synthetic oligonucleotide
ugcacuaagcagcugcugc

SEQ ID NO: 1412877 - RNA, 19 nt, Artificial Sequence
  Description of Artificial Sequence: Synthetic oligonucleotide
guaaggaauggguuugggg

SEQ ID NO: 1412878 - RNA, 19 nt, Artificial Sequence
  Description of Artificial Sequence: Synthetic oligonucleotide
gaacguauguaucuucaug

SEQ ID NO: 1412879 - RNA, 19 nt, Artificial Sequence
  Description of Artificial Sequence: Synthetic oligonucleotide
guauacaccaggcacugcc

SEQ ID NO: 1412880 - RNA, 19 nt, Artificial Sequence
  Description of Artificial Sequence: Synthetic oligonucleotide
gagaagugcgacaggaugg

SEQ ID NO: 1412881 - RNA, 19 nt, Artificial Sequence
  Description of Artificial Sequence: Synthetic oligonucleotide
aacucuacugcuacuagug

SEQ ID NO: 1412882 - RNA, 19 nt, Artificial Sequence
  Description of Artificial Sequence: Synthetic oligonucleotide
gaagacucggcgcugccgg

SEQ ID NO: 1412883 - RNA, 19 nt, Artificial Sequence
  Description of Artificial Sequence: Synthetic oligonucleotide
ucaaggugacaccugugag

SEQ ID NO: 1412884 - RNA, 19 nt, Artificial Sequence
  Description of Artificial Sequence: Synthetic oligonucleotide
ugugaggcugaagaagucg

SEQ ID NO: 1412885 - RNA, 19 nt, Artificial Sequence
  Description of Artificial Sequence: Synthetic oligonucleotide
gugggcaucccguugaucc

SEQ ID NO: 1412886 - RNA, 19 nt, Artificial Sequence
  Description of Artificial Sequence: Synthetic oligonucleotide
ucgcgcauggccuuggucc

SEQ ID NO: 1412887 - RNA, 19 nt, Artificial Sequence
  Description of Artificial Sequence: Synthetic oligonucleotide
aauguuguccagguauuug

SEQ ID NO: 1412888 - RNA, 19 nt, Artificial Sequence
  Description of Artificial Sequence: Synthetic oligonucleotide
caaugcuucgcgcacaaac

SEQ ID NO: 1412889 - RNA, 19 nt, Artificial Sequence
  Description of Artificial Sequence: Synthetic oligonucleotide
ucugggugcaaaugaaugu

SEQ ID NO: 1412890 - RNA, 19 nt, Artificial Sequence
  Description of Artificial Sequence: Synthetic oligonucleotide
aguccgugagcuucuggcc

SEQ ID NO: 1412891 - RNA, 19 nt, Artificial Sequence
  Description of Artificial Sequence: Synthetic oligonucleotide
ugcuucgcgcacaaacugg

SEQ ID NO: 1412892 - RNA, 19 nt, Artificial Sequence
  Description of Artificial Sequence: Synthetic oligonucleotide
cugcuuuuauucaggagag

SEQ ID NO: 1412893 - RNA, 19 nt, Artificial Sequence
  Description of Artificial Sequence: Synthetic oligonucleotide
uuccagucuagccaaggca

SEQ ID NO: 1412894 - RNA, 19 nt, Artificial Sequence
  Description of Artificial Sequence: Synthetic oligonucleotide
gaguccgugagcuucuggc

SEQ ID NO: 1412895 - RNA, 19 nt, Artificial Sequence
  Description of Artificial Sequence: Synthetic oligonucleotide
gaagccgauggcuucgaag

SEQ ID NO: 1412896 - RNA, 19 nt, Artificial Sequence
  Description of Artificial Sequence: Synthetic oligonucleotide
acuagugucccuucuauuu

SEQ ID NO: 1412897 - RNA, 19 nt, Artificial Sequence
  Description of Artificial Sequence: Synthetic oligonucleotide
guuguccagguauuuggcg

SEQ ID NO: 1412898 - RNA, 19 nt, Artificial Sequence
  Description of Artificial Sequence: Synthetic oligonucleotide
aacaccuuauucugcaguu

SEQ ID NO: 1412899 - RNA, 19 nt, Artificial Sequence
  Description of Artificial Sequence: Synthetic oligonucleotide
ucgaagaacucauggguac

SEQ ID NO: 1412900 - RNA, 19 nt, Artificial Sequence
  Description of Artificial Sequence: Synthetic oligonucleotide
agaagugcgacaggauggc

SEQ ID NO: 1412901 - RNA, 19 nt, Artificial Sequence
  Description of Artificial Sequence: Synthetic oligonucleotide
uguggcgacuuuucuuugg

SEQ ID NO: 1412902 - RNA, 19 nt, Artificial Sequence
  Description of Artificial Sequence: Synthetic oligonucleotide
ggccucaacacacaugugg

SEQ ID NO: 1412903 - RNA, 19 nt, Artificial Sequence
  Description of Artificial Sequence: Synthetic oligonucleotide
aaugcuucgcgcacaaacu

SEQ ID NO: 1412904 - RNA, 19 nt, Artificial Sequence
  Description of Artificial Sequence: Synthetic oligonucleotide
ucauggguacccuccaggc

SEQ ID NO: 1412905 - RNA, 19 nt, Artificial Sequence
  Description of Artificial Sequence: Synthetic oligonucleotide
agugcgacaggauggccuc

SEQ ID NO: 1412906 - RNA, 19 nt, Artificial Sequence
  Description of Artificial Sequence: Synthetic oligonucleotide
aguccacacucguucaggg

SEQ ID NO: 1412907 - RNA, 19 nt, Artificial Sequence
  Description of Artificial Sequence: Synthetic oligonucleotide
uaccaguccacacucguuc

SEQ ID NO: 1412908 - RNA, 19 nt, Artificial Sequence
  Description of Artificial Sequence: Synthetic oligonucleotide
uggaguccugagauguggg

SEQ ID NO: 1412909 - RNA, 19 nt, Artificial Sequence
  Description of Artificial Sequence: Synthetic oligonucleotide
aaagggcagccagucauuc

SEQ ID NO: 1412910 - RNA, 19 nt, Artificial Sequence
  Description of Artificial Sequence: Synthetic oligonucleotide
ucgcgcacaaacuggaaga

SEQ ID NO: 1412911 - RNA, 19 nt, Artificial Sequence
  Description of Artificial Sequence: Synthetic oligonucleotide
ugauggaggcagcuacggg

SEQ ID NO: 1412912 - RNA, 19 nt, Artificial Sequence
  Description of Artificial Sequence: Synthetic oligonucleotide
agaggguaccaguccacac

SEQ ID NO: 1412913 - RNA, 19 nt, Artificial Sequence
  Description of Artificial Sequence: Synthetic oligonucleotide
ugggugcaaaugaauguug

SEQ ID NO: 1412914 - RNA, 19 nt, Artificial Sequence
  Description of Artificial Sequence: Synthetic oligonucleotide
caacacugaagcaucccag

SEQ ID NO: 1412915 - RNA, 19 nt, Artificial Sequence
  Description of Artificial Sequence: Synthetic oligonucleotide
uuccugaucugguacuggc

SEQ ID NO: 1412916 - RNA, 19 nt, Artificial Sequence
  Description of Artificial Sequence: Synthetic oligonucleotide
uauacaccaggcacugcca

SEQ ID NO: 1412917 - RNA, 19 nt, Artificial Sequence
  Description of Artificial Sequence: Synthetic oligonucleotide
agauguggggccccgagcu

SEQ ID NO: 1412918 - RNA, 19 nt, Artificial Sequence
  Description of Artificial Sequence: Synthetic oligonucleotide
ggagagauuuccucuuugg

SEQ ID NO: 1412919 - RNA, 19 nt, Artificial Sequence
  Description of Artificial Sequence: Synthetic oligonucleotide
uauuuggcgauggugucca

SEQ ID NO: 1412920 - RNA, 19 nt, Artificial Sequence
  Description of Artificial Sequence: Synthetic oligonucleotide
agggucggaagacucggcg

SEQ ID NO: 1412921 - RNA, 19 nt, Artificial Sequence
  Description of Artificial Sequence: Synthetic oligonucleotide
ucccggucucuguugaacg

SEQ ID NO: 1412922 - RNA, 19 nt, Artificial Sequence
  Description of Artificial Sequence: Synthetic oligonucleotide
uauguaucuucaugaugga

SEQ ID NO: 1412923 - RNA, 19 nt, Artificial Sequence
  Description of Artificial Sequence: Synthetic oligonucleotide
ugcucguguggccucaccc

SEQ ID NO: 1412924 - RNA, 19 nt, Artificial Sequence
  Description of Artificial Sequence: Synthetic oligonucleotide
cacacauguggcuggcucg

SEQ ID NO: 1412925 - RNA, 19 nt, Artificial Sequence
  Description of Artificial Sequence: Synthetic oligonucleotide
ugagggucggaagacucgg

SEQ ID NO: 1412926 - RNA, 19 nt, Artificial Sequence
  Description of Artificial Sequence: Synthetic oligonucleotide
aucugguacuggcaguguc

SEQ ID NO: 1412927 - RNA, 19 nt, Artificial Sequence
  Description of Artificial Sequence: Synthetic oligonucleotide
gguucaggugccaaguugg

SEQ ID NO: 1412928 - RNA, 19 nt, Artificial Sequence
  Description of Artificial Sequence: Synthetic oligonucleotide
guccuuagugagcucagcc

SEQ ID NO: 1412929 - RNA, 19 nt, Artificial Sequence
  Description of Artificial Sequence: Synthetic oligonucleotide
cucuacugcuacuaguguc

SEQ ID NO: 1412930 - RNA, 19 nt, Artificial Sequence
  Description of Artificial Sequence: Synthetic oligonucleotide
gaagaagucggcggggagc

SEQ ID NO: 1412931 - RNA, 19 nt, Artificial Sequence
  Description of Artificial Sequence: Synthetic oligonucleotide
gaugugggcaucccguuga

SEQ ID NO: 1412932 - RNA, 19 nt, Artificial Sequence
  Description of Artificial Sequence: Synthetic oligonucleotide
aaugaauguuguccaggua

SEQ ID NO: 1412933 - RNA, 19 nt, Artificial Sequence
  Description of Artificial Sequence: Synthetic oligonucleotide
ucgcguuucaccuccucug

SEQ ID NO: 1412934 - RNA, 19 nt, Artificial Sequence
  Description of Artificial Sequence: Synthetic oligonucleotide
uacaccaggcacugccagg

SEQ ID NO: 1412935 - RNA, 19 nt, Artificial Sequence
  Description of Artificial Sequence: Synthetic oligonucleotide
gaagguccccugcagcaag

SEQ ID NO: 1412936 - RNA, 19 nt, Artificial Sequence
  Description of Artificial Sequence: Synthetic oligonucleotide
ucuguggagaagugcgaca

SEQ ID NO: 1412937 - RNA, 19 nt, Artificial Sequence
  Description of Artificial Sequence: Synthetic oligonucleotide
uuucucaccugguuccgga

SEQ ID NO: 1412938 - RNA, 19 nt, Artificial Sequence
  Description of Artificial Sequence: Synthetic oligonucleotide
uugcucgcguuucaccucc

SEQ ID NO: 1412939 - RNA, 19 nt, Artificial Sequence
  Description of Artificial Sequence: Synthetic oligonucleotide
aacucauggguacccucca

SEQ ID NO: 1412940 - RNA, 19 nt, Artificial Sequence
  Description of Artificial Sequence: Synthetic oligonucleotide
auacaccaggcacugccag

SEQ ID NO: 1412941 - RNA, 19 nt, Artificial Sequence
  Description of Artificial Sequence: Synthetic oligonucleotide
uccgugagcuucuggcccg

SEQ ID NO: 1412942 - RNA, 19 nt, Artificial Sequence
  Description of Artificial Sequence: Synthetic oligonucleotide
uugaucccuccucaaggug

SEQ ID NO: 1412943 - RNA, 19 nt, Artificial Sequence
  Description of Artificial Sequence: Synthetic oligonucleotide
gacgucaggguaaggaaug

SEQ ID NO: 1412944 - RNA, 19 nt, Artificial Sequence
  Description of Artificial Sequence: Synthetic oligonucleotide
guggcgacuuuucuuuggg

SEQ ID NO: 1412945 - RNA, 19 nt, Artificial Sequence
  Description of Artificial Sequence: Synthetic oligonucleotide
cuugaagccgauggcuucg

SEQ ID NO: 1412946 - RNA, 19 nt, Artificial Sequence
  Description of Artificial Sequence: Synthetic oligonucleotide
guugaacguauguaucuuc

SEQ ID NO: 1412947 - RNA, 19 nt, Artificial Sequence
  Description of Artificial Sequence: Synthetic oligonucleotide
ucaggccucaacacacaug

SEQ ID NO: 1412948 - RNA, 19 nt, Artificial Sequence
  Description of Artificial Sequence: Synthetic oligonucleotide
ucucaccugguuccggaug

SEQ ID NO: 1412949 - RNA, 19 nt, Artificial Sequence
  Description of Artificial Sequence: Synthetic oligonucleotide
augcuucgcgcacaaacug

SEQ ID NO: 1412950 - RNA, 19 nt, Artificial Sequence
  Description of Artificial Sequence: Synthetic oligonucleotide
aucccguugaucccuccuc

SEQ ID NO: 1412951 - RNA, 19 nt, Artificial Sequence
  Description of Artificial Sequence: Synthetic oligonucleotide
uucuugaagccgauggcuu

SEQ ID NO: 1412952 - RNA, 19 nt, Artificial Sequence
  Description of Artificial Sequence: Synthetic oligonucleotide
cuggaacaccuuauucugc

SEQ ID NO: 1412953 - RNA, 19 nt, Artificial Sequence
  Description of Artificial Sequence: Synthetic oligonucleotide
uguucccaacucuacugcu

SEQ ID NO: 1412954 - RNA, 19 nt, Artificial Sequence
  Description of Artificial Sequence: Synthetic oligonucleotide
uggccuugguccuuaguga

SEQ ID NO: 1412955 - RNA, 19 nt, Artificial Sequence
  Description of Artificial Sequence: Synthetic oligonucleotide
cacucuugaacuugauguc

SEQ ID NO: 1412956 - RNA, 19 nt, Artificial Sequence
  Description of Artificial Sequence: Synthetic oligonucleotide
acccagcacauagaacucc

SEQ ID NO: 1412957 - RNA, 19 nt, Artificial Sequence
  Description of Artificial Sequence: Synthetic oligonucleotide
uccggauggaguccugaga

SEQ ID NO: 1412958 - RNA, 19 nt, Artificial Sequence
  Description of Artificial Sequence: Synthetic oligonucleotide
ugaacguauguaucuucau

SEQ ID NO: 1412959 - RNA, 19 nt, Artificial Sequence
  Description of Artificial Sequence: Synthetic oligonucleotide
ugccgguccagcauggcuc

SEQ ID NO: 1412960 - RNA, 19 nt, Artificial Sequence
  Description of Artificial Sequence: Synthetic oligonucleotide
gggucuguggagaagugcg

SEQ ID NO: 1412961 - RNA, 19 nt, Artificial Sequence
  Description of Artificial Sequence: Synthetic oligonucleotide
ugcggcugugcucgugugg

SEQ ID NO: 1412962 - RNA, 19 nt, Artificial Sequence
  Description of Artificial Sequence: Synthetic oligonucleotide
aggguaaggaauggguuug

SEQ ID NO: 1412963 - RNA, 19 nt, Artificial Sequence
  Description of Artificial Sequence: Synthetic oligonucleotide
cuucgaagaacucaugggu

SEQ ID NO: 1412964 - RNA, 19 nt, Artificial Sequence
  Description of Artificial Sequence: Synthetic oligonucleotide
aaguuggucccgggagccc

SEQ ID NO: 1412965 - RNA, 19 nt, Artificial Sequence
  Description of Artificial Sequence: Synthetic oligonucleotide
ugugagcgggcagaugaag

SEQ ID NO: 1412966 - RNA, 19 nt, Artificial Sequence
  Description of Artificial Sequence: Synthetic oligonucleotide
uuccggauggaguccugag

SEQ ID NO: 1412967 - RNA, 19 nt, Artificial Sequence
  Description of Artificial Sequence: Synthetic oligonucleotide
augacacagcgcaugcugg

SEQ ID NO: 1412968 - RNA, 19 nt, Artificial Sequence
  Description of Artificial Sequence: Synthetic oligonucleotide
ugagcgggcagaugaagua

SEQ ID NO: 1412969 - RNA, 19 nt, Artificial Sequence
  Description of Artificial Sequence: Synthetic oligonucleotide
caggcgcacacgcaguagg

SEQ ID NO: 1412970 - RNA, 19 nt, Artificial Sequence
  Description of Artificial Sequence: Synthetic oligonucleotide
ucggggcugcuucuguucc

SEQ ID NO: 1412971 - RNA, 19 nt, Artificial Sequence
  Description of Artificial Sequence: Synthetic oligonucleotide
gagccugcuuuuauucagg

SEQ ID NO: 1412972 - RNA, 19 nt, Artificial Sequence
  Description of Artificial Sequence: Synthetic oligonucleotide
auucaggagagcugcucga

SEQ ID NO: 1412973 - RNA, 19 nt, Artificial Sequence
  Description of Artificial Sequence: Synthetic oligonucleotide
ucccguugaucccuccuca

SEQ ID NO: 1412974 - RNA, 19 nt, Artificial Sequence
  Description of Artificial Sequence: Synthetic oligonucleotide
ucugugccucaucgguggg

SEQ ID NO: 1412975 - RNA, 19 nt, Artificial Sequence
  Description of Artificial Sequence: Synthetic oligonucleotide
acucuacugcuacuagugu

SEQ ID NO: 1412976 - RNA, 19 nt, Artificial Sequence
  Description of Artificial Sequence: Synthetic oligonucleotide
acguauguaucuucaugau

SEQ ID NO: 1412977 - RNA, 19 nt, Artificial Sequence
  Description of Artificial Sequence: Synthetic oligonucleotide
auguccuccaacacugaag

SEQ ID NO: 1412978 - RNA, 19 nt, Artificial Sequence
  Description of Artificial Sequence: Synthetic oligonucleotide
aguauacaccaggcacugc

SEQ ID NO: 1412979 - RNA, 19 nt, Artificial Sequence
  Description of Artificial Sequence: Synthetic oligonucleotide
aagguccccugcagcaagc

SEQ ID NO: 1412980 - RNA, 19 nt, Artificial Sequence
  Description of Artificial Sequence: Synthetic oligonucleotide
gaacuccucagaaccuucc

SEQ ID NO: 1412981 - RNA, 19 nt, Artificial Sequence
  Description of Artificial Sequence: Synthetic oligonucleotide
caucugugccucaucggug

SEQ ID NO: 1412982 - RNA, 19 nt, Artificial Sequence
  Description of Artificial Sequence: Synthetic oligonucleotide
gaaguuccuuucucaccug

SEQ ID NO: 1412983 - RNA, 19 nt, Artificial Sequence
  Description of Artificial Sequence: Synthetic oligonucleotide
ugcaaugcuucgcgcacaa

SEQ ID NO: 1412984 - RNA, 19 nt, Artificial Sequence
  Description of Artificial Sequence: Synthetic oligonucleotide
uguugaacguauguaucuu

SEQ ID NO: 1412985 - RNA, 19 nt, Artificial Sequence
  Description of Artificial Sequence: Synthetic oligonucleotide
agccagucauucugcaaug

SEQ ID NO: 1412986 - RNA, 19 nt, Artificial Sequence
  Description of Artificial Sequence: Synthetic oligonucleotide
ucggcggggagcucaaagu

SEQ ID NO: 1412987 - RNA, 19 nt, Artificial Sequence
  Description of Artificial Sequence: Synthetic oligonucleotide
agaacuccucagaaccuuc

SEQ ID NO: 1412988 - RNA, 19 nt, Artificial Sequence
  Description of Artificial Sequence: Synthetic oligonucleotide
ugccaaguuggucccggga

SEQ ID NO: 1412989 - RNA, 19 nt, Artificial Sequence
  Description of Artificial Sequence: Synthetic oligonucleotide
gaacuugaugucagccuug

SEQ ID NO: 1412990 - RNA, 19 nt, Artificial Sequence
  Description of Artificial Sequence: Synthetic oligonucleotide
ucaucgguggggcccuggc

SEQ ID NO: 1412991 - RNA, 19 nt, Artificial Sequence
  Description of Artificial Sequence: Synthetic oligonucleotide
uggcagugucaucuucuug

SEQ ID NO: 1412992 - RNA, 19 nt, Artificial Sequence
  Description of Artificial Sequence: Synthetic oligonucleotide
acugcuacuagugucccuu

SEQ ID NO: 1412993 - RNA, 19 nt, Artificial Sequence
  Description of Artificial Sequence: Synthetic oligonucleotide
uuugcucgcguuucaccuc

SEQ ID NO: 1412994 - RNA, 19 nt, Artificial Sequence
  Description of Artificial Sequence: Synthetic oligonucleotide
uuuucgcgcauggccuugg

SEQ ID NO: 1412995 - RNA, 19 nt, Artificial Sequence
  Description of Artificial Sequence: Synthetic oligonucleotide
caggccucaacacacaugu

SEQ ID NO: 1412996 - RNA, 19 nt, Artificial Sequence
  Description of Artificial Sequence: Synthetic oligonucleotide
ggcucugcggcugugcucg

SEQ ID NO: 1412997 - RNA, 19 nt, Artificial Sequence
  Description of Artificial Sequence: Synthetic oligonucleotide
acucauggguacccuccag

SEQ ID NO: 1412998 - RNA, 19 nt, Artificial Sequence
  Description of Artificial Sequence: Synthetic oligonucleotide
auguggggccccgagcucg

SEQ ID NO: 1412999 - RNA, 19 nt, Artificial Sequence
  Description of Artificial Sequence: Synthetic oligonucleotide
cacggccucaguucugagc

SEQ ID NO: 1413000 - RNA, 19 nt, Artificial Sequence
  Description of Artificial Sequence: Synthetic oligonucleotide
auagaacuccucagaaccu

SEQ ID NO: 1413001 - RNA, 19 nt, Artificial Sequence
  Description of Artificial Sequence: Synthetic oligonucleotide
guggagaagugcgacagga

SEQ ID NO: 1413002 - RNA, 19 nt, Artificial Sequence
  Description of Artificial Sequence: Synthetic oligonucleotide
cucguguggccucacccag

SEQ ID NO: 1413003 - RNA, 19 nt, Artificial Sequence
  Description of Artificial Sequence: Synthetic oligonucleotide
ugcggaguccgugagcuuc

SEQ ID NO: 1413004 - RNA, 19 nt, Artificial Sequence
  Description of Artificial Sequence: Synthetic oligonucleotide
uggagaagugcgacaggau

SEQ ID NO: 1413005 - RNA, 19 nt, Artificial Sequence
  Description of Artificial Sequence: Synthetic oligonucleotide
ugcuuuuauucaggagagc

SEQ ID NO: 1413006 - RNA, 19 nt, Artificial Sequence
  Description of Artificial Sequence: Synthetic oligonucleotide
ucccuccucaaggugacac

SEQ ID NO: 1413007 - RNA, 19 nt, Artificial Sequence
  Description of Artificial Sequence: Synthetic oligonucleotide
caggcaguugaugcgcucc

SEQ ID NO: 1413008 - RNA, 19 nt, Artificial Sequence
  Description of Artificial Sequence: Synthetic oligonucleotide
ccuguucccaacucuacug

SEQ ID NO: 1413009 - RNA, 19 nt, Artificial Sequence
  Description of Artificial Sequence: Synthetic oligonucleotide
gucggcggggagcucaaag

SEQ ID NO: 1413010 - RNA, 19 nt, Artificial Sequence
  Description of Artificial Sequence: Synthetic oligonucleotide
caggugccaaguugguccc

SEQ ID NO: 1413011 - RNA, 19 nt, Artificial Sequence
  Description of Artificial Sequence: Synthetic oligonucleotide
gguacuggcagugucaucu

SEQ ID NO: 1413012 - RNA, 19 nt, Artificial Sequence
  Description of Artificial Sequence: Synthetic oligonucleotide
cguugaucccuccucaagg

SEQ ID NO: 1413013 - RNA, 19 nt, Artificial Sequence
  Description of Artificial Sequence: Synthetic oligonucleotide
acauguggcuggcucggcu

SEQ ID NO: 1413014 - RNA, 19 nt, Artificial Sequence
  Description of Artificial Sequence: Synthetic oligonucleotide
cucuguugaacguauguau

SEQ ID NO: 1413015 - RNA, 19 nt, Artificial Sequence
  Description of Artificial Sequence: Synthetic oligonucleotide
cuuugcucgcguuucaccu

SEQ ID NO: 1413016 - RNA, 19 nt, Artificial Sequence
  Description of Artificial Sequence: Synthetic oligonucleotide
ggccuugguccuuagugag

SEQ ID NO: 1413017 - RNA, 19 nt, Artificial Sequence
  Description of Artificial Sequence: Synthetic oligonucleotide
agcaagcagccaucgggca

SEQ ID NO: 1413018 - RNA, 19 nt, Artificial Sequence
  Description of Artificial Sequence: Synthetic oligonucleotide
uagaacuccucagaaccuu

SEQ ID NO: 1413019 - RNA, 19 nt, Artificial Sequence
  Description of Artificial Sequence: Synthetic oligonucleotide
gauggaguccugagaugug

SEQ ID NO: 1413020 - RNA, 19 nt, Artificial Sequence
  Description of Artificial Sequence: Synthetic oligonucleotide
acgucaggguaaggaaugg

SEQ ID NO: 1413021 - RNA, 19 nt, Artificial Sequence
  Description of Artificial Sequence: Synthetic oligonucleotide
gaagucggcggggagcuca

SEQ ID NO: 1413022 - RNA, 19 nt, Artificial Sequence
  Description of Artificial Sequence: Synthetic oligonucleotide
guacuugcgcagcucccgc

SEQ ID NO: 1413023 - RNA, 19 nt, Artificial Sequence
  Description of Artificial Sequence: Synthetic oligonucleotide
ggguucaggugccaaguug

SEQ ID NO: 1413024 - RNA, 19 nt, Artificial Sequence
  Description of Artificial Sequence: Synthetic oligonucleotide
uucaugauggaggcagcua

SEQ ID NO: 1413025 - RNA, 19 nt, Artificial Sequence
  Description of Artificial Sequence: Synthetic oligonucleotide
ggcauagaagguccccugc

SEQ ID NO: 1413026 - RNA, 19 nt, Artificial Sequence
  Description of Artificial Sequence: Synthetic oligonucleotide
gaugcgcuccuggaacacc

SEQ ID NO: 1413027 - RNA, 19 nt, Artificial Sequence
  Description of Artificial Sequence: Synthetic oligonucleotide
aagcaucccaggagaaggu

SEQ ID NO: 1413028 - RNA, 19 nt, Artificial Sequence
  Description of Artificial Sequence: Synthetic oligonucleotide
uccacggccucaguucuga

SEQ ID NO: 1413029 - RNA, 19 nt, Artificial Sequence
  Description of Artificial Sequence: Synthetic oligonucleotide
uccucagaaccuuccugau

SEQ ID NO: 1413030 - RNA, 19 nt, Artificial Sequence
  Description of Artificial Sequence: Synthetic oligonucleotide
cuacugcuacuaguguccc

SEQ ID NO: 1413031 - RNA, 19 nt, Artificial Sequence
  Description of Artificial Sequence: Synthetic oligonucleotide
guugaucccuccucaaggu

SEQ ID NO: 1413032 - RNA, 19 nt, Artificial Sequence
  Description of Artificial Sequence: Synthetic oligonucleotide
ucguguggccucacccagc

SEQ ID NO: 1413033 - RNA, 19 nt, Artificial Sequence
  Description of Artificial Sequence: Synthetic oligonucleotide
ucugagccuuugcucgcgu

SEQ ID NO: 1413034 - RNA, 19 nt, Artificial Sequence
  Description of Artificial Sequence: Synthetic oligonucleotide
gaucccuccucaaggugac

SEQ ID NO: 1413035 - RNA, 19 nt, Artificial Sequence
  Description of Artificial Sequence: Synthetic oligonucleotide
agaaggucagcagggcaga

SEQ ID NO: 1413036 - RNA, 19 nt, Artificial Sequence
  Description of Artificial Sequence: Synthetic oligonucleotide
ucccuucuauuuggugggg

SEQ ID NO: 1413037 - RNA, 19 nt, Artificial Sequence
  Description of Artificial Sequence: Synthetic oligonucleotide
aagacucggcgcugccggu

SEQ ID NO: 1413038 - RNA, 19 nt, Artificial Sequence
  Description of Artificial Sequence: Synthetic oligonucleotide
gggagagauuuccucuuug

SEQ ID NO: 1413039 - RNA, 19 nt, Artificial Sequence
  Description of Artificial Sequence: Synthetic oligonucleotide
cuauuugguggggacguca

SEQ ID NO: 1413040 - RNA, 19 nt, Artificial Sequence
  Description of Artificial Sequence: Synthetic oligonucleotide
cuggcggggcugcuggagg

SEQ ID NO: 1413041 - RNA, 19 nt, Artificial Sequence
  Description of Artificial Sequence: Synthetic oligonucleotide
gaagugcgacaggauggcc

SEQ ID NO: 1413042 - RNA, 19 nt, Artificial Sequence
  Description of Artificial Sequence: Synthetic oligonucleotide
uacuugcgcagcucccgcu

SEQ ID NO: 1413043 - RNA, 19 nt, Artificial Sequence
  Description of Artificial Sequence: Synthetic oligonucleotide
cacccagcacauagaacuc

SEQ ID NO: 1413044 - RNA, 19 nt, Artificial Sequence
  Description of Artificial Sequence: Synthetic oligonucleotide
guggggagagauuuccucu

SEQ ID NO: 1413045 - RNA, 19 nt, Artificial Sequence
  Description of Artificial Sequence: Synthetic oligonucleotide
ggagaaggucagcagggca

SEQ ID NO: 1413046 - RNA, 19 nt, Artificial Sequence
  Description of Artificial Sequence: Synthetic oligonucleotide
cucggggcugcuucuguuc

SEQ ID NO: 1413047 - RNA, 19 nt, Artificial Sequence
  Description of Artificial Sequence: Synthetic oligonucleotide
cacgcaguagggcauaggu

SEQ ID NO: 1413048 - RNA, 19 nt, Artificial Sequence
  Description of Artificial Sequence: Synthetic oligonucleotide
ccuccaacacugaagcauc

SEQ ID NO: 1413049 - RNA, 19 nt, Artificial Sequence
  Description of Artificial Sequence: Synthetic oligonucleotide
acgcaguagggcauaggug

SEQ ID NO: 1413050 - RNA, 19 nt, Artificial Sequence
  Description of Artificial Sequence: Synthetic oligonucleotide
ccuuugcucgcguuucacc

SEQ ID NO: 1413051 - RNA, 19 nt, Artificial Sequence
  Description of Artificial Sequence: Synthetic oligonucleotide
gggucggaagacucggcgc

SEQ ID NO: 1413052 - RNA, 19 nt, Artificial Sequence
  Description of Artificial Sequence: Synthetic oligonucleotide
ggugccaaguuggucccgg

SEQ ID NO: 1413053 - RNA, 19 nt, Artificial Sequence
  Description of Artificial Sequence: Synthetic oligonucleotide
uucucaccugguuccggau

SEQ ID NO: 1413054 - RNA, 19 nt, Artificial Sequence
  Description of Artificial Sequence: Synthetic oligonucleotide
cuguggcgacuuuucuuug

SEQ ID NO: 1413055 - RNA, 19 nt, Artificial Sequence
  Description of Artificial Sequence: Synthetic oligonucleotide
cauggguacccuccaggca

SEQ ID NO: 1413056 - RNA, 19 nt, Artificial Sequence
  Description of Artificial Sequence: Synthetic oligonucleotide
ugcgacaggauggccuccu

SEQ ID NO: 1413057 - RNA, 19 nt, Artificial Sequence
  Description of Artificial Sequence: Synthetic oligonucleotide
gugccaaguuggucccggg

SEQ ID NO: 1413058 - RNA, 19 nt, Artificial Sequence
  Description of Artificial Sequence: Synthetic oligonucleotide
ggaagacucggcgcugccg

SEQ ID NO: 1413059 - RNA, 19 nt, Artificial Sequence
  Description of Artificial Sequence: Synthetic oligonucleotide
ucuauuugguggggacguc

SEQ ID NO: 1413060 - RNA, 19 nt, Artificial Sequence
  Description of Artificial Sequence: Synthetic oligonucleotide
aggcgcacacgcaguaggg

SEQ ID NO: 1413061 - RNA, 19 nt, Artificial Sequence
  Description of Artificial Sequence: Synthetic oligonucleotide
cugugccucaucggugggg

SEQ ID NO: 1413062 - RNA, 19 nt, Artificial Sequence
  Description of Artificial Sequence: Synthetic oligonucleotide
cugguuccggauggagucc

SEQ ID NO: 1413063 - RNA, 19 nt, Artificial Sequence
  Description of Artificial Sequence: Synthetic oligonucleotide
agcgcaugcugggccgagc

SEQ ID NO: 1413064 - RNA, 19 nt, Artificial Sequence
  Description of Artificial Sequence: Synthetic oligonucleotide
agacucggcgcugccgguc

SEQ ID NO: 1413065 - RNA, 19 nt, Artificial Sequence
  Description of Artificial Sequence: Synthetic oligonucleotide
cuuauucugcaguuugauu

SEQ ID NO: 1413066 - RNA, 19 nt, Artificial Sequence
  Description of Artificial Sequence: Synthetic oligonucleotide
cucccgggcauagaagguc

SEQ ID NO: 1413067 - RNA, 19 nt, Artificial Sequence
  Description of Artificial Sequence: Synthetic oligonucleotide
cuguuccagucuagccaag

SEQ ID NO: 1413068 - RNA, 19 nt, Artificial Sequence
  Description of Artificial Sequence: Synthetic oligonucleotide
ggaguccgugagcuucugg

SEQ ID NO: 1413069 - RNA, 19 nt, Artificial Sequence
  Description of Artificial Sequence: Synthetic oligonucleotide
gggcauagguguacuugcg

SEQ ID NO: 1413070 - RNA, 19 nt, Artificial Sequence
  Description of Artificial Sequence: Synthetic oligonucleotide
gccgagccugcuuuuauuc

SEQ ID NO: 1413071 - RNA, 19 nt, Artificial Sequence
  Description of Artificial Sequence: Synthetic oligonucleotide
uggucccgggagccccugg

SEQ ID NO: 1413072 - RNA, 19 nt, Artificial Sequence
  Description of Artificial Sequence: Synthetic oligonucleotide
cuuuucgcgcauggccuug

SEQ ID NO: 1413073 - RNA, 19 nt, Artificial Sequence
  Description of Artificial Sequence: Synthetic oligonucleotide
guccugcggaguccgugag

SEQ ID NO: 1413074 - RNA, 19 nt, Artificial Sequence
  Description of Artificial Sequence: Synthetic oligonucleotide
augcgcuccuggaacaccu

SEQ ID NO: 1413075 - RNA, 19 nt, Artificial Sequence
  Description of Artificial Sequence: Synthetic oligonucleotide
ggguaaggaauggguuugg

SEQ ID NO: 1413076 - RNA, 19 nt, Artificial Sequence
  Description of Artificial Sequence: Synthetic oligonucleotide
agccuuugcucgcguuuca

SEQ ID NO: 1413077 - RNA, 19 nt, Artificial Sequence
  Description of Artificial Sequence: Synthetic oligonucleotide
cugaagcaucccaggagaa

SEQ ID NO: 1413078 - RNA, 19 nt, Artificial Sequence
  Description of Artificial Sequence: Synthetic oligonucleotide
cagucauucugcaaugcuu

SEQ ID NO: 1413079 - RNA, 19 nt, Artificial Sequence
  Description of Artificial Sequence: Synthetic oligonucleotide
cuacuagugucccuucuau

SEQ ID NO: 1413080 - RNA, 19 nt, Artificial Sequence
  Description of Artificial Sequence: Synthetic oligonucleotide
gucccggucucuguugaac

SEQ ID NO: 1413081 - RNA, 19 nt, Artificial Sequence
  Description of Artificial Sequence: Synthetic oligonucleotide
uccugagauguggggcccc

SEQ ID NO: 1413082 - RNA, 19 nt, Artificial Sequence
  Description of Artificial Sequence: Synthetic oligonucleotide
ggucccgggagccccuggg

SEQ ID NO: 1413083 - RNA, 19 nt, Artificial Sequence
  Description of Artificial Sequence: Synthetic oligonucleotide
cugcuacuagugucccuuc

SEQ ID NO: 1413084 - RNA, 19 nt, Artificial Sequence
  Description of Artificial Sequence: Synthetic oligonucleotide
guggggacgucaggguaag

SEQ ID NO: 1413085 - RNA, 19 nt, Artificial Sequence
  Description of Artificial Sequence: Synthetic oligonucleotide
gagggucggaagacucggc

SEQ ID NO: 1413086 - RNA, 19 nt, Artificial Sequence
  Description of Artificial Sequence: Synthetic oligonucleotide
cugcacuaagcagcugcug

SEQ ID NO: 1413087 - RNA, 19 nt, Artificial Sequence
  Description of Artificial Sequence: Synthetic oligonucleotide
ucgcacuggcucugcacua

SEQ ID NO: 1413088 - RNA, 19 nt, Artificial Sequence
  Description of Artificial Sequence: Synthetic oligonucleotide
ucuguccugcggaguccgu

SEQ ID NO: 1413089 - RNA, 19 nt, Artificial Sequence
  Description of Artificial Sequence: Synthetic oligonucleotide
cuguccugcggaguccgug

SEQ ID NO: 1413090 - RNA, 19 nt, Artificial Sequence
  Description of Artificial Sequence: Synthetic oligonucleotide
acaccuuauucugcaguuu

SEQ ID NO: 1413091 - RNA, 19 nt, Artificial Sequence
  Description of Artificial Sequence: Synthetic oligonucleotide
caucgggcaggcgcacacg

SEQ ID NO: 1413092 - RNA, 19 nt, Artificial Sequence
  Description of Artificial Sequence: Synthetic oligonucleotide
gguaccaguccacacucgu

SEQ ID NO: 1413093 - RNA, 19 nt, Artificial Sequence
  Description of Artificial Sequence: Synthetic oligonucleotide
ugguacuggcagugucauc

SEQ ID NO: 1413094 - RNA, 19 nt, Artificial Sequence
  Description of Artificial Sequence: Synthetic oligonucleotide
uguccacucccagcuucac

SEQ ID NO: 1413095 - RNA, 19 nt, Artificial Sequence
  Description of Artificial Sequence: Synthetic oligonucleotide
guucccaacucuacugcua

SEQ ID NO: 1413096 - RNA, 19 nt, Artificial Sequence
  Description of Artificial Sequence: Synthetic oligonucleotide
gcggggagcucaaagugug

SEQ ID NO: 1413097 - RNA, 19 nt, Artificial Sequence
  Description of Artificial Sequence: Synthetic oligonucleotide
gcgcacacgcaguagggca

SEQ ID NO: 1413098 - RNA, 19 nt, Artificial Sequence
  Description of Artificial Sequence: Synthetic oligonucleotide
ccguugaucccuccucaag

SEQ ID NO: 1413099 - RNA, 19 nt, Artificial Sequence
  Description of Artificial Sequence: Synthetic oligonucleotide
gcucguguggccucaccca

SEQ ID NO: 1413100 - RNA, 19 nt, Artificial Sequence
  Description of Artificial Sequence: Synthetic oligonucleotide
ucaccugguuccggaugga

SEQ ID NO: 1413101 - RNA, 19 nt, Artificial Sequence
  Description of Artificial Sequence: Synthetic oligonucleotide
gcuguggcgacuuuucuuu

SEQ ID NO: 1413102 - RNA, 19 nt, Artificial Sequence
  Description of Artificial Sequence: Synthetic oligonucleotide
cagccaucgggcaggcgca

SEQ ID NO: 1413103 - RNA, 19 nt, Artificial Sequence
  Description of Artificial Sequence: Synthetic oligonucleotide
ggucggaagacucggcgcu

SEQ ID NO: 1413104 - RNA, 19 nt, Artificial Sequence
  Description of Artificial Sequence: Synthetic oligonucleotide
gcgcaugcugggccgagcc

SEQ ID NO: 1413105 - RNA, 19 nt, Artificial Sequence
  Description of Artificial Sequence: Synthetic oligonucleotide
cacacgcaguagggcauag

SEQ ID NO: 1413106 - RNA, 19 nt, Artificial Sequence
  Description of Artificial Sequence: Synthetic oligonucleotide
ugccagguggggagagauu

SEQ ID NO: 1413107 - RNA, 19 nt, Artificial Sequence
  Description of Artificial Sequence: Synthetic oligonucleotide
gaauguuguccagguauuu

SEQ ID NO: 1413108 - RNA, 19 nt, Artificial Sequence
  Description of Artificial Sequence: Synthetic oligonucleotide
cagaggguaccaguccaca

SEQ ID NO: 1413109 - RNA, 19 nt, Artificial Sequence
  Description of Artificial Sequence: Synthetic oligonucleotide
gcaucccaggagaagguca

SEQ ID NO: 1413110 - RNA, 19 nt, Artificial Sequence
  Description of Artificial Sequence: Synthetic oligonucleotide
gucggaagacucggcgcug

SEQ ID NO: 1413111 - RNA, 19 nt, Artificial Sequence
  Description of Artificial Sequence: Synthetic oligonucleotide
aggugccaaguuggucccg

SEQ ID NO: 1413112 - RNA, 19 nt, Artificial Sequence
  Description of Artificial Sequence: Synthetic oligonucleotide
cucgcguuucaccuccucu

SEQ ID NO: 1413113 - RNA, 19 nt, Artificial Sequence
  Description of Artificial Sequence: Synthetic oligonucleotide
uggggacgucaggguaagg

SEQ ID NO: 1413114 - RNA, 19 nt, Artificial Sequence
  Description of Artificial Sequence: Synthetic oligonucleotide
cccuccucaaggugacacc

SEQ ID NO: 1413115 - RNA, 19 nt, Artificial Sequence
  Description of Artificial Sequence: Synthetic oligonucleotide
agcgggcagaugaaguaua

SEQ ID NO: 1413116 - RNA, 19 nt, Artificial Sequence
  Description of Artificial Sequence: Synthetic oligonucleotide
cuccacggccucaguucug

SEQ ID NO: 1413117 - RNA, 19 nt, Artificial Sequence
  Description of Artificial Sequence: Synthetic oligonucleotide
ggacgguaugacacagcgc

SEQ ID NO: 1413118 - RNA, 19 nt, Artificial Sequence
  Description of Artificial Sequence: Synthetic oligonucleotide
cgaagaacucauggguacc

SEQ ID NO: 1413119 - RNA, 19 nt, Artificial Sequence
  Description of Artificial Sequence: Synthetic oligonucleotide
cuucgcgcacaaacuggaa

SEQ ID NO: 1413120 - RNA, 19 nt, Artificial Sequence
  Description of Artificial Sequence: Synthetic oligonucleotide
gugcucguguggccucacc

SEQ ID NO: 1413121 - RNA, 19 nt, Artificial Sequence
  Description of Artificial Sequence: Synthetic oligonucleotide
cugcggcugugcucgugug

SEQ ID NO: 1413122 - RNA, 19 nt, Artificial Sequence
  Description of Artificial Sequence: Synthetic oligonucleotide
gcucgcacuggcucugcac

SEQ ID NO: 1413123 - RNA, 19 nt, Artificial Sequence
  Description of Artificial Sequence: Synthetic oligonucleotide
acccuccaggcaguugaug

SEQ ID NO: 1413124 - RNA, 19 nt, Artificial Sequence
  Description of Artificial Sequence: Synthetic oligonucleotide
gcuucgcgcacaaacugga

SEQ ID NO: 1413125 - RNA, 19 nt, Artificial Sequence
  Description of Artificial Sequence: Synthetic oligonucleotide
guguccacucccagcuuca

SEQ ID NO: 1413126 - RNA, 19 nt, Artificial Sequence
  Description of Artificial Sequence: Synthetic oligonucleotide
ugcucgcguuucaccuccu

SEQ ID NO: 1413127 - RNA, 19 nt, Artificial Sequence
  Description of Artificial Sequence: Synthetic oligonucleotide
agcauggcucgcacuggcu

SEQ ID NO: 1413128 - RNA, 19 nt, Artificial Sequence
  Description of Artificial Sequence: Synthetic oligonucleotide
gugagcgggcagaugaagu

SEQ ID NO: 1413129 - RNA, 19 nt, Artificial Sequence
  Description of Artificial Sequence: Synthetic oligonucleotide
ggguaccaguccacacucg

SEQ ID NO: 1413130 - RNA, 19 nt, Artificial Sequence
  Description of Artificial Sequence: Synthetic oligonucleotide
uguccaccugaggcccuca

SEQ ID NO: 1413131 - RNA, 19 nt, Artificial Sequence
  Description of Artificial Sequence: Synthetic oligonucleotide
gugacaccugugagcgggc

SEQ ID NO: 1413132 - RNA, 19 nt, Artificial Sequence
  Description of Artificial Sequence: Synthetic oligonucleotide
cugggugcaaaugaauguu

SEQ ID NO: 1413133 - RNA, 19 nt, Artificial Sequence
  Description of Artificial Sequence: Synthetic oligonucleotide
cugugagcgggcagaugaa

SEQ ID NO: 1413134 - RNA, 19 nt, Artificial Sequence
  Description of Artificial Sequence: Synthetic oligonucleotide
ugugcucguguggccucac

SEQ ID NO: 1413135 - RNA, 19 nt, Artificial Sequence
  Description of Artificial Sequence: Synthetic oligonucleotide
agguccccugcagcaagca

SEQ ID NO: 1413136 - RNA, 19 nt, Artificial Sequence
  Description of Artificial Sequence: Synthetic oligonucleotide
ggcagcuacggggucugug

SEQ ID NO: 1413137 - RNA, 19 nt, Artificial Sequence
  Description of Artificial Sequence: Synthetic oligonucleotide
cccucagcucaaagggcag

SEQ ID NO: 1413138 - RNA, 19 nt, Artificial Sequence
  Description of Artificial Sequence: Synthetic oligonucleotide
cuacggggucuguggagaa

SEQ ID NO: 1413139 - RNA, 19 nt, Artificial Sequence
  Description of Artificial Sequence: Synthetic oligonucleotide
gggugcaaaugaauguugu

SEQ ID NO: 1413140 - RNA, 19 nt, Artificial Sequence
  Description of Artificial Sequence: Synthetic oligonucleotide
gguggggacgucaggguaa

SEQ ID NO: 1413141 - RNA, 19 nt, Artificial Sequence
  Description of Artificial Sequence: Synthetic oligonucleotide
gagcgggcagaugaaguau

SEQ ID NO: 1413142 - RNA, 19 nt, Artificial Sequence
  Description of Artificial Sequence: Synthetic oligonucleotide
gaucugguacuggcagugu

SEQ ID NO: 1413143 - RNA, 19 nt, Artificial Sequence
  Description of Artificial Sequence: Synthetic oligonucleotide
ccaucgggcaggcgcacac

SEQ ID NO: 1413144 - RNA, 19 nt, Artificial Sequence
  Description of Artificial Sequence: Synthetic oligonucleotide
ucacucggucccggucucu

SEQ ID NO: 1413145 - RNA, 19 nt, Artificial Sequence
  Description of Artificial Sequence: Synthetic oligonucleotide
acagcgcaugcugggccga

SEQ ID NO: 1413146 - RNA, 19 nt, Artificial Sequence
  Description of Artificial Sequence: Synthetic oligonucleotide
cgguaugacacagcgcaug

SEQ ID NO: 1413147 - RNA, 19 nt, Artificial Sequence
  Description of Artificial Sequence: Synthetic oligonucleotide
ugggccgagccugcuuuua

SEQ ID NO: 1413148 - RNA, 19 nt, Artificial Sequence
  Description of Artificial Sequence: Synthetic oligonucleotide
acgguaugacacagcgcau

SEQ ID NO: 1413149 - RNA, 19 nt, Artificial Sequence
  Description of Artificial Sequence: Synthetic oligonucleotide
ccgcugcuccuccuuuucg

SEQ ID NO: 1413150 - RNA, 19 nt, Artificial Sequence
  Description of Artificial Sequence: Synthetic oligonucleotide
cgggcaggcgcacacgcag

SEQ ID NO: 1413151 - RNA, 19 nt, Artificial Sequence
  Description of Artificial Sequence: Synthetic oligonucleotide
ccaccugaggcccucagcu

SEQ ID NO: 1413152 - RNA, 19 nt, Artificial Sequence
  Description of Artificial Sequence: Synthetic oligonucleotide
ccgagcucggggcugcuuc

SEQ ID NO: 1413153 - RNA, 19 nt, Artificial Sequence
  Description of Artificial Sequence: Synthetic oligonucleotide
gcagaggguaccaguccac

SEQ ID NO: 1413154 - RNA, 19 nt, Artificial Sequence
  Description of Artificial Sequence: Synthetic oligonucleotide
cgcuccacggccucaguuc

SEQ ID NO: 1413155 - RNA, 19 nt, Artificial Sequence
  Description of Artificial Sequence: Synthetic oligonucleotide
caucccguugaucccuccu

SEQ ID NO: 1413156 - RNA, 19 nt, Artificial Sequence
  Description of Artificial Sequence: Synthetic oligonucleotide
aggccucaacacacaugug

SEQ ID NO: 1413157 - RNA, 19 nt, Artificial Sequence
  Description of Artificial Sequence: Synthetic oligonucleotide
gcgcugccgguccagcaug

SEQ ID NO: 1413158 - RNA, 19 nt, Artificial Sequence
  Description of Artificial Sequence: Synthetic oligonucleotide
gcaggcgcacacgcaguag

SEQ ID NO: 1413159 - RNA, 19 nt, Artificial Sequence
  Description of Artificial Sequence: Synthetic oligonucleotide
gcgagggccgcugggcggg

SEQ ID NO: 1413160 - RNA, 19 nt, Artificial Sequence
  Description of Artificial Sequence: Synthetic oligonucleotide
gugcgacaggauggccucc

SEQ ID NO: 1413161 - RNA, 19 nt, Artificial Sequence
  Description of Artificial Sequence: Synthetic oligonucleotide
ccgagccugcuuuuauuca

SEQ ID NO: 1413162 - RNA, 19 nt, Artificial Sequence
  Description of Artificial Sequence: Synthetic oligonucleotide
cucaggccucaacacacau

SEQ ID NO: 1413163 - RNA, 19 nt, Artificial Sequence
  Description of Artificial Sequence: Synthetic oligonucleotide
ggggacgguaugacacagc

SEQ ID NO: 1413164 - RNA, 19 nt, Artificial Sequence
  Description of Artificial Sequence: Synthetic oligonucleotide
ccggauggaguccugagau

SEQ ID NO: 1413165 - RNA, 19 nt, Artificial Sequence
  Description of Artificial Sequence: Synthetic oligonucleotide
gcaucccguugaucccucc

SEQ ID NO: 1413166 - RNA, 19 nt, Artificial Sequence
  Description of Artificial Sequence: Synthetic oligonucleotide
cgcgcacaaacuggaagag

SEQ ID NO: 1413167 - RNA, 19 nt, Artificial Sequence
  Description of Artificial Sequence: Synthetic oligonucleotide
cccgggcauagaagguccc

SEQ ID NO: 1413168 - RNA, 19 nt, Artificial Sequence
  Description of Artificial Sequence: Synthetic oligonucleotide
ccagucauucugcaaugcu

SEQ ID NO: 1413169 - RNA, 19 nt, Artificial Sequence
  Description of Artificial Sequence: Synthetic oligonucleotide
cugccgguccagcauggcu

SEQ ID NO: 1413170 - RNA, 19 nt, Artificial Sequence
  Description of Artificial Sequence: Synthetic oligonucleotide
ggacgucaggguaaggaau

SEQ ID NO: 1413171 - RNA, 19 nt, Artificial Sequence
  Description of Artificial Sequence: Synthetic oligonucleotide
ggagggccugcuguggcga

SEQ ID NO: 1413172 - RNA, 19 nt, Artificial Sequence
  Description of Artificial Sequence: Synthetic oligonucleotide
cugguacuggcagugucau

SEQ ID NO: 1413173 - RNA, 19 nt, Artificial Sequence
  Description of Artificial Sequence: Synthetic oligonucleotide
gcuccacggccucaguucu

SEQ ID NO: 1413174 - RNA, 19 nt, Artificial Sequence
  Description of Artificial Sequence: Synthetic oligonucleotide
ccgggcauagaaggucccc

SEQ ID NO: 1413175 - RNA, 19 nt, Artificial Sequence
  Description of Artificial Sequence: Synthetic oligonucleotide
cccgcacucuugaacuuga

SEQ ID NO: 1413176 - RNA, 19 nt, Artificial Sequence
  Description of Artificial Sequence: Synthetic oligonucleotide
gccuuugcucgcguuucac

SEQ ID NO: 1413177 - RNA, 19 nt, Artificial Sequence
  Description of Artificial Sequence: Synthetic oligonucleotide
cagcgcaugcugggccgag

SEQ ID NO: 1413178 - RNA, 19 nt, Artificial Sequence
  Description of Artificial Sequence: Synthetic oligonucleotide
ccaggcaguugaugcgcuc

SEQ ID NO: 1413179 - RNA, 19 nt, Artificial Sequence
  Description of Artificial Sequence: Synthetic oligonucleotide
ccgcucccgggcauagaag

SEQ ID NO: 1413180 - RNA, 19 nt, Artificial Sequence
  Description of Artificial Sequence: Synthetic oligonucleotide
gcgaugguguccacuccca

SEQ ID NO: 1413181 - RNA, 19 nt, Artificial Sequence
  Description of Artificial Sequence: Synthetic oligonucleotide
ggcaggcgcacacgcagua

SEQ ID NO: 1413182 - RNA, 19 nt, Artificial Sequence
  Description of Artificial Sequence: Synthetic oligonucleotide
cuucuggcccggccccgca

SEQ ID NO: 1413183 - RNA, 19 nt, Artificial Sequence
  Description of Artificial Sequence: Synthetic oligonucleotide
gcagcggcccggcggcgag

SEQ ID NO: 1413184 - RNA, 19 nt, Artificial Sequence
  Description of Artificial Sequence: Synthetic oligonucleotide
guacuggcagugucaucuu

SEQ ID NO: 1413185 - RNA, 19 nt, Artificial Sequence
  Description of Artificial Sequence: Synthetic oligonucleotide
ccucaacacacauguggcu

SEQ ID NO: 1413186 - RNA, 19 nt, Artificial Sequence
  Description of Artificial Sequence: Synthetic oligonucleotide
ccugcggaguccgugagcu

SEQ ID NO: 1413187 - RNA, 19 nt, Artificial Sequence
  Description of Artificial Sequence: Synthetic oligonucleotide
guaccaguccacacucguu

SEQ ID NO: 1413188 - RNA, 19 nt, Artificial Sequence
  Description of Artificial Sequence: Synthetic oligonucleotide
cugagauguggggccccga

SEQ ID NO: 1413189 - RNA, 19 nt, Artificial Sequence
  Description of Artificial Sequence: Synthetic oligonucleotide
ccuuauucugcaguuugau

SEQ ID NO: 1413190 - RNA, 19 nt, Artificial Sequence
  Description of Artificial Sequence: Synthetic oligonucleotide
cugccagguggggagagau

SEQ ID NO: 1413191 - RNA, 19 nt, Artificial Sequence
  Description of Artificial Sequence: Synthetic oligonucleotide
gcggcgagggccgcugggc

SEQ ID NO: 1413192 - RNA, 19 nt, Artificial Sequence
  Description of Artificial Sequence: Synthetic oligonucleotide
cgcugccgguccagcaugg

SEQ ID NO: 1413193 - RNA, 19 nt, Artificial Sequence
  Description of Artificial Sequence: Synthetic oligonucleotide
gcuucuggcccggccccgc

SEQ ID NO: 1413194 - RNA, 19 nt, Artificial Sequence
  Description of Artificial Sequence: Synthetic oligonucleotide
gcguuucaccuccucugcu

SEQ ID NO: 1413195 - RNA, 19 nt, Artificial Sequence
  Description of Artificial Sequence: Synthetic oligonucleotide
ccuccucaaggugacaccu

SEQ ID NO: 1413196 - RNA, 19 nt, Artificial Sequence
  Description of Artificial Sequence: Synthetic oligonucleotide
gcgcuccuggaacaccuua

SEQ ID NO: 1413197 - RNA, 19 nt, Artificial Sequence
  Description of Artificial Sequence: Synthetic oligonucleotide
caagcagcucaggccucaa

SEQ ID NO: 1413198 - RNA, 19 nt, Artificial Sequence
  Description of Artificial Sequence: Synthetic oligonucleotide
ccacggccucaguucugag

SEQ ID NO: 1413199 - RNA, 19 nt, Artificial Sequence
  Description of Artificial Sequence: Synthetic oligonucleotide
cccuucuauuuggugggga

SEQ ID NO: 1413200 - RNA, 19 nt, Artificial Sequence
  Description of Artificial Sequence: Synthetic oligonucleotide
ggucccggucucuguugaa

SEQ ID NO: 1413201 - RNA, 19 nt, Artificial Sequence
  Description of Artificial Sequence: Synthetic oligonucleotide
cagcggcccggcggcgagg

SEQ ID NO: 1413202 - RNA, 19 nt, Artificial Sequence
  Description of Artificial Sequence: Synthetic oligonucleotide
cccguugaucccuccucaa

SEQ ID NO: 1413203 - RNA, 19 nt, Artificial Sequence
  Description of Artificial Sequence: Synthetic oligonucleotide
gggcaucccguugaucccu

SEQ ID NO: 1413204 - RNA, 19 nt, Artificial Sequence
  Description of Artificial Sequence: Synthetic oligonucleotide
ccgugagcuucuggcccgg

SEQ ID NO: 1413205 - RNA, 19 nt, Artificial Sequence
  Description of Artificial Sequence: Synthetic oligonucleotide
aggcagcuacggggucugu

SEQ ID NO: 1413206 - RNA, 19 nt, Artificial Sequence
  Description of Artificial Sequence: Synthetic oligonucleotide
agucggcggggagcucaaa

SEQ ID NO: 1413207 - RNA, 19 nt, Artificial Sequence
  Description of Artificial Sequence: Synthetic oligonucleotide
ggccgagccugcuuuuauu

SEQ ID NO: 1413208 - RNA, 19 nt, Artificial Sequence
  Description of Artificial Sequence: Synthetic oligonucleotide
ggccccgagcucggggcug

SEQ ID NO: 1413209 - RNA, 19 nt, Artificial Sequence
  Description of Artificial Sequence: Synthetic oligonucleotide
gccccgagcucggggcugc

SEQ ID NO: 1413210 - RNA, 19 nt, Artificial Sequence
  Description of Artificial Sequence: Synthetic oligonucleotide
cgggcagaugaaguauaca

SEQ ID NO: 1413211 - RNA, 19 nt, Artificial Sequence
  Description of Artificial Sequence: Synthetic oligonucleotide
gcacacgcaguagggcaua

SEQ ID NO: 1413212 - RNA, 19 nt, Artificial Sequence
  Description of Artificial Sequence: Synthetic oligonucleotide
ccggucucuguugaacgua

SEQ ID NO: 1413213 - RNA, 19 nt, Artificial Sequence
  Description of Artificial Sequence: Synthetic oligonucleotide
gggccgagccugcuuuuau

SEQ ID NO: 1413214 - RNA, 19 nt, Artificial Sequence
  Description of Artificial Sequence: Synthetic oligonucleotide
cccggccccgcacucuuga

SEQ ID NO: 1413215 - RNA, 19 nt, Artificial Sequence
  Description of Artificial Sequence: Synthetic oligonucleotide
gccaucgggcaggcgcaca

SEQ ID NO: 1413216 - RNA, 19 nt, Artificial Sequence
  Description of Artificial Sequence: Synthetic oligonucleotide
cggucccggucucuguuga

SEQ ID NO: 1413217 - RNA, 19 nt, Artificial Sequence
  Description of Artificial Sequence: Synthetic oligonucleotide
ggcagcggcccggcggcga

SEQ ID NO: 1413218 - RNA, 19 nt, Artificial Sequence
  Description of Artificial Sequence: Synthetic oligonucleotide
cggggagcucaaaguguga

SEQ ID NO: 1413219 - RNA, 19 nt, Artificial Sequence
  Description of Artificial Sequence: Synthetic oligonucleotide
gcucggggcugcuucuguu

SEQ ID NO: 1413220 - RNA, 19 nt, Artificial Sequence
  Description of Artificial Sequence: Synthetic oligonucleotide
gcggaguccgugagcuucu

SEQ ID NO: 1413221 - RNA, 19 nt, Artificial Sequence
  Description of Artificial Sequence: Synthetic oligonucleotide
gccucaucgguggggcccu

SEQ ID NO: 1413222 - RNA, 19 nt, Artificial Sequence
  Description of Artificial Sequence: Synthetic oligonucleotide
cgcacuggcucugcacuaa

SEQ ID NO: 1413223 - RNA, 19 nt, Artificial Sequence
  Description of Artificial Sequence: Synthetic oligonucleotide
ccgguccagcauggcucgc

SEQ ID NO: 1413224 - RNA, 19 nt, Artificial Sequence
  Description of Artificial Sequence: Synthetic oligonucleotide
gccugcuguggcgacuuuu

SEQ ID NO: 1413225 - RNA, 19 nt, Artificial Sequence
  Description of Artificial Sequence: Synthetic oligonucleotide
cugcggaguccgugagcuu

SEQ ID NO: 1413226 - RNA, 19 nt, Artificial Sequence
  Description of Artificial Sequence: Synthetic oligonucleotide
cggaguccgugagcuucug

SEQ ID NO: 1413227 - RNA, 19 nt, Artificial Sequence
  Description of Artificial Sequence: Synthetic oligonucleotide
ccggccccgcacucuugaa

SEQ ID NO: 1413228 - RNA, 19 nt, Artificial Sequence
  Description of Artificial Sequence: Synthetic oligonucleotide
ccgcacucuugaacuugau

SEQ ID NO: 1413229 - RNA, 19 nt, Artificial Sequence
  Description of Artificial Sequence: Synthetic oligonucleotide
ggguacccuccaggcaguu

SEQ ID NO: 1413230 - RNA, 19 nt, Artificial Sequence
  Description of Artificial Sequence: Synthetic oligonucleotide
ggccugcuguggcgacuuu

SEQ ID NO: 1413231 - RNA, 19 nt, Artificial Sequence
  Description of Artificial Sequence: Synthetic oligonucleotide
cccgagcucggggcugcuu

SEQ ID NO: 1413232 - RNA, 19 nt, Artificial Sequence
  Description of Artificial Sequence: Synthetic oligonucleotide
ccccgagcucggggcugcu

SEQ ID NO: 1413233 - RNA, 19 nt, Artificial Sequence
  Description of Artificial Sequence: Synthetic oligonucleotide
cgggagccccugggcuguu

SEQ ID NO: 1413234 - RNA, 19 nt, Artificial Sequence
  Description of Artificial Sequence: Synthetic oligonucleotide
aaucuuaccaucuacacgg

SEQ ID NO: 1413235 - RNA, 19 nt, Artificial Sequence
  Description of Artificial Sequence: Synthetic oligonucleotide
auauaauaaaccuugagag

SEQ ID NO: 1413236 - RNA, 19 nt, Artificial Sequence
  Description of Artificial Sequence: Synthetic oligonucleotide
uauauaauaaaccuugaga

SEQ ID NO: 1413237 - RNA, 19 nt, Artificial Sequence
  Description of Artificial Sequence: Synthetic oligonucleotide
aaaacgaaaguguagaaca

SEQ ID NO: 1413238 - RNA, 19 nt, Artificial Sequence
  Description of Artificial Sequence: Synthetic oligonucleotide
uguacuucgaauaacagga

SEQ ID NO: 1413239 - RNA, 19 nt, Artificial Sequence
  Description of Artificial Sequence: Synthetic oligonucleotide
aauaggaucaauaaacuuc

SEQ ID NO: 1413240 - RNA, 19 nt, Artificial Sequence
  Description of Artificial Sequence: Synthetic oligonucleotide
auuaaauauacuaaagggc

SEQ ID NO: 1413241 - RNA, 19 nt, Artificial Sequence
  Description of Artificial Sequence: Synthetic oligonucleotide
aagaguauauaauaaaccu

SEQ ID NO: 1413242 - RNA, 19 nt, Artificial Sequence
  Description of Artificial Sequence: Synthetic oligonucleotide
aaaguuuaggcucugaaga

SEQ ID NO: 1413243 - RNA, 19 nt, Artificial Sequence
  Description of Artificial Sequence: Synthetic oligonucleotide
uuguuaaucaaucuuacca

SEQ ID NO: 1413244 - RNA, 19 nt, Artificial Sequence
  Description of Artificial Sequence: Synthetic oligonucleotide
aagaggaauaaauuuagcu

SEQ ID NO: 1413245 - RNA, 19 nt, Artificial Sequence
  Description of Artificial Sequence: Synthetic oligonucleotide
aagaccaauuccugcaucc

SEQ ID NO: 1413246 - RNA, 19 nt, Artificial Sequence
  Description of Artificial Sequence: Synthetic oligonucleotide
agagcucaaucacagaucc

SEQ ID NO: 1413247 - RNA, 19 nt, Artificial Sequence
  Description of Artificial Sequence: Synthetic oligonucleotide
aaucaaucuuaccaucuac

SEQ ID NO: 1413248 - RNA, 19 nt, Artificial Sequence
  Description of Artificial Sequence: Synthetic oligonucleotide
ucaauaaacuucuuugacc

SEQ ID NO: 1413249 - RNA, 19 nt, Artificial Sequence
  Description of Artificial Sequence: Synthetic oligonucleotide
aaugacacucaaucuuccc

SEQ ID NO: 1413250 - RNA, 19 nt, Artificial Sequence
  Description of Artificial Sequence: Synthetic oligonucleotide
ucccaaaucugauaaauag

SEQ ID NO: 1413251 - RNA, 19 nt, Artificial Sequence
  Description of Artificial Sequence: Synthetic oligonucleotide
auaucguaaaccuuccuuc

SEQ ID NO: 1413252 - RNA, 19 nt, Artificial Sequence
  Description of Artificial Sequence: Synthetic oligonucleotide
uuaagauacaugugcaacc

SEQ ID NO: 1413253 - RNA, 19 nt, Artificial Sequence
  Description of Artificial Sequence: Synthetic oligonucleotide
uuauuaagauacaugugca

SEQ ID NO: 1413254 - RNA, 19 nt, Artificial Sequence
  Description of Artificial Sequence: Synthetic oligonucleotide
auuguuaaucaaucuuacc

SEQ ID NO: 1413255 - RNA, 19 nt, Artificial Sequence
  Description of Artificial Sequence: Synthetic oligonucleotide
agugucauuacauaagagu

SEQ ID NO: 1413256 - RNA, 19 nt, Artificial Sequence
  Description of Artificial Sequence: Synthetic oligonucleotide
accucuuaagcacacaagg

SEQ ID NO: 1413257 - RNA, 19 nt, Artificial Sequence
  Description of Artificial Sequence: Synthetic oligonucleotide
aaccaaaagauccaggcau

SEQ ID NO: 1413258 - RNA, 19 nt, Artificial Sequence
  Description of Artificial Sequence: Synthetic oligonucleotide
uguaauucgcagcagcuug

SEQ ID NO: 1413259 - RNA, 19 nt, Artificial Sequence
  Description of Artificial Sequence: Synthetic oligonucleotide
aucuacacggcagacaucc

SEQ ID NO: 1413260 - RNA, 19 nt, Artificial Sequence
  Description of Artificial Sequence: Synthetic oligonucleotide
uuuaguagguuucuuaaau

SEQ ID NO: 1413261 - RNA, 19 nt, Artificial Sequence
  Description of Artificial Sequence: Synthetic oligonucleotide
uacaaaguuuacauguaag

SEQ ID NO: 1413262 - RNA, 19 nt, Artificial Sequence
  Description of Artificial Sequence: Synthetic oligonucleotide
acauguaaggaucccaggg

SEQ ID NO: 1413263 - RNA, 19 nt, Artificial Sequence
  Description of Artificial Sequence: Synthetic oligonucleotide
acacgcucaaaguuuaggc

SEQ ID NO: 1413264 - RNA, 19 nt, Artificial Sequence
  Description of Artificial Sequence: Synthetic oligonucleotide
ugucaaaagauggauauca

SEQ ID NO: 1413265 - RNA, 19 nt, Artificial Sequence
  Description of Artificial Sequence: Synthetic oligonucleotide
ucgaauaacaggaagcauc

SEQ ID NO: 1413266 - RNA, 19 nt, Artificial Sequence
  Description of Artificial Sequence: Synthetic oligonucleotide
uuacauaagaguauauaau

SEQ ID NO: 1413267 - RNA, 19 nt, Artificial Sequence
  Description of Artificial Sequence: Synthetic oligonucleotide
guacaaaugacacucaauc

SEQ ID NO: 1413268 - RNA, 19 nt, Artificial Sequence
  Description of Artificial Sequence: Synthetic oligonucleotide
uacauaagaguauauaaua

SEQ ID NO: 1413269 - RNA, 19 nt, Artificial Sequence
  Description of Artificial Sequence: Synthetic oligonucleotide
uuacauguaaggaucccag

SEQ ID NO: 1413270 - RNA, 19 nt, Artificial Sequence
  Description of Artificial Sequence: Synthetic oligonucleotide
aaaaggcauuaacagguag

SEQ ID NO: 1413271 - RNA, 19 nt, Artificial Sequence
  Description of Artificial Sequence: Synthetic oligonucleotide
auccugguuauuaagauac

SEQ ID NO: 1413272 - RNA, 19 nt, Artificial Sequence
  Description of Artificial Sequence: Synthetic oligonucleotide
uuaggcucugaagauaucg

SEQ ID NO: 1413273 - RNA, 19 nt, Artificial Sequence
  Description of Artificial Sequence: Synthetic oligonucleotide
aaauuaaccacugauggua

SEQ ID NO: 1413274 - RNA, 19 nt, Artificial Sequence
  Description of Artificial Sequence: Synthetic oligonucleotide
aaucccaauuugaagcugc

SEQ ID NO: 1413275 - RNA, 19 nt, Artificial Sequence
  Description of Artificial Sequence: Synthetic oligonucleotide
uccauagcgagcaaacugc

SEQ ID NO: 1413276 - RNA, 19 nt, Artificial Sequence
  Description of Artificial Sequence: Synthetic oligonucleotide
ugauaagaggaauaaauuu

SEQ ID NO: 1413277 - RNA, 19 nt, Artificial Sequence
  Description of Artificial Sequence: Synthetic oligonucleotide
ugaauccugguuauuaaga

SEQ ID NO: 1413278 - RNA, 19 nt, Artificial Sequence
  Description of Artificial Sequence: Synthetic oligonucleotide
aaaaugguccauggagugc

SEQ ID NO: 1413279 - RNA, 19 nt, Artificial Sequence
  Description of Artificial Sequence: Synthetic oligonucleotide
ccaguuaaccaaaagaucc

SEQ ID NO: 1413280 - RNA, 19 nt, Artificial Sequence
  Description of Artificial Sequence: Synthetic oligonucleotide
uguuaaucaaucuuaccau

SEQ ID NO: 1413281 - RNA, 19 nt, Artificial Sequence
  Description of Artificial Sequence: Synthetic oligonucleotide
uaaaaugguccauggagug

SEQ ID NO: 1413282 - RNA, 19 nt, Artificial Sequence
  Description of Artificial Sequence: Synthetic oligonucleotide
uucuuugaccucuuaagca

SEQ ID NO: 1413283 - RNA, 19 nt, Artificial Sequence
  Description of Artificial Sequence: Synthetic oligonucleotide
cuuaccaucuacacggcag

SEQ ID NO: 1413284 - RNA, 19 nt, Artificial Sequence
  Description of Artificial Sequence: Synthetic oligonucleotide
ucuuugaccucuuaagcac

SEQ ID NO: 1413285 - RNA, 19 nt, Artificial Sequence
  Description of Artificial Sequence: Synthetic oligonucleotide
aaauaggaucaauaaacuu

SEQ ID NO: 1413286 - RNA, 19 nt, Artificial Sequence
  Description of Artificial Sequence: Synthetic oligonucleotide
gaggaauaaauuuagcucu

SEQ ID NO: 1413287 - RNA, 19 nt, Artificial Sequence
  Description of Artificial Sequence: Synthetic oligonucleotide
ucuuaagcacacaaggguc

SEQ ID NO: 1413288 - RNA, 19 nt, Artificial Sequence
  Description of Artificial Sequence: Synthetic oligonucleotide
aagauaucguaaaccuucc

SEQ ID NO: 1413289 - RNA, 19 nt, Artificial Sequence
  Description of Artificial Sequence: Synthetic oligonucleotide
gacuuuacggugauaagag

SEQ ID NO: 1413290 - RNA, 19 nt, Artificial Sequence
  Description of Artificial Sequence: Synthetic oligonucleotide
aacacaagcugguacuugu

SEQ ID NO: 1413291 - RNA, 19 nt, Artificial Sequence
  Description of Artificial Sequence: Synthetic oligonucleotide
gaucaauaaacuucuuuga

SEQ ID NO: 1413292 - RNA, 19 nt, Artificial Sequence
  Description of Artificial Sequence: Synthetic oligonucleotide
acgcucaaaguuuaggcuc

SEQ ID NO: 1413293 - RNA, 19 nt, Artificial Sequence
  Description of Artificial Sequence: Synthetic oligonucleotide
auaacaggaagcaucugac

SEQ ID NO: 1413294 - RNA, 19 nt, Artificial Sequence
  Description of Artificial Sequence: Synthetic oligonucleotide
uucugcaaaucccaauuug

SEQ ID NO: 1413295 - RNA, 19 nt, Artificial Sequence
  Description of Artificial Sequence: Synthetic oligonucleotide
aagugggugucaaaggaac

SEQ ID NO: 1413296 - RNA, 19 nt, Artificial Sequence
  Description of Artificial Sequence: Synthetic oligonucleotide
uguuccugaauccugguua

SEQ ID NO: 1413297 - RNA, 19 nt, Artificial Sequence
  Description of Artificial Sequence: Synthetic oligonucleotide
aaacgaaaguguagaacac

SEQ ID NO: 1413298 - RNA, 19 nt, Artificial Sequence
  Description of Artificial Sequence: Synthetic oligonucleotide
gauaagaggaauaaauuua

SEQ ID NO: 1413299 - RNA, 19 nt, Artificial Sequence
  Description of Artificial Sequence: Synthetic oligonucleotide
uuuacggugauaagaggaa

SEQ ID NO: 1413300 - RNA, 19 nt, Artificial Sequence
  Description of Artificial Sequence: Synthetic oligonucleotide
ugacuuuacggugauaaga

SEQ ID NO: 1413301 - RNA, 19 nt, Artificial Sequence
  Description of Artificial Sequence: Synthetic oligonucleotide
guagacugaaauccagagg

SEQ ID NO: 1413302 - RNA, 19 nt, Artificial Sequence
  Description of Artificial Sequence: Synthetic oligonucleotide
cagacuaguccaauguggg

SEQ ID NO: 1413303 - RNA, 19 nt, Artificial Sequence
  Description of Artificial Sequence: Synthetic oligonucleotide
aacacgcucaaaguuuagg

SEQ ID NO: 1413304 - RNA, 19 nt, Artificial Sequence
  Description of Artificial Sequence: Synthetic oligonucleotide
aguuuacauguaaggaucc

SEQ ID NO: 1413305 - RNA, 19 nt, Artificial Sequence
  Description of Artificial Sequence: Synthetic oligonucleotide
caauguaauucgcagcagc

SEQ ID NO: 1413306 - RNA, 19 nt, Artificial Sequence
  Description of Artificial Sequence: Synthetic oligonucleotide
gaugguauagcagaacaca

SEQ ID NO: 1413307 - RNA, 19 nt, Artificial Sequence
  Description of Artificial Sequence: Synthetic oligonucleotide
caaaagauggauaucaggu

SEQ ID NO: 1413308 - RNA, 19 nt, Artificial Sequence
  Description of Artificial Sequence: Synthetic oligonucleotide
aauguaauucgcagcagcu

SEQ ID NO: 1413309 - RNA, 19 nt, Artificial Sequence
  Description of Artificial Sequence: Synthetic oligonucleotide
ugucauuacauaagaguau

SEQ ID NO: 1413310 - RNA, 19 nt, Artificial Sequence
  Description of Artificial Sequence: Synthetic oligonucleotide
aauuaaccacugaugguag

SEQ ID NO: 1413311 - RNA, 19 nt, Artificial Sequence
  Description of Artificial Sequence: Synthetic oligonucleotide
auucgcagcagcuugccug

SEQ ID NO: 1413312 - RNA, 19 nt, Artificial Sequence
  Description of Artificial Sequence: Synthetic oligonucleotide
aaauauacuaaagggccau

SEQ ID NO: 1413313 - RNA, 19 nt, Artificial Sequence
  Description of Artificial Sequence: Synthetic oligonucleotide
uacauguaaggaucccagg

SEQ ID NO: 1413314 - RNA, 19 nt, Artificial Sequence
  Description of Artificial Sequence: Synthetic oligonucleotide
aaccacugaugguaggcag

SEQ ID NO: 1413315 - RNA, 19 nt, Artificial Sequence
  Description of Artificial Sequence: Synthetic oligonucleotide
aguggguuggugcaggucu

SEQ ID NO: 1413316 - RNA, 19 nt, Artificial Sequence
  Description of Artificial Sequence: Synthetic oligonucleotide
uuaaccacugaugguaggc

SEQ ID NO: 1413317 - RNA, 19 nt, Artificial Sequence
  Description of Artificial Sequence: Synthetic oligonucleotide
guaaggaucccagggaagg

SEQ ID NO: 1413318 - RNA, 19 nt, Artificial Sequence
  Description of Artificial Sequence: Synthetic oligonucleotide
acagacuaguccaaugugg

SEQ ID NO: 1413319 - RNA, 19 nt, Artificial Sequence
  Description of Artificial Sequence: Synthetic oligonucleotide
uaucguaaaccuuccuuca

SEQ ID NO: 1413320 - RNA, 19 nt, Artificial Sequence
  Description of Artificial Sequence: Synthetic oligonucleotide
aagauacaugugcaaccag

SEQ ID NO: 1413321 - RNA, 19 nt, Artificial Sequence
  Description of Artificial Sequence: Synthetic oligonucleotide
acaagcugguacuuguuug

SEQ ID NO: 1413322 - RNA, 19 nt, Artificial Sequence
  Description of Artificial Sequence: Synthetic oligonucleotide
ugaugguauagcagaacac

SEQ ID NO: 1413323 - RNA, 19 nt, Artificial Sequence
  Description of Artificial Sequence: Synthetic oligonucleotide
uguucacugugaaauagua

SEQ ID NO: 1413324 - RNA, 19 nt, Artificial Sequence
  Description of Artificial Sequence: Synthetic oligonucleotide
caauaaacuucuuugaccu

SEQ ID NO: 1413325 - RNA, 19 nt, Artificial Sequence
  Description of Artificial Sequence: Synthetic oligonucleotide
acuaguccaaugugggguc

SEQ ID NO: 1413326 - RNA, 19 nt, Artificial Sequence
  Description of Artificial Sequence: Synthetic oligonucleotide
ucggaagugggugucaaag

SEQ ID NO: 1413327 - RNA, 19 nt, Artificial Sequence
  Description of Artificial Sequence: Synthetic oligonucleotide
guuaaucaaucuuaccauc

SEQ ID NO: 1413328 - RNA, 19 nt, Artificial Sequence
  Description of Artificial Sequence: Synthetic oligonucleotide
acuuuacggugauaagagg

SEQ ID NO: 1413329 - RNA, 19 nt, Artificial Sequence
  Description of Artificial Sequence: Synthetic oligonucleotide
gguagacugaaauccagag

SEQ ID NO: 1413330 - RNA, 19 nt, Artificial Sequence
  Description of Artificial Sequence: Synthetic oligonucleotide
gauggauaucaggucacgg

SEQ ID NO: 1413331 - RNA, 19 nt, Artificial Sequence
  Description of Artificial Sequence: Synthetic oligonucleotide
uuuuaguagguuucuuaaa

SEQ ID NO: 1413332 - RNA, 19 nt, Artificial Sequence
  Description of Artificial Sequence: Synthetic oligonucleotide
auggauaucaggucacggu

SEQ ID NO: 1413333 - RNA, 19 nt, Artificial Sequence
  Description of Artificial Sequence: Synthetic oligonucleotide
uggauaucaggucacggua

SEQ ID NO: 1413334 - RNA, 19 nt, Artificial Sequence
  Description of Artificial Sequence: Synthetic oligonucleotide
gcagacauccucaauauag

SEQ ID NO: 1413335 - RNA, 19 nt, Artificial Sequence
  Description of Artificial Sequence: Synthetic oligonucleotide
uauacuaaagggccauuuu

SEQ ID NO: 1413336 - RNA, 19 nt, Artificial Sequence
  Description of Artificial Sequence: Synthetic oligonucleotide
uuaccaucuacacggcaga

SEQ ID NO: 1413337 - RNA, 19 nt, Artificial Sequence
  Description of Artificial Sequence: Synthetic oligonucleotide
augacacucaaucuucccu

SEQ ID NO: 1413338 - RNA, 19 nt, Artificial Sequence
  Description of Artificial Sequence: Synthetic oligonucleotide
ugauggcgggguuauuugg

SEQ ID NO: 1413339 - RNA, 19 nt, Artificial Sequence
  Description of Artificial Sequence: Synthetic oligonucleotide
ucccuucagacacuggccc

SEQ ID NO: 1413340 - RNA, 19 nt, Artificial Sequence
  Description of Artificial Sequence: Synthetic oligonucleotide
cuugagagaaauuccauua

SEQ ID NO: 1413341 - RNA, 19 nt, Artificial Sequence
  Description of Artificial Sequence: Synthetic oligonucleotide
aacgaaaguguagaacaca

SEQ ID NO: 1413342 - RNA, 19 nt, Artificial Sequence
  Description of Artificial Sequence: Synthetic oligonucleotide
aaagauccaggcaugacuu

SEQ ID NO: 1413343 - RNA, 19 nt, Artificial Sequence
  Description of Artificial Sequence: Synthetic oligonucleotide
agcuccccaauguaauucg

SEQ ID NO: 1413344 - RNA, 19 nt, Artificial Sequence
  Description of Artificial Sequence: Synthetic oligonucleotide
acaugaagaacuguacaug

SEQ ID NO: 1413345 - RNA, 19 nt, Artificial Sequence
  Description of Artificial Sequence: Synthetic oligonucleotide
cuugggguaagaccaauuc

SEQ ID NO: 1413346 - RNA, 19 nt, Artificial Sequence
  Description of Artificial Sequence: Synthetic oligonucleotide
aguccaacauggaagcugg

SEQ ID NO: 1413347 - RNA, 19 nt, Artificial Sequence
  Description of Artificial Sequence: Synthetic oligonucleotide
uggcaggcugaauaaaaug

SEQ ID NO: 1413348 - RNA, 19 nt, Artificial Sequence
  Description of Artificial Sequence: Synthetic oligonucleotide
augaagaacuguacauggc

SEQ ID NO: 1413349 - RNA, 19 nt, Artificial Sequence
  Description of Artificial Sequence: Synthetic oligonucleotide
uaacagguagacugaaauc

SEQ ID NO: 1413350 - RNA, 19 nt, Artificial Sequence
  Description of Artificial Sequence: Synthetic oligonucleotide
accaguuaaccaaaagauc

SEQ ID NO: 1413351 - RNA, 19 nt, Artificial Sequence
  Description of Artificial Sequence: Synthetic oligonucleotide
ucacugugaaauaguacaa

SEQ ID NO: 1413352 - RNA, 19 nt, Artificial Sequence
  Description of Artificial Sequence: Synthetic oligonucleotide
uaaucaaucuuaccaucua

SEQ ID NO: 1413353 - RNA, 19 nt, Artificial Sequence
  Description of Artificial Sequence: Synthetic oligonucleotide
agacuaguccaaugugggg

SEQ ID NO: 1413354 - RNA, 19 nt, Artificial Sequence
  Description of Artificial Sequence: Synthetic oligonucleotide
ugaagauaucguaaaccuu

SEQ ID NO: 1413355 - RNA, 19 nt, Artificial Sequence
  Description of Artificial Sequence: Synthetic oligonucleotide
uacuggaaggacuucggaa

SEQ ID NO: 1413356 - RNA, 19 nt, Artificial Sequence
  Description of Artificial Sequence: Synthetic oligonucleotide
augugcaaccaguuaacca

SEQ ID NO: 1413357 - RNA, 19 nt, Artificial Sequence
  Description of Artificial Sequence: Synthetic oligonucleotide
cugauaaauaggaucaaua

SEQ ID NO: 1413358 - RNA, 19 nt, Artificial Sequence
  Description of Artificial Sequence: Synthetic oligonucleotide
agacauccucaauauagga

SEQ ID NO: 1413359 - RNA, 19 nt, Artificial Sequence
  Description of Artificial Sequence: Synthetic oligonucleotide
guuuccacucaaaaucugc

SEQ ID NO: 1413360 - RNA, 19 nt, Artificial Sequence
  Description of Artificial Sequence: Synthetic oligonucleotide
ggacguaagaggcacagac

SEQ ID NO: 1413361 - RNA, 19 nt, Artificial Sequence
  Description of Artificial Sequence: Synthetic oligonucleotide
agcacacaagggucaaagg

SEQ ID NO: 1413362 - RNA, 19 nt, Artificial Sequence
  Description of Artificial Sequence: Synthetic oligonucleotide
ccaacauggaagcuggacg

SEQ ID NO: 1413363 - RNA, 19 nt, Artificial Sequence
  Description of Artificial Sequence: Synthetic oligonucleotide
ugguccauggagugcaaca

SEQ ID NO: 1413364 - RNA, 19 nt, Artificial Sequence
  Description of Artificial Sequence: Synthetic oligonucleotide
ucauuacauaagaguauau

SEQ ID NO: 1413365 - RNA, 19 nt, Artificial Sequence
  Description of Artificial Sequence: Synthetic oligonucleotide
aaaucccaauuugaagcug

SEQ ID NO: 1413366 - RNA, 19 nt, Artificial Sequence
  Description of Artificial Sequence: Synthetic oligonucleotide
ucugauaaauaggaucaau

SEQ ID NO: 1413367 - RNA, 19 nt, Artificial Sequence
  Description of Artificial Sequence: Synthetic oligonucleotide
cccaaaucugauaaauagg

SEQ ID NO: 1413368 - RNA, 19 nt, Artificial Sequence
  Description of Artificial Sequence: Synthetic oligonucleotide
cagauccuugagaugagug

SEQ ID NO: 1413369 - RNA, 19 nt, Artificial Sequence
  Description of Artificial Sequence: Synthetic oligonucleotide
ucacgguauaaauccuuug

SEQ ID NO: 1413370 - RNA, 19 nt, Artificial Sequence
  Description of Artificial Sequence: Synthetic oligonucleotide
augacuuuacggugauaag

SEQ ID NO: 1413371 - RNA, 19 nt, Artificial Sequence
  Description of Artificial Sequence: Synthetic oligonucleotide
uacggugauaagaggaaua

SEQ ID NO: 1413372 - RNA, 19 nt, Artificial Sequence
  Description of Artificial Sequence: Synthetic oligonucleotide
ucuuaccaucuacacggca

SEQ ID NO: 1413373 - RNA, 19 nt, Artificial Sequence
  Description of Artificial Sequence: Synthetic oligonucleotide
aaaaucugcuugugucuaa

SEQ ID NO: 1413374 - RNA, 19 nt, Artificial Sequence
  Description of Artificial Sequence: Synthetic oligonucleotide
agcuggacguaagaggcac

SEQ ID NO: 1413375 - RNA, 19 nt, Artificial Sequence
  Description of Artificial Sequence: Synthetic oligonucleotide
aggacuucggaagugggug

SEQ ID NO: 1413376 - RNA, 19 nt, Artificial Sequence
  Description of Artificial Sequence: Synthetic oligonucleotide
augguaggcagaucuucag

SEQ ID NO: 1413377 - RNA, 19 nt, Artificial Sequence
  Description of Artificial Sequence: Synthetic oligonucleotide
aagcaucugacgacuguuc

SEQ ID NO: 1413378 - RNA, 19 nt, Artificial Sequence
  Description of Artificial Sequence: Synthetic oligonucleotide
cuguccauagcgagcaaac

SEQ ID NO: 1413379 - RNA, 19 nt, Artificial Sequence
  Description of Artificial Sequence: Synthetic oligonucleotide
agauacaugugcaaccagu

SEQ ID NO: 1413380 - RNA, 19 nt, Artificial Sequence
  Description of Artificial Sequence: Synthetic oligonucleotide
ugacacucaaucuucccuu

SEQ ID NO: 1413381 - RNA, 19 nt, Artificial Sequence
  Description of Artificial Sequence: Synthetic oligonucleotide
uagcgagcaaacugcaaac

SEQ ID NO: 1413382 - RNA, 19 nt, Artificial Sequence
  Description of Artificial Sequence: Synthetic oligonucleotide
ugggcaaacaggaguuugu

SEQ ID NO: 1413383 - RNA, 19 nt, Artificial Sequence
  Description of Artificial Sequence: Synthetic oligonucleotide
acgacuguuccucuccaug

SEQ ID NO: 1413384 - RNA, 19 nt, Artificial Sequence
  Description of Artificial Sequence: Synthetic oligonucleotide
acggcagacauccucaaua

SEQ ID NO: 1413385 - RNA, 19 nt, Artificial Sequence
  Description of Artificial Sequence: Synthetic oligonucleotide
cacuacuggaaggacuucg

SEQ ID NO: 1413386 - RNA, 19 nt, Artificial Sequence
  Description of Artificial Sequence: Synthetic oligonucleotide
caggcaugacuuuacggug

SEQ ID NO: 1413387 - RNA, 19 nt, Artificial Sequence
  Description of Artificial Sequence: Synthetic oligonucleotide
cagguagacugaaauccag

SEQ ID NO: 1413388 - RNA, 19 nt, Artificial Sequence
  Description of Artificial Sequence: Synthetic oligonucleotide
augauggcgggguuauuug

SEQ ID NO: 1413389 - RNA, 19 nt, Artificial Sequence
  Description of Artificial Sequence: Synthetic oligonucleotide
accagcuguacuucgaaua

SEQ ID NO: 1413390 - RNA, 19 nt, Artificial Sequence
  Description of Artificial Sequence: Synthetic oligonucleotide
acgguauaaauccuuuguu

SEQ ID NO: 1413391 - RNA, 19 nt, Artificial Sequence
  Description of Artificial Sequence: Synthetic oligonucleotide
cuugccugaugauggcggg

SEQ ID NO: 1413392 - RNA, 19 nt, Artificial Sequence
  Description of Artificial Sequence: Synthetic oligonucleotide
acaguacagguggggagcc

SEQ ID NO: 1413393 - RNA, 19 nt, Artificial Sequence
  Description of Artificial Sequence: Synthetic oligonucleotide
acuacuggaaggacuucgg

SEQ ID NO: 1413394 - RNA, 19 nt, Artificial Sequence
  Description of Artificial Sequence: Synthetic oligonucleotide
cauguaaggaucccaggga

SEQ ID NO: 1413395 - RNA, 19 nt, Artificial Sequence
  Description of Artificial Sequence: Synthetic oligonucleotide
acaagggucaaagggaaaa

SEQ ID NO: 1413396 - RNA, 19 nt, Artificial Sequence
  Description of Artificial Sequence: Synthetic oligonucleotide
gaaggucugcaagaaacca

SEQ ID NO: 1413397 - RNA, 19 nt, Artificial Sequence
  Description of Artificial Sequence: Synthetic oligonucleotide
agcucaaucacagauccuu

SEQ ID NO: 1413398 - RNA, 19 nt, Artificial Sequence
  Description of Artificial Sequence: Synthetic oligonucleotide
auccaggcaugacuuuacg

SEQ ID NO: 1413399 - RNA, 19 nt, Artificial Sequence
  Description of Artificial Sequence: Synthetic oligonucleotide
augaguggggacuggucug

SEQ ID NO: 1413400 - RNA, 19 nt, Artificial Sequence
  Description of Artificial Sequence: Synthetic oligonucleotide
uucgcagcagcuugccuga

SEQ ID NO: 1413401 - RNA, 19 nt, Artificial Sequence
  Description of Artificial Sequence: Synthetic oligonucleotide
auguacaguacaggugggg

SEQ ID NO: 1413402 - RNA, 19 nt, Artificial Sequence
  Description of Artificial Sequence: Synthetic oligonucleotide
agauggauaucaggucacg

SEQ ID NO: 1413403 - RNA, 19 nt, Artificial Sequence
  Description of Artificial Sequence: Synthetic oligonucleotide
uuuguuccugaauccuggu

SEQ ID NO: 1413404 - RNA, 19 nt, Artificial Sequence
  Description of Artificial Sequence: Synthetic oligonucleotide
gcuggcucagcacaacacg

SEQ ID NO: 1413405 - RNA, 19 nt, Artificial Sequence
  Description of Artificial Sequence: Synthetic oligonucleotide
cagagcucaaucacagauc

SEQ ID NO: 1413406 - RNA, 19 nt, Artificial Sequence
  Description of Artificial Sequence: Synthetic oligonucleotide
uggggagcccacacuacug

SEQ ID NO: 1413407 - RNA, 19 nt, Artificial Sequence
  Description of Artificial Sequence: Synthetic oligonucleotide
guuuacauguaaggauccc

SEQ ID NO: 1413408 - RNA, 19 nt, Artificial Sequence
  Description of Artificial Sequence: Synthetic oligonucleotide
gaauccugguuauuaagau

SEQ ID NO: 1413409 - RNA, 19 nt, Artificial Sequence
  Description of Artificial Sequence: Synthetic oligonucleotide
caugugcaaccaguuaacc

SEQ ID NO: 1413410 - RNA, 19 nt, Artificial Sequence
  Description of Artificial Sequence: Synthetic oligonucleotide
caguuaaccaaaagaucca

SEQ ID NO: 1413411 - RNA, 19 nt, Artificial Sequence
  Description of Artificial Sequence: Synthetic oligonucleotide
agauaucguaaaccuuccu

SEQ ID NO: 1413412 - RNA, 19 nt, Artificial Sequence
  Description of Artificial Sequence: Synthetic oligonucleotide
ucccuucuguccauagcga

SEQ ID NO: 1413413 - RNA, 19 nt, Artificial Sequence
  Description of Artificial Sequence: Synthetic oligonucleotide
auauacuaaagggccauuu

SEQ ID NO: 1413414 - RNA, 19 nt, Artificial Sequence
  Description of Artificial Sequence: Synthetic oligonucleotide
guguagaacacagcuuggc

SEQ ID NO: 1413415 - RNA, 19 nt, Artificial Sequence
  Description of Artificial Sequence: Synthetic oligonucleotide
cacucaaucuucccuucug

SEQ ID NO: 1413416 - RNA, 19 nt, Artificial Sequence
  Description of Artificial Sequence: Synthetic oligonucleotide
cuuggcaggcugaauaaaa

SEQ ID NO: 1413417 - RNA, 19 nt, Artificial Sequence
  Description of Artificial Sequence: Synthetic oligonucleotide
uccugguuauuaagauaca

SEQ ID NO: 1413418 - RNA, 19 nt, Artificial Sequence
  Description of Artificial Sequence: Synthetic oligonucleotide
gucauuacauaagaguaua

SEQ ID NO: 1413419 - RNA, 19 nt, Artificial Sequence
  Description of Artificial Sequence: Synthetic oligonucleotide
gaacacaagcugguacuug

SEQ ID NO: 1413420 - RNA, 19 nt, Artificial Sequence
  Description of Artificial Sequence: Synthetic oligonucleotide
ggugauaagaggaauaaau

SEQ ID NO: 1413421 - RNA, 19 nt, Artificial Sequence
  Description of Artificial Sequence: Synthetic oligonucleotide
aguacaaaugacacucaau

SEQ ID NO: 1413422 - RNA, 19 nt, Artificial Sequence
  Description of Artificial Sequence: Synthetic oligonucleotide
ugucuucccaaaucugaua

SEQ ID NO: 1413423 - RNA, 19 nt, Artificial Sequence
  Description of Artificial Sequence: Synthetic oligonucleotide
aauauacuaaagggccauu

SEQ ID NO: 1413424 - RNA, 19 nt, Artificial Sequence
  Description of Artificial Sequence: Synthetic oligonucleotide
gauaucaggucacgguaua

SEQ ID NO: 1413425 - RNA, 19 nt, Artificial Sequence
  Description of Artificial Sequence: Synthetic oligonucleotide
auacaugugcaaccaguua

SEQ ID NO: 1413426 - RNA, 19 nt, Artificial Sequence
  Description of Artificial Sequence: Synthetic oligonucleotide
ugacgacuguuccucucca

SEQ ID NO: 1413427 - RNA, 19 nt, Artificial Sequence
  Description of Artificial Sequence: Synthetic oligonucleotide
uguacauggcaggaagcau

SEQ ID NO: 1413428 - RNA, 19 nt, Artificial Sequence
  Description of Artificial Sequence: Synthetic oligonucleotide
gcagaacacaagcugguac

SEQ ID NO: 1413429 - RNA, 19 nt, Artificial Sequence
  Description of Artificial Sequence: Synthetic oligonucleotide
acggugauaagaggaauaa

SEQ ID NO: 1413430 - RNA, 19 nt, Artificial Sequence
  Description of Artificial Sequence: Synthetic oligonucleotide
ggguaagaccaauuccugc

SEQ ID NO: 1413431 - RNA, 19 nt, Artificial Sequence
  Description of Artificial Sequence: Synthetic oligonucleotide
uugucaaaagauggauauc

SEQ ID NO: 1413432 - RNA, 19 nt, Artificial Sequence
  Description of Artificial Sequence: Synthetic oligonucleotide
uggaaggacuucggaagug

SEQ ID NO: 1413433 - RNA, 19 nt, Artificial Sequence
  Description of Artificial Sequence: Synthetic oligonucleotide
uuuaggcucugaagauauc

SEQ ID NO: 1413434 - RNA, 19 nt, Artificial Sequence
  Description of Artificial Sequence: Synthetic oligonucleotide
aucuuaccaucuacacggc

SEQ ID NO: 1413435 - RNA, 19 nt, Artificial Sequence
  Description of Artificial Sequence: Synthetic oligonucleotide
uguccauagcgagcaaacu

SEQ ID NO: 1413436 - RNA, 19 nt, Artificial Sequence
  Description of Artificial Sequence: Synthetic oligonucleotide
uuacggugauaagaggaau

SEQ ID NO: 1413437 - RNA, 19 nt, Artificial Sequence
  Description of Artificial Sequence: Synthetic oligonucleotide
uguuccucuccaugauggu

SEQ ID NO: 1413438 - RNA, 19 nt, Artificial Sequence
  Description of Artificial Sequence: Synthetic oligonucleotide
gauccaggcaugacuuuac

SEQ ID NO: 1413439 - RNA, 19 nt, Artificial Sequence
  Description of Artificial Sequence: Synthetic oligonucleotide
acacucaaucuucccuucu

SEQ ID NO: 1413440 - RNA, 19 nt, Artificial Sequence
  Description of Artificial Sequence: Synthetic oligonucleotide
aagauccaggcaugacuuu

SEQ ID NO: 1413441 - RNA, 19 nt, Artificial Sequence
  Description of Artificial Sequence: Synthetic oligonucleotide
caggaguuugucaaaagau

SEQ ID NO: 1413442 - RNA, 19 nt, Artificial Sequence
  Description of Artificial Sequence: Synthetic oligonucleotide
cacgguauaaauccuuugu

SEQ ID NO: 1413443 - RNA, 19 nt, Artificial Sequence
  Description of Artificial Sequence: Synthetic oligonucleotide
cacagauccuugagaugag

SEQ ID NO: 1413444 - RNA, 19 nt, Artificial Sequence
  Description of Artificial Sequence: Synthetic oligonucleotide
gauggcgggguuauuugga

SEQ ID NO: 1413445 - RNA, 19 nt, Artificial Sequence
  Description of Artificial Sequence: Synthetic oligonucleotide
uugccugaugauggcgggg

SEQ ID NO: 1413446 - RNA, 19 nt, Artificial Sequence
  Description of Artificial Sequence: Synthetic oligonucleotide
aggucugcaagaaaccaaa

SEQ ID NO: 1413447 - RNA, 19 nt, Artificial Sequence
  Description of Artificial Sequence: Synthetic oligonucleotide
aguuuaggcucugaagaua

SEQ ID NO: 1413448 - RNA, 19 nt, Artificial Sequence
  Description of Artificial Sequence: Synthetic oligonucleotide
guuugucaaaagauggaua

SEQ ID NO: 1413449 - RNA, 19 nt, Artificial Sequence
  Description of Artificial Sequence: Synthetic oligonucleotide
uaaggaucccagggaaggu

SEQ ID NO: 1413450 - RNA, 19 nt, Artificial Sequence
  Description of Artificial Sequence: Synthetic oligonucleotide
ggaaggucugcaagaaacc

SEQ ID NO: 1413451 - RNA, 19 nt, Artificial Sequence
  Description of Artificial Sequence: Synthetic oligonucleotide
ugccugaugauggcggggu

SEQ ID NO: 1413452 - RNA, 19 nt, Artificial Sequence
  Description of Artificial Sequence: Synthetic oligonucleotide
cccaauguaauucgcagca

SEQ ID NO: 1413453 - RNA, 19 nt, Artificial Sequence
  Description of Artificial Sequence: Synthetic oligonucleotide
ggaauaaauuuagcucuug

SEQ ID NO: 1413454 - RNA, 19 nt, Artificial Sequence
  Description of Artificial Sequence: Synthetic oligonucleotide
gacuggucuggcauguaca

SEQ ID NO: 1413455 - RNA, 19 nt, Artificial Sequence
  Description of Artificial Sequence: Synthetic oligonucleotide
gcuugccugaugauggcgg

SEQ ID NO: 1413456 - RNA, 19 nt, Artificial Sequence
  Description of Artificial Sequence: Synthetic oligonucleotide
acacaagggucaaagggaa

SEQ ID NO: 1413457 - RNA, 19 nt, Artificial Sequence
  Description of Artificial Sequence: Synthetic oligonucleotide
agguagacugaaauccaga

SEQ ID NO: 1413458 - RNA, 19 nt, Artificial Sequence
  Description of Artificial Sequence: Synthetic oligonucleotide
agguggggagcccacacua

SEQ ID NO: 1413459 - RNA, 19 nt, Artificial Sequence
  Description of Artificial Sequence: Synthetic oligonucleotide
agcgagcaaacugcaaaca

SEQ ID NO: 1413460 - RNA, 19 nt, Artificial Sequence
  Description of Artificial Sequence: Synthetic oligonucleotide
ggcauguacaguacaggug

SEQ ID NO: 1413461 - RNA, 19 nt, Artificial Sequence
  Description of Artificial Sequence: Synthetic oligonucleotide
gguaucugcaucaguguca

SEQ ID NO: 1413462 - RNA, 19 nt, Artificial Sequence
  Description of Artificial Sequence: Synthetic oligonucleotide
caacacgcucaaaguuuag

SEQ ID NO: 1413463 - RNA, 19 nt, Artificial Sequence
  Description of Artificial Sequence: Synthetic oligonucleotide
gugauaagaggaauaaauu

SEQ ID NO: 1413464 - RNA, 19 nt, Artificial Sequence
  Description of Artificial Sequence: Synthetic oligonucleotide
acaacacgcucaaaguuua

SEQ ID NO: 1413465 - RNA, 19 nt, Artificial Sequence
  Description of Artificial Sequence: Synthetic oligonucleotide
agaccaauuccugcaucca

SEQ ID NO: 1413466 - RNA, 19 nt, Artificial Sequence
  Description of Artificial Sequence: Synthetic oligonucleotide
cuaguccaauguggggucc

SEQ ID NO: 1413467 - RNA, 19 nt, Artificial Sequence
  Description of Artificial Sequence: Synthetic oligonucleotide
aggcaugacuuuacgguga

SEQ ID NO: 1413468 - RNA, 19 nt, Artificial Sequence
  Description of Artificial Sequence: Synthetic oligonucleotide
cacgcucaaaguuuaggcu

SEQ ID NO: 1413469 - RNA, 19 nt, Artificial Sequence
  Description of Artificial Sequence: Synthetic oligonucleotide
guauagcagaacacaagcu

SEQ ID NO: 1413470 - RNA, 19 nt, Artificial Sequence
  Description of Artificial Sequence: Synthetic oligonucleotide
aggaauaaauuuagcucuu

SEQ ID NO: 1413471 - RNA, 19 nt, Artificial Sequence
  Description of Artificial Sequence: Synthetic oligonucleotide
gaugauggcgggguuauuu

SEQ ID NO: 1413472 - RNA, 19 nt, Artificial Sequence
  Description of Artificial Sequence: Synthetic oligonucleotide
cacaacacgcucaaaguuu

SEQ ID NO: 1413473 - RNA, 19 nt, Artificial Sequence
  Description of Artificial Sequence: Synthetic oligonucleotide
auaucaggucacgguauaa

SEQ ID NO: 1413474 - RNA, 19 nt, Artificial Sequence
  Description of Artificial Sequence: Synthetic oligonucleotide
gucuggcauguacaguaca

SEQ ID NO: 1413475 - RNA, 19 nt, Artificial Sequence
  Description of Artificial Sequence: Synthetic oligonucleotide
caaaaucugcuugugucua

SEQ ID NO: 1413476 - RNA, 19 nt, Artificial Sequence
  Description of Artificial Sequence: Synthetic oligonucleotide
aucugacgacuguuccucu

SEQ ID NO: 1413477 - RNA, 19 nt, Artificial Sequence
  Description of Artificial Sequence: Synthetic oligonucleotide
uucggaagugggugucaaa

SEQ ID NO: 1413478 - RNA, 19 nt, Artificial Sequence
  Description of Artificial Sequence: Synthetic oligonucleotide
uaccaucuacacggcagac

SEQ ID NO: 1413479 - RNA, 19 nt, Artificial Sequence
  Description of Artificial Sequence: Synthetic oligonucleotide
uggcgggguuauuuggauc

SEQ ID NO: 1413480 - RNA, 19 nt, Artificial Sequence
  Description of Artificial Sequence: Synthetic oligonucleotide
aucuggggcacuucaccuu

SEQ ID NO: 1413481 - RNA, 19 nt, Artificial Sequence
  Description of Artificial Sequence: Synthetic oligonucleotide
ggacuggucuggcauguac

SEQ ID NO: 1413482 - RNA, 19 nt, Artificial Sequence
  Description of Artificial Sequence: Synthetic oligonucleotide
cagcuuggcaggcugaaua

SEQ ID NO: 1413483 - RNA, 19 nt, Artificial Sequence
  Description of Artificial Sequence: Synthetic oligonucleotide
gcagagcucaaucacagau

SEQ ID NO: 1413484 - RNA, 19 nt, Artificial Sequence
  Description of Artificial Sequence: Synthetic oligonucleotide
accacugaugguaggcaga

SEQ ID NO: 1413485 - RNA, 19 nt, Artificial Sequence
  Description of Artificial Sequence: Synthetic oligonucleotide
uggacguaagaggcacaga

SEQ ID NO: 1413486 - RNA, 19 nt, Artificial Sequence
  Description of Artificial Sequence: Synthetic oligonucleotide
gaacuguacauggcaggaa

SEQ ID NO: 1413487 - RNA, 19 nt, Artificial Sequence
  Description of Artificial Sequence: Synthetic oligonucleotide
cagcuguacuucgaauaac

SEQ ID NO: 1413488 - RNA, 19 nt, Artificial Sequence
  Description of Artificial Sequence: Synthetic oligonucleotide
cagaggguaucugcaucag

SEQ ID NO: 1413489 - RNA, 19 nt, Artificial Sequence
  Description of Artificial Sequence: Synthetic oligonucleotide
gacguaagaggcacagacu

SEQ ID NO: 1413490 - RNA, 19 nt, Artificial Sequence
  Description of Artificial Sequence: Synthetic oligonucleotide
uaagcacacaagggucaaa

SEQ ID NO: 1413491 - RNA, 19 nt, Artificial Sequence
  Description of Artificial Sequence: Synthetic oligonucleotide
gggguaagaccaauuccug

SEQ ID NO: 1413492 - RNA, 19 nt, Artificial Sequence
  Description of Artificial Sequence: Synthetic oligonucleotide
gaagcaucugacgacuguu

SEQ ID NO: 1413493 - RNA, 19 nt, Artificial Sequence
  Description of Artificial Sequence: Synthetic oligonucleotide
ucagaggguucagcuggcu

SEQ ID NO: 1413494 - RNA, 19 nt, Artificial Sequence
  Description of Artificial Sequence: Synthetic oligonucleotide
ccaggcaugacuuuacggu

SEQ ID NO: 1413495 - RNA, 19 nt, Artificial Sequence
  Description of Artificial Sequence: Synthetic oligonucleotide
agcaaacugcaaacacaca

SEQ ID NO: 1413496 - RNA, 19 nt, Artificial Sequence
  Description of Artificial Sequence: Synthetic oligonucleotide
gcucaaucacagauccuug

SEQ ID NO: 1413497 - RNA, 19 nt, Artificial Sequence
  Description of Artificial Sequence: Synthetic oligonucleotide
aggcagaucuucagagggu

SEQ ID NO: 1413498 - RNA, 19 nt, Artificial Sequence
  Description of Artificial Sequence: Synthetic oligonucleotide
aggaagcaugugugggcaa

SEQ ID NO: 1413499 - RNA, 19 nt, Artificial Sequence
  Description of Artificial Sequence: Synthetic oligonucleotide
ccuugagaugaguggggac

SEQ ID NO: 1413500 - RNA, 19 nt, Artificial Sequence
  Description of Artificial Sequence: Synthetic oligonucleotide
agcagaacacaagcuggua

SEQ ID NO: 1413501 - RNA, 19 nt, Artificial Sequence
  Description of Artificial Sequence: Synthetic oligonucleotide
acacggcagacauccucaa

SEQ ID NO: 1413502 - RNA, 19 nt, Artificial Sequence
  Description of Artificial Sequence: Synthetic oligonucleotide
guacuucgaauaacaggaa

SEQ ID NO: 1413503 - RNA, 19 nt, Artificial Sequence
  Description of Artificial Sequence: Synthetic oligonucleotide
aaugguccauggagugcaa

SEQ ID NO: 1413504 - RNA, 19 nt, Artificial Sequence
  Description of Artificial Sequence: Synthetic oligonucleotide
acuugggguaagaccaauu

SEQ ID NO: 1413505 - RNA, 19 nt, Artificial Sequence
  Description of Artificial Sequence: Synthetic oligonucleotide
cucaaaguuuaggcucuga

SEQ ID NO: 1413506 - RNA, 19 nt, Artificial Sequence
  Description of Artificial Sequence: Synthetic oligonucleotide
cgaauaacaggaagcaucu

SEQ ID NO: 1413507 - RNA, 19 nt, Artificial Sequence
  Description of Artificial Sequence: Synthetic oligonucleotide
cuggaaggacuucggaagu

SEQ ID NO: 1413508 - RNA, 19 nt, Artificial Sequence
  Description of Artificial Sequence: Synthetic oligonucleotide
ccagcuguacuucgaauaa

SEQ ID NO: 1413509 - RNA, 19 nt, Artificial Sequence
  Description of Artificial Sequence: Synthetic oligonucleotide
gugcaaccaguuaaccaaa

SEQ ID NO: 1413510 - RNA, 19 nt, Artificial Sequence
  Description of Artificial Sequence: Synthetic oligonucleotide
cuucugcaaaucccaauuu

SEQ ID NO: 1413511 - RNA, 19 nt, Artificial Sequence
  Description of Artificial Sequence: Synthetic oligonucleotide
cagggaaggucugcaagaa

SEQ ID NO: 1413512 - RNA, 19 nt, Artificial Sequence
  Description of Artificial Sequence: Synthetic oligonucleotide
ggaagcaugugugggcaaa

SEQ ID NO: 1413513 - RNA, 19 nt, Artificial Sequence
  Description of Artificial Sequence: Synthetic oligonucleotide
gguauccaguggguuggug

SEQ ID NO: 1413514 - RNA, 19 nt, Artificial Sequence
  Description of Artificial Sequence: Synthetic oligonucleotide
ccauagcgagcaaacugca

SEQ ID NO: 1413515 - RNA, 19 nt, Artificial Sequence
  Description of Artificial Sequence: Synthetic oligonucleotide
gucacgguauaaauccuuu

SEQ ID NO: 1413516 - RNA, 19 nt, Artificial Sequence
  Description of Artificial Sequence: Synthetic oligonucleotide
gcacaacacgcucaaaguu

SEQ ID NO: 1413517 - RNA, 19 nt, Artificial Sequence
  Description of Artificial Sequence: Synthetic oligonucleotide
cuucggaagugggugucaa

SEQ ID NO: 1413518 - RNA, 19 nt, Artificial Sequence
  Description of Artificial Sequence: Synthetic oligonucleotide
guacagguggggagcccac

SEQ ID NO: 1413519 - RNA, 19 nt, Artificial Sequence
  Description of Artificial Sequence: Synthetic oligonucleotide
ccaauuccugcauccaucu

SEQ ID NO: 1413520 - RNA, 19 nt, Artificial Sequence
  Description of Artificial Sequence: Synthetic oligonucleotide
ccaaaagauccaggcauga

SEQ ID NO: 1413521 - RNA, 19 nt, Artificial Sequence
  Description of Artificial Sequence: Synthetic oligonucleotide
gacgacuguuccucuccau

SEQ ID NO: 1413522 - RNA, 19 nt, Artificial Sequence
  Description of Artificial Sequence: Synthetic oligonucleotide
gcccacacuacuggaagga

SEQ ID NO: 1413523 - RNA, 19 nt, Artificial Sequence
  Description of Artificial Sequence: Synthetic oligonucleotide
cguaaaccuuccuucaagu

SEQ ID NO: 1413524 - RNA, 19 nt, Artificial Sequence
  Description of Artificial Sequence: Synthetic oligonucleotide
ggacuucggaagugggugu

SEQ ID NO: 1413525 - RNA, 19 nt, Artificial Sequence
  Description of Artificial Sequence: Synthetic oligonucleotide
ccacacuacuggaaggacu

SEQ ID NO: 1413526 - RNA, 19 nt, Artificial Sequence
  Description of Artificial Sequence: Synthetic oligonucleotide
ggucugcaagaaaccaaaa

SEQ ID NO: 1413527 - RNA, 19 nt, Artificial Sequence
  Description of Artificial Sequence: Synthetic oligonucleotide
ggggcacuucaccuuucaa

SEQ ID NO: 1413528 - RNA, 19 nt, Artificial Sequence
  Description of Artificial Sequence: Synthetic oligonucleotide
ggcaugacuuuacggugau

SEQ ID NO: 1413529 - RNA, 19 nt, Artificial Sequence
  Description of Artificial Sequence: Synthetic oligonucleotide
caaguccaacauggaagcu

SEQ ID NO: 1413530 - RNA, 19 nt, Artificial Sequence
  Description of Artificial Sequence: Synthetic oligonucleotide
ggucacgguauaaauccuu

SEQ ID NO: 1413531 - RNA, 19 nt, Artificial Sequence
  Description of Artificial Sequence: Synthetic oligonucleotide
gcuggacguaagaggcaca

SEQ ID NO: 1413532 - RNA, 19 nt, Artificial Sequence
  Description of Artificial Sequence: Synthetic oligonucleotide
cacggcagacauccucaau

SEQ ID NO: 1413533 - RNA, 19 nt, Artificial Sequence
  Description of Artificial Sequence: Synthetic oligonucleotide
cgggguuauuuggauccug

SEQ ID NO: 1413534 - RNA, 19 nt, Artificial Sequence
  Description of Artificial Sequence: Synthetic oligonucleotide
cggugauaagaggaauaaa

SEQ ID NO: 1413535 - RNA, 19 nt, Artificial Sequence
  Description of Artificial Sequence: Synthetic oligonucleotide
gcaugacuuuacggugaua

SEQ ID NO: 1413536 - RNA, 19 nt, Artificial Sequence
  Description of Artificial Sequence: Synthetic oligonucleotide
ucacuuuucacauaguacg

SEQ ID NO: 1413537 - RNA, 19 nt, Artificial Sequence
  Description of Artificial Sequence: Synthetic oligonucleotide
aguacauggauauagcuac

SEQ ID NO: 1413538 - RNA, 19 nt, Artificial Sequence
  Description of Artificial Sequence: Synthetic oligonucleotide
uuuaauauuggucauuucu

SEQ ID NO: 1413539 - RNA, 19 nt, Artificial Sequence
  Description of Artificial Sequence: Synthetic oligonucleotide
aauaaugaacccgacagac

SEQ ID NO: 1413540 - RNA, 19 nt, Artificial Sequence
  Description of Artificial Sequence: Synthetic oligonucleotide
aaucagcugcacuagauac

SEQ ID NO: 1413541 - RNA, 19 nt, Artificial Sequence
  Description of Artificial Sequence: Synthetic oligonucleotide
cuagauacaauccagcacc

SEQ ID NO: 1413542 - RNA, 19 nt, Artificial Sequence
  Description of Artificial Sequence: Synthetic oligonucleotide
aauugggacacgcuauugc

SEQ ID NO: 1413543 - RNA, 19 nt, Artificial Sequence
  Description of Artificial Sequence: Synthetic oligonucleotide
uacgaaagaaccuacagga

SEQ ID NO: 1413544 - RNA, 19 nt, Artificial Sequence
  Description of Artificial Sequence: Synthetic oligonucleotide
ugagaauccaucuuaauaa

SEQ ID NO: 1413545 - RNA, 19 nt, Artificial Sequence
  Description of Artificial Sequence: Synthetic oligonucleotide
uuaguuaaugcuaugggaa

SEQ ID NO: 1413546 - RNA, 19 nt, Artificial Sequence
  Description of Artificial Sequence: Synthetic oligonucleotide
gauacaauccagcaccagg

SEQ ID NO: 1413547 - RNA, 19 nt, Artificial Sequence
  Description of Artificial Sequence: Synthetic oligonucleotide
ucacucacagauaaggucc

SEQ ID NO: 1413548 - RNA, 19 nt, Artificial Sequence
  Description of Artificial Sequence: Synthetic oligonucleotide
gacaucacgaugaagauug

SEQ ID NO: 1413549 - RNA, 19 nt, Artificial Sequence
  Description of Artificial Sequence: Synthetic oligonucleotide
cacauaguacgaaagaacc

SEQ ID NO: 1413550 - RNA, 19 nt, Artificial Sequence
  Description of Artificial Sequence: Synthetic oligonucleotide
uaucuacuggaaaauaaag

SEQ ID NO: 1413551 - RNA, 19 nt, Artificial Sequence
  Description of Artificial Sequence: Synthetic oligonucleotide
aguagguauuguuaaaauc

SEQ ID NO: 1413552 - RNA, 19 nt, Artificial Sequence
  Description of Artificial Sequence: Synthetic oligonucleotide
aagacuaaggagaaggaag

SEQ ID NO: 1413553 - RNA, 19 nt, Artificial Sequence
  Description of Artificial Sequence: Synthetic oligonucleotide
uuggucauuucuaauuggg

SEQ ID NO: 1413554 - RNA, 19 nt, Artificial Sequence
  Description of Artificial Sequence: Synthetic oligonucleotide
acuagauacaauccagcac

SEQ ID NO: 1413555 - RNA, 19 nt, Artificial Sequence
  Description of Artificial Sequence: Synthetic oligonucleotide
aacguuuucauggaaaacu

SEQ ID NO: 1413556 - RNA, 19 nt, Artificial Sequence
  Description of Artificial Sequence: Synthetic oligonucleotide
auugggacacgcuauugcc

SEQ ID NO: 1413557 - RNA, 19 nt, Artificial Sequence
  Description of Artificial Sequence: Synthetic oligonucleotide
uauuggucauuucuaauug

SEQ ID NO: 1413558 - RNA, 19 nt, Artificial Sequence
  Description of Artificial Sequence: Synthetic oligonucleotide
ucuuaguuuaauauugguc

SEQ ID NO: 1413559 - RNA, 19 nt, Artificial Sequence
  Description of Artificial Sequence: Synthetic oligonucleotide
auuucuaauugggacacgc

SEQ ID NO: 1413560 - RNA, 19 nt, Artificial Sequence
  Description of Artificial Sequence: Synthetic oligonucleotide
agcugcacuagauacaauc

SEQ ID NO: 1413561 - RNA, 19 nt, Artificial Sequence
  Description of Artificial Sequence: Synthetic oligonucleotide
aguacgaaagaaccuacag

SEQ ID NO: 1413562 - RNA, 19 nt, Artificial Sequence
  Description of Artificial Sequence: Synthetic oligonucleotide
uuaauauuggucauuucua

SEQ ID NO: 1413563 - RNA, 19 nt, Artificial Sequence
  Description of Artificial Sequence: Synthetic oligonucleotide
ugcacuagauacaauccag

SEQ ID NO: 1413564 - RNA, 19 nt, Artificial Sequence
  Description of Artificial Sequence: Synthetic oligonucleotide
ucuuugagcauauuggcaa

SEQ ID NO: 1413565 - RNA, 19 nt, Artificial Sequence
  Description of Artificial Sequence: Synthetic oligonucleotide
agcgucauugagaagaggc

SEQ ID NO: 1413566 - RNA, 19 nt, Artificial Sequence
  Description of Artificial Sequence: Synthetic oligonucleotide
ucuaucuacuggaaaauaa

SEQ ID NO: 1413567 - RNA, 19 nt, Artificial Sequence
  Description of Artificial Sequence: Synthetic oligonucleotide
agugacaucacgaugaaga

SEQ ID NO: 1413568 - RNA, 19 nt, Artificial Sequence
  Description of Artificial Sequence: Synthetic oligonucleotide
cuugcaagcaggucggugg

SEQ ID NO: 1413569 - RNA, 19 nt, Artificial Sequence
  Description of Artificial Sequence: Synthetic oligonucleotide
gacuuaguuaaugcuaugg

SEQ ID NO: 1413570 - RNA, 19 nt, Artificial Sequence
  Description of Artificial Sequence: Synthetic oligonucleotide
uuucacauaguacgaaaga

SEQ ID NO: 1413571 - RNA, 19 nt, Artificial Sequence
  Description of Artificial Sequence: Synthetic oligonucleotide
guacgaaagaaccuacagg

SEQ ID NO: 1413572 - RNA, 19 nt, Artificial Sequence
  Description of Artificial Sequence: Synthetic oligonucleotide
ggaucuugcaagcaggucg

SEQ ID NO: 1413573 - RNA, 19 nt, Artificial Sequence
  Description of Artificial Sequence: Synthetic oligonucleotide
gucacuaggaacaauacac

SEQ ID NO: 1413574 - RNA, 19 nt, Artificial Sequence
  Description of Artificial Sequence: Synthetic oligonucleotide
gaacaagaagucaucaaag

SEQ ID NO: 1413575 - RNA, 19 nt, Artificial Sequence
  Description of Artificial Sequence: Synthetic oligonucleotide
aagacaaaggaagacgugu

SEQ ID NO: 1413576 - RNA, 19 nt, Artificial Sequence
  Description of Artificial Sequence: Synthetic oligonucleotide
uaacuaccaacucuccagg

SEQ ID NO: 1413577 - RNA, 19 nt, Artificial Sequence
  Description of Artificial Sequence: Synthetic oligonucleotide
uaaugaacccgacagacuu

SEQ ID NO: 1413578 - RNA, 19 nt, Artificial Sequence
  Description of Artificial Sequence: Synthetic oligonucleotide
uuuuacaucuccggaagag

SEQ ID NO: 1413579 - RNA, 19 nt, Artificial Sequence
  Description of Artificial Sequence: Synthetic oligonucleotide
acaaugcaugaucagugac

SEQ ID NO: 1413580 - RNA, 19 nt, Artificial Sequence
  Description of Artificial Sequence: Synthetic oligonucleotide
aagacguguaaguugugca

SEQ ID NO: 1413581 - RNA, 19 nt, Artificial Sequence
  Description of Artificial Sequence: Synthetic oligonucleotide
aauauuggucauuucuaau

SEQ ID NO: 1413582 - RNA, 19 nt, Artificial Sequence
  Description of Artificial Sequence: Synthetic oligonucleotide
uguaaguugugcagcuggg

SEQ ID NO: 1413583 - RNA, 19 nt, Artificial Sequence
  Description of Artificial Sequence: Synthetic oligonucleotide
agggaagacguguuucucc

SEQ ID NO: 1413584 - RNA, 19 nt, Artificial Sequence
  Description of Artificial Sequence: Synthetic oligonucleotide
gaagauugacgcugaagag

SEQ ID NO: 1413585 - RNA, 19 nt, Artificial Sequence
  Description of Artificial Sequence: Synthetic oligonucleotide
gaagagaaacuacaguaca

SEQ ID NO: 1413586 - RNA, 19 nt, Artificial Sequence
  Description of Artificial Sequence: Synthetic oligonucleotide
ccaauaaugaacccgacag

SEQ ID NO: 1413587 - RNA, 19 nt, Artificial Sequence
  Description of Artificial Sequence: Synthetic oligonucleotide
uguuaaaaucagcugcacu

SEQ ID NO: 1413588 - RNA, 19 nt, Artificial Sequence
  Description of Artificial Sequence: Synthetic oligonucleotide
aagauugacgcugaagaga

SEQ ID NO: 1413589 - RNA, 19 nt, Artificial Sequence
  Description of Artificial Sequence: Synthetic oligonucleotide
aacaaugcaugaucaguga

SEQ ID NO: 1413590 - RNA, 19 nt, Artificial Sequence
  Description of Artificial Sequence: Synthetic oligonucleotide
uuacaucuccggaagaggu

SEQ ID NO: 1413591 - RNA, 19 nt, Artificial Sequence
  Description of Artificial Sequence: Synthetic oligonucleotide
caacaaugcaugaucagug

SEQ ID NO: 1413592 - RNA, 19 nt, Artificial Sequence
  Description of Artificial Sequence: Synthetic oligonucleotide
cuacuggaaaauaaaguuc

SEQ ID NO: 1413593 - RNA, 19 nt, Artificial Sequence
  Description of Artificial Sequence: Synthetic oligonucleotide
aggaggaugcuuucaaguc

SEQ ID NO: 1413594 - RNA, 19 nt, Artificial Sequence
  Description of Artificial Sequence: Synthetic oligonucleotide
ugguguguuucacucacag

SEQ ID NO: 1413595 - RNA, 19 nt, Artificial Sequence
  Description of Artificial Sequence: Synthetic oligonucleotide
agugugggugagcugagcg

SEQ ID NO: 1413596 - RNA, 19 nt, Artificial Sequence
  Description of Artificial Sequence: Synthetic oligonucleotide
uaauauuggucauuucuaa

SEQ ID NO: 1413597 - RNA, 19 nt, Artificial Sequence
  Description of Artificial Sequence: Synthetic oligonucleotide
cuacuaacuaccaacucuc

SEQ ID NO: 1413598 - RNA, 19 nt, Artificial Sequence
  Description of Artificial Sequence: Synthetic oligonucleotide
cuaugggaagacuaaggag

SEQ ID NO: 1413599 - RNA, 19 nt, Artificial Sequence
  Description of Artificial Sequence: Synthetic oligonucleotide
auauuggucauuucuaauu

SEQ ID NO: 1413600 - RNA, 19 nt, Artificial Sequence
  Description of Artificial Sequence: Synthetic oligonucleotide
gauaagguccuccccuagg

SEQ ID NO: 1413601 - RNA, 19 nt, Artificial Sequence
  Description of Artificial Sequence: Synthetic oligonucleotide
gauuccggcauuuggcugc

SEQ ID NO: 1413602 - RNA, 19 nt, Artificial Sequence
  Description of Artificial Sequence: Synthetic oligonucleotide
uaaugcuaugggaagacua

SEQ ID NO: 1413603 - RNA, 19 nt, Artificial Sequence
  Description of Artificial Sequence: Synthetic oligonucleotide
ucugcugcguagaaggaac

SEQ ID NO: 1413604 - RNA, 19 nt, Artificial Sequence
  Description of Artificial Sequence: Synthetic oligonucleotide
uucuaauugggacacgcua

SEQ ID NO: 1413605 - RNA, 19 nt, Artificial Sequence
  Description of Artificial Sequence: Synthetic oligonucleotide
auagguccaugucuggcac

SEQ ID NO: 1413606 - RNA, 19 nt, Artificial Sequence
  Description of Artificial Sequence: Synthetic oligonucleotide
ggagcuacugugcagaggc

SEQ ID NO: 1413607 - RNA, 19 nt, Artificial Sequence
  Description of Artificial Sequence: Synthetic oligonucleotide
accaccgggguacacaggg

SEQ ID NO: 1413608 - RNA, 19 nt, Artificial Sequence
  Description of Artificial Sequence: Synthetic oligonucleotide
uucuuaguuuaauauuggu

SEQ ID NO: 1413609 - RNA, 19 nt, Artificial Sequence
  Description of Artificial Sequence: Synthetic oligonucleotide
ucacuaggaacaauacacu

SEQ ID NO: 1413610 - RNA, 19 nt, Artificial Sequence
  Description of Artificial Sequence: Synthetic oligonucleotide
cauuucuagacgccgacug

SEQ ID NO: 1413611 - RNA, 19 nt, Artificial Sequence
  Description of Artificial Sequence: Synthetic oligonucleotide
uggccgucgucucagagcc

SEQ ID NO: 1413612 - RNA, 19 nt, Artificial Sequence
  Description of Artificial Sequence: Synthetic oligonucleotide
agucaaauccagggaagcc

SEQ ID NO: 1413613 - RNA, 19 nt, Artificial Sequence
  Description of Artificial Sequence: Synthetic oligonucleotide
agguuaauucccaauaaug

SEQ ID NO: 1413614 - RNA, 19 nt, Artificial Sequence
  Description of Artificial Sequence: Synthetic oligonucleotide
agacuucucgucuucaagu

SEQ ID NO: 1413615 - RNA, 19 nt, Artificial Sequence
  Description of Artificial Sequence: Synthetic oligonucleotide
agacguguaaguugugcag

SEQ ID NO: 1413616 - RNA, 19 nt, Artificial Sequence
  Description of Artificial Sequence: Synthetic oligonucleotide
agagaaacuacaguacaug

SEQ ID NO: 1413617 - RNA, 19 nt, Artificial Sequence
  Description of Artificial Sequence: Synthetic oligonucleotide
aaguugugcagcugggagu

SEQ ID NO: 1413618 - RNA, 19 nt, Artificial Sequence
  Description of Artificial Sequence: Synthetic oligonucleotide
cuaggaacaauacacucca

SEQ ID NO: 1413619 - RNA, 19 nt, Artificial Sequence
  Description of Artificial Sequence: Synthetic oligonucleotide
ucagucaguucccuccucc

SEQ ID NO: 1413620 - RNA, 19 nt, Artificial Sequence
  Description of Artificial Sequence: Synthetic oligonucleotide
aaccggauagguccauguc

SEQ ID NO: 1413621 - RNA, 19 nt, Artificial Sequence
  Description of Artificial Sequence: Synthetic oligonucleotide
uuaguuuaauauuggucau

SEQ ID NO: 1413622 - RNA, 19 nt, Artificial Sequence
  Description of Artificial Sequence: Synthetic oligonucleotide
ucgucuucaaguuggucug

SEQ ID NO: 1413623 - RNA, 19 nt, Artificial Sequence
  Description of Artificial Sequence: Synthetic oligonucleotide
gauucuccguuucucuucc

SEQ ID NO: 1413624 - RNA, 19 nt, Artificial Sequence
  Description of Artificial Sequence: Synthetic oligonucleotide
aguaucagucaguucccuc

SEQ ID NO: 1413625 - RNA, 19 nt, Artificial Sequence
  Description of Artificial Sequence: Synthetic oligonucleotide
acacgcuauugccaggaac

SEQ ID NO: 1413626 - RNA, 19 nt, Artificial Sequence
  Description of Artificial Sequence: Synthetic oligonucleotide
uggucauuucuaauuggga

SEQ ID NO: 1413627 - RNA, 19 nt, Artificial Sequence
  Description of Artificial Sequence: Synthetic oligonucleotide
uuucuagacgccgacugcc

SEQ ID NO: 1413628 - RNA, 19 nt, Artificial Sequence
  Description of Artificial Sequence: Synthetic oligonucleotide
uucagaucaccucaacaau

SEQ ID NO: 1413629 - RNA, 19 nt, Artificial Sequence
  Description of Artificial Sequence: Synthetic oligonucleotide
uccgggaucuugcaagcag

SEQ ID NO: 1413630 - RNA, 19 nt, Artificial Sequence
  Description of Artificial Sequence: Synthetic oligonucleotide
auaguacgaaagaaccuac

SEQ ID NO: 1413631 - RNA, 19 nt, Artificial Sequence
  Description of Artificial Sequence: Synthetic oligonucleotide
aucaccucaacaaugcaug

SEQ ID NO: 1413632 - RNA, 19 nt, Artificial Sequence
  Description of Artificial Sequence: Synthetic oligonucleotide
acuaacuaccaacucucca

SEQ ID NO: 1413633 - RNA, 19 nt, Artificial Sequence
  Description of Artificial Sequence: Synthetic oligonucleotide
caugaucagugacaucacg

SEQ ID NO: 1413634 - RNA, 19 nt, Artificial Sequence
  Description of Artificial Sequence: Synthetic oligonucleotide
aacccgacagacuuaguua

SEQ ID NO: 1413635 - RNA, 19 nt, Artificial Sequence
  Description of Artificial Sequence: Synthetic oligonucleotide
gauagguccaugucuggca

SEQ ID NO: 1413636 - RNA, 19 nt, Artificial Sequence
  Description of Artificial Sequence: Synthetic oligonucleotide
aaugcuaugggaagacuaa

SEQ ID NO: 1413637 - RNA, 19 nt, Artificial Sequence
  Description of Artificial Sequence: Synthetic oligonucleotide
uuucuaauugggacacgcu

SEQ ID NO: 1413638 - RNA, 19 nt, Artificial Sequence
  Description of Artificial Sequence: Synthetic oligonucleotide
aaguuggucugucuccgcu

SEQ ID NO: 1413639 - RNA, 19 nt, Artificial Sequence
  Description of Artificial Sequence: Synthetic oligonucleotide
agaguaucagucaguuccc

SEQ ID NO: 1413640 - RNA, 19 nt, Artificial Sequence
  Description of Artificial Sequence: Synthetic oligonucleotide
ucgggguaggugaagacaa

SEQ ID NO: 1413641 - RNA, 19 nt, Artificial Sequence
  Description of Artificial Sequence: Synthetic oligonucleotide
gaacccucgagggaagacg

SEQ ID NO: 1413642 - RNA, 19 nt, Artificial Sequence
  Description of Artificial Sequence: Synthetic oligonucleotide
uugcaagcaggucgguggg

SEQ ID NO: 1413643 - RNA, 19 nt, Artificial Sequence
  Description of Artificial Sequence: Synthetic oligonucleotide
uagcuacuuaguucuaucu

SEQ ID NO: 1413644 - RNA, 19 nt, Artificial Sequence
  Description of Artificial Sequence: Synthetic oligonucleotide
gaaaacuguuaaugucagc

SEQ ID NO: 1413645 - RNA, 19 nt, Artificial Sequence
  Description of Artificial Sequence: Synthetic oligonucleotide
accggauagguccaugucu

SEQ ID NO: 1413646 - RNA, 19 nt, Artificial Sequence
  Description of Artificial Sequence: Synthetic oligonucleotide
cacgcuauugccaggaaca

SEQ ID NO: 1413647 - RNA, 19 nt, Artificial Sequence
  Description of Artificial Sequence: Synthetic oligonucleotide
uaguacgaaagaaccuaca

SEQ ID NO: 1413648 - RNA, 19 nt, Artificial Sequence
  Description of Artificial Sequence: Synthetic oligonucleotide
ggauauagcuacuuaguuc

SEQ ID NO: 1413649 - RNA, 19 nt, Artificial Sequence
  Description of Artificial Sequence: Synthetic oligonucleotide
cacuaggaacaauacacuc

SEQ ID NO: 1413650 - RNA, 19 nt, Artificial Sequence
  Description of Artificial Sequence: Synthetic oligonucleotide
gguuaauucccaauaauga

SEQ ID NO: 1413651 - RNA, 19 nt, Artificial Sequence
  Description of Artificial Sequence: Synthetic oligonucleotide
uacuaacuaccaacucucc

SEQ ID NO: 1413652 - RNA, 19 nt, Artificial Sequence
  Description of Artificial Sequence: Synthetic oligonucleotide
uagauacaauccagcacca

SEQ ID NO: 1413653 - RNA, 19 nt, Artificial Sequence
  Description of Artificial Sequence: Synthetic oligonucleotide
uacaucuccggaagaggug

SEQ ID NO: 1413654 - RNA, 19 nt, Artificial Sequence
  Description of Artificial Sequence: Synthetic oligonucleotide
gacguguaaguugugcagc

SEQ ID NO: 1413655 - RNA, 19 nt, Artificial Sequence
  Description of Artificial Sequence: Synthetic oligonucleotide
accagguuaauucccaaua

SEQ ID NO: 1413656 - RNA, 19 nt, Artificial Sequence
  Description of Artificial Sequence: Synthetic oligonucleotide
aacuaccaacucuccaggu

SEQ ID NO: 1413657 - RNA, 19 nt, Artificial Sequence
  Description of Artificial Sequence: Synthetic oligonucleotide
ucuccaggugucacuagga

SEQ ID NO: 1413658 - RNA, 19 nt, Artificial Sequence
  Description of Artificial Sequence: Synthetic oligonucleotide
aggaagacguguaaguugu

SEQ ID NO: 1413659 - RNA, 19 nt, Artificial Sequence
  Description of Artificial Sequence: Synthetic oligonucleotide
cugagaauccaucuuaaua

SEQ ID NO: 1413660 - RNA, 19 nt, Artificial Sequence
  Description of Artificial Sequence: Synthetic oligonucleotide
cucuugacuggcuccagug

SEQ ID NO: 1413661 - RNA, 19 nt, Artificial Sequence
  Description of Artificial Sequence: Synthetic oligonucleotide
agauugacgcugaagagaa

SEQ ID NO: 1413662 - RNA, 19 nt, Artificial Sequence
  Description of Artificial Sequence: Synthetic oligonucleotide
aaaagaggacagacccagg

SEQ ID NO: 1413663 - RNA, 19 nt, Artificial Sequence
  Description of Artificial Sequence: Synthetic oligonucleotide
uugagcauauuggcaaucu

SEQ ID NO: 1413664 - RNA, 19 nt, Artificial Sequence
  Description of Artificial Sequence: Synthetic oligonucleotide
augaacccgacagacuuag

SEQ ID NO: 1413665 - RNA, 19 nt, Artificial Sequence
  Description of Artificial Sequence: Synthetic oligonucleotide
uccgcuuggagaguaucag

SEQ ID NO: 1413666 - RNA, 19 nt, Artificial Sequence
  Description of Artificial Sequence: Synthetic oligonucleotide
aggaacacaguagguauug

SEQ ID NO: 1413667 - RNA, 19 nt, Artificial Sequence
  Description of Artificial Sequence: Synthetic oligonucleotide
cacuagauacaauccagca

SEQ ID NO: 1413668 - RNA, 19 nt, Artificial Sequence
  Description of Artificial Sequence: Synthetic oligonucleotide
acaguagguauuguuaaaa

SEQ ID NO: 1413669 - RNA, 19 nt, Artificial Sequence
  Description of Artificial Sequence: Synthetic oligonucleotide
cucacagauaagguccucc

SEQ ID NO: 1413670 - RNA, 19 nt, Artificial Sequence
  Description of Artificial Sequence: Synthetic oligonucleotide
guagaaggaaccggauagg

SEQ ID NO: 1413671 - RNA, 19 nt, Artificial Sequence
  Description of Artificial Sequence: Synthetic oligonucleotide
gacagacuuaguuaaugcu

SEQ ID NO: 1413672 - RNA, 19 nt, Artificial Sequence
  Description of Artificial Sequence: Synthetic oligonucleotide
aggucauccgggaucuugc

SEQ ID NO: 1413673 - RNA, 19 nt, Artificial Sequence
  Description of Artificial Sequence: Synthetic oligonucleotide
gacgcugaagagaaacuac

SEQ ID NO: 1413674 - RNA, 19 nt, Artificial Sequence
  Description of Artificial Sequence: Synthetic oligonucleotide
acuaaggagaaggaagaaa

SEQ ID NO: 1413675 - RNA, 19 nt, Artificial Sequence
  Description of Artificial Sequence: Synthetic oligonucleotide
cauucagaucaccucaaca

SEQ ID NO: 1413676 - RNA, 19 nt, Artificial Sequence
  Description of Artificial Sequence: Synthetic oligonucleotide
aauacacuccaugcgguuu

SEQ ID NO: 1413677 - RNA, 19 nt, Artificial Sequence
  Description of Artificial Sequence: Synthetic oligonucleotide
agcuacugugcagaggcuc

SEQ ID NO: 1413678 - RNA, 19 nt, Artificial Sequence
  Description of Artificial Sequence: Synthetic oligonucleotide
agauaagguccuccccuag

SEQ ID NO: 1413679 - RNA, 19 nt, Artificial Sequence
  Description of Artificial Sequence: Synthetic oligonucleotide
ugcugcguagaaggaaccg

SEQ ID NO: 1413680 - RNA, 19 nt, Artificial Sequence
  Description of Artificial Sequence: Synthetic oligonucleotide
ugcuacuaacuaccaacuc

SEQ ID NO: 1413681 - RNA, 19 nt, Artificial Sequence
  Description of Artificial Sequence: Synthetic oligonucleotide
uauagcuacuuaguucuau

SEQ ID NO: 1413682 - RNA, 19 nt, Artificial Sequence
  Description of Artificial Sequence: Synthetic oligonucleotide
cacagauaagguccucccc

SEQ ID NO: 1413683 - RNA, 19 nt, Artificial Sequence
  Description of Artificial Sequence: Synthetic oligonucleotide
uaauugggacacgcuauug

SEQ ID NO: 1413684 - RNA, 19 nt, Artificial Sequence
  Description of Artificial Sequence: Synthetic oligonucleotide
acagacuuaguuaaugcua

SEQ ID NO: 1413685 - RNA, 19 nt, Artificial Sequence
  Description of Artificial Sequence: Synthetic oligonucleotide
cauaguacgaaagaaccua

SEQ ID NO: 1413686 - RNA, 19 nt, Artificial Sequence
  Description of Artificial Sequence: Synthetic oligonucleotide
uugaguccagaggaggaug

SEQ ID NO: 1413687 - RNA, 19 nt, Artificial Sequence
  Description of Artificial Sequence: Synthetic oligonucleotide
aggucuacaggaacccucg

SEQ ID NO: 1413688 - RNA, 19 nt, Artificial Sequence
  Description of Artificial Sequence: Synthetic oligonucleotide
gaagacuaaggagaaggaa

SEQ ID NO: 1413689 - RNA, 19 nt, Artificial Sequence
  Description of Artificial Sequence: Synthetic oligonucleotide
acguuuucauggaaaacug

SEQ ID NO: 1413690 - RNA, 19 nt, Artificial Sequence
  Description of Artificial Sequence: Synthetic oligonucleotide
agcuacuuaguucuaucua

SEQ ID NO: 1413691 - RNA, 19 nt, Artificial Sequence
  Description of Artificial Sequence: Synthetic oligonucleotide
ugaccaugggccccauccc

SEQ ID NO: 1413692 - RNA, 19 nt, Artificial Sequence
  Description of Artificial Sequence: Synthetic oligonucleotide
acccgacagacuuaguuaa

SEQ ID NO: 1413693 - RNA, 19 nt, Artificial Sequence
  Description of Artificial Sequence: Synthetic oligonucleotide
cucgucuucaaguuggucu

SEQ ID NO: 1413694 - RNA, 19 nt, Artificial Sequence
  Description of Artificial Sequence: Synthetic oligonucleotide
ucaccucaacaaugcauga

SEQ ID NO: 1413695 - RNA, 19 nt, Artificial Sequence
  Description of Artificial Sequence: Synthetic oligonucleotide
acguguaaguugugcagcu

SEQ ID NO: 1413696 - RNA, 19 nt, Artificial Sequence
  Description of Artificial Sequence: Synthetic oligonucleotide
acauaguacgaaagaaccu

SEQ ID NO: 1413697 - RNA, 19 nt, Artificial Sequence
  Description of Artificial Sequence: Synthetic oligonucleotide
gcuaugggaagacuaagga

SEQ ID NO: 1413698 - RNA, 19 nt, Artificial Sequence
  Description of Artificial Sequence: Synthetic oligonucleotide
gaagacguguuucuccucu

SEQ ID NO: 1413699 - RNA, 19 nt, Artificial Sequence
  Description of Artificial Sequence: Synthetic oligonucleotide
ucagucugcaaugcagacu

SEQ ID NO: 1413700 - RNA, 19 nt, Artificial Sequence
  Description of Artificial Sequence: Synthetic oligonucleotide
agacuuaguuaaugcuaug

SEQ ID NO: 1413701 - RNA, 19 nt, Artificial Sequence
  Description of Artificial Sequence: Synthetic oligonucleotide
uucuagacgccgacugccu

SEQ ID NO: 1413702 - RNA, 19 nt, Artificial Sequence
  Description of Artificial Sequence: Synthetic oligonucleotide
acauggauauagcuacuua

SEQ ID NO: 1413703 - RNA, 19 nt, Artificial Sequence
  Description of Artificial Sequence: Synthetic oligonucleotide
cauccgggaucuugcaagc

SEQ ID NO: 1413704 - RNA, 19 nt, Artificial Sequence
  Description of Artificial Sequence: Synthetic oligonucleotide
caauaaugaacccgacaga

SEQ ID NO: 1413705 - RNA, 19 nt, Artificial Sequence
  Description of Artificial Sequence: Synthetic oligonucleotide
uacaggugaccaccggggu

SEQ ID NO: 1413706 - RNA, 19 nt, Artificial Sequence
  Description of Artificial Sequence: Synthetic oligonucleotide
uggagaguaucagucaguu

SEQ ID NO: 1413707 - RNA, 19 nt, Artificial Sequence
  Description of Artificial Sequence: Synthetic oligonucleotide
caaaggaagacguguaagu

SEQ ID NO: 1413708 - RNA, 19 nt, Artificial Sequence
  Description of Artificial Sequence: Synthetic oligonucleotide
gagggcucguugcugcugc

SEQ ID NO: 1413709 - RNA, 19 nt, Artificial Sequence
  Description of Artificial Sequence: Synthetic oligonucleotide
uucuaucuacuggaaaaua

SEQ ID NO: 1413710 - RNA, 19 nt, Artificial Sequence
  Description of Artificial Sequence: Synthetic oligonucleotide
cacuuuucacauaguacga

SEQ ID NO: 1413711 - RNA, 19 nt, Artificial Sequence
  Description of Artificial Sequence: Synthetic oligonucleotide
agaucaccucaacaaugca

SEQ ID NO: 1413712 - RNA, 19 nt, Artificial Sequence
  Description of Artificial Sequence: Synthetic oligonucleotide
acaauacacuccaugcggu

SEQ ID NO: 1413713 - RNA, 19 nt, Artificial Sequence
  Description of Artificial Sequence: Synthetic oligonucleotide
caccgggguacacaggggc

SEQ ID NO: 1413714 - RNA, 19 nt, Artificial Sequence
  Description of Artificial Sequence: Synthetic oligonucleotide
aacccucgagggaagacgu

SEQ ID NO: 1413715 - RNA, 19 nt, Artificial Sequence
  Description of Artificial Sequence: Synthetic oligonucleotide
gcuacuaacuaccaacucu

SEQ ID NO: 1413716 - RNA, 19 nt, Artificial Sequence
  Description of Artificial Sequence: Synthetic oligonucleotide
gcacauucagaucaccuca

SEQ ID NO: 1413717 - RNA, 19 nt, Artificial Sequence
  Description of Artificial Sequence: Synthetic oligonucleotide
gucagaggagggcucguug

SEQ ID NO: 1413718 - RNA, 19 nt, Artificial Sequence
  Description of Artificial Sequence: Synthetic oligonucleotide
cagcaccagguuaauuccc

SEQ ID NO: 1413719 - RNA, 19 nt, Artificial Sequence
  Description of Artificial Sequence: Synthetic oligonucleotide
augcuaugggaagacuaag

SEQ ID NO: 1413720 - RNA, 19 nt, Artificial Sequence
  Description of Artificial Sequence: Synthetic oligonucleotide
ucuagacgccgacugccuc

SEQ ID NO: 1413721 - RNA, 19 nt, Artificial Sequence
  Description of Artificial Sequence: Synthetic oligonucleotide
augcuacuaacuaccaacu

SEQ ID NO: 1413722 - RNA, 19 nt, Artificial Sequence
  Description of Artificial Sequence: Synthetic oligonucleotide
uucggauucuccguuucuc

SEQ ID NO: 1413723 - RNA, 19 nt, Artificial Sequence
  Description of Artificial Sequence: Synthetic oligonucleotide
aucagucaguucccuccuc

SEQ ID NO: 1413724 - RNA, 19 nt, Artificial Sequence
  Description of Artificial Sequence: Synthetic oligonucleotide
ucgagggaagacguguuuc

SEQ ID NO: 1413725 - RNA, 19 nt, Artificial Sequence
  Description of Artificial Sequence: Synthetic oligonucleotide
uccuccccuaggucuacag

SEQ ID NO: 1413726 - RNA, 19 nt, Artificial Sequence
  Description of Artificial Sequence: Synthetic oligonucleotide
ugcguagaaggaaccggau

SEQ ID NO: 1413727 - RNA, 19 nt, Artificial Sequence
  Description of Artificial Sequence: Synthetic oligonucleotide
acgcuauugccaggaacac

SEQ ID NO: 1413728 - RNA, 19 nt, Artificial Sequence
  Description of Artificial Sequence: Synthetic oligonucleotide
gaacccgacagacuuaguu

SEQ ID NO: 1413729 - RNA, 19 nt, Artificial Sequence
  Description of Artificial Sequence: Synthetic oligonucleotide
ugggaguacaggugaccac

SEQ ID NO: 1413730 - RNA, 19 nt, Artificial Sequence
  Description of Artificial Sequence: Synthetic oligonucleotide
cugcguagaaggaaccgga

SEQ ID NO: 1413731 - RNA, 19 nt, Artificial Sequence
  Description of Artificial Sequence: Synthetic oligonucleotide
cuaccaacucuccaggugu

SEQ ID NO: 1413732 - RNA, 19 nt, Artificial Sequence
  Description of Artificial Sequence: Synthetic oligonucleotide
gcugcguagaaggaaccgg

SEQ ID NO: 1413733 - RNA, 19 nt, Artificial Sequence
  Description of Artificial Sequence: Synthetic oligonucleotide
cugcugcguagaaggaacc

SEQ ID NO: 1413734 - RNA, 19 nt, Artificial Sequence
  Description of Artificial Sequence: Synthetic oligonucleotide
agaucuggccgucgucuca

SEQ ID NO: 1413735 - RNA, 19 nt, Artificial Sequence
  Description of Artificial Sequence: Synthetic oligonucleotide
ugcccuuucggugggcagc

SEQ ID NO: 1413736 - RNA, 19 nt, Artificial Sequence
  Description of Artificial Sequence: Synthetic oligonucleotide
cauuucuaauugggacacg

SEQ ID NO: 1413737 - RNA, 19 nt, Artificial Sequence
  Description of Artificial Sequence: Synthetic oligonucleotide
cccuaggucuacaggaacc

SEQ ID NO: 1413738 - RNA, 19 nt, Artificial Sequence
  Description of Artificial Sequence: Synthetic oligonucleotide
augcaugaucagugacauc

SEQ ID NO: 1413739 - RNA, 19 nt, Artificial Sequence
  Description of Artificial Sequence: Synthetic oligonucleotide
cagacuuaguuaaugcuau

SEQ ID NO: 1413740 - RNA, 19 nt, Artificial Sequence
  Description of Artificial Sequence: Synthetic oligonucleotide
agggagcuacugugcagag

SEQ ID NO: 1413741 - RNA, 19 nt, Artificial Sequence
  Description of Artificial Sequence: Synthetic oligonucleotide
cucaugcuacuaacuacca

SEQ ID NO: 1413742 - RNA, 19 nt, Artificial Sequence
  Description of Artificial Sequence: Synthetic oligonucleotide
uaccaacucuccagguguc

SEQ ID NO: 1413743 - RNA, 19 nt, Artificial Sequence
  Description of Artificial Sequence: Synthetic oligonucleotide
agaggcucccagucugcug

SEQ ID NO: 1413744 - RNA, 19 nt, Artificial Sequence
  Description of Artificial Sequence: Synthetic oligonucleotide
gaaccggauagguccaugu

SEQ ID NO: 1413745 - RNA, 19 nt, Artificial Sequence
  Description of Artificial Sequence: Synthetic oligonucleotide
aaugaacccgacagacuua

SEQ ID NO: 1413746 - RNA, 19 nt, Artificial Sequence
  Description of Artificial Sequence: Synthetic oligonucleotide
cgacagacuuaguuaaugc

SEQ ID NO: 1413747 - RNA, 19 nt, Artificial Sequence
  Description of Artificial Sequence: Synthetic oligonucleotide
ccggauagguccaugucug

SEQ ID NO: 1413748 - RNA, 19 nt, Artificial Sequence
  Description of Artificial Sequence: Synthetic oligonucleotide
gcacuagauacaauccagc

SEQ ID NO: 1413749 - RNA, 19 nt, Artificial Sequence
  Description of Artificial Sequence: Synthetic oligonucleotide
agcaccagguuaauuccca

SEQ ID NO: 1413750 - RNA, 19 nt, Artificial Sequence
  Description of Artificial Sequence: Synthetic oligonucleotide
aguuggucugucuccgcuu

SEQ ID NO: 1413751 - RNA, 19 nt, Artificial Sequence
  Description of Artificial Sequence: Synthetic oligonucleotide
cuuucggugggcagcugca

SEQ ID NO: 1413752 - RNA, 19 nt, Artificial Sequence
  Description of Artificial Sequence: Synthetic oligonucleotide
augggaagacuaaggagaa

SEQ ID NO: 1413753 - RNA, 19 nt, Artificial Sequence
  Description of Artificial Sequence: Synthetic oligonucleotide
caucuccggaagaggugag

SEQ ID NO: 1413754 - RNA, 19 nt, Artificial Sequence
  Description of Artificial Sequence: Synthetic oligonucleotide
ccgggaucuugcaagcagg

SEQ ID NO: 1413755 - RNA, 19 nt, Artificial Sequence
  Description of Artificial Sequence: Synthetic oligonucleotide
gacuaaggagaaggaagaa

SEQ ID NO: 1413756 - RNA, 19 nt, Artificial Sequence
  Description of Artificial Sequence: Synthetic oligonucleotide
ggcauuucuagacgccgac

SEQ ID NO: 1413757 - RNA, 19 nt, Artificial Sequence
  Description of Artificial Sequence: Synthetic oligonucleotide
acaggugaccaccggggua

SEQ ID NO: 1413758 - RNA, 19 nt, Artificial Sequence
  Description of Artificial Sequence: Synthetic oligonucleotide
ucccuucggauucuccguu

SEQ ID NO: 1413759 - RNA, 19 nt, Artificial Sequence
  Description of Artificial Sequence: Synthetic oligonucleotide
ccuaggucuacaggaaccc

SEQ ID NO: 1413760 - RNA, 19 nt, Artificial Sequence
  Description of Artificial Sequence: Synthetic oligonucleotide
cacauucagaucaccucaa

SEQ ID NO: 1413761 - RNA, 19 nt, Artificial Sequence
  Description of Artificial Sequence: Synthetic oligonucleotide
acucacagauaagguccuc

SEQ ID NO: 1413762 - RNA, 19 nt, Artificial Sequence
  Description of Artificial Sequence: Synthetic oligonucleotide
gugggaacaagaagucauc

SEQ ID NO: 1413763 - RNA, 19 nt, Artificial Sequence
  Description of Artificial Sequence: Synthetic oligonucleotide
gcuacugugcagaggcucc

SEQ ID NO: 1413764 - RNA, 19 nt, Artificial Sequence
  Description of Artificial Sequence: Synthetic oligonucleotide
cuacugugcagaggcuccc

SEQ ID NO: 1413765 - RNA, 19 nt, Artificial Sequence
  Description of Artificial Sequence: Synthetic oligonucleotide
caaugcagacuucucgucu

SEQ ID NO: 1413766 - RNA, 19 nt, Artificial Sequence
  Description of Artificial Sequence: Synthetic oligonucleotide
ucuccgcuuggagaguauc

SEQ ID NO: 1413767 - RNA, 19 nt, Artificial Sequence
  Description of Artificial Sequence: Synthetic oligonucleotide
gggaacaagaagucaucaa

SEQ ID NO: 1413768 - RNA, 19 nt, Artificial Sequence
  Description of Artificial Sequence: Synthetic oligonucleotide
ugaacccgacagacuuagu

SEQ ID NO: 1413769 - RNA, 19 nt, Artificial Sequence
  Description of Artificial Sequence: Synthetic oligonucleotide
acgaaagaaccuacaggau

SEQ ID NO: 1413770 - RNA, 19 nt, Artificial Sequence
  Description of Artificial Sequence: Synthetic oligonucleotide
acuacaguacauggauaua

SEQ ID NO: 1413771 - RNA, 19 nt, Artificial Sequence
  Description of Artificial Sequence: Synthetic oligonucleotide
gugggcugccaaaaugaac

SEQ ID NO: 1413772 - RNA, 19 nt, Artificial Sequence
  Description of Artificial Sequence: Synthetic oligonucleotide
ggcaaucucagucugcaau

SEQ ID NO: 1413773 - RNA, 19 nt, Artificial Sequence
  Description of Artificial Sequence: Synthetic oligonucleotide
gcucucaugcuacuaacua

SEQ ID NO: 1413774 - RNA, 19 nt, Artificial Sequence
  Description of Artificial Sequence: Synthetic oligonucleotide
ggcugccaaaaugaacucc

SEQ ID NO: 1413775 - RNA, 19 nt, Artificial Sequence
  Description of Artificial Sequence: Synthetic oligonucleotide
cucgggguaggugaagaca

SEQ ID NO: 1413776 - RNA, 19 nt, Artificial Sequence
  Description of Artificial Sequence: Synthetic oligonucleotide
uuucggugggcagcugcac

SEQ ID NO: 1413777 - RNA, 19 nt, Artificial Sequence
  Description of Artificial Sequence: Synthetic oligonucleotide
ucucgucuucaaguugguc

SEQ ID NO: 1413778 - RNA, 19 nt, Artificial Sequence
  Description of Artificial Sequence: Synthetic oligonucleotide
gacucugggguaguggccu

SEQ ID NO: 1413779 - RNA, 19 nt, Artificial Sequence
  Description of Artificial Sequence: Synthetic oligonucleotide
caaagggcucagccuucag

SEQ ID NO: 1413780 - RNA, 19 nt, Artificial Sequence
  Description of Artificial Sequence: Synthetic oligonucleotide
gcaaugcagacuucucguc

SEQ ID NO: 1413781 - RNA, 19 nt, Artificial Sequence
  Description of Artificial Sequence: Synthetic oligonucleotide
gguguguuucacucacaga

SEQ ID NO: 1413782 - RNA, 19 nt, Artificial Sequence
  Description of Artificial Sequence: Synthetic oligonucleotide
gugacaucacgaugaagau

SEQ ID NO: 1413783 - RNA, 19 nt, Artificial Sequence
  Description of Artificial Sequence: Synthetic oligonucleotide
cagguuaauucccaauaau

SEQ ID NO: 1413784 - RNA, 19 nt, Artificial Sequence
  Description of Artificial Sequence: Synthetic oligonucleotide
cugcccuuucggugggcag

SEQ ID NO: 1413785 - RNA, 19 nt, Artificial Sequence
  Description of Artificial Sequence: Synthetic oligonucleotide
ggagaguaucagucaguuc

SEQ ID NO: 1413786 - RNA, 19 nt, Artificial Sequence
  Description of Artificial Sequence: Synthetic oligonucleotide
ggacuugaguccagaggag

SEQ ID NO: 1413787 - RNA, 19 nt, Artificial Sequence
  Description of Artificial Sequence: Synthetic oligonucleotide
ccgacagacuuaguuaaug

SEQ ID NO: 1413788 - RNA, 19 nt, Artificial Sequence
  Description of Artificial Sequence: Synthetic oligonucleotide
accaacucuccagguguca

SEQ ID NO: 1413789 - RNA, 19 nt, Artificial Sequence
  Description of Artificial Sequence: Synthetic oligonucleotide
cagcgucauugagaagagg

SEQ ID NO: 1413790 - RNA, 19 nt, Artificial Sequence
  Description of Artificial Sequence: Synthetic oligonucleotide
cccaauaaugaacccgaca

SEQ ID NO: 1413791 - RNA, 19 nt, Artificial Sequence
  Description of Artificial Sequence: Synthetic oligonucleotide
gggaagacguguuucuccu

SEQ ID NO: 1413792 - RNA, 19 nt, Artificial Sequence
  Description of Artificial Sequence: Synthetic oligonucleotide
aggucggugggcugccaaa

SEQ ID NO: 1413793 - RNA, 19 nt, Artificial Sequence
  Description of Artificial Sequence: Synthetic oligonucleotide
ugugaccaugggccccauc

SEQ ID NO: 1413794 - RNA, 19 nt, Artificial Sequence
  Description of Artificial Sequence: Synthetic oligonucleotide
gggacacgcuauugccagg

SEQ ID NO: 1413795 - RNA, 19 nt, Artificial Sequence
  Description of Artificial Sequence: Synthetic oligonucleotide
cgaaagaaccuacaggaua

SEQ ID NO: 1413796 - RNA, 19 nt, Artificial Sequence
  Description of Artificial Sequence: Synthetic oligonucleotide
agacgccgacugccucccc

SEQ ID NO: 1413797 - RNA, 19 nt, Artificial Sequence
  Description of Artificial Sequence: Synthetic oligonucleotide
cugcugcccuuucgguggg

SEQ ID NO: 1413798 - RNA, 19 nt, Artificial Sequence
  Description of Artificial Sequence: Synthetic oligonucleotide
ccagguuaauucccaauaa

SEQ ID NO: 1413799 - RNA, 19 nt, Artificial Sequence
  Description of Artificial Sequence: Synthetic oligonucleotide
gacacgcuauugccaggaa

SEQ ID NO: 1413800 - RNA, 19 nt, Artificial Sequence
  Description of Artificial Sequence: Synthetic oligonucleotide
ggacacgcuauugccagga

SEQ ID NO: 1413801 - RNA, 19 nt, Artificial Sequence
  Description of Artificial Sequence: Synthetic oligonucleotide
gcgucauugagaagaggca

SEQ ID NO: 1413802 - RNA, 19 nt, Artificial Sequence
  Description of Artificial Sequence: Synthetic oligonucleotide
cagugugggugagcugagc

SEQ ID NO: 1413803 - RNA, 19 nt, Artificial Sequence
  Description of Artificial Sequence: Synthetic oligonucleotide
cugguguguuucacucaca

SEQ ID NO: 1413804 - RNA, 19 nt, Artificial Sequence
  Description of Artificial Sequence: Synthetic oligonucleotide
auuccggcauuuggcugca

SEQ ID NO: 1413805 - RNA, 19 nt, Artificial Sequence
  Description of Artificial Sequence: Synthetic oligonucleotide
gggaaggagucagccucgg

SEQ ID NO: 1413806 - RNA, 19 nt, Artificial Sequence
  Description of Artificial Sequence: Synthetic oligonucleotide
uccuccgauuccggcauuu

SEQ ID NO: 1413807 - RNA, 19 nt, Artificial Sequence
  Description of Artificial Sequence: Synthetic oligonucleotide
auccgggaucuugcaagca

SEQ ID NO: 1413808 - RNA, 19 nt, Artificial Sequence
  Description of Artificial Sequence: Synthetic oligonucleotide
gacgccgacugccuccccu

SEQ ID NO: 1413809 - RNA, 19 nt, Artificial Sequence
  Description of Artificial Sequence: Synthetic oligonucleotide
gaguaucagucaguucccu

SEQ ID NO: 1413810 - RNA, 19 nt, Artificial Sequence
  Description of Artificial Sequence: Synthetic oligonucleotide
ggucauccgggaucuugca

SEQ ID NO: 1413811 - RNA, 19 nt, Artificial Sequence
  Description of Artificial Sequence: Synthetic oligonucleotide
auauagcuacuuaguucua

SEQ ID NO: 1413812 - RNA, 19 nt, Artificial Sequence
  Description of Artificial Sequence: Synthetic oligonucleotide
ccaggaacacaguagguau

SEQ ID NO: 1413813 - RNA, 19 nt, Artificial Sequence
  Description of Artificial Sequence: Synthetic oligonucleotide
ccuucggauucuccguuuc

SEQ ID NO: 1413814 - RNA, 19 nt, Artificial Sequence
  Description of Artificial Sequence: Synthetic oligonucleotide
ggaaccggauagguccaug

SEQ ID NO: 1413815 - RNA, 19 nt, Artificial Sequence
  Description of Artificial Sequence: Synthetic oligonucleotide
ggaacccucgagggaagac

SEQ ID NO: 1413816 - RNA, 19 nt, Artificial Sequence
  Description of Artificial Sequence: Synthetic oligonucleotide
gcguagaaggaaccggaua

SEQ ID NO: 1413817 - RNA, 19 nt, Artificial Sequence
  Description of Artificial Sequence: Synthetic oligonucleotide
agucagaggagggcucguu

SEQ ID NO: 1413818 - RNA, 19 nt, Artificial Sequence
  Description of Artificial Sequence: Synthetic oligonucleotide
gccgucgucucagagccac

SEQ ID NO: 1413819 - RNA, 19 nt, Artificial Sequence
  Description of Artificial Sequence: Synthetic oligonucleotide
acaucacgaugaagauuga

SEQ ID NO: 1413820 - RNA, 19 nt, Artificial Sequence
  Description of Artificial Sequence: Synthetic oligonucleotide
gggcugccaaaaugaacuc

SEQ ID NO: 1413821 - RNA, 19 nt, Artificial Sequence
  Description of Artificial Sequence: Synthetic oligonucleotide
cuucggauucuccguuucu

SEQ ID NO: 1413822 - RNA, 19 nt, Artificial Sequence
  Description of Artificial Sequence: Synthetic oligonucleotide
caauacacuccaugcgguu

SEQ ID NO: 1413823 - RNA, 19 nt, Artificial Sequence
  Description of Artificial Sequence: Synthetic oligonucleotide
ccccuaggucuacaggaac

SEQ ID NO: 1413824 - RNA, 19 nt, Artificial Sequence
  Description of Artificial Sequence: Synthetic oligonucleotide
cgagucagaggagggcucg

SEQ ID NO: 1413825 - RNA, 19 nt, Artificial Sequence
  Description of Artificial Sequence: Synthetic oligonucleotide
agggcucguugcugcugcu

SEQ ID NO: 1413826 - RNA, 19 nt, Artificial Sequence
  Description of Artificial Sequence: Synthetic oligonucleotide
cgauuccggcauuuggcug

SEQ ID NO: 1413827 - RNA, 19 nt, Artificial Sequence
  Description of Artificial Sequence: Synthetic oligonucleotide
caccagguuaauucccaau

SEQ ID NO: 1413828 - RNA, 19 nt, Artificial Sequence
  Description of Artificial Sequence: Synthetic oligonucleotide
cuugaguccagaggaggau

SEQ ID NO: 1413829 - RNA, 19 nt, Artificial Sequence
  Description of Artificial Sequence: Synthetic oligonucleotide
cuauugccaggaacacagu

SEQ ID NO: 1413830 - RNA, 19 nt, Artificial Sequence
  Description of Artificial Sequence: Synthetic oligonucleotide
gccugguguguuucacuca

SEQ ID NO: 1413831 - RNA, 19 nt, Artificial Sequence
  Description of Artificial Sequence: Synthetic oligonucleotide
cuaggucuacaggaacccu

SEQ ID NO: 1413832 - RNA, 19 nt, Artificial Sequence
  Description of Artificial Sequence: Synthetic oligonucleotide
acccucgagggaagacgug

SEQ ID NO: 1413833 - RNA, 19 nt, Artificial Sequence
  Description of Artificial Sequence: Synthetic oligonucleotide
caggugucacuaggaacaa

SEQ ID NO: 1413834 - RNA, 19 nt, Artificial Sequence
  Description of Artificial Sequence: Synthetic oligonucleotide
gcaccagguuaauucccaa

SEQ ID NO: 1413835 - RNA, 19 nt, Artificial Sequence
  Description of Artificial Sequence: Synthetic oligonucleotide
cccagggagcuacugugca

SEQ ID NO: 1413836 - RNA, 19 nt, Artificial Sequence
  Description of Artificial Sequence: Synthetic oligonucleotide
ggcucucaugcuacuaacu

SEQ ID NO: 1413837 - RNA, 19 nt, Artificial Sequence
  Description of Artificial Sequence: Synthetic oligonucleotide
caccucaacaaugcaugau

SEQ ID NO: 1413838 - RNA, 19 nt, Artificial Sequence
  Description of Artificial Sequence: Synthetic oligonucleotide
ccgauuccggcauuuggcu

SEQ ID NO: 1413839 - RNA, 19 nt, Artificial Sequence
  Description of Artificial Sequence: Synthetic oligonucleotide
cgucgucucagagccacug

SEQ ID NO: 1413840 - RNA, 19 nt, Artificial Sequence
  Description of Artificial Sequence: Synthetic oligonucleotide
gggcucguugcugcugcug

SEQ ID NO: 1413841 - RNA, 19 nt, Artificial Sequence
  Description of Artificial Sequence: Synthetic oligonucleotide
gucggugggcugccaaaau

SEQ ID NO: 1413842 - RNA, 19 nt, Artificial Sequence
  Description of Artificial Sequence: Synthetic oligonucleotide
cucgagggaagacguguuu

SEQ ID NO: 1413843 - RNA, 19 nt, Artificial Sequence
  Description of Artificial Sequence: Synthetic oligonucleotide
cguuuucauggaaaacugu

SEQ ID NO: 1413844 - RNA, 19 nt, Artificial Sequence
  Description of Artificial Sequence: Synthetic oligonucleotide
cguguaaguugugcagcug

SEQ ID NO: 1413845 - RNA, 19 nt, Artificial Sequence
  Description of Artificial Sequence: Synthetic oligonucleotide
agucagccucgggguaggu

SEQ ID NO: 1413846 - RNA, 19 nt, Artificial Sequence
  Description of Artificial Sequence: Synthetic oligonucleotide
gcugcccuuucggugggca

SEQ ID NO: 1413847 - RNA, 19 nt, Artificial Sequence
  Description of Artificial Sequence: Synthetic oligonucleotide
gagcuacugugcagaggcu

SEQ ID NO: 1413848 - RNA, 19 nt, Artificial Sequence
  Description of Artificial Sequence: Synthetic oligonucleotide
gcucuugacuggcuccagu

SEQ ID NO: 1413849 - RNA, 19 nt, Artificial Sequence
  Description of Artificial Sequence: Synthetic oligonucleotide
gagucagaggagggcucgu

SEQ ID NO: 1413850 - RNA, 19 nt, Artificial Sequence
  Description of Artificial Sequence: Synthetic oligonucleotide
aggugaccaccgggguaca

SEQ ID NO: 1413851 - RNA, 19 nt, Artificial Sequence
  Description of Artificial Sequence: Synthetic oligonucleotide
gcgagucagaggagggcuc

SEQ ID NO: 1413852 - RNA, 19 nt, Artificial Sequence
  Description of Artificial Sequence: Synthetic oligonucleotide
ccgggguacacaggggcuc

SEQ ID NO: 1413853 - RNA, 19 nt, Artificial Sequence
  Description of Artificial Sequence: Synthetic oligonucleotide
ccuccgauuccggcauuug

SEQ ID NO: 1413854 - RNA, 19 nt, Artificial Sequence
  Description of Artificial Sequence: Synthetic oligonucleotide
cgggguacacaggggcucc

SEQ ID NO: 1413855 - RNA, 19 nt, Artificial Sequence
  Description of Artificial Sequence: Synthetic oligonucleotide
cagaggcucccagucugcu

SEQ ID NO: 1413856 - RNA, 19 nt, Artificial Sequence
  Description of Artificial Sequence: Synthetic oligonucleotide
ccggaagaggugaggacuu

SEQ ID NO: 1413857 - RNA, 19 nt, Artificial Sequence
  Description of Artificial Sequence: Synthetic oligonucleotide
gcccuuucggugggcagcu

SEQ ID NO: 1413858 - RNA, 19 nt, Artificial Sequence
  Description of Artificial Sequence: Synthetic oligonucleotide
ccucgagggaagacguguu

SEQ ID NO: 1413859 - RNA, 19 nt, Artificial Sequence
  Description of Artificial Sequence: Synthetic oligonucleotide
cccgacagacuuaguuaau

SEQ ID NO: 1413860 - RNA, 19 nt, Artificial Sequence
  Description of Artificial Sequence: Synthetic oligonucleotide
cccuucggauucuccguuu

SEQ ID NO: 1413861 - RNA, 19 nt, Artificial Sequence
  Description of Artificial Sequence: Synthetic oligonucleotide
ccgucgucucagagccacu

SEQ ID NO: 1413862 - RNA, 19 nt, Artificial Sequence
  Description of Artificial Sequence: Synthetic oligonucleotide
uguguaauagguaacaggg

SEQ ID NO: 1413863 - RNA, 19 nt, Artificial Sequence
  Description of Artificial Sequence: Synthetic oligonucleotide
agcauaaucguccaggggc

SEQ ID NO: 1413864 - RNA, 19 nt, Artificial Sequence
  Description of Artificial Sequence: Synthetic oligonucleotide
aauacaugugaacacagug

SEQ ID NO: 1413865 - RNA, 19 nt, Artificial Sequence
  Description of Artificial Sequence: Synthetic oligonucleotide
agcuguguaacuuggaagc

SEQ ID NO: 1413866 - RNA, 19 nt, Artificial Sequence
  Description of Artificial Sequence: Synthetic oligonucleotide
uucaguaaagggcaaaagc

SEQ ID NO: 1413867 - RNA, 19 nt, Artificial Sequence
  Description of Artificial Sequence: Synthetic oligonucleotide
gauaaaagacccuccagag

SEQ ID NO: 1413868 - RNA, 19 nt, Artificial Sequence
  Description of Artificial Sequence: Synthetic oligonucleotide
uguugaaguucucagguag

SEQ ID NO: 1413869 - RNA, 19 nt, Artificial Sequence
  Description of Artificial Sequence: Synthetic oligonucleotide
agauaauacaugugaacac

SEQ ID NO: 1413870 - RNA, 19 nt, Artificial Sequence
  Description of Artificial Sequence: Synthetic oligonucleotide
uguaauagguaacaggguc

SEQ ID NO: 1413871 - RNA, 19 nt, Artificial Sequence
  Description of Artificial Sequence: Synthetic oligonucleotide
ugguacucgaagaugaucc

SEQ ID NO: 1413872 - RNA, 19 nt, Artificial Sequence
  Description of Artificial Sequence: Synthetic oligonucleotide
aggaagauaauacauguga

SEQ ID NO: 1413873 - RNA, 19 nt, Artificial Sequence
  Description of Artificial Sequence: Synthetic oligonucleotide
aacaggaugcaccaugcag

SEQ ID NO: 1413874 - RNA, 19 nt, Artificial Sequence
  Description of Artificial Sequence: Synthetic oligonucleotide
aaguaccaggucuaccugc

SEQ ID NO: 1413875 - RNA, 19 nt, Artificial Sequence
  Description of Artificial Sequence: Synthetic oligonucleotide
acugggaucagccccaugg

SEQ ID NO: 1413876 - RNA, 19 nt, Artificial Sequence
  Description of Artificial Sequence: Synthetic oligonucleotide
aucacugcuagccagagca

SEQ ID NO: 1413877 - RNA, 19 nt, Artificial Sequence
  Description of Artificial Sequence: Synthetic oligonucleotide
gacagucucaccaaggagg

SEQ ID NO: 1413878 - RNA, 19 nt, Artificial Sequence
  Description of Artificial Sequence: Synthetic oligonucleotide
uguguuguggaucugcacu

SEQ ID NO: 1413879 - RNA, 19 nt, Artificial Sequence
  Description of Artificial Sequence: Synthetic oligonucleotide
aagggcaaaagcuugccca

SEQ ID NO: 1413880 - RNA, 19 nt, Artificial Sequence
  Description of Artificial Sequence: Synthetic oligonucleotide
ucgaagaugauccugcgaa

SEQ ID NO: 1413881 - RNA, 19 nt, Artificial Sequence
  Description of Artificial Sequence: Synthetic oligonucleotide
uuaugcagaagcucaaugu

SEQ ID NO: 1413882 - RNA, 19 nt, Artificial Sequence
  Description of Artificial Sequence: Synthetic oligonucleotide
gauagcguccaccaggggc

SEQ ID NO: 1413883 - RNA, 19 nt, Artificial Sequence
  Description of Artificial Sequence: Synthetic oligonucleotide
agaugauccugcgaaagcc

SEQ ID NO: 1413884 - RNA, 19 nt, Artificial Sequence
  Description of Artificial Sequence: Synthetic oligonucleotide
auaaaagacccuccagagg

SEQ ID NO: 1413885 - RNA, 19 nt, Artificial Sequence
  Description of Artificial Sequence: Synthetic oligonucleotide
gaucuaccgguucagaccc

SEQ ID NO: 1413886 - RNA, 19 nt, Artificial Sequence
  Description of Artificial Sequence: Synthetic oligonucleotide
gaagcgguugaucaucggg

SEQ ID NO: 1413887 - RNA, 19 nt, Artificial Sequence
  Description of Artificial Sequence: Synthetic oligonucleotide
gauguuugagagguggugg

SEQ ID NO: 1413888 - RNA, 19 nt, Artificial Sequence
  Description of Artificial Sequence: Synthetic oligonucleotide
uugcccagauaaaagaccc

SEQ ID NO: 1413889 - RNA, 19 nt, Artificial Sequence
  Description of Artificial Sequence: Synthetic oligonucleotide
ucaaaauuagagguuggcc

SEQ ID NO: 1413890 - RNA, 19 nt, Artificial Sequence
  Description of Artificial Sequence: Synthetic oligonucleotide
uacaugugaacacaguguc

SEQ ID NO: 1413891 - RNA, 19 nt, Artificial Sequence
  Description of Artificial Sequence: Synthetic oligonucleotide
cuguguaauagguaacagg

SEQ ID NO: 1413892 - RNA, 19 nt, Artificial Sequence
  Description of Artificial Sequence: Synthetic oligonucleotide
agcaguugucuucuguacc

SEQ ID NO: 1413893 - RNA, 19 nt, Artificial Sequence
  Description of Artificial Sequence: Synthetic oligonucleotide
aagcagaagcgguugauca

SEQ ID NO: 1413894 - RNA, 19 nt, Artificial Sequence
  Description of Artificial Sequence: Synthetic oligonucleotide
agggcagacguucagguuc

SEQ ID NO: 1413895 - RNA, 19 nt, Artificial Sequence
  Description of Artificial Sequence: Synthetic oligonucleotide
uacucgaagaugauccugc

SEQ ID NO: 1413896 - RNA, 19 nt, Artificial Sequence
  Description of Artificial Sequence: Synthetic oligonucleotide
auugacaucugcuccaaga

SEQ ID NO: 1413897 - RNA, 19 nt, Artificial Sequence
  Description of Artificial Sequence: Synthetic oligonucleotide
uguuccaggguccaucagc

SEQ ID NO: 1413898 - RNA, 19 nt, Artificial Sequence
  Description of Artificial Sequence: Synthetic oligonucleotide
caagcuacccacugggugg

SEQ ID NO: 1413899 - RNA, 19 nt, Artificial Sequence
  Description of Artificial Sequence: Synthetic oligonucleotide
agagugggccuucugcucc

SEQ ID NO: 1413900 - RNA, 19 nt, Artificial Sequence
  Description of Artificial Sequence: Synthetic oligonucleotide
cagacguucagguuccucg

SEQ ID NO: 1413901 - RNA, 19 nt, Artificial Sequence
  Description of Artificial Sequence: Synthetic oligonucleotide
cucgccggcagcauaaucg

SEQ ID NO: 1413902 - RNA, 19 nt, Artificial Sequence
  Description of Artificial Sequence: Synthetic oligonucleotide
uaccgguucagacccagcg

SEQ ID NO: 1413903 - RNA, 19 nt, Artificial Sequence
  Description of Artificial Sequence: Synthetic oligonucleotide
agccagaccaacaggaugc

SEQ ID NO: 1413904 - RNA, 19 nt, Artificial Sequence
  Description of Artificial Sequence: Synthetic oligonucleotide
cuugcccagauaaaagacc

SEQ ID NO: 1413905 - RNA, 19 nt, Artificial Sequence
  Description of Artificial Sequence: Synthetic oligonucleotide
ugugugagcgacucauggg

SEQ ID NO: 1413906 - RNA, 19 nt, Artificial Sequence
  Description of Artificial Sequence: Synthetic oligonucleotide
agggucuucaaaauuagag

SEQ ID NO: 1413907 - RNA, 19 nt, Artificial Sequence
  Description of Artificial Sequence: Synthetic oligonucleotide
auguccacgccccaucggc

SEQ ID NO: 1413908 - RNA, 19 nt, Artificial Sequence
  Description of Artificial Sequence: Synthetic oligonucleotide
gggucuucaaaauuagagg

SEQ ID NO: 1413909 - RNA, 19 nt, Artificial Sequence
  Description of Artificial Sequence: Synthetic oligonucleotide
aaagccgugcaggaacggc

SEQ ID NO: 1413910 - RNA, 19 nt, Artificial Sequence
  Description of Artificial Sequence: Synthetic oligonucleotide
uucaaaauuagagguuggc

SEQ ID NO: 1413911 - RNA, 19 nt, Artificial Sequence
  Description of Artificial Sequence: Synthetic oligonucleotide
acaggaugcaccaugcagg

SEQ ID NO: 1413912 - RNA, 19 nt, Artificial Sequence
  Description of Artificial Sequence: Synthetic oligonucleotide
ugguagaauggagaguggg

SEQ ID NO: 1413913 - RNA, 19 nt, Artificial Sequence
  Description of Artificial Sequence: Synthetic oligonucleotide
auguuugagaggugguggg

SEQ ID NO: 1413914 - RNA, 19 nt, Artificial Sequence
  Description of Artificial Sequence: Synthetic oligonucleotide
agcgguugaucaucggggc

SEQ ID NO: 1413915 - RNA, 19 nt, Artificial Sequence
  Description of Artificial Sequence: Synthetic oligonucleotide
agacguucagguuccucgc

SEQ ID NO: 1413916 - RNA, 19 nt, Artificial Sequence
  Description of Artificial Sequence: Synthetic oligonucleotide
aacccugaccacucuguuc

SEQ ID NO: 1413917 - RNA, 19 nt, Artificial Sequence
  Description of Artificial Sequence: Synthetic oligonucleotide
gaugauccugcgaaagccg

SEQ ID NO: 1413918 - RNA, 19 nt, Artificial Sequence
  Description of Artificial Sequence: Synthetic oligonucleotide
agucucaccaaggaggaag

SEQ ID NO: 1413919 - RNA, 19 nt, Artificial Sequence
  Description of Artificial Sequence: Synthetic oligonucleotide
uuagagguuggccccaccu

SEQ ID NO: 1413920 - RNA, 19 nt, Artificial Sequence
  Description of Artificial Sequence: Synthetic oligonucleotide
auaauacaugugaacacag

SEQ ID NO: 1413921 - RNA, 19 nt, Artificial Sequence
  Description of Artificial Sequence: Synthetic oligonucleotide
uuucaguaaagggcaaaag

SEQ ID NO: 1413922 - RNA, 19 nt, Artificial Sequence
  Description of Artificial Sequence: Synthetic oligonucleotide
gugugugagcgacucaugg

SEQ ID NO: 1413923 - RNA, 19 nt, Artificial Sequence
  Description of Artificial Sequence: Synthetic oligonucleotide
gugugagcgacucaugggc

SEQ ID NO: 1413924 - RNA, 19 nt, Artificial Sequence
  Description of Artificial Sequence: Synthetic oligonucleotide
agaaggacagcagcugccc

SEQ ID NO: 1413925 - RNA, 19 nt, Artificial Sequence
  Description of Artificial Sequence: Synthetic oligonucleotide
ggaugcaccaugcagggag

SEQ ID NO: 1413926 - RNA, 19 nt, Artificial Sequence
  Description of Artificial Sequence: Synthetic oligonucleotide
uggguagcucucuagcugc

SEQ ID NO: 1413927 - RNA, 19 nt, Artificial Sequence
  Description of Artificial Sequence: Synthetic oligonucleotide
uuucucaggacagcgauau

SEQ ID NO: 1413928 - RNA, 19 nt, Artificial Sequence
  Description of Artificial Sequence: Synthetic oligonucleotide
uaguuguuucauuucagua

SEQ ID NO: 1413929 - RNA, 19 nt, Artificial Sequence
  Description of Artificial Sequence: Synthetic oligonucleotide
ucgcuggccagaucuaagg

SEQ ID NO: 1413930 - RNA, 19 nt, Artificial Sequence
  Description of Artificial Sequence: Synthetic oligonucleotide
acugcuagccagagcaugc

SEQ ID NO: 1413931 - RNA, 19 nt, Artificial Sequence
  Description of Artificial Sequence: Synthetic oligonucleotide
ucugcacuccaucacugcu

SEQ ID NO: 1413932 - RNA, 19 nt, Artificial Sequence
  Description of Artificial Sequence: Synthetic oligonucleotide
uuguuucauuucaguaaag

SEQ ID NO: 1413933 - RNA, 19 nt, Artificial Sequence
  Description of Artificial Sequence: Synthetic oligonucleotide
auaaucguccaggggcucc

SEQ ID NO: 1413934 - RNA, 19 nt, Artificial Sequence
  Description of Artificial Sequence: Synthetic oligonucleotide
gaugcggcucuccucgccg

SEQ ID NO: 1413935 - RNA, 19 nt, Artificial Sequence
  Description of Artificial Sequence: Synthetic oligonucleotide
caaagcauugcucacaccu

SEQ ID NO: 1413936 - RNA, 19 nt, Artificial Sequence
  Description of Artificial Sequence: Synthetic oligonucleotide
auacaugugaacacagugu

SEQ ID NO: 1413937 - RNA, 19 nt, Artificial Sequence
  Description of Artificial Sequence: Synthetic oligonucleotide
augcagaagcucaaugugg

SEQ ID NO: 1413938 - RNA, 19 nt, Artificial Sequence
  Description of Artificial Sequence: Synthetic oligonucleotide
cuugacaucugccccuccc

SEQ ID NO: 1413939 - RNA, 19 nt, Artificial Sequence
  Description of Artificial Sequence: Synthetic oligonucleotide
caggaugcaccaugcaggg

SEQ ID NO: 1413940 - RNA, 19 nt, Artificial Sequence
  Description of Artificial Sequence: Synthetic oligonucleotide
gguaacagggucuucaaaa

SEQ ID NO: 1413941 - RNA, 19 nt, Artificial Sequence
  Description of Artificial Sequence: Synthetic oligonucleotide
ccaaggaggaagauaauac

SEQ ID NO: 1413942 - RNA, 19 nt, Artificial Sequence
  Description of Artificial Sequence: Synthetic oligonucleotide
agggcaaaagcuugcccag

SEQ ID NO: 1413943 - RNA, 19 nt, Artificial Sequence
  Description of Artificial Sequence: Synthetic oligonucleotide
uguaggcggccccagacuc

SEQ ID NO: 1413944 - RNA, 19 nt, Artificial Sequence
  Description of Artificial Sequence: Synthetic oligonucleotide
agagguuggccccaccucu

SEQ ID NO: 1413945 - RNA, 19 nt, Artificial Sequence
  Description of Artificial Sequence: Synthetic oligonucleotide
agaagcucaauguggcuau

SEQ ID NO: 1413946 - RNA, 19 nt, Artificial Sequence
  Description of Artificial Sequence: Synthetic oligonucleotide
uacccuaguuguuucauuu

SEQ ID NO: 1413947 - RNA, 19 nt, Artificial Sequence
  Description of Artificial Sequence: Synthetic oligonucleotide
gagcuagucaccaugaggu

SEQ ID NO: 1413948 - RNA, 19 nt, Artificial Sequence
  Description of Artificial Sequence: Synthetic oligonucleotide
uguccacgccccaucggcg

SEQ ID NO: 1413949 - RNA, 19 nt, Artificial Sequence
  Description of Artificial Sequence: Synthetic oligonucleotide
acccuaguuguuucauuuc

SEQ ID NO: 1413950 - RNA, 19 nt, Artificial Sequence
  Description of Artificial Sequence: Synthetic oligonucleotide
aggaggaagauaauacaug

SEQ ID NO: 1413951 - RNA, 19 nt, Artificial Sequence
  Description of Artificial Sequence: Synthetic oligonucleotide
gaggcugugacaaguacca

SEQ ID NO: 1413952 - RNA, 19 nt, Artificial Sequence
  Description of Artificial Sequence: Synthetic oligonucleotide
ugggagcuagucaccauga

SEQ ID NO: 1413953 - RNA, 19 nt, Artificial Sequence
  Description of Artificial Sequence: Synthetic oligonucleotide
cagggcacuacccuaguug

SEQ ID NO: 1413954 - RNA, 19 nt, Artificial Sequence
  Description of Artificial Sequence: Synthetic oligonucleotide
cuuccugguagaauggaga

SEQ ID NO: 1413955 - RNA, 19 nt, Artificial Sequence
  Description of Artificial Sequence: Synthetic oligonucleotide
agggcacuacccuaguugu

SEQ ID NO: 1413956 - RNA, 19 nt, Artificial Sequence
  Description of Artificial Sequence: Synthetic oligonucleotide
cugaccacucuguuccagg

SEQ ID NO: 1413957 - RNA, 19 nt, Artificial Sequence
  Description of Artificial Sequence: Synthetic oligonucleotide
caauguggcuaucaucuuc

SEQ ID NO: 1413958 - RNA, 19 nt, Artificial Sequence
  Description of Artificial Sequence: Synthetic oligonucleotide
ugugagcgacucaugggcu

SEQ ID NO: 1413959 - RNA, 19 nt, Artificial Sequence
  Description of Artificial Sequence: Synthetic oligonucleotide
cauggauccggucccuccg

SEQ ID NO: 1413960 - RNA, 19 nt, Artificial Sequence
  Description of Artificial Sequence: Synthetic oligonucleotide
ucauggauccggucccucc

SEQ ID NO: 1413961 - RNA, 19 nt, Artificial Sequence
  Description of Artificial Sequence: Synthetic oligonucleotide
cauggccgcaggcauagcc

SEQ ID NO: 1413962 - RNA, 19 nt, Artificial Sequence
  Description of Artificial Sequence: Synthetic oligonucleotide
agauguuugagagguggug

SEQ ID NO: 1413963 - RNA, 19 nt, Artificial Sequence
  Description of Artificial Sequence: Synthetic oligonucleotide
ggcagcauaaucguccagg

SEQ ID NO: 1413964 - RNA, 19 nt, Artificial Sequence
  Description of Artificial Sequence: Synthetic oligonucleotide
gauccugcgaaagccgugc

SEQ ID NO: 1413965 - RNA, 19 nt, Artificial Sequence
  Description of Artificial Sequence: Synthetic oligonucleotide
gauguccacgccccaucgg

SEQ ID NO: 1413966 - RNA, 19 nt, Artificial Sequence
  Description of Artificial Sequence: Synthetic oligonucleotide
gcaaaagcuguguaacuug

SEQ ID NO: 1413967 - RNA, 19 nt, Artificial Sequence
  Description of Artificial Sequence: Synthetic oligonucleotide
aggaacggcauggcgacgg

SEQ ID NO: 1413968 - RNA, 19 nt, Artificial Sequence
  Description of Artificial Sequence: Synthetic oligonucleotide
acagacagucucaccaagg

SEQ ID NO: 1413969 - RNA, 19 nt, Artificial Sequence
  Description of Artificial Sequence: Synthetic oligonucleotide
ugcuagccagagcaugcag

SEQ ID NO: 1413970 - RNA, 19 nt, Artificial Sequence
  Description of Artificial Sequence: Synthetic oligonucleotide
ugagcgacucaugggcugg

SEQ ID NO: 1413971 - RNA, 19 nt, Artificial Sequence
  Description of Artificial Sequence: Synthetic oligonucleotide
ugugugugagcgacucaug

SEQ ID NO: 1413972 - RNA, 19 nt, Artificial Sequence
  Description of Artificial Sequence: Synthetic oligonucleotide
agcuagucaccaugagguc

SEQ ID NO: 1413973 - RNA, 19 nt, Artificial Sequence
  Description of Artificial Sequence: Synthetic oligonucleotide
ccugguagaauggagagug

SEQ ID NO: 1413974 - RNA, 19 nt, Artificial Sequence
  Description of Artificial Sequence: Synthetic oligonucleotide
gcucacaccuuccugguag

SEQ ID NO: 1413975 - RNA, 19 nt, Artificial Sequence
  Description of Artificial Sequence: Synthetic oligonucleotide
cuagccagagcaugcagca

SEQ ID NO: 1413976 - RNA, 19 nt, Artificial Sequence
  Description of Artificial Sequence: Synthetic oligonucleotide
ugauccugcgaaagccgug

SEQ ID NO: 1413977 - RNA, 19 nt, Artificial Sequence
  Description of Artificial Sequence: Synthetic oligonucleotide
uccugcgaaagccgugcag

SEQ ID NO: 1413978 - RNA, 19 nt, Artificial Sequence
  Description of Artificial Sequence: Synthetic oligonucleotide
guuguaggcggccccagac

SEQ ID NO: 1413979 - RNA, 19 nt, Artificial Sequence
  Description of Artificial Sequence: Synthetic oligonucleotide
auggcgacggccgugcguc

SEQ ID NO: 1413980 - RNA, 19 nt, Artificial Sequence
  Description of Artificial Sequence: Synthetic oligonucleotide
gcucucauggauccggucc

SEQ ID NO: 1413981 - RNA, 19 nt, Artificial Sequence
  Description of Artificial Sequence: Synthetic oligonucleotide
ugguuucucaggacagcga

SEQ ID NO: 1413982 - RNA, 19 nt, Artificial Sequence
  Description of Artificial Sequence: Synthetic oligonucleotide
cuguguaacuuggaagcag

SEQ ID NO: 1413983 - RNA, 19 nt, Artificial Sequence
  Description of Artificial Sequence: Synthetic oligonucleotide
ucuaccgguucagacccag

SEQ ID NO: 1413984 - RNA, 19 nt, Artificial Sequence
  Description of Artificial Sequence: Synthetic oligonucleotide
auagcguccaccaggggcu

SEQ ID NO: 1413985 - RNA, 19 nt, Artificial Sequence
  Description of Artificial Sequence: Synthetic oligonucleotide
aaaagcuguguaacuugga

SEQ ID NO: 1413986 - RNA, 19 nt, Artificial Sequence
  Description of Artificial Sequence: Synthetic oligonucleotide
cuaccugcagguuggcuuc

SEQ ID NO: 1413987 - RNA, 19 nt, Artificial Sequence
  Description of Artificial Sequence: Synthetic oligonucleotide
caaggcgcccaggauagcg

SEQ ID NO: 1413988 - RNA, 19 nt, Artificial Sequence
  Description of Artificial Sequence: Synthetic oligonucleotide
cagcauaaucguccagggg

SEQ ID NO: 1413989 - RNA, 19 nt, Artificial Sequence
  Description of Artificial Sequence: Synthetic oligonucleotide
agcaaaagcuguguaacuu

SEQ ID NO: 1413990 - RNA, 19 nt, Artificial Sequence
  Description of Artificial Sequence: Synthetic oligonucleotide
gacaaguaccaggucuacc

SEQ ID NO: 1413991 - RNA, 19 nt, Artificial Sequence
  Description of Artificial Sequence: Synthetic oligonucleotide
uguuguggaucugcacucc

SEQ ID NO: 1413992 - RNA, 19 nt, Artificial Sequence
  Description of Artificial Sequence: Synthetic oligonucleotide
aggaccaggaugcggcucu

SEQ ID NO: 1413993 - RNA, 19 nt, Artificial Sequence
  Description of Artificial Sequence: Synthetic oligonucleotide
uggacacacggcacagaug

SEQ ID NO: 1413994 - RNA, 19 nt, Artificial Sequence
  Description of Artificial Sequence: Synthetic oligonucleotide
ggcacagauguuugagagg

SEQ ID NO: 1413995 - RNA, 19 nt, Artificial Sequence
  Description of Artificial Sequence: Synthetic oligonucleotide
agccccaugggccagcaaa

SEQ ID NO: 1413996 - RNA, 19 nt, Artificial Sequence
  Description of Artificial Sequence: Synthetic oligonucleotide
aaaagcuugcccagauaaa

SEQ ID NO: 1413997 - RNA, 19 nt, Artificial Sequence
  Description of Artificial Sequence: Synthetic oligonucleotide
gaucuaaggggcugcucuc

SEQ ID NO: 1413998 - RNA, 19 nt, Artificial Sequence
  Description of Artificial Sequence: Synthetic oligonucleotide
caccuuccugguagaaugg

SEQ ID NO: 1413999 - RNA, 19 nt, Artificial Sequence
  Description of Artificial Sequence: Synthetic oligonucleotide
acguucagguuccucgcug

SEQ ID NO: 1414000 - RNA, 19 nt, Artificial Sequence
  Description of Artificial Sequence: Synthetic oligonucleotide
cagcaguugucuucuguac

SEQ ID NO: 1414001 - RNA, 19 nt, Artificial Sequence
  Description of Artificial Sequence: Synthetic oligonucleotide
uuggaucuucccugccaag

SEQ ID NO: 1414002 - RNA, 19 nt, Artificial Sequence
  Description of Artificial Sequence: Synthetic oligonucleotide
uggcuaucaucuucagcac

SEQ ID NO: 1414003 - RNA, 19 nt, Artificial Sequence
  Description of Artificial Sequence: Synthetic oligonucleotide
auggauccggucccuccgg

SEQ ID NO: 1414004 - RNA, 19 nt, Artificial Sequence
  Description of Artificial Sequence: Synthetic oligonucleotide
cauagccggauggacacac

SEQ ID NO: 1414005 - RNA, 19 nt, Artificial Sequence
  Description of Artificial Sequence: Synthetic oligonucleotide
guggaucugcacuccauca

SEQ ID NO: 1414006 - RNA, 19 nt, Artificial Sequence
  Description of Artificial Sequence: Synthetic oligonucleotide
gcuucagccaacccugacc

SEQ ID NO: 1414007 - RNA, 19 nt, Artificial Sequence
  Description of Artificial Sequence: Synthetic oligonucleotide
acuuggaagcagaagcggu

SEQ ID NO: 1414008 - RNA, 19 nt, Artificial Sequence
  Description of Artificial Sequence: Synthetic oligonucleotide
ggcauagccggauggacac

SEQ ID NO: 1414009 - RNA, 19 nt, Artificial Sequence
  Description of Artificial Sequence: Synthetic oligonucleotide
gucuguguuguggaucugc

SEQ ID NO: 1414010 - RNA, 19 nt, Artificial Sequence
  Description of Artificial Sequence: Synthetic oligonucleotide
aaagcauugcucacaccuu

SEQ ID NO: 1414011 - RNA, 19 nt, Artificial Sequence
  Description of Artificial Sequence: Synthetic oligonucleotide
auggccgcaggcauagccg

SEQ ID NO: 1414012 - RNA, 19 nt, Artificial Sequence
  Description of Artificial Sequence: Synthetic oligonucleotide
uguuugagagguggugggu

SEQ ID NO: 1414013 - RNA, 19 nt, Artificial Sequence
  Description of Artificial Sequence: Synthetic oligonucleotide
gaaagccgugcaggaacgg

SEQ ID NO: 1414014 - RNA, 19 nt, Artificial Sequence
  Description of Artificial Sequence: Synthetic oligonucleotide
ccuaguuguuucauuucag

SEQ ID NO: 1414015 - RNA, 19 nt, Artificial Sequence
  Description of Artificial Sequence: Synthetic oligonucleotide
cacggcacagauguuugag

SEQ ID NO: 1414016 - RNA, 19 nt, Artificial Sequence
  Description of Artificial Sequence: Synthetic oligonucleotide
cuaguuguuucauuucagu

SEQ ID NO: 1414017 - RNA, 19 nt, Artificial Sequence
  Description of Artificial Sequence: Synthetic oligonucleotide
gcuagucaccaugaggucc

SEQ ID NO: 1414018 - RNA, 19 nt, Artificial Sequence
  Description of Artificial Sequence: Synthetic oligonucleotide
ccaacaggaugcaccaugc

SEQ ID NO: 1414019 - RNA, 19 nt, Artificial Sequence
  Description of Artificial Sequence: Synthetic oligonucleotide
guaauagguaacagggucu

SEQ ID NO: 1414020 - RNA, 19 nt, Artificial Sequence
  Description of Artificial Sequence: Synthetic oligonucleotide
agcagaagcgguugaucau

SEQ ID NO: 1414021 - RNA, 19 nt, Artificial Sequence
  Description of Artificial Sequence: Synthetic oligonucleotide
cacuggguggauguugaag

SEQ ID NO: 1414022 - RNA, 19 nt, Artificial Sequence
  Description of Artificial Sequence: Synthetic oligonucleotide
accacuugagccggucagg

SEQ ID NO: 1414023 - RNA, 19 nt, Artificial Sequence
  Description of Artificial Sequence: Synthetic oligonucleotide
cucgcuggccagaucuaag

SEQ ID NO: 1414024 - RNA, 19 nt, Artificial Sequence
  Description of Artificial Sequence: Synthetic oligonucleotide
auguugaaguucucaggua

SEQ ID NO: 1414025 - RNA, 19 nt, Artificial Sequence
  Description of Artificial Sequence: Synthetic oligonucleotide
ugaucaucggggccuccuc

SEQ ID NO: 1414026 - RNA, 19 nt, Artificial Sequence
  Description of Artificial Sequence: Synthetic oligonucleotide
uggguggauguugaaguuc

SEQ ID NO: 1414027 - RNA, 19 nt, Artificial Sequence
  Description of Artificial Sequence: Synthetic oligonucleotide
gaugcaccaugcagggagc

SEQ ID NO: 1414028 - RNA, 19 nt, Artificial Sequence
  Description of Artificial Sequence: Synthetic oligonucleotide
gugagcgacucaugggcug

SEQ ID NO: 1414029 - RNA, 19 nt, Artificial Sequence
  Description of Artificial Sequence: Synthetic oligonucleotide
gcaguugucuucuguacca

SEQ ID NO: 1414030 - RNA, 19 nt, Artificial Sequence
  Description of Artificial Sequence: Synthetic oligonucleotide
uugaucaucggggccuccu

SEQ ID NO: 1414031 - RNA, 19 nt, Artificial Sequence
  Description of Artificial Sequence: Synthetic oligonucleotide
aguaccaggucuaccugca

SEQ ID NO: 1414032 - RNA, 19 nt, Artificial Sequence
  Description of Artificial Sequence: Synthetic oligonucleotide
cgaucuaccgguucagacc

SEQ ID NO: 1414033 - RNA, 19 nt, Artificial Sequence
  Description of Artificial Sequence: Synthetic oligonucleotide
gcgaaagccgugcaggaac

SEQ ID NO: 1414034 - RNA, 19 nt, Artificial Sequence
  Description of Artificial Sequence: Synthetic oligonucleotide
aauggagagugggccuucu

SEQ ID NO: 1414035 - RNA, 19 nt, Artificial Sequence
  Description of Artificial Sequence: Synthetic oligonucleotide
gaagcgcaggaggggaaag

SEQ ID NO: 1414036 - RNA, 19 nt, Artificial Sequence
  Description of Artificial Sequence: Synthetic oligonucleotide
ccugcgaaagccgugcagg

SEQ ID NO: 1414037 - RNA, 19 nt, Artificial Sequence
  Description of Artificial Sequence: Synthetic oligonucleotide
cuuggaucuucccugccaa

SEQ ID NO: 1414038 - RNA, 19 nt, Artificial Sequence
  Description of Artificial Sequence: Synthetic oligonucleotide
augcagggagcaguuguag

SEQ ID NO: 1414039 - RNA, 19 nt, Artificial Sequence
  Description of Artificial Sequence: Synthetic oligonucleotide
aggaugcggcucuccucgc

SEQ ID NO: 1414040 - RNA, 19 nt, Artificial Sequence
  Description of Artificial Sequence: Synthetic oligonucleotide
ugacaaguaccaggucuac

SEQ ID NO: 1414041 - RNA, 19 nt, Artificial Sequence
  Description of Artificial Sequence: Synthetic oligonucleotide
acgcccacacgccgccucc

SEQ ID NO: 1414042 - RNA, 19 nt, Artificial Sequence
  Description of Artificial Sequence: Synthetic oligonucleotide
caacuccaccaugucaggc

SEQ ID NO: 1414043 - RNA, 19 nt, Artificial Sequence
  Description of Artificial Sequence: Synthetic oligonucleotide
acggccgugcgucccgacg

SEQ ID NO: 1414044 - RNA, 19 nt, Artificial Sequence
  Description of Artificial Sequence: Synthetic oligonucleotide
uugagaggugguggguagc

SEQ ID NO: 1414045 - RNA, 19 nt, Artificial Sequence
  Description of Artificial Sequence: Synthetic oligonucleotide
cucacugggaucagcccca

SEQ ID NO: 1414046 - RNA, 19 nt, Artificial Sequence
  Description of Artificial Sequence: Synthetic oligonucleotide
agguaacagggucuucaaa

SEQ ID NO: 1414047 - RNA, 19 nt, Artificial Sequence
  Description of Artificial Sequence: Synthetic oligonucleotide
uucucaggacagcgauaug

SEQ ID NO: 1414048 - RNA, 19 nt, Artificial Sequence
  Description of Artificial Sequence: Synthetic oligonucleotide
ucggcgcaccagcaacucc

SEQ ID NO: 1414049 - RNA, 19 nt, Artificial Sequence
  Description of Artificial Sequence: Synthetic oligonucleotide
cugcuccaagauccaagag

SEQ ID NO: 1414050 - RNA, 19 nt, Artificial Sequence
  Description of Artificial Sequence: Synthetic oligonucleotide
acuacccuaguuguuucau

SEQ ID NO: 1414051 - RNA, 19 nt, Artificial Sequence
  Description of Artificial Sequence: Synthetic oligonucleotide
ccaagcuacccacugggug

SEQ ID NO: 1414052 - RNA, 19 nt, Artificial Sequence
  Description of Artificial Sequence: Synthetic oligonucleotide
aguuguaggcggccccaga

SEQ ID NO: 1414053 - RNA, 19 nt, Artificial Sequence
  Description of Artificial Sequence: Synthetic oligonucleotide
cacugcuagccagagcaug

SEQ ID NO: 1414054 - RNA, 19 nt, Artificial Sequence
  Description of Artificial Sequence: Synthetic oligonucleotide
gaucuucccugccaagcua

SEQ ID NO: 1414055 - RNA, 19 nt, Artificial Sequence
  Description of Artificial Sequence: Synthetic oligonucleotide
uaaucguccaggggcuccu

SEQ ID NO: 1414056 - RNA, 19 nt, Artificial Sequence
  Description of Artificial Sequence: Synthetic oligonucleotide
ugcacugagcagguaccac

SEQ ID NO: 1414057 - RNA, 19 nt, Artificial Sequence
  Description of Artificial Sequence: Synthetic oligonucleotide
cucuguuccaggguccauc

SEQ ID NO: 1414058 - RNA, 19 nt, Artificial Sequence
  Description of Artificial Sequence: Synthetic oligonucleotide
augcggcucuccucgccgg

SEQ ID NO: 1414059 - RNA, 19 nt, Artificial Sequence
  Description of Artificial Sequence: Synthetic oligonucleotide
augauccugcgaaagccgu

SEQ ID NO: 1414060 - RNA, 19 nt, Artificial Sequence
  Description of Artificial Sequence: Synthetic oligonucleotide
gccggcagcauaaucgucc

SEQ ID NO: 1414061 - RNA, 19 nt, Artificial Sequence
  Description of Artificial Sequence: Synthetic oligonucleotide
agcgacucaugggcugggc

SEQ ID NO: 1414062 - RNA, 19 nt, Artificial Sequence
  Description of Artificial Sequence: Synthetic oligonucleotide
gcuagccagagcaugcagc

SEQ ID NO: 1414063 - RNA, 19 nt, Artificial Sequence
  Description of Artificial Sequence: Synthetic oligonucleotide
cccaaggcgcccaggauag

SEQ ID NO: 1414064 - RNA, 19 nt, Artificial Sequence
  Description of Artificial Sequence: Synthetic oligonucleotide
auggagagugggccuucug

SEQ ID NO: 1414065 - RNA, 19 nt, Artificial Sequence
  Description of Artificial Sequence: Synthetic oligonucleotide
aggcauagccggauggaca

SEQ ID NO: 1414066 - RNA, 19 nt, Artificial Sequence
  Description of Artificial Sequence: Synthetic oligonucleotide
cacagauguuugagaggug

SEQ ID NO: 1414067 - RNA, 19 nt, Artificial Sequence
  Description of Artificial Sequence: Synthetic oligonucleotide
caggcauagccggauggac

SEQ ID NO: 1414068 - RNA, 19 nt, Artificial Sequence
  Description of Artificial Sequence: Synthetic oligonucleotide
cagccaacccugaccacuc

SEQ ID NO: 1414069 - RNA, 19 nt, Artificial Sequence
  Description of Artificial Sequence: Synthetic oligonucleotide
aucggcgcaccagcaacuc

SEQ ID NO: 1414070 - RNA, 19 nt, Artificial Sequence
  Description of Artificial Sequence: Synthetic oligonucleotide
cucgaagaugauccugcga

SEQ ID NO: 1414071 - RNA, 19 nt, Artificial Sequence
  Description of Artificial Sequence: Synthetic oligonucleotide
guccacgccccaucggcgc

SEQ ID NO: 1414072 - RNA, 19 nt, Artificial Sequence
  Description of Artificial Sequence: Synthetic oligonucleotide
gugacaaguaccaggucua

SEQ ID NO: 1414073 - RNA, 19 nt, Artificial Sequence
  Description of Artificial Sequence: Synthetic oligonucleotide
aucggggccuccuccuugu

SEQ ID NO: 1414074 - RNA, 19 nt, Artificial Sequence
  Description of Artificial Sequence: Synthetic oligonucleotide
ggcuguguaauagguaaca

SEQ ID NO: 1414075 - RNA, 19 nt, Artificial Sequence
  Description of Artificial Sequence: Synthetic oligonucleotide
cuaccgguucagacccagc

SEQ ID NO: 1414076 - RNA, 19 nt, Artificial Sequence
  Description of Artificial Sequence: Synthetic oligonucleotide
agcgauaugcagggcugug

SEQ ID NO: 1414077 - RNA, 19 nt, Artificial Sequence
  Description of Artificial Sequence: Synthetic oligonucleotide
gaacggcauggcgacggcc

SEQ ID NO: 1414078 - RNA, 19 nt, Artificial Sequence
  Description of Artificial Sequence: Synthetic oligonucleotide
aggguccaucagcaguugu

SEQ ID NO: 1414079 - RNA, 19 nt, Artificial Sequence
  Description of Artificial Sequence: Synthetic oligonucleotide
ccgaucuaccgguucagac

SEQ ID NO: 1414080 - RNA, 19 nt, Artificial Sequence
  Description of Artificial Sequence: Synthetic oligonucleotide
cagggucuucaaaauuaga

SEQ ID NO: 1414081 - RNA, 19 nt, Artificial Sequence
  Description of Artificial Sequence: Synthetic oligonucleotide
ugcgaaagccgugcaggaa

SEQ ID NO: 1414082 - RNA, 19 nt, Artificial Sequence
  Description of Artificial Sequence: Synthetic oligonucleotide
guuugagagguggugggua

SEQ ID NO: 1414083 - RNA, 19 nt, Artificial Sequence
  Description of Artificial Sequence: Synthetic oligonucleotide
ggcuaucaucuucagcaca

SEQ ID NO: 1414084 - RNA, 19 nt, Artificial Sequence
  Description of Artificial Sequence: Synthetic oligonucleotide
uccacgccccaucggcgca

SEQ ID NO: 1414085 - RNA, 19 nt, Artificial Sequence
  Description of Artificial Sequence: Synthetic oligonucleotide
cagagcaugcagcagugcu

SEQ ID NO: 1414086 - RNA, 19 nt, Artificial Sequence
  Description of Artificial Sequence: Synthetic oligonucleotide
cucccgaucuaccgguuca

SEQ ID NO: 1414087 - RNA, 19 nt, Artificial Sequence
  Description of Artificial Sequence: Synthetic oligonucleotide
uucagccaacccugaccac

SEQ ID NO: 1414088 - RNA, 19 nt, Artificial Sequence
  Description of Artificial Sequence: Synthetic oligonucleotide
cauuucaguaaagggcaaa

SEQ ID NO: 1414089 - RNA, 19 nt, Artificial Sequence
  Description of Artificial Sequence: Synthetic oligonucleotide
uuguccccacagacagucu

SEQ ID NO: 1414090 - RNA, 19 nt, Artificial Sequence
  Description of Artificial Sequence: Synthetic oligonucleotide
ggauggacacacggcacag

SEQ ID NO: 1414091 - RNA, 19 nt, Artificial Sequence
  Description of Artificial Sequence: Synthetic oligonucleotide
gagguuggccccaccucug

SEQ ID NO: 1414092 - RNA, 19 nt, Artificial Sequence
  Description of Artificial Sequence: Synthetic oligonucleotide
ucuccucgccggcagcaua

SEQ ID NO: 1414093 - RNA, 19 nt, Artificial Sequence
  Description of Artificial Sequence: Synthetic oligonucleotide
agcacagucucagccuuau

SEQ ID NO: 1414094 - RNA, 19 nt, Artificial Sequence
  Description of Artificial Sequence: Synthetic oligonucleotide
accuuccugguagaaugga

SEQ ID NO: 1414095 - RNA, 19 nt, Artificial Sequence
  Description of Artificial Sequence: Synthetic oligonucleotide
cgaaagccgugcaggaacg

SEQ ID NO: 1414096 - RNA, 19 nt, Artificial Sequence
  Description of Artificial Sequence: Synthetic oligonucleotide
gcuuggaucuucccugcca

SEQ ID NO: 1414097 - RNA, 19 nt, Artificial Sequence
  Description of Artificial Sequence: Synthetic oligonucleotide
cucaccaaggaggaagaua

SEQ ID NO: 1414098 - RNA, 19 nt, Artificial Sequence
  Description of Artificial Sequence: Synthetic oligonucleotide
caugcagggagcaguugua

SEQ ID NO: 1414099 - RNA, 19 nt, Artificial Sequence
  Description of Artificial Sequence: Synthetic oligonucleotide
gaauggagagugggccuuc

SEQ ID NO: 1414100 - RNA, 19 nt, Artificial Sequence
  Description of Artificial Sequence: Synthetic oligonucleotide
cugcgaaagccgugcagga

SEQ ID NO: 1414101 - RNA, 19 nt, Artificial Sequence
  Description of Artificial Sequence: Synthetic oligonucleotide
agacccuccagaggcugug

SEQ ID NO: 1414102 - RNA, 19 nt, Artificial Sequence
  Description of Artificial Sequence: Synthetic oligonucleotide
cgucccgacgcccacacgc

SEQ ID NO: 1414103 - RNA, 19 nt, Artificial Sequence
  Description of Artificial Sequence: Synthetic oligonucleotide
cacuacccuaguuguuuca

SEQ ID NO: 1414104 - RNA, 19 nt, Artificial Sequence
  Description of Artificial Sequence: Synthetic oligonucleotide
gcccagauaaaagacccuc

SEQ ID NO: 1414105 - RNA, 19 nt, Artificial Sequence
  Description of Artificial Sequence: Synthetic oligonucleotide
gagcgacucaugggcuggg

SEQ ID NO: 1414106 - RNA, 19 nt, Artificial Sequence
  Description of Artificial Sequence: Synthetic oligonucleotide
cauaaucguccaggggcuc

SEQ ID NO: 1414107 - RNA, 19 nt, Artificial Sequence
  Description of Artificial Sequence: Synthetic oligonucleotide
auccugcgaaagccgugca

SEQ ID NO: 1414108 - RNA, 19 nt, Artificial Sequence
  Description of Artificial Sequence: Synthetic oligonucleotide
cacacgccgccuccucccg

SEQ ID NO: 1414109 - RNA, 19 nt, Artificial Sequence
  Description of Artificial Sequence: Synthetic oligonucleotide
ggagagugggccuucugcu

SEQ ID NO: 1414110 - RNA, 19 nt, Artificial Sequence
  Description of Artificial Sequence: Synthetic oligonucleotide
guguaauagguaacagggu

SEQ ID NO: 1414111 - RNA, 19 nt, Artificial Sequence
  Description of Artificial Sequence: Synthetic oligonucleotide
agcugccucagggaggcau

SEQ ID NO: 1414112 - RNA, 19 nt, Artificial Sequence
  Description of Artificial Sequence: Synthetic oligonucleotide
cagguuccucgcuggccag

SEQ ID NO: 1414113 - RNA, 19 nt, Artificial Sequence
  Description of Artificial Sequence: Synthetic oligonucleotide
gacgcccacacgccgccuc

SEQ ID NO: 1414114 - RNA, 19 nt, Artificial Sequence
  Description of Artificial Sequence: Synthetic oligonucleotide
ccuccucccgaucuaccgg

SEQ ID NO: 1414115 - RNA, 19 nt, Artificial Sequence
  Description of Artificial Sequence: Synthetic oligonucleotide
ggagcaguuguaggcggcc

SEQ ID NO: 1414116 - RNA, 19 nt, Artificial Sequence
  Description of Artificial Sequence: Synthetic oligonucleotide
cucacaccuuccugguaga

SEQ ID NO: 1414117 - RNA, 19 nt, Artificial Sequence
  Description of Artificial Sequence: Synthetic oligonucleotide
ucaucggggccuccuccuu

SEQ ID NO: 1414118 - RNA, 19 nt, Artificial Sequence
  Description of Artificial Sequence: Synthetic oligonucleotide
caacaggaugcaccaugca

SEQ ID NO: 1414119 - RNA, 19 nt, Artificial Sequence
  Description of Artificial Sequence: Synthetic oligonucleotide
ccaucggcgcaccagcaac

SEQ ID NO: 1414120 - RNA, 19 nt, Artificial Sequence
  Description of Artificial Sequence: Synthetic oligonucleotide
gcgguugaucaucggggcc

SEQ ID NO: 1414121 - RNA, 19 nt, Artificial Sequence
  Description of Artificial Sequence: Synthetic oligonucleotide
gaagcucaauguggcuauc

SEQ ID NO: 1414122 - RNA, 19 nt, Artificial Sequence
  Description of Artificial Sequence: Synthetic oligonucleotide
gacguucagguuccucgcu

SEQ ID NO: 1414123 - RNA, 19 nt, Artificial Sequence
  Description of Artificial Sequence: Synthetic oligonucleotide
ggcuuugaccuuggugucc

SEQ ID NO: 1414124 - RNA, 19 nt, Artificial Sequence
  Description of Artificial Sequence: Synthetic oligonucleotide
uccucgcuggccagaucua

SEQ ID NO: 1414125 - RNA, 19 nt, Artificial Sequence
  Description of Artificial Sequence: Synthetic oligonucleotide
caggaagcgcaggagggga

SEQ ID NO: 1414126 - RNA, 19 nt, Artificial Sequence
  Description of Artificial Sequence: Synthetic oligonucleotide
gcugguuucucaggacagc

SEQ ID NO: 1414127 - RNA, 19 nt, Artificial Sequence
  Description of Artificial Sequence: Synthetic oligonucleotide
ggauagcguccaccagggg

SEQ ID NO: 1414128 - RNA, 19 nt, Artificial Sequence
  Description of Artificial Sequence: Synthetic oligonucleotide
guguaacuuggaagcagaa

SEQ ID NO: 1414129 - RNA, 19 nt, Artificial Sequence
  Description of Artificial Sequence: Synthetic oligonucleotide
cagauguuugagagguggu

SEQ ID NO: 1414130 - RNA, 19 nt, Artificial Sequence
  Description of Artificial Sequence: Synthetic oligonucleotide
gaggaccaggaugcggcuc

SEQ ID NO: 1414131 - RNA, 19 nt, Artificial Sequence
  Description of Artificial Sequence: Synthetic oligonucleotide
ggaucuucccugccaagcu

SEQ ID NO: 1414132 - RNA, 19 nt, Artificial Sequence
  Description of Artificial Sequence: Synthetic oligonucleotide
ggaugcggcucuccucgcc

SEQ ID NO: 1414133 - RNA, 19 nt, Artificial Sequence
  Description of Artificial Sequence: Synthetic oligonucleotide
cagaucuaaggggcugcuc

SEQ ID NO: 1414134 - RNA, 19 nt, Artificial Sequence
  Description of Artificial Sequence: Synthetic oligonucleotide
augcaccaugcagggagca

SEQ ID NO: 1414135 - RNA, 19 nt, Artificial Sequence
  Description of Artificial Sequence: Synthetic oligonucleotide
ugcccgagucagccccagc

SEQ ID NO: 1414136 - RNA, 19 nt, Artificial Sequence
  Description of Artificial Sequence: Synthetic oligonucleotide
ccacuugagccggucaggc

SEQ ID NO: 1414137 - RNA, 19 nt, Artificial Sequence
  Description of Artificial Sequence: Synthetic oligonucleotide
cgacucaugggcugggcac

SEQ ID NO: 1414138 - RNA, 19 nt, Artificial Sequence
  Description of Artificial Sequence: Synthetic oligonucleotide
cacuugagccggucaggca

SEQ ID NO: 1414139 - RNA, 19 nt, Artificial Sequence
  Description of Artificial Sequence: Synthetic oligonucleotide
cuccucgccggcagcauaa

SEQ ID NO: 1414140 - RNA, 19 nt, Artificial Sequence
  Description of Artificial Sequence: Synthetic oligonucleotide
gccagaucuaaggggcugc

SEQ ID NO: 1414141 - RNA, 19 nt, Artificial Sequence
  Description of Artificial Sequence: Synthetic oligonucleotide
agccaacccugaccacucu

SEQ ID NO: 1414142 - RNA, 19 nt, Artificial Sequence
  Description of Artificial Sequence: Synthetic oligonucleotide
cgcaggcauagccggaugg

SEQ ID NO: 1414143 - RNA, 19 nt, Artificial Sequence
  Description of Artificial Sequence: Synthetic oligonucleotide
gcacuacccuaguuguuuc

SEQ ID NO: 1414144 - RNA, 19 nt, Artificial Sequence
  Description of Artificial Sequence: Synthetic oligonucleotide
cagggcuguguaauaggua

SEQ ID NO: 1414145 - RNA, 19 nt, Artificial Sequence
  Description of Artificial Sequence: Synthetic oligonucleotide
gcuguguaacuuggaagca

SEQ ID NO: 1414146 - RNA, 19 nt, Artificial Sequence
  Description of Artificial Sequence: Synthetic oligonucleotide
gccccaucggcgcaccagc

SEQ ID NO: 1414147 - RNA, 19 nt, Artificial Sequence
  Description of Artificial Sequence: Synthetic oligonucleotide
caguuguaggcggccccag

SEQ ID NO: 1414148 - RNA, 19 nt, Artificial Sequence
  Description of Artificial Sequence: Synthetic oligonucleotide
guugaucaucggggccucc

SEQ ID NO: 1414149 - RNA, 19 nt, Artificial Sequence
  Description of Artificial Sequence: Synthetic oligonucleotide
caugcagcagugcugucuu

SEQ ID NO: 1414150 - RNA, 19 nt, Artificial Sequence
  Description of Artificial Sequence: Synthetic oligonucleotide
ggucccuccgguugauguc

SEQ ID NO: 1414151 - RNA, 19 nt, Artificial Sequence
  Description of Artificial Sequence: Synthetic oligonucleotide
ggcuuggaucuucccugcc

SEQ ID NO: 1414152 - RNA, 19 nt, Artificial Sequence
  Description of Artificial Sequence: Synthetic oligonucleotide
ccaggauagcguccaccag

SEQ ID NO: 1414153 - RNA, 19 nt, Artificial Sequence
  Description of Artificial Sequence: Synthetic oligonucleotide
caggaacggcauggcgacg

SEQ ID NO: 1414154 - RNA, 19 nt, Artificial Sequence
  Description of Artificial Sequence: Synthetic oligonucleotide
uccucccgaucuaccgguu

SEQ ID NO: 1414155 - RNA, 19 nt, Artificial Sequence
  Description of Artificial Sequence: Synthetic oligonucleotide
cuccucccgaucuaccggu

SEQ ID NO: 1414156 - RNA, 19 nt, Artificial Sequence
  Description of Artificial Sequence: Synthetic oligonucleotide
ggcacucacugggaucagc

SEQ ID NO: 1414157 - RNA, 19 nt, Artificial Sequence
  Description of Artificial Sequence: Synthetic oligonucleotide
uagcguccaccaggggcug

SEQ ID NO: 1414158 - RNA, 19 nt, Artificial Sequence
  Description of Artificial Sequence: Synthetic oligonucleotide
gcgacucaugggcugggca

SEQ ID NO: 1414159 - RNA, 19 nt, Artificial Sequence
  Description of Artificial Sequence: Synthetic oligonucleotide
cugcuagccagagcaugca

SEQ ID NO: 1414160 - RNA, 19 nt, Artificial Sequence
  Description of Artificial Sequence: Synthetic oligonucleotide
ugugugcacugagcaggua

SEQ ID NO: 1414161 - RNA, 19 nt, Artificial Sequence
  Description of Artificial Sequence: Synthetic oligonucleotide
aggaugcaccaugcaggga

SEQ ID NO: 1414162 - RNA, 19 nt, Artificial Sequence
  Description of Artificial Sequence: Synthetic oligonucleotide
agccggucaggcaggggca

SEQ ID NO: 1414163 - RNA, 19 nt, Artificial Sequence
  Description of Artificial Sequence: Synthetic oligonucleotide
caucggcgcaccagcaacu

SEQ ID NO: 1414164 - RNA, 19 nt, Artificial Sequence
  Description of Artificial Sequence: Synthetic oligonucleotide
guaccacugugugcacuga

SEQ ID NO: 1414165 - RNA, 19 nt, Artificial Sequence
  Description of Artificial Sequence: Synthetic oligonucleotide
gcauaaucguccaggggcu

SEQ ID NO: 1414166 - RNA, 19 nt, Artificial Sequence
  Description of Artificial Sequence: Synthetic oligonucleotide
uggcgacggccgugcgucc

SEQ ID NO: 1414167 - RNA, 19 nt, Artificial Sequence
  Description of Artificial Sequence: Synthetic oligonucleotide
gguuggccccaccucugca

SEQ ID NO: 1414168 - RNA, 19 nt, Artificial Sequence
  Description of Artificial Sequence: Synthetic oligonucleotide
ccgagucagccccagcuca

SEQ ID NO: 1414169 - RNA, 19 nt, Artificial Sequence
  Description of Artificial Sequence: Synthetic oligonucleotide
gcugccucagggaggcaug

SEQ ID NO: 1414170 - RNA, 19 nt, Artificial Sequence
  Description of Artificial Sequence: Synthetic oligonucleotide
gcgacggccgugcgucccg

SEQ ID NO: 1414171 - RNA, 19 nt, Artificial Sequence
  Description of Artificial Sequence: Synthetic oligonucleotide
cacugggaucagccccaug

SEQ ID NO: 1414172 - RNA, 19 nt, Artificial Sequence
  Description of Artificial Sequence: Synthetic oligonucleotide
gacccuccagaggcuguga

SEQ ID NO: 1414173 - RNA, 19 nt, Artificial Sequence
  Description of Artificial Sequence: Synthetic oligonucleotide
cuacccuaguuguuucauu

SEQ ID NO: 1414174 - RNA, 19 nt, Artificial Sequence
  Description of Artificial Sequence: Synthetic oligonucleotide
ggcacuacccuaguuguuu

SEQ ID NO: 1414175 - RNA, 19 nt, Artificial Sequence
  Description of Artificial Sequence: Synthetic oligonucleotide
gacggccgugcgucccgac

SEQ ID NO: 1414176 - RNA, 19 nt, Artificial Sequence
  Description of Artificial Sequence: Synthetic oligonucleotide
gguugaucaucggggccuc

SEQ ID NO: 1414177 - RNA, 19 nt, Artificial Sequence
  Description of Artificial Sequence: Synthetic oligonucleotide
gcaguuguaggcggcccca

SEQ ID NO: 1414178 - RNA, 19 nt, Artificial Sequence
  Description of Artificial Sequence: Synthetic oligonucleotide
cuggguggauguugaaguu

SEQ ID NO: 1414179 - RNA, 19 nt, Artificial Sequence
  Description of Artificial Sequence: Synthetic oligonucleotide
acucuguuccaggguccau

SEQ ID NO: 1414180 - RNA, 19 nt, Artificial Sequence
  Description of Artificial Sequence: Synthetic oligonucleotide
ggaagcgcaggaggggaaa

SEQ ID NO: 1414181 - RNA, 19 nt, Artificial Sequence
  Description of Artificial Sequence: Synthetic oligonucleotide
ggcgcccaggauagcgucc

SEQ ID NO: 1414182 - RNA, 19 nt, Artificial Sequence
  Description of Artificial Sequence: Synthetic oligonucleotide
cugcccgagucagccccag

SEQ ID NO: 1414183 - RNA, 19 nt, Artificial Sequence
  Description of Artificial Sequence: Synthetic oligonucleotide
ggccgugcgucccgacgcc

SEQ ID NO: 1414184 - RNA, 19 nt, Artificial Sequence
  Description of Artificial Sequence: Synthetic oligonucleotide
aucuaccgguucagaccca

SEQ ID NO: 1414185 - RNA, 19 nt, Artificial Sequence
  Description of Artificial Sequence: Synthetic oligonucleotide
cauggcgacggccgugcgu

SEQ ID NO: 1414186 - RNA, 19 nt, Artificial Sequence
  Description of Artificial Sequence: Synthetic oligonucleotide
ccucccgaucuaccgguuc

SEQ ID NO: 1414187 - RNA, 19 nt, Artificial Sequence
  Description of Artificial Sequence: Synthetic oligonucleotide
cacaccuuccugguagaau

SEQ ID NO: 1414188 - RNA, 19 nt, Artificial Sequence
  Description of Artificial Sequence: Synthetic oligonucleotide
uccucgccggcagcauaau

SEQ ID NO: 1414189 - RNA, 19 nt, Artificial Sequence
  Description of Artificial Sequence: Synthetic oligonucleotide
cacgccccaucggcgcacc

SEQ ID NO: 1414190 - RNA, 19 nt, Artificial Sequence
  Description of Artificial Sequence: Synthetic oligonucleotide
ggucuaccugcagguuggc

SEQ ID NO: 1414191 - RNA, 19 nt, Artificial Sequence
  Description of Artificial Sequence: Synthetic oligonucleotide
ccgacgcccacacgccgcc

SEQ ID NO: 1414192 - RNA, 19 nt, Artificial Sequence
  Description of Artificial Sequence: Synthetic oligonucleotide
ccagaccaacaggaugcac

SEQ ID NO: 1414193 - RNA, 19 nt, Artificial Sequence
  Description of Artificial Sequence: Synthetic oligonucleotide
cggauggacacacggcaca

SEQ ID NO: 1414194 - RNA, 19 nt, Artificial Sequence
  Description of Artificial Sequence: Synthetic oligonucleotide
uccggucccuccgguugau

SEQ ID NO: 1414195 - RNA, 19 nt, Artificial Sequence
  Description of Artificial Sequence: Synthetic oligonucleotide
cggccgugcgucccgacgc

SEQ ID NO: 1414196 - RNA, 19 nt, Artificial Sequence
  Description of Artificial Sequence: Synthetic oligonucleotide
ggagccggauguugucugu

SEQ ID NO: 1414197 - RNA, 19 nt, Artificial Sequence
  Description of Artificial Sequence: Synthetic oligonucleotide
gucuaccugcagguuggcu

SEQ ID NO: 1414198 - RNA, 19 nt, Artificial Sequence
  Description of Artificial Sequence: Synthetic oligonucleotide
gccggucaggcaggggcag

SEQ ID NO: 1414199 - RNA, 19 nt, Artificial Sequence
  Description of Artificial Sequence: Synthetic oligonucleotide
ggcgacggccgugcguccc

SEQ ID NO: 1414200 - RNA, 19 nt, Artificial Sequence
  Description of Artificial Sequence: Synthetic oligonucleotide
gccagaccaacaggaugca

SEQ ID NO: 1414201 - RNA, 19 nt, Artificial Sequence
  Description of Artificial Sequence: Synthetic oligonucleotide
ccucgccggcagcauaauc

SEQ ID NO: 1414202 - RNA, 19 nt, Artificial Sequence
  Description of Artificial Sequence: Synthetic oligonucleotide
gcugggcacucacugggau

SEQ ID NO: 1414203 - RNA, 19 nt, Artificial Sequence
  Description of Artificial Sequence: Synthetic oligonucleotide
acgccccaucggcgcacca

SEQ ID NO: 1414204 - RNA, 19 nt, Artificial Sequence
  Description of Artificial Sequence: Synthetic oligonucleotide
gguagcucucuagcugccu

SEQ ID NO: 1414205 - RNA, 19 nt, Artificial Sequence
  Description of Artificial Sequence: Synthetic oligonucleotide
gcgucccgacgcccacacg

SEQ ID NO: 1414206 - RNA, 19 nt, Artificial Sequence
  Description of Artificial Sequence: Synthetic oligonucleotide
ccgcaggcauagccggaug

SEQ ID NO: 1414207 - RNA, 19 nt, Artificial Sequence
  Description of Artificial Sequence: Synthetic oligonucleotide
gcauagccggauggacaca

SEQ ID NO: 1414208 - RNA, 19 nt, Artificial Sequence
  Description of Artificial Sequence: Synthetic oligonucleotide
gugcgucccgacgcccaca

SEQ ID NO: 1414209 - RNA, 19 nt, Artificial Sequence
  Description of Artificial Sequence: Synthetic oligonucleotide
gggcacucacugggaucag

SEQ ID NO: 1414210 - RNA, 19 nt, Artificial Sequence
  Description of Artificial Sequence: Synthetic oligonucleotide
cacgccgccuccucccgau

SEQ ID NO: 1414211 - RNA, 19 nt, Artificial Sequence
  Description of Artificial Sequence: Synthetic oligonucleotide
agcuacccacuggguggau

SEQ ID NO: 1414212 - RNA, 19 nt, Artificial Sequence
  Description of Artificial Sequence: Synthetic oligonucleotide
gccgugcgucccgacgccc

SEQ ID NO: 1414213 - RNA, 19 nt, Artificial Sequence
  Description of Artificial Sequence: Synthetic oligonucleotide
ccaggggcugguacucgaa

SEQ ID NO: 1414214 - RNA, 19 nt, Artificial Sequence
  Description of Artificial Sequence: Synthetic oligonucleotide
cccaucggcgcaccagcaa

SEQ ID NO: 1414215 - RNA, 19 nt, Artificial Sequence
  Description of Artificial Sequence: Synthetic oligonucleotide
cgugcgucccgacgcccac

SEQ ID NO: 1414216 - RNA, 19 nt, Artificial Sequence
  Description of Artificial Sequence: Synthetic oligonucleotide
ccgugcgucccgacgccca

SEQ ID NO: 1414217 - RNA, 19 nt, Artificial Sequence
  Description of Artificial Sequence: Synthetic oligonucleotide
ccgccuccucccgaucuac

SEQ ID NO: 1414218 - RNA, 19 nt, Artificial Sequence
  Description of Artificial Sequence: Synthetic oligonucleotide
ggauccggucccuccgguu

SEQ ID NO: 1414219 - RNA, 19 nt, Artificial Sequence
  Description of Artificial Sequence: Synthetic oligonucleotide
ccaaggcgcccaggauagc

SEQ ID NO: 1414220 - RNA, 19 nt, Artificial Sequence
  Description of Artificial Sequence: Synthetic oligonucleotide
gccaagcuacccacugggu

SEQ ID NO: 1414221 - RNA, 19 nt, Artificial Sequence
  Description of Artificial Sequence: Synthetic oligonucleotide
cccgaucuaccgguucaga

SEQ ID NO: 1414222 - RNA, 19 nt, Artificial Sequence
  Description of Artificial Sequence: Synthetic oligonucleotide
ccucgcuggccagaucuaa

SEQ ID NO: 1414223 - RNA, 19 nt, Artificial Sequence
  Description of Artificial Sequence: Synthetic oligonucleotide
cgccccaucggcgcaccag

SEQ ID NO: 1414224 - RNA, 19 nt, Artificial Sequence
  Description of Artificial Sequence: Synthetic oligonucleotide
gcggcucuccucgccggca

SEQ ID NO: 1414225 - RNA, 19 nt, Artificial Sequence
  Description of Artificial Sequence: Synthetic oligonucleotide
gccgccuccucccgaucua

SEQ ID NO: 1414226 - RNA, 19 nt, Artificial Sequence
  Description of Artificial Sequence: Synthetic oligonucleotide
cccugaccacucuguucca

SEQ ID NO: 1414227 - RNA, 19 nt, Artificial Sequence
  Description of Artificial Sequence: Synthetic oligonucleotide
ccacgccccaucggcgcac

SEQ ID NO: 1414228 - RNA, 19 nt, Artificial Sequence
  Description of Artificial Sequence: Synthetic oligonucleotide
ccagaucuaaggggcugcu

SEQ ID NO: 1414229 - RNA, 19 nt, Artificial Sequence
  Description of Artificial Sequence: Synthetic oligonucleotide
gccgcaggcauagccggau

SEQ ID NO: 1414230 - RNA, 19 nt, Artificial Sequence
  Description of Artificial Sequence: Synthetic oligonucleotide
ccauggccgcaggcauagc

SEQ ID NO: 1414231 - RNA, 19 nt, Artificial Sequence
  Description of Artificial Sequence: Synthetic oligonucleotide
ccggucccuccgguugaug

SEQ ID NO: 1414232 - RNA, 19 nt, Artificial Sequence
  Description of Artificial Sequence: Synthetic oligonucleotide
gggcacuacccuaguuguu

SEQ ID NO: 1414233 - RNA, 19 nt, Artificial Sequence
  Description of Artificial Sequence: Synthetic oligonucleotide
ccccucccuccaggaggag

SEQ ID NO: 1414234 - RNA, 19 nt, Artificial Sequence
  Description of Artificial Sequence: Synthetic oligonucleotide
cgacggccgugcgucccga

SEQ ID NO: 1414235 - RNA, 19 nt, Artificial Sequence
  Description of Artificial Sequence: Synthetic oligonucleotide
cgacgcccacacgccgccu

SEQ ID NO: 1414236 - RNA, 19 nt, Artificial Sequence
  Description of Artificial Sequence: Synthetic oligonucleotide
aauaauugggcucagcuuc

SEQ ID NO: 1414237 - RNA, 19 nt, Artificial Sequence
  Description of Artificial Sequence: Synthetic oligonucleotide
aaaagcaucuaguugcacc

SEQ ID NO: 1414238 - RNA, 19 nt, Artificial Sequence
  Description of Artificial Sequence: Synthetic oligonucleotide
aaagcaucuaguugcaccc

SEQ ID NO: 1414239 - RNA, 19 nt, Artificial Sequence
  Description of Artificial Sequence: Synthetic oligonucleotide
aauagaucuaccugguagg

SEQ ID NO: 1414240 - RNA, 19 nt, Artificial Sequence
  Description of Artificial Sequence: Synthetic oligonucleotide
guaaucuucacauauuagg

SEQ ID NO: 1414241 - RNA, 19 nt, Artificial Sequence
  Description of Artificial Sequence: Synthetic oligonucleotide
aaguacuugacucugggag

SEQ ID NO: 1414242 - RNA, 19 nt, Artificial Sequence
  Description of Artificial Sequence: Synthetic oligonucleotide
aauuuauuccauaagucac

SEQ ID NO: 1414243 - RNA, 19 nt, Artificial Sequence
  Description of Artificial Sequence: Synthetic oligonucleotide
uuuaacuugagguugauau

SEQ ID NO: 1414244 - RNA, 19 nt, Artificial Sequence
  Description of Artificial Sequence: Synthetic oligonucleotide
uugaacaacaguaagugug

SEQ ID NO: 1414245 - RNA, 19 nt, Artificial Sequence
  Description of Artificial Sequence: Synthetic oligonucleotide
auugcaaucauaaggaucg

SEQ ID NO: 1414246 - RNA, 19 nt, Artificial Sequence
  Description of Artificial Sequence: Synthetic oligonucleotide
acacuuuauauauugguac

SEQ ID NO: 1414247 - RNA, 19 nt, Artificial Sequence
  Description of Artificial Sequence: Synthetic oligonucleotide
uuugcuauacccaauagau

SEQ ID NO: 1414248 - RNA, 19 nt, Artificial Sequence
  Description of Artificial Sequence: Synthetic oligonucleotide
aaucccaugggacagguug

SEQ ID NO: 1414249 - RNA, 19 nt, Artificial Sequence
  Description of Artificial Sequence: Synthetic oligonucleotide
aaacaaaguaacaaguguc

SEQ ID NO: 1414250 - RNA, 19 nt, Artificial Sequence
  Description of Artificial Sequence: Synthetic oligonucleotide
uuauauauugguaccaaac

SEQ ID NO: 1414251 - RNA, 19 nt, Artificial Sequence
  Description of Artificial Sequence: Synthetic oligonucleotide
ugcuauacccaauagaucu

SEQ ID NO: 1414252 - RNA, 19 nt, Artificial Sequence
  Description of Artificial Sequence: Synthetic oligonucleotide
aacucaauuuccuuccccg

SEQ ID NO: 1414253 - RNA, 19 nt, Artificial Sequence
  Description of Artificial Sequence: Synthetic oligonucleotide
aaaggaguagaugcaaacc

SEQ ID NO: 1414254 - RNA, 19 nt, Artificial Sequence
  Description of Artificial Sequence: Synthetic oligonucleotide
aacgauauggccaucuugg

SEQ ID NO: 1414255 - RNA, 19 nt, Artificial Sequence
  Description of Artificial Sequence: Synthetic oligonucleotide
uaaauaaucaggacuauua

SEQ ID NO: 1414256 - RNA, 19 nt, Artificial Sequence
  Description of Artificial Sequence: Synthetic oligonucleotide
ucuaguugcacccucaggu

SEQ ID NO: 1414257 - RNA, 19 nt, Artificial Sequence
  Description of Artificial Sequence: Synthetic oligonucleotide
uguuccuugaacaacagua

SEQ ID NO: 1414258 - RNA, 19 nt, Artificial Sequence
  Description of Artificial Sequence: Synthetic oligonucleotide
ucaauaauugggcucagcu

SEQ ID NO: 1414259 - RNA, 19 nt, Artificial Sequence
  Description of Artificial Sequence: Synthetic oligonucleotide
uaaucuucacauauuaggu

SEQ ID NO: 1414260 - RNA, 19 nt, Artificial Sequence
  Description of Artificial Sequence: Synthetic oligonucleotide
ucagaauccgcauaaagaa

SEQ ID NO: 1414261 - RNA, 19 nt, Artificial Sequence
  Description of Artificial Sequence: Synthetic oligonucleotide
uggaacacuuuauauauug

SEQ ID NO: 1414262 - RNA, 19 nt, Artificial Sequence
  Description of Artificial Sequence: Synthetic oligonucleotide
uaacuuguaaucuucacau

SEQ ID NO: 1414263 - RNA, 19 nt, Artificial Sequence
  Description of Artificial Sequence: Synthetic oligonucleotide
auuuuaguaguuguagucg

SEQ ID NO: 1414264 - RNA, 19 nt, Artificial Sequence
  Description of Artificial Sequence: Synthetic oligonucleotide
ucaugagucacaaauucac

SEQ ID NO: 1414265 - RNA, 19 nt, Artificial Sequence
  Description of Artificial Sequence: Synthetic oligonucleotide
aaaguaacaaguguccuca

SEQ ID NO: 1414266 - RNA, 19 nt, Artificial Sequence
  Description of Artificial Sequence: Synthetic oligonucleotide
cuaaacaaaguaacaagug

SEQ ID NO: 1414267 - RNA, 19 nt, Artificial Sequence
  Description of Artificial Sequence: Synthetic oligonucleotide
auuuagacguuccuuuaac

SEQ ID NO: 1414268 - RNA, 19 nt, Artificial Sequence
  Description of Artificial Sequence: Synthetic oligonucleotide
caauagaucuaccugguag

SEQ ID NO: 1414269 - RNA, 19 nt, Artificial Sequence
  Description of Artificial Sequence: Synthetic oligonucleotide
uauauugguaccaaacgau

SEQ ID NO: 1414270 - RNA, 19 nt, Artificial Sequence
  Description of Artificial Sequence: Synthetic oligonucleotide
ugaacaacaguaagugugc

SEQ ID NO: 1414271 - RNA, 19 nt, Artificial Sequence
  Description of Artificial Sequence: Synthetic oligonucleotide
gacgguaucucauggaaag

SEQ ID NO: 1414272 - RNA, 19 nt, Artificial Sequence
  Description of Artificial Sequence: Synthetic oligonucleotide
aggacuauuauuucaugag

SEQ ID NO: 1414273 - RNA, 19 nt, Artificial Sequence
  Description of Artificial Sequence: Synthetic oligonucleotide
uauuauuucaugagucaca

SEQ ID NO: 1414274 - RNA, 19 nt, Artificial Sequence
  Description of Artificial Sequence: Synthetic oligonucleotide
auauauugguaccaaacga

SEQ ID NO: 1414275 - RNA, 19 nt, Artificial Sequence
  Description of Artificial Sequence: Synthetic oligonucleotide
ucaggguuaggaccaaugg

SEQ ID NO: 1414276 - RNA, 19 nt, Artificial Sequence
  Description of Artificial Sequence: Synthetic oligonucleotide
acugucuucaauaauuggg

SEQ ID NO: 1414277 - RNA, 19 nt, Artificial Sequence
  Description of Artificial Sequence: Synthetic oligonucleotide
aggacuaauuaccuucccc

SEQ ID NO: 1414278 - RNA, 19 nt, Artificial Sequence
  Description of Artificial Sequence: Synthetic oligonucleotide
acuauuucagcuuugugaa

SEQ ID NO: 1414279 - RNA, 19 nt, Artificial Sequence
  Description of Artificial Sequence: Synthetic oligonucleotide
auuuauuccauaagucacc

SEQ ID NO: 1414280 - RNA, 19 nt, Artificial Sequence
  Description of Artificial Sequence: Synthetic oligonucleotide
aguauucuggcuaaguuuc

SEQ ID NO: 1414281 - RNA, 19 nt, Artificial Sequence
  Description of Artificial Sequence: Synthetic oligonucleotide
auaacuuguaaucuucaca

SEQ ID NO: 1414282 - RNA, 19 nt, Artificial Sequence
  Description of Artificial Sequence: Synthetic oligonucleotide
ugugaugaaccucaguggu

SEQ ID NO: 1414283 - RNA, 19 nt, Artificial Sequence
  Description of Artificial Sequence: Synthetic oligonucleotide
cuaaguuuccagaggagcc

SEQ ID NO: 1414284 - RNA, 19 nt, Artificial Sequence
  Description of Artificial Sequence: Synthetic oligonucleotide
aauagcuacaaagcugauc

SEQ ID NO: 1414285 - RNA, 19 nt, Artificial Sequence
  Description of Artificial Sequence: Synthetic oligonucleotide
aggaccaaugguuacguuc

SEQ ID NO: 1414286 - RNA, 19 nt, Artificial Sequence
  Description of Artificial Sequence: Synthetic oligonucleotide
uguagguguuccuugaaca

SEQ ID NO: 1414287 - RNA, 19 nt, Artificial Sequence
  Description of Artificial Sequence: Synthetic oligonucleotide
uauugcaaucauaaggauc

SEQ ID NO: 1414288 - RNA, 19 nt, Artificial Sequence
  Description of Artificial Sequence: Synthetic oligonucleotide
aaaccgaggcgcucuaaac

SEQ ID NO: 1414289 - RNA, 19 nt, Artificial Sequence
  Description of Artificial Sequence: Synthetic oligonucleotide
aaacgauauggccaucuug

SEQ ID NO: 1414290 - RNA, 19 nt, Artificial Sequence
  Description of Artificial Sequence: Synthetic oligonucleotide
gaagggaugcccugcaagg

SEQ ID NO: 1414291 - RNA, 19 nt, Artificial Sequence
  Description of Artificial Sequence: Synthetic oligonucleotide
agaacaguucuccaggaug

SEQ ID NO: 1414292 - RNA, 19 nt, Artificial Sequence
  Description of Artificial Sequence: Synthetic oligonucleotide
agguacuuguaacggaagc

SEQ ID NO: 1414293 - RNA, 19 nt, Artificial Sequence
  Description of Artificial Sequence: Synthetic oligonucleotide
uugucaagagguuauaaau

SEQ ID NO: 1414294 - RNA, 19 nt, Artificial Sequence
  Description of Artificial Sequence: Synthetic oligonucleotide
ugguacugaaaauagcuac

SEQ ID NO: 1414295 - RNA, 19 nt, Artificial Sequence
  Description of Artificial Sequence: Synthetic oligonucleotide
uguaagcucaucacggcug

SEQ ID NO: 1414296 - RNA, 19 nt, Artificial Sequence
  Description of Artificial Sequence: Synthetic oligonucleotide
guccgaaagccauugaagg

SEQ ID NO: 1414297 - RNA, 19 nt, Artificial Sequence
  Description of Artificial Sequence: Synthetic oligonucleotide
uuuucugccgcaucauuag

SEQ ID NO: 1414298 - RNA, 19 nt, Artificial Sequence
  Description of Artificial Sequence: Synthetic oligonucleotide
uagguauucuugcuuaaug

SEQ ID NO: 1414299 - RNA, 19 nt, Artificial Sequence
  Description of Artificial Sequence: Synthetic oligonucleotide
auuggucuaucuuccauag

SEQ ID NO: 1414300 - RNA, 19 nt, Artificial Sequence
  Description of Artificial Sequence: Synthetic oligonucleotide
cacauauuagguauucuug

SEQ ID NO: 1414301 - RNA, 19 nt, Artificial Sequence
  Description of Artificial Sequence: Synthetic oligonucleotide
uuuucguuaccuaacucaa

SEQ ID NO: 1414302 - RNA, 19 nt, Artificial Sequence
  Description of Artificial Sequence: Synthetic oligonucleotide
cacuuuauauauugguacc

SEQ ID NO: 1414303 - RNA, 19 nt, Artificial Sequence
  Description of Artificial Sequence: Synthetic oligonucleotide
guagaugcaaaccgaggcg

SEQ ID NO: 1414304 - RNA, 19 nt, Artificial Sequence
  Description of Artificial Sequence: Synthetic oligonucleotide
guuuucguuaccuaacuca

SEQ ID NO: 1414305 - RNA, 19 nt, Artificial Sequence
  Description of Artificial Sequence: Synthetic oligonucleotide
ugguuaacucuguugagug

SEQ ID NO: 1414306 - RNA, 19 nt, Artificial Sequence
  Description of Artificial Sequence: Synthetic oligonucleotide
uuccuugaacaacaguaag

SEQ ID NO: 1414307 - RNA, 19 nt, Artificial Sequence
  Description of Artificial Sequence: Synthetic oligonucleotide
ugagucacaaauucacugu

SEQ ID NO: 1414308 - RNA, 19 nt, Artificial Sequence
  Description of Artificial Sequence: Synthetic oligonucleotide
uguacaguccgaaagccau

SEQ ID NO: 1414309 - RNA, 19 nt, Artificial Sequence
  Description of Artificial Sequence: Synthetic oligonucleotide
uacccaauagaucuaccug

SEQ ID NO: 1414310 - RNA, 19 nt, Artificial Sequence
  Description of Artificial Sequence: Synthetic oligonucleotide
aucuucacauauuagguau

SEQ ID NO: 1414311 - RNA, 19 nt, Artificial Sequence
  Description of Artificial Sequence: Synthetic oligonucleotide
ugucaagagguuauaaaua

SEQ ID NO: 1414312 - RNA, 19 nt, Artificial Sequence
  Description of Artificial Sequence: Synthetic oligonucleotide
aagcuccaggacuaauuac

SEQ ID NO: 1414313 - RNA, 19 nt, Artificial Sequence
  Description of Artificial Sequence: Synthetic oligonucleotide
uggauucuguuucuuagga

SEQ ID NO: 1414314 - RNA, 19 nt, Artificial Sequence
  Description of Artificial Sequence: Synthetic oligonucleotide
aguaguuuucguuaccuaa

SEQ ID NO: 1414315 - RNA, 19 nt, Artificial Sequence
  Description of Artificial Sequence: Synthetic oligonucleotide
aaugguuacguuccugaaa

SEQ ID NO: 1414316 - RNA, 19 nt, Artificial Sequence
  Description of Artificial Sequence: Synthetic oligonucleotide
uccaggacuaauuaccuuc

SEQ ID NO: 1414317 - RNA, 19 nt, Artificial Sequence
  Description of Artificial Sequence: Synthetic oligonucleotide
ugcaaaaguacuugacucu

SEQ ID NO: 1414318 - RNA, 19 nt, Artificial Sequence
  Description of Artificial Sequence: Synthetic oligonucleotide
accagggugacugaauagc

SEQ ID NO: 1414319 - RNA, 19 nt, Artificial Sequence
  Description of Artificial Sequence: Synthetic oligonucleotide
uggcuaaguuuccagagga

SEQ ID NO: 1414320 - RNA, 19 nt, Artificial Sequence
  Description of Artificial Sequence: Synthetic oligonucleotide
auuaccuuccccaccuucc

SEQ ID NO: 1414321 - RNA, 19 nt, Artificial Sequence
  Description of Artificial Sequence: Synthetic oligonucleotide
ugauggguacuuuuggcca

SEQ ID NO: 1414322 - RNA, 19 nt, Artificial Sequence
  Description of Artificial Sequence: Synthetic oligonucleotide
uaggcauuggucuaucuuc

SEQ ID NO: 1414323 - RNA, 19 nt, Artificial Sequence
  Description of Artificial Sequence: Synthetic oligonucleotide
auguagguguuccuugaac

SEQ ID NO: 1414324 - RNA, 19 nt, Artificial Sequence
  Description of Artificial Sequence: Synthetic oligonucleotide
uauugguaccaaacgauau

SEQ ID NO: 1414325 - RNA, 19 nt, Artificial Sequence
  Description of Artificial Sequence: Synthetic oligonucleotide
uucguuaccuaacucaauu

SEQ ID NO: 1414326 - RNA, 19 nt, Artificial Sequence
  Description of Artificial Sequence: Synthetic oligonucleotide
ggucuucccauccagaucc

SEQ ID NO: 1414327 - RNA, 19 nt, Artificial Sequence
  Description of Artificial Sequence: Synthetic oligonucleotide
gacuauuauuucaugaguc

SEQ ID NO: 1414328 - RNA, 19 nt, Artificial Sequence
  Description of Artificial Sequence: Synthetic oligonucleotide
uuuagacguuccuuuaacu

SEQ ID NO: 1414329 - RNA, 19 nt, Artificial Sequence
  Description of Artificial Sequence: Synthetic oligonucleotide
ucacauauuagguauucuu

SEQ ID NO: 1414330 - RNA, 19 nt, Artificial Sequence
  Description of Artificial Sequence: Synthetic oligonucleotide
uucacgacugucuucaaua

SEQ ID NO: 1414331 - RNA, 19 nt, Artificial Sequence
  Description of Artificial Sequence: Synthetic oligonucleotide
auacccaauagaucuaccu

SEQ ID NO: 1414332 - RNA, 19 nt, Artificial Sequence
  Description of Artificial Sequence: Synthetic oligonucleotide
gugugaugaaccucagugg

SEQ ID NO: 1414333 - RNA, 19 nt, Artificial Sequence
  Description of Artificial Sequence: Synthetic oligonucleotide
uuuauuccauaagucacca

SEQ ID NO: 1414334 - RNA, 19 nt, Artificial Sequence
  Description of Artificial Sequence: Synthetic oligonucleotide
gaucaauuccuguaagcuc

SEQ ID NO: 1414335 - RNA, 19 nt, Artificial Sequence
  Description of Artificial Sequence: Synthetic oligonucleotide
aguuuucguuaccuaacuc

SEQ ID NO: 1414336 - RNA, 19 nt, Artificial Sequence
  Description of Artificial Sequence: Synthetic oligonucleotide
aaccgaggcgcucuaaaca

SEQ ID NO: 1414337 - RNA, 19 nt, Artificial Sequence
  Description of Artificial Sequence: Synthetic oligonucleotide
uuagacguuccuuuaacuu

SEQ ID NO: 1414338 - RNA, 19 nt, Artificial Sequence
  Description of Artificial Sequence: Synthetic oligonucleotide
aggagcaaagcuccaggac

SEQ ID NO: 1414339 - RNA, 19 nt, Artificial Sequence
  Description of Artificial Sequence: Synthetic oligonucleotide
guaggaaaaguccacgauc

SEQ ID NO: 1414340 - RNA, 19 nt, Artificial Sequence
  Description of Artificial Sequence: Synthetic oligonucleotide
uaacucaauuuccuucccc

SEQ ID NO: 1414341 - RNA, 19 nt, Artificial Sequence
  Description of Artificial Sequence: Synthetic oligonucleotide
uaacggaagcagaggaucc

SEQ ID NO: 1414342 - RNA, 19 nt, Artificial Sequence
  Description of Artificial Sequence: Synthetic oligonucleotide
gcaaucauaaggaucgugg

SEQ ID NO: 1414343 - RNA, 19 nt, Artificial Sequence
  Description of Artificial Sequence: Synthetic oligonucleotide
aacaaguguccucaggguu

SEQ ID NO: 1414344 - RNA, 19 nt, Artificial Sequence
  Description of Artificial Sequence: Synthetic oligonucleotide
ugaugaaccucaguggucu

SEQ ID NO: 1414345 - RNA, 19 nt, Artificial Sequence
  Description of Artificial Sequence: Synthetic oligonucleotide
agggucugguuauaaacag

SEQ ID NO: 1414346 - RNA, 19 nt, Artificial Sequence
  Description of Artificial Sequence: Synthetic oligonucleotide
gguaccaaacgauauggcc

SEQ ID NO: 1414347 - RNA, 19 nt, Artificial Sequence
  Description of Artificial Sequence: Synthetic oligonucleotide
aacaguaagugugcuaggu

SEQ ID NO: 1414348 - RNA, 19 nt, Artificial Sequence
  Description of Artificial Sequence: Synthetic oligonucleotide
gagucacaaauucacugug

SEQ ID NO: 1414349 - RNA, 19 nt, Artificial Sequence
  Description of Artificial Sequence: Synthetic oligonucleotide
ugaucguucuuauugcaau

SEQ ID NO: 1414350 - RNA, 19 nt, Artificial Sequence
  Description of Artificial Sequence: Synthetic oligonucleotide
guuaggaccaaugguuacg

SEQ ID NO: 1414351 - RNA, 19 nt, Artificial Sequence
  Description of Artificial Sequence: Synthetic oligonucleotide
ucgauauugugaacaccag

SEQ ID NO: 1414352 - RNA, 19 nt, Artificial Sequence
  Description of Artificial Sequence: Synthetic oligonucleotide
ucaugggcauucagaaucc

SEQ ID NO: 1414353 - RNA, 19 nt, Artificial Sequence
  Description of Artificial Sequence: Synthetic oligonucleotide
aguguguagcuucacgacu

SEQ ID NO: 1414354 - RNA, 19 nt, Artificial Sequence
  Description of Artificial Sequence: Synthetic oligonucleotide
ucugccgcaucauuaguga

SEQ ID NO: 1414355 - RNA, 19 nt, Artificial Sequence
  Description of Artificial Sequence: Synthetic oligonucleotide
agauccugaaggguggaac

SEQ ID NO: 1414356 - RNA, 19 nt, Artificial Sequence
  Description of Artificial Sequence: Synthetic oligonucleotide
auaaggaucguggauucug

SEQ ID NO: 1414357 - RNA, 19 nt, Artificial Sequence
  Description of Artificial Sequence: Synthetic oligonucleotide
auauugugaacaccagggu

SEQ ID NO: 1414358 - RNA, 19 nt, Artificial Sequence
  Description of Artificial Sequence: Synthetic oligonucleotide
uauacccaauagaucuacc

SEQ ID NO: 1414359 - RNA, 19 nt, Artificial Sequence
  Description of Artificial Sequence: Synthetic oligonucleotide
ugccgcaucauuagugagc

SEQ ID NO: 1414360 - RNA, 19 nt, Artificial Sequence
  Description of Artificial Sequence: Synthetic oligonucleotide
guuugcuauacccaauaga

SEQ ID NO: 1414361 - RNA, 19 nt, Artificial Sequence
  Description of Artificial Sequence: Synthetic oligonucleotide
uccgaaagccauugaagga

SEQ ID NO: 1414362 - RNA, 19 nt, Artificial Sequence
  Description of Artificial Sequence: Synthetic oligonucleotide
ucucauggaaaggaguaga

SEQ ID NO: 1414363 - RNA, 19 nt, Artificial Sequence
  Description of Artificial Sequence: Synthetic oligonucleotide
ugugcuagguuugcuauac

SEQ ID NO: 1414364 - RNA, 19 nt, Artificial Sequence
  Description of Artificial Sequence: Synthetic oligonucleotide
ucauaaggaucguggauuc

SEQ ID NO: 1414365 - RNA, 19 nt, Artificial Sequence
  Description of Artificial Sequence: Synthetic oligonucleotide
ucuaucuuccauagagaau

SEQ ID NO: 1414366 - RNA, 19 nt, Artificial Sequence
  Description of Artificial Sequence: Synthetic oligonucleotide
cuuguaacggaagcagagg

SEQ ID NO: 1414367 - RNA, 19 nt, Artificial Sequence
  Description of Artificial Sequence: Synthetic oligonucleotide
uaguaguuguagucgauau

SEQ ID NO: 1414368 - RNA, 19 nt, Artificial Sequence
  Description of Artificial Sequence: Synthetic oligonucleotide
agucgauauugugaacacc

SEQ ID NO: 1414369 - RNA, 19 nt, Artificial Sequence
  Description of Artificial Sequence: Synthetic oligonucleotide
uacuuguaacggaagcaga

SEQ ID NO: 1414370 - RNA, 19 nt, Artificial Sequence
  Description of Artificial Sequence: Synthetic oligonucleotide
acuuuauauauugguacca

SEQ ID NO: 1414371 - RNA, 19 nt, Artificial Sequence
  Description of Artificial Sequence: Synthetic oligonucleotide
auagaucuaccugguaggg

SEQ ID NO: 1414372 - RNA, 19 nt, Artificial Sequence
  Description of Artificial Sequence: Synthetic oligonucleotide
ugaacuauuucagcuuugu

SEQ ID NO: 1414373 - RNA, 19 nt, Artificial Sequence
  Description of Artificial Sequence: Synthetic oligonucleotide
ggucuguacaguccgaaag

SEQ ID NO: 1414374 - RNA, 19 nt, Artificial Sequence
  Description of Artificial Sequence: Synthetic oligonucleotide
uugguacugaaaauagcua

SEQ ID NO: 1414375 - RNA, 19 nt, Artificial Sequence
  Description of Artificial Sequence: Synthetic oligonucleotide
aaggguggaacacuuuaua

SEQ ID NO: 1414376 - RNA, 19 nt, Artificial Sequence
  Description of Artificial Sequence: Synthetic oligonucleotide
ggacagguugaaaagaugc

SEQ ID NO: 1414377 - RNA, 19 nt, Artificial Sequence
  Description of Artificial Sequence: Synthetic oligonucleotide
acaccguggacucaucaug

SEQ ID NO: 1414378 - RNA, 19 nt, Artificial Sequence
  Description of Artificial Sequence: Synthetic oligonucleotide
aagacauguagguguuccu

SEQ ID NO: 1414379 - RNA, 19 nt, Artificial Sequence
  Description of Artificial Sequence: Synthetic oligonucleotide
auaagucaccauccuuuag

SEQ ID NO: 1414380 - RNA, 19 nt, Artificial Sequence
  Description of Artificial Sequence: Synthetic oligonucleotide
gaguagaugcaaaccgagg

SEQ ID NO: 1414381 - RNA, 19 nt, Artificial Sequence
  Description of Artificial Sequence: Synthetic oligonucleotide
uaaggaucguggauucugu

SEQ ID NO: 1414382 - RNA, 19 nt, Artificial Sequence
  Description of Artificial Sequence: Synthetic oligonucleotide
guuacguuccugaaacuug

SEQ ID NO: 1414383 - RNA, 19 nt, Artificial Sequence
  Description of Artificial Sequence: Synthetic oligonucleotide
uuaacuugagguugauaua

SEQ ID NO: 1414384 - RNA, 19 nt, Artificial Sequence
  Description of Artificial Sequence: Synthetic oligonucleotide
guaccaaacgauauggcca

SEQ ID NO: 1414385 - RNA, 19 nt, Artificial Sequence
  Description of Artificial Sequence: Synthetic oligonucleotide
ucaggacuauuauuucaug

SEQ ID NO: 1414386 - RNA, 19 nt, Artificial Sequence
  Description of Artificial Sequence: Synthetic oligonucleotide
agguugaaaagaugccuug

SEQ ID NO: 1414387 - RNA, 19 nt, Artificial Sequence
  Description of Artificial Sequence: Synthetic oligonucleotide
uccgcauaaagaauuuauu

SEQ ID NO: 1414388 - RNA, 19 nt, Artificial Sequence
  Description of Artificial Sequence: Synthetic oligonucleotide
guuaacucuguugaguguc

SEQ ID NO: 1414389 - RNA, 19 nt, Artificial Sequence
  Description of Artificial Sequence: Synthetic oligonucleotide
acccagaauaacuuguaau

SEQ ID NO: 1414390 - RNA, 19 nt, Artificial Sequence
  Description of Artificial Sequence: Synthetic oligonucleotide
uguaacggaagcagaggau

SEQ ID NO: 1414391 - RNA, 19 nt, Artificial Sequence
  Description of Artificial Sequence: Synthetic oligonucleotide
uguggaacgugguaucaaa

SEQ ID NO: 1414392 - RNA, 19 nt, Artificial Sequence
  Description of Artificial Sequence: Synthetic oligonucleotide
aucauuagugagcuccagu

SEQ ID NO: 1414393 - RNA, 19 nt, Artificial Sequence
  Description of Artificial Sequence: Synthetic oligonucleotide
caccguggacucaucaugg

SEQ ID NO: 1414394 - RNA, 19 nt, Artificial Sequence
  Description of Artificial Sequence: Synthetic oligonucleotide
acuugagguugauauaaaa

SEQ ID NO: 1414395 - RNA, 19 nt, Artificial Sequence
  Description of Artificial Sequence: Synthetic oligonucleotide
uuauugcaaucauaaggau

SEQ ID NO: 1414396 - RNA, 19 nt, Artificial Sequence
  Description of Artificial Sequence: Synthetic oligonucleotide
aaguaacaaguguccucag

SEQ ID NO: 1414397 - RNA, 19 nt, Artificial Sequence
  Description of Artificial Sequence: Synthetic oligonucleotide
ugaaccucaguggucuucc

SEQ ID NO: 1414398 - RNA, 19 nt, Artificial Sequence
  Description of Artificial Sequence: Synthetic oligonucleotide
guacuugacucugggaggg

SEQ ID NO: 1414399 - RNA, 19 nt, Artificial Sequence
  Description of Artificial Sequence: Synthetic oligonucleotide
agcaucuaguugcacccuc

SEQ ID NO: 1414400 - RNA, 19 nt, Artificial Sequence
  Description of Artificial Sequence: Synthetic oligonucleotide
gaguguguagcuucacgac

SEQ ID NO: 1414401 - RNA, 19 nt, Artificial Sequence
  Description of Artificial Sequence: Synthetic oligonucleotide
agugugcuagguuugcuau

SEQ ID NO: 1414402 - RNA, 19 nt, Artificial Sequence
  Description of Artificial Sequence: Synthetic oligonucleotide
uagucgauauugugaacac

SEQ ID NO: 1414403 - RNA, 19 nt, Artificial Sequence
  Description of Artificial Sequence: Synthetic oligonucleotide
ugguaccaaacgauauggc

SEQ ID NO: 1414404 - RNA, 19 nt, Artificial Sequence
  Description of Artificial Sequence: Synthetic oligonucleotide
aagugugcuagguuugcua

SEQ ID NO: 1414405 - RNA, 19 nt, Artificial Sequence
  Description of Artificial Sequence: Synthetic oligonucleotide
gggauuuuaguaguuguag

SEQ ID NO: 1414406 - RNA, 19 nt, Artificial Sequence
  Description of Artificial Sequence: Synthetic oligonucleotide
caugguuaacucuguugag

SEQ ID NO: 1414407 - RNA, 19 nt, Artificial Sequence
  Description of Artificial Sequence: Synthetic oligonucleotide
uaccaaacgauauggccau

SEQ ID NO: 1414408 - RNA, 19 nt, Artificial Sequence
  Description of Artificial Sequence: Synthetic oligonucleotide
ggacuaauuaccuucccca

SEQ ID NO: 1414409 - RNA, 19 nt, Artificial Sequence
  Description of Artificial Sequence: Synthetic oligonucleotide
ucuccacuauugucaagag

SEQ ID NO: 1414410 - RNA, 19 nt, Artificial Sequence
  Description of Artificial Sequence: Synthetic oligonucleotide
gaucguucuuauugcaauc

SEQ ID NO: 1414411 - RNA, 19 nt, Artificial Sequence
  Description of Artificial Sequence: Synthetic oligonucleotide
uugcuauacccaauagauc

SEQ ID NO: 1414412 - RNA, 19 nt, Artificial Sequence
  Description of Artificial Sequence: Synthetic oligonucleotide
uccacaaggcuuuguccag

SEQ ID NO: 1414413 - RNA, 19 nt, Artificial Sequence
  Description of Artificial Sequence: Synthetic oligonucleotide
cccagaauaacuuguaauc

SEQ ID NO: 1414414 - RNA, 19 nt, Artificial Sequence
  Description of Artificial Sequence: Synthetic oligonucleotide
uauugucaagagguuauaa

SEQ ID NO: 1414415 - RNA, 19 nt, Artificial Sequence
  Description of Artificial Sequence: Synthetic oligonucleotide
guaguuuucguuaccuaac

SEQ ID NO: 1414416 - RNA, 19 nt, Artificial Sequence
  Description of Artificial Sequence: Synthetic oligonucleotide
cuccacuauugucaagagg

SEQ ID NO: 1414417 - RNA, 19 nt, Artificial Sequence
  Description of Artificial Sequence: Synthetic oligonucleotide
acuauugucaagagguuau

SEQ ID NO: 1414418 - RNA, 19 nt, Artificial Sequence
  Description of Artificial Sequence: Synthetic oligonucleotide
gaacagacaccguggacuc

SEQ ID NO: 1414419 - RNA, 19 nt, Artificial Sequence
  Description of Artificial Sequence: Synthetic oligonucleotide
uuaggaccaaugguuacgu

SEQ ID NO: 1414420 - RNA, 19 nt, Artificial Sequence
  Description of Artificial Sequence: Synthetic oligonucleotide
agagaagccggaugagugu

SEQ ID NO: 1414421 - RNA, 19 nt, Artificial Sequence
  Description of Artificial Sequence: Synthetic oligonucleotide
agaauccgcauaaagaauu

SEQ ID NO: 1414422 - RNA, 19 nt, Artificial Sequence
  Description of Artificial Sequence: Synthetic oligonucleotide
cuaacucaauuuccuuccc

SEQ ID NO: 1414423 - RNA, 19 nt, Artificial Sequence
  Description of Artificial Sequence: Synthetic oligonucleotide
caggacuauuauuucauga

SEQ ID NO: 1414424 - RNA, 19 nt, Artificial Sequence
  Description of Artificial Sequence: Synthetic oligonucleotide
guaacggaagcagaggauc

SEQ ID NO: 1414425 - RNA, 19 nt, Artificial Sequence
  Description of Artificial Sequence: Synthetic oligonucleotide
ugcaaggacgguaucucau

SEQ ID NO: 1414426 - RNA, 19 nt, Artificial Sequence
  Description of Artificial Sequence: Synthetic oligonucleotide
ucucucgggaucggaaggg

SEQ ID NO: 1414427 - RNA, 19 nt, Artificial Sequence
  Description of Artificial Sequence: Synthetic oligonucleotide
agcuacaaagcugaucaca

SEQ ID NO: 1414428 - RNA, 19 nt, Artificial Sequence
  Description of Artificial Sequence: Synthetic oligonucleotide
acauguagguguuccuuga

SEQ ID NO: 1414429 - RNA, 19 nt, Artificial Sequence
  Description of Artificial Sequence: Synthetic oligonucleotide
gcuacaaagcugaucacag

SEQ ID NO: 1414430 - RNA, 19 nt, Artificial Sequence
  Description of Artificial Sequence: Synthetic oligonucleotide
uauucuggcuaaguuucca

SEQ ID NO: 1414431 - RNA, 19 nt, Artificial Sequence
  Description of Artificial Sequence: Synthetic oligonucleotide
ugcaaucauaaggaucgug

SEQ ID NO: 1414432 - RNA, 19 nt, Artificial Sequence
  Description of Artificial Sequence: Synthetic oligonucleotide
cuauacccaauagaucuac

SEQ ID NO: 1414433 - RNA, 19 nt, Artificial Sequence
  Description of Artificial Sequence: Synthetic oligonucleotide
uuaguaguuguagucgaua

SEQ ID NO: 1414434 - RNA, 19 nt, Artificial Sequence
  Description of Artificial Sequence: Synthetic oligonucleotide
augggcauucagaauccgc

SEQ ID NO: 1414435 - RNA, 19 nt, Artificial Sequence
  Description of Artificial Sequence: Synthetic oligonucleotide
aucggaagggaugcccugc

SEQ ID NO: 1414436 - RNA, 19 nt, Artificial Sequence
  Description of Artificial Sequence: Synthetic oligonucleotide
caaucauaaggaucgugga

SEQ ID NO: 1414437 - RNA, 19 nt, Artificial Sequence
  Description of Artificial Sequence: Synthetic oligonucleotide
ccuugaacaacaguaagug

SEQ ID NO: 1414438 - RNA, 19 nt, Artificial Sequence
  Description of Artificial Sequence: Synthetic oligonucleotide
uuccccguuuccaggguag

SEQ ID NO: 1414439 - RNA, 19 nt, Artificial Sequence
  Description of Artificial Sequence: Synthetic oligonucleotide
uuaaugcaguaguuuucgu

SEQ ID NO: 1414440 - RNA, 19 nt, Artificial Sequence
  Description of Artificial Sequence: Synthetic oligonucleotide
aacuuguaaucuucacaua

SEQ ID NO: 1414441 - RNA, 19 nt, Artificial Sequence
  Description of Artificial Sequence: Synthetic oligonucleotide
aucguucuuauugcaauca

SEQ ID NO: 1414442 - RNA, 19 nt, Artificial Sequence
  Description of Artificial Sequence: Synthetic oligonucleotide
cuagguuugcuauacccaa

SEQ ID NO: 1414443 - RNA, 19 nt, Artificial Sequence
  Description of Artificial Sequence: Synthetic oligonucleotide
ugacuguggaacgugguau

SEQ ID NO: 1414444 - RNA, 19 nt, Artificial Sequence
  Description of Artificial Sequence: Synthetic oligonucleotide
auuagguauucuugcuuaa

SEQ ID NO: 1414445 - RNA, 19 nt, Artificial Sequence
  Description of Artificial Sequence: Synthetic oligonucleotide
ccgcauaaagaauuuauuc

SEQ ID NO: 1414446 - RNA, 19 nt, Artificial Sequence
  Description of Artificial Sequence: Synthetic oligonucleotide
ggaucguggauucuguuuc

SEQ ID NO: 1414447 - RNA, 19 nt, Artificial Sequence
  Description of Artificial Sequence: Synthetic oligonucleotide
cuaguugcacccucagguc

SEQ ID NO: 1414448 - RNA, 19 nt, Artificial Sequence
  Description of Artificial Sequence: Synthetic oligonucleotide
ucacgacugucuucaauaa

SEQ ID NO: 1414449 - RNA, 19 nt, Artificial Sequence
  Description of Artificial Sequence: Synthetic oligonucleotide
uucacauauuagguauucu

SEQ ID NO: 1414450 - RNA, 19 nt, Artificial Sequence
  Description of Artificial Sequence: Synthetic oligonucleotide
caacaguaagugugcuagg

SEQ ID NO: 1414451 - RNA, 19 nt, Artificial Sequence
  Description of Artificial Sequence: Synthetic oligonucleotide
guguguagcuucacgacug

SEQ ID NO: 1414452 - RNA, 19 nt, Artificial Sequence
  Description of Artificial Sequence: Synthetic oligonucleotide
cucgggaucggaagggaug

SEQ ID NO: 1414453 - RNA, 19 nt, Artificial Sequence
  Description of Artificial Sequence: Synthetic oligonucleotide
cuaauuaccuuccccaccu

SEQ ID NO: 1414454 - RNA, 19 nt, Artificial Sequence
  Description of Artificial Sequence: Synthetic oligonucleotide
gcuaaguuuccagaggagc

SEQ ID NO: 1414455 - RNA, 19 nt, Artificial Sequence
  Description of Artificial Sequence: Synthetic oligonucleotide
aucucauggaaaggaguag

SEQ ID NO: 1414456 - RNA, 19 nt, Artificial Sequence
  Description of Artificial Sequence: Synthetic oligonucleotide
acucaauuuccuuccccgu

SEQ ID NO: 1414457 - RNA, 19 nt, Artificial Sequence
  Description of Artificial Sequence: Synthetic oligonucleotide
uucaauaauugggcucagc

SEQ ID NO: 1414458 - RNA, 19 nt, Artificial Sequence
  Description of Artificial Sequence: Synthetic oligonucleotide
uuucguuaccuaacucaau

SEQ ID NO: 1414459 - RNA, 19 nt, Artificial Sequence
  Description of Artificial Sequence: Synthetic oligonucleotide
aggguuaggaccaaugguu

SEQ ID NO: 1414460 - RNA, 19 nt, Artificial Sequence
  Description of Artificial Sequence: Synthetic oligonucleotide
ucguucuuauugcaaucau

SEQ ID NO: 1414461 - RNA, 19 nt, Artificial Sequence
  Description of Artificial Sequence: Synthetic oligonucleotide
accgaggcgcucuaaacaa

SEQ ID NO: 1414462 - RNA, 19 nt, Artificial Sequence
  Description of Artificial Sequence: Synthetic oligonucleotide
aguaguuguagucgauauu

SEQ ID NO: 1414463 - RNA, 19 nt, Artificial Sequence
  Description of Artificial Sequence: Synthetic oligonucleotide
gguggaacacuuuauauau

SEQ ID NO: 1414464 - RNA, 19 nt, Artificial Sequence
  Description of Artificial Sequence: Synthetic oligonucleotide
aggagguacuuguaacgga

SEQ ID NO: 1414465 - RNA, 19 nt, Artificial Sequence
  Description of Artificial Sequence: Synthetic oligonucleotide
caacagucucucgggaucg

SEQ ID NO: 1414466 - RNA, 19 nt, Artificial Sequence
  Description of Artificial Sequence: Synthetic oligonucleotide
uaucuuccauagagaauuc

SEQ ID NO: 1414467 - RNA, 19 nt, Artificial Sequence
  Description of Artificial Sequence: Synthetic oligonucleotide
aucaggacuauuauuucau

SEQ ID NO: 1414468 - RNA, 19 nt, Artificial Sequence
  Description of Artificial Sequence: Synthetic oligonucleotide
agguuugcuauacccaaua

SEQ ID NO: 1414469 - RNA, 19 nt, Artificial Sequence
  Description of Artificial Sequence: Synthetic oligonucleotide
ucguuaccuaacucaauuu

SEQ ID NO: 1414470 - RNA, 19 nt, Artificial Sequence
  Description of Artificial Sequence: Synthetic oligonucleotide
gguuugcuauacccaauag

SEQ ID NO: 1414471 - RNA, 19 nt, Artificial Sequence
  Description of Artificial Sequence: Synthetic oligonucleotide
gacuguggaacgugguauc

SEQ ID NO: 1414472 - RNA, 19 nt, Artificial Sequence
  Description of Artificial Sequence: Synthetic oligonucleotide
gagguacuuguaacggaag

SEQ ID NO: 1414473 - RNA, 19 nt, Artificial Sequence
  Description of Artificial Sequence: Synthetic oligonucleotide
gaucggaagggaugcccug

SEQ ID NO: 1414474 - RNA, 19 nt, Artificial Sequence
  Description of Artificial Sequence: Synthetic oligonucleotide
caucuaguugcacccucag

SEQ ID NO: 1414475 - RNA, 19 nt, Artificial Sequence
  Description of Artificial Sequence: Synthetic oligonucleotide
uuagguauucuugcuuaau

SEQ ID NO: 1414476 - RNA, 19 nt, Artificial Sequence
  Description of Artificial Sequence: Synthetic oligonucleotide
accguggacucaucauggg

SEQ ID NO: 1414477 - RNA, 19 nt, Artificial Sequence
  Description of Artificial Sequence: Synthetic oligonucleotide
acaguaagugugcuagguu

SEQ ID NO: 1414478 - RNA, 19 nt, Artificial Sequence
  Description of Artificial Sequence: Synthetic oligonucleotide
aggcgcucuaaacaaagua

SEQ ID NO: 1414479 - RNA, 19 nt, Artificial Sequence
  Description of Artificial Sequence: Synthetic oligonucleotide
ggaguagaugcaaaccgag

SEQ ID NO: 1414480 - RNA, 19 nt, Artificial Sequence
  Description of Artificial Sequence: Synthetic oligonucleotide
aacggaagcagaggaucca

SEQ ID NO: 1414481 - RNA, 19 nt, Artificial Sequence
  Description of Artificial Sequence: Synthetic oligonucleotide
guagguguuccuugaacaa

SEQ ID NO: 1414482 - RNA, 19 nt, Artificial Sequence
  Description of Artificial Sequence: Synthetic oligonucleotide
cucugaaguauucuggcua

SEQ ID NO: 1414483 - RNA, 19 nt, Artificial Sequence
  Description of Artificial Sequence: Synthetic oligonucleotide
cuguaggaaaaguccacga

SEQ ID NO: 1414484 - RNA, 19 nt, Artificial Sequence
  Description of Artificial Sequence: Synthetic oligonucleotide
uucuuaggaucagacuccu

SEQ ID NO: 1414485 - RNA, 19 nt, Artificial Sequence
  Description of Artificial Sequence: Synthetic oligonucleotide
uuccaggguaggcauuggu

SEQ ID NO: 1414486 - RNA, 19 nt, Artificial Sequence
  Description of Artificial Sequence: Synthetic oligonucleotide
aguccucauuuagacguuc

SEQ ID NO: 1414487 - RNA, 19 nt, Artificial Sequence
  Description of Artificial Sequence: Synthetic oligonucleotide
cuaccugguagggagaaca

SEQ ID NO: 1414488 - RNA, 19 nt, Artificial Sequence
  Description of Artificial Sequence: Synthetic oligonucleotide
uuggucuaucuuccauaga

SEQ ID NO: 1414489 - RNA, 19 nt, Artificial Sequence
  Description of Artificial Sequence: Synthetic oligonucleotide
guaagugugcuagguuugc

SEQ ID NO: 1414490 - RNA, 19 nt, Artificial Sequence
  Description of Artificial Sequence: Synthetic oligonucleotide
uagguuugcuauacccaau

SEQ ID NO: 1414491 - RNA, 19 nt, Artificial Sequence
  Description of Artificial Sequence: Synthetic oligonucleotide
ugcccugcaaggacgguau

SEQ ID NO: 1414492 - RNA, 19 nt, Artificial Sequence
  Description of Artificial Sequence: Synthetic oligonucleotide
auauugguaccaaacgaua

SEQ ID NO: 1414493 - RNA, 19 nt, Artificial Sequence
  Description of Artificial Sequence: Synthetic oligonucleotide
aauccgcauaaagaauuua

SEQ ID NO: 1414494 - RNA, 19 nt, Artificial Sequence
  Description of Artificial Sequence: Synthetic oligonucleotide
ggaaaaguccacgaucuuc

SEQ ID NO: 1414495 - RNA, 19 nt, Artificial Sequence
  Description of Artificial Sequence: Synthetic oligonucleotide
uagaucuaccugguaggga

SEQ ID NO: 1414496 - RNA, 19 nt, Artificial Sequence
  Description of Artificial Sequence: Synthetic oligonucleotide
agacaccguggacucauca

SEQ ID NO: 1414497 - RNA, 19 nt, Artificial Sequence
  Description of Artificial Sequence: Synthetic oligonucleotide
ugcugcaaguucccucaga

SEQ ID NO: 1414498 - RNA, 19 nt, Artificial Sequence
  Description of Artificial Sequence: Synthetic oligonucleotide
acgguaucucauggaaagg

SEQ ID NO: 1414499 - RNA, 19 nt, Artificial Sequence
  Description of Artificial Sequence: Synthetic oligonucleotide
aacagucucucgggaucgg

SEQ ID NO: 1414500 - RNA, 19 nt, Artificial Sequence
  Description of Artificial Sequence: Synthetic oligonucleotide
aggauguuuuguccuucca

SEQ ID NO: 1414501 - RNA, 19 nt, Artificial Sequence
  Description of Artificial Sequence: Synthetic oligonucleotide
acgauauggccaucuuggu

SEQ ID NO: 1414502 - RNA, 19 nt, Artificial Sequence
  Description of Artificial Sequence: Synthetic oligonucleotide
caccagggugacugaauag

SEQ ID NO: 1414503 - RNA, 19 nt, Artificial Sequence
  Description of Artificial Sequence: Synthetic oligonucleotide
uaccuaacucaauuuccuu

SEQ ID NO: 1414504 - RNA, 19 nt, Artificial Sequence
  Description of Artificial Sequence: Synthetic oligonucleotide
agucacaaauucacugugu

SEQ ID NO: 1414505 - RNA, 19 nt, Artificial Sequence
  Description of Artificial Sequence: Synthetic oligonucleotide
gguacugaaaauagcuaca

SEQ ID NO: 1414506 - RNA, 19 nt, Artificial Sequence
  Description of Artificial Sequence: Synthetic oligonucleotide
gcucuaaacaaaguaacaa

SEQ ID NO: 1414507 - RNA, 19 nt, Artificial Sequence
  Description of Artificial Sequence: Synthetic oligonucleotide
caggacuaauuaccuuccc

SEQ ID NO: 1414508 - RNA, 19 nt, Artificial Sequence
  Description of Artificial Sequence: Synthetic oligonucleotide
cauuuagacguuccuuuaa

SEQ ID NO: 1414509 - RNA, 19 nt, Artificial Sequence
  Description of Artificial Sequence: Synthetic oligonucleotide
uugacucugggagggauuu

SEQ ID NO: 1414510 - RNA, 19 nt, Artificial Sequence
  Description of Artificial Sequence: Synthetic oligonucleotide
ccaggacuaauuaccuucc

SEQ ID NO: 1414511 - RNA, 19 nt, Artificial Sequence
  Description of Artificial Sequence: Synthetic oligonucleotide
uacguuccugaaacuuggu

SEQ ID NO: 1414512 - RNA, 19 nt, Artificial Sequence
  Description of Artificial Sequence: Synthetic oligonucleotide
caucacggcugauggguac

SEQ ID NO: 1414513 - RNA, 19 nt, Artificial Sequence
  Description of Artificial Sequence: Synthetic oligonucleotide
uaagugugcuagguuugcu

SEQ ID NO: 1414514 - RNA, 19 nt, Artificial Sequence
  Description of Artificial Sequence: Synthetic oligonucleotide
uccugaaacuugguauggu

SEQ ID NO: 1414515 - RNA, 19 nt, Artificial Sequence
  Description of Artificial Sequence: Synthetic oligonucleotide
ucucgggaucggaagggau

SEQ ID NO: 1414516 - RNA, 19 nt, Artificial Sequence
  Description of Artificial Sequence: Synthetic oligonucleotide
gguuaggaccaaugguuac

SEQ ID NO: 1414517 - RNA, 19 nt, Artificial Sequence
  Description of Artificial Sequence: Synthetic oligonucleotide
acguuccugaaacuuggua

SEQ ID NO: 1414518 - RNA, 19 nt, Artificial Sequence
  Description of Artificial Sequence: Synthetic oligonucleotide
cugccgcaucauuagugag

SEQ ID NO: 1414519 - RNA, 19 nt, Artificial Sequence
  Description of Artificial Sequence: Synthetic oligonucleotide
gccugaucguucuuauugc

SEQ ID NO: 1414520 - RNA, 19 nt, Artificial Sequence
  Description of Artificial Sequence: Synthetic oligonucleotide
guauucuggcuaaguuucc

SEQ ID NO: 1414521 - RNA, 19 nt, Artificial Sequence
  Description of Artificial Sequence: Synthetic oligonucleotide
aagcaucuaguugcacccu

SEQ ID NO: 1414522 - RNA, 19 nt, Artificial Sequence
  Description of Artificial Sequence: Synthetic oligonucleotide
acuguggaacgugguauca

SEQ ID NO: 1414523 - RNA, 19 nt, Artificial Sequence
  Description of Artificial Sequence: Synthetic oligonucleotide
ugguuacguuccugaaacu

SEQ ID NO: 1414524 - RNA, 19 nt, Artificial Sequence
  Description of Artificial Sequence: Synthetic oligonucleotide
ggacuauuauuucaugagu

SEQ ID NO: 1414525 - RNA, 19 nt, Artificial Sequence
  Description of Artificial Sequence: Synthetic oligonucleotide
ggauuuuaguaguuguagu

SEQ ID NO: 1414526 - RNA, 19 nt, Artificial Sequence
  Description of Artificial Sequence: Synthetic oligonucleotide
augaacuauuucagcuuug

SEQ ID NO: 1414527 - RNA, 19 nt, Artificial Sequence
  Description of Artificial Sequence: Synthetic oligonucleotide
ggaucaauuccuguaagcu

SEQ ID NO: 1414528 - RNA, 19 nt, Artificial Sequence
  Description of Artificial Sequence: Synthetic oligonucleotide
caugggcauucagaauccg

SEQ ID NO: 1414529 - RNA, 19 nt, Artificial Sequence
  Description of Artificial Sequence: Synthetic oligonucleotide
gaugcaaaccgaggcgcuc

SEQ ID NO: 1414530 - RNA, 19 nt, Artificial Sequence
  Description of Artificial Sequence: Synthetic oligonucleotide
ggguggaacacuuuauaua

SEQ ID NO: 1414531 - RNA, 19 nt, Artificial Sequence
  Description of Artificial Sequence: Synthetic oligonucleotide
cguuaccuaacucaauuuc

SEQ ID NO: 1414532 - RNA, 19 nt, Artificial Sequence
  Description of Artificial Sequence: Synthetic oligonucleotide
cagaauaacuuguaaucuu

SEQ ID NO: 1414533 - RNA, 19 nt, Artificial Sequence
  Description of Artificial Sequence: Synthetic oligonucleotide
agcccaucccagaagacau

SEQ ID NO: 1414534 - RNA, 19 nt, Artificial Sequence
  Description of Artificial Sequence: Synthetic oligonucleotide
augcaaaccgaggcgcucu

SEQ ID NO: 1414535 - RNA, 19 nt, Artificial Sequence
  Description of Artificial Sequence: Synthetic oligonucleotide
cguuccuuuaacuugaggu

SEQ ID NO: 1414536 - RNA, 19 nt, Artificial Sequence
  Description of Artificial Sequence: Synthetic oligonucleotide
gcgcucuaaacaaaguaac

SEQ ID NO: 1414537 - RNA, 19 nt, Artificial Sequence
  Description of Artificial Sequence: Synthetic oligonucleotide
cugaaguauucuggcuaag

SEQ ID NO: 1414538 - RNA, 19 nt, Artificial Sequence
  Description of Artificial Sequence: Synthetic oligonucleotide
guaucucauggaaaggagu

SEQ ID NO: 1414539 - RNA, 19 nt, Artificial Sequence
  Description of Artificial Sequence: Synthetic oligonucleotide
cuuguaaucuucacauauu

SEQ ID NO: 1414540 - RNA, 19 nt, Artificial Sequence
  Description of Artificial Sequence: Synthetic oligonucleotide
guuucucauggagcugcag

SEQ ID NO: 1414541 - RNA, 19 nt, Artificial Sequence
  Description of Artificial Sequence: Synthetic oligonucleotide
ggcgcucuaaacaaaguaa

SEQ ID NO: 1414542 - RNA, 19 nt, Artificial Sequence
  Description of Artificial Sequence: Synthetic oligonucleotide
gugacuguggaacguggua

SEQ ID NO: 1414543 - RNA, 19 nt, Artificial Sequence
  Description of Artificial Sequence: Synthetic oligonucleotide
gacucugggagggauuuua

SEQ ID NO: 1414544 - RNA, 19 nt, Artificial Sequence
  Description of Artificial Sequence: Synthetic oligonucleotide
gauggguacuuuuggccau

SEQ ID NO: 1414545 - RNA, 19 nt, Artificial Sequence
  Description of Artificial Sequence: Synthetic oligonucleotide
cucaucacggcugaugggu

SEQ ID NO: 1414546 - RNA, 19 nt, Artificial Sequence
  Description of Artificial Sequence: Synthetic oligonucleotide
caaugguuacguuccugaa

SEQ ID NO: 1414547 - RNA, 19 nt, Artificial Sequence
  Description of Artificial Sequence: Synthetic oligonucleotide
caaaccgaggcgcucuaaa

SEQ ID NO: 1414548 - RNA, 19 nt, Artificial Sequence
  Description of Artificial Sequence: Synthetic oligonucleotide
gaagauccugaagggugga

SEQ ID NO: 1414549 - RNA, 19 nt, Artificial Sequence
  Description of Artificial Sequence: Synthetic oligonucleotide
cucaagucuccaugaacua

SEQ ID NO: 1414550 - RNA, 19 nt, Artificial Sequence
  Description of Artificial Sequence: Synthetic oligonucleotide
caggugacuguggaacgug

SEQ ID NO: 1414551 - RNA, 19 nt, Artificial Sequence
  Description of Artificial Sequence: Synthetic oligonucleotide
gugaugaaccucagugguc

SEQ ID NO: 1414552 - RNA, 19 nt, Artificial Sequence
  Description of Artificial Sequence: Synthetic oligonucleotide
agaugcaaaccgaggcgcu

SEQ ID NO: 1414553 - RNA, 19 nt, Artificial Sequence
  Description of Artificial Sequence: Synthetic oligonucleotide
cacuauugucaagagguua

SEQ ID NO: 1414554 - RNA, 19 nt, Artificial Sequence
  Description of Artificial Sequence: Synthetic oligonucleotide
gaucguggauucuguuucu

SEQ ID NO: 1414555 - RNA, 19 nt, Artificial Sequence
  Description of Artificial Sequence: Synthetic oligonucleotide
cccaaaggaucaauuccug

SEQ ID NO: 1414556 - RNA, 19 nt, Artificial Sequence
  Description of Artificial Sequence: Synthetic oligonucleotide
acagugugaugaaccucag

SEQ ID NO: 1414557 - RNA, 19 nt, Artificial Sequence
  Description of Artificial Sequence: Synthetic oligonucleotide
gugcuagguuugcuauacc

SEQ ID NO: 1414558 - RNA, 19 nt, Artificial Sequence
  Description of Artificial Sequence: Synthetic oligonucleotide
aucacggcugauggguacu

SEQ ID NO: 1414559 - RNA, 19 nt, Artificial Sequence
  Description of Artificial Sequence: Synthetic oligonucleotide
gacaccguggacucaucau

SEQ ID NO: 1414560 - RNA, 19 nt, Artificial Sequence
  Description of Artificial Sequence: Synthetic oligonucleotide
cugcaaggacgguaucuca

SEQ ID NO: 1414561 - RNA, 19 nt, Artificial Sequence
  Description of Artificial Sequence: Synthetic oligonucleotide
cagacuccugggacucaag

SEQ ID NO: 1414562 - RNA, 19 nt, Artificial Sequence
  Description of Artificial Sequence: Synthetic oligonucleotide
ugcaaaccgaggcgcucua

SEQ ID NO: 1414563 - RNA, 19 nt, Artificial Sequence
  Description of Artificial Sequence: Synthetic oligonucleotide
gagaacaguucuccaggau

SEQ ID NO: 1414564 - RNA, 19 nt, Artificial Sequence
  Description of Artificial Sequence: Synthetic oligonucleotide
cgaggcgcucuaaacaaag

SEQ ID NO: 1414565 - RNA, 19 nt, Artificial Sequence
  Description of Artificial Sequence: Synthetic oligonucleotide
aucccaugggacagguuga

SEQ ID NO: 1414566 - RNA, 19 nt, Artificial Sequence
  Description of Artificial Sequence: Synthetic oligonucleotide
ggucuaucuuccauagaga

SEQ ID NO: 1414567 - RNA, 19 nt, Artificial Sequence
  Description of Artificial Sequence: Synthetic oligonucleotide
cacccagaauaacuuguaa

SEQ ID NO: 1414568 - RNA, 19 nt, Artificial Sequence
  Description of Artificial Sequence: Synthetic oligonucleotide
gauggaggagguacuugua

SEQ ID NO: 1414569 - RNA, 19 nt, Artificial Sequence
  Description of Artificial Sequence: Synthetic oligonucleotide
uaacucuguugagugucuu

SEQ ID NO: 1414570 - RNA, 19 nt, Artificial Sequence
  Description of Artificial Sequence: Synthetic oligonucleotide
cucauggaaaggaguagau

SEQ ID NO: 1414571 - RNA, 19 nt, Artificial Sequence
  Description of Artificial Sequence: Synthetic oligonucleotide
ccguggacucaucaugggc

SEQ ID NO: 1414572 - RNA, 19 nt, Artificial Sequence
  Description of Artificial Sequence: Synthetic oligonucleotide
cagaauccgcauaaagaau

SEQ ID NO: 1414573 - RNA, 19 nt, Artificial Sequence
  Description of Artificial Sequence: Synthetic oligonucleotide
ucccaugggacagguugaa

SEQ ID NO: 1414574 - RNA, 19 nt, Artificial Sequence
  Description of Artificial Sequence: Synthetic oligonucleotide
caguaguuuucguuaccua

SEQ ID NO: 1414575 - RNA, 19 nt, Artificial Sequence
  Description of Artificial Sequence: Synthetic oligonucleotide
guggaacgugguaucaaaa

SEQ ID NO: 1414576 - RNA, 19 nt, Artificial Sequence
  Description of Artificial Sequence: Synthetic oligonucleotide
gaacaccagggugacugaa

SEQ ID NO: 1414577 - RNA, 19 nt, Artificial Sequence
  Description of Artificial Sequence: Synthetic oligonucleotide
accaaacgauauggccauc

SEQ ID NO: 1414578 - RNA, 19 nt, Artificial Sequence
  Description of Artificial Sequence: Synthetic oligonucleotide
gacucaucaugggcauuca

SEQ ID NO: 1414579 - RNA, 19 nt, Artificial Sequence
  Description of Artificial Sequence: Synthetic oligonucleotide
gaagccggaugagugugua

SEQ ID NO: 1414580 - RNA, 19 nt, Artificial Sequence
  Description of Artificial Sequence: Synthetic oligonucleotide
aggguaggcauuggucuau

SEQ ID NO: 1414581 - RNA, 19 nt, Artificial Sequence
  Description of Artificial Sequence: Synthetic oligonucleotide
uaggaccaaugguuacguu

SEQ ID NO: 1414582 - RNA, 19 nt, Artificial Sequence
  Description of Artificial Sequence: Synthetic oligonucleotide
cuuuaacuugagguugaua

SEQ ID NO: 1414583 - RNA, 19 nt, Artificial Sequence
  Description of Artificial Sequence: Synthetic oligonucleotide
ggaucagacuccugggacu

SEQ ID NO: 1414584 - RNA, 19 nt, Artificial Sequence
  Description of Artificial Sequence: Synthetic oligonucleotide
cugcaacagucucucggga

SEQ ID NO: 1414585 - RNA, 19 nt, Artificial Sequence
  Description of Artificial Sequence: Synthetic oligonucleotide
agaagccggaugagugugu

SEQ ID NO: 1414586 - RNA, 19 nt, Artificial Sequence
  Description of Artificial Sequence: Synthetic oligonucleotide
cauuagugagcuccaguuu

SEQ ID NO: 1414587 - RNA, 19 nt, Artificial Sequence
  Description of Artificial Sequence: Synthetic oligonucleotide
uaauugggcucagcuucuu

SEQ ID NO: 1414588 - RNA, 19 nt, Artificial Sequence
  Description of Artificial Sequence: Synthetic oligonucleotide
guugagugucuuggugcca

SEQ ID NO: 1414589 - RNA, 19 nt, Artificial Sequence
  Description of Artificial Sequence: Synthetic oligonucleotide
aaaucccaugggacagguu

SEQ ID NO: 1414590 - RNA, 19 nt, Artificial Sequence
  Description of Artificial Sequence: Synthetic oligonucleotide
cgcucuaaacaaaguaaca

SEQ ID NO: 1414591 - RNA, 19 nt, Artificial Sequence
  Description of Artificial Sequence: Synthetic oligonucleotide
gucugguuauaaacagugu

SEQ ID NO: 1414592 - RNA, 19 nt, Artificial Sequence
  Description of Artificial Sequence: Synthetic oligonucleotide
cagaagacauguagguguu

SEQ ID NO: 1414593 - RNA, 19 nt, Artificial Sequence
  Description of Artificial Sequence: Synthetic oligonucleotide
gguuacguuccugaaacuu

SEQ ID NO: 1414594 - RNA, 19 nt, Artificial Sequence
  Description of Artificial Sequence: Synthetic oligonucleotide
cacagccugaucguucuua

SEQ ID NO: 1414595 - RNA, 19 nt, Artificial Sequence
  Description of Artificial Sequence: Synthetic oligonucleotide
ucacggcugauggguacuu

SEQ ID NO: 1414596 - RNA, 19 nt, Artificial Sequence
  Description of Artificial Sequence: Synthetic oligonucleotide
cuucacgacugucuucaau

SEQ ID NO: 1414597 - RNA, 19 nt, Artificial Sequence
  Description of Artificial Sequence: Synthetic oligonucleotide
ggguuaggaccaaugguua

SEQ ID NO: 1414598 - RNA, 19 nt, Artificial Sequence
  Description of Artificial Sequence: Synthetic oligonucleotide
gcaucuaguugcacccuca

SEQ ID NO: 1414599 - RNA, 19 nt, Artificial Sequence
  Description of Artificial Sequence: Synthetic oligonucleotide
gaggcgcucuaaacaaagu

SEQ ID NO: 1414600 - RNA, 19 nt, Artificial Sequence
  Description of Artificial Sequence: Synthetic oligonucleotide
cagggugacugaauagcau

SEQ ID NO: 1414601 - RNA, 19 nt, Artificial Sequence
  Description of Artificial Sequence: Synthetic oligonucleotide
guugcacccucaggucaac

SEQ ID NO: 1414602 - RNA, 19 nt, Artificial Sequence
  Description of Artificial Sequence: Synthetic oligonucleotide
gggucuguacaguccgaaa

SEQ ID NO: 1414603 - RNA, 19 nt, Artificial Sequence
  Description of Artificial Sequence: Synthetic oligonucleotide
cuuccccguuuccagggua

SEQ ID NO: 1414604 - RNA, 19 nt, Artificial Sequence
  Description of Artificial Sequence: Synthetic oligonucleotide
ggacgguaucucauggaaa

SEQ ID NO: 1414605 - RNA, 19 nt, Artificial Sequence
  Description of Artificial Sequence: Synthetic oligonucleotide
caaacgauauggccaucuu

SEQ ID NO: 1414606 - RNA, 19 nt, Artificial Sequence
  Description of Artificial Sequence: Synthetic oligonucleotide
gcuauacccaauagaucua

SEQ ID NO: 1414607 - RNA, 19 nt, Artificial Sequence
  Description of Artificial Sequence: Synthetic oligonucleotide
cacgacugucuucaauaau

SEQ ID NO: 1414608 - RNA, 19 nt, Artificial Sequence
  Description of Artificial Sequence: Synthetic oligonucleotide
ugacucugggagggauuuu

SEQ ID NO: 1414609 - RNA, 19 nt, Artificial Sequence
  Description of Artificial Sequence: Synthetic oligonucleotide
ccaggauguuuuguccuuc

SEQ ID NO: 1414610 - RNA, 19 nt, Artificial Sequence
  Description of Artificial Sequence: Synthetic oligonucleotide
gguaggcauuggucuaucu

SEQ ID NO: 1414611 - RNA, 19 nt, Artificial Sequence
  Description of Artificial Sequence: Synthetic oligonucleotide
cccaauagaucuaccuggu

SEQ ID NO: 1414612 - RNA, 19 nt, Artificial Sequence
  Description of Artificial Sequence: Synthetic oligonucleotide
ggaucggaagggaugcccu

SEQ ID NO: 1414613 - RNA, 19 nt, Artificial Sequence
  Description of Artificial Sequence: Synthetic oligonucleotide
ccaaacgauauggccaucu

SEQ ID NO: 1414614 - RNA, 19 nt, Artificial Sequence
  Description of Artificial Sequence: Synthetic oligonucleotide
cgauauggccaucuuggua

SEQ ID NO: 1414615 - RNA, 19 nt, Artificial Sequence
  Description of Artificial Sequence: Synthetic oligonucleotide
ccaauagaucuaccuggua

SEQ ID NO: 1414616 - RNA, 19 nt, Artificial Sequence
  Description of Artificial Sequence: Synthetic oligonucleotide
gcccaucccagaagacaug

SEQ ID NO: 1414617 - RNA, 19 nt, Artificial Sequence
  Description of Artificial Sequence: Synthetic oligonucleotide
ggguaggcauuggucuauc

SEQ ID NO: 1414618 - RNA, 19 nt, Artificial Sequence
  Description of Artificial Sequence: Synthetic oligonucleotide
guacaguccgaaagccauu

SEQ ID NO: 1414619 - RNA, 19 nt, Artificial Sequence
  Description of Artificial Sequence: Synthetic oligonucleotide
caguccucauuuagacguu

SEQ ID NO: 1414620 - RNA, 19 nt, Artificial Sequence
  Description of Artificial Sequence: Synthetic oligonucleotide
ccgaggcgcucuaaacaaa

SEQ ID NO: 1414621 - RNA, 19 nt, Artificial Sequence
  Description of Artificial Sequence: Synthetic oligonucleotide
ccguuuccaggguaggcau

SEQ ID NO: 1414622 - RNA, 19 nt, Artificial Sequence
  Description of Artificial Sequence: Synthetic oligonucleotide
cagccugaucguucuuauu

SEQ ID NO: 1414623 - RNA, 19 nt, Artificial Sequence
  Description of Artificial Sequence: Synthetic oligonucleotide
gcccugcaaggacgguauc

SEQ ID NO: 1414624 - RNA, 19 nt, Artificial Sequence
  Description of Artificial Sequence: Synthetic oligonucleotide
cgggaucggaagggaugcc

SEQ ID NO: 1414625 - RNA, 19 nt, Artificial Sequence
  Description of Artificial Sequence: Synthetic oligonucleotide
ggguacuuuuggccaucuu

SEQ ID NO: 1414626 - RNA, 19 nt, Artificial Sequence
  Description of Artificial Sequence: Synthetic oligonucleotide
cacggcugauggguacuuu

SEQ ID NO: 1414627 - RNA, 19 nt, Artificial Sequence
  Description of Artificial Sequence: Synthetic oligonucleotide
ccggaugaguguguagcuu

SEQ ID NO: 1414628 - RNA, 19 nt, Artificial Sequence
  Description of Artificial Sequence: Synthetic oligonucleotide
ccucaggguuaggaccaau

SEQ ID NO: 1414629 - RNA, 19 nt, Artificial Sequence
  Description of Artificial Sequence: Synthetic oligonucleotide
ucugauaguacacaggucc

SEQ ID NO: 1414630 - RNA, 19 nt, Artificial Sequence
  Description of Artificial Sequence: Synthetic oligonucleotide
uguggguucauuaugaugu

SEQ ID NO: 1414631 - RNA, 19 nt, Artificial Sequence
  Description of Artificial Sequence: Synthetic oligonucleotide
acucaauuaacuuuccgac

SEQ ID NO: 1414632 - RNA, 19 nt, Artificial Sequence
  Description of Artificial Sequence: Synthetic oligonucleotide
aaacacaucggucuguaag

SEQ ID NO: 1414633 - RNA, 19 nt, Artificial Sequence
  Description of Artificial Sequence: Synthetic oligonucleotide
uucaacuagacucucaugu

SEQ ID NO: 1414634 - RNA, 19 nt, Artificial Sequence
  Description of Artificial Sequence: Synthetic oligonucleotide
uucuugacaauuauguaag

SEQ ID NO: 1414635 - RNA, 19 nt, Artificial Sequence
  Description of Artificial Sequence: Synthetic oligonucleotide
ugauauaucccgcucuucg

SEQ ID NO: 1414636 - RNA, 19 nt, Artificial Sequence
  Description of Artificial Sequence: Synthetic oligonucleotide
uaaucguauguucauagag

SEQ ID NO: 1414637 - RNA, 19 nt, Artificial Sequence
  Description of Artificial Sequence: Synthetic oligonucleotide
gauucguggagauagaaac

SEQ ID NO: 1414638 - RNA, 19 nt, Artificial Sequence
  Description of Artificial Sequence: Synthetic oligonucleotide
uaucuuauuaaucguaugu

SEQ ID NO: 1414639 - RNA, 19 nt, Artificial Sequence
  Description of Artificial Sequence: Synthetic oligonucleotide
aacucaauuaacuuuccga

SEQ ID NO: 1414640 - RNA, 19 nt, Artificial Sequence
  Description of Artificial Sequence: Synthetic oligonucleotide
ugcaucuaaaauuucaugu

SEQ ID NO: 1414641 - RNA, 19 nt, Artificial Sequence
  Description of Artificial Sequence: Synthetic oligonucleotide
uccauagccgauuaaacag

SEQ ID NO: 1414642 - RNA, 19 nt, Artificial Sequence
  Description of Artificial Sequence: Synthetic oligonucleotide
ggugguaucuuauuaaucg

SEQ ID NO: 1414643 - RNA, 19 nt, Artificial Sequence
  Description of Artificial Sequence: Synthetic oligonucleotide
auuaaucguauguucauag

SEQ ID NO: 1414644 - RNA, 19 nt, Artificial Sequence
  Description of Artificial Sequence: Synthetic oligonucleotide
ucgaaugacaccuaagaug

SEQ ID NO: 1414645 - RNA, 19 nt, Artificial Sequence
  Description of Artificial Sequence: Synthetic oligonucleotide
aauucacaucuucuacucc

SEQ ID NO: 1414646 - RNA, 19 nt, Artificial Sequence
  Description of Artificial Sequence: Synthetic oligonucleotide
uggagauagaaacaaauuc

SEQ ID NO: 1414647 - RNA, 19 nt, Artificial Sequence
  Description of Artificial Sequence: Synthetic oligonucleotide
aagauguugccauuuagga

SEQ ID NO: 1414648 - RNA, 19 nt, Artificial Sequence
  Description of Artificial Sequence: Synthetic oligonucleotide
caauguaggaaucuguugc

SEQ ID NO: 1414649 - RNA, 19 nt, Artificial Sequence
  Description of Artificial Sequence: Synthetic oligonucleotide
guuauaaccauggcgaacg

SEQ ID NO: 1414650 - RNA, 19 nt, Artificial Sequence
  Description of Artificial Sequence: Synthetic oligonucleotide
ucagcauuggaagagauca

SEQ ID NO: 1414651 - RNA, 19 nt, Artificial Sequence
  Description of Artificial Sequence: Synthetic oligonucleotide
uucauuaugaugucgggac

SEQ ID NO: 1414652 - RNA, 19 nt, Artificial Sequence
  Description of Artificial Sequence: Synthetic oligonucleotide
guaagauucguggagauag

SEQ ID NO: 1414653 - RNA, 19 nt, Artificial Sequence
  Description of Artificial Sequence: Synthetic oligonucleotide
uuaaagaagagugaagggu

SEQ ID NO: 1414654 - RNA, 19 nt, Artificial Sequence
  Description of Artificial Sequence: Synthetic oligonucleotide
gguaguuauaaccauggcg

SEQ ID NO: 1414655 - RNA, 19 nt, Artificial Sequence
  Description of Artificial Sequence: Synthetic oligonucleotide
ucucgaaugacaccuaaga

SEQ ID NO: 1414656 - RNA, 19 nt, Artificial Sequence
  Description of Artificial Sequence: Synthetic oligonucleotide
ucuacuuucucaccuggag

SEQ ID NO: 1414657 - RNA, 19 nt, Artificial Sequence
  Description of Artificial Sequence: Synthetic oligonucleotide
agacgagaaacacauuugg

SEQ ID NO: 1414658 - RNA, 19 nt, Artificial Sequence
  Description of Artificial Sequence: Synthetic oligonucleotide
uuucaaugugcacuuagca

SEQ ID NO: 1414659 - RNA, 19 nt, Artificial Sequence
  Description of Artificial Sequence: Synthetic oligonucleotide
uuuauggucucgaaugaca

SEQ ID NO: 1414660 - RNA, 19 nt, Artificial Sequence
  Description of Artificial Sequence: Synthetic oligonucleotide
uacuuggccaguuucaacc

SEQ ID NO: 1414661 - RNA, 19 nt, Artificial Sequence
  Description of Artificial Sequence: Synthetic oligonucleotide
cuuuguacgugauagggac

SEQ ID NO: 1414662 - RNA, 19 nt, Artificial Sequence
  Description of Artificial Sequence: Synthetic oligonucleotide
guaguuauaaccauggcga

SEQ ID NO: 1414663 - RNA, 19 nt, Artificial Sequence
  Description of Artificial Sequence: Synthetic oligonucleotide
ucuaaaauuucaugucgcc

SEQ ID NO: 1414664 - RNA, 19 nt, Artificial Sequence
  Description of Artificial Sequence: Synthetic oligonucleotide
agcaaaagcaugcuugcuc

SEQ ID NO: 1414665 - RNA, 19 nt, Artificial Sequence
  Description of Artificial Sequence: Synthetic oligonucleotide
uccagaaucacagaauggc

SEQ ID NO: 1414666 - RNA, 19 nt, Artificial Sequence
  Description of Artificial Sequence: Synthetic oligonucleotide
uguaucguuucaaugugca

SEQ ID NO: 1414667 - RNA, 19 nt, Artificial Sequence
  Description of Artificial Sequence: Synthetic oligonucleotide
uagccgauuaaacagucgc

SEQ ID NO: 1414668 - RNA, 19 nt, Artificial Sequence
  Description of Artificial Sequence: Synthetic oligonucleotide
aacacaucggucuguaaga

SEQ ID NO: 1414669 - RNA, 19 nt, Artificial Sequence
  Description of Artificial Sequence: Synthetic oligonucleotide
auguaaggccugcacaacc

SEQ ID NO: 1414670 - RNA, 19 nt, Artificial Sequence
  Description of Artificial Sequence: Synthetic oligonucleotide
cuuauuaaucguauguuca

SEQ ID NO: 1414671 - RNA, 19 nt, Artificial Sequence
  Description of Artificial Sequence: Synthetic oligonucleotide
acgagaaacacauuugggu

SEQ ID NO: 1414672 - RNA, 19 nt, Artificial Sequence
  Description of Artificial Sequence: Synthetic oligonucleotide
acgaucaggccacaaacac

SEQ ID NO: 1414673 - RNA, 19 nt, Artificial Sequence
  Description of Artificial Sequence: Synthetic oligonucleotide
ucaaugugcacuuagcauu

SEQ ID NO: 1414674 - RNA, 19 nt, Artificial Sequence
  Description of Artificial Sequence: Synthetic oligonucleotide
ugcaacuccuggaagagca

SEQ ID NO: 1414675 - RNA, 19 nt, Artificial Sequence
  Description of Artificial Sequence: Synthetic oligonucleotide
acuugagaucauuagucuc

SEQ ID NO: 1414676 - RNA, 19 nt, Artificial Sequence
  Description of Artificial Sequence: Synthetic oligonucleotide
uuauguaaggccugcacaa

SEQ ID NO: 1414677 - RNA, 19 nt, Artificial Sequence
  Description of Artificial Sequence: Synthetic oligonucleotide
uucaaucuccaaguggugg

SEQ ID NO: 1414678 - RNA, 19 nt, Artificial Sequence
  Description of Artificial Sequence: Synthetic oligonucleotide
uaucguuucaaugugcacu

SEQ ID NO: 1414679 - RNA, 19 nt, Artificial Sequence
  Description of Artificial Sequence: Synthetic oligonucleotide
gagaucaucacuuucucaa

SEQ ID NO: 1414680 - RNA, 19 nt, Artificial Sequence
  Description of Artificial Sequence: Synthetic oligonucleotide
agcaacucaauuaacuuuc

SEQ ID NO: 1414681 - RNA, 19 nt, Artificial Sequence
  Description of Artificial Sequence: Synthetic oligonucleotide
uauucaacuagacucucau

SEQ ID NO: 1414682 - RNA, 19 nt, Artificial Sequence
  Description of Artificial Sequence: Synthetic oligonucleotide
uuauggucucgaaugacac

SEQ ID NO: 1414683 - RNA, 19 nt, Artificial Sequence
  Description of Artificial Sequence: Synthetic oligonucleotide
aaaauuucaugucgccaga

SEQ ID NO: 1414684 - RNA, 19 nt, Artificial Sequence
  Description of Artificial Sequence: Synthetic oligonucleotide
uccaaaauagauguaugcu

SEQ ID NO: 1414685 - RNA, 19 nt, Artificial Sequence
  Description of Artificial Sequence: Synthetic oligonucleotide
uccccagguaguuauaacc

SEQ ID NO: 1414686 - RNA, 19 nt, Artificial Sequence
  Description of Artificial Sequence: Synthetic oligonucleotide
aagugacauaguccuuccc

SEQ ID NO: 1414687 - RNA, 19 nt, Artificial Sequence
  Description of Artificial Sequence: Synthetic oligonucleotide
agaaucacagaauggcaug

SEQ ID NO: 1414688 - RNA, 19 nt, Artificial Sequence
  Description of Artificial Sequence: Synthetic oligonucleotide
ucauguaagaaaucuucaa

SEQ ID NO: 1414689 - RNA, 19 nt, Artificial Sequence
  Description of Artificial Sequence: Synthetic oligonucleotide
aaagaagagugaaggguuc

SEQ ID NO: 1414690 - RNA, 19 nt, Artificial Sequence
  Description of Artificial Sequence: Synthetic oligonucleotide
acuuuacucccuccaaagg

SEQ ID NO: 1414691 - RNA, 19 nt, Artificial Sequence
  Description of Artificial Sequence: Synthetic oligonucleotide
uuauuaaucguauguucau

SEQ ID NO: 1414692 - RNA, 19 nt, Artificial Sequence
  Description of Artificial Sequence: Synthetic oligonucleotide
agucgcguuccauuucucc

SEQ ID NO: 1414693 - RNA, 19 nt, Artificial Sequence
  Description of Artificial Sequence: Synthetic oligonucleotide
gauauaucccgcucuucgc

SEQ ID NO: 1414694 - RNA, 19 nt, Artificial Sequence
  Description of Artificial Sequence: Synthetic oligonucleotide
auuuggguaagagaguucu

SEQ ID NO: 1414695 - RNA, 19 nt, Artificial Sequence
  Description of Artificial Sequence: Synthetic oligonucleotide
ucuugacaauuauguaagg

SEQ ID NO: 1414696 - RNA, 19 nt, Artificial Sequence
  Description of Artificial Sequence: Synthetic oligonucleotide
acgagaucguccuucagug

SEQ ID NO: 1414697 - RNA, 19 nt, Artificial Sequence
  Description of Artificial Sequence: Synthetic oligonucleotide
uucauugauauaucccgcu

SEQ ID NO: 1414698 - RNA, 19 nt, Artificial Sequence
  Description of Artificial Sequence: Synthetic oligonucleotide
aacuagacucucauguaag

SEQ ID NO: 1414699 - RNA, 19 nt, Artificial Sequence
  Description of Artificial Sequence: Synthetic oligonucleotide
uggacuuguuuacaaguac

SEQ ID NO: 1414700 - RNA, 19 nt, Artificial Sequence
  Description of Artificial Sequence: Synthetic oligonucleotide
guacgugauagggacaucg

SEQ ID NO: 1414701 - RNA, 19 nt, Artificial Sequence
  Description of Artificial Sequence: Synthetic oligonucleotide
uuaaucguauguucauaga

SEQ ID NO: 1414702 - RNA, 19 nt, Artificial Sequence
  Description of Artificial Sequence: Synthetic oligonucleotide
uugguguaucguuucaaug

SEQ ID NO: 1414703 - RNA, 19 nt, Artificial Sequence
  Description of Artificial Sequence: Synthetic oligonucleotide
gacgcaagccgccaucacg

SEQ ID NO: 1414704 - RNA, 19 nt, Artificial Sequence
  Description of Artificial Sequence: Synthetic oligonucleotide
gacgagaaacacauuuggg

SEQ ID NO: 1414705 - RNA, 19 nt, Artificial Sequence
  Description of Artificial Sequence: Synthetic oligonucleotide
uacgugauagggacaucgg

SEQ ID NO: 1414706 - RNA, 19 nt, Artificial Sequence
  Description of Artificial Sequence: Synthetic oligonucleotide
ucagccgaaauguacugac

SEQ ID NO: 1414707 - RNA, 19 nt, Artificial Sequence
  Description of Artificial Sequence: Synthetic oligonucleotide
aguuauaaccauggcgaac

SEQ ID NO: 1414708 - RNA, 19 nt, Artificial Sequence
  Description of Artificial Sequence: Synthetic oligonucleotide
auguucauagagugcaaug

SEQ ID NO: 1414709 - RNA, 19 nt, Artificial Sequence
  Description of Artificial Sequence: Synthetic oligonucleotide
ucuguaagauucguggaga

SEQ ID NO: 1414710 - RNA, 19 nt, Artificial Sequence
  Description of Artificial Sequence: Synthetic oligonucleotide
gaacuugccgucuaacaca

SEQ ID NO: 1414711 - RNA, 19 nt, Artificial Sequence
  Description of Artificial Sequence: Synthetic oligonucleotide
uucuugagggacgaucagg

SEQ ID NO: 1414712 - RNA, 19 nt, Artificial Sequence
  Description of Artificial Sequence: Synthetic oligonucleotide
ucaaucuccaagugguggu

SEQ ID NO: 1414713 - RNA, 19 nt, Artificial Sequence
  Description of Artificial Sequence: Synthetic oligonucleotide
acucucauguaagaaaucu

SEQ ID NO: 1414714 - RNA, 19 nt, Artificial Sequence
  Description of Artificial Sequence: Synthetic oligonucleotide
ugccgucuaacacaccugc

SEQ ID NO: 1414715 - RNA, 19 nt, Artificial Sequence
  Description of Artificial Sequence: Synthetic oligonucleotide
guuucugauaguacacagg

SEQ ID NO: 1414716 - RNA, 19 nt, Artificial Sequence
  Description of Artificial Sequence: Synthetic oligonucleotide
ugguaucuuauuaaucgua

SEQ ID NO: 1414717 - RNA, 19 nt, Artificial Sequence
  Description of Artificial Sequence: Synthetic oligonucleotide
guaucuuauuaaucguaug

SEQ ID NO: 1414718 - RNA, 19 nt, Artificial Sequence
  Description of Artificial Sequence: Synthetic oligonucleotide
ugucuccgaucucuggacg

SEQ ID NO: 1414719 - RNA, 19 nt, Artificial Sequence
  Description of Artificial Sequence: Synthetic oligonucleotide
agcauuggaagagaucauc

SEQ ID NO: 1414720 - RNA, 19 nt, Artificial Sequence
  Description of Artificial Sequence: Synthetic oligonucleotide
auauaucccgcucuucgca

SEQ ID NO: 1414721 - RNA, 19 nt, Artificial Sequence
  Description of Artificial Sequence: Synthetic oligonucleotide
ugcuuaacugucacugcug

SEQ ID NO: 1414722 - RNA, 19 nt, Artificial Sequence
  Description of Artificial Sequence: Synthetic oligonucleotide
ucguauguucauagagugc

SEQ ID NO: 1414723 - RNA, 19 nt, Artificial Sequence
  Description of Artificial Sequence: Synthetic oligonucleotide
cauuggaagagaucaucac

SEQ ID NO: 1414724 - RNA, 19 nt, Artificial Sequence
  Description of Artificial Sequence: Synthetic oligonucleotide
aggaagacgagaaacacau

SEQ ID NO: 1414725 - RNA, 19 nt, Artificial Sequence
  Description of Artificial Sequence: Synthetic oligonucleotide
cauuaugaugucgggacag

SEQ ID NO: 1414726 - RNA, 19 nt, Artificial Sequence
  Description of Artificial Sequence: Synthetic oligonucleotide
ugccauuuaggaagacgag

SEQ ID NO: 1414727 - RNA, 19 nt, Artificial Sequence
  Description of Artificial Sequence: Synthetic oligonucleotide
ugcuucuaagggcucaccu

SEQ ID NO: 1414728 - RNA, 19 nt, Artificial Sequence
  Description of Artificial Sequence: Synthetic oligonucleotide
caacucaauuaacuuuccg

SEQ ID NO: 1414729 - RNA, 19 nt, Artificial Sequence
  Description of Artificial Sequence: Synthetic oligonucleotide
aaacagucgcguuccauuu

SEQ ID NO: 1414730 - RNA, 19 nt, Artificial Sequence
  Description of Artificial Sequence: Synthetic oligonucleotide
agcucgugguccucgggcc

SEQ ID NO: 1414731 - RNA, 19 nt, Artificial Sequence
  Description of Artificial Sequence: Synthetic oligonucleotide
ucauuagucucuccagcaa

SEQ ID NO: 1414732 - RNA, 19 nt, Artificial Sequence
  Description of Artificial Sequence: Synthetic oligonucleotide
uaaccauggcgaacgaggu

SEQ ID NO: 1414733 - RNA, 19 nt, Artificial Sequence
  Description of Artificial Sequence: Synthetic oligonucleotide
uauggucucgaaugacacc

SEQ ID NO: 1414734 - RNA, 19 nt, Artificial Sequence
  Description of Artificial Sequence: Synthetic oligonucleotide
ucuaagggcucaccuguga

SEQ ID NO: 1414735 - RNA, 19 nt, Artificial Sequence
  Description of Artificial Sequence: Synthetic oligonucleotide
aggcauaugggaugcggag

SEQ ID NO: 1414736 - RNA, 19 nt, Artificial Sequence
  Description of Artificial Sequence: Synthetic oligonucleotide
acaaccguccuccaucaga

SEQ ID NO: 1414737 - RNA, 19 nt, Artificial Sequence
  Description of Artificial Sequence: Synthetic oligonucleotide
ugauugguguaucguuuca

SEQ ID NO: 1414738 - RNA, 19 nt, Artificial Sequence
  Description of Artificial Sequence: Synthetic oligonucleotide
uguuuacaaguacuuguuu

SEQ ID NO: 1414739 - RNA, 19 nt, Artificial Sequence
  Description of Artificial Sequence: Synthetic oligonucleotide
aggucugauugguguaucg

SEQ ID NO: 1414740 - RNA, 19 nt, Artificial Sequence
  Description of Artificial Sequence: Synthetic oligonucleotide
agccgaaauguacugacaa

SEQ ID NO: 1414741 - RNA, 19 nt, Artificial Sequence
  Description of Artificial Sequence: Synthetic oligonucleotide
guaagaacagcucgugguc

SEQ ID NO: 1414742 - RNA, 19 nt, Artificial Sequence
  Description of Artificial Sequence: Synthetic oligonucleotide
cagaauaucccaggagucc

SEQ ID NO: 1414743 - RNA, 19 nt, Artificial Sequence
  Description of Artificial Sequence: Synthetic oligonucleotide
aguauucaacuagacucuc

SEQ ID NO: 1414744 - RNA, 19 nt, Artificial Sequence
  Description of Artificial Sequence: Synthetic oligonucleotide
auugauauaucccgcucuu

SEQ ID NO: 1414745 - RNA, 19 nt, Artificial Sequence
  Description of Artificial Sequence: Synthetic oligonucleotide
accauggcgaacgaggucu

SEQ ID NO: 1414746 - RNA, 19 nt, Artificial Sequence
  Description of Artificial Sequence: Synthetic oligonucleotide
uuuuauggucucgaaugac

SEQ ID NO: 1414747 - RNA, 19 nt, Artificial Sequence
  Description of Artificial Sequence: Synthetic oligonucleotide
gcauaugggaugcggaggg

SEQ ID NO: 1414748 - RNA, 19 nt, Artificial Sequence
  Description of Artificial Sequence: Synthetic oligonucleotide
ugucgggacagauuccaga

SEQ ID NO: 1414749 - RNA, 19 nt, Artificial Sequence
  Description of Artificial Sequence: Synthetic oligonucleotide
ucucaccuggagaacaaau

SEQ ID NO: 1414750 - RNA, 19 nt, Artificial Sequence
  Description of Artificial Sequence: Synthetic oligonucleotide
gccauaguggaacuugccg

SEQ ID NO: 1414751 - RNA, 19 nt, Artificial Sequence
  Description of Artificial Sequence: Synthetic oligonucleotide
uggugguaucuuauuaauc

SEQ ID NO: 1414752 - RNA, 19 nt, Artificial Sequence
  Description of Artificial Sequence: Synthetic oligonucleotide
augacgacugcugaacuug

SEQ ID NO: 1414753 - RNA, 19 nt, Artificial Sequence
  Description of Artificial Sequence: Synthetic oligonucleotide
uauaaacacaucggucugu

SEQ ID NO: 1414754 - RNA, 19 nt, Artificial Sequence
  Description of Artificial Sequence: Synthetic oligonucleotide
uaagauucguggagauaga

SEQ ID NO: 1414755 - RNA, 19 nt, Artificial Sequence
  Description of Artificial Sequence: Synthetic oligonucleotide
cauagccgauuaaacaguc

SEQ ID NO: 1414756 - RNA, 19 nt, Artificial Sequence
  Description of Artificial Sequence: Synthetic oligonucleotide
agaauaucccaggagucca

SEQ ID NO: 1414757 - RNA, 19 nt, Artificial Sequence
  Description of Artificial Sequence: Synthetic oligonucleotide
ugccuugccggccagcaac

SEQ ID NO: 1414758 - RNA, 19 nt, Artificial Sequence
  Description of Artificial Sequence: Synthetic oligonucleotide
auaguacacagguccaaaa

SEQ ID NO: 1414759 - RNA, 19 nt, Artificial Sequence
  Description of Artificial Sequence: Synthetic oligonucleotide
uguugcaccuuuguacgug

SEQ ID NO: 1414760 - RNA, 19 nt, Artificial Sequence
  Description of Artificial Sequence: Synthetic oligonucleotide
cuugagaucauuagucucu

SEQ ID NO: 1414761 - RNA, 19 nt, Artificial Sequence
  Description of Artificial Sequence: Synthetic oligonucleotide
gguucauuaugaugucggg

SEQ ID NO: 1414762 - RNA, 19 nt, Artificial Sequence
  Description of Artificial Sequence: Synthetic oligonucleotide
cuuaacugucacugcuggc

SEQ ID NO: 1414763 - RNA, 19 nt, Artificial Sequence
  Description of Artificial Sequence: Synthetic oligonucleotide
ggguucaaucuccaagugg

SEQ ID NO: 1414764 - RNA, 19 nt, Artificial Sequence
  Description of Artificial Sequence: Synthetic oligonucleotide
acagucgcguuccauuucu

SEQ ID NO: 1414765 - RNA, 19 nt, Artificial Sequence
  Description of Artificial Sequence: Synthetic oligonucleotide
cuaaaauuucaugucgcca

SEQ ID NO: 1414766 - RNA, 19 nt, Artificial Sequence
  Description of Artificial Sequence: Synthetic oligonucleotide
uauuaaucguauguucaua

SEQ ID NO: 1414767 - RNA, 19 nt, Artificial Sequence
  Description of Artificial Sequence: Synthetic oligonucleotide
ucggucuguaagauucgug

SEQ ID NO: 1414768 - RNA, 19 nt, Artificial Sequence
  Description of Artificial Sequence: Synthetic oligonucleotide
cuccauagccgauuaaaca

SEQ ID NO: 1414769 - RNA, 19 nt, Artificial Sequence
  Description of Artificial Sequence: Synthetic oligonucleotide
ggauaauguucauggacug

SEQ ID NO: 1414770 - RNA, 19 nt, Artificial Sequence
  Description of Artificial Sequence: Synthetic oligonucleotide
gcaccuuuguacgugauag

SEQ ID NO: 1414771 - RNA, 19 nt, Artificial Sequence
  Description of Artificial Sequence: Synthetic oligonucleotide
aagauucguggagauagaa

SEQ ID NO: 1414772 - RNA, 19 nt, Artificial Sequence
  Description of Artificial Sequence: Synthetic oligonucleotide
uuguacgugauagggacau

SEQ ID NO: 1414773 - RNA, 19 nt, Artificial Sequence
  Description of Artificial Sequence: Synthetic oligonucleotide
ugcuccauagccgauuaaa

SEQ ID NO: 1414774 - RNA, 19 nt, Artificial Sequence
  Description of Artificial Sequence: Synthetic oligonucleotide
auagagugcaauguugcaa

SEQ ID NO: 1414775 - RNA, 19 nt, Artificial Sequence
  Description of Artificial Sequence: Synthetic oligonucleotide
aaagcaugcuugcuccaua

SEQ ID NO: 1414776 - RNA, 19 nt, Artificial Sequence
  Description of Artificial Sequence: Synthetic oligonucleotide
aucuaaguauucaacuaga

SEQ ID NO: 1414777 - RNA, 19 nt, Artificial Sequence
  Description of Artificial Sequence: Synthetic oligonucleotide
aaauagauguaugcuucua

SEQ ID NO: 1414778 - RNA, 19 nt, Artificial Sequence
  Description of Artificial Sequence: Synthetic oligonucleotide
aucuuauuaaucguauguu

SEQ ID NO: 1414779 - RNA, 19 nt, Artificial Sequence
  Description of Artificial Sequence: Synthetic oligonucleotide
cugauugguguaucguuuc

SEQ ID NO: 1414780 - RNA, 19 nt, Artificial Sequence
  Description of Artificial Sequence: Synthetic oligonucleotide
cuugaugggaagccaugug

SEQ ID NO: 1414781 - RNA, 19 nt, Artificial Sequence
  Description of Artificial Sequence: Synthetic oligonucleotide
ugauagggacaucggcaug

SEQ ID NO: 1414782 - RNA, 19 nt, Artificial Sequence
  Description of Artificial Sequence: Synthetic oligonucleotide
ugccaucugcaucuaaaau

SEQ ID NO: 1414783 - RNA, 19 nt, Artificial Sequence
  Description of Artificial Sequence: Synthetic oligonucleotide
uuucaaccuggggauaaug

SEQ ID NO: 1414784 - RNA, 19 nt, Artificial Sequence
  Description of Artificial Sequence: Synthetic oligonucleotide
uaguuauaaccauggcgaa

SEQ ID NO: 1414785 - RNA, 19 nt, Artificial Sequence
  Description of Artificial Sequence: Synthetic oligonucleotide
uucugauaguacacagguc

SEQ ID NO: 1414786 - RNA, 19 nt, Artificial Sequence
  Description of Artificial Sequence: Synthetic oligonucleotide
ccgaaauguacugacaagc

SEQ ID NO: 1414787 - RNA, 19 nt, Artificial Sequence
  Description of Artificial Sequence: Synthetic oligonucleotide
agacucucauguaagaaau

SEQ ID NO: 1414788 - RNA, 19 nt, Artificial Sequence
  Description of Artificial Sequence: Synthetic oligonucleotide
uucaugucgccagaugggu

SEQ ID NO: 1414789 - RNA, 19 nt, Artificial Sequence
  Description of Artificial Sequence: Synthetic oligonucleotide
uaucccgcucuucgcauca

SEQ ID NO: 1414790 - RNA, 19 nt, Artificial Sequence
  Description of Artificial Sequence: Synthetic oligonucleotide
ugagaucauuagucucucc

SEQ ID NO: 1414791 - RNA, 19 nt, Artificial Sequence
  Description of Artificial Sequence: Synthetic oligonucleotide
auaucccgcucuucgcauc

SEQ ID NO: 1414792 - RNA, 19 nt, Artificial Sequence
  Description of Artificial Sequence: Synthetic oligonucleotide
aauguacugacaagcuuuu

SEQ ID NO: 1414793 - RNA, 19 nt, Artificial Sequence
  Description of Artificial Sequence: Synthetic oligonucleotide
cuugagggacgaucaggcc

SEQ ID NO: 1414794 - RNA, 19 nt, Artificial Sequence
  Description of Artificial Sequence: Synthetic oligonucleotide
uucuaagggcucaccugug

SEQ ID NO: 1414795 - RNA, 19 nt, Artificial Sequence
  Description of Artificial Sequence: Synthetic oligonucleotide
uauaucccgcucuucgcau

SEQ ID NO: 1414796 - RNA, 19 nt, Artificial Sequence
  Description of Artificial Sequence: Synthetic oligonucleotide
caucagccgaaauguacug

SEQ ID NO: 1414797 - RNA, 19 nt, Artificial Sequence
  Description of Artificial Sequence: Synthetic oligonucleotide
caucggucuguaagauucg

SEQ ID NO: 1414798 - RNA, 19 nt, Artificial Sequence
  Description of Artificial Sequence: Synthetic oligonucleotide
ggacgaucaggccacaaac

SEQ ID NO: 1414799 - RNA, 19 nt, Artificial Sequence
  Description of Artificial Sequence: Synthetic oligonucleotide
auagccgauuaaacagucg

SEQ ID NO: 1414800 - RNA, 19 nt, Artificial Sequence
  Description of Artificial Sequence: Synthetic oligonucleotide
agccgauuaaacagucgcg

SEQ ID NO: 1414801 - RNA, 19 nt, Artificial Sequence
  Description of Artificial Sequence: Synthetic oligonucleotide
cuuacucguuguacuuggc

SEQ ID NO: 1414802 - RNA, 19 nt, Artificial Sequence
  Description of Artificial Sequence: Synthetic oligonucleotide
uugccggccagcaacucaa

SEQ ID NO: 1414803 - RNA, 19 nt, Artificial Sequence
  Description of Artificial Sequence: Synthetic oligonucleotide
ccuuacucguuguacuugg

SEQ ID NO: 1414804 - RNA, 19 nt, Artificial Sequence
  Description of Artificial Sequence: Synthetic oligonucleotide
uagccuugagccaacucuu

SEQ ID NO: 1414805 - RNA, 19 nt, Artificial Sequence
  Description of Artificial Sequence: Synthetic oligonucleotide
uauguaaggccugcacaac

SEQ ID NO: 1414806 - RNA, 19 nt, Artificial Sequence
  Description of Artificial Sequence: Synthetic oligonucleotide
uugccgucuaacacaccug

SEQ ID NO: 1414807 - RNA, 19 nt, Artificial Sequence
  Description of Artificial Sequence: Synthetic oligonucleotide
aagacgcaagccgccauca

SEQ ID NO: 1414808 - RNA, 19 nt, Artificial Sequence
  Description of Artificial Sequence: Synthetic oligonucleotide
uggcacgaugacuugcagu

SEQ ID NO: 1414809 - RNA, 19 nt, Artificial Sequence
  Description of Artificial Sequence: Synthetic oligonucleotide
cucagcauuggaagagauc

SEQ ID NO: 1414810 - RNA, 19 nt, Artificial Sequence
  Description of Artificial Sequence: Synthetic oligonucleotide
guaucguuucaaugugcac

SEQ ID NO: 1414811 - RNA, 19 nt, Artificial Sequence
  Description of Artificial Sequence: Synthetic oligonucleotide
cauucacaucuaaguauuc

SEQ ID NO: 1414812 - RNA, 19 nt, Artificial Sequence
  Description of Artificial Sequence: Synthetic oligonucleotide
ugacgacugcugaacuugu

SEQ ID NO: 1414813 - RNA, 19 nt, Artificial Sequence
  Description of Artificial Sequence: Synthetic oligonucleotide
ggacccaucaccuuaucaa

SEQ ID NO: 1414814 - RNA, 19 nt, Artificial Sequence
  Description of Artificial Sequence: Synthetic oligonucleotide
uaacuuuccgaccgucauu

SEQ ID NO: 1414815 - RNA, 19 nt, Artificial Sequence
  Description of Artificial Sequence: Synthetic oligonucleotide
gucuccgaucucuggacgc

SEQ ID NO: 1414816 - RNA, 19 nt, Artificial Sequence
  Description of Artificial Sequence: Synthetic oligonucleotide
cuucuacucccaaguugcc

SEQ ID NO: 1414817 - RNA, 19 nt, Artificial Sequence
  Description of Artificial Sequence: Synthetic oligonucleotide
ggcacgaugacuugcagua

SEQ ID NO: 1414818 - RNA, 19 nt, Artificial Sequence
  Description of Artificial Sequence: Synthetic oligonucleotide
cugauaguacacaggucca

SEQ ID NO: 1414819 - RNA, 19 nt, Artificial Sequence
  Description of Artificial Sequence: Synthetic oligonucleotide
gcgaacgaggucuucacac

SEQ ID NO: 1414820 - RNA, 19 nt, Artificial Sequence
  Description of Artificial Sequence: Synthetic oligonucleotide
ugaaggguucaaucuccaa

SEQ ID NO: 1414821 - RNA, 19 nt, Artificial Sequence
  Description of Artificial Sequence: Synthetic oligonucleotide
uguaagauucguggagaua

SEQ ID NO: 1414822 - RNA, 19 nt, Artificial Sequence
  Description of Artificial Sequence: Synthetic oligonucleotide
ugcaccuuuguacgugaua

SEQ ID NO: 1414823 - RNA, 19 nt, Artificial Sequence
  Description of Artificial Sequence: Synthetic oligonucleotide
aguuucaaccuggggauaa

SEQ ID NO: 1414824 - RNA, 19 nt, Artificial Sequence
  Description of Artificial Sequence: Synthetic oligonucleotide
gacgaucaggccacaaaca

SEQ ID NO: 1414825 - RNA, 19 nt, Artificial Sequence
  Description of Artificial Sequence: Synthetic oligonucleotide
accgucauucuugauggga

SEQ ID NO: 1414826 - RNA, 19 nt, Artificial Sequence
  Description of Artificial Sequence: Synthetic oligonucleotide
gucgggacagauuccagaa

SEQ ID NO: 1414827 - RNA, 19 nt, Artificial Sequence
  Description of Artificial Sequence: Synthetic oligonucleotide
agacgcaagccgccaucac

SEQ ID NO: 1414828 - RNA, 19 nt, Artificial Sequence
  Description of Artificial Sequence: Synthetic oligonucleotide
auuaugaugucgggacaga

SEQ ID NO: 1414829 - RNA, 19 nt, Artificial Sequence
  Description of Artificial Sequence: Synthetic oligonucleotide
guguaucguuucaaugugc

SEQ ID NO: 1414830 - RNA, 19 nt, Artificial Sequence
  Description of Artificial Sequence: Synthetic oligonucleotide
cuucuaagggcucaccugu

SEQ ID NO: 1414831 - RNA, 19 nt, Artificial Sequence
  Description of Artificial Sequence: Synthetic oligonucleotide
auaaacacaucggucugua

SEQ ID NO: 1414832 - RNA, 19 nt, Artificial Sequence
  Description of Artificial Sequence: Synthetic oligonucleotide
guugcaccuuuguacguga

SEQ ID NO: 1414833 - RNA, 19 nt, Artificial Sequence
  Description of Artificial Sequence: Synthetic oligonucleotide
gauugguguaucguuucaa

SEQ ID NO: 1414834 - RNA, 19 nt, Artificial Sequence
  Description of Artificial Sequence: Synthetic oligonucleotide
auggcacgaugacuugcag

SEQ ID NO: 1414835 - RNA, 19 nt, Artificial Sequence
  Description of Artificial Sequence: Synthetic oligonucleotide
uuuggguaagagaguucuu

SEQ ID NO: 1414836 - RNA, 19 nt, Artificial Sequence
  Description of Artificial Sequence: Synthetic oligonucleotide
gccgaaauguacugacaag

SEQ ID NO: 1414837 - RNA, 19 nt, Artificial Sequence
  Description of Artificial Sequence: Synthetic oligonucleotide
auucuugaugggaagccau

SEQ ID NO: 1414838 - RNA, 19 nt, Artificial Sequence
  Description of Artificial Sequence: Synthetic oligonucleotide
uggcgaacgaggucuucac

SEQ ID NO: 1414839 - RNA, 19 nt, Artificial Sequence
  Description of Artificial Sequence: Synthetic oligonucleotide
gucucgaaugacaccuaag

SEQ ID NO: 1414840 - RNA, 19 nt, Artificial Sequence
  Description of Artificial Sequence: Synthetic oligonucleotide
uugauauaucccgcucuuc

SEQ ID NO: 1414841 - RNA, 19 nt, Artificial Sequence
  Description of Artificial Sequence: Synthetic oligonucleotide
ucgccagauggguuuucug

SEQ ID NO: 1414842 - RNA, 19 nt, Artificial Sequence
  Description of Artificial Sequence: Synthetic oligonucleotide
ccgaccgucauucuugaug

SEQ ID NO: 1414843 - RNA, 19 nt, Artificial Sequence
  Description of Artificial Sequence: Synthetic oligonucleotide
ucaugucgccagauggguu

SEQ ID NO: 1414844 - RNA, 19 nt, Artificial Sequence
  Description of Artificial Sequence: Synthetic oligonucleotide
auggcgaacgaggucuuca

SEQ ID NO: 1414845 - RNA, 19 nt, Artificial Sequence
  Description of Artificial Sequence: Synthetic oligonucleotide
cuagacucucauguaagaa

SEQ ID NO: 1414846 - RNA, 19 nt, Artificial Sequence
  Description of Artificial Sequence: Synthetic oligonucleotide
gugguaucuuauuaaucgu

SEQ ID NO: 1414847 - RNA, 19 nt, Artificial Sequence
  Description of Artificial Sequence: Synthetic oligonucleotide
auaguggaacuugccgucu

SEQ ID NO: 1414848 - RNA, 19 nt, Artificial Sequence
  Description of Artificial Sequence: Synthetic oligonucleotide
ucuucgcaucagccgaaau

SEQ ID NO: 1414849 - RNA, 19 nt, Artificial Sequence
  Description of Artificial Sequence: Synthetic oligonucleotide
guauucaacuagacucuca

SEQ ID NO: 1414850 - RNA, 19 nt, Artificial Sequence
  Description of Artificial Sequence: Synthetic oligonucleotide
aucagccgaaauguacuga

SEQ ID NO: 1414851 - RNA, 19 nt, Artificial Sequence
  Description of Artificial Sequence: Synthetic oligonucleotide
ucccgcucuucgcaucagc

SEQ ID NO: 1414852 - RNA, 19 nt, Artificial Sequence
  Description of Artificial Sequence: Synthetic oligonucleotide
ucccaaguugccagcuaau

SEQ ID NO: 1414853 - RNA, 19 nt, Artificial Sequence
  Description of Artificial Sequence: Synthetic oligonucleotide
cucaauguaggaaucuguu

SEQ ID NO: 1414854 - RNA, 19 nt, Artificial Sequence
  Description of Artificial Sequence: Synthetic oligonucleotide
cacuugagaucauuagucu

SEQ ID NO: 1414855 - RNA, 19 nt, Artificial Sequence
  Description of Artificial Sequence: Synthetic oligonucleotide
caccuuaucaaaggucuga

SEQ ID NO: 1414856 - RNA, 19 nt, Artificial Sequence
  Description of Artificial Sequence: Synthetic oligonucleotide
uagggacaucggcauggac

SEQ ID NO: 1414857 - RNA, 19 nt, Artificial Sequence
  Description of Artificial Sequence: Synthetic oligonucleotide
gcauuggaagagaucauca

SEQ ID NO: 1414858 - RNA, 19 nt, Artificial Sequence
  Description of Artificial Sequence: Synthetic oligonucleotide
cgauuaaacagucgcguuc

SEQ ID NO: 1414859 - RNA, 19 nt, Artificial Sequence
  Description of Artificial Sequence: Synthetic oligonucleotide
uggacgccgcgucugucuc

SEQ ID NO: 1414860 - RNA, 19 nt, Artificial Sequence
  Description of Artificial Sequence: Synthetic oligonucleotide
cacgagaucguccuucagu

SEQ ID NO: 1414861 - RNA, 19 nt, Artificial Sequence
  Description of Artificial Sequence: Synthetic oligonucleotide
aucggucuguaagauucgu

SEQ ID NO: 1414862 - RNA, 19 nt, Artificial Sequence
  Description of Artificial Sequence: Synthetic oligonucleotide
acacaucggucuguaagau

SEQ ID NO: 1414863 - RNA, 19 nt, Artificial Sequence
  Description of Artificial Sequence: Synthetic oligonucleotide
cgugauagggacaucggca

SEQ ID NO: 1414864 - RNA, 19 nt, Artificial Sequence
  Description of Artificial Sequence: Synthetic oligonucleotide
gccugcacaaccguccucc

SEQ ID NO: 1414865 - RNA, 19 nt, Artificial Sequence
  Description of Artificial Sequence: Synthetic oligonucleotide
cuccgaucucuggacgccg

SEQ ID NO: 1414866 - RNA, 19 nt, Artificial Sequence
  Description of Artificial Sequence: Synthetic oligonucleotide
cucgaaugacaccuaagau

SEQ ID NO: 1414867 - RNA, 19 nt, Artificial Sequence
  Description of Artificial Sequence: Synthetic oligonucleotide
cgaucaggccacaaacacc

SEQ ID NO: 1414868 - RNA, 19 nt, Artificial Sequence
  Description of Artificial Sequence: Synthetic oligonucleotide
gcuccauagccgauuaaac

SEQ ID NO: 1414869 - RNA, 19 nt, Artificial Sequence
  Description of Artificial Sequence: Synthetic oligonucleotide
gguaucuuauuaaucguau

SEQ ID NO: 1414870 - RNA, 19 nt, Artificial Sequence
  Description of Artificial Sequence: Synthetic oligonucleotide
gucugauugguguaucguu

SEQ ID NO: 1414871 - RNA, 19 nt, Artificial Sequence
  Description of Artificial Sequence: Synthetic oligonucleotide
uugcaccuuuguacgugau

SEQ ID NO: 1414872 - RNA, 19 nt, Artificial Sequence
  Description of Artificial Sequence: Synthetic oligonucleotide
cccgcucuucgcaucagcc

SEQ ID NO: 1414873 - RNA, 19 nt, Artificial Sequence
  Description of Artificial Sequence: Synthetic oligonucleotide
cgcaucagccgaaauguac

SEQ ID NO: 1414874 - RNA, 19 nt, Artificial Sequence
  Description of Artificial Sequence: Synthetic oligonucleotide
caauuauguaaggccugca

SEQ ID NO: 1414875 - RNA, 19 nt, Artificial Sequence
  Description of Artificial Sequence: Synthetic oligonucleotide
uugcuccauagccgauuaa

SEQ ID NO: 1414876 - RNA, 19 nt, Artificial Sequence
  Description of Artificial Sequence: Synthetic oligonucleotide
ccccagguaguuauaacca

SEQ ID NO: 1414877 - RNA, 19 nt, Artificial Sequence
  Description of Artificial Sequence: Synthetic oligonucleotide
auagggacaucggcaugga

SEQ ID NO: 1414878 - RNA, 19 nt, Artificial Sequence
  Description of Artificial Sequence: Synthetic oligonucleotide
cgagaaacacauuugggua

SEQ ID NO: 1414879 - RNA, 19 nt, Artificial Sequence
  Description of Artificial Sequence: Synthetic oligonucleotide
ccgcucuucgcaucagccg

SEQ ID NO: 1414880 - RNA, 19 nt, Artificial Sequence
  Description of Artificial Sequence: Synthetic oligonucleotide
cagccgaaauguacugaca

SEQ ID NO: 1414881 - RNA, 19 nt, Artificial Sequence
  Description of Artificial Sequence: Synthetic oligonucleotide
caugucgccagauggguuu

SEQ ID NO: 1414882 - RNA, 19 nt, Artificial Sequence
  Description of Artificial Sequence: Synthetic oligonucleotide
gcccgaagugacauagucc

SEQ ID NO: 1414883 - RNA, 19 nt, Artificial Sequence
  Description of Artificial Sequence: Synthetic oligonucleotide
uguacgugauagggacauc

SEQ ID NO: 1414884 - RNA, 19 nt, Artificial Sequence
  Description of Artificial Sequence: Synthetic oligonucleotide
ugggaugcggagggaggac

SEQ ID NO: 1414885 - RNA, 19 nt, Artificial Sequence
  Description of Artificial Sequence: Synthetic oligonucleotide
augucgggacagauuccag

SEQ ID NO: 1414886 - RNA, 19 nt, Artificial Sequence
  Description of Artificial Sequence: Synthetic oligonucleotide
gaugcggagggaggacaca

SEQ ID NO: 1414887 - RNA, 19 nt, Artificial Sequence
  Description of Artificial Sequence: Synthetic oligonucleotide
gccaucacgagaucguccu

SEQ ID NO: 1414888 - RNA, 19 nt, Artificial Sequence
  Description of Artificial Sequence: Synthetic oligonucleotide
guaaggccugcacaaccgu

SEQ ID NO: 1414889 - RNA, 19 nt, Artificial Sequence
  Description of Artificial Sequence: Synthetic oligonucleotide
ugggacccaucaccuuauc

SEQ ID NO: 1414890 - RNA, 19 nt, Artificial Sequence
  Description of Artificial Sequence: Synthetic oligonucleotide
ggcucaccugugaugcccg

SEQ ID NO: 1414891 - RNA, 19 nt, Artificial Sequence
  Description of Artificial Sequence: Synthetic oligonucleotide
cgugccauaguggaacuug

SEQ ID NO: 1414892 - RNA, 19 nt, Artificial Sequence
  Description of Artificial Sequence: Synthetic oligonucleotide
ggucucgaaugacaccuaa

SEQ ID NO: 1414893 - RNA, 19 nt, Artificial Sequence
  Description of Artificial Sequence: Synthetic oligonucleotide
cacaaccguccuccaucag

SEQ ID NO: 1414894 - RNA, 19 nt, Artificial Sequence
  Description of Artificial Sequence: Synthetic oligonucleotide
gggacgaucaggccacaaa

SEQ ID NO: 1414895 - RNA, 19 nt, Artificial Sequence
  Description of Artificial Sequence: Synthetic oligonucleotide
gggcucaccugugaugccc

SEQ ID NO: 1414896 - RNA, 19 nt, Artificial Sequence
  Description of Artificial Sequence: Synthetic oligonucleotide
gcacaaccguccuccauca

SEQ ID NO: 1414897 - RNA, 19 nt, Artificial Sequence
  Description of Artificial Sequence: Synthetic oligonucleotide
cuaagggcucaccugugau

SEQ ID NO: 1414898 - RNA, 19 nt, Artificial Sequence
  Description of Artificial Sequence: Synthetic oligonucleotide
cgagaucguccuucagugg

SEQ ID NO: 1414899 - RNA, 19 nt, Artificial Sequence
  Description of Artificial Sequence: Synthetic oligonucleotide
augggacccaucaccuuau

SEQ ID NO: 1414900 - RNA, 19 nt, Artificial Sequence
  Description of Artificial Sequence: Synthetic oligonucleotide
gccgauuaaacagucgcgu

SEQ ID NO: 1414901 - RNA, 19 nt, Artificial Sequence
  Description of Artificial Sequence: Synthetic oligonucleotide
cagucgcguuccauuucuc

SEQ ID NO: 1414902 - RNA, 19 nt, Artificial Sequence
  Description of Artificial Sequence: Synthetic oligonucleotide
ccgucauucuugaugggaa

SEQ ID NO: 1414903 - RNA, 19 nt, Artificial Sequence
  Description of Artificial Sequence: Synthetic oligonucleotide
caugacgacugcugaacuu

SEQ ID NO: 1414904 - RNA, 19 nt, Artificial Sequence
  Description of Artificial Sequence: Synthetic oligonucleotide
ucuggacgccgcgucuguc

SEQ ID NO: 1414905 - RNA, 19 nt, Artificial Sequence
  Description of Artificial Sequence: Synthetic oligonucleotide
ggcgaacgaggucuucaca

SEQ ID NO: 1414906 - RNA, 19 nt, Artificial Sequence
  Description of Artificial Sequence: Synthetic oligonucleotide
caaguggugguaucuuauu

SEQ ID NO: 1414907 - RNA, 19 nt, Artificial Sequence
  Description of Artificial Sequence: Synthetic oligonucleotide
ccggccagcaacucaauua

SEQ ID NO: 1414908 - RNA, 19 nt, Artificial Sequence
  Description of Artificial Sequence: Synthetic oligonucleotide
uccgaccgucauucuugau

SEQ ID NO: 1414909 - RNA, 19 nt, Artificial Sequence
  Description of Artificial Sequence: Synthetic oligonucleotide
uggcaccagccagaauauc

SEQ ID NO: 1414910 - RNA, 19 nt, Artificial Sequence
  Description of Artificial Sequence: Synthetic oligonucleotide
caaucuccaagugguggua

SEQ ID NO: 1414911 - RNA, 19 nt, Artificial Sequence
  Description of Artificial Sequence: Synthetic oligonucleotide
ccauagccgauuaaacagu

SEQ ID NO: 1414912 - RNA, 19 nt, Artificial Sequence
  Description of Artificial Sequence: Synthetic oligonucleotide
ugucgccagauggguuuuc

SEQ ID NO: 1414913 - RNA, 19 nt, Artificial Sequence
  Description of Artificial Sequence: Synthetic oligonucleotide
cuggacgccgcgucugucu

SEQ ID NO: 1414914 - RNA, 19 nt, Artificial Sequence
  Description of Artificial Sequence: Synthetic oligonucleotide
ccuaagauguugccauuua

SEQ ID NO: 1414915 - RNA, 19 nt, Artificial Sequence
  Description of Artificial Sequence: Synthetic oligonucleotide
acgccgcgucugucucagc

SEQ ID NO: 1414916 - RNA, 19 nt, Artificial Sequence
  Description of Artificial Sequence: Synthetic oligonucleotide
ggucugauugguguaucgu

SEQ ID NO: 1414917 - RNA, 19 nt, Artificial Sequence
  Description of Artificial Sequence: Synthetic oligonucleotide
aucccgcucuucgcaucag

SEQ ID NO: 1414918 - RNA, 19 nt, Artificial Sequence
  Description of Artificial Sequence: Synthetic oligonucleotide
gggaugcggagggaggaca

SEQ ID NO: 1414919 - RNA, 19 nt, Artificial Sequence
  Description of Artificial Sequence: Synthetic oligonucleotide
cgaacgaggucuucacaca

SEQ ID NO: 1414920 - RNA, 19 nt, Artificial Sequence
  Description of Artificial Sequence: Synthetic oligonucleotide
cgcucuucgcaucagccga

SEQ ID NO: 1414921 - RNA, 19 nt, Artificial Sequence
  Description of Artificial Sequence: Synthetic oligonucleotide
augucgccagauggguuuu

SEQ ID NO: 1414922 - RNA, 19 nt, Artificial Sequence
  Description of Artificial Sequence: Synthetic oligonucleotide
agggacgaucaggccacaa

SEQ ID NO: 1414923 - RNA, 19 nt, Artificial Sequence
  Description of Artificial Sequence: Synthetic oligonucleotide
cacaucggucuguaagauu

SEQ ID NO: 1414924 - RNA, 19 nt, Artificial Sequence
  Description of Artificial Sequence: Synthetic oligonucleotide
ccaaguggugguaucuuau

SEQ ID NO: 1414925 - RNA, 19 nt, Artificial Sequence
  Description of Artificial Sequence: Synthetic oligonucleotide
gucgccagauggguuuucu

SEQ ID NO: 1414926 - RNA, 19 nt, Artificial Sequence
  Description of Artificial Sequence: Synthetic oligonucleotide
ggcccgggcaugcauuuua

SEQ ID NO: 1414927 - RNA, 19 nt, Artificial Sequence
  Description of Artificial Sequence: Synthetic oligonucleotide
guggcaccagccagaauau

SEQ ID NO: 1414928 - RNA, 19 nt, Artificial Sequence
  Description of Artificial Sequence: Synthetic oligonucleotide
cucuucgcaucagccgaaa

SEQ ID NO: 1414929 - RNA, 19 nt, Artificial Sequence
  Description of Artificial Sequence: Synthetic oligonucleotide
acaucggcauggacuuguu

SEQ ID NO: 1414930 - RNA, 19 nt, Artificial Sequence
  Description of Artificial Sequence: Synthetic oligonucleotide
ccguccuccaucagaggaa

SEQ ID NO: 1414931 - RNA, 19 nt, Artificial Sequence
  Description of Artificial Sequence: Synthetic oligonucleotide
gagggacgaucaggccaca

SEQ ID NO: 1414932 - RNA, 19 nt, Artificial Sequence
  Description of Artificial Sequence: Synthetic oligonucleotide
caccuaagauguugccauu

SEQ ID NO: 1414933 - RNA, 19 nt, Artificial Sequence
  Description of Artificial Sequence: Synthetic oligonucleotide
cugccuugccggccagcaa

SEQ ID NO: 1414934 - RNA, 19 nt, Artificial Sequence
  Description of Artificial Sequence: Synthetic oligonucleotide
cugcacaaccguccuccau

SEQ ID NO: 1414935 - RNA, 19 nt, Artificial Sequence
  Description of Artificial Sequence: Synthetic oligonucleotide
ccgauuaaacagucgcguu

SEQ ID NO: 1414936 - RNA, 19 nt, Artificial Sequence
  Description of Artificial Sequence: Synthetic oligonucleotide
gccgccaucacgagaucgu

SEQ ID NO: 1414937 - RNA, 19 nt, Artificial Sequence
  Description of Artificial Sequence: Synthetic oligonucleotide
ccgccaucacgagaucguc

SEQ ID NO: 1414938 - RNA, 19 nt, Artificial Sequence
  Description of Artificial Sequence: Synthetic oligonucleotide
cgccgcgucugucucagca

SEQ ID NO: 1414939 - RNA, 19 nt, Artificial Sequence
  Description of Artificial Sequence: Synthetic oligonucleotide
gcucuucgcaucagccgaa

SEQ ID NO: 1414940 - RNA, 19 nt, Artificial Sequence
  Description of Artificial Sequence: Synthetic oligonucleotide
ccucagcauuggaagagau

SEQ ID NO: 1414941 - RNA, 19 nt, Artificial Sequence
  Description of Artificial Sequence: Synthetic oligonucleotide
ccugcacaaccguccucca

SEQ ID NO: 1414942 - RNA, 19 nt, Artificial Sequence
  Description of Artificial Sequence: Synthetic oligonucleotide
gcuugcuccauagccgauu

SEQ ID NO: 1414943 - RNA, 19 nt, Artificial Sequence
  Description of Artificial Sequence: Synthetic oligonucleotide
ggaagacgagaaacacauu

SEQ ID NO: 1414944 - RNA, 19 nt, Artificial Sequence
  Description of Artificial Sequence: Synthetic oligonucleotide
gccuugccggccagcaacu

SEQ ID NO: 1414945 - RNA, 19 nt, Artificial Sequence
  Description of Artificial Sequence: Synthetic oligonucleotide
ccaagacgcaagccgccau

SEQ ID NO: 1414946 - RNA, 19 nt, Artificial Sequence
  Description of Artificial Sequence: Synthetic oligonucleotide
gccggccagcaacucaauu

SEQ ID NO: 1414947 - RNA, 19 nt, Artificial Sequence
  Description of Artificial Sequence: Synthetic oligonucleotide
ccauggcgaacgaggucuu

SEQ ID NO: 1414948 - RNA, 19 nt, Artificial Sequence
  Description of Artificial Sequence: Synthetic oligonucleotide
ccaucacgagaucguccuu

SEQ ID NO: 1414949 - RNA, 19 nt, Artificial Sequence
  Description of Artificial Sequence: Synthetic oligonucleotide
gggcccgggcaugcauuuu

SEQ ID NO: 1414950 - RNA, 19 nt, Artificial Sequence
  Description of Artificial Sequence: Synthetic oligonucleotide
auaaaugacagcuagcgcc

SEQ ID NO: 1414951 - RNA, 19 nt, Artificial Sequence
  Description of Artificial Sequence: Synthetic oligonucleotide
ugaauauucacuuugggga

SEQ ID NO: 1414952 - RNA, 19 nt, Artificial Sequence
  Description of Artificial Sequence: Synthetic oligonucleotide
ucccauaucuaccagaggg

SEQ ID NO: 1414953 - RNA, 19 nt, Artificial Sequence
  Description of Artificial Sequence: Synthetic oligonucleotide
accgcuaucaccuucauag

SEQ ID NO: 1414954 - RNA, 19 nt, Artificial Sequence
  Description of Artificial Sequence: Synthetic oligonucleotide
aauagagcuaaaucucuac

SEQ ID NO: 1414955 - RNA, 19 nt, Artificial Sequence
  Description of Artificial Sequence: Synthetic oligonucleotide
uugaauauucacuuugggg

SEQ ID NO: 1414956 - RNA, 19 nt, Artificial Sequence
  Description of Artificial Sequence: Synthetic oligonucleotide
aaauguuuuaggcuaaaca

SEQ ID NO: 1414957 - RNA, 19 nt, Artificial Sequence
  Description of Artificial Sequence: Synthetic oligonucleotide
uuugauuucaacaguugag

SEQ ID NO: 1414958 - RNA, 19 nt, Artificial Sequence
  Description of Artificial Sequence: Synthetic oligonucleotide
ugaaagacuaaauauuuga

SEQ ID NO: 1414959 - RNA, 19 nt, Artificial Sequence
  Description of Artificial Sequence: Synthetic oligonucleotide
aaauaucuacacugugccc

SEQ ID NO: 1414960 - RNA, 19 nt, Artificial Sequence
  Description of Artificial Sequence: Synthetic oligonucleotide
uguuuuaggcuaaacaaga

SEQ ID NO: 1414961 - RNA, 19 nt, Artificial Sequence
  Description of Artificial Sequence: Synthetic oligonucleotide
uuacaucucuaaaauagag

SEQ ID NO: 1414962 - RNA, 19 nt, Artificial Sequence
  Description of Artificial Sequence: Synthetic oligonucleotide
acauaaaugacagcuagcg

SEQ ID NO: 1414963 - RNA, 19 nt, Artificial Sequence
  Description of Artificial Sequence: Synthetic oligonucleotide
uuuaggcuaaacaagacua

SEQ ID NO: 1414964 - RNA, 19 nt, Artificial Sequence
  Description of Artificial Sequence: Synthetic oligonucleotide
auauguaggcaucuaaauc

SEQ ID NO: 1414965 - RNA, 19 nt, Artificial Sequence
  Description of Artificial Sequence: Synthetic oligonucleotide
aaaugaagcggcuaccgug

SEQ ID NO: 1414966 - RNA, 19 nt, Artificial Sequence
  Description of Artificial Sequence: Synthetic oligonucleotide
agagguucgaaaugaagcg

SEQ ID NO: 1414967 - RNA, 19 nt, Artificial Sequence
  Description of Artificial Sequence: Synthetic oligonucleotide
uuuaaggccagcaccauga

SEQ ID NO: 1414968 - RNA, 19 nt, Artificial Sequence
  Description of Artificial Sequence: Synthetic oligonucleotide
aauaucuacacugugcccu

SEQ ID NO: 1414969 - RNA, 19 nt, Artificial Sequence
  Description of Artificial Sequence: Synthetic oligonucleotide
agaagaucgccucagcuuc

SEQ ID NO: 1414970 - RNA, 19 nt, Artificial Sequence
  Description of Artificial Sequence: Synthetic oligonucleotide
aacuuggagacuugggauc

SEQ ID NO: 1414971 - RNA, 19 nt, Artificial Sequence
  Description of Artificial Sequence: Synthetic oligonucleotide
cuaaaauagagcuaaaucu

SEQ ID NO: 1414972 - RNA, 19 nt, Artificial Sequence
  Description of Artificial Sequence: Synthetic oligonucleotide
uucguuuucacuuuuguuu

SEQ ID NO: 1414973 - RNA, 19 nt, Artificial Sequence
  Description of Artificial Sequence: Synthetic oligonucleotide
ugcaaauucccauaucuac

SEQ ID NO: 1414974 - RNA, 19 nt, Artificial Sequence
  Description of Artificial Sequence: Synthetic oligonucleotide
ugcccuuuauacuaaagug

SEQ ID NO: 1414975 - RNA, 19 nt, Artificial Sequence
  Description of Artificial Sequence: Synthetic oligonucleotide
agaucuacauccccaagag

SEQ ID NO: 1414976 - RNA, 19 nt, Artificial Sequence
  Description of Artificial Sequence: Synthetic oligonucleotide
aggaauuuaaggccagcac

SEQ ID NO: 1414977 - RNA, 19 nt, Artificial Sequence
  Description of Artificial Sequence: Synthetic oligonucleotide
ucuugagcgaagagguucg

SEQ ID NO: 1414978 - RNA, 19 nt, Artificial Sequence
  Description of Artificial Sequence: Synthetic oligonucleotide
gcuaaacaagacuauaagg

SEQ ID NO: 1414979 - RNA, 19 nt, Artificial Sequence
  Description of Artificial Sequence: Synthetic oligonucleotide
aaucucuacaaaugcaaau

SEQ ID NO: 1414980 - RNA, 19 nt, Artificial Sequence
  Description of Artificial Sequence: Synthetic oligonucleotide
ugucuuggaacucaggaau

SEQ ID NO: 1414981 - RNA, 19 nt, Artificial Sequence
  Description of Artificial Sequence: Synthetic oligonucleotide
uuauggcacaucuucacug

SEQ ID NO: 1414982 - RNA, 19 nt, Artificial Sequence
  Description of Artificial Sequence: Synthetic oligonucleotide
cuuuauacuaaagugcuuc

SEQ ID NO: 1414983 - RNA, 19 nt, Artificial Sequence
  Description of Artificial Sequence: Synthetic oligonucleotide
aaaauagagcuaaaucucu

SEQ ID NO: 1414984 - RNA, 19 nt, Artificial Sequence
  Description of Artificial Sequence: Synthetic oligonucleotide
aaaaugugccacugucuag

SEQ ID NO: 1414985 - RNA, 19 nt, Artificial Sequence
  Description of Artificial Sequence: Synthetic oligonucleotide
uucgaaaugaagcggcuac

SEQ ID NO: 1414986 - RNA, 19 nt, Artificial Sequence
  Description of Artificial Sequence: Synthetic oligonucleotide
agauguucgcuccauuuuc

SEQ ID NO: 1414987 - RNA, 19 nt, Artificial Sequence
  Description of Artificial Sequence: Synthetic oligonucleotide
acuauaaggaaacauuauu

SEQ ID NO: 1414988 - RNA, 19 nt, Artificial Sequence
  Description of Artificial Sequence: Synthetic oligonucleotide
ucguuuucacuuuuguuug

SEQ ID NO: 1414989 - RNA, 19 nt, Artificial Sequence
  Description of Artificial Sequence: Synthetic oligonucleotide
aggaguggugucuacaaag

SEQ ID NO: 1414990 - RNA, 19 nt, Artificial Sequence
  Description of Artificial Sequence: Synthetic oligonucleotide
uauuuguagugugaaaaug

SEQ ID NO: 1414991 - RNA, 19 nt, Artificial Sequence
  Description of Artificial Sequence: Synthetic oligonucleotide
auuucaacaguugaguacu

SEQ ID NO: 1414992 - RNA, 19 nt, Artificial Sequence
  Description of Artificial Sequence: Synthetic oligonucleotide
ggaauuuaaggccagcacc

SEQ ID NO: 1414993 - RNA, 19 nt, Artificial Sequence
  Description of Artificial Sequence: Synthetic oligonucleotide
gcugacaggaauuuaaggc

SEQ ID NO: 1414994 - RNA, 19 nt, Artificial Sequence
  Description of Artificial Sequence: Synthetic oligonucleotide
uugauuucaacaguugagu

SEQ ID NO: 1414995 - RNA, 19 nt, Artificial Sequence
  Description of Artificial Sequence: Synthetic oligonucleotide
aaaugugccacugucuaga

SEQ ID NO: 1414996 - RNA, 19 nt, Artificial Sequence
  Description of Artificial Sequence: Synthetic oligonucleotide
ucucuacaaaugcaaauuc

SEQ ID NO: 1414997 - RNA, 19 nt, Artificial Sequence
  Description of Artificial Sequence: Synthetic oligonucleotide
ugagaggugacaaugucuu

SEQ ID NO: 1414998 - RNA, 19 nt, Artificial Sequence
  Description of Artificial Sequence: Synthetic oligonucleotide
auuugcagccaggacaccc

SEQ ID NO: 1414999 - RNA, 19 nt, Artificial Sequence
  Description of Artificial Sequence: Synthetic oligonucleotide
uucuggucaugauauguag

SEQ ID NO: 1415000 - RNA, 19 nt, Artificial Sequence
  Description of Artificial Sequence: Synthetic oligonucleotide
ugucuagacacuugaauau

SEQ ID NO: 1415001 - RNA, 19 nt, Artificial Sequence
  Description of Artificial Sequence: Synthetic oligonucleotide
aagacuauaaggaaacauu

SEQ ID NO: 1415002 - RNA, 19 nt, Artificial Sequence
  Description of Artificial Sequence: Synthetic oligonucleotide
ucuaugaaauucucacucu

SEQ ID NO: 1415003 - RNA, 19 nt, Artificial Sequence
  Description of Artificial Sequence: Synthetic oligonucleotide
uguaaauuaaaagcuuuau

SEQ ID NO: 1415004 - RNA, 19 nt, Artificial Sequence
  Description of Artificial Sequence: Synthetic oligonucleotide
aagaagaucgccucagcuu

SEQ ID NO: 1415005 - RNA, 19 nt, Artificial Sequence
  Description of Artificial Sequence: Synthetic oligonucleotide
aguggugucuacaaagccg

SEQ ID NO: 1415006 - RNA, 19 nt, Artificial Sequence
  Description of Artificial Sequence: Synthetic oligonucleotide
aucucuaaaauagagcuaa

SEQ ID NO: 1415007 - RNA, 19 nt, Artificial Sequence
  Description of Artificial Sequence: Synthetic oligonucleotide
ugauaaagggcagugacua

SEQ ID NO: 1415008 - RNA, 19 nt, Artificial Sequence
  Description of Artificial Sequence: Synthetic oligonucleotide
ucuccaauuccacaauggu

SEQ ID NO: 1415009 - RNA, 19 nt, Artificial Sequence
  Description of Artificial Sequence: Synthetic oligonucleotide
cacaaugguauuuguagug

SEQ ID NO: 1415010 - RNA, 19 nt, Artificial Sequence
  Description of Artificial Sequence: Synthetic oligonucleotide
caaagccggaccaacuugg

SEQ ID NO: 1415011 - RNA, 19 nt, Artificial Sequence
  Description of Artificial Sequence: Synthetic oligonucleotide
ucuuauggcacaucuucac

SEQ ID NO: 1415012 - RNA, 19 nt, Artificial Sequence
  Description of Artificial Sequence: Synthetic oligonucleotide
auagagcuaaaucucuaca

SEQ ID NO: 1415013 - RNA, 19 nt, Artificial Sequence
  Description of Artificial Sequence: Synthetic oligonucleotide
gaauuuaaggccagcacca

SEQ ID NO: 1415014 - RNA, 19 nt, Artificial Sequence
  Description of Artificial Sequence: Synthetic oligonucleotide
ggcuacaccaaugagagcc

SEQ ID NO: 1415015 - RNA, 19 nt, Artificial Sequence
  Description of Artificial Sequence: Synthetic oligonucleotide
aacucuucaguaggagugg

SEQ ID NO: 1415016 - RNA, 19 nt, Artificial Sequence
  Description of Artificial Sequence: Synthetic oligonucleotide
agguucgaaaugaagcggc

SEQ ID NO: 1415017 - RNA, 19 nt, Artificial Sequence
  Description of Artificial Sequence: Synthetic oligonucleotide
cauaaaugacagcuagcgc

SEQ ID NO: 1415018 - RNA, 19 nt, Artificial Sequence
  Description of Artificial Sequence: Synthetic oligonucleotide
auccccaagagccucgguc

SEQ ID NO: 1415019 - RNA, 19 nt, Artificial Sequence
  Description of Artificial Sequence: Synthetic oligonucleotide
aaugguauuuguaguguga

SEQ ID NO: 1415020 - RNA, 19 nt, Artificial Sequence
  Description of Artificial Sequence: Synthetic oligonucleotide
ugaaccccuuccuccaugg

SEQ ID NO: 1415021 - RNA, 19 nt, Artificial Sequence
  Description of Artificial Sequence: Synthetic oligonucleotide
ugagcgaagagguucgaaa

SEQ ID NO: 1415022 - RNA, 19 nt, Artificial Sequence
  Description of Artificial Sequence: Synthetic oligonucleotide
gucgcucccacauaaauga

SEQ ID NO: 1415023 - RNA, 19 nt, Artificial Sequence
  Description of Artificial Sequence: Synthetic oligonucleotide
acugucuagacacuugaau

SEQ ID NO: 1415024 - RNA, 19 nt, Artificial Sequence
  Description of Artificial Sequence: Synthetic oligonucleotide
caucuaaaucuguuguuug

SEQ ID NO: 1415025 - RNA, 19 nt, Artificial Sequence
  Description of Artificial Sequence: Synthetic oligonucleotide
auaucuaccagagggagaa

SEQ ID NO: 1415026 - RNA, 19 nt, Artificial Sequence
  Description of Artificial Sequence: Synthetic oligonucleotide
aucuaaaucuguuguuugu

SEQ ID NO: 1415027 - RNA, 19 nt, Artificial Sequence
  Description of Artificial Sequence: Synthetic oligonucleotide
ugugaaaaugugccacugu

SEQ ID NO: 1415028 - RNA, 19 nt, Artificial Sequence
  Description of Artificial Sequence: Synthetic oligonucleotide
aaugaagcggcuaccguga

SEQ ID NO: 1415029 - RNA, 19 nt, Artificial Sequence
  Description of Artificial Sequence: Synthetic oligonucleotide
guucgcuccauuuucuaug

SEQ ID NO: 1415030 - RNA, 19 nt, Artificial Sequence
  Description of Artificial Sequence: Synthetic oligonucleotide
ggcuaaacaagacuauaag

SEQ ID NO: 1415031 - RNA, 19 nt, Artificial Sequence
  Description of Artificial Sequence: Synthetic oligonucleotide
accgguuucucuuuaucug

SEQ ID NO: 1415032 - RNA, 19 nt, Artificial Sequence
  Description of Artificial Sequence: Synthetic oligonucleotide
caccacuugauaaagggca

SEQ ID NO: 1415033 - RNA, 19 nt, Artificial Sequence
  Description of Artificial Sequence: Synthetic oligonucleotide
gagguucgaaaugaagcgg

SEQ ID NO: 1415034 - RNA, 19 nt, Artificial Sequence
  Description of Artificial Sequence: Synthetic oligonucleotide
ucuaccccggaguuauggg

SEQ ID NO: 1415035 - RNA, 19 nt, Artificial Sequence
  Description of Artificial Sequence: Synthetic oligonucleotide
ggucuugcugguuucaucc

SEQ ID NO: 1415036 - RNA, 19 nt, Artificial Sequence
  Description of Artificial Sequence: Synthetic oligonucleotide
ucaacaccaugaauguccu

SEQ ID NO: 1415037 - RNA, 19 nt, Artificial Sequence
  Description of Artificial Sequence: Synthetic oligonucleotide
uuaggcuaaacaagacuau

SEQ ID NO: 1415038 - RNA, 19 nt, Artificial Sequence
  Description of Artificial Sequence: Synthetic oligonucleotide
uagugugaaaaugugccac

SEQ ID NO: 1415039 - RNA, 19 nt, Artificial Sequence
  Description of Artificial Sequence: Synthetic oligonucleotide
uaccgguuucucuuuaucu

SEQ ID NO: 1415040 - RNA, 19 nt, Artificial Sequence
  Description of Artificial Sequence: Synthetic oligonucleotide
uucuaccccggaguuaugg

SEQ ID NO: 1415041 - RNA, 19 nt, Artificial Sequence
  Description of Artificial Sequence: Synthetic oligonucleotide
ugcuuagcucuuauggcac

SEQ ID NO: 1415042 - RNA, 19 nt, Artificial Sequence
  Description of Artificial Sequence: Synthetic oligonucleotide
ugggaucuaguggagacug

SEQ ID NO: 1415043 - RNA, 19 nt, Artificial Sequence
  Description of Artificial Sequence: Synthetic oligonucleotide
auuuaaggccagcaccaug

SEQ ID NO: 1415044 - RNA, 19 nt, Artificial Sequence
  Description of Artificial Sequence: Synthetic oligonucleotide
ggcuuagagcccuugaacc

SEQ ID NO: 1415045 - RNA, 19 nt, Artificial Sequence
  Description of Artificial Sequence: Synthetic oligonucleotide
cuaccccggaguuaugggg

SEQ ID NO: 1415046 - RNA, 19 nt, Artificial Sequence
  Description of Artificial Sequence: Synthetic oligonucleotide
ucauaguaccgguuucucu

SEQ ID NO: 1415047 - RNA, 19 nt, Artificial Sequence
  Description of Artificial Sequence: Synthetic oligonucleotide
ucuacaaagccggaccaac

SEQ ID NO: 1415048 - RNA, 19 nt, Artificial Sequence
  Description of Artificial Sequence: Synthetic oligonucleotide
aggacacccaccuuagaga

SEQ ID NO: 1415049 - RNA, 19 nt, Artificial Sequence
  Description of Artificial Sequence: Synthetic oligonucleotide
caaugguauuuguagugug

SEQ ID NO: 1415050 - RNA, 19 nt, Artificial Sequence
  Description of Artificial Sequence: Synthetic oligonucleotide
ucuucuaccccggaguuau

SEQ ID NO: 1415051 - RNA, 19 nt, Artificial Sequence
  Description of Artificial Sequence: Synthetic oligonucleotide
gauauguaggcaucuaaau

SEQ ID NO: 1415052 - RNA, 19 nt, Artificial Sequence
  Description of Artificial Sequence: Synthetic oligonucleotide
agcgaagagguucgaaaug

SEQ ID NO: 1415053 - RNA, 19 nt, Artificial Sequence
  Description of Artificial Sequence: Synthetic oligonucleotide
aaaucucuacaaaugcaaa

SEQ ID NO: 1415054 - RNA, 19 nt, Artificial Sequence
  Description of Artificial Sequence: Synthetic oligonucleotide
uucgcuccauuuucuauga

SEQ ID NO: 1415055 - RNA, 19 nt, Artificial Sequence
  Description of Artificial Sequence: Synthetic oligonucleotide
uccaugguacuuccugagc

SEQ ID NO: 1415056 - RNA, 19 nt, Artificial Sequence
  Description of Artificial Sequence: Synthetic oligonucleotide
cuuagagcccuugaacccc

SEQ ID NO: 1415057 - RNA, 19 nt, Artificial Sequence
  Description of Artificial Sequence: Synthetic oligonucleotide
uucagcgaagaagaucgcc

SEQ ID NO: 1415058 - RNA, 19 nt, Artificial Sequence
  Description of Artificial Sequence: Synthetic oligonucleotide
gaucuacauccccaagagc

SEQ ID NO: 1415059 - RNA, 19 nt, Artificial Sequence
  Description of Artificial Sequence: Synthetic oligonucleotide
acuggggugaucucucuga

SEQ ID NO: 1415060 - RNA, 19 nt, Artificial Sequence
  Description of Artificial Sequence: Synthetic oligonucleotide
gacuaucccgccuccagac

SEQ ID NO: 1415061 - RNA, 19 nt, Artificial Sequence
  Description of Artificial Sequence: Synthetic oligonucleotide
cuauaaggaaacauuauuu

SEQ ID NO: 1415062 - RNA, 19 nt, Artificial Sequence
  Description of Artificial Sequence: Synthetic oligonucleotide
uacaaagccggaccaacuu

SEQ ID NO: 1415063 - RNA, 19 nt, Artificial Sequence
  Description of Artificial Sequence: Synthetic oligonucleotide
agugacuacuggugcugac

SEQ ID NO: 1415064 - RNA, 19 nt, Artificial Sequence
  Description of Artificial Sequence: Synthetic oligonucleotide
uguaggcaucuaaaucugu

SEQ ID NO: 1415065 - RNA, 19 nt, Artificial Sequence
  Description of Artificial Sequence: Synthetic oligonucleotide
cuuggaacucaggaauucc

SEQ ID NO: 1415066 - RNA, 19 nt, Artificial Sequence
  Description of Artificial Sequence: Synthetic oligonucleotide
accccuuccuccaugguac

SEQ ID NO: 1415067 - RNA, 19 nt, Artificial Sequence
  Description of Artificial Sequence: Synthetic oligonucleotide
accgugaaugggcggcucc

SEQ ID NO: 1415068 - RNA, 19 nt, Artificial Sequence
  Description of Artificial Sequence: Synthetic oligonucleotide
gagcccuugaaccccuucc

SEQ ID NO: 1415069 - RNA, 19 nt, Artificial Sequence
  Description of Artificial Sequence: Synthetic oligonucleotide
agacuauaaggaaacauua

SEQ ID NO: 1415070 - RNA, 19 nt, Artificial Sequence
  Description of Artificial Sequence: Synthetic oligonucleotide
cugucuagacacuugaaua

SEQ ID NO: 1415071 - RNA, 19 nt, Artificial Sequence
  Description of Artificial Sequence: Synthetic oligonucleotide
ucaugauauguaggcaucu

SEQ ID NO: 1415072 - RNA, 19 nt, Artificial Sequence
  Description of Artificial Sequence: Synthetic oligonucleotide
gauaaagggcagugacuac

SEQ ID NO: 1415073 - RNA, 19 nt, Artificial Sequence
  Description of Artificial Sequence: Synthetic oligonucleotide
gaaugggcggcuccucucc

SEQ ID NO: 1415074 - RNA, 19 nt, Artificial Sequence
  Description of Artificial Sequence: Synthetic oligonucleotide
ugacuaucccgccuccaga

SEQ ID NO: 1415075 - RNA, 19 nt, Artificial Sequence
  Description of Artificial Sequence: Synthetic oligonucleotide
cccugcuuagcucuuaugg

SEQ ID NO: 1415076 - RNA, 19 nt, Artificial Sequence
  Description of Artificial Sequence: Synthetic oligonucleotide
aucuucacugaauggacuu

SEQ ID NO: 1415077 - RNA, 19 nt, Artificial Sequence
  Description of Artificial Sequence: Synthetic oligonucleotide
aagcggcuaccgugaaugg

SEQ ID NO: 1415078 - RNA, 19 nt, Artificial Sequence
  Description of Artificial Sequence: Synthetic oligonucleotide
aucauaguaccgguuucuc

SEQ ID NO: 1415079 - RNA, 19 nt, Artificial Sequence
  Description of Artificial Sequence: Synthetic oligonucleotide
aaauagagcuaaaucucua

SEQ ID NO: 1415080 - RNA, 19 nt, Artificial Sequence
  Description of Artificial Sequence: Synthetic oligonucleotide
cugcuuagcucuuauggca

SEQ ID NO: 1415081 - RNA, 19 nt, Artificial Sequence
  Description of Artificial Sequence: Synthetic oligonucleotide
gcucuuauggcacaucuuc

SEQ ID NO: 1415082 - RNA, 19 nt, Artificial Sequence
  Description of Artificial Sequence: Synthetic oligonucleotide
uggggugaucucucugagg

SEQ ID NO: 1415083 - RNA, 19 nt, Artificial Sequence
  Description of Artificial Sequence: Synthetic oligonucleotide
uuccuuuccaaagucgcuc

SEQ ID NO: 1415084 - RNA, 19 nt, Artificial Sequence
  Description of Artificial Sequence: Synthetic oligonucleotide
gugacuaucccgccuccag

SEQ ID NO: 1415085 - RNA, 19 nt, Artificial Sequence
  Description of Artificial Sequence: Synthetic oligonucleotide
cagaucuacauccccaaga

SEQ ID NO: 1415086 - RNA, 19 nt, Artificial Sequence
  Description of Artificial Sequence: Synthetic oligonucleotide
augaauguccuugcuccuc

SEQ ID NO: 1415087 - RNA, 19 nt, Artificial Sequence
  Description of Artificial Sequence: Synthetic oligonucleotide
uguucgcuccauuuucuau

SEQ ID NO: 1415088 - RNA, 19 nt, Artificial Sequence
  Description of Artificial Sequence: Synthetic oligonucleotide
ucgaaaugaagcggcuacc

SEQ ID NO: 1415089 - RNA, 19 nt, Artificial Sequence
  Description of Artificial Sequence: Synthetic oligonucleotide
uggaacucaggaauuccuu

SEQ ID NO: 1415090 - RNA, 19 nt, Artificial Sequence
  Description of Artificial Sequence: Synthetic oligonucleotide
uugaaccccuuccuccaug

SEQ ID NO: 1415091 - RNA, 19 nt, Artificial Sequence
  Description of Artificial Sequence: Synthetic oligonucleotide
gaccaacuuggagacuugg

SEQ ID NO: 1415092 - RNA, 19 nt, Artificial Sequence
  Description of Artificial Sequence: Synthetic oligonucleotide
uuagagcccuugaaccccu

SEQ ID NO: 1415093 - RNA, 19 nt, Artificial Sequence
  Description of Artificial Sequence: Synthetic oligonucleotide
uuuggggaaugcaguggac

SEQ ID NO: 1415094 - RNA, 19 nt, Artificial Sequence
  Description of Artificial Sequence: Synthetic oligonucleotide
ucuggguugugaacucuuc

SEQ ID NO: 1415095 - RNA, 19 nt, Artificial Sequence
  Description of Artificial Sequence: Synthetic oligonucleotide
ggaucuccccaacaucugg

SEQ ID NO: 1415096 - RNA, 19 nt, Artificial Sequence
  Description of Artificial Sequence: Synthetic oligonucleotide
ccuguuauucuucaucuuc

SEQ ID NO: 1415097 - RNA, 19 nt, Artificial Sequence
  Description of Artificial Sequence: Synthetic oligonucleotide
gcccuuuauacuaaagugc

SEQ ID NO: 1415098 - RNA, 19 nt, Artificial Sequence
  Description of Artificial Sequence: Synthetic oligonucleotide
gagcuaaaucucuacaaau

SEQ ID NO: 1415099 - RNA, 19 nt, Artificial Sequence
  Description of Artificial Sequence: Synthetic oligonucleotide
uaucccgccuccagacucc

SEQ ID NO: 1415100 - RNA, 19 nt, Artificial Sequence
  Description of Artificial Sequence: Synthetic oligonucleotide
ucucuaaaauagagcuaaa

SEQ ID NO: 1415101 - RNA, 19 nt, Artificial Sequence
  Description of Artificial Sequence: Synthetic oligonucleotide
ucuacacugugcccuuuau

SEQ ID NO: 1415102 - RNA, 19 nt, Artificial Sequence
  Description of Artificial Sequence: Synthetic oligonucleotide
cuaucccgccuccagacuc

SEQ ID NO: 1415103 - RNA, 19 nt, Artificial Sequence
  Description of Artificial Sequence: Synthetic oligonucleotide
agcgaagaagaucgccuca

SEQ ID NO: 1415104 - RNA, 19 nt, Artificial Sequence
  Description of Artificial Sequence: Synthetic oligonucleotide
caaagucgcucccacauaa

SEQ ID NO: 1415105 - RNA, 19 nt, Artificial Sequence
  Description of Artificial Sequence: Synthetic oligonucleotide
ccugcuuagcucuuauggc

SEQ ID NO: 1415106 - RNA, 19 nt, Artificial Sequence
  Description of Artificial Sequence: Synthetic oligonucleotide
agucgcucccacauaaaug

SEQ ID NO: 1415107 - RNA, 19 nt, Artificial Sequence
  Description of Artificial Sequence: Synthetic oligonucleotide
ugcacgaggucaccgcuau

SEQ ID NO: 1415108 - RNA, 19 nt, Artificial Sequence
  Description of Artificial Sequence: Synthetic oligonucleotide
acgggcuacaccaaugaga

SEQ ID NO: 1415109 - RNA, 19 nt, Artificial Sequence
  Description of Artificial Sequence: Synthetic oligonucleotide
uguuucccugcugugacua

SEQ ID NO: 1415110 - RNA, 19 nt, Artificial Sequence
  Description of Artificial Sequence: Synthetic oligonucleotide
acuugauaaagggcaguga

SEQ ID NO: 1415111 - RNA, 19 nt, Artificial Sequence
  Description of Artificial Sequence: Synthetic oligonucleotide
cugaccacuucucccuccc

SEQ ID NO: 1415112 - RNA, 19 nt, Artificial Sequence
  Description of Artificial Sequence: Synthetic oligonucleotide
cgggcuacaccaaugagag

SEQ ID NO: 1415113 - RNA, 19 nt, Artificial Sequence
  Description of Artificial Sequence: Synthetic oligonucleotide
guuuguuucccugcuguga

SEQ ID NO: 1415114 - RNA, 19 nt, Artificial Sequence
  Description of Artificial Sequence: Synthetic oligonucleotide
uuucauccucaggaggcca

SEQ ID NO: 1415115 - RNA, 19 nt, Artificial Sequence
  Description of Artificial Sequence: Synthetic oligonucleotide
aucuaccagagggagaaaa

SEQ ID NO: 1415116 - RNA, 19 nt, Artificial Sequence
  Description of Artificial Sequence: Synthetic oligonucleotide
aaugggcggcuccucuccu

SEQ ID NO: 1415117 - RNA, 19 nt, Artificial Sequence
  Description of Artificial Sequence: Synthetic oligonucleotide
gugugaaaaugugccacug

SEQ ID NO: 1415118 - RNA, 19 nt, Artificial Sequence
  Description of Artificial Sequence: Synthetic oligonucleotide
uggagacuugggaucuagu

SEQ ID NO: 1415119 - RNA, 19 nt, Artificial Sequence
  Description of Artificial Sequence: Synthetic oligonucleotide
gacuggggugaucucucug

SEQ ID NO: 1415120 - RNA, 19 nt, Artificial Sequence
  Description of Artificial Sequence: Synthetic oligonucleotide
cuccaauuccacaauggua

SEQ ID NO: 1415121 - RNA, 19 nt, Artificial Sequence
  Description of Artificial Sequence: Synthetic oligonucleotide
gguugugaacucuucagua

SEQ ID NO: 1415122 - RNA, 19 nt, Artificial Sequence
  Description of Artificial Sequence: Synthetic oligonucleotide
uucuggguugugaacucuu

SEQ ID NO: 1415123 - RNA, 19 nt, Artificial Sequence
  Description of Artificial Sequence: Synthetic oligonucleotide
cauaguaccgguuucucuu

SEQ ID NO: 1415124 - RNA, 19 nt, Artificial Sequence
  Description of Artificial Sequence: Synthetic oligonucleotide
aaaugacagcuagcgccug

SEQ ID NO: 1415125 - RNA, 19 nt, Artificial Sequence
  Description of Artificial Sequence: Synthetic oligonucleotide
agcggcuaccgugaauggg

SEQ ID NO: 1415126 - RNA, 19 nt, Artificial Sequence
  Description of Artificial Sequence: Synthetic oligonucleotide
ggccacuugggcuuagagc

SEQ ID NO: 1415127 - RNA, 19 nt, Artificial Sequence
  Description of Artificial Sequence: Synthetic oligonucleotide
gucaugauauguaggcauc

SEQ ID NO: 1415128 - RNA, 19 nt, Artificial Sequence
  Description of Artificial Sequence: Synthetic oligonucleotide
caggcaccacuugauaaag

SEQ ID NO: 1415129 - RNA, 19 nt, Artificial Sequence
  Description of Artificial Sequence: Synthetic oligonucleotide
auaucuacacugugcccuu

SEQ ID NO: 1415130 - RNA, 19 nt, Artificial Sequence
  Description of Artificial Sequence: Synthetic oligonucleotide
auaguaccgguuucucuuu

SEQ ID NO: 1415131 - RNA, 19 nt, Artificial Sequence
  Description of Artificial Sequence: Synthetic oligonucleotide
acaagacuauaaggaaaca

SEQ ID NO: 1415132 - RNA, 19 nt, Artificial Sequence
  Description of Artificial Sequence: Synthetic oligonucleotide
ugcuucuggucaugauaug

SEQ ID NO: 1415133 - RNA, 19 nt, Artificial Sequence
  Description of Artificial Sequence: Synthetic oligonucleotide
aguaccgguuucucuuuau

SEQ ID NO: 1415134 - RNA, 19 nt, Artificial Sequence
  Description of Artificial Sequence: Synthetic oligonucleotide
acauuauuuuacaucucua

SEQ ID NO: 1415135 - RNA, 19 nt, Artificial Sequence
  Description of Artificial Sequence: Synthetic oligonucleotide
cuucagcgaagaagaucgc

SEQ ID NO: 1415136 - RNA, 19 nt, Artificial Sequence
  Description of Artificial Sequence: Synthetic oligonucleotide
agaucgccucagcuucuuc

SEQ ID NO: 1415137 - RNA, 19 nt, Artificial Sequence
  Description of Artificial Sequence: Synthetic oligonucleotide
gacggccuguuauucuuca

SEQ ID NO: 1415138 - RNA, 19 nt, Artificial Sequence
  Description of Artificial Sequence: Synthetic oligonucleotide
guaccgguuucucuuuauc

SEQ ID NO: 1415139 - RNA, 19 nt, Artificial Sequence
  Description of Artificial Sequence: Synthetic oligonucleotide
guggacgacgggcuacacc

SEQ ID NO: 1415140 - RNA, 19 nt, Artificial Sequence
  Description of Artificial Sequence: Synthetic oligonucleotide
accaugacggccuguuauu

SEQ ID NO: 1415141 - RNA, 19 nt, Artificial Sequence
  Description of Artificial Sequence: Synthetic oligonucleotide
gaaccccacaucaugagau

SEQ ID NO: 1415142 - RNA, 19 nt, Artificial Sequence
  Description of Artificial Sequence: Synthetic oligonucleotide
cucccggaaccccacauca

SEQ ID NO: 1415143 - RNA, 19 nt, Artificial Sequence
  Description of Artificial Sequence: Synthetic oligonucleotide
gacuauaaggaaacauuau

SEQ ID NO: 1415144 - RNA, 19 nt, Artificial Sequence
  Description of Artificial Sequence: Synthetic oligonucleotide
acuaucccgccuccagacu

SEQ ID NO: 1415145 - RNA, 19 nt, Artificial Sequence
  Description of Artificial Sequence: Synthetic oligonucleotide
gggcuuagagcccuugaac

SEQ ID NO: 1415146 - RNA, 19 nt, Artificial Sequence
  Description of Artificial Sequence: Synthetic oligonucleotide
gcuccgacaugcuccaacc

SEQ ID NO: 1415147 - RNA, 19 nt, Artificial Sequence
  Description of Artificial Sequence: Synthetic oligonucleotide
caucucuaaaauagagcua

SEQ ID NO: 1415148 - RNA, 19 nt, Artificial Sequence
  Description of Artificial Sequence: Synthetic oligonucleotide
ugacggccuguuauucuuc

SEQ ID NO: 1415149 - RNA, 19 nt, Artificial Sequence
  Description of Artificial Sequence: Synthetic oligonucleotide
ccauaucuaccagagggag

SEQ ID NO: 1415150 - RNA, 19 nt, Artificial Sequence
  Description of Artificial Sequence: Synthetic oligonucleotide
ugaagcggcuaccgugaau

SEQ ID NO: 1415151 - RNA, 19 nt, Artificial Sequence
  Description of Artificial Sequence: Synthetic oligonucleotide
ggugcugacaggaauuuaa

SEQ ID NO: 1415152 - RNA, 19 nt, Artificial Sequence
  Description of Artificial Sequence: Synthetic oligonucleotide
gagacuggggugaucucuc

SEQ ID NO: 1415153 - RNA, 19 nt, Artificial Sequence
  Description of Artificial Sequence: Synthetic oligonucleotide
ggucaugauauguaggcau

SEQ ID NO: 1415154 - RNA, 19 nt, Artificial Sequence
  Description of Artificial Sequence: Synthetic oligonucleotide
ugugacuaucccgccucca

SEQ ID NO: 1415155 - RNA, 19 nt, Artificial Sequence
  Description of Artificial Sequence: Synthetic oligonucleotide
ucgcucccacauaaaugac

SEQ ID NO: 1415156 - RNA, 19 nt, Artificial Sequence
  Description of Artificial Sequence: Synthetic oligonucleotide
gcuaccgugaaugggcggc

SEQ ID NO: 1415157 - RNA, 19 nt, Artificial Sequence
  Description of Artificial Sequence: Synthetic oligonucleotide
ugccagcgugauuuccuca

SEQ ID NO: 1415158 - RNA, 19 nt, Artificial Sequence
  Description of Artificial Sequence: Synthetic oligonucleotide
agcgugauuuccucacauu

SEQ ID NO: 1415159 - RNA, 19 nt, Artificial Sequence
  Description of Artificial Sequence: Synthetic oligonucleotide
cuuauggcacaucuucacu

SEQ ID NO: 1415160 - RNA, 19 nt, Artificial Sequence
  Description of Artificial Sequence: Synthetic oligonucleotide
caacuuggagacuugggau

SEQ ID NO: 1415161 - RNA, 19 nt, Artificial Sequence
  Description of Artificial Sequence: Synthetic oligonucleotide
uaguaccgguuucucuuua

SEQ ID NO: 1415162 - RNA, 19 nt, Artificial Sequence
  Description of Artificial Sequence: Synthetic oligonucleotide
uugagcgaagagguucgaa

SEQ ID NO: 1415163 - RNA, 19 nt, Artificial Sequence
  Description of Artificial Sequence: Synthetic oligonucleotide
cugugacuaucccgccucc

SEQ ID NO: 1415164 - RNA, 19 nt, Artificial Sequence
  Description of Artificial Sequence: Synthetic oligonucleotide
ggaaugcaguggacgacgg

SEQ ID NO: 1415165 - RNA, 19 nt, Artificial Sequence
  Description of Artificial Sequence: Synthetic oligonucleotide
aaagucgcucccacauaaa

SEQ ID NO: 1415166 - RNA, 19 nt, Artificial Sequence
  Description of Artificial Sequence: Synthetic oligonucleotide
gcggcuaccgugaaugggc

SEQ ID NO: 1415167 - RNA, 19 nt, Artificial Sequence
  Description of Artificial Sequence: Synthetic oligonucleotide
aucuacacugugcccuuua

SEQ ID NO: 1415168 - RNA, 19 nt, Artificial Sequence
  Description of Artificial Sequence: Synthetic oligonucleotide
gcgaagagguucgaaauga

SEQ ID NO: 1415169 - RNA, 19 nt, Artificial Sequence
  Description of Artificial Sequence: Synthetic oligonucleotide
augcaaauucccauaucua

SEQ ID NO: 1415170 - RNA, 19 nt, Artificial Sequence
  Description of Artificial Sequence: Synthetic oligonucleotide
ugcaguggacgacgggcua

SEQ ID NO: 1415171 - RNA, 19 nt, Artificial Sequence
  Description of Artificial Sequence: Synthetic oligonucleotide
ggugucuacaaagccggac

SEQ ID NO: 1415172 - RNA, 19 nt, Artificial Sequence
  Description of Artificial Sequence: Synthetic oligonucleotide
agacuggggugaucucucu

SEQ ID NO: 1415173 - RNA, 19 nt, Artificial Sequence
  Description of Artificial Sequence: Synthetic oligonucleotide
ggccuguuauucuucaucu

SEQ ID NO: 1415174 - RNA, 19 nt, Artificial Sequence
  Description of Artificial Sequence: Synthetic oligonucleotide
cugcugugacuaucccgcc

SEQ ID NO: 1415175 - RNA, 19 nt, Artificial Sequence
  Description of Artificial Sequence: Synthetic oligonucleotide
gcgaagaagaucgccucag

SEQ ID NO: 1415176 - RNA, 19 nt, Artificial Sequence
  Description of Artificial Sequence: Synthetic oligonucleotide
uggggcucuugagcgaaga

SEQ ID NO: 1415177 - RNA, 19 nt, Artificial Sequence
  Description of Artificial Sequence: Synthetic oligonucleotide
ggaaccccacaucaugaga

SEQ ID NO: 1415178 - RNA, 19 nt, Artificial Sequence
  Description of Artificial Sequence: Synthetic oligonucleotide
gcaccacuugauaaagggc

SEQ ID NO: 1415179 - RNA, 19 nt, Artificial Sequence
  Description of Artificial Sequence: Synthetic oligonucleotide
caggcuuaucuuccuucuc

SEQ ID NO: 1415180 - RNA, 19 nt, Artificial Sequence
  Description of Artificial Sequence: Synthetic oligonucleotide
caauccucagcuucuuggu

SEQ ID NO: 1415181 - RNA, 19 nt, Artificial Sequence
  Description of Artificial Sequence: Synthetic oligonucleotide
aguggacgacgggcuacac

SEQ ID NO: 1415182 - RNA, 19 nt, Artificial Sequence
  Description of Artificial Sequence: Synthetic oligonucleotide
agcaccaugacggccuguu

SEQ ID NO: 1415183 - RNA, 19 nt, Artificial Sequence
  Description of Artificial Sequence: Synthetic oligonucleotide
aagaucgccucagcuucuu

SEQ ID NO: 1415184 - RNA, 19 nt, Artificial Sequence
  Description of Artificial Sequence: Synthetic oligonucleotide
cuucguuuucacuuuuguu

SEQ ID NO: 1415185 - RNA, 19 nt, Artificial Sequence
  Description of Artificial Sequence: Synthetic oligonucleotide
cucugaccacuucucccuc

SEQ ID NO: 1415186 - RNA, 19 nt, Artificial Sequence
  Description of Artificial Sequence: Synthetic oligonucleotide
ucgcuccauuuucuaugaa

SEQ ID NO: 1415187 - RNA, 19 nt, Artificial Sequence
  Description of Artificial Sequence: Synthetic oligonucleotide
caugauauguaggcaucua

SEQ ID NO: 1415188 - RNA, 19 nt, Artificial Sequence
  Description of Artificial Sequence: Synthetic oligonucleotide
cucucugagguuucuucgu

SEQ ID NO: 1415189 - RNA, 19 nt, Artificial Sequence
  Description of Artificial Sequence: Synthetic oligonucleotide
ggcuaccgugaaugggcgg

SEQ ID NO: 1415190 - RNA, 19 nt, Artificial Sequence
  Description of Artificial Sequence: Synthetic oligonucleotide
caugacggccuguuauucu

SEQ ID NO: 1415191 - RNA, 19 nt, Artificial Sequence
  Description of Artificial Sequence: Synthetic oligonucleotide
ggccaggcaauccucagcu

SEQ ID NO: 1415192 - RNA, 19 nt, Artificial Sequence
  Description of Artificial Sequence: Synthetic oligonucleotide
gcuccaaccuuuccugaga

SEQ ID NO: 1415193 - RNA, 19 nt, Artificial Sequence
  Description of Artificial Sequence: Synthetic oligonucleotide
cccggaaccccacaucaug

SEQ ID NO: 1415194 - RNA, 19 nt, Artificial Sequence
  Description of Artificial Sequence: Synthetic oligonucleotide
ucggucuugcugguuucau

SEQ ID NO: 1415195 - RNA, 19 nt, Artificial Sequence
  Description of Artificial Sequence: Synthetic oligonucleotide
augaagcggcuaccgugaa

SEQ ID NO: 1415196 - RNA, 19 nt, Artificial Sequence
  Description of Artificial Sequence: Synthetic oligonucleotide
guaggcaucuaaaucuguu

SEQ ID NO: 1415197 - RNA, 19 nt, Artificial Sequence
  Description of Artificial Sequence: Synthetic oligonucleotide
ccagaucuacauccccaag

SEQ ID NO: 1415198 - RNA, 19 nt, Artificial Sequence
  Description of Artificial Sequence: Synthetic oligonucleotide
agcgccuggcugccugucu

SEQ ID NO: 1415199 - RNA, 19 nt, Artificial Sequence
  Description of Artificial Sequence: Synthetic oligonucleotide
caccaugacggccuguuau

SEQ ID NO: 1415200 - RNA, 19 nt, Artificial Sequence
  Description of Artificial Sequence: Synthetic oligonucleotide
acggccuguuauucuucau

SEQ ID NO: 1415201 - RNA, 19 nt, Artificial Sequence
  Description of Artificial Sequence: Synthetic oligonucleotide
cuucuaccccggaguuaug

SEQ ID NO: 1415202 - RNA, 19 nt, Artificial Sequence
  Description of Artificial Sequence: Synthetic oligonucleotide
uggugcugacaggaauuua

SEQ ID NO: 1415203 - RNA, 19 nt, Artificial Sequence
  Description of Artificial Sequence: Synthetic oligonucleotide
gcuuagcucuuauggcaca

SEQ ID NO: 1415204 - RNA, 19 nt, Artificial Sequence
  Description of Artificial Sequence: Synthetic oligonucleotide
ccuugaaccccuuccucca

SEQ ID NO: 1415205 - RNA, 19 nt, Artificial Sequence
  Description of Artificial Sequence: Synthetic oligonucleotide
ggaucuaguggagacugcu

SEQ ID NO: 1415206 - RNA, 19 nt, Artificial Sequence
  Description of Artificial Sequence: Synthetic oligonucleotide
gucuacaaagccggaccaa

SEQ ID NO: 1415207 - RNA, 19 nt, Artificial Sequence
  Description of Artificial Sequence: Synthetic oligonucleotide
ggugaucucucugagguuu

SEQ ID NO: 1415208 - RNA, 19 nt, Artificial Sequence
  Description of Artificial Sequence: Synthetic oligonucleotide
cuacuggugcugacaggaa

SEQ ID NO: 1415209 - RNA, 19 nt, Artificial Sequence
  Description of Artificial Sequence: Synthetic oligonucleotide
ggucaccgcuaucaccuuc

SEQ ID NO: 1415210 - RNA, 19 nt, Artificial Sequence
  Description of Artificial Sequence: Synthetic oligonucleotide
agcucuuauggcacaucuu

SEQ ID NO: 1415211 - RNA, 19 nt, Artificial Sequence
  Description of Artificial Sequence: Synthetic oligonucleotide
aucuucuaccccggaguua

SEQ ID NO: 1415212 - RNA, 19 nt, Artificial Sequence
  Description of Artificial Sequence: Synthetic oligonucleotide
gacgacgggcuacaccaau

SEQ ID NO: 1415213 - RNA, 19 nt, Artificial Sequence
  Description of Artificial Sequence: Synthetic oligonucleotide
cucccucccggaaccccac

SEQ ID NO: 1415214 - RNA, 19 nt, Artificial Sequence
  Description of Artificial Sequence: Synthetic oligonucleotide
uaucuacacugugcccuuu

SEQ ID NO: 1415215 - RNA, 19 nt, Artificial Sequence
  Description of Artificial Sequence: Synthetic oligonucleotide
gcaucuaaaucuguuguuu

SEQ ID NO: 1415216 - RNA, 19 nt, Artificial Sequence
  Description of Artificial Sequence: Synthetic oligonucleotide
uaccgugaaugggcggcuc

SEQ ID NO: 1415217 - RNA, 19 nt, Artificial Sequence
  Description of Artificial Sequence: Synthetic oligonucleotide
gaagaucgccucagcuucu

SEQ ID NO: 1415218 - RNA, 19 nt, Artificial Sequence
  Description of Artificial Sequence: Synthetic oligonucleotide
ggggaaugcaguggacgac

SEQ ID NO: 1415219 - RNA, 19 nt, Artificial Sequence
  Description of Artificial Sequence: Synthetic oligonucleotide
ggagacuggggugaucucu

SEQ ID NO: 1415220 - RNA, 19 nt, Artificial Sequence
  Description of Artificial Sequence: Synthetic oligonucleotide
ccggaaccccacaucauga

SEQ ID NO: 1415221 - RNA, 19 nt, Artificial Sequence
  Description of Artificial Sequence: Synthetic oligonucleotide
ggcaucuaaaucuguuguu

SEQ ID NO: 1415222 - RNA, 19 nt, Artificial Sequence
  Description of Artificial Sequence: Synthetic oligonucleotide
cugugcccuuuauacuaaa

SEQ ID NO: 1415223 - RNA, 19 nt, Artificial Sequence
  Description of Artificial Sequence: Synthetic oligonucleotide
gcggccaggcaauccucag

SEQ ID NO: 1415224 - RNA, 19 nt, Artificial Sequence
  Description of Artificial Sequence: Synthetic oligonucleotide
cagugacuacuggugcuga

SEQ ID NO: 1415225 - RNA, 19 nt, Artificial Sequence
  Description of Artificial Sequence: Synthetic oligonucleotide
gggaucuaguggagacugc

SEQ ID NO: 1415226 - RNA, 19 nt, Artificial Sequence
  Description of Artificial Sequence: Synthetic oligonucleotide
augggcggcuccucuccuu

SEQ ID NO: 1415227 - RNA, 19 nt, Artificial Sequence
  Description of Artificial Sequence: Synthetic oligonucleotide
ggaccaacuuggagacuug

SEQ ID NO: 1415228 - RNA, 19 nt, Artificial Sequence
  Description of Artificial Sequence: Synthetic oligonucleotide
gcaguggacgacgggcuac

SEQ ID NO: 1415229 - RNA, 19 nt, Artificial Sequence
  Description of Artificial Sequence: Synthetic oligonucleotide
cuugagcgaagagguucga

SEQ ID NO: 1415230 - RNA, 19 nt, Artificial Sequence
  Description of Artificial Sequence: Synthetic oligonucleotide
cauagauguucgcuccauu

SEQ ID NO: 1415231 - RNA, 19 nt, Artificial Sequence
  Description of Artificial Sequence: Synthetic oligonucleotide
ccaugacggccuguuauuc

SEQ ID NO: 1415232 - RNA, 19 nt, Artificial Sequence
  Description of Artificial Sequence: Synthetic oligonucleotide
cucggucuugcugguuuca

SEQ ID NO: 1415233 - RNA, 19 nt, Artificial Sequence
  Description of Artificial Sequence: Synthetic oligonucleotide
cuuagcucuuauggcacau

SEQ ID NO: 1415234 - RNA, 19 nt, Artificial Sequence
  Description of Artificial Sequence: Synthetic oligonucleotide
gggcuacaccaaugagagc

SEQ ID NO: 1415235 - RNA, 19 nt, Artificial Sequence
  Description of Artificial Sequence: Synthetic oligonucleotide
aggucaccgcuaucaccuu

SEQ ID NO: 1415236 - RNA, 19 nt, Artificial Sequence
  Description of Artificial Sequence: Synthetic oligonucleotide
cggcuaccgugaaugggcg

SEQ ID NO: 1415237 - RNA, 19 nt, Artificial Sequence
  Description of Artificial Sequence: Synthetic oligonucleotide
caguggacgacgggcuaca

SEQ ID NO: 1415238 - RNA, 19 nt, Artificial Sequence
  Description of Artificial Sequence: Synthetic oligonucleotide
cagcgugauuuccucacau

SEQ ID NO: 1415239 - RNA, 19 nt, Artificial Sequence
  Description of Artificial Sequence: Synthetic oligonucleotide
gaaccccuuccuccauggu

SEQ ID NO: 1415240 - RNA, 19 nt, Artificial Sequence
  Description of Artificial Sequence: Synthetic oligonucleotide
cugcacgaggucaccgcua

SEQ ID NO: 1415241 - RNA, 19 nt, Artificial Sequence
  Description of Artificial Sequence: Synthetic oligonucleotide
gguucgaaaugaagcggcu

SEQ ID NO: 1415242 - RNA, 19 nt, Artificial Sequence
  Description of Artificial Sequence: Synthetic oligonucleotide
gcugcacgaggucaccgcu

SEQ ID NO: 1415243 - RNA, 19 nt, Artificial Sequence
  Description of Artificial Sequence: Synthetic oligonucleotide
ccucccggaaccccacauc

SEQ ID NO: 1415244 - RNA, 19 nt, Artificial Sequence
  Description of Artificial Sequence: Synthetic oligonucleotide
uagcgccuggcugccuguc

SEQ ID NO: 1415245 - RNA, 19 nt, Artificial Sequence
  Description of Artificial Sequence: Synthetic oligonucleotide
cuccgacaugcuccaaccu

SEQ ID NO: 1415246 - RNA, 19 nt, Artificial Sequence
  Description of Artificial Sequence: Synthetic oligonucleotide
cgacaugcuccaaccuuuc

SEQ ID NO: 1415247 - RNA, 19 nt, Artificial Sequence
  Description of Artificial Sequence: Synthetic oligonucleotide
caccgcuaucaccuucaua

SEQ ID NO: 1415248 - RNA, 19 nt, Artificial Sequence
  Description of Artificial Sequence: Synthetic oligonucleotide
cgacgggcuacaccaauga

SEQ ID NO: 1415249 - RNA, 19 nt, Artificial Sequence
  Description of Artificial Sequence: Synthetic oligonucleotide
ccgcuaucaccuucauaga

SEQ ID NO: 1415250 - RNA, 19 nt, Artificial Sequence
  Description of Artificial Sequence: Synthetic oligonucleotide
gcuacaccaaugagagccu

SEQ ID NO: 1415251 - RNA, 19 nt, Artificial Sequence
  Description of Artificial Sequence: Synthetic oligonucleotide
cuagcgccuggcugccugu

SEQ ID NO: 1415252 - RNA, 19 nt, Artificial Sequence
  Description of Artificial Sequence: Synthetic oligonucleotide
cuaccgugaaugggcggcu

SEQ ID NO: 1415253 - RNA, 19 nt, Artificial Sequence
  Description of Artificial Sequence: Synthetic oligonucleotide
ccuuuauacuaaagugcuu

SEQ ID NO: 1415254 - RNA, 19 nt, Artificial Sequence
  Description of Artificial Sequence: Synthetic oligonucleotide
gccucggucuugcugguuu

SEQ ID NO: 1415255 - RNA, 19 nt, Artificial Sequence
  Description of Artificial Sequence: Synthetic oligonucleotide
cuacaccaaugagagccuu

SEQ ID NO: 1415256 - RNA, 19 nt, Artificial Sequence
  Description of Artificial Sequence: Synthetic oligonucleotide
gcacgaggucaccgcuauc

SEQ ID NO: 1415257 - RNA, 19 nt, Artificial Sequence
  Description of Artificial Sequence: Synthetic oligonucleotide
cgugaaugggcggcuccuc

SEQ ID NO: 1415258 - RNA, 19 nt, Artificial Sequence
  Description of Artificial Sequence: Synthetic oligonucleotide
ccacuugauaaagggcagu

SEQ ID NO: 1415259 - RNA, 19 nt, Artificial Sequence
  Description of Artificial Sequence: Synthetic oligonucleotide
ccccacaucaugagauuuu

SEQ ID NO: 1415260 - RNA, 19 nt, Artificial Sequence
  Description of Artificial Sequence: Synthetic oligonucleotide
cggaccaacuuggagacuu

SEQ ID NO: 1415261 - RNA, 19 nt, Artificial Sequence
  Description of Artificial Sequence: Synthetic oligonucleotide
ccgcugccagcgugauuuc

SEQ ID NO: 1415262 - RNA, 19 nt, Artificial Sequence
  Description of Artificial Sequence: Synthetic oligonucleotide
ccgugaaugggcggcuccu

SEQ ID NO: 1415263 - RNA, 19 nt, Artificial Sequence
  Description of Artificial Sequence: Synthetic oligonucleotide
ccggaccaacuuggagacu

SEQ ID NO: 1415264 - RNA, 19 nt, Artificial Sequence
  Description of Artificial Sequence: Synthetic oligonucleotide
aaagauugcauuuuaguag

SEQ ID NO: 1415265 - RNA, 19 nt, Artificial Sequence
  Description of Artificial Sequence: Synthetic oligonucleotide
aagaagcucaaauggaccc

SEQ ID NO: 1415266 - RNA, 19 nt, Artificial Sequence
  Description of Artificial Sequence: Synthetic oligonucleotide
aaaccaagcucacagguac

SEQ ID NO: 1415267 - RNA, 19 nt, Artificial Sequence
  Description of Artificial Sequence: Synthetic oligonucleotide
acaaaagucgaccagggac

SEQ ID NO: 1415268 - RNA, 19 nt, Artificial Sequence
  Description of Artificial Sequence: Synthetic oligonucleotide
auugcauuuuaguagaguc

SEQ ID NO: 1415269 - RNA, 19 nt, Artificial Sequence
  Description of Artificial Sequence: Synthetic oligonucleotide
aauacuaccguauggccag

SEQ ID NO: 1415270 - RNA, 19 nt, Artificial Sequence
  Description of Artificial Sequence: Synthetic oligonucleotide
ugagauauggcaccaagag

SEQ ID NO: 1415271 - RNA, 19 nt, Artificial Sequence
  Description of Artificial Sequence: Synthetic oligonucleotide
uuuacaaaagucgaccagg

SEQ ID NO: 1415272 - RNA, 19 nt, Artificial Sequence
  Description of Artificial Sequence: Synthetic oligonucleotide
aaaagauugcauuuuagua

SEQ ID NO: 1415273 - RNA, 19 nt, Artificial Sequence
  Description of Artificial Sequence: Synthetic oligonucleotide
uguaguauccagcccaacg

SEQ ID NO: 1415274 - RNA, 19 nt, Artificial Sequence
  Description of Artificial Sequence: Synthetic oligonucleotide
aguagagucaauucauagg

SEQ ID NO: 1415275 - RNA, 19 nt, Artificial Sequence
  Description of Artificial Sequence: Synthetic oligonucleotide
uaucacugauuucucaugg

SEQ ID NO: 1415276 - RNA, 19 nt, Artificial Sequence
  Description of Artificial Sequence: Synthetic oligonucleotide
auuuuaguagagucaauuc

SEQ ID NO: 1415277 - RNA, 19 nt, Artificial Sequence
  Description of Artificial Sequence: Synthetic oligonucleotide
aagauugcauuuuaguaga

SEQ ID NO: 1415278 - RNA, 19 nt, Artificial Sequence
  Description of Artificial Sequence: Synthetic oligonucleotide
uucacgauaaauccaggag

SEQ ID NO: 1415279 - RNA, 19 nt, Artificial Sequence
  Description of Artificial Sequence: Synthetic oligonucleotide
aaauggacccaucggguac

SEQ ID NO: 1415280 - RNA, 19 nt, Artificial Sequence
  Description of Artificial Sequence: Synthetic oligonucleotide
aguggaggaaucuuauuac

SEQ ID NO: 1415281 - RNA, 19 nt, Artificial Sequence
  Description of Artificial Sequence: Synthetic oligonucleotide
ucaaaugauuacuucagac

SEQ ID NO: 1415282 - RNA, 19 nt, Artificial Sequence
  Description of Artificial Sequence: Synthetic oligonucleotide
ugaucugcagagaagaggu

SEQ ID NO: 1415283 - RNA, 19 nt, Artificial Sequence
  Description of Artificial Sequence: Synthetic oligonucleotide
agagaaucagaucucagug

SEQ ID NO: 1415284 - RNA, 19 nt, Artificial Sequence
  Description of Artificial Sequence: Synthetic oligonucleotide
uguuuuaaugaucuccaca

SEQ ID NO: 1415285 - RNA, 19 nt, Artificial Sequence
  Description of Artificial Sequence: Synthetic oligonucleotide
uacucauuugaacagacaa

SEQ ID NO: 1415286 - RNA, 19 nt, Artificial Sequence
  Description of Artificial Sequence: Synthetic oligonucleotide
cuuagaugcaccuguaggc

SEQ ID NO: 1415287 - RNA, 19 nt, Artificial Sequence
  Description of Artificial Sequence: Synthetic oligonucleotide
uuuaguagagucaauucau

SEQ ID NO: 1415288 - RNA, 19 nt, Artificial Sequence
  Description of Artificial Sequence: Synthetic oligonucleotide
ugggauauuccccauagac

SEQ ID NO: 1415289 - RNA, 19 nt, Artificial Sequence
  Description of Artificial Sequence: Synthetic oligonucleotide
guccuugcaagauacaggg

SEQ ID NO: 1415290 - RNA, 19 nt, Artificial Sequence
  Description of Artificial Sequence: Synthetic oligonucleotide
agaugcaucgccucgcucg

SEQ ID NO: 1415291 - RNA, 19 nt, Artificial Sequence
  Description of Artificial Sequence: Synthetic oligonucleotide
gacgguucacgauaaaucc

SEQ ID NO: 1415292 - RNA, 19 nt, Artificial Sequence
  Description of Artificial Sequence: Synthetic oligonucleotide
uaugagauauggcaccaag

SEQ ID NO: 1415293 - RNA, 19 nt, Artificial Sequence
  Description of Artificial Sequence: Synthetic oligonucleotide
ucaagaagcucaaauggac

SEQ ID NO: 1415294 - RNA, 19 nt, Artificial Sequence
  Description of Artificial Sequence: Synthetic oligonucleotide
uagucaaaugauuacuuca

SEQ ID NO: 1415295 - RNA, 19 nt, Artificial Sequence
  Description of Artificial Sequence: Synthetic oligonucleotide
ugauuuuauguuauguaaa

SEQ ID NO: 1415296 - RNA, 19 nt, Artificial Sequence
  Description of Artificial Sequence: Synthetic oligonucleotide
ucgaccagggacucgaacg

SEQ ID NO: 1415297 - RNA, 19 nt, Artificial Sequence
  Description of Artificial Sequence: Synthetic oligonucleotide
ucuuauuacugcaacuagu

SEQ ID NO: 1415298 - RNA, 19 nt, Artificial Sequence
  Description of Artificial Sequence: Synthetic oligonucleotide
agaugaacuuuguaguauc

SEQ ID NO: 1415299 - RNA, 19 nt, Artificial Sequence
  Description of Artificial Sequence: Synthetic oligonucleotide
guaggcuaaggcuugaggc

SEQ ID NO: 1415300 - RNA, 19 nt, Artificial Sequence
  Description of Artificial Sequence: Synthetic oligonucleotide
uaguagagucaauucauag

SEQ ID NO: 1415301 - RNA, 19 nt, Artificial Sequence
  Description of Artificial Sequence: Synthetic oligonucleotide
uuggcuaugcuugugaucu

SEQ ID NO: 1415302 - RNA, 19 nt, Artificial Sequence
  Description of Artificial Sequence: Synthetic oligonucleotide
uaugcuugugaucugcaga

SEQ ID NO: 1415303 - RNA, 19 nt, Artificial Sequence
  Description of Artificial Sequence: Synthetic oligonucleotide
agacuguauguucugcagc

SEQ ID NO: 1415304 - RNA, 19 nt, Artificial Sequence
  Description of Artificial Sequence: Synthetic oligonucleotide
ugugcuaugcaccacggau

SEQ ID NO: 1415305 - RNA, 19 nt, Artificial Sequence
  Description of Artificial Sequence: Synthetic oligonucleotide
uccccagaaaccaagcuca

SEQ ID NO: 1415306 - RNA, 19 nt, Artificial Sequence
  Description of Artificial Sequence: Synthetic oligonucleotide
cuugcaagcaccacccagg

SEQ ID NO: 1415307 - RNA, 19 nt, Artificial Sequence
  Description of Artificial Sequence: Synthetic oligonucleotide
aaggacugggcugaaagag

SEQ ID NO: 1415308 - RNA, 19 nt, Artificial Sequence
  Description of Artificial Sequence: Synthetic oligonucleotide
aaucuuauuacugcaacua

SEQ ID NO: 1415309 - RNA, 19 nt, Artificial Sequence
  Description of Artificial Sequence: Synthetic oligonucleotide
acugauuucucauggaaaa

SEQ ID NO: 1415310 - RNA, 19 nt, Artificial Sequence
  Description of Artificial Sequence: Synthetic oligonucleotide
agcucacagguacucaacc

SEQ ID NO: 1415311 - RNA, 19 nt, Artificial Sequence
  Description of Artificial Sequence: Synthetic oligonucleotide
agaaaccaagcucacaggu

SEQ ID NO: 1415312 - RNA, 19 nt, Artificial Sequence
  Description of Artificial Sequence: Synthetic oligonucleotide
aacuagucaaaugauuacu

SEQ ID NO: 1415313 - RNA, 19 nt, Artificial Sequence
  Description of Artificial Sequence: Synthetic oligonucleotide
uugcauuuuaguagaguca

SEQ ID NO: 1415314 - RNA, 19 nt, Artificial Sequence
  Description of Artificial Sequence: Synthetic oligonucleotide
aucuuauuacugcaacuag

SEQ ID NO: 1415315 - RNA, 19 nt, Artificial Sequence
  Description of Artificial Sequence: Synthetic oligonucleotide
ucaaauggacccaucgggu

SEQ ID NO: 1415316 - RNA, 19 nt, Artificial Sequence
  Description of Artificial Sequence: Synthetic oligonucleotide
caaaugauuacuucagaca

SEQ ID NO: 1415317 - RNA, 19 nt, Artificial Sequence
  Description of Artificial Sequence: Synthetic oligonucleotide
aguaucaauauccucuuua

SEQ ID NO: 1415318 - RNA, 19 nt, Artificial Sequence
  Description of Artificial Sequence: Synthetic oligonucleotide
caagaagcucaaauggacc

SEQ ID NO: 1415319 - RNA, 19 nt, Artificial Sequence
  Description of Artificial Sequence: Synthetic oligonucleotide
uuauucauggaaggacugg

SEQ ID NO: 1415320 - RNA, 19 nt, Artificial Sequence
  Description of Artificial Sequence: Synthetic oligonucleotide
aauggacccaucggguacc

SEQ ID NO: 1415321 - RNA, 19 nt, Artificial Sequence
  Description of Artificial Sequence: Synthetic oligonucleotide
cacgauaaauccaggagug

SEQ ID NO: 1415322 - RNA, 19 nt, Artificial Sequence
  Description of Artificial Sequence: Synthetic oligonucleotide
cucuaugagauauggcacc

SEQ ID NO: 1415323 - RNA, 19 nt, Artificial Sequence
  Description of Artificial Sequence: Synthetic oligonucleotide
aaaucggucuugucgggug

SEQ ID NO: 1415324 - RNA, 19 nt, Artificial Sequence
  Description of Artificial Sequence: Synthetic oligonucleotide
uuacagaguaaaagauugc

SEQ ID NO: 1415325 - RNA, 19 nt, Artificial Sequence
  Description of Artificial Sequence: Synthetic oligonucleotide
cuuggauuuugccaggaug

SEQ ID NO: 1415326 - RNA, 19 nt, Artificial Sequence
  Description of Artificial Sequence: Synthetic oligonucleotide
agcaacauggcauacucau

SEQ ID NO: 1415327 - RNA, 19 nt, Artificial Sequence
  Description of Artificial Sequence: Synthetic oligonucleotide
cuuuagaugcaucgccucg

SEQ ID NO: 1415328 - RNA, 19 nt, Artificial Sequence
  Description of Artificial Sequence: Synthetic oligonucleotide
ugcauuuuaguagagucaa

SEQ ID NO: 1415329 - RNA, 19 nt, Artificial Sequence
  Description of Artificial Sequence: Synthetic oligonucleotide
uguuugguccaccaauacu

SEQ ID NO: 1415330 - RNA, 19 nt, Artificial Sequence
  Description of Artificial Sequence: Synthetic oligonucleotide
ggcaaaucggucuugucgg

SEQ ID NO: 1415331 - RNA, 19 nt, Artificial Sequence
  Description of Artificial Sequence: Synthetic oligonucleotide
aaucggucuugucgggugg

SEQ ID NO: 1415332 - RNA, 19 nt, Artificial Sequence
  Description of Artificial Sequence: Synthetic oligonucleotide
agacgguucacgauaaauc

SEQ ID NO: 1415333 - RNA, 19 nt, Artificial Sequence
  Description of Artificial Sequence: Synthetic oligonucleotide
gguuuuacaaaagucgacc

SEQ ID NO: 1415334 - RNA, 19 nt, Artificial Sequence
  Description of Artificial Sequence: Synthetic oligonucleotide
aacgucuucuggcuaguca

SEQ ID NO: 1415335 - RNA, 19 nt, Artificial Sequence
  Description of Artificial Sequence: Synthetic oligonucleotide
uuacuucagacagacuugc

SEQ ID NO: 1415336 - RNA, 19 nt, Artificial Sequence
  Description of Artificial Sequence: Synthetic oligonucleotide
gacuguauguucugcagca

SEQ ID NO: 1415337 - RNA, 19 nt, Artificial Sequence
  Description of Artificial Sequence: Synthetic oligonucleotide
uccuaagguuuuacaaaag

SEQ ID NO: 1415338 - RNA, 19 nt, Artificial Sequence
  Description of Artificial Sequence: Synthetic oligonucleotide
cuagucaaaugauuacuuc

SEQ ID NO: 1415339 - RNA, 19 nt, Artificial Sequence
  Description of Artificial Sequence: Synthetic oligonucleotide
caacuagucaaaugauuac

SEQ ID NO: 1415340 - RNA, 19 nt, Artificial Sequence
  Description of Artificial Sequence: Synthetic oligonucleotide
acagacuugcaaaggaggg

SEQ ID NO: 1415341 - RNA, 19 nt, Artificial Sequence
  Description of Artificial Sequence: Synthetic oligonucleotide
ucgaacgucuucuggcuag

SEQ ID NO: 1415342 - RNA, 19 nt, Artificial Sequence
  Description of Artificial Sequence: Synthetic oligonucleotide
aaaagucgaccagggacuc

SEQ ID NO: 1415343 - RNA, 19 nt, Artificial Sequence
  Description of Artificial Sequence: Synthetic oligonucleotide
ucuugaagcaucacuugua

SEQ ID NO: 1415344 - RNA, 19 nt, Artificial Sequence
  Description of Artificial Sequence: Synthetic oligonucleotide
cuuuccuaagguuuuacaa

SEQ ID NO: 1415345 - RNA, 19 nt, Artificial Sequence
  Description of Artificial Sequence: Synthetic oligonucleotide
uuccccagaaaccaagcuc

SEQ ID NO: 1415346 - RNA, 19 nt, Artificial Sequence
  Description of Artificial Sequence: Synthetic oligonucleotide
cuaccguauggccaguugc

SEQ ID NO: 1415347 - RNA, 19 nt, Artificial Sequence
  Description of Artificial Sequence: Synthetic oligonucleotide
uuaguagagucaauucaua

SEQ ID NO: 1415348 - RNA, 19 nt, Artificial Sequence
  Description of Artificial Sequence: Synthetic oligonucleotide
gugaucugcagagaagagg

SEQ ID NO: 1415349 - RNA, 19 nt, Artificial Sequence
  Description of Artificial Sequence: Synthetic oligonucleotide
gaggaaucuuauuacugca

SEQ ID NO: 1415350 - RNA, 19 nt, Artificial Sequence
  Description of Artificial Sequence: Synthetic oligonucleotide
agagccuuuucugauguag

SEQ ID NO: 1415351 - RNA, 19 nt, Artificial Sequence
  Description of Artificial Sequence: Synthetic oligonucleotide
uguccugaugagaaguaaa

SEQ ID NO: 1415352 - RNA, 19 nt, Artificial Sequence
  Description of Artificial Sequence: Synthetic oligonucleotide
gucugugcuaugcaccacg

SEQ ID NO: 1415353 - RNA, 19 nt, Artificial Sequence
  Description of Artificial Sequence: Synthetic oligonucleotide
ucaucgguguuuuaaugau

SEQ ID NO: 1415354 - RNA, 19 nt, Artificial Sequence
  Description of Artificial Sequence: Synthetic oligonucleotide
uucgccacaaacucaucac

SEQ ID NO: 1415355 - RNA, 19 nt, Artificial Sequence
  Description of Artificial Sequence: Synthetic oligonucleotide
acggaugcugcgucagugc

SEQ ID NO: 1415356 - RNA, 19 nt, Artificial Sequence
  Description of Artificial Sequence: Synthetic oligonucleotide
ugcaccuguaggcacgaug

SEQ ID NO: 1415357 - RNA, 19 nt, Artificial Sequence
  Description of Artificial Sequence: Synthetic oligonucleotide
ugcaacuagucaaaugauu

SEQ ID NO: 1415358 - RNA, 19 nt, Artificial Sequence
  Description of Artificial Sequence: Synthetic oligonucleotide
uuugguccaccaauacuac

SEQ ID NO: 1415359 - RNA, 19 nt, Artificial Sequence
  Description of Artificial Sequence: Synthetic oligonucleotide
agucaucgguguuuuaaug

SEQ ID NO: 1415360 - RNA, 19 nt, Artificial Sequence
  Description of Artificial Sequence: Synthetic oligonucleotide
aucgguguuuuaaugaucu

SEQ ID NO: 1415361 - RNA, 19 nt, Artificial Sequence
  Description of Artificial Sequence: Synthetic oligonucleotide
gaauuggcuaugcuuguga

SEQ ID NO: 1415362 - RNA, 19 nt, Artificial Sequence
  Description of Artificial Sequence: Synthetic oligonucleotide
caagcuucaucauggggac

SEQ ID NO: 1415363 - RNA, 19 nt, Artificial Sequence
  Description of Artificial Sequence: Synthetic oligonucleotide
aaugauuacuucagacaga

SEQ ID NO: 1415364 - RNA, 19 nt, Artificial Sequence
  Description of Artificial Sequence: Synthetic oligonucleotide
aagauuugaauggccacaa

SEQ ID NO: 1415365 - RNA, 19 nt, Artificial Sequence
  Description of Artificial Sequence: Synthetic oligonucleotide
uaugcaccacggaugcugc

SEQ ID NO: 1415366 - RNA, 19 nt, Artificial Sequence
  Description of Artificial Sequence: Synthetic oligonucleotide
gucaucgguguuuuaauga

SEQ ID NO: 1415367 - RNA, 19 nt, Artificial Sequence
  Description of Artificial Sequence: Synthetic oligonucleotide
ucuaugagauauggcacca

SEQ ID NO: 1415368 - RNA, 19 nt, Artificial Sequence
  Description of Artificial Sequence: Synthetic oligonucleotide
ccagauuauucauggaagg

SEQ ID NO: 1415369 - RNA, 19 nt, Artificial Sequence
  Description of Artificial Sequence: Synthetic oligonucleotide
caccaauacuaccguaugg

SEQ ID NO: 1415370 - RNA, 19 nt, Artificial Sequence
  Description of Artificial Sequence: Synthetic oligonucleotide
agguuuuacaaaagucgac

SEQ ID NO: 1415371 - RNA, 19 nt, Artificial Sequence
  Description of Artificial Sequence: Synthetic oligonucleotide
uggccucuaugagauaugg

SEQ ID NO: 1415372 - RNA, 19 nt, Artificial Sequence
  Description of Artificial Sequence: Synthetic oligonucleotide
gccucuaugagauauggca

SEQ ID NO: 1415373 - RNA, 19 nt, Artificial Sequence
  Description of Artificial Sequence: Synthetic oligonucleotide
ucuggcuagucaucggugu

SEQ ID NO: 1415374 - RNA, 19 nt, Artificial Sequence
  Description of Artificial Sequence: Synthetic oligonucleotide
agaauguaggcuaaggcuu

SEQ ID NO: 1415375 - RNA, 19 nt, Artificial Sequence
  Description of Artificial Sequence: Synthetic oligonucleotide
ggaaucuuauuacugcaac

SEQ ID NO: 1415376 - RNA, 19 nt, Artificial Sequence
  Description of Artificial Sequence: Synthetic oligonucleotide
cugaugagaaguaaacaaa

SEQ ID NO: 1415377 - RNA, 19 nt, Artificial Sequence
  Description of Artificial Sequence: Synthetic oligonucleotide
uucuggcuagucaucggug

SEQ ID NO: 1415378 - RNA, 19 nt, Artificial Sequence
  Description of Artificial Sequence: Synthetic oligonucleotide
guaggcaaggccucagaug

SEQ ID NO: 1415379 - RNA, 19 nt, Artificial Sequence
  Description of Artificial Sequence: Synthetic oligonucleotide
ucguguagccugauggccu

SEQ ID NO: 1415380 - RNA, 19 nt, Artificial Sequence
  Description of Artificial Sequence: Synthetic oligonucleotide
accaagagacgguucacga

SEQ ID NO: 1415381 - RNA, 19 nt, Artificial Sequence
  Description of Artificial Sequence: Synthetic oligonucleotide
agauacagggugcuuuccu

SEQ ID NO: 1415382 - RNA, 19 nt, Artificial Sequence
  Description of Artificial Sequence: Synthetic oligonucleotide
cuaugcuugugaucugcag

SEQ ID NO: 1415383 - RNA, 19 nt, Artificial Sequence
  Description of Artificial Sequence: Synthetic oligonucleotide
uucaugccacccauccaag

SEQ ID NO: 1415384 - RNA, 19 nt, Artificial Sequence
  Description of Artificial Sequence: Synthetic oligonucleotide
guucacgauaaauccagga

SEQ ID NO: 1415385 - RNA, 19 nt, Artificial Sequence
  Description of Artificial Sequence: Synthetic oligonucleotide
uaccguauggccaguugcu

SEQ ID NO: 1415386 - RNA, 19 nt, Artificial Sequence
  Description of Artificial Sequence: Synthetic oligonucleotide
gaauguaggcuaaggcuug

SEQ ID NO: 1415387 - RNA, 19 nt, Artificial Sequence
  Description of Artificial Sequence: Synthetic oligonucleotide
ugcuggcaaagacuguaug

SEQ ID NO: 1415388 - RNA, 19 nt, Artificial Sequence
  Description of Artificial Sequence: Synthetic oligonucleotide
agcuucaucauggggacug

SEQ ID NO: 1415389 - RNA, 19 nt, Artificial Sequence
  Description of Artificial Sequence: Synthetic oligonucleotide
ggcacgaugguuccuaccc

SEQ ID NO: 1415390 - RNA, 19 nt, Artificial Sequence
  Description of Artificial Sequence: Synthetic oligonucleotide
ccaggguucaauaccaagc

SEQ ID NO: 1415391 - RNA, 19 nt, Artificial Sequence
  Description of Artificial Sequence: Synthetic oligonucleotide
uuagaugcaucgccucgcu

SEQ ID NO: 1415392 - RNA, 19 nt, Artificial Sequence
  Description of Artificial Sequence: Synthetic oligonucleotide
ugucgggugguggaauugg

SEQ ID NO: 1415393 - RNA, 19 nt, Artificial Sequence
  Description of Artificial Sequence: Synthetic oligonucleotide
gaaucuuauuacugcaacu

SEQ ID NO: 1415394 - RNA, 19 nt, Artificial Sequence
  Description of Artificial Sequence: Synthetic oligonucleotide
caagauacagggugcuuuc

SEQ ID NO: 1415395 - RNA, 19 nt, Artificial Sequence
  Description of Artificial Sequence: Synthetic oligonucleotide
ugguaucacugauuucuca

SEQ ID NO: 1415396 - RNA, 19 nt, Artificial Sequence
  Description of Artificial Sequence: Synthetic oligonucleotide
aagucgaccagggacucga

SEQ ID NO: 1415397 - RNA, 19 nt, Artificial Sequence
  Description of Artificial Sequence: Synthetic oligonucleotide
gucuucuggcuagucaucg

SEQ ID NO: 1415398 - RNA, 19 nt, Artificial Sequence
  Description of Artificial Sequence: Synthetic oligonucleotide
acaaaagcagagaaucaga

SEQ ID NO: 1415399 - RNA, 19 nt, Artificial Sequence
  Description of Artificial Sequence: Synthetic oligonucleotide
gccgaugacugucacaugc

SEQ ID NO: 1415400 - RNA, 19 nt, Artificial Sequence
  Description of Artificial Sequence: Synthetic oligonucleotide
gaguguccuugcaagauac

SEQ ID NO: 1415401 - RNA, 19 nt, Artificial Sequence
  Description of Artificial Sequence: Synthetic oligonucleotide
aguauccagcccaacguag

SEQ ID NO: 1415402 - RNA, 19 nt, Artificial Sequence
  Description of Artificial Sequence: Synthetic oligonucleotide
aucgccucgcucguguagc

SEQ ID NO: 1415403 - RNA, 19 nt, Artificial Sequence
  Description of Artificial Sequence: Synthetic oligonucleotide
acucgaacgucuucuggcu

SEQ ID NO: 1415404 - RNA, 19 nt, Artificial Sequence
  Description of Artificial Sequence: Synthetic oligonucleotide
cacaugcuugaucaggauc

SEQ ID NO: 1415405 - RNA, 19 nt, Artificial Sequence
  Description of Artificial Sequence: Synthetic oligonucleotide
caucacuuguauuuguaaa

SEQ ID NO: 1415406 - RNA, 19 nt, Artificial Sequence
  Description of Artificial Sequence: Synthetic oligonucleotide
uaguauccagcccaacgua

SEQ ID NO: 1415407 - RNA, 19 nt, Artificial Sequence
  Description of Artificial Sequence: Synthetic oligonucleotide
ccccauagacucuugaagc

SEQ ID NO: 1415408 - RNA, 19 nt, Artificial Sequence
  Description of Artificial Sequence: Synthetic oligonucleotide
gcucaaauggacccaucgg

SEQ ID NO: 1415409 - RNA, 19 nt, Artificial Sequence
  Description of Artificial Sequence: Synthetic oligonucleotide
uagaugcaccuguaggcac

SEQ ID NO: 1415410 - RNA, 19 nt, Artificial Sequence
  Description of Artificial Sequence: Synthetic oligonucleotide
agcaagccuugcaagcacc

SEQ ID NO: 1415411 - RNA, 19 nt, Artificial Sequence
  Description of Artificial Sequence: Synthetic oligonucleotide
caauaccaagcaacauggc

SEQ ID NO: 1415412 - RNA, 19 nt, Artificial Sequence
  Description of Artificial Sequence: Synthetic oligonucleotide
aggcacgaugguuccuacc

SEQ ID NO: 1415413 - RNA, 19 nt, Artificial Sequence
  Description of Artificial Sequence: Synthetic oligonucleotide
uggaauuggcuaugcuugu

SEQ ID NO: 1415414 - RNA, 19 nt, Artificial Sequence
  Description of Artificial Sequence: Synthetic oligonucleotide
augaacuuuguaguaucca

SEQ ID NO: 1415415 - RNA, 19 nt, Artificial Sequence
  Description of Artificial Sequence: Synthetic oligonucleotide
caccagauuauucauggaa

SEQ ID NO: 1415416 - RNA, 19 nt, Artificial Sequence
  Description of Artificial Sequence: Synthetic oligonucleotide
auuucaugccacccaucca

SEQ ID NO: 1415417 - RNA, 19 nt, Artificial Sequence
  Description of Artificial Sequence: Synthetic oligonucleotide
uccagcccaacguagucaa

SEQ ID NO: 1415418 - RNA, 19 nt, Artificial Sequence
  Description of Artificial Sequence: Synthetic oligonucleotide
aaagucgaccagggacucg

SEQ ID NO: 1415419 - RNA, 19 nt, Artificial Sequence
  Description of Artificial Sequence: Synthetic oligonucleotide
ccagaauguaggcuaaggc

SEQ ID NO: 1415420 - RNA, 19 nt, Artificial Sequence
  Description of Artificial Sequence: Synthetic oligonucleotide
guaguauccagcccaacgu

SEQ ID NO: 1415421 - RNA, 19 nt, Artificial Sequence
  Description of Artificial Sequence: Synthetic oligonucleotide
caggguucaauaccaagca

SEQ ID NO: 1415422 - RNA, 19 nt, Artificial Sequence
  Description of Artificial Sequence: Synthetic oligonucleotide
ugcaucgccucgcucgugu

SEQ ID NO: 1415423 - RNA, 19 nt, Artificial Sequence
  Description of Artificial Sequence: Synthetic oligonucleotide
gucaagaagcucaaaugga

SEQ ID NO: 1415424 - RNA, 19 nt, Artificial Sequence
  Description of Artificial Sequence: Synthetic oligonucleotide
caaaagucgaccagggacu

SEQ ID NO: 1415425 - RNA, 19 nt, Artificial Sequence
  Description of Artificial Sequence: Synthetic oligonucleotide
agaugcaccuguaggcacg

SEQ ID NO: 1415426 - RNA, 19 nt, Artificial Sequence
  Description of Artificial Sequence: Synthetic oligonucleotide
acuagucaaaugauuacuu

SEQ ID NO: 1415427 - RNA, 19 nt, Artificial Sequence
  Description of Artificial Sequence: Synthetic oligonucleotide
cuucgccacaaacucauca

SEQ ID NO: 1415428 - RNA, 19 nt, Artificial Sequence
  Description of Artificial Sequence: Synthetic oligonucleotide
cucguguagccugauggcc

SEQ ID NO: 1415429 - RNA, 19 nt, Artificial Sequence
  Description of Artificial Sequence: Synthetic oligonucleotide
guccugaugagaaguaaac

SEQ ID NO: 1415430 - RNA, 19 nt, Artificial Sequence
  Description of Artificial Sequence: Synthetic oligonucleotide
caagagacgguucacgaua

SEQ ID NO: 1415431 - RNA, 19 nt, Artificial Sequence
  Description of Artificial Sequence: Synthetic oligonucleotide
ccaauacuaccguauggcc

SEQ ID NO: 1415432 - RNA, 19 nt, Artificial Sequence
  Description of Artificial Sequence: Synthetic oligonucleotide
auuccccauagacucuuga

SEQ ID NO: 1415433 - RNA, 19 nt, Artificial Sequence
  Description of Artificial Sequence: Synthetic oligonucleotide
guggaggccggcaaaucgg

SEQ ID NO: 1415434 - RNA, 19 nt, Artificial Sequence
  Description of Artificial Sequence: Synthetic oligonucleotide
uacuucagacagacuugca

SEQ ID NO: 1415435 - RNA, 19 nt, Artificial Sequence
  Description of Artificial Sequence: Synthetic oligonucleotide
ggacccaucggguacccag

SEQ ID NO: 1415436 - RNA, 19 nt, Artificial Sequence
  Description of Artificial Sequence: Synthetic oligonucleotide
caucgguguuuuaaugauc

SEQ ID NO: 1415437 - RNA, 19 nt, Artificial Sequence
  Description of Artificial Sequence: Synthetic oligonucleotide
cuguuugguccaccaauac

SEQ ID NO: 1415438 - RNA, 19 nt, Artificial Sequence
  Description of Artificial Sequence: Synthetic oligonucleotide
ccucuaugagauauggcac

SEQ ID NO: 1415439 - RNA, 19 nt, Artificial Sequence
  Description of Artificial Sequence: Synthetic oligonucleotide
accugcgcgaugcccgcgc

SEQ ID NO: 1415440 - RNA, 19 nt, Artificial Sequence
  Description of Artificial Sequence: Synthetic oligonucleotide
guacccagcucccaacuuc

SEQ ID NO: 1415441 - RNA, 19 nt, Artificial Sequence
  Description of Artificial Sequence: Synthetic oligonucleotide
augagauauggcaccaaga

SEQ ID NO: 1415442 - RNA, 19 nt, Artificial Sequence
  Description of Artificial Sequence: Synthetic oligonucleotide
gugcgcucauccuuguccc

SEQ ID NO: 1415443 - RNA, 19 nt, Artificial Sequence
  Description of Artificial Sequence: Synthetic oligonucleotide
cuagucaucgguguuuuaa

SEQ ID NO: 1415444 - RNA, 19 nt, Artificial Sequence
  Description of Artificial Sequence: Synthetic oligonucleotide
ccuguaggcacgaugguuc

SEQ ID NO: 1415445 - RNA, 19 nt, Artificial Sequence
  Description of Artificial Sequence: Synthetic oligonucleotide
uggaggccggcaaaucggu

SEQ ID NO: 1415446 - RNA, 19 nt, Artificial Sequence
  Description of Artificial Sequence: Synthetic oligonucleotide
cagauuauucauggaagga

SEQ ID NO: 1415447 - RNA, 19 nt, Artificial Sequence
  Description of Artificial Sequence: Synthetic oligonucleotide
ugguggaauuggcuaugcu

SEQ ID NO: 1415448 - RNA, 19 nt, Artificial Sequence
  Description of Artificial Sequence: Synthetic oligonucleotide
ggauuuugccaggaugucc

SEQ ID NO: 1415449 - RNA, 19 nt, Artificial Sequence
  Description of Artificial Sequence: Synthetic oligonucleotide
gggucuucgccacaaacuc

SEQ ID NO: 1415450 - RNA, 19 nt, Artificial Sequence
  Description of Artificial Sequence: Synthetic oligonucleotide
ggacucgaacgucuucugg

SEQ ID NO: 1415451 - RNA, 19 nt, Artificial Sequence
  Description of Artificial Sequence: Synthetic oligonucleotide
cagagaaucagaucucagu

SEQ ID NO: 1415452 - RNA, 19 nt, Artificial Sequence
  Description of Artificial Sequence: Synthetic oligonucleotide
gcaacuagucaaaugauua

SEQ ID NO: 1415453 - RNA, 19 nt, Artificial Sequence
  Description of Artificial Sequence: Synthetic oligonucleotide
gacucuugaagcaucacuu

SEQ ID NO: 1415454 - RNA, 19 nt, Artificial Sequence
  Description of Artificial Sequence: Synthetic oligonucleotide
uccuugcaagauacagggu

SEQ ID NO: 1415455 - RNA, 19 nt, Artificial Sequence
  Description of Artificial Sequence: Synthetic oligonucleotide
cggcaaaucggucuugucg

SEQ ID NO: 1415456 - RNA, 19 nt, Artificial Sequence
  Description of Artificial Sequence: Synthetic oligonucleotide
gauugcauuuuaguagagu

SEQ ID NO: 1415457 - RNA, 19 nt, Artificial Sequence
  Description of Artificial Sequence: Synthetic oligonucleotide
ugcuuuccuaagguuuuac

SEQ ID NO: 1415458 - RNA, 19 nt, Artificial Sequence
  Description of Artificial Sequence: Synthetic oligonucleotide
ugcaccacggaugcugcgu

SEQ ID NO: 1415459 - RNA, 19 nt, Artificial Sequence
  Description of Artificial Sequence: Synthetic oligonucleotide
agcccaacguagucaagaa

SEQ ID NO: 1415460 - RNA, 19 nt, Artificial Sequence
  Description of Artificial Sequence: Synthetic oligonucleotide
aagcucaaauggacccauc

SEQ ID NO: 1415461 - RNA, 19 nt, Artificial Sequence
  Description of Artificial Sequence: Synthetic oligonucleotide
gaauuggacagugaugguu

SEQ ID NO: 1415462 - RNA, 19 nt, Artificial Sequence
  Description of Artificial Sequence: Synthetic oligonucleotide
gguacucaaccaccacucc

SEQ ID NO: 1415463 - RNA, 19 nt, Artificial Sequence
  Description of Artificial Sequence: Synthetic oligonucleotide
cgguucacgauaaauccag

SEQ ID NO: 1415464 - RNA, 19 nt, Artificial Sequence
  Description of Artificial Sequence: Synthetic oligonucleotide
cauuuuaguagagucaauu

SEQ ID NO: 1415465 - RNA, 19 nt, Artificial Sequence
  Description of Artificial Sequence: Synthetic oligonucleotide
aggaguguccuugcaagau

SEQ ID NO: 1415466 - RNA, 19 nt, Artificial Sequence
  Description of Artificial Sequence: Synthetic oligonucleotide
cucuuuagaugcaucgccu

SEQ ID NO: 1415467 - RNA, 19 nt, Artificial Sequence
  Description of Artificial Sequence: Synthetic oligonucleotide
gcaaaucggucuugucggg

SEQ ID NO: 1415468 - RNA, 19 nt, Artificial Sequence
  Description of Artificial Sequence: Synthetic oligonucleotide
acgguucacgauaaaucca

SEQ ID NO: 1415469 - RNA, 19 nt, Artificial Sequence
  Description of Artificial Sequence: Synthetic oligonucleotide
caaauggacccaucgggua

SEQ ID NO: 1415470 - RNA, 19 nt, Artificial Sequence
  Description of Artificial Sequence: Synthetic oligonucleotide
acgauaaauccaggagugu

SEQ ID NO: 1415471 - RNA, 19 nt, Artificial Sequence
  Description of Artificial Sequence: Synthetic oligonucleotide
guaaacaaaggcagagccu

SEQ ID NO: 1415472 - RNA, 19 nt, Artificial Sequence
  Description of Artificial Sequence: Synthetic oligonucleotide
agccaccugcgcgaugccc

SEQ ID NO: 1415473 - RNA, 19 nt, Artificial Sequence
  Description of Artificial Sequence: Synthetic oligonucleotide
cagcaagccuugcaagcac

SEQ ID NO: 1415474 - RNA, 19 nt, Artificial Sequence
  Description of Artificial Sequence: Synthetic oligonucleotide
cuugaagcaucacuuguau

SEQ ID NO: 1415475 - RNA, 19 nt, Artificial Sequence
  Description of Artificial Sequence: Synthetic oligonucleotide
cacggaugcugcgucagug

SEQ ID NO: 1415476 - RNA, 19 nt, Artificial Sequence
  Description of Artificial Sequence: Synthetic oligonucleotide
uuacugcaacuagucaaau

SEQ ID NO: 1415477 - RNA, 19 nt, Artificial Sequence
  Description of Artificial Sequence: Synthetic oligonucleotide
ucgguguuuuaaugaucuc

SEQ ID NO: 1415478 - RNA, 19 nt, Artificial Sequence
  Description of Artificial Sequence: Synthetic oligonucleotide
augcaccacggaugcugcg

SEQ ID NO: 1415479 - RNA, 19 nt, Artificial Sequence
  Description of Artificial Sequence: Synthetic oligonucleotide
caucgccucgcucguguag

SEQ ID NO: 1415480 - RNA, 19 nt, Artificial Sequence
  Description of Artificial Sequence: Synthetic oligonucleotide
auauuccccauagacucuu

SEQ ID NO: 1415481 - RNA, 19 nt, Artificial Sequence
  Description of Artificial Sequence: Synthetic oligonucleotide
aaccaagcucacagguacu

SEQ ID NO: 1415482 - RNA, 19 nt, Artificial Sequence
  Description of Artificial Sequence: Synthetic oligonucleotide
ggcagagccuuuucugaug

SEQ ID NO: 1415483 - RNA, 19 nt, Artificial Sequence
  Description of Artificial Sequence: Synthetic oligonucleotide
cucaaccaccacuccagga

SEQ ID NO: 1415484 - RNA, 19 nt, Artificial Sequence
  Description of Artificial Sequence: Synthetic oligonucleotide
ccuugcaagcaccacccag

SEQ ID NO: 1415485 - RNA, 19 nt, Artificial Sequence
  Description of Artificial Sequence: Synthetic oligonucleotide
accacggaugcugcgucag

SEQ ID NO: 1415486 - RNA, 19 nt, Artificial Sequence
  Description of Artificial Sequence: Synthetic oligonucleotide
gguucacgauaaauccagg

SEQ ID NO: 1415487 - RNA, 19 nt, Artificial Sequence
  Description of Artificial Sequence: Synthetic oligonucleotide
gcucguguagccugauggc

SEQ ID NO: 1415488 - RNA, 19 nt, Artificial Sequence
  Description of Artificial Sequence: Synthetic oligonucleotide
gguggaauuggcuaugcuu

SEQ ID NO: 1415489 - RNA, 19 nt, Artificial Sequence
  Description of Artificial Sequence: Synthetic oligonucleotide
auggacccaucggguaccc

SEQ ID NO: 1415490 - RNA, 19 nt, Artificial Sequence
  Description of Artificial Sequence: Synthetic oligonucleotide
auguaggcuaaggcuugag

SEQ ID NO: 1415491 - RNA, 19 nt, Artificial Sequence
  Description of Artificial Sequence: Synthetic oligonucleotide
accguauggccaguugcug

SEQ ID NO: 1415492 - RNA, 19 nt, Artificial Sequence
  Description of Artificial Sequence: Synthetic oligonucleotide
accagggacucgaacgucu

SEQ ID NO: 1415493 - RNA, 19 nt, Artificial Sequence
  Description of Artificial Sequence: Synthetic oligonucleotide
uaggcacgaugguuccuac

SEQ ID NO: 1415494 - RNA, 19 nt, Artificial Sequence
  Description of Artificial Sequence: Synthetic oligonucleotide
agggugcuuuccuaagguu

SEQ ID NO: 1415495 - RNA, 19 nt, Artificial Sequence
  Description of Artificial Sequence: Synthetic oligonucleotide
cgccacaaacucaucaccc

SEQ ID NO: 1415496 - RNA, 19 nt, Artificial Sequence
  Description of Artificial Sequence: Synthetic oligonucleotide
ucuugucgggugguggaau

SEQ ID NO: 1415497 - RNA, 19 nt, Artificial Sequence
  Description of Artificial Sequence: Synthetic oligonucleotide
aaggccucagaugcugguu

SEQ ID NO: 1415498 - RNA, 19 nt, Artificial Sequence
  Description of Artificial Sequence: Synthetic oligonucleotide
ucgcucguguagccugaug

SEQ ID NO: 1415499 - RNA, 19 nt, Artificial Sequence
  Description of Artificial Sequence: Synthetic oligonucleotide
gagacgguucacgauaaau

SEQ ID NO: 1415500 - RNA, 19 nt, Artificial Sequence
  Description of Artificial Sequence: Synthetic oligonucleotide
gucgaccagggacucgaac

SEQ ID NO: 1415501 - RNA, 19 nt, Artificial Sequence
  Description of Artificial Sequence: Synthetic oligonucleotide
ccguauggccaguugcugc

SEQ ID NO: 1415502 - RNA, 19 nt, Artificial Sequence
  Description of Artificial Sequence: Synthetic oligonucleotide
cagcccaacguagucaaga

SEQ ID NO: 1415503 - RNA, 19 nt, Artificial Sequence
  Description of Artificial Sequence: Synthetic oligonucleotide
uggcuagucaucgguguuu

SEQ ID NO: 1415504 - RNA, 19 nt, Artificial Sequence
  Description of Artificial Sequence: Synthetic oligonucleotide
gauauuccccauagacucu

SEQ ID NO: 1415505 - RNA, 19 nt, Artificial Sequence
  Description of Artificial Sequence: Synthetic oligonucleotide
uggcuaugcuugugaucug

SEQ ID NO: 1415506 - RNA, 19 nt, Artificial Sequence
  Description of Artificial Sequence: Synthetic oligonucleotide
gaugcaucgccucgcucgu

SEQ ID NO: 1415507 - RNA, 19 nt, Artificial Sequence
  Description of Artificial Sequence: Synthetic oligonucleotide
ccaccaauacuaccguaug

SEQ ID NO: 1415508 - RNA, 19 nt, Artificial Sequence
  Description of Artificial Sequence: Synthetic oligonucleotide
ugcgcucauccuuguccca

SEQ ID NO: 1415509 - RNA, 19 nt, Artificial Sequence
  Description of Artificial Sequence: Synthetic oligonucleotide
gaugcaccuguaggcacga

SEQ ID NO: 1415510 - RNA, 19 nt, Artificial Sequence
  Description of Artificial Sequence: Synthetic oligonucleotide
uuguaguauccagcccaac

SEQ ID NO: 1415511 - RNA, 19 nt, Artificial Sequence
  Description of Artificial Sequence: Synthetic oligonucleotide
gccugauggccucuaugag

SEQ ID NO: 1415512 - RNA, 19 nt, Artificial Sequence
  Description of Artificial Sequence: Synthetic oligonucleotide
gcccaacguagucaagaag

SEQ ID NO: 1415513 - RNA, 19 nt, Artificial Sequence
  Description of Artificial Sequence: Synthetic oligonucleotide
ggaauuggcuaugcuugug

SEQ ID NO: 1415514 - RNA, 19 nt, Artificial Sequence
  Description of Artificial Sequence: Synthetic oligonucleotide
accgccgaugacugucaca

SEQ ID NO: 1415515 - RNA, 19 nt, Artificial Sequence
  Description of Artificial Sequence: Synthetic oligonucleotide
gccaccugcgcgaugcccg

SEQ ID NO: 1415516 - RNA, 19 nt, Artificial Sequence
  Description of Artificial Sequence: Synthetic oligonucleotide
ccuaagguuuuacaaaagu

SEQ ID NO: 1415517 - RNA, 19 nt, Artificial Sequence
  Description of Artificial Sequence: Synthetic oligonucleotide
cgauaaauccaggaguguc

SEQ ID NO: 1415518 - RNA, 19 nt, Artificial Sequence
  Description of Artificial Sequence: Synthetic oligonucleotide
ggucuugucggguggugga

SEQ ID NO: 1415519 - RNA, 19 nt, Artificial Sequence
  Description of Artificial Sequence: Synthetic oligonucleotide
auggcaccaagagacgguu

SEQ ID NO: 1415520 - RNA, 19 nt, Artificial Sequence
  Description of Artificial Sequence: Synthetic oligonucleotide
ugcaagauacagggugcuu

SEQ ID NO: 1415521 - RNA, 19 nt, Artificial Sequence
  Description of Artificial Sequence: Synthetic oligonucleotide
cccauagacucuugaagca

SEQ ID NO: 1415522 - RNA, 19 nt, Artificial Sequence
  Description of Artificial Sequence: Synthetic oligonucleotide
gaugggccuuuccccagaa

SEQ ID NO: 1415523 - RNA, 19 nt, Artificial Sequence
  Description of Artificial Sequence: Synthetic oligonucleotide
gaagcucaaauggacccau

SEQ ID NO: 1415524 - RNA, 19 nt, Artificial Sequence
  Description of Artificial Sequence: Synthetic oligonucleotide
guaggcacgaugguuccua

SEQ ID NO: 1415525 - RNA, 19 nt, Artificial Sequence
  Description of Artificial Sequence: Synthetic oligonucleotide
agagacgguucacgauaaa

SEQ ID NO: 1415526 - RNA, 19 nt, Artificial Sequence
  Description of Artificial Sequence: Synthetic oligonucleotide
gcacgaugguuccuacccc

SEQ ID NO: 1415527 - RNA, 19 nt, Artificial Sequence
  Description of Artificial Sequence: Synthetic oligonucleotide
gggauauuccccauagacu

SEQ ID NO: 1415528 - RNA, 19 nt, Artificial Sequence
  Description of Artificial Sequence: Synthetic oligonucleotide
auggccucuaugagauaug

SEQ ID NO: 1415529 - RNA, 19 nt, Artificial Sequence
  Description of Artificial Sequence: Synthetic oligonucleotide
ucggucuugucggguggug

SEQ ID NO: 1415530 - RNA, 19 nt, Artificial Sequence
  Description of Artificial Sequence: Synthetic oligonucleotide
gggacucgaacgucuucug

SEQ ID NO: 1415531 - RNA, 19 nt, Artificial Sequence
  Description of Artificial Sequence: Synthetic oligonucleotide
cauaggcacuugguaucac

SEQ ID NO: 1415532 - RNA, 19 nt, Artificial Sequence
  Description of Artificial Sequence: Synthetic oligonucleotide
uguagccugauggccucua

SEQ ID NO: 1415533 - RNA, 19 nt, Artificial Sequence
  Description of Artificial Sequence: Synthetic oligonucleotide
aguguccuugcaagauaca

SEQ ID NO: 1415534 - RNA, 19 nt, Artificial Sequence
  Description of Artificial Sequence: Synthetic oligonucleotide
cccuuagaugcaccuguag

SEQ ID NO: 1415535 - RNA, 19 nt, Artificial Sequence
  Description of Artificial Sequence: Synthetic oligonucleotide
ugacugucacaugcuugau

SEQ ID NO: 1415536 - RNA, 19 nt, Artificial Sequence
  Description of Artificial Sequence: Synthetic oligonucleotide
gccucgcucguguagccug

SEQ ID NO: 1415537 - RNA, 19 nt, Artificial Sequence
  Description of Artificial Sequence: Synthetic oligonucleotide
gucuucgccacaaacucau

SEQ ID NO: 1415538 - RNA, 19 nt, Artificial Sequence
  Description of Artificial Sequence: Synthetic oligonucleotide
ccgcuggaaaagcucauuc

SEQ ID NO: 1415539 - RNA, 19 nt, Artificial Sequence
  Description of Artificial Sequence: Synthetic oligonucleotide
agcccaccgccgaugacug

SEQ ID NO: 1415540 - RNA, 19 nt, Artificial Sequence
  Description of Artificial Sequence: Synthetic oligonucleotide
cagggugcuuuccuaaggu

SEQ ID NO: 1415541 - RNA, 19 nt, Artificial Sequence
  Description of Artificial Sequence: Synthetic oligonucleotide
cugggauauuccccauaga

SEQ ID NO: 1415542 - RNA, 19 nt, Artificial Sequence
  Description of Artificial Sequence: Synthetic oligonucleotide
cagggacucgaacgucuuc

SEQ ID NO: 1415543 - RNA, 19 nt, Artificial Sequence
  Description of Artificial Sequence: Synthetic oligonucleotide
gaacgucuucuggcuaguc

SEQ ID NO: 1415544 - RNA, 19 nt, Artificial Sequence
  Description of Artificial Sequence: Synthetic oligonucleotide
cugcaacuagucaaaugau

SEQ ID NO: 1415545 - RNA, 19 nt, Artificial Sequence
  Description of Artificial Sequence: Synthetic oligonucleotide
aucggucuugucggguggu

SEQ ID NO: 1415546 - RNA, 19 nt, Artificial Sequence
  Description of Artificial Sequence: Synthetic oligonucleotide
gccuuaggguuuucuguga

SEQ ID NO: 1415547 - RNA, 19 nt, Artificial Sequence
  Description of Artificial Sequence: Synthetic oligonucleotide
cugcgcgaugcccgcgccc

SEQ ID NO: 1415548 - RNA, 19 nt, Artificial Sequence
  Description of Artificial Sequence: Synthetic oligonucleotide
cuaugagauauggcaccaa

SEQ ID NO: 1415549 - RNA, 19 nt, Artificial Sequence
  Description of Artificial Sequence: Synthetic oligonucleotide
uacuaccguauggccaguu

SEQ ID NO: 1415550 - RNA, 19 nt, Artificial Sequence
  Description of Artificial Sequence: Synthetic oligonucleotide
ggccucuaugagauauggc

SEQ ID NO: 1415551 - RNA, 19 nt, Artificial Sequence
  Description of Artificial Sequence: Synthetic oligonucleotide
ggucuucgccacaaacuca

SEQ ID NO: 1415552 - RNA, 19 nt, Artificial Sequence
  Description of Artificial Sequence: Synthetic oligonucleotide
aucggguacccagcuccca

SEQ ID NO: 1415553 - RNA, 19 nt, Artificial Sequence
  Description of Artificial Sequence: Synthetic oligonucleotide
cucgaacgucuucuggcua

SEQ ID NO: 1415554 - RNA, 19 nt, Artificial Sequence
  Description of Artificial Sequence: Synthetic oligonucleotide
ucccaacuucauggcagua

SEQ ID NO: 1415555 - RNA, 19 nt, Artificial Sequence
  Description of Artificial Sequence: Synthetic oligonucleotide
caucacccgccuuaggguu

SEQ ID NO: 1415556 - RNA, 19 nt, Artificial Sequence
  Description of Artificial Sequence: Synthetic oligonucleotide
gcuaugcuugugaucugca

SEQ ID NO: 1415557 - RNA, 19 nt, Artificial Sequence
  Description of Artificial Sequence: Synthetic oligonucleotide
cguauggccaguugcugca

SEQ ID NO: 1415558 - RNA, 19 nt, Artificial Sequence
  Description of Artificial Sequence: Synthetic oligonucleotide
auacuaccguauggccagu

SEQ ID NO: 1415559 - RNA, 19 nt, Artificial Sequence
  Description of Artificial Sequence: Synthetic oligonucleotide
ccaacguagucaagaagcu

SEQ ID NO: 1415560 - RNA, 19 nt, Artificial Sequence
  Description of Artificial Sequence: Synthetic oligonucleotide
caccacggaugcugcguca

SEQ ID NO: 1415561 - RNA, 19 nt, Artificial Sequence
  Description of Artificial Sequence: Synthetic oligonucleotide
caccgccgaugacugucac

SEQ ID NO: 1415562 - RNA, 19 nt, Artificial Sequence
  Description of Artificial Sequence: Synthetic oligonucleotide
caaaucggucuugucgggu

SEQ ID NO: 1415563 - RNA, 19 nt, Artificial Sequence
  Description of Artificial Sequence: Synthetic oligonucleotide
uggacccaucggguaccca

SEQ ID NO: 1415564 - RNA, 19 nt, Artificial Sequence
  Description of Artificial Sequence: Synthetic oligonucleotide
ggcccacugagcagacugc

SEQ ID NO: 1415565 - RNA, 19 nt, Artificial Sequence
  Description of Artificial Sequence: Synthetic oligonucleotide
ccuuaggguuuucugugaa

SEQ ID NO: 1415566 - RNA, 19 nt, Artificial Sequence
  Description of Artificial Sequence: Synthetic oligonucleotide
gucuugucgggugguggaa

SEQ ID NO: 1415567 - RNA, 19 nt, Artificial Sequence
  Description of Artificial Sequence: Synthetic oligonucleotide
ggugcuuuccuaagguuuu

SEQ ID NO: 1415568 - RNA, 19 nt, Artificial Sequence
  Description of Artificial Sequence: Synthetic oligonucleotide
cagcccaccgccgaugacu

SEQ ID NO: 1415569 - RNA, 19 nt, Artificial Sequence
  Description of Artificial Sequence: Synthetic oligonucleotide
aucacccgccuuaggguuu

SEQ ID NO: 1415570 - RNA, 19 nt, Artificial Sequence
  Description of Artificial Sequence: Synthetic oligonucleotide
cccaccgccgaugacuguc

SEQ ID NO: 1415571 - RNA, 19 nt, Artificial Sequence
  Description of Artificial Sequence: Synthetic oligonucleotide
gggugcuuuccuaagguuu

SEQ ID NO: 1415572 - RNA, 19 nt, Artificial Sequence
  Description of Artificial Sequence: Synthetic oligonucleotide
cguguagccugauggccuc

SEQ ID NO: 1415573 - RNA, 19 nt, Artificial Sequence
  Description of Artificial Sequence: Synthetic oligonucleotide
gcaccaagagacgguucac

SEQ ID NO: 1415574 - RNA, 19 nt, Artificial Sequence
  Description of Artificial Sequence: Synthetic oligonucleotide
cagccaccugcgcgaugcc

SEQ ID NO: 1415575 - RNA, 19 nt, Artificial Sequence
  Description of Artificial Sequence: Synthetic oligonucleotide
caccugcgcgaugcccgcg

SEQ ID NO: 1415576 - RNA, 19 nt, Artificial Sequence
  Description of Artificial Sequence: Synthetic oligonucleotide
ccaccugcgcgaugcccgc

SEQ ID NO: 1415577 - RNA, 19 nt, Artificial Sequence
  Description of Artificial Sequence: Synthetic oligonucleotide
gcccagaauguaggcuaag

SEQ ID NO: 1415578 - RNA, 19 nt, Artificial Sequence
  Description of Artificial Sequence: Synthetic oligonucleotide
ccagcccaacguagucaag

SEQ ID NO: 1415579 - RNA, 19 nt, Artificial Sequence
  Description of Artificial Sequence: Synthetic oligonucleotide
ggcugggauauuccccaua

SEQ ID NO: 1415580 - RNA, 19 nt, Artificial Sequence
  Description of Artificial Sequence: Synthetic oligonucleotide
gcccaucagcccaccgccg

SEQ ID NO: 1415581 - RNA, 19 nt, Artificial Sequence
  Description of Artificial Sequence: Synthetic oligonucleotide
guagccugauggccucuau

SEQ ID NO: 1415582 - RNA, 19 nt, Artificial Sequence
  Description of Artificial Sequence: Synthetic oligonucleotide
ccggcaaaucggucuuguc

SEQ ID NO: 1415583 - RNA, 19 nt, Artificial Sequence
  Description of Artificial Sequence: Synthetic oligonucleotide
cuggcuagucaucgguguu

SEQ ID NO: 1415584 - RNA, 19 nt, Artificial Sequence
  Description of Artificial Sequence: Synthetic oligonucleotide
cagagccuuuucugaugua

SEQ ID NO: 1415585 - RNA, 19 nt, Artificial Sequence
  Description of Artificial Sequence: Synthetic oligonucleotide
ccgccuuaggguuuucugu

SEQ ID NO: 1415586 - RNA, 19 nt, Artificial Sequence
  Description of Artificial Sequence: Synthetic oligonucleotide
caguaucaauauccucuuu

SEQ ID NO: 1415587 - RNA, 19 nt, Artificial Sequence
  Description of Artificial Sequence: Synthetic oligonucleotide
ccaagagacgguucacgau

SEQ ID NO: 1415588 - RNA, 19 nt, Artificial Sequence
  Description of Artificial Sequence: Synthetic oligonucleotide
agucgaccagggacucgaa

SEQ ID NO: 1415589 - RNA, 19 nt, Artificial Sequence
  Description of Artificial Sequence: Synthetic oligonucleotide
augcugcgucagugcuggu

SEQ ID NO: 1415590 - RNA, 19 nt, Artificial Sequence
  Description of Artificial Sequence: Synthetic oligonucleotide
ccacaaagaugggccuuuc

SEQ ID NO: 1415591 - RNA, 19 nt, Artificial Sequence
  Description of Artificial Sequence: Synthetic oligonucleotide
ccucuguuugguccaccaa

SEQ ID NO: 1415592 - RNA, 19 nt, Artificial Sequence
  Description of Artificial Sequence: Synthetic oligonucleotide
gcuagucaucgguguuuua

SEQ ID NO: 1415593 - RNA, 19 nt, Artificial Sequence
  Description of Artificial Sequence: Synthetic oligonucleotide
ccaccgccgaugacuguca

SEQ ID NO: 1415594 - RNA, 19 nt, Artificial Sequence
  Description of Artificial Sequence: Synthetic oligonucleotide
cccgcgcccaucagcccac

SEQ ID NO: 1415595 - RNA, 19 nt, Artificial Sequence
  Description of Artificial Sequence: Synthetic oligonucleotide
ggcuagucaucgguguuuu

SEQ ID NO: 1415596 - RNA, 19 nt, Artificial Sequence
  Description of Artificial Sequence: Synthetic oligonucleotide
ccucgcucguguagccuga

SEQ ID NO: 1415597 - RNA, 19 nt, Artificial Sequence
  Description of Artificial Sequence: Synthetic oligonucleotide
augcaccuguaggcacgau

SEQ ID NO: 1415598 - RNA, 19 nt, Artificial Sequence
  Description of Artificial Sequence: Synthetic oligonucleotide
gcauuuuaguagagucaau

SEQ ID NO: 1415599 - RNA, 19 nt, Artificial Sequence
  Description of Artificial Sequence: Synthetic oligonucleotide
gccggcaaaucggucuugu

SEQ ID NO: 1415600 - RNA, 19 nt, Artificial Sequence
  Description of Artificial Sequence: Synthetic oligonucleotide
gcaucgccucgcucgugua

SEQ ID NO: 1415601 - RNA, 19 nt, Artificial Sequence
  Description of Artificial Sequence: Synthetic oligonucleotide
gcccuuagaugcaccugua

SEQ ID NO: 1415602 - RNA, 19 nt, Artificial Sequence
  Description of Artificial Sequence: Synthetic oligonucleotide
cgcgcccaucagcccaccg

SEQ ID NO: 1415603 - RNA, 19 nt, Artificial Sequence
  Description of Artificial Sequence: Synthetic oligonucleotide
ccacuccaggagcccuguc

SEQ ID NO: 1415604 - RNA, 19 nt, Artificial Sequence
  Description of Artificial Sequence: Synthetic oligonucleotide
gcgcucauccuugucccau

SEQ ID NO: 1415605 - RNA, 19 nt, Artificial Sequence
  Description of Artificial Sequence: Synthetic oligonucleotide
ccagggacucgaacgucuu

SEQ ID NO: 1415606 - RNA, 19 nt, Artificial Sequence
  Description of Artificial Sequence: Synthetic oligonucleotide
ccuugucccauggcuggcu

SEQ ID NO: 1415607 - RNA, 19 nt, Artificial Sequence
  Description of Artificial Sequence: Synthetic oligonucleotide
cccauccaagaugaacuuu

SEQ ID NO: 1415608 - RNA, 19 nt, Artificial Sequence
  Description of Artificial Sequence: Synthetic oligonucleotide
cucgcucguguagccugau

SEQ ID NO: 1415609 - RNA, 19 nt, Artificial Sequence
  Description of Artificial Sequence: Synthetic oligonucleotide
ccacggaugcugcgucagu

SEQ ID NO: 1415610 - RNA, 19 nt, Artificial Sequence
  Description of Artificial Sequence: Synthetic oligonucleotide
gggguucucuggguccauu

SEQ ID NO: 1415611 - RNA, 19 nt, Artificial Sequence
  Description of Artificial Sequence: Synthetic oligonucleotide
cgaacgucuucuggcuagu

SEQ ID NO: 1415612 - RNA, 19 nt, Artificial Sequence
  Description of Artificial Sequence: Synthetic oligonucleotide
ccgcgcccaucagcccacc

SEQ ID NO: 1415613 - RNA, 19 nt, Artificial Sequence
  Description of Artificial Sequence: Synthetic oligonucleotide
gcccaccgccgaugacugu

SEQ ID NO: 1415614 - RNA, 19 nt, Artificial Sequence
  Description of Artificial Sequence: Synthetic oligonucleotide
uaggauaugacacacaaag

SEQ ID NO: 1415615 - RNA, 19 nt, Artificial Sequence
  Description of Artificial Sequence: Synthetic oligonucleotide
uuauaugagguguaaaugg

SEQ ID NO: 1415616 - RNA, 19 nt, Artificial Sequence
  Description of Artificial Sequence: Synthetic oligonucleotide
aauuagaccaaaguuuucc

SEQ ID NO: 1415617 - RNA, 19 nt, Artificial Sequence
  Description of Artificial Sequence: Synthetic oligonucleotide
aagucaaaucuauauacac

SEQ ID NO: 1415618 - RNA, 19 nt, Artificial Sequence
  Description of Artificial Sequence: Synthetic oligonucleotide
uucuauuuaaccagaauag

SEQ ID NO: 1415619 - RNA, 19 nt, Artificial Sequence
  Description of Artificial Sequence: Synthetic oligonucleotide
aauggcaguuaauaaaggg

SEQ ID NO: 1415620 - RNA, 19 nt, Artificial Sequence
  Description of Artificial Sequence: Synthetic oligonucleotide
aaauguaauaggcaggucu

SEQ ID NO: 1415621 - RNA, 19 nt, Artificial Sequence
  Description of Artificial Sequence: Synthetic oligonucleotide
aaagauacaacuuugcaua

SEQ ID NO: 1415622 - RNA, 19 nt, Artificial Sequence
  Description of Artificial Sequence: Synthetic oligonucleotide
aaccuuuugagacuggagg

SEQ ID NO: 1415623 - RNA, 19 nt, Artificial Sequence
  Description of Artificial Sequence: Synthetic oligonucleotide
uauccaacaaaccacugcg

SEQ ID NO: 1415624 - RNA, 19 nt, Artificial Sequence
  Description of Artificial Sequence: Synthetic oligonucleotide
ucuuuaauugguuaagagc

SEQ ID NO: 1415625 - RNA, 19 nt, Artificial Sequence
  Description of Artificial Sequence: Synthetic oligonucleotide
acaaaauaggauaugacac

SEQ ID NO: 1415626 - RNA, 19 nt, Artificial Sequence
  Description of Artificial Sequence: Synthetic oligonucleotide
cuuuaauugguuaagagca

SEQ ID NO: 1415627 - RNA, 19 nt, Artificial Sequence
  Description of Artificial Sequence: Synthetic oligonucleotide
gaaauuguauccuggauug

SEQ ID NO: 1415628 - RNA, 19 nt, Artificial Sequence
  Description of Artificial Sequence: Synthetic oligonucleotide
uguauuuaucaucaaaccu

SEQ ID NO: 1415629 - RNA, 19 nt, Artificial Sequence
  Description of Artificial Sequence: Synthetic oligonucleotide
uuagcaauggacuuaguga

SEQ ID NO: 1415630 - RNA, 19 nt, Artificial Sequence
  Description of Artificial Sequence: Synthetic oligonucleotide
uuguaagugaacaccaugc

SEQ ID NO: 1415631 - RNA, 19 nt, Artificial Sequence
  Description of Artificial Sequence: Synthetic oligonucleotide
aguuccuaagaacuaagcg

SEQ ID NO: 1415632 - RNA, 19 nt, Artificial Sequence
  Description of Artificial Sequence: Synthetic oligonucleotide
aguuuaagcuuucuguuuc

SEQ ID NO: 1415633 - RNA, 19 nt, Artificial Sequence
  Description of Artificial Sequence: Synthetic oligonucleotide
aaggggugcauguaauccc

SEQ ID NO: 1415634 - RNA, 19 nt, Artificial Sequence
  Description of Artificial Sequence: Synthetic oligonucleotide
auucuauuuaaccagaaua

SEQ ID NO: 1415635 - RNA, 19 nt, Artificial Sequence
  Description of Artificial Sequence: Synthetic oligonucleotide
auagcaaagaagcaggaga

SEQ ID NO: 1415636 - RNA, 19 nt, Artificial Sequence
  Description of Artificial Sequence: Synthetic oligonucleotide
acuaguggaaaacagagaa

SEQ ID NO: 1415637 - RNA, 19 nt, Artificial Sequence
  Description of Artificial Sequence: Synthetic oligonucleotide
uacuugaccaaguuuaagc

SEQ ID NO: 1415638 - RNA, 19 nt, Artificial Sequence
  Description of Artificial Sequence: Synthetic oligonucleotide
ugcauguaaucccaaauca

SEQ ID NO: 1415639 - RNA, 19 nt, Artificial Sequence
  Description of Artificial Sequence: Synthetic oligonucleotide
ggauaugacacacaaagcc

SEQ ID NO: 1415640 - RNA, 19 nt, Artificial Sequence
  Description of Artificial Sequence: Synthetic oligonucleotide
cauagaaauuguauccugg

SEQ ID NO: 1415641 - RNA, 19 nt, Artificial Sequence
  Description of Artificial Sequence: Synthetic oligonucleotide
uaugcauccaugacuagug

SEQ ID NO: 1415642 - RNA, 19 nt, Artificial Sequence
  Description of Artificial Sequence: Synthetic oligonucleotide
aaucccaaaucaaagccac

SEQ ID NO: 1415643 - RNA, 19 nt, Artificial Sequence
  Description of Artificial Sequence: Synthetic oligonucleotide
gaacuaagcguucaaacac

SEQ ID NO: 1415644 - RNA, 19 nt, Artificial Sequence
  Description of Artificial Sequence: Synthetic oligonucleotide
uuauccaacaaaccacugc

SEQ ID NO: 1415645 - RNA, 19 nt, Artificial Sequence
  Description of Artificial Sequence: Synthetic oligonucleotide
aaaaccccuacucagcaga

SEQ ID NO: 1415646 - RNA, 19 nt, Artificial Sequence
  Description of Artificial Sequence: Synthetic oligonucleotide
aaagccaaaacuggcuugg

SEQ ID NO: 1415647 - RNA, 19 nt, Artificial Sequence
  Description of Artificial Sequence: Synthetic oligonucleotide
acuauagcaaagaagcagg

SEQ ID NO: 1415648 - RNA, 19 nt, Artificial Sequence
  Description of Artificial Sequence: Synthetic oligonucleotide
agcuuuacuaaauaaagua

SEQ ID NO: 1415649 - RNA, 19 nt, Artificial Sequence
  Description of Artificial Sequence: Synthetic oligonucleotide
aaggaaagcugucauacau

SEQ ID NO: 1415650 - RNA, 19 nt, Artificial Sequence
  Description of Artificial Sequence: Synthetic oligonucleotide
ucauaugcauccaugacua

SEQ ID NO: 1415651 - RNA, 19 nt, Artificial Sequence
  Description of Artificial Sequence: Synthetic oligonucleotide
aagaacuuagcaauggacu

SEQ ID NO: 1415652 - RNA, 19 nt, Artificial Sequence
  Description of Artificial Sequence: Synthetic oligonucleotide
uauaugagguguaaauggu

SEQ ID NO: 1415653 - RNA, 19 nt, Artificial Sequence
  Description of Artificial Sequence: Synthetic oligonucleotide
aacaaguuaacaauaccca

SEQ ID NO: 1415654 - RNA, 19 nt, Artificial Sequence
  Description of Artificial Sequence: Synthetic oligonucleotide
agaacuaagcguucaaaca

SEQ ID NO: 1415655 - RNA, 19 nt, Artificial Sequence
  Description of Artificial Sequence: Synthetic oligonucleotide
gggauuaacacaaaguuag

SEQ ID NO: 1415656 - RNA, 19 nt, Artificial Sequence
  Description of Artificial Sequence: Synthetic oligonucleotide
uaacaaauuaaaaggcuau

SEQ ID NO: 1415657 - RNA, 19 nt, Artificial Sequence
  Description of Artificial Sequence: Synthetic oligonucleotide
ucuuaaggaaaacaacaaa

SEQ ID NO: 1415658 - RNA, 19 nt, Artificial Sequence
  Description of Artificial Sequence: Synthetic oligonucleotide
ggcggaaucauccaaagag

SEQ ID NO: 1415659 - RNA, 19 nt, Artificial Sequence
  Description of Artificial Sequence: Synthetic oligonucleotide
uugguuaagagcacaaaau

SEQ ID NO: 1415660 - RNA, 19 nt, Artificial Sequence
  Description of Artificial Sequence: Synthetic oligonucleotide
aauucuauuuaaccagaau

SEQ ID NO: 1415661 - RNA, 19 nt, Artificial Sequence
  Description of Artificial Sequence: Synthetic oligonucleotide
uacucagcagaccauggag

SEQ ID NO: 1415662 - RNA, 19 nt, Artificial Sequence
  Description of Artificial Sequence: Synthetic oligonucleotide
agaaauuguauccuggauu

SEQ ID NO: 1415663 - RNA, 19 nt, Artificial Sequence
  Description of Artificial Sequence: Synthetic oligonucleotide
uccaacaaaccacugcggc

SEQ ID NO: 1415664 - RNA, 19 nt, Artificial Sequence
  Description of Artificial Sequence: Synthetic oligonucleotide
auuguaagugaacaccaug

SEQ ID NO: 1415665 - RNA, 19 nt, Artificial Sequence
  Description of Artificial Sequence: Synthetic oligonucleotide
aaguaugcuuggcuuuuac

SEQ ID NO: 1415666 - RNA, 19 nt, Artificial Sequence
  Description of Artificial Sequence: Synthetic oligonucleotide
aaggaaauagcugcugaag

SEQ ID NO: 1415667 - RNA, 19 nt, Artificial Sequence
  Description of Artificial Sequence: Synthetic oligonucleotide
auacuaguggaaaacagag

SEQ ID NO: 1415668 - RNA, 19 nt, Artificial Sequence
  Description of Artificial Sequence: Synthetic oligonucleotide
aggcuuaucaucaaucuuc

SEQ ID NO: 1415669 - RNA, 19 nt, Artificial Sequence
  Description of Artificial Sequence: Synthetic oligonucleotide
auugguuaagagcacaaaa

SEQ ID NO: 1415670 - RNA, 19 nt, Artificial Sequence
  Description of Artificial Sequence: Synthetic oligonucleotide
ugaaggaaauagcugcuga

SEQ ID NO: 1415671 - RNA, 19 nt, Artificial Sequence
  Description of Artificial Sequence: Synthetic oligonucleotide
gaaauagcugcugaagcag

SEQ ID NO: 1415672 - RNA, 19 nt, Artificial Sequence
  Description of Artificial Sequence: Synthetic oligonucleotide
aauagacuaaauaggggcu

SEQ ID NO: 1415673 - RNA, 19 nt, Artificial Sequence
  Description of Artificial Sequence: Synthetic oligonucleotide
gccacuauagcaaagaagc

SEQ ID NO: 1415674 - RNA, 19 nt, Artificial Sequence
  Description of Artificial Sequence: Synthetic oligonucleotide
uuccuaagaacuaagcguu

SEQ ID NO: 1415675 - RNA, 19 nt, Artificial Sequence
  Description of Artificial Sequence: Synthetic oligonucleotide
aacuuagcaauggacuuag

SEQ ID NO: 1415676 - RNA, 19 nt, Artificial Sequence
  Description of Artificial Sequence: Synthetic oligonucleotide
ucuucuccuuauaugaggu

SEQ ID NO: 1415677 - RNA, 19 nt, Artificial Sequence
  Description of Artificial Sequence: Synthetic oligonucleotide
uccacuuauccaacaaacc

SEQ ID NO: 1415678 - RNA, 19 nt, Artificial Sequence
  Description of Artificial Sequence: Synthetic oligonucleotide
aaccagaauagacuaaaua

SEQ ID NO: 1415679 - RNA, 19 nt, Artificial Sequence
  Description of Artificial Sequence: Synthetic oligonucleotide
uauuuaucaucaaaccuuu

SEQ ID NO: 1415680 - RNA, 19 nt, Artificial Sequence
  Description of Artificial Sequence: Synthetic oligonucleotide
guaagugaacaccaugccc

SEQ ID NO: 1415681 - RNA, 19 nt, Artificial Sequence
  Description of Artificial Sequence: Synthetic oligonucleotide
cuuauaugagguguaaaug

SEQ ID NO: 1415682 - RNA, 19 nt, Artificial Sequence
  Description of Artificial Sequence: Synthetic oligonucleotide
auagaaauuguauccugga

SEQ ID NO: 1415683 - RNA, 19 nt, Artificial Sequence
  Description of Artificial Sequence: Synthetic oligonucleotide
uuuaauugguuaagagcac

SEQ ID NO: 1415684 - RNA, 19 nt, Artificial Sequence
  Description of Artificial Sequence: Synthetic oligonucleotide
cuuugcauaucuugauagg

SEQ ID NO: 1415685 - RNA, 19 nt, Artificial Sequence
  Description of Artificial Sequence: Synthetic oligonucleotide
cacuuauccaacaaaccac

SEQ ID NO: 1415686 - RNA, 19 nt, Artificial Sequence
  Description of Artificial Sequence: Synthetic oligonucleotide
ucuauuuaaccagaauaga

SEQ ID NO: 1415687 - RNA, 19 nt, Artificial Sequence
  Description of Artificial Sequence: Synthetic oligonucleotide
aaucaacaggaacauacua

SEQ ID NO: 1415688 - RNA, 19 nt, Artificial Sequence
  Description of Artificial Sequence: Synthetic oligonucleotide
cuggauugaaggaaauagc

SEQ ID NO: 1415689 - RNA, 19 nt, Artificial Sequence
  Description of Artificial Sequence: Synthetic oligonucleotide
gguguaaauggucagaauc

SEQ ID NO: 1415690 - RNA, 19 nt, Artificial Sequence
  Description of Artificial Sequence: Synthetic oligonucleotide
ugaaggucaacuucagggu

SEQ ID NO: 1415691 - RNA, 19 nt, Artificial Sequence
  Description of Artificial Sequence: Synthetic oligonucleotide
uuaaccagaauagacuaaa

SEQ ID NO: 1415692 - RNA, 19 nt, Artificial Sequence
  Description of Artificial Sequence: Synthetic oligonucleotide
aucaacaggaacauacuag

SEQ ID NO: 1415693 - RNA, 19 nt, Artificial Sequence
  Description of Artificial Sequence: Synthetic oligonucleotide
aaagccacuauagcaaaga

SEQ ID NO: 1415694 - RNA, 19 nt, Artificial Sequence
  Description of Artificial Sequence: Synthetic oligonucleotide
uguuucuucucuacccacc

SEQ ID NO: 1415695 - RNA, 19 nt, Artificial Sequence
  Description of Artificial Sequence: Synthetic oligonucleotide
ggaaagcugucauacauag

SEQ ID NO: 1415696 - RNA, 19 nt, Artificial Sequence
  Description of Artificial Sequence: Synthetic oligonucleotide
aacaaaccacugcggcugc

SEQ ID NO: 1415697 - RNA, 19 nt, Artificial Sequence
  Description of Artificial Sequence: Synthetic oligonucleotide
aguaauucguccgauccag

SEQ ID NO: 1415698 - RNA, 19 nt, Artificial Sequence
  Description of Artificial Sequence: Synthetic oligonucleotide
cccaucaucacaaaauagg

SEQ ID NO: 1415699 - RNA, 19 nt, Artificial Sequence
  Description of Artificial Sequence: Synthetic oligonucleotide
aauggcguguaaaggaaag

SEQ ID NO: 1415700 - RNA, 19 nt, Artificial Sequence
  Description of Artificial Sequence: Synthetic oligonucleotide
acauagaaauuguauccug

SEQ ID NO: 1415701 - RNA, 19 nt, Artificial Sequence
  Description of Artificial Sequence: Synthetic oligonucleotide
cacuauagcaaagaagcag

SEQ ID NO: 1415702 - RNA, 19 nt, Artificial Sequence
  Description of Artificial Sequence: Synthetic oligonucleotide
gauaugacacacaaagcca

SEQ ID NO: 1415703 - RNA, 19 nt, Artificial Sequence
  Description of Artificial Sequence: Synthetic oligonucleotide
aauaggcaggucuauuuua

SEQ ID NO: 1415704 - RNA, 19 nt, Artificial Sequence
  Description of Artificial Sequence: Synthetic oligonucleotide
uguauccuggauugaagga

SEQ ID NO: 1415705 - RNA, 19 nt, Artificial Sequence
  Description of Artificial Sequence: Synthetic oligonucleotide
ccaagucaaaucuauauac

SEQ ID NO: 1415706 - RNA, 19 nt, Artificial Sequence
  Description of Artificial Sequence: Synthetic oligonucleotide
aauuguauccuggauugaa

SEQ ID NO: 1415707 - RNA, 19 nt, Artificial Sequence
  Description of Artificial Sequence: Synthetic oligonucleotide
auuagaccaaaguuuucca

SEQ ID NO: 1415708 - RNA, 19 nt, Artificial Sequence
  Description of Artificial Sequence: Synthetic oligonucleotide
ugaggcgaccgucaauuag

SEQ ID NO: 1415709 - RNA, 19 nt, Artificial Sequence
  Description of Artificial Sequence: Synthetic oligonucleotide
uucuccuuauaugaggugu

SEQ ID NO: 1415710 - RNA, 19 nt, Artificial Sequence
  Description of Artificial Sequence: Synthetic oligonucleotide
agcagggauuaacacaaag

SEQ ID NO: 1415711 - RNA, 19 nt, Artificial Sequence
  Description of Artificial Sequence: Synthetic oligonucleotide
uugcauaucuugauaggaa

SEQ ID NO: 1415712 - RNA, 19 nt, Artificial Sequence
  Description of Artificial Sequence: Synthetic oligonucleotide
guuccuaagaacuaagcgu

SEQ ID NO: 1415713 - RNA, 19 nt, Artificial Sequence
  Description of Artificial Sequence: Synthetic oligonucleotide
cauacuaguggaaaacaga

SEQ ID NO: 1415714 - RNA, 19 nt, Artificial Sequence
  Description of Artificial Sequence: Synthetic oligonucleotide
agaacuuagcaauggacuu

SEQ ID NO: 1415715 - RNA, 19 nt, Artificial Sequence
  Description of Artificial Sequence: Synthetic oligonucleotide
aggauaugacacacaaagc

SEQ ID NO: 1415716 - RNA, 19 nt, Artificial Sequence
  Description of Artificial Sequence: Synthetic oligonucleotide
auguaaucccaaaucaaag

SEQ ID NO: 1415717 - RNA, 19 nt, Artificial Sequence
  Description of Artificial Sequence: Synthetic oligonucleotide
uagaaauuguauccuggau

SEQ ID NO: 1415718 - RNA, 19 nt, Artificial Sequence
  Description of Artificial Sequence: Synthetic oligonucleotide
uuuggcggaaucauccaaa

SEQ ID NO: 1415719 - RNA, 19 nt, Artificial Sequence
  Description of Artificial Sequence: Synthetic oligonucleotide
agcuagccaucaaagauac

SEQ ID NO: 1415720 - RNA, 19 nt, Artificial Sequence
  Description of Artificial Sequence: Synthetic oligonucleotide
uacuaguggaaaacagaga

SEQ ID NO: 1415721 - RNA, 19 nt, Artificial Sequence
  Description of Artificial Sequence: Synthetic oligonucleotide
accuuuugagacuggagga

SEQ ID NO: 1415722 - RNA, 19 nt, Artificial Sequence
  Description of Artificial Sequence: Synthetic oligonucleotide
ugucccgcugugaucaaag

SEQ ID NO: 1415723 - RNA, 19 nt, Artificial Sequence
  Description of Artificial Sequence: Synthetic oligonucleotide
gcgaccgucaauuagacca

SEQ ID NO: 1415724 - RNA, 19 nt, Artificial Sequence
  Description of Artificial Sequence: Synthetic oligonucleotide
cauguaaucccaaaucaaa

SEQ ID NO: 1415725 - RNA, 19 nt, Artificial Sequence
  Description of Artificial Sequence: Synthetic oligonucleotide
aaaauggcguguaaaggaa

SEQ ID NO: 1415726 - RNA, 19 nt, Artificial Sequence
  Description of Artificial Sequence: Synthetic oligonucleotide
aaaccuuuugagacuggag

SEQ ID NO: 1415727 - RNA, 19 nt, Artificial Sequence
  Description of Artificial Sequence: Synthetic oligonucleotide
auucguccgauccagcaga

SEQ ID NO: 1415728 - RNA, 19 nt, Artificial Sequence
  Description of Artificial Sequence: Synthetic oligonucleotide
aggacaguugccaaauauc

SEQ ID NO: 1415729 - RNA, 19 nt, Artificial Sequence
  Description of Artificial Sequence: Synthetic oligonucleotide
acaaauuaaaaggcuauuu

SEQ ID NO: 1415730 - RNA, 19 nt, Artificial Sequence
  Description of Artificial Sequence: Synthetic oligonucleotide
auaugagguguaaaugguc

SEQ ID NO: 1415731 - RNA, 19 nt, Artificial Sequence
  Description of Artificial Sequence: Synthetic oligonucleotide
acauacuaguggaaaacag

SEQ ID NO: 1415732 - RNA, 19 nt, Artificial Sequence
  Description of Artificial Sequence: Synthetic oligonucleotide
uuggcggaaucauccaaag

SEQ ID NO: 1415733 - RNA, 19 nt, Artificial Sequence
  Description of Artificial Sequence: Synthetic oligonucleotide
aacacaaaguuagcaacaa

SEQ ID NO: 1415734 - RNA, 19 nt, Artificial Sequence
  Description of Artificial Sequence: Synthetic oligonucleotide
uagugaacucggcuucccg

SEQ ID NO: 1415735 - RNA, 19 nt, Artificial Sequence
  Description of Artificial Sequence: Synthetic oligonucleotide
agucaaaucuauauacaca

SEQ ID NO: 1415736 - RNA, 19 nt, Artificial Sequence
  Description of Artificial Sequence: Synthetic oligonucleotide
uaauaggcaggucuauuuu

SEQ ID NO: 1415737 - RNA, 19 nt, Artificial Sequence
  Description of Artificial Sequence: Synthetic oligonucleotide
aacaaauuaaaaggcuauu

SEQ ID NO: 1415738 - RNA, 19 nt, Artificial Sequence
  Description of Artificial Sequence: Synthetic oligonucleotide
uagugucccgcugugauca

SEQ ID NO: 1415739 - RNA, 19 nt, Artificial Sequence
  Description of Artificial Sequence: Synthetic oligonucleotide
augacuagugucccgcugu

SEQ ID NO: 1415740 - RNA, 19 nt, Artificial Sequence
  Description of Artificial Sequence: Synthetic oligonucleotide
aacuaagcguucaaacacu

SEQ ID NO: 1415741 - RNA, 19 nt, Artificial Sequence
  Description of Artificial Sequence: Synthetic oligonucleotide
caguuccuaagaacuaagc

SEQ ID NO: 1415742 - RNA, 19 nt, Artificial Sequence
  Description of Artificial Sequence: Synthetic oligonucleotide
guucauaugcauccaugac

SEQ ID NO: 1415743 - RNA, 19 nt, Artificial Sequence
  Description of Artificial Sequence: Synthetic oligonucleotide
accaguaauucguccgauc

SEQ ID NO: 1415744 - RNA, 19 nt, Artificial Sequence
  Description of Artificial Sequence: Synthetic oligonucleotide
uggacuuagugaacucggc

SEQ ID NO: 1415745 - RNA, 19 nt, Artificial Sequence
  Description of Artificial Sequence: Synthetic oligonucleotide
uggcguguaaaggaaagcu

SEQ ID NO: 1415746 - RNA, 19 nt, Artificial Sequence
  Description of Artificial Sequence: Synthetic oligonucleotide
uuuuggcggaaucauccaa

SEQ ID NO: 1415747 - RNA, 19 nt, Artificial Sequence
  Description of Artificial Sequence: Synthetic oligonucleotide
uccaugacuagugucccgc

SEQ ID NO: 1415748 - RNA, 19 nt, Artificial Sequence
  Description of Artificial Sequence: Synthetic oligonucleotide
caacaaaccacugcggcug

SEQ ID NO: 1415749 - RNA, 19 nt, Artificial Sequence
  Description of Artificial Sequence: Synthetic oligonucleotide
agaccaaaguuuuccacau

SEQ ID NO: 1415750 - RNA, 19 nt, Artificial Sequence
  Description of Artificial Sequence: Synthetic oligonucleotide
acuagugucccgcugugau

SEQ ID NO: 1415751 - RNA, 19 nt, Artificial Sequence
  Description of Artificial Sequence: Synthetic oligonucleotide
acuuauccaacaaaccacu

SEQ ID NO: 1415752 - RNA, 19 nt, Artificial Sequence
  Description of Artificial Sequence: Synthetic oligonucleotide
uaagaacuaagcguucaaa

SEQ ID NO: 1415753 - RNA, 19 nt, Artificial Sequence
  Description of Artificial Sequence: Synthetic oligonucleotide
ugcuuuguccuuccacuga

SEQ ID NO: 1415754 - RNA, 19 nt, Artificial Sequence
  Description of Artificial Sequence: Synthetic oligonucleotide
auaugcauccaugacuagu

SEQ ID NO: 1415755 - RNA, 19 nt, Artificial Sequence
  Description of Artificial Sequence: Synthetic oligonucleotide
ccaguaauucguccgaucc

SEQ ID NO: 1415756 - RNA, 19 nt, Artificial Sequence
  Description of Artificial Sequence: Synthetic oligonucleotide
aauugguuaagagcacaaa

SEQ ID NO: 1415757 - RNA, 19 nt, Artificial Sequence
  Description of Artificial Sequence: Synthetic oligonucleotide
ccuggauugaaggaaauag

SEQ ID NO: 1415758 - RNA, 19 nt, Artificial Sequence
  Description of Artificial Sequence: Synthetic oligonucleotide
auggcguguaaaggaaagc

SEQ ID NO: 1415759 - RNA, 19 nt, Artificial Sequence
  Description of Artificial Sequence: Synthetic oligonucleotide
accccuacucagcagacca

SEQ ID NO: 1415760 - RNA, 19 nt, Artificial Sequence
  Description of Artificial Sequence: Synthetic oligonucleotide
agggcacaaacaaaucaac

SEQ ID NO: 1415761 - RNA, 19 nt, Artificial Sequence
  Description of Artificial Sequence: Synthetic oligonucleotide
aagccacuauagcaaagaa

SEQ ID NO: 1415762 - RNA, 19 nt, Artificial Sequence
  Description of Artificial Sequence: Synthetic oligonucleotide
agguuagcaguuccuaaga

SEQ ID NO: 1415763 - RNA, 19 nt, Artificial Sequence
  Description of Artificial Sequence: Synthetic oligonucleotide
uggcuuggacucuggaaag

SEQ ID NO: 1415764 - RNA, 19 nt, Artificial Sequence
  Description of Artificial Sequence: Synthetic oligonucleotide
cuuauccaacaaaccacug

SEQ ID NO: 1415765 - RNA, 19 nt, Artificial Sequence
  Description of Artificial Sequence: Synthetic oligonucleotide
guauuuaucaucaaaccuu

SEQ ID NO: 1415766 - RNA, 19 nt, Artificial Sequence
  Description of Artificial Sequence: Synthetic oligonucleotide
aaccccuacucagcagacc

SEQ ID NO: 1415767 - RNA, 19 nt, Artificial Sequence
  Description of Artificial Sequence: Synthetic oligonucleotide
aaaccccuacucagcagac

SEQ ID NO: 1415768 - RNA, 19 nt, Artificial Sequence
  Description of Artificial Sequence: Synthetic oligonucleotide
gguucauaugcauccauga

SEQ ID NO: 1415769 - RNA, 19 nt, Artificial Sequence
  Description of Artificial Sequence: Synthetic oligonucleotide
uggcauuguaagugaacac

SEQ ID NO: 1415770 - RNA, 19 nt, Artificial Sequence
  Description of Artificial Sequence: Synthetic oligonucleotide
auaugacacacaaagccaa

SEQ ID NO: 1415771 - RNA, 19 nt, Artificial Sequence
  Description of Artificial Sequence: Synthetic oligonucleotide
ugguacagauggugaggcg

SEQ ID NO: 1415772 - RNA, 19 nt, Artificial Sequence
  Description of Artificial Sequence: Synthetic oligonucleotide
uucuguggcgagacuguca

SEQ ID NO: 1415773 - RNA, 19 nt, Artificial Sequence
  Description of Artificial Sequence: Synthetic oligonucleotide
auacuugaccaaguuuaag

SEQ ID NO: 1415774 - RNA, 19 nt, Artificial Sequence
  Description of Artificial Sequence: Synthetic oligonucleotide
ucccgcugugaucaaagaa

SEQ ID NO: 1415775 - RNA, 19 nt, Artificial Sequence
  Description of Artificial Sequence: Synthetic oligonucleotide
auaagucuccccaagucaa

SEQ ID NO: 1415776 - RNA, 19 nt, Artificial Sequence
  Description of Artificial Sequence: Synthetic oligonucleotide
ugacuagugucccgcugug

SEQ ID NO: 1415777 - RNA, 19 nt, Artificial Sequence
  Description of Artificial Sequence: Synthetic oligonucleotide
acuggcuucuuuaauuggu

SEQ ID NO: 1415778 - RNA, 19 nt, Artificial Sequence
  Description of Artificial Sequence: Synthetic oligonucleotide
ucucuacccaccaguaauu

SEQ ID NO: 1415779 - RNA, 19 nt, Artificial Sequence
  Description of Artificial Sequence: Synthetic oligonucleotide
aaauuguauccuggauuga

SEQ ID NO: 1415780 - RNA, 19 nt, Artificial Sequence
  Description of Artificial Sequence: Synthetic oligonucleotide
ucauggagccuggagauuu

SEQ ID NO: 1415781 - RNA, 19 nt, Artificial Sequence
  Description of Artificial Sequence: Synthetic oligonucleotide
cccgcugugaucaaagaac

SEQ ID NO: 1415782 - RNA, 19 nt, Artificial Sequence
  Description of Artificial Sequence: Synthetic oligonucleotide
cuugcgacgccgucgccgc

SEQ ID NO: 1415783 - RNA, 19 nt, Artificial Sequence
  Description of Artificial Sequence: Synthetic oligonucleotide
agcaauggacuuagugaac

SEQ ID NO: 1415784 - RNA, 19 nt, Artificial Sequence
  Description of Artificial Sequence: Synthetic oligonucleotide
acuaagcguucaaacacug

SEQ ID NO: 1415785 - RNA, 19 nt, Artificial Sequence
  Description of Artificial Sequence: Synthetic oligonucleotide
auccaugacuagugucccg

SEQ ID NO: 1415786 - RNA, 19 nt, Artificial Sequence
  Description of Artificial Sequence: Synthetic oligonucleotide
uuagugaacucggcuuccc

SEQ ID NO: 1415787 - RNA, 19 nt, Artificial Sequence
  Description of Artificial Sequence: Synthetic oligonucleotide
uccuaagaacuaagcguuc

SEQ ID NO: 1415788 - RNA, 19 nt, Artificial Sequence
  Description of Artificial Sequence: Synthetic oligonucleotide
ggcaggucuauuuuaacaa

SEQ ID NO: 1415789 - RNA, 19 nt, Artificial Sequence
  Description of Artificial Sequence: Synthetic oligonucleotide
agauggugaggcgaccguc

SEQ ID NO: 1415790 - RNA, 19 nt, Artificial Sequence
  Description of Artificial Sequence: Synthetic oligonucleotide
uguaauaggcaggucuauu

SEQ ID NO: 1415791 - RNA, 19 nt, Artificial Sequence
  Description of Artificial Sequence: Synthetic oligonucleotide
ggacaguugccaaauauca

SEQ ID NO: 1415792 - RNA, 19 nt, Artificial Sequence
  Description of Artificial Sequence: Synthetic oligonucleotide
acauuucauacuugaccaa

SEQ ID NO: 1415793 - RNA, 19 nt, Artificial Sequence
  Description of Artificial Sequence: Synthetic oligonucleotide
aguuagcaacaaguuaaca

SEQ ID NO: 1415794 - RNA, 19 nt, Artificial Sequence
  Description of Artificial Sequence: Synthetic oligonucleotide
aaauggcguguaaaggaaa

SEQ ID NO: 1415795 - RNA, 19 nt, Artificial Sequence
  Description of Artificial Sequence: Synthetic oligonucleotide
uaggcaggucuauuuuaac

SEQ ID NO: 1415796 - RNA, 19 nt, Artificial Sequence
  Description of Artificial Sequence: Synthetic oligonucleotide
cuucuuuaauugguuaaga

SEQ ID NO: 1415797 - RNA, 19 nt, Artificial Sequence
  Description of Artificial Sequence: Synthetic oligonucleotide
auagacuaaauaggggcuu

SEQ ID NO: 1415798 - RNA, 19 nt, Artificial Sequence
  Description of Artificial Sequence: Synthetic oligonucleotide
guguaaaggaaagcuguca

SEQ ID NO: 1415799 - RNA, 19 nt, Artificial Sequence
  Description of Artificial Sequence: Synthetic oligonucleotide
agguucauaugcauccaug

SEQ ID NO: 1415800 - RNA, 19 nt, Artificial Sequence
  Description of Artificial Sequence: Synthetic oligonucleotide
auccaacaaaccacugcgg

SEQ ID NO: 1415801 - RNA, 19 nt, Artificial Sequence
  Description of Artificial Sequence: Synthetic oligonucleotide
caugacuagugucccgcug

SEQ ID NO: 1415802 - RNA, 19 nt, Artificial Sequence
  Description of Artificial Sequence: Synthetic oligonucleotide
cagggauuaacacaaaguu

SEQ ID NO: 1415803 - RNA, 19 nt, Artificial Sequence
  Description of Artificial Sequence: Synthetic oligonucleotide
agggauuaacacaaaguua

SEQ ID NO: 1415804 - RNA, 19 nt, Artificial Sequence
  Description of Artificial Sequence: Synthetic oligonucleotide
augcccagcaagguuagca

SEQ ID NO: 1415805 - RNA, 19 nt, Artificial Sequence
  Description of Artificial Sequence: Synthetic oligonucleotide
uccuuauaugagguguaaa

SEQ ID NO: 1415806 - RNA, 19 nt, Artificial Sequence
  Description of Artificial Sequence: Synthetic oligonucleotide
ugaccaaguuuaagcuuuc

SEQ ID NO: 1415807 - RNA, 19 nt, Artificial Sequence
  Description of Artificial Sequence: Synthetic oligonucleotide
ucuacgggcuggcauugua

SEQ ID NO: 1415808 - RNA, 19 nt, Artificial Sequence
  Description of Artificial Sequence: Synthetic oligonucleotide
gaggacaguugccaaauau

SEQ ID NO: 1415809 - RNA, 19 nt, Artificial Sequence
  Description of Artificial Sequence: Synthetic oligonucleotide
agcaguuccuaagaacuaa

SEQ ID NO: 1415810 - RNA, 19 nt, Artificial Sequence
  Description of Artificial Sequence: Synthetic oligonucleotide
uccagcagaaagagagauu

SEQ ID NO: 1415811 - RNA, 19 nt, Artificial Sequence
  Description of Artificial Sequence: Synthetic oligonucleotide
uggcucuacaguccagaau

SEQ ID NO: 1415812 - RNA, 19 nt, Artificial Sequence
  Description of Artificial Sequence: Synthetic oligonucleotide
ucuccccaagucaaaucua

SEQ ID NO: 1415813 - RNA, 19 nt, Artificial Sequence
  Description of Artificial Sequence: Synthetic oligonucleotide
cuuuguccuuccacugaug

SEQ ID NO: 1415814 - RNA, 19 nt, Artificial Sequence
  Description of Artificial Sequence: Synthetic oligonucleotide
ggcuuaucaucaaucuucc

SEQ ID NO: 1415815 - RNA, 19 nt, Artificial Sequence
  Description of Artificial Sequence: Synthetic oligonucleotide
augcauccaugacuagugu

SEQ ID NO: 1415816 - RNA, 19 nt, Artificial Sequence
  Description of Artificial Sequence: Synthetic oligonucleotide
cuaagaacuaagcguucaa

SEQ ID NO: 1415817 - RNA, 19 nt, Artificial Sequence
  Description of Artificial Sequence: Synthetic oligonucleotide
agguguaaauggucagaau

SEQ ID NO: 1415818 - RNA, 19 nt, Artificial Sequence
  Description of Artificial Sequence: Synthetic oligonucleotide
ccuacucagcagaccaugg

SEQ ID NO: 1415819 - RNA, 19 nt, Artificial Sequence
  Description of Artificial Sequence: Synthetic oligonucleotide
cagcuagccaucaaagaua

SEQ ID NO: 1415820 - RNA, 19 nt, Artificial Sequence
  Description of Artificial Sequence: Synthetic oligonucleotide
gcauuguaagugaacacca

SEQ ID NO: 1415821 - RNA, 19 nt, Artificial Sequence
  Description of Artificial Sequence: Synthetic oligonucleotide
gcuacagcuagccaucaaa

SEQ ID NO: 1415822 - RNA, 19 nt, Artificial Sequence
  Description of Artificial Sequence: Synthetic oligonucleotide
aggucuauuuuaacaaauu

SEQ ID NO: 1415823 - RNA, 19 nt, Artificial Sequence
  Description of Artificial Sequence: Synthetic oligonucleotide
cguccgauccagcagaaag

SEQ ID NO: 1415824 - RNA, 19 nt, Artificial Sequence
  Description of Artificial Sequence: Synthetic oligonucleotide
uaacaauacccaggcccca

SEQ ID NO: 1415825 - RNA, 19 nt, Artificial Sequence
  Description of Artificial Sequence: Synthetic oligonucleotide
aggcgaccgucaauuagac

SEQ ID NO: 1415826 - RNA, 19 nt, Artificial Sequence
  Description of Artificial Sequence: Synthetic oligonucleotide
accgucaauuagaccaaag

SEQ ID NO: 1415827 - RNA, 19 nt, Artificial Sequence
  Description of Artificial Sequence: Synthetic oligonucleotide
caguaauucguccgaucca

SEQ ID NO: 1415828 - RNA, 19 nt, Artificial Sequence
  Description of Artificial Sequence: Synthetic oligonucleotide
gccaaaacuggcuuggacu

SEQ ID NO: 1415829 - RNA, 19 nt, Artificial Sequence
  Description of Artificial Sequence: Synthetic oligonucleotide
cuucucccgccuugcgacg

SEQ ID NO: 1415830 - RNA, 19 nt, Artificial Sequence
  Description of Artificial Sequence: Synthetic oligonucleotide
gcugugaucaaagaacuua

SEQ ID NO: 1415831 - RNA, 19 nt, Artificial Sequence
  Description of Artificial Sequence: Synthetic oligonucleotide
ggcguguaaaggaaagcug

SEQ ID NO: 1415832 - RNA, 19 nt, Artificial Sequence
  Description of Artificial Sequence: Synthetic oligonucleotide
aaaguaugcuuggcuuuua

SEQ ID NO: 1415833 - RNA, 19 nt, Artificial Sequence
  Description of Artificial Sequence: Synthetic oligonucleotide
uacagauggugaggcgacc

SEQ ID NO: 1415834 - RNA, 19 nt, Artificial Sequence
  Description of Artificial Sequence: Synthetic oligonucleotide
uccuggauugaaggaaaua

SEQ ID NO: 1415835 - RNA, 19 nt, Artificial Sequence
  Description of Artificial Sequence: Synthetic oligonucleotide
gcgagacugucauggagcc

SEQ ID NO: 1415836 - RNA, 19 nt, Artificial Sequence
  Description of Artificial Sequence: Synthetic oligonucleotide
guaauucguccgauccagc

SEQ ID NO: 1415837 - RNA, 19 nt, Artificial Sequence
  Description of Artificial Sequence: Synthetic oligonucleotide
gaaagcugucauacauaga

SEQ ID NO: 1415838 - RNA, 19 nt, Artificial Sequence
  Description of Artificial Sequence: Synthetic oligonucleotide
ugcauggcacaaagcuuua

SEQ ID NO: 1415839 - RNA, 19 nt, Artificial Sequence
  Description of Artificial Sequence: Synthetic oligonucleotide
auaggauaugacacacaaa

SEQ ID NO: 1415840 - RNA, 19 nt, Artificial Sequence
  Description of Artificial Sequence: Synthetic oligonucleotide
gcugaagcagggauuaaca

SEQ ID NO: 1415841 - RNA, 19 nt, Artificial Sequence
  Description of Artificial Sequence: Synthetic oligonucleotide
gccuggagauuucagguuc

SEQ ID NO: 1415842 - RNA, 19 nt, Artificial Sequence
  Description of Artificial Sequence: Synthetic oligonucleotide
uucguccgauccagcagaa

SEQ ID NO: 1415843 - RNA, 19 nt, Artificial Sequence
  Description of Artificial Sequence: Synthetic oligonucleotide
cugcauggcacaaagcuuu

SEQ ID NO: 1415844 - RNA, 19 nt, Artificial Sequence
  Description of Artificial Sequence: Synthetic oligonucleotide
gucauacauagaaauugua

SEQ ID NO: 1415845 - RNA, 19 nt, Artificial Sequence
  Description of Artificial Sequence: Synthetic oligonucleotide
cucuacccaccaguaauuc

SEQ ID NO: 1415846 - RNA, 19 nt, Artificial Sequence
  Description of Artificial Sequence: Synthetic oligonucleotide
auguaauaggcaggucuau

SEQ ID NO: 1415847 - RNA, 19 nt, Artificial Sequence
  Description of Artificial Sequence: Synthetic oligonucleotide
aggggugcauguaauccca

SEQ ID NO: 1415848 - RNA, 19 nt, Artificial Sequence
  Description of Artificial Sequence: Synthetic oligonucleotide
guccgauccagcagaaaga

SEQ ID NO: 1415849 - RNA, 19 nt, Artificial Sequence
  Description of Artificial Sequence: Synthetic oligonucleotide
caggucuauuuuaacaaau

SEQ ID NO: 1415850 - RNA, 19 nt, Artificial Sequence
  Description of Artificial Sequence: Synthetic oligonucleotide
ggccacaagaaagaugcuc

SEQ ID NO: 1415851 - RNA, 19 nt, Artificial Sequence
  Description of Artificial Sequence: Synthetic oligonucleotide
cauggagccuggagauuuc

SEQ ID NO: 1415852 - RNA, 19 nt, Artificial Sequence
  Description of Artificial Sequence: Synthetic oligonucleotide
uucucccgccuugcgacgc

SEQ ID NO: 1415853 - RNA, 19 nt, Artificial Sequence
  Description of Artificial Sequence: Synthetic oligonucleotide
agacaaggccuggcucuac

SEQ ID NO: 1415854 - RNA, 19 nt, Artificial Sequence
  Description of Artificial Sequence: Synthetic oligonucleotide
acaaaucaacaggaacaua

SEQ ID NO: 1415855 - RNA, 19 nt, Artificial Sequence
  Description of Artificial Sequence: Synthetic oligonucleotide
ccuuauaugagguguaaau

SEQ ID NO: 1415856 - RNA, 19 nt, Artificial Sequence
  Description of Artificial Sequence: Synthetic oligonucleotide
gugaacucggcuucccgcu

SEQ ID NO: 1415857 - RNA, 19 nt, Artificial Sequence
  Description of Artificial Sequence: Synthetic oligonucleotide
gcaggucuauuuuaacaaa

SEQ ID NO: 1415858 - RNA, 19 nt, Artificial Sequence
  Description of Artificial Sequence: Synthetic oligonucleotide
cuucucuacccaccaguaa

SEQ ID NO: 1415859 - RNA, 19 nt, Artificial Sequence
  Description of Artificial Sequence: Synthetic oligonucleotide
uggugaggcgaccgucaau

SEQ ID NO: 1415860 - RNA, 19 nt, Artificial Sequence
  Description of Artificial Sequence: Synthetic oligonucleotide
ggacuuagugaacucggcu

SEQ ID NO: 1415861 - RNA, 19 nt, Artificial Sequence
  Description of Artificial Sequence: Synthetic oligonucleotide
gcauguaaucccaaaucaa

SEQ ID NO: 1415862 - RNA, 19 nt, Artificial Sequence
  Description of Artificial Sequence: Synthetic oligonucleotide
gaccaaaguuuuccacaua

SEQ ID NO: 1415863 - RNA, 19 nt, Artificial Sequence
  Description of Artificial Sequence: Synthetic oligonucleotide
agacuaaauaggggcuuuu

SEQ ID NO: 1415864 - RNA, 19 nt, Artificial Sequence
  Description of Artificial Sequence: Synthetic oligonucleotide
cauuguaagugaacaccau

SEQ ID NO: 1415865 - RNA, 19 nt, Artificial Sequence
  Description of Artificial Sequence: Synthetic oligonucleotide
gcagggauuaacacaaagu

SEQ ID NO: 1415866 - RNA, 19 nt, Artificial Sequence
  Description of Artificial Sequence: Synthetic oligonucleotide
gcaauggacuuagugaacu

SEQ ID NO: 1415867 - RNA, 19 nt, Artificial Sequence
  Description of Artificial Sequence: Synthetic oligonucleotide
ugcgacgccgucgccgcca

SEQ ID NO: 1415868 - RNA, 19 nt, Artificial Sequence
  Description of Artificial Sequence: Synthetic oligonucleotide
cucagccuucuacgggcug

SEQ ID NO: 1415869 - RNA, 19 nt, Artificial Sequence
  Description of Artificial Sequence: Synthetic oligonucleotide
cguguaaaggaaagcuguc

SEQ ID NO: 1415870 - RNA, 19 nt, Artificial Sequence
  Description of Artificial Sequence: Synthetic oligonucleotide
ccuugcgacgccgucgccg

SEQ ID NO: 1415871 - RNA, 19 nt, Artificial Sequence
  Description of Artificial Sequence: Synthetic oligonucleotide
gacuagugucccgcuguga

SEQ ID NO: 1415872 - RNA, 19 nt, Artificial Sequence
  Description of Artificial Sequence: Synthetic oligonucleotide
ggcgaccgucaauuagacc

SEQ ID NO: 1415873 - RNA, 19 nt, Artificial Sequence
  Description of Artificial Sequence: Synthetic oligonucleotide
gucccgcugugaucaaaga

SEQ ID NO: 1415874 - RNA, 19 nt, Artificial Sequence
  Description of Artificial Sequence: Synthetic oligonucleotide
aguuuuccacauacuugua

SEQ ID NO: 1415875 - RNA, 19 nt, Artificial Sequence
  Description of Artificial Sequence: Synthetic oligonucleotide
accauggaggcuacagcua

SEQ ID NO: 1415876 - RNA, 19 nt, Artificial Sequence
  Description of Artificial Sequence: Synthetic oligonucleotide
uucuacgggcuggcauugu

SEQ ID NO: 1415877 - RNA, 19 nt, Artificial Sequence
  Description of Artificial Sequence: Synthetic oligonucleotide
cuguggcgagacugucaug

SEQ ID NO: 1415878 - RNA, 19 nt, Artificial Sequence
  Description of Artificial Sequence: Synthetic oligonucleotide
ggugaggcgaccgucaauu

SEQ ID NO: 1415879 - RNA, 19 nt, Artificial Sequence
  Description of Artificial Sequence: Synthetic oligonucleotide
cccuacucagcagaccaug

SEQ ID NO: 1415880 - RNA, 19 nt, Artificial Sequence
  Description of Artificial Sequence: Synthetic oligonucleotide
ccgucaauuagaccaaagu

SEQ ID NO: 1415881 - RNA, 19 nt, Artificial Sequence
  Description of Artificial Sequence: Synthetic oligonucleotide
gcaagguuagcaguuccua

SEQ ID NO: 1415882 - RNA, 19 nt, Artificial Sequence
  Description of Artificial Sequence: Synthetic oligonucleotide
caugcccagcaagguuagc

SEQ ID NO: 1415883 - RNA, 19 nt, Artificial Sequence
  Description of Artificial Sequence: Synthetic oligonucleotide
gaccaaguuuaagcuuucu

SEQ ID NO: 1415884 - RNA, 19 nt, Artificial Sequence
  Description of Artificial Sequence: Synthetic oligonucleotide
gggugcauguaaucccaaa

SEQ ID NO: 1415885 - RNA, 19 nt, Artificial Sequence
  Description of Artificial Sequence: Synthetic oligonucleotide
gaccgucaauuagaccaaa

SEQ ID NO: 1415886 - RNA, 19 nt, Artificial Sequence
  Description of Artificial Sequence: Synthetic oligonucleotide
ucccgccuugcgacgccgu

SEQ ID NO: 1415887 - RNA, 19 nt, Artificial Sequence
  Description of Artificial Sequence: Synthetic oligonucleotide
ccuggagauuucagguuca

SEQ ID NO: 1415888 - RNA, 19 nt, Artificial Sequence
  Description of Artificial Sequence: Synthetic oligonucleotide
cgucaauuagaccaaaguu

SEQ ID NO: 1415889 - RNA, 19 nt, Artificial Sequence
  Description of Artificial Sequence: Synthetic oligonucleotide
gcauaucuugauaggaaau

SEQ ID NO: 1415890 - RNA, 19 nt, Artificial Sequence
  Description of Artificial Sequence: Synthetic oligonucleotide
cucccgccuugcgacgccg

SEQ ID NO: 1415891 - RNA, 19 nt, Artificial Sequence
  Description of Artificial Sequence: Synthetic oligonucleotide
ucguccgauccagcagaaa

SEQ ID NO: 1415892 - RNA, 19 nt, Artificial Sequence
  Description of Artificial Sequence: Synthetic oligonucleotide
ccaccaguaauucguccga

SEQ ID NO: 1415893 - RNA, 19 nt, Artificial Sequence
  Description of Artificial Sequence: Synthetic oligonucleotide
gcggaaucauccaaagagu

SEQ ID NO: 1415894 - RNA, 19 nt, Artificial Sequence
  Description of Artificial Sequence: Synthetic oligonucleotide
ggaaucauccaaagaguuu

SEQ ID NO: 1415895 - RNA, 19 nt, Artificial Sequence
  Description of Artificial Sequence: Synthetic oligonucleotide
gugaggcgaccgucaauua

SEQ ID NO: 1415896 - RNA, 19 nt, Artificial Sequence
  Description of Artificial Sequence: Synthetic oligonucleotide
caaaacuggcuuggacucu

SEQ ID NO: 1415897 - RNA, 19 nt, Artificial Sequence
  Description of Artificial Sequence: Synthetic oligonucleotide
ccgcugugaucaaagaacu

SEQ ID NO: 1415898 - RNA, 19 nt, Artificial Sequence
  Description of Artificial Sequence: Synthetic oligonucleotide
cagcugauccaucccacuu

SEQ ID NO: 1415899 - RNA, 19 nt, Artificial Sequence
  Description of Artificial Sequence: Synthetic oligonucleotide
caguccagaauggccucaa

SEQ ID NO: 1415900 - RNA, 19 nt, Artificial Sequence
  Description of Artificial Sequence: Synthetic oligonucleotide
ccgccuugcgacgccgucg

SEQ ID NO: 1415901 - RNA, 19 nt, Artificial Sequence
  Description of Artificial Sequence: Synthetic oligonucleotide
agccuucuacgggcuggca

SEQ ID NO: 1415902 - RNA, 19 nt, Artificial Sequence
  Description of Artificial Sequence: Synthetic oligonucleotide
ggcuacagcuagccaucaa

SEQ ID NO: 1415903 - RNA, 19 nt, Artificial Sequence
  Description of Artificial Sequence: Synthetic oligonucleotide
ccuucuacgggcuggcauu

SEQ ID NO: 1415904 - RNA, 19 nt, Artificial Sequence
  Description of Artificial Sequence: Synthetic oligonucleotide
gccuucuacgggcuggcau

SEQ ID NO: 1415905 - RNA, 19 nt, Artificial Sequence
  Description of Artificial Sequence: Synthetic oligonucleotide
gugucccgcugugaucaaa

SEQ ID NO: 1415906 - RNA, 19 nt, Artificial Sequence
  Description of Artificial Sequence: Synthetic oligonucleotide
cuggagauuucagguucau

SEQ ID NO: 1415907 - RNA, 19 nt, Artificial Sequence
  Description of Artificial Sequence: Synthetic oligonucleotide
cgaccgucaauuagaccaa

SEQ ID NO: 1415908 - RNA, 19 nt, Artificial Sequence
  Description of Artificial Sequence: Synthetic oligonucleotide
caccaguaauucguccgau

SEQ ID NO: 1415909 - RNA, 19 nt, Artificial Sequence
  Description of Artificial Sequence: Synthetic oligonucleotide
gcuagccaucaaagauaca

SEQ ID NO: 1415910 - RNA, 19 nt, Artificial Sequence
  Description of Artificial Sequence: Synthetic oligonucleotide
ggggugcauguaaucccaa

SEQ ID NO: 1415911 - RNA, 19 nt, Artificial Sequence
  Description of Artificial Sequence: Synthetic oligonucleotide
ccaugacuagugucccgcu

SEQ ID NO: 1415912 - RNA, 19 nt, Artificial Sequence
  Description of Artificial Sequence: Synthetic oligonucleotide
cccgccuugcgacgccguc

SEQ ID NO: 1415913 - RNA, 19 nt, Artificial Sequence
  Description of Artificial Sequence: Synthetic oligonucleotide
gccuugcgacgccgucgcc

SEQ ID NO: 1415914 - RNA, 19 nt, Artificial Sequence
  Description of Artificial Sequence: Synthetic oligonucleotide
ccccuacucagcagaccau

SEQ ID NO: 1415915 - RNA, 19 nt, Artificial Sequence
  Description of Artificial Sequence: Synthetic oligonucleotide
aaaaccaagagaaauaagc

SEQ ID NO: 1415916 - RNA, 19 nt, Artificial Sequence
  Description of Artificial Sequence: Synthetic oligonucleotide
ucuuuuaucaucuuuauga

SEQ ID NO: 1415917 - RNA, 19 nt, Artificial Sequence
  Description of Artificial Sequence: Synthetic oligonucleotide
aaguuuagugccuaaaccg

SEQ ID NO: 1415918 - RNA, 19 nt, Artificial Sequence
  Description of Artificial Sequence: Synthetic oligonucleotide
cuuuuaauaaguuuagugc

SEQ ID NO: 1415919 - RNA, 19 nt, Artificial Sequence
  Description of Artificial Sequence: Synthetic oligonucleotide
uuuuaauaaguuuagugcc

SEQ ID NO: 1415920 - RNA, 19 nt, Artificial Sequence
  Description of Artificial Sequence: Synthetic oligonucleotide
aaacuaaaguagcaaguac

SEQ ID NO: 1415921 - RNA, 19 nt, Artificial Sequence
  Description of Artificial Sequence: Synthetic oligonucleotide
gauagcuccgccuucaggg

SEQ ID NO: 1415922 - RNA, 19 nt, Artificial Sequence
  Description of Artificial Sequence: Synthetic oligonucleotide
ugucguuugacccugggag

SEQ ID NO: 1415923 - RNA, 19 nt, Artificial Sequence
  Description of Artificial Sequence: Synthetic oligonucleotide
auaaguuuagugccuaaac

SEQ ID NO: 1415924 - RNA, 19 nt, Artificial Sequence
  Description of Artificial Sequence: Synthetic oligonucleotide
aauaagcccucccacaaag

SEQ ID NO: 1415925 - RNA, 19 nt, Artificial Sequence
  Description of Artificial Sequence: Synthetic oligonucleotide
uaaguuuagugccuaaacc

SEQ ID NO: 1415926 - RNA, 19 nt, Artificial Sequence
  Description of Artificial Sequence: Synthetic oligonucleotide
  modified_base (5)..(5): a, c, u, g, unknown or other
uuuanccuggccaauaggu

SEQ ID NO: 1415927 - RNA, 19 nt, Artificial Sequence
  Description of Artificial Sequence: Synthetic oligonucleotide
aagagaaauaagcccuccc

SEQ ID NO: 1415928 - RNA, 19 nt, Artificial Sequence
  Description of Artificial Sequence: Synthetic oligonucleotide
uuuaauaaguuuagugccu

SEQ ID NO: 1415929 - RNA, 19 nt, Artificial Sequence
  Description of Artificial Sequence: Synthetic oligonucleotide
uccaugaucuuucccaggg

SEQ ID NO: 1415930 - RNA, 19 nt, Artificial Sequence
  Description of Artificial Sequence: Synthetic oligonucleotide
aagcugaaaacuaaaguag

SEQ ID NO: 1415931 - RNA, 19 nt, Artificial Sequence
  Description of Artificial Sequence: Synthetic oligonucleotide
aguucuggacucuucuucc

SEQ ID NO: 1415932 - RNA, 19 nt, Artificial Sequence
  Description of Artificial Sequence: Synthetic oligonucleotide
  modified_base (15)..(15): a, c, u, g, unknown or other
ucugacaccguuuanccug

SEQ ID NO: 1415933 - RNA, 19 nt, Artificial Sequence
  Description of Artificial Sequence: Synthetic oligonucleotide
ucuuuaugaguucuggacu

SEQ ID NO: 1415934 - RNA, 19 nt, Artificial Sequence
  Description of Artificial Sequence: Synthetic oligonucleotide
aaaccgaaagcucugacuu

SEQ ID NO: 1415935 - RNA, 19 nt, Artificial Sequence
  Description of Artificial Sequence: Synthetic oligonucleotide
aaacacagccuuuuaauaa

SEQ ID NO: 1415936 - RNA, 19 nt, Artificial Sequence
  Description of Artificial Sequence: Synthetic oligonucleotide
uggauguaguccaugaucu

SEQ ID NO: 1415937 - RNA, 19 nt, Artificial Sequence
  Description of Artificial Sequence: Synthetic oligonucleotide
uguuaucagucucaugugc

SEQ ID NO: 1415938 - RNA, 19 nt, Artificial Sequence
  Description of Artificial Sequence: Synthetic oligonucleotide
auuggaguacgguuuuacc

SEQ ID NO: 1415939 - RNA, 19 nt, Artificial Sequence
  Description of Artificial Sequence: Synthetic oligonucleotide
agugcacucuuacacaggg

SEQ ID NO: 1415940 - RNA, 19 nt, Artificial Sequence
  Description of Artificial Sequence: Synthetic oligonucleotide
aacuaaaguagcaaguacu

SEQ ID NO: 1415941 - RNA, 19 nt, Artificial Sequence
  Description of Artificial Sequence: Synthetic oligonucleotide
cuuuuaucaucuuuaugag

SEQ ID NO: 1415942 - RNA, 19 nt, Artificial Sequence
  Description of Artificial Sequence: Synthetic oligonucleotide
ugcaguucauucugcaugg

SEQ ID NO: 1415943 - RNA, 19 nt, Artificial Sequence
  Description of Artificial Sequence: Synthetic oligonucleotide
  modified_base (3)..(3): a, c, u, g, unknown or other
uanccuggccaauaggucc

SEQ ID NO: 1415944 - RNA, 19 nt, Artificial Sequence
  Description of Artificial Sequence: Synthetic oligonucleotide
acucaaagaggagugagcg

SEQ ID NO: 1415945 - RNA, 19 nt, Artificial Sequence
  Description of Artificial Sequence: Synthetic oligonucleotide
uuggaguacgguuuuacca

SEQ ID NO: 1415946 - RNA, 19 nt, Artificial Sequence
  Description of Artificial Sequence: Synthetic oligonucleotide
uuagacaucuccccugagc

SEQ ID NO: 1415947 - RNA, 19 nt, Artificial Sequence
  Description of Artificial Sequence: Synthetic oligonucleotide
auuggagggaaguucacug

SEQ ID NO: 1415948 - RNA, 19 nt, Artificial Sequence
  Description of Artificial Sequence: Synthetic oligonucleotide
uuauccccagcuaagacuc

SEQ ID NO: 1415949 - RNA, 19 nt, Artificial Sequence
  Description of Artificial Sequence: Synthetic oligonucleotide
ucaaagaggagugagcgcu

SEQ ID NO: 1415950 - RNA, 19 nt, Artificial Sequence
  Description of Artificial Sequence: Synthetic oligonucleotide
uuagugccuaaaccgaaag

SEQ ID NO: 1415951 - RNA, 19 nt, Artificial Sequence
  Description of Artificial Sequence: Synthetic oligonucleotide
uagcaaguacugcagcugg

SEQ ID NO: 1415952 - RNA, 19 nt, Artificial Sequence
  Description of Artificial Sequence: Synthetic oligonucleotide
cauuucugcaaggugaggg

SEQ ID NO: 1415953 - RNA, 19 nt, Artificial Sequence
  Description of Artificial Sequence: Synthetic oligonucleotide
  modified_base (17)..(17): a, c, u, g, unknown or other
ucucugacaccguuuancc

SEQ ID NO: 1415954 - RNA, 19 nt, Artificial Sequence
  Description of Artificial Sequence: Synthetic oligonucleotide
ugugagucgaugaucacau

SEQ ID NO: 1415955 - RNA, 19 nt, Artificial Sequence
  Description of Artificial Sequence: Synthetic oligonucleotide
gucucaugugcuuuggagg

SEQ ID NO: 1415956 - RNA, 19 nt, Artificial Sequence
  Description of Artificial Sequence: Synthetic oligonucleotide
agagaaauaagcccuccca

SEQ ID NO: 1415957 - RNA, 19 nt, Artificial Sequence
  Description of Artificial Sequence: Synthetic oligonucleotide
uuuagcuggguccaggcau

SEQ ID NO: 1415958 - RNA, 19 nt, Artificial Sequence
  Description of Artificial Sequence: Synthetic oligonucleotide
uaagcccucccacaaaggc

SEQ ID NO: 1415959 - RNA, 19 nt, Artificial Sequence
  Description of Artificial Sequence: Synthetic oligonucleotide
agugccuaaaccgaaagcu

SEQ ID NO: 1415960 - RNA, 19 nt, Artificial Sequence
  Description of Artificial Sequence: Synthetic oligonucleotide
agucucaugugcuuuggag

SEQ ID NO: 1415961 - RNA, 19 nt, Artificial Sequence
  Description of Artificial Sequence: Synthetic oligonucleotide
uuuuagacaucuccccuga

SEQ ID NO: 1415962 - RNA, 19 nt, Artificial Sequence
  Description of Artificial Sequence: Synthetic oligonucleotide
gagucgaugaucacauugg

SEQ ID NO: 1415963 - RNA, 19 nt, Artificial Sequence
  Description of Artificial Sequence: Synthetic oligonucleotide
uaaaccgaaagcucugacu

SEQ ID NO: 1415964 - RNA, 19 nt, Artificial Sequence
  Description of Artificial Sequence: Synthetic oligonucleotide
ucccacaaaggcaagcuga

SEQ ID NO: 1415965 - RNA, 19 nt, Artificial Sequence
  Description of Artificial Sequence: Synthetic oligonucleotide
agaaauaagcccucccaca

SEQ ID NO: 1415966 - RNA, 19 nt, Artificial Sequence
  Description of Artificial Sequence: Synthetic oligonucleotide
aucgcuuccagugacugac

SEQ ID NO: 1415967 - RNA, 19 nt, Artificial Sequence
  Description of Artificial Sequence: Synthetic oligonucleotide
uggaguacgguuuuaccac

SEQ ID NO: 1415968 - RNA, 19 nt, Artificial Sequence
  Description of Artificial Sequence: Synthetic oligonucleotide
gagaaauaagcccucccac

SEQ ID NO: 1415969 - RNA, 19 nt, Artificial Sequence
  Description of Artificial Sequence: Synthetic oligonucleotide
auuucugacauuucugcaa

SEQ ID NO: 1415970 - RNA, 19 nt, Artificial Sequence
  Description of Artificial Sequence: Synthetic oligonucleotide
ccuuuuaauaaguuuagug

SEQ ID NO: 1415971 - RNA, 19 nt, Artificial Sequence
  Description of Artificial Sequence: Synthetic oligonucleotide
uuggaaacaauguccuucu

SEQ ID NO: 1415972 - RNA, 19 nt, Artificial Sequence
  Description of Artificial Sequence: Synthetic oligonucleotide
uccagcgucuccuucugcg

SEQ ID NO: 1415973 - RNA, 19 nt, Artificial Sequence
  Description of Artificial Sequence: Synthetic oligonucleotide
  modified_base (11)..(11): a, c, u, g, unknown or other
acaccguuuanccuggcca

SEQ ID NO: 1415974 - RNA, 19 nt, Artificial Sequence
  Description of Artificial Sequence: Synthetic oligonucleotide
agguccguaagguccgucc

SEQ ID NO: 1415975 - RNA, 19 nt, Artificial Sequence
  Description of Artificial Sequence: Synthetic oligonucleotide
guaagguccguccucucgg

SEQ ID NO: 1415976 - RNA, 19 nt, Artificial Sequence
  Description of Artificial Sequence: Synthetic oligonucleotide
  modified_base (6)..(6): a, c, u, g, unknown or other
guuuanccuggccaauagg

SEQ ID NO: 1415977 - RNA, 19 nt, Artificial Sequence
  Description of Artificial Sequence: Synthetic oligonucleotide
  modified_base (4)..(4): a, c, u, g, unknown or other
uuanccuggccaauagguc

SEQ ID NO: 1415978 - RNA, 19 nt, Artificial Sequence
  Description of Artificial Sequence: Synthetic oligonucleotide
aagacggcuccaucuccgc

SEQ ID NO: 1415979 - RNA, 19 nt, Artificial Sequence
  Description of Artificial Sequence: Synthetic oligonucleotide
agcuuguuaaggcagcacu

SEQ ID NO: 1415980 - RNA, 19 nt, Artificial Sequence
  Description of Artificial Sequence: Synthetic oligonucleotide
aauaaguuuagugccuaaa

SEQ ID NO: 1415981 - RNA, 19 nt, Artificial Sequence
  Description of Artificial Sequence: Synthetic oligonucleotide
uacgguuuuaccacuuccu

SEQ ID NO: 1415982 - RNA, 19 nt, Artificial Sequence
  Description of Artificial Sequence: Synthetic oligonucleotide
cuuggaaacaauguccuuc

SEQ ID NO: 1415983 - RNA, 19 nt, Artificial Sequence
  Description of Artificial Sequence: Synthetic oligonucleotide
uggucgugcacuuccaggc

SEQ ID NO: 1415984 - RNA, 19 nt, Artificial Sequence
  Description of Artificial Sequence: Synthetic oligonucleotide
uucucacugugccacaacu

SEQ ID NO: 1415985 - RNA, 19 nt, Artificial Sequence
  Description of Artificial Sequence: Synthetic oligonucleotide
augaucacauuggaguacg

SEQ ID NO: 1415986 - RNA, 19 nt, Artificial Sequence
  Description of Artificial Sequence: Synthetic oligonucleotide
aggggaagugcacucuuac

SEQ ID NO: 1415987 - RNA, 19 nt, Artificial Sequence
  Description of Artificial Sequence: Synthetic oligonucleotide
uguuugugcucuucgcuug

SEQ ID NO: 1415988 - RNA, 19 nt, Artificial Sequence
  Description of Artificial Sequence: Synthetic oligonucleotide
gaaauaagcccucccacaa

SEQ ID NO: 1415989 - RNA, 19 nt, Artificial Sequence
  Description of Artificial Sequence: Synthetic oligonucleotide
cuuacacagggucuggaug

SEQ ID NO: 1415990 - RNA, 19 nt, Artificial Sequence
  Description of Artificial Sequence: Synthetic oligonucleotide
ucucuaucuccuuggaaac

SEQ ID NO: 1415991 - RNA, 19 nt, Artificial Sequence
  Description of Artificial Sequence: Synthetic oligonucleotide
  modified_base (14)..(14): a, c, u, g, unknown or other
cugacaccguuuanccugg

SEQ ID NO: 1415992 - RNA, 19 nt, Artificial Sequence
  Description of Artificial Sequence: Synthetic oligonucleotide
accaucucaauuucugaca

SEQ ID NO: 1415993 - RNA, 19 nt, Artificial Sequence
  Description of Artificial Sequence: Synthetic oligonucleotide
uuuagugccuaaaccgaaa

SEQ ID NO: 1415994 - RNA, 19 nt, Artificial Sequence
  Description of Artificial Sequence: Synthetic oligonucleotide
aucacauuggaguacgguu

SEQ ID NO: 1415995 - RNA, 19 nt, Artificial Sequence
  Description of Artificial Sequence: Synthetic oligonucleotide
uccuucugcgucacguggg

SEQ ID NO: 1415996 - RNA, 19 nt, Artificial Sequence
  Description of Artificial Sequence: Synthetic oligonucleotide
ugccuguucucacugugcc

SEQ ID NO: 1415997 - RNA, 19 nt, Artificial Sequence
  Description of Artificial Sequence: Synthetic oligonucleotide
  modified_base (18)..(18): a, c, u, g, unknown or other
uucucugacaccguuuanc

SEQ ID NO: 1415998 - RNA, 19 nt, Artificial Sequence
  Description of Artificial Sequence: Synthetic oligonucleotide
ugaucuuucccaggggaag

SEQ ID NO: 1415999 - RNA, 19 nt, Artificial Sequence
  Description of Artificial Sequence: Synthetic oligonucleotide
ugagauuggagggaaguuc

SEQ ID NO: 1416000 - RNA, 19 nt, Artificial Sequence
  Description of Artificial Sequence: Synthetic oligonucleotide
uucgcuugugcuucucucc

SEQ ID NO: 1416001 - RNA, 19 nt, Artificial Sequence
  Description of Artificial Sequence: Synthetic oligonucleotide
uucacaagcccaccgugcu

SEQ ID NO: 1416002 - RNA, 19 nt, Artificial Sequence
  Description of Artificial Sequence: Synthetic oligonucleotide
aggaagacggcuccaucuc

SEQ ID NO: 1416003 - RNA, 19 nt, Artificial Sequence
  Description of Artificial Sequence: Synthetic oligonucleotide
uggagagcuuguuaaggca

SEQ ID NO: 1416004 - RNA, 19 nt, Artificial Sequence
  Description of Artificial Sequence: Synthetic oligonucleotide
ugcuuuggagguccguaag

SEQ ID NO: 1416005 - RNA, 19 nt, Artificial Sequence
  Description of Artificial Sequence: Synthetic oligonucleotide
uagugccuaaaccgaaagc

SEQ ID NO: 1416006 - RNA, 19 nt, Artificial Sequence
  Description of Artificial Sequence: Synthetic oligonucleotide
uuccaugcugacucaaaga

SEQ ID NO: 1416007 - RNA, 19 nt, Artificial Sequence
  Description of Artificial Sequence: Synthetic oligonucleotide
augaguucuggacucuucu

SEQ ID NO: 1416008 - RNA, 19 nt, Artificial Sequence
  Description of Artificial Sequence: Synthetic oligonucleotide
gaguucuggacucuucuuc

SEQ ID NO: 1416009 - RNA, 19 nt, Artificial Sequence
  Description of Artificial Sequence: Synthetic oligonucleotide
caccaucucaauuucugac

SEQ ID NO: 1416010 - RNA, 19 nt, Artificial Sequence
  Description of Artificial Sequence: Synthetic oligonucleotide
cugacuuuucucuggcuug

SEQ ID NO: 1416011 - RNA, 19 nt, Artificial Sequence
  Description of Artificial Sequence: Synthetic oligonucleotide
gaagacggcuccaucuccg

SEQ ID NO: 1416012 - RNA, 19 nt, Artificial Sequence
  Description of Artificial Sequence: Synthetic oligonucleotide
uuaauaaguuuagugccua

SEQ ID NO: 1416013 - RNA, 19 nt, Artificial Sequence
  Description of Artificial Sequence: Synthetic oligonucleotide
gggaagugcacucuuacac

SEQ ID NO: 1416014 - RNA, 19 nt, Artificial Sequence
  Description of Artificial Sequence: Synthetic oligonucleotide
aaauaagcccucccacaaa

SEQ ID NO: 1416015 - RNA, 19 nt, Artificial Sequence
  Description of Artificial Sequence: Synthetic oligonucleotide
aggcaucugcaguccaugc

SEQ ID NO: 1416016 - RNA, 19 nt, Artificial Sequence
  Description of Artificial Sequence: Synthetic oligonucleotide
auagcuccgccuucagggg

SEQ ID NO: 1416017 - RNA, 19 nt, Artificial Sequence
  Description of Artificial Sequence: Synthetic oligonucleotide
agcacagaucuuguccugc

SEQ ID NO: 1416018 - RNA, 19 nt, Artificial Sequence
  Description of Artificial Sequence: Synthetic oligonucleotide
gacggcuccaucuccgcag

SEQ ID NO: 1416019 - RNA, 19 nt, Artificial Sequence
  Description of Artificial Sequence: Synthetic oligonucleotide
aaaggcaagcugaaaacua

SEQ ID NO: 1416020 - RNA, 19 nt, Artificial Sequence
  Description of Artificial Sequence: Synthetic oligonucleotide
agauagcuccgccuucagg

SEQ ID NO: 1416021 - RNA, 19 nt, Artificial Sequence
  Description of Artificial Sequence: Synthetic oligonucleotide
gacuucggcauucucugac

SEQ ID NO: 1416022 - RNA, 19 nt, Artificial Sequence
  Description of Artificial Sequence: Synthetic oligonucleotide
ugugccacaacugcaguuc

SEQ ID NO: 1416023 - RNA, 19 nt, Artificial Sequence
  Description of Artificial Sequence: Synthetic oligonucleotide
ugaucacauuggaguacgg

SEQ ID NO: 1416024 - RNA, 19 nt, Artificial Sequence
  Description of Artificial Sequence: Synthetic oligonucleotide
ugcugacucaaagaggagu

SEQ ID NO: 1416025 - RNA, 19 nt, Artificial Sequence
  Description of Artificial Sequence: Synthetic oligonucleotide
uuuagacaucuccccugag

SEQ ID NO: 1416026 - RNA, 19 nt, Artificial Sequence
  Description of Artificial Sequence: Synthetic oligonucleotide
agcuaagacucucuucacu

SEQ ID NO: 1416027 - RNA, 19 nt, Artificial Sequence
  Description of Artificial Sequence: Synthetic oligonucleotide
ugacgucagguugauacug

SEQ ID NO: 1416028 - RNA, 19 nt, Artificial Sequence
  Description of Artificial Sequence: Synthetic oligonucleotide
gagauuggagggaaguuca

SEQ ID NO: 1416029 - RNA, 19 nt, Artificial Sequence
  Description of Artificial Sequence: Synthetic oligonucleotide
aguuuagugccuaaaccga

SEQ ID NO: 1416030 - RNA, 19 nt, Artificial Sequence
  Description of Artificial Sequence: Synthetic oligonucleotide
uaugaguucuggacucuuc

SEQ ID NO: 1416031 - RNA, 19 nt, Artificial Sequence
  Description of Artificial Sequence: Synthetic oligonucleotide
uuucugcaaggugaggggc

SEQ ID NO: 1416032 - RNA, 19 nt, Artificial Sequence
  Description of Artificial Sequence: Synthetic oligonucleotide
accacaaacuguucauccu

SEQ ID NO: 1416033 - RNA, 19 nt, Artificial Sequence
  Description of Artificial Sequence: Synthetic oligonucleotide
uaagguccguccucucggg

SEQ ID NO: 1416034 - RNA, 19 nt, Artificial Sequence
  Description of Artificial Sequence: Synthetic oligonucleotide
uugucguuugacccuggga

SEQ ID NO: 1416035 - RNA, 19 nt, Artificial Sequence
  Description of Artificial Sequence: Synthetic oligonucleotide
ucaccuucgugacgucagg

SEQ ID NO: 1416036 - RNA, 19 nt, Artificial Sequence
  Description of Artificial Sequence: Synthetic oligonucleotide
gacucaaagaggagugagc

SEQ ID NO: 1416037 - RNA, 19 nt, Artificial Sequence
  Description of Artificial Sequence: Synthetic oligonucleotide
  modified_base (12)..(12): a, c, u, g, unknown or other
gacaccguuuanccuggcc

SEQ ID NO: 1416038 - RNA, 19 nt, Artificial Sequence
  Description of Artificial Sequence: Synthetic oligonucleotide
ucucauaguccuucuucgu

SEQ ID NO: 1416039 - RNA, 19 nt, Artificial Sequence
  Description of Artificial Sequence: Synthetic oligonucleotide
ucgcuggagagcuuguuaa

SEQ ID NO: 1416040 - RNA, 19 nt, Artificial Sequence
  Description of Artificial Sequence: Synthetic oligonucleotide
gucagaguucugugagucg

SEQ ID NO: 1416041 - RNA, 19 nt, Artificial Sequence
  Description of Artificial Sequence: Synthetic oligonucleotide
guccgugaugcucugcucc

SEQ ID NO: 1416042 - RNA, 19 nt, Artificial Sequence
  Description of Artificial Sequence: Synthetic oligonucleotide
gucgacguccuccuggaug

SEQ ID NO: 1416043 - RNA, 19 nt, Artificial Sequence
  Description of Artificial Sequence: Synthetic oligonucleotide
uuaaggcagcacuugccaa

SEQ ID NO: 1416044 - RNA, 19 nt, Artificial Sequence
  Description of Artificial Sequence: Synthetic oligonucleotide
ucuuacacagggucuggau

SEQ ID NO: 1416045 - RNA, 19 nt, Artificial Sequence
  Description of Artificial Sequence: Synthetic oligonucleotide
uaauaaguuuagugccuaa

SEQ ID NO: 1416046 - RNA, 19 nt, Artificial Sequence
  Description of Artificial Sequence: Synthetic oligonucleotide
uuuggagguccguaagguc

SEQ ID NO: 1416047 - RNA, 19 nt, Artificial Sequence
  Description of Artificial Sequence: Synthetic oligonucleotide
aaggcaagcugaaaacuaa

SEQ ID NO: 1416048 - RNA, 19 nt, Artificial Sequence
  Description of Artificial Sequence: Synthetic oligonucleotide
caaacuguucauccucuuc

SEQ ID NO: 1416049 - RNA, 19 nt, Artificial Sequence
  Description of Artificial Sequence: Synthetic oligonucleotide
gacuuuagcuggguccagg

SEQ ID NO: 1416050 - RNA, 19 nt, Artificial Sequence
  Description of Artificial Sequence: Synthetic oligonucleotide
cuaaaccgaaagcucugac

SEQ ID NO: 1416051 - RNA, 19 nt, Artificial Sequence
  Description of Artificial Sequence: Synthetic oligonucleotide
uugauacugugcaccauuu

SEQ ID NO: 1416052 - RNA, 19 nt, Artificial Sequence
  Description of Artificial Sequence: Synthetic oligonucleotide
uuaucagucucaugugcuu

SEQ ID NO: 1416053 - RNA, 19 nt, Artificial Sequence
  Description of Artificial Sequence: Synthetic oligonucleotide
uggccaauagguccagcgu

SEQ ID NO: 1416054 - RNA, 19 nt, Artificial Sequence
  Description of Artificial Sequence: Synthetic oligonucleotide
agguccguccucucggguc

SEQ ID NO: 1416055 - RNA, 19 nt, Artificial Sequence
  Description of Artificial Sequence: Synthetic oligonucleotide
gacacucugagcuucucua

SEQ ID NO: 1416056 - RNA, 19 nt, Artificial Sequence
  Description of Artificial Sequence: Synthetic oligonucleotide
agugagcgcuccuucucuc

SEQ ID NO: 1416057 - RNA, 19 nt, Artificial Sequence
  Description of Artificial Sequence: Synthetic oligonucleotide
ucucagggucucugugucg

SEQ ID NO: 1416058 - RNA, 19 nt, Artificial Sequence
  Description of Artificial Sequence: Synthetic oligonucleotide
uuuaugaguucuggacucu

SEQ ID NO: 1416059 - RNA, 19 nt, Artificial Sequence
  Description of Artificial Sequence: Synthetic oligonucleotide
agguugauacugugcacca

SEQ ID NO: 1416060 - RNA, 19 nt, Artificial Sequence
  Description of Artificial Sequence: Synthetic oligonucleotide
uucggcauucucugacacc

SEQ ID NO: 1416061 - RNA, 19 nt, Artificial Sequence
  Description of Artificial Sequence: Synthetic oligonucleotide
aagugcacucuuacacagg

SEQ ID NO: 1416062 - RNA, 19 nt, Artificial Sequence
  Description of Artificial Sequence: Synthetic oligonucleotide
cuucacugccucaucgcug

SEQ ID NO: 1416063 - RNA, 19 nt, Artificial Sequence
  Description of Artificial Sequence: Synthetic oligonucleotide
ucgcuugugcuucucuccu

SEQ ID NO: 1416064 - RNA, 19 nt, Artificial Sequence
  Description of Artificial Sequence: Synthetic oligonucleotide
cuugucuggauccucucga

SEQ ID NO: 1416065 - RNA, 19 nt, Artificial Sequence
  Description of Artificial Sequence: Synthetic oligonucleotide
uuccugaccugucucccac

SEQ ID NO: 1416066 - RNA, 19 nt, Artificial Sequence
  Description of Artificial Sequence: Synthetic oligonucleotide
cauugucagaguucuguga

SEQ ID NO: 1416067 - RNA, 19 nt, Artificial Sequence
  Description of Artificial Sequence: Synthetic oligonucleotide
agcucagauagcuccgccu

SEQ ID NO: 1416068 - RNA, 19 nt, Artificial Sequence
  Description of Artificial Sequence: Synthetic oligonucleotide
uucugcgucacguggggau

SEQ ID NO: 1416069 - RNA, 19 nt, Artificial Sequence
  Description of Artificial Sequence: Synthetic oligonucleotide
cuugucguuugacccuggg

SEQ ID NO: 1416070 - RNA, 19 nt, Artificial Sequence
  Description of Artificial Sequence: Synthetic oligonucleotide
guucacuggggacuucggc

SEQ ID NO: 1416071 - RNA, 19 nt, Artificial Sequence
  Description of Artificial Sequence: Synthetic oligonucleotide
ugugucggucucugucagg

SEQ ID NO: 1416072 - RNA, 19 nt, Artificial Sequence
  Description of Artificial Sequence: Synthetic oligonucleotide
cugaaaacuaaaguagcaa

SEQ ID NO: 1416073 - RNA, 19 nt, Artificial Sequence
  Description of Artificial Sequence: Synthetic oligonucleotide
uugacagacugcugcaauu

SEQ ID NO: 1416074 - RNA, 19 nt, Artificial Sequence
  Description of Artificial Sequence: Synthetic oligonucleotide
ucugcaguccaugcucuca

SEQ ID NO: 1416075 - RNA, 19 nt, Artificial Sequence
  Description of Artificial Sequence: Synthetic oligonucleotide
gugucggucucugucaggc

SEQ ID NO: 1416076 - RNA, 19 nt, Artificial Sequence
  Description of Artificial Sequence: Synthetic oligonucleotide
gcuuuggagguccguaagg

SEQ ID NO: 1416077 - RNA, 19 nt, Artificial Sequence
  Description of Artificial Sequence: Synthetic oligonucleotide
ucuugucguuugacccugg

SEQ ID NO: 1416078 - RNA, 19 nt, Artificial Sequence
  Description of Artificial Sequence: Synthetic oligonucleotide
cuucggcauucucugacac

SEQ ID NO: 1416079 - RNA, 19 nt, Artificial Sequence
  Description of Artificial Sequence: Synthetic oligonucleotide
ccagcuaagacucucuuca

SEQ ID NO: 1416080 - RNA, 19 nt, Artificial Sequence
  Description of Artificial Sequence: Synthetic oligonucleotide
ugucuggauccucucgauc

SEQ ID NO: 1416081 - RNA, 19 nt, Artificial Sequence
  Description of Artificial Sequence: Synthetic oligonucleotide
acuucggcauucucugaca

SEQ ID NO: 1416082 - RNA, 19 nt, Artificial Sequence
  Description of Artificial Sequence: Synthetic oligonucleotide
cuucgcuugugcuucucuc

SEQ ID NO: 1416083 - RNA, 19 nt, Artificial Sequence
  Description of Artificial Sequence: Synthetic oligonucleotide
uggggaucgcuuccaguga

SEQ ID NO: 1416084 - RNA, 19 nt, Artificial Sequence
  Description of Artificial Sequence: Synthetic oligonucleotide
uugcucagggccucggcgu

SEQ ID NO: 1416085 - RNA, 19 nt, Artificial Sequence
  Description of Artificial Sequence: Synthetic oligonucleotide
ugugcuuuggagguccgua

SEQ ID NO: 1416086 - RNA, 19 nt, Artificial Sequence
  Description of Artificial Sequence: Synthetic oligonucleotide
cugcugcaauuucucauag

SEQ ID NO: 1416087 - RNA, 19 nt, Artificial Sequence
  Description of Artificial Sequence: Synthetic oligonucleotide
  modified_base (2)..(2): a, c, u, g, unknown or other
anccuggccaauaggucca

SEQ ID NO: 1416088 - RNA, 19 nt, Artificial Sequence
  Description of Artificial Sequence: Synthetic oligonucleotide
ugcaaggugaggggcagcu

SEQ ID NO: 1416089 - RNA, 19 nt, Artificial Sequence
  Description of Artificial Sequence: Synthetic oligonucleotide
cauaguccuucuucgucuc

SEQ ID NO: 1416090 - RNA, 19 nt, Artificial Sequence
  Description of Artificial Sequence: Synthetic oligonucleotide
gcuggagagcuuguuaagg

SEQ ID NO: 1416091 - RNA, 19 nt, Artificial Sequence
  Description of Artificial Sequence: Synthetic oligonucleotide
cugccuguucucacugugc

SEQ ID NO: 1416092 - RNA, 19 nt, Artificial Sequence
  Description of Artificial Sequence: Synthetic oligonucleotide
ugauacugugcaccauuuu

SEQ ID NO: 1416093 - RNA, 19 nt, Artificial Sequence
  Description of Artificial Sequence: Synthetic oligonucleotide
acgucagguugauacugug

SEQ ID NO: 1416094 - RNA, 19 nt, Artificial Sequence
  Description of Artificial Sequence: Synthetic oligonucleotide
cucaucgcuggagagcuug

SEQ ID NO: 1416095 - RNA, 19 nt, Artificial Sequence
  Description of Artificial Sequence: Synthetic oligonucleotide
ucauucugcauggcgucga

SEQ ID NO: 1416096 - RNA, 19 nt, Artificial Sequence
  Description of Artificial Sequence: Synthetic oligonucleotide
caauagguccagcgucucc

SEQ ID NO: 1416097 - RNA, 19 nt, Artificial Sequence
  Description of Artificial Sequence: Synthetic oligonucleotide
aaccgaaagcucugacuuu

SEQ ID NO: 1416098 - RNA, 19 nt, Artificial Sequence
  Description of Artificial Sequence: Synthetic oligonucleotide
auaagcccucccacaaagg

SEQ ID NO: 1416099 - RNA, 19 nt, Artificial Sequence
  Description of Artificial Sequence: Synthetic oligonucleotide
uccguaagguccguccucu

SEQ ID NO: 1416100 - RNA, 19 nt, Artificial Sequence
  Description of Artificial Sequence: Synthetic oligonucleotide
gcugacucaaagaggagug

SEQ ID NO: 1416101 - RNA, 19 nt, Artificial Sequence
  Description of Artificial Sequence: Synthetic oligonucleotide
cuucgugacgucagguuga

SEQ ID NO: 1416102 - RNA, 19 nt, Artificial Sequence
  Description of Artificial Sequence: Synthetic oligonucleotide
ugaguucuggacucuucuu

SEQ ID NO: 1416103 - RNA, 19 nt, Artificial Sequence
  Description of Artificial Sequence: Synthetic oligonucleotide
uuaccacuuccugaccugu

SEQ ID NO: 1416104 - RNA, 19 nt, Artificial Sequence
  Description of Artificial Sequence: Synthetic oligonucleotide
acucuuacacagggucugg

SEQ ID NO: 1416105 - RNA, 19 nt, Artificial Sequence
  Description of Artificial Sequence: Synthetic oligonucleotide
gagcgcuccuucucucccg

SEQ ID NO: 1416106 - RNA, 19 nt, Artificial Sequence
  Description of Artificial Sequence: Synthetic oligonucleotide
ucugugagucgaugaucac

SEQ ID NO: 1416107 - RNA, 19 nt, Artificial Sequence
  Description of Artificial Sequence: Synthetic oligonucleotide
aucugcaguccaugcucuc

SEQ ID NO: 1416108 - RNA, 19 nt, Artificial Sequence
  Description of Artificial Sequence: Synthetic oligonucleotide
ugccucaucgcuggagagc

SEQ ID NO: 1416109 - RNA, 19 nt, Artificial Sequence
  Description of Artificial Sequence: Synthetic oligonucleotide
uacugcagcuggaguaaaa

SEQ ID NO: 1416110 - RNA, 19 nt, Artificial Sequence
  Description of Artificial Sequence: Synthetic oligonucleotide
ugcauggcgucgacguccu

SEQ ID NO: 1416111 - RNA, 19 nt, Artificial Sequence
  Description of Artificial Sequence: Synthetic oligonucleotide
cugacuuuagcugggucca

SEQ ID NO: 1416112 - RNA, 19 nt, Artificial Sequence
  Description of Artificial Sequence: Synthetic oligonucleotide
ggcgucgacguccuccugg

SEQ ID NO: 1416113 - RNA, 19 nt, Artificial Sequence
  Description of Artificial Sequence: Synthetic oligonucleotide
aucgcuggagagcuuguua

SEQ ID NO: 1416114 - RNA, 19 nt, Artificial Sequence
  Description of Artificial Sequence: Synthetic oligonucleotide
gcucucuugucguuugacc

SEQ ID NO: 1416115 - RNA, 19 nt, Artificial Sequence
  Description of Artificial Sequence: Synthetic oligonucleotide
  modified_base (10)..(10): a, c, u, g, unknown or other
caccguuuanccuggccaa

SEQ ID NO: 1416116 - RNA, 19 nt, Artificial Sequence
  Description of Artificial Sequence: Synthetic oligonucleotide
auggcgucgacguccuccu

SEQ ID NO: 1416117 - RNA, 19 nt, Artificial Sequence
  Description of Artificial Sequence: Synthetic oligonucleotide
ucgugcacuuccaggccga

SEQ ID NO: 1416118 - RNA, 19 nt, Artificial Sequence
  Description of Artificial Sequence: Synthetic oligonucleotide
cugugucggucucugucag

SEQ ID NO: 1416119 - RNA, 19 nt, Artificial Sequence
  Description of Artificial Sequence: Synthetic oligonucleotide
acacucugagcuucucuau

SEQ ID NO: 1416120 - RNA, 19 nt, Artificial Sequence
  Description of Artificial Sequence: Synthetic oligonucleotide
cacaagcccaccgugcuuc

SEQ ID NO: 1416121 - RNA, 19 nt, Artificial Sequence
  Description of Artificial Sequence: Synthetic oligonucleotide
guuaucagucucaugugcu

SEQ ID NO: 1416122 - RNA, 19 nt, Artificial Sequence
  Description of Artificial Sequence: Synthetic oligonucleotide
uuugacccugggaggugcu

SEQ ID NO: 1416123 - RNA, 19 nt, Artificial Sequence
  Description of Artificial Sequence: Synthetic oligonucleotide
gucacguggggaucgcuuc

SEQ ID NO: 1416124 - RNA, 19 nt, Artificial Sequence
  Description of Artificial Sequence: Synthetic oligonucleotide
uugucuggauccucucgau

SEQ ID NO: 1416125 - RNA, 19 nt, Artificial Sequence
  Description of Artificial Sequence: Synthetic oligonucleotide
caaagaggagugagcgcuc

SEQ ID NO: 1416126 - RNA, 19 nt, Artificial Sequence
  Description of Artificial Sequence: Synthetic oligonucleotide
cacuuccaggccgagguac

SEQ ID NO: 1416127 - RNA, 19 nt, Artificial Sequence
  Description of Artificial Sequence: Synthetic oligonucleotide
agagcuuguuaaggcagca

SEQ ID NO: 1416128 - RNA, 19 nt, Artificial Sequence
  Description of Artificial Sequence: Synthetic oligonucleotide
guucugugagucgaugauc

SEQ ID NO: 1416129 - RNA, 19 nt, Artificial Sequence
  Description of Artificial Sequence: Synthetic oligonucleotide
ggaagacggcuccaucucc

SEQ ID NO: 1416130 - RNA, 19 nt, Artificial Sequence
  Description of Artificial Sequence: Synthetic oligonucleotide
uguucucacugugccacaa

SEQ ID NO: 1416131 - RNA, 19 nt, Artificial Sequence
  Description of Artificial Sequence: Synthetic oligonucleotide
cugugagucgaugaucaca

SEQ ID NO: 1416132 - RNA, 19 nt, Artificial Sequence
  Description of Artificial Sequence: Synthetic oligonucleotide
ugcucucuugucguuugac

SEQ ID NO: 1416133 - RNA, 19 nt, Artificial Sequence
  Description of Artificial Sequence: Synthetic oligonucleotide
accgaaagcucugacuuua

SEQ ID NO: 1416134 - RNA, 19 nt, Artificial Sequence
  Description of Artificial Sequence: Synthetic oligonucleotide
uucccaggggaagugcacu

SEQ ID NO: 1416135 - RNA, 19 nt, Artificial Sequence
  Description of Artificial Sequence: Synthetic oligonucleotide
ccuucgugacgucagguug

SEQ ID NO: 1416136 - RNA, 19 nt, Artificial Sequence
  Description of Artificial Sequence: Synthetic oligonucleotide
ugcugacuuuucucuggcu

SEQ ID NO: 1416137 - RNA, 19 nt, Artificial Sequence
  Description of Artificial Sequence: Synthetic oligonucleotide
cucuugucguuugacccug

SEQ ID NO: 1416138 - RNA, 19 nt, Artificial Sequence
  Description of Artificial Sequence: Synthetic oligonucleotide
guuuagugccuaaaccgaa

SEQ ID NO: 1416139 - RNA, 19 nt, Artificial Sequence
  Description of Artificial Sequence: Synthetic oligonucleotide
cagcuaagacucucuucac

SEQ ID NO: 1416140 - RNA, 19 nt, Artificial Sequence
  Description of Artificial Sequence: Synthetic oligonucleotide
accuucgugacgucagguu

SEQ ID NO: 1416141 - RNA, 19 nt, Artificial Sequence
  Description of Artificial Sequence: Synthetic oligonucleotide
gcaaguacugcagcuggag

SEQ ID NO: 1416142 - RNA, 19 nt, Artificial Sequence
  Description of Artificial Sequence: Synthetic oligonucleotide
aguucacuggggacuucgg

SEQ ID NO: 1416143 - RNA, 19 nt, Artificial Sequence
  Description of Artificial Sequence: Synthetic oligonucleotide
acuguccgugaugcucugc

SEQ ID NO: 1416144 - RNA, 19 nt, Artificial Sequence
  Description of Artificial Sequence: Synthetic oligonucleotide
gaucgcuuccagugacuga

SEQ ID NO: 1416145 - RNA, 19 nt, Artificial Sequence
  Description of Artificial Sequence: Synthetic oligonucleotide
uuaugaguucuggacucuu

SEQ ID NO: 1416146 - RNA, 19 nt, Artificial Sequence
  Description of Artificial Sequence: Synthetic oligonucleotide
gaucacauuggaguacggu

SEQ ID NO: 1416147 - RNA, 19 nt, Artificial Sequence
  Description of Artificial Sequence: Synthetic oligonucleotide
cccuucucccaucaugagg

SEQ ID NO: 1416148 - RNA, 19 nt, Artificial Sequence
  Description of Artificial Sequence: Synthetic oligonucleotide
aucuuucccaggggaagug

SEQ ID NO: 1416149 - RNA, 19 nt, Artificial Sequence
  Description of Artificial Sequence: Synthetic oligonucleotide
  modified_base (7)..(7): a, c, u, g, unknown or other
cguuuanccuggccaauag

SEQ ID NO: 1416150 - RNA, 19 nt, Artificial Sequence
  Description of Artificial Sequence: Synthetic oligonucleotide
  modified_base (19)..(19): a, c, u, g, unknown or other
auucucugacaccguuuan

SEQ ID NO: 1416151 - RNA, 19 nt, Artificial Sequence
  Description of Artificial Sequence: Synthetic oligonucleotide
gagcuuguuaaggcagcac

SEQ ID NO: 1416152 - RNA, 19 nt, Artificial Sequence
  Description of Artificial Sequence: Synthetic oligonucleotide
ggcuguucaccuucgugac

SEQ ID NO: 1416153 - RNA, 19 nt, Artificial Sequence
  Description of Artificial Sequence: Synthetic oligonucleotide
gcuugcugacuuuucucug

SEQ ID NO: 1416154 - RNA, 19 nt, Artificial Sequence
  Description of Artificial Sequence: Synthetic oligonucleotide
cuuccaccacaaacuguuc

SEQ ID NO: 1416155 - RNA, 19 nt, Artificial Sequence
  Description of Artificial Sequence: Synthetic oligonucleotide
uccugaccugucucccacc

SEQ ID NO: 1416156 - RNA, 19 nt, Artificial Sequence
  Description of Artificial Sequence: Synthetic oligonucleotide
ugacuuuagcuggguccag

SEQ ID NO: 1416157 - RNA, 19 nt, Artificial Sequence
  Description of Artificial Sequence: Synthetic oligonucleotide
uguccgugaugcucugcuc

SEQ ID NO: 1416158 - RNA, 19 nt, Artificial Sequence
  Description of Artificial Sequence: Synthetic oligonucleotide
gguccguccucucgggucc

SEQ ID NO: 1416159 - RNA, 19 nt, Artificial Sequence
  Description of Artificial Sequence: Synthetic oligonucleotide
gcuguucaccuucgugacg

SEQ ID NO: 1416160 - RNA, 19 nt, Artificial Sequence
  Description of Artificial Sequence: Synthetic oligonucleotide
cauucugcauggcgucgac

SEQ ID NO: 1416161 - RNA, 19 nt, Artificial Sequence
  Description of Artificial Sequence: Synthetic oligonucleotide
gguacucuccugagauugg

SEQ ID NO: 1416162 - RNA, 19 nt, Artificial Sequence
  Description of Artificial Sequence: Synthetic oligonucleotide
ucuucgucuccaagaucuu

SEQ ID NO: 1416163 - RNA, 19 nt, Artificial Sequence
  Description of Artificial Sequence: Synthetic oligonucleotide
cagcacuugccaaucaacu

SEQ ID NO: 1416164 - RNA, 19 nt, Artificial Sequence
  Description of Artificial Sequence: Synthetic oligonucleotide
  modified_base (13)..(13): a, c, u, g, unknown or other
ugacaccguuuanccuggc

SEQ ID NO: 1416165 - RNA, 19 nt, Artificial Sequence
  Description of Artificial Sequence: Synthetic oligonucleotide
augaucuuucccaggggaa

SEQ ID NO: 1416166 - RNA, 19 nt, Artificial Sequence
  Description of Artificial Sequence: Synthetic oligonucleotide
gcugccuguucucacugug

SEQ ID NO: 1416167 - RNA, 19 nt, Artificial Sequence
  Description of Artificial Sequence: Synthetic oligonucleotide
ccaagagaaauaagcccuc

SEQ ID NO: 1416168 - RNA, 19 nt, Artificial Sequence
  Description of Artificial Sequence: Synthetic oligonucleotide
caggcaucugcaguccaug

SEQ ID NO: 1416169 - RNA, 19 nt, Artificial Sequence
  Description of Artificial Sequence: Synthetic oligonucleotide
agacggcuccaucuccgca

SEQ ID NO: 1416170 - RNA, 19 nt, Artificial Sequence
  Description of Artificial Sequence: Synthetic oligonucleotide
ucgcuuccagugacugaca

SEQ ID NO: 1416171 - RNA, 19 nt, Artificial Sequence
  Description of Artificial Sequence: Synthetic oligonucleotide
ucuccgcagggcuggcugu

SEQ ID NO: 1416172 - RNA, 19 nt, Artificial Sequence
  Description of Artificial Sequence: Synthetic oligonucleotide
ucacaagcccaccgugcuu

SEQ ID NO: 1416173 - RNA, 19 nt, Artificial Sequence
  Description of Artificial Sequence: Synthetic oligonucleotide
cugcgucacguggggaucg

SEQ ID NO: 1416174 - RNA, 19 nt, Artificial Sequence
  Description of Artificial Sequence: Synthetic oligonucleotide
ucugcgucacguggggauc

SEQ ID NO: 1416175 - RNA, 19 nt, Artificial Sequence
  Description of Artificial Sequence: Synthetic oligonucleotide
ggaucgcuuccagugacug

SEQ ID NO: 1416176 - RNA, 19 nt, Artificial Sequence
  Description of Artificial Sequence: Synthetic oligonucleotide
cucagugcucucuugucgu

SEQ ID NO: 1416177 - RNA, 19 nt, Artificial Sequence
  Description of Artificial Sequence: Synthetic oligonucleotide
cagauagcuccgccuucag

SEQ ID NO: 1416178 - RNA, 19 nt, Artificial Sequence
  Description of Artificial Sequence: Synthetic oligonucleotide
cguaagguccguccucucg

SEQ ID NO: 1416179 - RNA, 19 nt, Artificial Sequence
  Description of Artificial Sequence: Synthetic oligonucleotide
acguggggaucgcuuccag

SEQ ID NO: 1416180 - RNA, 19 nt, Artificial Sequence
  Description of Artificial Sequence: Synthetic oligonucleotide
cuucucagggucucugugu

SEQ ID NO: 1416181 - RNA, 19 nt, Artificial Sequence
  Description of Artificial Sequence: Synthetic oligonucleotide
cuguucaccuucgugacgu

SEQ ID NO: 1416182 - RNA, 19 nt, Artificial Sequence
  Description of Artificial Sequence: Synthetic oligonucleotide
caucaugaggaagacggcu

SEQ ID NO: 1416183 - RNA, 19 nt, Artificial Sequence
  Description of Artificial Sequence: Synthetic oligonucleotide
gugcuuuggagguccguaa

SEQ ID NO: 1416184 - RNA, 19 nt, Artificial Sequence
  Description of Artificial Sequence: Synthetic oligonucleotide
cuuuggagguccguaaggu

SEQ ID NO: 1416185 - RNA, 19 nt, Artificial Sequence
  Description of Artificial Sequence: Synthetic oligonucleotide
guacucuccugagauugga

SEQ ID NO: 1416186 - RNA, 19 nt, Artificial Sequence
  Description of Artificial Sequence: Synthetic oligonucleotide
  modified_base (16)..(16): a, c, u, g, unknown or other
cucugacaccguuuanccu

SEQ ID NO: 1416187 - RNA, 19 nt, Artificial Sequence
  Description of Artificial Sequence: Synthetic oligonucleotide
ccaucaugaggaagacggc

SEQ ID NO: 1416188 - RNA, 19 nt, Artificial Sequence
  Description of Artificial Sequence: Synthetic oligonucleotide
aggccgagguacucuccug

SEQ ID NO: 1416189 - RNA, 19 nt, Artificial Sequence
  Description of Artificial Sequence: Synthetic oligonucleotide
ggagugagcgcuccuucuc

SEQ ID NO: 1416190 - RNA, 19 nt, Artificial Sequence
  Description of Artificial Sequence: Synthetic oligonucleotide
guccguaagguccguccuc

SEQ ID NO: 1416191 - RNA, 19 nt, Artificial Sequence
  Description of Artificial Sequence: Synthetic oligonucleotide
ccuucugcgucacgugggg

SEQ ID NO: 1416192 - RNA, 19 nt, Artificial Sequence
  Description of Artificial Sequence: Synthetic oligonucleotide
ggggaucgcuuccagugac

SEQ ID NO: 1416193 - RNA, 19 nt, Artificial Sequence
  Description of Artificial Sequence: Synthetic oligonucleotide
cucuaucuccuuggaaaca

SEQ ID NO: 1416194 - RNA, 19 nt, Artificial Sequence
  Description of Artificial Sequence: Synthetic oligonucleotide
guucaccuucgugacguca

SEQ ID NO: 1416195 - RNA, 19 nt, Artificial Sequence
  Description of Artificial Sequence: Synthetic oligonucleotide
uugacccugggaggugcug

SEQ ID NO: 1416196 - RNA, 19 nt, Artificial Sequence
  Description of Artificial Sequence: Synthetic oligonucleotide
ucccggcuugacagacugc

SEQ ID NO: 1416197 - RNA, 19 nt, Artificial Sequence
  Description of Artificial Sequence: Synthetic oligonucleotide
aggcaagcugaaaacuaaa

SEQ ID NO: 1416198 - RNA, 19 nt, Artificial Sequence
  Description of Artificial Sequence: Synthetic oligonucleotide
auagguccagcgucuccuu

SEQ ID NO: 1416199 - RNA, 19 nt, Artificial Sequence
  Description of Artificial Sequence: Synthetic oligonucleotide
ugccggcaccaucucaauu

SEQ ID NO: 1416200 - RNA, 19 nt, Artificial Sequence
  Description of Artificial Sequence: Synthetic oligonucleotide
uguucaccuucgugacguc

SEQ ID NO: 1416201 - RNA, 19 nt, Artificial Sequence
  Description of Artificial Sequence: Synthetic oligonucleotide
cugacucaaagaggaguga

SEQ ID NO: 1416202 - RNA, 19 nt, Artificial Sequence
  Description of Artificial Sequence: Synthetic oligonucleotide
uucgugacgucagguugau

SEQ ID NO: 1416203 - RNA, 19 nt, Artificial Sequence
  Description of Artificial Sequence: Synthetic oligonucleotide
ggggaagugcacucuuaca

SEQ ID NO: 1416204 - RNA, 19 nt, Artificial Sequence
  Description of Artificial Sequence: Synthetic oligonucleotide
gugacgucagguugauacu

SEQ ID NO: 1416205 - RNA, 19 nt, Artificial Sequence
  Description of Artificial Sequence: Synthetic oligonucleotide
cuugacagacugcugcaau

SEQ ID NO: 1416206 - RNA, 19 nt, Artificial Sequence
  Description of Artificial Sequence: Synthetic oligonucleotide
agcccaccgugcuucuccu

SEQ ID NO: 1416207 - RNA, 19 nt, Artificial Sequence
  Description of Artificial Sequence: Synthetic oligonucleotide
gccgagguacucuccugag

SEQ ID NO: 1416208 - RNA, 19 nt, Artificial Sequence
  Description of Artificial Sequence: Synthetic oligonucleotide
ccccuuauccccagcuaag

SEQ ID NO: 1416209 - RNA, 19 nt, Artificial Sequence
  Description of Artificial Sequence: Synthetic oligonucleotide
caccgcacuguccgugaug

SEQ ID NO: 1416210 - RNA, 19 nt, Artificial Sequence
  Description of Artificial Sequence: Synthetic oligonucleotide
gccuaaaccgaaagcucug

SEQ ID NO: 1416211 - RNA, 19 nt, Artificial Sequence
  Description of Artificial Sequence: Synthetic oligonucleotide
cuguccgugaugcucugcu

SEQ ID NO: 1416212 - RNA, 19 nt, Artificial Sequence
  Description of Artificial Sequence: Synthetic oligonucleotide
ggaggugcuggucgugcac

SEQ ID NO: 1416213 - RNA, 19 nt, Artificial Sequence
  Description of Artificial Sequence: Synthetic oligonucleotide
caucugcaguccaugcucu

SEQ ID NO: 1416214 - RNA, 19 nt, Artificial Sequence
  Description of Artificial Sequence: Synthetic oligonucleotide
gacgucagguugauacugu

SEQ ID NO: 1416215 - RNA, 19 nt, Artificial Sequence
  Description of Artificial Sequence: Synthetic oligonucleotide
uccuucucucccggcuuga

SEQ ID NO: 1416216 - RNA, 19 nt, Artificial Sequence
  Description of Artificial Sequence: Synthetic oligonucleotide
guuugugcucuucgcuugu

SEQ ID NO: 1416217 - RNA, 19 nt, Artificial Sequence
  Description of Artificial Sequence: Synthetic oligonucleotide
cccagcuaagacucucuuc

SEQ ID NO: 1416218 - RNA, 19 nt, Artificial Sequence
  Description of Artificial Sequence: Synthetic oligonucleotide
  modified_base (9)..(9): a, c, u, g, unknown or other
accguuuanccuggccaau

SEQ ID NO: 1416219 - RNA, 19 nt, Artificial Sequence
  Description of Artificial Sequence: Synthetic oligonucleotide
ggccgagguacucuccuga

SEQ ID NO: 1416220 - RNA, 19 nt, Artificial Sequence
  Description of Artificial Sequence: Synthetic oligonucleotide
cucuuacacagggucugga

SEQ ID NO: 1416221 - RNA, 19 nt, Artificial Sequence
  Description of Artificial Sequence: Synthetic oligonucleotide
gcugacuuuucucuggcuu

SEQ ID NO: 1416222 - RNA, 19 nt, Artificial Sequence
  Description of Artificial Sequence: Synthetic oligonucleotide
cucggaguucuuuuaucau

SEQ ID NO: 1416223 - RNA, 19 nt, Artificial Sequence
  Description of Artificial Sequence: Synthetic oligonucleotide
cucggcgugcugccuguuc

SEQ ID NO: 1416224 - RNA, 19 nt, Artificial Sequence
  Description of Artificial Sequence: Synthetic oligonucleotide
ugcgucacguggggaucgc

SEQ ID NO: 1416225 - RNA, 19 nt, Artificial Sequence
  Description of Artificial Sequence: Synthetic oligonucleotide
ggcagaaugucugucuccu

SEQ ID NO: 1416226 - RNA, 19 nt, Artificial Sequence
  Description of Artificial Sequence: Synthetic oligonucleotide
cacuguccgugaugcucug

SEQ ID NO: 1416227 - RNA, 19 nt, Artificial Sequence
  Description of Artificial Sequence: Synthetic oligonucleotide
ccgaaagcucugacuuuag

SEQ ID NO: 1416228 - RNA, 19 nt, Artificial Sequence
  Description of Artificial Sequence: Synthetic oligonucleotide
ccaaucaacugaagcagcu

SEQ ID NO: 1416229 - RNA, 19 nt, Artificial Sequence
  Description of Artificial Sequence: Synthetic oligonucleotide
augugcuuuggagguccgu

SEQ ID NO: 1416230 - RNA, 19 nt, Artificial Sequence
  Description of Artificial Sequence: Synthetic oligonucleotide
ggaguacgguuuuaccacu

SEQ ID NO: 1416231 - RNA, 19 nt, Artificial Sequence
  Description of Artificial Sequence: Synthetic oligonucleotide
cccggggucuguuuucuuc

SEQ ID NO: 1416232 - RNA, 19 nt, Artificial Sequence
  Description of Artificial Sequence: Synthetic oligonucleotide
caccgugcuucuccucauc

SEQ ID NO: 1416233 - RNA, 19 nt, Artificial Sequence
  Description of Artificial Sequence: Synthetic oligonucleotide
cagguccccugccggcacc

SEQ ID NO: 1416234 - RNA, 19 nt, Artificial Sequence
  Description of Artificial Sequence: Synthetic oligonucleotide
uggcgucgacguccuccug

SEQ ID NO: 1416235 - RNA, 19 nt, Artificial Sequence
  Description of Artificial Sequence: Synthetic oligonucleotide
ccugccggcaccaucucaa

SEQ ID NO: 1416236 - RNA, 19 nt, Artificial Sequence
  Description of Artificial Sequence: Synthetic oligonucleotide
gagguacucuccugagauu

SEQ ID NO: 1416237 - RNA, 19 nt, Artificial Sequence
  Description of Artificial Sequence: Synthetic oligonucleotide
gagguccguaagguccguc

SEQ ID NO: 1416238 - RNA, 19 nt, Artificial Sequence
  Description of Artificial Sequence: Synthetic oligonucleotide
ggacacucugagcuucucu

SEQ ID NO: 1416239 - RNA, 19 nt, Artificial Sequence
  Description of Artificial Sequence: Synthetic oligonucleotide
ggacuucggcauucucuga

SEQ ID NO: 1416240 - RNA, 19 nt, Artificial Sequence
  Description of Artificial Sequence: Synthetic oligonucleotide
gguccguaagguccguccu

SEQ ID NO: 1416241 - RNA, 19 nt, Artificial Sequence
  Description of Artificial Sequence: Synthetic oligonucleotide
ccaucucaauuucugacau

SEQ ID NO: 1416242 - RNA, 19 nt, Artificial Sequence
  Description of Artificial Sequence: Synthetic oligonucleotide
ccggcaccaucucaauuuc

SEQ ID NO: 1416243 - RNA, 19 nt, Artificial Sequence
  Description of Artificial Sequence: Synthetic oligonucleotide
guccccugccggcaccauc

SEQ ID NO: 1416244 - RNA, 19 nt, Artificial Sequence
  Description of Artificial Sequence: Synthetic oligonucleotide
gccuguucucacugugcca

SEQ ID NO: 1416245 - RNA, 19 nt, Artificial Sequence
  Description of Artificial Sequence: Synthetic oligonucleotide
gugcucuucgcuugugcuu

SEQ ID NO: 1416246 - RNA, 19 nt, Artificial Sequence
  Description of Artificial Sequence: Synthetic oligonucleotide
ccuaaaccgaaagcucuga

SEQ ID NO: 1416247 - RNA, 19 nt, Artificial Sequence
  Description of Artificial Sequence: Synthetic oligonucleotide
gcucagauagcuccgccuu

SEQ ID NO: 1416248 - RNA, 19 nt, Artificial Sequence
  Description of Artificial Sequence: Synthetic oligonucleotide
cgcacuguccgugaugcuc

SEQ ID NO: 1416249 - RNA, 19 nt, Artificial Sequence
  Description of Artificial Sequence: Synthetic oligonucleotide
gcgucgacguccuccugga

SEQ ID NO: 1416250 - RNA, 19 nt, Artificial Sequence
  Description of Artificial Sequence: Synthetic oligonucleotide
uccguccucucgggucccc

SEQ ID NO: 1416251 - RNA, 19 nt, Artificial Sequence
  Description of Artificial Sequence: Synthetic oligonucleotide
cuucugcgucacgugggga

SEQ ID NO: 1416252 - RNA, 19 nt, Artificial Sequence
  Description of Artificial Sequence: Synthetic oligonucleotide
cugagauuggagggaaguu

SEQ ID NO: 1416253 - RNA, 19 nt, Artificial Sequence
  Description of Artificial Sequence: Synthetic oligonucleotide
agguccccugccggcacca

SEQ ID NO: 1416254 - RNA, 19 nt, Artificial Sequence
  Description of Artificial Sequence: Synthetic oligonucleotide
caucucaauuucugacauu

SEQ ID NO: 1416255 - RNA, 19 nt, Artificial Sequence
  Description of Artificial Sequence: Synthetic oligonucleotide
cgagguacucuccugagau

SEQ ID NO: 1416256 - RNA, 19 nt, Artificial Sequence
  Description of Artificial Sequence: Synthetic oligonucleotide
gcgugcugccuguucucac

SEQ ID NO: 1416257 - RNA, 19 nt, Artificial Sequence
  Description of Artificial Sequence: Synthetic oligonucleotide
ccggcuugacagacugcug

SEQ ID NO: 1416258 - RNA, 19 nt, Artificial Sequence
  Description of Artificial Sequence: Synthetic oligonucleotide
caccucggaguucuuuuau

SEQ ID NO: 1416259 - RNA, 19 nt, Artificial Sequence
  Description of Artificial Sequence: Synthetic oligonucleotide
ucccggggucuguuuucuu

SEQ ID NO: 1416260 - RNA, 19 nt, Artificial Sequence
  Description of Artificial Sequence: Synthetic oligonucleotide
ccaauagguccagcgucuc

SEQ ID NO: 1416261 - RNA, 19 nt, Artificial Sequence
  Description of Artificial Sequence: Synthetic oligonucleotide
caagcccaccgugcuucuc

SEQ ID NO: 1416262 - RNA, 19 nt, Artificial Sequence
  Description of Artificial Sequence: Synthetic oligonucleotide
ggugcuggucgugcacuuc

SEQ ID NO: 1416263 - RNA, 19 nt, Artificial Sequence
  Description of Artificial Sequence: Synthetic oligonucleotide
ggcgugcugccuguucuca

SEQ ID NO: 1416264 - RNA, 19 nt, Artificial Sequence
  Description of Artificial Sequence: Synthetic oligonucleotide
cuucgucuccaagaucuuu

SEQ ID NO: 1416265 - RNA, 19 nt, Artificial Sequence
  Description of Artificial Sequence: Synthetic oligonucleotide
ucgugacgucagguugaua

SEQ ID NO: 1416266 - RNA, 19 nt, Artificial Sequence
  Description of Artificial Sequence: Synthetic oligonucleotide
ccgagguacucuccugaga

SEQ ID NO: 1416267 - RNA, 19 nt, Artificial Sequence
  Description of Artificial Sequence: Synthetic oligonucleotide
guccguccucucggguccc

SEQ ID NO: 1416268 - RNA, 19 nt, Artificial Sequence
  Description of Artificial Sequence: Synthetic oligonucleotide
caccuucgugacgucaggu

SEQ ID NO: 1416269 - RNA, 19 nt, Artificial Sequence
  Description of Artificial Sequence: Synthetic oligonucleotide
gugcacucuuacacagggu

SEQ ID NO: 1416270 - RNA, 19 nt, Artificial Sequence
  Description of Artificial Sequence: Synthetic oligonucleotide
cuccgccuucaggggcucc

SEQ ID NO: 1416271 - RNA, 19 nt, Artificial Sequence
  Description of Artificial Sequence: Synthetic oligonucleotide
cuucaccucggaguucuuu

SEQ ID NO: 1416272 - RNA, 19 nt, Artificial Sequence
  Description of Artificial Sequence: Synthetic oligonucleotide
ccggggucuguuuucuucu

SEQ ID NO: 1416273 - RNA, 19 nt, Artificial Sequence
  Description of Artificial Sequence: Synthetic oligonucleotide
gugagucgaugaucacauu

SEQ ID NO: 1416274 - RNA, 19 nt, Artificial Sequence
  Description of Artificial Sequence: Synthetic oligonucleotide
cccggcuugacagacugcu

SEQ ID NO: 1416275 - RNA, 19 nt, Artificial Sequence
  Description of Artificial Sequence: Synthetic oligonucleotide
gguugauacugugcaccau

SEQ ID NO: 1416276 - RNA, 19 nt, Artificial Sequence
  Description of Artificial Sequence: Synthetic oligonucleotide
cucccggggucuguuuucu

SEQ ID NO: 1416277 - RNA, 19 nt, Artificial Sequence
  Description of Artificial Sequence: Synthetic oligonucleotide
ccguaagguccguccucuc

SEQ ID NO: 1416278 - RNA, 19 nt, Artificial Sequence
  Description of Artificial Sequence: Synthetic oligonucleotide
  modified_base (8)..(8): a, c, u, g, unknown or other
ccguuuanccuggccaaua

SEQ ID NO: 1416279 - RNA, 19 nt, Artificial Sequence
  Description of Artificial Sequence: Synthetic oligonucleotide
cguuugacccugggaggug

SEQ ID NO: 1416280 - RNA, 19 nt, Artificial Sequence
  Description of Artificial Sequence: Synthetic oligonucleotide
gggaucgcuuccagugacu

SEQ ID NO: 1416281 - RNA, 19 nt, Artificial Sequence
  Description of Artificial Sequence: Synthetic oligonucleotide
cuggggacuucggcauucu

SEQ ID NO: 1416282 - RNA, 19 nt, Artificial Sequence
  Description of Artificial Sequence: Synthetic oligonucleotide
ccgugcuucuccucauccu

SEQ ID NO: 1416283 - RNA, 19 nt, Artificial Sequence
  Description of Artificial Sequence: Synthetic oligonucleotide
ccaucuccgcagggcuggc

SEQ ID NO: 1416284 - RNA, 19 nt, Artificial Sequence
  Description of Artificial Sequence: Synthetic oligonucleotide
cccugccggcaccaucuca

SEQ ID NO: 1416285 - RNA, 19 nt, Artificial Sequence
  Description of Artificial Sequence: Synthetic oligonucleotide
cgugcacuuccaggccgag

SEQ ID NO: 1416286 - RNA, 19 nt, Artificial Sequence
  Description of Artificial Sequence: Synthetic oligonucleotide
cacuggggacuucggcauu

SEQ ID NO: 1416287 - RNA, 19 nt, Artificial Sequence
  Description of Artificial Sequence: Synthetic oligonucleotide
ccgccuucaggggcuccac

SEQ ID NO: 1416288 - RNA, 19 nt, Artificial Sequence
  Description of Artificial Sequence: Synthetic oligonucleotide
ccccugagcuugcugacuu

SEQ ID NO: 1416289 - RNA, 19 nt, Artificial Sequence
  Description of Artificial Sequence: Synthetic oligonucleotide
ccaggggaagugcacucuu

SEQ ID NO: 1416290 - RNA, 19 nt, Artificial Sequence
  Description of Artificial Sequence: Synthetic oligonucleotide
gcuccaccgcacuguccgu

SEQ ID NO: 1416291 - RNA, 19 nt, Artificial Sequence
  Description of Artificial Sequence: Synthetic oligonucleotide
gcauggcgucgacguccuc

SEQ ID NO: 1416292 - RNA, 19 nt, Artificial Sequence
  Description of Artificial Sequence: Synthetic oligonucleotide
cccaggggaagugcacucu

SEQ ID NO: 1416293 - RNA, 19 nt, Artificial Sequence
  Description of Artificial Sequence: Synthetic oligonucleotide
cgucacguggggaucgcuu

SEQ ID NO: 1416294 - RNA, 19 nt, Artificial Sequence
  Description of Artificial Sequence: Synthetic oligonucleotide
ccccugccggcaccaucuc

SEQ ID NO: 1416295 - RNA, 19 nt, Artificial Sequence
  Description of Artificial Sequence: Synthetic oligonucleotide
ggagguccguaagguccgu

SEQ ID NO: 1416296 - RNA, 19 nt, Artificial Sequence
  Description of Artificial Sequence: Synthetic oligonucleotide
ccccagcuaagacucucuu

SEQ ID NO: 1416297 - RNA, 19 nt, Artificial Sequence
  Description of Artificial Sequence: Synthetic oligonucleotide
cuccgcagggcuggcuguu

SEQ ID NO: 1416298 - RNA, 19 nt, Artificial Sequence
  Description of Artificial Sequence: Synthetic oligonucleotide
gcaaggugaggggcagcuu

SEQ ID NO: 1416299 - RNA, 19 nt, Artificial Sequence
  Description of Artificial Sequence: Synthetic oligonucleotide
gcgucacguggggaucgcu

SEQ ID NO: 1416300 - RNA, 19 nt, Artificial Sequence
  Description of Artificial Sequence: Synthetic oligonucleotide
ggucucugucaggcuccuu

SEQ ID NO: 1416301 - RNA, 19 nt, Artificial Sequence
  Description of Artificial Sequence: Synthetic oligonucleotide
ccucaucgcuggagagcuu

SEQ ID NO: 1416302 - RNA, 19 nt, Artificial Sequence
  Description of Artificial Sequence: Synthetic oligonucleotide
cgucgacguccuccuggau

SEQ ID NO: 1416303 - RNA, 19 nt, Artificial Sequence
  Description of Artificial Sequence: Synthetic oligonucleotide
cgacguccuccuggaugua

SEQ ID NO: 1416304 - RNA, 19 nt, Artificial Sequence
  Description of Artificial Sequence: Synthetic oligonucleotide
ccucggcgugcugccuguu

SEQ ID NO: 1416305 - RNA, 19 nt, Artificial Sequence
  Description of Artificial Sequence: Synthetic oligonucleotide
  modified_base (1)..(1): a, c, u, g, unknown or other
nccuggccaauagguccag

SEQ ID NO: 1416306 - RNA, 19 nt, Artificial Sequence
  Description of Artificial Sequence: Synthetic oligonucleotide
aaagugaagguuccggcgc

SEQ ID NO: 1416307 - RNA, 19 nt, Artificial Sequence
  Description of Artificial Sequence: Synthetic oligonucleotide
uucgcaaggagucuaaagg

SEQ ID NO: 1416308 - RNA, 19 nt, Artificial Sequence
  Description of Artificial Sequence: Synthetic oligonucleotide
aaaacccacagucccaacc

SEQ ID NO: 1416309 - RNA, 19 nt, Artificial Sequence
  Description of Artificial Sequence: Synthetic oligonucleotide
aaagcguuucugcauaaac

SEQ ID NO: 1416310 - RNA, 19 nt, Artificial Sequence
  Description of Artificial Sequence: Synthetic oligonucleotide
ucugcauaaacucugcacc

SEQ ID NO: 1416311 - RNA, 19 nt, Artificial Sequence
  Description of Artificial Sequence: Synthetic oligonucleotide
ucggguucaucauagaugg

SEQ ID NO: 1416312 - RNA, 19 nt, Artificial Sequence
  Description of Artificial Sequence: Synthetic oligonucleotide
ucaacugccugaaagaugu

SEQ ID NO: 1416313 - RNA, 19 nt, Artificial Sequence
  Description of Artificial Sequence: Synthetic oligonucleotide
uguaugggagcucauagcc

SEQ ID NO: 1416314 - RNA, 19 nt, Artificial Sequence
  Description of Artificial Sequence: Synthetic oligonucleotide
aacauuaccuugucccggc

SEQ ID NO: 1416315 - RNA, 19 nt, Artificial Sequence
  Description of Artificial Sequence: Synthetic oligonucleotide
cauacaagucccaauagag

SEQ ID NO: 1416316 - RNA, 19 nt, Artificial Sequence
  Description of Artificial Sequence: Synthetic oligonucleotide
ugugguaccagguucagga

SEQ ID NO: 1416317 - RNA, 19 nt, Artificial Sequence
  Description of Artificial Sequence: Synthetic oligonucleotide
ucugacuugacuccugucc

SEQ ID NO: 1416318 - RNA, 19 nt, Artificial Sequence
  Description of Artificial Sequence: Synthetic oligonucleotide
guauauaggagccuugcag

SEQ ID NO: 1416319 - RNA, 19 nt, Artificial Sequence
  Description of Artificial Sequence: Synthetic oligonucleotide
ugcgugguuacccagaacu

SEQ ID NO: 1416320 - RNA, 19 nt, Artificial Sequence
  Description of Artificial Sequence: Synthetic oligonucleotide
auauaggagccuugcaggc

SEQ ID NO: 1416321 - RNA, 19 nt, Artificial Sequence
  Description of Artificial Sequence: Synthetic oligonucleotide
aagcggaucaucuugcagu

SEQ ID NO: 1416322 - RNA, 19 nt, Artificial Sequence
  Description of Artificial Sequence: Synthetic oligonucleotide
uggaguuucgcggaggugg

SEQ ID NO: 1416323 - RNA, 19 nt, Artificial Sequence
  Description of Artificial Sequence: Synthetic oligonucleotide
aguccagacggcgagagcc

SEQ ID NO: 1416324 - RNA, 19 nt, Artificial Sequence
  Description of Artificial Sequence: Synthetic oligonucleotide
agaacauuaccuugucccg

SEQ ID NO: 1416325 - RNA, 19 nt, Artificial Sequence
  Description of Artificial Sequence: Synthetic oligonucleotide
aauagagagguuucuucga

SEQ ID NO: 1416326 - RNA, 19 nt, Artificial Sequence
  Description of Artificial Sequence: Synthetic oligonucleotide
uguacagagccauaucuga

SEQ ID NO: 1416327 - RNA, 19 nt, Artificial Sequence
  Description of Artificial Sequence: Synthetic oligonucleotide
auagcgucgcaacagagug

SEQ ID NO: 1416328 - RNA, 19 nt, Artificial Sequence
  Description of Artificial Sequence: Synthetic oligonucleotide
ugggacucaguucugagga

SEQ ID NO: 1416329 - RNA, 19 nt, Artificial Sequence
  Description of Artificial Sequence: Synthetic oligonucleotide
aagugaagguuccggcgcc

SEQ ID NO: 1416330 - RNA, 19 nt, Artificial Sequence
  Description of Artificial Sequence: Synthetic oligonucleotide
agagaacauuaccuugucc

SEQ ID NO: 1416331 - RNA, 19 nt, Artificial Sequence
  Description of Artificial Sequence: Synthetic oligonucleotide
guuguaugggagcucauag

SEQ ID NO: 1416332 - RNA, 19 nt, Artificial Sequence
  Description of Artificial Sequence: Synthetic oligonucleotide
uguguagucuggaaaguga

SEQ ID NO: 1416333 - RNA, 19 nt, Artificial Sequence
  Description of Artificial Sequence: Synthetic oligonucleotide
caggauuugacucuggguc

SEQ ID NO: 1416334 - RNA, 19 nt, Artificial Sequence
  Description of Artificial Sequence: Synthetic oligonucleotide
auccuuagguuccugcggc

SEQ ID NO: 1416335 - RNA, 19 nt, Artificial Sequence
  Description of Artificial Sequence: Synthetic oligonucleotide
aaagagcggacccuccauc

SEQ ID NO: 1416336 - RNA, 19 nt, Artificial Sequence
  Description of Artificial Sequence: Synthetic oligonucleotide
aacuuaggcggguucuccg

SEQ ID NO: 1416337 - RNA, 19 nt, Artificial Sequence
  Description of Artificial Sequence: Synthetic oligonucleotide
aaacuuaggcggguucucc

SEQ ID NO: 1416338 - RNA, 19 nt, Artificial Sequence
  Description of Artificial Sequence: Synthetic oligonucleotide
ucgcaaggagucuaaaggc

SEQ ID NO: 1416339 - RNA, 19 nt, Artificial Sequence
  Description of Artificial Sequence: Synthetic oligonucleotide
cugaaagaugucauuuccc

SEQ ID NO: 1416340 - RNA, 19 nt, Artificial Sequence
  Description of Artificial Sequence: Synthetic oligonucleotide
caggcuuggaguuucgcgg

SEQ ID NO: 1416341 - RNA, 19 nt, Artificial Sequence
  Description of Artificial Sequence: Synthetic oligonucleotide
uuacccagaacugggagcc

SEQ ID NO: 1416342 - RNA, 19 nt, Artificial Sequence
  Description of Artificial Sequence: Synthetic oligonucleotide
uguagucuggaaagugaag

SEQ ID NO: 1416343 - RNA, 19 nt, Artificial Sequence
  Description of Artificial Sequence: Synthetic oligonucleotide
aacccacagucccaacccc

SEQ ID NO: 1416344 - RNA, 19 nt, Artificial Sequence
  Description of Artificial Sequence: Synthetic oligonucleotide
ucuguagcaggguuguaug

SEQ ID NO: 1416345 - RNA, 19 nt, Artificial Sequence
  Description of Artificial Sequence: Synthetic oligonucleotide
auagucaucuguagcaggg

SEQ ID NO: 1416346 - RNA, 19 nt, Artificial Sequence
  Description of Artificial Sequence: Synthetic oligonucleotide
uuucuucgaaugcaucccc

SEQ ID NO: 1416347 - RNA, 19 nt, Artificial Sequence
  Description of Artificial Sequence: Synthetic oligonucleotide
agaucauaaaggccccggg

SEQ ID NO: 1416348 - RNA, 19 nt, Artificial Sequence
  Description of Artificial Sequence: Synthetic oligonucleotide
agccucaacugccugaaag

SEQ ID NO: 1416349 - RNA, 19 nt, Artificial Sequence
  Description of Artificial Sequence: Synthetic oligonucleotide
gaaaaggaguggcuccagg

SEQ ID NO: 1416350 - RNA, 19 nt, Artificial Sequence
  Description of Artificial Sequence: Synthetic oligonucleotide
aggcucagcauauagggcu

SEQ ID NO: 1416351 - RNA, 19 nt, Artificial Sequence
  Description of Artificial Sequence: Synthetic oligonucleotide
aguacagagaguccugaga

SEQ ID NO: 1416352 - RNA, 19 nt, Artificial Sequence
  Description of Artificial Sequence: Synthetic oligonucleotide
auucgcaaggagucuaaag

SEQ ID NO: 1416353 - RNA, 19 nt, Artificial Sequence
  Description of Artificial Sequence: Synthetic oligonucleotide
aguguagggccagaaaagg

SEQ ID NO: 1416354 - RNA, 19 nt, Artificial Sequence
  Description of Artificial Sequence: Synthetic oligonucleotide
ugguaccagguucaggaag

SEQ ID NO: 1416355 - RNA, 19 nt, Artificial Sequence
  Description of Artificial Sequence: Synthetic oligonucleotide
uucgaaugcauccccuccc

SEQ ID NO: 1416356 - RNA, 19 nt, Artificial Sequence
  Description of Artificial Sequence: Synthetic oligonucleotide
agucuaaaggcucagcaua

SEQ ID NO: 1416357 - RNA, 19 nt, Artificial Sequence
  Description of Artificial Sequence: Synthetic oligonucleotide
cucggguucaucauagaug

SEQ ID NO: 1416358 - RNA, 19 nt, Artificial Sequence
  Description of Artificial Sequence: Synthetic oligonucleotide
gucgcaacagaguguaggg

SEQ ID NO: 1416359 - RNA, 19 nt, Artificial Sequence
  Description of Artificial Sequence: Synthetic oligonucleotide
ggucaaagaacuccagacg

SEQ ID NO: 1416360 - RNA, 19 nt, Artificial Sequence
  Description of Artificial Sequence: Synthetic oligonucleotide
accaugcauccuuagguuc

SEQ ID NO: 1416361 - RNA, 19 nt, Artificial Sequence
  Description of Artificial Sequence: Synthetic oligonucleotide
ugcacgugcccauacaagu

SEQ ID NO: 1416362 - RNA, 19 nt, Artificial Sequence
  Description of Artificial Sequence: Synthetic oligonucleotide
gaacauuaccuugucccgg

SEQ ID NO: 1416363 - RNA, 19 nt, Artificial Sequence
  Description of Artificial Sequence: Synthetic oligonucleotide
ucggaaaagcguuucugca

SEQ ID NO: 1416364 - RNA, 19 nt, Artificial Sequence
  Description of Artificial Sequence: Synthetic oligonucleotide
aacuccagacgcgcuacgc

SEQ ID NO: 1416365 - RNA, 19 nt, Artificial Sequence
  Description of Artificial Sequence: Synthetic oligonucleotide
uucccuacucuagaaaacc

SEQ ID NO: 1416366 - RNA, 19 nt, Artificial Sequence
  Description of Artificial Sequence: Synthetic oligonucleotide
auagcccuccuccuucagc

SEQ ID NO: 1416367 - RNA, 19 nt, Artificial Sequence
  Description of Artificial Sequence: Synthetic oligonucleotide
uuguaugggagcucauagc

SEQ ID NO: 1416368 - RNA, 19 nt, Artificial Sequence
  Description of Artificial Sequence: Synthetic oligonucleotide
ucaguauauaggagccuug

SEQ ID NO: 1416369 - RNA, 19 nt, Artificial Sequence
  Description of Artificial Sequence: Synthetic oligonucleotide
agagccauaucugagcugu

SEQ ID NO: 1416370 - RNA, 19 nt, Artificial Sequence
  Description of Artificial Sequence: Synthetic oligonucleotide
ugucauuucccuguguagu

SEQ ID NO: 1416371 - RNA, 19 nt, Artificial Sequence
  Description of Artificial Sequence: Synthetic oligonucleotide
uguggucaaagaacuccag

SEQ ID NO: 1416372 - RNA, 19 nt, Artificial Sequence
  Description of Artificial Sequence: Synthetic oligonucleotide
aagcguuucugcauaaacu

SEQ ID NO: 1416373 - RNA, 19 nt, Artificial Sequence
  Description of Artificial Sequence: Synthetic oligonucleotide
gaagcgcugacucuguaga

SEQ ID NO: 1416374 - RNA, 19 nt, Artificial Sequence
  Description of Artificial Sequence: Synthetic oligonucleotide
cuguagaaagagcggaccc

SEQ ID NO: 1416375 - RNA, 19 nt, Artificial Sequence
  Description of Artificial Sequence: Synthetic oligonucleotide
uuucggaaaagcguuucug

SEQ ID NO: 1416376 - RNA, 19 nt, Artificial Sequence
  Description of Artificial Sequence: Synthetic oligonucleotide
aagagcggacccuccauca

SEQ ID NO: 1416377 - RNA, 19 nt, Artificial Sequence
  Description of Artificial Sequence: Synthetic oligonucleotide
guuacccagaacugggagc

SEQ ID NO: 1416378 - RNA, 19 nt, Artificial Sequence
  Description of Artificial Sequence: Synthetic oligonucleotide
ucuugcaguccagacggcg

SEQ ID NO: 1416379 - RNA, 19 nt, Artificial Sequence
  Description of Artificial Sequence: Synthetic oligonucleotide
ucccuacucuagaaaaccc

SEQ ID NO: 1416380 - RNA, 19 nt, Artificial Sequence
  Description of Artificial Sequence: Synthetic oligonucleotide
cuuucccugggcuuucugc

SEQ ID NO: 1416381 - RNA, 19 nt, Artificial Sequence
  Description of Artificial Sequence: Synthetic oligonucleotide
cauccuuagguuccugcgg

SEQ ID NO: 1416382 - RNA, 19 nt, Artificial Sequence
  Description of Artificial Sequence: Synthetic oligonucleotide
aguauauaggagccuugca

SEQ ID NO: 1416383 - RNA, 19 nt, Artificial Sequence
  Description of Artificial Sequence: Synthetic oligonucleotide
gaaggaccaagcccugcgg

SEQ ID NO: 1416384 - RNA, 19 nt, Artificial Sequence
  Description of Artificial Sequence: Synthetic oligonucleotide
acucuggguccccaaaguc

SEQ ID NO: 1416385 - RNA, 19 nt, Artificial Sequence
  Description of Artificial Sequence: Synthetic oligonucleotide
cuguacagagccauaucug

SEQ ID NO: 1416386 - RNA, 19 nt, Artificial Sequence
  Description of Artificial Sequence: Synthetic oligonucleotide
uacgccgugaggacuagcu

SEQ ID NO: 1416387 - RNA, 19 nt, Artificial Sequence
  Description of Artificial Sequence: Synthetic oligonucleotide
gaacugggagccuucccag

SEQ ID NO: 1416388 - RNA, 19 nt, Artificial Sequence
  Description of Artificial Sequence: Synthetic oligonucleotide
ucauucccuacucuagaaa

SEQ ID NO: 1416389 - RNA, 19 nt, Artificial Sequence
  Description of Artificial Sequence: Synthetic oligonucleotide
cugcggcagaucauaaagg

SEQ ID NO: 1416390 - RNA, 19 nt, Artificial Sequence
  Description of Artificial Sequence: Synthetic oligonucleotide
uccugugguaccagguuca

SEQ ID NO: 1416391 - RNA, 19 nt, Artificial Sequence
  Description of Artificial Sequence: Synthetic oligonucleotide
auucccuacucuagaaaac

SEQ ID NO: 1416392 - RNA, 19 nt, Artificial Sequence
  Description of Artificial Sequence: Synthetic oligonucleotide
uguagaaagagcggacccu

SEQ ID NO: 1416393 - RNA, 19 nt, Artificial Sequence
  Description of Artificial Sequence: Synthetic oligonucleotide
ucgaaugcauccccucccc

SEQ ID NO: 1416394 - RNA, 19 nt, Artificial Sequence
  Description of Artificial Sequence: Synthetic oligonucleotide
auagagagguuucuucgaa

SEQ ID NO: 1416395 - RNA, 19 nt, Artificial Sequence
  Description of Artificial Sequence: Synthetic oligonucleotide
gagcccucugacuugacuc

SEQ ID NO: 1416396 - RNA, 19 nt, Artificial Sequence
  Description of Artificial Sequence: Synthetic oligonucleotide
ggaaagugaagguuccggc

SEQ ID NO: 1416397 - RNA, 19 nt, Artificial Sequence
  Description of Artificial Sequence: Synthetic oligonucleotide
ucuucugcgugguuaccca

SEQ ID NO: 1416398 - RNA, 19 nt, Artificial Sequence
  Description of Artificial Sequence: Synthetic oligonucleotide
cacgugcccauacaagucc

SEQ ID NO: 1416399 - RNA, 19 nt, Artificial Sequence
  Description of Artificial Sequence: Synthetic oligonucleotide
agaacuccagacgcgcuac

SEQ ID NO: 1416400 - RNA, 19 nt, Artificial Sequence
  Description of Artificial Sequence: Synthetic oligonucleotide
aguuucgcggagguggcac

SEQ ID NO: 1416401 - RNA, 19 nt, Artificial Sequence
  Description of Artificial Sequence: Synthetic oligonucleotide
aguggcgccggguucgggg

SEQ ID NO: 1416402 - RNA, 19 nt, Artificial Sequence
  Description of Artificial Sequence: Synthetic oligonucleotide
cauucccuacucuagaaaa

SEQ ID NO: 1416403 - RNA, 19 nt, Artificial Sequence
  Description of Artificial Sequence: Synthetic oligonucleotide
acaagucccaauagagagg

SEQ ID NO: 1416404 - RNA, 19 nt, Artificial Sequence
  Description of Artificial Sequence: Synthetic oligonucleotide
acauuaccuugucccggcc

SEQ ID NO: 1416405 - RNA, 19 nt, Artificial Sequence
  Description of Artificial Sequence: Synthetic oligonucleotide
caguauauaggagccuugc

SEQ ID NO: 1416406 - RNA, 19 nt, Artificial Sequence
  Description of Artificial Sequence: Synthetic oligonucleotide
agaaacuuaggcggguucu

SEQ ID NO: 1416407 - RNA, 19 nt, Artificial Sequence
  Description of Artificial Sequence: Synthetic oligonucleotide
uagaaagagcggacccucc

SEQ ID NO: 1416408 - RNA, 19 nt, Artificial Sequence
  Description of Artificial Sequence: Synthetic oligonucleotide
acucuagaaaacccacagu

SEQ ID NO: 1416409 - RNA, 19 nt, Artificial Sequence
  Description of Artificial Sequence: Synthetic oligonucleotide
agaaagagcggacccucca

SEQ ID NO: 1416410 - RNA, 19 nt, Artificial Sequence
  Description of Artificial Sequence: Synthetic oligonucleotide
agccauaucugagcugugg

SEQ ID NO: 1416411 - RNA, 19 nt, Artificial Sequence
  Description of Artificial Sequence: Synthetic oligonucleotide
gagaguccugagaagggcc

SEQ ID NO: 1416412 - RNA, 19 nt, Artificial Sequence
  Description of Artificial Sequence: Synthetic oligonucleotide
cagaucauaaaggccccgg

SEQ ID NO: 1416413 - RNA, 19 nt, Artificial Sequence
  Description of Artificial Sequence: Synthetic oligonucleotide
ugucccggccauagcgucg

SEQ ID NO: 1416414 - RNA, 19 nt, Artificial Sequence
  Description of Artificial Sequence: Synthetic oligonucleotide
aucuugugccugucccacc

SEQ ID NO: 1416415 - RNA, 19 nt, Artificial Sequence
  Description of Artificial Sequence: Synthetic oligonucleotide
agagcggacccuccaucac

SEQ ID NO: 1416416 - RNA, 19 nt, Artificial Sequence
  Description of Artificial Sequence: Synthetic oligonucleotide
uaucuugugccugucccac

SEQ ID NO: 1416417 - RNA, 19 nt, Artificial Sequence
  Description of Artificial Sequence: Synthetic oligonucleotide
caagcggaucaucuugcag

SEQ ID NO: 1416418 - RNA, 19 nt, Artificial Sequence
  Description of Artificial Sequence: Synthetic oligonucleotide
gguuacccagaacugggag

SEQ ID NO: 1416419 - RNA, 19 nt, Artificial Sequence
  Description of Artificial Sequence: Synthetic oligonucleotide
ugguuacccagaacuggga

SEQ ID NO: 1416420 - RNA, 19 nt, Artificial Sequence
  Description of Artificial Sequence: Synthetic oligonucleotide
cuccgucugcgccaaagcc

SEQ ID NO: 1416421 - RNA, 19 nt, Artificial Sequence
  Description of Artificial Sequence: Synthetic oligonucleotide
ccugcggcagaucauaaag

SEQ ID NO: 1416422 - RNA, 19 nt, Artificial Sequence
  Description of Artificial Sequence: Synthetic oligonucleotide
ggucugaguacagagaguc

SEQ ID NO: 1416423 - RNA, 19 nt, Artificial Sequence
  Description of Artificial Sequence: Synthetic oligonucleotide
ugccugaaagaugucauuu

SEQ ID NO: 1416424 - RNA, 19 nt, Artificial Sequence
  Description of Artificial Sequence: Synthetic oligonucleotide
ccuacucuagaaaacccac

SEQ ID NO: 1416425 - RNA, 19 nt, Artificial Sequence
  Description of Artificial Sequence: Synthetic oligonucleotide
ggacuagcuggguagagca

SEQ ID NO: 1416426 - RNA, 19 nt, Artificial Sequence
  Description of Artificial Sequence: Synthetic oligonucleotide
cugcacgugcccauacaag

SEQ ID NO: 1416427 - RNA, 19 nt, Artificial Sequence
  Description of Artificial Sequence: Synthetic oligonucleotide
uuaggcggguucuccgucu

SEQ ID NO: 1416428 - RNA, 19 nt, Artificial Sequence
  Description of Artificial Sequence: Synthetic oligonucleotide
gaacuccagacgcgcuacg

SEQ ID NO: 1416429 - RNA, 19 nt, Artificial Sequence
  Description of Artificial Sequence: Synthetic oligonucleotide
aaaagcguuucugcauaaa

SEQ ID NO: 1416430 - RNA, 19 nt, Artificial Sequence
  Description of Artificial Sequence: Synthetic oligonucleotide
acuuaggcggguucuccgu

SEQ ID NO: 1416431 - RNA, 19 nt, Artificial Sequence
  Description of Artificial Sequence: Synthetic oligonucleotide
cuacucuagaaaacccaca

SEQ ID NO: 1416432 - RNA, 19 nt, Artificial Sequence
  Description of Artificial Sequence: Synthetic oligonucleotide
cccuguguagucuggaaag

SEQ ID NO: 1416433 - RNA, 19 nt, Artificial Sequence
  Description of Artificial Sequence: Synthetic oligonucleotide
aggaccaagcccugcggcu

SEQ ID NO: 1416434 - RNA, 19 nt, Artificial Sequence
  Description of Artificial Sequence: Synthetic oligonucleotide
gaaaagcguuucugcauaa

SEQ ID NO: 1416435 - RNA, 19 nt, Artificial Sequence
  Description of Artificial Sequence: Synthetic oligonucleotide
cuccugugguaccagguuc

SEQ ID NO: 1416436 - RNA, 19 nt, Artificial Sequence
  Description of Artificial Sequence: Synthetic oligonucleotide
cgcaacagaguguagggcc

SEQ ID NO: 1416437 - RNA, 19 nt, Artificial Sequence
  Description of Artificial Sequence: Synthetic oligonucleotide
ucgcaacagaguguagggc

SEQ ID NO: 1416438 - RNA, 19 nt, Artificial Sequence
  Description of Artificial Sequence: Synthetic oligonucleotide
gucuucugcgugguuaccc

SEQ ID NO: 1416439 - RNA, 19 nt, Artificial Sequence
  Description of Artificial Sequence: Synthetic oligonucleotide
acgugcccauacaaguccc

SEQ ID NO: 1416440 - RNA, 19 nt, Artificial Sequence
  Description of Artificial Sequence: Synthetic oligonucleotide
agcaggaggggaagucacc

SEQ ID NO: 1416441 - RNA, 19 nt, Artificial Sequence
  Description of Artificial Sequence: Synthetic oligonucleotide
cacagcguucagaagccuc

SEQ ID NO: 1416442 - RNA, 19 nt, Artificial Sequence
  Description of Artificial Sequence: Synthetic oligonucleotide
agagcccuuguggucaaag

SEQ ID NO: 1416443 - RNA, 19 nt, Artificial Sequence
  Description of Artificial Sequence: Synthetic oligonucleotide
gaaacuuaggcggguucuc

SEQ ID NO: 1416444 - RNA, 19 nt, Artificial Sequence
  Description of Artificial Sequence: Synthetic oligonucleotide
cagaaacuuaggcggguuc

SEQ ID NO: 1416445 - RNA, 19 nt, Artificial Sequence
  Description of Artificial Sequence: Synthetic oligonucleotide
aagcgcugacucuguagaa

SEQ ID NO: 1416446 - RNA, 19 nt, Artificial Sequence
  Description of Artificial Sequence: Synthetic oligonucleotide
aauucgcaaggagucuaaa

SEQ ID NO: 1416447 - RNA, 19 nt, Artificial Sequence
  Description of Artificial Sequence: Synthetic oligonucleotide
agcccagccgccuuucgga

SEQ ID NO: 1416448 - RNA, 19 nt, Artificial Sequence
  Description of Artificial Sequence: Synthetic oligonucleotide
agacgcgcuacgccgugag

SEQ ID NO: 1416449 - RNA, 19 nt, Artificial Sequence
  Description of Artificial Sequence: Synthetic oligonucleotide
gcgcugacucuguagaaag

SEQ ID NO: 1416450 - RNA, 19 nt, Artificial Sequence
  Description of Artificial Sequence: Synthetic oligonucleotide
aggcuuggaguuucgcgga

SEQ ID NO: 1416451 - RNA, 19 nt, Artificial Sequence
  Description of Artificial Sequence: Synthetic oligonucleotide
gcguucagaagccucaguc

SEQ ID NO: 1416452 - RNA, 19 nt, Artificial Sequence
  Description of Artificial Sequence: Synthetic oligonucleotide
ugcugcacgugcccauaca

SEQ ID NO: 1416453 - RNA, 19 nt, Artificial Sequence
  Description of Artificial Sequence: Synthetic oligonucleotide
uuucgcggagguggcacag

SEQ ID NO: 1416454 - RNA, 19 nt, Artificial Sequence
  Description of Artificial Sequence: Synthetic oligonucleotide
cugcgcgguguccaggcgg

SEQ ID NO: 1416455 - RNA, 19 nt, Artificial Sequence
  Description of Artificial Sequence: Synthetic oligonucleotide
ugcgcgguguccaggcgga

SEQ ID NO: 1416456 - RNA, 19 nt, Artificial Sequence
  Description of Artificial Sequence: Synthetic oligonucleotide
gguucaggaaggaccaagc

SEQ ID NO: 1416457 - RNA, 19 nt, Artificial Sequence
  Description of Artificial Sequence: Synthetic oligonucleotide
gaggauaucuugugccugu

SEQ ID NO: 1416458 - RNA, 19 nt, Artificial Sequence
  Description of Artificial Sequence: Synthetic oligonucleotide
gagucuaaaggcucagcau

SEQ ID NO: 1416459 - RNA, 19 nt, Artificial Sequence
  Description of Artificial Sequence: Synthetic oligonucleotide
uccagacgcgcuacgccgu

SEQ ID NO: 1416460 - RNA, 19 nt, Artificial Sequence
  Description of Artificial Sequence: Synthetic oligonucleotide
uccuuagguuccugcggca

SEQ ID NO: 1416461 - RNA, 19 nt, Artificial Sequence
  Description of Artificial Sequence: Synthetic oligonucleotide
aggcagaaacuuaggcggg

SEQ ID NO: 1416462 - RNA, 19 nt, Artificial Sequence
  Description of Artificial Sequence: Synthetic oligonucleotide
gcuauacagggaauucucc

SEQ ID NO: 1416463 - RNA, 19 nt, Artificial Sequence
  Description of Artificial Sequence: Synthetic oligonucleotide
agcaggugcgagcgcugcg

SEQ ID NO: 1416464 - RNA, 19 nt, Artificial Sequence
  Description of Artificial Sequence: Synthetic oligonucleotide
ggggaauucgcaaggaguc

SEQ ID NO: 1416465 - RNA, 19 nt, Artificial Sequence
  Description of Artificial Sequence: Synthetic oligonucleotide
uagcgucgcaacagagugu

SEQ ID NO: 1416466 - RNA, 19 nt, Artificial Sequence
  Description of Artificial Sequence: Synthetic oligonucleotide
gaggggaagucaccuucac

SEQ ID NO: 1416467 - RNA, 19 nt, Artificial Sequence
  Description of Artificial Sequence: Synthetic oligonucleotide
acacucagccaagcggauc

SEQ ID NO: 1416468 - RNA, 19 nt, Artificial Sequence
  Description of Artificial Sequence: Synthetic oligonucleotide
gagcggacccuccaucaca

SEQ ID NO: 1416469 - RNA, 19 nt, Artificial Sequence
  Description of Artificial Sequence: Synthetic oligonucleotide
gaggacuagcuggguagag

SEQ ID NO: 1416470 - RNA, 19 nt, Artificial Sequence
  Description of Artificial Sequence: Synthetic oligonucleotide
agccgccuuucggaaaagc

SEQ ID NO: 1416471 - RNA, 19 nt, Artificial Sequence
  Description of Artificial Sequence: Synthetic oligonucleotide
uaggcggguucuccgucug

SEQ ID NO: 1416472 - RNA, 19 nt, Artificial Sequence
  Description of Artificial Sequence: Synthetic oligonucleotide
uguggucuuugcugccacu

SEQ ID NO: 1416473 - RNA, 19 nt, Artificial Sequence
  Description of Artificial Sequence: Synthetic oligonucleotide
agcgucgcaacagagugua

SEQ ID NO: 1416474 - RNA, 19 nt, Artificial Sequence
  Description of Artificial Sequence: Synthetic oligonucleotide
gagcccuuguggucaaaga

SEQ ID NO: 1416475 - RNA, 19 nt, Artificial Sequence
  Description of Artificial Sequence: Synthetic oligonucleotide
uugucccggccauagcguc

SEQ ID NO: 1416476 - RNA, 19 nt, Artificial Sequence
  Description of Artificial Sequence: Synthetic oligonucleotide
acgcgcuacgccgugagga

SEQ ID NO: 1416477 - RNA, 19 nt, Artificial Sequence
  Description of Artificial Sequence: Synthetic oligonucleotide
agcggacccuccaucacag

SEQ ID NO: 1416478 - RNA, 19 nt, Artificial Sequence
  Description of Artificial Sequence: Synthetic oligonucleotide
caagucccaauagagaggu

SEQ ID NO: 1416479 - RNA, 19 nt, Artificial Sequence
  Description of Artificial Sequence: Synthetic oligonucleotide
cuggacggggcguccgccg

SEQ ID NO: 1416480 - RNA, 19 nt, Artificial Sequence
  Description of Artificial Sequence: Synthetic oligonucleotide
aggcggguucuccgucugc

SEQ ID NO: 1416481 - RNA, 19 nt, Artificial Sequence
  Description of Artificial Sequence: Synthetic oligonucleotide
uggggcuauacagggaauu

SEQ ID NO: 1416482 - RNA, 19 nt, Artificial Sequence
  Description of Artificial Sequence: Synthetic oligonucleotide
gccgccuuucggaaaagcg

SEQ ID NO: 1416483 - RNA, 19 nt, Artificial Sequence
  Description of Artificial Sequence: Synthetic oligonucleotide
cauuaccuugucccggcca

SEQ ID NO: 1416484 - RNA, 19 nt, Artificial Sequence
  Description of Artificial Sequence: Synthetic oligonucleotide
gacgcgcuacgccgugagg

SEQ ID NO: 1416485 - RNA, 19 nt, Artificial Sequence
  Description of Artificial Sequence: Synthetic oligonucleotide
uggacggggcguccgccgc

SEQ ID NO: 1416486 - RNA, 19 nt, Artificial Sequence
  Description of Artificial Sequence: Synthetic oligonucleotide
gacaggcuuggaguuucgc

SEQ ID NO: 1416487 - RNA, 19 nt, Artificial Sequence
  Description of Artificial Sequence: Synthetic oligonucleotide
gucccaauagagagguuuc

SEQ ID NO: 1416488 - RNA, 19 nt, Artificial Sequence
  Description of Artificial Sequence: Synthetic oligonucleotide
acgccgugaggacuagcug

SEQ ID NO: 1416489 - RNA, 19 nt, Artificial Sequence
  Description of Artificial Sequence: Synthetic oligonucleotide
cauagcgucgcaacagagu

SEQ ID NO: 1416490 - RNA, 19 nt, Artificial Sequence
  Description of Artificial Sequence: Synthetic oligonucleotide
gaccaagcccugcggcuug

SEQ ID NO: 1416491 - RNA, 19 nt, Artificial Sequence
  Description of Artificial Sequence: Synthetic oligonucleotide
caggcccucggguucauca

SEQ ID NO: 1416492 - RNA, 19 nt, Artificial Sequence
  Description of Artificial Sequence: Synthetic oligonucleotide
gaauucgcaaggagucuaa

SEQ ID NO: 1416493 - RNA, 19 nt, Artificial Sequence
  Description of Artificial Sequence: Synthetic oligonucleotide
cgccgugaggacuagcugg

SEQ ID NO: 1416494 - RNA, 19 nt, Artificial Sequence
  Description of Artificial Sequence: Synthetic oligonucleotide
agcgcugacucuguagaaa

SEQ ID NO: 1416495 - RNA, 19 nt, Artificial Sequence
  Description of Artificial Sequence: Synthetic oligonucleotide
caggugcgagcgcugcgcg

SEQ ID NO: 1416496 - RNA, 19 nt, Artificial Sequence
  Description of Artificial Sequence: Synthetic oligonucleotide
gacucuggguccccaaagu

SEQ ID NO: 1416497 - RNA, 19 nt, Artificial Sequence
  Description of Artificial Sequence: Synthetic oligonucleotide
guccagacggcgagagccg

SEQ ID NO: 1416498 - RNA, 19 nt, Artificial Sequence
  Description of Artificial Sequence: Synthetic oligonucleotide
agccuucccagguggggcu

SEQ ID NO: 1416499 - RNA, 19 nt, Artificial Sequence
  Description of Artificial Sequence: Synthetic oligonucleotide
agcaaccgcugcugcacgu

SEQ ID NO: 1416500 - RNA, 19 nt, Artificial Sequence
  Description of Artificial Sequence: Synthetic oligonucleotide
ccauacaagucccaauaga

SEQ ID NO: 1416501 - RNA, 19 nt, Artificial Sequence
  Description of Artificial Sequence: Synthetic oligonucleotide
gggccagaaaaggaguggc

SEQ ID NO: 1416502 - RNA, 19 nt, Artificial Sequence
  Description of Artificial Sequence: Synthetic oligonucleotide
gaaagagcggacccuccau

SEQ ID NO: 1416503 - RNA, 19 nt, Artificial Sequence
  Description of Artificial Sequence: Synthetic oligonucleotide
cuggguccccaaagucagg

SEQ ID NO: 1416504 - RNA, 19 nt, Artificial Sequence
  Description of Artificial Sequence: Synthetic oligonucleotide
aggaguggcuccaggauuu

SEQ ID NO: 1416505 - RNA, 19 nt, Artificial Sequence
  Description of Artificial Sequence: Synthetic oligonucleotide
ccauagcgucgcaacagag

SEQ ID NO: 1416506 - RNA, 19 nt, Artificial Sequence
  Description of Artificial Sequence: Synthetic oligonucleotide
gacuagcuggguagagcac

SEQ ID NO: 1416507 - RNA, 19 nt, Artificial Sequence
  Description of Artificial Sequence: Synthetic oligonucleotide
gcggcuugggagcagggac

SEQ ID NO: 1416508 - RNA, 19 nt, Artificial Sequence
  Description of Artificial Sequence: Synthetic oligonucleotide
cgucgcaacagaguguagg

SEQ ID NO: 1416509 - RNA, 19 nt, Artificial Sequence
  Description of Artificial Sequence: Synthetic oligonucleotide
ggcaguggcgccggguucg

SEQ ID NO: 1416510 - RNA, 19 nt, Artificial Sequence
  Description of Artificial Sequence: Synthetic oligonucleotide
caccaccaugcauccuuag

SEQ ID NO: 1416511 - RNA, 19 nt, Artificial Sequence
  Description of Artificial Sequence: Synthetic oligonucleotide
gcccauacaagucccaaua

SEQ ID NO: 1416512 - RNA, 19 nt, Artificial Sequence
  Description of Artificial Sequence: Synthetic oligonucleotide
cucuuggucccgaagcgcu

SEQ ID NO: 1416513 - RNA, 19 nt, Artificial Sequence
  Description of Artificial Sequence: Synthetic oligonucleotide
ggcggguucuccgucugcg

SEQ ID NO: 1416514 - RNA, 19 nt, Artificial Sequence
  Description of Artificial Sequence: Synthetic oligonucleotide
gccgugaggacuagcuggg

SEQ ID NO: 1416515 - RNA, 19 nt, Artificial Sequence
  Description of Artificial Sequence: Synthetic oligonucleotide
cuuggaguuucgcggaggu

SEQ ID NO: 1416516 - RNA, 19 nt, Artificial Sequence
  Description of Artificial Sequence: Synthetic oligonucleotide
agcgcugcgcgguguccag

SEQ ID NO: 1416517 - RNA, 19 nt, Artificial Sequence
  Description of Artificial Sequence: Synthetic oligonucleotide
guuucgcggagguggcaca

SEQ ID NO: 1416518 - RNA, 19 nt, Artificial Sequence
  Description of Artificial Sequence: Synthetic oligonucleotide
ggaagucaccuucaccucu

SEQ ID NO: 1416519 - RNA, 19 nt, Artificial Sequence
  Description of Artificial Sequence: Synthetic oligonucleotide
cccuacucuagaaaaccca

SEQ ID NO: 1416520 - RNA, 19 nt, Artificial Sequence
  Description of Artificial Sequence: Synthetic oligonucleotide
ggcuuucagcaaccgcugc

SEQ ID NO: 1416521 - RNA, 19 nt, Artificial Sequence
  Description of Artificial Sequence: Synthetic oligonucleotide
agugaagguuccggcgccu

SEQ ID NO: 1416522 - RNA, 19 nt, Artificial Sequence
  Description of Artificial Sequence: Synthetic oligonucleotide
ggagccuugcaggccacag

SEQ ID NO: 1416523 - RNA, 19 nt, Artificial Sequence
  Description of Artificial Sequence: Synthetic oligonucleotide
gagguuucuucgaaugcau

SEQ ID NO: 1416524 - RNA, 19 nt, Artificial Sequence
  Description of Artificial Sequence: Synthetic oligonucleotide
uucgcggagguggcacagc

SEQ ID NO: 1416525 - RNA, 19 nt, Artificial Sequence
  Description of Artificial Sequence: Synthetic oligonucleotide
caguccagacggcgagagc

SEQ ID NO: 1416526 - RNA, 19 nt, Artificial Sequence
  Description of Artificial Sequence: Synthetic oligonucleotide
cucaguauauaggagccuu

SEQ ID NO: 1416527 - RNA, 19 nt, Artificial Sequence
  Description of Artificial Sequence: Synthetic oligonucleotide
gcugcacgugcccauacaa

SEQ ID NO: 1416528 - RNA, 19 nt, Artificial Sequence
  Description of Artificial Sequence: Synthetic oligonucleotide
ggaauucgcaaggagucua

SEQ ID NO: 1416529 - RNA, 19 nt, Artificial Sequence
  Description of Artificial Sequence: Synthetic oligonucleotide
agacggcgagagccgccuc

SEQ ID NO: 1416530 - RNA, 19 nt, Artificial Sequence
  Description of Artificial Sequence: Synthetic oligonucleotide
ggaguuucgcggagguggc

SEQ ID NO: 1416531 - RNA, 19 nt, Artificial Sequence
  Description of Artificial Sequence: Synthetic oligonucleotide
gugguaccagguucaggaa

SEQ ID NO: 1416532 - RNA, 19 nt, Artificial Sequence
  Description of Artificial Sequence: Synthetic oligonucleotide
caggcggcgcuggacgggg

SEQ ID NO: 1416533 - RNA, 19 nt, Artificial Sequence
  Description of Artificial Sequence: Synthetic oligonucleotide
augggagcucauagcccuc

SEQ ID NO: 1416534 - RNA, 19 nt, Artificial Sequence
  Description of Artificial Sequence: Synthetic oligonucleotide
ccugucauucccuacucua

SEQ ID NO: 1416535 - RNA, 19 nt, Artificial Sequence
  Description of Artificial Sequence: Synthetic oligonucleotide
gugaagguuccggcgccug

SEQ ID NO: 1416536 - RNA, 19 nt, Artificial Sequence
  Description of Artificial Sequence: Synthetic oligonucleotide
aggcccucggguucaucau

SEQ ID NO: 1416537 - RNA, 19 nt, Artificial Sequence
  Description of Artificial Sequence: Synthetic oligonucleotide
gccauagcgucgcaacaga

SEQ ID NO: 1416538 - RNA, 19 nt, Artificial Sequence
  Description of Artificial Sequence: Synthetic oligonucleotide
agcggcgaccagcuucaaa

SEQ ID NO: 1416539 - RNA, 19 nt, Artificial Sequence
  Description of Artificial Sequence: Synthetic oligonucleotide
cugcgugguuacccagaac

SEQ ID NO: 1416540 - RNA, 19 nt, Artificial Sequence
  Description of Artificial Sequence: Synthetic oligonucleotide
gcccucggguucaucauag

SEQ ID NO: 1416541 - RNA, 19 nt, Artificial Sequence
  Description of Artificial Sequence: Synthetic oligonucleotide
gcgccugaggggcagcggc

SEQ ID NO: 1416542 - RNA, 19 nt, Artificial Sequence
  Description of Artificial Sequence: Synthetic oligonucleotide
ccuuagguuccugcggcag

SEQ ID NO: 1416543 - RNA, 19 nt, Artificial Sequence
  Description of Artificial Sequence: Synthetic oligonucleotide
caacugccugaaagauguc

SEQ ID NO: 1416544 - RNA, 19 nt, Artificial Sequence
  Description of Artificial Sequence: Synthetic oligonucleotide
gcaggugcgagcgcugcgc

SEQ ID NO: 1416545 - RNA, 19 nt, Artificial Sequence
  Description of Artificial Sequence: Synthetic oligonucleotide
ccuuucggaaaagcguuuc

SEQ ID NO: 1416546 - RNA, 19 nt, Artificial Sequence
  Description of Artificial Sequence: Synthetic oligonucleotide
gguuguaugggagcucaua

SEQ ID NO: 1416547 - RNA, 19 nt, Artificial Sequence
  Description of Artificial Sequence: Synthetic oligonucleotide
uggucccgaagcgcugacu

SEQ ID NO: 1416548 - RNA, 19 nt, Artificial Sequence
  Description of Artificial Sequence: Synthetic oligonucleotide
cauagaugggguccucuuu

SEQ ID NO: 1416549 - RNA, 19 nt, Artificial Sequence
  Description of Artificial Sequence: Synthetic oligonucleotide
uuaccuugucccggccaua

SEQ ID NO: 1416550 - RNA, 19 nt, Artificial Sequence
  Description of Artificial Sequence: Synthetic oligonucleotide
caagcccugcggcuuggga

SEQ ID NO: 1416551 - RNA, 19 nt, Artificial Sequence
  Description of Artificial Sequence: Synthetic oligonucleotide
ggacucaguucugaggaua

SEQ ID NO: 1416552 - RNA, 19 nt, Artificial Sequence
  Description of Artificial Sequence: Synthetic oligonucleotide
cuacgccgugaggacuagc

SEQ ID NO: 1416553 - RNA, 19 nt, Artificial Sequence
  Description of Artificial Sequence: Synthetic oligonucleotide
gugcuacccagagggucug

SEQ ID NO: 1416554 - RNA, 19 nt, Artificial Sequence
  Description of Artificial Sequence: Synthetic oligonucleotide
uacccagaacugggagccu

SEQ ID NO: 1416555 - RNA, 19 nt, Artificial Sequence
  Description of Artificial Sequence: Synthetic oligonucleotide
gaguuucgcggagguggca

SEQ ID NO: 1416556 - RNA, 19 nt, Artificial Sequence
  Description of Artificial Sequence: Synthetic oligonucleotide
acggcgagagccgccucga

SEQ ID NO: 1416557 - RNA, 19 nt, Artificial Sequence
  Description of Artificial Sequence: Synthetic oligonucleotide
caggagggucagcuucuca

SEQ ID NO: 1416558 - RNA, 19 nt, Artificial Sequence
  Description of Artificial Sequence: Synthetic oligonucleotide
uuccggcgccugaggggca

SEQ ID NO: 1416559 - RNA, 19 nt, Artificial Sequence
  Description of Artificial Sequence: Synthetic oligonucleotide
gcugcgcgguguccaggcg

SEQ ID NO: 1416560 - RNA, 19 nt, Artificial Sequence
  Description of Artificial Sequence: Synthetic oligonucleotide
ugcgagcgcugcgcggugu

SEQ ID NO: 1416561 - RNA, 19 nt, Artificial Sequence
  Description of Artificial Sequence: Synthetic oligonucleotide
ccugcccuagcaggggugc

SEQ ID NO: 1416562 - RNA, 19 nt, Artificial Sequence
  Description of Artificial Sequence: Synthetic oligonucleotide
gcggguucuccgucugcgc

SEQ ID NO: 1416563 - RNA, 19 nt, Artificial Sequence
  Description of Artificial Sequence: Synthetic oligonucleotide
ccagacggcgagagccgcc

SEQ ID NO: 1416564 - RNA, 19 nt, Artificial Sequence
  Description of Artificial Sequence: Synthetic oligonucleotide
aagucccaauagagagguu

SEQ ID NO: 1416565 - RNA, 19 nt, Artificial Sequence
  Description of Artificial Sequence: Synthetic oligonucleotide
ggagcccucugacuugacu

SEQ ID NO: 1416566 - RNA, 19 nt, Artificial Sequence
  Description of Artificial Sequence: Synthetic oligonucleotide
ccggcgguuccuucccagc

SEQ ID NO: 1416567 - RNA, 19 nt, Artificial Sequence
  Description of Artificial Sequence: Synthetic oligonucleotide
ccgccuuucggaaaagcgu

SEQ ID NO: 1416568 - RNA, 19 nt, Artificial Sequence
  Description of Artificial Sequence: Synthetic oligonucleotide
gugcgagcgcugcgcggug

SEQ ID NO: 1416569 - RNA, 19 nt, Artificial Sequence
  Description of Artificial Sequence: Synthetic oligonucleotide
gcguuucugcauaaacucu

SEQ ID NO: 1416570 - RNA, 19 nt, Artificial Sequence
  Description of Artificial Sequence: Synthetic oligonucleotide
gacggggcguccgccgcca

SEQ ID NO: 1416571 - RNA, 19 nt, Artificial Sequence
  Description of Artificial Sequence: Synthetic oligonucleotide
cugucucagguggagcccu

SEQ ID NO: 1416572 - RNA, 19 nt, Artificial Sequence
  Description of Artificial Sequence: Synthetic oligonucleotide
ccagccgccuuucggaaaa

SEQ ID NO: 1416573 - RNA, 19 nt, Artificial Sequence
  Description of Artificial Sequence: Synthetic oligonucleotide
ggggcguccgccgccagca

SEQ ID NO: 1416574 - RNA, 19 nt, Artificial Sequence
  Description of Artificial Sequence: Synthetic oligonucleotide
gggaauucgcaaggagucu

SEQ ID NO: 1416575 - RNA, 19 nt, Artificial Sequence
  Description of Artificial Sequence: Synthetic oligonucleotide
gcccuagcaggggugcuac

SEQ ID NO: 1416576 - RNA, 19 nt, Artificial Sequence
  Description of Artificial Sequence: Synthetic oligonucleotide
ggacggggcguccgccgcc

SEQ ID NO: 1416577 - RNA, 19 nt, Artificial Sequence
  Description of Artificial Sequence: Synthetic oligonucleotide
cgcaaggagucuaaaggcu

SEQ ID NO: 1416578 - RNA, 19 nt, Artificial Sequence
  Description of Artificial Sequence: Synthetic oligonucleotide
cccggcgguuccuucccag

SEQ ID NO: 1416579 - RNA, 19 nt, Artificial Sequence
  Description of Artificial Sequence: Synthetic oligonucleotide
ucccggccauagcgucgca

SEQ ID NO: 1416580 - RNA, 19 nt, Artificial Sequence
  Description of Artificial Sequence: Synthetic oligonucleotide
ggugcgagcgcugcgcggu

SEQ ID NO: 1416581 - RNA, 19 nt, Artificial Sequence
  Description of Artificial Sequence: Synthetic oligonucleotide
uggccccggcgguuccuuc

SEQ ID NO: 1416582 - RNA, 19 nt, Artificial Sequence
  Description of Artificial Sequence: Synthetic oligonucleotide
gccccggcgguuccuuccc

SEQ ID NO: 1416583 - RNA, 19 nt, Artificial Sequence
  Description of Artificial Sequence: Synthetic oligonucleotide
cgcgcuacgccgugaggac

SEQ ID NO: 1416584 - RNA, 19 nt, Artificial Sequence
  Description of Artificial Sequence: Synthetic oligonucleotide
cgccugaggggcagcggcg

SEQ ID NO: 1416585 - RNA, 19 nt, Artificial Sequence
  Description of Artificial Sequence: Synthetic oligonucleotide
gcuacgccgugaggacuag

SEQ ID NO: 1416586 - RNA, 19 nt, Artificial Sequence
  Description of Artificial Sequence: Synthetic oligonucleotide
caguggcgccggguucggg

SEQ ID NO: 1416587 - RNA, 19 nt, Artificial Sequence
  Description of Artificial Sequence: Synthetic oligonucleotide
acggggcguccgccgccag

SEQ ID NO: 1416588 - RNA, 19 nt, Artificial Sequence
  Description of Artificial Sequence: Synthetic oligonucleotide
ccagacgcgcuacgccgug

SEQ ID NO: 1416589 - RNA, 19 nt, Artificial Sequence
  Description of Artificial Sequence: Synthetic oligonucleotide
gcggacccuccaucacagc

SEQ ID NO: 1416590 - RNA, 19 nt, Artificial Sequence
  Description of Artificial Sequence: Synthetic oligonucleotide
gucucagguggagcccucu

SEQ ID NO: 1416591 - RNA, 19 nt, Artificial Sequence
  Description of Artificial Sequence: Synthetic oligonucleotide
cgugaggacuagcugggua

SEQ ID NO: 1416592 - RNA, 19 nt, Artificial Sequence
  Description of Artificial Sequence: Synthetic oligonucleotide
ccucaacugccugaaagau

SEQ ID NO: 1416593 - RNA, 19 nt, Artificial Sequence
  Description of Artificial Sequence: Synthetic oligonucleotide
cagacgcgcuacgccguga

SEQ ID NO: 1416594 - RNA, 19 nt, Artificial Sequence
  Description of Artificial Sequence: Synthetic oligonucleotide
auggccccggcgguuccuu

SEQ ID NO: 1416595 - RNA, 19 nt, Artificial Sequence
  Description of Artificial Sequence: Synthetic oligonucleotide
gcgcuggacggggcguccg

SEQ ID NO: 1416596 - RNA, 19 nt, Artificial Sequence
  Description of Artificial Sequence: Synthetic oligonucleotide
ggcgcuggacggggcgucc

SEQ ID NO: 1416597 - RNA, 19 nt, Artificial Sequence
  Description of Artificial Sequence: Synthetic oligonucleotide
gcgagcgcugcgcgguguc

SEQ ID NO: 1416598 - RNA, 19 nt, Artificial Sequence
  Description of Artificial Sequence: Synthetic oligonucleotide
ccucugacuugacuccugu

SEQ ID NO: 1416599 - RNA, 19 nt, Artificial Sequence
  Description of Artificial Sequence: Synthetic oligonucleotide
ggggcagcggcgaccagcu

SEQ ID NO: 1416600 - RNA, 19 nt, Artificial Sequence
  Description of Artificial Sequence: Synthetic oligonucleotide
gcgucgcaacagaguguag

SEQ ID NO: 1416601 - RNA, 19 nt, Artificial Sequence
  Description of Artificial Sequence: Synthetic oligonucleotide
caucuguagcaggguugua

SEQ ID NO: 1416602 - RNA, 19 nt, Artificial Sequence
  Description of Artificial Sequence: Synthetic oligonucleotide
cgugcccauacaaguccca

SEQ ID NO: 1416603 - RNA, 19 nt, Artificial Sequence
  Description of Artificial Sequence: Synthetic oligonucleotide
cgcgguguccaggcggaag

SEQ ID NO: 1416604 - RNA, 19 nt, Artificial Sequence
  Description of Artificial Sequence: Synthetic oligonucleotide
gcagaaacuuaggcggguu

SEQ ID NO: 1416605 - RNA, 19 nt, Artificial Sequence
  Description of Artificial Sequence: Synthetic oligonucleotide
gggcguccgccgccagcag

SEQ ID NO: 1416606 - RNA, 19 nt, Artificial Sequence
  Description of Artificial Sequence: Synthetic oligonucleotide
gcaccaccaugcauccuua

SEQ ID NO: 1416607 - RNA, 19 nt, Artificial Sequence
  Description of Artificial Sequence: Synthetic oligonucleotide
cgcuacgccgugaggacua

SEQ ID NO: 1416608 - RNA, 19 nt, Artificial Sequence
  Description of Artificial Sequence: Synthetic oligonucleotide
ccucaguauauaggagccu

SEQ ID NO: 1416609 - RNA, 19 nt, Artificial Sequence
  Description of Artificial Sequence: Synthetic oligonucleotide
gcguccgccgccagcaggu

SEQ ID NO: 1416610 - RNA, 19 nt, Artificial Sequence
  Description of Artificial Sequence: Synthetic oligonucleotide
cccagccgccuuucggaaa

SEQ ID NO: 1416611 - RNA, 19 nt, Artificial Sequence
  Description of Artificial Sequence: Synthetic oligonucleotide
cgagcgcugcgcggugucc

SEQ ID NO: 1416612 - RNA, 19 nt, Artificial Sequence
  Description of Artificial Sequence: Synthetic oligonucleotide
gccuuucggaaaagcguuu

SEQ ID NO: 1416613 - RNA, 19 nt, Artificial Sequence
  Description of Artificial Sequence: Synthetic oligonucleotide
cggcgccugaggggcagcg

SEQ ID NO: 1416614 - RNA, 19 nt, Artificial Sequence
  Description of Artificial Sequence: Synthetic oligonucleotide
cggggcguccgccgccagc

SEQ ID NO: 1416615 - RNA, 19 nt, Artificial Sequence
  Description of Artificial Sequence: Synthetic oligonucleotide
cccgaagcgcugacucugu

SEQ ID NO: 1416616 - RNA, 19 nt, Artificial Sequence
  Description of Artificial Sequence: Synthetic oligonucleotide
cugcccuagcaggggugcu

SEQ ID NO: 1416617 - RNA, 19 nt, Artificial Sequence
  Description of Artificial Sequence: Synthetic oligonucleotide
gcgcuacgccgugaggacu

SEQ ID NO: 1416618 - RNA, 19 nt, Artificial Sequence
  Description of Artificial Sequence: Synthetic oligonucleotide
ccgaagcgcugacucugua

SEQ ID NO: 1416619 - RNA, 19 nt, Artificial Sequence
  Description of Artificial Sequence: Synthetic oligonucleotide
ggggugcuacccagagggu

SEQ ID NO: 1416620 - RNA, 19 nt, Artificial Sequence
  Description of Artificial Sequence: Synthetic oligonucleotide
cccggccauagcgucgcaa

SEQ ID NO: 1416621 - RNA, 19 nt, Artificial Sequence
  Description of Artificial Sequence: Synthetic oligonucleotide
cggcgagagccgccucgac

SEQ ID NO: 1416622 - RNA, 19 nt, Artificial Sequence
  Description of Artificial Sequence: Synthetic oligonucleotide
ccacagcguucagaagccu

SEQ ID NO: 1416623 - RNA, 19 nt, Artificial Sequence
  Description of Artificial Sequence: Synthetic oligonucleotide
ccccggcgguuccuuccca

SEQ ID NO: 1416624 - RNA, 19 nt, Artificial Sequence
  Description of Artificial Sequence: Synthetic oligonucleotide
cagcggcgaccagcuucaa

SEQ ID NO: 1416625 - RNA, 19 nt, Artificial Sequence
  Description of Artificial Sequence: Synthetic oligonucleotide
cggcgcuggacggggcguc

SEQ ID NO: 1416626 - RNA, 19 nt, Artificial Sequence
  Description of Artificial Sequence: Synthetic oligonucleotide
ccgugaggacuagcugggu

SEQ ID NO: 1416627 - RNA, 19 nt, Artificial Sequence
  Description of Artificial Sequence: Synthetic oligonucleotide
gcgcgguguccaggcggaa

SEQ ID NO: 1416628 - RNA, 19 nt, Artificial Sequence
  Description of Artificial Sequence: Synthetic oligonucleotide
aaaggcuucccuaacaugc

SEQ ID NO: 1416629 - RNA, 19 nt, Artificial Sequence
  Description of Artificial Sequence: Synthetic oligonucleotide
aauguagugaucuccuuuc

SEQ ID NO: 1416630 - RNA, 19 nt, Artificial Sequence
  Description of Artificial Sequence: Synthetic oligonucleotide
ucaaagauuagcucgcagg

SEQ ID NO: 1416631 - RNA, 19 nt, Artificial Sequence
  Description of Artificial Sequence: Synthetic oligonucleotide
uauagucugacgaagcugc

SEQ ID NO: 1416632 - RNA, 19 nt, Artificial Sequence
  Description of Artificial Sequence: Synthetic oligonucleotide
uccaccuaaacacugaaug

SEQ ID NO: 1416633 - RNA, 19 nt, Artificial Sequence
  Description of Artificial Sequence: Synthetic oligonucleotide
aaauggccgauuuucuggc

SEQ ID NO: 1416634 - RNA, 19 nt, Artificial Sequence
  Description of Artificial Sequence: Synthetic oligonucleotide
uuuggcaucucgaaggaag

SEQ ID NO: 1416635 - RNA, 19 nt, Artificial Sequence
  Description of Artificial Sequence: Synthetic oligonucleotide
auugggcucacucauggcc

SEQ ID NO: 1416636 - RNA, 19 nt, Artificial Sequence
  Description of Artificial Sequence: Synthetic oligonucleotide
aacguuguagacauacugc

SEQ ID NO: 1416637 - RNA, 19 nt, Artificial Sequence
  Description of Artificial Sequence: Synthetic oligonucleotide
acguuguagacauacugcc

SEQ ID NO: 1416638 - RNA, 19 nt, Artificial Sequence
  Description of Artificial Sequence: Synthetic oligonucleotide
aagauuagcucgcaggugu

SEQ ID NO: 1416639 - RNA, 19 nt, Artificial Sequence
  Description of Artificial Sequence: Synthetic oligonucleotide
aaguacuaaaaccaggcau

SEQ ID NO: 1416640 - RNA, 19 nt, Artificial Sequence
  Description of Artificial Sequence: Synthetic oligonucleotide
ugaaggaacuuagauauag

SEQ ID NO: 1416641 - RNA, 19 nt, Artificial Sequence
  Description of Artificial Sequence: Synthetic oligonucleotide
auugcggacaaucugguug

SEQ ID NO: 1416642 - RNA, 19 nt, Artificial Sequence
  Description of Artificial Sequence: Synthetic oligonucleotide
uacagaaucacaccggcac

SEQ ID NO: 1416643 - RNA, 19 nt, Artificial Sequence
  Description of Artificial Sequence: Synthetic oligonucleotide
ucguuuagcccguugauag

SEQ ID NO: 1416644 - RNA, 19 nt, Artificial Sequence
  Description of Artificial Sequence: Synthetic oligonucleotide
aauuuccugggccuugggg

SEQ ID NO: 1416645 - RNA, 19 nt, Artificial Sequence
  Description of Artificial Sequence: Synthetic oligonucleotide
guugcuauggucaauuucc

SEQ ID NO: 1416646 - RNA, 19 nt, Artificial Sequence
  Description of Artificial Sequence: Synthetic oligonucleotide
uccgaucucauacaguuug

SEQ ID NO: 1416647 - RNA, 19 nt, Artificial Sequence
  Description of Artificial Sequence: Synthetic oligonucleotide
agggaguccgaccucaugc

SEQ ID NO: 1416648 - RNA, 19 nt, Artificial Sequence
  Description of Artificial Sequence: Synthetic oligonucleotide
cuuggaaguacuaaaacca

SEQ ID NO: 1416649 - RNA, 19 nt, Artificial Sequence
  Description of Artificial Sequence: Synthetic oligonucleotide
aguacguagacacccuuac

SEQ ID NO: 1416650 - RNA, 19 nt, Artificial Sequence
  Description of Artificial Sequence: Synthetic oligonucleotide
cuuagauauagucugacga

SEQ ID NO: 1416651 - RNA, 19 nt, Artificial Sequence
  Description of Artificial Sequence: Synthetic oligonucleotide
uuuagguacaccagggagu

SEQ ID NO: 1416652 - RNA, 19 nt, Artificial Sequence
  Description of Artificial Sequence: Synthetic oligonucleotide
auagggaaugguguggucc

SEQ ID NO: 1416653 - RNA, 19 nt, Artificial Sequence
  Description of Artificial Sequence: Synthetic oligonucleotide
uucuagguagcccaggcca

SEQ ID NO: 1416654 - RNA, 19 nt, Artificial Sequence
  Description of Artificial Sequence: Synthetic oligonucleotide
gaauucaccacugaucagc

SEQ ID NO: 1416655 - RNA, 19 nt, Artificial Sequence
  Description of Artificial Sequence: Synthetic oligonucleotide
aacuuagauauagucugac

SEQ ID NO: 1416656 - RNA, 19 nt, Artificial Sequence
  Description of Artificial Sequence: Synthetic oligonucleotide
guuuagguacaccagggag

SEQ ID NO: 1416657 - RNA, 19 nt, Artificial Sequence
  Description of Artificial Sequence: Synthetic oligonucleotide
uacguagacacccuuacuc

SEQ ID NO: 1416658 - RNA, 19 nt, Artificial Sequence
  Description of Artificial Sequence: Synthetic oligonucleotide
cuuuuagucucauggagac

SEQ ID NO: 1416659 - RNA, 19 nt, Artificial Sequence
  Description of Artificial Sequence: Synthetic oligonucleotide
aacuuguugccauucagaa

SEQ ID NO: 1416660 - RNA, 19 nt, Artificial Sequence
  Description of Artificial Sequence: Synthetic oligonucleotide
acuuagauauagucugacg

SEQ ID NO: 1416661 - RNA, 19 nt, Artificial Sequence
  Description of Artificial Sequence: Synthetic oligonucleotide
gcuauggucaauuuccugg

SEQ ID NO: 1416662 - RNA, 19 nt, Artificial Sequence
  Description of Artificial Sequence: Synthetic oligonucleotide
acccuuacucucuuggccc

SEQ ID NO: 1416663 - RNA, 19 nt, Artificial Sequence
  Description of Artificial Sequence: Synthetic oligonucleotide
agucugacgaagcugcuuc

SEQ ID NO: 1416664 - RNA, 19 nt, Artificial Sequence
  Description of Artificial Sequence: Synthetic oligonucleotide
acaacgagcggcgagggcc

SEQ ID NO: 1416665 - RNA, 19 nt, Artificial Sequence
  Description of Artificial Sequence: Synthetic oligonucleotide
agagccgccauacugaaca

SEQ ID NO: 1416666 - RNA, 19 nt, Artificial Sequence
  Description of Artificial Sequence: Synthetic oligonucleotide
uuagauauagucugacgaa

SEQ ID NO: 1416667 - RNA, 19 nt, Artificial Sequence
  Description of Artificial Sequence: Synthetic oligonucleotide
ugcagauagggaauggugu

SEQ ID NO: 1416668 - RNA, 19 nt, Artificial Sequence
  Description of Artificial Sequence: Synthetic oligonucleotide
gacacccuuacucucuugg

SEQ ID NO: 1416669 - RNA, 19 nt, Artificial Sequence
  Description of Artificial Sequence: Synthetic oligonucleotide
acgccgucaguuuagguac

SEQ ID NO: 1416670 - RNA, 19 nt, Artificial Sequence
  Description of Artificial Sequence: Synthetic oligonucleotide
agauauagucugacgaagc

SEQ ID NO: 1416671 - RNA, 19 nt, Artificial Sequence
  Description of Artificial Sequence: Synthetic oligonucleotide
ucaugaaggaacuuagaua

SEQ ID NO: 1416672 - RNA, 19 nt, Artificial Sequence
  Description of Artificial Sequence: Synthetic oligonucleotide
uagauauagucugacgaag

SEQ ID NO: 1416673 - RNA, 19 nt, Artificial Sequence
  Description of Artificial Sequence: Synthetic oligonucleotide
aauggccgauuuucuggcc

SEQ ID NO: 1416674 - RNA, 19 nt, Artificial Sequence
  Description of Artificial Sequence: Synthetic oligonucleotide
aggaccaacccguucgccc

SEQ ID NO: 1416675 - RNA, 19 nt, Artificial Sequence
  Description of Artificial Sequence: Synthetic oligonucleotide
gaugaauucaccacugauc

SEQ ID NO: 1416676 - RNA, 19 nt, Artificial Sequence
  Description of Artificial Sequence: Synthetic oligonucleotide
uagacaacgaggacaucag

SEQ ID NO: 1416677 - RNA, 19 nt, Artificial Sequence
  Description of Artificial Sequence: Synthetic oligonucleotide
agacaaaucugucuuggca

SEQ ID NO: 1416678 - RNA, 19 nt, Artificial Sequence
  Description of Artificial Sequence: Synthetic oligonucleotide
auagacaacgaggacauca

SEQ ID NO: 1416679 - RNA, 19 nt, Artificial Sequence
  Description of Artificial Sequence: Synthetic oligonucleotide
gauauuagcagcaggaacu

SEQ ID NO: 1416680 - RNA, 19 nt, Artificial Sequence
  Description of Artificial Sequence: Synthetic oligonucleotide
uucaaagauuagcucgcag

SEQ ID NO: 1416681 - RNA, 19 nt, Artificial Sequence
  Description of Artificial Sequence: Synthetic oligonucleotide
uugauagcaucgucuacag

SEQ ID NO: 1416682 - RNA, 19 nt, Artificial Sequence
  Description of Artificial Sequence: Synthetic oligonucleotide
uaaacacugaaugccgucc

SEQ ID NO: 1416683 - RNA, 19 nt, Artificial Sequence
  Description of Artificial Sequence: Synthetic oligonucleotide
ugcgagacaacgagcggcg

SEQ ID NO: 1416684 - RNA, 19 nt, Artificial Sequence
  Description of Artificial Sequence: Synthetic oligonucleotide
caguuuagguacaccaggg

SEQ ID NO: 1416685 - RNA, 19 nt, Artificial Sequence
  Description of Artificial Sequence: Synthetic oligonucleotide
uccaaacuaggaccaaccc

SEQ ID NO: 1416686 - RNA, 19 nt, Artificial Sequence
  Description of Artificial Sequence: Synthetic oligonucleotide
guuguagacauacugccga

SEQ ID NO: 1416687 - RNA, 19 nt, Artificial Sequence
  Description of Artificial Sequence: Synthetic oligonucleotide
acaguuuggcaucucgaag

SEQ ID NO: 1416688 - RNA, 19 nt, Artificial Sequence
  Description of Artificial Sequence: Synthetic oligonucleotide
aacgcucugccaaugauca

SEQ ID NO: 1416689 - RNA, 19 nt, Artificial Sequence
  Description of Artificial Sequence: Synthetic oligonucleotide
caucagcuggaaauggccg

SEQ ID NO: 1416690 - RNA, 19 nt, Artificial Sequence
  Description of Artificial Sequence: Synthetic oligonucleotide
cuugaacucguugcuaugg

SEQ ID NO: 1416691 - RNA, 19 nt, Artificial Sequence
  Description of Artificial Sequence: Synthetic oligonucleotide
aacuaggaccaacccguuc

SEQ ID NO: 1416692 - RNA, 19 nt, Artificial Sequence
  Description of Artificial Sequence: Synthetic oligonucleotide
gacaaucugguugacgcag

SEQ ID NO: 1416693 - RNA, 19 nt, Artificial Sequence
  Description of Artificial Sequence: Synthetic oligonucleotide
aggcguucuagguccagcc

SEQ ID NO: 1416694 - RNA, 19 nt, Artificial Sequence
  Description of Artificial Sequence: Synthetic oligonucleotide
caccuaaacacugaaugcc

SEQ ID NO: 1416695 - RNA, 19 nt, Artificial Sequence
  Description of Artificial Sequence: Synthetic oligonucleotide
cagguucucaugaaggaac

SEQ ID NO: 1416696 - RNA, 19 nt, Artificial Sequence
  Description of Artificial Sequence: Synthetic oligonucleotide
uagacauacugccgacacg

SEQ ID NO: 1416697 - RNA, 19 nt, Artificial Sequence
  Description of Artificial Sequence: Synthetic oligonucleotide
uccgaugaauucaccacug

SEQ ID NO: 1416698 - RNA, 19 nt, Artificial Sequence
  Description of Artificial Sequence: Synthetic oligonucleotide
agacaacgaggacaucagc

SEQ ID NO: 1416699 - RNA, 19 nt, Artificial Sequence
  Description of Artificial Sequence: Synthetic oligonucleotide
ugaugccccgagaagcagg

SEQ ID NO: 1416700 - RNA, 19 nt, Artificial Sequence
  Description of Artificial Sequence: Synthetic oligonucleotide
agggcuaccuguguggcgc

SEQ ID NO: 1416701 - RNA, 19 nt, Artificial Sequence
  Description of Artificial Sequence: Synthetic oligonucleotide
cuccaaacuaggaccaacc

SEQ ID NO: 1416702 - RNA, 19 nt, Artificial Sequence
  Description of Artificial Sequence: Synthetic oligonucleotide
aacacugaaugccguccag

SEQ ID NO: 1416703 - RNA, 19 nt, Artificial Sequence
  Description of Artificial Sequence: Synthetic oligonucleotide
aaagauuagcucgcaggug

SEQ ID NO: 1416704 - RNA, 19 nt, Artificial Sequence
  Description of Artificial Sequence: Synthetic oligonucleotide
ggaaguacuaaaaccaggc

SEQ ID NO: 1416705 - RNA, 19 nt, Artificial Sequence
  Description of Artificial Sequence: Synthetic oligonucleotide
uggcccaggauauuagcag

SEQ ID NO: 1416706 - RNA, 19 nt, Artificial Sequence
  Description of Artificial Sequence: Synthetic oligonucleotide
cagaaggucacaugagcag

SEQ ID NO: 1416707 - RNA, 19 nt, Artificial Sequence
  Description of Artificial Sequence: Synthetic oligonucleotide
agguacaccagggaguccg

SEQ ID NO: 1416708 - RNA, 19 nt, Artificial Sequence
  Description of Artificial Sequence: Synthetic oligonucleotide
accaacacauguucuaggu

SEQ ID NO: 1416709 - RNA, 19 nt, Artificial Sequence
  Description of Artificial Sequence: Synthetic oligonucleotide
acccguucgccccagcagc

SEQ ID NO: 1416710 - RNA, 19 nt, Artificial Sequence
  Description of Artificial Sequence: Synthetic oligonucleotide
acacccuuacucucuuggc

SEQ ID NO: 1416711 - RNA, 19 nt, Artificial Sequence
  Description of Artificial Sequence: Synthetic oligonucleotide
ugugaugccccgagaagca

SEQ ID NO: 1416712 - RNA, 19 nt, Artificial Sequence
  Description of Artificial Sequence: Synthetic oligonucleotide
ugucaagcuucuuggaagu

SEQ ID NO: 1416713 - RNA, 19 nt, Artificial Sequence
  Description of Artificial Sequence: Synthetic oligonucleotide
aguccgaccucaugcgggc

SEQ ID NO: 1416714 - RNA, 19 nt, Artificial Sequence
  Description of Artificial Sequence: Synthetic oligonucleotide
aacaugcagauagggaaug

SEQ ID NO: 1416715 - RNA, 19 nt, Artificial Sequence
  Description of Artificial Sequence: Synthetic oligonucleotide
ucaucaguacguagacacc

SEQ ID NO: 1416716 - RNA, 19 nt, Artificial Sequence
  Description of Artificial Sequence: Synthetic oligonucleotide
uccucguuuagcccguuga

SEQ ID NO: 1416717 - RNA, 19 nt, Artificial Sequence
  Description of Artificial Sequence: Synthetic oligonucleotide
gaaguacuaaaaccaggca

SEQ ID NO: 1416718 - RNA, 19 nt, Artificial Sequence
  Description of Artificial Sequence: Synthetic oligonucleotide
ugagcagacccagugcuag

SEQ ID NO: 1416719 - RNA, 19 nt, Artificial Sequence
  Description of Artificial Sequence: Synthetic oligonucleotide
gagacaacgagcggcgagg

SEQ ID NO: 1416720 - RNA, 19 nt, Artificial Sequence
  Description of Artificial Sequence: Synthetic oligonucleotide
caugucagccaucuuuccc

SEQ ID NO: 1416721 - RNA, 19 nt, Artificial Sequence
  Description of Artificial Sequence: Synthetic oligonucleotide
guuggagccccucaugccc

SEQ ID NO: 1416722 - RNA, 19 nt, Artificial Sequence
  Description of Artificial Sequence: Synthetic oligonucleotide
auuagcucgcagguguugg

SEQ ID NO: 1416723 - RNA, 19 nt, Artificial Sequence
  Description of Artificial Sequence: Synthetic oligonucleotide
aagcccgggauaucucuuc

SEQ ID NO: 1416724 - RNA, 19 nt, Artificial Sequence
  Description of Artificial Sequence: Synthetic oligonucleotide
aaucugguugacgcagagg

SEQ ID NO: 1416725 - RNA, 19 nt, Artificial Sequence
  Description of Artificial Sequence: Synthetic oligonucleotide
cuagcggaagucugcauug

SEQ ID NO: 1416726 - RNA, 19 nt, Artificial Sequence
  Description of Artificial Sequence: Synthetic oligonucleotide
accuaaacacugaaugccg

SEQ ID NO: 1416727 - RNA, 19 nt, Artificial Sequence
  Description of Artificial Sequence: Synthetic oligonucleotide
aacccguucgccccagcag

SEQ ID NO: 1416728 - RNA, 19 nt, Artificial Sequence
  Description of Artificial Sequence: Synthetic oligonucleotide
cucgcugcgagacaacgag

SEQ ID NO: 1416729 - RNA, 19 nt, Artificial Sequence
  Description of Artificial Sequence: Synthetic oligonucleotide
aggcacggcagacaaaucu

SEQ ID NO: 1416730 - RNA, 19 nt, Artificial Sequence
  Description of Artificial Sequence: Synthetic oligonucleotide
ucucaugaaggaacuuaga

SEQ ID NO: 1416731 - RNA, 19 nt, Artificial Sequence
  Description of Artificial Sequence: Synthetic oligonucleotide
ugcaugaucccaagggguc

SEQ ID NO: 1416732 - RNA, 19 nt, Artificial Sequence
  Description of Artificial Sequence: Synthetic oligonucleotide
gaacucguugcuaugguca

SEQ ID NO: 1416733 - RNA, 19 nt, Artificial Sequence
  Description of Artificial Sequence: Synthetic oligonucleotide
agcucgcagguguuggagc

SEQ ID NO: 1416734 - RNA, 19 nt, Artificial Sequence
  Description of Artificial Sequence: Synthetic oligonucleotide
uuuccaccuaaacacugaa

SEQ ID NO: 1416735 - RNA, 19 nt, Artificial Sequence
  Description of Artificial Sequence: Synthetic oligonucleotide
uugcggacaaucugguuga

SEQ ID NO: 1416736 - RNA, 19 nt, Artificial Sequence
  Description of Artificial Sequence: Synthetic oligonucleotide
cugcuccucguuuagcccg

SEQ ID NO: 1416737 - RNA, 19 nt, Artificial Sequence
  Description of Artificial Sequence: Synthetic oligonucleotide
ugguugacgcagagguugg

SEQ ID NO: 1416738 - RNA, 19 nt, Artificial Sequence
  Description of Artificial Sequence: Synthetic oligonucleotide
aguuuagguacaccaggga

SEQ ID NO: 1416739 - RNA, 19 nt, Artificial Sequence
  Description of Artificial Sequence: Synthetic oligonucleotide
acguagacacccuuacucu

SEQ ID NO: 1416740 - RNA, 19 nt, Artificial Sequence
  Description of Artificial Sequence: Synthetic oligonucleotide
gauauagucugacgaagcu

SEQ ID NO: 1416741 - RNA, 19 nt, Artificial Sequence
  Description of Artificial Sequence: Synthetic oligonucleotide
cugugaugccccgagaagc

SEQ ID NO: 1416742 - RNA, 19 nt, Artificial Sequence
  Description of Artificial Sequence: Synthetic oligonucleotide
aucacaccggcacaguccu

SEQ ID NO: 1416743 - RNA, 19 nt, Artificial Sequence
  Description of Artificial Sequence: Synthetic oligonucleotide
cuaaacacugaaugccguc

SEQ ID NO: 1416744 - RNA, 19 nt, Artificial Sequence
  Description of Artificial Sequence: Synthetic oligonucleotide
ggauauuagcagcaggaac

SEQ ID NO: 1416745 - RNA, 19 nt, Artificial Sequence
  Description of Artificial Sequence: Synthetic oligonucleotide
acggcagacaaaucugucu

SEQ ID NO: 1416746 - RNA, 19 nt, Artificial Sequence
  Description of Artificial Sequence: Synthetic oligonucleotide
uugacgcagagguuggagu

SEQ ID NO: 1416747 - RNA, 19 nt, Artificial Sequence
  Description of Artificial Sequence: Synthetic oligonucleotide
uugaacucguugcuauggu

SEQ ID NO: 1416748 - RNA, 19 nt, Artificial Sequence
  Description of Artificial Sequence: Synthetic oligonucleotide
cacccuuacucucuuggcc

SEQ ID NO: 1416749 - RNA, 19 nt, Artificial Sequence
  Description of Artificial Sequence: Synthetic oligonucleotide
ccaaacuaggaccaacccg

SEQ ID NO: 1416750 - RNA, 19 nt, Artificial Sequence
  Description of Artificial Sequence: Synthetic oligonucleotide
ugacgaagcugcuucugcu

SEQ ID NO: 1416751 - RNA, 19 nt, Artificial Sequence
  Description of Artificial Sequence: Synthetic oligonucleotide
uguagugaucuccuuucuu

SEQ ID NO: 1416752 - RNA, 19 nt, Artificial Sequence
  Description of Artificial Sequence: Synthetic oligonucleotide
cauagcugagucccacugc

SEQ ID NO: 1416753 - RNA, 19 nt, Artificial Sequence
  Description of Artificial Sequence: Synthetic oligonucleotide
ugcuauggucaauuuccug

SEQ ID NO: 1416754 - RNA, 19 nt, Artificial Sequence
  Description of Artificial Sequence: Synthetic oligonucleotide
aacucguugcuauggucaa

SEQ ID NO: 1416755 - RNA, 19 nt, Artificial Sequence
  Description of Artificial Sequence: Synthetic oligonucleotide
ugaacucguugcuaugguc

SEQ ID NO: 1416756 - RNA, 19 nt, Artificial Sequence
  Description of Artificial Sequence: Synthetic oligonucleotide
agcccgggauaucucuucc

SEQ ID NO: 1416757 - RNA, 19 nt, Artificial Sequence
  Description of Artificial Sequence: Synthetic oligonucleotide
uugaacgcucugccaauga

SEQ ID NO: 1416758 - RNA, 19 nt, Artificial Sequence
  Description of Artificial Sequence: Synthetic oligonucleotide
ggauaucucuuccaucacc

SEQ ID NO: 1416759 - RNA, 19 nt, Artificial Sequence
  Description of Artificial Sequence: Synthetic oligonucleotide
gaacuuguugccauucaga

SEQ ID NO: 1416760 - RNA, 19 nt, Artificial Sequence
  Description of Artificial Sequence: Synthetic oligonucleotide
gaguccgaccucaugcggg

SEQ ID NO: 1416761 - RNA, 19 nt, Artificial Sequence
  Description of Artificial Sequence: Synthetic oligonucleotide
cugacgaagcugcuucugc

SEQ ID NO: 1416762 - RNA, 19 nt, Artificial Sequence
  Description of Artificial Sequence: Synthetic oligonucleotide
gacgccgucaguuuaggua

SEQ ID NO: 1416763 - RNA, 19 nt, Artificial Sequence
  Description of Artificial Sequence: Synthetic oligonucleotide
uucagaauguagugaucuc

SEQ ID NO: 1416764 - RNA, 19 nt, Artificial Sequence
  Description of Artificial Sequence: Synthetic oligonucleotide
cagauagggaauggugugg

SEQ ID NO: 1416765 - RNA, 19 nt, Artificial Sequence
  Description of Artificial Sequence: Synthetic oligonucleotide
gucacaugagcagacccag

SEQ ID NO: 1416766 - RNA, 19 nt, Artificial Sequence
  Description of Artificial Sequence: Synthetic oligonucleotide
uagucucauggagacaaca

SEQ ID NO: 1416767 - RNA, 19 nt, Artificial Sequence
  Description of Artificial Sequence: Synthetic oligonucleotide
acugccgacacgccaugag

SEQ ID NO: 1416768 - RNA, 19 nt, Artificial Sequence
  Description of Artificial Sequence: Synthetic oligonucleotide
acacugaaugccguccagg

SEQ ID NO: 1416769 - RNA, 19 nt, Artificial Sequence
  Description of Artificial Sequence: Synthetic oligonucleotide
uguagacauacugccgaca

SEQ ID NO: 1416770 - RNA, 19 nt, Artificial Sequence
  Description of Artificial Sequence: Synthetic oligonucleotide
uuguagacauacugccgac

SEQ ID NO: 1416771 - RNA, 19 nt, Artificial Sequence
  Description of Artificial Sequence: Synthetic oligonucleotide
ggugauccagaacuuguug

SEQ ID NO: 1416772 - RNA, 19 nt, Artificial Sequence
  Description of Artificial Sequence: Synthetic oligonucleotide
uccgaccucaugcgggcag

SEQ ID NO: 1416773 - RNA, 19 nt, Artificial Sequence
  Description of Artificial Sequence: Synthetic oligonucleotide
cggacaaucugguugacgc

SEQ ID NO: 1416774 - RNA, 19 nt, Artificial Sequence
  Description of Artificial Sequence: Synthetic oligonucleotide
guucuagguagcccaggcc

SEQ ID NO: 1416775 - RNA, 19 nt, Artificial Sequence
  Description of Artificial Sequence: Synthetic oligonucleotide
guuuagcccguugauagca

SEQ ID NO: 1416776 - RNA, 19 nt, Artificial Sequence
  Description of Artificial Sequence: Synthetic oligonucleotide
cagaaucacaccggcacag

SEQ ID NO: 1416777 - RNA, 19 nt, Artificial Sequence
  Description of Artificial Sequence: Synthetic oligonucleotide
cauucagaauguagugauc

SEQ ID NO: 1416778 - RNA, 19 nt, Artificial Sequence
  Description of Artificial Sequence: Synthetic oligonucleotide
ggcauagacaacgaggaca

SEQ ID NO: 1416779 - RNA, 19 nt, Artificial Sequence
  Description of Artificial Sequence: Synthetic oligonucleotide
gcguucuagguccagcccg

SEQ ID NO: 1416780 - RNA, 19 nt, Artificial Sequence
  Description of Artificial Sequence: Synthetic oligonucleotide
auacccuucuccacaauga

SEQ ID NO: 1416781 - RNA, 19 nt, Artificial Sequence
  Description of Artificial Sequence: Synthetic oligonucleotide
agccgccucacuucacugg

SEQ ID NO: 1416782 - RNA, 19 nt, Artificial Sequence
  Description of Artificial Sequence: Synthetic oligonucleotide
gcuagccugugacagagug

SEQ ID NO: 1416783 - RNA, 19 nt, Artificial Sequence
  Description of Artificial Sequence: Synthetic oligonucleotide
gcagauagggaauggugug

SEQ ID NO: 1416784 - RNA, 19 nt, Artificial Sequence
  Description of Artificial Sequence: Synthetic oligonucleotide
caaagauuagcucgcaggu

SEQ ID NO: 1416785 - RNA, 19 nt, Artificial Sequence
  Description of Artificial Sequence: Synthetic oligonucleotide
uuggggcuaggaccagggg

SEQ ID NO: 1416786 - RNA, 19 nt, Artificial Sequence
  Description of Artificial Sequence: Synthetic oligonucleotide
ugucagccaucuuucccug

SEQ ID NO: 1416787 - RNA, 19 nt, Artificial Sequence
  Description of Artificial Sequence: Synthetic oligonucleotide
agauagggaaugguguggu

SEQ ID NO: 1416788 - RNA, 19 nt, Artificial Sequence
  Description of Artificial Sequence: Synthetic oligonucleotide
agcucgcucgcugcgagac

SEQ ID NO: 1416789 - RNA, 19 nt, Artificial Sequence
  Description of Artificial Sequence: Synthetic oligonucleotide
aucgagcucgcucgcugcg

SEQ ID NO: 1416790 - RNA, 19 nt, Artificial Sequence
  Description of Artificial Sequence: Synthetic oligonucleotide
gaugccccgagaagcaggc

SEQ ID NO: 1416791 - RNA, 19 nt, Artificial Sequence
  Description of Artificial Sequence: Synthetic oligonucleotide
cugaaugccguccagggcu

SEQ ID NO: 1416792 - RNA, 19 nt, Artificial Sequence
  Description of Artificial Sequence: Synthetic oligonucleotide
uuuuagucucauggagaca

SEQ ID NO: 1416793 - RNA, 19 nt, Artificial Sequence
  Description of Artificial Sequence: Synthetic oligonucleotide
ggcaacguuguagacauac

SEQ ID NO: 1416794 - RNA, 19 nt, Artificial Sequence
  Description of Artificial Sequence: Synthetic oligonucleotide
uuggagccccucaugccca

SEQ ID NO: 1416795 - RNA, 19 nt, Artificial Sequence
  Description of Artificial Sequence: Synthetic oligonucleotide
cuuggcaacguuguagaca

SEQ ID NO: 1416796 - RNA, 19 nt, Artificial Sequence
  Description of Artificial Sequence: Synthetic oligonucleotide
acaccggcacaguccuugc

SEQ ID NO: 1416797 - RNA, 19 nt, Artificial Sequence
  Description of Artificial Sequence: Synthetic oligonucleotide
agggcuccgaugaauucac

SEQ ID NO: 1416798 - RNA, 19 nt, Artificial Sequence
  Description of Artificial Sequence: Synthetic oligonucleotide
uuagcucgcagguguugga

SEQ ID NO: 1416799 - RNA, 19 nt, Artificial Sequence
  Description of Artificial Sequence: Synthetic oligonucleotide
gauuagcucgcagguguug

SEQ ID NO: 1416800 - RNA, 19 nt, Artificial Sequence
  Description of Artificial Sequence: Synthetic oligonucleotide
uuccaccuaaacacugaau

SEQ ID NO: 1416801 - RNA, 19 nt, Artificial Sequence
  Description of Artificial Sequence: Synthetic oligonucleotide
gaauguagugaucuccuuu

SEQ ID NO: 1416802 - RNA, 19 nt, Artificial Sequence
  Description of Artificial Sequence: Synthetic oligonucleotide
ucaguacguagacacccuu

SEQ ID NO: 1416803 - RNA, 19 nt, Artificial Sequence
  Description of Artificial Sequence: Synthetic oligonucleotide
uuuagcccguugauagcau

SEQ ID NO: 1416804 - RNA, 19 nt, Artificial Sequence
  Description of Artificial Sequence: Synthetic oligonucleotide
caacgagcggcgagggccg

SEQ ID NO: 1416805 - RNA, 19 nt, Artificial Sequence
  Description of Artificial Sequence: Synthetic oligonucleotide
cuaggaccaacccguucgc

SEQ ID NO: 1416806 - RNA, 19 nt, Artificial Sequence
  Description of Artificial Sequence: Synthetic oligonucleotide
aggcuucccuaacaugcag

SEQ ID NO: 1416807 - RNA, 19 nt, Artificial Sequence
  Description of Artificial Sequence: Synthetic oligonucleotide
accacugaucagcuuggga

SEQ ID NO: 1416808 - RNA, 19 nt, Artificial Sequence
  Description of Artificial Sequence: Synthetic oligonucleotide
gccgccauacugaacaggg

SEQ ID NO: 1416809 - RNA, 19 nt, Artificial Sequence
  Description of Artificial Sequence: Synthetic oligonucleotide
gaggcggguguacauguca

SEQ ID NO: 1416810 - RNA, 19 nt, Artificial Sequence
  Description of Artificial Sequence: Synthetic oligonucleotide
uuccugggacaggugagag

SEQ ID NO: 1416811 - RNA, 19 nt, Artificial Sequence
  Description of Artificial Sequence: Synthetic oligonucleotide
uuagcccguugauagcauc

SEQ ID NO: 1416812 - RNA, 19 nt, Artificial Sequence
  Description of Artificial Sequence: Synthetic oligonucleotide
ugggaagguacuucucuuu

SEQ ID NO: 1416813 - RNA, 19 nt, Artificial Sequence
  Description of Artificial Sequence: Synthetic oligonucleotide
aaggcuucccuaacaugca

SEQ ID NO: 1416814 - RNA, 19 nt, Artificial Sequence
  Description of Artificial Sequence: Synthetic oligonucleotide
auugaacgcucugccaaug

SEQ ID NO: 1416815 - RNA, 19 nt, Artificial Sequence
  Description of Artificial Sequence: Synthetic oligonucleotide
caucgagcucgcucgcugc

SEQ ID NO: 1416816 - RNA, 19 nt, Artificial Sequence
  Description of Artificial Sequence: Synthetic oligonucleotide
gggaguccgaccucaugcg

SEQ ID NO: 1416817 - RNA, 19 nt, Artificial Sequence
  Description of Artificial Sequence: Synthetic oligonucleotide
agugacgccgucaguuuag

SEQ ID NO: 1416818 - RNA, 19 nt, Artificial Sequence
  Description of Artificial Sequence: Synthetic oligonucleotide
ucgcugcgagacaacgagc

SEQ ID NO: 1416819 - RNA, 19 nt, Artificial Sequence
  Description of Artificial Sequence: Synthetic oligonucleotide
uagcucgcagguguuggag

SEQ ID NO: 1416820 - RNA, 19 nt, Artificial Sequence
  Description of Artificial Sequence: Synthetic oligonucleotide
cauugggcucacucauggc

SEQ ID NO: 1416821 - RNA, 19 nt, Artificial Sequence
  Description of Artificial Sequence: Synthetic oligonucleotide
agacaacgagcggcgaggg

SEQ ID NO: 1416822 - RNA, 19 nt, Artificial Sequence
  Description of Artificial Sequence: Synthetic oligonucleotide
auauuagcagcaggaacuu

SEQ ID NO: 1416823 - RNA, 19 nt, Artificial Sequence
  Description of Artificial Sequence: Synthetic oligonucleotide
caugaggcggguguacaug

SEQ ID NO: 1416824 - RNA, 19 nt, Artificial Sequence
  Description of Artificial Sequence: Synthetic oligonucleotide
gaucccaagggguccaccu

SEQ ID NO: 1416825 - RNA, 19 nt, Artificial Sequence
  Description of Artificial Sequence: Synthetic oligonucleotide
ggaccaacccguucgcccc

SEQ ID NO: 1416826 - RNA, 19 nt, Artificial Sequence
  Description of Artificial Sequence: Synthetic oligonucleotide
acgcagagguuggaguggg

SEQ ID NO: 1416827 - RNA, 19 nt, Artificial Sequence
  Description of Artificial Sequence: Synthetic oligonucleotide
agagugacgccgucaguuu

SEQ ID NO: 1416828 - RNA, 19 nt, Artificial Sequence
  Description of Artificial Sequence: Synthetic oligonucleotide
ugaaugccguccagggcua

SEQ ID NO: 1416829 - RNA, 19 nt, Artificial Sequence
  Description of Artificial Sequence: Synthetic oligonucleotide
uacucucuuggcccaggau

SEQ ID NO: 1416830 - RNA, 19 nt, Artificial Sequence
  Description of Artificial Sequence: Synthetic oligonucleotide
cuaaaaccaggcauacccu

SEQ ID NO: 1416831 - RNA, 19 nt, Artificial Sequence
  Description of Artificial Sequence: Synthetic oligonucleotide
caggacagccugcaugauc

SEQ ID NO: 1416832 - RNA, 19 nt, Artificial Sequence
  Description of Artificial Sequence: Synthetic oligonucleotide
ggagacaacaucagagcca

SEQ ID NO: 1416833 - RNA, 19 nt, Artificial Sequence
  Description of Artificial Sequence: Synthetic oligonucleotide
gggaagguacuucucuuuc

SEQ ID NO: 1416834 - RNA, 19 nt, Artificial Sequence
  Description of Artificial Sequence: Synthetic oligonucleotide
gacaacgagcggcgagggc

SEQ ID NO: 1416835 - RNA, 19 nt, Artificial Sequence
  Description of Artificial Sequence: Synthetic oligonucleotide
auacugccgacacgccaug

SEQ ID NO: 1416836 - RNA, 19 nt, Artificial Sequence
  Description of Artificial Sequence: Synthetic oligonucleotide
cuaccuguguggcgcacuc

SEQ ID NO: 1416837 - RNA, 19 nt, Artificial Sequence
  Description of Artificial Sequence: Synthetic oligonucleotide
cacucggcuguguacagaa

SEQ ID NO: 1416838 - RNA, 19 nt, Artificial Sequence
  Description of Artificial Sequence: Synthetic oligonucleotide
uggccgauuuucuggccaa

SEQ ID NO: 1416839 - RNA, 19 nt, Artificial Sequence
  Description of Artificial Sequence: Synthetic oligonucleotide
gcagaaggucacaugagca

SEQ ID NO: 1416840 - RNA, 19 nt, Artificial Sequence
  Description of Artificial Sequence: Synthetic oligonucleotide
gaacucucucagguccuug

SEQ ID NO: 1416841 - RNA, 19 nt, Artificial Sequence
  Description of Artificial Sequence: Synthetic oligonucleotide
gaccucaugcgggcagagg

SEQ ID NO: 1416842 - RNA, 19 nt, Artificial Sequence
  Description of Artificial Sequence: Synthetic oligonucleotide
aucaguacguagacacccu

SEQ ID NO: 1416843 - RNA, 19 nt, Artificial Sequence
  Description of Artificial Sequence: Synthetic oligonucleotide
ggcagcaucgagcucgcuc

SEQ ID NO: 1416844 - RNA, 19 nt, Artificial Sequence
  Description of Artificial Sequence: Synthetic oligonucleotide
agaaucacaccggcacagu

SEQ ID NO: 1416845 - RNA, 19 nt, Artificial Sequence
  Description of Artificial Sequence: Synthetic oligonucleotide
gcaucucgaaggaagcggc

SEQ ID NO: 1416846 - RNA, 19 nt, Artificial Sequence
  Description of Artificial Sequence: Synthetic oligonucleotide
cauacugccgacacgccau

SEQ ID NO: 1416847 - RNA, 19 nt, Artificial Sequence
  Description of Artificial Sequence: Synthetic oligonucleotide
ggcacggcagacaaaucug

SEQ ID NO: 1416848 - RNA, 19 nt, Artificial Sequence
  Description of Artificial Sequence: Synthetic oligonucleotide
aacgagcggcgagggccgc

SEQ ID NO: 1416849 - RNA, 19 nt, Artificial Sequence
  Description of Artificial Sequence: Synthetic oligonucleotide
ggcucacucauggccaggg

SEQ ID NO: 1416850 - RNA, 19 nt, Artificial Sequence
  Description of Artificial Sequence: Synthetic oligonucleotide
uagcugagucccacugcuc

SEQ ID NO: 1416851 - RNA, 19 nt, Artificial Sequence
  Description of Artificial Sequence: Synthetic oligonucleotide
ugacgccgucaguuuaggu

SEQ ID NO: 1416852 - RNA, 19 nt, Artificial Sequence
  Description of Artificial Sequence: Synthetic oligonucleotide
gugacgccgucaguuuagg

SEQ ID NO: 1416853 - RNA, 19 nt, Artificial Sequence
  Description of Artificial Sequence: Synthetic oligonucleotide
uagcggaagucugcauuga

SEQ ID NO: 1416854 - RNA, 19 nt, Artificial Sequence
  Description of Artificial Sequence: Synthetic oligonucleotide
ucgaaggaagcggcccaug

SEQ ID NO: 1416855 - RNA, 19 nt, Artificial Sequence
  Description of Artificial Sequence: Synthetic oligonucleotide
uauuagcagcaggaacuuu

SEQ ID NO: 1416856 - RNA, 19 nt, Artificial Sequence
  Description of Artificial Sequence: Synthetic oligonucleotide
ucguugcuauggucaauuu

SEQ ID NO: 1416857 - RNA, 19 nt, Artificial Sequence
  Description of Artificial Sequence: Synthetic oligonucleotide
gagugacgccgucaguuua

SEQ ID NO: 1416858 - RNA, 19 nt, Artificial Sequence
  Description of Artificial Sequence: Synthetic oligonucleotide
agcauugggcucacucaug

SEQ ID NO: 1416859 - RNA, 19 nt, Artificial Sequence
  Description of Artificial Sequence: Synthetic oligonucleotide
ggcguucuagguccagccc

SEQ ID NO: 1416860 - RNA, 19 nt, Artificial Sequence
  Description of Artificial Sequence: Synthetic oligonucleotide
cagggcuccgaugaauuca

SEQ ID NO: 1416861 - RNA, 19 nt, Artificial Sequence
  Description of Artificial Sequence: Synthetic oligonucleotide
augaucccaagggguccac

SEQ ID NO: 1416862 - RNA, 19 nt, Artificial Sequence
  Description of Artificial Sequence: Synthetic oligonucleotide
ugccguccagggcuaccug

SEQ ID NO: 1416863 - RNA, 19 nt, Artificial Sequence
  Description of Artificial Sequence: Synthetic oligonucleotide
gcuccgaucucauacaguu

SEQ ID NO: 1416864 - RNA, 19 nt, Artificial Sequence
  Description of Artificial Sequence: Synthetic oligonucleotide
gcaucgagcucgcucgcug

SEQ ID NO: 1416865 - RNA, 19 nt, Artificial Sequence
  Description of Artificial Sequence: Synthetic oligonucleotide
guagacacccuuacucucu

SEQ ID NO: 1416866 - RNA, 19 nt, Artificial Sequence
  Description of Artificial Sequence: Synthetic oligonucleotide
acgcucugccaaugaucag

SEQ ID NO: 1416867 - RNA, 19 nt, Artificial Sequence
  Description of Artificial Sequence: Synthetic oligonucleotide
aaacuaggaccaacccguu

SEQ ID NO: 1416868 - RNA, 19 nt, Artificial Sequence
  Description of Artificial Sequence: Synthetic oligonucleotide
aagcggcccauggggaagu

SEQ ID NO: 1416869 - RNA, 19 nt, Artificial Sequence
  Description of Artificial Sequence: Synthetic oligonucleotide
cgaaggaagcggcccaugg

SEQ ID NO: 1416870 - RNA, 19 nt, Artificial Sequence
  Description of Artificial Sequence: Synthetic oligonucleotide
gccuucaucacaggccuug

SEQ ID NO: 1416871 - RNA, 19 nt, Artificial Sequence
  Description of Artificial Sequence: Synthetic oligonucleotide
caguacguagacacccuua

SEQ ID NO: 1416872 - RNA, 19 nt, Artificial Sequence
  Description of Artificial Sequence: Synthetic oligonucleotide
ggacaaucugguugacgca

SEQ ID NO: 1416873 - RNA, 19 nt, Artificial Sequence
  Description of Artificial Sequence: Synthetic oligonucleotide
gggauaucucuuccaucac

SEQ ID NO: 1416874 - RNA, 19 nt, Artificial Sequence
  Description of Artificial Sequence: Synthetic oligonucleotide
uguugccauucagaaugua

SEQ ID NO: 1416875 - RNA, 19 nt, Artificial Sequence
  Description of Artificial Sequence: Synthetic oligonucleotide
ucacuggucccagcuccga

SEQ ID NO: 1416876 - RNA, 19 nt, Artificial Sequence
  Description of Artificial Sequence: Synthetic oligonucleotide
gcaugaucccaaggggucc

SEQ ID NO: 1416877 - RNA, 19 nt, Artificial Sequence
  Description of Artificial Sequence: Synthetic oligonucleotide
caugaucccaaggggucca

SEQ ID NO: 1416878 - RNA, 19 nt, Artificial Sequence
  Description of Artificial Sequence: Synthetic oligonucleotide
cgcucugccaaugaucagc

SEQ ID NO: 1416879 - RNA, 19 nt, Artificial Sequence
  Description of Artificial Sequence: Synthetic oligonucleotide
cuuccugggacaggugaga

SEQ ID NO: 1416880 - RNA, 19 nt, Artificial Sequence
  Description of Artificial Sequence: Synthetic oligonucleotide
caccggcacaguccuugcc

SEQ ID NO: 1416881 - RNA, 19 nt, Artificial Sequence
  Description of Artificial Sequence: Synthetic oligonucleotide
ggcggguguacaugucagc

SEQ ID NO: 1416882 - RNA, 19 nt, Artificial Sequence
  Description of Artificial Sequence: Synthetic oligonucleotide
gccgauuuucuggccaaag

SEQ ID NO: 1416883 - RNA, 19 nt, Artificial Sequence
  Description of Artificial Sequence: Synthetic oligonucleotide
agacccagugcuagccugu

SEQ ID NO: 1416884 - RNA, 19 nt, Artificial Sequence
  Description of Artificial Sequence: Synthetic oligonucleotide
ucgagcucgcucgcugcga

SEQ ID NO: 1416885 - RNA, 19 nt, Artificial Sequence
  Description of Artificial Sequence: Synthetic oligonucleotide
gcggacaaucugguugacg

SEQ ID NO: 1416886 - RNA, 19 nt, Artificial Sequence
  Description of Artificial Sequence: Synthetic oligonucleotide
caacccguucgccccagca

SEQ ID NO: 1416887 - RNA, 19 nt, Artificial Sequence
  Description of Artificial Sequence: Synthetic oligonucleotide
guacguagacacccuuacu

SEQ ID NO: 1416888 - RNA, 19 nt, Artificial Sequence
  Description of Artificial Sequence: Synthetic oligonucleotide
ccgagaagcaggcacggca

SEQ ID NO: 1416889 - RNA, 19 nt, Artificial Sequence
  Description of Artificial Sequence: Synthetic oligonucleotide
uggcgcacucggcugugua

SEQ ID NO: 1416890 - RNA, 19 nt, Artificial Sequence
  Description of Artificial Sequence: Synthetic oligonucleotide
cucguuuagcccguugaua

SEQ ID NO: 1416891 - RNA, 19 nt, Artificial Sequence
  Description of Artificial Sequence: Synthetic oligonucleotide
cagagccgccauacugaac

SEQ ID NO: 1416892 - RNA, 19 nt, Artificial Sequence
  Description of Artificial Sequence: Synthetic oligonucleotide
cuccucguuuagcccguug

SEQ ID NO: 1416893 - RNA, 19 nt, Artificial Sequence
  Description of Artificial Sequence: Synthetic oligonucleotide
cacgccaugaggcgggugu

SEQ ID NO: 1416894 - RNA, 19 nt, Artificial Sequence
  Description of Artificial Sequence: Synthetic oligonucleotide
uacugccgacacgccauga

SEQ ID NO: 1416895 - RNA, 19 nt, Artificial Sequence
  Description of Artificial Sequence: Synthetic oligonucleotide
acggggcuagcggaagucu

SEQ ID NO: 1416896 - RNA, 19 nt, Artificial Sequence
  Description of Artificial Sequence: Synthetic oligonucleotide
cagcaucgagcucgcucgc

SEQ ID NO: 1416897 - RNA, 19 nt, Artificial Sequence
  Description of Artificial Sequence: Synthetic oligonucleotide
cguagacacccuuacucuc

SEQ ID NO: 1416898 - RNA, 19 nt, Artificial Sequence
  Description of Artificial Sequence: Synthetic oligonucleotide
cguucuagguccagcccgc

SEQ ID NO: 1416899 - RNA, 19 nt, Artificial Sequence
  Description of Artificial Sequence: Synthetic oligonucleotide
gccccgagaagcaggcacg

SEQ ID NO: 1416900 - RNA, 19 nt, Artificial Sequence
  Description of Artificial Sequence: Synthetic oligonucleotide
gaaaggccuuggggcuagg

SEQ ID NO: 1416901 - RNA, 19 nt, Artificial Sequence
  Description of Artificial Sequence: Synthetic oligonucleotide
cucgcucgcugcgagacaa

SEQ ID NO: 1416902 - RNA, 19 nt, Artificial Sequence
  Description of Artificial Sequence: Synthetic oligonucleotide
ggcgcacucggcuguguac

SEQ ID NO: 1416903 - RNA, 19 nt, Artificial Sequence
  Description of Artificial Sequence: Synthetic oligonucleotide
cuguguggcgcacucggcu

SEQ ID NO: 1416904 - RNA, 19 nt, Artificial Sequence
  Description of Artificial Sequence: Synthetic oligonucleotide
cuggucccagcuccgaucu

SEQ ID NO: 1416905 - RNA, 19 nt, Artificial Sequence
  Description of Artificial Sequence: Synthetic oligonucleotide
cguuuagcccguugauagc

SEQ ID NO: 1416906 - RNA, 19 nt, Artificial Sequence
  Description of Artificial Sequence: Synthetic oligonucleotide
augaaggaacuuagauaua

SEQ ID NO: 1416907 - RNA, 19 nt, Artificial Sequence
  Description of Artificial Sequence: Synthetic oligonucleotide
agcaucgagcucgcucgcu

SEQ ID NO: 1416908 - RNA, 19 nt, Artificial Sequence
  Description of Artificial Sequence: Synthetic oligonucleotide
cccgcucaucaguacguag

SEQ ID NO: 1416909 - RNA, 19 nt, Artificial Sequence
  Description of Artificial Sequence: Synthetic oligonucleotide
cacggggcuagcggaaguc

SEQ ID NO: 1416910 - RNA, 19 nt, Artificial Sequence
  Description of Artificial Sequence: Synthetic oligonucleotide
guacaccagggaguccgac

SEQ ID NO: 1416911 - RNA, 19 nt, Artificial Sequence
  Description of Artificial Sequence: Synthetic oligonucleotide
cauugaacgcucugccaau

SEQ ID NO: 1416912 - RNA, 19 nt, Artificial Sequence
  Description of Artificial Sequence: Synthetic oligonucleotide
agauuagcucgcagguguu

SEQ ID NO: 1416913 - RNA, 19 nt, Artificial Sequence
  Description of Artificial Sequence: Synthetic oligonucleotide
cgagacaacgagcggcgag

SEQ ID NO: 1416914 - RNA, 19 nt, Artificial Sequence
  Description of Artificial Sequence: Synthetic oligonucleotide
agccugugacagagugacg

SEQ ID NO: 1416915 - RNA, 19 nt, Artificial Sequence
  Description of Artificial Sequence: Synthetic oligonucleotide
ucgcucgcugcgagacaac

SEQ ID NO: 1416916 - RNA, 19 nt, Artificial Sequence
  Description of Artificial Sequence: Synthetic oligonucleotide
agggguccaccugccagca

SEQ ID NO: 1416917 - RNA, 19 nt, Artificial Sequence
  Description of Artificial Sequence: Synthetic oligonucleotide
cuagguagcccaggccaga

SEQ ID NO: 1416918 - RNA, 19 nt, Artificial Sequence
  Description of Artificial Sequence: Synthetic oligonucleotide
cgcucaucaguacguagac

SEQ ID NO: 1416919 - RNA, 19 nt, Artificial Sequence
  Description of Artificial Sequence: Synthetic oligonucleotide
cagcauugggcucacucau

SEQ ID NO: 1416920 - RNA, 19 nt, Artificial Sequence
  Description of Artificial Sequence: Synthetic oligonucleotide
cagagugacgccgucaguu

SEQ ID NO: 1416921 - RNA, 19 nt, Artificial Sequence
  Description of Artificial Sequence: Synthetic oligonucleotide
cgacacgccaugaggcggg

SEQ ID NO: 1416922 - RNA, 19 nt, Artificial Sequence
  Description of Artificial Sequence: Synthetic oligonucleotide
cauagacaacgaggacauc

SEQ ID NO: 1416923 - RNA, 19 nt, Artificial Sequence
  Description of Artificial Sequence: Synthetic oligonucleotide
ccgacacgccaugaggcgg

SEQ ID NO: 1416924 - RNA, 19 nt, Artificial Sequence
  Description of Artificial Sequence: Synthetic oligonucleotide
gccucacuucacugguccc

SEQ ID NO: 1416925 - RNA, 19 nt, Artificial Sequence
  Description of Artificial Sequence: Synthetic oligonucleotide
ugcggacaaucugguugac

SEQ ID NO: 1416926 - RNA, 19 nt, Artificial Sequence
  Description of Artificial Sequence: Synthetic oligonucleotide
cccguugauagcaucgucu

SEQ ID NO: 1416927 - RNA, 19 nt, Artificial Sequence
  Description of Artificial Sequence: Synthetic oligonucleotide
agucugcauugaacgcucu

SEQ ID NO: 1416928 - RNA, 19 nt, Artificial Sequence
  Description of Artificial Sequence: Synthetic oligonucleotide
gcuagcggaagucugcauu

SEQ ID NO: 1416929 - RNA, 19 nt, Artificial Sequence
  Description of Artificial Sequence: Synthetic oligonucleotide
acucguugcuauggucaau

SEQ ID NO: 1416930 - RNA, 19 nt, Artificial Sequence
  Description of Artificial Sequence: Synthetic oligonucleotide
gucugacgaagcugcuucu

SEQ ID NO: 1416931 - RNA, 19 nt, Artificial Sequence
  Description of Artificial Sequence: Synthetic oligonucleotide
gaaugccguccagggcuac

SEQ ID NO: 1416932 - RNA, 19 nt, Artificial Sequence
  Description of Artificial Sequence: Synthetic oligonucleotide
ucucuuggcccaggauauu

SEQ ID NO: 1416933 - RNA, 19 nt, Artificial Sequence
  Description of Artificial Sequence: Synthetic oligonucleotide
ccuaaacacugaaugccgu

SEQ ID NO: 1416934 - RNA, 19 nt, Artificial Sequence
  Description of Artificial Sequence: Synthetic oligonucleotide
cccguucgccccagcagcc

SEQ ID NO: 1416935 - RNA, 19 nt, Artificial Sequence
  Description of Artificial Sequence: Synthetic oligonucleotide
uucgccccagcagccggau

SEQ ID NO: 1416936 - RNA, 19 nt, Artificial Sequence
  Description of Artificial Sequence: Synthetic oligonucleotide
uggcaacguuguagacaua

SEQ ID NO: 1416937 - RNA, 19 nt, Artificial Sequence
  Description of Artificial Sequence: Synthetic oligonucleotide
gcgcacucggcuguguaca

SEQ ID NO: 1416938 - RNA, 19 nt, Artificial Sequence
  Description of Artificial Sequence: Synthetic oligonucleotide
ccgcagccuccaaacuagg

SEQ ID NO: 1416939 - RNA, 19 nt, Artificial Sequence
  Description of Artificial Sequence: Synthetic oligonucleotide
gcccguugauagcaucguc

SEQ ID NO: 1416940 - RNA, 19 nt, Artificial Sequence
  Description of Artificial Sequence: Synthetic oligonucleotide
cguucgccccagcagccgg

SEQ ID NO: 1416941 - RNA, 19 nt, Artificial Sequence
  Description of Artificial Sequence: Synthetic oligonucleotide
ccgaugaauucaccacuga

SEQ ID NO: 1416942 - RNA, 19 nt, Artificial Sequence
  Description of Artificial Sequence: Synthetic oligonucleotide
ccucacuucacugguccca

SEQ ID NO: 1416943 - RNA, 19 nt, Artificial Sequence
  Description of Artificial Sequence: Synthetic oligonucleotide
ccccgagaagcaggcacgg

SEQ ID NO: 1416944 - RNA, 19 nt, Artificial Sequence
  Description of Artificial Sequence: Synthetic oligonucleotide
gaagcccgggauaucucuu

SEQ ID NO: 1416945 - RNA, 19 nt, Artificial Sequence
  Description of Artificial Sequence: Synthetic oligonucleotide
cugaucagcuugggaaggu

SEQ ID NO: 1416946 - RNA, 19 nt, Artificial Sequence
  Description of Artificial Sequence: Synthetic oligonucleotide
acacgccaugaggcgggug

SEQ ID NO: 1416947 - RNA, 19 nt, Artificial Sequence
  Description of Artificial Sequence: Synthetic oligonucleotide
cgcucgcugcgagacaacg

SEQ ID NO: 1416948 - RNA, 19 nt, Artificial Sequence
  Description of Artificial Sequence: Synthetic oligonucleotide
cgagcucgcucgcugcgag

SEQ ID NO: 1416949 - RNA, 19 nt, Artificial Sequence
  Description of Artificial Sequence: Synthetic oligonucleotide
gcccgggauaucucuucca

SEQ ID NO: 1416950 - RNA, 19 nt, Artificial Sequence
  Description of Artificial Sequence: Synthetic oligonucleotide
guucgccccagcagccgga

SEQ ID NO: 1416951 - RNA, 19 nt, Artificial Sequence
  Description of Artificial Sequence: Synthetic oligonucleotide
gccacggggcuagcggaag

SEQ ID NO: 1416952 - RNA, 19 nt, Artificial Sequence
  Description of Artificial Sequence: Synthetic oligonucleotide
cggggcuagcggaagucug

SEQ ID NO: 1416953 - RNA, 19 nt, Artificial Sequence
  Description of Artificial Sequence: Synthetic oligonucleotide
gcaacguuguagacauacu

SEQ ID NO: 1416954 - RNA, 19 nt, Artificial Sequence
  Description of Artificial Sequence: Synthetic oligonucleotide
gcucgcugcgagacaacga

SEQ ID NO: 1416955 - RNA, 19 nt, Artificial Sequence
  Description of Artificial Sequence: Synthetic oligonucleotide
cuccgaucucauacaguuu

SEQ ID NO: 1416956 - RNA, 19 nt, Artificial Sequence
  Description of Artificial Sequence: Synthetic oligonucleotide
agguuggagugggcgccau

SEQ ID NO: 1416957 - RNA, 19 nt, Artificial Sequence
  Description of Artificial Sequence: Synthetic oligonucleotide
cgaugaauucaccacugau

SEQ ID NO: 1416958 - RNA, 19 nt, Artificial Sequence
  Description of Artificial Sequence: Synthetic oligonucleotide
gggcuccgaugaauucacc

SEQ ID NO: 1416959 - RNA, 19 nt, Artificial Sequence
  Description of Artificial Sequence: Synthetic oligonucleotide
guccgaccucaugcgggca

SEQ ID NO: 1416960 - RNA, 19 nt, Artificial Sequence
  Description of Artificial Sequence: Synthetic oligonucleotide
ccguucgccccagcagccg

SEQ ID NO: 1416961 - RNA, 19 nt, Artificial Sequence
  Description of Artificial Sequence: Synthetic oligonucleotide
cccgagaagcaggcacggc

SEQ ID NO: 1416962 - RNA, 19 nt, Artificial Sequence
  Description of Artificial Sequence: Synthetic oligonucleotide
guucuagguccagcccgcu

SEQ ID NO: 1416963 - RNA, 19 nt, Artificial Sequence
  Description of Artificial Sequence: Synthetic oligonucleotide
gcacucggcuguguacaga

SEQ ID NO: 1416964 - RNA, 19 nt, Artificial Sequence
  Description of Artificial Sequence: Synthetic oligonucleotide
gggcuaccuguguggcgca

SEQ ID NO: 1416965 - RNA, 19 nt, Artificial Sequence
  Description of Artificial Sequence: Synthetic oligonucleotide
cucgaaggaagcggcccau

SEQ ID NO: 1416966 - RNA, 19 nt, Artificial Sequence
  Description of Artificial Sequence: Synthetic oligonucleotide
ccaggcguucuagguccag

SEQ ID NO: 1416967 - RNA, 19 nt, Artificial Sequence
  Description of Artificial Sequence: Synthetic oligonucleotide
ggcuaccuguguggcgcac

SEQ ID NO: 1416968 - RNA, 19 nt, Artificial Sequence
  Description of Artificial Sequence: Synthetic oligonucleotide
gcucgcucgcugcgagaca

SEQ ID NO: 1416969 - RNA, 19 nt, Artificial Sequence
  Description of Artificial Sequence: Synthetic oligonucleotide
cugggccauuggugaucca

SEQ ID NO: 1416970 - RNA, 19 nt, Artificial Sequence
  Description of Artificial Sequence: Synthetic oligonucleotide
ccaacccguucgccccagc

SEQ ID NO: 1416971 - RNA, 19 nt, Artificial Sequence
  Description of Artificial Sequence: Synthetic oligonucleotide
gacacgccaugaggcgggu

SEQ ID NO: 1416972 - RNA, 19 nt, Artificial Sequence
  Description of Artificial Sequence: Synthetic oligonucleotide
cccgggauaucucuuccau

SEQ ID NO: 1416973 - RNA, 19 nt, Artificial Sequence
  Description of Artificial Sequence: Synthetic oligonucleotide
augcgggcagagggcugau

SEQ ID NO: 1416974 - RNA, 19 nt, Artificial Sequence
  Description of Artificial Sequence: Synthetic oligonucleotide
gcuaccuguguggcgcacu

SEQ ID NO: 1416975 - RNA, 19 nt, Artificial Sequence
  Description of Artificial Sequence: Synthetic oligonucleotide
ggcuagcggaagucugcau

SEQ ID NO: 1416976 - RNA, 19 nt, Artificial Sequence
  Description of Artificial Sequence: Synthetic oligonucleotide
gcgagacaacgagcggcga

SEQ ID NO: 1416977 - RNA, 19 nt, Artificial Sequence
  Description of Artificial Sequence: Synthetic oligonucleotide
ggccgauuuucuggccaaa

SEQ ID NO: 1416978 - RNA, 19 nt, Artificial Sequence
  Description of Artificial Sequence: Synthetic oligonucleotide
cgaccucaugcgggcagag

SEQ ID NO: 1416979 - RNA, 19 nt, Artificial Sequence
  Description of Artificial Sequence: Synthetic oligonucleotide
gcgagggccgcagccucca

SEQ ID NO: 1416980 - RNA, 19 nt, Artificial Sequence
  Description of Artificial Sequence: Synthetic oligonucleotide
ggccacggggcuagcggaa

SEQ ID NO: 1416981 - RNA, 19 nt, Artificial Sequence
  Description of Artificial Sequence: Synthetic oligonucleotide
ccgaccucaugcgggcaga

SEQ ID NO: 1416982 - RNA, 19 nt, Artificial Sequence
  Description of Artificial Sequence: Synthetic oligonucleotide
caucgucuacaggcagcau

SEQ ID NO: 1416983 - RNA, 19 nt, Artificial Sequence
  Description of Artificial Sequence: Synthetic oligonucleotide
gcccgcucaucaguacgua

SEQ ID NO: 1416984 - RNA, 19 nt, Artificial Sequence
  Description of Artificial Sequence: Synthetic oligonucleotide
cgccgucaguuuagguaca

SEQ ID NO: 1416985 - RNA, 19 nt, Artificial Sequence
  Description of Artificial Sequence: Synthetic oligonucleotide
ccacggggcuagcggaagu

SEQ ID NO: 1416986 - RNA, 19 nt, Artificial Sequence
  Description of Artificial Sequence: Synthetic oligonucleotide
gcuccucguuuagcccguu

SEQ ID NO: 1416987 - RNA, 19 nt, Artificial Sequence
  Description of Artificial Sequence: Synthetic oligonucleotide
uuuaauugcaaucaaauau

SEQ ID NO: 1416988 - RNA, 19 nt, Artificial Sequence
  Description of Artificial Sequence: Synthetic oligonucleotide
auugcaaucaaauaugcug

SEQ ID NO: 1416989 - RNA, 19 nt, Artificial Sequence
  Description of Artificial Sequence: Synthetic oligonucleotide
uuaauugcaaucaaauaug

SEQ ID NO: 1416990 - RNA, 19 nt, Artificial Sequence
  Description of Artificial Sequence: Synthetic oligonucleotide
aacugacgaagacagaagc

SEQ ID NO: 1416991 - RNA, 19 nt, Artificial Sequence
  Description of Artificial Sequence: Synthetic oligonucleotide
ucugaaguuagccagggcc

SEQ ID NO: 1416992 - RNA, 19 nt, Artificial Sequence
  Description of Artificial Sequence: Synthetic oligonucleotide
uuugcuaaaaugaucagau

SEQ ID NO: 1416993 - RNA, 19 nt, Artificial Sequence
  Description of Artificial Sequence: Synthetic oligonucleotide
gaugcuauuauagagcugc

SEQ ID NO: 1416994 - RNA, 19 nt, Artificial Sequence
  Description of Artificial Sequence: Synthetic oligonucleotide
agauuaauguucuuggcag

SEQ ID NO: 1416995 - RNA, 19 nt, Artificial Sequence
  Description of Artificial Sequence: Synthetic oligonucleotide
auuauagagcugcaucucc

SEQ ID NO: 1416996 - RNA, 19 nt, Artificial Sequence
  Description of Artificial Sequence: Synthetic oligonucleotide
aacaguagugaguuugagg

SEQ ID NO: 1416997 - RNA, 19 nt, Artificial Sequence
  Description of Artificial Sequence: Synthetic oligonucleotide
gaaagugugcgcuugcacg

SEQ ID NO: 1416998 - RNA, 19 nt, Artificial Sequence
  Description of Artificial Sequence: Synthetic oligonucleotide
accguuaguacacugguac

SEQ ID NO: 1416999 - RNA, 19 nt, Artificial Sequence
  Description of Artificial Sequence: Synthetic oligonucleotide
auaaggccggaacugaacc

SEQ ID NO: 1417000 - RNA, 19 nt, Artificial Sequence
  Description of Artificial Sequence: Synthetic oligonucleotide
aagaugcuauuauagagcu

SEQ ID NO: 1417001 - RNA, 19 nt, Artificial Sequence
  Description of Artificial Sequence: Synthetic oligonucleotide
aauacgcuuguacuugcac

SEQ ID NO: 1417002 - RNA, 19 nt, Artificial Sequence
  Description of Artificial Sequence: Synthetic oligonucleotide
aacugaaccucuguguagc

SEQ ID NO: 1417003 - RNA, 19 nt, Artificial Sequence
  Description of Artificial Sequence: Synthetic oligonucleotide
ucaaauaugcugucugaag

SEQ ID NO: 1417004 - RNA, 19 nt, Artificial Sequence
  Description of Artificial Sequence: Synthetic oligonucleotide
aaagggaucgucaauuuug

SEQ ID NO: 1417005 - RNA, 19 nt, Artificial Sequence
  Description of Artificial Sequence: Synthetic oligonucleotide
agguggauaaaacagccag

SEQ ID NO: 1417006 - RNA, 19 nt, Artificial Sequence
  Description of Artificial Sequence: Synthetic oligonucleotide
auucacacgagccuucagg

SEQ ID NO: 1417007 - RNA, 19 nt, Artificial Sequence
  Description of Artificial Sequence: Synthetic oligonucleotide
agugcgauaaggccggaac

SEQ ID NO: 1417008 - RNA, 19 nt, Artificial Sequence
  Description of Artificial Sequence: Synthetic oligonucleotide
ucaagugaccguuaguaca

SEQ ID NO: 1417009 - RNA, 19 nt, Artificial Sequence
  Description of Artificial Sequence: Synthetic oligonucleotide
caucagugcgauaaggccg

SEQ ID NO: 1417010 - RNA, 19 nt, Artificial Sequence
  Description of Artificial Sequence: Synthetic oligonucleotide
aguagguggauaaaacagc

SEQ ID NO: 1417011 - RNA, 19 nt, Artificial Sequence
  Description of Artificial Sequence: Synthetic oligonucleotide
ucagauaguugugugaagc

SEQ ID NO: 1417012 - RNA, 19 nt, Artificial Sequence
  Description of Artificial Sequence: Synthetic oligonucleotide
aucguaugggcccuugagc

SEQ ID NO: 1417013 - RNA, 19 nt, Artificial Sequence
  Description of Artificial Sequence: Synthetic oligonucleotide
guggauaaaacagccagcg

SEQ ID NO: 1417014 - RNA, 19 nt, Artificial Sequence
  Description of Artificial Sequence: Synthetic oligonucleotide
uuaguacacugguacagag

SEQ ID NO: 1417015 - RNA, 19 nt, Artificial Sequence
  Description of Artificial Sequence: Synthetic oligonucleotide
gauaguugugugaagcugc

SEQ ID NO: 1417016 - RNA, 19 nt, Artificial Sequence
  Description of Artificial Sequence: Synthetic oligonucleotide
uucaguacugugaaccgug

SEQ ID NO: 1417017 - RNA, 19 nt, Artificial Sequence
  Description of Artificial Sequence: Synthetic oligonucleotide
auuuggagaccauggcacc

SEQ ID NO: 1417018 - RNA, 19 nt, Artificial Sequence
  Description of Artificial Sequence: Synthetic oligonucleotide
aaugaucagauaguugugu

SEQ ID NO: 1417019 - RNA, 19 nt, Artificial Sequence
  Description of Artificial Sequence: Synthetic oligonucleotide
gaagaaaagagcacuccag

SEQ ID NO: 1417020 - RNA, 19 nt, Artificial Sequence
  Description of Artificial Sequence: Synthetic oligonucleotide
aggacaguacuccauucac

SEQ ID NO: 1417021 - RNA, 19 nt, Artificial Sequence
  Description of Artificial Sequence: Synthetic oligonucleotide
aucaagugaccguuaguac

SEQ ID NO: 1417022 - RNA, 19 nt, Artificial Sequence
  Description of Artificial Sequence: Synthetic oligonucleotide
ucugcuaguagguggauaa

SEQ ID NO: 1417023 - RNA, 19 nt, Artificial Sequence
  Description of Artificial Sequence: Synthetic oligonucleotide
uguuuguucgccucuuuug

SEQ ID NO: 1417024 - RNA, 19 nt, Artificial Sequence
  Description of Artificial Sequence: Synthetic oligonucleotide
guagccaaucuucucaaag

SEQ ID NO: 1417025 - RNA, 19 nt, Artificial Sequence
  Description of Artificial Sequence: Synthetic oligonucleotide
gaaccgugguguuucauag

SEQ ID NO: 1417026 - RNA, 19 nt, Artificial Sequence
  Description of Artificial Sequence: Synthetic oligonucleotide
ucucacaacgacaguuggg

SEQ ID NO: 1417027 - RNA, 19 nt, Artificial Sequence
  Description of Artificial Sequence: Synthetic oligonucleotide
uagccaaucuucucaaagc

SEQ ID NO: 1417028 - RNA, 19 nt, Artificial Sequence
  Description of Artificial Sequence: Synthetic oligonucleotide
uacgcuuguacuugcacug

SEQ ID NO: 1417029 - RNA, 19 nt, Artificial Sequence
  Description of Artificial Sequence: Synthetic oligonucleotide
ggauaaaacagccagcgca

SEQ ID NO: 1417030 - RNA, 19 nt, Artificial Sequence
  Description of Artificial Sequence: Synthetic oligonucleotide
aaacagccagcgcacauca

SEQ ID NO: 1417031 - RNA, 19 nt, Artificial Sequence
  Description of Artificial Sequence: Synthetic oligonucleotide
uacacugguacagagcuca

SEQ ID NO: 1417032 - RNA, 19 nt, Artificial Sequence
  Description of Artificial Sequence: Synthetic oligonucleotide
aagcacagaggauggcgac

SEQ ID NO: 1417033 - RNA, 19 nt, Artificial Sequence
  Description of Artificial Sequence: Synthetic oligonucleotide
cugaaguuagccagggccc

SEQ ID NO: 1417034 - RNA, 19 nt, Artificial Sequence
  Description of Artificial Sequence: Synthetic oligonucleotide
gguguuucauaguacaggc

SEQ ID NO: 1417035 - RNA, 19 nt, Artificial Sequence
  Description of Artificial Sequence: Synthetic oligonucleotide
gauaaaacagccagcgcac

SEQ ID NO: 1417036 - RNA, 19 nt, Artificial Sequence
  Description of Artificial Sequence: Synthetic oligonucleotide
guuuguucgccucuuuugc

SEQ ID NO: 1417037 - RNA, 19 nt, Artificial Sequence
  Description of Artificial Sequence: Synthetic oligonucleotide
aagggaucgucaauuuugg

SEQ ID NO: 1417038 - RNA, 19 nt, Artificial Sequence
  Description of Artificial Sequence: Synthetic oligonucleotide
gaucgucaauuuuggagag

SEQ ID NO: 1417039 - RNA, 19 nt, Artificial Sequence
  Description of Artificial Sequence: Synthetic oligonucleotide
gggaucgucaauuuuggag

SEQ ID NO: 1417040 - RNA, 19 nt, Artificial Sequence
  Description of Artificial Sequence: Synthetic oligonucleotide
cagaguacuguuuccacug

SEQ ID NO: 1417041 - RNA, 19 nt, Artificial Sequence
  Description of Artificial Sequence: Synthetic oligonucleotide
caagugaccguuaguacac

SEQ ID NO: 1417042 - RNA, 19 nt, Artificial Sequence
  Description of Artificial Sequence: Synthetic oligonucleotide
ucaguacugugaaccgugg

SEQ ID NO: 1417043 - RNA, 19 nt, Artificial Sequence
  Description of Artificial Sequence: Synthetic oligonucleotide
guagguggauaaaacagcc

SEQ ID NO: 1417044 - RNA, 19 nt, Artificial Sequence
  Description of Artificial Sequence: Synthetic oligonucleotide
uucaugcacugucagcuca

SEQ ID NO: 1417045 - RNA, 19 nt, Artificial Sequence
  Description of Artificial Sequence: Synthetic oligonucleotide
ugaccguuaguacacuggu

SEQ ID NO: 1417046 - RNA, 19 nt, Artificial Sequence
  Description of Artificial Sequence: Synthetic oligonucleotide
ugguacagagcucaccgcu

SEQ ID NO: 1417047 - RNA, 19 nt, Artificial Sequence
  Description of Artificial Sequence: Synthetic oligonucleotide
gaacugaaccucuguguag

SEQ ID NO: 1417048 - RNA, 19 nt, Artificial Sequence
  Description of Artificial Sequence: Synthetic oligonucleotide
ucauugccugucuugguug

SEQ ID NO: 1417049 - RNA, 19 nt, Artificial Sequence
  Description of Artificial Sequence: Synthetic oligonucleotide
cuaguagguggauaaaaca

SEQ ID NO: 1417050 - RNA, 19 nt, Artificial Sequence
  Description of Artificial Sequence: Synthetic oligonucleotide
cucgcucacagcuuucucc

SEQ ID NO: 1417051 - RNA, 19 nt, Artificial Sequence
  Description of Artificial Sequence: Synthetic oligonucleotide
agugcaguucuucaggcau

SEQ ID NO: 1417052 - RNA, 19 nt, Artificial Sequence
  Description of Artificial Sequence: Synthetic oligonucleotide
uaguacacugguacagagc

SEQ ID NO: 1417053 - RNA, 19 nt, Artificial Sequence
  Description of Artificial Sequence: Synthetic oligonucleotide
auacgcuuguacuugcacu

SEQ ID NO: 1417054 - RNA, 19 nt, Artificial Sequence
  Description of Artificial Sequence: Synthetic oligonucleotide
ugggcagcggcacauaguc

SEQ ID NO: 1417055 - RNA, 19 nt, Artificial Sequence
  Description of Artificial Sequence: Synthetic oligonucleotide
acaggcguguaaugaaguc

SEQ ID NO: 1417056 - RNA, 19 nt, Artificial Sequence
  Description of Artificial Sequence: Synthetic oligonucleotide
gacugcagcccucugcucc

SEQ ID NO: 1417057 - RNA, 19 nt, Artificial Sequence
  Description of Artificial Sequence: Synthetic oligonucleotide
uguguuacccuguccuggc

SEQ ID NO: 1417058 - RNA, 19 nt, Artificial Sequence
  Description of Artificial Sequence: Synthetic oligonucleotide
acugaaccucuguguagcc

SEQ ID NO: 1417059 - RNA, 19 nt, Artificial Sequence
  Description of Artificial Sequence: Synthetic oligonucleotide
ugguugggugagcacaugc

SEQ ID NO: 1417060 - RNA, 19 nt, Artificial Sequence
  Description of Artificial Sequence: Synthetic oligonucleotide
aagagcacuccaggggcgc

SEQ ID NO: 1417061 - RNA, 19 nt, Artificial Sequence
  Description of Artificial Sequence: Synthetic oligonucleotide
cagauuaauguucuuggca

SEQ ID NO: 1417062 - RNA, 19 nt, Artificial Sequence
  Description of Artificial Sequence: Synthetic oligonucleotide
gcuauuauagagcugcauc

SEQ ID NO: 1417063 - RNA, 19 nt, Artificial Sequence
  Description of Artificial Sequence: Synthetic oligonucleotide
ggaucgucaauuuuggaga

SEQ ID NO: 1417064 - RNA, 19 nt, Artificial Sequence
  Description of Artificial Sequence: Synthetic oligonucleotide
aauaugcugucugaaguua

SEQ ID NO: 1417065 - RNA, 19 nt, Artificial Sequence
  Description of Artificial Sequence: Synthetic oligonucleotide
uguccuacuucuguauuug

SEQ ID NO: 1417066 - RNA, 19 nt, Artificial Sequence
  Description of Artificial Sequence: Synthetic oligonucleotide
aguacaggcguguaaugaa

SEQ ID NO: 1417067 - RNA, 19 nt, Artificial Sequence
  Description of Artificial Sequence: Synthetic oligonucleotide
acuccauucacuccugaau

SEQ ID NO: 1417068 - RNA, 19 nt, Artificial Sequence
  Description of Artificial Sequence: Synthetic oligonucleotide
acuacuggacugcagcccu

SEQ ID NO: 1417069 - RNA, 19 nt, Artificial Sequence
  Description of Artificial Sequence: Synthetic oligonucleotide
uuucauaguacaggcgugu

SEQ ID NO: 1417070 - RNA, 19 nt, Artificial Sequence
  Description of Artificial Sequence: Synthetic oligonucleotide
agauaguugugugaagcug

SEQ ID NO: 1417071 - RNA, 19 nt, Artificial Sequence
  Description of Artificial Sequence: Synthetic oligonucleotide
ugcgauaaggccggaacug

SEQ ID NO: 1417072 - RNA, 19 nt, Artificial Sequence
  Description of Artificial Sequence: Synthetic oligonucleotide
ugcacacgcaugcagacuu

SEQ ID NO: 1417073 - RNA, 19 nt, Artificial Sequence
  Description of Artificial Sequence: Synthetic oligonucleotide
uacaggcguguaaugaagu

SEQ ID NO: 1417074 - RNA, 19 nt, Artificial Sequence
  Description of Artificial Sequence: Synthetic oligonucleotide
uauuauagagcugcaucuc

SEQ ID NO: 1417075 - RNA, 19 nt, Artificial Sequence
  Description of Artificial Sequence: Synthetic oligonucleotide
ucauaguacaggcguguaa

SEQ ID NO: 1417076 - RNA, 19 nt, Artificial Sequence
  Description of Artificial Sequence: Synthetic oligonucleotide
cuauuauagagcugcaucu

SEQ ID NO: 1417077 - RNA, 19 nt, Artificial Sequence
  Description of Artificial Sequence: Synthetic oligonucleotide
uaguacaggcguguaauga

SEQ ID NO: 1417078 - RNA, 19 nt, Artificial Sequence
  Description of Artificial Sequence: Synthetic oligonucleotide
aaagagcacuccaggggcg

SEQ ID NO: 1417079 - RNA, 19 nt, Artificial Sequence
  Description of Artificial Sequence: Synthetic oligonucleotide
gaacugacgaagacagaag

SEQ ID NO: 1417080 - RNA, 19 nt, Artificial Sequence
  Description of Artificial Sequence: Synthetic oligonucleotide
agacaccgcugccagcacc

SEQ ID NO: 1417081 - RNA, 19 nt, Artificial Sequence
  Description of Artificial Sequence: Synthetic oligonucleotide
guugugugaagcugcugcc

SEQ ID NO: 1417082 - RNA, 19 nt, Artificial Sequence
  Description of Artificial Sequence: Synthetic oligonucleotide
auaguacaggcguguaaug

SEQ ID NO: 1417083 - RNA, 19 nt, Artificial Sequence
  Description of Artificial Sequence: Synthetic oligonucleotide
aacgacaguugggacaugu

SEQ ID NO: 1417084 - RNA, 19 nt, Artificial Sequence
  Description of Artificial Sequence: Synthetic oligonucleotide
uagguggauaaaacagcca

SEQ ID NO: 1417085 - RNA, 19 nt, Artificial Sequence
  Description of Artificial Sequence: Synthetic oligonucleotide
aucagugcgauaaggccgg

SEQ ID NO: 1417086 - RNA, 19 nt, Artificial Sequence
  Description of Artificial Sequence: Synthetic oligonucleotide
ugauccucacaucaucgua

SEQ ID NO: 1417087 - RNA, 19 nt, Artificial Sequence
  Description of Artificial Sequence: Synthetic oligonucleotide
gcuggaaggaaagugugcg

SEQ ID NO: 1417088 - RNA, 19 nt, Artificial Sequence
  Description of Artificial Sequence: Synthetic oligonucleotide
cugucugaaguuagccagg

SEQ ID NO: 1417089 - RNA, 19 nt, Artificial Sequence
  Description of Artificial Sequence: Synthetic oligonucleotide
ucgcucacagcuuucucca

SEQ ID NO: 1417090 - RNA, 19 nt, Artificial Sequence
  Description of Artificial Sequence: Synthetic oligonucleotide
cacaucaagugaccguuag

SEQ ID NO: 1417091 - RNA, 19 nt, Artificial Sequence
  Description of Artificial Sequence: Synthetic oligonucleotide
ugcgcuccgagucauucac

SEQ ID NO: 1417092 - RNA, 19 nt, Artificial Sequence
  Description of Artificial Sequence: Synthetic oligonucleotide
caucguaugggcccuugag

SEQ ID NO: 1417093 - RNA, 19 nt, Artificial Sequence
  Description of Artificial Sequence: Synthetic oligonucleotide
uggcauuccucuuucuggu

SEQ ID NO: 1417094 - RNA, 19 nt, Artificial Sequence
  Description of Artificial Sequence: Synthetic oligonucleotide
cauuccucuuucuggugcc

SEQ ID NO: 1417095 - RNA, 19 nt, Artificial Sequence
  Description of Artificial Sequence: Synthetic oligonucleotide
ugaaccgugguguuucaua

SEQ ID NO: 1417096 - RNA, 19 nt, Artificial Sequence
  Description of Artificial Sequence: Synthetic oligonucleotide
gugaccguuaguacacugg

SEQ ID NO: 1417097 - RNA, 19 nt, Artificial Sequence
  Description of Artificial Sequence: Synthetic oligonucleotide
caaauaugcugucugaagu

SEQ ID NO: 1417098 - RNA, 19 nt, Artificial Sequence
  Description of Artificial Sequence: Synthetic oligonucleotide
acgcaugcagacuuucuca

SEQ ID NO: 1417099 - RNA, 19 nt, Artificial Sequence
  Description of Artificial Sequence: Synthetic oligonucleotide
ugcaaucaaauaugcuguc

SEQ ID NO: 1417100 - RNA, 19 nt, Artificial Sequence
  Description of Artificial Sequence: Synthetic oligonucleotide
aucucaaguuccagagacc

SEQ ID NO: 1417101 - RNA, 19 nt, Artificial Sequence
  Description of Artificial Sequence: Synthetic oligonucleotide
agcgagggaacugacgaag

SEQ ID NO: 1417102 - RNA, 19 nt, Artificial Sequence
  Description of Artificial Sequence: Synthetic oligonucleotide
aguugggacauguggccug

SEQ ID NO: 1417103 - RNA, 19 nt, Artificial Sequence
  Description of Artificial Sequence: Synthetic oligonucleotide
agugaccguuaguacacug

SEQ ID NO: 1417104 - RNA, 19 nt, Artificial Sequence
  Description of Artificial Sequence: Synthetic oligonucleotide
cucacaacgacaguuggga

SEQ ID NO: 1417105 - RNA, 19 nt, Artificial Sequence
  Description of Artificial Sequence: Synthetic oligonucleotide
gauaaggccggaacugaac

SEQ ID NO: 1417106 - RNA, 19 nt, Artificial Sequence
  Description of Artificial Sequence: Synthetic oligonucleotide
uccgagucauucacacgag

SEQ ID NO: 1417107 - RNA, 19 nt, Artificial Sequence
  Description of Artificial Sequence: Synthetic oligonucleotide
cucuuacugaucucacaac

SEQ ID NO: 1417108 - RNA, 19 nt, Artificial Sequence
  Description of Artificial Sequence: Synthetic oligonucleotide
ugcuaguagguggauaaaa

SEQ ID NO: 1417109 - RNA, 19 nt, Artificial Sequence
  Description of Artificial Sequence: Synthetic oligonucleotide
cuguguuacccuguccugg

SEQ ID NO: 1417110 - RNA, 19 nt, Artificial Sequence
  Description of Artificial Sequence: Synthetic oligonucleotide
guaccugaggugcccagag

SEQ ID NO: 1417111 - RNA, 19 nt, Artificial Sequence
  Description of Artificial Sequence: Synthetic oligonucleotide
uguuacccuguccuggcau

SEQ ID NO: 1417112 - RNA, 19 nt, Artificial Sequence
  Description of Artificial Sequence: Synthetic oligonucleotide
auccucacaucaucguaug

SEQ ID NO: 1417113 - RNA, 19 nt, Artificial Sequence
  Description of Artificial Sequence: Synthetic oligonucleotide
acaacgacaguugggacau

SEQ ID NO: 1417114 - RNA, 19 nt, Artificial Sequence
  Description of Artificial Sequence: Synthetic oligonucleotide
aggcagcucgcucacagcu

SEQ ID NO: 1417115 - RNA, 19 nt, Artificial Sequence
  Description of Artificial Sequence: Synthetic oligonucleotide
gcugcgugcagagacaccg

SEQ ID NO: 1417116 - RNA, 19 nt, Artificial Sequence
  Description of Artificial Sequence: Synthetic oligonucleotide
accgugguguuucauagua

SEQ ID NO: 1417117 - RNA, 19 nt, Artificial Sequence
  Description of Artificial Sequence: Synthetic oligonucleotide
ugugcgcuugcacgacagg

SEQ ID NO: 1417118 - RNA, 19 nt, Artificial Sequence
  Description of Artificial Sequence: Synthetic oligonucleotide
gaguccuuagugcaguucu

SEQ ID NO: 1417119 - RNA, 19 nt, Artificial Sequence
  Description of Artificial Sequence: Synthetic oligonucleotide
accaccuguaccugaggug

SEQ ID NO: 1417120 - RNA, 19 nt, Artificial Sequence
  Description of Artificial Sequence: Synthetic oligonucleotide
auaugcugucugaaguuag

SEQ ID NO: 1417121 - RNA, 19 nt, Artificial Sequence
  Description of Artificial Sequence: Synthetic oligonucleotide
guacagagcucaccgcugc

SEQ ID NO: 1417122 - RNA, 19 nt, Artificial Sequence
  Description of Artificial Sequence: Synthetic oligonucleotide
auagucugucucauugcuc

SEQ ID NO: 1417123 - RNA, 19 nt, Artificial Sequence
  Description of Artificial Sequence: Synthetic oligonucleotide
ccaugggcagccaauacgc

SEQ ID NO: 1417124 - RNA, 19 nt, Artificial Sequence
  Description of Artificial Sequence: Synthetic oligonucleotide
aagugugcgcuugcacgac

SEQ ID NO: 1417125 - RNA, 19 nt, Artificial Sequence
  Description of Artificial Sequence: Synthetic oligonucleotide
guuucauaguacaggcgug

SEQ ID NO: 1417126 - RNA, 19 nt, Artificial Sequence
  Description of Artificial Sequence: Synthetic oligonucleotide
caccucgaugugaggaugg

SEQ ID NO: 1417127 - RNA, 19 nt, Artificial Sequence
  Description of Artificial Sequence: Synthetic oligonucleotide
ggagcgagggaacugacga

SEQ ID NO: 1417128 - RNA, 19 nt, Artificial Sequence
  Description of Artificial Sequence: Synthetic oligonucleotide
guacaggcguguaaugaag

SEQ ID NO: 1417129 - RNA, 19 nt, Artificial Sequence
  Description of Artificial Sequence: Synthetic oligonucleotide
caucaagugaccguuagua

SEQ ID NO: 1417130 - RNA, 19 nt, Artificial Sequence
  Description of Artificial Sequence: Synthetic oligonucleotide
gccaugggcagccaauacg

SEQ ID NO: 1417131 - RNA, 19 nt, Artificial Sequence
  Description of Artificial Sequence: Synthetic oligonucleotide
acaucaagugaccguuagu

SEQ ID NO: 1417132 - RNA, 19 nt, Artificial Sequence
  Description of Artificial Sequence: Synthetic oligonucleotide
ugcacgacagguugggguu

SEQ ID NO: 1417133 - RNA, 19 nt, Artificial Sequence
  Description of Artificial Sequence: Synthetic oligonucleotide
uuguucgccucuuuugcua

SEQ ID NO: 1417134 - RNA, 19 nt, Artificial Sequence
  Description of Artificial Sequence: Synthetic oligonucleotide
agcgcacaucaagugaccg

SEQ ID NO: 1417135 - RNA, 19 nt, Artificial Sequence
  Description of Artificial Sequence: Synthetic oligonucleotide
ugccaccucgaugugagga

SEQ ID NO: 1417136 - RNA, 19 nt, Artificial Sequence
  Description of Artificial Sequence: Synthetic oligonucleotide
aaccgugguguuucauagu

SEQ ID NO: 1417137 - RNA, 19 nt, Artificial Sequence
  Description of Artificial Sequence: Synthetic oligonucleotide
uacuugcacuguguuaccc

SEQ ID NO: 1417138 - RNA, 19 nt, Artificial Sequence
  Description of Artificial Sequence: Synthetic oligonucleotide
agccaauacgcuuguacuu

SEQ ID NO: 1417139 - RNA, 19 nt, Artificial Sequence
  Description of Artificial Sequence: Synthetic oligonucleotide
cacgcaugcagacuuucuc

SEQ ID NO: 1417140 - RNA, 19 nt, Artificial Sequence
  Description of Artificial Sequence: Synthetic oligonucleotide
ucaucguaugggcccuuga

SEQ ID NO: 1417141 - RNA, 19 nt, Artificial Sequence
  Description of Artificial Sequence: Synthetic oligonucleotide
gagucauucacacgagccu

SEQ ID NO: 1417142 - RNA, 19 nt, Artificial Sequence
  Description of Artificial Sequence: Synthetic oligonucleotide
gcagccaauacgcuuguac

SEQ ID NO: 1417143 - RNA, 19 nt, Artificial Sequence
  Description of Artificial Sequence: Synthetic oligonucleotide
accuguaccugaggugccc

SEQ ID NO: 1417144 - RNA, 19 nt, Artificial Sequence
  Description of Artificial Sequence: Synthetic oligonucleotide
cucaccgcugcgugcagag

SEQ ID NO: 1417145 - RNA, 19 nt, Artificial Sequence
  Description of Artificial Sequence: Synthetic oligonucleotide
ucacacgagccuucaggac

SEQ ID NO: 1417146 - RNA, 19 nt, Artificial Sequence
  Description of Artificial Sequence: Synthetic oligonucleotide
cugguacagagcucaccgc

SEQ ID NO: 1417147 - RNA, 19 nt, Artificial Sequence
  Description of Artificial Sequence: Synthetic oligonucleotide
aguuagccagggccccucg

SEQ ID NO: 1417148 - RNA, 19 nt, Artificial Sequence
  Description of Artificial Sequence: Synthetic oligonucleotide
cgagucauucacacgagcc

SEQ ID NO: 1417149 - RNA, 19 nt, Artificial Sequence
  Description of Artificial Sequence: Synthetic oligonucleotide
caccgcugcgugcagagac

SEQ ID NO: 1417150 - RNA, 19 nt, Artificial Sequence
  Description of Artificial Sequence: Synthetic oligonucleotide
gcucuuacugaucucacaa

SEQ ID NO: 1417151 - RNA, 19 nt, Artificial Sequence
  Description of Artificial Sequence: Synthetic oligonucleotide
cacuacuggacugcagccc

SEQ ID NO: 1417152 - RNA, 19 nt, Artificial Sequence
  Description of Artificial Sequence: Synthetic oligonucleotide
gcuaguagguggauaaaac

SEQ ID NO: 1417153 - RNA, 19 nt, Artificial Sequence
  Description of Artificial Sequence: Synthetic oligonucleotide
ugcgcuugcacgacagguu

SEQ ID NO: 1417154 - RNA, 19 nt, Artificial Sequence
  Description of Artificial Sequence: Synthetic oligonucleotide
cagcucauugccugucuug

SEQ ID NO: 1417155 - RNA, 19 nt, Artificial Sequence
  Description of Artificial Sequence: Synthetic oligonucleotide
agggccgugccaugggcag

SEQ ID NO: 1417156 - RNA, 19 nt, Artificial Sequence
  Description of Artificial Sequence: Synthetic oligonucleotide
agucauucacacgagccuu

SEQ ID NO: 1417157 - RNA, 19 nt, Artificial Sequence
  Description of Artificial Sequence: Synthetic oligonucleotide
ucgagccuggccagggaac

SEQ ID NO: 1417158 - RNA, 19 nt, Artificial Sequence
  Description of Artificial Sequence: Synthetic oligonucleotide
guagugaguuugaggagac

SEQ ID NO: 1417159 - RNA, 19 nt, Artificial Sequence
  Description of Artificial Sequence: Synthetic oligonucleotide
ggaacugaaccucugugua

SEQ ID NO: 1417160 - RNA, 19 nt, Artificial Sequence
  Description of Artificial Sequence: Synthetic oligonucleotide
gagccgcagauuaauguuc

SEQ ID NO: 1417161 - RNA, 19 nt, Artificial Sequence
  Description of Artificial Sequence: Synthetic oligonucleotide
auaaaacagccagcgcaca

SEQ ID NO: 1417162 - RNA, 19 nt, Artificial Sequence
  Description of Artificial Sequence: Synthetic oligonucleotide
guacuugcacuguguuacc

SEQ ID NO: 1417163 - RNA, 19 nt, Artificial Sequence
  Description of Artificial Sequence: Synthetic oligonucleotide
cuucaugcacugucagcuc

SEQ ID NO: 1417164 - RNA, 19 nt, Artificial Sequence
  Description of Artificial Sequence: Synthetic oligonucleotide
uguggucagcccagccucu

SEQ ID NO: 1417165 - RNA, 19 nt, Artificial Sequence
  Description of Artificial Sequence: Synthetic oligonucleotide
auucacuccugaauuugga

SEQ ID NO: 1417166 - RNA, 19 nt, Artificial Sequence
  Description of Artificial Sequence: Synthetic oligonucleotide
cgacaguugggacaugugg

SEQ ID NO: 1417167 - RNA, 19 nt, Artificial Sequence
  Description of Artificial Sequence: Synthetic oligonucleotide
agcggcacauagucugucu

SEQ ID NO: 1417168 - RNA, 19 nt, Artificial Sequence
  Description of Artificial Sequence: Synthetic oligonucleotide
aggcguguaaugaagucau

SEQ ID NO: 1417169 - RNA, 19 nt, Artificial Sequence
  Description of Artificial Sequence: Synthetic oligonucleotide
auaguugugugaagcugcu

SEQ ID NO: 1417170 - RNA, 19 nt, Artificial Sequence
  Description of Artificial Sequence: Synthetic oligonucleotide
ggaaagugugcgcuugcac

SEQ ID NO: 1417171 - RNA, 19 nt, Artificial Sequence
  Description of Artificial Sequence: Synthetic oligonucleotide
cauagucugucucauugcu

SEQ ID NO: 1417172 - RNA, 19 nt, Artificial Sequence
  Description of Artificial Sequence: Synthetic oligonucleotide
caggacaguacuccauuca

SEQ ID NO: 1417173 - RNA, 19 nt, Artificial Sequence
  Description of Artificial Sequence: Synthetic oligonucleotide
ccaccuguaccugaggugc

SEQ ID NO: 1417174 - RNA, 19 nt, Artificial Sequence
  Description of Artificial Sequence: Synthetic oligonucleotide
ggaaagggccgugccaugg

SEQ ID NO: 1417175 - RNA, 19 nt, Artificial Sequence
  Description of Artificial Sequence: Synthetic oligonucleotide
gccaauacgcuuguacuug

SEQ ID NO: 1417176 - RNA, 19 nt, Artificial Sequence
  Description of Artificial Sequence: Synthetic oligonucleotide
cugaaggcagcucgcucac

SEQ ID NO: 1417177 - RNA, 19 nt, Artificial Sequence
  Description of Artificial Sequence: Synthetic oligonucleotide
agagcacuccaggggcgcc

SEQ ID NO: 1417178 - RNA, 19 nt, Artificial Sequence
  Description of Artificial Sequence: Synthetic oligonucleotide
ggcgacuuggaguccuuag

SEQ ID NO: 1417179 - RNA, 19 nt, Artificial Sequence
  Description of Artificial Sequence: Synthetic oligonucleotide
cagcgcacaucaagugacc

SEQ ID NO: 1417180 - RNA, 19 nt, Artificial Sequence
  Description of Artificial Sequence: Synthetic oligonucleotide
auugccugucuugguuggg

SEQ ID NO: 1417181 - RNA, 19 nt, Artificial Sequence
  Description of Artificial Sequence: Synthetic oligonucleotide
ucgccucuuuugcuaaaau

SEQ ID NO: 1417182 - RNA, 19 nt, Artificial Sequence
  Description of Artificial Sequence: Synthetic oligonucleotide
caccgugccaccucgaugu

SEQ ID NO: 1417183 - RNA, 19 nt, Artificial Sequence
  Description of Artificial Sequence: Synthetic oligonucleotide
agugugcgcuugcacgaca

SEQ ID NO: 1417184 - RNA, 19 nt, Artificial Sequence
  Description of Artificial Sequence: Synthetic oligonucleotide
guacugugaaccguggugu

SEQ ID NO: 1417185 - RNA, 19 nt, Artificial Sequence
  Description of Artificial Sequence: Synthetic oligonucleotide
caggcguguaaugaaguca

SEQ ID NO: 1417186 - RNA, 19 nt, Artificial Sequence
  Description of Artificial Sequence: Synthetic oligonucleotide
ccaauacgcuuguacuugc

SEQ ID NO: 1417187 - RNA, 19 nt, Artificial Sequence
  Description of Artificial Sequence: Synthetic oligonucleotide
agggaucgucaauuuugga

SEQ ID NO: 1417188 - RNA, 19 nt, Artificial Sequence
  Description of Artificial Sequence: Synthetic oligonucleotide
gagggagcgagggaacuga

SEQ ID NO: 1417189 - RNA, 19 nt, Artificial Sequence
  Description of Artificial Sequence: Synthetic oligonucleotide
gugguagaugacagggcug

SEQ ID NO: 1417190 - RNA, 19 nt, Artificial Sequence
  Description of Artificial Sequence: Synthetic oligonucleotide
uucgccucuuuugcuaaaa

SEQ ID NO: 1417191 - RNA, 19 nt, Artificial Sequence
  Description of Artificial Sequence: Synthetic oligonucleotide
accucgaugugaggauggg

SEQ ID NO: 1417192 - RNA, 19 nt, Artificial Sequence
  Description of Artificial Sequence: Synthetic oligonucleotide
cuugcacgacagguugggg

SEQ ID NO: 1417193 - RNA, 19 nt, Artificial Sequence
  Description of Artificial Sequence: Synthetic oligonucleotide
aagugaccguuaguacacu

SEQ ID NO: 1417194 - RNA, 19 nt, Artificial Sequence
  Description of Artificial Sequence: Synthetic oligonucleotide
cuccugaauuuggagacca

SEQ ID NO: 1417195 - RNA, 19 nt, Artificial Sequence
  Description of Artificial Sequence: Synthetic oligonucleotide
aguacuccauucacuccug

SEQ ID NO: 1417196 - RNA, 19 nt, Artificial Sequence
  Description of Artificial Sequence: Synthetic oligonucleotide
gaaagggaucgucaauuuu

SEQ ID NO: 1417197 - RNA, 19 nt, Artificial Sequence
  Description of Artificial Sequence: Synthetic oligonucleotide
gcguguaaugaagucauca

SEQ ID NO: 1417198 - RNA, 19 nt, Artificial Sequence
  Description of Artificial Sequence: Synthetic oligonucleotide
uggcucugauccaucucau

SEQ ID NO: 1417199 - RNA, 19 nt, Artificial Sequence
  Description of Artificial Sequence: Synthetic oligonucleotide
gcuugcacgacagguuggg

SEQ ID NO: 1417200 - RNA, 19 nt, Artificial Sequence
  Description of Artificial Sequence: Synthetic oligonucleotide
guaugggcccuugagcaga

SEQ ID NO: 1417201 - RNA, 19 nt, Artificial Sequence
  Description of Artificial Sequence: Synthetic oligonucleotide
guugcgcuccgagucauuc

SEQ ID NO: 1417202 - RNA, 19 nt, Artificial Sequence
  Description of Artificial Sequence: Synthetic oligonucleotide
agaugcuauuauagagcug

SEQ ID NO: 1417203 - RNA, 19 nt, Artificial Sequence
  Description of Artificial Sequence: Synthetic oligonucleotide
agcaggcugaagaugcuau

SEQ ID NO: 1417204 - RNA, 19 nt, Artificial Sequence
  Description of Artificial Sequence: Synthetic oligonucleotide
aagggccgugccaugggca

SEQ ID NO: 1417205 - RNA, 19 nt, Artificial Sequence
  Description of Artificial Sequence: Synthetic oligonucleotide
agccgcagauuaauguucu

SEQ ID NO: 1417206 - RNA, 19 nt, Artificial Sequence
  Description of Artificial Sequence: Synthetic oligonucleotide
cagauaguugugugaagcu

SEQ ID NO: 1417207 - RNA, 19 nt, Artificial Sequence
  Description of Artificial Sequence: Synthetic oligonucleotide
cguuaguacacugguacag

SEQ ID NO: 1417208 - RNA, 19 nt, Artificial Sequence
  Description of Artificial Sequence: Synthetic oligonucleotide
guccuuagugcaguucuuc

SEQ ID NO: 1417209 - RNA, 19 nt, Artificial Sequence
  Description of Artificial Sequence: Synthetic oligonucleotide
uacugugaaccgugguguu

SEQ ID NO: 1417210 - RNA, 19 nt, Artificial Sequence
  Description of Artificial Sequence: Synthetic oligonucleotide
agcacagaggauggcgacu

SEQ ID NO: 1417211 - RNA, 19 nt, Artificial Sequence
  Description of Artificial Sequence: Synthetic oligonucleotide
caauacgcuuguacuugca

SEQ ID NO: 1417212 - RNA, 19 nt, Artificial Sequence
  Description of Artificial Sequence: Synthetic oligonucleotide
gugccucucuaggagggag

SEQ ID NO: 1417213 - RNA, 19 nt, Artificial Sequence
  Description of Artificial Sequence: Synthetic oligonucleotide
gugugcgcuugcacgacag

SEQ ID NO: 1417214 - RNA, 19 nt, Artificial Sequence
  Description of Artificial Sequence: Synthetic oligonucleotide
gcgcuugcacgacagguug

SEQ ID NO: 1417215 - RNA, 19 nt, Artificial Sequence
  Description of Artificial Sequence: Synthetic oligonucleotide
cugcgugcagagacaccgc

SEQ ID NO: 1417216 - RNA, 19 nt, Artificial Sequence
  Description of Artificial Sequence: Synthetic oligonucleotide
gcuccgagucauucacacg

SEQ ID NO: 1417217 - RNA, 19 nt, Artificial Sequence
  Description of Artificial Sequence: Synthetic oligonucleotide
augacagggcugauccuca

SEQ ID NO: 1417218 - RNA, 19 nt, Artificial Sequence
  Description of Artificial Sequence: Synthetic oligonucleotide
gagcucaccgcugcgugca

SEQ ID NO: 1417219 - RNA, 19 nt, Artificial Sequence
  Description of Artificial Sequence: Synthetic oligonucleotide
aucgucaauuuuggagaga

SEQ ID NO: 1417220 - RNA, 19 nt, Artificial Sequence
  Description of Artificial Sequence: Synthetic oligonucleotide
cuccauucacuccugaauu

SEQ ID NO: 1417221 - RNA, 19 nt, Artificial Sequence
  Description of Artificial Sequence: Synthetic oligonucleotide
gucuugguugggugagcac

SEQ ID NO: 1417222 - RNA, 19 nt, Artificial Sequence
  Description of Artificial Sequence: Synthetic oligonucleotide
cacugucagcucauggaaa

SEQ ID NO: 1417223 - RNA, 19 nt, Artificial Sequence
  Description of Artificial Sequence: Synthetic oligonucleotide
aucaucguaugggcccuug

SEQ ID NO: 1417224 - RNA, 19 nt, Artificial Sequence
  Description of Artificial Sequence: Synthetic oligonucleotide
uugguugggugagcacaug

SEQ ID NO: 1417225 - RNA, 19 nt, Artificial Sequence
  Description of Artificial Sequence: Synthetic oligonucleotide
gcacugucagcucauggaa

SEQ ID NO: 1417226 - RNA, 19 nt, Artificial Sequence
  Description of Artificial Sequence: Synthetic oligonucleotide
ccccguugcacacgcaugc

SEQ ID NO: 1417227 - RNA, 19 nt, Artificial Sequence
  Description of Artificial Sequence: Synthetic oligonucleotide
agggagcgagggaacugac

SEQ ID NO: 1417228 - RNA, 19 nt, Artificial Sequence
  Description of Artificial Sequence: Synthetic oligonucleotide
aggggcgccgugaccuugc

SEQ ID NO: 1417229 - RNA, 19 nt, Artificial Sequence
  Description of Artificial Sequence: Synthetic oligonucleotide
agcucgcucacagcuuucu

SEQ ID NO: 1417230 - RNA, 19 nt, Artificial Sequence
  Description of Artificial Sequence: Synthetic oligonucleotide
gugcgauaaggccggaacu

SEQ ID NO: 1417231 - RNA, 19 nt, Artificial Sequence
  Description of Artificial Sequence: Synthetic oligonucleotide
cacgacagguugggguugc

SEQ ID NO: 1417232 - RNA, 19 nt, Artificial Sequence
  Description of Artificial Sequence: Synthetic oligonucleotide
gagcgagggaacugacgaa

SEQ ID NO: 1417233 - RNA, 19 nt, Artificial Sequence
  Description of Artificial Sequence: Synthetic oligonucleotide
ccggaacugaaccucugug

SEQ ID NO: 1417234 - RNA, 19 nt, Artificial Sequence
  Description of Artificial Sequence: Synthetic oligonucleotide
ggcugaagaugcuauuaua

SEQ ID NO: 1417235 - RNA, 19 nt, Artificial Sequence
  Description of Artificial Sequence: Synthetic oligonucleotide
ccugaggugcccagaguac

SEQ ID NO: 1417236 - RNA, 19 nt, Artificial Sequence
  Description of Artificial Sequence: Synthetic oligonucleotide
caugcacugucagcucaug

SEQ ID NO: 1417237 - RNA, 19 nt, Artificial Sequence
  Description of Artificial Sequence: Synthetic oligonucleotide
aggagggagcgagggaacu

SEQ ID NO: 1417238 - RNA, 19 nt, Artificial Sequence
  Description of Artificial Sequence: Synthetic oligonucleotide
guacuccauucacuccuga

SEQ ID NO: 1417239 - RNA, 19 nt, Artificial Sequence
  Description of Artificial Sequence: Synthetic oligonucleotide
cagggaccccguugcacac

SEQ ID NO: 1417240 - RNA, 19 nt, Artificial Sequence
  Description of Artificial Sequence: Synthetic oligonucleotide
gccagcgcacaucaaguga

SEQ ID NO: 1417241 - RNA, 19 nt, Artificial Sequence
  Description of Artificial Sequence: Synthetic oligonucleotide
gguugggugagcacaugca

SEQ ID NO: 1417242 - RNA, 19 nt, Artificial Sequence
  Description of Artificial Sequence: Synthetic oligonucleotide
cuacuggacugcagcccuc

SEQ ID NO: 1417243 - RNA, 19 nt, Artificial Sequence
  Description of Artificial Sequence: Synthetic oligonucleotide
augcuauuauagagcugca

SEQ ID NO: 1417244 - RNA, 19 nt, Artificial Sequence
  Description of Artificial Sequence: Synthetic oligonucleotide
ccgagucauucacacgagc

SEQ ID NO: 1417245 - RNA, 19 nt, Artificial Sequence
  Description of Artificial Sequence: Synthetic oligonucleotide
acgcuuguacuugcacugu

SEQ ID NO: 1417246 - RNA, 19 nt, Artificial Sequence
  Description of Artificial Sequence: Synthetic oligonucleotide
gaccccguugcacacgcau

SEQ ID NO: 1417247 - RNA, 19 nt, Artificial Sequence
  Description of Artificial Sequence: Synthetic oligonucleotide
guuagccagggccccucga

SEQ ID NO: 1417248 - RNA, 19 nt, Artificial Sequence
  Description of Artificial Sequence: Synthetic oligonucleotide
guucaguacugugaaccgu

SEQ ID NO: 1417249 - RNA, 19 nt, Artificial Sequence
  Description of Artificial Sequence: Synthetic oligonucleotide
cucauugccugucuugguu

SEQ ID NO: 1417250 - RNA, 19 nt, Artificial Sequence
  Description of Artificial Sequence: Synthetic oligonucleotide
guguuacccuguccuggca

SEQ ID NO: 1417251 - RNA, 19 nt, Artificial Sequence
  Description of Artificial Sequence: Synthetic oligonucleotide
cgcuccgagucauucacac

SEQ ID NO: 1417252 - RNA, 19 nt, Artificial Sequence
  Description of Artificial Sequence: Synthetic oligonucleotide
accccguugcacacgcaug

SEQ ID NO: 1417253 - RNA, 19 nt, Artificial Sequence
  Description of Artificial Sequence: Synthetic oligonucleotide
gaccguuaguacacuggua

SEQ ID NO: 1417254 - RNA, 19 nt, Artificial Sequence
  Description of Artificial Sequence: Synthetic oligonucleotide
guacacugguacagagcuc

SEQ ID NO: 1417255 - RNA, 19 nt, Artificial Sequence
  Description of Artificial Sequence: Synthetic oligonucleotide
caccaccuguaccugaggu

SEQ ID NO: 1417256 - RNA, 19 nt, Artificial Sequence
  Description of Artificial Sequence: Synthetic oligonucleotide
ccgugguguuucauaguac

SEQ ID NO: 1417257 - RNA, 19 nt, Artificial Sequence
  Description of Artificial Sequence: Synthetic oligonucleotide
ggaguccuuagugcaguuc

SEQ ID NO: 1417258 - RNA, 19 nt, Artificial Sequence
  Description of Artificial Sequence: Synthetic oligonucleotide
gugcgcuugcacgacaggu

SEQ ID NO: 1417259 - RNA, 19 nt, Artificial Sequence
  Description of Artificial Sequence: Synthetic oligonucleotide
guuacccuguccuggcauu

SEQ ID NO: 1417260 - RNA, 19 nt, Artificial Sequence
  Description of Artificial Sequence: Synthetic oligonucleotide
accgcugcgugcagagaca

SEQ ID NO: 1417261 - RNA, 19 nt, Artificial Sequence
  Description of Artificial Sequence: Synthetic oligonucleotide
gcgauaaggccggaacuga

SEQ ID NO: 1417262 - RNA, 19 nt, Artificial Sequence
  Description of Artificial Sequence: Synthetic oligonucleotide
cgagggaacugacgaagac

SEQ ID NO: 1417263 - RNA, 19 nt, Artificial Sequence
  Description of Artificial Sequence: Synthetic oligonucleotide
ggaagagccgcagauuaau

SEQ ID NO: 1417264 - RNA, 19 nt, Artificial Sequence
  Description of Artificial Sequence: Synthetic oligonucleotide
guucgccucuuuugcuaaa

SEQ ID NO: 1417265 - RNA, 19 nt, Artificial Sequence
  Description of Artificial Sequence: Synthetic oligonucleotide
uccuugcgguggcucugau

SEQ ID NO: 1417266 - RNA, 19 nt, Artificial Sequence
  Description of Artificial Sequence: Synthetic oligonucleotide
ggccgugccaugggcagcc

SEQ ID NO: 1417267 - RNA, 19 nt, Artificial Sequence
  Description of Artificial Sequence: Synthetic oligonucleotide
ucagugcgauaaggccgga

SEQ ID NO: 1417268 - RNA, 19 nt, Artificial Sequence
  Description of Artificial Sequence: Synthetic oligonucleotide
gcccagaguacuguuucca

SEQ ID NO: 1417269 - RNA, 19 nt, Artificial Sequence
  Description of Artificial Sequence: Synthetic oligonucleotide
gggguugcgcuccgaguca

SEQ ID NO: 1417270 - RNA, 19 nt, Artificial Sequence
  Description of Artificial Sequence: Synthetic oligonucleotide
caugggcagccaauacgcu

SEQ ID NO: 1417271 - RNA, 19 nt, Artificial Sequence
  Description of Artificial Sequence: Synthetic oligonucleotide
gggcccuugagcagaagaa

SEQ ID NO: 1417272 - RNA, 19 nt, Artificial Sequence
  Description of Artificial Sequence: Synthetic oligonucleotide
ggacaguacuccauucacu

SEQ ID NO: 1417273 - RNA, 19 nt, Artificial Sequence
  Description of Artificial Sequence: Synthetic oligonucleotide
uggcgacuuggaguccuua

SEQ ID NO: 1417274 - RNA, 19 nt, Artificial Sequence
  Description of Artificial Sequence: Synthetic oligonucleotide
cgcuugcacgacagguugg

SEQ ID NO: 1417275 - RNA, 19 nt, Artificial Sequence
  Description of Artificial Sequence: Synthetic oligonucleotide
cagcggcacauagucuguc

SEQ ID NO: 1417276 - RNA, 19 nt, Artificial Sequence
  Description of Artificial Sequence: Synthetic oligonucleotide
ccaagccagggaggggugg

SEQ ID NO: 1417277 - RNA, 19 nt, Artificial Sequence
  Description of Artificial Sequence: Synthetic oligonucleotide
gagccuggccagggaacca

SEQ ID NO: 1417278 - RNA, 19 nt, Artificial Sequence
  Description of Artificial Sequence: Synthetic oligonucleotide
ccaccgugccaccucgaug

SEQ ID NO: 1417279 - RNA, 19 nt, Artificial Sequence
  Description of Artificial Sequence: Synthetic oligonucleotide
ccaccucgaugugaggaug

SEQ ID NO: 1417280 - RNA, 19 nt, Artificial Sequence
  Description of Artificial Sequence: Synthetic oligonucleotide
cuugaacaguagugaguuu

SEQ ID NO: 1417281 - RNA, 19 nt, Artificial Sequence
  Description of Artificial Sequence: Synthetic oligonucleotide
cgcuuguacuugcacugug

SEQ ID NO: 1417282 - RNA, 19 nt, Artificial Sequence
  Description of Artificial Sequence: Synthetic oligonucleotide
cugcuaguagguggauaaa

SEQ ID NO: 1417283 - RNA, 19 nt, Artificial Sequence
  Description of Artificial Sequence: Synthetic oligonucleotide
gcucgcucacagcuuucuc

SEQ ID NO: 1417284 - RNA, 19 nt, Artificial Sequence
  Description of Artificial Sequence: Synthetic oligonucleotide
gcgagggaacugacgaaga

SEQ ID NO: 1417285 - RNA, 19 nt, Artificial Sequence
  Description of Artificial Sequence: Synthetic oligonucleotide
gcacgacagguugggguug

SEQ ID NO: 1417286 - RNA, 19 nt, Artificial Sequence
  Description of Artificial Sequence: Synthetic oligonucleotide
agccgggcaucugcuagua

SEQ ID NO: 1417287 - RNA, 19 nt, Artificial Sequence
  Description of Artificial Sequence: Synthetic oligonucleotide
caggggcgccgugaccuug

SEQ ID NO: 1417288 - RNA, 19 nt, Artificial Sequence
  Description of Artificial Sequence: Synthetic oligonucleotide
gcgcacaucaagugaccgu

SEQ ID NO: 1417289 - RNA, 19 nt, Artificial Sequence
  Description of Artificial Sequence: Synthetic oligonucleotide
cggcacauagucugucuca

SEQ ID NO: 1417290 - RNA, 19 nt, Artificial Sequence
  Description of Artificial Sequence: Synthetic oligonucleotide
ggauggcgacuuggagucc

SEQ ID NO: 1417291 - RNA, 19 nt, Artificial Sequence
  Description of Artificial Sequence: Synthetic oligonucleotide
ggcguguaaugaagucauc

SEQ ID NO: 1417292 - RNA, 19 nt, Artificial Sequence
  Description of Artificial Sequence: Synthetic oligonucleotide
caacgacaguugggacaug

SEQ ID NO: 1417293 - RNA, 19 nt, Artificial Sequence
  Description of Artificial Sequence: Synthetic oligonucleotide
gccaccucgaugugaggau

SEQ ID NO: 1417294 - RNA, 19 nt, Artificial Sequence
  Description of Artificial Sequence: Synthetic oligonucleotide
cagugcgauaaggccggaa

SEQ ID NO: 1417295 - RNA, 19 nt, Artificial Sequence
  Description of Artificial Sequence: Synthetic oligonucleotide
ccucgaugugaggauggga

SEQ ID NO: 1417296 - RNA, 19 nt, Artificial Sequence
  Description of Artificial Sequence: Synthetic oligonucleotide
auggcgacuuggaguccuu

SEQ ID NO: 1417297 - RNA, 19 nt, Artificial Sequence
  Description of Artificial Sequence: Synthetic oligonucleotide
gugaaccgugguguuucau

SEQ ID NO: 1417298 - RNA, 19 nt, Artificial Sequence
  Description of Artificial Sequence: Synthetic oligonucleotide
gcacaucaagugaccguua

SEQ ID NO: 1417299 - RNA, 19 nt, Artificial Sequence
  Description of Artificial Sequence: Synthetic oligonucleotide
ccaucagcucauugccugu

SEQ ID NO: 1417300 - RNA, 19 nt, Artificial Sequence
  Description of Artificial Sequence: Synthetic oligonucleotide
gcagcggcacauagucugu

SEQ ID NO: 1417301 - RNA, 19 nt, Artificial Sequence
  Description of Artificial Sequence: Synthetic oligonucleotide
gcgguggcucugauccauc

SEQ ID NO: 1417302 - RNA, 19 nt, Artificial Sequence
  Description of Artificial Sequence: Synthetic oligonucleotide
gcgcuccgagucauucaca

SEQ ID NO: 1417303 - RNA, 19 nt, Artificial Sequence
  Description of Artificial Sequence: Synthetic oligonucleotide
cccguugcacacgcaugca

SEQ ID NO: 1417304 - RNA, 19 nt, Artificial Sequence
  Description of Artificial Sequence: Synthetic oligonucleotide
ccgugccaccucgauguga

SEQ ID NO: 1417305 - RNA, 19 nt, Artificial Sequence
  Description of Artificial Sequence: Synthetic oligonucleotide
gccgcagauuaauguucuu

SEQ ID NO: 1417306 - RNA, 19 nt, Artificial Sequence
  Description of Artificial Sequence: Synthetic oligonucleotide
ggguugcgcuccgagucau

SEQ ID NO: 1417307 - RNA, 19 nt, Artificial Sequence
  Description of Artificial Sequence: Synthetic oligonucleotide
ggcagccaauacgcuugua

SEQ ID NO: 1417308 - RNA, 19 nt, Artificial Sequence
  Description of Artificial Sequence: Synthetic oligonucleotide
ccgugccaugggcagccaa

SEQ ID NO: 1417309 - RNA, 19 nt, Artificial Sequence
  Description of Artificial Sequence: Synthetic oligonucleotide
ggaccccguugcacacgca

SEQ ID NO: 1417310 - RNA, 19 nt, Artificial Sequence
  Description of Artificial Sequence: Synthetic oligonucleotide
caucaucguaugggcccuu

SEQ ID NO: 1417311 - RNA, 19 nt, Artificial Sequence
  Description of Artificial Sequence: Synthetic oligonucleotide
ggggcgccgugaccuugcu

SEQ ID NO: 1417312 - RNA, 19 nt, Artificial Sequence
  Description of Artificial Sequence: Synthetic oligonucleotide
aaagcugcaacauuguccc

SEQ ID NO: 1417313 - RNA, 19 nt, Artificial Sequence
  Description of Artificial Sequence: Synthetic oligonucleotide
auuaucauaaaccuguaac

SEQ ID NO: 1417314 - RNA, 19 nt, Artificial Sequence
  Description of Artificial Sequence: Synthetic oligonucleotide
uuuagaaucucuuacguag

SEQ ID NO: 1417315 - RNA, 19 nt, Artificial Sequence
  Description of Artificial Sequence: Synthetic oligonucleotide
uaucauguagaccagaucc

SEQ ID NO: 1417316 - RNA, 19 nt, Artificial Sequence
  Description of Artificial Sequence: Synthetic oligonucleotide
aauuuuagaaucucuuacg

SEQ ID NO: 1417317 - RNA, 19 nt, Artificial Sequence
  Description of Artificial Sequence: Synthetic oligonucleotide
auauccagaauucuuaagc

SEQ ID NO: 1417318 - RNA, 19 nt, Artificial Sequence
  Description of Artificial Sequence: Synthetic oligonucleotide
gauauaugcagccaaagcc

SEQ ID NO: 1417319 - RNA, 19 nt, Artificial Sequence
  Description of Artificial Sequence: Synthetic oligonucleotide
aauacuuaggaacaccaag

SEQ ID NO: 1417320 - RNA, 19 nt, Artificial Sequence
  Description of Artificial Sequence: Synthetic oligonucleotide
uagguuguaacaacuaagg

SEQ ID NO: 1417321 - RNA, 19 nt, Artificial Sequence
  Description of Artificial Sequence: Synthetic oligonucleotide
agcacuaaaauccaguuug

SEQ ID NO: 1417322 - RNA, 19 nt, Artificial Sequence
  Description of Artificial Sequence: Synthetic oligonucleotide
aguaccgauaagcaagucc

SEQ ID NO: 1417323 - RNA, 19 nt, Artificial Sequence
  Description of Artificial Sequence: Synthetic oligonucleotide
ucaaauuauccucccaagg

SEQ ID NO: 1417324 - RNA, 19 nt, Artificial Sequence
  Description of Artificial Sequence: Synthetic oligonucleotide
aaaguacacaaaauuauuc

SEQ ID NO: 1417325 - RNA, 19 nt, Artificial Sequence
  Description of Artificial Sequence: Synthetic oligonucleotide
auuacuacaaccccagaag

SEQ ID NO: 1417326 - RNA, 19 nt, Artificial Sequence
  Description of Artificial Sequence: Synthetic oligonucleotide
aaaagagguccauugucac

SEQ ID NO: 1417327 - RNA, 19 nt, Artificial Sequence
  Description of Artificial Sequence: Synthetic oligonucleotide
uaaauccugauaaacaggu

SEQ ID NO: 1417328 - RNA, 19 nt, Artificial Sequence
  Description of Artificial Sequence: Synthetic oligonucleotide
uuuccaaaucuccacgucg

SEQ ID NO: 1417329 - RNA, 19 nt, Artificial Sequence
  Description of Artificial Sequence: Synthetic oligonucleotide
auucagugaaaagaggucc

SEQ ID NO: 1417330 - RNA, 19 nt, Artificial Sequence
  Description of Artificial Sequence: Synthetic oligonucleotide
uaauuauuacuacaacccc

SEQ ID NO: 1417331 - RNA, 19 nt, Artificial Sequence
  Description of Artificial Sequence: Synthetic oligonucleotide
ugauaaacagguuucucag

SEQ ID NO: 1417332 - RNA, 19 nt, Artificial Sequence
  Description of Artificial Sequence: Synthetic oligonucleotide
uagucuaccaaguacaccu

SEQ ID NO: 1417333 - RNA, 19 nt, Artificial Sequence
  Description of Artificial Sequence: Synthetic oligonucleotide
acucacaugaaaauaaaac

SEQ ID NO: 1417334 - RNA, 19 nt, Artificial Sequence
  Description of Artificial Sequence: Synthetic oligonucleotide
uguguaugaauccauuucu

SEQ ID NO: 1417335 - RNA, 19 nt, Artificial Sequence
  Description of Artificial Sequence: Synthetic oligonucleotide
cuuccuauggcuuuuaguc

SEQ ID NO: 1417336 - RNA, 19 nt, Artificial Sequence
  Description of Artificial Sequence: Synthetic oligonucleotide
ugaauaggcaggaaaguug

SEQ ID NO: 1417337 - RNA, 19 nt, Artificial Sequence
  Description of Artificial Sequence: Synthetic oligonucleotide
acauaaauuagaaaaggag

SEQ ID NO: 1417338 - RNA, 19 nt, Artificial Sequence
  Description of Artificial Sequence: Synthetic oligonucleotide
ucuuacguaguuaggaucu

SEQ ID NO: 1417339 - RNA, 19 nt, Artificial Sequence
  Description of Artificial Sequence: Synthetic oligonucleotide
agcaauuucaccuggcuug

SEQ ID NO: 1417340 - RNA, 19 nt, Artificial Sequence
  Description of Artificial Sequence: Synthetic oligonucleotide
uuauaaacuacccuucaau

SEQ ID NO: 1417341 - RNA, 19 nt, Artificial Sequence
  Description of Artificial Sequence: Synthetic oligonucleotide
uaaacuacccuucaauaaa

SEQ ID NO: 1417342 - RNA, 19 nt, Artificial Sequence
  Description of Artificial Sequence: Synthetic oligonucleotide
uguacuuagcaauuucacc

SEQ ID NO: 1417343 - RNA, 19 nt, Artificial Sequence
  Description of Artificial Sequence: Synthetic oligonucleotide
ugcaagacaguuuuccuag

SEQ ID NO: 1417344 - RNA, 19 nt, Artificial Sequence
  Description of Artificial Sequence: Synthetic oligonucleotide
uacccuucaauaaaguaca

SEQ ID NO: 1417345 - RNA, 19 nt, Artificial Sequence
  Description of Artificial Sequence: Synthetic oligonucleotide
gaaggucacucccaaagcg

SEQ ID NO: 1417346 - RNA, 19 nt, Artificial Sequence
  Description of Artificial Sequence: Synthetic oligonucleotide
ucuaauuuuagaaucucuu

SEQ ID NO: 1417347 - RNA, 19 nt, Artificial Sequence
  Description of Artificial Sequence: Synthetic oligonucleotide
uauuacuacaaccccagaa

SEQ ID NO: 1417348 - RNA, 19 nt, Artificial Sequence
  Description of Artificial Sequence: Synthetic oligonucleotide
acuaaaauccaguuugcca

SEQ ID NO: 1417349 - RNA, 19 nt, Artificial Sequence
  Description of Artificial Sequence: Synthetic oligonucleotide
caaguauuuccaaaucucc

SEQ ID NO: 1417350 - RNA, 19 nt, Artificial Sequence
  Description of Artificial Sequence: Synthetic oligonucleotide
auuuuagaaucucuuacgu

SEQ ID NO: 1417351 - RNA, 19 nt, Artificial Sequence
  Description of Artificial Sequence: Synthetic oligonucleotide
ucuugaacgaacgagucug

SEQ ID NO: 1417352 - RNA, 19 nt, Artificial Sequence
  Description of Artificial Sequence: Synthetic oligonucleotide
acacguggcauuuucuccc

SEQ ID NO: 1417353 - RNA, 19 nt, Artificial Sequence
  Description of Artificial Sequence: Synthetic oligonucleotide
gaacgaacgagucuguaug

SEQ ID NO: 1417354 - RNA, 19 nt, Artificial Sequence
  Description of Artificial Sequence: Synthetic oligonucleotide
aauuauuacuacaacccca

SEQ ID NO: 1417355 - RNA, 19 nt, Artificial Sequence
  Description of Artificial Sequence: Synthetic oligonucleotide
uguauggcguaucccaccg

SEQ ID NO: 1417356 - RNA, 19 nt, Artificial Sequence
  Description of Artificial Sequence: Synthetic oligonucleotide
aguacgaacuucccgccgc

SEQ ID NO: 1417357 - RNA, 19 nt, Artificial Sequence
  Description of Artificial Sequence: Synthetic oligonucleotide
caucauggcaccuuuuggg

SEQ ID NO: 1417358 - RNA, 19 nt, Artificial Sequence
  Description of Artificial Sequence: Synthetic oligonucleotide
aacgaacgagucuguaugg

SEQ ID NO: 1417359 - RNA, 19 nt, Artificial Sequence
  Description of Artificial Sequence: Synthetic oligonucleotide
uguaugaauccauuucuga

SEQ ID NO: 1417360 - RNA, 19 nt, Artificial Sequence
  Description of Artificial Sequence: Synthetic oligonucleotide
auuuuauaaacuacccuuc

SEQ ID NO: 1417361 - RNA, 19 nt, Artificial Sequence
  Description of Artificial Sequence: Synthetic oligonucleotide
uauaaacuacccuucaaua

SEQ ID NO: 1417362 - RNA, 19 nt, Artificial Sequence
  Description of Artificial Sequence: Synthetic oligonucleotide
aagagguccauugucacug

SEQ ID NO: 1417363 - RNA, 19 nt, Artificial Sequence
  Description of Artificial Sequence: Synthetic oligonucleotide
auacuuaggaacaccaagg

SEQ ID NO: 1417364 - RNA, 19 nt, Artificial Sequence
  Description of Artificial Sequence: Synthetic oligonucleotide
gauaagcaaguccauaguc

SEQ ID NO: 1417365 - RNA, 19 nt, Artificial Sequence
  Description of Artificial Sequence: Synthetic oligonucleotide
uuacuacaaccccagaaga

SEQ ID NO: 1417366 - RNA, 19 nt, Artificial Sequence
  Description of Artificial Sequence: Synthetic oligonucleotide
ucgguuaugaucuccccag

SEQ ID NO: 1417367 - RNA, 19 nt, Artificial Sequence
  Description of Artificial Sequence: Synthetic oligonucleotide
guguccgcaagauauaugc

SEQ ID NO: 1417368 - RNA, 19 nt, Artificial Sequence
  Description of Artificial Sequence: Synthetic oligonucleotide
uuuuccuagaaaaccuucu

SEQ ID NO: 1417369 - RNA, 19 nt, Artificial Sequence
  Description of Artificial Sequence: Synthetic oligonucleotide
uauccagaauucuuaagcu

SEQ ID NO: 1417370 - RNA, 19 nt, Artificial Sequence
  Description of Artificial Sequence: Synthetic oligonucleotide
uuucacaacacagggugcg

SEQ ID NO: 1417371 - RNA, 19 nt, Artificial Sequence
  Description of Artificial Sequence: Synthetic oligonucleotide
aacuuuaauucagugaaaa

SEQ ID NO: 1417372 - RNA, 19 nt, Artificial Sequence
  Description of Artificial Sequence: Synthetic oligonucleotide
uugugaaagaaugucacgu

SEQ ID NO: 1417373 - RNA, 19 nt, Artificial Sequence
  Description of Artificial Sequence: Synthetic oligonucleotide
uccagaauucuuaagcuua

SEQ ID NO: 1417374 - RNA, 19 nt, Artificial Sequence
  Description of Artificial Sequence: Synthetic oligonucleotide
uuuauaaacuacccuucaa

SEQ ID NO: 1417375 - RNA, 19 nt, Artificial Sequence
  Description of Artificial Sequence: Synthetic oligonucleotide
aagauauaugcagccaaag

SEQ ID NO: 1417376 - RNA, 19 nt, Artificial Sequence
  Description of Artificial Sequence: Synthetic oligonucleotide
auuauuacuacaaccccag

SEQ ID NO: 1417377 - RNA, 19 nt, Artificial Sequence
  Description of Artificial Sequence: Synthetic oligonucleotide
gucacguaaauccugauaa

SEQ ID NO: 1417378 - RNA, 19 nt, Artificial Sequence
  Description of Artificial Sequence: Synthetic oligonucleotide
uuuauguguaugaauccau

SEQ ID NO: 1417379 - RNA, 19 nt, Artificial Sequence
  Description of Artificial Sequence: Synthetic oligonucleotide
ucuuaagcuuagcugcaag

SEQ ID NO: 1417380 - RNA, 19 nt, Artificial Sequence
  Description of Artificial Sequence: Synthetic oligonucleotide
uuagcaauuucaccuggcu

SEQ ID NO: 1417381 - RNA, 19 nt, Artificial Sequence
  Description of Artificial Sequence: Synthetic oligonucleotide
guaacaacuaaggauucag

SEQ ID NO: 1417382 - RNA, 19 nt, Artificial Sequence
  Description of Artificial Sequence: Synthetic oligonucleotide
ugcgcaucgaugcugguga

SEQ ID NO: 1417383 - RNA, 19 nt, Artificial Sequence
  Description of Artificial Sequence: Synthetic oligonucleotide
aaaguugguucccggcauc

SEQ ID NO: 1417384 - RNA, 19 nt, Artificial Sequence
  Description of Artificial Sequence: Synthetic oligonucleotide
aggcaggaaaguugguucc

SEQ ID NO: 1417385 - RNA, 19 nt, Artificial Sequence
  Description of Artificial Sequence: Synthetic oligonucleotide
uuaagcuuagcugcaagac

SEQ ID NO: 1417386 - RNA, 19 nt, Artificial Sequence
  Description of Artificial Sequence: Synthetic oligonucleotide
aaacuacccuucaauaaag

SEQ ID NO: 1417387 - RNA, 19 nt, Artificial Sequence
  Description of Artificial Sequence: Synthetic oligonucleotide
uuuuacacguggcauuuuc

SEQ ID NO: 1417388 - RNA, 19 nt, Artificial Sequence
  Description of Artificial Sequence: Synthetic oligonucleotide
aucgaugcuggugaacucc

SEQ ID NO: 1417389 - RNA, 19 nt, Artificial Sequence
  Description of Artificial Sequence: Synthetic oligonucleotide
acuuagcaauuucaccugg

SEQ ID NO: 1417390 - RNA, 19 nt, Artificial Sequence
  Description of Artificial Sequence: Synthetic oligonucleotide
uuaugaacuccaucugggc

SEQ ID NO: 1417391 - RNA, 19 nt, Artificial Sequence
  Description of Artificial Sequence: Synthetic oligonucleotide
uaucccaccgguguguccg

SEQ ID NO: 1417392 - RNA, 19 nt, Artificial Sequence
  Description of Artificial Sequence: Synthetic oligonucleotide
uuagaaucucuuacguagu

SEQ ID NO: 1417393 - RNA, 19 nt, Artificial Sequence
  Description of Artificial Sequence: Synthetic oligonucleotide
uuaggaucuuucaaauuau

SEQ ID NO: 1417394 - RNA, 19 nt, Artificial Sequence
  Description of Artificial Sequence: Synthetic oligonucleotide
guccgcaagauauaugcag

SEQ ID NO: 1417395 - RNA, 19 nt, Artificial Sequence
  Description of Artificial Sequence: Synthetic oligonucleotide
guagguuguaacaacuaag

SEQ ID NO: 1417396 - RNA, 19 nt, Artificial Sequence
  Description of Artificial Sequence: Synthetic oligonucleotide
cugauaaacagguuucuca

SEQ ID NO: 1417397 - RNA, 19 nt, Artificial Sequence
  Description of Artificial Sequence: Synthetic oligonucleotide
uguacucuuuaugaacucc

SEQ ID NO: 1417398 - RNA, 19 nt, Artificial Sequence
  Description of Artificial Sequence: Synthetic oligonucleotide
uccuauggcuuuuaguccu

SEQ ID NO: 1417399 - RNA, 19 nt, Artificial Sequence
  Description of Artificial Sequence: Synthetic oligonucleotide
aaagagguccauugucacu

SEQ ID NO: 1417400 - RNA, 19 nt, Artificial Sequence
  Description of Artificial Sequence: Synthetic oligonucleotide
cugccaaccgguuuggaag

SEQ ID NO: 1417401 - RNA, 19 nt, Artificial Sequence
  Description of Artificial Sequence: Synthetic oligonucleotide
aggaaagcauuucuccauc

SEQ ID NO: 1417402 - RNA, 19 nt, Artificial Sequence
  Description of Artificial Sequence: Synthetic oligonucleotide
auauaugcagccaaagccu

SEQ ID NO: 1417403 - RNA, 19 nt, Artificial Sequence
  Description of Artificial Sequence: Synthetic oligonucleotide
auuuauguguaugaaucca

SEQ ID NO: 1417404 - RNA, 19 nt, Artificial Sequence
  Description of Artificial Sequence: Synthetic oligonucleotide
auagucuaccaaguacacc

SEQ ID NO: 1417405 - RNA, 19 nt, Artificial Sequence
  Description of Artificial Sequence: Synthetic oligonucleotide
uacuucuggacuuucuuuc

SEQ ID NO: 1417406 - RNA, 19 nt, Artificial Sequence
  Description of Artificial Sequence: Synthetic oligonucleotide
cuccagugugccaucaugg

SEQ ID NO: 1417407 - RNA, 19 nt, Artificial Sequence
  Description of Artificial Sequence: Synthetic oligonucleotide
uagaccagauccccaauac

SEQ ID NO: 1417408 - RNA, 19 nt, Artificial Sequence
  Description of Artificial Sequence: Synthetic oligonucleotide
uuccuauggcuuuuagucc

SEQ ID NO: 1417409 - RNA, 19 nt, Artificial Sequence
  Description of Artificial Sequence: Synthetic oligonucleotide
uguaguccaguaauuucac

SEQ ID NO: 1417410 - RNA, 19 nt, Artificial Sequence
  Description of Artificial Sequence: Synthetic oligonucleotide
gguauuuuauaaacuaccc

SEQ ID NO: 1417411 - RNA, 19 nt, Artificial Sequence
  Description of Artificial Sequence: Synthetic oligonucleotide
uuuuagacaugucgguuau

SEQ ID NO: 1417412 - RNA, 19 nt, Artificial Sequence
  Description of Artificial Sequence: Synthetic oligonucleotide
acaacuaaggauucaggua

SEQ ID NO: 1417413 - RNA, 19 nt, Artificial Sequence
  Description of Artificial Sequence: Synthetic oligonucleotide
uggaucaugcaauaaccaa

SEQ ID NO: 1417414 - RNA, 19 nt, Artificial Sequence
  Description of Artificial Sequence: Synthetic oligonucleotide
ugggcaguaccgauaagca

SEQ ID NO: 1417415 - RNA, 19 nt, Artificial Sequence
  Description of Artificial Sequence: Synthetic oligonucleotide
agaauuuguguccgcaaga

SEQ ID NO: 1417416 - RNA, 19 nt, Artificial Sequence
  Description of Artificial Sequence: Synthetic oligonucleotide
uuuuagaaucucuuacgua

SEQ ID NO: 1417417 - RNA, 19 nt, Artificial Sequence
  Description of Artificial Sequence: Synthetic oligonucleotide
uaucauaaaccuguaacuu

SEQ ID NO: 1417418 - RNA, 19 nt, Artificial Sequence
  Description of Artificial Sequence: Synthetic oligonucleotide
ucgugauggggccacacca

SEQ ID NO: 1417419 - RNA, 19 nt, Artificial Sequence
  Description of Artificial Sequence: Synthetic oligonucleotide
uugugcgcaucgaugcugg

SEQ ID NO: 1417420 - RNA, 19 nt, Artificial Sequence
  Description of Artificial Sequence: Synthetic oligonucleotide
uauggcguaucccaccggu

SEQ ID NO: 1417421 - RNA, 19 nt, Artificial Sequence
  Description of Artificial Sequence: Synthetic oligonucleotide
augcacauacucaugcucg

SEQ ID NO: 1417422 - RNA, 19 nt, Artificial Sequence
  Description of Artificial Sequence: Synthetic oligonucleotide
uaggcaggaaaguugguuc

SEQ ID NO: 1417423 - RNA, 19 nt, Artificial Sequence
  Description of Artificial Sequence: Synthetic oligonucleotide
agauccccaauacuuagga

SEQ ID NO: 1417424 - RNA, 19 nt, Artificial Sequence
  Description of Artificial Sequence: Synthetic oligonucleotide
caucuuuacuuccuauggc

SEQ ID NO: 1417425 - RNA, 19 nt, Artificial Sequence
  Description of Artificial Sequence: Synthetic oligonucleotide
cacaccauugugcgcaucg

SEQ ID NO: 1417426 - RNA, 19 nt, Artificial Sequence
  Description of Artificial Sequence: Synthetic oligonucleotide
uauaugcagccaaagccuc

SEQ ID NO: 1417427 - RNA, 19 nt, Artificial Sequence
  Description of Artificial Sequence: Synthetic oligonucleotide
uacguaguuaggaucuuuc

SEQ ID NO: 1417428 - RNA, 19 nt, Artificial Sequence
  Description of Artificial Sequence: Synthetic oligonucleotide
uuaucauguagaccagauc

SEQ ID NO: 1417429 - RNA, 19 nt, Artificial Sequence
  Description of Artificial Sequence: Synthetic oligonucleotide
uuggccaauaggcaauccu

SEQ ID NO: 1417430 - RNA, 19 nt, Artificial Sequence
  Description of Artificial Sequence: Synthetic oligonucleotide
ucuaccaaguacaccuggu

SEQ ID NO: 1417431 - RNA, 19 nt, Artificial Sequence
  Description of Artificial Sequence: Synthetic oligonucleotide
uucuugaacgaacgagucu

SEQ ID NO: 1417432 - RNA, 19 nt, Artificial Sequence
  Description of Artificial Sequence: Synthetic oligonucleotide
guaccgauaagcaagucca

SEQ ID NO: 1417433 - RNA, 19 nt, Artificial Sequence
  Description of Artificial Sequence: Synthetic oligonucleotide
cuuagcaauuucaccuggc

SEQ ID NO: 1417434 - RNA, 19 nt, Artificial Sequence
  Description of Artificial Sequence: Synthetic oligonucleotide
cagcguaguacgaacuucc

SEQ ID NO: 1417435 - RNA, 19 nt, Artificial Sequence
  Description of Artificial Sequence: Synthetic oligonucleotide
uuacacguggcauuuucuc

SEQ ID NO: 1417436 - RNA, 19 nt, Artificial Sequence
  Description of Artificial Sequence: Synthetic oligonucleotide
auccugauaaacagguuuc

SEQ ID NO: 1417437 - RNA, 19 nt, Artificial Sequence
  Description of Artificial Sequence: Synthetic oligonucleotide
uuauguguaugaauccauu

SEQ ID NO: 1417438 - RNA, 19 nt, Artificial Sequence
  Description of Artificial Sequence: Synthetic oligonucleotide
ugaauuugcucugguuuag

SEQ ID NO: 1417439 - RNA, 19 nt, Artificial Sequence
  Description of Artificial Sequence: Synthetic oligonucleotide
ggcaguaccgauaagcaag

SEQ ID NO: 1417440 - RNA, 19 nt, Artificial Sequence
  Description of Artificial Sequence: Synthetic oligonucleotide
ugugaaagaaugucacgua

SEQ ID NO: 1417441 - RNA, 19 nt, Artificial Sequence
  Description of Artificial Sequence: Synthetic oligonucleotide
uaguacgaacuucccgccg

SEQ ID NO: 1417442 - RNA, 19 nt, Artificial Sequence
  Description of Artificial Sequence: Synthetic oligonucleotide
ugaacgaacgagucuguau

SEQ ID NO: 1417443 - RNA, 19 nt, Artificial Sequence
  Description of Artificial Sequence: Synthetic oligonucleotide
cguaaauccugauaaacag

SEQ ID NO: 1417444 - RNA, 19 nt, Artificial Sequence
  Description of Artificial Sequence: Synthetic oligonucleotide
ugcaauaaccaaguauuuc

SEQ ID NO: 1417445 - RNA, 19 nt, Artificial Sequence
  Description of Artificial Sequence: Synthetic oligonucleotide
cacguaaauccugauaaac

SEQ ID NO: 1417446 - RNA, 19 nt, Artificial Sequence
  Description of Artificial Sequence: Synthetic oligonucleotide
ucuguauggcguaucccac

SEQ ID NO: 1417447 - RNA, 19 nt, Artificial Sequence
  Description of Artificial Sequence: Synthetic oligonucleotide
cugggcaguaccgauaagc

SEQ ID NO: 1417448 - RNA, 19 nt, Artificial Sequence
  Description of Artificial Sequence: Synthetic oligonucleotide
uggauguauuccaggauau

SEQ ID NO: 1417449 - RNA, 19 nt, Artificial Sequence
  Description of Artificial Sequence: Synthetic oligonucleotide
gagucuguauggcguaucc

SEQ ID NO: 1417450 - RNA, 19 nt, Artificial Sequence
  Description of Artificial Sequence: Synthetic oligonucleotide
gucuguauggcguauccca

SEQ ID NO: 1417451 - RNA, 19 nt, Artificial Sequence
  Description of Artificial Sequence: Synthetic oligonucleotide
guuguaacaacuaaggauu

SEQ ID NO: 1417452 - RNA, 19 nt, Artificial Sequence
  Description of Artificial Sequence: Synthetic oligonucleotide
augcucguggauguauucc

SEQ ID NO: 1417453 - RNA, 19 nt, Artificial Sequence
  Description of Artificial Sequence: Synthetic oligonucleotide
agguuguaacaacuaagga

SEQ ID NO: 1417454 - RNA, 19 nt, Artificial Sequence
  Description of Artificial Sequence: Synthetic oligonucleotide
cccaagaccacguagguug

SEQ ID NO: 1417455 - RNA, 19 nt, Artificial Sequence
  Description of Artificial Sequence: Synthetic oligonucleotide
ugucacguaaauccugaua

SEQ ID NO: 1417456 - RNA, 19 nt, Artificial Sequence
  Description of Artificial Sequence: Synthetic oligonucleotide
augucgguuaugaucuccc

SEQ ID NO: 1417457 - RNA, 19 nt, Artificial Sequence
  Description of Artificial Sequence: Synthetic oligonucleotide
ucucuuacguaguuaggau

SEQ ID NO: 1417458 - RNA, 19 nt, Artificial Sequence
  Description of Artificial Sequence: Synthetic oligonucleotide
ugcgucacugccaaccggu

SEQ ID NO: 1417459 - RNA, 19 nt, Artificial Sequence
  Description of Artificial Sequence: Synthetic oligonucleotide
cucuuacguaguuaggauc

SEQ ID NO: 1417460 - RNA, 19 nt, Artificial Sequence
  Description of Artificial Sequence: Synthetic oligonucleotide
ugcucguggauguauucca

SEQ ID NO: 1417461 - RNA, 19 nt, Artificial Sequence
  Description of Artificial Sequence: Synthetic oligonucleotide
agaccacguagguuguaac

SEQ ID NO: 1417462 - RNA, 19 nt, Artificial Sequence
  Description of Artificial Sequence: Synthetic oligonucleotide
ugcaaggcgccucuuggca

SEQ ID NO: 1417463 - RNA, 19 nt, Artificial Sequence
  Description of Artificial Sequence: Synthetic oligonucleotide
uguaacaacuaaggauuca

SEQ ID NO: 1417464 - RNA, 19 nt, Artificial Sequence
  Description of Artificial Sequence: Synthetic oligonucleotide
uuucuuucggguucuugaa

SEQ ID NO: 1417465 - RNA, 19 nt, Artificial Sequence
  Description of Artificial Sequence: Synthetic oligonucleotide
uuguaacaacuaaggauuc

SEQ ID NO: 1417466 - RNA, 19 nt, Artificial Sequence
  Description of Artificial Sequence: Synthetic oligonucleotide
cuuucacaacacagggugc

SEQ ID NO: 1417467 - RNA, 19 nt, Artificial Sequence
  Description of Artificial Sequence: Synthetic oligonucleotide
uguguccgcaagauauaug

SEQ ID NO: 1417468 - RNA, 19 nt, Artificial Sequence
  Description of Artificial Sequence: Synthetic oligonucleotide
guauuuuauaaacuacccu

SEQ ID NO: 1417469 - RNA, 19 nt, Artificial Sequence
  Description of Artificial Sequence: Synthetic oligonucleotide
uucuuucggguucuugaac

SEQ ID NO: 1417470 - RNA, 19 nt, Artificial Sequence
  Description of Artificial Sequence: Synthetic oligonucleotide
uggccaauaggcaauccua

SEQ ID NO: 1417471 - RNA, 19 nt, Artificial Sequence
  Description of Artificial Sequence: Synthetic oligonucleotide
acguaaauccugauaaaca

SEQ ID NO: 1417472 - RNA, 19 nt, Artificial Sequence
  Description of Artificial Sequence: Synthetic oligonucleotide
cucguggauguauuccagg

SEQ ID NO: 1417473 - RNA, 19 nt, Artificial Sequence
  Description of Artificial Sequence: Synthetic oligonucleotide
acagcacuaaaauccaguu

SEQ ID NO: 1417474 - RNA, 19 nt, Artificial Sequence
  Description of Artificial Sequence: Synthetic oligonucleotide
cagaagacucacaugaaaa

SEQ ID NO: 1417475 - RNA, 19 nt, Artificial Sequence
  Description of Artificial Sequence: Synthetic oligonucleotide
cguaguacgaacuucccgc

SEQ ID NO: 1417476 - RNA, 19 nt, Artificial Sequence
  Description of Artificial Sequence: Synthetic oligonucleotide
acgaacgagucuguauggc

SEQ ID NO: 1417477 - RNA, 19 nt, Artificial Sequence
  Description of Artificial Sequence: Synthetic oligonucleotide
acuacccuucaauaaagua

SEQ ID NO: 1417478 - RNA, 19 nt, Artificial Sequence
  Description of Artificial Sequence: Synthetic oligonucleotide
ucuggacuuucuuucgggu

SEQ ID NO: 1417479 - RNA, 19 nt, Artificial Sequence
  Description of Artificial Sequence: Synthetic oligonucleotide
cuuaagcuuagcugcaaga

SEQ ID NO: 1417480 - RNA, 19 nt, Artificial Sequence
  Description of Artificial Sequence: Synthetic oligonucleotide
uccacagcguaguacgaac

SEQ ID NO: 1417481 - RNA, 19 nt, Artificial Sequence
  Description of Artificial Sequence: Synthetic oligonucleotide
agucuguauggcguauccc

SEQ ID NO: 1417482 - RNA, 19 nt, Artificial Sequence
  Description of Artificial Sequence: Synthetic oligonucleotide
uuauuacuacaaccccaga

SEQ ID NO: 1417483 - RNA, 19 nt, Artificial Sequence
  Description of Artificial Sequence: Synthetic oligonucleotide
guaguacgaacuucccgcc

SEQ ID NO: 1417484 - RNA, 19 nt, Artificial Sequence
  Description of Artificial Sequence: Synthetic oligonucleotide
gguuguaacaacuaaggau

SEQ ID NO: 1417485 - RNA, 19 nt, Artificial Sequence
  Description of Artificial Sequence: Synthetic oligonucleotide
uggcguaucccaccggugu

SEQ ID NO: 1417486 - RNA, 19 nt, Artificial Sequence
  Description of Artificial Sequence: Synthetic oligonucleotide
cuacaaccccagaagacuc

SEQ ID NO: 1417487 - RNA, 19 nt, Artificial Sequence
  Description of Artificial Sequence: Synthetic oligonucleotide
uaggcaauccuaguuucca

SEQ ID NO: 1417488 - RNA, 19 nt, Artificial Sequence
  Description of Artificial Sequence: Synthetic oligonucleotide
acagcguaguacgaacuuc

SEQ ID NO: 1417489 - RNA, 19 nt, Artificial Sequence
  Description of Artificial Sequence: Synthetic oligonucleotide
uucuuguagcucagaagaa

SEQ ID NO: 1417490 - RNA, 19 nt, Artificial Sequence
  Description of Artificial Sequence: Synthetic oligonucleotide
guguaguccaguaauuuca

SEQ ID NO: 1417491 - RNA, 19 nt, Artificial Sequence
  Description of Artificial Sequence: Synthetic oligonucleotide
accgguuuggaagaauuug

SEQ ID NO: 1417492 - RNA, 19 nt, Artificial Sequence
  Description of Artificial Sequence: Synthetic oligonucleotide
gugaaagaaugucacguaa

SEQ ID NO: 1417493 - RNA, 19 nt, Artificial Sequence
  Description of Artificial Sequence: Synthetic oligonucleotide
aguacaccuggucaggguu

SEQ ID NO: 1417494 - RNA, 19 nt, Artificial Sequence
  Description of Artificial Sequence: Synthetic oligonucleotide
cugguagaacuuuaauuca

SEQ ID NO: 1417495 - RNA, 19 nt, Artificial Sequence
  Description of Artificial Sequence: Synthetic oligonucleotide
ccgauaagcaaguccauag

SEQ ID NO: 1417496 - RNA, 19 nt, Artificial Sequence
  Description of Artificial Sequence: Synthetic oligonucleotide
cacuaaaauccaguuugcc

SEQ ID NO: 1417497 - RNA, 19 nt, Artificial Sequence
  Description of Artificial Sequence: Synthetic oligonucleotide
uagcaauuucaccuggcuu

SEQ ID NO: 1417498 - RNA, 19 nt, Artificial Sequence
  Description of Artificial Sequence: Synthetic oligonucleotide
ggauucagguauuuuauaa

SEQ ID NO: 1417499 - RNA, 19 nt, Artificial Sequence
  Description of Artificial Sequence: Synthetic oligonucleotide
uacuuccuauggcuuuuag

SEQ ID NO: 1417500 - RNA, 19 nt, Artificial Sequence
  Description of Artificial Sequence: Synthetic oligonucleotide
aucuaauuuuagaaucucu

SEQ ID NO: 1417501 - RNA, 19 nt, Artificial Sequence
  Description of Artificial Sequence: Synthetic oligonucleotide
accaagguacuucaauuua

SEQ ID NO: 1417502 - RNA, 19 nt, Artificial Sequence
  Description of Artificial Sequence: Synthetic oligonucleotide
agaaugucacguaaauccu

SEQ ID NO: 1417503 - RNA, 19 nt, Artificial Sequence
  Description of Artificial Sequence: Synthetic oligonucleotide
cuguauggcguaucccacc

SEQ ID NO: 1417504 - RNA, 19 nt, Artificial Sequence
  Description of Artificial Sequence: Synthetic oligonucleotide
caacuaaggauucagguau

SEQ ID NO: 1417505 - RNA, 19 nt, Artificial Sequence
  Description of Artificial Sequence: Synthetic oligonucleotide
uuuguguccgcaagauaua

SEQ ID NO: 1417506 - RNA, 19 nt, Artificial Sequence
  Description of Artificial Sequence: Synthetic oligonucleotide
uguguccgagcauuccaug

SEQ ID NO: 1417507 - RNA, 19 nt, Artificial Sequence
  Description of Artificial Sequence: Synthetic oligonucleotide
ucgaugcuggugaacucca

SEQ ID NO: 1417508 - RNA, 19 nt, Artificial Sequence
  Description of Artificial Sequence: Synthetic oligonucleotide
gaccacguagguuguaaca

SEQ ID NO: 1417509 - RNA, 19 nt, Artificial Sequence
  Description of Artificial Sequence: Synthetic oligonucleotide
ccauugugcgcaucgaugc

SEQ ID NO: 1417510 - RNA, 19 nt, Artificial Sequence
  Description of Artificial Sequence: Synthetic oligonucleotide
uagaaucucuuacguaguu

SEQ ID NO: 1417511 - RNA, 19 nt, Artificial Sequence
  Description of Artificial Sequence: Synthetic oligonucleotide
acuuaggaacaccaaggua

SEQ ID NO: 1417512 - RNA, 19 nt, Artificial Sequence
  Description of Artificial Sequence: Synthetic oligonucleotide
uccacgucgugauggggcc

SEQ ID NO: 1417513 - RNA, 19 nt, Artificial Sequence
  Description of Artificial Sequence: Synthetic oligonucleotide
acauugucccuguaucuaa

SEQ ID NO: 1417514 - RNA, 19 nt, Artificial Sequence
  Description of Artificial Sequence: Synthetic oligonucleotide
auccagaauucuuaagcuu

SEQ ID NO: 1417515 - RNA, 19 nt, Artificial Sequence
  Description of Artificial Sequence: Synthetic oligonucleotide
ucacguaaauccugauaaa

SEQ ID NO: 1417516 - RNA, 19 nt, Artificial Sequence
  Description of Artificial Sequence: Synthetic oligonucleotide
ugucgguuaugaucucccc

SEQ ID NO: 1417517 - RNA, 19 nt, Artificial Sequence
  Description of Artificial Sequence: Synthetic oligonucleotide
cuggaucaugcaauaacca

SEQ ID NO: 1417518 - RNA, 19 nt, Artificial Sequence
  Description of Artificial Sequence: Synthetic oligonucleotide
agaccagauccccaauacu

SEQ ID NO: 1417519 - RNA, 19 nt, Artificial Sequence
  Description of Artificial Sequence: Synthetic oligonucleotide
caaggcgccucuuggcagg

SEQ ID NO: 1417520 - RNA, 19 nt, Artificial Sequence
  Description of Artificial Sequence: Synthetic oligonucleotide
ugcacauacucaugcucgu

SEQ ID NO: 1417521 - RNA, 19 nt, Artificial Sequence
  Description of Artificial Sequence: Synthetic oligonucleotide
guguaugaauccauuucug

SEQ ID NO: 1417522 - RNA, 19 nt, Artificial Sequence
  Description of Artificial Sequence: Synthetic oligonucleotide
ccuguaucuaauuuuagaa

SEQ ID NO: 1417523 - RNA, 19 nt, Artificial Sequence
  Description of Artificial Sequence: Synthetic oligonucleotide
aucugggcaguaccgauaa

SEQ ID NO: 1417524 - RNA, 19 nt, Artificial Sequence
  Description of Artificial Sequence: Synthetic oligonucleotide
agccccaagaccacguagg

SEQ ID NO: 1417525 - RNA, 19 nt, Artificial Sequence
  Description of Artificial Sequence: Synthetic oligonucleotide
aacgagucuguauggcgua

SEQ ID NO: 1417526 - RNA, 19 nt, Artificial Sequence
  Description of Artificial Sequence: Synthetic oligonucleotide
aagaccacguagguuguaa

SEQ ID NO: 1417527 - RNA, 19 nt, Artificial Sequence
  Description of Artificial Sequence: Synthetic oligonucleotide
gagguccauugucacuggg

SEQ ID NO: 1417528 - RNA, 19 nt, Artificial Sequence
  Description of Artificial Sequence: Synthetic oligonucleotide
cucccgaguugucagcccg

SEQ ID NO: 1417529 - RNA, 19 nt, Artificial Sequence
  Description of Artificial Sequence: Synthetic oligonucleotide
auugugcgcaucgaugcug

SEQ ID NO: 1417530 - RNA, 19 nt, Artificial Sequence
  Description of Artificial Sequence: Synthetic oligonucleotide
gaauuugcucugguuuagc

SEQ ID NO: 1417531 - RNA, 19 nt, Artificial Sequence
  Description of Artificial Sequence: Synthetic oligonucleotide
aacuacccuucaauaaagu

SEQ ID NO: 1417532 - RNA, 19 nt, Artificial Sequence
  Description of Artificial Sequence: Synthetic oligonucleotide
uggaagaauuuguguccgc

SEQ ID NO: 1417533 - RNA, 19 nt, Artificial Sequence
  Description of Artificial Sequence: Synthetic oligonucleotide
agagguccauugucacugg

SEQ ID NO: 1417534 - RNA, 19 nt, Artificial Sequence
  Description of Artificial Sequence: Synthetic oligonucleotide
acugccaaccgguuuggaa

SEQ ID NO: 1417535 - RNA, 19 nt, Artificial Sequence
  Description of Artificial Sequence: Synthetic oligonucleotide
cucugguuuagcagcccgc

SEQ ID NO: 1417536 - RNA, 19 nt, Artificial Sequence
  Description of Artificial Sequence: Synthetic oligonucleotide
uccugauaaacagguuucu

SEQ ID NO: 1417537 - RNA, 19 nt, Artificial Sequence
  Description of Artificial Sequence: Synthetic oligonucleotide
agcguaguacgaacuuccc

SEQ ID NO: 1417538 - RNA, 19 nt, Artificial Sequence
  Description of Artificial Sequence: Synthetic oligonucleotide
accauugugcgcaucgaug

SEQ ID NO: 1417539 - RNA, 19 nt, Artificial Sequence
  Description of Artificial Sequence: Synthetic oligonucleotide
gauaaacagguuucucagu

SEQ ID NO: 1417540 - RNA, 19 nt, Artificial Sequence
  Description of Artificial Sequence: Synthetic oligonucleotide
aguugucagcccgccgucc

SEQ ID NO: 1417541 - RNA, 19 nt, Artificial Sequence
  Description of Artificial Sequence: Synthetic oligonucleotide
cuagaaaaccuucuggcau

SEQ ID NO: 1417542 - RNA, 19 nt, Artificial Sequence
  Description of Artificial Sequence: Synthetic oligonucleotide
ccauagucuaccaaguaca

SEQ ID NO: 1417543 - RNA, 19 nt, Artificial Sequence
  Description of Artificial Sequence: Synthetic oligonucleotide
ggguucuugaacgaacgag

SEQ ID NO: 1417544 - RNA, 19 nt, Artificial Sequence
  Description of Artificial Sequence: Synthetic oligonucleotide
ccguccacagcguaguacg

SEQ ID NO: 1417545 - RNA, 19 nt, Artificial Sequence
  Description of Artificial Sequence: Synthetic oligonucleotide
accacguagguuguaacaa

SEQ ID NO: 1417546 - RNA, 19 nt, Artificial Sequence
  Description of Artificial Sequence: Synthetic oligonucleotide
uguagaccagauccccaau

SEQ ID NO: 1417547 - RNA, 19 nt, Artificial Sequence
  Description of Artificial Sequence: Synthetic oligonucleotide
cacguggcauuuucucccg

SEQ ID NO: 1417548 - RNA, 19 nt, Artificial Sequence
  Description of Artificial Sequence: Synthetic oligonucleotide
gcguaguacgaacuucccg

SEQ ID NO: 1417549 - RNA, 19 nt, Artificial Sequence
  Description of Artificial Sequence: Synthetic oligonucleotide
caugcucguggauguauuc

SEQ ID NO: 1417550 - RNA, 19 nt, Artificial Sequence
  Description of Artificial Sequence: Synthetic oligonucleotide
gcaagauauaugcagccaa

SEQ ID NO: 1417551 - RNA, 19 nt, Artificial Sequence
  Description of Artificial Sequence: Synthetic oligonucleotide
ccaauacuuaggaacacca

SEQ ID NO: 1417552 - RNA, 19 nt, Artificial Sequence
  Description of Artificial Sequence: Synthetic oligonucleotide
caguuuuccuagaaaaccu

SEQ ID NO: 1417553 - RNA, 19 nt, Artificial Sequence
  Description of Artificial Sequence: Synthetic oligonucleotide
cuguaucuaauuuuagaau

SEQ ID NO: 1417554 - RNA, 19 nt, Artificial Sequence
  Description of Artificial Sequence: Synthetic oligonucleotide
uuguguccgcaagauauau

SEQ ID NO: 1417555 - RNA, 19 nt, Artificial Sequence
  Description of Artificial Sequence: Synthetic oligonucleotide
uuuagacaugucgguuaug

SEQ ID NO: 1417556 - RNA, 19 nt, Artificial Sequence
  Description of Artificial Sequence: Synthetic oligonucleotide
ggugcgucacugccaaccg

SEQ ID NO: 1417557 - RNA, 19 nt, Artificial Sequence
  Description of Artificial Sequence: Synthetic oligonucleotide
ucugaaggucacucccaaa

SEQ ID NO: 1417558 - RNA, 19 nt, Artificial Sequence
  Description of Artificial Sequence: Synthetic oligonucleotide
gguuaugaucuccccagca

SEQ ID NO: 1417559 - RNA, 19 nt, Artificial Sequence
  Description of Artificial Sequence: Synthetic oligonucleotide
ggcuuuuaguccuugugaa

SEQ ID NO: 1417560 - RNA, 19 nt, Artificial Sequence
  Description of Artificial Sequence: Synthetic oligonucleotide
acuuucuuucggguucuug

SEQ ID NO: 1417561 - RNA, 19 nt, Artificial Sequence
  Description of Artificial Sequence: Synthetic oligonucleotide
agaaucucuuacguaguua

SEQ ID NO: 1417562 - RNA, 19 nt, Artificial Sequence
  Description of Artificial Sequence: Synthetic oligonucleotide
gucgugauggggccacacc

SEQ ID NO: 1417563 - RNA, 19 nt, Artificial Sequence
  Description of Artificial Sequence: Synthetic oligonucleotide
gaucuccccagcagcaaac

SEQ ID NO: 1417564 - RNA, 19 nt, Artificial Sequence
  Description of Artificial Sequence: Synthetic oligonucleotide
guaguccaguaauuucaca

SEQ ID NO: 1417565 - RNA, 19 nt, Artificial Sequence
  Description of Artificial Sequence: Synthetic oligonucleotide
guauggcguaucccaccgg

SEQ ID NO: 1417566 - RNA, 19 nt, Artificial Sequence
  Description of Artificial Sequence: Synthetic oligonucleotide
uuucggguucuugaacgaa

SEQ ID NO: 1417567 - RNA, 19 nt, Artificial Sequence
  Description of Artificial Sequence: Synthetic oligonucleotide
aaauccugauaaacagguu

SEQ ID NO: 1417568 - RNA, 19 nt, Artificial Sequence
  Description of Artificial Sequence: Synthetic oligonucleotide
uucuuaagcuuagcugcaa

SEQ ID NO: 1417569 - RNA, 19 nt, Artificial Sequence
  Description of Artificial Sequence: Synthetic oligonucleotide
aacuucccgccgcuuuccu

SEQ ID NO: 1417570 - RNA, 19 nt, Artificial Sequence
  Description of Artificial Sequence: Synthetic oligonucleotide
ggccaauaggcaauccuag

SEQ ID NO: 1417571 - RNA, 19 nt, Artificial Sequence
  Description of Artificial Sequence: Synthetic oligonucleotide
gauccccaauacuuaggaa

SEQ ID NO: 1417572 - RNA, 19 nt, Artificial Sequence
  Description of Artificial Sequence: Synthetic oligonucleotide
gaauuuguguccgcaagau

SEQ ID NO: 1417573 - RNA, 19 nt, Artificial Sequence
  Description of Artificial Sequence: Synthetic oligonucleotide
gaacuuuaauucagugaaa

SEQ ID NO: 1417574 - RNA, 19 nt, Artificial Sequence
  Description of Artificial Sequence: Synthetic oligonucleotide
uaccgauaagcaaguccau

SEQ ID NO: 1417575 - RNA, 19 nt, Artificial Sequence
  Description of Artificial Sequence: Synthetic oligonucleotide
gaacgagucuguauggcgu

SEQ ID NO: 1417576 - RNA, 19 nt, Artificial Sequence
  Description of Artificial Sequence: Synthetic oligonucleotide
gaacuucccgccgcuuucc

SEQ ID NO: 1417577 - RNA, 19 nt, Artificial Sequence
  Description of Artificial Sequence: Synthetic oligonucleotide
aaagccuccuuggccaaua

SEQ ID NO: 1417578 - RNA, 19 nt, Artificial Sequence
  Description of Artificial Sequence: Synthetic oligonucleotide
cgaacgagucuguauggcg

SEQ ID NO: 1417579 - RNA, 19 nt, Artificial Sequence
  Description of Artificial Sequence: Synthetic oligonucleotide
ucccgaguugucagcccgc

SEQ ID NO: 1417580 - RNA, 19 nt, Artificial Sequence
  Description of Artificial Sequence: Synthetic oligonucleotide
uuacguaguuaggaucuuu

SEQ ID NO: 1417581 - RNA, 19 nt, Artificial Sequence
  Description of Artificial Sequence: Synthetic oligonucleotide
ccgcaagauauaugcagcc

SEQ ID NO: 1417582 - RNA, 19 nt, Artificial Sequence
  Description of Artificial Sequence: Synthetic oligonucleotide
gugcgucacugccaaccgg

SEQ ID NO: 1417583 - RNA, 19 nt, Artificial Sequence
  Description of Artificial Sequence: Synthetic oligonucleotide
aacuaaggauucagguauu

SEQ ID NO: 1417584 - RNA, 19 nt, Artificial Sequence
  Description of Artificial Sequence: Synthetic oligonucleotide
caucgaugcuggugaacuc

SEQ ID NO: 1417585 - RNA, 19 nt, Artificial Sequence
  Description of Artificial Sequence: Synthetic oligonucleotide
acgaacuucccgccgcuuu

SEQ ID NO: 1417586 - RNA, 19 nt, Artificial Sequence
  Description of Artificial Sequence: Synthetic oligonucleotide
aggucacucccaaagcggu

SEQ ID NO: 1417587 - RNA, 19 nt, Artificial Sequence
  Description of Artificial Sequence: Synthetic oligonucleotide
aaccgguuuggaagaauuu

SEQ ID NO: 1417588 - RNA, 19 nt, Artificial Sequence
  Description of Artificial Sequence: Synthetic oligonucleotide
agguccauugucacugggu

SEQ ID NO: 1417589 - RNA, 19 nt, Artificial Sequence
  Description of Artificial Sequence: Synthetic oligonucleotide
uugaacgaacgagucugua

SEQ ID NO: 1417590 - RNA, 19 nt, Artificial Sequence
  Description of Artificial Sequence: Synthetic oligonucleotide
guugucagcccgccgucca

SEQ ID NO: 1417591 - RNA, 19 nt, Artificial Sequence
  Description of Artificial Sequence: Synthetic oligonucleotide
gggugcgucacugccaacc

SEQ ID NO: 1417592 - RNA, 19 nt, Artificial Sequence
  Description of Artificial Sequence: Synthetic oligonucleotide
gucccuguaucuaauuuua

SEQ ID NO: 1417593 - RNA, 19 nt, Artificial Sequence
  Description of Artificial Sequence: Synthetic oligonucleotide
uccucccaaggaagacagc

SEQ ID NO: 1417594 - RNA, 19 nt, Artificial Sequence
  Description of Artificial Sequence: Synthetic oligonucleotide
augucacguaaauccugau

SEQ ID NO: 1417595 - RNA, 19 nt, Artificial Sequence
  Description of Artificial Sequence: Synthetic oligonucleotide
cccaauacuuaggaacacc

SEQ ID NO: 1417596 - RNA, 19 nt, Artificial Sequence
  Description of Artificial Sequence: Synthetic oligonucleotide
accgauaagcaaguccaua

SEQ ID NO: 1417597 - RNA, 19 nt, Artificial Sequence
  Description of Artificial Sequence: Synthetic oligonucleotide
cagccugagcugcuuuuac

SEQ ID NO: 1417598 - RNA, 19 nt, Artificial Sequence
  Description of Artificial Sequence: Synthetic oligonucleotide
cccuguaucuaauuuuaga

SEQ ID NO: 1417599 - RNA, 19 nt, Artificial Sequence
  Description of Artificial Sequence: Synthetic oligonucleotide
gcaaggcgccucuuggcag

SEQ ID NO: 1417600 - RNA, 19 nt, Artificial Sequence
  Description of Artificial Sequence: Synthetic oligonucleotide
augcaauaaccaaguauuu

SEQ ID NO: 1417601 - RNA, 19 nt, Artificial Sequence
  Description of Artificial Sequence: Synthetic oligonucleotide
gcacuaaaauccaguuugc

SEQ ID NO: 1417602 - RNA, 19 nt, Artificial Sequence
  Description of Artificial Sequence: Synthetic oligonucleotide
ugucagcccgccguccaca

SEQ ID NO: 1417603 - RNA, 19 nt, Artificial Sequence
  Description of Artificial Sequence: Synthetic oligonucleotide
guaucccaccggugugucc

SEQ ID NO: 1417604 - RNA, 19 nt, Artificial Sequence
  Description of Artificial Sequence: Synthetic oligonucleotide
accagauccccaauacuua

SEQ ID NO: 1417605 - RNA, 19 nt, Artificial Sequence
  Description of Artificial Sequence: Synthetic oligonucleotide
auggcaccuuuugggaucu

SEQ ID NO: 1417606 - RNA, 19 nt, Artificial Sequence
  Description of Artificial Sequence: Synthetic oligonucleotide
gucagcccgccguccacag

SEQ ID NO: 1417607 - RNA, 19 nt, Artificial Sequence
  Description of Artificial Sequence: Synthetic oligonucleotide
gugcgcaucgaugcuggug

SEQ ID NO: 1417608 - RNA, 19 nt, Artificial Sequence
  Description of Artificial Sequence: Synthetic oligonucleotide
gugaacuccagugugccau

SEQ ID NO: 1417609 - RNA, 19 nt, Artificial Sequence
  Description of Artificial Sequence: Synthetic oligonucleotide
guccauagucuaccaagua

SEQ ID NO: 1417610 - RNA, 19 nt, Artificial Sequence
  Description of Artificial Sequence: Synthetic oligonucleotide
guacuucaauuuaugugua

SEQ ID NO: 1417611 - RNA, 19 nt, Artificial Sequence
  Description of Artificial Sequence: Synthetic oligonucleotide
ccaaagcgguccauuauca

SEQ ID NO: 1417612 - RNA, 19 nt, Artificial Sequence
  Description of Artificial Sequence: Synthetic oligonucleotide
guguccgagcauuccaugu

SEQ ID NO: 1417613 - RNA, 19 nt, Artificial Sequence
  Description of Artificial Sequence: Synthetic oligonucleotide
ucagcccgccguccacagc

SEQ ID NO: 1417614 - RNA, 19 nt, Artificial Sequence
  Description of Artificial Sequence: Synthetic oligonucleotide
cgguuuggaagaauuugug

SEQ ID NO: 1417615 - RNA, 19 nt, Artificial Sequence
  Description of Artificial Sequence: Synthetic oligonucleotide
gccgcuuuccucgacucgc

SEQ ID NO: 1417616 - RNA, 19 nt, Artificial Sequence
  Description of Artificial Sequence: Synthetic oligonucleotide
gguagaacuuuaauucagu

SEQ ID NO: 1417617 - RNA, 19 nt, Artificial Sequence
  Description of Artificial Sequence: Synthetic oligonucleotide
ggcguaucccaccggugug

SEQ ID NO: 1417618 - RNA, 19 nt, Artificial Sequence
  Description of Artificial Sequence: Synthetic oligonucleotide
acguagguuguaacaacua

SEQ ID NO: 1417619 - RNA, 19 nt, Artificial Sequence
  Description of Artificial Sequence: Synthetic oligonucleotide
cacgucgugauggggccac

SEQ ID NO: 1417620 - RNA, 19 nt, Artificial Sequence
  Description of Artificial Sequence: Synthetic oligonucleotide
ugguucccggcaucuuuua

SEQ ID NO: 1417621 - RNA, 19 nt, Artificial Sequence
  Description of Artificial Sequence: Synthetic oligonucleotide
cucccaaagcgguccauua

SEQ ID NO: 1417622 - RNA, 19 nt, Artificial Sequence
  Description of Artificial Sequence: Synthetic oligonucleotide
caucugggcaguaccgaua

SEQ ID NO: 1417623 - RNA, 19 nt, Artificial Sequence
  Description of Artificial Sequence: Synthetic oligonucleotide
guugguucccggcaucuuu

SEQ ID NO: 1417624 - RNA, 19 nt, Artificial Sequence
  Description of Artificial Sequence: Synthetic oligonucleotide
guggcauuuucucccgagu

SEQ ID NO: 1417625 - RNA, 19 nt, Artificial Sequence
  Description of Artificial Sequence: Synthetic oligonucleotide
caaccgguuuggaagaauu

SEQ ID NO: 1417626 - RNA, 19 nt, Artificial Sequence
  Description of Artificial Sequence: Synthetic oligonucleotide
ugugcgcaucgaugcuggu

SEQ ID NO: 1417627 - RNA, 19 nt, Artificial Sequence
  Description of Artificial Sequence: Synthetic oligonucleotide
cuugaacgaacgagucugu

SEQ ID NO: 1417628 - RNA, 19 nt, Artificial Sequence
  Description of Artificial Sequence: Synthetic oligonucleotide
auggcguaucccaccggug

SEQ ID NO: 1417629 - RNA, 19 nt, Artificial Sequence
  Description of Artificial Sequence: Synthetic oligonucleotide
agcgguccauuaucauaaa

SEQ ID NO: 1417630 - RNA, 19 nt, Artificial Sequence
  Description of Artificial Sequence: Synthetic oligonucleotide
agggugcgucacugccaac

SEQ ID NO: 1417631 - RNA, 19 nt, Artificial Sequence
  Description of Artificial Sequence: Synthetic oligonucleotide
ucccggcaucuuuuacuuc

SEQ ID NO: 1417632 - RNA, 19 nt, Artificial Sequence
  Description of Artificial Sequence: Synthetic oligonucleotide
gcucguggauguauuccag

SEQ ID NO: 1417633 - RNA, 19 nt, Artificial Sequence
  Description of Artificial Sequence: Synthetic oligonucleotide
ggauguauuccaggauauc

SEQ ID NO: 1417634 - RNA, 19 nt, Artificial Sequence
  Description of Artificial Sequence: Synthetic oligonucleotide
acguggcauuuucucccga

SEQ ID NO: 1417635 - RNA, 19 nt, Artificial Sequence
  Description of Artificial Sequence: Synthetic oligonucleotide
gggcaguaccgauaagcaa

SEQ ID NO: 1417636 - RNA, 19 nt, Artificial Sequence
  Description of Artificial Sequence: Synthetic oligonucleotide
gcaagacaguuuuccuaga

SEQ ID NO: 1417637 - RNA, 19 nt, Artificial Sequence
  Description of Artificial Sequence: Synthetic oligonucleotide
guccacagcguaguacgaa

SEQ ID NO: 1417638 - RNA, 19 nt, Artificial Sequence
  Description of Artificial Sequence: Synthetic oligonucleotide
uucccgccgcuuuccucga

SEQ ID NO: 1417639 - RNA, 19 nt, Artificial Sequence
  Description of Artificial Sequence: Synthetic oligonucleotide
gcacauacucaugcucgug

SEQ ID NO: 1417640 - RNA, 19 nt, Artificial Sequence
  Description of Artificial Sequence: Synthetic oligonucleotide
cauugucccuguaucuaau

SEQ ID NO: 1417641 - RNA, 19 nt, Artificial Sequence
  Description of Artificial Sequence: Synthetic oligonucleotide
acgagucuguauggcguau

SEQ ID NO: 1417642 - RNA, 19 nt, Artificial Sequence
  Description of Artificial Sequence: Synthetic oligonucleotide
caaagcgguccauuaucau

SEQ ID NO: 1417643 - RNA, 19 nt, Artificial Sequence
  Description of Artificial Sequence: Synthetic oligonucleotide
cugcuuuuacacguggcau

SEQ ID NO: 1417644 - RNA, 19 nt, Artificial Sequence
  Description of Artificial Sequence: Synthetic oligonucleotide
cauugugcgcaucgaugcu

SEQ ID NO: 1417645 - RNA, 19 nt, Artificial Sequence
  Description of Artificial Sequence: Synthetic oligonucleotide
guacgaacuucccgccgcu

SEQ ID NO: 1417646 - RNA, 19 nt, Artificial Sequence
  Description of Artificial Sequence: Synthetic oligonucleotide
cccuucaauaaaguacaca

SEQ ID NO: 1417647 - RNA, 19 nt, Artificial Sequence
  Description of Artificial Sequence: Synthetic oligonucleotide
gccaauaggcaauccuagu

SEQ ID NO: 1417648 - RNA, 19 nt, Artificial Sequence
  Description of Artificial Sequence: Synthetic oligonucleotide
ccaagguacuucaauuuau

SEQ ID NO: 1417649 - RNA, 19 nt, Artificial Sequence
  Description of Artificial Sequence: Synthetic oligonucleotide
caguaccgauaagcaaguc

SEQ ID NO: 1417650 - RNA, 19 nt, Artificial Sequence
  Description of Artificial Sequence: Synthetic oligonucleotide
uacgaacuucccgccgcuu

SEQ ID NO: 1417651 - RNA, 19 nt, Artificial Sequence
  Description of Artificial Sequence: Synthetic oligonucleotide
ccggcaucuuuuacuucug

SEQ ID NO: 1417652 - RNA, 19 nt, Artificial Sequence
  Description of Artificial Sequence: Synthetic oligonucleotide
cacagcguaguacgaacuu

SEQ ID NO: 1417653 - RNA, 19 nt, Artificial Sequence
  Description of Artificial Sequence: Synthetic oligonucleotide
cccgccguccacagcguag

SEQ ID NO: 1417654 - RNA, 19 nt, Artificial Sequence
  Description of Artificial Sequence: Synthetic oligonucleotide
gccguccacagcguaguac

SEQ ID NO: 1417655 - RNA, 19 nt, Artificial Sequence
  Description of Artificial Sequence: Synthetic oligonucleotide
ccaccgguguguccgagca

SEQ ID NO: 1417656 - RNA, 19 nt, Artificial Sequence
  Description of Artificial Sequence: Synthetic oligonucleotide
ccgaguugucagcccgccg

SEQ ID NO: 1417657 - RNA, 19 nt, Artificial Sequence
  Description of Artificial Sequence: Synthetic oligonucleotide
cgaacuucccgccgcuuuc

SEQ ID NO: 1417658 - RNA, 19 nt, Artificial Sequence
  Description of Artificial Sequence: Synthetic oligonucleotide
ccccaauacuuaggaacac

SEQ ID NO: 1417659 - RNA, 19 nt, Artificial Sequence
  Description of Artificial Sequence: Synthetic oligonucleotide
cgguuaugaucuccccagc

SEQ ID NO: 1417660 - RNA, 19 nt, Artificial Sequence
  Description of Artificial Sequence: Synthetic oligonucleotide
gcuuuuacacguggcauuu

SEQ ID NO: 1417661 - RNA, 19 nt, Artificial Sequence
  Description of Artificial Sequence: Synthetic oligonucleotide
gcaguaccgauaagcaagu

SEQ ID NO: 1417662 - RNA, 19 nt, Artificial Sequence
  Description of Artificial Sequence: Synthetic oligonucleotide
guguguccgagcauuccau

SEQ ID NO: 1417663 - RNA, 19 nt, Artificial Sequence
  Description of Artificial Sequence: Synthetic oligonucleotide
ccuuggccaauaggcaauc

SEQ ID NO: 1417664 - RNA, 19 nt, Artificial Sequence
  Description of Artificial Sequence: Synthetic oligonucleotide
caacacagggugcgucacu

SEQ ID NO: 1417665 - RNA, 19 nt, Artificial Sequence
  Description of Artificial Sequence: Synthetic oligonucleotide
cccgaguugucagcccgcc

SEQ ID NO: 1417666 - RNA, 19 nt, Artificial Sequence
  Description of Artificial Sequence: Synthetic oligonucleotide
cgcaagauauaugcagcca

SEQ ID NO: 1417667 - RNA, 19 nt, Artificial Sequence
  Description of Artificial Sequence: Synthetic oligonucleotide
cgaguugucagcccgccgu

SEQ ID NO: 1417668 - RNA, 19 nt, Artificial Sequence
  Description of Artificial Sequence: Synthetic oligonucleotide
cgauaagcaaguccauagu

SEQ ID NO: 1417669 - RNA, 19 nt, Artificial Sequence
  Description of Artificial Sequence: Synthetic oligonucleotide
cuuacguaguuaggaucuu

SEQ ID NO: 1417670 - RNA, 19 nt, Artificial Sequence
  Description of Artificial Sequence: Synthetic oligonucleotide
ccacagcguaguacgaacu

SEQ ID NO: 1417671 - RNA, 19 nt, Artificial Sequence
  Description of Artificial Sequence: Synthetic oligonucleotide
gccccaagaccacguaggu

SEQ ID NO: 1417672 - RNA, 19 nt, Artificial Sequence
  Description of Artificial Sequence: Synthetic oligonucleotide
cgccgcuuuccucgacucg

SEQ ID NO: 1417673 - RNA, 19 nt, Artificial Sequence
  Description of Artificial Sequence: Synthetic oligonucleotide
acgucgugauggggccaca

SEQ ID NO: 1417674 - RNA, 19 nt, Artificial Sequence
  Description of Artificial Sequence: Synthetic oligonucleotide
cgagucuguauggcguauc

SEQ ID NO: 1417675 - RNA, 19 nt, Artificial Sequence
  Description of Artificial Sequence: Synthetic oligonucleotide
cgcaucgaugcuggugaac

SEQ ID NO: 1417676 - RNA, 19 nt, Artificial Sequence
  Description of Artificial Sequence: Synthetic oligonucleotide
cggguucuugaacgaacga

SEQ ID NO: 1417677 - RNA, 19 nt, Artificial Sequence
  Description of Artificial Sequence: Synthetic oligonucleotide
cguaucccaccgguguguc

SEQ ID NO: 1417678 - RNA, 19 nt, Artificial Sequence
  Description of Artificial Sequence: Synthetic oligonucleotide
cgucgugauggggccacac

SEQ ID NO: 1417679 - RNA, 19 nt, Artificial Sequence
  Description of Artificial Sequence: Synthetic oligonucleotide
cguccacagcguaguacga

SEQ ID NO: 1417680 - RNA, 19 nt, Artificial Sequence
  Description of Artificial Sequence: Synthetic oligonucleotide
gcgcaucgaugcuggugaa

SEQ ID NO: 1417681 - RNA, 19 nt, Artificial Sequence
  Description of Artificial Sequence: Synthetic oligonucleotide
gccaaccgguuuggaagaa

SEQ ID NO: 1417682 - RNA, 19 nt, Artificial Sequence
  Description of Artificial Sequence: Synthetic oligonucleotide
caauuucaccuggcuuguu

SEQ ID NO: 1417683 - RNA, 19 nt, Artificial Sequence
  Description of Artificial Sequence: Synthetic oligonucleotide
ccuauggcuuuuaguccuu

SEQ ID NO: 1417684 - RNA, 19 nt, Artificial Sequence
  Description of Artificial Sequence: Synthetic oligonucleotide
ccacaccauugugcgcauc

SEQ ID NO: 1417685 - RNA, 19 nt, Artificial Sequence
  Description of Artificial Sequence: Synthetic oligonucleotide
caccgguguguccgagcau

SEQ ID NO: 1417686 - RNA, 19 nt, Artificial Sequence
  Description of Artificial Sequence: Synthetic oligonucleotide
gcccgccguccacagcgua

SEQ ID NO: 1417687 - RNA, 19 nt, Artificial Sequence
  Description of Artificial Sequence: Synthetic oligonucleotide
gcgucacugccaaccgguu

SEQ ID NO: 1417688 - RNA, 19 nt, Artificial Sequence
  Description of Artificial Sequence: Synthetic oligonucleotide
cgccguccacagcguagua

SEQ ID NO: 1417689 - RNA, 19 nt, Artificial Sequence
  Description of Artificial Sequence: Synthetic oligonucleotide
uuaagaauaauuuugggga

SEQ ID NO: 1417690 - RNA, 19 nt, Artificial Sequence
  Description of Artificial Sequence: Synthetic oligonucleotide
uuaauaagcaccuaaauaa

SEQ ID NO: 1417691 - RNA, 19 nt, Artificial Sequence
  Description of Artificial Sequence: Synthetic oligonucleotide
uugacaaaggccauaaucg

SEQ ID NO: 1417692 - RNA, 19 nt, Artificial Sequence
  Description of Artificial Sequence: Synthetic oligonucleotide
aaacaguucaauguguucc

SEQ ID NO: 1417693 - RNA, 19 nt, Artificial Sequence
  Description of Artificial Sequence: Synthetic oligonucleotide
accuuuuacacguugaggc

SEQ ID NO: 1417694 - RNA, 19 nt, Artificial Sequence
  Description of Artificial Sequence: Synthetic oligonucleotide
uacuagauaugucagagag

SEQ ID NO: 1417695 - RNA, 19 nt, Artificial Sequence
  Description of Artificial Sequence: Synthetic oligonucleotide
auaucuguuuuccagaggg

SEQ ID NO: 1417696 - RNA, 19 nt, Artificial Sequence
  Description of Artificial Sequence: Synthetic oligonucleotide
acaaauacuagauauguca

SEQ ID NO: 1417697 - RNA, 19 nt, Artificial Sequence
  Description of Artificial Sequence: Synthetic oligonucleotide
gauuacauaacuucagcag

SEQ ID NO: 1417698 - RNA, 19 nt, Artificial Sequence
  Description of Artificial Sequence: Synthetic oligonucleotide
aauacuagauaugucagag

SEQ ID NO: 1417699 - RNA, 19 nt, Artificial Sequence
  Description of Artificial Sequence: Synthetic oligonucleotide
uuacuuguauuuaauaagc

SEQ ID NO: 1417700 - RNA, 19 nt, Artificial Sequence
  Description of Artificial Sequence: Synthetic oligonucleotide
ugaauuauaaauccuucca

SEQ ID NO: 1417701 - RNA, 19 nt, Artificial Sequence
  Description of Artificial Sequence: Synthetic oligonucleotide
uugauaaccaaauaccuca

SEQ ID NO: 1417702 - RNA, 19 nt, Artificial Sequence
  Description of Artificial Sequence: Synthetic oligonucleotide
ucuucaaugaguucaagca

SEQ ID NO: 1417703 - RNA, 19 nt, Artificial Sequence
  Description of Artificial Sequence: Synthetic oligonucleotide
ucuaaucucaauaagcuau

SEQ ID NO: 1417704 - RNA, 19 nt, Artificial Sequence
  Description of Artificial Sequence: Synthetic oligonucleotide
agauaguugacuccaaagg

SEQ ID NO: 1417705 - RNA, 19 nt, Artificial Sequence
  Description of Artificial Sequence: Synthetic oligonucleotide
uuuaauaagcaccuaaaua

SEQ ID NO: 1417706 - RNA, 19 nt, Artificial Sequence
  Description of Artificial Sequence: Synthetic oligonucleotide
aaagccuugcaacauugac

SEQ ID NO: 1417707 - RNA, 19 nt, Artificial Sequence
  Description of Artificial Sequence: Synthetic oligonucleotide
aauccuauuauuucacaug

SEQ ID NO: 1417708 - RNA, 19 nt, Artificial Sequence
  Description of Artificial Sequence: Synthetic oligonucleotide
cuagauaugucagagaggc

SEQ ID NO: 1417709 - RNA, 19 nt, Artificial Sequence
  Description of Artificial Sequence: Synthetic oligonucleotide
aauguaggaccuuaaguug

SEQ ID NO: 1417710 - RNA, 19 nt, Artificial Sequence
  Description of Artificial Sequence: Synthetic oligonucleotide
cuauucuccagaaaguucc

SEQ ID NO: 1417711 - RNA, 19 nt, Artificial Sequence
  Description of Artificial Sequence: Synthetic oligonucleotide
accgaaaagggucauuucc

SEQ ID NO: 1417712 - RNA, 19 nt, Artificial Sequence
  Description of Artificial Sequence: Synthetic oligonucleotide
aauaccucaauaaauucag

SEQ ID NO: 1417713 - RNA, 19 nt, Artificial Sequence
  Description of Artificial Sequence: Synthetic oligonucleotide
uccacaaaaggucuuauga

SEQ ID NO: 1417714 - RNA, 19 nt, Artificial Sequence
  Description of Artificial Sequence: Synthetic oligonucleotide
aauaauuuuggggacagga

SEQ ID NO: 1417715 - RNA, 19 nt, Artificial Sequence
  Description of Artificial Sequence: Synthetic oligonucleotide
ugaaaagagacuugaaugu

SEQ ID NO: 1417716 - RNA, 19 nt, Artificial Sequence
  Description of Artificial Sequence: Synthetic oligonucleotide
aaacucuuaaucucuaagu

SEQ ID NO: 1417717 - RNA, 19 nt, Artificial Sequence
  Description of Artificial Sequence: Synthetic oligonucleotide
aauccuaucugaguucugc

SEQ ID NO: 1417718 - RNA, 19 nt, Artificial Sequence
  Description of Artificial Sequence: Synthetic oligonucleotide
auuacuuugacuaagcccu

SEQ ID NO: 1417719 - RNA, 19 nt, Artificial Sequence
  Description of Artificial Sequence: Synthetic oligonucleotide
ucaagcaaacccaacaaca

SEQ ID NO: 1417720 - RNA, 19 nt, Artificial Sequence
  Description of Artificial Sequence: Synthetic oligonucleotide
ugcaacauugacaaaggcc

SEQ ID NO: 1417721 - RNA, 19 nt, Artificial Sequence
  Description of Artificial Sequence: Synthetic oligonucleotide
agugucauuacuuugacua

SEQ ID NO: 1417722 - RNA, 19 nt, Artificial Sequence
  Description of Artificial Sequence: Synthetic oligonucleotide
aaucucuaaguacugauaa

SEQ ID NO: 1417723 - RNA, 19 nt, Artificial Sequence
  Description of Artificial Sequence: Synthetic oligonucleotide
ucaauaaauucagugaagc

SEQ ID NO: 1417724 - RNA, 19 nt, Artificial Sequence
  Description of Artificial Sequence: Synthetic oligonucleotide
uuaucuuugauaaccaaau

SEQ ID NO: 1417725 - RNA, 19 nt, Artificial Sequence
  Description of Artificial Sequence: Synthetic oligonucleotide
uaaaugaugcgucaaucug

SEQ ID NO: 1417726 - RNA, 19 nt, Artificial Sequence
  Description of Artificial Sequence: Synthetic oligonucleotide
aaagaagaauaauuuggga

SEQ ID NO: 1417727 - RNA, 19 nt, Artificial Sequence
  Description of Artificial Sequence: Synthetic oligonucleotide
augcaaaacaccgaaaagg

SEQ ID NO: 1417728 - RNA, 19 nt, Artificial Sequence
  Description of Artificial Sequence: Synthetic oligonucleotide
cauuacuuugacuaagccc

SEQ ID NO: 1417729 - RNA, 19 nt, Artificial Sequence
  Description of Artificial Sequence: Synthetic oligonucleotide
ugaagcauggcuaaacccu

SEQ ID NO: 1417730 - RNA, 19 nt, Artificial Sequence
  Description of Artificial Sequence: Synthetic oligonucleotide
augauuaagaauaauuuug

SEQ ID NO: 1417731 - RNA, 19 nt, Artificial Sequence
  Description of Artificial Sequence: Synthetic oligonucleotide
caaaacaccgaaaaggguc

SEQ ID NO: 1417732 - RNA, 19 nt, Artificial Sequence
  Description of Artificial Sequence: Synthetic oligonucleotide
gauagugcuaauccaacug

SEQ ID NO: 1417733 - RNA, 19 nt, Artificial Sequence
  Description of Artificial Sequence: Synthetic oligonucleotide
gaauaugccuuguuguuag

SEQ ID NO: 1417734 - RNA, 19 nt, Artificial Sequence
  Description of Artificial Sequence: Synthetic oligonucleotide
cugaccaauaccaaugccc

SEQ ID NO: 1417735 - RNA, 19 nt, Artificial Sequence
  Description of Artificial Sequence: Synthetic oligonucleotide
gauuacuuguauuuaauaa

SEQ ID NO: 1417736 - RNA, 19 nt, Artificial Sequence
  Description of Artificial Sequence: Synthetic oligonucleotide
uuaaaugaugcgucaaucu

SEQ ID NO: 1417737 - RNA, 19 nt, Artificial Sequence
  Description of Artificial Sequence: Synthetic oligonucleotide
acaaaauuucaguagcuca

SEQ ID NO: 1417738 - RNA, 19 nt, Artificial Sequence
  Description of Artificial Sequence: Synthetic oligonucleotide
acuuggcuuauuuuguugg

SEQ ID NO: 1417739 - RNA, 19 nt, Artificial Sequence
  Description of Artificial Sequence: Synthetic oligonucleotide
auuggaagcugaccaauac

SEQ ID NO: 1417740 - RNA, 19 nt, Artificial Sequence
  Description of Artificial Sequence: Synthetic oligonucleotide
agcaaggggcauuucaagc

SEQ ID NO: 1417741 - RNA, 19 nt, Artificial Sequence
  Description of Artificial Sequence: Synthetic oligonucleotide
gucgauauacagcugaagc

SEQ ID NO: 1417742 - RNA, 19 nt, Artificial Sequence
  Description of Artificial Sequence: Synthetic oligonucleotide
uuggauuacauaacuucag

SEQ ID NO: 1417743 - RNA, 19 nt, Artificial Sequence
  Description of Artificial Sequence: Synthetic oligonucleotide
cuguccauaauccaguuug

SEQ ID NO: 1417744 - RNA, 19 nt, Artificial Sequence
  Description of Artificial Sequence: Synthetic oligonucleotide
uuacauaacuucagcagca

SEQ ID NO: 1417745 - RNA, 19 nt, Artificial Sequence
  Description of Artificial Sequence: Synthetic oligonucleotide
uuugauaaccaaauaccuc

SEQ ID NO: 1417746 - RNA, 19 nt, Artificial Sequence
  Description of Artificial Sequence: Synthetic oligonucleotide
uccaugauuaagaauaauu

SEQ ID NO: 1417747 - RNA, 19 nt, Artificial Sequence
  Description of Artificial Sequence: Synthetic oligonucleotide
aaauacuagauaugucaga

SEQ ID NO: 1417748 - RNA, 19 nt, Artificial Sequence
  Description of Artificial Sequence: Synthetic oligonucleotide
aguagcucaucuuuuaacu

SEQ ID NO: 1417749 - RNA, 19 nt, Artificial Sequence
  Description of Artificial Sequence: Synthetic oligonucleotide
uucauaaugugcuuuugac

SEQ ID NO: 1417750 - RNA, 19 nt, Artificial Sequence
  Description of Artificial Sequence: Synthetic oligonucleotide
acugaauaugccuuguugu

SEQ ID NO: 1417751 - RNA, 19 nt, Artificial Sequence
  Description of Artificial Sequence: Synthetic oligonucleotide
uaauccaacugaauaugcc

SEQ ID NO: 1417752 - RNA, 19 nt, Artificial Sequence
  Description of Artificial Sequence: Synthetic oligonucleotide
aaggccauaaucgucuguc

SEQ ID NO: 1417753 - RNA, 19 nt, Artificial Sequence
  Description of Artificial Sequence: Synthetic oligonucleotide
aacucuuaaucucuaagua

SEQ ID NO: 1417754 - RNA, 19 nt, Artificial Sequence
  Description of Artificial Sequence: Synthetic oligonucleotide
ucauaaugugcuuuugaca

SEQ ID NO: 1417755 - RNA, 19 nt, Artificial Sequence
  Description of Artificial Sequence: Synthetic oligonucleotide
uucaaugaguucaagcaaa

SEQ ID NO: 1417756 - RNA, 19 nt, Artificial Sequence
  Description of Artificial Sequence: Synthetic oligonucleotide
aacaacaauuccuuuggau

SEQ ID NO: 1417757 - RNA, 19 nt, Artificial Sequence
  Description of Artificial Sequence: Synthetic oligonucleotide
uggauuacauaacuucagc

SEQ ID NO: 1417758 - RNA, 19 nt, Artificial Sequence
  Description of Artificial Sequence: Synthetic oligonucleotide
acauauuaaguccuauaug

SEQ ID NO: 1417759 - RNA, 19 nt, Artificial Sequence
  Description of Artificial Sequence: Synthetic oligonucleotide
ccauaauccaguuugauug

SEQ ID NO: 1417760 - RNA, 19 nt, Artificial Sequence
  Description of Artificial Sequence: Synthetic oligonucleotide
gcugcaaaagguaugaugg

SEQ ID NO: 1417761 - RNA, 19 nt, Artificial Sequence
  Description of Artificial Sequence: Synthetic oligonucleotide
ucaauuacuucuuccacaa

SEQ ID NO: 1417762 - RNA, 19 nt, Artificial Sequence
  Description of Artificial Sequence: Synthetic oligonucleotide
guaugaugggcuuaagacc

SEQ ID NO: 1417763 - RNA, 19 nt, Artificial Sequence
  Description of Artificial Sequence: Synthetic oligonucleotide
aaaauccuauuauuucaca

SEQ ID NO: 1417764 - RNA, 19 nt, Artificial Sequence
  Description of Artificial Sequence: Synthetic oligonucleotide
aauaagcaccuaaauaaug

SEQ ID NO: 1417765 - RNA, 19 nt, Artificial Sequence
  Description of Artificial Sequence: Synthetic oligonucleotide
agauaugucagagaggcca

SEQ ID NO: 1417766 - RNA, 19 nt, Artificial Sequence
  Description of Artificial Sequence: Synthetic oligonucleotide
cacaaaaggucuuaugaac

SEQ ID NO: 1417767 - RNA, 19 nt, Artificial Sequence
  Description of Artificial Sequence: Synthetic oligonucleotide
auaauguauauuugccuug

SEQ ID NO: 1417768 - RNA, 19 nt, Artificial Sequence
  Description of Artificial Sequence: Synthetic oligonucleotide
uuaaguccuauaugaagug

SEQ ID NO: 1417769 - RNA, 19 nt, Artificial Sequence
  Description of Artificial Sequence: Synthetic oligonucleotide
uaagaauaauuuuggggac

SEQ ID NO: 1417770 - RNA, 19 nt, Artificial Sequence
  Description of Artificial Sequence: Synthetic oligonucleotide
ucauuacuuugacuaagcc

SEQ ID NO: 1417771 - RNA, 19 nt, Artificial Sequence
  Description of Artificial Sequence: Synthetic oligonucleotide
aauaagcuauucuccagaa

SEQ ID NO: 1417772 - RNA, 19 nt, Artificial Sequence
  Description of Artificial Sequence: Synthetic oligonucleotide
uguuauauguuuucuuaaa

SEQ ID NO: 1417773 - RNA, 19 nt, Artificial Sequence
  Description of Artificial Sequence: Synthetic oligonucleotide
uacacguugaggcuacuug

SEQ ID NO: 1417774 - RNA, 19 nt, Artificial Sequence
  Description of Artificial Sequence: Synthetic oligonucleotide
aacaauuccuuuggauuac

SEQ ID NO: 1417775 - RNA, 19 nt, Artificial Sequence
  Description of Artificial Sequence: Synthetic oligonucleotide
uaguugacuccaaagggug

SEQ ID NO: 1417776 - RNA, 19 nt, Artificial Sequence
  Description of Artificial Sequence: Synthetic oligonucleotide
cuaauccaacugaauaugc

SEQ ID NO: 1417777 - RNA, 19 nt, Artificial Sequence
  Description of Artificial Sequence: Synthetic oligonucleotide
acacguugaggcuacuugg

SEQ ID NO: 1417778 - RNA, 19 nt, Artificial Sequence
  Description of Artificial Sequence: Synthetic oligonucleotide
auaugaaguggcuuuaaaa

SEQ ID NO: 1417779 - RNA, 19 nt, Artificial Sequence
  Description of Artificial Sequence: Synthetic oligonucleotide
ucuuaugaacucuauuaaa

SEQ ID NO: 1417780 - RNA, 19 nt, Artificial Sequence
  Description of Artificial Sequence: Synthetic oligonucleotide
gucucaauggggcaaagug

SEQ ID NO: 1417781 - RNA, 19 nt, Artificial Sequence
  Description of Artificial Sequence: Synthetic oligonucleotide
agcugaccaauaccaaugc

SEQ ID NO: 1417782 - RNA, 19 nt, Artificial Sequence
  Description of Artificial Sequence: Synthetic oligonucleotide
cucagggagaaacaguacc

SEQ ID NO: 1417783 - RNA, 19 nt, Artificial Sequence
  Description of Artificial Sequence: Synthetic oligonucleotide
ucucaauggggcaaagugu

SEQ ID NO: 1417784 - RNA, 19 nt, Artificial Sequence
  Description of Artificial Sequence: Synthetic oligonucleotide
auguauauuugccuuguga

SEQ ID NO: 1417785 - RNA, 19 nt, Artificial Sequence
  Description of Artificial Sequence: Synthetic oligonucleotide
ucaagucaaauagugaaaa

SEQ ID NO: 1417786 - RNA, 19 nt, Artificial Sequence
  Description of Artificial Sequence: Synthetic oligonucleotide
ucuuaaucucuaaguacug

SEQ ID NO: 1417787 - RNA, 19 nt, Artificial Sequence
  Description of Artificial Sequence: Synthetic oligonucleotide
uaaaucuguuucagcaccc

SEQ ID NO: 1417788 - RNA, 19 nt, Artificial Sequence
  Description of Artificial Sequence: Synthetic oligonucleotide
ugcuaauccaacugaauau

SEQ ID NO: 1417789 - RNA, 19 nt, Artificial Sequence
  Description of Artificial Sequence: Synthetic oligonucleotide
auguaggaccuuaaguugc

SEQ ID NO: 1417790 - RNA, 19 nt, Artificial Sequence
  Description of Artificial Sequence: Synthetic oligonucleotide
uucaagcaaacccaacaac

SEQ ID NO: 1417791 - RNA, 19 nt, Artificial Sequence
  Description of Artificial Sequence: Synthetic oligonucleotide
caguaaaucuguuucagca

SEQ ID NO: 1417792 - RNA, 19 nt, Artificial Sequence
  Description of Artificial Sequence: Synthetic oligonucleotide
auagugcuaauccaacuga

SEQ ID NO: 1417793 - RNA, 19 nt, Artificial Sequence
  Description of Artificial Sequence: Synthetic oligonucleotide
ugggcuuaagaccauugga

SEQ ID NO: 1417794 - RNA, 19 nt, Artificial Sequence
  Description of Artificial Sequence: Synthetic oligonucleotide
auuucacaugcaaaacacc

SEQ ID NO: 1417795 - RNA, 19 nt, Artificial Sequence
  Description of Artificial Sequence: Synthetic oligonucleotide
gaauguaggaccuuaaguu

SEQ ID NO: 1417796 - RNA, 19 nt, Artificial Sequence
  Description of Artificial Sequence: Synthetic oligonucleotide
ugucauuacuuugacuaag

SEQ ID NO: 1417797 - RNA, 19 nt, Artificial Sequence
  Description of Artificial Sequence: Synthetic oligonucleotide
ugcaaaagguaugaugggc

SEQ ID NO: 1417798 - RNA, 19 nt, Artificial Sequence
  Description of Artificial Sequence: Synthetic oligonucleotide
aauuugggauaucuguuuu

SEQ ID NO: 1417799 - RNA, 19 nt, Artificial Sequence
  Description of Artificial Sequence: Synthetic oligonucleotide
ucuuaaaugaugcgucaau

SEQ ID NO: 1417800 - RNA, 19 nt, Artificial Sequence
  Description of Artificial Sequence: Synthetic oligonucleotide
ugaagccauaauccuaucu

SEQ ID NO: 1417801 - RNA, 19 nt, Artificial Sequence
  Description of Artificial Sequence: Synthetic oligonucleotide
acagcaagaaaacucuuaa

SEQ ID NO: 1417802 - RNA, 19 nt, Artificial Sequence
  Description of Artificial Sequence: Synthetic oligonucleotide
guauuuaauaagcaccuaa

SEQ ID NO: 1417803 - RNA, 19 nt, Artificial Sequence
  Description of Artificial Sequence: Synthetic oligonucleotide
cucaauggggcaaaguguc

SEQ ID NO: 1417804 - RNA, 19 nt, Artificial Sequence
  Description of Artificial Sequence: Synthetic oligonucleotide
gaccauuggaagcugacca

SEQ ID NO: 1417805 - RNA, 19 nt, Artificial Sequence
  Description of Artificial Sequence: Synthetic oligonucleotide
caagguuaucccaaguuuc

SEQ ID NO: 1417806 - RNA, 19 nt, Artificial Sequence
  Description of Artificial Sequence: Synthetic oligonucleotide
uuugccuugugaauccaac

SEQ ID NO: 1417807 - RNA, 19 nt, Artificial Sequence
  Description of Artificial Sequence: Synthetic oligonucleotide
acuguucaaggaauugugc

SEQ ID NO: 1417808 - RNA, 19 nt, Artificial Sequence
  Description of Artificial Sequence: Synthetic oligonucleotide
agaauaauuuuggggacag

SEQ ID NO: 1417809 - RNA, 19 nt, Artificial Sequence
  Description of Artificial Sequence: Synthetic oligonucleotide
aauaugccuuguuguuagg

SEQ ID NO: 1417810 - RNA, 19 nt, Artificial Sequence
  Description of Artificial Sequence: Synthetic oligonucleotide
aagaauaauuuuggggaca

SEQ ID NO: 1417811 - RNA, 19 nt, Artificial Sequence
  Description of Artificial Sequence: Synthetic oligonucleotide
uucuucugaguauggaaca

SEQ ID NO: 1417812 - RNA, 19 nt, Artificial Sequence
  Description of Artificial Sequence: Synthetic oligonucleotide
uaugccuuguuguuaggga

SEQ ID NO: 1417813 - RNA, 19 nt, Artificial Sequence
  Description of Artificial Sequence: Synthetic oligonucleotide
ugcaguaaaucuguuucag

SEQ ID NO: 1417814 - RNA, 19 nt, Artificial Sequence
  Description of Artificial Sequence: Synthetic oligonucleotide
uguuagggaguuucugaag

SEQ ID NO: 1417815 - RNA, 19 nt, Artificial Sequence
  Description of Artificial Sequence: Synthetic oligonucleotide
ucaaugaguucaagcaaac

SEQ ID NO: 1417816 - RNA, 19 nt, Artificial Sequence
  Description of Artificial Sequence: Synthetic oligonucleotide
uauaugaaguggcuuuaaa

SEQ ID NO: 1417817 - RNA, 19 nt, Artificial Sequence
  Description of Artificial Sequence: Synthetic oligonucleotide
augggcuuaagaccauugg

SEQ ID NO: 1417818 - RNA, 19 nt, Artificial Sequence
  Description of Artificial Sequence: Synthetic oligonucleotide
gacauauuaaguccuauau

SEQ ID NO: 1417819 - RNA, 19 nt, Artificial Sequence
  Description of Artificial Sequence: Synthetic oligonucleotide
uucccaauccuuuggagaa

SEQ ID NO: 1417820 - RNA, 19 nt, Artificial Sequence
  Description of Artificial Sequence: Synthetic oligonucleotide
uguccaauuugugauaaaa

SEQ ID NO: 1417821 - RNA, 19 nt, Artificial Sequence
  Description of Artificial Sequence: Synthetic oligonucleotide
uuuuacacguugaggcuac

SEQ ID NO: 1417822 - RNA, 19 nt, Artificial Sequence
  Description of Artificial Sequence: Synthetic oligonucleotide
uguucagcugcaaaaggua

SEQ ID NO: 1417823 - RNA, 19 nt, Artificial Sequence
  Description of Artificial Sequence: Synthetic oligonucleotide
cauaaugugcuuuugacau

SEQ ID NO: 1417824 - RNA, 19 nt, Artificial Sequence
  Description of Artificial Sequence: Synthetic oligonucleotide
auaaauucagugaagccau

SEQ ID NO: 1417825 - RNA, 19 nt, Artificial Sequence
  Description of Artificial Sequence: Synthetic oligonucleotide
uccuauaugaaguggcuuu

SEQ ID NO: 1417826 - RNA, 19 nt, Artificial Sequence
  Description of Artificial Sequence: Synthetic oligonucleotide
uaaucucuaaguacugaua

SEQ ID NO: 1417827 - RNA, 19 nt, Artificial Sequence
  Description of Artificial Sequence: Synthetic oligonucleotide
uguaaugguugaaguaaaa

SEQ ID NO: 1417828 - RNA, 19 nt, Artificial Sequence
  Description of Artificial Sequence: Synthetic oligonucleotide
cuuaaaugaugcgucaauc

SEQ ID NO: 1417829 - RNA, 19 nt, Artificial Sequence
  Description of Artificial Sequence: Synthetic oligonucleotide
cugaacaaauacuagauau

SEQ ID NO: 1417830 - RNA, 19 nt, Artificial Sequence
  Description of Artificial Sequence: Synthetic oligonucleotide
gcaacauugacaaaggcca

SEQ ID NO: 1417831 - RNA, 19 nt, Artificial Sequence
  Description of Artificial Sequence: Synthetic oligonucleotide
auaugccuuguuguuaggg

SEQ ID NO: 1417832 - RNA, 19 nt, Artificial Sequence
  Description of Artificial Sequence: Synthetic oligonucleotide
uguuaucaauuacuucuuc

SEQ ID NO: 1417833 - RNA, 19 nt, Artificial Sequence
  Description of Artificial Sequence: Synthetic oligonucleotide
uaaugugcuuuugacauau

SEQ ID NO: 1417834 - RNA, 19 nt, Artificial Sequence
  Description of Artificial Sequence: Synthetic oligonucleotide
aggaccuuaaguugcauuu

SEQ ID NO: 1417835 - RNA, 19 nt, Artificial Sequence
  Description of Artificial Sequence: Synthetic oligonucleotide
ucugaguucugcaguaaau

SEQ ID NO: 1417836 - RNA, 19 nt, Artificial Sequence
  Description of Artificial Sequence: Synthetic oligonucleotide
cuucuaaucucaauaagcu

SEQ ID NO: 1417837 - RNA, 19 nt, Artificial Sequence
  Description of Artificial Sequence: Synthetic oligonucleotide
uuguuagggaguuucugaa

SEQ ID NO: 1417838 - RNA, 19 nt, Artificial Sequence
  Description of Artificial Sequence: Synthetic oligonucleotide
auaaucgucugucuguauu

SEQ ID NO: 1417839 - RNA, 19 nt, Artificial Sequence
  Description of Artificial Sequence: Synthetic oligonucleotide
cauaauccuaucugaguuc

SEQ ID NO: 1417840 - RNA, 19 nt, Artificial Sequence
  Description of Artificial Sequence: Synthetic oligonucleotide
uguaggaccuuaaguugca

SEQ ID NO: 1417841 - RNA, 19 nt, Artificial Sequence
  Description of Artificial Sequence: Synthetic oligonucleotide
agaccauuggaagcugacc

SEQ ID NO: 1417842 - RNA, 19 nt, Artificial Sequence
  Description of Artificial Sequence: Synthetic oligonucleotide
auaauccuaucugaguucu

SEQ ID NO: 1417843 - RNA, 19 nt, Artificial Sequence
  Description of Artificial Sequence: Synthetic oligonucleotide
uugcaacauugacaaaggc

SEQ ID NO: 1417844 - RNA, 19 nt, Artificial Sequence
  Description of Artificial Sequence: Synthetic oligonucleotide
ugcccugaacaaauacuag

SEQ ID NO: 1417845 - RNA, 19 nt, Artificial Sequence
  Description of Artificial Sequence: Synthetic oligonucleotide
ucuucugaguauggaacag

SEQ ID NO: 1417846 - RNA, 19 nt, Artificial Sequence
  Description of Artificial Sequence: Synthetic oligonucleotide
ucuguucuuugcagaaaca

SEQ ID NO: 1417847 - RNA, 19 nt, Artificial Sequence
  Description of Artificial Sequence: Synthetic oligonucleotide
ucaaugucucaauggggca

SEQ ID NO: 1417848 - RNA, 19 nt, Artificial Sequence
  Description of Artificial Sequence: Synthetic oligonucleotide
uucuaaucucaauaagcua

SEQ ID NO: 1417849 - RNA, 19 nt, Artificial Sequence
  Description of Artificial Sequence: Synthetic oligonucleotide
cuuggcuuauuuuguuggc

SEQ ID NO: 1417850 - RNA, 19 nt, Artificial Sequence
  Description of Artificial Sequence: Synthetic oligonucleotide
aaugaugcgucaaucugau

SEQ ID NO: 1417851 - RNA, 19 nt, Artificial Sequence
  Description of Artificial Sequence: Synthetic oligonucleotide
auaguugacuccaaagggu

SEQ ID NO: 1417852 - RNA, 19 nt, Artificial Sequence
  Description of Artificial Sequence: Synthetic oligonucleotide
cucuuaaucucuaaguacu

SEQ ID NO: 1417853 - RNA, 19 nt, Artificial Sequence
  Description of Artificial Sequence: Synthetic oligonucleotide
aggaauugugcugucagca

SEQ ID NO: 1417854 - RNA, 19 nt, Artificial Sequence
  Description of Artificial Sequence: Synthetic oligonucleotide
cuuugauaaccaaauaccu

SEQ ID NO: 1417855 - RNA, 19 nt, Artificial Sequence
  Description of Artificial Sequence: Synthetic oligonucleotide
uaucuuugauaaccaaaua

SEQ ID NO: 1417856 - RNA, 19 nt, Artificial Sequence
  Description of Artificial Sequence: Synthetic oligonucleotide
ucaguagcucaucuuuuaa

SEQ ID NO: 1417857 - RNA, 19 nt, Artificial Sequence
  Description of Artificial Sequence: Synthetic oligonucleotide
ggcuuaagaccauuggaag

SEQ ID NO: 1417858 - RNA, 19 nt, Artificial Sequence
  Description of Artificial Sequence: Synthetic oligonucleotide
aagguuaucccaaguuucu

SEQ ID NO: 1417859 - RNA, 19 nt, Artificial Sequence
  Description of Artificial Sequence: Synthetic oligonucleotide
ugccuugugaauccaacuu

SEQ ID NO: 1417860 - RNA, 19 nt, Artificial Sequence
  Description of Artificial Sequence: Synthetic oligonucleotide
uguccauaauccaguuuga

SEQ ID NO: 1417861 - RNA, 19 nt, Artificial Sequence
  Description of Artificial Sequence: Synthetic oligonucleotide
aaucgucugucuguauuug

SEQ ID NO: 1417862 - RNA, 19 nt, Artificial Sequence
  Description of Artificial Sequence: Synthetic oligonucleotide
ccuaaauaauguauauuug

SEQ ID NO: 1417863 - RNA, 19 nt, Artificial Sequence
  Description of Artificial Sequence: Synthetic oligonucleotide
ccuugcaacauugacaaag

SEQ ID NO: 1417864 - RNA, 19 nt, Artificial Sequence
  Description of Artificial Sequence: Synthetic oligonucleotide
gaccuuaaguugcauuuca

SEQ ID NO: 1417865 - RNA, 19 nt, Artificial Sequence
  Description of Artificial Sequence: Synthetic oligonucleotide
ggauuacauaacuucagca

SEQ ID NO: 1417866 - RNA, 19 nt, Artificial Sequence
  Description of Artificial Sequence: Synthetic oligonucleotide
aagcaccuaaauaauguau

SEQ ID NO: 1417867 - RNA, 19 nt, Artificial Sequence
  Description of Artificial Sequence: Synthetic oligonucleotide
gucuuaugaacucuauuaa

SEQ ID NO: 1417868 - RNA, 19 nt, Artificial Sequence
  Description of Artificial Sequence: Synthetic oligonucleotide
uagugcuaauccaacugaa

SEQ ID NO: 1417869 - RNA, 19 nt, Artificial Sequence
  Description of Artificial Sequence: Synthetic oligonucleotide
ugucgauauacagcugaag

SEQ ID NO: 1417870 - RNA, 19 nt, Artificial Sequence
  Description of Artificial Sequence: Synthetic oligonucleotide
caaugcccugaacaaauac

SEQ ID NO: 1417871 - RNA, 19 nt, Artificial Sequence
  Description of Artificial Sequence: Synthetic oligonucleotide
ugguccugcaaaccauuug

SEQ ID NO: 1417872 - RNA, 19 nt, Artificial Sequence
  Description of Artificial Sequence: Synthetic oligonucleotide
auacuagauaugucagaga

SEQ ID NO: 1417873 - RNA, 19 nt, Artificial Sequence
  Description of Artificial Sequence: Synthetic oligonucleotide
gucauuacuuugacuaagc

SEQ ID NO: 1417874 - RNA, 19 nt, Artificial Sequence
  Description of Artificial Sequence: Synthetic oligonucleotide
aguauggaacaggaagaag

SEQ ID NO: 1417875 - RNA, 19 nt, Artificial Sequence
  Description of Artificial Sequence: Synthetic oligonucleotide
uuagggaguuucugaagaa

SEQ ID NO: 1417876 - RNA, 19 nt, Artificial Sequence
  Description of Artificial Sequence: Synthetic oligonucleotide
ugaauaugccuuguuguua

SEQ ID NO: 1417877 - RNA, 19 nt, Artificial Sequence
  Description of Artificial Sequence: Synthetic oligonucleotide
cacguugaggcuacuuggc

SEQ ID NO: 1417878 - RNA, 19 nt, Artificial Sequence
  Description of Artificial Sequence: Synthetic oligonucleotide
aagcuauucuccagaaagu

SEQ ID NO: 1417879 - RNA, 19 nt, Artificial Sequence
  Description of Artificial Sequence: Synthetic oligonucleotide
uugccuugugaauccaacu

SEQ ID NO: 1417880 - RNA, 19 nt, Artificial Sequence
  Description of Artificial Sequence: Synthetic oligonucleotide
ggagaaaauagacuguucu

SEQ ID NO: 1417881 - RNA, 19 nt, Artificial Sequence
  Description of Artificial Sequence: Synthetic oligonucleotide
uuacuuugacuaagcccug

SEQ ID NO: 1417882 - RNA, 19 nt, Artificial Sequence
  Description of Artificial Sequence: Synthetic oligonucleotide
aguacugauaaaggaggcu

SEQ ID NO: 1417883 - RNA, 19 nt, Artificial Sequence
  Description of Artificial Sequence: Synthetic oligonucleotide
gugcuaauccaacugaaua

SEQ ID NO: 1417884 - RNA, 19 nt, Artificial Sequence
  Description of Artificial Sequence: Synthetic oligonucleotide
caccuuuuacacguugagg

SEQ ID NO: 1417885 - RNA, 19 nt, Artificial Sequence
  Description of Artificial Sequence: Synthetic oligonucleotide
gaugggcuuaagaccauug

SEQ ID NO: 1417886 - RNA, 19 nt, Artificial Sequence
  Description of Artificial Sequence: Synthetic oligonucleotide
uagauaugucagagaggcc

SEQ ID NO: 1417887 - RNA, 19 nt, Artificial Sequence
  Description of Artificial Sequence: Synthetic oligonucleotide
auguucagcugcaaaaggu

SEQ ID NO: 1417888 - RNA, 19 nt, Artificial Sequence
  Description of Artificial Sequence: Synthetic oligonucleotide
gacaaaggccauaaucguc

SEQ ID NO: 1417889 - RNA, 19 nt, Artificial Sequence
  Description of Artificial Sequence: Synthetic oligonucleotide
uuggcuuauuuuguuggcu

SEQ ID NO: 1417890 - RNA, 19 nt, Artificial Sequence
  Description of Artificial Sequence: Synthetic oligonucleotide
uucuuaaaugaugcgucaa

SEQ ID NO: 1417891 - RNA, 19 nt, Artificial Sequence
  Description of Artificial Sequence: Synthetic oligonucleotide
caaauagugaaaagagacu

SEQ ID NO: 1417892 - RNA, 19 nt, Artificial Sequence
  Description of Artificial Sequence: Synthetic oligonucleotide
aaugucucaauggggcaaa

SEQ ID NO: 1417893 - RNA, 19 nt, Artificial Sequence
  Description of Artificial Sequence: Synthetic oligonucleotide
cagaggguucuucaaugag

SEQ ID NO: 1417894 - RNA, 19 nt, Artificial Sequence
  Description of Artificial Sequence: Synthetic oligonucleotide
uuccacaccugagugauua

SEQ ID NO: 1417895 - RNA, 19 nt, Artificial Sequence
  Description of Artificial Sequence: Synthetic oligonucleotide
ucaaggaauugugcuguca

SEQ ID NO: 1417896 - RNA, 19 nt, Artificial Sequence
  Description of Artificial Sequence: Synthetic oligonucleotide
aaaggucuuaugaacucua

SEQ ID NO: 1417897 - RNA, 19 nt, Artificial Sequence
  Description of Artificial Sequence: Synthetic oligonucleotide
ucgucugucuguauuuguu

SEQ ID NO: 1417898 - RNA, 19 nt, Artificial Sequence
  Description of Artificial Sequence: Synthetic oligonucleotide
aaaagguaugaugggcuua

SEQ ID NO: 1417899 - RNA, 19 nt, Artificial Sequence
  Description of Artificial Sequence: Synthetic oligonucleotide
gcuaauccaacugaauaug

SEQ ID NO: 1417900 - RNA, 19 nt, Artificial Sequence
  Description of Artificial Sequence: Synthetic oligonucleotide
auaagcuauucuccagaaa

SEQ ID NO: 1417901 - RNA, 19 nt, Artificial Sequence
  Description of Artificial Sequence: Synthetic oligonucleotide
cuugugaauccaacuuguc

SEQ ID NO: 1417902 - RNA, 19 nt, Artificial Sequence
  Description of Artificial Sequence: Synthetic oligonucleotide
agccauaauccuaucugag

SEQ ID NO: 1417903 - RNA, 19 nt, Artificial Sequence
  Description of Artificial Sequence: Synthetic oligonucleotide
aguugacuccaaagggugg

SEQ ID NO: 1417904 - RNA, 19 nt, Artificial Sequence
  Description of Artificial Sequence: Synthetic oligonucleotide
auuuuggggacaggauguc

SEQ ID NO: 1417905 - RNA, 19 nt, Artificial Sequence
  Description of Artificial Sequence: Synthetic oligonucleotide
agcaccuaaauaauguaua

SEQ ID NO: 1417906 - RNA, 19 nt, Artificial Sequence
  Description of Artificial Sequence: Synthetic oligonucleotide
cccaacaacaauuccuuug

SEQ ID NO: 1417907 - RNA, 19 nt, Artificial Sequence
  Description of Artificial Sequence: Synthetic oligonucleotide
auccuaucugaguucugca

SEQ ID NO: 1417908 - RNA, 19 nt, Artificial Sequence
  Description of Artificial Sequence: Synthetic oligonucleotide
aggguggauagugcuaauc

SEQ ID NO: 1417909 - RNA, 19 nt, Artificial Sequence
  Description of Artificial Sequence: Synthetic oligonucleotide
aggguucuucaaugaguuc

SEQ ID NO: 1417910 - RNA, 19 nt, Artificial Sequence
  Description of Artificial Sequence: Synthetic oligonucleotide
uaauccuaucugaguucug

SEQ ID NO: 1417911 - RNA, 19 nt, Artificial Sequence
  Description of Artificial Sequence: Synthetic oligonucleotide
gaagcugaccaauaccaau

SEQ ID NO: 1417912 - RNA, 19 nt, Artificial Sequence
  Description of Artificial Sequence: Synthetic oligonucleotide
agacuugaauguaggaccu

SEQ ID NO: 1417913 - RNA, 19 nt, Artificial Sequence
  Description of Artificial Sequence: Synthetic oligonucleotide
ucuguccauaauccaguuu

SEQ ID NO: 1417914 - RNA, 19 nt, Artificial Sequence
  Description of Artificial Sequence: Synthetic oligonucleotide
aucgucugucuguauuugu

SEQ ID NO: 1417915 - RNA, 19 nt, Artificial Sequence
  Description of Artificial Sequence: Synthetic oligonucleotide
gcauacuaggaauuucuuc

SEQ ID NO: 1417916 - RNA, 19 nt, Artificial Sequence
  Description of Artificial Sequence: Synthetic oligonucleotide
uaggaccuuaaguugcauu

SEQ ID NO: 1417917 - RNA, 19 nt, Artificial Sequence
  Description of Artificial Sequence: Synthetic oligonucleotide
acguugaggcuacuuggcu

SEQ ID NO: 1417918 - RNA, 19 nt, Artificial Sequence
  Description of Artificial Sequence: Synthetic oligonucleotide
uggggcaaagugucauuac

SEQ ID NO: 1417919 - RNA, 19 nt, Artificial Sequence
  Description of Artificial Sequence: Synthetic oligonucleotide
gaccaauaccaaugcccug

SEQ ID NO: 1417920 - RNA, 19 nt, Artificial Sequence
  Description of Artificial Sequence: Synthetic oligonucleotide
gguggauagugcuaaucca

SEQ ID NO: 1417921 - RNA, 19 nt, Artificial Sequence
  Description of Artificial Sequence: Synthetic oligonucleotide
gccuugugaauccaacuug

SEQ ID NO: 1417922 - RNA, 19 nt, Artificial Sequence
  Description of Artificial Sequence: Synthetic oligonucleotide
gaguauggaacaggaagaa

SEQ ID NO: 1417923 - RNA, 19 nt, Artificial Sequence
  Description of Artificial Sequence: Synthetic oligonucleotide
acaccgaaaagggucauuu

SEQ ID NO: 1417924 - RNA, 19 nt, Artificial Sequence
  Description of Artificial Sequence: Synthetic oligonucleotide
uacauaacuucagcagcaa

SEQ ID NO: 1417925 - RNA, 19 nt, Artificial Sequence
  Description of Artificial Sequence: Synthetic oligonucleotide
aguccuauaugaaguggcu

SEQ ID NO: 1417926 - RNA, 19 nt, Artificial Sequence
  Description of Artificial Sequence: Synthetic oligonucleotide
acuugaauguaggaccuua

SEQ ID NO: 1417927 - RNA, 19 nt, Artificial Sequence
  Description of Artificial Sequence: Synthetic oligonucleotide
cuugaauguaggaccuuaa

SEQ ID NO: 1417928 - RNA, 19 nt, Artificial Sequence
  Description of Artificial Sequence: Synthetic oligonucleotide
ugucucaauggggcaaagu

SEQ ID NO: 1417929 - RNA, 19 nt, Artificial Sequence
  Description of Artificial Sequence: Synthetic oligonucleotide
aaggucuuaugaacucuau

SEQ ID NO: 1417930 - RNA, 19 nt, Artificial Sequence
  Description of Artificial Sequence: Synthetic oligonucleotide
uaccaaugcccugaacaaa

SEQ ID NO: 1417931 - RNA, 19 nt, Artificial Sequence
  Description of Artificial Sequence: Synthetic oligonucleotide
aggccauaaucgucugucu

SEQ ID NO: 1417932 - RNA, 19 nt, Artificial Sequence
  Description of Artificial Sequence: Synthetic oligonucleotide
gcccugaacaaauacuaga

SEQ ID NO: 1417933 - RNA, 19 nt, Artificial Sequence
  Description of Artificial Sequence: Synthetic oligonucleotide
gugucauuacuuugacuaa

SEQ ID NO: 1417934 - RNA, 19 nt, Artificial Sequence
  Description of Artificial Sequence: Synthetic oligonucleotide
gauaaccaaauaccucaau

SEQ ID NO: 1417935 - RNA, 19 nt, Artificial Sequence
  Description of Artificial Sequence: Synthetic oligonucleotide
aguugcauuucaggaggca

SEQ ID NO: 1417936 - RNA, 19 nt, Artificial Sequence
  Description of Artificial Sequence: Synthetic oligonucleotide
agaaaacucuuaaucucua

SEQ ID NO: 1417937 - RNA, 19 nt, Artificial Sequence
  Description of Artificial Sequence: Synthetic oligonucleotide
cacccucagggagaaacag

SEQ ID NO: 1417938 - RNA, 19 nt, Artificial Sequence
  Description of Artificial Sequence: Synthetic oligonucleotide
cuuuuacacguugaggcua

SEQ ID NO: 1417939 - RNA, 19 nt, Artificial Sequence
  Description of Artificial Sequence: Synthetic oligonucleotide
ccauguucagcugcaaaag

SEQ ID NO: 1417940 - RNA, 19 nt, Artificial Sequence
  Description of Artificial Sequence: Synthetic oligonucleotide
gcugaccaauaccaaugcc

SEQ ID NO: 1417941 - RNA, 19 nt, Artificial Sequence
  Description of Artificial Sequence: Synthetic oligonucleotide
caccgaaaagggucauuuc

SEQ ID NO: 1417942 - RNA, 19 nt, Artificial Sequence
  Description of Artificial Sequence: Synthetic oligonucleotide
aaggguggauagugcuaau

SEQ ID NO: 1417943 - RNA, 19 nt, Artificial Sequence
  Description of Artificial Sequence: Synthetic oligonucleotide
auagacuguucuguucuuu

SEQ ID NO: 1417944 - RNA, 19 nt, Artificial Sequence
  Description of Artificial Sequence: Synthetic oligonucleotide
ccaccuacagucacagaac

SEQ ID NO: 1417945 - RNA, 19 nt, Artificial Sequence
  Description of Artificial Sequence: Synthetic oligonucleotide
auaccucaauaaauucagu

SEQ ID NO: 1417946 - RNA, 19 nt, Artificial Sequence
  Description of Artificial Sequence: Synthetic oligonucleotide
gggcuuaagaccauuggaa

SEQ ID NO: 1417947 - RNA, 19 nt, Artificial Sequence
  Description of Artificial Sequence: Synthetic oligonucleotide
aaacaccgaaaagggucau

SEQ ID NO: 1417948 - RNA, 19 nt, Artificial Sequence
  Description of Artificial Sequence: Synthetic oligonucleotide
caaaggguggauagugcua

SEQ ID NO: 1417949 - RNA, 19 nt, Artificial Sequence
  Description of Artificial Sequence: Synthetic oligonucleotide
gcuauucuccagaaaguuc

SEQ ID NO: 1417950 - RNA, 19 nt, Artificial Sequence
  Description of Artificial Sequence: Synthetic oligonucleotide
uccacaccugagugauuac

SEQ ID NO: 1417951 - RNA, 19 nt, Artificial Sequence
  Description of Artificial Sequence: Synthetic oligonucleotide
cugccaguuguuugucguc

SEQ ID NO: 1417952 - RNA, 19 nt, Artificial Sequence
  Description of Artificial Sequence: Synthetic oligonucleotide
uuacacguugaggcuacuu

SEQ ID NO: 1417953 - RNA, 19 nt, Artificial Sequence
  Description of Artificial Sequence: Synthetic oligonucleotide
auggggcaaagugucauua

SEQ ID NO: 1417954 - RNA, 19 nt, Artificial Sequence
  Description of Artificial Sequence: Synthetic oligonucleotide
caacaacaauuccuuugga

SEQ ID NO: 1417955 - RNA, 19 nt, Artificial Sequence
  Description of Artificial Sequence: Synthetic oligonucleotide
ccgaaaagggucauuucca

SEQ ID NO: 1417956 - RNA, 19 nt, Artificial Sequence
  Description of Artificial Sequence: Synthetic oligonucleotide
gaggcugcugucuucuaau

SEQ ID NO: 1417957 - RNA, 19 nt, Artificial Sequence
  Description of Artificial Sequence: Synthetic oligonucleotide
cugaauaugccuuguuguu

SEQ ID NO: 1417958 - RNA, 19 nt, Artificial Sequence
  Description of Artificial Sequence: Synthetic oligonucleotide
ggaauugugcugucagcaa

SEQ ID NO: 1417959 - RNA, 19 nt, Artificial Sequence
  Description of Artificial Sequence: Synthetic oligonucleotide
cuaaucucaauaagcuauu

SEQ ID NO: 1417960 - RNA, 19 nt, Artificial Sequence
  Description of Artificial Sequence: Synthetic oligonucleotide
ccacaaaaggucuuaugaa

SEQ ID NO: 1417961 - RNA, 19 nt, Artificial Sequence
  Description of Artificial Sequence: Synthetic oligonucleotide
accugagugauuacuugua

SEQ ID NO: 1417962 - RNA, 19 nt, Artificial Sequence
  Description of Artificial Sequence: Synthetic oligonucleotide
gugauuacuuguauuuaau

SEQ ID NO: 1417963 - RNA, 19 nt, Artificial Sequence
  Description of Artificial Sequence: Synthetic oligonucleotide
cuauaugaaguggcuuuaa

SEQ ID NO: 1417964 - RNA, 19 nt, Artificial Sequence
  Description of Artificial Sequence: Synthetic oligonucleotide
gcaaaccauuuguuauaug

SEQ ID NO: 1417965 - RNA, 19 nt, Artificial Sequence
  Description of Artificial Sequence: Synthetic oligonucleotide
gugaauccaacuugucgau

SEQ ID NO: 1417966 - RNA, 19 nt, Artificial Sequence
  Description of Artificial Sequence: Synthetic oligonucleotide
ggauagugcuaauccaacu

SEQ ID NO: 1417967 - RNA, 19 nt, Artificial Sequence
  Description of Artificial Sequence: Synthetic oligonucleotide
uuuacacguugaggcuacu

SEQ ID NO: 1417968 - RNA, 19 nt, Artificial Sequence
  Description of Artificial Sequence: Synthetic oligonucleotide
guaccaaguccaacagaga

SEQ ID NO: 1417969 - RNA, 19 nt, Artificial Sequence
  Description of Artificial Sequence: Synthetic oligonucleotide
caaaagguaugaugggcuu

SEQ ID NO: 1417970 - RNA, 19 nt, Artificial Sequence
  Description of Artificial Sequence: Synthetic oligonucleotide
ggggcaaagugucauuacu

SEQ ID NO: 1417971 - RNA, 19 nt, Artificial Sequence
  Description of Artificial Sequence: Synthetic oligonucleotide
acccucagggagaaacagu

SEQ ID NO: 1417972 - RNA, 19 nt, Artificial Sequence
  Description of Artificial Sequence: Synthetic oligonucleotide
ggaccuuaaguugcauuuc

SEQ ID NO: 1417973 - RNA, 19 nt, Artificial Sequence
  Description of Artificial Sequence: Synthetic oligonucleotide
cacaccugagugauuacuu

SEQ ID NO: 1417974 - RNA, 19 nt, Artificial Sequence
  Description of Artificial Sequence: Synthetic oligonucleotide
caauuacuucuuccacaaa

SEQ ID NO: 1417975 - RNA, 19 nt, Artificial Sequence
  Description of Artificial Sequence: Synthetic oligonucleotide
cagcaagaaaacucuuaau

SEQ ID NO: 1417976 - RNA, 19 nt, Artificial Sequence
  Description of Artificial Sequence: Synthetic oligonucleotide
cccugaacaaauacuagau

SEQ ID NO: 1417977 - RNA, 19 nt, Artificial Sequence
  Description of Artificial Sequence: Synthetic oligonucleotide
cuaagcccugaggcacagc

SEQ ID NO: 1417978 - RNA, 19 nt, Artificial Sequence
  Description of Artificial Sequence: Synthetic oligonucleotide
uugaggcuacuuggcuuau

SEQ ID NO: 1417979 - RNA, 19 nt, Artificial Sequence
  Description of Artificial Sequence: Synthetic oligonucleotide
augaugcgucaaucugauu

SEQ ID NO: 1417980 - RNA, 19 nt, Artificial Sequence
  Description of Artificial Sequence: Synthetic oligonucleotide
ugaggcuacuuggcuuauu

SEQ ID NO: 1417981 - RNA, 19 nt, Artificial Sequence
  Description of Artificial Sequence: Synthetic oligonucleotide
guccauaauccaguuugau

SEQ ID NO: 1417982 - RNA, 19 nt, Artificial Sequence
  Description of Artificial Sequence: Synthetic oligonucleotide
aggggcauuucaagcuuuu

SEQ ID NO: 1417983 - RNA, 19 nt, Artificial Sequence
  Description of Artificial Sequence: Synthetic oligonucleotide
gcugucuucuaaucucaau

SEQ ID NO: 1417984 - RNA, 19 nt, Artificial Sequence
  Description of Artificial Sequence: Synthetic oligonucleotide
caacugaauaugccuuguu

SEQ ID NO: 1417985 - RNA, 19 nt, Artificial Sequence
  Description of Artificial Sequence: Synthetic oligonucleotide
cuccaccuacagucacaga

SEQ ID NO: 1417986 - RNA, 19 nt, Artificial Sequence
  Description of Artificial Sequence: Synthetic oligonucleotide
ccauaaucgucugucugua

SEQ ID NO: 1417987 - RNA, 19 nt, Artificial Sequence
  Description of Artificial Sequence: Synthetic oligonucleotide
ggaggcauacuaggaauuu

SEQ ID NO: 1417988 - RNA, 19 nt, Artificial Sequence
  Description of Artificial Sequence: Synthetic oligonucleotide
gacuugaauguaggaccuu

SEQ ID NO: 1417989 - RNA, 19 nt, Artificial Sequence
  Description of Artificial Sequence: Synthetic oligonucleotide
ccugagugauuacuuguau

SEQ ID NO: 1417990 - RNA, 19 nt, Artificial Sequence
  Description of Artificial Sequence: Synthetic oligonucleotide
guaggaccuuaaguugcau

SEQ ID NO: 1417991 - RNA, 19 nt, Artificial Sequence
  Description of Artificial Sequence: Synthetic oligonucleotide
ccaacugaauaugccuugu

SEQ ID NO: 1417992 - RNA, 19 nt, Artificial Sequence
  Description of Artificial Sequence: Synthetic oligonucleotide
aaacauacgaauccaauac

SEQ ID NO: 1417993 - RNA, 19 nt, Artificial Sequence
  Description of Artificial Sequence: Synthetic oligonucleotide
agaacuuaguucuucaucc

SEQ ID NO: 1417994 - RNA, 19 nt, Artificial Sequence
  Description of Artificial Sequence: Synthetic oligonucleotide
aauaucacaaucaugaucu

SEQ ID NO: 1417995 - RNA, 19 nt, Artificial Sequence
  Description of Artificial Sequence: Synthetic oligonucleotide
auagcgaugacauugacag

SEQ ID NO: 1417996 - RNA, 19 nt, Artificial Sequence
  Description of Artificial Sequence: Synthetic oligonucleotide
aaauaucacaaucaugauc

SEQ ID NO: 1417997 - RNA, 19 nt, Artificial Sequence
  Description of Artificial Sequence: Synthetic oligonucleotide
gacauugacagucugacgg

SEQ ID NO: 1417998 - RNA, 19 nt, Artificial Sequence
  Description of Artificial Sequence: Synthetic oligonucleotide
aauaacuuauucuggguuc

SEQ ID NO: 1417999 - RNA, 19 nt, Artificial Sequence
  Description of Artificial Sequence: Synthetic oligonucleotide
ucgucauugaacuaguagg

SEQ ID NO: 1418000 - RNA, 19 nt, Artificial Sequence
  Description of Artificial Sequence: Synthetic oligonucleotide
uuuuaaucgucauugaacu

SEQ ID NO: 1418001 - RNA, 19 nt, Artificial Sequence
  Description of Artificial Sequence: Synthetic oligonucleotide
gagaucuuuguacauagcg

SEQ ID NO: 1418002 - RNA, 19 nt, Artificial Sequence
  Description of Artificial Sequence: Synthetic oligonucleotide
auuuagaaucuguuuauac

SEQ ID NO: 1418003 - RNA, 19 nt, Artificial Sequence
  Description of Artificial Sequence: Synthetic oligonucleotide
uuuaacacuugaaugauaa

SEQ ID NO: 1418004 - RNA, 19 nt, Artificial Sequence
  Description of Artificial Sequence: Synthetic oligonucleotide
uguaggagguauuuggugg

SEQ ID NO: 1418005 - RNA, 19 nt, Artificial Sequence
  Description of Artificial Sequence: Synthetic oligonucleotide
auauuauugauucaaaaua

SEQ ID NO: 1418006 - RNA, 19 nt, Artificial Sequence
  Description of Artificial Sequence: Synthetic oligonucleotide
ugcaauaacuuauucuggg

SEQ ID NO: 1418007 - RNA, 19 nt, Artificial Sequence
  Description of Artificial Sequence: Synthetic oligonucleotide
uauacaguggggcuguggg

SEQ ID NO: 1418008 - RNA, 19 nt, Artificial Sequence
  Description of Artificial Sequence: Synthetic oligonucleotide
auuuagcccagucaguccc

SEQ ID NO: 1418009 - RNA, 19 nt, Artificial Sequence
  Description of Artificial Sequence: Synthetic oligonucleotide
uuaaucgucauugaacuag

SEQ ID NO: 1418010 - RNA, 19 nt, Artificial Sequence
  Description of Artificial Sequence: Synthetic oligonucleotide
aaagauagugucuucaaua

SEQ ID NO: 1418011 - RNA, 19 nt, Artificial Sequence
  Description of Artificial Sequence: Synthetic oligonucleotide
aacgcacagggauuguucc

SEQ ID NO: 1418012 - RNA, 19 nt, Artificial Sequence
  Description of Artificial Sequence: Synthetic oligonucleotide
ugcaacaaauuuuauuuag

SEQ ID NO: 1418013 - RNA, 19 nt, Artificial Sequence
  Description of Artificial Sequence: Synthetic oligonucleotide
uguauuaccucuguaacgc

SEQ ID NO: 1418014 - RNA, 19 nt, Artificial Sequence
  Description of Artificial Sequence: Synthetic oligonucleotide
uguaugguggguaggaugc

SEQ ID NO: 1418015 - RNA, 19 nt, Artificial Sequence
  Description of Artificial Sequence: Synthetic oligonucleotide
uauugauucaaaauauuua

SEQ ID NO: 1418016 - RNA, 19 nt, Artificial Sequence
  Description of Artificial Sequence: Synthetic oligonucleotide
auauuauauguauuaccuc

SEQ ID NO: 1418017 - RNA, 19 nt, Artificial Sequence
  Description of Artificial Sequence: Synthetic oligonucleotide
aggucuauuacuccccgcc

SEQ ID NO: 1418018 - RNA, 19 nt, Artificial Sequence
  Description of Artificial Sequence: Synthetic oligonucleotide
uggaauauuauauguauua

SEQ ID NO: 1418019 - RNA, 19 nt, Artificial Sequence
  Description of Artificial Sequence: Synthetic oligonucleotide
auacgaauccaauacaggu

SEQ ID NO: 1418020 - RNA, 19 nt, Artificial Sequence
  Description of Artificial Sequence: Synthetic oligonucleotide
ucuguuuauacaguggggc

SEQ ID NO: 1418021 - RNA, 19 nt, Artificial Sequence
  Description of Artificial Sequence: Synthetic oligonucleotide
cauauuggaauauuauaug

SEQ ID NO: 1418022 - RNA, 19 nt, Artificial Sequence
  Description of Artificial Sequence: Synthetic oligonucleotide
gauagugucuucaauagca

SEQ ID NO: 1418023 - RNA, 19 nt, Artificial Sequence
  Description of Artificial Sequence: Synthetic oligonucleotide
uuuaggaagaggucuaccu

SEQ ID NO: 1418024 - RNA, 19 nt, Artificial Sequence
  Description of Artificial Sequence: Synthetic oligonucleotide
gacgggagaauacuggagg

SEQ ID NO: 1418025 - RNA, 19 nt, Artificial Sequence
  Description of Artificial Sequence: Synthetic oligonucleotide
cauaagugcccucagcugg

SEQ ID NO: 1418026 - RNA, 19 nt, Artificial Sequence
  Description of Artificial Sequence: Synthetic oligonucleotide
aauuaugcaacaaauuuua

SEQ ID NO: 1418027 - RNA, 19 nt, Artificial Sequence
  Description of Artificial Sequence: Synthetic oligonucleotide
agauaaggaagguagauuu

SEQ ID NO: 1418028 - RNA, 19 nt, Artificial Sequence
  Description of Artificial Sequence: Synthetic oligonucleotide
auguauuaccucuguaacg

SEQ ID NO: 1418029 - RNA, 19 nt, Artificial Sequence
  Description of Artificial Sequence: Synthetic oligonucleotide
ccaaauaucacaaucauga

SEQ ID NO: 1418030 - RNA, 19 nt, Artificial Sequence
  Description of Artificial Sequence: Synthetic oligonucleotide
ugcagaaauagugggacgg

SEQ ID NO: 1418031 - RNA, 19 nt, Artificial Sequence
  Description of Artificial Sequence: Synthetic oligonucleotide
gauuguuccagugagguuc

SEQ ID NO: 1418032 - RNA, 19 nt, Artificial Sequence
  Description of Artificial Sequence: Synthetic oligonucleotide
aggaugcagaaauaguggg

SEQ ID NO: 1418033 - RNA, 19 nt, Artificial Sequence
  Description of Artificial Sequence: Synthetic oligonucleotide
agauagugucuucaauagc

SEQ ID NO: 1418034 - RNA, 19 nt, Artificial Sequence
  Description of Artificial Sequence: Synthetic oligonucleotide
ucccagauaaaagauagug

SEQ ID NO: 1418035 - RNA, 19 nt, Artificial Sequence
  Description of Artificial Sequence: Synthetic oligonucleotide
aacauacgaauccaauaca

SEQ ID NO: 1418036 - RNA, 19 nt, Artificial Sequence
  Description of Artificial Sequence: Synthetic oligonucleotide
auuacuccccgccucaagg

SEQ ID NO: 1418037 - RNA, 19 nt, Artificial Sequence
  Description of Artificial Sequence: Synthetic oligonucleotide
auccaggucuauuacuccc

SEQ ID NO: 1418038 - RNA, 19 nt, Artificial Sequence
  Description of Artificial Sequence: Synthetic oligonucleotide
uccguuucaaggcauugag

SEQ ID NO: 1418039 - RNA, 19 nt, Artificial Sequence
  Description of Artificial Sequence: Synthetic oligonucleotide
uaguagguuucacaaaaca

SEQ ID NO: 1418040 - RNA, 19 nt, Artificial Sequence
  Description of Artificial Sequence: Synthetic oligonucleotide
cauacgaauccaauacagg

SEQ ID NO: 1418041 - RNA, 19 nt, Artificial Sequence
  Description of Artificial Sequence: Synthetic oligonucleotide
uguuuuaaucgucauugaa

SEQ ID NO: 1418042 - RNA, 19 nt, Artificial Sequence
  Description of Artificial Sequence: Synthetic oligonucleotide
aaaagauagugucuucaau

SEQ ID NO: 1418043 - RNA, 19 nt, Artificial Sequence
  Description of Artificial Sequence: Synthetic oligonucleotide
agugcauuaauaaaagcca

SEQ ID NO: 1418044 - RNA, 19 nt, Artificial Sequence
  Description of Artificial Sequence: Synthetic oligonucleotide
agacugauuuuccauuuuc

SEQ ID NO: 1418045 - RNA, 19 nt, Artificial Sequence
  Description of Artificial Sequence: Synthetic oligonucleotide
guuuuaaucgucauugaac

SEQ ID NO: 1418046 - RNA, 19 nt, Artificial Sequence
  Description of Artificial Sequence: Synthetic oligonucleotide
guacauagcgaugacauug

SEQ ID NO: 1418047 - RNA, 19 nt, Artificial Sequence
  Description of Artificial Sequence: Synthetic oligonucleotide
aauaagcuccagcaacucu

SEQ ID NO: 1418048 - RNA, 19 nt, Artificial Sequence
  Description of Artificial Sequence: Synthetic oligonucleotide
guaggaugcagaaauagug

SEQ ID NO: 1418049 - RNA, 19 nt, Artificial Sequence
  Description of Artificial Sequence: Synthetic oligonucleotide
uuuaucaacuucagcgacu

SEQ ID NO: 1418050 - RNA, 19 nt, Artificial Sequence
  Description of Artificial Sequence: Synthetic oligonucleotide
gaugcagaaauagugggac

SEQ ID NO: 1418051 - RNA, 19 nt, Artificial Sequence
  Description of Artificial Sequence: Synthetic oligonucleotide
uguagauaaggaagguaga

SEQ ID NO: 1418052 - RNA, 19 nt, Artificial Sequence
  Description of Artificial Sequence: Synthetic oligonucleotide
aguagguuucacaaaacag

SEQ ID NO: 1418053 - RNA, 19 nt, Artificial Sequence
  Description of Artificial Sequence: Synthetic oligonucleotide
aucucaguuugucacugac

SEQ ID NO: 1418054 - RNA, 19 nt, Artificial Sequence
  Description of Artificial Sequence: Synthetic oligonucleotide
uggguucuacugaugagag

SEQ ID NO: 1418055 - RNA, 19 nt, Artificial Sequence
  Description of Artificial Sequence: Synthetic oligonucleotide
uauuuguacuuggacauca

SEQ ID NO: 1418056 - RNA, 19 nt, Artificial Sequence
  Description of Artificial Sequence: Synthetic oligonucleotide
uuuauuuagcccagucagu

SEQ ID NO: 1418057 - RNA, 19 nt, Artificial Sequence
  Description of Artificial Sequence: Synthetic oligonucleotide
uagauuuucccauuugcau

SEQ ID NO: 1418058 - RNA, 19 nt, Artificial Sequence
  Description of Artificial Sequence: Synthetic oligonucleotide
aggauaagcacugggauug

SEQ ID NO: 1418059 - RNA, 19 nt, Artificial Sequence
  Description of Artificial Sequence: Synthetic oligonucleotide
acgggagaauacuggaggc

SEQ ID NO: 1418060 - RNA, 19 nt, Artificial Sequence
  Description of Artificial Sequence: Synthetic oligonucleotide
gaacuaguagguuucacaa

SEQ ID NO: 1418061 - RNA, 19 nt, Artificial Sequence
  Description of Artificial Sequence: Synthetic oligonucleotide
ucagucccaacacagcaca

SEQ ID NO: 1418062 - RNA, 19 nt, Artificial Sequence
  Description of Artificial Sequence: Synthetic oligonucleotide
aauccaauacagguuugag

SEQ ID NO: 1418063 - RNA, 19 nt, Artificial Sequence
  Description of Artificial Sequence: Synthetic oligonucleotide
uaagcggguaaccaucucu

SEQ ID NO: 1418064 - RNA, 19 nt, Artificial Sequence
  Description of Artificial Sequence: Synthetic oligonucleotide
gauggauaugcggagauuc

SEQ ID NO: 1418065 - RNA, 19 nt, Artificial Sequence
  Description of Artificial Sequence: Synthetic oligonucleotide
uagaucucuguauuuguac

SEQ ID NO: 1418066 - RNA, 19 nt, Artificial Sequence
  Description of Artificial Sequence: Synthetic oligonucleotide
ucauugaacuaguagguuu

SEQ ID NO: 1418067 - RNA, 19 nt, Artificial Sequence
  Description of Artificial Sequence: Synthetic oligonucleotide
uuauuuagcccagucaguc

SEQ ID NO: 1418068 - RNA, 19 nt, Artificial Sequence
  Description of Artificial Sequence: Synthetic oligonucleotide
agauuuagaaucuguuuau

SEQ ID NO: 1418069 - RNA, 19 nt, Artificial Sequence
  Description of Artificial Sequence: Synthetic oligonucleotide
uauuaccucuguaacgcac

SEQ ID NO: 1418070 - RNA, 19 nt, Artificial Sequence
  Description of Artificial Sequence: Synthetic oligonucleotide
ucuauuacuccccgccuca

SEQ ID NO: 1418071 - RNA, 19 nt, Artificial Sequence
  Description of Artificial Sequence: Synthetic oligonucleotide
uuuugcauaagugcccuca

SEQ ID NO: 1418072 - RNA, 19 nt, Artificial Sequence
  Description of Artificial Sequence: Synthetic oligonucleotide
cauugaacuaguagguuuc

SEQ ID NO: 1418073 - RNA, 19 nt, Artificial Sequence
  Description of Artificial Sequence: Synthetic oligonucleotide
uggaagucaguagagguca

SEQ ID NO: 1418074 - RNA, 19 nt, Artificial Sequence
  Description of Artificial Sequence: Synthetic oligonucleotide
ucuaccuccagccgagucu

SEQ ID NO: 1418075 - RNA, 19 nt, Artificial Sequence
  Description of Artificial Sequence: Synthetic oligonucleotide
acauacgaauccaauacag

SEQ ID NO: 1418076 - RNA, 19 nt, Artificial Sequence
  Description of Artificial Sequence: Synthetic oligonucleotide
agcacagaaagcuuacaga

SEQ ID NO: 1418077 - RNA, 19 nt, Artificial Sequence
  Description of Artificial Sequence: Synthetic oligonucleotide
aguuagaucucuguauuug

SEQ ID NO: 1418078 - RNA, 19 nt, Artificial Sequence
  Description of Artificial Sequence: Synthetic oligonucleotide
guagguuucacaaaacaga

SEQ ID NO: 1418079 - RNA, 19 nt, Artificial Sequence
  Description of Artificial Sequence: Synthetic oligonucleotide
gaagaggucuaccuccagc

SEQ ID NO: 1418080 - RNA, 19 nt, Artificial Sequence
  Description of Artificial Sequence: Synthetic oligonucleotide
cccauuugcauccacaugc

SEQ ID NO: 1418081 - RNA, 19 nt, Artificial Sequence
  Description of Artificial Sequence: Synthetic oligonucleotide
uacauagcgaugacauuga

SEQ ID NO: 1418082 - RNA, 19 nt, Artificial Sequence
  Description of Artificial Sequence: Synthetic oligonucleotide
uuauauggguaugugucca

SEQ ID NO: 1418083 - RNA, 19 nt, Artificial Sequence
  Description of Artificial Sequence: Synthetic oligonucleotide
uauuuagcccagucagucc

SEQ ID NO: 1418084 - RNA, 19 nt, Artificial Sequence
  Description of Artificial Sequence: Synthetic oligonucleotide
gaaauagugggacgggaga

SEQ ID NO: 1418085 - RNA, 19 nt, Artificial Sequence
  Description of Artificial Sequence: Synthetic oligonucleotide
agucagucccaacacagca

SEQ ID NO: 1418086 - RNA, 19 nt, Artificial Sequence
  Description of Artificial Sequence: Synthetic oligonucleotide
cugacggacaguuagaucu

SEQ ID NO: 1418087 - RNA, 19 nt, Artificial Sequence
  Description of Artificial Sequence: Synthetic oligonucleotide
cagucugacggacaguuag

SEQ ID NO: 1418088 - RNA, 19 nt, Artificial Sequence
  Description of Artificial Sequence: Synthetic oligonucleotide
auaagcuccagcaacucug

SEQ ID NO: 1418089 - RNA, 19 nt, Artificial Sequence
  Description of Artificial Sequence: Synthetic oligonucleotide
acgaauccaauacagguuu

SEQ ID NO: 1418090 - RNA, 19 nt, Artificial Sequence
  Description of Artificial Sequence: Synthetic oligonucleotide
ugaucuaagcggguaacca

SEQ ID NO: 1418091 - RNA, 19 nt, Artificial Sequence
  Description of Artificial Sequence: Synthetic oligonucleotide
ugacauugacagucugacg

SEQ ID NO: 1418092 - RNA, 19 nt, Artificial Sequence
  Description of Artificial Sequence: Synthetic oligonucleotide
uaaucgucauugaacuagu

SEQ ID NO: 1418093 - RNA, 19 nt, Artificial Sequence
  Description of Artificial Sequence: Synthetic oligonucleotide
auguaggagguauuuggug

SEQ ID NO: 1418094 - RNA, 19 nt, Artificial Sequence
  Description of Artificial Sequence: Synthetic oligonucleotide
ucuugaucuaagcggguaa

SEQ ID NO: 1418095 - RNA, 19 nt, Artificial Sequence
  Description of Artificial Sequence: Synthetic oligonucleotide
ucuaagcggguaaccaucu

SEQ ID NO: 1418096 - RNA, 19 nt, Artificial Sequence
  Description of Artificial Sequence: Synthetic oligonucleotide
uacgaauccaauacagguu

SEQ ID NO: 1418097 - RNA, 19 nt, Artificial Sequence
  Description of Artificial Sequence: Synthetic oligonucleotide
uauauggguauguguccag

SEQ ID NO: 1418098 - RNA, 19 nt, Artificial Sequence
  Description of Artificial Sequence: Synthetic oligonucleotide
cagggauuguuccagugag

SEQ ID NO: 1418099 - RNA, 19 nt, Artificial Sequence
  Description of Artificial Sequence: Synthetic oligonucleotide
cuacugaugagagaaagga

SEQ ID NO: 1418100 - RNA, 19 nt, Artificial Sequence
  Description of Artificial Sequence: Synthetic oligonucleotide
ccuguuuuaaucgucauug

SEQ ID NO: 1418101 - RNA, 19 nt, Artificial Sequence
  Description of Artificial Sequence: Synthetic oligonucleotide
aacuaguagguuucacaaa

SEQ ID NO: 1418102 - RNA, 19 nt, Artificial Sequence
  Description of Artificial Sequence: Synthetic oligonucleotide
cagauuuagaaucuguuua

SEQ ID NO: 1418103 - RNA, 19 nt, Artificial Sequence
  Description of Artificial Sequence: Synthetic oligonucleotide
uccaggucuauuacucccc

SEQ ID NO: 1418104 - RNA, 19 nt, Artificial Sequence
  Description of Artificial Sequence: Synthetic oligonucleotide
accgacaguggucacagga

SEQ ID NO: 1418105 - RNA, 19 nt, Artificial Sequence
  Description of Artificial Sequence: Synthetic oligonucleotide
uguuuccgggacaggaggc

SEQ ID NO: 1418106 - RNA, 19 nt, Artificial Sequence
  Description of Artificial Sequence: Synthetic oligonucleotide
ugaccguggauguuuccag

SEQ ID NO: 1418107 - RNA, 19 nt, Artificial Sequence
  Description of Artificial Sequence: Synthetic oligonucleotide
aaauagugggacgggagaa

SEQ ID NO: 1418108 - RNA, 19 nt, Artificial Sequence
  Description of Artificial Sequence: Synthetic oligonucleotide
agaaauagugggacgggag

SEQ ID NO: 1418109 - RNA, 19 nt, Artificial Sequence
  Description of Artificial Sequence: Synthetic oligonucleotide
uauuacuccccgccucaag

SEQ ID NO: 1418110 - RNA, 19 nt, Artificial Sequence
  Description of Artificial Sequence: Synthetic oligonucleotide
ugagaucuuuguacauagc

SEQ ID NO: 1418111 - RNA, 19 nt, Artificial Sequence
  Description of Artificial Sequence: Synthetic oligonucleotide
accguggauguuuccaguc

SEQ ID NO: 1418112 - RNA, 19 nt, Artificial Sequence
  Description of Artificial Sequence: Synthetic oligonucleotide
uuauacaguggggcugugg

SEQ ID NO: 1418113 - RNA, 19 nt, Artificial Sequence
  Description of Artificial Sequence: Synthetic oligonucleotide
auggauaugcggagauucc

SEQ ID NO: 1418114 - RNA, 19 nt, Artificial Sequence
  Description of Artificial Sequence: Synthetic oligonucleotide
agaucuuuguacauagcga

SEQ ID NO: 1418115 - RNA, 19 nt, Artificial Sequence
  Description of Artificial Sequence: Synthetic oligonucleotide
uagcauuuuccucugcaua

SEQ ID NO: 1418116 - RNA, 19 nt, Artificial Sequence
  Description of Artificial Sequence: Synthetic oligonucleotide
aucuaagcggguaaccauc

SEQ ID NO: 1418117 - RNA, 19 nt, Artificial Sequence
  Description of Artificial Sequence: Synthetic oligonucleotide
uaacgcacagggauuguuc

SEQ ID NO: 1418118 - RNA, 19 nt, Artificial Sequence
  Description of Artificial Sequence: Synthetic oligonucleotide
ugcuguguaugguggguag

SEQ ID NO: 1418119 - RNA, 19 nt, Artificial Sequence
  Description of Artificial Sequence: Synthetic oligonucleotide
guguaugguggguaggaug

SEQ ID NO: 1418120 - RNA, 19 nt, Artificial Sequence
  Description of Artificial Sequence: Synthetic oligonucleotide
acagggauuguuccaguga

SEQ ID NO: 1418121 - RNA, 19 nt, Artificial Sequence
  Description of Artificial Sequence: Synthetic oligonucleotide
gguaugggccagcaggugg

SEQ ID NO: 1418122 - RNA, 19 nt, Artificial Sequence
  Description of Artificial Sequence: Synthetic oligonucleotide
agaggucuaccuccagccg

SEQ ID NO: 1418123 - RNA, 19 nt, Artificial Sequence
  Description of Artificial Sequence: Synthetic oligonucleotide
ucaguuugucacugacugc

SEQ ID NO: 1418124 - RNA, 19 nt, Artificial Sequence
  Description of Artificial Sequence: Synthetic oligonucleotide
ucuguaacgcacagggauu

SEQ ID NO: 1418125 - RNA, 19 nt, Artificial Sequence
  Description of Artificial Sequence: Synthetic oligonucleotide
uucucccagauaaaagaua

SEQ ID NO: 1418126 - RNA, 19 nt, Artificial Sequence
  Description of Artificial Sequence: Synthetic oligonucleotide
uugaucuaagcggguaacc

SEQ ID NO: 1418127 - RNA, 19 nt, Artificial Sequence
  Description of Artificial Sequence: Synthetic oligonucleotide
uuuaaucgucauugaacua

SEQ ID NO: 1418128 - RNA, 19 nt, Artificial Sequence
  Description of Artificial Sequence: Synthetic oligonucleotide
gguucuacugaugagagaa

SEQ ID NO: 1418129 - RNA, 19 nt, Artificial Sequence
  Description of Artificial Sequence: Synthetic oligonucleotide
uuacuccccgccucaaggc

SEQ ID NO: 1418130 - RNA, 19 nt, Artificial Sequence
  Description of Artificial Sequence: Synthetic oligonucleotide
aagugcccucagcuggaac

SEQ ID NO: 1418131 - RNA, 19 nt, Artificial Sequence
  Description of Artificial Sequence: Synthetic oligonucleotide
uccagcaacucugaccgug

SEQ ID NO: 1418132 - RNA, 19 nt, Artificial Sequence
  Description of Artificial Sequence: Synthetic oligonucleotide
acauugacagucugacgga

SEQ ID NO: 1418133 - RNA, 19 nt, Artificial Sequence
  Description of Artificial Sequence: Synthetic oligonucleotide
gguuugagaucuuuguaca

SEQ ID NO: 1418134 - RNA, 19 nt, Artificial Sequence
  Description of Artificial Sequence: Synthetic oligonucleotide
uggauaugcggagauucca

SEQ ID NO: 1418135 - RNA, 19 nt, Artificial Sequence
  Description of Artificial Sequence: Synthetic oligonucleotide
aggcuuuaggaagaggucu

SEQ ID NO: 1418136 - RNA, 19 nt, Artificial Sequence
  Description of Artificial Sequence: Synthetic oligonucleotide
cauagcgaugacauugaca

SEQ ID NO: 1418137 - RNA, 19 nt, Artificial Sequence
  Description of Artificial Sequence: Synthetic oligonucleotide
gacaguuagaucucuguau

SEQ ID NO: 1418138 - RNA, 19 nt, Artificial Sequence
  Description of Artificial Sequence: Synthetic oligonucleotide
agucuuuacccaaaggaaa

SEQ ID NO: 1418139 - RNA, 19 nt, Artificial Sequence
  Description of Artificial Sequence: Synthetic oligonucleotide
gguauccagauggauaugc

SEQ ID NO: 1418140 - RNA, 19 nt, Artificial Sequence
  Description of Artificial Sequence: Synthetic oligonucleotide
auccagauggauaugcgga

SEQ ID NO: 1418141 - RNA, 19 nt, Artificial Sequence
  Description of Artificial Sequence: Synthetic oligonucleotide
gguaaggacagccaggaua

SEQ ID NO: 1418142 - RNA, 19 nt, Artificial Sequence
  Description of Artificial Sequence: Synthetic oligonucleotide
ucauccgccaucucaguuu

SEQ ID NO: 1418143 - RNA, 19 nt, Artificial Sequence
  Description of Artificial Sequence: Synthetic oligonucleotide
cagucuuuacccaaaggaa

SEQ ID NO: 1418144 - RNA, 19 nt, Artificial Sequence
  Description of Artificial Sequence: Synthetic oligonucleotide
guauuugguggcccuguug

SEQ ID NO: 1418145 - RNA, 19 nt, Artificial Sequence
  Description of Artificial Sequence: Synthetic oligonucleotide
cuugaucuaagcggguaac

SEQ ID NO: 1418146 - RNA, 19 nt, Artificial Sequence
  Description of Artificial Sequence: Synthetic oligonucleotide
aauagugggacgggagaau

SEQ ID NO: 1418147 - RNA, 19 nt, Artificial Sequence
  Description of Artificial Sequence: Synthetic oligonucleotide
gaaggguacugggagcuug

SEQ ID NO: 1418148 - RNA, 19 nt, Artificial Sequence
  Description of Artificial Sequence: Synthetic oligonucleotide
uuuccgggacaggaggcgg

SEQ ID NO: 1418149 - RNA, 19 nt, Artificial Sequence
  Description of Artificial Sequence: Synthetic oligonucleotide
cuuguuguggcaggguaug

SEQ ID NO: 1418150 - RNA, 19 nt, Artificial Sequence
  Description of Artificial Sequence: Synthetic oligonucleotide
gaauccaauacagguuuga

SEQ ID NO: 1418151 - RNA, 19 nt, Artificial Sequence
  Description of Artificial Sequence: Synthetic oligonucleotide
uccuguuuuaaucgucauu

SEQ ID NO: 1418152 - RNA, 19 nt, Artificial Sequence
  Description of Artificial Sequence: Synthetic oligonucleotide
ugaucugaauaagcuccag

SEQ ID NO: 1418153 - RNA, 19 nt, Artificial Sequence
  Description of Artificial Sequence: Synthetic oligonucleotide
gaggucuaccuccagccga

SEQ ID NO: 1418154 - RNA, 19 nt, Artificial Sequence
  Description of Artificial Sequence: Synthetic oligonucleotide
aggcggacaugcuucagga

SEQ ID NO: 1418155 - RNA, 19 nt, Artificial Sequence
  Description of Artificial Sequence: Synthetic oligonucleotide
caggaggcggacaugcuuc

SEQ ID NO: 1418156 - RNA, 19 nt, Artificial Sequence
  Description of Artificial Sequence: Synthetic oligonucleotide
ccagucuuuacccaaagga

SEQ ID NO: 1418157 - RNA, 19 nt, Artificial Sequence
  Description of Artificial Sequence: Synthetic oligonucleotide
agcggguaaccaucucuuc

SEQ ID NO: 1418158 - RNA, 19 nt, Artificial Sequence
  Description of Artificial Sequence: Synthetic oligonucleotide
auaugcggagauuccacuu

SEQ ID NO: 1418159 - RNA, 19 nt, Artificial Sequence
  Description of Artificial Sequence: Synthetic oligonucleotide
cacaaucaugaucugaaua

SEQ ID NO: 1418160 - RNA, 19 nt, Artificial Sequence
  Description of Artificial Sequence: Synthetic oligonucleotide
gcaacucugaccguggaug

SEQ ID NO: 1418161 - RNA, 19 nt, Artificial Sequence
  Description of Artificial Sequence: Synthetic oligonucleotide
ugcucgaaugguguccuca

SEQ ID NO: 1418162 - RNA, 19 nt, Artificial Sequence
  Description of Artificial Sequence: Synthetic oligonucleotide
auggcgcgcgccuccgucc

SEQ ID NO: 1418163 - RNA, 19 nt, Artificial Sequence
  Description of Artificial Sequence: Synthetic oligonucleotide
ucuguccguuucaaggcau

SEQ ID NO: 1418164 - RNA, 19 nt, Artificial Sequence
  Description of Artificial Sequence: Synthetic oligonucleotide
ggcauauuggaauauuaua

SEQ ID NO: 1418165 - RNA, 19 nt, Artificial Sequence
  Description of Artificial Sequence: Synthetic oligonucleotide
uagugggacgggagaauac

SEQ ID NO: 1418166 - RNA, 19 nt, Artificial Sequence
  Description of Artificial Sequence: Synthetic oligonucleotide
ugggagcuuguuguggcag

SEQ ID NO: 1418167 - RNA, 19 nt, Artificial Sequence
  Description of Artificial Sequence: Synthetic oligonucleotide
agugggacgggagaauacu

SEQ ID NO: 1418168 - RNA, 19 nt, Artificial Sequence
  Description of Artificial Sequence: Synthetic oligonucleotide
uguacauagcgaugacauu

SEQ ID NO: 1418169 - RNA, 19 nt, Artificial Sequence
  Description of Artificial Sequence: Synthetic oligonucleotide
guuuccgggacaggaggcg

SEQ ID NO: 1418170 - RNA, 19 nt, Artificial Sequence
  Description of Artificial Sequence: Synthetic oligonucleotide
gauaugcggagauuccacu

SEQ ID NO: 1418171 - RNA, 19 nt, Artificial Sequence
  Description of Artificial Sequence: Synthetic oligonucleotide
uagaggucacuaagaccug

SEQ ID NO: 1418172 - RNA, 19 nt, Artificial Sequence
  Description of Artificial Sequence: Synthetic oligonucleotide
ugacugcugagaugaggga

SEQ ID NO: 1418173 - RNA, 19 nt, Artificial Sequence
  Description of Artificial Sequence: Synthetic oligonucleotide
uucauccgccaucucaguu

SEQ ID NO: 1418174 - RNA, 19 nt, Artificial Sequence
  Description of Artificial Sequence: Synthetic oligonucleotide
gucuauuacuccccgccuc

SEQ ID NO: 1418175 - RNA, 19 nt, Artificial Sequence
  Description of Artificial Sequence: Synthetic oligonucleotide
gcggacaugcuucaggaac

SEQ ID NO: 1418176 - RNA, 19 nt, Artificial Sequence
  Description of Artificial Sequence: Synthetic oligonucleotide
gauuuagaaucuguuuaua

SEQ ID NO: 1418177 - RNA, 19 nt, Artificial Sequence
  Description of Artificial Sequence: Synthetic oligonucleotide
gagggaugcucgaauggug

SEQ ID NO: 1418178 - RNA, 19 nt, Artificial Sequence
  Description of Artificial Sequence: Synthetic oligonucleotide
ugcggagauuccacuuggc

SEQ ID NO: 1418179 - RNA, 19 nt, Artificial Sequence
  Description of Artificial Sequence: Synthetic oligonucleotide
gauugggaggguauccaga

SEQ ID NO: 1418180 - RNA, 19 nt, Artificial Sequence
  Description of Artificial Sequence: Synthetic oligonucleotide
uacuccccgccucaaggcu

SEQ ID NO: 1418181 - RNA, 19 nt, Artificial Sequence
  Description of Artificial Sequence: Synthetic oligonucleotide
agcuuguuguggcagggua

SEQ ID NO: 1418182 - RNA, 19 nt, Artificial Sequence
  Description of Artificial Sequence: Synthetic oligonucleotide
gguagaaagugcauuaaua

SEQ ID NO: 1418183 - RNA, 19 nt, Artificial Sequence
  Description of Artificial Sequence: Synthetic oligonucleotide
aucuuuguacauagcgaug

SEQ ID NO: 1418184 - RNA, 19 nt, Artificial Sequence
  Description of Artificial Sequence: Synthetic oligonucleotide
auugaacuaguagguuuca

SEQ ID NO: 1418185 - RNA, 19 nt, Artificial Sequence
  Description of Artificial Sequence: Synthetic oligonucleotide
aggcauauuggaauauuau

SEQ ID NO: 1418186 - RNA, 19 nt, Artificial Sequence
  Description of Artificial Sequence: Synthetic oligonucleotide
guccucacuaauggugccg

SEQ ID NO: 1418187 - RNA, 19 nt, Artificial Sequence
  Description of Artificial Sequence: Synthetic oligonucleotide
uaccucuguaacgcacagg

SEQ ID NO: 1418188 - RNA, 19 nt, Artificial Sequence
  Description of Artificial Sequence: Synthetic oligonucleotide
agcgacuucuugaucuaag

SEQ ID NO: 1418189 - RNA, 19 nt, Artificial Sequence
  Description of Artificial Sequence: Synthetic oligonucleotide
uaggagguauuugguggcc

SEQ ID NO: 1418190 - RNA, 19 nt, Artificial Sequence
  Description of Artificial Sequence: Synthetic oligonucleotide
cauugacagucugacggac

SEQ ID NO: 1418191 - RNA, 19 nt, Artificial Sequence
  Description of Artificial Sequence: Synthetic oligonucleotide
gaucuaagcggguaaccau

SEQ ID NO: 1418192 - RNA, 19 nt, Artificial Sequence
  Description of Artificial Sequence: Synthetic oligonucleotide
ucugaccguggauguuucc

SEQ ID NO: 1418193 - RNA, 19 nt, Artificial Sequence
  Description of Artificial Sequence: Synthetic oligonucleotide
gcggguaaccaucucuucc

SEQ ID NO: 1418194 - RNA, 19 nt, Artificial Sequence
  Description of Artificial Sequence: Synthetic oligonucleotide
ggauugggaggguauccag

SEQ ID NO: 1418195 - RNA, 19 nt, Artificial Sequence
  Description of Artificial Sequence: Synthetic oligonucleotide
uuccuguuuuaaucgucau

SEQ ID NO: 1418196 - RNA, 19 nt, Artificial Sequence
  Description of Artificial Sequence: Synthetic oligonucleotide
gucccaacacagcacagaa

SEQ ID NO: 1418197 - RNA, 19 nt, Artificial Sequence
  Description of Artificial Sequence: Synthetic oligonucleotide
gcgacuucuugaucuaagc

SEQ ID NO: 1418198 - RNA, 19 nt, Artificial Sequence
  Description of Artificial Sequence: Synthetic oligonucleotide
caauagcauuuuccucugc

SEQ ID NO: 1418199 - RNA, 19 nt, Artificial Sequence
  Description of Artificial Sequence: Synthetic oligonucleotide
cuaccuccagccgagucug

SEQ ID NO: 1418200 - RNA, 19 nt, Artificial Sequence
  Description of Artificial Sequence: Synthetic oligonucleotide
cuguuuuaaucgucauuga

SEQ ID NO: 1418201 - RNA, 19 nt, Artificial Sequence
  Description of Artificial Sequence: Synthetic oligonucleotide
gcauaagugcccucagcug

SEQ ID NO: 1418202 - RNA, 19 nt, Artificial Sequence
  Description of Artificial Sequence: Synthetic oligonucleotide
agucccaacacagcacaga

SEQ ID NO: 1418203 - RNA, 19 nt, Artificial Sequence
  Description of Artificial Sequence: Synthetic oligonucleotide
aagcggguaaccaucucuu

SEQ ID NO: 1418204 - RNA, 19 nt, Artificial Sequence
  Description of Artificial Sequence: Synthetic oligonucleotide
caauaacuuauucuggguu

SEQ ID NO: 1418205 - RNA, 19 nt, Artificial Sequence
  Description of Artificial Sequence: Synthetic oligonucleotide
agggauuguuccagugagg

SEQ ID NO: 1418206 - RNA, 19 nt, Artificial Sequence
  Description of Artificial Sequence: Synthetic oligonucleotide
uggguaggaugcagaaaua

SEQ ID NO: 1418207 - RNA, 19 nt, Artificial Sequence
  Description of Artificial Sequence: Synthetic oligonucleotide
uccacuuggcaugccuggc

SEQ ID NO: 1418208 - RNA, 19 nt, Artificial Sequence
  Description of Artificial Sequence: Synthetic oligonucleotide
gagcagaacuuaguucuuc

SEQ ID NO: 1418209 - RNA, 19 nt, Artificial Sequence
  Description of Artificial Sequence: Synthetic oligonucleotide
ggguauguguccagcagcc

SEQ ID NO: 1418210 - RNA, 19 nt, Artificial Sequence
  Description of Artificial Sequence: Synthetic oligonucleotide
gcagaaauagugggacggg

SEQ ID NO: 1418211 - RNA, 19 nt, Artificial Sequence
  Description of Artificial Sequence: Synthetic oligonucleotide
guagauaaggaagguagau

SEQ ID NO: 1418212 - RNA, 19 nt, Artificial Sequence
  Description of Artificial Sequence: Synthetic oligonucleotide
ggacaggaggcggacaugc

SEQ ID NO: 1418213 - RNA, 19 nt, Artificial Sequence
  Description of Artificial Sequence: Synthetic oligonucleotide
cuaagaccugcagucuuuc

SEQ ID NO: 1418214 - RNA, 19 nt, Artificial Sequence
  Description of Artificial Sequence: Synthetic oligonucleotide
aaggguacugggagcuugu

SEQ ID NO: 1418215 - RNA, 19 nt, Artificial Sequence
  Description of Artificial Sequence: Synthetic oligonucleotide
uuccgggacaggaggcgga

SEQ ID NO: 1418216 - RNA, 19 nt, Artificial Sequence
  Description of Artificial Sequence: Synthetic oligonucleotide
uguguaugguggguaggau

SEQ ID NO: 1418217 - RNA, 19 nt, Artificial Sequence
  Description of Artificial Sequence: Synthetic oligonucleotide
cuguuuauacaguggggcu

SEQ ID NO: 1418218 - RNA, 19 nt, Artificial Sequence
  Description of Artificial Sequence: Synthetic oligonucleotide
auagugggacgggagaaua

SEQ ID NO: 1418219 - RNA, 19 nt, Artificial Sequence
  Description of Artificial Sequence: Synthetic oligonucleotide
aggucuaccuccagccgag

SEQ ID NO: 1418220 - RNA, 19 nt, Artificial Sequence
  Description of Artificial Sequence: Synthetic oligonucleotide
ggaugcucgaauggugucc

SEQ ID NO: 1418221 - RNA, 19 nt, Artificial Sequence
  Description of Artificial Sequence: Synthetic oligonucleotide
ggaccgacaguggucacag

SEQ ID NO: 1418222 - RNA, 19 nt, Artificial Sequence
  Description of Artificial Sequence: Synthetic oligonucleotide
ggcuucucccagauaaaag

SEQ ID NO: 1418223 - RNA, 19 nt, Artificial Sequence
  Description of Artificial Sequence: Synthetic oligonucleotide
guauuuguacuuggacauc

SEQ ID NO: 1418224 - RNA, 19 nt, Artificial Sequence
  Description of Artificial Sequence: Synthetic oligonucleotide
auaagugcccucagcugga

SEQ ID NO: 1418225 - RNA, 19 nt, Artificial Sequence
  Description of Artificial Sequence: Synthetic oligonucleotide
gaacuguuuccgggacagg

SEQ ID NO: 1418226 - RNA, 19 nt, Artificial Sequence
  Description of Artificial Sequence: Synthetic oligonucleotide
uguaacgcacagggauugu

SEQ ID NO: 1418227 - RNA, 19 nt, Artificial Sequence
  Description of Artificial Sequence: Synthetic oligonucleotide
ggauaugcggagauuccac

SEQ ID NO: 1418228 - RNA, 19 nt, Artificial Sequence
  Description of Artificial Sequence: Synthetic oligonucleotide
guuuauacaguggggcugu

SEQ ID NO: 1418229 - RNA, 19 nt, Artificial Sequence
  Description of Artificial Sequence: Synthetic oligonucleotide
uuuauacaguggggcugug

SEQ ID NO: 1418230 - RNA, 19 nt, Artificial Sequence
  Description of Artificial Sequence: Synthetic oligonucleotide
ggagaauacuggaggcucc

SEQ ID NO: 1418231 - RNA, 19 nt, Artificial Sequence
  Description of Artificial Sequence: Synthetic oligonucleotide
cuucucccagauaaaagau

SEQ ID NO: 1418232 - RNA, 19 nt, Artificial Sequence
  Description of Artificial Sequence: Synthetic oligonucleotide
cuguguaugguggguagga

SEQ ID NO: 1418233 - RNA, 19 nt, Artificial Sequence
  Description of Artificial Sequence: Synthetic oligonucleotide
uggggcugugggaaugaua

SEQ ID NO: 1418234 - RNA, 19 nt, Artificial Sequence
  Description of Artificial Sequence: Synthetic oligonucleotide
cucuguccguuucaaggca

SEQ ID NO: 1418235 - RNA, 19 nt, Artificial Sequence
  Description of Artificial Sequence: Synthetic oligonucleotide
cagucccaacacagcacag

SEQ ID NO: 1418236 - RNA, 19 nt, Artificial Sequence
  Description of Artificial Sequence: Synthetic oligonucleotide
ccagcaacucugaccgugg

SEQ ID NO: 1418237 - RNA, 19 nt, Artificial Sequence
  Description of Artificial Sequence: Synthetic oligonucleotide
cugaccguggauguuucca

SEQ ID NO: 1418238 - RNA, 19 nt, Artificial Sequence
  Description of Artificial Sequence: Synthetic oligonucleotide
cucugaccguggauguuuc

SEQ ID NO: 1418239 - RNA, 19 nt, Artificial Sequence
  Description of Artificial Sequence: Synthetic oligonucleotide
gugggacgggagaauacug

SEQ ID NO: 1418240 - RNA, 19 nt, Artificial Sequence
  Description of Artificial Sequence: Synthetic oligonucleotide
cagaaauagugggacggga

SEQ ID NO: 1418241 - RNA, 19 nt, Artificial Sequence
  Description of Artificial Sequence: Synthetic oligonucleotide
aggaggcggacaugcuuca

SEQ ID NO: 1418242 - RNA, 19 nt, Artificial Sequence
  Description of Artificial Sequence: Synthetic oligonucleotide
gaugcucgaaugguguccu

SEQ ID NO: 1418243 - RNA, 19 nt, Artificial Sequence
  Description of Artificial Sequence: Synthetic oligonucleotide
aaucgucauugaacuagua

SEQ ID NO: 1418244 - RNA, 19 nt, Artificial Sequence
  Description of Artificial Sequence: Synthetic oligonucleotide
uugcuguguauggugggua

SEQ ID NO: 1418245 - RNA, 19 nt, Artificial Sequence
  Description of Artificial Sequence: Synthetic oligonucleotide
gaaugguguccucacuaau

SEQ ID NO: 1418246 - RNA, 19 nt, Artificial Sequence
  Description of Artificial Sequence: Synthetic oligonucleotide
caaauaucacaaucaugau

SEQ ID NO: 1418247 - RNA, 19 nt, Artificial Sequence
  Description of Artificial Sequence: Synthetic oligonucleotide
guuugagaucuuuguacau

SEQ ID NO: 1418248 - RNA, 19 nt, Artificial Sequence
  Description of Artificial Sequence: Synthetic oligonucleotide
ccaggucuauuacuccccg

SEQ ID NO: 1418249 - RNA, 19 nt, Artificial Sequence
  Description of Artificial Sequence: Synthetic oligonucleotide
cuaagcggguaaccaucuc

SEQ ID NO: 1418250 - RNA, 19 nt, Artificial Sequence
  Description of Artificial Sequence: Synthetic oligonucleotide
ggacaguuagaucucugua

SEQ ID NO: 1418251 - RNA, 19 nt, Artificial Sequence
  Description of Artificial Sequence: Synthetic oligonucleotide
ccguuucaaggcauugagc

SEQ ID NO: 1418252 - RNA, 19 nt, Artificial Sequence
  Description of Artificial Sequence: Synthetic oligonucleotide
agucugacggacaguuaga

SEQ ID NO: 1418253 - RNA, 19 nt, Artificial Sequence
  Description of Artificial Sequence: Synthetic oligonucleotide
cugggaccgacagugguca

SEQ ID NO: 1418254 - RNA, 19 nt, Artificial Sequence
  Description of Artificial Sequence: Synthetic oligonucleotide
gucuaccuccagccgaguc

SEQ ID NO: 1418255 - RNA, 19 nt, Artificial Sequence
  Description of Artificial Sequence: Synthetic oligonucleotide
gcaauaacuuauucugggu

SEQ ID NO: 1418256 - RNA, 19 nt, Artificial Sequence
  Description of Artificial Sequence: Synthetic oligonucleotide
uaacuuauucuggguucua

SEQ ID NO: 1418257 - RNA, 19 nt, Artificial Sequence
  Description of Artificial Sequence: Synthetic oligonucleotide
ggucacuaagaccugcagu

SEQ ID NO: 1418258 - RNA, 19 nt, Artificial Sequence
  Description of Artificial Sequence: Synthetic oligonucleotide
gcuguguaugguggguagg

SEQ ID NO: 1418259 - RNA, 19 nt, Artificial Sequence
  Description of Artificial Sequence: Synthetic oligonucleotide
cacggggccgccccaggcc

SEQ ID NO: 1418260 - RNA, 19 nt, Artificial Sequence
  Description of Artificial Sequence: Synthetic oligonucleotide
gcucgaaugguguccucac

SEQ ID NO: 1418261 - RNA, 19 nt, Artificial Sequence
  Description of Artificial Sequence: Synthetic oligonucleotide
guccguuucaaggcauuga

SEQ ID NO: 1418262 - RNA, 19 nt, Artificial Sequence
  Description of Artificial Sequence: Synthetic oligonucleotide
gcggagauuccacuuggca

SEQ ID NO: 1418263 - RNA, 19 nt, Artificial Sequence
  Description of Artificial Sequence: Synthetic oligonucleotide
ggguuauauggguaugugu

SEQ ID NO: 1418264 - RNA, 19 nt, Artificial Sequence
  Description of Artificial Sequence: Synthetic oligonucleotide
ggauaagcacugggauugg

SEQ ID NO: 1418265 - RNA, 19 nt, Artificial Sequence
  Description of Artificial Sequence: Synthetic oligonucleotide
gggauuguuccagugaggu

SEQ ID NO: 1418266 - RNA, 19 nt, Artificial Sequence
  Description of Artificial Sequence: Synthetic oligonucleotide
cauggcgcgcgccuccguc

SEQ ID NO: 1418267 - RNA, 19 nt, Artificial Sequence
  Description of Artificial Sequence: Synthetic oligonucleotide
cccgccucaaggcuucucc

SEQ ID NO: 1418268 - RNA, 19 nt, Artificial Sequence
  Description of Artificial Sequence: Synthetic oligonucleotide
agauggauaugcggagauu

SEQ ID NO: 1418269 - RNA, 19 nt, Artificial Sequence
  Description of Artificial Sequence: Synthetic oligonucleotide
acggacaguuagaucucug

SEQ ID NO: 1418270 - RNA, 19 nt, Artificial Sequence
  Description of Artificial Sequence: Synthetic oligonucleotide
agguggguaaggacagcca

SEQ ID NO: 1418271 - RNA, 19 nt, Artificial Sequence
  Description of Artificial Sequence: Synthetic oligonucleotide
cccagauaaaagauagugu

SEQ ID NO: 1418272 - RNA, 19 nt, Artificial Sequence
  Description of Artificial Sequence: Synthetic oligonucleotide
cuccccgccucaaggcuuc

SEQ ID NO: 1418273 - RNA, 19 nt, Artificial Sequence
  Description of Artificial Sequence: Synthetic oligonucleotide
uaagugcccucagcuggaa

SEQ ID NO: 1418274 - RNA, 19 nt, Artificial Sequence
  Description of Artificial Sequence: Synthetic oligonucleotide
ggguagaaagugcauuaau

SEQ ID NO: 1418275 - RNA, 19 nt, Artificial Sequence
  Description of Artificial Sequence: Synthetic oligonucleotide
ggagguauuugguggcccu

SEQ ID NO: 1418276 - RNA, 19 nt, Artificial Sequence
  Description of Artificial Sequence: Synthetic oligonucleotide
ggguucuacugaugagaga

SEQ ID NO: 1418277 - RNA, 19 nt, Artificial Sequence
  Description of Artificial Sequence: Synthetic oligonucleotide
ggucuauuacuccccgccu

SEQ ID NO: 1418278 - RNA, 19 nt, Artificial Sequence
  Description of Artificial Sequence: Synthetic oligonucleotide
ugggaccgacaguggucac

SEQ ID NO: 1418279 - RNA, 19 nt, Artificial Sequence
  Description of Artificial Sequence: Synthetic oligonucleotide
cucccagauaaaagauagu

SEQ ID NO: 1418280 - RNA, 19 nt, Artificial Sequence
  Description of Artificial Sequence: Synthetic oligonucleotide
cgucauugaacuaguaggu

SEQ ID NO: 1418281 - RNA, 19 nt, Artificial Sequence
  Description of Artificial Sequence: Synthetic oligonucleotide
gucugacggacaguuagau

SEQ ID NO: 1418282 - RNA, 19 nt, Artificial Sequence
  Description of Artificial Sequence: Synthetic oligonucleotide
caguuagaucucuguauuu

SEQ ID NO: 1418283 - RNA, 19 nt, Artificial Sequence
  Description of Artificial Sequence: Synthetic oligonucleotide
gcucccuggaacugccauc

SEQ ID NO: 1418284 - RNA, 19 nt, Artificial Sequence
  Description of Artificial Sequence: Synthetic oligonucleotide
ccgccucaaggcuucuccc

SEQ ID NO: 1418285 - RNA, 19 nt, Artificial Sequence
  Description of Artificial Sequence: Synthetic oligonucleotide
ggcuuuaggaagaggucua

SEQ ID NO: 1418286 - RNA, 19 nt, Artificial Sequence
  Description of Artificial Sequence: Synthetic oligonucleotide
cacaugcuuuccuguuuua

SEQ ID NO: 1418287 - RNA, 19 nt, Artificial Sequence
  Description of Artificial Sequence: Synthetic oligonucleotide
ggugccgucucugcuggga

SEQ ID NO: 1418288 - RNA, 19 nt, Artificial Sequence
  Description of Artificial Sequence: Synthetic oligonucleotide
uuggcaugccuggcaugua

SEQ ID NO: 1418289 - RNA, 19 nt, Artificial Sequence
  Description of Artificial Sequence: Synthetic oligonucleotide
cucgaaugguguccucacu

SEQ ID NO: 1418290 - RNA, 19 nt, Artificial Sequence
  Description of Artificial Sequence: Synthetic oligonucleotide
cuauuacuccccgccucaa

SEQ ID NO: 1418291 - RNA, 19 nt, Artificial Sequence
  Description of Artificial Sequence: Synthetic oligonucleotide
cuucauccgccaucucagu

SEQ ID NO: 1418292 - RNA, 19 nt, Artificial Sequence
  Description of Artificial Sequence: Synthetic oligonucleotide
acuccccgccucaaggcuu

SEQ ID NO: 1418293 - RNA, 19 nt, Artificial Sequence
  Description of Artificial Sequence: Synthetic oligonucleotide
ggguaugggccagcaggug

SEQ ID NO: 1418294 - RNA, 19 nt, Artificial Sequence
  Description of Artificial Sequence: Synthetic oligonucleotide
gggaccgacaguggucaca

SEQ ID NO: 1418295 - RNA, 19 nt, Artificial Sequence
  Description of Artificial Sequence: Synthetic oligonucleotide
gagcuuguuguggcagggu

SEQ ID NO: 1418296 - RNA, 19 nt, Artificial Sequence
  Description of Artificial Sequence: Synthetic oligonucleotide
ggcggacaugcuucaggaa

SEQ ID NO: 1418297 - RNA, 19 nt, Artificial Sequence
  Description of Artificial Sequence: Synthetic oligonucleotide
ccucuguaacgcacaggga

SEQ ID NO: 1418298 - RNA, 19 nt, Artificial Sequence
  Description of Artificial Sequence: Synthetic oligonucleotide
ccgccaucucaguuuguca

SEQ ID NO: 1418299 - RNA, 19 nt, Artificial Sequence
  Description of Artificial Sequence: Synthetic oligonucleotide
ccucacuaauggugccguc

SEQ ID NO: 1418300 - RNA, 19 nt, Artificial Sequence
  Description of Artificial Sequence: Synthetic oligonucleotide
cagcgacuucuugaucuaa

SEQ ID NO: 1418301 - RNA, 19 nt, Artificial Sequence
  Description of Artificial Sequence: Synthetic oligonucleotide
cccgcaggcagagggucag

SEQ ID NO: 1418302 - RNA, 19 nt, Artificial Sequence
  Description of Artificial Sequence: Synthetic oligonucleotide
cacugggauugggagggua

SEQ ID NO: 1418303 - RNA, 19 nt, Artificial Sequence
  Description of Artificial Sequence: Synthetic oligonucleotide
cuguccguuucaaggcauu

SEQ ID NO: 1418304 - RNA, 19 nt, Artificial Sequence
  Description of Artificial Sequence: Synthetic oligonucleotide
ccgagucuggaagucagua

SEQ ID NO: 1418305 - RNA, 19 nt, Artificial Sequence
  Description of Artificial Sequence: Synthetic oligonucleotide
guccccgcaggcagagggu

SEQ ID NO: 1418306 - RNA, 19 nt, Artificial Sequence
  Description of Artificial Sequence: Synthetic oligonucleotide
cgggagaauacuggaggcu

SEQ ID NO: 1418307 - RNA, 19 nt, Artificial Sequence
  Description of Artificial Sequence: Synthetic oligonucleotide
uuuauuacaggacaguggc

SEQ ID NO: 1418308 - RNA, 19 nt, Artificial Sequence
  Description of Artificial Sequence: Synthetic oligonucleotide
acaaacuauauacagggac

SEQ ID NO: 1418309 - RNA, 19 nt, Artificial Sequence
  Description of Artificial Sequence: Synthetic oligonucleotide
aaaguugagucgcugcucc

SEQ ID NO: 1418310 - RNA, 19 nt, Artificial Sequence
  Description of Artificial Sequence: Synthetic oligonucleotide
ucacuauucagauaaaagc

SEQ ID NO: 1418311 - RNA, 19 nt, Artificial Sequence
  Description of Artificial Sequence: Synthetic oligonucleotide
cacuauucagauaaaagcc

SEQ ID NO: 1418312 - RNA, 19 nt, Artificial Sequence
  Description of Artificial Sequence: Synthetic oligonucleotide
aggggagcaguucagaacc

SEQ ID NO: 1418313 - RNA, 19 nt, Artificial Sequence
  Description of Artificial Sequence: Synthetic oligonucleotide
agaugaaugcaucaaugac

SEQ ID NO: 1418314 - RNA, 19 nt, Artificial Sequence
  Description of Artificial Sequence: Synthetic oligonucleotide
caaacuauaggcucgcugc

SEQ ID NO: 1418315 - RNA, 19 nt, Artificial Sequence
  Description of Artificial Sequence: Synthetic oligonucleotide
ugcaucuucagauagcaca

SEQ ID NO: 1418316 - RNA, 19 nt, Artificial Sequence
  Description of Artificial Sequence: Synthetic oligonucleotide
cuucagauagcacagggcc

SEQ ID NO: 1418317 - RNA, 19 nt, Artificial Sequence
  Description of Artificial Sequence: Synthetic oligonucleotide
acuauucagauaaaagccc

SEQ ID NO: 1418318 - RNA, 19 nt, Artificial Sequence
  Description of Artificial Sequence: Synthetic oligonucleotide
auaacucuccaucucuagc

SEQ ID NO: 1418319 - RNA, 19 nt, Artificial Sequence
  Description of Artificial Sequence: Synthetic oligonucleotide
aguagucagggauaucucg

SEQ ID NO: 1418320 - RNA, 19 nt, Artificial Sequence
  Description of Artificial Sequence: Synthetic oligonucleotide
uauauacagggacuggagc

SEQ ID NO: 1418321 - RNA, 19 nt, Artificial Sequence
  Description of Artificial Sequence: Synthetic oligonucleotide
guauuuaucgugcuuggcc

SEQ ID NO: 1418322 - RNA, 19 nt, Artificial Sequence
  Description of Artificial Sequence: Synthetic oligonucleotide
uauucagauaaaagccccg

SEQ ID NO: 1418323 - RNA, 19 nt, Artificial Sequence
  Description of Artificial Sequence: Synthetic oligonucleotide
auaagagugcagcucacuc

SEQ ID NO: 1418324 - RNA, 19 nt, Artificial Sequence
  Description of Artificial Sequence: Synthetic oligonucleotide
aaggggagcaguucagaac

SEQ ID NO: 1418325 - RNA, 19 nt, Artificial Sequence
  Description of Artificial Sequence: Synthetic oligonucleotide
uguccuugcgaucauaagu

SEQ ID NO: 1418326 - RNA, 19 nt, Artificial Sequence
  Description of Artificial Sequence: Synthetic oligonucleotide
cuauucagauaaaagcccc

SEQ ID NO: 1418327 - RNA, 19 nt, Artificial Sequence
  Description of Artificial Sequence: Synthetic oligonucleotide
aaaggcggagccucgcggc

SEQ ID NO: 1418328 - RNA, 19 nt, Artificial Sequence
  Description of Artificial Sequence: Synthetic oligonucleotide
uucuuagcaaugcgaaggg

SEQ ID NO: 1418329 - RNA, 19 nt, Artificial Sequence
  Description of Artificial Sequence: Synthetic oligonucleotide
ugcagauuggcaauggccu

SEQ ID NO: 1418330 - RNA, 19 nt, Artificial Sequence
  Description of Artificial Sequence: Synthetic oligonucleotide
uauuuaucgugcuuggccu

SEQ ID NO: 1418331 - RNA, 19 nt, Artificial Sequence
  Description of Artificial Sequence: Synthetic oligonucleotide
aaacuauauacagggacug

SEQ ID NO: 1418332 - RNA, 19 nt, Artificial Sequence
  Description of Artificial Sequence: Synthetic oligonucleotide
auauacagggacuggagcu

SEQ ID NO: 1418333 - RNA, 19 nt, Artificial Sequence
  Description of Artificial Sequence: Synthetic oligonucleotide
aucuucagauagcacaggg

SEQ ID NO: 1418334 - RNA, 19 nt, Artificial Sequence
  Description of Artificial Sequence: Synthetic oligonucleotide
ucuuuucucguccaccuga

SEQ ID NO: 1418335 - RNA, 19 nt, Artificial Sequence
  Description of Artificial Sequence: Synthetic oligonucleotide
ucagauagcacagggcccg

SEQ ID NO: 1418336 - RNA, 19 nt, Artificial Sequence
  Description of Artificial Sequence: Synthetic oligonucleotide
uccuuggccaaacuauagg

SEQ ID NO: 1418337 - RNA, 19 nt, Artificial Sequence
  Description of Artificial Sequence: Synthetic oligonucleotide
uucauggccaaguugggga

SEQ ID NO: 1418338 - RNA, 19 nt, Artificial Sequence
  Description of Artificial Sequence: Synthetic oligonucleotide
aucucuagcuggcacugcc

SEQ ID NO: 1418339 - RNA, 19 nt, Artificial Sequence
  Description of Artificial Sequence: Synthetic oligonucleotide
gacacgugagcaaaggcgg

SEQ ID NO: 1418340 - RNA, 19 nt, Artificial Sequence
  Description of Artificial Sequence: Synthetic oligonucleotide
auucagauaaaagccccgc

SEQ ID NO: 1418341 - RNA, 19 nt, Artificial Sequence
  Description of Artificial Sequence: Synthetic oligonucleotide
uaguacacugccacaagug

SEQ ID NO: 1418342 - RNA, 19 nt, Artificial Sequence
  Description of Artificial Sequence: Synthetic oligonucleotide
gagauaagagugcagcuca

SEQ ID NO: 1418343 - RNA, 19 nt, Artificial Sequence
  Description of Artificial Sequence: Synthetic oligonucleotide
aaaagccccgccccuucgc

SEQ ID NO: 1418344 - RNA, 19 nt, Artificial Sequence
  Description of Artificial Sequence: Synthetic oligonucleotide
cuauauacagggacuggag

SEQ ID NO: 1418345 - RNA, 19 nt, Artificial Sequence
  Description of Artificial Sequence: Synthetic oligonucleotide
ugguguaguacacugccac

SEQ ID NO: 1418346 - RNA, 19 nt, Artificial Sequence
  Description of Artificial Sequence: Synthetic oligonucleotide
uucagauaaaagccccgcc

SEQ ID NO: 1418347 - RNA, 19 nt, Artificial Sequence
  Description of Artificial Sequence: Synthetic oligonucleotide
guaaccaggagcuauccuc

SEQ ID NO: 1418348 - RNA, 19 nt, Artificial Sequence
  Description of Artificial Sequence: Synthetic oligonucleotide
uggccaaacuauaggcucg

SEQ ID NO: 1418349 - RNA, 19 nt, Artificial Sequence
  Description of Artificial Sequence: Synthetic oligonucleotide
aguaguccucuacccagcc

SEQ ID NO: 1418350 - RNA, 19 nt, Artificial Sequence
  Description of Artificial Sequence: Synthetic oligonucleotide
aacuauauacagggacugg

SEQ ID NO: 1418351 - RNA, 19 nt, Artificial Sequence
  Description of Artificial Sequence: Synthetic oligonucleotide
caucagcaaggacugaugg

SEQ ID NO: 1418352 - RNA, 19 nt, Artificial Sequence
  Description of Artificial Sequence: Synthetic oligonucleotide
ggacacaaacuauauacag

SEQ ID NO: 1418353 - RNA, 19 nt, Artificial Sequence
  Description of Artificial Sequence: Synthetic oligonucleotide
aggacacgugagcaaaggc

SEQ ID NO: 1418354 - RNA, 19 nt, Artificial Sequence
  Description of Artificial Sequence: Synthetic oligonucleotide
agugauaccacugggugug

SEQ ID NO: 1418355 - RNA, 19 nt, Artificial Sequence
  Description of Artificial Sequence: Synthetic oligonucleotide
acuuuauuacaggacagug

SEQ ID NO: 1418356 - RNA, 19 nt, Artificial Sequence
  Description of Artificial Sequence: Synthetic oligonucleotide
uaaccaggagcuauccuca

SEQ ID NO: 1418357 - RNA, 19 nt, Artificial Sequence
  Description of Artificial Sequence: Synthetic oligonucleotide
uucagauagcacagggccc

SEQ ID NO: 1418358 - RNA, 19 nt, Artificial Sequence
  Description of Artificial Sequence: Synthetic oligonucleotide
ucgugcuuggccucaaugc

SEQ ID NO: 1418359 - RNA, 19 nt, Artificial Sequence
  Description of Artificial Sequence: Synthetic oligonucleotide
uuccagacccuccugggcc

SEQ ID NO: 1418360 - RNA, 19 nt, Artificial Sequence
  Description of Artificial Sequence: Synthetic oligonucleotide
uaagagugcagcucacucu

SEQ ID NO: 1418361 - RNA, 19 nt, Artificial Sequence
  Description of Artificial Sequence: Synthetic oligonucleotide
gugaaugcgccguuccucg

SEQ ID NO: 1418362 - RNA, 19 nt, Artificial Sequence
  Description of Artificial Sequence: Synthetic oligonucleotide
ggauauggggccuuaguag

SEQ ID NO: 1418363 - RNA, 19 nt, Artificial Sequence
  Description of Artificial Sequence: Synthetic oligonucleotide
guacuugcggcccacgaag

SEQ ID NO: 1418364 - RNA, 19 nt, Artificial Sequence
  Description of Artificial Sequence: Synthetic oligonucleotide
acgggaacguggcagcggc

SEQ ID NO: 1418365 - RNA, 19 nt, Artificial Sequence
  Description of Artificial Sequence: Synthetic oligonucleotide
ucacgaagcgcugcgaugc

SEQ ID NO: 1418366 - RNA, 19 nt, Artificial Sequence
  Description of Artificial Sequence: Synthetic oligonucleotide
uugcggcccacgaagagcc

SEQ ID NO: 1418367 - RNA, 19 nt, Artificial Sequence
  Description of Artificial Sequence: Synthetic oligonucleotide
ucgauacuguuccagcgcu

SEQ ID NO: 1418368 - RNA, 19 nt, Artificial Sequence
  Description of Artificial Sequence: Synthetic oligonucleotide
agcgcugcgaugccguggc

SEQ ID NO: 1418369 - RNA, 19 nt, Artificial Sequence
  Description of Artificial Sequence: Synthetic oligonucleotide
uaguccucuacccagccau

SEQ ID NO: 1418370 - RNA, 19 nt, Artificial Sequence
  Description of Artificial Sequence: Synthetic oligonucleotide
ugagauaagagugcagcuc

SEQ ID NO: 1418371 - RNA, 19 nt, Artificial Sequence
  Description of Artificial Sequence: Synthetic oligonucleotide
caagggaugccgagaaggg

SEQ ID NO: 1418372 - RNA, 19 nt, Artificial Sequence
  Description of Artificial Sequence: Synthetic oligonucleotide
cauaacucuccaucucuag

SEQ ID NO: 1418373 - RNA, 19 nt, Artificial Sequence
  Description of Artificial Sequence: Synthetic oligonucleotide
acggcuugggcuccgcgcc

SEQ ID NO: 1418374 - RNA, 19 nt, Artificial Sequence
  Description of Artificial Sequence: Synthetic oligonucleotide
ggugagauaagagugcagc

SEQ ID NO: 1418375 - RNA, 19 nt, Artificial Sequence
  Description of Artificial Sequence: Synthetic oligonucleotide
uggcaugaggacacgugag

SEQ ID NO: 1418376 - RNA, 19 nt, Artificial Sequence
  Description of Artificial Sequence: Synthetic oligonucleotide
uuuccagacccuccugggc

SEQ ID NO: 1418377 - RNA, 19 nt, Artificial Sequence
  Description of Artificial Sequence: Synthetic oligonucleotide
agccuggugagauaagagu

SEQ ID NO: 1418378 - RNA, 19 nt, Artificial Sequence
  Description of Artificial Sequence: Synthetic oligonucleotide
uugcgaucauaagugauac

SEQ ID NO: 1418379 - RNA, 19 nt, Artificial Sequence
  Description of Artificial Sequence: Synthetic oligonucleotide
uccucgauacuguuccagc

SEQ ID NO: 1418380 - RNA, 19 nt, Artificial Sequence
  Description of Artificial Sequence: Synthetic oligonucleotide
ggacacgugagcaaaggcg

SEQ ID NO: 1418381 - RNA, 19 nt, Artificial Sequence
  Description of Artificial Sequence: Synthetic oligonucleotide
uuacccgcuuuccagccca

SEQ ID NO: 1418382 - RNA, 19 nt, Artificial Sequence
  Description of Artificial Sequence: Synthetic oligonucleotide
acuauaggcucgcugcaga

SEQ ID NO: 1418383 - RNA, 19 nt, Artificial Sequence
  Description of Artificial Sequence: Synthetic oligonucleotide
gauauggggccuuaguagu

SEQ ID NO: 1418384 - RNA, 19 nt, Artificial Sequence
  Description of Artificial Sequence: Synthetic oligonucleotide
auaagugauaccacugggu

SEQ ID NO: 1418385 - RNA, 19 nt, Artificial Sequence
  Description of Artificial Sequence: Synthetic oligonucleotide
gaugagcuguuccuggguc

SEQ ID NO: 1418386 - RNA, 19 nt, Artificial Sequence
  Description of Artificial Sequence: Synthetic oligonucleotide
uguauuuaucgugcuuggc

SEQ ID NO: 1418387 - RNA, 19 nt, Artificial Sequence
  Description of Artificial Sequence: Synthetic oligonucleotide
aucagcuccgcccggucgg

SEQ ID NO: 1418388 - RNA, 19 nt, Artificial Sequence
  Description of Artificial Sequence: Synthetic oligonucleotide
aggauauggggccuuagua

SEQ ID NO: 1418389 - RNA, 19 nt, Artificial Sequence
  Description of Artificial Sequence: Synthetic oligonucleotide
guagucagggauaucucgc

SEQ ID NO: 1418390 - RNA, 19 nt, Artificial Sequence
  Description of Artificial Sequence: Synthetic oligonucleotide
gaacuuccggcguggggcg

SEQ ID NO: 1418391 - RNA, 19 nt, Artificial Sequence
  Description of Artificial Sequence: Synthetic oligonucleotide
cacuagggauaucaucucc

SEQ ID NO: 1418392 - RNA, 19 nt, Artificial Sequence
  Description of Artificial Sequence: Synthetic oligonucleotide
guuggggaugagcuguucc

SEQ ID NO: 1418393 - RNA, 19 nt, Artificial Sequence
  Description of Artificial Sequence: Synthetic oligonucleotide
ucauaacucuccaucucua

SEQ ID NO: 1418394 - RNA, 19 nt, Artificial Sequence
  Description of Artificial Sequence: Synthetic oligonucleotide
ucgggcucuuaucagggcu

SEQ ID NO: 1418395 - RNA, 19 nt, Artificial Sequence
  Description of Artificial Sequence: Synthetic oligonucleotide
uaguaguccucuacccagc

SEQ ID NO: 1418396 - RNA, 19 nt, Artificial Sequence
  Description of Artificial Sequence: Synthetic oligonucleotide
cacucgggcucuuaucagg

SEQ ID NO: 1418397 - RNA, 19 nt, Artificial Sequence
  Description of Artificial Sequence: Synthetic oligonucleotide
gcaagggaugccgagaagg

SEQ ID NO: 1418398 - RNA, 19 nt, Artificial Sequence
  Description of Artificial Sequence: Synthetic oligonucleotide
gaggacacgugagcaaagg

SEQ ID NO: 1418399 - RNA, 19 nt, Artificial Sequence
  Description of Artificial Sequence: Synthetic oligonucleotide
acccuuacccgcuuuccag

SEQ ID NO: 1418400 - RNA, 19 nt, Artificial Sequence
  Description of Artificial Sequence: Synthetic oligonucleotide
uucacgaagcgcugcgaug

SEQ ID NO: 1418401 - RNA, 19 nt, Artificial Sequence
  Description of Artificial Sequence: Synthetic oligonucleotide
cuuaguaguccucuaccca

SEQ ID NO: 1418402 - RNA, 19 nt, Artificial Sequence
  Description of Artificial Sequence: Synthetic oligonucleotide
ucucuagcuggcacugccc

SEQ ID NO: 1418403 - RNA, 19 nt, Artificial Sequence
  Description of Artificial Sequence: Synthetic oligonucleotide
ccuuggccaaacuauaggc

SEQ ID NO: 1418404 - RNA, 19 nt, Artificial Sequence
  Description of Artificial Sequence: Synthetic oligonucleotide
auagcacagggcccgguug

SEQ ID NO: 1418405 - RNA, 19 nt, Artificial Sequence
  Description of Artificial Sequence: Synthetic oligonucleotide
gcgaucauaagugauacca

SEQ ID NO: 1418406 - RNA, 19 nt, Artificial Sequence
  Description of Artificial Sequence: Synthetic oligonucleotide
accucagcccacccuuacc

SEQ ID NO: 1418407 - RNA, 19 nt, Artificial Sequence
  Description of Artificial Sequence: Synthetic oligonucleotide
cacggggucaaaguggccc

SEQ ID NO: 1418408 - RNA, 19 nt, Artificial Sequence
  Description of Artificial Sequence: Synthetic oligonucleotide
uggguuccgggugauggcg

SEQ ID NO: 1418409 - RNA, 19 nt, Artificial Sequence
  Description of Artificial Sequence: Synthetic oligonucleotide
ccggcagucagcaagugcc

SEQ ID NO: 1418410 - RNA, 19 nt, Artificial Sequence
  Description of Artificial Sequence: Synthetic oligonucleotide
caaaggcggagccucgcgg

SEQ ID NO: 1418411 - RNA, 19 nt, Artificial Sequence
  Description of Artificial Sequence: Synthetic oligonucleotide
uuuaucgugcuuggccuca

SEQ ID NO: 1418412 - RNA, 19 nt, Artificial Sequence
  Description of Artificial Sequence: Synthetic oligonucleotide
acaguaaccaggagcuauc

SEQ ID NO: 1418413 - RNA, 19 nt, Artificial Sequence
  Description of Artificial Sequence: Synthetic oligonucleotide
cucuuaucagggcugccac

SEQ ID NO: 1418414 - RNA, 19 nt, Artificial Sequence
  Description of Artificial Sequence: Synthetic oligonucleotide
uugagucgcugcuccuugg

SEQ ID NO: 1418415 - RNA, 19 nt, Artificial Sequence
  Description of Artificial Sequence: Synthetic oligonucleotide
uuccucgauacuguuccag

SEQ ID NO: 1418416 - RNA, 19 nt, Artificial Sequence
  Description of Artificial Sequence: Synthetic oligonucleotide
ggaacuuccggcguggggc

SEQ ID NO: 1418417 - RNA, 19 nt, Artificial Sequence
  Description of Artificial Sequence: Synthetic oligonucleotide
cuugcgaucauaagugaua

SEQ ID NO: 1418418 - RNA, 19 nt, Artificial Sequence
  Description of Artificial Sequence: Synthetic oligonucleotide
uccggcagucagcaagugc

SEQ ID NO: 1418419 - RNA, 19 nt, Artificial Sequence
  Description of Artificial Sequence: Synthetic oligonucleotide
aguaaccaggagcuauccu

SEQ ID NO: 1418420 - RNA, 19 nt, Artificial Sequence
  Description of Artificial Sequence: Synthetic oligonucleotide
ucuuagcaaugcgaagggc

SEQ ID NO: 1418421 - RNA, 19 nt, Artificial Sequence
  Description of Artificial Sequence: Synthetic oligonucleotide
ucuccggcagucagcaagu

SEQ ID NO: 1418422 - RNA, 19 nt, Artificial Sequence
  Description of Artificial Sequence: Synthetic oligonucleotide
ugcacgggaacguggcagc

SEQ ID NO: 1418423 - RNA, 19 nt, Artificial Sequence
  Description of Artificial Sequence: Synthetic oligonucleotide
uagggauaucaucuccaaa

SEQ ID NO: 1418424 - RNA, 19 nt, Artificial Sequence
  Description of Artificial Sequence: Synthetic oligonucleotide
acucuccuggugaaugcgc

SEQ ID NO: 1418425 - RNA, 19 nt, Artificial Sequence
  Description of Artificial Sequence: Synthetic oligonucleotide
cucgugguuccgcugacac

SEQ ID NO: 1418426 - RNA, 19 nt, Artificial Sequence
  Description of Artificial Sequence: Synthetic oligonucleotide
guugagucgcugcuccuug

SEQ ID NO: 1418427 - RNA, 19 nt, Artificial Sequence
  Description of Artificial Sequence: Synthetic oligonucleotide
augcgaagggcacuaggga

SEQ ID NO: 1418428 - RNA, 19 nt, Artificial Sequence
  Description of Artificial Sequence: Synthetic oligonucleotide
ccuuaguaguccucuaccc

SEQ ID NO: 1418429 - RNA, 19 nt, Artificial Sequence
  Description of Artificial Sequence: Synthetic oligonucleotide
caguucacgaagcgcugcg

SEQ ID NO: 1418430 - RNA, 19 nt, Artificial Sequence
  Description of Artificial Sequence: Synthetic oligonucleotide
ugcgaucauaagugauacc

SEQ ID NO: 1418431 - RNA, 19 nt, Artificial Sequence
  Description of Artificial Sequence: Synthetic oligonucleotide
gaugccgagaaggggagca

SEQ ID NO: 1418432 - RNA, 19 nt, Artificial Sequence
  Description of Artificial Sequence: Synthetic oligonucleotide
ggagcuauccucacuauuc

SEQ ID NO: 1418433 - RNA, 19 nt, Artificial Sequence
  Description of Artificial Sequence: Synthetic oligonucleotide
ucucgcucagcagcaauga

SEQ ID NO: 1418434 - RNA, 19 nt, Artificial Sequence
  Description of Artificial Sequence: Synthetic oligonucleotide
guggccgcgcucucuaccg

SEQ ID NO: 1418435 - RNA, 19 nt, Artificial Sequence
  Description of Artificial Sequence: Synthetic oligonucleotide
cguuccucgauacuguucc

SEQ ID NO: 1418436 - RNA, 19 nt, Artificial Sequence
  Description of Artificial Sequence: Synthetic oligonucleotide
acucgggcucuuaucaggg

SEQ ID NO: 1418437 - RNA, 19 nt, Artificial Sequence
  Description of Artificial Sequence: Synthetic oligonucleotide
cuugcggcccacgaagagc

SEQ ID NO: 1418438 - RNA, 19 nt, Artificial Sequence
  Description of Artificial Sequence: Synthetic oligonucleotide
aaguugagucgcugcuccu

SEQ ID NO: 1418439 - RNA, 19 nt, Artificial Sequence
  Description of Artificial Sequence: Synthetic oligonucleotide
ucucuaccggccccgcccc

SEQ ID NO: 1418440 - RNA, 19 nt, Artificial Sequence
  Description of Artificial Sequence: Synthetic oligonucleotide
ccuggugagauaagagugc

SEQ ID NO: 1418441 - RNA, 19 nt, Artificial Sequence
  Description of Artificial Sequence: Synthetic oligonucleotide
uacuugcggcccacgaaga

SEQ ID NO: 1418442 - RNA, 19 nt, Artificial Sequence
  Description of Artificial Sequence: Synthetic oligonucleotide
cacacaaguagucagggau

SEQ ID NO: 1418443 - RNA, 19 nt, Artificial Sequence
  Description of Artificial Sequence: Synthetic oligonucleotide
ggucacggggucaaagugg

SEQ ID NO: 1418444 - RNA, 19 nt, Artificial Sequence
  Description of Artificial Sequence: Synthetic oligonucleotide
gagaaggggagcaguucag

SEQ ID NO: 1418445 - RNA, 19 nt, Artificial Sequence
  Description of Artificial Sequence: Synthetic oligonucleotide
gucacggggucaaaguggc

SEQ ID NO: 1418446 - RNA, 19 nt, Artificial Sequence
  Description of Artificial Sequence: Synthetic oligonucleotide
auaucucgcuucuuucuuu

SEQ ID NO: 1418447 - RNA, 19 nt, Artificial Sequence
  Description of Artificial Sequence: Synthetic oligonucleotide
aaugcgccguuccucgaua

SEQ ID NO: 1418448 - RNA, 19 nt, Artificial Sequence
  Description of Artificial Sequence: Synthetic oligonucleotide
auauggggccuuaguaguc

SEQ ID NO: 1418449 - RNA, 19 nt, Artificial Sequence
  Description of Artificial Sequence: Synthetic oligonucleotide
aagcgcugcgaugccgugg

SEQ ID NO: 1418450 - RNA, 19 nt, Artificial Sequence
  Description of Artificial Sequence: Synthetic oligonucleotide
augcgccguuccucgauac

SEQ ID NO: 1418451 - RNA, 19 nt, Artificial Sequence
  Description of Artificial Sequence: Synthetic oligonucleotide
ucgccguucaagccccgcc

SEQ ID NO: 1418452 - RNA, 19 nt, Artificial Sequence
  Description of Artificial Sequence: Synthetic oligonucleotide
gccuuaguaguccucuacc

SEQ ID NO: 1418453 - RNA, 19 nt, Artificial Sequence
  Description of Artificial Sequence: Synthetic oligonucleotide
uccgcgcccggccaccuag

SEQ ID NO: 1418454 - RNA, 19 nt, Artificial Sequence
  Description of Artificial Sequence: Synthetic oligonucleotide
gccaccggaacuuccggcg

SEQ ID NO: 1418455 - RNA, 19 nt, Artificial Sequence
  Description of Artificial Sequence: Synthetic oligonucleotide
cacggcuugggcuccgcgc

SEQ ID NO: 1418456 - RNA, 19 nt, Artificial Sequence
  Description of Artificial Sequence: Synthetic oligonucleotide
cuuacccgcuuuccagccc

SEQ ID NO: 1418457 - RNA, 19 nt, Artificial Sequence
  Description of Artificial Sequence: Synthetic oligonucleotide
auggcgcggccguagcagg

SEQ ID NO: 1418458 - RNA, 19 nt, Artificial Sequence
  Description of Artificial Sequence: Synthetic oligonucleotide
guaguacacugccacaagu

SEQ ID NO: 1418459 - RNA, 19 nt, Artificial Sequence
  Description of Artificial Sequence: Synthetic oligonucleotide
aaggcggagccucgcggcu

SEQ ID NO: 1418460 - RNA, 19 nt, Artificial Sequence
  Description of Artificial Sequence: Synthetic oligonucleotide
ggcacuagggauaucaucu

SEQ ID NO: 1418461 - RNA, 19 nt, Artificial Sequence
  Description of Artificial Sequence: Synthetic oligonucleotide
cgcuuuccagcccagaagg

SEQ ID NO: 1418462 - RNA, 19 nt, Artificial Sequence
  Description of Artificial Sequence: Synthetic oligonucleotide
cugcacgggaacguggcag

SEQ ID NO: 1418463 - RNA, 19 nt, Artificial Sequence
  Description of Artificial Sequence: Synthetic oligonucleotide
cuauccucacuauucagau

SEQ ID NO: 1418464 - RNA, 19 nt, Artificial Sequence
  Description of Artificial Sequence: Synthetic oligonucleotide
gauaucucgcuucuuucuu

SEQ ID NO: 1418465 - RNA, 19 nt, Artificial Sequence
  Description of Artificial Sequence: Synthetic oligonucleotide
cuagggauaucaucuccaa

SEQ ID NO: 1418466 - RNA, 19 nt, Artificial Sequence
  Description of Artificial Sequence: Synthetic oligonucleotide
uugcccuucauggcgccgc

SEQ ID NO: 1418467 - RNA, 19 nt, Artificial Sequence
  Description of Artificial Sequence: Synthetic oligonucleotide
ccaaacuauaggcucgcug

SEQ ID NO: 1418468 - RNA, 19 nt, Artificial Sequence
  Description of Artificial Sequence: Synthetic oligonucleotide
ugcccuucauggcgccgcg

SEQ ID NO: 1418469 - RNA, 19 nt, Artificial Sequence
  Description of Artificial Sequence: Synthetic oligonucleotide
aggagcuauccucacuauu

SEQ ID NO: 1418470 - RNA, 19 nt, Artificial Sequence
  Description of Artificial Sequence: Synthetic oligonucleotide
cccacgaagagccgguucc

SEQ ID NO: 1418471 - RNA, 19 nt, Artificial Sequence
  Description of Artificial Sequence: Synthetic oligonucleotide
acccucgugguuccgcuga

SEQ ID NO: 1418472 - RNA, 19 nt, Artificial Sequence
  Description of Artificial Sequence: Synthetic oligonucleotide
cucgcucagcagcaaugag

SEQ ID NO: 1418473 - RNA, 19 nt, Artificial Sequence
  Description of Artificial Sequence: Synthetic oligonucleotide
acggggucaaaguggccca

SEQ ID NO: 1418474 - RNA, 19 nt, Artificial Sequence
  Description of Artificial Sequence: Synthetic oligonucleotide
cucuacccagccauucuca

SEQ ID NO: 1418475 - RNA, 19 nt, Artificial Sequence
  Description of Artificial Sequence: Synthetic oligonucleotide
cacgugagcaaaggcggag

SEQ ID NO: 1418476 - RNA, 19 nt, Artificial Sequence
  Description of Artificial Sequence: Synthetic oligonucleotide
uucauggcgccgcgcggca

SEQ ID NO: 1418477 - RNA, 19 nt, Artificial Sequence
  Description of Artificial Sequence: Synthetic oligonucleotide
ggagcuggcaugaggacac

SEQ ID NO: 1418478 - RNA, 19 nt, Artificial Sequence
  Description of Artificial Sequence: Synthetic oligonucleotide
ugcgcacucgggcucuuau

SEQ ID NO: 1418479 - RNA, 19 nt, Artificial Sequence
  Description of Artificial Sequence: Synthetic oligonucleotide
gggauaucucgcuucuuuc

SEQ ID NO: 1418480 - RNA, 19 nt, Artificial Sequence
  Description of Artificial Sequence: Synthetic oligonucleotide
gcuauccucacuauucaga

SEQ ID NO: 1418481 - RNA, 19 nt, Artificial Sequence
  Description of Artificial Sequence: Synthetic oligonucleotide
uccucacuauucagauaaa

SEQ ID NO: 1418482 - RNA, 19 nt, Artificial Sequence
  Description of Artificial Sequence: Synthetic oligonucleotide
cucgcggcuggccaguuca

SEQ ID NO: 1418483 - RNA, 19 nt, Artificial Sequence
  Description of Artificial Sequence: Synthetic oligonucleotide
gauaagagugcagcucacu

SEQ ID NO: 1418484 - RNA, 19 nt, Artificial Sequence
  Description of Artificial Sequence: Synthetic oligonucleotide
aguuggggaugagcuguuc

SEQ ID NO: 1418485 - RNA, 19 nt, Artificial Sequence
  Description of Artificial Sequence: Synthetic oligonucleotide
cucgggcucuuaucagggc

SEQ ID NO: 1418486 - RNA, 19 nt, Artificial Sequence
  Description of Artificial Sequence: Synthetic oligonucleotide
gguuccgggugauggcgcg

SEQ ID NO: 1418487 - RNA, 19 nt, Artificial Sequence
  Description of Artificial Sequence: Synthetic oligonucleotide
agcgaucagcuccgcccgg

SEQ ID NO: 1418488 - RNA, 19 nt, Artificial Sequence
  Description of Artificial Sequence: Synthetic oligonucleotide
ucgugguuccgcugacacu

SEQ ID NO: 1418489 - RNA, 19 nt, Artificial Sequence
  Description of Artificial Sequence: Synthetic oligonucleotide
gaagcgcugcgaugccgug

SEQ ID NO: 1418490 - RNA, 19 nt, Artificial Sequence
  Description of Artificial Sequence: Synthetic oligonucleotide
ugcgccguuccucgauacu

SEQ ID NO: 1418491 - RNA, 19 nt, Artificial Sequence
  Description of Artificial Sequence: Synthetic oligonucleotide
aacguggcagcggcccuug

SEQ ID NO: 1418492 - RNA, 19 nt, Artificial Sequence
  Description of Artificial Sequence: Synthetic oligonucleotide
uggccgcgcucucuaccgg

SEQ ID NO: 1418493 - RNA, 19 nt, Artificial Sequence
  Description of Artificial Sequence: Synthetic oligonucleotide
guagcaggccgccgccucc

SEQ ID NO: 1418494 - RNA, 19 nt, Artificial Sequence
  Description of Artificial Sequence: Synthetic oligonucleotide
ggcagcggcccuugaaaag

SEQ ID NO: 1418495 - RNA, 19 nt, Artificial Sequence
  Description of Artificial Sequence: Synthetic oligonucleotide
ucacggggucaaaguggcc

SEQ ID NO: 1418496 - RNA, 19 nt, Artificial Sequence
  Description of Artificial Sequence: Synthetic oligonucleotide
gguguaguacacugccaca

SEQ ID NO: 1418497 - RNA, 19 nt, Artificial Sequence
  Description of Artificial Sequence: Synthetic oligonucleotide
ggccuuaguaguccucuac

SEQ ID NO: 1418498 - RNA, 19 nt, Artificial Sequence
  Description of Artificial Sequence: Synthetic oligonucleotide
cucauggcccagcaaggga

SEQ ID NO: 1418499 - RNA, 19 nt, Artificial Sequence
  Description of Artificial Sequence: Synthetic oligonucleotide
aacuuccggcguggggcgg

SEQ ID NO: 1418500 - RNA, 19 nt, Artificial Sequence
  Description of Artificial Sequence: Synthetic oligonucleotide
aagagccgguuccccugcu

SEQ ID NO: 1418501 - RNA, 19 nt, Artificial Sequence
  Description of Artificial Sequence: Synthetic oligonucleotide
gccccuucgccguucaagc

SEQ ID NO: 1418502 - RNA, 19 nt, Artificial Sequence
  Description of Artificial Sequence: Synthetic oligonucleotide
ggaagaagugugccuucac

SEQ ID NO: 1418503 - RNA, 19 nt, Artificial Sequence
  Description of Artificial Sequence: Synthetic oligonucleotide
cccuucgccguucaagccc

SEQ ID NO: 1418504 - RNA, 19 nt, Artificial Sequence
  Description of Artificial Sequence: Synthetic oligonucleotide
ugcgaugccguggccgcgc

SEQ ID NO: 1418505 - RNA, 19 nt, Artificial Sequence
  Description of Artificial Sequence: Synthetic oligonucleotide
ucgcugcagauuggcaaug

SEQ ID NO: 1418506 - RNA, 19 nt, Artificial Sequence
  Description of Artificial Sequence: Synthetic oligonucleotide
ccuucgccguucaagcccc

SEQ ID NO: 1418507 - RNA, 19 nt, Artificial Sequence
  Description of Artificial Sequence: Synthetic oligonucleotide
ccuuacccgcuuuccagcc

SEQ ID NO: 1418508 - RNA, 19 nt, Artificial Sequence
  Description of Artificial Sequence: Synthetic oligonucleotide
aguugagucgcugcuccuu

SEQ ID NO: 1418509 - RNA, 19 nt, Artificial Sequence
  Description of Artificial Sequence: Synthetic oligonucleotide
gagccucgcggcuggccag

SEQ ID NO: 1418510 - RNA, 19 nt, Artificial Sequence
  Description of Artificial Sequence: Synthetic oligonucleotide
cacgggaacguggcagcgg

SEQ ID NO: 1418511 - RNA, 19 nt, Artificial Sequence
  Description of Artificial Sequence: Synthetic oligonucleotide
cacugccccaggaagaagu

SEQ ID NO: 1418512 - RNA, 19 nt, Artificial Sequence
  Description of Artificial Sequence: Synthetic oligonucleotide
gggcacuagggauaucauc

SEQ ID NO: 1418513 - RNA, 19 nt, Artificial Sequence
  Description of Artificial Sequence: Synthetic oligonucleotide
gccaccuagcucucgcagc

SEQ ID NO: 1418514 - RNA, 19 nt, Artificial Sequence
  Description of Artificial Sequence: Synthetic oligonucleotide
gggaacguggcagcggccc

SEQ ID NO: 1418515 - RNA, 19 nt, Artificial Sequence
  Description of Artificial Sequence: Synthetic oligonucleotide
cgugguuccgcugacacuc

SEQ ID NO: 1418516 - RNA, 19 nt, Artificial Sequence
  Description of Artificial Sequence: Synthetic oligonucleotide
cacgaagcgcugcgaugcc

SEQ ID NO: 1418517 - RNA, 19 nt, Artificial Sequence
  Description of Artificial Sequence: Synthetic oligonucleotide
gcaugaggacacgugagca

SEQ ID NO: 1418518 - RNA, 19 nt, Artificial Sequence
  Description of Artificial Sequence: Synthetic oligonucleotide
uacccgcuuuccagcccag

SEQ ID NO: 1418519 - RNA, 19 nt, Artificial Sequence
  Description of Artificial Sequence: Synthetic oligonucleotide
cccuuacccgcuuuccagc

SEQ ID NO: 1418520 - RNA, 19 nt, Artificial Sequence
  Description of Artificial Sequence: Synthetic oligonucleotide
gguacuugcggcccacgaa

SEQ ID NO: 1418521 - RNA, 19 nt, Artificial Sequence
  Description of Artificial Sequence: Synthetic oligonucleotide
cagcgcuucuucuuagcaa

SEQ ID NO: 1418522 - RNA, 19 nt, Artificial Sequence
  Description of Artificial Sequence: Synthetic oligonucleotide
gcuggcaugaggacacgug

SEQ ID NO: 1418523 - RNA, 19 nt, Artificial Sequence
  Description of Artificial Sequence: Synthetic oligonucleotide
gauagcacagggcccgguu

SEQ ID NO: 1418524 - RNA, 19 nt, Artificial Sequence
  Description of Artificial Sequence: Synthetic oligonucleotide
uaccggccccgccccacag

SEQ ID NO: 1418525 - RNA, 19 nt, Artificial Sequence
  Description of Artificial Sequence: Synthetic oligonucleotide
caccggaacuuccggcgug

SEQ ID NO: 1418526 - RNA, 19 nt, Artificial Sequence
  Description of Artificial Sequence: Synthetic oligonucleotide
caucucuagcuggcacugc

SEQ ID NO: 1418527 - RNA, 19 nt, Artificial Sequence
  Description of Artificial Sequence: Synthetic oligonucleotide
uucgccguucaagccccgc

SEQ ID NO: 1418528 - RNA, 19 nt, Artificial Sequence
  Description of Artificial Sequence: Synthetic oligonucleotide
guucacgaagcgcugcgau

SEQ ID NO: 1418529 - RNA, 19 nt, Artificial Sequence
  Description of Artificial Sequence: Synthetic oligonucleotide
agauuggcaauggccucau

SEQ ID NO: 1418530 - RNA, 19 nt, Artificial Sequence
  Description of Artificial Sequence: Synthetic oligonucleotide
guuccgggugauggcgcgg

SEQ ID NO: 1418531 - RNA, 19 nt, Artificial Sequence
  Description of Artificial Sequence: Synthetic oligonucleotide
cacccuuacccgcuuucca

SEQ ID NO: 1418532 - RNA, 19 nt, Artificial Sequence
  Description of Artificial Sequence: Synthetic oligonucleotide
uuaucgugcuuggccucaa

SEQ ID NO: 1418533 - RNA, 19 nt, Artificial Sequence
  Description of Artificial Sequence: Synthetic oligonucleotide
cacaguaaccaggagcuau

SEQ ID NO: 1418534 - RNA, 19 nt, Artificial Sequence
  Description of Artificial Sequence: Synthetic oligonucleotide
uccuggugaaugcgccguu

SEQ ID NO: 1418535 - RNA, 19 nt, Artificial Sequence
  Description of Artificial Sequence: Synthetic oligonucleotide
gcccgguugguguaguaca

SEQ ID NO: 1418536 - RNA, 19 nt, Artificial Sequence
  Description of Artificial Sequence: Synthetic oligonucleotide
cccgccaccggaacuuccg

SEQ ID NO: 1418537 - RNA, 19 nt, Artificial Sequence
  Description of Artificial Sequence: Synthetic oligonucleotide
guuccucgauacuguucca

SEQ ID NO: 1418538 - RNA, 19 nt, Artificial Sequence
  Description of Artificial Sequence: Synthetic oligonucleotide
agcuccgcccggucggcga

SEQ ID NO: 1418539 - RNA, 19 nt, Artificial Sequence
  Description of Artificial Sequence: Synthetic oligonucleotide
ggccaaguuggggaugagc

SEQ ID NO: 1418540 - RNA, 19 nt, Artificial Sequence
  Description of Artificial Sequence: Synthetic oligonucleotide
ccgcuuuccagcccagaag

SEQ ID NO: 1418541 - RNA, 19 nt, Artificial Sequence
  Description of Artificial Sequence: Synthetic oligonucleotide
gagcuggcaugaggacacg

SEQ ID NO: 1418542 - RNA, 19 nt, Artificial Sequence
  Description of Artificial Sequence: Synthetic oligonucleotide
ggauaucaucuccaaaguu

SEQ ID NO: 1418543 - RNA, 19 nt, Artificial Sequence
  Description of Artificial Sequence: Synthetic oligonucleotide
gaaugcgccguuccucgau

SEQ ID NO: 1418544 - RNA, 19 nt, Artificial Sequence
  Description of Artificial Sequence: Synthetic oligonucleotide
agcuggcaugaggacacgu

SEQ ID NO: 1418545 - RNA, 19 nt, Artificial Sequence
  Description of Artificial Sequence: Synthetic oligonucleotide
cagggacacaaacuauaua

SEQ ID NO: 1418546 - RNA, 19 nt, Artificial Sequence
  Description of Artificial Sequence: Synthetic oligonucleotide
ccgccccacaguaaccagg

SEQ ID NO: 1418547 - RNA, 19 nt, Artificial Sequence
  Description of Artificial Sequence: Synthetic oligonucleotide
acacgugagcaaaggcgga

SEQ ID NO: 1418548 - RNA, 19 nt, Artificial Sequence
  Description of Artificial Sequence: Synthetic oligonucleotide
guggggcggagcuggcaug

SEQ ID NO: 1418549 - RNA, 19 nt, Artificial Sequence
  Description of Artificial Sequence: Synthetic oligonucleotide
acccgccaccggaacuucc

SEQ ID NO: 1418550 - RNA, 19 nt, Artificial Sequence
  Description of Artificial Sequence: Synthetic oligonucleotide
ggccaaacuauaggcucgc

SEQ ID NO: 1418551 - RNA, 19 nt, Artificial Sequence
  Description of Artificial Sequence: Synthetic oligonucleotide
gggaugccgagaaggggag

SEQ ID NO: 1418552 - RNA, 19 nt, Artificial Sequence
  Description of Artificial Sequence: Synthetic oligonucleotide
cuucgccguucaagccccg

SEQ ID NO: 1418553 - RNA, 19 nt, Artificial Sequence
  Description of Artificial Sequence: Synthetic oligonucleotide
ccucuacccagccauucuc

SEQ ID NO: 1418554 - RNA, 19 nt, Artificial Sequence
  Description of Artificial Sequence: Synthetic oligonucleotide
augagccuggugagauaag

SEQ ID NO: 1418555 - RNA, 19 nt, Artificial Sequence
  Description of Artificial Sequence: Synthetic oligonucleotide
ggagccucgcggcuggcca

SEQ ID NO: 1418556 - RNA, 19 nt, Artificial Sequence
  Description of Artificial Sequence: Synthetic oligonucleotide
gcgccguuccucgauacug

SEQ ID NO: 1418557 - RNA, 19 nt, Artificial Sequence
  Description of Artificial Sequence: Synthetic oligonucleotide
cccgcaucagcucaaagcu

SEQ ID NO: 1418558 - RNA, 19 nt, Artificial Sequence
  Description of Artificial Sequence: Synthetic oligonucleotide
gacacucuuccaguucccu

SEQ ID NO: 1418559 - RNA, 19 nt, Artificial Sequence
  Description of Artificial Sequence: Synthetic oligonucleotide
gccguucaagccccgcccc

SEQ ID NO: 1418560 - RNA, 19 nt, Artificial Sequence
  Description of Artificial Sequence: Synthetic oligonucleotide
cucgcugcagauuggcaau

SEQ ID NO: 1418561 - RNA, 19 nt, Artificial Sequence
  Description of Artificial Sequence: Synthetic oligonucleotide
uccugcgcacucgggcucu

SEQ ID NO: 1418562 - RNA, 19 nt, Artificial Sequence
  Description of Artificial Sequence: Synthetic oligonucleotide
ccaguucccucucucgcuc

SEQ ID NO: 1418563 - RNA, 19 nt, Artificial Sequence
  Description of Artificial Sequence: Synthetic oligonucleotide
cgagaaggggagcaguuca

SEQ ID NO: 1418564 - RNA, 19 nt, Artificial Sequence
  Description of Artificial Sequence: Synthetic oligonucleotide
gcggcuggccaguucacga

SEQ ID NO: 1418565 - RNA, 19 nt, Artificial Sequence
  Description of Artificial Sequence: Synthetic oligonucleotide
caccuagcucucgcagccc

SEQ ID NO: 1418566 - RNA, 19 nt, Artificial Sequence
  Description of Artificial Sequence: Synthetic oligonucleotide
augccguggccgcgcucuc

SEQ ID NO: 1418567 - RNA, 19 nt, Artificial Sequence
  Description of Artificial Sequence: Synthetic oligonucleotide
uggccaaguuggggaugag

SEQ ID NO: 1418568 - RNA, 19 nt, Artificial Sequence
  Description of Artificial Sequence: Synthetic oligonucleotide
cagaacccaucagcaagga

SEQ ID NO: 1418569 - RNA, 19 nt, Artificial Sequence
  Description of Artificial Sequence: Synthetic oligonucleotide
ccgcaucagcucaaagcug

SEQ ID NO: 1418570 - RNA, 19 nt, Artificial Sequence
  Description of Artificial Sequence: Synthetic oligonucleotide
agggcacuagggauaucau

SEQ ID NO: 1418571 - RNA, 19 nt, Artificial Sequence
  Description of Artificial Sequence: Synthetic oligonucleotide
caaugagccuggugagaua

SEQ ID NO: 1418572 - RNA, 19 nt, Artificial Sequence
  Description of Artificial Sequence: Synthetic oligonucleotide
ccagcgcuucuucuuagca

SEQ ID NO: 1418573 - RNA, 19 nt, Artificial Sequence
  Description of Artificial Sequence: Synthetic oligonucleotide
ccuagcucucgcagcccgc

SEQ ID NO: 1418574 - RNA, 19 nt, Artificial Sequence
  Description of Artificial Sequence: Synthetic oligonucleotide
ggccgcgcucucuaccggc

SEQ ID NO: 1418575 - RNA, 19 nt, Artificial Sequence
  Description of Artificial Sequence: Synthetic oligonucleotide
cgcacucgggcucuuauca

SEQ ID NO: 1418576 - RNA, 19 nt, Artificial Sequence
  Description of Artificial Sequence: Synthetic oligonucleotide
ccguuccucgauacuguuc

SEQ ID NO: 1418577 - RNA, 19 nt, Artificial Sequence
  Description of Artificial Sequence: Synthetic oligonucleotide
cugcgaugccguggccgcg

SEQ ID NO: 1418578 - RNA, 19 nt, Artificial Sequence
  Description of Artificial Sequence: Synthetic oligonucleotide
gcaaugcgaagggcacuag

SEQ ID NO: 1418579 - RNA, 19 nt, Artificial Sequence
  Description of Artificial Sequence: Synthetic oligonucleotide
ccggccaccuagcucucgc

SEQ ID NO: 1418580 - RNA, 19 nt, Artificial Sequence
  Description of Artificial Sequence: Synthetic oligonucleotide
gcacggcuugggcuccgcg

SEQ ID NO: 1418581 - RNA, 19 nt, Artificial Sequence
  Description of Artificial Sequence: Synthetic oligonucleotide
aggcggagccucgcggcug

SEQ ID NO: 1418582 - RNA, 19 nt, Artificial Sequence
  Description of Artificial Sequence: Synthetic oligonucleotide
ccccuucgccguucaagcc

SEQ ID NO: 1418583 - RNA, 19 nt, Artificial Sequence
  Description of Artificial Sequence: Synthetic oligonucleotide
ccacccuuacccgcuuucc

SEQ ID NO: 1418584 - RNA, 19 nt, Artificial Sequence
  Description of Artificial Sequence: Synthetic oligonucleotide
cugccacaaguggguuccg

SEQ ID NO: 1418585 - RNA, 19 nt, Artificial Sequence
  Description of Artificial Sequence: Synthetic oligonucleotide
ggguuccgggugauggcgc

SEQ ID NO: 1418586 - RNA, 19 nt, Artificial Sequence
  Description of Artificial Sequence: Synthetic oligonucleotide
ccacgaagagccgguuccc

SEQ ID NO: 1418587 - RNA, 19 nt, Artificial Sequence
  Description of Artificial Sequence: Synthetic oligonucleotide
cgccguucaagccccgccc

SEQ ID NO: 1418588 - RNA, 19 nt, Artificial Sequence
  Description of Artificial Sequence: Synthetic oligonucleotide
cuccggcagucagcaagug

SEQ ID NO: 1418589 - RNA, 19 nt, Artificial Sequence
  Description of Artificial Sequence: Synthetic oligonucleotide
gcgaagggcacuagggaua

SEQ ID NO: 1418590 - RNA, 19 nt, Artificial Sequence
  Description of Artificial Sequence: Synthetic oligonucleotide
cggaacuuccggcgugggg

SEQ ID NO: 1418591 - RNA, 19 nt, Artificial Sequence
  Description of Artificial Sequence: Synthetic oligonucleotide
aguccucuacccagccauu

SEQ ID NO: 1418592 - RNA, 19 nt, Artificial Sequence
  Description of Artificial Sequence: Synthetic oligonucleotide
ggggccuuaguaguccucu

SEQ ID NO: 1418593 - RNA, 19 nt, Artificial Sequence
  Description of Artificial Sequence: Synthetic oligonucleotide
gugauaccacuggguguga

SEQ ID NO: 1418594 - RNA, 19 nt, Artificial Sequence
  Description of Artificial Sequence: Synthetic oligonucleotide
gcgcggccguagcaggccg

SEQ ID NO: 1418595 - RNA, 19 nt, Artificial Sequence
  Description of Artificial Sequence: Synthetic oligonucleotide
ccgggugauggcgcggccg

SEQ ID NO: 1418596 - RNA, 19 nt, Artificial Sequence
  Description of Artificial Sequence: Synthetic oligonucleotide
gaagggcacuagggauauc

SEQ ID NO: 1418597 - RNA, 19 nt, Artificial Sequence
  Description of Artificial Sequence: Synthetic oligonucleotide
ccgccaccggaacuuccgg

SEQ ID NO: 1418598 - RNA, 19 nt, Artificial Sequence
  Description of Artificial Sequence: Synthetic oligonucleotide
ccagggacacaaacuauau

SEQ ID NO: 1418599 - RNA, 19 nt, Artificial Sequence
  Description of Artificial Sequence: Synthetic oligonucleotide
ccgagaaggggagcaguuc

SEQ ID NO: 1418600 - RNA, 19 nt, Artificial Sequence
  Description of Artificial Sequence: Synthetic oligonucleotide
ccuggugaaugcgccguuc

SEQ ID NO: 1418601 - RNA, 19 nt, Artificial Sequence
  Description of Artificial Sequence: Synthetic oligonucleotide
ccuugcgaucauaagugau

SEQ ID NO: 1418602 - RNA, 19 nt, Artificial Sequence
  Description of Artificial Sequence: Synthetic oligonucleotide
gcgcucucuaccggccccg

SEQ ID NO: 1418603 - RNA, 19 nt, Artificial Sequence
  Description of Artificial Sequence: Synthetic oligonucleotide
cgcugcagauuggcaaugg

SEQ ID NO: 1418604 - RNA, 19 nt, Artificial Sequence
  Description of Artificial Sequence: Synthetic oligonucleotide
cgcggcacggcuugggcuc

SEQ ID NO: 1418605 - RNA, 19 nt, Artificial Sequence
  Description of Artificial Sequence: Synthetic oligonucleotide
ggucggcgacccgccaccg

SEQ ID NO: 1418606 - RNA, 19 nt, Artificial Sequence
  Description of Artificial Sequence: Synthetic oligonucleotide
cgccaccggaacuuccggc

SEQ ID NO: 1418607 - RNA, 19 nt, Artificial Sequence
  Description of Artificial Sequence: Synthetic oligonucleotide
ccgggucacggggucaaag

SEQ ID NO: 1418608 - RNA, 19 nt, Artificial Sequence
  Description of Artificial Sequence: Synthetic oligonucleotide
gcgcacucgggcucuuauc

SEQ ID NO: 1418609 - RNA, 19 nt, Artificial Sequence
  Description of Artificial Sequence: Synthetic oligonucleotide
cagcuccgcccggucggcg

SEQ ID NO: 1418610 - RNA, 19 nt, Artificial Sequence
  Description of Artificial Sequence: Synthetic oligonucleotide
agccucgcggcuggccagu

SEQ ID NO: 1418611 - RNA, 19 nt, Artificial Sequence
  Description of Artificial Sequence: Synthetic oligonucleotide
caggagcuauccucacuau

SEQ ID NO: 1418612 - RNA, 19 nt, Artificial Sequence
  Description of Artificial Sequence: Synthetic oligonucleotide
cccgccccacaguaaccag

SEQ ID NO: 1418613 - RNA, 19 nt, Artificial Sequence
  Description of Artificial Sequence: Synthetic oligonucleotide
acccgcuuuccagcccaga

SEQ ID NO: 1418614 - RNA, 19 nt, Artificial Sequence
  Description of Artificial Sequence: Synthetic oligonucleotide
agggcccgguugguguagu

SEQ ID NO: 1418615 - RNA, 19 nt, Artificial Sequence
  Description of Artificial Sequence: Synthetic oligonucleotide
cagcccgcgcagcgaucag

SEQ ID NO: 1418616 - RNA, 19 nt, Artificial Sequence
  Description of Artificial Sequence: Synthetic oligonucleotide
cccaggaagaagugugccu

SEQ ID NO: 1418617 - RNA, 19 nt, Artificial Sequence
  Description of Artificial Sequence: Synthetic oligonucleotide
gggcucuccggcagucagc

SEQ ID NO: 1418618 - RNA, 19 nt, Artificial Sequence
  Description of Artificial Sequence: Synthetic oligonucleotide
gccgcgcucucuaccggcc

SEQ ID NO: 1418619 - RNA, 19 nt, Artificial Sequence
  Description of Artificial Sequence: Synthetic oligonucleotide
cuccgggucacggggucaa

SEQ ID NO: 1418620 - RNA, 19 nt, Artificial Sequence
  Description of Artificial Sequence: Synthetic oligonucleotide
cgccccuucgccguucaag

SEQ ID NO: 1418621 - RNA, 19 nt, Artificial Sequence
  Description of Artificial Sequence: Synthetic oligonucleotide
ccgguuccccugcuccuug

SEQ ID NO: 1418622 - RNA, 19 nt, Artificial Sequence
  Description of Artificial Sequence: Synthetic oligonucleotide
cuccgcccggucggcgacc

SEQ ID NO: 1418623 - RNA, 19 nt, Artificial Sequence
  Description of Artificial Sequence: Synthetic oligonucleotide
cggucggcgacccgccacc

SEQ ID NO: 1418624 - RNA, 19 nt, Artificial Sequence
  Description of Artificial Sequence: Synthetic oligonucleotide
ccggucggcgacccgccac

SEQ ID NO: 1418625 - RNA, 19 nt, Artificial Sequence
  Description of Artificial Sequence: Synthetic oligonucleotide
cguagcaggccgccgccuc

SEQ ID NO: 1418626 - RNA, 19 nt, Artificial Sequence
  Description of Artificial Sequence: Synthetic oligonucleotide
cgcccggccaccuagcucu

SEQ ID NO: 1418627 - RNA, 19 nt, Artificial Sequence
  Description of Artificial Sequence: Synthetic oligonucleotide
gggccuuaguaguccucua

SEQ ID NO: 1418628 - RNA, 19 nt, Artificial Sequence
  Description of Artificial Sequence: Synthetic oligonucleotide
ccgcgcucucuaccggccc

SEQ ID NO: 1418629 - RNA, 19 nt, Artificial Sequence
  Description of Artificial Sequence: Synthetic oligonucleotide
ccauguauuuaucgugcuu

SEQ ID NO: 1418630 - RNA, 19 nt, Artificial Sequence
  Description of Artificial Sequence: Synthetic oligonucleotide
ccggaacuuccggcguggg

SEQ ID NO: 1418631 - RNA, 19 nt, Artificial Sequence
  Description of Artificial Sequence: Synthetic oligonucleotide
cucuaccggccccgcccca

SEQ ID NO: 1418632 - RNA, 19 nt, Artificial Sequence
  Description of Artificial Sequence: Synthetic oligonucleotide
ggcccggauguggccauca

SEQ ID NO: 1418633 - RNA, 19 nt, Artificial Sequence
  Description of Artificial Sequence: Synthetic oligonucleotide
cccucgugguuccgcugac

SEQ ID NO: 1418634 - RNA, 19 nt, Artificial Sequence
  Description of Artificial Sequence: Synthetic oligonucleotide
guucaggcugcugcaucuu

SEQ ID NO: 1418635 - RNA, 19 nt, Artificial Sequence
  Description of Artificial Sequence: Synthetic oligonucleotide
gcgcccggccaccuagcuc

SEQ ID NO: 1418636 - RNA, 19 nt, Artificial Sequence
  Description of Artificial Sequence: Synthetic oligonucleotide
ggcaggauauggggccuua

SEQ ID NO: 1418637 - RNA, 19 nt, Artificial Sequence
  Description of Artificial Sequence: Synthetic oligonucleotide
ggcacggcuugggcuccgc

SEQ ID NO: 1418638 - RNA, 19 nt, Artificial Sequence
  Description of Artificial Sequence: Synthetic oligonucleotide
gcggcacggcuugggcucc

SEQ ID NO: 1418639 - RNA, 19 nt, Artificial Sequence
  Description of Artificial Sequence: Synthetic oligonucleotide
ggcgccgcgcggcacggcu

SEQ ID NO: 1418640 - RNA, 19 nt, Artificial Sequence
  Description of Artificial Sequence: Synthetic oligonucleotide
caaguggguuccgggugau

SEQ ID NO: 1418641 - RNA, 19 nt, Artificial Sequence
  Description of Artificial Sequence: Synthetic oligonucleotide
gcuccgggucacgggguca

SEQ ID NO: 1418642 - RNA, 19 nt, Artificial Sequence
  Description of Artificial Sequence: Synthetic oligonucleotide
gcccgcgcagcgaucagcu

SEQ ID NO: 1418643 - RNA, 19 nt, Artificial Sequence
  Description of Artificial Sequence: Synthetic oligonucleotide
gccguuccucgauacuguu

SEQ ID NO: 1418644 - RNA, 19 nt, Artificial Sequence
  Description of Artificial Sequence: Synthetic oligonucleotide
ccguggccgcgcucucuac

SEQ ID NO: 1418645 - RNA, 19 nt, Artificial Sequence
  Description of Artificial Sequence: Synthetic oligonucleotide
ccgcgcccggccaccuagc

SEQ ID NO: 1418646 - RNA, 19 nt, Artificial Sequence
  Description of Artificial Sequence: Synthetic oligonucleotide
ccucgcggcuggccaguuc

SEQ ID NO: 1418647 - RNA, 19 nt, Artificial Sequence
  Description of Artificial Sequence: Synthetic oligonucleotide
cccgcgcagcgaucagcuc

SEQ ID NO: 1418648 - RNA, 19 nt, Artificial Sequence
  Description of Artificial Sequence: Synthetic oligonucleotide
gcgcugcgaugccguggcc

SEQ ID NO: 1418649 - RNA, 19 nt, Artificial Sequence
  Description of Artificial Sequence: Synthetic oligonucleotide
ccaccggaacuuccggcgu

SEQ ID NO: 1418650 - RNA, 19 nt, Artificial Sequence
  Description of Artificial Sequence: Synthetic oligonucleotide
cgccgcgcggcacggcuug

SEQ ID NO: 1418651 - RNA, 19 nt, Artificial Sequence
  Description of Artificial Sequence: Synthetic oligonucleotide
gccgcgcggcacggcuugg

SEQ ID NO: 1418652 - RNA, 19 nt, Artificial Sequence
  Description of Artificial Sequence: Synthetic oligonucleotide
cggagccucgcggcuggcc

SEQ ID NO: 1418653 - RNA, 19 nt, Artificial Sequence
  Description of Artificial Sequence: Synthetic oligonucleotide
cgccguuccucgauacugu

SEQ ID NO: 1418654 - RNA, 19 nt, Artificial Sequence
  Description of Artificial Sequence: Synthetic oligonucleotide
ccgguugguguaguacacu

SEQ ID NO: 1418655 - RNA, 19 nt, Artificial Sequence
  Description of Artificial Sequence: Synthetic oligonucleotide
cgaagggcacuagggauau

SEQ ID NO: 1418656 - RNA, 19 nt, Artificial Sequence
  Description of Artificial Sequence: Synthetic oligonucleotide
cugcgcacucgggcucuua

SEQ ID NO: 1418657 - RNA, 19 nt, Artificial Sequence
  Description of Artificial Sequence: Synthetic oligonucleotide
cggccaccuagcucucgca

SEQ ID NO: 1418658 - RNA, 19 nt, Artificial Sequence
  Description of Artificial Sequence: Synthetic oligonucleotide
cgcucucuaccggccccgc

SEQ ID NO: 1418659 - RNA, 19 nt, Artificial Sequence
  Description of Artificial Sequence: Synthetic oligonucleotide
cggccguagcaggccgccg

SEQ ID NO: 1418660 - RNA, 19 nt, Artificial Sequence
  Description of Artificial Sequence: Synthetic oligonucleotide
cgauacuguuccagcgcuu

SEQ ID NO: 1418661 - RNA, 19 nt, Artificial Sequence
  Description of Artificial Sequence: Synthetic oligonucleotide
cccggucggcgacccgcca

SEQ ID NO: 1418662 - RNA, 19 nt, Artificial Sequence
  Description of Artificial Sequence: Synthetic oligonucleotide
cggcacggcuugggcuccg

SEQ ID NO: 1418663 - RNA, 19 nt, Artificial Sequence
  Description of Artificial Sequence: Synthetic oligonucleotide
gcccggccaccuagcucuc

SEQ ID NO: 1418664 - RNA, 19 nt, Artificial Sequence
  Description of Artificial Sequence: Synthetic oligonucleotide
cggcgacccgccaccggaa

SEQ ID NO: 1418665 - RNA, 19 nt, Artificial Sequence
  Description of Artificial Sequence: Synthetic oligonucleotide
ccccgccccuucgccguuc

SEQ ID NO: 1418666 - RNA, 19 nt, Artificial Sequence
  Description of Artificial Sequence: Synthetic oligonucleotide
ccguagcaggccgccgccu

SEQ ID NO: 1418667 - RNA, 19 nt, Artificial Sequence
  Description of Artificial Sequence: Synthetic oligonucleotide
cgcgcccggccaccuagcu

SEQ ID NO: 1418668 - RNA, 19 nt, Artificial Sequence
  Description of Artificial Sequence: Synthetic oligonucleotide
ccgccccuucgccguucaa

SEQ ID NO: 1418669 - RNA, 19 nt, Artificial Sequence
  Description of Artificial Sequence: Synthetic oligonucleotide
agaaguguuacuuuagccc

SEQ ID NO: 1418670 - RNA, 19 nt, Artificial Sequence
  Description of Artificial Sequence: Synthetic oligonucleotide
uuauaagccauguaaaucc

SEQ ID NO: 1418671 - RNA, 19 nt, Artificial Sequence
  Description of Artificial Sequence: Synthetic oligonucleotide
cuauaauuuacucagguag

SEQ ID NO: 1418672 - RNA, 19 nt, Artificial Sequence
  Description of Artificial Sequence: Synthetic oligonucleotide
aacauaucacuucacuggc

SEQ ID NO: 1418673 - RNA, 19 nt, Artificial Sequence
  Description of Artificial Sequence: Synthetic oligonucleotide
gaacauaucacuucacugg

SEQ ID NO: 1418674 - RNA, 19 nt, Artificial Sequence
  Description of Artificial Sequence: Synthetic oligonucleotide
uguaauaacaucugagucc

SEQ ID NO: 1418675 - RNA, 19 nt, Artificial Sequence
  Description of Artificial Sequence: Synthetic oligonucleotide
uuuaaguugaauuauuuaa

SEQ ID NO: 1418676 - RNA, 19 nt, Artificial Sequence
  Description of Artificial Sequence: Synthetic oligonucleotide
ucugucaucaggaaacucg

SEQ ID NO: 1418677 - RNA, 19 nt, Artificial Sequence
  Description of Artificial Sequence: Synthetic oligonucleotide
uguucaucuaacaauagcu

SEQ ID NO: 1418678 - RNA, 19 nt, Artificial Sequence
  Description of Artificial Sequence: Synthetic oligonucleotide
uaccuaacaauacagaaga

SEQ ID NO: 1418679 - RNA, 19 nt, Artificial Sequence
  Description of Artificial Sequence: Synthetic oligonucleotide
aguugaauuauuuaaugug

SEQ ID NO: 1418680 - RNA, 19 nt, Artificial Sequence
  Description of Artificial Sequence: Synthetic oligonucleotide
ucauucuagagucugacug

SEQ ID NO: 1418681 - RNA, 19 nt, Artificial Sequence
  Description of Artificial Sequence: Synthetic oligonucleotide
ugcuuuaucuucaaguugc

SEQ ID NO: 1418682 - RNA, 19 nt, Artificial Sequence
  Description of Artificial Sequence: Synthetic oligonucleotide
uuuauuugcgcucccacag

SEQ ID NO: 1418683 - RNA, 19 nt, Artificial Sequence
  Description of Artificial Sequence: Synthetic oligonucleotide
uuugauauuaccauaugua

SEQ ID NO: 1418684 - RNA, 19 nt, Artificial Sequence
  Description of Artificial Sequence: Synthetic oligonucleotide
auaguacaaacauuuuccc

SEQ ID NO: 1418685 - RNA, 19 nt, Artificial Sequence
  Description of Artificial Sequence: Synthetic oligonucleotide
uguaccagaauaaaccagc

SEQ ID NO: 1418686 - RNA, 19 nt, Artificial Sequence
  Description of Artificial Sequence: Synthetic oligonucleotide
aaauguagaagagaacuag

SEQ ID NO: 1418687 - RNA, 19 nt, Artificial Sequence
  Description of Artificial Sequence: Synthetic oligonucleotide
auagaucuggcauuuguac

SEQ ID NO: 1418688 - RNA, 19 nt, Artificial Sequence
  Description of Artificial Sequence: Synthetic oligonucleotide
uaaacaggcggcaacagug

SEQ ID NO: 1418689 - RNA, 19 nt, Artificial Sequence
  Description of Artificial Sequence: Synthetic oligonucleotide
gaauuauuuaaugugagca

SEQ ID NO: 1418690 - RNA, 19 nt, Artificial Sequence
  Description of Artificial Sequence: Synthetic oligonucleotide
ucaaguauagaggacauga

SEQ ID NO: 1418691 - RNA, 19 nt, Artificial Sequence
  Description of Artificial Sequence: Synthetic oligonucleotide
acauuaguggaacauauca

SEQ ID NO: 1418692 - RNA, 19 nt, Artificial Sequence
  Description of Artificial Sequence: Synthetic oligonucleotide
aaaggcuagagaaaucugg

SEQ ID NO: 1418693 - RNA, 19 nt, Artificial Sequence
  Description of Artificial Sequence: Synthetic oligonucleotide
auugaaucgcuuuaguuca

SEQ ID NO: 1418694 - RNA, 19 nt, Artificial Sequence
  Description of Artificial Sequence: Synthetic oligonucleotide
agugauucaacucguguuc

SEQ ID NO: 1418695 - RNA, 19 nt, Artificial Sequence
  Description of Artificial Sequence: Synthetic oligonucleotide
uauaauuuacucagguaga

SEQ ID NO: 1418696 - RNA, 19 nt, Artificial Sequence
  Description of Artificial Sequence: Synthetic oligonucleotide
auuaguggaacauaucacu

SEQ ID NO: 1418697 - RNA, 19 nt, Artificial Sequence
  Description of Artificial Sequence: Synthetic oligonucleotide
gaagaaaggauguccuugg

SEQ ID NO: 1418698 - RNA, 19 nt, Artificial Sequence
  Description of Artificial Sequence: Synthetic oligonucleotide
agaauucccagucuggguc

SEQ ID NO: 1418699 - RNA, 19 nt, Artificial Sequence
  Description of Artificial Sequence: Synthetic oligonucleotide
auuauaagccauguaaauc

SEQ ID NO: 1418700 - RNA, 19 nt, Artificial Sequence
  Description of Artificial Sequence: Synthetic oligonucleotide
cuuuaguucacagaaagug

SEQ ID NO: 1418701 - RNA, 19 nt, Artificial Sequence
  Description of Artificial Sequence: Synthetic oligonucleotide
cauugaaucgcuuuaguuc

SEQ ID NO: 1418702 - RNA, 19 nt, Artificial Sequence
  Description of Artificial Sequence: Synthetic oligonucleotide
auacaugggacauuaaacu

SEQ ID NO: 1418703 - RNA, 19 nt, Artificial Sequence
  Description of Artificial Sequence: Synthetic oligonucleotide
agagaaaucuggaagaaag

SEQ ID NO: 1418704 - RNA, 19 nt, Artificial Sequence
  Description of Artificial Sequence: Synthetic oligonucleotide
guuacuuuagcccucuccc

SEQ ID NO: 1418705 - RNA, 19 nt, Artificial Sequence
  Description of Artificial Sequence: Synthetic oligonucleotide
aaagguaccugcccacugg

SEQ ID NO: 1418706 - RNA, 19 nt, Artificial Sequence
  Description of Artificial Sequence: Synthetic oligonucleotide
uauccagugggcuguaugg

SEQ ID NO: 1418707 - RNA, 19 nt, Artificial Sequence
  Description of Artificial Sequence: Synthetic oligonucleotide
uguaccuaacaauacagaa

SEQ ID NO: 1418708 - RNA, 19 nt, Artificial Sequence
  Description of Artificial Sequence: Synthetic oligonucleotide
aagagaacuagcuggcuca

SEQ ID NO: 1418709 - RNA, 19 nt, Artificial Sequence
  Description of Artificial Sequence: Synthetic oligonucleotide
agugagaaacauuagugga

SEQ ID NO: 1418710 - RNA, 19 nt, Artificial Sequence
  Description of Artificial Sequence: Synthetic oligonucleotide
ugauauuaccauauguaaa

SEQ ID NO: 1418711 - RNA, 19 nt, Artificial Sequence
  Description of Artificial Sequence: Synthetic oligonucleotide
ucacuauugacugugugag

SEQ ID NO: 1418712 - RNA, 19 nt, Artificial Sequence
  Description of Artificial Sequence: Synthetic oligonucleotide
aacaauccaaaagagacau

SEQ ID NO: 1418713 - RNA, 19 nt, Artificial Sequence
  Description of Artificial Sequence: Synthetic oligonucleotide
uugcagauauaucccaccg

SEQ ID NO: 1418714 - RNA, 19 nt, Artificial Sequence
  Description of Artificial Sequence: Synthetic oligonucleotide
aacuagcuggcucaaaggu

SEQ ID NO: 1418715 - RNA, 19 nt, Artificial Sequence
  Description of Artificial Sequence: Synthetic oligonucleotide
ggcucuauaauuuacucag

SEQ ID NO: 1418716 - RNA, 19 nt, Artificial Sequence
  Description of Artificial Sequence: Synthetic oligonucleotide
agggugugaaaccacgccc

SEQ ID NO: 1418717 - RNA, 19 nt, Artificial Sequence
  Description of Artificial Sequence: Synthetic oligonucleotide
aggaaacucgcauuccagc

SEQ ID NO: 1418718 - RNA, 19 nt, Artificial Sequence
  Description of Artificial Sequence: Synthetic oligonucleotide
uauuugcgcucccacaggg

SEQ ID NO: 1418719 - RNA, 19 nt, Artificial Sequence
  Description of Artificial Sequence: Synthetic oligonucleotide
uucacuauugacuguguga

SEQ ID NO: 1418720 - RNA, 19 nt, Artificial Sequence
  Description of Artificial Sequence: Synthetic oligonucleotide
uagaaguguuacuuuagcc

SEQ ID NO: 1418721 - RNA, 19 nt, Artificial Sequence
  Description of Artificial Sequence: Synthetic oligonucleotide
acaugggacauuaaacugc

SEQ ID NO: 1418722 - RNA, 19 nt, Artificial Sequence
  Description of Artificial Sequence: Synthetic oligonucleotide
aaugauucagcaacccuag

SEQ ID NO: 1418723 - RNA, 19 nt, Artificial Sequence
  Description of Artificial Sequence: Synthetic oligonucleotide
uacaugggacauuaaacug

SEQ ID NO: 1418724 - RNA, 19 nt, Artificial Sequence
  Description of Artificial Sequence: Synthetic oligonucleotide
uaagccauguaaauccugu

SEQ ID NO: 1418725 - RNA, 19 nt, Artificial Sequence
  Description of Artificial Sequence: Synthetic oligonucleotide
uuugcuuuaucuucaaguu

SEQ ID NO: 1418726 - RNA, 19 nt, Artificial Sequence
  Description of Artificial Sequence: Synthetic oligonucleotide
guucgugaagcacagaaac

SEQ ID NO: 1418727 - RNA, 19 nt, Artificial Sequence
  Description of Artificial Sequence: Synthetic oligonucleotide
agauauaucccaccgggcu

SEQ ID NO: 1418728 - RNA, 19 nt, Artificial Sequence
  Description of Artificial Sequence: Synthetic oligonucleotide
gugaacagaggucagguug

SEQ ID NO: 1418729 - RNA, 19 nt, Artificial Sequence
  Description of Artificial Sequence: Synthetic oligonucleotide
agcacacuuucuccaaucc

SEQ ID NO: 1418730 - RNA, 19 nt, Artificial Sequence
  Description of Artificial Sequence: Synthetic oligonucleotide
ugauucagcaacccuagaa

SEQ ID NO: 1418731 - RNA, 19 nt, Artificial Sequence
  Description of Artificial Sequence: Synthetic oligonucleotide
uucaucuaacaauagcuaa

SEQ ID NO: 1418732 - RNA, 19 nt, Artificial Sequence
  Description of Artificial Sequence: Synthetic oligonucleotide
agaauaaaccagccuguuc

SEQ ID NO: 1418733 - RNA, 19 nt, Artificial Sequence
  Description of Artificial Sequence: Synthetic oligonucleotide
aguggaacauaucacuuca

SEQ ID NO: 1418734 - RNA, 19 nt, Artificial Sequence
  Description of Artificial Sequence: Synthetic oligonucleotide
aagguacucugaucugagc

SEQ ID NO: 1418735 - RNA, 19 nt, Artificial Sequence
  Description of Artificial Sequence: Synthetic oligonucleotide
aaacucgcauuccagcuca

SEQ ID NO: 1418736 - RNA, 19 nt, Artificial Sequence
  Description of Artificial Sequence: Synthetic oligonucleotide
cuagcuggcucaaagguac

SEQ ID NO: 1418737 - RNA, 19 nt, Artificial Sequence
  Description of Artificial Sequence: Synthetic oligonucleotide
ugcagauauaucccaccgg

SEQ ID NO: 1418738 - RNA, 19 nt, Artificial Sequence
  Description of Artificial Sequence: Synthetic oligonucleotide
gaacuagcuggcucaaagg

SEQ ID NO: 1418739 - RNA, 19 nt, Artificial Sequence
  Description of Artificial Sequence: Synthetic oligonucleotide
uccuauuuccacuugcagu

SEQ ID NO: 1418740 - RNA, 19 nt, Artificial Sequence
  Description of Artificial Sequence: Synthetic oligonucleotide
aaaccacgcccacaaacag

SEQ ID NO: 1418741 - RNA, 19 nt, Artificial Sequence
  Description of Artificial Sequence: Synthetic oligonucleotide
uggaacauaucacuucacu

SEQ ID NO: 1418742 - RNA, 19 nt, Artificial Sequence
  Description of Artificial Sequence: Synthetic oligonucleotide
aaacggcugucucaucaac

SEQ ID NO: 1418743 - RNA, 19 nt, Artificial Sequence
  Description of Artificial Sequence: Synthetic oligonucleotide
uauuuuaaguugaauuauu

SEQ ID NO: 1418744 - RNA, 19 nt, Artificial Sequence
  Description of Artificial Sequence: Synthetic oligonucleotide
augauuuaaggcucuauaa

SEQ ID NO: 1418745 - RNA, 19 nt, Artificial Sequence
  Description of Artificial Sequence: Synthetic oligonucleotide
uaaggcucuauaauuuacu

SEQ ID NO: 1418746 - RNA, 19 nt, Artificial Sequence
  Description of Artificial Sequence: Synthetic oligonucleotide
aagggcuuauuccccagag

SEQ ID NO: 1418747 - RNA, 19 nt, Artificial Sequence
  Description of Artificial Sequence: Synthetic oligonucleotide
ugagugauucaacucgugu

SEQ ID NO: 1418748 - RNA, 19 nt, Artificial Sequence
  Description of Artificial Sequence: Synthetic oligonucleotide
cauuaguggaacauaucac

SEQ ID NO: 1418749 - RNA, 19 nt, Artificial Sequence
  Description of Artificial Sequence: Synthetic oligonucleotide
gcagauauaucccaccggg

SEQ ID NO: 1418750 - RNA, 19 nt, Artificial Sequence
  Description of Artificial Sequence: Synthetic oligonucleotide
uuauuugcgcucccacagg

SEQ ID NO: 1418751 - RNA, 19 nt, Artificial Sequence
  Description of Artificial Sequence: Synthetic oligonucleotide
gaauacaugggacauuaaa

SEQ ID NO: 1418752 - RNA, 19 nt, Artificial Sequence
  Description of Artificial Sequence: Synthetic oligonucleotide
uuauaaacaggcggcaaca

SEQ ID NO: 1418753 - RNA, 19 nt, Artificial Sequence
  Description of Artificial Sequence: Synthetic oligonucleotide
aaguugcagauauauccca

SEQ ID NO: 1418754 - RNA, 19 nt, Artificial Sequence
  Description of Artificial Sequence: Synthetic oligonucleotide
gauauaucccaccgggcug

SEQ ID NO: 1418755 - RNA, 19 nt, Artificial Sequence
  Description of Artificial Sequence: Synthetic oligonucleotide
ucaggaaacucgcauucca

SEQ ID NO: 1418756 - RNA, 19 nt, Artificial Sequence
  Description of Artificial Sequence: Synthetic oligonucleotide
ugagaaacauuaguggaac

SEQ ID NO: 1418757 - RNA, 19 nt, Artificial Sequence
  Description of Artificial Sequence: Synthetic oligonucleotide
augaaaugauucagcaacc

SEQ ID NO: 1418758 - RNA, 19 nt, Artificial Sequence
  Description of Artificial Sequence: Synthetic oligonucleotide
ucuauaauuuacucaggua

SEQ ID NO: 1418759 - RNA, 19 nt, Artificial Sequence
  Description of Artificial Sequence: Synthetic oligonucleotide
agcaaaauguagaagagaa

SEQ ID NO: 1418760 - RNA, 19 nt, Artificial Sequence
  Description of Artificial Sequence: Synthetic oligonucleotide
agcugucaaguauagagga

SEQ ID NO: 1418761 - RNA, 19 nt, Artificial Sequence
  Description of Artificial Sequence: Synthetic oligonucleotide
aacggcugucucaucaacc

SEQ ID NO: 1418762 - RNA, 19 nt, Artificial Sequence
  Description of Artificial Sequence: Synthetic oligonucleotide
uuugcgcucccacagggug

SEQ ID NO: 1418763 - RNA, 19 nt, Artificial Sequence
  Description of Artificial Sequence: Synthetic oligonucleotide
uuguaccuaacaauacaga

SEQ ID NO: 1418764 - RNA, 19 nt, Artificial Sequence
  Description of Artificial Sequence: Synthetic oligonucleotide
cuguucaucuaacaauagc

SEQ ID NO: 1418765 - RNA, 19 nt, Artificial Sequence
  Description of Artificial Sequence: Synthetic oligonucleotide
uauaagccauguaaauccu

SEQ ID NO: 1418766 - RNA, 19 nt, Artificial Sequence
  Description of Artificial Sequence: Synthetic oligonucleotide
guagaaguguuacuuuagc

SEQ ID NO: 1418767 - RNA, 19 nt, Artificial Sequence
  Description of Artificial Sequence: Synthetic oligonucleotide
auugauggacacugauuuc

SEQ ID NO: 1418768 - RNA, 19 nt, Artificial Sequence
  Description of Artificial Sequence: Synthetic oligonucleotide
uauagaucuggcauuugua

SEQ ID NO: 1418769 - RNA, 19 nt, Artificial Sequence
  Description of Artificial Sequence: Synthetic oligonucleotide
ucaggugcgaggugaacag

SEQ ID NO: 1418770 - RNA, 19 nt, Artificial Sequence
  Description of Artificial Sequence: Synthetic oligonucleotide
uucagcaacccuagaauuc

SEQ ID NO: 1418771 - RNA, 19 nt, Artificial Sequence
  Description of Artificial Sequence: Synthetic oligonucleotide
auuuauuugcgcucccaca

SEQ ID NO: 1418772 - RNA, 19 nt, Artificial Sequence
  Description of Artificial Sequence: Synthetic oligonucleotide
aggguggcaugauuuaagg

SEQ ID NO: 1418773 - RNA, 19 nt, Artificial Sequence
  Description of Artificial Sequence: Synthetic oligonucleotide
ucucccuuuuaaaauugca

SEQ ID NO: 1418774 - RNA, 19 nt, Artificial Sequence
  Description of Artificial Sequence: Synthetic oligonucleotide
gaggacaugaaaugauuca

SEQ ID NO: 1418775 - RNA, 19 nt, Artificial Sequence
  Description of Artificial Sequence: Synthetic oligonucleotide
uauugacugugugaguucc

SEQ ID NO: 1418776 - RNA, 19 nt, Artificial Sequence
  Description of Artificial Sequence: Synthetic oligonucleotide
uuaguggaacauaucacuu

SEQ ID NO: 1418777 - RNA, 19 nt, Artificial Sequence
  Description of Artificial Sequence: Synthetic oligonucleotide
cuagaauucccagucuggg

SEQ ID NO: 1418778 - RNA, 19 nt, Artificial Sequence
  Description of Artificial Sequence: Synthetic oligonucleotide
uggcuaauucacaugcugu

SEQ ID NO: 1418779 - RNA, 19 nt, Artificial Sequence
  Description of Artificial Sequence: Synthetic oligonucleotide
ggcuagagaaaucuggaag

SEQ ID NO: 1418780 - RNA, 19 nt, Artificial Sequence
  Description of Artificial Sequence: Synthetic oligonucleotide
aggacaugaaaugauucag

SEQ ID NO: 1418781 - RNA, 19 nt, Artificial Sequence
  Description of Artificial Sequence: Synthetic oligonucleotide
gaagagaacuagcuggcuc

SEQ ID NO: 1418782 - RNA, 19 nt, Artificial Sequence
  Description of Artificial Sequence: Synthetic oligonucleotide
ccuguuauaaacaggcggc

SEQ ID NO: 1418783 - RNA, 19 nt, Artificial Sequence
  Description of Artificial Sequence: Synthetic oligonucleotide
gaaucgcuuuaguucacag

SEQ ID NO: 1418784 - RNA, 19 nt, Artificial Sequence
  Description of Artificial Sequence: Synthetic oligonucleotide
agaggacaugaaaugauuc

SEQ ID NO: 1418785 - RNA, 19 nt, Artificial Sequence
  Description of Artificial Sequence: Synthetic oligonucleotide
gccuguuauaaacaggcgg

SEQ ID NO: 1418786 - RNA, 19 nt, Artificial Sequence
  Description of Artificial Sequence: Synthetic oligonucleotide
uucgugaagcacagaaaca

SEQ ID NO: 1418787 - RNA, 19 nt, Artificial Sequence
  Description of Artificial Sequence: Synthetic oligonucleotide
uucacauuauaagccaugu

SEQ ID NO: 1418788 - RNA, 19 nt, Artificial Sequence
  Description of Artificial Sequence: Synthetic oligonucleotide
aguuugauauuaccauaug

SEQ ID NO: 1418789 - RNA, 19 nt, Artificial Sequence
  Description of Artificial Sequence: Synthetic oligonucleotide
gaaguguuacuuuagcccu

SEQ ID NO: 1418790 - RNA, 19 nt, Artificial Sequence
  Description of Artificial Sequence: Synthetic oligonucleotide
gaagccguucacuauugac

SEQ ID NO: 1418791 - RNA, 19 nt, Artificial Sequence
  Description of Artificial Sequence: Synthetic oligonucleotide
uggagaagcugucaaguau

SEQ ID NO: 1418792 - RNA, 19 nt, Artificial Sequence
  Description of Artificial Sequence: Synthetic oligonucleotide
gagucuacuccugacuggg

SEQ ID NO: 1418793 - RNA, 19 nt, Artificial Sequence
  Description of Artificial Sequence: Synthetic oligonucleotide
gaagcacagaaacaaucca

SEQ ID NO: 1418794 - RNA, 19 nt, Artificial Sequence
  Description of Artificial Sequence: Synthetic oligonucleotide
guugcagauauaucccacc

SEQ ID NO: 1418795 - RNA, 19 nt, Artificial Sequence
  Description of Artificial Sequence: Synthetic oligonucleotide
agcuucuguaauaacaucu

SEQ ID NO: 1418796 - RNA, 19 nt, Artificial Sequence
  Description of Artificial Sequence: Synthetic oligonucleotide
uccagucgagacaagcaca

SEQ ID NO: 1418797 - RNA, 19 nt, Artificial Sequence
  Description of Artificial Sequence: Synthetic oligonucleotide
ugugugaagccguucacua

SEQ ID NO: 1418798 - RNA, 19 nt, Artificial Sequence
  Description of Artificial Sequence: Synthetic oligonucleotide
uucuagagucugacugugg

SEQ ID NO: 1418799 - RNA, 19 nt, Artificial Sequence
  Description of Artificial Sequence: Synthetic oligonucleotide
ucgcauuccagcucacucc

SEQ ID NO: 1418800 - RNA, 19 nt, Artificial Sequence
  Description of Artificial Sequence: Synthetic oligonucleotide
agaaacauuaguggaacau

SEQ ID NO: 1418801 - RNA, 19 nt, Artificial Sequence
  Description of Artificial Sequence: Synthetic oligonucleotide
agguugucaaacccucuuc

SEQ ID NO: 1418802 - RNA, 19 nt, Artificial Sequence
  Description of Artificial Sequence: Synthetic oligonucleotide
ugaguuccagucgagacaa

SEQ ID NO: 1418803 - RNA, 19 nt, Artificial Sequence
  Description of Artificial Sequence: Synthetic oligonucleotide
cuuauuccccagaggacag

SEQ ID NO: 1418804 - RNA, 19 nt, Artificial Sequence
  Description of Artificial Sequence: Synthetic oligonucleotide
ggauaguacaaacauuuuc

SEQ ID NO: 1418805 - RNA, 19 nt, Artificial Sequence
  Description of Artificial Sequence: Synthetic oligonucleotide
aacaggcggcaacagugag

SEQ ID NO: 1418806 - RNA, 19 nt, Artificial Sequence
  Description of Artificial Sequence: Synthetic oligonucleotide
aaggcuagagaaaucugga

SEQ ID NO: 1418807 - RNA, 19 nt, Artificial Sequence
  Description of Artificial Sequence: Synthetic oligonucleotide
agagacauugaaucgcuuu

SEQ ID NO: 1418808 - RNA, 19 nt, Artificial Sequence
  Description of Artificial Sequence: Synthetic oligonucleotide
acauugaaucgcuuuaguu

SEQ ID NO: 1418809 - RNA, 19 nt, Artificial Sequence
  Description of Artificial Sequence: Synthetic oligonucleotide
auaaacaggcggcaacagu

SEQ ID NO: 1418810 - RNA, 19 nt, Artificial Sequence
  Description of Artificial Sequence: Synthetic oligonucleotide
ugucaaguauagaggacau

SEQ ID NO: 1418811 - RNA, 19 nt, Artificial Sequence
  Description of Artificial Sequence: Synthetic oligonucleotide
acuauugacugugugaguu

SEQ ID NO: 1418812 - RNA, 19 nt, Artificial Sequence
  Description of Artificial Sequence: Synthetic oligonucleotide
gaucccaacacuguaaaua

SEQ ID NO: 1418813 - RNA, 19 nt, Artificial Sequence
  Description of Artificial Sequence: Synthetic oligonucleotide
gaggacagcaaaauguaga

SEQ ID NO: 1418814 - RNA, 19 nt, Artificial Sequence
  Description of Artificial Sequence: Synthetic oligonucleotide
guuugauauuaccauaugu

SEQ ID NO: 1418815 - RNA, 19 nt, Artificial Sequence
  Description of Artificial Sequence: Synthetic oligonucleotide
agugacaaaauuccaucua

SEQ ID NO: 1418816 - RNA, 19 nt, Artificial Sequence
  Description of Artificial Sequence: Synthetic oligonucleotide
aggcucuauaauuuacuca

SEQ ID NO: 1418817 - RNA, 19 nt, Artificial Sequence
  Description of Artificial Sequence: Synthetic oligonucleotide
uaguggaacauaucacuuc

SEQ ID NO: 1418818 - RNA, 19 nt, Artificial Sequence
  Description of Artificial Sequence: Synthetic oligonucleotide
aagaaaggauguccuugga

SEQ ID NO: 1418819 - RNA, 19 nt, Artificial Sequence
  Description of Artificial Sequence: Synthetic oligonucleotide
ugaucaucuccagugcacc

SEQ ID NO: 1418820 - RNA, 19 nt, Artificial Sequence
  Description of Artificial Sequence: Synthetic oligonucleotide
uuauuuauuugcgcuccca

SEQ ID NO: 1418821 - RNA, 19 nt, Artificial Sequence
  Description of Artificial Sequence: Synthetic oligonucleotide
agccuguucaucuaacaau

SEQ ID NO: 1418822 - RNA, 19 nt, Artificial Sequence
  Description of Artificial Sequence: Synthetic oligonucleotide
ucguguucgugaagcacag

SEQ ID NO: 1418823 - RNA, 19 nt, Artificial Sequence
  Description of Artificial Sequence: Synthetic oligonucleotide
gacugggaauuucucauuc

SEQ ID NO: 1418824 - RNA, 19 nt, Artificial Sequence
  Description of Artificial Sequence: Synthetic oligonucleotide
gaaaccacgcccacaaaca

SEQ ID NO: 1418825 - RNA, 19 nt, Artificial Sequence
  Description of Artificial Sequence: Synthetic oligonucleotide
gaaagguaccugcccacug

SEQ ID NO: 1418826 - RNA, 19 nt, Artificial Sequence
  Description of Artificial Sequence: Synthetic oligonucleotide
agucgagacaagcacacuu

SEQ ID NO: 1418827 - RNA, 19 nt, Artificial Sequence
  Description of Artificial Sequence: Synthetic oligonucleotide
ucucauucuagagucugac

SEQ ID NO: 1418828 - RNA, 19 nt, Artificial Sequence
  Description of Artificial Sequence: Synthetic oligonucleotide
ccauauguaaaagggauag

SEQ ID NO: 1418829 - RNA, 19 nt, Artificial Sequence
  Description of Artificial Sequence: Synthetic oligonucleotide
acaugaaaugauucagcaa

SEQ ID NO: 1418830 - RNA, 19 nt, Artificial Sequence
  Description of Artificial Sequence: Synthetic oligonucleotide
gguacucugaucugagcag

SEQ ID NO: 1418831 - RNA, 19 nt, Artificial Sequence
  Description of Artificial Sequence: Synthetic oligonucleotide
ucaacucguguucgugaag

SEQ ID NO: 1418832 - RNA, 19 nt, Artificial Sequence
  Description of Artificial Sequence: Synthetic oligonucleotide
gaggucagguugucaaacc

SEQ ID NO: 1418833 - RNA, 19 nt, Artificial Sequence
  Description of Artificial Sequence: Synthetic oligonucleotide
gaaacucgcauuccagcuc

SEQ ID NO: 1418834 - RNA, 19 nt, Artificial Sequence
  Description of Artificial Sequence: Synthetic oligonucleotide
aagcacagaaacaauccaa

SEQ ID NO: 1418835 - RNA, 19 nt, Artificial Sequence
  Description of Artificial Sequence: Synthetic oligonucleotide
uagaauucccagucugggu

SEQ ID NO: 1418836 - RNA, 19 nt, Artificial Sequence
  Description of Artificial Sequence: Synthetic oligonucleotide
gugauucaacucguguucg

SEQ ID NO: 1418837 - RNA, 19 nt, Artificial Sequence
  Description of Artificial Sequence: Synthetic oligonucleotide
uucaacucguguucgugaa

SEQ ID NO: 1418838 - RNA, 19 nt, Artificial Sequence
  Description of Artificial Sequence: Synthetic oligonucleotide
gagacauugaaucgcuuua

SEQ ID NO: 1418839 - RNA, 19 nt, Artificial Sequence
  Description of Artificial Sequence: Synthetic oligonucleotide
guaauaacaucugaguccu

SEQ ID NO: 1418840 - RNA, 19 nt, Artificial Sequence
  Description of Artificial Sequence: Synthetic oligonucleotide
uuacucagguagaaguguu

SEQ ID NO: 1418841 - RNA, 19 nt, Artificial Sequence
  Description of Artificial Sequence: Synthetic oligonucleotide
ugacggccuguuauaaaca

SEQ ID NO: 1418842 - RNA, 19 nt, Artificial Sequence
  Description of Artificial Sequence: Synthetic oligonucleotide
cagauauaucccaccgggc

SEQ ID NO: 1418843 - RNA, 19 nt, Artificial Sequence
  Description of Artificial Sequence: Synthetic oligonucleotide
agggcuuauuccccagagg

SEQ ID NO: 1418844 - RNA, 19 nt, Artificial Sequence
  Description of Artificial Sequence: Synthetic oligonucleotide
caggaaacucgcauuccag

SEQ ID NO: 1418845 - RNA, 19 nt, Artificial Sequence
  Description of Artificial Sequence: Synthetic oligonucleotide
guucacuauugacugugug

SEQ ID NO: 1418846 - RNA, 19 nt, Artificial Sequence
  Description of Artificial Sequence: Synthetic oligonucleotide
ucgagacaagcacacuuuc

SEQ ID NO: 1418847 - RNA, 19 nt, Artificial Sequence
  Description of Artificial Sequence: Synthetic oligonucleotide
guguucgugaagcacagaa

SEQ ID NO: 1418848 - RNA, 19 nt, Artificial Sequence
  Description of Artificial Sequence: Synthetic oligonucleotide
agguagaaguguuacuuua

SEQ ID NO: 1418849 - RNA, 19 nt, Artificial Sequence
  Description of Artificial Sequence: Synthetic oligonucleotide
acucguguucgugaagcac

SEQ ID NO: 1418850 - RNA, 19 nt, Artificial Sequence
  Description of Artificial Sequence: Synthetic oligonucleotide
uacuuuagcccucucccuu

SEQ ID NO: 1418851 - RNA, 19 nt, Artificial Sequence
  Description of Artificial Sequence: Synthetic oligonucleotide
uugcgcucccacagggugg

SEQ ID NO: 1418852 - RNA, 19 nt, Artificial Sequence
  Description of Artificial Sequence: Synthetic oligonucleotide
aacucguguucgugaagca

SEQ ID NO: 1418853 - RNA, 19 nt, Artificial Sequence
  Description of Artificial Sequence: Synthetic oligonucleotide
caugauuuaaggcucuaua

SEQ ID NO: 1418854 - RNA, 19 nt, Artificial Sequence
  Description of Artificial Sequence: Synthetic oligonucleotide
auguccuuggaaucacugu

SEQ ID NO: 1418855 - RNA, 19 nt, Artificial Sequence
  Description of Artificial Sequence: Synthetic oligonucleotide
ugcgaggugaacagagguc

SEQ ID NO: 1418856 - RNA, 19 nt, Artificial Sequence
  Description of Artificial Sequence: Synthetic oligonucleotide
caaucccggagucuacucc

SEQ ID NO: 1418857 - RNA, 19 nt, Artificial Sequence
  Description of Artificial Sequence: Synthetic oligonucleotide
ggcuaauucacaugcugug

SEQ ID NO: 1418858 - RNA, 19 nt, Artificial Sequence
  Description of Artificial Sequence: Synthetic oligonucleotide
auucuagagucugacugug

SEQ ID NO: 1418859 - RNA, 19 nt, Artificial Sequence
  Description of Artificial Sequence: Synthetic oligonucleotide
cugucaaguauagaggaca

SEQ ID NO: 1418860 - RNA, 19 nt, Artificial Sequence
  Description of Artificial Sequence: Synthetic oligonucleotide
cucguguucgugaagcaca

SEQ ID NO: 1418861 - RNA, 19 nt, Artificial Sequence
  Description of Artificial Sequence: Synthetic oligonucleotide
gggcuuauuccccagagga

SEQ ID NO: 1418862 - RNA, 19 nt, Artificial Sequence
  Description of Artificial Sequence: Synthetic oligonucleotide
cucgcauuccagcucacuc

SEQ ID NO: 1418863 - RNA, 19 nt, Artificial Sequence
  Description of Artificial Sequence: Synthetic oligonucleotide
augugagcaaggcucaguu

SEQ ID NO: 1418864 - RNA, 19 nt, Artificial Sequence
  Description of Artificial Sequence: Synthetic oligonucleotide
ucuacuccugacugggaau

SEQ ID NO: 1418865 - RNA, 19 nt, Artificial Sequence
  Description of Artificial Sequence: Synthetic oligonucleotide
cuauugacugugugaguuc

SEQ ID NO: 1418866 - RNA, 19 nt, Artificial Sequence
  Description of Artificial Sequence: Synthetic oligonucleotide
gugaccaggaggaaacggc

SEQ ID NO: 1418867 - RNA, 19 nt, Artificial Sequence
  Description of Artificial Sequence: Synthetic oligonucleotide
aagggcuuuguaccagaau

SEQ ID NO: 1418868 - RNA, 19 nt, Artificial Sequence
  Description of Artificial Sequence: Synthetic oligonucleotide
ucagguugucaaacccucu

SEQ ID NO: 1418869 - RNA, 19 nt, Artificial Sequence
  Description of Artificial Sequence: Synthetic oligonucleotide
ccuagaauucccagucugg

SEQ ID NO: 1418870 - RNA, 19 nt, Artificial Sequence
  Description of Artificial Sequence: Synthetic oligonucleotide
gguagaaguguuacuuuag

SEQ ID NO: 1418871 - RNA, 19 nt, Artificial Sequence
  Description of Artificial Sequence: Synthetic oligonucleotide
auauaucccaccgggcuga

SEQ ID NO: 1418872 - RNA, 19 nt, Artificial Sequence
  Description of Artificial Sequence: Synthetic oligonucleotide
ggaaacggcugucucauca

SEQ ID NO: 1418873 - RNA, 19 nt, Artificial Sequence
  Description of Artificial Sequence: Synthetic oligonucleotide
cucaguuugauauuaccau

SEQ ID NO: 1418874 - RNA, 19 nt, Artificial Sequence
  Description of Artificial Sequence: Synthetic oligonucleotide
cucuauaauuuacucaggu

SEQ ID NO: 1418875 - RNA, 19 nt, Artificial Sequence
  Description of Artificial Sequence: Synthetic oligonucleotide
ugaaucgcuuuaguucaca

SEQ ID NO: 1418876 - RNA, 19 nt, Artificial Sequence
  Description of Artificial Sequence: Synthetic oligonucleotide
gugagaguauggaaucuug

SEQ ID NO: 1418877 - RNA, 19 nt, Artificial Sequence
  Description of Artificial Sequence: Synthetic oligonucleotide
aauccugucucaggugcga

SEQ ID NO: 1418878 - RNA, 19 nt, Artificial Sequence
  Description of Artificial Sequence: Synthetic oligonucleotide
aaacaggcggcaacaguga

SEQ ID NO: 1418879 - RNA, 19 nt, Artificial Sequence
  Description of Artificial Sequence: Synthetic oligonucleotide
caaacccucuuccuauuuc

SEQ ID NO: 1418880 - RNA, 19 nt, Artificial Sequence
  Description of Artificial Sequence: Synthetic oligonucleotide
ugaagccguucacuauuga

SEQ ID NO: 1418881 - RNA, 19 nt, Artificial Sequence
  Description of Artificial Sequence: Synthetic oligonucleotide
gcaguucauagugagaaac

SEQ ID NO: 1418882 - RNA, 19 nt, Artificial Sequence
  Description of Artificial Sequence: Synthetic oligonucleotide
ggagucuacuccugacugg

SEQ ID NO: 1418883 - RNA, 19 nt, Artificial Sequence
  Description of Artificial Sequence: Synthetic oligonucleotide
uugaaucgcuuuaguucac

SEQ ID NO: 1418884 - RNA, 19 nt, Artificial Sequence
  Description of Artificial Sequence: Synthetic oligonucleotide
aaaccagccuguucaucua

SEQ ID NO: 1418885 - RNA, 19 nt, Artificial Sequence
  Description of Artificial Sequence: Synthetic oligonucleotide
agagucugacuguggaaaa

SEQ ID NO: 1418886 - RNA, 19 nt, Artificial Sequence
  Description of Artificial Sequence: Synthetic oligonucleotide
aagggauaguacaaacauu

SEQ ID NO: 1418887 - RNA, 19 nt, Artificial Sequence
  Description of Artificial Sequence: Synthetic oligonucleotide
ucucaucaaccagguauug

SEQ ID NO: 1418888 - RNA, 19 nt, Artificial Sequence
  Description of Artificial Sequence: Synthetic oligonucleotide
aggugcgaggugaacagag

SEQ ID NO: 1418889 - RNA, 19 nt, Artificial Sequence
  Description of Artificial Sequence: Synthetic oligonucleotide
aucccaccgggcugagacc

SEQ ID NO: 1418890 - RNA, 19 nt, Artificial Sequence
  Description of Artificial Sequence: Synthetic oligonucleotide
gugacaaaauuccaucuau

SEQ ID NO: 1418891 - RNA, 19 nt, Artificial Sequence
  Description of Artificial Sequence: Synthetic oligonucleotide
gugagaaacauuaguggaa

SEQ ID NO: 1418892 - RNA, 19 nt, Artificial Sequence
  Description of Artificial Sequence: Synthetic oligonucleotide
gagugauucaacucguguu

SEQ ID NO: 1418893 - RNA, 19 nt, Artificial Sequence
  Description of Artificial Sequence: Synthetic oligonucleotide
cggccuguuauaaacaggc

SEQ ID NO: 1418894 - RNA, 19 nt, Artificial Sequence
  Description of Artificial Sequence: Synthetic oligonucleotide
acgcccacaaacagagugg

SEQ ID NO: 1418895 - RNA, 19 nt, Artificial Sequence
  Description of Artificial Sequence: Synthetic oligonucleotide
uaaugugagcaaggcucag

SEQ ID NO: 1418896 - RNA, 19 nt, Artificial Sequence
  Description of Artificial Sequence: Synthetic oligonucleotide
aguguuacuuuagcccucu

SEQ ID NO: 1418897 - RNA, 19 nt, Artificial Sequence
  Description of Artificial Sequence: Synthetic oligonucleotide
cugagugauucaacucgug

SEQ ID NO: 1418898 - RNA, 19 nt, Artificial Sequence
  Description of Artificial Sequence: Synthetic oligonucleotide
ucgcuuuaguucacagaaa

SEQ ID NO: 1418899 - RNA, 19 nt, Artificial Sequence
  Description of Artificial Sequence: Synthetic oligonucleotide
aggcuagagaaaucuggaa

SEQ ID NO: 1418900 - RNA, 19 nt, Artificial Sequence
  Description of Artificial Sequence: Synthetic oligonucleotide
uaauaacaucugaguccug

SEQ ID NO: 1418901 - RNA, 19 nt, Artificial Sequence
  Description of Artificial Sequence: Synthetic oligonucleotide
gaaacggcugucucaucaa

SEQ ID NO: 1418902 - RNA, 19 nt, Artificial Sequence
  Description of Artificial Sequence: Synthetic oligonucleotide
ucccaacacuguaaauauc

SEQ ID NO: 1418903 - RNA, 19 nt, Artificial Sequence
  Description of Artificial Sequence: Synthetic oligonucleotide
gacauugaaucgcuuuagu

SEQ ID NO: 1418904 - RNA, 19 nt, Artificial Sequence
  Description of Artificial Sequence: Synthetic oligonucleotide
aaggcaggagagaacguuu

SEQ ID NO: 1418905 - RNA, 19 nt, Artificial Sequence
  Description of Artificial Sequence: Synthetic oligonucleotide
guuccagucgagacaagca

SEQ ID NO: 1418906 - RNA, 19 nt, Artificial Sequence
  Description of Artificial Sequence: Synthetic oligonucleotide
gugggcuguauggaggacc

SEQ ID NO: 1418907 - RNA, 19 nt, Artificial Sequence
  Description of Artificial Sequence: Synthetic oligonucleotide
aaccacgcccacaaacaga

SEQ ID NO: 1418908 - RNA, 19 nt, Artificial Sequence
  Description of Artificial Sequence: Synthetic oligonucleotide
agugagaguauggaaucuu

SEQ ID NO: 1418909 - RNA, 19 nt, Artificial Sequence
  Description of Artificial Sequence: Synthetic oligonucleotide
gcuuauuccccagaggaca

SEQ ID NO: 1418910 - RNA, 19 nt, Artificial Sequence
  Description of Artificial Sequence: Synthetic oligonucleotide
gucagguugucaaacccuc

SEQ ID NO: 1418911 - RNA, 19 nt, Artificial Sequence
  Description of Artificial Sequence: Synthetic oligonucleotide
gaagggcuuauuccccaga

SEQ ID NO: 1418912 - RNA, 19 nt, Artificial Sequence
  Description of Artificial Sequence: Synthetic oligonucleotide
agugcaccaacuguauuuu

SEQ ID NO: 1418913 - RNA, 19 nt, Artificial Sequence
  Description of Artificial Sequence: Synthetic oligonucleotide
caguuugauauuaccauau

SEQ ID NO: 1418914 - RNA, 19 nt, Artificial Sequence
  Description of Artificial Sequence: Synthetic oligonucleotide
caugggacauuaaacugcu

SEQ ID NO: 1418915 - RNA, 19 nt, Artificial Sequence
  Description of Artificial Sequence: Synthetic oligonucleotide
uccaaucccggagucuacu

SEQ ID NO: 1418916 - RNA, 19 nt, Artificial Sequence
  Description of Artificial Sequence: Synthetic oligonucleotide
acuuuagcccucucccuuu

SEQ ID NO: 1418917 - RNA, 19 nt, Artificial Sequence
  Description of Artificial Sequence: Synthetic oligonucleotide
ucccaccgggcugagacca

SEQ ID NO: 1418918 - RNA, 19 nt, Artificial Sequence
  Description of Artificial Sequence: Synthetic oligonucleotide
cauucuagagucugacugu

SEQ ID NO: 1418919 - RNA, 19 nt, Artificial Sequence
  Description of Artificial Sequence: Synthetic oligonucleotide
cagcaacccuagaauuccc

SEQ ID NO: 1418920 - RNA, 19 nt, Artificial Sequence
  Description of Artificial Sequence: Synthetic oligonucleotide
gucaaguauagaggacaug

SEQ ID NO: 1418921 - RNA, 19 nt, Artificial Sequence
  Description of Artificial Sequence: Synthetic oligonucleotide
acugacggccuguuauaaa

SEQ ID NO: 1418922 - RNA, 19 nt, Artificial Sequence
  Description of Artificial Sequence: Synthetic oligonucleotide
acccuagaauucccagucu

SEQ ID NO: 1418923 - RNA, 19 nt, Artificial Sequence
  Description of Artificial Sequence: Synthetic oligonucleotide
aaagggcuuuguaccagaa

SEQ ID NO: 1418924 - RNA, 19 nt, Artificial Sequence
  Description of Artificial Sequence: Synthetic oligonucleotide
cucaggugcgaggugaaca

SEQ ID NO: 1418925 - RNA, 19 nt, Artificial Sequence
  Description of Artificial Sequence: Synthetic oligonucleotide
guacucugaucugagcaga

SEQ ID NO: 1418926 - RNA, 19 nt, Artificial Sequence
  Description of Artificial Sequence: Synthetic oligonucleotide
ggcauuuguaccuaacaau

SEQ ID NO: 1418927 - RNA, 19 nt, Artificial Sequence
  Description of Artificial Sequence: Synthetic oligonucleotide
cuagagucugacuguggaa

SEQ ID NO: 1418928 - RNA, 19 nt, Artificial Sequence
  Description of Artificial Sequence: Synthetic oligonucleotide
ccuguucaucuaacaauag

SEQ ID NO: 1418929 - RNA, 19 nt, Artificial Sequence
  Description of Artificial Sequence: Synthetic oligonucleotide
gcucuauaauuuacucagg

SEQ ID NO: 1418930 - RNA, 19 nt, Artificial Sequence
  Description of Artificial Sequence: Synthetic oligonucleotide
ggcggcaacagugagagua

SEQ ID NO: 1418931 - RNA, 19 nt, Artificial Sequence
  Description of Artificial Sequence: Synthetic oligonucleotide
ggaaacucgcauuccagcu

SEQ ID NO: 1418932 - RNA, 19 nt, Artificial Sequence
  Description of Artificial Sequence: Synthetic oligonucleotide
caaguauagaucuggcauu

SEQ ID NO: 1418933 - RNA, 19 nt, Artificial Sequence
  Description of Artificial Sequence: Synthetic oligonucleotide
acauaucacuucacuggcu

SEQ ID NO: 1418934 - RNA, 19 nt, Artificial Sequence
  Description of Artificial Sequence: Synthetic oligonucleotide
agcaaggcucaguuugaua

SEQ ID NO: 1418935 - RNA, 19 nt, Artificial Sequence
  Description of Artificial Sequence: Synthetic oligonucleotide
cccuagaauucccagucug

SEQ ID NO: 1418936 - RNA, 19 nt, Artificial Sequence
  Description of Artificial Sequence: Synthetic oligonucleotide
uuuagcccucucccuuuua

SEQ ID NO: 1418937 - RNA, 19 nt, Artificial Sequence
  Description of Artificial Sequence: Synthetic oligonucleotide
caccgggcugagaccaagg

SEQ ID NO: 1418938 - RNA, 19 nt, Artificial Sequence
  Description of Artificial Sequence: Synthetic oligonucleotide
aacucgcauuccagcucac

SEQ ID NO: 1418939 - RNA, 19 nt, Artificial Sequence
  Description of Artificial Sequence: Synthetic oligonucleotide
cagccuguucaucuaacaa

SEQ ID NO: 1418940 - RNA, 19 nt, Artificial Sequence
  Description of Artificial Sequence: Synthetic oligonucleotide
ccaacuguauuuucaagua

SEQ ID NO: 1418941 - RNA, 19 nt, Artificial Sequence
  Description of Artificial Sequence: Synthetic oligonucleotide
gcgaggugaacagagguca

SEQ ID NO: 1418942 - RNA, 19 nt, Artificial Sequence
  Description of Artificial Sequence: Synthetic oligonucleotide
ggugcgaggugaacagagg

SEQ ID NO: 1418943 - RNA, 19 nt, Artificial Sequence
  Description of Artificial Sequence: Synthetic oligonucleotide
gugcgaggugaacagaggu

SEQ ID NO: 1418944 - RNA, 19 nt, Artificial Sequence
  Description of Artificial Sequence: Synthetic oligonucleotide
auccagugggcuguaugga

SEQ ID NO: 1418945 - RNA, 19 nt, Artificial Sequence
  Description of Artificial Sequence: Synthetic oligonucleotide
gaggaaacggcugucucau

SEQ ID NO: 1418946 - RNA, 19 nt, Artificial Sequence
  Description of Artificial Sequence: Synthetic oligonucleotide
ggccuguuauaaacaggcg

SEQ ID NO: 1418947 - RNA, 19 nt, Artificial Sequence
  Description of Artificial Sequence: Synthetic oligonucleotide
guggaacauaucacuucac

SEQ ID NO: 1418948 - RNA, 19 nt, Artificial Sequence
  Description of Artificial Sequence: Synthetic oligonucleotide
cagugcaccaacuguauuu

SEQ ID NO: 1418949 - RNA, 19 nt, Artificial Sequence
  Description of Artificial Sequence: Synthetic oligonucleotide
cuccaaucccggagucuac

SEQ ID NO: 1418950 - RNA, 19 nt, Artificial Sequence
  Description of Artificial Sequence: Synthetic oligonucleotide
ccguucacuauugacugug

SEQ ID NO: 1418951 - RNA, 19 nt, Artificial Sequence
  Description of Artificial Sequence: Synthetic oligonucleotide
cucauucuagagucugacu

SEQ ID NO: 1418952 - RNA, 19 nt, Artificial Sequence
  Description of Artificial Sequence: Synthetic oligonucleotide
agagaacuagcuggcucaa

SEQ ID NO: 1418953 - RNA, 19 nt, Artificial Sequence
  Description of Artificial Sequence: Synthetic oligonucleotide
gcugucaaguauagaggac

SEQ ID NO: 1418954 - RNA, 19 nt, Artificial Sequence
  Description of Artificial Sequence: Synthetic oligonucleotide
cacuuucuccaaucccgga

SEQ ID NO: 1418955 - RNA, 19 nt, Artificial Sequence
  Description of Artificial Sequence: Synthetic oligonucleotide
gugcaccaacuguauuuuc

SEQ ID NO: 1418956 - RNA, 19 nt, Artificial Sequence
  Description of Artificial Sequence: Synthetic oligonucleotide
cggagucuacuccugacug

SEQ ID NO: 1418957 - RNA, 19 nt, Artificial Sequence
  Description of Artificial Sequence: Synthetic oligonucleotide
agguauugauggacacuga

SEQ ID NO: 1418958 - RNA, 19 nt, Artificial Sequence
  Description of Artificial Sequence: Synthetic oligonucleotide
ccgggcugagaccaaggcc

SEQ ID NO: 1418959 - RNA, 19 nt, Artificial Sequence
  Description of Artificial Sequence: Synthetic oligonucleotide
ggcuuauuccccagaggac

SEQ ID NO: 1418960 - RNA, 19 nt, Artificial Sequence
  Description of Artificial Sequence: Synthetic oligonucleotide
acucgcauuccagcucacu

SEQ ID NO: 1418961 - RNA, 19 nt, Artificial Sequence
  Description of Artificial Sequence: Synthetic oligonucleotide
agaauacaugggacauuaa

SEQ ID NO: 1418962 - RNA, 19 nt, Artificial Sequence
  Description of Artificial Sequence: Synthetic oligonucleotide
cauauguaaaagggauagu

SEQ ID NO: 1418963 - RNA, 19 nt, Artificial Sequence
  Description of Artificial Sequence: Synthetic oligonucleotide
gugugaaaccacgcccaca

SEQ ID NO: 1418964 - RNA, 19 nt, Artificial Sequence
  Description of Artificial Sequence: Synthetic oligonucleotide
uacuccugacugggaauuu

SEQ ID NO: 1418965 - RNA, 19 nt, Artificial Sequence
  Description of Artificial Sequence: Synthetic oligonucleotide
gccacugacggccuguuau

SEQ ID NO: 1418966 - RNA, 19 nt, Artificial Sequence
  Description of Artificial Sequence: Synthetic oligonucleotide
agcucacuccauggugaca

SEQ ID NO: 1418967 - RNA, 19 nt, Artificial Sequence
  Description of Artificial Sequence: Synthetic oligonucleotide
ccaaucccggagucuacuc

SEQ ID NO: 1418968 - RNA, 19 nt, Artificial Sequence
  Description of Artificial Sequence: Synthetic oligonucleotide
acaauccaaaagagacauu

SEQ ID NO: 1418969 - RNA, 19 nt, Artificial Sequence
  Description of Artificial Sequence: Synthetic oligonucleotide
agucuacuccugacuggga

SEQ ID NO: 1418970 - RNA, 19 nt, Artificial Sequence
  Description of Artificial Sequence: Synthetic oligonucleotide
gagaacuagcuggcucaaa

SEQ ID NO: 1418971 - RNA, 19 nt, Artificial Sequence
  Description of Artificial Sequence: Synthetic oligonucleotide
gugugaagccguucacuau

SEQ ID NO: 1418972 - RNA, 19 nt, Artificial Sequence
  Description of Artificial Sequence: Synthetic oligonucleotide
gucgagacaagcacacuuu

SEQ ID NO: 1418973 - RNA, 19 nt, Artificial Sequence
  Description of Artificial Sequence: Synthetic oligonucleotide
cagguugucaaacccucuu

SEQ ID NO: 1418974 - RNA, 19 nt, Artificial Sequence
  Description of Artificial Sequence: Synthetic oligonucleotide
cacuauugacugugugagu

SEQ ID NO: 1418975 - RNA, 19 nt, Artificial Sequence
  Description of Artificial Sequence: Synthetic oligonucleotide
guguuacuuuagcccucuc

SEQ ID NO: 1418976 - RNA, 19 nt, Artificial Sequence
  Description of Artificial Sequence: Synthetic oligonucleotide
cccggagucuacuccugac

SEQ ID NO: 1418977 - RNA, 19 nt, Artificial Sequence
  Description of Artificial Sequence: Synthetic oligonucleotide
cacugacggccuguuauaa

SEQ ID NO: 1418978 - RNA, 19 nt, Artificial Sequence
  Description of Artificial Sequence: Synthetic oligonucleotide
cgaggugaacagaggucag

SEQ ID NO: 1418979 - RNA, 19 nt, Artificial Sequence
  Description of Artificial Sequence: Synthetic oligonucleotide
gauggugugugaagccguu

SEQ ID NO: 1418980 - RNA, 19 nt, Artificial Sequence
  Description of Artificial Sequence: Synthetic oligonucleotide
caucuccagugcaccaacu

SEQ ID NO: 1418981 - RNA, 19 nt, Artificial Sequence
  Description of Artificial Sequence: Synthetic oligonucleotide
cuacuccugacugggaauu

SEQ ID NO: 1418982 - RNA, 19 nt, Artificial Sequence
  Description of Artificial Sequence: Synthetic oligonucleotide
gcccucucccuuuuaaaau

SEQ ID NO: 1418983 - RNA, 19 nt, Artificial Sequence
  Description of Artificial Sequence: Synthetic oligonucleotide
gucucaggugcgaggugaa

SEQ ID NO: 1418984 - RNA, 19 nt, Artificial Sequence
  Description of Artificial Sequence: Synthetic oligonucleotide
ggcuguauggaggaccuuu

SEQ ID NO: 1418985 - RNA, 19 nt, Artificial Sequence
  Description of Artificial Sequence: Synthetic oligonucleotide
caggugcgaggugaacaga

SEQ ID NO: 1418986 - RNA, 19 nt, Artificial Sequence
  Description of Artificial Sequence: Synthetic oligonucleotide
ggugaacagaggucagguu

SEQ ID NO: 1418987 - RNA, 19 nt, Artificial Sequence
  Description of Artificial Sequence: Synthetic oligonucleotide
cuuuagcccucucccuuuu

SEQ ID NO: 1418988 - RNA, 19 nt, Artificial Sequence
  Description of Artificial Sequence: Synthetic oligonucleotide
augggacauuaaacugcuu

SEQ ID NO: 1418989 - RNA, 19 nt, Artificial Sequence
  Description of Artificial Sequence: Synthetic oligonucleotide
ccacugacggccuguuaua

SEQ ID NO: 1418990 - RNA, 19 nt, Artificial Sequence
  Description of Artificial Sequence: Synthetic oligonucleotide
ccggagucuacuccugacu

SEQ ID NO: 1418991 - RNA, 19 nt, Artificial Sequence
  Description of Artificial Sequence: Synthetic oligonucleotide
cagucgagacaagcacacu

SEQ ID NO: 1418992 - RNA, 19 nt, Artificial Sequence
  Description of Artificial Sequence: Synthetic oligonucleotide
cguucacuauugacugugu

SEQ ID NO: 1418993 - RNA, 19 nt, Artificial Sequence
  Description of Artificial Sequence: Synthetic oligonucleotide
ccagugcaccaacuguauu

SEQ ID NO: 1418994 - RNA, 19 nt, Artificial Sequence
  Description of Artificial Sequence: Synthetic oligonucleotide
cguguucgugaagcacaga

SEQ ID NO: 1418995 - RNA, 19 nt, Artificial Sequence
  Description of Artificial Sequence: Synthetic oligonucleotide
ccucagaggaagggcuuau

SEQ ID NO: 1418996 - RNA, 19 nt, Artificial Sequence
  Description of Artificial Sequence: Synthetic oligonucleotide
gggcuguauggaggaccuu

SEQ ID NO: 1418997 - RNA, 19 nt, Artificial Sequence
  Description of Artificial Sequence: Synthetic oligonucleotide
aacacuaugaucuggaagc

SEQ ID NO: 1418998 - RNA, 19 nt, Artificial Sequence
  Description of Artificial Sequence: Synthetic oligonucleotide
accacuacaauuuugaagc

SEQ ID NO: 1418999 - RNA, 19 nt, Artificial Sequence
  Description of Artificial Sequence: Synthetic oligonucleotide
aauucgauuauucuguuca

SEQ ID NO: 1419000 - RNA, 19 nt, Artificial Sequence
  Description of Artificial Sequence: Synthetic oligonucleotide
agcacauuaagcuuuagac

SEQ ID NO: 1419001 - RNA, 19 nt, Artificial Sequence
  Description of Artificial Sequence: Synthetic oligonucleotide
aagagugcagccaagaacc

SEQ ID NO: 1419002 - RNA, 19 nt, Artificial Sequence
  Description of Artificial Sequence: Synthetic oligonucleotide
aaacuggaaacugacaugc

SEQ ID NO: 1419003 - RNA, 19 nt, Artificial Sequence
  Description of Artificial Sequence: Synthetic oligonucleotide
aucaguaucacucauacca

SEQ ID NO: 1419004 - RNA, 19 nt, Artificial Sequence
  Description of Artificial Sequence: Synthetic oligonucleotide
uauacuccaaggcagacgg

SEQ ID NO: 1419005 - RNA, 19 nt, Artificial Sequence
  Description of Artificial Sequence: Synthetic oligonucleotide
uguagcauggcccacauug

SEQ ID NO: 1419006 - RNA, 19 nt, Artificial Sequence
  Description of Artificial Sequence: Synthetic oligonucleotide
ugaacuuuucauaaguaag

SEQ ID NO: 1419007 - RNA, 19 nt, Artificial Sequence
  Description of Artificial Sequence: Synthetic oligonucleotide
acauacacagaaucgaagc

SEQ ID NO: 1419008 - RNA, 19 nt, Artificial Sequence
  Description of Artificial Sequence: Synthetic oligonucleotide
acagaaucgaagcuaauac

SEQ ID NO: 1419009 - RNA, 19 nt, Artificial Sequence
  Description of Artificial Sequence: Synthetic oligonucleotide
auuaggagcucacuggucc

SEQ ID NO: 1419010 - RNA, 19 nt, Artificial Sequence
  Description of Artificial Sequence: Synthetic oligonucleotide
uccaauuuugcacucaacc

SEQ ID NO: 1419011 - RNA, 19 nt, Artificial Sequence
  Description of Artificial Sequence: Synthetic oligonucleotide
auauuaucuguggagaucc

SEQ ID NO: 1419012 - RNA, 19 nt, Artificial Sequence
  Description of Artificial Sequence: Synthetic oligonucleotide
aauagccgaaaucaguauc

SEQ ID NO: 1419013 - RNA, 19 nt, Artificial Sequence
  Description of Artificial Sequence: Synthetic oligonucleotide
uuuggaauagccgaaauca

SEQ ID NO: 1419014 - RNA, 19 nt, Artificial Sequence
  Description of Artificial Sequence: Synthetic oligonucleotide
agaauauggcucuaggaac

SEQ ID NO: 1419015 - RNA, 19 nt, Artificial Sequence
  Description of Artificial Sequence: Synthetic oligonucleotide
aguuaccaguguuaaaucc

SEQ ID NO: 1419016 - RNA, 19 nt, Artificial Sequence
  Description of Artificial Sequence: Synthetic oligonucleotide
aauauauuugcuaugccug

SEQ ID NO: 1419017 - RNA, 19 nt, Artificial Sequence
  Description of Artificial Sequence: Synthetic oligonucleotide
acguuuggcaauuacacac

SEQ ID NO: 1419018 - RNA, 19 nt, Artificial Sequence
  Description of Artificial Sequence: Synthetic oligonucleotide
aaucgaagcuaauacuuuc

SEQ ID NO: 1419019 - RNA, 19 nt, Artificial Sequence
  Description of Artificial Sequence: Synthetic oligonucleotide
uguauguauacuccaaggc

SEQ ID NO: 1419020 - RNA, 19 nt, Artificial Sequence
  Description of Artificial Sequence: Synthetic oligonucleotide
uuggcaauuacacacagaa

SEQ ID NO: 1419021 - RNA, 19 nt, Artificial Sequence
  Description of Artificial Sequence: Synthetic oligonucleotide
aaaacuagguagaagagca

SEQ ID NO: 1419022 - RNA, 19 nt, Artificial Sequence
  Description of Artificial Sequence: Synthetic oligonucleotide
cuuuauguuggcaagguac

SEQ ID NO: 1419023 - RNA, 19 nt, Artificial Sequence
  Description of Artificial Sequence: Synthetic oligonucleotide
uaaaaggugcuccaucagg

SEQ ID NO: 1419024 - RNA, 19 nt, Artificial Sequence
  Description of Artificial Sequence: Synthetic oligonucleotide
aaacuugucccggucaucc

SEQ ID NO: 1419025 - RNA, 19 nt, Artificial Sequence
  Description of Artificial Sequence: Synthetic oligonucleotide
caagguaccauuuuauccc

SEQ ID NO: 1419026 - RNA, 19 nt, Artificial Sequence
  Description of Artificial Sequence: Synthetic oligonucleotide
auauauuugcuaugccugc

SEQ ID NO: 1419027 - RNA, 19 nt, Artificial Sequence
  Description of Artificial Sequence: Synthetic oligonucleotide
auuugcuaugccugcaucc

SEQ ID NO: 1419028 - RNA, 19 nt, Artificial Sequence
  Description of Artificial Sequence: Synthetic oligonucleotide
guuacuucuuucuugguag

SEQ ID NO: 1419029 - RNA, 19 nt, Artificial Sequence
  Description of Artificial Sequence: Synthetic oligonucleotide
aaacugacaugcuugauaa

SEQ ID NO: 1419030 - RNA, 19 nt, Artificial Sequence
  Description of Artificial Sequence: Synthetic oligonucleotide
uuuauguuggcaagguacc

SEQ ID NO: 1419031 - RNA, 19 nt, Artificial Sequence
  Description of Artificial Sequence: Synthetic oligonucleotide
uuaagcuuuagacguuugg

SEQ ID NO: 1419032 - RNA, 19 nt, Artificial Sequence
  Description of Artificial Sequence: Synthetic oligonucleotide
uguaucacauauuaucugu

SEQ ID NO: 1419033 - RNA, 19 nt, Artificial Sequence
  Description of Artificial Sequence: Synthetic oligonucleotide
uaucacauauuaucugugg

SEQ ID NO: 1419034 - RNA, 19 nt, Artificial Sequence
  Description of Artificial Sequence: Synthetic oligonucleotide
aauccuagaauggcagucc

SEQ ID NO: 1419035 - RNA, 19 nt, Artificial Sequence
  Description of Artificial Sequence: Synthetic oligonucleotide
uuuugaagcaaggaaacug

SEQ ID NO: 1419036 - RNA, 19 nt, Artificial Sequence
  Description of Artificial Sequence: Synthetic oligonucleotide
aaaagucacuuuauguugg

SEQ ID NO: 1419037 - RNA, 19 nt, Artificial Sequence
  Description of Artificial Sequence: Synthetic oligonucleotide
uagcauuagauucaaagau

SEQ ID NO: 1419038 - RNA, 19 nt, Artificial Sequence
  Description of Artificial Sequence: Synthetic oligonucleotide
ucuggcauuaauucgauua

SEQ ID NO: 1419039 - RNA, 19 nt, Artificial Sequence
  Description of Artificial Sequence: Synthetic oligonucleotide
cuggacggcaacuagaggc

SEQ ID NO: 1419040 - RNA, 19 nt, Artificial Sequence
  Description of Artificial Sequence: Synthetic oligonucleotide
aagucuauaaguccacggu

SEQ ID NO: 1419041 - RNA, 19 nt, Artificial Sequence
  Description of Artificial Sequence: Synthetic oligonucleotide
auuaauucgauuauucugu

SEQ ID NO: 1419042 - RNA, 19 nt, Artificial Sequence
  Description of Artificial Sequence: Synthetic oligonucleotide
ucacaagaacacaagguug

SEQ ID NO: 1419043 - RNA, 19 nt, Artificial Sequence
  Description of Artificial Sequence: Synthetic oligonucleotide
aagcuaauacuuucagauc

SEQ ID NO: 1419044 - RNA, 19 nt, Artificial Sequence
  Description of Artificial Sequence: Synthetic oligonucleotide
uguccuuuggaauagccga

SEQ ID NO: 1419045 - RNA, 19 nt, Artificial Sequence
  Description of Artificial Sequence: Synthetic oligonucleotide
cauaauccuagaauggcag

SEQ ID NO: 1419046 - RNA, 19 nt, Artificial Sequence
  Description of Artificial Sequence: Synthetic oligonucleotide
ucuaggaaccucuucaggu

SEQ ID NO: 1419047 - RNA, 19 nt, Artificial Sequence
  Description of Artificial Sequence: Synthetic oligonucleotide
agucuauaaguccacgguc

SEQ ID NO: 1419048 - RNA, 19 nt, Artificial Sequence
  Description of Artificial Sequence: Synthetic oligonucleotide
uagagaauauggcucuagg

SEQ ID NO: 1419049 - RNA, 19 nt, Artificial Sequence
  Description of Artificial Sequence: Synthetic oligonucleotide
uauaaguccacggucagga

SEQ ID NO: 1419050 - RNA, 19 nt, Artificial Sequence
  Description of Artificial Sequence: Synthetic oligonucleotide
aagcuuuagacguuuggca

SEQ ID NO: 1419051 - RNA, 19 nt, Artificial Sequence
  Description of Artificial Sequence: Synthetic oligonucleotide
gaagcuaauacuuucagau

SEQ ID NO: 1419052 - RNA, 19 nt, Artificial Sequence
  Description of Artificial Sequence: Synthetic oligonucleotide
uuugaacacaacucguccc

SEQ ID NO: 1419053 - RNA, 19 nt, Artificial Sequence
  Description of Artificial Sequence: Synthetic oligonucleotide
uuguccuuuggaauagccg

SEQ ID NO: 1419054 - RNA, 19 nt, Artificial Sequence
  Description of Artificial Sequence: Synthetic oligonucleotide
aacaugacacaacauguau

SEQ ID NO: 1419055 - RNA, 19 nt, Artificial Sequence
  Description of Artificial Sequence: Synthetic oligonucleotide
ucugcuuaaaaggugcucc

SEQ ID NO: 1419056 - RNA, 19 nt, Artificial Sequence
  Description of Artificial Sequence: Synthetic oligonucleotide
ucauaauccuagaauggca

SEQ ID NO: 1419057 - RNA, 19 nt, Artificial Sequence
  Description of Artificial Sequence: Synthetic oligonucleotide
ucaaaauaugacaguuacc

SEQ ID NO: 1419058 - RNA, 19 nt, Artificial Sequence
  Description of Artificial Sequence: Synthetic oligonucleotide
caugcuguauguauacucc

SEQ ID NO: 1419059 - RNA, 19 nt, Artificial Sequence
  Description of Artificial Sequence: Synthetic oligonucleotide
agauucaaagaugaccugg

SEQ ID NO: 1419060 - RNA, 19 nt, Artificial Sequence
  Description of Artificial Sequence: Synthetic oligonucleotide
accguuacuucuuucuugg

SEQ ID NO: 1419061 - RNA, 19 nt, Artificial Sequence
  Description of Artificial Sequence: Synthetic oligonucleotide
uauucuguucauuuucaca

SEQ ID NO: 1419062 - RNA, 19 nt, Artificial Sequence
  Description of Artificial Sequence: Synthetic oligonucleotide
agacaugcuguauguauac

SEQ ID NO: 1419063 - RNA, 19 nt, Artificial Sequence
  Description of Artificial Sequence: Synthetic oligonucleotide
aacuagguagaagagcaag

SEQ ID NO: 1419064 - RNA, 19 nt, Artificial Sequence
  Description of Artificial Sequence: Synthetic oligonucleotide
uccuuuguaucacauauua

SEQ ID NO: 1419065 - RNA, 19 nt, Artificial Sequence
  Description of Artificial Sequence: Synthetic oligonucleotide
aacuggaccauucugcuua

SEQ ID NO: 1419066 - RNA, 19 nt, Artificial Sequence
  Description of Artificial Sequence: Synthetic oligonucleotide
cuucuagagaauauggcuc

SEQ ID NO: 1419067 - RNA, 19 nt, Artificial Sequence
  Description of Artificial Sequence: Synthetic oligonucleotide
uccuggacuaggaaucugg

SEQ ID NO: 1419068 - RNA, 19 nt, Artificial Sequence
  Description of Artificial Sequence: Synthetic oligonucleotide
uuagacaugcuguauguau

SEQ ID NO: 1419069 - RNA, 19 nt, Artificial Sequence
  Description of Artificial Sequence: Synthetic oligonucleotide
aggacuuugaacacaacuc

SEQ ID NO: 1419070 - RNA, 19 nt, Artificial Sequence
  Description of Artificial Sequence: Synthetic oligonucleotide
caucaggacaguuugugag

SEQ ID NO: 1419071 - RNA, 19 nt, Artificial Sequence
  Description of Artificial Sequence: Synthetic oligonucleotide
uuuucauaaguaaguggcu

SEQ ID NO: 1419072 - RNA, 19 nt, Artificial Sequence
  Description of Artificial Sequence: Synthetic oligonucleotide
ucaaccguuacuucuuucu

SEQ ID NO: 1419073 - RNA, 19 nt, Artificial Sequence
  Description of Artificial Sequence: Synthetic oligonucleotide
cugucgauacccaacgugc

SEQ ID NO: 1419074 - RNA, 19 nt, Artificial Sequence
  Description of Artificial Sequence: Synthetic oligonucleotide
uuucggaaccucaucauuc

SEQ ID NO: 1419075 - RNA, 19 nt, Artificial Sequence
  Description of Artificial Sequence: Synthetic oligonucleotide
aaccguuacuucuuucuug

SEQ ID NO: 1419076 - RNA, 19 nt, Artificial Sequence
  Description of Artificial Sequence: Synthetic oligonucleotide
uugaacacaacucguccca

SEQ ID NO: 1419077 - RNA, 19 nt, Artificial Sequence
  Description of Artificial Sequence: Synthetic oligonucleotide
ucuugcagcuaaaagucac

SEQ ID NO: 1419078 - RNA, 19 nt, Artificial Sequence
  Description of Artificial Sequence: Synthetic oligonucleotide
ucuauaaguccacggucag

SEQ ID NO: 1419079 - RNA, 19 nt, Artificial Sequence
  Description of Artificial Sequence: Synthetic oligonucleotide
ucgaagcuaauacuuucag

SEQ ID NO: 1419080 - RNA, 19 nt, Artificial Sequence
  Description of Artificial Sequence: Synthetic oligonucleotide
guauguauacuccaaggca

SEQ ID NO: 1419081 - RNA, 19 nt, Artificial Sequence
  Description of Artificial Sequence: Synthetic oligonucleotide
guagcauuagauucaaaga

SEQ ID NO: 1419082 - RNA, 19 nt, Artificial Sequence
  Description of Artificial Sequence: Synthetic oligonucleotide
uuggaauagccgaaaucag

SEQ ID NO: 1419083 - RNA, 19 nt, Artificial Sequence
  Description of Artificial Sequence: Synthetic oligonucleotide
uccgucuggcauuaauucg

SEQ ID NO: 1419084 - RNA, 19 nt, Artificial Sequence
  Description of Artificial Sequence: Synthetic oligonucleotide
uggaauagccgaaaucagu

SEQ ID NO: 1419085 - RNA, 19 nt, Artificial Sequence
  Description of Artificial Sequence: Synthetic oligonucleotide
agagaauauggcucuagga

SEQ ID NO: 1419086 - RNA, 19 nt, Artificial Sequence
  Description of Artificial Sequence: Synthetic oligonucleotide
aaaaggugcuccaucagga

SEQ ID NO: 1419087 - RNA, 19 nt, Artificial Sequence
  Description of Artificial Sequence: Synthetic oligonucleotide
ucauaaguaaguggcuuag

SEQ ID NO: 1419088 - RNA, 19 nt, Artificial Sequence
  Description of Artificial Sequence: Synthetic oligonucleotide
uaucacucauaccacuaca

SEQ ID NO: 1419089 - RNA, 19 nt, Artificial Sequence
  Description of Artificial Sequence: Synthetic oligonucleotide
uuaucuguggagauccguc

SEQ ID NO: 1419090 - RNA, 19 nt, Artificial Sequence
  Description of Artificial Sequence: Synthetic oligonucleotide
ugauaaacuggaccauucu

SEQ ID NO: 1419091 - RNA, 19 nt, Artificial Sequence
  Description of Artificial Sequence: Synthetic oligonucleotide
ucuuuggagaccccuacuc

SEQ ID NO: 1419092 - RNA, 19 nt, Artificial Sequence
  Description of Artificial Sequence: Synthetic oligonucleotide
gauggaaggacuucuucuc

SEQ ID NO: 1419093 - RNA, 19 nt, Artificial Sequence
  Description of Artificial Sequence: Synthetic oligonucleotide
aacacaagguuguccuuug

SEQ ID NO: 1419094 - RNA, 19 nt, Artificial Sequence
  Description of Artificial Sequence: Synthetic oligonucleotide
uugugaaugugaagagugc

SEQ ID NO: 1419095 - RNA, 19 nt, Artificial Sequence
  Description of Artificial Sequence: Synthetic oligonucleotide
gaagacgagacucccacuc

SEQ ID NO: 1419096 - RNA, 19 nt, Artificial Sequence
  Description of Artificial Sequence: Synthetic oligonucleotide
aggcaguuacuucagagga

SEQ ID NO: 1419097 - RNA, 19 nt, Artificial Sequence
  Description of Artificial Sequence: Synthetic oligonucleotide
aacacaacucgucccaaaa

SEQ ID NO: 1419098 - RNA, 19 nt, Artificial Sequence
  Description of Artificial Sequence: Synthetic oligonucleotide
guauuucggaaccucauca

SEQ ID NO: 1419099 - RNA, 19 nt, Artificial Sequence
  Description of Artificial Sequence: Synthetic oligonucleotide
uuuucccguaauaugggaa

SEQ ID NO: 1419100 - RNA, 19 nt, Artificial Sequence
  Description of Artificial Sequence: Synthetic oligonucleotide
ucaguaucacucauaccac

SEQ ID NO: 1419101 - RNA, 19 nt, Artificial Sequence
  Description of Artificial Sequence: Synthetic oligonucleotide
ccaauuuugcacucaaccg

SEQ ID NO: 1419102 - RNA, 19 nt, Artificial Sequence
  Description of Artificial Sequence: Synthetic oligonucleotide
uauuuacacagcacagcac

SEQ ID NO: 1419103 - RNA, 19 nt, Artificial Sequence
  Description of Artificial Sequence: Synthetic oligonucleotide
ucacuuuauguuggcaagg

SEQ ID NO: 1419104 - RNA, 19 nt, Artificial Sequence
  Description of Artificial Sequence: Synthetic oligonucleotide
uuagacguuuggcaauuac

SEQ ID NO: 1419105 - RNA, 19 nt, Artificial Sequence
  Description of Artificial Sequence: Synthetic oligonucleotide
uguguaccacaccaccucc

SEQ ID NO: 1419106 - RNA, 19 nt, Artificial Sequence
  Description of Artificial Sequence: Synthetic oligonucleotide
auaaguuaauauauuugcu

SEQ ID NO: 1419107 - RNA, 19 nt, Artificial Sequence
  Description of Artificial Sequence: Synthetic oligonucleotide
aggacaguuugugagguuc

SEQ ID NO: 1419108 - RNA, 19 nt, Artificial Sequence
  Description of Artificial Sequence: Synthetic oligonucleotide
uauuaucuguggagauccg

SEQ ID NO: 1419109 - RNA, 19 nt, Artificial Sequence
  Description of Artificial Sequence: Synthetic oligonucleotide
uuucccguaauaugggaaa

SEQ ID NO: 1419110 - RNA, 19 nt, Artificial Sequence
  Description of Artificial Sequence: Synthetic oligonucleotide
ggaccauucugcuuaaaag

SEQ ID NO: 1419111 - RNA, 19 nt, Artificial Sequence
  Description of Artificial Sequence: Synthetic oligonucleotide
ugaucuggaagcacgcuau

SEQ ID NO: 1419112 - RNA, 19 nt, Artificial Sequence
  Description of Artificial Sequence: Synthetic oligonucleotide
uaugccugcauccuuugua

SEQ ID NO: 1419113 - RNA, 19 nt, Artificial Sequence
  Description of Artificial Sequence: Synthetic oligonucleotide
cuaugaucuggaagcacgc

SEQ ID NO: 1419114 - RNA, 19 nt, Artificial Sequence
  Description of Artificial Sequence: Synthetic oligonucleotide
aauuaggagcucacugguc

SEQ ID NO: 1419115 - RNA, 19 nt, Artificial Sequence
  Description of Artificial Sequence: Synthetic oligonucleotide
cuuuggagaccccuacucc

SEQ ID NO: 1419116 - RNA, 19 nt, Artificial Sequence
  Description of Artificial Sequence: Synthetic oligonucleotide
aggcugucgauacccaacg

SEQ ID NO: 1419117 - RNA, 19 nt, Artificial Sequence
  Description of Artificial Sequence: Synthetic oligonucleotide
ugucgauacccaacgugcc

SEQ ID NO: 1419118 - RNA, 19 nt, Artificial Sequence
  Description of Artificial Sequence: Synthetic oligonucleotide
ugacacaacaugacacaac

SEQ ID NO: 1419119 - RNA, 19 nt, Artificial Sequence
  Description of Artificial Sequence: Synthetic oligonucleotide
agcuuuagacguuuggcaa

SEQ ID NO: 1419120 - RNA, 19 nt, Artificial Sequence
  Description of Artificial Sequence: Synthetic oligonucleotide
aggaacgcuccgcuggucg

SEQ ID NO: 1419121 - RNA, 19 nt, Artificial Sequence
  Description of Artificial Sequence: Synthetic oligonucleotide
uacuuucagauccacuuuu

SEQ ID NO: 1419122 - RNA, 19 nt, Artificial Sequence
  Description of Artificial Sequence: Synthetic oligonucleotide
uagacaugcuguauguaua

SEQ ID NO: 1419123 - RNA, 19 nt, Artificial Sequence
  Description of Artificial Sequence: Synthetic oligonucleotide
uuaucccuaaaacuuuguu

SEQ ID NO: 1419124 - RNA, 19 nt, Artificial Sequence
  Description of Artificial Sequence: Synthetic oligonucleotide
caucauucagggucuguag

SEQ ID NO: 1419125 - RNA, 19 nt, Artificial Sequence
  Description of Artificial Sequence: Synthetic oligonucleotide
uucggaaccucaucauuca

SEQ ID NO: 1419126 - RNA, 19 nt, Artificial Sequence
  Description of Artificial Sequence: Synthetic oligonucleotide
uuucauaaguaaguggcuu

SEQ ID NO: 1419127 - RNA, 19 nt, Artificial Sequence
  Description of Artificial Sequence: Synthetic oligonucleotide
agaaucgaagcuaauacuu

SEQ ID NO: 1419128 - RNA, 19 nt, Artificial Sequence
  Description of Artificial Sequence: Synthetic oligonucleotide
cagaagacgagacucccac

SEQ ID NO: 1419129 - RNA, 19 nt, Artificial Sequence
  Description of Artificial Sequence: Synthetic oligonucleotide
guguucgucauggugggcg

SEQ ID NO: 1419130 - RNA, 19 nt, Artificial Sequence
  Description of Artificial Sequence: Synthetic oligonucleotide
uacuccaaggcagacggug

SEQ ID NO: 1419131 - RNA, 19 nt, Artificial Sequence
  Description of Artificial Sequence: Synthetic oligonucleotide
ucgguauuucggaaccuca

SEQ ID NO: 1419132 - RNA, 19 nt, Artificial Sequence
  Description of Artificial Sequence: Synthetic oligonucleotide
aucuggucucgguauuucg

SEQ ID NO: 1419133 - RNA, 19 nt, Artificial Sequence
  Description of Artificial Sequence: Synthetic oligonucleotide
aagacgagacucccacucu

SEQ ID NO: 1419134 - RNA, 19 nt, Artificial Sequence
  Description of Artificial Sequence: Synthetic oligonucleotide
uagauucaaagaugaccug

SEQ ID NO: 1419135 - RNA, 19 nt, Artificial Sequence
  Description of Artificial Sequence: Synthetic oligonucleotide
uccuaggugcucacuagga

SEQ ID NO: 1419136 - RNA, 19 nt, Artificial Sequence
  Description of Artificial Sequence: Synthetic oligonucleotide
auagccgaaaucaguauca

SEQ ID NO: 1419137 - RNA, 19 nt, Artificial Sequence
  Description of Artificial Sequence: Synthetic oligonucleotide
gucgauacccaacgugccg

SEQ ID NO: 1419138 - RNA, 19 nt, Artificial Sequence
  Description of Artificial Sequence: Synthetic oligonucleotide
uuuagguuguauguuccuc

SEQ ID NO: 1419139 - RNA, 19 nt, Artificial Sequence
  Description of Artificial Sequence: Synthetic oligonucleotide
guauacuccaaggcagacg

SEQ ID NO: 1419140 - RNA, 19 nt, Artificial Sequence
  Description of Artificial Sequence: Synthetic oligonucleotide
gucucgguauuucggaacc

SEQ ID NO: 1419141 - RNA, 19 nt, Artificial Sequence
  Description of Artificial Sequence: Synthetic oligonucleotide
uauuucggaaccucaucau

SEQ ID NO: 1419142 - RNA, 19 nt, Artificial Sequence
  Description of Artificial Sequence: Synthetic oligonucleotide
uggacggcaacuagaggcu

SEQ ID NO: 1419143 - RNA, 19 nt, Artificial Sequence
  Description of Artificial Sequence: Synthetic oligonucleotide
uuugugagguucuucuguu

SEQ ID NO: 1419144 - RNA, 19 nt, Artificial Sequence
  Description of Artificial Sequence: Synthetic oligonucleotide
ugcuguauguauacuccaa

SEQ ID NO: 1419145 - RNA, 19 nt, Artificial Sequence
  Description of Artificial Sequence: Synthetic oligonucleotide
guuaccaguguuaaaucca

SEQ ID NO: 1419146 - RNA, 19 nt, Artificial Sequence
  Description of Artificial Sequence: Synthetic oligonucleotide
caugcuugauaaacuggac

SEQ ID NO: 1419147 - RNA, 19 nt, Artificial Sequence
  Description of Artificial Sequence: Synthetic oligonucleotide
ugaccuggacggcaacuag

SEQ ID NO: 1419148 - RNA, 19 nt, Artificial Sequence
  Description of Artificial Sequence: Synthetic oligonucleotide
uaauucgauuauucuguuc

SEQ ID NO: 1419149 - RNA, 19 nt, Artificial Sequence
  Description of Artificial Sequence: Synthetic oligonucleotide
gacgacgaggggcucggcg

SEQ ID NO: 1419150 - RNA, 19 nt, Artificial Sequence
  Description of Artificial Sequence: Synthetic oligonucleotide
cauauuaucuguggagauc

SEQ ID NO: 1419151 - RNA, 19 nt, Artificial Sequence
  Description of Artificial Sequence: Synthetic oligonucleotide
acuccuaggugcucacuag

SEQ ID NO: 1419152 - RNA, 19 nt, Artificial Sequence
  Description of Artificial Sequence: Synthetic oligonucleotide
uaggaaucuggucucggua

SEQ ID NO: 1419153 - RNA, 19 nt, Artificial Sequence
  Description of Artificial Sequence: Synthetic oligonucleotide
gaaggcgaggcgaacggag

SEQ ID NO: 1419154 - RNA, 19 nt, Artificial Sequence
  Description of Artificial Sequence: Synthetic oligonucleotide
aauauggcucuaggaaccu

SEQ ID NO: 1419155 - RNA, 19 nt, Artificial Sequence
  Description of Artificial Sequence: Synthetic oligonucleotide
guaucacucauaccacuac

SEQ ID NO: 1419156 - RNA, 19 nt, Artificial Sequence
  Description of Artificial Sequence: Synthetic oligonucleotide
agguuuggaauuaggagcu

SEQ ID NO: 1419157 - RNA, 19 nt, Artificial Sequence
  Description of Artificial Sequence: Synthetic oligonucleotide
uuaauucgauuauucuguu

SEQ ID NO: 1419158 - RNA, 19 nt, Artificial Sequence
  Description of Artificial Sequence: Synthetic oligonucleotide
gacguuuggcaauuacaca

SEQ ID NO: 1419159 - RNA, 19 nt, Artificial Sequence
  Description of Artificial Sequence: Synthetic oligonucleotide
gccgaaaucaguaucacuc

SEQ ID NO: 1419160 - RNA, 19 nt, Artificial Sequence
  Description of Artificial Sequence: Synthetic oligonucleotide
ucccuaaaacuuuguuggc

SEQ ID NO: 1419161 - RNA, 19 nt, Artificial Sequence
  Description of Artificial Sequence: Synthetic oligonucleotide
cacauauuaucuguggaga

SEQ ID NO: 1419162 - RNA, 19 nt, Artificial Sequence
  Description of Artificial Sequence: Synthetic oligonucleotide
auggaaggacuucuucuca

SEQ ID NO: 1419163 - RNA, 19 nt, Artificial Sequence
  Description of Artificial Sequence: Synthetic oligonucleotide
ugacaguuaccaguguuaa

SEQ ID NO: 1419164 - RNA, 19 nt, Artificial Sequence
  Description of Artificial Sequence: Synthetic oligonucleotide
gucuauaaguccacgguca

SEQ ID NO: 1419165 - RNA, 19 nt, Artificial Sequence
  Description of Artificial Sequence: Synthetic oligonucleotide
cuaugaugucaucccagug

SEQ ID NO: 1419166 - RNA, 19 nt, Artificial Sequence
  Description of Artificial Sequence: Synthetic oligonucleotide
cuagagaauauggcucuag

SEQ ID NO: 1419167 - RNA, 19 nt, Artificial Sequence
  Description of Artificial Sequence: Synthetic oligonucleotide
gcuguauguauacuccaag

SEQ ID NO: 1419168 - RNA, 19 nt, Artificial Sequence
  Description of Artificial Sequence: Synthetic oligonucleotide
auauuugcuaugccugcau

SEQ ID NO: 1419169 - RNA, 19 nt, Artificial Sequence
  Description of Artificial Sequence: Synthetic oligonucleotide
ucaucauucagggucugua

SEQ ID NO: 1419170 - RNA, 19 nt, Artificial Sequence
  Description of Artificial Sequence: Synthetic oligonucleotide
cuccuaggugcucacuagg

SEQ ID NO: 1419171 - RNA, 19 nt, Artificial Sequence
  Description of Artificial Sequence: Synthetic oligonucleotide
auuucggaaccucaucauu

SEQ ID NO: 1419172 - RNA, 19 nt, Artificial Sequence
  Description of Artificial Sequence: Synthetic oligonucleotide
accguacacugguucaaag

SEQ ID NO: 1419173 - RNA, 19 nt, Artificial Sequence
  Description of Artificial Sequence: Synthetic oligonucleotide
augaucuggaagcacgcua

SEQ ID NO: 1419174 - RNA, 19 nt, Artificial Sequence
  Description of Artificial Sequence: Synthetic oligonucleotide
cagaccccagcucuuggcg

SEQ ID NO: 1419175 - RNA, 19 nt, Artificial Sequence
  Description of Artificial Sequence: Synthetic oligonucleotide
cuaauacuuucagauccac

SEQ ID NO: 1419176 - RNA, 19 nt, Artificial Sequence
  Description of Artificial Sequence: Synthetic oligonucleotide
uguauacuccaaggcagac

SEQ ID NO: 1419177 - RNA, 19 nt, Artificial Sequence
  Description of Artificial Sequence: Synthetic oligonucleotide
cuauaaguccacggucagg

SEQ ID NO: 1419178 - RNA, 19 nt, Artificial Sequence
  Description of Artificial Sequence: Synthetic oligonucleotide
uuccacucggccaggcucu

SEQ ID NO: 1419179 - RNA, 19 nt, Artificial Sequence
  Description of Artificial Sequence: Synthetic oligonucleotide
auuaucuguggagauccgu

SEQ ID NO: 1419180 - RNA, 19 nt, Artificial Sequence
  Description of Artificial Sequence: Synthetic oligonucleotide
auacuuucagauccacuuu

SEQ ID NO: 1419181 - RNA, 19 nt, Artificial Sequence
  Description of Artificial Sequence: Synthetic oligonucleotide
acacaagguuguccuuugg

SEQ ID NO: 1419182 - RNA, 19 nt, Artificial Sequence
  Description of Artificial Sequence: Synthetic oligonucleotide
acuaggaaucuggucucgg

SEQ ID NO: 1419183 - RNA, 19 nt, Artificial Sequence
  Description of Artificial Sequence: Synthetic oligonucleotide
ggcuuagacaugcuguaug

SEQ ID NO: 1419184 - RNA, 19 nt, Artificial Sequence
  Description of Artificial Sequence: Synthetic oligonucleotide
cauaaguccuggacuagga

SEQ ID NO: 1419185 - RNA, 19 nt, Artificial Sequence
  Description of Artificial Sequence: Synthetic oligonucleotide
agagcaagaucagacccca

SEQ ID NO: 1419186 - RNA, 19 nt, Artificial Sequence
  Description of Artificial Sequence: Synthetic oligonucleotide
guacacugguucaaagggc

SEQ ID NO: 1419187 - RNA, 19 nt, Artificial Sequence
  Description of Artificial Sequence: Synthetic oligonucleotide
caguuaccaguguuaaauc

SEQ ID NO: 1419188 - RNA, 19 nt, Artificial Sequence
  Description of Artificial Sequence: Synthetic oligonucleotide
aagucacuuuauguuggca

SEQ ID NO: 1419189 - RNA, 19 nt, Artificial Sequence
  Description of Artificial Sequence: Synthetic oligonucleotide
uucucacauacagaacuuc

SEQ ID NO: 1419190 - RNA, 19 nt, Artificial Sequence
  Description of Artificial Sequence: Synthetic oligonucleotide
ggcauuaauucgauuauuc

SEQ ID NO: 1419191 - RNA, 19 nt, Artificial Sequence
  Description of Artificial Sequence: Synthetic oligonucleotide
ucgauacccaacgugccgu

SEQ ID NO: 1419192 - RNA, 19 nt, Artificial Sequence
  Description of Artificial Sequence: Synthetic oligonucleotide
uacuucuuucuugguagca

SEQ ID NO: 1419193 - RNA, 19 nt, Artificial Sequence
  Description of Artificial Sequence: Synthetic oligonucleotide
ugcucacuaggacuuugaa

SEQ ID NO: 1419194 - RNA, 19 nt, Artificial Sequence
  Description of Artificial Sequence: Synthetic oligonucleotide
auccuagaauggcagucca

SEQ ID NO: 1419195 - RNA, 19 nt, Artificial Sequence
  Description of Artificial Sequence: Synthetic oligonucleotide
gacuaggaaucuggucucg

SEQ ID NO: 1419196 - RNA, 19 nt, Artificial Sequence
  Description of Artificial Sequence: Synthetic oligonucleotide
agcucuuggcggugcgccc

SEQ ID NO: 1419197 - RNA, 19 nt, Artificial Sequence
  Description of Artificial Sequence: Synthetic oligonucleotide
auucgauuauucuguucau

SEQ ID NO: 1419198 - RNA, 19 nt, Artificial Sequence
  Description of Artificial Sequence: Synthetic oligonucleotide
gcugucgauacccaacgug

SEQ ID NO: 1419199 - RNA, 19 nt, Artificial Sequence
  Description of Artificial Sequence: Synthetic oligonucleotide
guguguaccacaccaccuc

SEQ ID NO: 1419200 - RNA, 19 nt, Artificial Sequence
  Description of Artificial Sequence: Synthetic oligonucleotide
gaaaucaguaucacucaua

SEQ ID NO: 1419201 - RNA, 19 nt, Artificial Sequence
  Description of Artificial Sequence: Synthetic oligonucleotide
uuggcggugcgccccagga

SEQ ID NO: 1419202 - RNA, 19 nt, Artificial Sequence
  Description of Artificial Sequence: Synthetic oligonucleotide
gcaauuacacacagaagac

SEQ ID NO: 1419203 - RNA, 19 nt, Artificial Sequence
  Description of Artificial Sequence: Synthetic oligonucleotide
cuggacuaggaaucugguc

SEQ ID NO: 1419204 - RNA, 19 nt, Artificial Sequence
  Description of Artificial Sequence: Synthetic oligonucleotide
ccuagaauggcaguccagc

SEQ ID NO: 1419205 - RNA, 19 nt, Artificial Sequence
  Description of Artificial Sequence: Synthetic oligonucleotide
uguucgucauggugggcgu

SEQ ID NO: 1419206 - RNA, 19 nt, Artificial Sequence
  Description of Artificial Sequence: Synthetic oligonucleotide
agccgaaaucaguaucacu

SEQ ID NO: 1419207 - RNA, 19 nt, Artificial Sequence
  Description of Artificial Sequence: Synthetic oligonucleotide
guuuggaauuaggagcuca

SEQ ID NO: 1419208 - RNA, 19 nt, Artificial Sequence
  Description of Artificial Sequence: Synthetic oligonucleotide
agauccgucuggcauuaau

SEQ ID NO: 1419209 - RNA, 19 nt, Artificial Sequence
  Description of Artificial Sequence: Synthetic oligonucleotide
auguuggcaagguaccauu

SEQ ID NO: 1419210 - RNA, 19 nt, Artificial Sequence
  Description of Artificial Sequence: Synthetic oligonucleotide
ugcacucaaccguuacuuc

SEQ ID NO: 1419211 - RNA, 19 nt, Artificial Sequence
  Description of Artificial Sequence: Synthetic oligonucleotide
acuuuauguuggcaaggua

SEQ ID NO: 1419212 - RNA, 19 nt, Artificial Sequence
  Description of Artificial Sequence: Synthetic oligonucleotide
ccguacacugguucaaagg

SEQ ID NO: 1419213 - RNA, 19 nt, Artificial Sequence
  Description of Artificial Sequence: Synthetic oligonucleotide
gucggguuguagaugaaca

SEQ ID NO: 1419214 - RNA, 19 nt, Artificial Sequence
  Description of Artificial Sequence: Synthetic oligonucleotide
gggaacaagucuccguuac

SEQ ID NO: 1419215 - RNA, 19 nt, Artificial Sequence
  Description of Artificial Sequence: Synthetic oligonucleotide
agaagacgagacucccacu

SEQ ID NO: 1419216 - RNA, 19 nt, Artificial Sequence
  Description of Artificial Sequence: Synthetic oligonucleotide
gguauuucggaaccucauc

SEQ ID NO: 1419217 - RNA, 19 nt, Artificial Sequence
  Description of Artificial Sequence: Synthetic oligonucleotide
aacugacaugcuugauaaa

SEQ ID NO: 1419218 - RNA, 19 nt, Artificial Sequence
  Description of Artificial Sequence: Synthetic oligonucleotide
gcucacuaggacuuugaac

SEQ ID NO: 1419219 - RNA, 19 nt, Artificial Sequence
  Description of Artificial Sequence: Synthetic oligonucleotide
cacaagguuguccuuugga

SEQ ID NO: 1419220 - RNA, 19 nt, Artificial Sequence
  Description of Artificial Sequence: Synthetic oligonucleotide
aucacucauaccacuacaa

SEQ ID NO: 1419221 - RNA, 19 nt, Artificial Sequence
  Description of Artificial Sequence: Synthetic oligonucleotide
aguaucacucauaccacua

SEQ ID NO: 1419222 - RNA, 19 nt, Artificial Sequence
  Description of Artificial Sequence: Synthetic oligonucleotide
guagaagagcaagaucaga

SEQ ID NO: 1419223 - RNA, 19 nt, Artificial Sequence
  Description of Artificial Sequence: Synthetic oligonucleotide
acgcuaugaugucauccca

SEQ ID NO: 1419224 - RNA, 19 nt, Artificial Sequence
  Description of Artificial Sequence: Synthetic oligonucleotide
cacggucaggauaaguuaa

SEQ ID NO: 1419225 - RNA, 19 nt, Artificial Sequence
  Description of Artificial Sequence: Synthetic oligonucleotide
agaccccuacuccuaggug

SEQ ID NO: 1419226 - RNA, 19 nt, Artificial Sequence
  Description of Artificial Sequence: Synthetic oligonucleotide
auacccaacgugccguuuu

SEQ ID NO: 1419227 - RNA, 19 nt, Artificial Sequence
  Description of Artificial Sequence: Synthetic oligonucleotide
ggaauagccgaaaucagua

SEQ ID NO: 1419228 - RNA, 19 nt, Artificial Sequence
  Description of Artificial Sequence: Synthetic oligonucleotide
caacaugacacaacaugua

SEQ ID NO: 1419229 - RNA, 19 nt, Artificial Sequence
  Description of Artificial Sequence: Synthetic oligonucleotide
acacauacacagaaucgaa

SEQ ID NO: 1419230 - RNA, 19 nt, Artificial Sequence
  Description of Artificial Sequence: Synthetic oligonucleotide
aaacuagguagaagagcaa

SEQ ID NO: 1419231 - RNA, 19 nt, Artificial Sequence
  Description of Artificial Sequence: Synthetic oligonucleotide
aagcacgcuaugaugucau

SEQ ID NO: 1419232 - RNA, 19 nt, Artificial Sequence
  Description of Artificial Sequence: Synthetic oligonucleotide
acaugacacaacauguauu

SEQ ID NO: 1419233 - RNA, 19 nt, Artificial Sequence
  Description of Artificial Sequence: Synthetic oligonucleotide
cagaaucgaagcuaauacu

SEQ ID NO: 1419234 - RNA, 19 nt, Artificial Sequence
  Description of Artificial Sequence: Synthetic oligonucleotide
cuccaagguggcuucauaa

SEQ ID NO: 1419235 - RNA, 19 nt, Artificial Sequence
  Description of Artificial Sequence: Synthetic oligonucleotide
uggucucgguauuucggaa

SEQ ID NO: 1419236 - RNA, 19 nt, Artificial Sequence
  Description of Artificial Sequence: Synthetic oligonucleotide
caaagaugaccuggacggc

SEQ ID NO: 1419237 - RNA, 19 nt, Artificial Sequence
  Description of Artificial Sequence: Synthetic oligonucleotide
gcaguuacuucagaggaca

SEQ ID NO: 1419238 - RNA, 19 nt, Artificial Sequence
  Description of Artificial Sequence: Synthetic oligonucleotide
accauaaguccuggacuag

SEQ ID NO: 1419239 - RNA, 19 nt, Artificial Sequence
  Description of Artificial Sequence: Synthetic oligonucleotide
gaacgcuccgcuggucggg

SEQ ID NO: 1419240 - RNA, 19 nt, Artificial Sequence
  Description of Artificial Sequence: Synthetic oligonucleotide
ugcgccccaggaacgcucc

SEQ ID NO: 1419241 - RNA, 19 nt, Artificial Sequence
  Description of Artificial Sequence: Synthetic oligonucleotide
gaauagccgaaaucaguau

SEQ ID NO: 1419242 - RNA, 19 nt, Artificial Sequence
  Description of Artificial Sequence: Synthetic oligonucleotide
acacuaugaucuggaagca

SEQ ID NO: 1419243 - RNA, 19 nt, Artificial Sequence
  Description of Artificial Sequence: Synthetic oligonucleotide
ugcuuaaaaggugcuccau

SEQ ID NO: 1419244 - RNA, 19 nt, Artificial Sequence
  Description of Artificial Sequence: Synthetic oligonucleotide
gaacacaacucgucccaaa

SEQ ID NO: 1419245 - RNA, 19 nt, Artificial Sequence
  Description of Artificial Sequence: Synthetic oligonucleotide
cucaaccguuacuucuuuc

SEQ ID NO: 1419246 - RNA, 19 nt, Artificial Sequence
  Description of Artificial Sequence: Synthetic oligonucleotide
acggcaacuagaggcuguc

SEQ ID NO: 1419247 - RNA, 19 nt, Artificial Sequence
  Description of Artificial Sequence: Synthetic oligonucleotide
ggucucgguauuucggaac

SEQ ID NO: 1419248 - RNA, 19 nt, Artificial Sequence
  Description of Artificial Sequence: Synthetic oligonucleotide
cucgguauuucggaaccuc

SEQ ID NO: 1419249 - RNA, 19 nt, Artificial Sequence
  Description of Artificial Sequence: Synthetic oligonucleotide
cccguaauaugggaaauac

SEQ ID NO: 1419250 - RNA, 19 nt, Artificial Sequence
  Description of Artificial Sequence: Synthetic oligonucleotide
ugaacacaacucgucccaa

SEQ ID NO: 1419251 - RNA, 19 nt, Artificial Sequence
  Description of Artificial Sequence: Synthetic oligonucleotide
uggcauuaauucgauuauu

SEQ ID NO: 1419252 - RNA, 19 nt, Artificial Sequence
  Description of Artificial Sequence: Synthetic oligonucleotide
agaggcugucgauacccaa

SEQ ID NO: 1419253 - RNA, 19 nt, Artificial Sequence
  Description of Artificial Sequence: Synthetic oligonucleotide
gacuuugaacacaacucgu

SEQ ID NO: 1419254 - RNA, 19 nt, Artificial Sequence
  Description of Artificial Sequence: Synthetic oligonucleotide
guggcuuagacaugcugua

SEQ ID NO: 1419255 - RNA, 19 nt, Artificial Sequence
  Description of Artificial Sequence: Synthetic oligonucleotide
cacucauaccacuacaauu

SEQ ID NO: 1419256 - RNA, 19 nt, Artificial Sequence
  Description of Artificial Sequence: Synthetic oligonucleotide
cggaaccucaucauucagg

SEQ ID NO: 1419257 - RNA, 19 nt, Artificial Sequence
  Description of Artificial Sequence: Synthetic oligonucleotide
uucccguaauaugggaaau

SEQ ID NO: 1419258 - RNA, 19 nt, Artificial Sequence
  Description of Artificial Sequence: Synthetic oligonucleotide
ucgucauggugggcgugcg

SEQ ID NO: 1419259 - RNA, 19 nt, Artificial Sequence
  Description of Artificial Sequence: Synthetic oligonucleotide
ggaacgcuccgcuggucgg

SEQ ID NO: 1419260 - RNA, 19 nt, Artificial Sequence
  Description of Artificial Sequence: Synthetic oligonucleotide
gcacgcuaugaugucaucc

SEQ ID NO: 1419261 - RNA, 19 nt, Artificial Sequence
  Description of Artificial Sequence: Synthetic oligonucleotide
auaaguccacggucaggau

SEQ ID NO: 1419262 - RNA, 19 nt, Artificial Sequence
  Description of Artificial Sequence: Synthetic oligonucleotide
ggcuucauaauccuagaau

SEQ ID NO: 1419263 - RNA, 19 nt, Artificial Sequence
  Description of Artificial Sequence: Synthetic oligonucleotide
caagguuguccuuuggaau

SEQ ID NO: 1419264 - RNA, 19 nt, Artificial Sequence
  Description of Artificial Sequence: Synthetic oligonucleotide
ucccguaauaugggaaaua

SEQ ID NO: 1419265 - RNA, 19 nt, Artificial Sequence
  Description of Artificial Sequence: Synthetic oligonucleotide
ucuagagaauauggcucua

SEQ ID NO: 1419266 - RNA, 19 nt, Artificial Sequence
  Description of Artificial Sequence: Synthetic oligonucleotide
gagaccccuacuccuaggu

SEQ ID NO: 1419267 - RNA, 19 nt, Artificial Sequence
  Description of Artificial Sequence: Synthetic oligonucleotide
ggacuaggaaucuggucuc

SEQ ID NO: 1419268 - RNA, 19 nt, Artificial Sequence
  Description of Artificial Sequence: Synthetic oligonucleotide
uugcuaugccugcauccuu

SEQ ID NO: 1419269 - RNA, 19 nt, Artificial Sequence
  Description of Artificial Sequence: Synthetic oligonucleotide
caucccaguguguguacca

SEQ ID NO: 1419270 - RNA, 19 nt, Artificial Sequence
  Description of Artificial Sequence: Synthetic oligonucleotide
ucucgguauuucggaaccu

SEQ ID NO: 1419271 - RNA, 19 nt, Artificial Sequence
  Description of Artificial Sequence: Synthetic oligonucleotide
gaaucgaagcuaauacuuu

SEQ ID NO: 1419272 - RNA, 19 nt, Artificial Sequence
  Description of Artificial Sequence: Synthetic oligonucleotide
uccgcuggucggguuguag

SEQ ID NO: 1419273 - RNA, 19 nt, Artificial Sequence
  Description of Artificial Sequence: Synthetic oligonucleotide
aacggaggccgcagggcug

SEQ ID NO: 1419274 - RNA, 19 nt, Artificial Sequence
  Description of Artificial Sequence: Synthetic oligonucleotide
uuuagacguuuggcaauua

SEQ ID NO: 1419275 - RNA, 19 nt, Artificial Sequence
  Description of Artificial Sequence: Synthetic oligonucleotide
gcgaacggaggccgcaggg

SEQ ID NO: 1419276 - RNA, 19 nt, Artificial Sequence
  Description of Artificial Sequence: Synthetic oligonucleotide
ggagaccccuacuccuagg

SEQ ID NO: 1419277 - RNA, 19 nt, Artificial Sequence
  Description of Artificial Sequence: Synthetic oligonucleotide
ccacauugugaaugugaag

SEQ ID NO: 1419278 - RNA, 19 nt, Artificial Sequence
  Description of Artificial Sequence: Synthetic oligonucleotide
gcuuagacaugcuguaugu

SEQ ID NO: 1419279 - RNA, 19 nt, Artificial Sequence
  Description of Artificial Sequence: Synthetic oligonucleotide
uggcuuagacaugcuguau

SEQ ID NO: 1419280 - RNA, 19 nt, Artificial Sequence
  Description of Artificial Sequence: Synthetic oligonucleotide
ggaagcacgcuaugauguc

SEQ ID NO: 1419281 - RNA, 19 nt, Artificial Sequence
  Description of Artificial Sequence: Synthetic oligonucleotide
cuggcauuaauucgauuau

SEQ ID NO: 1419282 - RNA, 19 nt, Artificial Sequence
  Description of Artificial Sequence: Synthetic oligonucleotide
cacuaggacuuugaacaca

SEQ ID NO: 1419283 - RNA, 19 nt, Artificial Sequence
  Description of Artificial Sequence: Synthetic oligonucleotide
ccgucuggcauuaauucga

SEQ ID NO: 1419284 - RNA, 19 nt, Artificial Sequence
  Description of Artificial Sequence: Synthetic oligonucleotide
caguaucacucauaccacu

SEQ ID NO: 1419285 - RNA, 19 nt, Artificial Sequence
  Description of Artificial Sequence: Synthetic oligonucleotide
ccaucuggcgaccguacac

SEQ ID NO: 1419286 - RNA, 19 nt, Artificial Sequence
  Description of Artificial Sequence: Synthetic oligonucleotide
gcaacggcggcgcagccca

SEQ ID NO: 1419287 - RNA, 19 nt, Artificial Sequence
  Description of Artificial Sequence: Synthetic oligonucleotide
cgcuaugaugucaucccag

SEQ ID NO: 1419288 - RNA, 19 nt, Artificial Sequence
  Description of Artificial Sequence: Synthetic oligonucleotide
ccgaaaucaguaucacuca

SEQ ID NO: 1419289 - RNA, 19 nt, Artificial Sequence
  Description of Artificial Sequence: Synthetic oligonucleotide
gcuaugaugucaucccagu

SEQ ID NO: 1419290 - RNA, 19 nt, Artificial Sequence
  Description of Artificial Sequence: Synthetic oligonucleotide
cuggcgaccguacacuggu

SEQ ID NO: 1419291 - RNA, 19 nt, Artificial Sequence
  Description of Artificial Sequence: Synthetic oligonucleotide
ggucggguuguagaugaac

SEQ ID NO: 1419292 - RNA, 19 nt, Artificial Sequence
  Description of Artificial Sequence: Synthetic oligonucleotide
gaggcgacgacgaggggcu

SEQ ID NO: 1419293 - RNA, 19 nt, Artificial Sequence
  Description of Artificial Sequence: Synthetic oligonucleotide
gagcaagaucagaccccag

SEQ ID NO: 1419294 - RNA, 19 nt, Artificial Sequence
  Description of Artificial Sequence: Synthetic oligonucleotide
gucccggucauccuggguu

SEQ ID NO: 1419295 - RNA, 19 nt, Artificial Sequence
  Description of Artificial Sequence: Synthetic oligonucleotide
uggugggcgugcggaaggc

SEQ ID NO: 1419296 - RNA, 19 nt, Artificial Sequence
  Description of Artificial Sequence: Synthetic oligonucleotide
accccuacuccuaggugcu

SEQ ID NO: 1419297 - RNA, 19 nt, Artificial Sequence
  Description of Artificial Sequence: Synthetic oligonucleotide
ggcgaacggaggccgcagg

SEQ ID NO: 1419298 - RNA, 19 nt, Artificial Sequence
  Description of Artificial Sequence: Synthetic oligonucleotide
auccuuuguaucacauauu

SEQ ID NO: 1419299 - RNA, 19 nt, Artificial Sequence
  Description of Artificial Sequence: Synthetic oligonucleotide
acggucaggauaaguuaau

SEQ ID NO: 1419300 - RNA, 19 nt, Artificial Sequence
  Description of Artificial Sequence: Synthetic oligonucleotide
uccccaucuggcgaccgua

SEQ ID NO: 1419301 - RNA, 19 nt, Artificial Sequence
  Description of Artificial Sequence: Synthetic oligonucleotide
cacuuuauguuggcaaggu

SEQ ID NO: 1419302 - RNA, 19 nt, Artificial Sequence
  Description of Artificial Sequence: Synthetic oligonucleotide
gcagacggugguuuuggaa

SEQ ID NO: 1419303 - RNA, 19 nt, Artificial Sequence
  Description of Artificial Sequence: Synthetic oligonucleotide
cagcuaaaagucacuuuau

SEQ ID NO: 1419304 - RNA, 19 nt, Artificial Sequence
  Description of Artificial Sequence: Synthetic oligonucleotide
auuuugcacucaaccguua

SEQ ID NO: 1419305 - RNA, 19 nt, Artificial Sequence
  Description of Artificial Sequence: Synthetic oligonucleotide
gaccguacacugguucaaa

SEQ ID NO: 1419306 - RNA, 19 nt, Artificial Sequence
  Description of Artificial Sequence: Synthetic oligonucleotide
aggcgaacggaggccgcag

SEQ ID NO: 1419307 - RNA, 19 nt, Artificial Sequence
  Description of Artificial Sequence: Synthetic oligonucleotide
cccuaaaacuuuguuggca

SEQ ID NO: 1419308 - RNA, 19 nt, Artificial Sequence
  Description of Artificial Sequence: Synthetic oligonucleotide
gugcucacuaggacuuuga

SEQ ID NO: 1419309 - RNA, 19 nt, Artificial Sequence
  Description of Artificial Sequence: Synthetic oligonucleotide
cauuaagcuuuagacguuu

SEQ ID NO: 1419310 - RNA, 19 nt, Artificial Sequence
  Description of Artificial Sequence: Synthetic oligonucleotide
guucgucauggugggcgug

SEQ ID NO: 1419311 - RNA, 19 nt, Artificial Sequence
  Description of Artificial Sequence: Synthetic oligonucleotide
gcuuuagacguuuggcaau

SEQ ID NO: 1419312 - RNA, 19 nt, Artificial Sequence
  Description of Artificial Sequence: Synthetic oligonucleotide
cacucaaccguuacuucuu

SEQ ID NO: 1419313 - RNA, 19 nt, Artificial Sequence
  Description of Artificial Sequence: Synthetic oligonucleotide
guagcauggcccacauugu

SEQ ID NO: 1419314 - RNA, 19 nt, Artificial Sequence
  Description of Artificial Sequence: Synthetic oligonucleotide
ccuacuccuaggugcucac

SEQ ID NO: 1419315 - RNA, 19 nt, Artificial Sequence
  Description of Artificial Sequence: Synthetic oligonucleotide
cggaaggcgaggcgaacgg

SEQ ID NO: 1419316 - RNA, 19 nt, Artificial Sequence
  Description of Artificial Sequence: Synthetic oligonucleotide
gcuggucggguuguagaug

SEQ ID NO: 1419317 - RNA, 19 nt, Artificial Sequence
  Description of Artificial Sequence: Synthetic oligonucleotide
cuuuagacguuuggcaauu

SEQ ID NO: 1419318 - RNA, 19 nt, Artificial Sequence
  Description of Artificial Sequence: Synthetic oligonucleotide
agaucagaccccagcucuu

SEQ ID NO: 1419319 - RNA, 19 nt, Artificial Sequence
  Description of Artificial Sequence: Synthetic oligonucleotide
gaaucuggucucgguauuu

SEQ ID NO: 1419320 - RNA, 19 nt, Artificial Sequence
  Description of Artificial Sequence: Synthetic oligonucleotide
ggcgcgucccggcaacggc

SEQ ID NO: 1419321 - RNA, 19 nt, Artificial Sequence
  Description of Artificial Sequence: Synthetic oligonucleotide
cguuuggcaauuacacaca

SEQ ID NO: 1419322 - RNA, 19 nt, Artificial Sequence
  Description of Artificial Sequence: Synthetic oligonucleotide
caucuggcgaccguacacu

SEQ ID NO: 1419323 - RNA, 19 nt, Artificial Sequence
  Description of Artificial Sequence: Synthetic oligonucleotide
ggcgaggcgaacggaggcc

SEQ ID NO: 1419324 - RNA, 19 nt, Artificial Sequence
  Description of Artificial Sequence: Synthetic oligonucleotide
ggugggcgugcggaaggcg

SEQ ID NO: 1419325 - RNA, 19 nt, Artificial Sequence
  Description of Artificial Sequence: Synthetic oligonucleotide
gacggcaacuagaggcugu

SEQ ID NO: 1419326 - RNA, 19 nt, Artificial Sequence
  Description of Artificial Sequence: Synthetic oligonucleotide
cucauaccacuacaauuuu

SEQ ID NO: 1419327 - RNA, 19 nt, Artificial Sequence
  Description of Artificial Sequence: Synthetic oligonucleotide
auacuccaaggcagacggu

SEQ ID NO: 1419328 - RNA, 19 nt, Artificial Sequence
  Description of Artificial Sequence: Synthetic oligonucleotide
ccacuacaauuuugaagca

SEQ ID NO: 1419329 - RNA, 19 nt, Artificial Sequence
  Description of Artificial Sequence: Synthetic oligonucleotide
caaccguuacuucuuucuu

SEQ ID NO: 1419330 - RNA, 19 nt, Artificial Sequence
  Description of Artificial Sequence: Synthetic oligonucleotide
gcgugcggaaggcgaggcg

SEQ ID NO: 1419331 - RNA, 19 nt, Artificial Sequence
  Description of Artificial Sequence: Synthetic oligonucleotide
ggacggcaacuagaggcug

SEQ ID NO: 1419332 - RNA, 19 nt, Artificial Sequence
  Description of Artificial Sequence: Synthetic oligonucleotide
gcgcgucccggcaacggcg

SEQ ID NO: 1419333 - RNA, 19 nt, Artificial Sequence
  Description of Artificial Sequence: Synthetic oligonucleotide
ccacggucaggauaaguua

SEQ ID NO: 1419334 - RNA, 19 nt, Artificial Sequence
  Description of Artificial Sequence: Synthetic oligonucleotide
cauucagggucuguagcau

SEQ ID NO: 1419335 - RNA, 19 nt, Artificial Sequence
  Description of Artificial Sequence: Synthetic oligonucleotide
uggcgaccguacacugguu

SEQ ID NO: 1419336 - RNA, 19 nt, Artificial Sequence
  Description of Artificial Sequence: Synthetic oligonucleotide
ggccgggaacaagucuccg

SEQ ID NO: 1419337 - RNA, 19 nt, Artificial Sequence
  Description of Artificial Sequence: Synthetic oligonucleotide
gguuuggaauuaggagcuc

SEQ ID NO: 1419338 - RNA, 19 nt, Artificial Sequence
  Description of Artificial Sequence: Synthetic oligonucleotide
ggcgugcggaaggcgaggc

SEQ ID NO: 1419339 - RNA, 19 nt, Artificial Sequence
  Description of Artificial Sequence: Synthetic oligonucleotide
ggcaacggcggcgcagccc

SEQ ID NO: 1419340 - RNA, 19 nt, Artificial Sequence
  Description of Artificial Sequence: Synthetic oligonucleotide
guguaccacaccaccuccu

SEQ ID NO: 1419341 - RNA, 19 nt, Artificial Sequence
  Description of Artificial Sequence: Synthetic oligonucleotide
ccguaauaugggaaauacu

SEQ ID NO: 1419342 - RNA, 19 nt, Artificial Sequence
  Description of Artificial Sequence: Synthetic oligonucleotide
ggaaggcgaggcgaacgga

SEQ ID NO: 1419343 - RNA, 19 nt, Artificial Sequence
  Description of Artificial Sequence: Synthetic oligonucleotide
gggcgugcggaaggcgagg

SEQ ID NO: 1419344 - RNA, 19 nt, Artificial Sequence
  Description of Artificial Sequence: Synthetic oligonucleotide
caggaacgcuccgcugguc

SEQ ID NO: 1419345 - RNA, 19 nt, Artificial Sequence
  Description of Artificial Sequence: Synthetic oligonucleotide
cagggccgggaacaagucu

SEQ ID NO: 1419346 - RNA, 19 nt, Artificial Sequence
  Description of Artificial Sequence: Synthetic oligonucleotide
ccggcaacggcggcgcagc

SEQ ID NO: 1419347 - RNA, 19 nt, Artificial Sequence
  Description of Artificial Sequence: Synthetic oligonucleotide
caacggcggcgcagcccag

SEQ ID NO: 1419348 - RNA, 19 nt, Artificial Sequence
  Description of Artificial Sequence: Synthetic oligonucleotide
ccgcuggucggguuguaga

SEQ ID NO: 1419349 - RNA, 19 nt, Artificial Sequence
  Description of Artificial Sequence: Synthetic oligonucleotide
ccuggacuaggaaucuggu

SEQ ID NO: 1419350 - RNA, 19 nt, Artificial Sequence
  Description of Artificial Sequence: Synthetic oligonucleotide
cgcgucccggcaacggcgg

SEQ ID NO: 1419351 - RNA, 19 nt, Artificial Sequence
  Description of Artificial Sequence: Synthetic oligonucleotide
aggcgacgacgaggggcuc

SEQ ID NO: 1419352 - RNA, 19 nt, Artificial Sequence
  Description of Artificial Sequence: Synthetic oligonucleotide
ggcggcgcgucccggcaac

SEQ ID NO: 1419353 - RNA, 19 nt, Artificial Sequence
  Description of Artificial Sequence: Synthetic oligonucleotide
ggcugucgauacccaacgu

SEQ ID NO: 1419354 - RNA, 19 nt, Artificial Sequence
  Description of Artificial Sequence: Synthetic oligonucleotide
ccuuuggaauagccgaaau

SEQ ID NO: 1419355 - RNA, 19 nt, Artificial Sequence
  Description of Artificial Sequence: Synthetic oligonucleotide
guccccaucuggcgaccgu

SEQ ID NO: 1419356 - RNA, 19 nt, Artificial Sequence
  Description of Artificial Sequence: Synthetic oligonucleotide
cccaucuggcgaccguaca

SEQ ID NO: 1419357 - RNA, 19 nt, Artificial Sequence
  Description of Artificial Sequence: Synthetic oligonucleotide
cgaggcgaacggaggccgc

SEQ ID NO: 1419358 - RNA, 19 nt, Artificial Sequence
  Description of Artificial Sequence: Synthetic oligonucleotide
cuacuccuaggugcucacu

SEQ ID NO: 1419359 - RNA, 19 nt, Artificial Sequence
  Description of Artificial Sequence: Synthetic oligonucleotide
caggacaguuugugagguu

SEQ ID NO: 1419360 - RNA, 19 nt, Artificial Sequence
  Description of Artificial Sequence: Synthetic oligonucleotide
cgguauuucggaaccucau

SEQ ID NO: 1419361 - RNA, 19 nt, Artificial Sequence
  Description of Artificial Sequence: Synthetic oligonucleotide
gcggcgcgucccggcaacg

SEQ ID NO: 1419362 - RNA, 19 nt, Artificial Sequence
  Description of Artificial Sequence: Synthetic oligonucleotide
cgaggggcucggcggcgcg

SEQ ID NO: 1419363 - RNA, 19 nt, Artificial Sequence
  Description of Artificial Sequence: Synthetic oligonucleotide
cccagggaccgcggcggag

SEQ ID NO: 1419364 - RNA, 19 nt, Artificial Sequence
  Description of Artificial Sequence: Synthetic oligonucleotide
cgggaacaagucuccguua

SEQ ID NO: 1419365 - RNA, 19 nt, Artificial Sequence
  Description of Artificial Sequence: Synthetic oligonucleotide
ccguuacuucuuucuuggu

SEQ ID NO: 1419366 - RNA, 19 nt, Artificial Sequence
  Description of Artificial Sequence: Synthetic oligonucleotide
cgcuggucggguuguagau

SEQ ID NO: 1419367 - RNA, 19 nt, Artificial Sequence
  Description of Artificial Sequence: Synthetic oligonucleotide
gcuccgcuggucggguugu

SEQ ID NO: 1419368 - RNA, 19 nt, Artificial Sequence
  Description of Artificial Sequence: Synthetic oligonucleotide
ccccuacuccuaggugcuc

SEQ ID NO: 1419369 - RNA, 19 nt, Artificial Sequence
  Description of Artificial Sequence: Synthetic oligonucleotide
cuccgcuggucggguugua

SEQ ID NO: 1419370 - RNA, 19 nt, Artificial Sequence
  Description of Artificial Sequence: Synthetic oligonucleotide
cgacgacgaggggcucggc

SEQ ID NO: 1419371 - RNA, 19 nt, Artificial Sequence
  Description of Artificial Sequence: Synthetic oligonucleotide
cgauacccaacgugccguu

SEQ ID NO: 1419372 - RNA, 19 nt, Artificial Sequence
  Description of Artificial Sequence: Synthetic oligonucleotide
cccggucauccuggguuuu

SEQ ID NO: 1419373 - RNA, 19 nt, Artificial Sequence
  Description of Artificial Sequence: Synthetic oligonucleotide
uuuaugacaauuaaaagac

SEQ ID NO: 1419374 - RNA, 19 nt, Artificial Sequence
  Description of Artificial Sequence: Synthetic oligonucleotide
ugggcuauaaaucuaaagg

SEQ ID NO: 1419375 - RNA, 19 nt, Artificial Sequence
  Description of Artificial Sequence: Synthetic oligonucleotide
aaugcaagaaucugugccc

SEQ ID NO: 1419376 - RNA, 19 nt, Artificial Sequence
  Description of Artificial Sequence: Synthetic oligonucleotide
ugcuuaauaagcaacagca

SEQ ID NO: 1419377 - RNA, 19 nt, Artificial Sequence
  Description of Artificial Sequence: Synthetic oligonucleotide
uuuauuauagccuuugguc

SEQ ID NO: 1419378 - RNA, 19 nt, Artificial Sequence
  Description of Artificial Sequence: Synthetic oligonucleotide
agaggaaccauacccaugc

SEQ ID NO: 1419379 - RNA, 19 nt, Artificial Sequence
  Description of Artificial Sequence: Synthetic oligonucleotide
auggaugaaagcuuguggc

SEQ ID NO: 1419380 - RNA, 19 nt, Artificial Sequence
  Description of Artificial Sequence: Synthetic oligonucleotide
aaaucuaaaggagucuccc

SEQ ID NO: 1419381 - RNA, 19 nt, Artificial Sequence
  Description of Artificial Sequence: Synthetic oligonucleotide
uaaugcaagaaucugugcc

SEQ ID NO: 1419382 - RNA, 19 nt, Artificial Sequence
  Description of Artificial Sequence: Synthetic oligonucleotide
uuuaucagaaucuuaggga

SEQ ID NO: 1419383 - RNA, 19 nt, Artificial Sequence
  Description of Artificial Sequence: Synthetic oligonucleotide
aacaaguugagucccaaca

SEQ ID NO: 1419384 - RNA, 19 nt, Artificial Sequence
  Description of Artificial Sequence: Synthetic oligonucleotide
uaugugaccagcgucaccg

SEQ ID NO: 1419385 - RNA, 19 nt, Artificial Sequence
  Description of Artificial Sequence: Synthetic oligonucleotide
uuauuauagccuuuggucu

SEQ ID NO: 1419386 - RNA, 19 nt, Artificial Sequence
  Description of Artificial Sequence: Synthetic oligonucleotide
ugugcauugacauaggaua

SEQ ID NO: 1419387 - RNA, 19 nt, Artificial Sequence
  Description of Artificial Sequence: Synthetic oligonucleotide
uggugaguccaauacaucg

SEQ ID NO: 1419388 - RNA, 19 nt, Artificial Sequence
  Description of Artificial Sequence: Synthetic oligonucleotide
uugaaauucagaagagcag

SEQ ID NO: 1419389 - RNA, 19 nt, Artificial Sequence
  Description of Artificial Sequence: Synthetic oligonucleotide
ucugauuuggacacaaagu

SEQ ID NO: 1419390 - RNA, 19 nt, Artificial Sequence
  Description of Artificial Sequence: Synthetic oligonucleotide
aauacaaaguguugcauua

SEQ ID NO: 1419391 - RNA, 19 nt, Artificial Sequence
  Description of Artificial Sequence: Synthetic oligonucleotide
aacccaaaggaauugguga

SEQ ID NO: 1419392 - RNA, 19 nt, Artificial Sequence
  Description of Artificial Sequence: Synthetic oligonucleotide
aucuaaaggagucucccac

SEQ ID NO: 1419393 - RNA, 19 nt, Artificial Sequence
  Description of Artificial Sequence: Synthetic oligonucleotide
aguaaaagcugccucaaca

SEQ ID NO: 1419394 - RNA, 19 nt, Artificial Sequence
  Description of Artificial Sequence: Synthetic oligonucleotide
cuauaaaucuaaaggaguc

SEQ ID NO: 1419395 - RNA, 19 nt, Artificial Sequence
  Description of Artificial Sequence: Synthetic oligonucleotide
uugcguuugcuuaauaagc

SEQ ID NO: 1419396 - RNA, 19 nt, Artificial Sequence
  Description of Artificial Sequence: Synthetic oligonucleotide
uacucuuguacucaucacc

SEQ ID NO: 1419397 - RNA, 19 nt, Artificial Sequence
  Description of Artificial Sequence: Synthetic oligonucleotide
ugggcugacuuuauuauag

SEQ ID NO: 1419398 - RNA, 19 nt, Artificial Sequence
  Description of Artificial Sequence: Synthetic oligonucleotide
aauacaucgccccucaguu

SEQ ID NO: 1419399 - RNA, 19 nt, Artificial Sequence
  Description of Artificial Sequence: Synthetic oligonucleotide
auaaaucuaaaggagucuc

SEQ ID NO: 1419400 - RNA, 19 nt, Artificial Sequence
  Description of Artificial Sequence: Synthetic oligonucleotide
ucaaagcaguuucagaaac

SEQ ID NO: 1419401 - RNA, 19 nt, Artificial Sequence
  Description of Artificial Sequence: Synthetic oligonucleotide
aucaccaugggcuauaaau

SEQ ID NO: 1419402 - RNA, 19 nt, Artificial Sequence
  Description of Artificial Sequence: Synthetic oligonucleotide
ucggaugccagccagaguc

SEQ ID NO: 1419403 - RNA, 19 nt, Artificial Sequence
  Description of Artificial Sequence: Synthetic oligonucleotide
uaccucuuggcacauaagc

SEQ ID NO: 1419404 - RNA, 19 nt, Artificial Sequence
  Description of Artificial Sequence: Synthetic oligonucleotide
gaauuggugaguccaauac

SEQ ID NO: 1419405 - RNA, 19 nt, Artificial Sequence
  Description of Artificial Sequence: Synthetic oligonucleotide
cuugcguuugcuuaauaag

SEQ ID NO: 1419406 - RNA, 19 nt, Artificial Sequence
  Description of Artificial Sequence: Synthetic oligonucleotide
acuacagaaacaauuccac

SEQ ID NO: 1419407 - RNA, 19 nt, Artificial Sequence
  Description of Artificial Sequence: Synthetic oligonucleotide
uccaguggaacauaauuga

SEQ ID NO: 1419408 - RNA, 19 nt, Artificial Sequence
  Description of Artificial Sequence: Synthetic oligonucleotide
gugcaauucagguuuagag

SEQ ID NO: 1419409 - RNA, 19 nt, Artificial Sequence
  Description of Artificial Sequence: Synthetic oligonucleotide
aguaccaccgaacccaaag

SEQ ID NO: 1419410 - RNA, 19 nt, Artificial Sequence
  Description of Artificial Sequence: Synthetic oligonucleotide
auuaguaccaccgaaccca

SEQ ID NO: 1419411 - RNA, 19 nt, Artificial Sequence
  Description of Artificial Sequence: Synthetic oligonucleotide
uaaaucuaaaggagucucc

SEQ ID NO: 1419412 - RNA, 19 nt, Artificial Sequence
  Description of Artificial Sequence: Synthetic oligonucleotide
ugagaucaaauucuggcuc

SEQ ID NO: 1419413 - RNA, 19 nt, Artificial Sequence
  Description of Artificial Sequence: Synthetic oligonucleotide
uugcuuaauaagcaacagc

SEQ ID NO: 1419414 - RNA, 19 nt, Artificial Sequence
  Description of Artificial Sequence: Synthetic oligonucleotide
gauaauggacuaaugcaag

SEQ ID NO: 1419415 - RNA, 19 nt, Artificial Sequence
  Description of Artificial Sequence: Synthetic oligonucleotide
ugcaauucagguuuagagu

SEQ ID NO: 1419416 - RNA, 19 nt, Artificial Sequence
  Description of Artificial Sequence: Synthetic oligonucleotide
gaugguaacaagccagggc

SEQ ID NO: 1419417 - RNA, 19 nt, Artificial Sequence
  Description of Artificial Sequence: Synthetic oligonucleotide
uuuugaugguaacaagcca

SEQ ID NO: 1419418 - RNA, 19 nt, Artificial Sequence
  Description of Artificial Sequence: Synthetic oligonucleotide
ugaauugaccuucaccagu

SEQ ID NO: 1419419 - RNA, 19 nt, Artificial Sequence
  Description of Artificial Sequence: Synthetic oligonucleotide
aaaacuugcguuugcuuaa

SEQ ID NO: 1419420 - RNA, 19 nt, Artificial Sequence
  Description of Artificial Sequence: Synthetic oligonucleotide
uuaugacaauuaaaagacc

SEQ ID NO: 1419421 - RNA, 19 nt, Artificial Sequence
  Description of Artificial Sequence: Synthetic oligonucleotide
uuuauagcgaaugcugacc

SEQ ID NO: 1419422 - RNA, 19 nt, Artificial Sequence
  Description of Artificial Sequence: Synthetic oligonucleotide
uuauagcgaaugcugaccu

SEQ ID NO: 1419423 - RNA, 19 nt, Artificial Sequence
  Description of Artificial Sequence: Synthetic oligonucleotide
uuuguggaggauauggcaa

SEQ ID NO: 1419424 - RNA, 19 nt, Artificial Sequence
  Description of Artificial Sequence: Synthetic oligonucleotide
uuuacaugccagcaauaca

SEQ ID NO: 1419425 - RNA, 19 nt, Artificial Sequence
  Description of Artificial Sequence: Synthetic oligonucleotide
aauugagaucaaauucugg

SEQ ID NO: 1419426 - RNA, 19 nt, Artificial Sequence
  Description of Artificial Sequence: Synthetic oligonucleotide
aucuuagggacaaagaaug

SEQ ID NO: 1419427 - RNA, 19 nt, Artificial Sequence
  Description of Artificial Sequence: Synthetic oligonucleotide
ugcguuugcuuaauaagca

SEQ ID NO: 1419428 - RNA, 19 nt, Artificial Sequence
  Description of Artificial Sequence: Synthetic oligonucleotide
gucugaaacaucaaagcag

SEQ ID NO: 1419429 - RNA, 19 nt, Artificial Sequence
  Description of Artificial Sequence: Synthetic oligonucleotide
uccuaggagaagccgaucc

SEQ ID NO: 1419430 - RNA, 19 nt, Artificial Sequence
  Description of Artificial Sequence: Synthetic oligonucleotide
uuuuauagcgaaugcugac

SEQ ID NO: 1419431 - RNA, 19 nt, Artificial Sequence
  Description of Artificial Sequence: Synthetic oligonucleotide
cuuagggacaaagaauggg

SEQ ID NO: 1419432 - RNA, 19 nt, Artificial Sequence
  Description of Artificial Sequence: Synthetic oligonucleotide
ugcauuaguaccaccgaac

SEQ ID NO: 1419433 - RNA, 19 nt, Artificial Sequence
  Description of Artificial Sequence: Synthetic oligonucleotide
acuuuauuauagccuuugg

SEQ ID NO: 1419434 - RNA, 19 nt, Artificial Sequence
  Description of Artificial Sequence: Synthetic oligonucleotide
uaggauaucuguucaggca

SEQ ID NO: 1419435 - RNA, 19 nt, Artificial Sequence
  Description of Artificial Sequence: Synthetic oligonucleotide
gaggauauggcaagggugc

SEQ ID NO: 1419436 - RNA, 19 nt, Artificial Sequence
  Description of Artificial Sequence: Synthetic oligonucleotide
uuuagggccaacccugcug

SEQ ID NO: 1419437 - RNA, 19 nt, Artificial Sequence
  Description of Artificial Sequence: Synthetic oligonucleotide
acguucuuccaacaccagc

SEQ ID NO: 1419438 - RNA, 19 nt, Artificial Sequence
  Description of Artificial Sequence: Synthetic oligonucleotide
acuucaagaggaaccauac

SEQ ID NO: 1419439 - RNA, 19 nt, Artificial Sequence
  Description of Artificial Sequence: Synthetic oligonucleotide
uauaaaucuaaaggagucu

SEQ ID NO: 1419440 - RNA, 19 nt, Artificial Sequence
  Description of Artificial Sequence: Synthetic oligonucleotide
aauugaccuucaccaguac

SEQ ID NO: 1419441 - RNA, 19 nt, Artificial Sequence
  Description of Artificial Sequence: Synthetic oligonucleotide
auggacuaaugcaagaauc

SEQ ID NO: 1419442 - RNA, 19 nt, Artificial Sequence
  Description of Artificial Sequence: Synthetic oligonucleotide
aaucuaaaggagucuccca

SEQ ID NO: 1419443 - RNA, 19 nt, Artificial Sequence
  Description of Artificial Sequence: Synthetic oligonucleotide
ugguugaaauucagaagag

SEQ ID NO: 1419444 - RNA, 19 nt, Artificial Sequence
  Description of Artificial Sequence: Synthetic oligonucleotide
ugacauaggauaucuguuc

SEQ ID NO: 1419445 - RNA, 19 nt, Artificial Sequence
  Description of Artificial Sequence: Synthetic oligonucleotide
ucaccaugggcuauaaauc

SEQ ID NO: 1419446 - RNA, 19 nt, Artificial Sequence
  Description of Artificial Sequence: Synthetic oligonucleotide
uuagaaaauuuuguaagua

SEQ ID NO: 1419447 - RNA, 19 nt, Artificial Sequence
  Description of Artificial Sequence: Synthetic oligonucleotide
gaguccaauacaucgcccc

SEQ ID NO: 1419448 - RNA, 19 nt, Artificial Sequence
  Description of Artificial Sequence: Synthetic oligonucleotide
ucaccaacuacagaaacaa

SEQ ID NO: 1419449 - RNA, 19 nt, Artificial Sequence
  Description of Artificial Sequence: Synthetic oligonucleotide
ugaucagcuucugacuucg

SEQ ID NO: 1419450 - RNA, 19 nt, Artificial Sequence
  Description of Artificial Sequence: Synthetic oligonucleotide
acuaaugcaagaaucugug

SEQ ID NO: 1419451 - RNA, 19 nt, Artificial Sequence
  Description of Artificial Sequence: Synthetic oligonucleotide
uacaaaguguugcauuagu

SEQ ID NO: 1419452 - RNA, 19 nt, Artificial Sequence
  Description of Artificial Sequence: Synthetic oligonucleotide
uugaauugaccuucaccag

SEQ ID NO: 1419453 - RNA, 19 nt, Artificial Sequence
  Description of Artificial Sequence: Synthetic oligonucleotide
ugugaugacaacucgccua

SEQ ID NO: 1419454 - RNA, 19 nt, Artificial Sequence
  Description of Artificial Sequence: Synthetic oligonucleotide
guucaggcaacacaccugc

SEQ ID NO: 1419455 - RNA, 19 nt, Artificial Sequence
  Description of Artificial Sequence: Synthetic oligonucleotide
accauacccaugccaaugg

SEQ ID NO: 1419456 - RNA, 19 nt, Artificial Sequence
  Description of Artificial Sequence: Synthetic oligonucleotide
gauauggcaagggugccag

SEQ ID NO: 1419457 - RNA, 19 nt, Artificial Sequence
  Description of Artificial Sequence: Synthetic oligonucleotide
uguacucaucaccaacuac

SEQ ID NO: 1419458 - RNA, 19 nt, Artificial Sequence
  Description of Artificial Sequence: Synthetic oligonucleotide
agcaugacgcuggauaugg

SEQ ID NO: 1419459 - RNA, 19 nt, Artificial Sequence
  Description of Artificial Sequence: Synthetic oligonucleotide
ucaccaguaccucuuggca

SEQ ID NO: 1419460 - RNA, 19 nt, Artificial Sequence
  Description of Artificial Sequence: Synthetic oligonucleotide
aaacccaucucgcucugga

SEQ ID NO: 1419461 - RNA, 19 nt, Artificial Sequence
  Description of Artificial Sequence: Synthetic oligonucleotide
ucuaaaggagucucccaca

SEQ ID NO: 1419462 - RNA, 19 nt, Artificial Sequence
  Description of Artificial Sequence: Synthetic oligonucleotide
aggauaucuguucaggcaa

SEQ ID NO: 1419463 - RNA, 19 nt, Artificial Sequence
  Description of Artificial Sequence: Synthetic oligonucleotide
auaauggacuaaugcaaga

SEQ ID NO: 1419464 - RNA, 19 nt, Artificial Sequence
  Description of Artificial Sequence: Synthetic oligonucleotide
caaguggugucacuagucc

SEQ ID NO: 1419465 - RNA, 19 nt, Artificial Sequence
  Description of Artificial Sequence: Synthetic oligonucleotide
gacauaggauaucuguuca

SEQ ID NO: 1419466 - RNA, 19 nt, Artificial Sequence
  Description of Artificial Sequence: Synthetic oligonucleotide
uugacauaggauaucuguu

SEQ ID NO: 1419467 - RNA, 19 nt, Artificial Sequence
  Description of Artificial Sequence: Synthetic oligonucleotide
uggacacaaaguuuuguuc

SEQ ID NO: 1419468 - RNA, 19 nt, Artificial Sequence
  Description of Artificial Sequence: Synthetic oligonucleotide
agauaauggacuaaugcaa

SEQ ID NO: 1419469 - RNA, 19 nt, Artificial Sequence
  Description of Artificial Sequence: Synthetic oligonucleotide
uguucauugaauugaccuu

SEQ ID NO: 1419470 - RNA, 19 nt, Artificial Sequence
  Description of Artificial Sequence: Synthetic oligonucleotide
ugacaaacccaucucgcuc

SEQ ID NO: 1419471 - RNA, 19 nt, Artificial Sequence
  Description of Artificial Sequence: Synthetic oligonucleotide
aagccgaucccaaacaagu

SEQ ID NO: 1419472 - RNA, 19 nt, Artificial Sequence
  Description of Artificial Sequence: Synthetic oligonucleotide
guugagucccaacaccaag

SEQ ID NO: 1419473 - RNA, 19 nt, Artificial Sequence
  Description of Artificial Sequence: Synthetic oligonucleotide
uaccaccgaacccaaagga

SEQ ID NO: 1419474 - RNA, 19 nt, Artificial Sequence
  Description of Artificial Sequence: Synthetic oligonucleotide
cuaaugcaagaaucugugc

SEQ ID NO: 1419475 - RNA, 19 nt, Artificial Sequence
  Description of Artificial Sequence: Synthetic oligonucleotide
aguccgaugccugugauga

SEQ ID NO: 1419476 - RNA, 19 nt, Artificial Sequence
  Description of Artificial Sequence: Synthetic oligonucleotide
cauuaguaccaccgaaccc

SEQ ID NO: 1419477 - RNA, 19 nt, Artificial Sequence
  Description of Artificial Sequence: Synthetic oligonucleotide
aguuaugugaccagcguca

SEQ ID NO: 1419478 - RNA, 19 nt, Artificial Sequence
  Description of Artificial Sequence: Synthetic oligonucleotide
uucauugaauugaccuuca

SEQ ID NO: 1419479 - RNA, 19 nt, Artificial Sequence
  Description of Artificial Sequence: Synthetic oligonucleotide
ucugacuucggaugccagc

SEQ ID NO: 1419480 - RNA, 19 nt, Artificial Sequence
  Description of Artificial Sequence: Synthetic oligonucleotide
gugaguccaauacaucgcc

SEQ ID NO: 1419481 - RNA, 19 nt, Artificial Sequence
  Description of Artificial Sequence: Synthetic oligonucleotide
uggaggauauggcaagggu

SEQ ID NO: 1419482 - RNA, 19 nt, Artificial Sequence
  Description of Artificial Sequence: Synthetic oligonucleotide
acuugcguuugcuuaauaa

SEQ ID NO: 1419483 - RNA, 19 nt, Artificial Sequence
  Description of Artificial Sequence: Synthetic oligonucleotide
ugccugugaugacaacucg

SEQ ID NO: 1419484 - RNA, 19 nt, Artificial Sequence
  Description of Artificial Sequence: Synthetic oligonucleotide
cagaaucuuagggacaaag

SEQ ID NO: 1419485 - RNA, 19 nt, Artificial Sequence
  Description of Artificial Sequence: Synthetic oligonucleotide
gaguccauagcccaggacu

SEQ ID NO: 1419486 - RNA, 19 nt, Artificial Sequence
  Description of Artificial Sequence: Synthetic oligonucleotide
gcaaggaauacucuuguac

SEQ ID NO: 1419487 - RNA, 19 nt, Artificial Sequence
  Description of Artificial Sequence: Synthetic oligonucleotide
aauucuggcucugugcaau

SEQ ID NO: 1419488 - RNA, 19 nt, Artificial Sequence
  Description of Artificial Sequence: Synthetic oligonucleotide
ugacaacucgccuacgcaa

SEQ ID NO: 1419489 - RNA, 19 nt, Artificial Sequence
  Description of Artificial Sequence: Synthetic oligonucleotide
ucuguucaggcaacacacc

SEQ ID NO: 1419490 - RNA, 19 nt, Artificial Sequence
  Description of Artificial Sequence: Synthetic oligonucleotide
ucgcccaugacaaacccau

SEQ ID NO: 1419491 - RNA, 19 nt, Artificial Sequence
  Description of Artificial Sequence: Synthetic oligonucleotide
gcccuugaguuuuauagcg

SEQ ID NO: 1419492 - RNA, 19 nt, Artificial Sequence
  Description of Artificial Sequence: Synthetic oligonucleotide
ugaguccaauacaucgccc

SEQ ID NO: 1419493 - RNA, 19 nt, Artificial Sequence
  Description of Artificial Sequence: Synthetic oligonucleotide
uugcauuaguaccaccgaa

SEQ ID NO: 1419494 - RNA, 19 nt, Artificial Sequence
  Description of Artificial Sequence: Synthetic oligonucleotide
auaucuguucaggcaacac

SEQ ID NO: 1419495 - RNA, 19 nt, Artificial Sequence
  Description of Artificial Sequence: Synthetic oligonucleotide
uauggcaagggugccagca

SEQ ID NO: 1419496 - RNA, 19 nt, Artificial Sequence
  Description of Artificial Sequence: Synthetic oligonucleotide
uggcacauaagcagcuaca

SEQ ID NO: 1419497 - RNA, 19 nt, Artificial Sequence
  Description of Artificial Sequence: Synthetic oligonucleotide
uuuggacacaaaguuuugu

SEQ ID NO: 1419498 - RNA, 19 nt, Artificial Sequence
  Description of Artificial Sequence: Synthetic oligonucleotide
ugauuggggcccuugaguu

SEQ ID NO: 1419499 - RNA, 19 nt, Artificial Sequence
  Description of Artificial Sequence: Synthetic oligonucleotide
caucaccaacuacagaaac

SEQ ID NO: 1419500 - RNA, 19 nt, Artificial Sequence
  Description of Artificial Sequence: Synthetic oligonucleotide
cagccaugcaucugaaggc

SEQ ID NO: 1419501 - RNA, 19 nt, Artificial Sequence
  Description of Artificial Sequence: Synthetic oligonucleotide
ugguaacaagccagggcag

SEQ ID NO: 1419502 - RNA, 19 nt, Artificial Sequence
  Description of Artificial Sequence: Synthetic oligonucleotide
ucgccuacgcaacauggcu

SEQ ID NO: 1419503 - RNA, 19 nt, Artificial Sequence
  Description of Artificial Sequence: Synthetic oligonucleotide
accaacuacagaaacaauu

SEQ ID NO: 1419504 - RNA, 19 nt, Artificial Sequence
  Description of Artificial Sequence: Synthetic oligonucleotide
aacucgccuacgcaacaug

SEQ ID NO: 1419505 - RNA, 19 nt, Artificial Sequence
  Description of Artificial Sequence: Synthetic oligonucleotide
uggcucugugcaauucagg

SEQ ID NO: 1419506 - RNA, 19 nt, Artificial Sequence
  Description of Artificial Sequence: Synthetic oligonucleotide
caaaggaauuggugagucc

SEQ ID NO: 1419507 - RNA, 19 nt, Artificial Sequence
  Description of Artificial Sequence: Synthetic oligonucleotide
acccaucucgcucuggaug

SEQ ID NO: 1419508 - RNA, 19 nt, Artificial Sequence
  Description of Artificial Sequence: Synthetic oligonucleotide
aacaagccagggcaguaaa

SEQ ID NO: 1419509 - RNA, 19 nt, Artificial Sequence
  Description of Artificial Sequence: Synthetic oligonucleotide
ugcaucugaaggcaccguc

SEQ ID NO: 1419510 - RNA, 19 nt, Artificial Sequence
  Description of Artificial Sequence: Synthetic oligonucleotide
gaaggcaccgucuccuuca

SEQ ID NO: 1419511 - RNA, 19 nt, Artificial Sequence
  Description of Artificial Sequence: Synthetic oligonucleotide
uggacacugugugauuggg

SEQ ID NO: 1419512 - RNA, 19 nt, Artificial Sequence
  Description of Artificial Sequence: Synthetic oligonucleotide
gcauuaguaccaccgaacc

SEQ ID NO: 1419513 - RNA, 19 nt, Artificial Sequence
  Description of Artificial Sequence: Synthetic oligonucleotide
uguguguguguguauuuau

SEQ ID NO: 1419514 - RNA, 19 nt, Artificial Sequence
  Description of Artificial Sequence: Synthetic oligonucleotide
aacaccaaguggugucacu

SEQ ID NO: 1419515 - RNA, 19 nt, Artificial Sequence
  Description of Artificial Sequence: Synthetic oligonucleotide
gaagccgaucccaaacaag

SEQ ID NO: 1419516 - RNA, 19 nt, Artificial Sequence
  Description of Artificial Sequence: Synthetic oligonucleotide
uggcauaguuccagaaaac

SEQ ID NO: 1419517 - RNA, 19 nt, Artificial Sequence
  Description of Artificial Sequence: Synthetic oligonucleotide
ugugcaauucagguuuaga

SEQ ID NO: 1419518 - RNA, 19 nt, Artificial Sequence
  Description of Artificial Sequence: Synthetic oligonucleotide
agcaagagauaauggacua

SEQ ID NO: 1419519 - RNA, 19 nt, Artificial Sequence
  Description of Artificial Sequence: Synthetic oligonucleotide
uuaugugaccagcgucacc

SEQ ID NO: 1419520 - RNA, 19 nt, Artificial Sequence
  Description of Artificial Sequence: Synthetic oligonucleotide
uauagcgaaugcugaccug

SEQ ID NO: 1419521 - RNA, 19 nt, Artificial Sequence
  Description of Artificial Sequence: Synthetic oligonucleotide
aagagccucuugauggcuc

SEQ ID NO: 1419522 - RNA, 19 nt, Artificial Sequence
  Description of Artificial Sequence: Synthetic oligonucleotide
agaaucuuagggacaaaga

SEQ ID NO: 1419523 - RNA, 19 nt, Artificial Sequence
  Description of Artificial Sequence: Synthetic oligonucleotide
aggaauacucuuguacuca

SEQ ID NO: 1419524 - RNA, 19 nt, Artificial Sequence
  Description of Artificial Sequence: Synthetic oligonucleotide
caaggaauacucuuguacu

SEQ ID NO: 1419525 - RNA, 19 nt, Artificial Sequence
  Description of Artificial Sequence: Synthetic oligonucleotide
gucaccggagaguccauag

SEQ ID NO: 1419526 - RNA, 19 nt, Artificial Sequence
  Description of Artificial Sequence: Synthetic oligonucleotide
auacccaugccaauggcca

SEQ ID NO: 1419527 - RNA, 19 nt, Artificial Sequence
  Description of Artificial Sequence: Synthetic oligonucleotide
ggcugacuuuauuauagcc

SEQ ID NO: 1419528 - RNA, 19 nt, Artificial Sequence
  Description of Artificial Sequence: Synthetic oligonucleotide
agcacccucgcccaugaca

SEQ ID NO: 1419529 - RNA, 19 nt, Artificial Sequence
  Description of Artificial Sequence: Synthetic oligonucleotide
uucagaaucaggggcaguu

SEQ ID NO: 1419530 - RNA, 19 nt, Artificial Sequence
  Description of Artificial Sequence: Synthetic oligonucleotide
caguuaugugaccagcguc

SEQ ID NO: 1419531 - RNA, 19 nt, Artificial Sequence
  Description of Artificial Sequence: Synthetic oligonucleotide
uuagaguuggugguaguuu

SEQ ID NO: 1419532 - RNA, 19 nt, Artificial Sequence
  Description of Artificial Sequence: Synthetic oligonucleotide
ugucacuaguccgaugccu

SEQ ID NO: 1419533 - RNA, 19 nt, Artificial Sequence
  Description of Artificial Sequence: Synthetic oligonucleotide
ccaugacaaacccaucucg

SEQ ID NO: 1419534 - RNA, 19 nt, Artificial Sequence
  Description of Artificial Sequence: Synthetic oligonucleotide
aggauauggcaagggugcc

SEQ ID NO: 1419535 - RNA, 19 nt, Artificial Sequence
  Description of Artificial Sequence: Synthetic oligonucleotide
cauagcccaggacuucugc

SEQ ID NO: 1419536 - RNA, 19 nt, Artificial Sequence
  Description of Artificial Sequence: Synthetic oligonucleotide
cauugacauaggauaucug

SEQ ID NO: 1419537 - RNA, 19 nt, Artificial Sequence
  Description of Artificial Sequence: Synthetic oligonucleotide
acuaguccgaugccuguga

SEQ ID NO: 1419538 - RNA, 19 nt, Artificial Sequence
  Description of Artificial Sequence: Synthetic oligonucleotide
uuaguaccaccgaacccaa

SEQ ID NO: 1419539 - RNA, 19 nt, Artificial Sequence
  Description of Artificial Sequence: Synthetic oligonucleotide
acucgccuacgcaacaugg

SEQ ID NO: 1419540 - RNA, 19 nt, Artificial Sequence
  Description of Artificial Sequence: Synthetic oligonucleotide
cugauuuggacacaaaguu

SEQ ID NO: 1419541 - RNA, 19 nt, Artificial Sequence
  Description of Artificial Sequence: Synthetic oligonucleotide
cuucugcauacauccgggc

SEQ ID NO: 1419542 - RNA, 19 nt, Artificial Sequence
  Description of Artificial Sequence: Synthetic oligonucleotide
ugccgcgauggccaggaug

SEQ ID NO: 1419543 - RNA, 19 nt, Artificial Sequence
  Description of Artificial Sequence: Synthetic oligonucleotide
uaggagaagccgaucccaa

SEQ ID NO: 1419544 - RNA, 19 nt, Artificial Sequence
  Description of Artificial Sequence: Synthetic oligonucleotide
cucgccuacgcaacauggc

SEQ ID NO: 1419545 - RNA, 19 nt, Artificial Sequence
  Description of Artificial Sequence: Synthetic oligonucleotide
acaggccagcuugggaucc

SEQ ID NO: 1419546 - RNA, 19 nt, Artificial Sequence
  Description of Artificial Sequence: Synthetic oligonucleotide
aguggugucacuaguccga

SEQ ID NO: 1419547 - RNA, 19 nt, Artificial Sequence
  Description of Artificial Sequence: Synthetic oligonucleotide
aacacaccugcaucuuuua

SEQ ID NO: 1419548 - RNA, 19 nt, Artificial Sequence
  Description of Artificial Sequence: Synthetic oligonucleotide
augacaauuaaaagaccaa

SEQ ID NO: 1419549 - RNA, 19 nt, Artificial Sequence
  Description of Artificial Sequence: Synthetic oligonucleotide
ugugccuccaguggaacau

SEQ ID NO: 1419550 - RNA, 19 nt, Artificial Sequence
  Description of Artificial Sequence: Synthetic oligonucleotide
gaaucaggggcaguuaugu

SEQ ID NO: 1419551 - RNA, 19 nt, Artificial Sequence
  Description of Artificial Sequence: Synthetic oligonucleotide
ggcaguaaaagcugccuca

SEQ ID NO: 1419552 - RNA, 19 nt, Artificial Sequence
  Description of Artificial Sequence: Synthetic oligonucleotide
caauguuuacaugccagca

SEQ ID NO: 1419553 - RNA, 19 nt, Artificial Sequence
  Description of Artificial Sequence: Synthetic oligonucleotide
gacaacucgccuacgcaac

SEQ ID NO: 1419554 - RNA, 19 nt, Artificial Sequence
  Description of Artificial Sequence: Synthetic oligonucleotide
agcaucacccaguggcgug

SEQ ID NO: 1419555 - RNA, 19 nt, Artificial Sequence
  Description of Artificial Sequence: Synthetic oligonucleotide
gaauggucgacaggccagc

SEQ ID NO: 1419556 - RNA, 19 nt, Artificial Sequence
  Description of Artificial Sequence: Synthetic oligonucleotide
uaguccgaugccugugaug

SEQ ID NO: 1419557 - RNA, 19 nt, Artificial Sequence
  Description of Artificial Sequence: Synthetic oligonucleotide
ugugugugugugugugugu

SEQ ID NO: 1419558 - RNA, 19 nt, Artificial Sequence
  Description of Artificial Sequence: Synthetic oligonucleotide
guggaggauauggcaaggg

SEQ ID NO: 1419559 - RNA, 19 nt, Artificial Sequence
  Description of Artificial Sequence: Synthetic oligonucleotide
caccaaguggugucacuag

SEQ ID NO: 1419560 - RNA, 19 nt, Artificial Sequence
  Description of Artificial Sequence: Synthetic oligonucleotide
gauaucuguucaggcaaca

SEQ ID NO: 1419561 - RNA, 19 nt, Artificial Sequence
  Description of Artificial Sequence: Synthetic oligonucleotide
uguguguguguguguauuu

SEQ ID NO: 1419562 - RNA, 19 nt, Artificial Sequence
  Description of Artificial Sequence: Synthetic oligonucleotide
ggcaguuaugugaccagcg

SEQ ID NO: 1419563 - RNA, 19 nt, Artificial Sequence
  Description of Artificial Sequence: Synthetic oligonucleotide
ugugugauuggggcccuug

SEQ ID NO: 1419564 - RNA, 19 nt, Artificial Sequence
  Description of Artificial Sequence: Synthetic oligonucleotide
agcgucaccggagagucca

SEQ ID NO: 1419565 - RNA, 19 nt, Artificial Sequence
  Description of Artificial Sequence: Synthetic oligonucleotide
acaacucgccuacgcaaca

SEQ ID NO: 1419566 - RNA, 19 nt, Artificial Sequence
  Description of Artificial Sequence: Synthetic oligonucleotide
ugaacagcaugcucacguu

SEQ ID NO: 1419567 - RNA, 19 nt, Artificial Sequence
  Description of Artificial Sequence: Synthetic oligonucleotide
guuccagaaaacuugcguu

SEQ ID NO: 1419568 - RNA, 19 nt, Artificial Sequence
  Description of Artificial Sequence: Synthetic oligonucleotide
ggugaguccaauacaucgc

SEQ ID NO: 1419569 - RNA, 19 nt, Artificial Sequence
  Description of Artificial Sequence: Synthetic oligonucleotide
auuuggacacaaaguuuug

SEQ ID NO: 1419570 - RNA, 19 nt, Artificial Sequence
  Description of Artificial Sequence: Synthetic oligonucleotide
gugugugugugugugugug

SEQ ID NO: 1419571 - RNA, 19 nt, Artificial Sequence
  Description of Artificial Sequence: Synthetic oligonucleotide
cugcauacauccgggcucc

SEQ ID NO: 1419572 - RNA, 19 nt, Artificial Sequence
  Description of Artificial Sequence: Synthetic oligonucleotide
agcagaugcccgguggcuc

SEQ ID NO: 1419573 - RNA, 19 nt, Artificial Sequence
  Description of Artificial Sequence: Synthetic oligonucleotide
ugacuucggaugccagcca

SEQ ID NO: 1419574 - RNA, 19 nt, Artificial Sequence
  Description of Artificial Sequence: Synthetic oligonucleotide
guggcucccuuuguggagg

SEQ ID NO: 1419575 - RNA, 19 nt, Artificial Sequence
  Description of Artificial Sequence: Synthetic oligonucleotide
aggggcaguuaugugacca

SEQ ID NO: 1419576 - RNA, 19 nt, Artificial Sequence
  Description of Artificial Sequence: Synthetic oligonucleotide
ugucugauuuggacacaaa

SEQ ID NO: 1419577 - RNA, 19 nt, Artificial Sequence
  Description of Artificial Sequence: Synthetic oligonucleotide
ugcccgguggcucccuuug

SEQ ID NO: 1419578 - RNA, 19 nt, Artificial Sequence
  Description of Artificial Sequence: Synthetic oligonucleotide
ccaguggaacauaauugag

SEQ ID NO: 1419579 - RNA, 19 nt, Artificial Sequence
  Description of Artificial Sequence: Synthetic oligonucleotide
uaacaagccagggcaguaa

SEQ ID NO: 1419580 - RNA, 19 nt, Artificial Sequence
  Description of Artificial Sequence: Synthetic oligonucleotide
ggauggaauggucgacagg

SEQ ID NO: 1419581 - RNA, 19 nt, Artificial Sequence
  Description of Artificial Sequence: Synthetic oligonucleotide
gcucuggauggaauggucg

SEQ ID NO: 1419582 - RNA, 19 nt, Artificial Sequence
  Description of Artificial Sequence: Synthetic oligonucleotide
cguuugcuuaauaagcaac

SEQ ID NO: 1419583 - RNA, 19 nt, Artificial Sequence
  Description of Artificial Sequence: Synthetic oligonucleotide
ccagcaauacaaaguguug

SEQ ID NO: 1419584 - RNA, 19 nt, Artificial Sequence
  Description of Artificial Sequence: Synthetic oligonucleotide
accgaacccaaaggaauug

SEQ ID NO: 1419585 - RNA, 19 nt, Artificial Sequence
  Description of Artificial Sequence: Synthetic oligonucleotide
ggaauggucgacaggccag

SEQ ID NO: 1419586 - RNA, 19 nt, Artificial Sequence
  Description of Artificial Sequence: Synthetic oligonucleotide
uacauccgggcuccucucu

SEQ ID NO: 1419587 - RNA, 19 nt, Artificial Sequence
  Description of Artificial Sequence: Synthetic oligonucleotide
agccaugcaucugaaggca

SEQ ID NO: 1419588 - RNA, 19 nt, Artificial Sequence
  Description of Artificial Sequence: Synthetic oligonucleotide
ccuuuguggaggauauggc

SEQ ID NO: 1419589 - RNA, 19 nt, Artificial Sequence
  Description of Artificial Sequence: Synthetic oligonucleotide
agggcaguaaaagcugccu

SEQ ID NO: 1419590 - RNA, 19 nt, Artificial Sequence
  Description of Artificial Sequence: Synthetic oligonucleotide
uguguguguguguguguau

SEQ ID NO: 1419591 - RNA, 19 nt, Artificial Sequence
  Description of Artificial Sequence: Synthetic oligonucleotide
aaacuugcguuugcuuaau

SEQ ID NO: 1419592 - RNA, 19 nt, Artificial Sequence
  Description of Artificial Sequence: Synthetic oligonucleotide
augugaccagcgucaccgg

SEQ ID NO: 1419593 - RNA, 19 nt, Artificial Sequence
  Description of Artificial Sequence: Synthetic oligonucleotide
cuaggagaagccgauccca

SEQ ID NO: 1419594 - RNA, 19 nt, Artificial Sequence
  Description of Artificial Sequence: Synthetic oligonucleotide
aaggaauuggugaguccaa

SEQ ID NO: 1419595 - RNA, 19 nt, Artificial Sequence
  Description of Artificial Sequence: Synthetic oligonucleotide
agagcccgggcucuggaaa

SEQ ID NO: 1419596 - RNA, 19 nt, Artificial Sequence
  Description of Artificial Sequence: Synthetic oligonucleotide
augggcugacuuuauuaua

SEQ ID NO: 1419597 - RNA, 19 nt, Artificial Sequence
  Description of Artificial Sequence: Synthetic oligonucleotide
uucaggcaacacaccugca

SEQ ID NO: 1419598 - RNA, 19 nt, Artificial Sequence
  Description of Artificial Sequence: Synthetic oligonucleotide
acgcaacauggcugcuggc

SEQ ID NO: 1419599 - RNA, 19 nt, Artificial Sequence
  Description of Artificial Sequence: Synthetic oligonucleotide
gcuauaaaucuaaaggagu

SEQ ID NO: 1419600 - RNA, 19 nt, Artificial Sequence
  Description of Artificial Sequence: Synthetic oligonucleotide
caguaaaagcugccucaac

SEQ ID NO: 1419601 - RNA, 19 nt, Artificial Sequence
  Description of Artificial Sequence: Synthetic oligonucleotide
uggucccuaaagagccucu

SEQ ID NO: 1419602 - RNA, 19 nt, Artificial Sequence
  Description of Artificial Sequence: Synthetic oligonucleotide
gccuacgcaacauggcugc

SEQ ID NO: 1419603 - RNA, 19 nt, Artificial Sequence
  Description of Artificial Sequence: Synthetic oligonucleotide
aauggucgacaggccagcu

SEQ ID NO: 1419604 - RNA, 19 nt, Artificial Sequence
  Description of Artificial Sequence: Synthetic oligonucleotide
aacuugcguuugcuuaaua

SEQ ID NO: 1419605 - RNA, 19 nt, Artificial Sequence
  Description of Artificial Sequence: Synthetic oligonucleotide
guuaugugaccagcgucac

SEQ ID NO: 1419606 - RNA, 19 nt, Artificial Sequence
  Description of Artificial Sequence: Synthetic oligonucleotide
gcccugaugucugauuugg

SEQ ID NO: 1419607 - RNA, 19 nt, Artificial Sequence
  Description of Artificial Sequence: Synthetic oligonucleotide
agggccaacccugcugccg

SEQ ID NO: 1419608 - RNA, 19 nt, Artificial Sequence
  Description of Artificial Sequence: Synthetic oligonucleotide
gugucacuaguccgaugcc

SEQ ID NO: 1419609 - RNA, 19 nt, Artificial Sequence
  Description of Artificial Sequence: Synthetic oligonucleotide
uacccaugccaauggccac

SEQ ID NO: 1419610 - RNA, 19 nt, Artificial Sequence
  Description of Artificial Sequence: Synthetic oligonucleotide
cagguuuagaguugguggu

SEQ ID NO: 1419611 - RNA, 19 nt, Artificial Sequence
  Description of Artificial Sequence: Synthetic oligonucleotide
acaccaaguggugucacua

SEQ ID NO: 1419612 - RNA, 19 nt, Artificial Sequence
  Description of Artificial Sequence: Synthetic oligonucleotide
agcuacacugcaaggaaua

SEQ ID NO: 1419613 - RNA, 19 nt, Artificial Sequence
  Description of Artificial Sequence: Synthetic oligonucleotide
gugauuggggcccuugagu

SEQ ID NO: 1419614 - RNA, 19 nt, Artificial Sequence
  Description of Artificial Sequence: Synthetic oligonucleotide
auaagcagcuacacugcaa

SEQ ID NO: 1419615 - RNA, 19 nt, Artificial Sequence
  Description of Artificial Sequence: Synthetic oligonucleotide
ggcacauaagcagcuacac

SEQ ID NO: 1419616 - RNA, 19 nt, Artificial Sequence
  Description of Artificial Sequence: Synthetic oligonucleotide
guguugcauuaguaccacc

SEQ ID NO: 1419617 - RNA, 19 nt, Artificial Sequence
  Description of Artificial Sequence: Synthetic oligonucleotide
cauacauccgggcuccucu

SEQ ID NO: 1419618 - RNA, 19 nt, Artificial Sequence
  Description of Artificial Sequence: Synthetic oligonucleotide
cuacgcaacauggcugcug

SEQ ID NO: 1419619 - RNA, 19 nt, Artificial Sequence
  Description of Artificial Sequence: Synthetic oligonucleotide
ugcuccuguugugcaggcg

SEQ ID NO: 1419620 - RNA, 19 nt, Artificial Sequence
  Description of Artificial Sequence: Synthetic oligonucleotide
gguggcucccuuuguggag

SEQ ID NO: 1419621 - RNA, 19 nt, Artificial Sequence
  Description of Artificial Sequence: Synthetic oligonucleotide
ccuaggagaagccgauccc

SEQ ID NO: 1419622 - RNA, 19 nt, Artificial Sequence
  Description of Artificial Sequence: Synthetic oligonucleotide
gguggcaugugcauugaca

SEQ ID NO: 1419623 - RNA, 19 nt, Artificial Sequence
  Description of Artificial Sequence: Synthetic oligonucleotide
caugcucacguucuuccaa

SEQ ID NO: 1419624 - RNA, 19 nt, Artificial Sequence
  Description of Artificial Sequence: Synthetic oligonucleotide
aguggcguggagguggcau

SEQ ID NO: 1419625 - RNA, 19 nt, Artificial Sequence
  Description of Artificial Sequence: Synthetic oligonucleotide
cuguucaggcaacacaccu

SEQ ID NO: 1419626 - RNA, 19 nt, Artificial Sequence
  Description of Artificial Sequence: Synthetic oligonucleotide
caaagaaugggcugacuuu

SEQ ID NO: 1419627 - RNA, 19 nt, Artificial Sequence
  Description of Artificial Sequence: Synthetic oligonucleotide
guggcguggagguggcaug

SEQ ID NO: 1419628 - RNA, 19 nt, Artificial Sequence
  Description of Artificial Sequence: Synthetic oligonucleotide
ggcucugugcaauucaggu

SEQ ID NO: 1419629 - RNA, 19 nt, Artificial Sequence
  Description of Artificial Sequence: Synthetic oligonucleotide
uggugucacuaguccgaug

SEQ ID NO: 1419630 - RNA, 19 nt, Artificial Sequence
  Description of Artificial Sequence: Synthetic oligonucleotide
gcugacuuuauuauagccu

SEQ ID NO: 1419631 - RNA, 19 nt, Artificial Sequence
  Description of Artificial Sequence: Synthetic oligonucleotide
accaccgaacccaaaggaa

SEQ ID NO: 1419632 - RNA, 19 nt, Artificial Sequence
  Description of Artificial Sequence: Synthetic oligonucleotide
guaccucuuggcacauaag

SEQ ID NO: 1419633 - RNA, 19 nt, Artificial Sequence
  Description of Artificial Sequence: Synthetic oligonucleotide
aggaauuggugaguccaau

SEQ ID NO: 1419634 - RNA, 19 nt, Artificial Sequence
  Description of Artificial Sequence: Synthetic oligonucleotide
gucgacaggccagcuuggg

SEQ ID NO: 1419635 - RNA, 19 nt, Artificial Sequence
  Description of Artificial Sequence: Synthetic oligonucleotide
gcagcuacacugcaaggaa

SEQ ID NO: 1419636 - RNA, 19 nt, Artificial Sequence
  Description of Artificial Sequence: Synthetic oligonucleotide
ccaaaggaauuggugaguc

SEQ ID NO: 1419637 - RNA, 19 nt, Artificial Sequence
  Description of Artificial Sequence: Synthetic oligonucleotide
ggaauuggugaguccaaua

SEQ ID NO: 1419638 - RNA, 19 nt, Artificial Sequence
  Description of Artificial Sequence: Synthetic oligonucleotide
gugugauuggggcccuuga

SEQ ID NO: 1419639 - RNA, 19 nt, Artificial Sequence
  Description of Artificial Sequence: Synthetic oligonucleotide
gauccggguuugugcucag

SEQ ID NO: 1419640 - RNA, 19 nt, Artificial Sequence
  Description of Artificial Sequence: Synthetic oligonucleotide
gggcaguaaaagcugccuc

SEQ ID NO: 1419641 - RNA, 19 nt, Artificial Sequence
  Description of Artificial Sequence: Synthetic oligonucleotide
ccgaucccaaacaaguuga

SEQ ID NO: 1419642 - RNA, 19 nt, Artificial Sequence
  Description of Artificial Sequence: Synthetic oligonucleotide
caugggcuauaaaucuaaa

SEQ ID NO: 1419643 - RNA, 19 nt, Artificial Sequence
  Description of Artificial Sequence: Synthetic oligonucleotide
caaacccaucucgcucugg

SEQ ID NO: 1419644 - RNA, 19 nt, Artificial Sequence
  Description of Artificial Sequence: Synthetic oligonucleotide
gcagaugcccgguggcucc

SEQ ID NO: 1419645 - RNA, 19 nt, Artificial Sequence
  Description of Artificial Sequence: Synthetic oligonucleotide
caaacaaguugagucccaa

SEQ ID NO: 1419646 - RNA, 19 nt, Artificial Sequence
  Description of Artificial Sequence: Synthetic oligonucleotide
gaaaacccagcaagagaua

SEQ ID NO: 1419647 - RNA, 19 nt, Artificial Sequence
  Description of Artificial Sequence: Synthetic oligonucleotide
ggcauaguuccagaaaacu

SEQ ID NO: 1419648 - RNA, 19 nt, Artificial Sequence
  Description of Artificial Sequence: Synthetic oligonucleotide
cugcaaggaauacucuugu

SEQ ID NO: 1419649 - RNA, 19 nt, Artificial Sequence
  Description of Artificial Sequence: Synthetic oligonucleotide
ucagaaucuuagggacaaa

SEQ ID NO: 1419650 - RNA, 19 nt, Artificial Sequence
  Description of Artificial Sequence: Synthetic oligonucleotide
ccagcauggucccuaaaga

SEQ ID NO: 1419651 - RNA, 19 nt, Artificial Sequence
  Description of Artificial Sequence: Synthetic oligonucleotide
auggucgacaggccagcuu

SEQ ID NO: 1419652 - RNA, 19 nt, Artificial Sequence
  Description of Artificial Sequence: Synthetic oligonucleotide
acccaugccaauggccaca

SEQ ID NO: 1419653 - RNA, 19 nt, Artificial Sequence
  Description of Artificial Sequence: Synthetic oligonucleotide
uagggccaacccugcugcc

SEQ ID NO: 1419654 - RNA, 19 nt, Artificial Sequence
  Description of Artificial Sequence: Synthetic oligonucleotide
caacaccaaguggugucac

SEQ ID NO: 1419655 - RNA, 19 nt, Artificial Sequence
  Description of Artificial Sequence: Synthetic oligonucleotide
ggauaucuguucaggcaac

SEQ ID NO: 1419656 - RNA, 19 nt, Artificial Sequence
  Description of Artificial Sequence: Synthetic oligonucleotide
guaaguaguuugacaacau

SEQ ID NO: 1419657 - RNA, 19 nt, Artificial Sequence
  Description of Artificial Sequence: Synthetic oligonucleotide
guaacaagccagggcagua

SEQ ID NO: 1419658 - RNA, 19 nt, Artificial Sequence
  Description of Artificial Sequence: Synthetic oligonucleotide
cacuuucuccuaggagaag

SEQ ID NO: 1419659 - RNA, 19 nt, Artificial Sequence
  Description of Artificial Sequence: Synthetic oligonucleotide
guguguguguguauuuaua

SEQ ID NO: 1419660 - RNA, 19 nt, Artificial Sequence
  Description of Artificial Sequence: Synthetic oligonucleotide
gcaucacccaguggcgugg

SEQ ID NO: 1419661 - RNA, 19 nt, Artificial Sequence
  Description of Artificial Sequence: Synthetic oligonucleotide
ccgaacccaaaggaauugg

SEQ ID NO: 1419662 - RNA, 19 nt, Artificial Sequence
  Description of Artificial Sequence: Synthetic oligonucleotide
cagcaugacgcuggauaug

SEQ ID NO: 1419663 - RNA, 19 nt, Artificial Sequence
  Description of Artificial Sequence: Synthetic oligonucleotide
gugugugugugugugugua

SEQ ID NO: 1419664 - RNA, 19 nt, Artificial Sequence
  Description of Artificial Sequence: Synthetic oligonucleotide
gaaccauacccaugccaau

SEQ ID NO: 1419665 - RNA, 19 nt, Artificial Sequence
  Description of Artificial Sequence: Synthetic oligonucleotide
gcgaaugcugaccuggccu

SEQ ID NO: 1419666 - RNA, 19 nt, Artificial Sequence
  Description of Artificial Sequence: Synthetic oligonucleotide
ccaugggcuauaaaucuaa

SEQ ID NO: 1419667 - RNA, 19 nt, Artificial Sequence
  Description of Artificial Sequence: Synthetic oligonucleotide
ggcccugaugucugauuug

SEQ ID NO: 1419668 - RNA, 19 nt, Artificial Sequence
  Description of Artificial Sequence: Synthetic oligonucleotide
ucccuuuguggaggauaug

SEQ ID NO: 1419669 - RNA, 19 nt, Artificial Sequence
  Description of Artificial Sequence: Synthetic oligonucleotide
cugugccuccaguggaaca

SEQ ID NO: 1419670 - RNA, 19 nt, Artificial Sequence
  Description of Artificial Sequence: Synthetic oligonucleotide
guguguguguguguauuua

SEQ ID NO: 1419671 - RNA, 19 nt, Artificial Sequence
  Description of Artificial Sequence: Synthetic oligonucleotide
caacccugcugccgcgaug

SEQ ID NO: 1419672 - RNA, 19 nt, Artificial Sequence
  Description of Artificial Sequence: Synthetic oligonucleotide
ccagcgucaccggagaguc

SEQ ID NO: 1419673 - RNA, 19 nt, Artificial Sequence
  Description of Artificial Sequence: Synthetic oligonucleotide
gcaguuaugugaccagcgu

SEQ ID NO: 1419674 - RNA, 19 nt, Artificial Sequence
  Description of Artificial Sequence: Synthetic oligonucleotide
ccucgcccaugacaaaccc

SEQ ID NO: 1419675 - RNA, 19 nt, Artificial Sequence
  Description of Artificial Sequence: Synthetic oligonucleotide
augcaucugaaggcaccgu

SEQ ID NO: 1419676 - RNA, 19 nt, Artificial Sequence
  Description of Artificial Sequence: Synthetic oligonucleotide
cccgggcucuggaaaaccc

SEQ ID NO: 1419677 - RNA, 19 nt, Artificial Sequence
  Description of Artificial Sequence: Synthetic oligonucleotide
cccucgcccaugacaaacc

SEQ ID NO: 1419678 - RNA, 19 nt, Artificial Sequence
  Description of Artificial Sequence: Synthetic oligonucleotide
ggauauggcaagggugcca

SEQ ID NO: 1419679 - RNA, 19 nt, Artificial Sequence
  Description of Artificial Sequence: Synthetic oligonucleotide
gcuucugacuucggaugcc

SEQ ID NO: 1419680 - RNA, 19 nt, Artificial Sequence
  Description of Artificial Sequence: Synthetic oligonucleotide
aucucgcucuggauggaau

SEQ ID NO: 1419681 - RNA, 19 nt, Artificial Sequence
  Description of Artificial Sequence: Synthetic oligonucleotide
cuuuuacagcagcagccau

SEQ ID NO: 1419682 - RNA, 19 nt, Artificial Sequence
  Description of Artificial Sequence: Synthetic oligonucleotide
ggucgacaggccagcuugg

SEQ ID NO: 1419683 - RNA, 19 nt, Artificial Sequence
  Description of Artificial Sequence: Synthetic oligonucleotide
gcaguaaaagcugccucaa

SEQ ID NO: 1419684 - RNA, 19 nt, Artificial Sequence
  Description of Artificial Sequence: Synthetic oligonucleotide
ugccagcauggucccuaaa

SEQ ID NO: 1419685 - RNA, 19 nt, Artificial Sequence
  Description of Artificial Sequence: Synthetic oligonucleotide
cagcgucaccggagagucc

SEQ ID NO: 1419686 - RNA, 19 nt, Artificial Sequence
  Description of Artificial Sequence: Synthetic oligonucleotide
gccagcaauacaaaguguu

SEQ ID NO: 1419687 - RNA, 19 nt, Artificial Sequence
  Description of Artificial Sequence: Synthetic oligonucleotide
gcaagagauaauggacuaa

SEQ ID NO: 1419688 - RNA, 19 nt, Artificial Sequence
  Description of Artificial Sequence: Synthetic oligonucleotide
ccaaacaaguugaguccca

SEQ ID NO: 1419689 - RNA, 19 nt, Artificial Sequence
  Description of Artificial Sequence: Synthetic oligonucleotide
ugcaggcgguggacacugu

SEQ ID NO: 1419690 - RNA, 19 nt, Artificial Sequence
  Description of Artificial Sequence: Synthetic oligonucleotide
guccgaugccugugaugac

SEQ ID NO: 1419691 - RNA, 19 nt, Artificial Sequence
  Description of Artificial Sequence: Synthetic oligonucleotide
caccgaacccaaaggaauu

SEQ ID NO: 1419692 - RNA, 19 nt, Artificial Sequence
  Description of Artificial Sequence: Synthetic oligonucleotide
gcuuaauaagcaacagcau

SEQ ID NO: 1419693 - RNA, 19 nt, Artificial Sequence
  Description of Artificial Sequence: Synthetic oligonucleotide
cagaugcccgguggcuccc

SEQ ID NO: 1419694 - RNA, 19 nt, Artificial Sequence
  Description of Artificial Sequence: Synthetic oligonucleotide
cgccuacgcaacauggcug

SEQ ID NO: 1419695 - RNA, 19 nt, Artificial Sequence
  Description of Artificial Sequence: Synthetic oligonucleotide
ggcgguggacacuguguga

SEQ ID NO: 1419696 - RNA, 19 nt, Artificial Sequence
  Description of Artificial Sequence: Synthetic oligonucleotide
aggcaccgucuccuucaga

SEQ ID NO: 1419697 - RNA, 19 nt, Artificial Sequence
  Description of Artificial Sequence: Synthetic oligonucleotide
cugcugccgcgauggccag

SEQ ID NO: 1419698 - RNA, 19 nt, Artificial Sequence
  Description of Artificial Sequence: Synthetic oligonucleotide
cagcuacacugcaaggaau

SEQ ID NO: 1419699 - RNA, 19 nt, Artificial Sequence
  Description of Artificial Sequence: Synthetic oligonucleotide
ggccaacccugcugccgcg

SEQ ID NO: 1419700 - RNA, 19 nt, Artificial Sequence
  Description of Artificial Sequence: Synthetic oligonucleotide
guguguguguguguguauu

SEQ ID NO: 1419701 - RNA, 19 nt, Artificial Sequence
  Description of Artificial Sequence: Synthetic oligonucleotide
uuggggcccuugaguuuua

SEQ ID NO: 1419702 - RNA, 19 nt, Artificial Sequence
  Description of Artificial Sequence: Synthetic oligonucleotide
cacagcaugugcuccuguu

SEQ ID NO: 1419703 - RNA, 19 nt, Artificial Sequence
  Description of Artificial Sequence: Synthetic oligonucleotide
ggugccagcauggucccua

SEQ ID NO: 1419704 - RNA, 19 nt, Artificial Sequence
  Description of Artificial Sequence: Synthetic oligonucleotide
ggagucucccacagcaugu

SEQ ID NO: 1419705 - RNA, 19 nt, Artificial Sequence
  Description of Artificial Sequence: Synthetic oligonucleotide
caucaccaugggcuauaaa

SEQ ID NO: 1419706 - RNA, 19 nt, Artificial Sequence
  Description of Artificial Sequence: Synthetic oligonucleotide
ugcauacauccgggcuccu

SEQ ID NO: 1419707 - RNA, 19 nt, Artificial Sequence
  Description of Artificial Sequence: Synthetic oligonucleotide
gccugcagccauauuuauc

SEQ ID NO: 1419708 - RNA, 19 nt, Artificial Sequence
  Description of Artificial Sequence: Synthetic oligonucleotide
cccgguggcucccuuugug

SEQ ID NO: 1419709 - RNA, 19 nt, Artificial Sequence
  Description of Artificial Sequence: Synthetic oligonucleotide
augcccgguggcucccuuu

SEQ ID NO: 1419710 - RNA, 19 nt, Artificial Sequence
  Description of Artificial Sequence: Synthetic oligonucleotide
ccaccgaacccaaaggaau

SEQ ID NO: 1419711 - RNA, 19 nt, Artificial Sequence
  Description of Artificial Sequence: Synthetic oligonucleotide
cuccuguugugcaggcggu

SEQ ID NO: 1419712 - RNA, 19 nt, Artificial Sequence
  Description of Artificial Sequence: Synthetic oligonucleotide
gugccagcauggucccuaa

SEQ ID NO: 1419713 - RNA, 19 nt, Artificial Sequence
  Description of Artificial Sequence: Synthetic oligonucleotide
caucucgcucuggauggaa

SEQ ID NO: 1419714 - RNA, 19 nt, Artificial Sequence
  Description of Artificial Sequence: Synthetic oligonucleotide
gggauccggguuugugcuc

SEQ ID NO: 1419715 - RNA, 19 nt, Artificial Sequence
  Description of Artificial Sequence: Synthetic oligonucleotide
cuaguccgaugccugugau

SEQ ID NO: 1419716 - RNA, 19 nt, Artificial Sequence
  Description of Artificial Sequence: Synthetic oligonucleotide
caccaacuacagaaacaau

SEQ ID NO: 1419717 - RNA, 19 nt, Artificial Sequence
  Description of Artificial Sequence: Synthetic oligonucleotide
cagagcccgggcucuggaa

SEQ ID NO: 1419718 - RNA, 19 nt, Artificial Sequence
  Description of Artificial Sequence: Synthetic oligonucleotide
ccgaugccugugaugacaa

SEQ ID NO: 1419719 - RNA, 19 nt, Artificial Sequence
  Description of Artificial Sequence: Synthetic oligonucleotide
acccaguggcguggaggug

SEQ ID NO: 1419720 - RNA, 19 nt, Artificial Sequence
  Description of Artificial Sequence: Synthetic oligonucleotide
cagcuugggauccggguuu

SEQ ID NO: 1419721 - RNA, 19 nt, Artificial Sequence
  Description of Artificial Sequence: Synthetic oligonucleotide
ccugaucagcuucugacuu

SEQ ID NO: 1419722 - RNA, 19 nt, Artificial Sequence
  Description of Artificial Sequence: Synthetic oligonucleotide
uggggcccuugaguuuuau

SEQ ID NO: 1419723 - RNA, 19 nt, Artificial Sequence
  Description of Artificial Sequence: Synthetic oligonucleotide
ccgggcucuggaaaaccca

SEQ ID NO: 1419724 - RNA, 19 nt, Artificial Sequence
  Description of Artificial Sequence: Synthetic oligonucleotide
gccaccugaucagcuucug

SEQ ID NO: 1419725 - RNA, 19 nt, Artificial Sequence
  Description of Artificial Sequence: Synthetic oligonucleotide
caucacccaguggcgugga

SEQ ID NO: 1419726 - RNA, 19 nt, Artificial Sequence
  Description of Artificial Sequence: Synthetic oligonucleotide
gcccgggcucuggaaaacc

SEQ ID NO: 1419727 - RNA, 19 nt, Artificial Sequence
  Description of Artificial Sequence: Synthetic oligonucleotide
gcgguggacacugugugau

SEQ ID NO: 1419728 - RNA, 19 nt, Artificial Sequence
  Description of Artificial Sequence: Synthetic oligonucleotide
gaugccagccagaguccuu

SEQ ID NO: 1419729 - RNA, 19 nt, Artificial Sequence
  Description of Artificial Sequence: Synthetic oligonucleotide
cccugaugucugauuugga

SEQ ID NO: 1419730 - RNA, 19 nt, Artificial Sequence
  Description of Artificial Sequence: Synthetic oligonucleotide
ggggcccuugaguuuuaua

SEQ ID NO: 1419731 - RNA, 19 nt, Artificial Sequence
  Description of Artificial Sequence: Synthetic oligonucleotide
caacucgccuacgcaacau

SEQ ID NO: 1419732 - RNA, 19 nt, Artificial Sequence
  Description of Artificial Sequence: Synthetic oligonucleotide
cagcagaugcccgguggcu

SEQ ID NO: 1419733 - RNA, 19 nt, Artificial Sequence
  Description of Artificial Sequence: Synthetic oligonucleotide
gcaucaccaugggcuauaa

SEQ ID NO: 1419734 - RNA, 19 nt, Artificial Sequence
  Description of Artificial Sequence: Synthetic oligonucleotide
gaugcccgguggcucccuu

SEQ ID NO: 1419735 - RNA, 19 nt, Artificial Sequence
  Description of Artificial Sequence: Synthetic oligonucleotide
cagaguccuuuagggccaa

SEQ ID NO: 1419736 - RNA, 19 nt, Artificial Sequence
  Description of Artificial Sequence: Synthetic oligonucleotide
gcaccgucuccuucagaau

SEQ ID NO: 1419737 - RNA, 19 nt, Artificial Sequence
  Description of Artificial Sequence: Synthetic oligonucleotide
gccuccaguggaacauaau

SEQ ID NO: 1419738 - RNA, 19 nt, Artificial Sequence
  Description of Artificial Sequence: Synthetic oligonucleotide
gcccgguggcucccuuugu

SEQ ID NO: 1419739 - RNA, 19 nt, Artificial Sequence
  Description of Artificial Sequence: Synthetic oligonucleotide
ccaacccugcugccgcgau

SEQ ID NO: 1419740 - RNA, 19 nt, Artificial Sequence
  Description of Artificial Sequence: Synthetic oligonucleotide
ccuacgcaacauggcugcu

SEQ ID NO: 1419741 - RNA, 19 nt, Artificial Sequence
  Description of Artificial Sequence: Synthetic oligonucleotide
cgucaccggagaguccaua

SEQ ID NO: 1419742 - RNA, 19 nt, Artificial Sequence
  Description of Artificial Sequence: Synthetic oligonucleotide
ggcucccuuuguggaggau

SEQ ID NO: 1419743 - RNA, 19 nt, Artificial Sequence
  Description of Artificial Sequence: Synthetic oligonucleotide
gcgucaccggagaguccau

SEQ ID NO: 1419744 - RNA, 19 nt, Artificial Sequence
  Description of Artificial Sequence: Synthetic oligonucleotide
uuuaauauuaaauugggau

SEQ ID NO: 1419745 - RNA, 19 nt, Artificial Sequence
  Description of Artificial Sequence: Synthetic oligonucleotide
aaaaggcucucccugagac

SEQ ID NO: 1419746 - RNA, 19 nt, Artificial Sequence
  Description of Artificial Sequence: Synthetic oligonucleotide
uuacaaguugcacaaauca

SEQ ID NO: 1419747 - RNA, 19 nt, Artificial Sequence
  Description of Artificial Sequence: Synthetic oligonucleotide
aagaggugggaacuagucc

SEQ ID NO: 1419748 - RNA, 19 nt, Artificial Sequence
  Description of Artificial Sequence: Synthetic oligonucleotide
guuaguggauacaagaugg

SEQ ID NO: 1419749 - RNA, 19 nt, Artificial Sequence
  Description of Artificial Sequence: Synthetic oligonucleotide
aagcggaacauccugaucu

SEQ ID NO: 1419750 - RNA, 19 nt, Artificial Sequence
  Description of Artificial Sequence: Synthetic oligonucleotide
aacucaaguuaguggauac

SEQ ID NO: 1419751 - RNA, 19 nt, Artificial Sequence
  Description of Artificial Sequence: Synthetic oligonucleotide
gauggugaccccuaaaccc

SEQ ID NO: 1419752 - RNA, 19 nt, Artificial Sequence
  Description of Artificial Sequence: Synthetic oligonucleotide
uuaaauugggaugaggcug

SEQ ID NO: 1419753 - RNA, 19 nt, Artificial Sequence
  Description of Artificial Sequence: Synthetic oligonucleotide
auucccaacaucccgaaag

SEQ ID NO: 1419754 - RNA, 19 nt, Artificial Sequence
  Description of Artificial Sequence: Synthetic oligonucleotide
uuuccaaucaugucguuca

SEQ ID NO: 1419755 - RNA, 19 nt, Artificial Sequence
  Description of Artificial Sequence: Synthetic oligonucleotide
uuauuucacgggaugaucu

SEQ ID NO: 1419756 - RNA, 19 nt, Artificial Sequence
  Description of Artificial Sequence: Synthetic oligonucleotide
ucguucaucauuccaaaca

SEQ ID NO: 1419757 - RNA, 19 nt, Artificial Sequence
  Description of Artificial Sequence: Synthetic oligonucleotide
gaagccaccagacauuccc

SEQ ID NO: 1419758 - RNA, 19 nt, Artificial Sequence
  Description of Artificial Sequence: Synthetic oligonucleotide
uauuccauaaacaccuagu

SEQ ID NO: 1419759 - RNA, 19 nt, Artificial Sequence
  Description of Artificial Sequence: Synthetic oligonucleotide
ugugcggugauuucgggag

SEQ ID NO: 1419760 - RNA, 19 nt, Artificial Sequence
  Description of Artificial Sequence: Synthetic oligonucleotide
uuauuccauaaacaccuag

SEQ ID NO: 1419761 - RNA, 19 nt, Artificial Sequence
  Description of Artificial Sequence: Synthetic oligonucleotide
auaaacaccuaguuacaag

SEQ ID NO: 1419762 - RNA, 19 nt, Artificial Sequence
  Description of Artificial Sequence: Synthetic oligonucleotide
aguuaguggauacaagaug

SEQ ID NO: 1419763 - RNA, 19 nt, Artificial Sequence
  Description of Artificial Sequence: Synthetic oligonucleotide
auuaaauugggaugaggcu

SEQ ID NO: 1419764 - RNA, 19 nt, Artificial Sequence
  Description of Artificial Sequence: Synthetic oligonucleotide
aggacaacguuauuucacg

SEQ ID NO: 1419765 - RNA, 19 nt, Artificial Sequence
  Description of Artificial Sequence: Synthetic oligonucleotide
cucaugaagcggaacaucc

SEQ ID NO: 1419766 - RNA, 19 nt, Artificial Sequence
  Description of Artificial Sequence: Synthetic oligonucleotide
uugccuguuaauuuaauau

SEQ ID NO: 1419767 - RNA, 19 nt, Artificial Sequence
  Description of Artificial Sequence: Synthetic oligonucleotide
aggaugugagcccuguccc

SEQ ID NO: 1419768 - RNA, 19 nt, Artificial Sequence
  Description of Artificial Sequence: Synthetic oligonucleotide
uuaguggauacaagauggg

SEQ ID NO: 1419769 - RNA, 19 nt, Artificial Sequence
  Description of Artificial Sequence: Synthetic oligonucleotide
ucaccagucauagcgacgg

SEQ ID NO: 1419770 - RNA, 19 nt, Artificial Sequence
  Description of Artificial Sequence: Synthetic oligonucleotide
aaagaggugggaacuaguc

SEQ ID NO: 1419771 - RNA, 19 nt, Artificial Sequence
  Description of Artificial Sequence: Synthetic oligonucleotide
cauguuaccaucugugaug

SEQ ID NO: 1419772 - RNA, 19 nt, Artificial Sequence
  Description of Artificial Sequence: Synthetic oligonucleotide
agaggugggaacuagucca

SEQ ID NO: 1419773 - RNA, 19 nt, Artificial Sequence
  Description of Artificial Sequence: Synthetic oligonucleotide
aaucgugaugucucccuuc

SEQ ID NO: 1419774 - RNA, 19 nt, Artificial Sequence
  Description of Artificial Sequence: Synthetic oligonucleotide
ucaaguuaguggauacaag

SEQ ID NO: 1419775 - RNA, 19 nt, Artificial Sequence
  Description of Artificial Sequence: Synthetic oligonucleotide
ucgaaauuccagaggacgc

SEQ ID NO: 1419776 - RNA, 19 nt, Artificial Sequence
  Description of Artificial Sequence: Synthetic oligonucleotide
gcucucaccagucauagcg

SEQ ID NO: 1419777 - RNA, 19 nt, Artificial Sequence
  Description of Artificial Sequence: Synthetic oligonucleotide
acaccuaguuacaaguugc

SEQ ID NO: 1419778 - RNA, 19 nt, Artificial Sequence
  Description of Artificial Sequence: Synthetic oligonucleotide
gacggugaauggcaaaggg

SEQ ID NO: 1419779 - RNA, 19 nt, Artificial Sequence
  Description of Artificial Sequence: Synthetic oligonucleotide
caaguuaguggauacaaga

SEQ ID NO: 1419780 - RNA, 19 nt, Artificial Sequence
  Description of Artificial Sequence: Synthetic oligonucleotide
cagcaugcggcucauaugc

SEQ ID NO: 1419781 - RNA, 19 nt, Artificial Sequence
  Description of Artificial Sequence: Synthetic oligonucleotide
uggauagccagacggggag

SEQ ID NO: 1419782 - RNA, 19 nt, Artificial Sequence
  Description of Artificial Sequence: Synthetic oligonucleotide
aacuaguccacucccucca

SEQ ID NO: 1419783 - RNA, 19 nt, Artificial Sequence
  Description of Artificial Sequence: Synthetic oligonucleotide
aucgugaugucucccuucg

SEQ ID NO: 1419784 - RNA, 19 nt, Artificial Sequence
  Description of Artificial Sequence: Synthetic oligonucleotide
ugaucucucagccucucac

SEQ ID NO: 1419785 - RNA, 19 nt, Artificial Sequence
  Description of Artificial Sequence: Synthetic oligonucleotide
ucugaaucccggacggucc

SEQ ID NO: 1419786 - RNA, 19 nt, Artificial Sequence
  Description of Artificial Sequence: Synthetic oligonucleotide
uacaaguugcacaaaucau

SEQ ID NO: 1419787 - RNA, 19 nt, Artificial Sequence
  Description of Artificial Sequence: Synthetic oligonucleotide
cuaguuacaaguugcacaa

SEQ ID NO: 1419788 - RNA, 19 nt, Artificial Sequence
  Description of Artificial Sequence: Synthetic oligonucleotide
gaagggacaaagagguggg

SEQ ID NO: 1419789 - RNA, 19 nt, Artificial Sequence
  Description of Artificial Sequence: Synthetic oligonucleotide
aguaaaaggcucucccuga

SEQ ID NO: 1419790 - RNA, 19 nt, Artificial Sequence
  Description of Artificial Sequence: Synthetic oligonucleotide
ugugauguggggugggaga

SEQ ID NO: 1419791 - RNA, 19 nt, Artificial Sequence
  Description of Artificial Sequence: Synthetic oligonucleotide
aaggcagagaaggguauag

SEQ ID NO: 1419792 - RNA, 19 nt, Artificial Sequence
  Description of Artificial Sequence: Synthetic oligonucleotide
ugggaacuaguccacuccc

SEQ ID NO: 1419793 - RNA, 19 nt, Artificial Sequence
  Description of Artificial Sequence: Synthetic oligonucleotide
ucugcucuagaccacuguc

SEQ ID NO: 1419794 - RNA, 19 nt, Artificial Sequence
  Description of Artificial Sequence: Synthetic oligonucleotide
acaucccgaaaggagagac

SEQ ID NO: 1419795 - RNA, 19 nt, Artificial Sequence
  Description of Artificial Sequence: Synthetic oligonucleotide
aauuccagaggacgcugcu

SEQ ID NO: 1419796 - RNA, 19 nt, Artificial Sequence
  Description of Artificial Sequence: Synthetic oligonucleotide
auacgacuguggcaucugc

SEQ ID NO: 1419797 - RNA, 19 nt, Artificial Sequence
  Description of Artificial Sequence: Synthetic oligonucleotide
auaugcugacggugaaugg

SEQ ID NO: 1419798 - RNA, 19 nt, Artificial Sequence
  Description of Artificial Sequence: Synthetic oligonucleotide
aacaugggaucuucaggcu

SEQ ID NO: 1419799 - RNA, 19 nt, Artificial Sequence
  Description of Artificial Sequence: Synthetic oligonucleotide
cauggcgucgaaauuccag

SEQ ID NO: 1419800 - RNA, 19 nt, Artificial Sequence
  Description of Artificial Sequence: Synthetic oligonucleotide
ugcacaaaucauuuauuuu

SEQ ID NO: 1419801 - RNA, 19 nt, Artificial Sequence
  Description of Artificial Sequence: Synthetic oligonucleotide
ugccuguuaauuuaauauu

SEQ ID NO: 1419802 - RNA, 19 nt, Artificial Sequence
  Description of Artificial Sequence: Synthetic oligonucleotide
uuuuggggcgccaucccca

SEQ ID NO: 1419803 - RNA, 19 nt, Artificial Sequence
  Description of Artificial Sequence: Synthetic oligonucleotide
augcccgauggacaucugc

SEQ ID NO: 1419804 - RNA, 19 nt, Artificial Sequence
  Description of Artificial Sequence: Synthetic oligonucleotide
cacgggaugaucucucagc

SEQ ID NO: 1419805 - RNA, 19 nt, Artificial Sequence
  Description of Artificial Sequence: Synthetic oligonucleotide
ugugaugcccgauggacau

SEQ ID NO: 1419806 - RNA, 19 nt, Artificial Sequence
  Description of Artificial Sequence: Synthetic oligonucleotide
ucaauguguggcaggggcu

SEQ ID NO: 1419807 - RNA, 19 nt, Artificial Sequence
  Description of Artificial Sequence: Synthetic oligonucleotide
guaaaaggcucucccugag

SEQ ID NO: 1419808 - RNA, 19 nt, Artificial Sequence
  Description of Artificial Sequence: Synthetic oligonucleotide
cuaaggaaggggcuguauc

SEQ ID NO: 1419809 - RNA, 19 nt, Artificial Sequence
  Description of Artificial Sequence: Synthetic oligonucleotide
ugcccgauggacaucugcu

SEQ ID NO: 1419810 - RNA, 19 nt, Artificial Sequence
  Description of Artificial Sequence: Synthetic oligonucleotide
uuuugugaugugggguggg

SEQ ID NO: 1419811 - RNA, 19 nt, Artificial Sequence
  Description of Artificial Sequence: Synthetic oligonucleotide
augaagccaccagacauuc

SEQ ID NO: 1419812 - RNA, 19 nt, Artificial Sequence
  Description of Artificial Sequence: Synthetic oligonucleotide
aaaugcggcugccucacuu

SEQ ID NO: 1419813 - RNA, 19 nt, Artificial Sequence
  Description of Artificial Sequence: Synthetic oligonucleotide
ugucguucaucauuccaaa

SEQ ID NO: 1419814 - RNA, 19 nt, Artificial Sequence
  Description of Artificial Sequence: Synthetic oligonucleotide
accuaguuacaaguugcac

SEQ ID NO: 1419815 - RNA, 19 nt, Artificial Sequence
  Description of Artificial Sequence: Synthetic oligonucleotide
ucacgggaugaucucucag

SEQ ID NO: 1419816 - RNA, 19 nt, Artificial Sequence
  Description of Artificial Sequence: Synthetic oligonucleotide
aucaaaugcggcugccuca

SEQ ID NO: 1419817 - RNA, 19 nt, Artificial Sequence
  Description of Artificial Sequence: Synthetic oligonucleotide
uauuucacgggaugaucuc

SEQ ID NO: 1419818 - RNA, 19 nt, Artificial Sequence
  Description of Artificial Sequence: Synthetic oligonucleotide
uacgacuguggcaucugca

SEQ ID NO: 1419819 - RNA, 19 nt, Artificial Sequence
  Description of Artificial Sequence: Synthetic oligonucleotide
gugaugcuaaggaaggggc

SEQ ID NO: 1419820 - RNA, 19 nt, Artificial Sequence
  Description of Artificial Sequence: Synthetic oligonucleotide
uuucacgggaugaucucuc

SEQ ID NO: 1419821 - RNA, 19 nt, Artificial Sequence
  Description of Artificial Sequence: Synthetic oligonucleotide
uggcgucgaaauuccagag

SEQ ID NO: 1419822 - RNA, 19 nt, Artificial Sequence
  Description of Artificial Sequence: Synthetic oligonucleotide
cugacggugaauggcaaag

SEQ ID NO: 1419823 - RNA, 19 nt, Artificial Sequence
  Description of Artificial Sequence: Synthetic oligonucleotide
gaggggauaaaagauggaa

SEQ ID NO: 1419824 - RNA, 19 nt, Artificial Sequence
  Description of Artificial Sequence: Synthetic oligonucleotide
gacgggacugucgggaagg

SEQ ID NO: 1419825 - RNA, 19 nt, Artificial Sequence
  Description of Artificial Sequence: Synthetic oligonucleotide
ucucaccagucauagcgac

SEQ ID NO: 1419826 - RNA, 19 nt, Artificial Sequence
  Description of Artificial Sequence: Synthetic oligonucleotide
ugacggugaauggcaaagg

SEQ ID NO: 1419827 - RNA, 19 nt, Artificial Sequence
  Description of Artificial Sequence: Synthetic oligonucleotide
uaguggauacaagaugggu

SEQ ID NO: 1419828 - RNA, 19 nt, Artificial Sequence
  Description of Artificial Sequence: Synthetic oligonucleotide
aaccuucaauguguggcag

SEQ ID NO: 1419829 - RNA, 19 nt, Artificial Sequence
  Description of Artificial Sequence: Synthetic oligonucleotide
uggggcagagcgcaucuca

SEQ ID NO: 1419830 - RNA, 19 nt, Artificial Sequence
  Description of Artificial Sequence: Synthetic oligonucleotide
caucaaaugcggcugccuc

SEQ ID NO: 1419831 - RNA, 19 nt, Artificial Sequence
  Description of Artificial Sequence: Synthetic oligonucleotide
agagacagccccagucugc

SEQ ID NO: 1419832 - RNA, 19 nt, Artificial Sequence
  Description of Artificial Sequence: Synthetic oligonucleotide
aaggaaggggcuguaucca

SEQ ID NO: 1419833 - RNA, 19 nt, Artificial Sequence
  Description of Artificial Sequence: Synthetic oligonucleotide
ggggucaucguggugaggg

SEQ ID NO: 1419834 - RNA, 19 nt, Artificial Sequence
  Description of Artificial Sequence: Synthetic oligonucleotide
guuacaaguugcacaaauc

SEQ ID NO: 1419835 - RNA, 19 nt, Artificial Sequence
  Description of Artificial Sequence: Synthetic oligonucleotide
aaugcggcugccucacuuu

SEQ ID NO: 1419836 - RNA, 19 nt, Artificial Sequence
  Description of Artificial Sequence: Synthetic oligonucleotide
uuucgggagcgcuggagga

SEQ ID NO: 1419837 - RNA, 19 nt, Artificial Sequence
  Description of Artificial Sequence: Synthetic oligonucleotide
accagacauucccaacauc

SEQ ID NO: 1419838 - RNA, 19 nt, Artificial Sequence
  Description of Artificial Sequence: Synthetic oligonucleotide
ucaaaugcggcugccucac

SEQ ID NO: 1419839 - RNA, 19 nt, Artificial Sequence
  Description of Artificial Sequence: Synthetic oligonucleotide
agccucauggcgucgaaau

SEQ ID NO: 1419840 - RNA, 19 nt, Artificial Sequence
  Description of Artificial Sequence: Synthetic oligonucleotide
gauuucgggagcgcuggag

SEQ ID NO: 1419841 - RNA, 19 nt, Artificial Sequence
  Description of Artificial Sequence: Synthetic oligonucleotide
aaguugcacaaaucauuua

SEQ ID NO: 1419842 - RNA, 19 nt, Artificial Sequence
  Description of Artificial Sequence: Synthetic oligonucleotide
gggaugaucucucagccuc

SEQ ID NO: 1419843 - RNA, 19 nt, Artificial Sequence
  Description of Artificial Sequence: Synthetic oligonucleotide
ccuaguuacaaguugcaca

SEQ ID NO: 1419844 - RNA, 19 nt, Artificial Sequence
  Description of Artificial Sequence: Synthetic oligonucleotide
aaucccggacgguccuccg

SEQ ID NO: 1419845 - RNA, 19 nt, Artificial Sequence
  Description of Artificial Sequence: Synthetic oligonucleotide
guccugucgcucuuccugg

SEQ ID NO: 1419846 - RNA, 19 nt, Artificial Sequence
  Description of Artificial Sequence: Synthetic oligonucleotide
ggacaacguuauuucacgg

SEQ ID NO: 1419847 - RNA, 19 nt, Artificial Sequence
  Description of Artificial Sequence: Synthetic oligonucleotide
cuugcaccccaaaaccuuc

SEQ ID NO: 1419848 - RNA, 19 nt, Artificial Sequence
  Description of Artificial Sequence: Synthetic oligonucleotide
ggauggugaccccuaaacc

SEQ ID NO: 1419849 - RNA, 19 nt, Artificial Sequence
  Description of Artificial Sequence: Synthetic oligonucleotide
gagccuggggcucucacca

SEQ ID NO: 1419850 - RNA, 19 nt, Artificial Sequence
  Description of Artificial Sequence: Synthetic oligonucleotide
cuaaacccagagcuugcac

SEQ ID NO: 1419851 - RNA, 19 nt, Artificial Sequence
  Description of Artificial Sequence: Synthetic oligonucleotide
acacuuuuggggcgccauc

SEQ ID NO: 1419852 - RNA, 19 nt, Artificial Sequence
  Description of Artificial Sequence: Synthetic oligonucleotide
auguuuccaaucaugucgu

SEQ ID NO: 1419853 - RNA, 19 nt, Artificial Sequence
  Description of Artificial Sequence: Synthetic oligonucleotide
ugucccgaaugugaugccc

SEQ ID NO: 1419854 - RNA, 19 nt, Artificial Sequence
  Description of Artificial Sequence: Synthetic oligonucleotide
cacuuuuggggcgccaucc

SEQ ID NO: 1419855 - RNA, 19 nt, Artificial Sequence
  Description of Artificial Sequence: Synthetic oligonucleotide
gggauggugaccccuaaac

SEQ ID NO: 1419856 - RNA, 19 nt, Artificial Sequence
  Description of Artificial Sequence: Synthetic oligonucleotide
cagaggacgcugcugccgg

SEQ ID NO: 1419857 - RNA, 19 nt, Artificial Sequence
  Description of Artificial Sequence: Synthetic oligonucleotide
ucauacgacuguggcaucu

SEQ ID NO: 1419858 - RNA, 19 nt, Artificial Sequence
  Description of Artificial Sequence: Synthetic oligonucleotide
uggugaccccuaaacccag

SEQ ID NO: 1419859 - RNA, 19 nt, Artificial Sequence
  Description of Artificial Sequence: Synthetic oligonucleotide
auuucacgggaugaucucu

SEQ ID NO: 1419860 - RNA, 19 nt, Artificial Sequence
  Description of Artificial Sequence: Synthetic oligonucleotide
gggacaaagaggugggaac

SEQ ID NO: 1419861 - RNA, 19 nt, Artificial Sequence
  Description of Artificial Sequence: Synthetic oligonucleotide
gaaugugaugcccgaugga

SEQ ID NO: 1419862 - RNA, 19 nt, Artificial Sequence
  Description of Artificial Sequence: Synthetic oligonucleotide
ggcgucgaaauuccagagg

SEQ ID NO: 1419863 - RNA, 19 nt, Artificial Sequence
  Description of Artificial Sequence: Synthetic oligonucleotide
gcggcucauaugcugacgg

SEQ ID NO: 1419864 - RNA, 19 nt, Artificial Sequence
  Description of Artificial Sequence: Synthetic oligonucleotide
caugucguucaucauucca

SEQ ID NO: 1419865 - RNA, 19 nt, Artificial Sequence
  Description of Artificial Sequence: Synthetic oligonucleotide
ugaugucucccuucgccau

SEQ ID NO: 1419866 - RNA, 19 nt, Artificial Sequence
  Description of Artificial Sequence: Synthetic oligonucleotide
augucguucaucauuccaa

SEQ ID NO: 1419867 - RNA, 19 nt, Artificial Sequence
  Description of Artificial Sequence: Synthetic oligonucleotide
agggucgcggcccgggacg

SEQ ID NO: 1419868 - RNA, 19 nt, Artificial Sequence
  Description of Artificial Sequence: Synthetic oligonucleotide
aggggauaaaagauggaaa

SEQ ID NO: 1419869 - RNA, 19 nt, Artificial Sequence
  Description of Artificial Sequence: Synthetic oligonucleotide
ugcuggcauguuaccaucu

SEQ ID NO: 1419870 - RNA, 19 nt, Artificial Sequence
  Description of Artificial Sequence: Synthetic oligonucleotide
ugaagccaccagacauucc

SEQ ID NO: 1419871 - RNA, 19 nt, Artificial Sequence
  Description of Artificial Sequence: Synthetic oligonucleotide
ucccggacgguccuccgug

SEQ ID NO: 1419872 - RNA, 19 nt, Artificial Sequence
  Description of Artificial Sequence: Synthetic oligonucleotide
cacacgguccccgacucgg

SEQ ID NO: 1419873 - RNA, 19 nt, Artificial Sequence
  Description of Artificial Sequence: Synthetic oligonucleotide
gcgucgaaauuccagagga

SEQ ID NO: 1419874 - RNA, 19 nt, Artificial Sequence
  Description of Artificial Sequence: Synthetic oligonucleotide
augcggcucauaugcugac

SEQ ID NO: 1419875 - RNA, 19 nt, Artificial Sequence
  Description of Artificial Sequence: Synthetic oligonucleotide
gucccgaaugugaugcccg

SEQ ID NO: 1419876 - RNA, 19 nt, Artificial Sequence
  Description of Artificial Sequence: Synthetic oligonucleotide
caugcggcucauaugcuga

SEQ ID NO: 1419877 - RNA, 19 nt, Artificial Sequence
  Description of Artificial Sequence: Synthetic oligonucleotide
ggcucagcggcccauccgg

SEQ ID NO: 1419878 - RNA, 19 nt, Artificial Sequence
  Description of Artificial Sequence: Synthetic oligonucleotide
gugaugucucccuucgcca

SEQ ID NO: 1419879 - RNA, 19 nt, Artificial Sequence
  Description of Artificial Sequence: Synthetic oligonucleotide
ucauuccaaacauguccau

SEQ ID NO: 1419880 - RNA, 19 nt, Artificial Sequence
  Description of Artificial Sequence: Synthetic oligonucleotide
auggugaccccuaaaccca

SEQ ID NO: 1419881 - RNA, 19 nt, Artificial Sequence
  Description of Artificial Sequence: Synthetic oligonucleotide
aggggaguccucagguccc

SEQ ID NO: 1419882 - RNA, 19 nt, Artificial Sequence
  Description of Artificial Sequence: Synthetic oligonucleotide
ucccgaaaggagagacagc

SEQ ID NO: 1419883 - RNA, 19 nt, Artificial Sequence
  Description of Artificial Sequence: Synthetic oligonucleotide
cauccugcggcuggcaggc

SEQ ID NO: 1419884 - RNA, 19 nt, Artificial Sequence
  Description of Artificial Sequence: Synthetic oligonucleotide
ugcggcucauaugcugacg

SEQ ID NO: 1419885 - RNA, 19 nt, Artificial Sequence
  Description of Artificial Sequence: Synthetic oligonucleotide
gucguucaucauuccaaac

SEQ ID NO: 1419886 - RNA, 19 nt, Artificial Sequence
  Description of Artificial Sequence: Synthetic oligonucleotide
uugcuggcauguuaccauc

SEQ ID NO: 1419887 - RNA, 19 nt, Artificial Sequence
  Description of Artificial Sequence: Synthetic oligonucleotide
cugugaugcuaaggaaggg

SEQ ID NO: 1419888 - RNA, 19 nt, Artificial Sequence
  Description of Artificial Sequence: Synthetic oligonucleotide
agcaaggauccaggagagc

SEQ ID NO: 1419889 - RNA, 19 nt, Artificial Sequence
  Description of Artificial Sequence: Synthetic oligonucleotide
ugguacacuuuuggggcgc

SEQ ID NO: 1419890 - RNA, 19 nt, Artificial Sequence
  Description of Artificial Sequence: Synthetic oligonucleotide
gaugugagcccugucccga

SEQ ID NO: 1419891 - RNA, 19 nt, Artificial Sequence
  Description of Artificial Sequence: Synthetic oligonucleotide
aacaucccgaaaggagaga

SEQ ID NO: 1419892 - RNA, 19 nt, Artificial Sequence
  Description of Artificial Sequence: Synthetic oligonucleotide
uggggcucucaccagucau

SEQ ID NO: 1419893 - RNA, 19 nt, Artificial Sequence
  Description of Artificial Sequence: Synthetic oligonucleotide
gaaucccggacgguccucc

SEQ ID NO: 1419894 - RNA, 19 nt, Artificial Sequence
  Description of Artificial Sequence: Synthetic oligonucleotide
acucaaguuaguggauaca

SEQ ID NO: 1419895 - RNA, 19 nt, Artificial Sequence
  Description of Artificial Sequence: Synthetic oligonucleotide
ggaacuaguccacucccuc

SEQ ID NO: 1419896 - RNA, 19 nt, Artificial Sequence
  Description of Artificial Sequence: Synthetic oligonucleotide
cgaaugugaugcccgaugg

SEQ ID NO: 1419897 - RNA, 19 nt, Artificial Sequence
  Description of Artificial Sequence: Synthetic oligonucleotide
ggcuccacgucccucauga

SEQ ID NO: 1419898 - RNA, 19 nt, Artificial Sequence
  Description of Artificial Sequence: Synthetic oligonucleotide
accagucauagcgacggga

SEQ ID NO: 1419899 - RNA, 19 nt, Artificial Sequence
  Description of Artificial Sequence: Synthetic oligonucleotide
ggagcaggaaaugaaaacu

SEQ ID NO: 1419900 - RNA, 19 nt, Artificial Sequence
  Description of Artificial Sequence: Synthetic oligonucleotide
ucauaugcugacggugaau

SEQ ID NO: 1419901 - RNA, 19 nt, Artificial Sequence
  Description of Artificial Sequence: Synthetic oligonucleotide
ucccgaaugugaugcccga

SEQ ID NO: 1419902 - RNA, 19 nt, Artificial Sequence
  Description of Artificial Sequence: Synthetic oligonucleotide
ucgugaugucucccuucgc

SEQ ID NO: 1419903 - RNA, 19 nt, Artificial Sequence
  Description of Artificial Sequence: Synthetic oligonucleotide
agauggguggggucaucgu

SEQ ID NO: 1419904 - RNA, 19 nt, Artificial Sequence
  Description of Artificial Sequence: Synthetic oligonucleotide
cgugaugucucccuucgcc

SEQ ID NO: 1419905 - RNA, 19 nt, Artificial Sequence
  Description of Artificial Sequence: Synthetic oligonucleotide
uacacuuuuggggcgccau

SEQ ID NO: 1419906 - RNA, 19 nt, Artificial Sequence
  Description of Artificial Sequence: Synthetic oligonucleotide
ugcugacggugaauggcaa

SEQ ID NO: 1419907 - RNA, 19 nt, Artificial Sequence
  Description of Artificial Sequence: Synthetic oligonucleotide
cucagcggcccauccggcc

SEQ ID NO: 1419908 - RNA, 19 nt, Artificial Sequence
  Description of Artificial Sequence: Synthetic oligonucleotide
gucugaaucccggacgguc

SEQ ID NO: 1419909 - RNA, 19 nt, Artificial Sequence
  Description of Artificial Sequence: Synthetic oligonucleotide
augcugacggugaauggca

SEQ ID NO: 1419910 - RNA, 19 nt, Artificial Sequence
  Description of Artificial Sequence: Synthetic oligonucleotide
ugccggaaucgugaugucu

SEQ ID NO: 1419911 - RNA, 19 nt, Artificial Sequence
  Description of Artificial Sequence: Synthetic oligonucleotide
ggcucauaugcugacggug

SEQ ID NO: 1419912 - RNA, 19 nt, Artificial Sequence
  Description of Artificial Sequence: Synthetic oligonucleotide
ggcauguuaccaucuguga

SEQ ID NO: 1419913 - RNA, 19 nt, Artificial Sequence
  Description of Artificial Sequence: Synthetic oligonucleotide
ugucgggaaggggaguccu

SEQ ID NO: 1419914 - RNA, 19 nt, Artificial Sequence
  Description of Artificial Sequence: Synthetic oligonucleotide
ucguggugaggggauaaaa

SEQ ID NO: 1419915 - RNA, 19 nt, Artificial Sequence
  Description of Artificial Sequence: Synthetic oligonucleotide
agcgacgggacugucggga

SEQ ID NO: 1419916 - RNA, 19 nt, Artificial Sequence
  Description of Artificial Sequence: Synthetic oligonucleotide
ugcugccggaaucgugaug

SEQ ID NO: 1419917 - RNA, 19 nt, Artificial Sequence
  Description of Artificial Sequence: Synthetic oligonucleotide
caccuaguuacaaguugca

SEQ ID NO: 1419918 - RNA, 19 nt, Artificial Sequence
  Description of Artificial Sequence: Synthetic oligonucleotide
cucucaccagucauagcga

SEQ ID NO: 1419919 - RNA, 19 nt, Artificial Sequence
  Description of Artificial Sequence: Synthetic oligonucleotide
agaaaaggucuggcaguug

SEQ ID NO: 1419920 - RNA, 19 nt, Artificial Sequence
  Description of Artificial Sequence: Synthetic oligonucleotide
gaugaucucucagccucuc

SEQ ID NO: 1419921 - RNA, 19 nt, Artificial Sequence
  Description of Artificial Sequence: Synthetic oligonucleotide
cauccggccggccucuuuc

SEQ ID NO: 1419922 - RNA, 19 nt, Artificial Sequence
  Description of Artificial Sequence: Synthetic oligonucleotide
gggacugucgggaagggga

SEQ ID NO: 1419923 - RNA, 19 nt, Artificial Sequence
  Description of Artificial Sequence: Synthetic oligonucleotide
cauacgacuguggcaucug

SEQ ID NO: 1419924 - RNA, 19 nt, Artificial Sequence
  Description of Artificial Sequence: Synthetic oligonucleotide
gcaugcggcucauaugcug

SEQ ID NO: 1419925 - RNA, 19 nt, Artificial Sequence
  Description of Artificial Sequence: Synthetic oligonucleotide
gaggugggaacuaguccac

SEQ ID NO: 1419926 - RNA, 19 nt, Artificial Sequence
  Description of Artificial Sequence: Synthetic oligonucleotide
uggaggaugugagcccugu

SEQ ID NO: 1419927 - RNA, 19 nt, Artificial Sequence
  Description of Artificial Sequence: Synthetic oligonucleotide
agccaccagacauucccaa

SEQ ID NO: 1419928 - RNA, 19 nt, Artificial Sequence
  Description of Artificial Sequence: Synthetic oligonucleotide
acgguccuccgugucuccc

SEQ ID NO: 1419929 - RNA, 19 nt, Artificial Sequence
  Description of Artificial Sequence: Synthetic oligonucleotide
gucccuggauagccagacg

SEQ ID NO: 1419930 - RNA, 19 nt, Artificial Sequence
  Description of Artificial Sequence: Synthetic oligonucleotide
gaucccuccuggggcagag

SEQ ID NO: 1419931 - RNA, 19 nt, Artificial Sequence
  Description of Artificial Sequence: Synthetic oligonucleotide
gauggacaucugcucuaga

SEQ ID NO: 1419932 - RNA, 19 nt, Artificial Sequence
  Description of Artificial Sequence: Synthetic oligonucleotide
agacggggaggccccucgg

SEQ ID NO: 1419933 - RNA, 19 nt, Artificial Sequence
  Description of Artificial Sequence: Synthetic oligonucleotide
agccaccugacagcaugcg

SEQ ID NO: 1419934 - RNA, 19 nt, Artificial Sequence
  Description of Artificial Sequence: Synthetic oligonucleotide
ccucauggcgucgaaauuc

SEQ ID NO: 1419935 - RNA, 19 nt, Artificial Sequence
  Description of Artificial Sequence: Synthetic oligonucleotide
agaagccucauggcgucga

SEQ ID NO: 1419936 - RNA, 19 nt, Artificial Sequence
  Description of Artificial Sequence: Synthetic oligonucleotide
uagcgacgggacugucggg

SEQ ID NO: 1419937 - RNA, 19 nt, Artificial Sequence
  Description of Artificial Sequence: Synthetic oligonucleotide
ccccaaaaccuucaaugug

SEQ ID NO: 1419938 - RNA, 19 nt, Artificial Sequence
  Description of Artificial Sequence: Synthetic oligonucleotide
agcccucauacgacugugg

SEQ ID NO: 1419939 - RNA, 19 nt, Artificial Sequence
  Description of Artificial Sequence: Synthetic oligonucleotide
cugugcggugauuucggga

SEQ ID NO: 1419940 - RNA, 19 nt, Artificial Sequence
  Description of Artificial Sequence: Synthetic oligonucleotide
ccgaaugugaugcccgaug

SEQ ID NO: 1419941 - RNA, 19 nt, Artificial Sequence
  Description of Artificial Sequence: Synthetic oligonucleotide
uguuaccaucugugaugcu

SEQ ID NO: 1419942 - RNA, 19 nt, Artificial Sequence
  Description of Artificial Sequence: Synthetic oligonucleotide
caucccgaaaggagagaca

SEQ ID NO: 1419943 - RNA, 19 nt, Artificial Sequence
  Description of Artificial Sequence: Synthetic oligonucleotide
gguccuccgugucucccgg

SEQ ID NO: 1419944 - RNA, 19 nt, Artificial Sequence
  Description of Artificial Sequence: Synthetic oligonucleotide
cacgguccccgacucgggc

SEQ ID NO: 1419945 - RNA, 19 nt, Artificial Sequence
  Description of Artificial Sequence: Synthetic oligonucleotide
gggcucucaccagucauag

SEQ ID NO: 1419946 - RNA, 19 nt, Artificial Sequence
  Description of Artificial Sequence: Synthetic oligonucleotide
gcucauaugcugacgguga

SEQ ID NO: 1419947 - RNA, 19 nt, Artificial Sequence
  Description of Artificial Sequence: Synthetic oligonucleotide
caaagaggugggaacuagu

SEQ ID NO: 1419948 - RNA, 19 nt, Artificial Sequence
  Description of Artificial Sequence: Synthetic oligonucleotide
cuuucucggggcgcugcag

SEQ ID NO: 1419949 - RNA, 19 nt, Artificial Sequence
  Description of Artificial Sequence: Synthetic oligonucleotide
cacgucccucaugaagcgg

SEQ ID NO: 1419950 - RNA, 19 nt, Artificial Sequence
  Description of Artificial Sequence: Synthetic oligonucleotide
gugugacucugaggaagag

SEQ ID NO: 1419951 - RNA, 19 nt, Artificial Sequence
  Description of Artificial Sequence: Synthetic oligonucleotide
cccugugcggugauuucgg

SEQ ID NO: 1419952 - RNA, 19 nt, Artificial Sequence
  Description of Artificial Sequence: Synthetic oligonucleotide
uaguuacaaguugcacaaa

SEQ ID NO: 1419953 - RNA, 19 nt, Artificial Sequence
  Description of Artificial Sequence: Synthetic oligonucleotide
agcagggucgcggcccggg

SEQ ID NO: 1419954 - RNA, 19 nt, Artificial Sequence
  Description of Artificial Sequence: Synthetic oligonucleotide
cugcucuagaccacugucu

SEQ ID NO: 1419955 - RNA, 19 nt, Artificial Sequence
  Description of Artificial Sequence: Synthetic oligonucleotide
ggaaucgugaugucucccu

SEQ ID NO: 1419956 - RNA, 19 nt, Artificial Sequence
  Description of Artificial Sequence: Synthetic oligonucleotide
ugucugaaucccggacggu

SEQ ID NO: 1419957 - RNA, 19 nt, Artificial Sequence
  Description of Artificial Sequence: Synthetic oligonucleotide
ccgacucgggcucagcggc

SEQ ID NO: 1419958 - RNA, 19 nt, Artificial Sequence
  Description of Artificial Sequence: Synthetic oligonucleotide
gcgcuggaggaugugagcc

SEQ ID NO: 1419959 - RNA, 19 nt, Artificial Sequence
  Description of Artificial Sequence: Synthetic oligonucleotide
gacgguccuccgugucucc

SEQ ID NO: 1419960 - RNA, 19 nt, Artificial Sequence
  Description of Artificial Sequence: Synthetic oligonucleotide
gcugcugccggaaucguga

SEQ ID NO: 1419961 - RNA, 19 nt, Artificial Sequence
  Description of Artificial Sequence: Synthetic oligonucleotide
cucauaugcugacggugaa

SEQ ID NO: 1419962 - RNA, 19 nt, Artificial Sequence
  Description of Artificial Sequence: Synthetic oligonucleotide
gcgcaucucagaugucucc

SEQ ID NO: 1419963 - RNA, 19 nt, Artificial Sequence
  Description of Artificial Sequence: Synthetic oligonucleotide
aagccucauggcgucgaaa

SEQ ID NO: 1419964 - RNA, 19 nt, Artificial Sequence
  Description of Artificial Sequence: Synthetic oligonucleotide
caccagucauagcgacggg

SEQ ID NO: 1419965 - RNA, 19 nt, Artificial Sequence
  Description of Artificial Sequence: Synthetic oligonucleotide
ggauagccagacggggagg

SEQ ID NO: 1419966 - RNA, 19 nt, Artificial Sequence
  Description of Artificial Sequence: Synthetic oligonucleotide
gagcccugucccgaaugug

SEQ ID NO: 1419967 - RNA, 19 nt, Artificial Sequence
  Description of Artificial Sequence: Synthetic oligonucleotide
cucauacgacuguggcauc

SEQ ID NO: 1419968 - RNA, 19 nt, Artificial Sequence
  Description of Artificial Sequence: Synthetic oligonucleotide
gggacgcagggaugggucc

SEQ ID NO: 1419969 - RNA, 19 nt, Artificial Sequence
  Description of Artificial Sequence: Synthetic oligonucleotide
ccgaaaggagagacagccc

SEQ ID NO: 1419970 - RNA, 19 nt, Artificial Sequence
  Description of Artificial Sequence: Synthetic oligonucleotide
uucgggagcgcuggaggau

SEQ ID NO: 1419971 - RNA, 19 nt, Artificial Sequence
  Description of Artificial Sequence: Synthetic oligonucleotide
gccggaaucgugaugucuc

SEQ ID NO: 1419972 - RNA, 19 nt, Artificial Sequence
  Description of Artificial Sequence: Synthetic oligonucleotide
gcugccggaaucgugaugu

SEQ ID NO: 1419973 - RNA, 19 nt, Artificial Sequence
  Description of Artificial Sequence: Synthetic oligonucleotide
guugcacaaaucauuuauu

SEQ ID NO: 1419974 - RNA, 19 nt, Artificial Sequence
  Description of Artificial Sequence: Synthetic oligonucleotide
uccccugugcggugauuuc

SEQ ID NO: 1419975 - RNA, 19 nt, Artificial Sequence
  Description of Artificial Sequence: Synthetic oligonucleotide
ggacugucgggaaggggag

SEQ ID NO: 1419976 - RNA, 19 nt, Artificial Sequence
  Description of Artificial Sequence: Synthetic oligonucleotide
cagcccucauacgacugug

SEQ ID NO: 1419977 - RNA, 19 nt, Artificial Sequence
  Description of Artificial Sequence: Synthetic oligonucleotide
aucccggacgguccuccgu

SEQ ID NO: 1419978 - RNA, 19 nt, Artificial Sequence
  Description of Artificial Sequence: Synthetic oligonucleotide
ggacgcagggauggguccg

SEQ ID NO: 1419979 - RNA, 19 nt, Artificial Sequence
  Description of Artificial Sequence: Synthetic oligonucleotide
gcauguuaccaucugugau

SEQ ID NO: 1419980 - RNA, 19 nt, Artificial Sequence
  Description of Artificial Sequence: Synthetic oligonucleotide
ccggaaucgugaugucucc

SEQ ID NO: 1419981 - RNA, 19 nt, Artificial Sequence
  Description of Artificial Sequence: Synthetic oligonucleotide
gaagccucauggcgucgaa

SEQ ID NO: 1419982 - RNA, 19 nt, Artificial Sequence
  Description of Artificial Sequence: Synthetic oligonucleotide
ucaucguggugaggggaua

SEQ ID NO: 1419983 - RNA, 19 nt, Artificial Sequence
  Description of Artificial Sequence: Synthetic oligonucleotide
ggguauaggaaaguguuuu

SEQ ID NO: 1419984 - RNA, 19 nt, Artificial Sequence
  Description of Artificial Sequence: Synthetic oligonucleotide
auccggccggccucuuucu

SEQ ID NO: 1419985 - RNA, 19 nt, Artificial Sequence
  Description of Artificial Sequence: Synthetic oligonucleotide
uccgugucucccggauccc

SEQ ID NO: 1419986 - RNA, 19 nt, Artificial Sequence
  Description of Artificial Sequence: Synthetic oligonucleotide
caacguuauuucacgggau

SEQ ID NO: 1419987 - RNA, 19 nt, Artificial Sequence
  Description of Artificial Sequence: Synthetic oligonucleotide
ugaaucccggacgguccuc

SEQ ID NO: 1419988 - RNA, 19 nt, Artificial Sequence
  Description of Artificial Sequence: Synthetic oligonucleotide
cagcggcccauccggccgg

SEQ ID NO: 1419989 - RNA, 19 nt, Artificial Sequence
  Description of Artificial Sequence: Synthetic oligonucleotide
ugcuaaggaaggggcugua

SEQ ID NO: 1419990 - RNA, 19 nt, Artificial Sequence
  Description of Artificial Sequence: Synthetic oligonucleotide
acacgguccccgacucggg

SEQ ID NO: 1419991 - RNA, 19 nt, Artificial Sequence
  Description of Artificial Sequence: Synthetic oligonucleotide
ggucaucguggugagggga

SEQ ID NO: 1419992 - RNA, 19 nt, Artificial Sequence
  Description of Artificial Sequence: Synthetic oligonucleotide
agcaugcggcucauaugcu

SEQ ID NO: 1419993 - RNA, 19 nt, Artificial Sequence
  Description of Artificial Sequence: Synthetic oligonucleotide
uccggccggccucuuucuc

SEQ ID NO: 1419994 - RNA, 19 nt, Artificial Sequence
  Description of Artificial Sequence: Synthetic oligonucleotide
agagcgcaucucagauguc

SEQ ID NO: 1419995 - RNA, 19 nt, Artificial Sequence
  Description of Artificial Sequence: Synthetic oligonucleotide
gguacacuuuuggggcgcc

SEQ ID NO: 1419996 - RNA, 19 nt, Artificial Sequence
  Description of Artificial Sequence: Synthetic oligonucleotide
ccccugugcggugauuucg

SEQ ID NO: 1419997 - RNA, 19 nt, Artificial Sequence
  Description of Artificial Sequence: Synthetic oligonucleotide
gaugcccgauggacaucug

SEQ ID NO: 1419998 - RNA, 19 nt, Artificial Sequence
  Description of Artificial Sequence: Synthetic oligonucleotide
ccccgacucgggcucagcg

SEQ ID NO: 1419999 - RNA, 19 nt, Artificial Sequence
  Description of Artificial Sequence: Synthetic oligonucleotide
ccucauacgacuguggcau

SEQ ID NO: 1420000 - RNA, 19 nt, Artificial Sequence
  Description of Artificial Sequence: Synthetic oligonucleotide
gcccgggacgcagggaugg

SEQ ID NO: 1420001 - RNA, 19 nt, Artificial Sequence
  Description of Artificial Sequence: Synthetic oligonucleotide
ggagcgcuggaggauguga

SEQ ID NO: 1420002 - RNA, 19 nt, Artificial Sequence
  Description of Artificial Sequence: Synthetic oligonucleotide
cgucgaaauuccagaggac

SEQ ID NO: 1420003 - RNA, 19 nt, Artificial Sequence
  Description of Artificial Sequence: Synthetic oligonucleotide
caccugacagcaugcggcu

SEQ ID NO: 1420004 - RNA, 19 nt, Artificial Sequence
  Description of Artificial Sequence: Synthetic oligonucleotide
ugccuccagcagccaugug

SEQ ID NO: 1420005 - RNA, 19 nt, Artificial Sequence
  Description of Artificial Sequence: Synthetic oligonucleotide
cugccggaaucgugauguc

SEQ ID NO: 1420006 - RNA, 19 nt, Artificial Sequence
  Description of Artificial Sequence: Synthetic oligonucleotide
caagauggguggggucauc

SEQ ID NO: 1420007 - RNA, 19 nt, Artificial Sequence
  Description of Artificial Sequence: Synthetic oligonucleotide
caaucaugucguucaucau

SEQ ID NO: 1420008 - RNA, 19 nt, Artificial Sequence
  Description of Artificial Sequence: Synthetic oligonucleotide
ggaggaugugagcccuguc

SEQ ID NO: 1420009 - RNA, 19 nt, Artificial Sequence
  Description of Artificial Sequence: Synthetic oligonucleotide
ggggcaguaaaaggcucuc

SEQ ID NO: 1420010 - RNA, 19 nt, Artificial Sequence
  Description of Artificial Sequence: Synthetic oligonucleotide
cagucauagcgacgggacu

SEQ ID NO: 1420011 - RNA, 19 nt, Artificial Sequence
  Description of Artificial Sequence: Synthetic oligonucleotide
cugaaucccggacgguccu

SEQ ID NO: 1420012 - RNA, 19 nt, Artificial Sequence
  Description of Artificial Sequence: Synthetic oligonucleotide
gcugacggugaauggcaaa

SEQ ID NO: 1420013 - RNA, 19 nt, Artificial Sequence
  Description of Artificial Sequence: Synthetic oligonucleotide
ugguccccugugcggugau

SEQ ID NO: 1420014 - RNA, 19 nt, Artificial Sequence
  Description of Artificial Sequence: Synthetic oligonucleotide
ggccccucggcccuucguc

SEQ ID NO: 1420015 - RNA, 19 nt, Artificial Sequence
  Description of Artificial Sequence: Synthetic oligonucleotide
cguucaucauuccaaacau

SEQ ID NO: 1420016 - RNA, 19 nt, Artificial Sequence
  Description of Artificial Sequence: Synthetic oligonucleotide
guacacuuuuggggcgcca

SEQ ID NO: 1420017 - RNA, 19 nt, Artificial Sequence
  Description of Artificial Sequence: Synthetic oligonucleotide
gucaucguggugaggggau

SEQ ID NO: 1420018 - RNA, 19 nt, Artificial Sequence
  Description of Artificial Sequence: Synthetic oligonucleotide
gucgggaaggggaguccuc

SEQ ID NO: 1420019 - RNA, 19 nt, Artificial Sequence
  Description of Artificial Sequence: Synthetic oligonucleotide
uccccgacucgggcucagc

SEQ ID NO: 1420020 - RNA, 19 nt, Artificial Sequence
  Description of Artificial Sequence: Synthetic oligonucleotide
cgggacgcagggauggguc

SEQ ID NO: 1420021 - RNA, 19 nt, Artificial Sequence
  Description of Artificial Sequence: Synthetic oligonucleotide
ccccucggcccuucguccc

SEQ ID NO: 1420022 - RNA, 19 nt, Artificial Sequence
  Description of Artificial Sequence: Synthetic oligonucleotide
cuggggcagagcgcaucuc

SEQ ID NO: 1420023 - RNA, 19 nt, Artificial Sequence
  Description of Artificial Sequence: Synthetic oligonucleotide
cggaaucgugaugucuccc

SEQ ID NO: 1420024 - RNA, 19 nt, Artificial Sequence
  Description of Artificial Sequence: Synthetic oligonucleotide
ggucuggcaguugccucca

SEQ ID NO: 1420025 - RNA, 19 nt, Artificial Sequence
  Description of Artificial Sequence: Synthetic oligonucleotide
ugcggcuggcaggccuggu

SEQ ID NO: 1420026 - RNA, 19 nt, Artificial Sequence
  Description of Artificial Sequence: Synthetic oligonucleotide
ggccggccucuuucucggg

SEQ ID NO: 1420027 - RNA, 19 nt, Artificial Sequence
  Description of Artificial Sequence: Synthetic oligonucleotide
gggaacuaguccacucccu

SEQ ID NO: 1420028 - RNA, 19 nt, Artificial Sequence
  Description of Artificial Sequence: Synthetic oligonucleotide
ggugaccccuaaacccaga

SEQ ID NO: 1420029 - RNA, 19 nt, Artificial Sequence
  Description of Artificial Sequence: Synthetic oligonucleotide
ggaugaucucucagccucu

SEQ ID NO: 1420030 - RNA, 19 nt, Artificial Sequence
  Description of Artificial Sequence: Synthetic oligonucleotide
gcucagcggcccauccggc

SEQ ID NO: 1420031 - RNA, 19 nt, Artificial Sequence
  Description of Artificial Sequence: Synthetic oligonucleotide
ccggaucccuccuggggca

SEQ ID NO: 1420032 - RNA, 19 nt, Artificial Sequence
  Description of Artificial Sequence: Synthetic oligonucleotide
cgacgggacugucgggaag

SEQ ID NO: 1420033 - RNA, 19 nt, Artificial Sequence
  Description of Artificial Sequence: Synthetic oligonucleotide
gcgacgggacugucgggaa

SEQ ID NO: 1420034 - RNA, 19 nt, Artificial Sequence
  Description of Artificial Sequence: Synthetic oligonucleotide
cgaaauuccagaggacgcu

SEQ ID NO: 1420035 - RNA, 19 nt, Artificial Sequence
  Description of Artificial Sequence: Synthetic oligonucleotide
gcggcugccucacuuucau

SEQ ID NO: 1420036 - RNA, 19 nt, Artificial Sequence
  Description of Artificial Sequence: Synthetic oligonucleotide
gcuaaggaaggggcuguau

SEQ ID NO: 1420037 - RNA, 19 nt, Artificial Sequence
  Description of Artificial Sequence: Synthetic oligonucleotide
ccacagcccucauacgacu

SEQ ID NO: 1420038 - RNA, 19 nt, Artificial Sequence
  Description of Artificial Sequence: Synthetic oligonucleotide
caaaugcggcugccucacu

SEQ ID NO: 1420039 - RNA, 19 nt, Artificial Sequence
  Description of Artificial Sequence: Synthetic oligonucleotide
ccggacgguccuccguguc

SEQ ID NO: 1420040 - RNA, 19 nt, Artificial Sequence
  Description of Artificial Sequence: Synthetic oligonucleotide
gcagggucgcggcccggga

SEQ ID NO: 1420041 - RNA, 19 nt, Artificial Sequence
  Description of Artificial Sequence: Synthetic oligonucleotide
cguuauuucacgggaugau

SEQ ID NO: 1420042 - RNA, 19 nt, Artificial Sequence
  Description of Artificial Sequence: Synthetic oligonucleotide
ggaucccuccuggggcaga

SEQ ID NO: 1420043 - RNA, 19 nt, Artificial Sequence
  Description of Artificial Sequence: Synthetic oligonucleotide
cccucaugaagcggaacau

SEQ ID NO: 1420044 - RNA, 19 nt, Artificial Sequence
  Description of Artificial Sequence: Synthetic oligonucleotide
gcccugucccgaaugugau

SEQ ID NO: 1420045 - RNA, 19 nt, Artificial Sequence
  Description of Artificial Sequence: Synthetic oligonucleotide
cgggaugaucucucagccu

SEQ ID NO: 1420046 - RNA, 19 nt, Artificial Sequence
  Description of Artificial Sequence: Synthetic oligonucleotide
gcggcuggcaggccugguu

SEQ ID NO: 1420047 - RNA, 19 nt, Artificial Sequence
  Description of Artificial Sequence: Synthetic oligonucleotide
cggaucccuccuggggcag

SEQ ID NO: 1420048 - RNA, 19 nt, Artificial Sequence
  Description of Artificial Sequence: Synthetic oligonucleotide
gggcgccauccccaguguu

SEQ ID NO: 1420049 - RNA, 19 nt, Artificial Sequence
  Description of Artificial Sequence: Synthetic oligonucleotide
cggcucauaugcugacggu

SEQ ID NO: 1420050 - RNA, 19 nt, Artificial Sequence
  Description of Artificial Sequence: Synthetic oligonucleotide
cggugauuucgggagcgcu

SEQ ID NO: 1420051 - RNA, 19 nt, Artificial Sequence
  Description of Artificial Sequence: Synthetic oligonucleotide
gcggcccauccggccggcc

SEQ ID NO: 1420052 - RNA, 19 nt, Artificial Sequence
  Description of Artificial Sequence: Synthetic oligonucleotide
cccggacgguccuccgugu

SEQ ID NO: 1420053 - RNA, 19 nt, Artificial Sequence
  Description of Artificial Sequence: Synthetic oligonucleotide
ccgggacgcagggaugggu

SEQ ID NO: 1420054 - RNA, 19 nt, Artificial Sequence
  Description of Artificial Sequence: Synthetic oligonucleotide
gccugguugcuggcauguu

SEQ ID NO: 1420055 - RNA, 19 nt, Artificial Sequence
  Description of Artificial Sequence: Synthetic oligonucleotide
cggcccauccggccggccu

SEQ ID NO: 1420056 - RNA, 19 nt, Artificial Sequence
  Description of Artificial Sequence: Synthetic oligonucleotide
ccauccggccggccucuuu

SEQ ID NO: 1420057 - RNA, 19 nt, Artificial Sequence
  Description of Artificial Sequence: Synthetic oligonucleotide
aauauauuauucuagguug

SEQ ID NO: 1420058 - RNA, 19 nt, Artificial Sequence
  Description of Artificial Sequence: Synthetic oligonucleotide
aaauucaaugaguuuaggc

SEQ ID NO: 1420059 - RNA, 19 nt, Artificial Sequence
  Description of Artificial Sequence: Synthetic oligonucleotide
aauagugucauaauuuugc

SEQ ID NO: 1420060 - RNA, 19 nt, Artificial Sequence
  Description of Artificial Sequence: Synthetic oligonucleotide
aauucaaugaguuuaggcu

SEQ ID NO: 1420061 - RNA, 19 nt, Artificial Sequence
  Description of Artificial Sequence: Synthetic oligonucleotide
ugauuuacuaaacaaaggc

SEQ ID NO: 1420062 - RNA, 19 nt, Artificial Sequence
  Description of Artificial Sequence: Synthetic oligonucleotide
cauaauagcaaaauugugg

SEQ ID NO: 1420063 - RNA, 19 nt, Artificial Sequence
  Description of Artificial Sequence: Synthetic oligonucleotide
aagauugucucuuugucac

SEQ ID NO: 1420064 - RNA, 19 nt, Artificial Sequence
  Description of Artificial Sequence: Synthetic oligonucleotide
ugugauuuacuaaacaaag

SEQ ID NO: 1420065 - RNA, 19 nt, Artificial Sequence
  Description of Artificial Sequence: Synthetic oligonucleotide
uuagcauaaucccacagcg

SEQ ID NO: 1420066 - RNA, 19 nt, Artificial Sequence
  Description of Artificial Sequence: Synthetic oligonucleotide
uuaucaauguuuaauauaa

SEQ ID NO: 1420067 - RNA, 19 nt, Artificial Sequence
  Description of Artificial Sequence: Synthetic oligonucleotide
uucacauaagcaaucauag

SEQ ID NO: 1420068 - RNA, 19 nt, Artificial Sequence
  Description of Artificial Sequence: Synthetic oligonucleotide
uguuuaaucagguaguucu

SEQ ID NO: 1420069 - RNA, 19 nt, Artificial Sequence
  Description of Artificial Sequence: Synthetic oligonucleotide
uuaacaaauccuuaaaagu

SEQ ID NO: 1420070 - RNA, 19 nt, Artificial Sequence
  Description of Artificial Sequence: Synthetic oligonucleotide
guuaacaaauccuuaaaag

SEQ ID NO: 1420071 - RNA, 19 nt, Artificial Sequence
  Description of Artificial Sequence: Synthetic oligonucleotide
aauacauucucuuagcaua

SEQ ID NO: 1420072 - RNA, 19 nt, Artificial Sequence
  Description of Artificial Sequence: Synthetic oligonucleotide
aaacggagacuguugaagc

SEQ ID NO: 1420073 - RNA, 19 nt, Artificial Sequence
  Description of Artificial Sequence: Synthetic oligonucleotide
uuaaaaguagcaaaggcau

SEQ ID NO: 1420074 - RNA, 19 nt, Artificial Sequence
  Description of Artificial Sequence: Synthetic oligonucleotide
uuagaaaagaggaugauuu

SEQ ID NO: 1420075 - RNA, 19 nt, Artificial Sequence
  Description of Artificial Sequence: Synthetic oligonucleotide
agugucauaauuuugcucu

SEQ ID NO: 1420076 - RNA, 19 nt, Artificial Sequence
  Description of Artificial Sequence: Synthetic oligonucleotide
caauguuuaauauaauggc

SEQ ID NO: 1420077 - RNA, 19 nt, Artificial Sequence
  Description of Artificial Sequence: Synthetic oligonucleotide
auucucuuagcauaauccc

SEQ ID NO: 1420078 - RNA, 19 nt, Artificial Sequence
  Description of Artificial Sequence: Synthetic oligonucleotide
auuuguaccacacagaauu

SEQ ID NO: 1420079 - RNA, 19 nt, Artificial Sequence
  Description of Artificial Sequence: Synthetic oligonucleotide
ucaaauuggauguuggggc

SEQ ID NO: 1420080 - RNA, 19 nt, Artificial Sequence
  Description of Artificial Sequence: Synthetic oligonucleotide
aucaauugagaaaacaggc

SEQ ID NO: 1420081 - RNA, 19 nt, Artificial Sequence
  Description of Artificial Sequence: Synthetic oligonucleotide
auguuuauauuccaucuac

SEQ ID NO: 1420082 - RNA, 19 nt, Artificial Sequence
  Description of Artificial Sequence: Synthetic oligonucleotide
accuuaaagacauggaagg

SEQ ID NO: 1420083 - RNA, 19 nt, Artificial Sequence
  Description of Artificial Sequence: Synthetic oligonucleotide
ucaaaugucgacaacucca

SEQ ID NO: 1420084 - RNA, 19 nt, Artificial Sequence
  Description of Artificial Sequence: Synthetic oligonucleotide
aaugaguuuaggcugauuu

SEQ ID NO: 1420085 - RNA, 19 nt, Artificial Sequence
  Description of Artificial Sequence: Synthetic oligonucleotide
caaucaauugagaaaacag

SEQ ID NO: 1420086 - RNA, 19 nt, Artificial Sequence
  Description of Artificial Sequence: Synthetic oligonucleotide
aauugagaaaacaggcacc

SEQ ID NO: 1420087 - RNA, 19 nt, Artificial Sequence
  Description of Artificial Sequence: Synthetic oligonucleotide
auuccaucuaccuugaaca

SEQ ID NO: 1420088 - RNA, 19 nt, Artificial Sequence
  Description of Artificial Sequence: Synthetic oligonucleotide
gaagcgauaucaaaugucg

SEQ ID NO: 1420089 - RNA, 19 nt, Artificial Sequence
  Description of Artificial Sequence: Synthetic oligonucleotide
uuuaacaguaucuccacga

SEQ ID NO: 1420090 - RNA, 19 nt, Artificial Sequence
  Description of Artificial Sequence: Synthetic oligonucleotide
cauagacaggauaugaggg

SEQ ID NO: 1420091 - RNA, 19 nt, Artificial Sequence
  Description of Artificial Sequence: Synthetic oligonucleotide
cauucucuuagcauaaucc

SEQ ID NO: 1420092 - RNA, 19 nt, Artificial Sequence
  Description of Artificial Sequence: Synthetic oligonucleotide
uuuugugugauuuacuaaa

SEQ ID NO: 1420093 - RNA, 19 nt, Artificial Sequence
  Description of Artificial Sequence: Synthetic oligonucleotide
aacugauuagaaaagagga

SEQ ID NO: 1420094 - RNA, 19 nt, Artificial Sequence
  Description of Artificial Sequence: Synthetic oligonucleotide
aaaucucugaacugauuag

SEQ ID NO: 1420095 - RNA, 19 nt, Artificial Sequence
  Description of Artificial Sequence: Synthetic oligonucleotide
auuaaaaucaauauauuau

SEQ ID NO: 1420096 - RNA, 19 nt, Artificial Sequence
  Description of Artificial Sequence: Synthetic oligonucleotide
ugauuagaaaagaggauga

SEQ ID NO: 1420097 - RNA, 19 nt, Artificial Sequence
  Description of Artificial Sequence: Synthetic oligonucleotide
aaacaggcaccuccaaagc

SEQ ID NO: 1420098 - RNA, 19 nt, Artificial Sequence
  Description of Artificial Sequence: Synthetic oligonucleotide
agcgauaucaaaugucgac

SEQ ID NO: 1420099 - RNA, 19 nt, Artificial Sequence
  Description of Artificial Sequence: Synthetic oligonucleotide
uucauauccuuugagaagc

SEQ ID NO: 1420100 - RNA, 19 nt, Artificial Sequence
  Description of Artificial Sequence: Synthetic oligonucleotide
aacaaauccuuaaaaguag

SEQ ID NO: 1420101 - RNA, 19 nt, Artificial Sequence
  Description of Artificial Sequence: Synthetic oligonucleotide
aaaacggagacuguugaag

SEQ ID NO: 1420102 - RNA, 19 nt, Artificial Sequence
  Description of Artificial Sequence: Synthetic oligonucleotide
ucacguaauucucugacug

SEQ ID NO: 1420103 - RNA, 19 nt, Artificial Sequence
  Description of Artificial Sequence: Synthetic oligonucleotide
ucaauugagaaaacaggca

SEQ ID NO: 1420104 - RNA, 19 nt, Artificial Sequence
  Description of Artificial Sequence: Synthetic oligonucleotide
ugugugauuuacuaaacaa

SEQ ID NO: 1420105 - RNA, 19 nt, Artificial Sequence
  Description of Artificial Sequence: Synthetic oligonucleotide
aucaaaugucgacaacucc

SEQ ID NO: 1420106 - RNA, 19 nt, Artificial Sequence
  Description of Artificial Sequence: Synthetic oligonucleotide
guucaugucgaauacauuc

SEQ ID NO: 1420107 - RNA, 19 nt, Artificial Sequence
  Description of Artificial Sequence: Synthetic oligonucleotide
ucauaauagcaaaauugug

SEQ ID NO: 1420108 - RNA, 19 nt, Artificial Sequence
  Description of Artificial Sequence: Synthetic oligonucleotide
uguaccacacagaauuucc

SEQ ID NO: 1420109 - RNA, 19 nt, Artificial Sequence
  Description of Artificial Sequence: Synthetic oligonucleotide
uuucacauaagcaaucaua

SEQ ID NO: 1420110 - RNA, 19 nt, Artificial Sequence
  Description of Artificial Sequence: Synthetic oligonucleotide
auuuucacaauuucugcug

SEQ ID NO: 1420111 - RNA, 19 nt, Artificial Sequence
  Description of Artificial Sequence: Synthetic oligonucleotide
uugaacaaucaauugagaa

SEQ ID NO: 1420112 - RNA, 19 nt, Artificial Sequence
  Description of Artificial Sequence: Synthetic oligonucleotide
aaagucuaucagcugcagg

SEQ ID NO: 1420113 - RNA, 19 nt, Artificial Sequence
  Description of Artificial Sequence: Synthetic oligonucleotide
ucgaaucuguuuaaucagg

SEQ ID NO: 1420114 - RNA, 19 nt, Artificial Sequence
  Description of Artificial Sequence: Synthetic oligonucleotide
uccuuugagaagcauagac

SEQ ID NO: 1420115 - RNA, 19 nt, Artificial Sequence
  Description of Artificial Sequence: Synthetic oligonucleotide
uguuuaauauaauggcuga

SEQ ID NO: 1420116 - RNA, 19 nt, Artificial Sequence
  Description of Artificial Sequence: Synthetic oligonucleotide
aauggcugauuucacauaa

SEQ ID NO: 1420117 - RNA, 19 nt, Artificial Sequence
  Description of Artificial Sequence: Synthetic oligonucleotide
aaugucgacaacuccacau

SEQ ID NO: 1420118 - RNA, 19 nt, Artificial Sequence
  Description of Artificial Sequence: Synthetic oligonucleotide
cuagcagcuuuaaagauug

SEQ ID NO: 1420119 - RNA, 19 nt, Artificial Sequence
  Description of Artificial Sequence: Synthetic oligonucleotide
caauugagaaaacaggcac

SEQ ID NO: 1420120 - RNA, 19 nt, Artificial Sequence
  Description of Artificial Sequence: Synthetic oligonucleotide
uugagaagcauagacagga

SEQ ID NO: 1420121 - RNA, 19 nt, Artificial Sequence
  Description of Artificial Sequence: Synthetic oligonucleotide
aaugcuugcggcuuucagu

SEQ ID NO: 1420122 - RNA, 19 nt, Artificial Sequence
  Description of Artificial Sequence: Synthetic oligonucleotide
uuugagaagcauagacagg

SEQ ID NO: 1420123 - RNA, 19 nt, Artificial Sequence
  Description of Artificial Sequence: Synthetic oligonucleotide
gucgaauacauucucuuag

SEQ ID NO: 1420124 - RNA, 19 nt, Artificial Sequence
  Description of Artificial Sequence: Synthetic oligonucleotide
cuuagcauaaucccacagc

SEQ ID NO: 1420125 - RNA, 19 nt, Artificial Sequence
  Description of Artificial Sequence: Synthetic oligonucleotide
ugagggugagaacugaugu

SEQ ID NO: 1420126 - RNA, 19 nt, Artificial Sequence
  Description of Artificial Sequence: Synthetic oligonucleotide
cugauuagaaaagaggaug

SEQ ID NO: 1420127 - RNA, 19 nt, Artificial Sequence
  Description of Artificial Sequence: Synthetic oligonucleotide
uauaauggcugauuucaca

SEQ ID NO: 1420128 - RNA, 19 nt, Artificial Sequence
  Description of Artificial Sequence: Synthetic oligonucleotide
ucggcuaucagugucacca

SEQ ID NO: 1420129 - RNA, 19 nt, Artificial Sequence
  Description of Artificial Sequence: Synthetic oligonucleotide
uccacauacuugaagaaau

SEQ ID NO: 1420130 - RNA, 19 nt, Artificial Sequence
  Description of Artificial Sequence: Synthetic oligonucleotide
caccuuaaagacauggaag

SEQ ID NO: 1420131 - RNA, 19 nt, Artificial Sequence
  Description of Artificial Sequence: Synthetic oligonucleotide
uuuauauuccaucuaccuu

SEQ ID NO: 1420132 - RNA, 19 nt, Artificial Sequence
  Description of Artificial Sequence: Synthetic oligonucleotide
gagauuucgacacuucuuc

SEQ ID NO: 1420133 - RNA, 19 nt, Artificial Sequence
  Description of Artificial Sequence: Synthetic oligonucleotide
uguugaagcagcacuguac

SEQ ID NO: 1420134 - RNA, 19 nt, Artificial Sequence
  Description of Artificial Sequence: Synthetic oligonucleotide
agcaaaauuguggcggucc

SEQ ID NO: 1420135 - RNA, 19 nt, Artificial Sequence
  Description of Artificial Sequence: Synthetic oligonucleotide
ugcaggucggcuaucagug

SEQ ID NO: 1420136 - RNA, 19 nt, Artificial Sequence
  Description of Artificial Sequence: Synthetic oligonucleotide
aaaauggccagguugucuu

SEQ ID NO: 1420137 - RNA, 19 nt, Artificial Sequence
  Description of Artificial Sequence: Synthetic oligonucleotide
ggucauaauagcaaaauug

SEQ ID NO: 1420138 - RNA, 19 nt, Artificial Sequence
  Description of Artificial Sequence: Synthetic oligonucleotide
uccuucauugauugcagag

SEQ ID NO: 1420139 - RNA, 19 nt, Artificial Sequence
  Description of Artificial Sequence: Synthetic oligonucleotide
accuugaacaaucaauuga

SEQ ID NO: 1420140 - RNA, 19 nt, Artificial Sequence
  Description of Artificial Sequence: Synthetic oligonucleotide
ugucacguaauucucugac

SEQ ID NO: 1420141 - RNA, 19 nt, Artificial Sequence
  Description of Artificial Sequence: Synthetic oligonucleotide
aauguuuauauuccaucua

SEQ ID NO: 1420142 - RNA, 19 nt, Artificial Sequence
  Description of Artificial Sequence: Synthetic oligonucleotide
ucuaucagcugcaggucgg

SEQ ID NO: 1420143 - RNA, 19 nt, Artificial Sequence
  Description of Artificial Sequence: Synthetic oligonucleotide
uggcugauuucacauaagc

SEQ ID NO: 1420144 - RNA, 19 nt, Artificial Sequence
  Description of Artificial Sequence: Synthetic oligonucleotide
uuucccucaaagucuauca

SEQ ID NO: 1420145 - RNA, 19 nt, Artificial Sequence
  Description of Artificial Sequence: Synthetic oligonucleotide
auguuuaauauaauggcug

SEQ ID NO: 1420146 - RNA, 19 nt, Artificial Sequence
  Description of Artificial Sequence: Synthetic oligonucleotide
cuggaaaucuguccaaugc

SEQ ID NO: 1420147 - RNA, 19 nt, Artificial Sequence
  Description of Artificial Sequence: Synthetic oligonucleotide
uaagaaguccgcuaccaac

SEQ ID NO: 1420148 - RNA, 19 nt, Artificial Sequence
  Description of Artificial Sequence: Synthetic oligonucleotide
gaagaaaucucugaacuga

SEQ ID NO: 1420149 - RNA, 19 nt, Artificial Sequence
  Description of Artificial Sequence: Synthetic oligonucleotide
ugaagcgauaucaaauguc

SEQ ID NO: 1420150 - RNA, 19 nt, Artificial Sequence
  Description of Artificial Sequence: Synthetic oligonucleotide
ucgacacuucuucugaagc

SEQ ID NO: 1420151 - RNA, 19 nt, Artificial Sequence
  Description of Artificial Sequence: Synthetic oligonucleotide
acaaauccuuaaaaguagc

SEQ ID NO: 1420152 - RNA, 19 nt, Artificial Sequence
  Description of Artificial Sequence: Synthetic oligonucleotide
agggugagaacugauguac

SEQ ID NO: 1420153 - RNA, 19 nt, Artificial Sequence
  Description of Artificial Sequence: Synthetic oligonucleotide
uggaaaucuguccaaugcu

SEQ ID NO: 1420154 - RNA, 19 nt, Artificial Sequence
  Description of Artificial Sequence: Synthetic oligonucleotide
uuugugugauuuacuaaac

SEQ ID NO: 1420155 - RNA, 19 nt, Artificial Sequence
  Description of Artificial Sequence: Synthetic oligonucleotide
aagugguucaugucgaaua

SEQ ID NO: 1420156 - RNA, 19 nt, Artificial Sequence
  Description of Artificial Sequence: Synthetic oligonucleotide
uuuaauauaauggcugauu

SEQ ID NO: 1420157 - RNA, 19 nt, Artificial Sequence
  Description of Artificial Sequence: Synthetic oligonucleotide
gauugcagagauuucgaca

SEQ ID NO: 1420158 - RNA, 19 nt, Artificial Sequence
  Description of Artificial Sequence: Synthetic oligonucleotide
uguuguugaauaucugggu

SEQ ID NO: 1420159 - RNA, 19 nt, Artificial Sequence
  Description of Artificial Sequence: Synthetic oligonucleotide
caagagauacuugugcucc

SEQ ID NO: 1420160 - RNA, 19 nt, Artificial Sequence
  Description of Artificial Sequence: Synthetic oligonucleotide
uugugugauuuacuaaaca

SEQ ID NO: 1420161 - RNA, 19 nt, Artificial Sequence
  Description of Artificial Sequence: Synthetic oligonucleotide
uuuacuaaacaaaggcauu

SEQ ID NO: 1420162 - RNA, 19 nt, Artificial Sequence
  Description of Artificial Sequence: Synthetic oligonucleotide
uaauauaauggcugauuuc

SEQ ID NO: 1420163 - RNA, 19 nt, Artificial Sequence
  Description of Artificial Sequence: Synthetic oligonucleotide
aaucucugaacugauuaga

SEQ ID NO: 1420164 - RNA, 19 nt, Artificial Sequence
  Description of Artificial Sequence: Synthetic oligonucleotide
gugauuuacuaaacaaagg

SEQ ID NO: 1420165 - RNA, 19 nt, Artificial Sequence
  Description of Artificial Sequence: Synthetic oligonucleotide
cuugucauuuguaccacac

SEQ ID NO: 1420166 - RNA, 19 nt, Artificial Sequence
  Description of Artificial Sequence: Synthetic oligonucleotide
uuugcucuaagaaguccgc

SEQ ID NO: 1420167 - RNA, 19 nt, Artificial Sequence
  Description of Artificial Sequence: Synthetic oligonucleotide
uugauugcagagauuucga

SEQ ID NO: 1420168 - RNA, 19 nt, Artificial Sequence
  Description of Artificial Sequence: Synthetic oligonucleotide
auguacuccacaguaggac

SEQ ID NO: 1420169 - RNA, 19 nt, Artificial Sequence
  Description of Artificial Sequence: Synthetic oligonucleotide
uuucccauucaaauguuua

SEQ ID NO: 1420170 - RNA, 19 nt, Artificial Sequence
  Description of Artificial Sequence: Synthetic oligonucleotide
ugcucagaaagcuuguguc

SEQ ID NO: 1420171 - RNA, 19 nt, Artificial Sequence
  Description of Artificial Sequence: Synthetic oligonucleotide
uccacaguaggacuccgug

SEQ ID NO: 1420172 - RNA, 19 nt, Artificial Sequence
  Description of Artificial Sequence: Synthetic oligonucleotide
auagacaggauaugagggu

SEQ ID NO: 1420173 - RNA, 19 nt, Artificial Sequence
  Description of Artificial Sequence: Synthetic oligonucleotide
ucuaagaaguccgcuacca

SEQ ID NO: 1420174 - RNA, 19 nt, Artificial Sequence
  Description of Artificial Sequence: Synthetic oligonucleotide
agcauaaucccacagcgua

SEQ ID NO: 1420175 - RNA, 19 nt, Artificial Sequence
  Description of Artificial Sequence: Synthetic oligonucleotide
cuuguuaacaaauccuuaa

SEQ ID NO: 1420176 - RNA, 19 nt, Artificial Sequence
  Description of Artificial Sequence: Synthetic oligonucleotide
accucucuuccuuuaguac

SEQ ID NO: 1420177 - RNA, 19 nt, Artificial Sequence
  Description of Artificial Sequence: Synthetic oligonucleotide
ccuugaacaaucaauugag

SEQ ID NO: 1420178 - RNA, 19 nt, Artificial Sequence
  Description of Artificial Sequence: Synthetic oligonucleotide
aguaggacuccgugcaccg

SEQ ID NO: 1420179 - RNA, 19 nt, Artificial Sequence
  Description of Artificial Sequence: Synthetic oligonucleotide
aagaaguccgcuaccaaca

SEQ ID NO: 1420180 - RNA, 19 nt, Artificial Sequence
  Description of Artificial Sequence: Synthetic oligonucleotide
agcuuuaaagauugucucu

SEQ ID NO: 1420181 - RNA, 19 nt, Artificial Sequence
  Description of Artificial Sequence: Synthetic oligonucleotide
auagugucauaauuuugcu

SEQ ID NO: 1420182 - RNA, 19 nt, Artificial Sequence
  Description of Artificial Sequence: Synthetic oligonucleotide
ucgacaacuccacauacuu

SEQ ID NO: 1420183 - RNA, 19 nt, Artificial Sequence
  Description of Artificial Sequence: Synthetic oligonucleotide
uuaacaguaucuccacgau

SEQ ID NO: 1420184 - RNA, 19 nt, Artificial Sequence
  Description of Artificial Sequence: Synthetic oligonucleotide
agcagcuuuaaagauuguc

SEQ ID NO: 1420185 - RNA, 19 nt, Artificial Sequence
  Description of Artificial Sequence: Synthetic oligonucleotide
aacggagacuguugaagca

SEQ ID NO: 1420186 - RNA, 19 nt, Artificial Sequence
  Description of Artificial Sequence: Synthetic oligonucleotide
cuuuaugucuuguuaacaa

SEQ ID NO: 1420187 - RNA, 19 nt, Artificial Sequence
  Description of Artificial Sequence: Synthetic oligonucleotide
cagcguaaggcaaucugcg

SEQ ID NO: 1420188 - RNA, 19 nt, Artificial Sequence
  Description of Artificial Sequence: Synthetic oligonucleotide
caaaugucgacaacuccac

SEQ ID NO: 1420189 - RNA, 19 nt, Artificial Sequence
  Description of Artificial Sequence: Synthetic oligonucleotide
uaaucccacagcguaaggc

SEQ ID NO: 1420190 - RNA, 19 nt, Artificial Sequence
  Description of Artificial Sequence: Synthetic oligonucleotide
uaccuugaacaaucaauug

SEQ ID NO: 1420191 - RNA, 19 nt, Artificial Sequence
  Description of Artificial Sequence: Synthetic oligonucleotide
aaauuggauguuggggcuc

SEQ ID NO: 1420192 - RNA, 19 nt, Artificial Sequence
  Description of Artificial Sequence: Synthetic oligonucleotide
uucccucaaagucuaucag

SEQ ID NO: 1420193 - RNA, 19 nt, Artificial Sequence
  Description of Artificial Sequence: Synthetic oligonucleotide
gauaucaaaugucgacaac

SEQ ID NO: 1420194 - RNA, 19 nt, Artificial Sequence
  Description of Artificial Sequence: Synthetic oligonucleotide
uccgcuaccaacacuuuau

SEQ ID NO: 1420195 - RNA, 19 nt, Artificial Sequence
  Description of Artificial Sequence: Synthetic oligonucleotide
agaaguccgcuaccaacac

SEQ ID NO: 1420196 - RNA, 19 nt, Artificial Sequence
  Description of Artificial Sequence: Synthetic oligonucleotide
ucuugugccagcugagcca

SEQ ID NO: 1420197 - RNA, 19 nt, Artificial Sequence
  Description of Artificial Sequence: Synthetic oligonucleotide
gacuugauuaaaaucaaua

SEQ ID NO: 1420198 - RNA, 19 nt, Artificial Sequence
  Description of Artificial Sequence: Synthetic oligonucleotide
gucuaucagcugcaggucg

SEQ ID NO: 1420199 - RNA, 19 nt, Artificial Sequence
  Description of Artificial Sequence: Synthetic oligonucleotide
ugucgacaacuccacauac

SEQ ID NO: 1420200 - RNA, 19 nt, Artificial Sequence
  Description of Artificial Sequence: Synthetic oligonucleotide
guuuauauuccaucuaccu

SEQ ID NO: 1420201 - RNA, 19 nt, Artificial Sequence
  Description of Artificial Sequence: Synthetic oligonucleotide
ucacauaagcaaucauaga

SEQ ID NO: 1420202 - RNA, 19 nt, Artificial Sequence
  Description of Artificial Sequence: Synthetic oligonucleotide
aaauuguggcgguccagga

SEQ ID NO: 1420203 - RNA, 19 nt, Artificial Sequence
  Description of Artificial Sequence: Synthetic oligonucleotide
gcuaccaacacuuuauguc

SEQ ID NO: 1420204 - RNA, 19 nt, Artificial Sequence
  Description of Artificial Sequence: Synthetic oligonucleotide
ucaauauggaaugcucaga

SEQ ID NO: 1420205 - RNA, 19 nt, Artificial Sequence
  Description of Artificial Sequence: Synthetic oligonucleotide
ucaugucgaauacauucuc

SEQ ID NO: 1420206 - RNA, 19 nt, Artificial Sequence
  Description of Artificial Sequence: Synthetic oligonucleotide
uaguacacugcucuugcau

SEQ ID NO: 1420207 - RNA, 19 nt, Artificial Sequence
  Description of Artificial Sequence: Synthetic oligonucleotide
aaucugcggggcuucauau

SEQ ID NO: 1420208 - RNA, 19 nt, Artificial Sequence
  Description of Artificial Sequence: Synthetic oligonucleotide
cacuuuaugucuuguuaac

SEQ ID NO: 1420209 - RNA, 19 nt, Artificial Sequence
  Description of Artificial Sequence: Synthetic oligonucleotide
uugucauuuguaccacaca

SEQ ID NO: 1420210 - RNA, 19 nt, Artificial Sequence
  Description of Artificial Sequence: Synthetic oligonucleotide
ggaugauuuuggcaagugg

SEQ ID NO: 1420211 - RNA, 19 nt, Artificial Sequence
  Description of Artificial Sequence: Synthetic oligonucleotide
auagcaaaauuguggcggu

SEQ ID NO: 1420212 - RNA, 19 nt, Artificial Sequence
  Description of Artificial Sequence: Synthetic oligonucleotide
gguaguucuucucaucagc

SEQ ID NO: 1420213 - RNA, 19 nt, Artificial Sequence
  Description of Artificial Sequence: Synthetic oligonucleotide
ugauugcagagauuucgac

SEQ ID NO: 1420214 - RNA, 19 nt, Artificial Sequence
  Description of Artificial Sequence: Synthetic oligonucleotide
ucucugaacugauuagaaa

SEQ ID NO: 1420215 - RNA, 19 nt, Artificial Sequence
  Description of Artificial Sequence: Synthetic oligonucleotide
uggucauaauagcaaaauu

SEQ ID NO: 1420216 - RNA, 19 nt, Artificial Sequence
  Description of Artificial Sequence: Synthetic oligonucleotide
aggauaugagggugagaac

SEQ ID NO: 1420217 - RNA, 19 nt, Artificial Sequence
  Description of Artificial Sequence: Synthetic oligonucleotide
agcguaaggcaaucugcgg

SEQ ID NO: 1420218 - RNA, 19 nt, Artificial Sequence
  Description of Artificial Sequence: Synthetic oligonucleotide
aaaugucgacaacuccaca

SEQ ID NO: 1420219 - RNA, 19 nt, Artificial Sequence
  Description of Artificial Sequence: Synthetic oligonucleotide
cauaaucccacagcguaag

SEQ ID NO: 1420220 - RNA, 19 nt, Artificial Sequence
  Description of Artificial Sequence: Synthetic oligonucleotide
uguugaauaucugggucac

SEQ ID NO: 1420221 - RNA, 19 nt, Artificial Sequence
  Description of Artificial Sequence: Synthetic oligonucleotide
acauggaaggcuucaaauu

SEQ ID NO: 1420222 - RNA, 19 nt, Artificial Sequence
  Description of Artificial Sequence: Synthetic oligonucleotide
uagugucauaauuuugcuc

SEQ ID NO: 1420223 - RNA, 19 nt, Artificial Sequence
  Description of Artificial Sequence: Synthetic oligonucleotide
uccacugcuguagagcucu

SEQ ID NO: 1420224 - RNA, 19 nt, Artificial Sequence
  Description of Artificial Sequence: Synthetic oligonucleotide
gaagcauagacaggauaug

SEQ ID NO: 1420225 - RNA, 19 nt, Artificial Sequence
  Description of Artificial Sequence: Synthetic oligonucleotide
uuauaccugcuuuuaucaa

SEQ ID NO: 1420226 - RNA, 19 nt, Artificial Sequence
  Description of Artificial Sequence: Synthetic oligonucleotide
cacguaauucucugacugc

SEQ ID NO: 1420227 - RNA, 19 nt, Artificial Sequence
  Description of Artificial Sequence: Synthetic oligonucleotide
gacuguugaagcagcacug

SEQ ID NO: 1420228 - RNA, 19 nt, Artificial Sequence
  Description of Artificial Sequence: Synthetic oligonucleotide
auggaaugcucagaaagcu

SEQ ID NO: 1420229 - RNA, 19 nt, Artificial Sequence
  Description of Artificial Sequence: Synthetic oligonucleotide
auauauuauucuagguuga

SEQ ID NO: 1420230 - RNA, 19 nt, Artificial Sequence
  Description of Artificial Sequence: Synthetic oligonucleotide
uuaccucucuuccuuuagu

SEQ ID NO: 1420231 - RNA, 19 nt, Artificial Sequence
  Description of Artificial Sequence: Synthetic oligonucleotide
acaguuaccucucuuccuu

SEQ ID NO: 1420232 - RNA, 19 nt, Artificial Sequence
  Description of Artificial Sequence: Synthetic oligonucleotide
aaggcaucugaagcgauau

SEQ ID NO: 1420233 - RNA, 19 nt, Artificial Sequence
  Description of Artificial Sequence: Synthetic oligonucleotide
aaguccgcuaccaacacuu

SEQ ID NO: 1420234 - RNA, 19 nt, Artificial Sequence
  Description of Artificial Sequence: Synthetic oligonucleotide
augucgaauacauucucuu

SEQ ID NO: 1420235 - RNA, 19 nt, Artificial Sequence
  Description of Artificial Sequence: Synthetic oligonucleotide
acuuuaugucuuguuaaca

SEQ ID NO: 1420236 - RNA, 19 nt, Artificial Sequence
  Description of Artificial Sequence: Synthetic oligonucleotide
ggaaugcucagaaagcuug

SEQ ID NO: 1420237 - RNA, 19 nt, Artificial Sequence
  Description of Artificial Sequence: Synthetic oligonucleotide
caauauauuauucuagguu

SEQ ID NO: 1420238 - RNA, 19 nt, Artificial Sequence
  Description of Artificial Sequence: Synthetic oligonucleotide
ucgucaucuguccuuuccu

SEQ ID NO: 1420239 - RNA, 19 nt, Artificial Sequence
  Description of Artificial Sequence: Synthetic oligonucleotide
agguaguucuucucaucag

SEQ ID NO: 1420240 - RNA, 19 nt, Artificial Sequence
  Description of Artificial Sequence: Synthetic oligonucleotide
aauuggauguuggggcucu

SEQ ID NO: 1420241 - RNA, 19 nt, Artificial Sequence
  Description of Artificial Sequence: Synthetic oligonucleotide
ugucgaauacauucucuua

SEQ ID NO: 1420242 - RNA, 19 nt, Artificial Sequence
  Description of Artificial Sequence: Synthetic oligonucleotide
caggauaugagggugagaa

SEQ ID NO: 1420243 - RNA, 19 nt, Artificial Sequence
  Description of Artificial Sequence: Synthetic oligonucleotide
gcguaaggcaaucugcggg

SEQ ID NO: 1420244 - RNA, 19 nt, Artificial Sequence
  Description of Artificial Sequence: Synthetic oligonucleotide
cucgucaucuguccuuucc

SEQ ID NO: 1420245 - RNA, 19 nt, Artificial Sequence
  Description of Artificial Sequence: Synthetic oligonucleotide
auaccugcuuuuaucaaug

SEQ ID NO: 1420246 - RNA, 19 nt, Artificial Sequence
  Description of Artificial Sequence: Synthetic oligonucleotide
agauuucgacacuucuucu

SEQ ID NO: 1420247 - RNA, 19 nt, Artificial Sequence
  Description of Artificial Sequence: Synthetic oligonucleotide
ucuggaguuauaccugcuu

SEQ ID NO: 1420248 - RNA, 19 nt, Artificial Sequence
  Description of Artificial Sequence: Synthetic oligonucleotide
auaucugggucacaucuuu

SEQ ID NO: 1420249 - RNA, 19 nt, Artificial Sequence
  Description of Artificial Sequence: Synthetic oligonucleotide
ugcucuaagaaguccgcua

SEQ ID NO: 1420250 - RNA, 19 nt, Artificial Sequence
  Description of Artificial Sequence: Synthetic oligonucleotide
uguacacauugggcaaugg

SEQ ID NO: 1420251 - RNA, 19 nt, Artificial Sequence
  Description of Artificial Sequence: Synthetic oligonucleotide
uuuucccauucaaauguuu

SEQ ID NO: 1420252 - RNA, 19 nt, Artificial Sequence
  Description of Artificial Sequence: Synthetic oligonucleotide
uaugagggugagaacugau

SEQ ID NO: 1420253 - RNA, 19 nt, Artificial Sequence
  Description of Artificial Sequence: Synthetic oligonucleotide
cacagcguaaggcaaucug

SEQ ID NO: 1420254 - RNA, 19 nt, Artificial Sequence
  Description of Artificial Sequence: Synthetic oligonucleotide
uagcauaaucccacagcgu

SEQ ID NO: 1420255 - RNA, 19 nt, Artificial Sequence
  Description of Artificial Sequence: Synthetic oligonucleotide
acaguaggacuccgugcac

SEQ ID NO: 1420256 - RNA, 19 nt, Artificial Sequence
  Description of Artificial Sequence: Synthetic oligonucleotide
aucuccacgauuggcugcg

SEQ ID NO: 1420257 - RNA, 19 nt, Artificial Sequence
  Description of Artificial Sequence: Synthetic oligonucleotide
uuuguaccacacagaauuu

SEQ ID NO: 1420258 - RNA, 19 nt, Artificial Sequence
  Description of Artificial Sequence: Synthetic oligonucleotide
acguaauucucugacugca

SEQ ID NO: 1420259 - RNA, 19 nt, Artificial Sequence
  Description of Artificial Sequence: Synthetic oligonucleotide
ugaauaucugggucacauc

SEQ ID NO: 1420260 - RNA, 19 nt, Artificial Sequence
  Description of Artificial Sequence: Synthetic oligonucleotide
ucuacuugguggccugggu

SEQ ID NO: 1420261 - RNA, 19 nt, Artificial Sequence
  Description of Artificial Sequence: Synthetic oligonucleotide
gcuucauauccuuugagaa

SEQ ID NO: 1420262 - RNA, 19 nt, Artificial Sequence
  Description of Artificial Sequence: Synthetic oligonucleotide
cuaccaacacuuuaugucu

SEQ ID NO: 1420263 - RNA, 19 nt, Artificial Sequence
  Description of Artificial Sequence: Synthetic oligonucleotide
uuaguacacugcucuugca

SEQ ID NO: 1420264 - RNA, 19 nt, Artificial Sequence
  Description of Artificial Sequence: Synthetic oligonucleotide
acggagacuguugaagcag

SEQ ID NO: 1420265 - RNA, 19 nt, Artificial Sequence
  Description of Artificial Sequence: Synthetic oligonucleotide
acugauuagaaaagaggau

SEQ ID NO: 1420266 - RNA, 19 nt, Artificial Sequence
  Description of Artificial Sequence: Synthetic oligonucleotide
acugcucuugcaugaagaa

SEQ ID NO: 1420267 - RNA, 19 nt, Artificial Sequence
  Description of Artificial Sequence: Synthetic oligonucleotide
gugugauuuacuaaacaaa

SEQ ID NO: 1420268 - RNA, 19 nt, Artificial Sequence
  Description of Artificial Sequence: Synthetic oligonucleotide
gaaucuguuuaaucaggua

SEQ ID NO: 1420269 - RNA, 19 nt, Artificial Sequence
  Description of Artificial Sequence: Synthetic oligonucleotide
uaccucucuuccuuuagua

SEQ ID NO: 1420270 - RNA, 19 nt, Artificial Sequence
  Description of Artificial Sequence: Synthetic oligonucleotide
uggaaugcucagaaagcuu

SEQ ID NO: 1420271 - RNA, 19 nt, Artificial Sequence
  Description of Artificial Sequence: Synthetic oligonucleotide
uuguaccacacagaauuuc

SEQ ID NO: 1420272 - RNA, 19 nt, Artificial Sequence
  Description of Artificial Sequence: Synthetic oligonucleotide
ugggugaccaagguccagc

SEQ ID NO: 1420273 - RNA, 19 nt, Artificial Sequence
  Description of Artificial Sequence: Synthetic oligonucleotide
accagcaguccacugcugu

SEQ ID NO: 1420274 - RNA, 19 nt, Artificial Sequence
  Description of Artificial Sequence: Synthetic oligonucleotide
uaauggcugauuucacaua

SEQ ID NO: 1420275 - RNA, 19 nt, Artificial Sequence
  Description of Artificial Sequence: Synthetic oligonucleotide
gaagcugcucagaaauuca

SEQ ID NO: 1420276 - RNA, 19 nt, Artificial Sequence
  Description of Artificial Sequence: Synthetic oligonucleotide
ugagaagcauagacaggau

SEQ ID NO: 1420277 - RNA, 19 nt, Artificial Sequence
  Description of Artificial Sequence: Synthetic oligonucleotide
uaggacuccgugcaccgau

SEQ ID NO: 1420278 - RNA, 19 nt, Artificial Sequence
  Description of Artificial Sequence: Synthetic oligonucleotide
auaagcaaucauagacuug

SEQ ID NO: 1420279 - RNA, 19 nt, Artificial Sequence
  Description of Artificial Sequence: Synthetic oligonucleotide
agaaagcuugugucuucug

SEQ ID NO: 1420280 - RNA, 19 nt, Artificial Sequence
  Description of Artificial Sequence: Synthetic oligonucleotide
ugucauaauuuugcucuaa

SEQ ID NO: 1420281 - RNA, 19 nt, Artificial Sequence
  Description of Artificial Sequence: Synthetic oligonucleotide
cauugauugcagagauuuc

SEQ ID NO: 1420282 - RNA, 19 nt, Artificial Sequence
  Description of Artificial Sequence: Synthetic oligonucleotide
caccgaucugucuucucag

SEQ ID NO: 1420283 - RNA, 19 nt, Artificial Sequence
  Description of Artificial Sequence: Synthetic oligonucleotide
cugcuuuuaucaauguuua

SEQ ID NO: 1420284 - RNA, 19 nt, Artificial Sequence
  Description of Artificial Sequence: Synthetic oligonucleotide
gagauacuugugcuccuuc

SEQ ID NO: 1420285 - RNA, 19 nt, Artificial Sequence
  Description of Artificial Sequence: Synthetic oligonucleotide
caaugcuugcggcuuucag

SEQ ID NO: 1420286 - RNA, 19 nt, Artificial Sequence
  Description of Artificial Sequence: Synthetic oligonucleotide
aagcgauaucaaaugucga

SEQ ID NO: 1420287 - RNA, 19 nt, Artificial Sequence
  Description of Artificial Sequence: Synthetic oligonucleotide
augucgacaacuccacaua

SEQ ID NO: 1420288 - RNA, 19 nt, Artificial Sequence
  Description of Artificial Sequence: Synthetic oligonucleotide
auauuauucuagguugauu

SEQ ID NO: 1420289 - RNA, 19 nt, Artificial Sequence
  Description of Artificial Sequence: Synthetic oligonucleotide
gauguacuccacaguagga

SEQ ID NO: 1420290 - RNA, 19 nt, Artificial Sequence
  Description of Artificial Sequence: Synthetic oligonucleotide
uccacgauuggcugcguuu

SEQ ID NO: 1420291 - RNA, 19 nt, Artificial Sequence
  Description of Artificial Sequence: Synthetic oligonucleotide
uuuccaaaauggccagguu

SEQ ID NO: 1420292 - RNA, 19 nt, Artificial Sequence
  Description of Artificial Sequence: Synthetic oligonucleotide
gcucuaagaaguccgcuac

SEQ ID NO: 1420293 - RNA, 19 nt, Artificial Sequence
  Description of Artificial Sequence: Synthetic oligonucleotide
ggcuccuugucauuuguac

SEQ ID NO: 1420294 - RNA, 19 nt, Artificial Sequence
  Description of Artificial Sequence: Synthetic oligonucleotide
acuccgugcaccgaucugu

SEQ ID NO: 1420295 - RNA, 19 nt, Artificial Sequence
  Description of Artificial Sequence: Synthetic oligonucleotide
uuguggcgguccaggauca

SEQ ID NO: 1420296 - RNA, 19 nt, Artificial Sequence
  Description of Artificial Sequence: Synthetic oligonucleotide
ggauaugagggugagaacu

SEQ ID NO: 1420297 - RNA, 19 nt, Artificial Sequence
  Description of Artificial Sequence: Synthetic oligonucleotide
augagggugagaacugaug

SEQ ID NO: 1420298 - RNA, 19 nt, Artificial Sequence
  Description of Artificial Sequence: Synthetic oligonucleotide
aucuaccuugaacaaucaa

SEQ ID NO: 1420299 - RNA, 19 nt, Artificial Sequence
  Description of Artificial Sequence: Synthetic oligonucleotide
ucacugcucagcacaguua

SEQ ID NO: 1420300 - RNA, 19 nt, Artificial Sequence
  Description of Artificial Sequence: Synthetic oligonucleotide
cuccccauucuguuccaag

SEQ ID NO: 1420301 - RNA, 19 nt, Artificial Sequence
  Description of Artificial Sequence: Synthetic oligonucleotide
ugcagagauuucgacacuu

SEQ ID NO: 1420302 - RNA, 19 nt, Artificial Sequence
  Description of Artificial Sequence: Synthetic oligonucleotide
auggagacaaagggcuguc

SEQ ID NO: 1420303 - RNA, 19 nt, Artificial Sequence
  Description of Artificial Sequence: Synthetic oligonucleotide
cacaauuucugcuggauuu

SEQ ID NO: 1420304 - RNA, 19 nt, Artificial Sequence
  Description of Artificial Sequence: Synthetic oligonucleotide
aagguccagcucuggaguu

SEQ ID NO: 1420305 - RNA, 19 nt, Artificial Sequence
  Description of Artificial Sequence: Synthetic oligonucleotide
aggcaucugaagcgauauc

SEQ ID NO: 1420306 - RNA, 19 nt, Artificial Sequence
  Description of Artificial Sequence: Synthetic oligonucleotide
agagauuucgacacuucuu

SEQ ID NO: 1420307 - RNA, 19 nt, Artificial Sequence
  Description of Artificial Sequence: Synthetic oligonucleotide
gauugucucuuugucacgu

SEQ ID NO: 1420308 - RNA, 19 nt, Artificial Sequence
  Description of Artificial Sequence: Synthetic oligonucleotide
cuguuuaaucagguaguuc

SEQ ID NO: 1420309 - RNA, 19 nt, Artificial Sequence
  Description of Artificial Sequence: Synthetic oligonucleotide
acugcucagcacaguuacc

SEQ ID NO: 1420310 - RNA, 19 nt, Artificial Sequence
  Description of Artificial Sequence: Synthetic oligonucleotide
uaccugcuuuuaucaaugu

SEQ ID NO: 1420311 - RNA, 19 nt, Artificial Sequence
  Description of Artificial Sequence: Synthetic oligonucleotide
uugcagagauuucgacacu

SEQ ID NO: 1420312 - RNA, 19 nt, Artificial Sequence
  Description of Artificial Sequence: Synthetic oligonucleotide
cguaaggcaaucugcgggg

SEQ ID NO: 1420313 - RNA, 19 nt, Artificial Sequence
  Description of Artificial Sequence: Synthetic oligonucleotide
aaggcaaucugcggggcuu

SEQ ID NO: 1420314 - RNA, 19 nt, Artificial Sequence
  Description of Artificial Sequence: Synthetic oligonucleotide
gcagggcccgucuucacgg

SEQ ID NO: 1420315 - RNA, 19 nt, Artificial Sequence
  Description of Artificial Sequence: Synthetic oligonucleotide
uccuucuacuugguggccu

SEQ ID NO: 1420316 - RNA, 19 nt, Artificial Sequence
  Description of Artificial Sequence: Synthetic oligonucleotide
accugcuuuuaucaauguu

SEQ ID NO: 1420317 - RNA, 19 nt, Artificial Sequence
  Description of Artificial Sequence: Synthetic oligonucleotide
aguuaccucucuuccuuua

SEQ ID NO: 1420318 - RNA, 19 nt, Artificial Sequence
  Description of Artificial Sequence: Synthetic oligonucleotide
uugcucuaagaaguccgcu

SEQ ID NO: 1420319 - RNA, 19 nt, Artificial Sequence
  Description of Artificial Sequence: Synthetic oligonucleotide
uccuugucauuuguaccac

SEQ ID NO: 1420320 - RNA, 19 nt, Artificial Sequence
  Description of Artificial Sequence: Synthetic oligonucleotide
cugcguuuugugagggcug

SEQ ID NO: 1420321 - RNA, 19 nt, Artificial Sequence
  Description of Artificial Sequence: Synthetic oligonucleotide
ugucaccagcaguccacug

SEQ ID NO: 1420322 - RNA, 19 nt, Artificial Sequence
  Description of Artificial Sequence: Synthetic oligonucleotide
caaauuggauguuggggcu

SEQ ID NO: 1420323 - RNA, 19 nt, Artificial Sequence
  Description of Artificial Sequence: Synthetic oligonucleotide
ucccacagcguaaggcaau

SEQ ID NO: 1420324 - RNA, 19 nt, Artificial Sequence
  Description of Artificial Sequence: Synthetic oligonucleotide
gcgauaucaaaugucgaca

SEQ ID NO: 1420325 - RNA, 19 nt, Artificial Sequence
  Description of Artificial Sequence: Synthetic oligonucleotide
uggguucccuccccauucu

SEQ ID NO: 1420326 - RNA, 19 nt, Artificial Sequence
  Description of Artificial Sequence: Synthetic oligonucleotide
gacuccgugcaccgaucug

SEQ ID NO: 1420327 - RNA, 19 nt, Artificial Sequence
  Description of Artificial Sequence: Synthetic oligonucleotide
gcagcuuuaaagauugucu

SEQ ID NO: 1420328 - RNA, 19 nt, Artificial Sequence
  Description of Artificial Sequence: Synthetic oligonucleotide
guacuccacaguaggacuc

SEQ ID NO: 1420329 - RNA, 19 nt, Artificial Sequence
  Description of Artificial Sequence: Synthetic oligonucleotide
gauuagaaaagaggaugau

SEQ ID NO: 1420330 - RNA, 19 nt, Artificial Sequence
  Description of Artificial Sequence: Synthetic oligonucleotide
cuaucagcugcaggucggc

SEQ ID NO: 1420331 - RNA, 19 nt, Artificial Sequence
  Description of Artificial Sequence: Synthetic oligonucleotide
agggcccgucuucacgggg

SEQ ID NO: 1420332 - RNA, 19 nt, Artificial Sequence
  Description of Artificial Sequence: Synthetic oligonucleotide
guaaggcaaucugcggggc

SEQ ID NO: 1420333 - RNA, 19 nt, Artificial Sequence
  Description of Artificial Sequence: Synthetic oligonucleotide
ccucucuuccuuuaguaca

SEQ ID NO: 1420334 - RNA, 19 nt, Artificial Sequence
  Description of Artificial Sequence: Synthetic oligonucleotide
acgauuggcugcguuuugu

SEQ ID NO: 1420335 - RNA, 19 nt, Artificial Sequence
  Description of Artificial Sequence: Synthetic oligonucleotide
ucacggggcugcuuucuuc

SEQ ID NO: 1420336 - RNA, 19 nt, Artificial Sequence
  Description of Artificial Sequence: Synthetic oligonucleotide
cuaagaaguccgcuaccaa

SEQ ID NO: 1420337 - RNA, 19 nt, Artificial Sequence
  Description of Artificial Sequence: Synthetic oligonucleotide
ggcuaucagugucaccagc

SEQ ID NO: 1420338 - RNA, 19 nt, Artificial Sequence
  Description of Artificial Sequence: Synthetic oligonucleotide
auggcugauuucacauaag

SEQ ID NO: 1420339 - RNA, 19 nt, Artificial Sequence
  Description of Artificial Sequence: Synthetic oligonucleotide
ggcuucaaauuggauguug

SEQ ID NO: 1420340 - RNA, 19 nt, Artificial Sequence
  Description of Artificial Sequence: Synthetic oligonucleotide
cucuuagcauaaucccaca

SEQ ID NO: 1420341 - RNA, 19 nt, Artificial Sequence
  Description of Artificial Sequence: Synthetic oligonucleotide
caucuaccuugaacaauca

SEQ ID NO: 1420342 - RNA, 19 nt, Artificial Sequence
  Description of Artificial Sequence: Synthetic oligonucleotide
ccacaguaggacuccgugc

SEQ ID NO: 1420343 - RNA, 19 nt, Artificial Sequence
  Description of Artificial Sequence: Synthetic oligonucleotide
cuguacacauugggcaaug

SEQ ID NO: 1420344 - RNA, 19 nt, Artificial Sequence
  Description of Artificial Sequence: Synthetic oligonucleotide
ggcagggcccgucuucacg

SEQ ID NO: 1420345 - RNA, 19 nt, Artificial Sequence
  Description of Artificial Sequence: Synthetic oligonucleotide
cacggggcugcuuucuuca

SEQ ID NO: 1420346 - RNA, 19 nt, Artificial Sequence
  Description of Artificial Sequence: Synthetic oligonucleotide
gcuaucagugucaccagca

SEQ ID NO: 1420347 - RNA, 19 nt, Artificial Sequence
  Description of Artificial Sequence: Synthetic oligonucleotide
cugaagcgauaucaaaugu

SEQ ID NO: 1420348 - RNA, 19 nt, Artificial Sequence
  Description of Artificial Sequence: Synthetic oligonucleotide
auugucucuuugucacgua

SEQ ID NO: 1420349 - RNA, 19 nt, Artificial Sequence
  Description of Artificial Sequence: Synthetic oligonucleotide
agauggguucccuccccau

SEQ ID NO: 1420350 - RNA, 19 nt, Artificial Sequence
  Description of Artificial Sequence: Synthetic oligonucleotide
agaaaucucugaacugauu

SEQ ID NO: 1420351 - RNA, 19 nt, Artificial Sequence
  Description of Artificial Sequence: Synthetic oligonucleotide
gcaccgaucugucuucuca

SEQ ID NO: 1420352 - RNA, 19 nt, Artificial Sequence
  Description of Artificial Sequence: Synthetic oligonucleotide
gaccaagguccagcucugg

SEQ ID NO: 1420353 - RNA, 19 nt, Artificial Sequence
  Description of Artificial Sequence: Synthetic oligonucleotide
gucacguaauucucugacu

SEQ ID NO: 1420354 - RNA, 19 nt, Artificial Sequence
  Description of Artificial Sequence: Synthetic oligonucleotide
uugcggcuuucagucacug

SEQ ID NO: 1420355 - RNA, 19 nt, Artificial Sequence
  Description of Artificial Sequence: Synthetic oligonucleotide
ucaaugaguuuaggcugau

SEQ ID NO: 1420356 - RNA, 19 nt, Artificial Sequence
  Description of Artificial Sequence: Synthetic oligonucleotide
uagcagcuuuaaagauugu

SEQ ID NO: 1420357 - RNA, 19 nt, Artificial Sequence
  Description of Artificial Sequence: Synthetic oligonucleotide
uucacggggcugcuuucuu

SEQ ID NO: 1420358 - RNA, 19 nt, Artificial Sequence
  Description of Artificial Sequence: Synthetic oligonucleotide
cacgauuggcugcguuuug

SEQ ID NO: 1420359 - RNA, 19 nt, Artificial Sequence
  Description of Artificial Sequence: Synthetic oligonucleotide
ugcucgucaucuguccuuu

SEQ ID NO: 1420360 - RNA, 19 nt, Artificial Sequence
  Description of Artificial Sequence: Synthetic oligonucleotide
uccgugcaccgaucugucu

SEQ ID NO: 1420361 - RNA, 19 nt, Artificial Sequence
  Description of Artificial Sequence: Synthetic oligonucleotide
uagcaaaauuguggcgguc

SEQ ID NO: 1420362 - RNA, 19 nt, Artificial Sequence
  Description of Artificial Sequence: Synthetic oligonucleotide
cuccgugcaccgaucuguc

SEQ ID NO: 1420363 - RNA, 19 nt, Artificial Sequence
  Description of Artificial Sequence: Synthetic oligonucleotide
gugucauaauuuugcucua

SEQ ID NO: 1420364 - RNA, 19 nt, Artificial Sequence
  Description of Artificial Sequence: Synthetic oligonucleotide
gcugucagggcagggcccg

SEQ ID NO: 1420365 - RNA, 19 nt, Artificial Sequence
  Description of Artificial Sequence: Synthetic oligonucleotide
acaggauaugagggugaga

SEQ ID NO: 1420366 - RNA, 19 nt, Artificial Sequence
  Description of Artificial Sequence: Synthetic oligonucleotide
aggacuccgugcaccgauc

SEQ ID NO: 1420367 - RNA, 19 nt, Artificial Sequence
  Description of Artificial Sequence: Synthetic oligonucleotide
guggcgguccaggaucagc

SEQ ID NO: 1420368 - RNA, 19 nt, Artificial Sequence
  Description of Artificial Sequence: Synthetic oligonucleotide
ggaguuauaccugcuuuua

SEQ ID NO: 1420369 - RNA, 19 nt, Artificial Sequence
  Description of Artificial Sequence: Synthetic oligonucleotide
caaucugcggggcuucaua

SEQ ID NO: 1420370 - RNA, 19 nt, Artificial Sequence
  Description of Artificial Sequence: Synthetic oligonucleotide
gucggcuaucagugucacc

SEQ ID NO: 1420371 - RNA, 19 nt, Artificial Sequence
  Description of Artificial Sequence: Synthetic oligonucleotide
gcucagaaagcuugugucu

SEQ ID NO: 1420372 - RNA, 19 nt, Artificial Sequence
  Description of Artificial Sequence: Synthetic oligonucleotide
acaacuccacauacuugaa

SEQ ID NO: 1420373 - RNA, 19 nt, Artificial Sequence
  Description of Artificial Sequence: Synthetic oligonucleotide
cauuuguaccacacagaau

SEQ ID NO: 1420374 - RNA, 19 nt, Artificial Sequence
  Description of Artificial Sequence: Synthetic oligonucleotide
guugaauaucugggucaca

SEQ ID NO: 1420375 - RNA, 19 nt, Artificial Sequence
  Description of Artificial Sequence: Synthetic oligonucleotide
ggggcugcuuucuucaagu

SEQ ID NO: 1420376 - RNA, 19 nt, Artificial Sequence
  Description of Artificial Sequence: Synthetic oligonucleotide
guccgcuaccaacacuuua

SEQ ID NO: 1420377 - RNA, 19 nt, Artificial Sequence
  Description of Artificial Sequence: Synthetic oligonucleotide
gauggguucccuccccauu

SEQ ID NO: 1420378 - RNA, 19 nt, Artificial Sequence
  Description of Artificial Sequence: Synthetic oligonucleotide
cggagacuguugaagcagc

SEQ ID NO: 1420379 - RNA, 19 nt, Artificial Sequence
  Description of Artificial Sequence: Synthetic oligonucleotide
uuggggcucuugucucgaa

SEQ ID NO: 1420380 - RNA, 19 nt, Artificial Sequence
  Description of Artificial Sequence: Synthetic oligonucleotide
guuggggcucuugucucga

SEQ ID NO: 1420381 - RNA, 19 nt, Artificial Sequence
  Description of Artificial Sequence: Synthetic oligonucleotide
cgacaacuccacauacuug

SEQ ID NO: 1420382 - RNA, 19 nt, Artificial Sequence
  Description of Artificial Sequence: Synthetic oligonucleotide
ggagacuguugaagcagca

SEQ ID NO: 1420383 - RNA, 19 nt, Artificial Sequence
  Description of Artificial Sequence: Synthetic oligonucleotide
cgauuggcugcguuuugug

SEQ ID NO: 1420384 - RNA, 19 nt, Artificial Sequence
  Description of Artificial Sequence: Synthetic oligonucleotide
gcauaaucccacagcguaa

SEQ ID NO: 1420385 - RNA, 19 nt, Artificial Sequence
  Description of Artificial Sequence: Synthetic oligonucleotide
agguccagcucuggaguua

SEQ ID NO: 1420386 - RNA, 19 nt, Artificial Sequence
  Description of Artificial Sequence: Synthetic oligonucleotide
acggggcugcuuucuucaa

SEQ ID NO: 1420387 - RNA, 19 nt, Artificial Sequence
  Description of Artificial Sequence: Synthetic oligonucleotide
cacacagaauuuccuucau

SEQ ID NO: 1420388 - RNA, 19 nt, Artificial Sequence
  Description of Artificial Sequence: Synthetic oligonucleotide
ggucggcuaucagugucac

SEQ ID NO: 1420389 - RNA, 19 nt, Artificial Sequence
  Description of Artificial Sequence: Synthetic oligonucleotide
ccuugucauuuguaccaca

SEQ ID NO: 1420390 - RNA, 19 nt, Artificial Sequence
  Description of Artificial Sequence: Synthetic oligonucleotide
gguucucuggcuugcugau

SEQ ID NO: 1420391 - RNA, 19 nt, Artificial Sequence
  Description of Artificial Sequence: Synthetic oligonucleotide
cuugcggcuuucagucacu

SEQ ID NO: 1420392 - RNA, 19 nt, Artificial Sequence
  Description of Artificial Sequence: Synthetic oligonucleotide
guaggacuccgugcaccga

SEQ ID NO: 1420393 - RNA, 19 nt, Artificial Sequence
  Description of Artificial Sequence: Synthetic oligonucleotide
cagcucaccuagcagcuuu

SEQ ID NO: 1420394 - RNA, 19 nt, Artificial Sequence
  Description of Artificial Sequence: Synthetic oligonucleotide
agcucaccuagcagcuuua

SEQ ID NO: 1420395 - RNA, 19 nt, Artificial Sequence
  Description of Artificial Sequence: Synthetic oligonucleotide
aguccgcuaccaacacuuu

SEQ ID NO: 1420396 - RNA, 19 nt, Artificial Sequence
  Description of Artificial Sequence: Synthetic oligonucleotide
cccacagcguaaggcaauc

SEQ ID NO: 1420397 - RNA, 19 nt, Artificial Sequence
  Description of Artificial Sequence: Synthetic oligonucleotide
ggggcuccuugucauuugu

SEQ ID NO: 1420398 - RNA, 19 nt, Artificial Sequence
  Description of Artificial Sequence: Synthetic oligonucleotide
cggcuaucagugucaccag

SEQ ID NO: 1420399 - RNA, 19 nt, Artificial Sequence
  Description of Artificial Sequence: Synthetic oligonucleotide
gggugagaacugauguacu

SEQ ID NO: 1420400 - RNA, 19 nt, Artificial Sequence
  Description of Artificial Sequence: Synthetic oligonucleotide
caguuaccucucuuccuuu

SEQ ID NO: 1420401 - RNA, 19 nt, Artificial Sequence
  Description of Artificial Sequence: Synthetic oligonucleotide
guccaaugcuugcggcuuu

SEQ ID NO: 1420402 - RNA, 19 nt, Artificial Sequence
  Description of Artificial Sequence: Synthetic oligonucleotide
gcucgucaucuguccuuuc

SEQ ID NO: 1420403 - RNA, 19 nt, Artificial Sequence
  Description of Artificial Sequence: Synthetic oligonucleotide
ggcaaucugcggggcuuca

SEQ ID NO: 1420404 - RNA, 19 nt, Artificial Sequence
  Description of Artificial Sequence: Synthetic oligonucleotide
cgcuaccaacacuuuaugu

SEQ ID NO: 1420405 - RNA, 19 nt, Artificial Sequence
  Description of Artificial Sequence: Synthetic oligonucleotide
cagcacaguuaccucucuu

SEQ ID NO: 1420406 - RNA, 19 nt, Artificial Sequence
  Description of Artificial Sequence: Synthetic oligonucleotide
gcucaccuagcagcuuuaa

SEQ ID NO: 1420407 - RNA, 19 nt, Artificial Sequence
  Description of Artificial Sequence: Synthetic oligonucleotide
gggcagggcccgucuucac

SEQ ID NO: 1420408 - RNA, 19 nt, Artificial Sequence
  Description of Artificial Sequence: Synthetic oligonucleotide
ccaaugcuugcggcuuuca

SEQ ID NO: 1420409 - RNA, 19 nt, Artificial Sequence
  Description of Artificial Sequence: Synthetic oligonucleotide
cuccacgauuggcugcguu

SEQ ID NO: 1420410 - RNA, 19 nt, Artificial Sequence
  Description of Artificial Sequence: Synthetic oligonucleotide
ccgugcaccgaucugucuu

SEQ ID NO: 1420411 - RNA, 19 nt, Artificial Sequence
  Description of Artificial Sequence: Synthetic oligonucleotide
gggcuccuugucauuugua

SEQ ID NO: 1420412 - RNA, 19 nt, Artificial Sequence
  Description of Artificial Sequence: Synthetic oligonucleotide
ggcccgucuucacggggcu

SEQ ID NO: 1420413 - RNA, 19 nt, Artificial Sequence
  Description of Artificial Sequence: Synthetic oligonucleotide
ccacgauuggcugcguuuu

SEQ ID NO: 1420414 - RNA, 19 nt, Artificial Sequence
  Description of Artificial Sequence: Synthetic oligonucleotide
gcaaucugcggggcuucau

SEQ ID NO: 1420415 - RNA, 19 nt, Artificial Sequence
  Description of Artificial Sequence: Synthetic oligonucleotide
ccacugcuguagagcucuu

SEQ ID NO: 1420416 - RNA, 19 nt, Artificial Sequence
  Description of Artificial Sequence: Synthetic oligonucleotide
aggaauucgaaguggaggc

SEQ ID NO: 1420417 - RNA, 19 nt, Artificial Sequence
  Description of Artificial Sequence: Synthetic oligonucleotide
aaugcagcgcuucaguuuc

SEQ ID NO: 1420418 - RNA, 19 nt, Artificial Sequence
  Description of Artificial Sequence: Synthetic oligonucleotide
uuagccuuaaggaaggaug

SEQ ID NO: 1420419 - RNA, 19 nt, Artificial Sequence
  Description of Artificial Sequence: Synthetic oligonucleotide
aaaaggagggccucccacc

SEQ ID NO: 1420420 - RNA, 19 nt, Artificial Sequence
  Description of Artificial Sequence: Synthetic oligonucleotide
ucaucauucaccucauugc

SEQ ID NO: 1420421 - RNA, 19 nt, Artificial Sequence
  Description of Artificial Sequence: Synthetic oligonucleotide
agcugacaaagccauagcc

SEQ ID NO: 1420422 - RNA, 19 nt, Artificial Sequence
  Description of Artificial Sequence: Synthetic oligonucleotide
uuagagcagccauagagcc

SEQ ID NO: 1420423 - RNA, 19 nt, Artificial Sequence
  Description of Artificial Sequence: Synthetic oligonucleotide
gaugggaaccggcugaagg

SEQ ID NO: 1420424 - RNA, 19 nt, Artificial Sequence
  Description of Artificial Sequence: Synthetic oligonucleotide
aucaccuuagccuuaagga

SEQ ID NO: 1420425 - RNA, 19 nt, Artificial Sequence
  Description of Artificial Sequence: Synthetic oligonucleotide
agauccggaagucaucggc

SEQ ID NO: 1420426 - RNA, 19 nt, Artificial Sequence
  Description of Artificial Sequence: Synthetic oligonucleotide
gaucaccuuagccuuaagg

SEQ ID NO: 1420427 - RNA, 19 nt, Artificial Sequence
  Description of Artificial Sequence: Synthetic oligonucleotide
ucuccuucaggccuaaccc

SEQ ID NO: 1420428 - RNA, 19 nt, Artificial Sequence
  Description of Artificial Sequence: Synthetic oligonucleotide
uuaaggaaggaugggaacc

SEQ ID NO: 1420429 - RNA, 19 nt, Artificial Sequence
  Description of Artificial Sequence: Synthetic oligonucleotide
aaucgggcggaucacuggg

SEQ ID NO: 1420430 - RNA, 19 nt, Artificial Sequence
  Description of Artificial Sequence: Synthetic oligonucleotide
aagcugacaaagccauagc

SEQ ID NO: 1420431 - RNA, 19 nt, Artificial Sequence
  Description of Artificial Sequence: Synthetic oligonucleotide
gaagauccggaagucaucg

SEQ ID NO: 1420432 - RNA, 19 nt, Artificial Sequence
  Description of Artificial Sequence: Synthetic oligonucleotide
ucaggaacauggcuucucg

SEQ ID NO: 1420433 - RNA, 19 nt, Artificial Sequence
  Description of Artificial Sequence: Synthetic oligonucleotide
gaagcugacaaagccauag

SEQ ID NO: 1420434 - RNA, 19 nt, Artificial Sequence
  Description of Artificial Sequence: Synthetic oligonucleotide
uuucaagcgcuccucgccg

SEQ ID NO: 1420435 - RNA, 19 nt, Artificial Sequence
  Description of Artificial Sequence: Synthetic oligonucleotide
uucaucucacgcauggcgc

SEQ ID NO: 1420436 - RNA, 19 nt, Artificial Sequence
  Description of Artificial Sequence: Synthetic oligonucleotide
uucuccuucaggccuaacc

SEQ ID NO: 1420437 - RNA, 19 nt, Artificial Sequence
  Description of Artificial Sequence: Synthetic oligonucleotide
cuuguccucacccagcggc

SEQ ID NO: 1420438 - RNA, 19 nt, Artificial Sequence
  Description of Artificial Sequence: Synthetic oligonucleotide
uuuucgaagcuugaugggc

SEQ ID NO: 1420439 - RNA, 19 nt, Artificial Sequence
  Description of Artificial Sequence: Synthetic oligonucleotide
uaaggaaggaugggaaccg

SEQ ID NO: 1420440 - RNA, 19 nt, Artificial Sequence
  Description of Artificial Sequence: Synthetic oligonucleotide
caucauucaccucauugcc

SEQ ID NO: 1420441 - RNA, 19 nt, Artificial Sequence
  Description of Artificial Sequence: Synthetic oligonucleotide
ucuacggugggcaccgcgg

SEQ ID NO: 1420442 - RNA, 19 nt, Artificial Sequence
  Description of Artificial Sequence: Synthetic oligonucleotide
uucuuucaagcgcuccucg

SEQ ID NO: 1420443 - RNA, 19 nt, Artificial Sequence
  Description of Artificial Sequence: Synthetic oligonucleotide
ugcauggcuucuacggugg

SEQ ID NO: 1420444 - RNA, 19 nt, Artificial Sequence
  Description of Artificial Sequence: Synthetic oligonucleotide
uguugguggcgauaaucgg

SEQ ID NO: 1420445 - RNA, 19 nt, Artificial Sequence
  Description of Artificial Sequence: Synthetic oligonucleotide
caggaauucgaaguggagg

SEQ ID NO: 1420446 - RNA, 19 nt, Artificial Sequence
  Description of Artificial Sequence: Synthetic oligonucleotide
ugugggaaggagcuagcgc

SEQ ID NO: 1420447 - RNA, 19 nt, Artificial Sequence
  Description of Artificial Sequence: Synthetic oligonucleotide
gaucagcagggccaaagcc

SEQ ID NO: 1420448 - RNA, 19 nt, Artificial Sequence
  Description of Artificial Sequence: Synthetic oligonucleotide
auggcgcgcacauagucac

SEQ ID NO: 1420449 - RNA, 19 nt, Artificial Sequence
  Description of Artificial Sequence: Synthetic oligonucleotide
cuuaaggaaggaugggaac

SEQ ID NO: 1420450 - RNA, 19 nt, Artificial Sequence
  Description of Artificial Sequence: Synthetic oligonucleotide
ucaggaauucgaaguggag

SEQ ID NO: 1420451 - RNA, 19 nt, Artificial Sequence
  Description of Artificial Sequence: Synthetic oligonucleotide
guugguggcgauaaucggg

SEQ ID NO: 1420452 - RNA, 19 nt, Artificial Sequence
  Description of Artificial Sequence: Synthetic oligonucleotide
gaauucgaaguggaggcag

SEQ ID NO: 1420453 - RNA, 19 nt, Artificial Sequence
  Description of Artificial Sequence: Synthetic oligonucleotide
cuggacgcaggauaggggc

SEQ ID NO: 1420454 - RNA, 19 nt, Artificial Sequence
  Description of Artificial Sequence: Synthetic oligonucleotide
aaaggagggccucccacca

SEQ ID NO: 1420455 - RNA, 19 nt, Artificial Sequence
  Description of Artificial Sequence: Synthetic oligonucleotide
aagccauagcccuugguuu

SEQ ID NO: 1420456 - RNA, 19 nt, Artificial Sequence
  Description of Artificial Sequence: Synthetic oligonucleotide
uucgaagcuugaugggccg

SEQ ID NO: 1420457 - RNA, 19 nt, Artificial Sequence
  Description of Artificial Sequence: Synthetic oligonucleotide
uucucgagccucaggacug

SEQ ID NO: 1420458 - RNA, 19 nt, Artificial Sequence
  Description of Artificial Sequence: Synthetic oligonucleotide
uccggcucaggcaagggca

SEQ ID NO: 1420459 - RNA, 19 nt, Artificial Sequence
  Description of Artificial Sequence: Synthetic oligonucleotide
uaaucgggcggaucacugg

SEQ ID NO: 1420460 - RNA, 19 nt, Artificial Sequence
  Description of Artificial Sequence: Synthetic oligonucleotide
aucauucaccucauugccc

SEQ ID NO: 1420461 - RNA, 19 nt, Artificial Sequence
  Description of Artificial Sequence: Synthetic oligonucleotide
gaagucaucggcaucccac

SEQ ID NO: 1420462 - RNA, 19 nt, Artificial Sequence
  Description of Artificial Sequence: Synthetic oligonucleotide
caugggagggacuacugug

SEQ ID NO: 1420463 - RNA, 19 nt, Artificial Sequence
  Description of Artificial Sequence: Synthetic oligonucleotide
aagauccggaagucaucgg

SEQ ID NO: 1420464 - RNA, 19 nt, Artificial Sequence
  Description of Artificial Sequence: Synthetic oligonucleotide
caagugccaagccacagac

SEQ ID NO: 1420465 - RNA, 19 nt, Artificial Sequence
  Description of Artificial Sequence: Synthetic oligonucleotide
ugagcccacguacuucccg

SEQ ID NO: 1420466 - RNA, 19 nt, Artificial Sequence
  Description of Artificial Sequence: Synthetic oligonucleotide
cacagacccuaucugaggc

SEQ ID NO: 1420467 - RNA, 19 nt, Artificial Sequence
  Description of Artificial Sequence: Synthetic oligonucleotide
ugaaccugcugguacgugu

SEQ ID NO: 1420468 - RNA, 19 nt, Artificial Sequence
  Description of Artificial Sequence: Synthetic oligonucleotide
cuugcggaccacauccagg

SEQ ID NO: 1420469 - RNA, 19 nt, Artificial Sequence
  Description of Artificial Sequence: Synthetic oligonucleotide
gaaggaugggaaccggcug

SEQ ID NO: 1420470 - RNA, 19 nt, Artificial Sequence
  Description of Artificial Sequence: Synthetic oligonucleotide
ucaucggcaucccacucca

SEQ ID NO: 1420471 - RNA, 19 nt, Artificial Sequence
  Description of Artificial Sequence: Synthetic oligonucleotide
cuucccguucaucucacgc

SEQ ID NO: 1420472 - RNA, 19 nt, Artificial Sequence
  Description of Artificial Sequence: Synthetic oligonucleotide
uugguuuugccugugcgcu

SEQ ID NO: 1420473 - RNA, 19 nt, Artificial Sequence
  Description of Artificial Sequence: Synthetic oligonucleotide
accaccucgagugggaggg

SEQ ID NO: 1420474 - RNA, 19 nt, Artificial Sequence
  Description of Artificial Sequence: Synthetic oligonucleotide
uucuacggugggcaccgcg

SEQ ID NO: 1420475 - RNA, 19 nt, Artificial Sequence
  Description of Artificial Sequence: Synthetic oligonucleotide
aaccgggaggcccggcgcc

SEQ ID NO: 1420476 - RNA, 19 nt, Artificial Sequence
  Description of Artificial Sequence: Synthetic oligonucleotide
aacacccggccccgggacc

SEQ ID NO: 1420477 - RNA, 19 nt, Artificial Sequence
  Description of Artificial Sequence: Synthetic oligonucleotide
gucacggaucaccuuagcc

SEQ ID NO: 1420478 - RNA, 19 nt, Artificial Sequence
  Description of Artificial Sequence: Synthetic oligonucleotide
caugggugguccaggaggc

SEQ ID NO: 1420479 - RNA, 19 nt, Artificial Sequence
  Description of Artificial Sequence: Synthetic oligonucleotide
uugucacggaucaccuuag

SEQ ID NO: 1420480 - RNA, 19 nt, Artificial Sequence
  Description of Artificial Sequence: Synthetic oligonucleotide
caggccacguaccaccucg

SEQ ID NO: 1420481 - RNA, 19 nt, Artificial Sequence
  Description of Artificial Sequence: Synthetic oligonucleotide
uuccagggucuguugaacc

SEQ ID NO: 1420482 - RNA, 19 nt, Artificial Sequence
  Description of Artificial Sequence: Synthetic oligonucleotide
ucgucucaggaacauggcu

SEQ ID NO: 1420483 - RNA, 19 nt, Artificial Sequence
  Description of Artificial Sequence: Synthetic oligonucleotide
cuagcauccuccagcccgg

SEQ ID NO: 1420484 - RNA, 19 nt, Artificial Sequence
  Description of Artificial Sequence: Synthetic oligonucleotide
ccacguaccaccucgagug

SEQ ID NO: 1420485 - RNA, 19 nt, Artificial Sequence
  Description of Artificial Sequence: Synthetic oligonucleotide
caggcaagggcauggcuag

SEQ ID NO: 1420486 - RNA, 19 nt, Artificial Sequence
  Description of Artificial Sequence: Synthetic oligonucleotide
ggggauuccggucaccggg

SEQ ID NO: 1420487 - RNA, 19 nt, Artificial Sequence
  Description of Artificial Sequence: Synthetic oligonucleotide
gaaggcuggacgcaggaua

SEQ ID NO: 1420488 - RNA, 19 nt, Artificial Sequence
  Description of Artificial Sequence: Synthetic oligonucleotide
aagugccaagccacagacc

SEQ ID NO: 1420489 - RNA, 19 nt, Artificial Sequence
  Description of Artificial Sequence: Synthetic oligonucleotide
acugcgaucagcagggcca

SEQ ID NO: 1420490 - RNA, 19 nt, Artificial Sequence
  Description of Artificial Sequence: Synthetic oligonucleotide
gagcccaacacccggcccc

SEQ ID NO: 1420491 - RNA, 19 nt, Artificial Sequence
  Description of Artificial Sequence: Synthetic oligonucleotide
aacauggcuucucgagccu

SEQ ID NO: 1420492 - RNA, 19 nt, Artificial Sequence
  Description of Artificial Sequence: Synthetic oligonucleotide
cucucgaggggcugcaggc

SEQ ID NO: 1420493 - RNA, 19 nt, Artificial Sequence
  Description of Artificial Sequence: Synthetic oligonucleotide
auuccggucaccggggcuc

SEQ ID NO: 1420494 - RNA, 19 nt, Artificial Sequence
  Description of Artificial Sequence: Synthetic oligonucleotide
ggaacauggcuucucgagc

SEQ ID NO: 1420495 - RNA, 19 nt, Artificial Sequence
  Description of Artificial Sequence: Synthetic oligonucleotide
aggaaggaugggaaccggc

SEQ ID NO: 1420496 - RNA, 19 nt, Artificial Sequence
  Description of Artificial Sequence: Synthetic oligonucleotide
cugcugugcgaaugcagcg

SEQ ID NO: 1420497 - RNA, 19 nt, Artificial Sequence
  Description of Artificial Sequence: Synthetic oligonucleotide
auaggggcccucugagggg

SEQ ID NO: 1420498 - RNA, 19 nt, Artificial Sequence
  Description of Artificial Sequence: Synthetic oligonucleotide
gacugcgaucagcagggcc

SEQ ID NO: 1420499 - RNA, 19 nt, Artificial Sequence
  Description of Artificial Sequence: Synthetic oligonucleotide
gcucgucucaggaacaugg

SEQ ID NO: 1420500 - RNA, 19 nt, Artificial Sequence
  Description of Artificial Sequence: Synthetic oligonucleotide
gccucagggccauaggucg

SEQ ID NO: 1420501 - RNA, 19 nt, Artificial Sequence
  Description of Artificial Sequence: Synthetic oligonucleotide
agucaucggcaucccacuc

SEQ ID NO: 1420502 - RNA, 19 nt, Artificial Sequence
  Description of Artificial Sequence: Synthetic oligonucleotide
ucgagccucaggacugucc

SEQ ID NO: 1420503 - RNA, 19 nt, Artificial Sequence
  Description of Artificial Sequence: Synthetic oligonucleotide
gcugacaaagccauagccc

SEQ ID NO: 1420504 - RNA, 19 nt, Artificial Sequence
  Description of Artificial Sequence: Synthetic oligonucleotide
aaugacugcagggccaguu

SEQ ID NO: 1420505 - RNA, 19 nt, Artificial Sequence
  Description of Artificial Sequence: Synthetic oligonucleotide
cuugucacggaucaccuua

SEQ ID NO: 1420506 - RNA, 19 nt, Artificial Sequence
  Description of Artificial Sequence: Synthetic oligonucleotide
ugaggcccaacuuuucuuu

SEQ ID NO: 1420507 - RNA, 19 nt, Artificial Sequence
  Description of Artificial Sequence: Synthetic oligonucleotide
cagccauagagcccagggg

SEQ ID NO: 1420508 - RNA, 19 nt, Artificial Sequence
  Description of Artificial Sequence: Synthetic oligonucleotide
ucccguucaucucacgcau

SEQ ID NO: 1420509 - RNA, 19 nt, Artificial Sequence
  Description of Artificial Sequence: Synthetic oligonucleotide
cuugaugggccgugagccc

SEQ ID NO: 1420510 - RNA, 19 nt, Artificial Sequence
  Description of Artificial Sequence: Synthetic oligonucleotide
uacguguugguggcgauaa

SEQ ID NO: 1420511 - RNA, 19 nt, Artificial Sequence
  Description of Artificial Sequence: Synthetic oligonucleotide
gguggcgauaaucgggcgg

SEQ ID NO: 1420512 - RNA, 19 nt, Artificial Sequence
  Description of Artificial Sequence: Synthetic oligonucleotide
gucucaggaacauggcuuc

SEQ ID NO: 1420513 - RNA, 19 nt, Artificial Sequence
  Description of Artificial Sequence: Synthetic oligonucleotide
ugccugugcgcuugucacg

SEQ ID NO: 1420514 - RNA, 19 nt, Artificial Sequence
  Description of Artificial Sequence: Synthetic oligonucleotide
cagacugggguccucccag

SEQ ID NO: 1420515 - RNA, 19 nt, Artificial Sequence
  Description of Artificial Sequence: Synthetic oligonucleotide
uaccaccucgagugggagg

SEQ ID NO: 1420516 - RNA, 19 nt, Artificial Sequence
  Description of Artificial Sequence: Synthetic oligonucleotide
ucgggcggaucacuggggc

SEQ ID NO: 1420517 - RNA, 19 nt, Artificial Sequence
  Description of Artificial Sequence: Synthetic oligonucleotide
uucgaaguggaggcagcag

SEQ ID NO: 1420518 - RNA, 19 nt, Artificial Sequence
  Description of Artificial Sequence: Synthetic oligonucleotide
gcuugaugggccgugagcc

SEQ ID NO: 1420519 - RNA, 19 nt, Artificial Sequence
  Description of Artificial Sequence: Synthetic oligonucleotide
gaccugcauggcuucuacg

SEQ ID NO: 1420520 - RNA, 19 nt, Artificial Sequence
  Description of Artificial Sequence: Synthetic oligonucleotide
cagacccuaucugaggccc

SEQ ID NO: 1420521 - RNA, 19 nt, Artificial Sequence
  Description of Artificial Sequence: Synthetic oligonucleotide
aagccaacugggcccacaa

SEQ ID NO: 1420522 - RNA, 19 nt, Artificial Sequence
  Description of Artificial Sequence: Synthetic oligonucleotide
cucgucucaggaacauggc

SEQ ID NO: 1420523 - RNA, 19 nt, Artificial Sequence
  Description of Artificial Sequence: Synthetic oligonucleotide
ugcugugcgaaugcagcgc

SEQ ID NO: 1420524 - RNA, 19 nt, Artificial Sequence
  Description of Artificial Sequence: Synthetic oligonucleotide
ugugcgcuugucacggauc

SEQ ID NO: 1420525 - RNA, 19 nt, Artificial Sequence
  Description of Artificial Sequence: Synthetic oligonucleotide
auaaucgggcggaucacug

SEQ ID NO: 1420526 - RNA, 19 nt, Artificial Sequence
  Description of Artificial Sequence: Synthetic oligonucleotide
ugucacggaucaccuuagc

SEQ ID NO: 1420527 - RNA, 19 nt, Artificial Sequence
  Description of Artificial Sequence: Synthetic oligonucleotide
ugcccgggagcccaacacc

SEQ ID NO: 1420528 - RNA, 19 nt, Artificial Sequence
  Description of Artificial Sequence: Synthetic oligonucleotide
cuagcgccuggcugggugg

SEQ ID NO: 1420529 - RNA, 19 nt, Artificial Sequence
  Description of Artificial Sequence: Synthetic oligonucleotide
ugugcgaaugcagcgcuuc

SEQ ID NO: 1420530 - RNA, 19 nt, Artificial Sequence
  Description of Artificial Sequence: Synthetic oligonucleotide
ugggagcaagugccaagcc

SEQ ID NO: 1420531 - RNA, 19 nt, Artificial Sequence
  Description of Artificial Sequence: Synthetic oligonucleotide
auagucacugggguccuug

SEQ ID NO: 1420532 - RNA, 19 nt, Artificial Sequence
  Description of Artificial Sequence: Synthetic oligonucleotide
gauccggaagucaucggca

SEQ ID NO: 1420533 - RNA, 19 nt, Artificial Sequence
  Description of Artificial Sequence: Synthetic oligonucleotide
ucacgcauggcgcgcacau

SEQ ID NO: 1420534 - RNA, 19 nt, Artificial Sequence
  Description of Artificial Sequence: Synthetic oligonucleotide
uucaagcgcuccucgccgc

SEQ ID NO: 1420535 - RNA, 19 nt, Artificial Sequence
  Description of Artificial Sequence: Synthetic oligonucleotide
cuuccugcucgaacagggc

SEQ ID NO: 1420536 - RNA, 19 nt, Artificial Sequence
  Description of Artificial Sequence: Synthetic oligonucleotide
uugcccgggagcccaacac

SEQ ID NO: 1420537 - RNA, 19 nt, Artificial Sequence
  Description of Artificial Sequence: Synthetic oligonucleotide
gaaggagcuagcgccuggc

SEQ ID NO: 1420538 - RNA, 19 nt, Artificial Sequence
  Description of Artificial Sequence: Synthetic oligonucleotide
accugcugguacguguugg

SEQ ID NO: 1420539 - RNA, 19 nt, Artificial Sequence
  Description of Artificial Sequence: Synthetic oligonucleotide
gugggagcaagugccaagc

SEQ ID NO: 1420540 - RNA, 19 nt, Artificial Sequence
  Description of Artificial Sequence: Synthetic oligonucleotide
agggccucccaccauggga

SEQ ID NO: 1420541 - RNA, 19 nt, Artificial Sequence
  Description of Artificial Sequence: Synthetic oligonucleotide
ugguggcgauaaucgggcg

SEQ ID NO: 1420542 - RNA, 19 nt, Artificial Sequence
  Description of Artificial Sequence: Synthetic oligonucleotide
cuacggugggcaccgcggg

SEQ ID NO: 1420543 - RNA, 19 nt, Artificial Sequence
  Description of Artificial Sequence: Synthetic oligonucleotide
cauggcgcgcacauaguca

SEQ ID NO: 1420544 - RNA, 19 nt, Artificial Sequence
  Description of Artificial Sequence: Synthetic oligonucleotide
agcaagugccaagccacag

SEQ ID NO: 1420545 - RNA, 19 nt, Artificial Sequence
  Description of Artificial Sequence: Synthetic oligonucleotide
cugugggaaggagcuagcg

SEQ ID NO: 1420546 - RNA, 19 nt, Artificial Sequence
  Description of Artificial Sequence: Synthetic oligonucleotide
ugguacguguugguggcga

SEQ ID NO: 1420547 - RNA, 19 nt, Artificial Sequence
  Description of Artificial Sequence: Synthetic oligonucleotide
acgagccaagaugucauca

SEQ ID NO: 1420548 - RNA, 19 nt, Artificial Sequence
  Description of Artificial Sequence: Synthetic oligonucleotide
ggcccaacuuuucuuuucc

SEQ ID NO: 1420549 - RNA, 19 nt, Artificial Sequence
  Description of Artificial Sequence: Synthetic oligonucleotide
gcuucuacggugggcaccg

SEQ ID NO: 1420550 - RNA, 19 nt, Artificial Sequence
  Description of Artificial Sequence: Synthetic oligonucleotide
gcacuagcauccuccagcc

SEQ ID NO: 1420551 - RNA, 19 nt, Artificial Sequence
  Description of Artificial Sequence: Synthetic oligonucleotide
acguaccaccucgaguggg

SEQ ID NO: 1420552 - RNA, 19 nt, Artificial Sequence
  Description of Artificial Sequence: Synthetic oligonucleotide
ggggacgaaggcuggacgc

SEQ ID NO: 1420553 - RNA, 19 nt, Artificial Sequence
  Description of Artificial Sequence: Synthetic oligonucleotide
auucgaaguggaggcagca

SEQ ID NO: 1420554 - RNA, 19 nt, Artificial Sequence
  Description of Artificial Sequence: Synthetic oligonucleotide
agagcagaaucugcucucu

SEQ ID NO: 1420555 - RNA, 19 nt, Artificial Sequence
  Description of Artificial Sequence: Synthetic oligonucleotide
ggugggagcaagugccaag

SEQ ID NO: 1420556 - RNA, 19 nt, Artificial Sequence
  Description of Artificial Sequence: Synthetic oligonucleotide
gaaugcagcgcuucaguuu

SEQ ID NO: 1420557 - RNA, 19 nt, Artificial Sequence
  Description of Artificial Sequence: Synthetic oligonucleotide
auccggaagucaucggcau

SEQ ID NO: 1420558 - RNA, 19 nt, Artificial Sequence
  Description of Artificial Sequence: Synthetic oligonucleotide
ugccaagccacagacccua

SEQ ID NO: 1420559 - RNA, 19 nt, Artificial Sequence
  Description of Artificial Sequence: Synthetic oligonucleotide
ucaagcgcuccucgccgcu

SEQ ID NO: 1420560 - RNA, 19 nt, Artificial Sequence
  Description of Artificial Sequence: Synthetic oligonucleotide
uccggaagucaucggcauc

SEQ ID NO: 1420561 - RNA, 19 nt, Artificial Sequence
  Description of Artificial Sequence: Synthetic oligonucleotide
cacguaccaccucgagugg

SEQ ID NO: 1420562 - RNA, 19 nt, Artificial Sequence
  Description of Artificial Sequence: Synthetic oligonucleotide
ggcuggacgcaggauaggg

SEQ ID NO: 1420563 - RNA, 19 nt, Artificial Sequence
  Description of Artificial Sequence: Synthetic oligonucleotide
guuccgguccuuccacaug

SEQ ID NO: 1420564 - RNA, 19 nt, Artificial Sequence
  Description of Artificial Sequence: Synthetic oligonucleotide
uaggggcccucugaggggc

SEQ ID NO: 1420565 - RNA, 19 nt, Artificial Sequence
  Description of Artificial Sequence: Synthetic oligonucleotide
ggcaagggcauggcuaggg

SEQ ID NO: 1420566 - RNA, 19 nt, Artificial Sequence
  Description of Artificial Sequence: Synthetic oligonucleotide
caguuggggcuccuccugc

SEQ ID NO: 1420567 - RNA, 19 nt, Artificial Sequence
  Description of Artificial Sequence: Synthetic oligonucleotide
gucaccggggcucccagga

SEQ ID NO: 1420568 - RNA, 19 nt, Artificial Sequence
  Description of Artificial Sequence: Synthetic oligonucleotide
ucuccgguuugccuuucuu

SEQ ID NO: 1420569 - RNA, 19 nt, Artificial Sequence
  Description of Artificial Sequence: Synthetic oligonucleotide
uccaggugacugcgaucag

SEQ ID NO: 1420570 - RNA, 19 nt, Artificial Sequence
  Description of Artificial Sequence: Synthetic oligonucleotide
guggcgauaaucgggcgga

SEQ ID NO: 1420571 - RNA, 19 nt, Artificial Sequence
  Description of Artificial Sequence: Synthetic oligonucleotide
ccggaagucaucggcaucc

SEQ ID NO: 1420572 - RNA, 19 nt, Artificial Sequence
  Description of Artificial Sequence: Synthetic oligonucleotide
ggaaggagcuagcgccugg

SEQ ID NO: 1420573 - RNA, 19 nt, Artificial Sequence
  Description of Artificial Sequence: Synthetic oligonucleotide
cuaucugaggcccaacuuu

SEQ ID NO: 1420574 - RNA, 19 nt, Artificial Sequence
  Description of Artificial Sequence: Synthetic oligonucleotide
ugggccgugagcccacgua

SEQ ID NO: 1420575 - RNA, 19 nt, Artificial Sequence
  Description of Artificial Sequence: Synthetic oligonucleotide
ucccgcaaccgggaggccc

SEQ ID NO: 1420576 - RNA, 19 nt, Artificial Sequence
  Description of Artificial Sequence: Synthetic oligonucleotide
ugaugggccgugagcccac

SEQ ID NO: 1420577 - RNA, 19 nt, Artificial Sequence
  Description of Artificial Sequence: Synthetic oligonucleotide
augggugguccaggaggcc

SEQ ID NO: 1420578 - RNA, 19 nt, Artificial Sequence
  Description of Artificial Sequence: Synthetic oligonucleotide
gggaccacgggcccucccg

SEQ ID NO: 1420579 - RNA, 19 nt, Artificial Sequence
  Description of Artificial Sequence: Synthetic oligonucleotide
cuucucgagccucaggacu

SEQ ID NO: 1420580 - RNA, 19 nt, Artificial Sequence
  Description of Artificial Sequence: Synthetic oligonucleotide
ccaaccagggccuggugug

SEQ ID NO: 1420581 - RNA, 19 nt, Artificial Sequence
  Description of Artificial Sequence: Synthetic oligonucleotide
gaggcuggggccaaugacu

SEQ ID NO: 1420582 - RNA, 19 nt, Artificial Sequence
  Description of Artificial Sequence: Synthetic oligonucleotide
gcucucgaggggcugcagg

SEQ ID NO: 1420583 - RNA, 19 nt, Artificial Sequence
  Description of Artificial Sequence: Synthetic oligonucleotide
caaccgggaggcccggcgc

SEQ ID NO: 1420584 - RNA, 19 nt, Artificial Sequence
  Description of Artificial Sequence: Synthetic oligonucleotide
gguuuugccugugcgcuug

SEQ ID NO: 1420585 - RNA, 19 nt, Artificial Sequence
  Description of Artificial Sequence: Synthetic oligonucleotide
aaggagggccucccaccau

SEQ ID NO: 1420586 - RNA, 19 nt, Artificial Sequence
  Description of Artificial Sequence: Synthetic oligonucleotide
gggucuguugaaccugcug

SEQ ID NO: 1420587 - RNA, 19 nt, Artificial Sequence
  Description of Artificial Sequence: Synthetic oligonucleotide
ugcucgucucaggaacaug

SEQ ID NO: 1420588 - RNA, 19 nt, Artificial Sequence
  Description of Artificial Sequence: Synthetic oligonucleotide
cugcacuagcauccuccag

SEQ ID NO: 1420589 - RNA, 19 nt, Artificial Sequence
  Description of Artificial Sequence: Synthetic oligonucleotide
gccugugcgcuugucacgg

SEQ ID NO: 1420590 - RNA, 19 nt, Artificial Sequence
  Description of Artificial Sequence: Synthetic oligonucleotide
ucucaggaacauggcuucu

SEQ ID NO: 1420591 - RNA, 19 nt, Artificial Sequence
  Description of Artificial Sequence: Synthetic oligonucleotide
gcgcacauagucacugggg

SEQ ID NO: 1420592 - RNA, 19 nt, Artificial Sequence
  Description of Artificial Sequence: Synthetic oligonucleotide
gcaaccgggaggcccggcg

SEQ ID NO: 1420593 - RNA, 19 nt, Artificial Sequence
  Description of Artificial Sequence: Synthetic oligonucleotide
uucuccgguuugccuuucu

SEQ ID NO: 1420594 - RNA, 19 nt, Artificial Sequence
  Description of Artificial Sequence: Synthetic oligonucleotide
caucucacgcauggcgcgc

SEQ ID NO: 1420595 - RNA, 19 nt, Artificial Sequence
  Description of Artificial Sequence: Synthetic oligonucleotide
gggccucccaccaugggag

SEQ ID NO: 1420596 - RNA, 19 nt, Artificial Sequence
  Description of Artificial Sequence: Synthetic oligonucleotide
cucuagggccaugaggcca

SEQ ID NO: 1420597 - RNA, 19 nt, Artificial Sequence
  Description of Artificial Sequence: Synthetic oligonucleotide
aggagcucaggaauucgaa

SEQ ID NO: 1420598 - RNA, 19 nt, Artificial Sequence
  Description of Artificial Sequence: Synthetic oligonucleotide
caacacccggccccgggac

SEQ ID NO: 1420599 - RNA, 19 nt, Artificial Sequence
  Description of Artificial Sequence: Synthetic oligonucleotide
aaccggcugaaggcacgag

SEQ ID NO: 1420600 - RNA, 19 nt, Artificial Sequence
  Description of Artificial Sequence: Synthetic oligonucleotide
ggaaccggcugaaggcacg

SEQ ID NO: 1420601 - RNA, 19 nt, Artificial Sequence
  Description of Artificial Sequence: Synthetic oligonucleotide
uccgguccuuccacaugcu

SEQ ID NO: 1420602 - RNA, 19 nt, Artificial Sequence
  Description of Artificial Sequence: Synthetic oligonucleotide
accaugggagggacuacug

SEQ ID NO: 1420603 - RNA, 19 nt, Artificial Sequence
  Description of Artificial Sequence: Synthetic oligonucleotide
aucgggcggaucacugggg

SEQ ID NO: 1420604 - RNA, 19 nt, Artificial Sequence
  Description of Artificial Sequence: Synthetic oligonucleotide
caggaacauggcuucucga

SEQ ID NO: 1420605 - RNA, 19 nt, Artificial Sequence
  Description of Artificial Sequence: Synthetic oligonucleotide
ucaccggggcucccaggac

SEQ ID NO: 1420606 - RNA, 19 nt, Artificial Sequence
  Description of Artificial Sequence: Synthetic oligonucleotide
gcgaucagcagggccaaag

SEQ ID NO: 1420607 - RNA, 19 nt, Artificial Sequence
  Description of Artificial Sequence: Synthetic oligonucleotide
cacgagccaagaugucauc

SEQ ID NO: 1420608 - RNA, 19 nt, Artificial Sequence
  Description of Artificial Sequence: Synthetic oligonucleotide
uagcgccuggcuggguggg

SEQ ID NO: 1420609 - RNA, 19 nt, Artificial Sequence
  Description of Artificial Sequence: Synthetic oligonucleotide
ucgaagcuugaugggccgu

SEQ ID NO: 1420610 - RNA, 19 nt, Artificial Sequence
  Description of Artificial Sequence: Synthetic oligonucleotide
gaggugguucaggccgcgg

SEQ ID NO: 1420611 - RNA, 19 nt, Artificial Sequence
  Description of Artificial Sequence: Synthetic oligonucleotide
gcaagugccaagccacaga

SEQ ID NO: 1420612 - RNA, 19 nt, Artificial Sequence
  Description of Artificial Sequence: Synthetic oligonucleotide
caccgcugccucuuccuuc

SEQ ID NO: 1420613 - RNA, 19 nt, Artificial Sequence
  Description of Artificial Sequence: Synthetic oligonucleotide
caccucgagugggaggggc

SEQ ID NO: 1420614 - RNA, 19 nt, Artificial Sequence
  Description of Artificial Sequence: Synthetic oligonucleotide
uggcuucuacggugggcac

SEQ ID NO: 1420615 - RNA, 19 nt, Artificial Sequence
  Description of Artificial Sequence: Synthetic oligonucleotide
gagcccacguacuucccgu

SEQ ID NO: 1420616 - RNA, 19 nt, Artificial Sequence
  Description of Artificial Sequence: Synthetic oligonucleotide
ggcacgagccaagauguca

SEQ ID NO: 1420617 - RNA, 19 nt, Artificial Sequence
  Description of Artificial Sequence: Synthetic oligonucleotide
gggauuccggucaccgggg

SEQ ID NO: 1420618 - RNA, 19 nt, Artificial Sequence
  Description of Artificial Sequence: Synthetic oligonucleotide
ccauagagcccaggggugg

SEQ ID NO: 1420619 - RNA, 19 nt, Artificial Sequence
  Description of Artificial Sequence: Synthetic oligonucleotide
gcucugggaccucuagggc

SEQ ID NO: 1420620 - RNA, 19 nt, Artificial Sequence
  Description of Artificial Sequence: Synthetic oligonucleotide
ggaccugcauggcuucuac

SEQ ID NO: 1420621 - RNA, 19 nt, Artificial Sequence
  Description of Artificial Sequence: Synthetic oligonucleotide
gcauggcgcgcacauaguc

SEQ ID NO: 1420622 - RNA, 19 nt, Artificial Sequence
  Description of Artificial Sequence: Synthetic oligonucleotide
gcggggauuccggucaccg

SEQ ID NO: 1420623 - RNA, 19 nt, Artificial Sequence
  Description of Artificial Sequence: Synthetic oligonucleotide
gggccgugagcccacguac

SEQ ID NO: 1420624 - RNA, 19 nt, Artificial Sequence
  Description of Artificial Sequence: Synthetic oligonucleotide
gccuaacccaaggccaagg

SEQ ID NO: 1420625 - RNA, 19 nt, Artificial Sequence
  Description of Artificial Sequence: Synthetic oligonucleotide
ggcguggacgcagggacag

SEQ ID NO: 1420626 - RNA, 19 nt, Artificial Sequence
  Description of Artificial Sequence: Synthetic oligonucleotide
gaugggccgugagcccacg

SEQ ID NO: 1420627 - RNA, 19 nt, Artificial Sequence
  Description of Artificial Sequence: Synthetic oligonucleotide
acccuaucugaggcccaac

SEQ ID NO: 1420628 - RNA, 19 nt, Artificial Sequence
  Description of Artificial Sequence: Synthetic oligonucleotide
ugguuuugccugugcgcuu

SEQ ID NO: 1420629 - RNA, 19 nt, Artificial Sequence
  Description of Artificial Sequence: Synthetic oligonucleotide
ggcgcgcacauagucacug

SEQ ID NO: 1420630 - RNA, 19 nt, Artificial Sequence
  Description of Artificial Sequence: Synthetic oligonucleotide
ucucgagccucaggacugu

SEQ ID NO: 1420631 - RNA, 19 nt, Artificial Sequence
  Description of Artificial Sequence: Synthetic oligonucleotide
gaaccggcugaaggcacga

SEQ ID NO: 1420632 - RNA, 19 nt, Artificial Sequence
  Description of Artificial Sequence: Synthetic oligonucleotide
gagcaagugccaagccaca

SEQ ID NO: 1420633 - RNA, 19 nt, Artificial Sequence
  Description of Artificial Sequence: Synthetic oligonucleotide
gauuccggucaccggggcu

SEQ ID NO: 1420634 - RNA, 19 nt, Artificial Sequence
  Description of Artificial Sequence: Synthetic oligonucleotide
cugguacguguugguggcg

SEQ ID NO: 1420635 - RNA, 19 nt, Artificial Sequence
  Description of Artificial Sequence: Synthetic oligonucleotide
ggacgaaggcuggacgcag

SEQ ID NO: 1420636 - RNA, 19 nt, Artificial Sequence
  Description of Artificial Sequence: Synthetic oligonucleotide
gggcggaucacuggggcug

SEQ ID NO: 1420637 - RNA, 19 nt, Artificial Sequence
  Description of Artificial Sequence: Synthetic oligonucleotide
ccucccgcaaccgggaggc

SEQ ID NO: 1420638 - RNA, 19 nt, Artificial Sequence
  Description of Artificial Sequence: Synthetic oligonucleotide
gcugcacuagcauccucca

SEQ ID NO: 1420639 - RNA, 19 nt, Artificial Sequence
  Description of Artificial Sequence: Synthetic oligonucleotide
uggcgcgcacauagucacu

SEQ ID NO: 1420640 - RNA, 19 nt, Artificial Sequence
  Description of Artificial Sequence: Synthetic oligonucleotide
cccgcaaccgggaggcccg

SEQ ID NO: 1420641 - RNA, 19 nt, Artificial Sequence
  Description of Artificial Sequence: Synthetic oligonucleotide
ggaauucgaaguggaggca

SEQ ID NO: 1420642 - RNA, 19 nt, Artificial Sequence
  Description of Artificial Sequence: Synthetic oligonucleotide
ggcaucccacuccagcaga

SEQ ID NO: 1420643 - RNA, 19 nt, Artificial Sequence
  Description of Artificial Sequence: Synthetic oligonucleotide
ggaccucuagggccaugag

SEQ ID NO: 1420644 - RNA, 19 nt, Artificial Sequence
  Description of Artificial Sequence: Synthetic oligonucleotide
cgcgcacauagucacuggg

SEQ ID NO: 1420645 - RNA, 19 nt, Artificial Sequence
  Description of Artificial Sequence: Synthetic oligonucleotide
ggauuccggucaccggggc

SEQ ID NO: 1420646 - RNA, 19 nt, Artificial Sequence
  Description of Artificial Sequence: Synthetic oligonucleotide
ucccaccaugggagggacu

SEQ ID NO: 1420647 - RNA, 19 nt, Artificial Sequence
  Description of Artificial Sequence: Synthetic oligonucleotide
caucggcaucccacuccag

SEQ ID NO: 1420648 - RNA, 19 nt, Artificial Sequence
  Description of Artificial Sequence: Synthetic oligonucleotide
ggagggccucccaccaugg

SEQ ID NO: 1420649 - RNA, 19 nt, Artificial Sequence
  Description of Artificial Sequence: Synthetic oligonucleotide
gccauagagcccaggggug

SEQ ID NO: 1420650 - RNA, 19 nt, Artificial Sequence
  Description of Artificial Sequence: Synthetic oligonucleotide
ggaagucaucggcauccca

SEQ ID NO: 1420651 - RNA, 19 nt, Artificial Sequence
  Description of Artificial Sequence: Synthetic oligonucleotide
aggaugggaaccggcugaa

SEQ ID NO: 1420652 - RNA, 19 nt, Artificial Sequence
  Description of Artificial Sequence: Synthetic oligonucleotide
agccaacugggcccacaaa

SEQ ID NO: 1420653 - RNA, 19 nt, Artificial Sequence
  Description of Artificial Sequence: Synthetic oligonucleotide
cguguugguggcgauaauc

SEQ ID NO: 1420654 - RNA, 19 nt, Artificial Sequence
  Description of Artificial Sequence: Synthetic oligonucleotide
ggcuucuacggugggcacc

SEQ ID NO: 1420655 - RNA, 19 nt, Artificial Sequence
  Description of Artificial Sequence: Synthetic oligonucleotide
ccacugcugcacuagcauc

SEQ ID NO: 1420656 - RNA, 19 nt, Artificial Sequence
  Description of Artificial Sequence: Synthetic oligonucleotide
accacgggcccucccgcaa

SEQ ID NO: 1420657 - RNA, 19 nt, Artificial Sequence
  Description of Artificial Sequence: Synthetic oligonucleotide
ugcgcuugucacggaucac

SEQ ID NO: 1420658 - RNA, 19 nt, Artificial Sequence
  Description of Artificial Sequence: Synthetic oligonucleotide
cuugcccgggagcccaaca

SEQ ID NO: 1420659 - RNA, 19 nt, Artificial Sequence
  Description of Artificial Sequence: Synthetic oligonucleotide
aggccuaacccaaggccaa

SEQ ID NO: 1420660 - RNA, 19 nt, Artificial Sequence
  Description of Artificial Sequence: Synthetic oligonucleotide
ugacugcgaucagcagggc

SEQ ID NO: 1420661 - RNA, 19 nt, Artificial Sequence
  Description of Artificial Sequence: Synthetic oligonucleotide
ggccacguaccaccucgag

SEQ ID NO: 1420662 - RNA, 19 nt, Artificial Sequence
  Description of Artificial Sequence: Synthetic oligonucleotide
gaccacgggcccucccgca

SEQ ID NO: 1420663 - RNA, 19 nt, Artificial Sequence
  Description of Artificial Sequence: Synthetic oligonucleotide
ggaaggaugggaaccggcu

SEQ ID NO: 1420664 - RNA, 19 nt, Artificial Sequence
  Description of Artificial Sequence: Synthetic oligonucleotide
ggucaccggggcucccagg

SEQ ID NO: 1420665 - RNA, 19 nt, Artificial Sequence
  Description of Artificial Sequence: Synthetic oligonucleotide
gacugggguccucccagcu

SEQ ID NO: 1420666 - RNA, 19 nt, Artificial Sequence
  Description of Artificial Sequence: Synthetic oligonucleotide
gacccuaucugaggcccaa

SEQ ID NO: 1420667 - RNA, 19 nt, Artificial Sequence
  Description of Artificial Sequence: Synthetic oligonucleotide
cucccaccaugggagggac

SEQ ID NO: 1420668 - RNA, 19 nt, Artificial Sequence
  Description of Artificial Sequence: Synthetic oligonucleotide
gcgcgcacauagucacugg

SEQ ID NO: 1420669 - RNA, 19 nt, Artificial Sequence
  Description of Artificial Sequence: Synthetic oligonucleotide
ccaguuggggcuccuccug

SEQ ID NO: 1420670 - RNA, 19 nt, Artificial Sequence
  Description of Artificial Sequence: Synthetic oligonucleotide
aggcacgagccaagauguc

SEQ ID NO: 1420671 - RNA, 19 nt, Artificial Sequence
  Description of Artificial Sequence: Synthetic oligonucleotide
aggggaggucuuagagcag

SEQ ID NO: 1420672 - RNA, 19 nt, Artificial Sequence
  Description of Artificial Sequence: Synthetic oligonucleotide
ggaccacgggcccucccgc

SEQ ID NO: 1420673 - RNA, 19 nt, Artificial Sequence
  Description of Artificial Sequence: Synthetic oligonucleotide
gggcccacaaaaggagggc

SEQ ID NO: 1420674 - RNA, 19 nt, Artificial Sequence
  Description of Artificial Sequence: Synthetic oligonucleotide
gcucccacggccacugcug

SEQ ID NO: 1420675 - RNA, 19 nt, Artificial Sequence
  Description of Artificial Sequence: Synthetic oligonucleotide
uagggccaugaggccagga

SEQ ID NO: 1420676 - RNA, 19 nt, Artificial Sequence
  Description of Artificial Sequence: Synthetic oligonucleotide
agcaggccacguaccaccu

SEQ ID NO: 1420677 - RNA, 19 nt, Artificial Sequence
  Description of Artificial Sequence: Synthetic oligonucleotide
gcggcggggauuccgguca

SEQ ID NO: 1420678 - RNA, 19 nt, Artificial Sequence
  Description of Artificial Sequence: Synthetic oligonucleotide
caccgcggcggggauuccg

SEQ ID NO: 1420679 - RNA, 19 nt, Artificial Sequence
  Description of Artificial Sequence: Synthetic oligonucleotide
gggaccucuagggccauga

SEQ ID NO: 1420680 - RNA, 19 nt, Artificial Sequence
  Description of Artificial Sequence: Synthetic oligonucleotide
cucgccgcucuugcccggg

SEQ ID NO: 1420681 - RNA, 19 nt, Artificial Sequence
  Description of Artificial Sequence: Synthetic oligonucleotide
gccauagguggcagcauca

SEQ ID NO: 1420682 - RNA, 19 nt, Artificial Sequence
  Description of Artificial Sequence: Synthetic oligonucleotide
augggccgugagcccacgu

SEQ ID NO: 1420683 - RNA, 19 nt, Artificial Sequence
  Description of Artificial Sequence: Synthetic oligonucleotide
ucuugcccgggagcccaac

SEQ ID NO: 1420684 - RNA, 19 nt, Artificial Sequence
  Description of Artificial Sequence: Synthetic oligonucleotide
gugagcccacguacuuccc

SEQ ID NO: 1420685 - RNA, 19 nt, Artificial Sequence
  Description of Artificial Sequence: Synthetic oligonucleotide
acguguugguggcgauaau

SEQ ID NO: 1420686 - RNA, 19 nt, Artificial Sequence
  Description of Artificial Sequence: Synthetic oligonucleotide
cugcucucuguagcacgug

SEQ ID NO: 1420687 - RNA, 19 nt, Artificial Sequence
  Description of Artificial Sequence: Synthetic oligonucleotide
gcgaaugcagcgcuucagu

SEQ ID NO: 1420688 - RNA, 19 nt, Artificial Sequence
  Description of Artificial Sequence: Synthetic oligonucleotide
ucgccgcucuugcccggga

SEQ ID NO: 1420689 - RNA, 19 nt, Artificial Sequence
  Description of Artificial Sequence: Synthetic oligonucleotide
agacccuaucugaggccca

SEQ ID NO: 1420690 - RNA, 19 nt, Artificial Sequence
  Description of Artificial Sequence: Synthetic oligonucleotide
gcugugcgaaugcagcgcu

SEQ ID NO: 1420691 - RNA, 19 nt, Artificial Sequence
  Description of Artificial Sequence: Synthetic oligonucleotide
gggacgaaggcuggacgca

SEQ ID NO: 1420692 - RNA, 19 nt, Artificial Sequence
  Description of Artificial Sequence: Synthetic oligonucleotide
ggaugggaaccggcugaag

SEQ ID NO: 1420693 - RNA, 19 nt, Artificial Sequence
  Description of Artificial Sequence: Synthetic oligonucleotide
cccaacacccggccccggg

SEQ ID NO: 1420694 - RNA, 19 nt, Artificial Sequence
  Description of Artificial Sequence: Synthetic oligonucleotide
acgcaggauaggggcccuc

SEQ ID NO: 1420695 - RNA, 19 nt, Artificial Sequence
  Description of Artificial Sequence: Synthetic oligonucleotide
ggcgauaaucgggcggauc

SEQ ID NO: 1420696 - RNA, 19 nt, Artificial Sequence
  Description of Artificial Sequence: Synthetic oligonucleotide
guacguguugguggcgaua

SEQ ID NO: 1420697 - RNA, 19 nt, Artificial Sequence
  Description of Artificial Sequence: Synthetic oligonucleotide
gggaaccggcugaaggcac

SEQ ID NO: 1420698 - RNA, 19 nt, Artificial Sequence
  Description of Artificial Sequence: Synthetic oligonucleotide
ggcaccgcggcggggauuc

SEQ ID NO: 1420699 - RNA, 19 nt, Artificial Sequence
  Description of Artificial Sequence: Synthetic oligonucleotide
ggccuaacccaaggccaag

SEQ ID NO: 1420700 - RNA, 19 nt, Artificial Sequence
  Description of Artificial Sequence: Synthetic oligonucleotide
ugggaccucuagggccaug

SEQ ID NO: 1420701 - RNA, 19 nt, Artificial Sequence
  Description of Artificial Sequence: Synthetic oligonucleotide
caagcgcuccucgccgcuc

SEQ ID NO: 1420702 - RNA, 19 nt, Artificial Sequence
  Description of Artificial Sequence: Synthetic oligonucleotide
ggaggcccggcgccggccc

SEQ ID NO: 1420703 - RNA, 19 nt, Artificial Sequence
  Description of Artificial Sequence: Synthetic oligonucleotide
ccgcucuugcccgggagcc

SEQ ID NO: 1420704 - RNA, 19 nt, Artificial Sequence
  Description of Artificial Sequence: Synthetic oligonucleotide
gggcaccgcgggcaccgcg

SEQ ID NO: 1420705 - RNA, 19 nt, Artificial Sequence
  Description of Artificial Sequence: Synthetic oligonucleotide
uggcgauaaucgggcggau

SEQ ID NO: 1420706 - RNA, 19 nt, Artificial Sequence
  Description of Artificial Sequence: Synthetic oligonucleotide
gcccacguacuucccguuc

SEQ ID NO: 1420707 - RNA, 19 nt, Artificial Sequence
  Description of Artificial Sequence: Synthetic oligonucleotide
cuucuacggugggcaccgc

SEQ ID NO: 1420708 - RNA, 19 nt, Artificial Sequence
  Description of Artificial Sequence: Synthetic oligonucleotide
cccguucaucucacgcaug

SEQ ID NO: 1420709 - RNA, 19 nt, Artificial Sequence
  Description of Artificial Sequence: Synthetic oligonucleotide
cucccggcugcugugcgaa

SEQ ID NO: 1420710 - RNA, 19 nt, Artificial Sequence
  Description of Artificial Sequence: Synthetic oligonucleotide
cucgagccucaggacuguc

SEQ ID NO: 1420711 - RNA, 19 nt, Artificial Sequence
  Description of Artificial Sequence: Synthetic oligonucleotide
ggcggaucacuggggcugc

SEQ ID NO: 1420712 - RNA, 19 nt, Artificial Sequence
  Description of Artificial Sequence: Synthetic oligonucleotide
caaagccaacugggcccac

SEQ ID NO: 1420713 - RNA, 19 nt, Artificial Sequence
  Description of Artificial Sequence: Synthetic oligonucleotide
cggggauuccggucaccgg

SEQ ID NO: 1420714 - RNA, 19 nt, Artificial Sequence
  Description of Artificial Sequence: Synthetic oligonucleotide
ugcgaucagcagggccaaa

SEQ ID NO: 1420715 - RNA, 19 nt, Artificial Sequence
  Description of Artificial Sequence: Synthetic oligonucleotide
cguucaucucacgcauggc

SEQ ID NO: 1420716 - RNA, 19 nt, Artificial Sequence
  Description of Artificial Sequence: Synthetic oligonucleotide
cguaccaccucgaguggga

SEQ ID NO: 1420717 - RNA, 19 nt, Artificial Sequence
  Description of Artificial Sequence: Synthetic oligonucleotide
aggccacguaccaccucga

SEQ ID NO: 1420718 - RNA, 19 nt, Artificial Sequence
  Description of Artificial Sequence: Synthetic oligonucleotide
cggcaucccacuccagcag

SEQ ID NO: 1420719 - RNA, 19 nt, Artificial Sequence
  Description of Artificial Sequence: Synthetic oligonucleotide
accggggcucccaggacuu

SEQ ID NO: 1420720 - RNA, 19 nt, Artificial Sequence
  Description of Artificial Sequence: Synthetic oligonucleotide
cugcgaucagcagggccaa

SEQ ID NO: 1420721 - RNA, 19 nt, Artificial Sequence
  Description of Artificial Sequence: Synthetic oligonucleotide
cauagagcccagggguggu

SEQ ID NO: 1420722 - RNA, 19 nt, Artificial Sequence
  Description of Artificial Sequence: Synthetic oligonucleotide
uccggucaccggggcuccc

SEQ ID NO: 1420723 - RNA, 19 nt, Artificial Sequence
  Description of Artificial Sequence: Synthetic oligonucleotide
augcagcgcuucaguuucu

SEQ ID NO: 1420724 - RNA, 19 nt, Artificial Sequence
  Description of Artificial Sequence: Synthetic oligonucleotide
cccaccaugggagggacua

SEQ ID NO: 1420725 - RNA, 19 nt, Artificial Sequence
  Description of Artificial Sequence: Synthetic oligonucleotide
acccggccccgggaccacg

SEQ ID NO: 1420726 - RNA, 19 nt, Artificial Sequence
  Description of Artificial Sequence: Synthetic oligonucleotide
gcgccuggcugggugggag

SEQ ID NO: 1420727 - RNA, 19 nt, Artificial Sequence
  Description of Artificial Sequence: Synthetic oligonucleotide
cacggccacugcugcacua

SEQ ID NO: 1420728 - RNA, 19 nt, Artificial Sequence
  Description of Artificial Sequence: Synthetic oligonucleotide
ccugcauggcuucuacggu

SEQ ID NO: 1420729 - RNA, 19 nt, Artificial Sequence
  Description of Artificial Sequence: Synthetic oligonucleotide
gacgcaggauaggggcccu

SEQ ID NO: 1420730 - RNA, 19 nt, Artificial Sequence
  Description of Artificial Sequence: Synthetic oligonucleotide
cccuaucugaggcccaacu

SEQ ID NO: 1420731 - RNA, 19 nt, Artificial Sequence
  Description of Artificial Sequence: Synthetic oligonucleotide
gguacguguugguggcgau

SEQ ID NO: 1420732 - RNA, 19 nt, Artificial Sequence
  Description of Artificial Sequence: Synthetic oligonucleotide
ccaacacccggccccggga

SEQ ID NO: 1420733 - RNA, 19 nt, Artificial Sequence
  Description of Artificial Sequence: Synthetic oligonucleotide
ccuaucugaggcccaacuu

SEQ ID NO: 1420734 - RNA, 19 nt, Artificial Sequence
  Description of Artificial Sequence: Synthetic oligonucleotide
gcaggccacguaccaccuc

SEQ ID NO: 1420735 - RNA, 19 nt, Artificial Sequence
  Description of Artificial Sequence: Synthetic oligonucleotide
gcccacaaaaggagggccu

SEQ ID NO: 1420736 - RNA, 19 nt, Artificial Sequence
  Description of Artificial Sequence: Synthetic oligonucleotide
gugccaagccacagacccu

SEQ ID NO: 1420737 - RNA, 19 nt, Artificial Sequence
  Description of Artificial Sequence: Synthetic oligonucleotide
ccaugggagggacuacugu

SEQ ID NO: 1420738 - RNA, 19 nt, Artificial Sequence
  Description of Artificial Sequence: Synthetic oligonucleotide
gcguggacgcagggacagg

SEQ ID NO: 1420739 - RNA, 19 nt, Artificial Sequence
  Description of Artificial Sequence: Synthetic oligonucleotide
ccacgggcccucccgcaac

SEQ ID NO: 1420740 - RNA, 19 nt, Artificial Sequence
  Description of Artificial Sequence: Synthetic oligonucleotide
gcucccggcugcugugcga

SEQ ID NO: 1420741 - RNA, 19 nt, Artificial Sequence
  Description of Artificial Sequence: Synthetic oligonucleotide
cucccgcaaccgggaggcc

SEQ ID NO: 1420742 - RNA, 19 nt, Artificial Sequence
  Description of Artificial Sequence: Synthetic oligonucleotide
ggcggggauuccggucacc

SEQ ID NO: 1420743 - RNA, 19 nt, Artificial Sequence
  Description of Artificial Sequence: Synthetic oligonucleotide
ccaccaugggagggacuac

SEQ ID NO: 1420744 - RNA, 19 nt, Artificial Sequence
  Description of Artificial Sequence: Synthetic oligonucleotide
ccucccaccaugggaggga

SEQ ID NO: 1420745 - RNA, 19 nt, Artificial Sequence
  Description of Artificial Sequence: Synthetic oligonucleotide
gggaccugcauggcuucua

SEQ ID NO: 1420746 - RNA, 19 nt, Artificial Sequence
  Description of Artificial Sequence: Synthetic oligonucleotide
cugugcgaaugcagcgcuu

SEQ ID NO: 1420747 - RNA, 19 nt, Artificial Sequence
  Description of Artificial Sequence: Synthetic oligonucleotide
ggcccucccgcaaccggga

SEQ ID NO: 1420748 - RNA, 19 nt, Artificial Sequence
  Description of Artificial Sequence: Synthetic oligonucleotide
ccuuagccuuaaggaagga

SEQ ID NO: 1420749 - RNA, 19 nt, Artificial Sequence
  Description of Artificial Sequence: Synthetic oligonucleotide
cacgcauggcgcgcacaua

SEQ ID NO: 1420750 - RNA, 19 nt, Artificial Sequence
  Description of Artificial Sequence: Synthetic oligonucleotide
ccggccccgggaccacggg

SEQ ID NO: 1420751 - RNA, 19 nt, Artificial Sequence
  Description of Artificial Sequence: Synthetic oligonucleotide
cgcggcggggauuccgguc

SEQ ID NO: 1420752 - RNA, 19 nt, Artificial Sequence
  Description of Artificial Sequence: Synthetic oligonucleotide
cgaaugcagcgcuucaguu

SEQ ID NO: 1420753 - RNA, 19 nt, Artificial Sequence
  Description of Artificial Sequence: Synthetic oligonucleotide
cggucaccggggcucccag

SEQ ID NO: 1420754 - RNA, 19 nt, Artificial Sequence
  Description of Artificial Sequence: Synthetic oligonucleotide
gggguccucccagcugcuc

SEQ ID NO: 1420755 - RNA, 19 nt, Artificial Sequence
  Description of Artificial Sequence: Synthetic oligonucleotide
cugcccgggcuuccagggu

SEQ ID NO: 1420756 - RNA, 19 nt, Artificial Sequence
  Description of Artificial Sequence: Synthetic oligonucleotide
cacccggccccgggaccac

SEQ ID NO: 1420757 - RNA, 19 nt, Artificial Sequence
  Description of Artificial Sequence: Synthetic oligonucleotide
gcccaacacccggccccgg

SEQ ID NO: 1420758 - RNA, 19 nt, Artificial Sequence
  Description of Artificial Sequence: Synthetic oligonucleotide
ggggcccucugaggggcca

SEQ ID NO: 1420759 - RNA, 19 nt, Artificial Sequence
  Description of Artificial Sequence: Synthetic oligonucleotide
gggcccucugaggggccac

SEQ ID NO: 1420760 - RNA, 19 nt, Artificial Sequence
  Description of Artificial Sequence: Synthetic oligonucleotide
ccgcaaccgggaggcccgg

SEQ ID NO: 1420761 - RNA, 19 nt, Artificial Sequence
  Description of Artificial Sequence: Synthetic oligonucleotide
ccggcucaggcaagggcau

SEQ ID NO: 1420762 - RNA, 19 nt, Artificial Sequence
  Description of Artificial Sequence: Synthetic oligonucleotide
gcggaucacuggggcugca

SEQ ID NO: 1420763 - RNA, 19 nt, Artificial Sequence
  Description of Artificial Sequence: Synthetic oligonucleotide
ccggucaccggggcuccca

SEQ ID NO: 1420764 - RNA, 19 nt, Artificial Sequence
  Description of Artificial Sequence: Synthetic oligonucleotide
cggcucaggcaagggcaug

SEQ ID NO: 1420765 - RNA, 19 nt, Artificial Sequence
  Description of Artificial Sequence: Synthetic oligonucleotide
cccgggcuuccagggucug

SEQ ID NO: 1420766 - RNA, 19 nt, Artificial Sequence
  Description of Artificial Sequence: Synthetic oligonucleotide
cggcggggauuccggucac

SEQ ID NO: 1420767 - RNA, 19 nt, Artificial Sequence
  Description of Artificial Sequence: Synthetic oligonucleotide
ccgggaccacgggcccucc

SEQ ID NO: 1420768 - RNA, 19 nt, Artificial Sequence
  Description of Artificial Sequence: Synthetic oligonucleotide
cgcaaccgggaggcccggc

SEQ ID NO: 1420769 - RNA, 19 nt, Artificial Sequence
  Description of Artificial Sequence: Synthetic oligonucleotide
gcaccgcggcggggauucc

SEQ ID NO: 1420770 - RNA, 19 nt, Artificial Sequence
  Description of Artificial Sequence: Synthetic oligonucleotide
cgcaggauaggggcccucu

SEQ ID NO: 1420771 - RNA, 19 nt, Artificial Sequence
  Description of Artificial Sequence: Synthetic oligonucleotide
ccggggcucccaggacuuc

SEQ ID NO: 1420772 - RNA, 19 nt, Artificial Sequence
  Description of Artificial Sequence: Synthetic oligonucleotide
ccgcggcggggauuccggu

SEQ ID NO: 1420773 - RNA, 19 nt, Artificial Sequence
  Description of Artificial Sequence: Synthetic oligonucleotide
gggcaccgcggcggggauu

SEQ ID NO: 1420774 - RNA, 19 nt, Artificial Sequence
  Description of Artificial Sequence: Synthetic oligonucleotide
aaauagaacaaguugaccc

SEQ ID NO: 1420775 - RNA, 19 nt, Artificial Sequence
  Description of Artificial Sequence: Synthetic oligonucleotide
aauagagucauucccagac

SEQ ID NO: 1420776 - RNA, 19 nt, Artificial Sequence
  Description of Artificial Sequence: Synthetic oligonucleotide
aauagaacaaguugacccc

SEQ ID NO: 1420777 - RNA, 19 nt, Artificial Sequence
  Description of Artificial Sequence: Synthetic oligonucleotide
aauaaugaugcagaaauag

SEQ ID NO: 1420778 - RNA, 19 nt, Artificial Sequence
  Description of Artificial Sequence: Synthetic oligonucleotide
ucuaguauaaauagcagca

SEQ ID NO: 1420779 - RNA, 19 nt, Artificial Sequence
  Description of Artificial Sequence: Synthetic oligonucleotide
uauugaagaacauggaagc

SEQ ID NO: 1420780 - RNA, 19 nt, Artificial Sequence
  Description of Artificial Sequence: Synthetic oligonucleotide
acuuuauugaagaacaugg

SEQ ID NO: 1420781 - RNA, 19 nt, Artificial Sequence
  Description of Artificial Sequence: Synthetic oligonucleotide
aaaagguuggcugaugaac

SEQ ID NO: 1420782 - RNA, 19 nt, Artificial Sequence
  Description of Artificial Sequence: Synthetic oligonucleotide
uauaaauagcagcaguacc

SEQ ID NO: 1420783 - RNA, 19 nt, Artificial Sequence
  Description of Artificial Sequence: Synthetic oligonucleotide
auagccaaaggucagcugg

SEQ ID NO: 1420784 - RNA, 19 nt, Artificial Sequence
  Description of Artificial Sequence: Synthetic oligonucleotide
acagcugccgcguagaugg

SEQ ID NO: 1420785 - RNA, 19 nt, Artificial Sequence
  Description of Artificial Sequence: Synthetic oligonucleotide
uguugauagucccauagcc

SEQ ID NO: 1420786 - RNA, 19 nt, Artificial Sequence
  Description of Artificial Sequence: Synthetic oligonucleotide
uguaauagagucauuccca

SEQ ID NO: 1420787 - RNA, 19 nt, Artificial Sequence
  Description of Artificial Sequence: Synthetic oligonucleotide
aagcuuuaaauauggcagg

SEQ ID NO: 1420788 - RNA, 19 nt, Artificial Sequence
  Description of Artificial Sequence: Synthetic oligonucleotide
aaaggugguugucacaaag

SEQ ID NO: 1420789 - RNA, 19 nt, Artificial Sequence
  Description of Artificial Sequence: Synthetic oligonucleotide
ugucuaggaacuuagcagc

SEQ ID NO: 1420790 - RNA, 19 nt, Artificial Sequence
  Description of Artificial Sequence: Synthetic oligonucleotide
ucacugaggacgauguugg

SEQ ID NO: 1420791 - RNA, 19 nt, Artificial Sequence
  Description of Artificial Sequence: Synthetic oligonucleotide
uuuaaauauggcagggugu

SEQ ID NO: 1420792 - RNA, 19 nt, Artificial Sequence
  Description of Artificial Sequence: Synthetic oligonucleotide
aaagguuggcugaugaacg

SEQ ID NO: 1420793 - RNA, 19 nt, Artificial Sequence
  Description of Artificial Sequence: Synthetic oligonucleotide
ucugucuaggaacuuagca

SEQ ID NO: 1420794 - RNA, 19 nt, Artificial Sequence
  Description of Artificial Sequence: Synthetic oligonucleotide
ccuguugucagauacaucc

SEQ ID NO: 1420795 - RNA, 19 nt, Artificial Sequence
  Description of Artificial Sequence: Synthetic oligonucleotide
ugcacagacaggaugggcc

SEQ ID NO: 1420796 - RNA, 19 nt, Artificial Sequence
  Description of Artificial Sequence: Synthetic oligonucleotide
cuuguugauagucccauag

SEQ ID NO: 1420797 - RNA, 19 nt, Artificial Sequence
  Description of Artificial Sequence: Synthetic oligonucleotide
cuguaauagagucauuccc

SEQ ID NO: 1420798 - RNA, 19 nt, Artificial Sequence
  Description of Artificial Sequence: Synthetic oligonucleotide
ugaugaacgucucugcaca

SEQ ID NO: 1420799 - RNA, 19 nt, Artificial Sequence
  Description of Artificial Sequence: Synthetic oligonucleotide
cugucuaggaacuuagcag

SEQ ID NO: 1420800 - RNA, 19 nt, Artificial Sequence
  Description of Artificial Sequence: Synthetic oligonucleotide
gaacuuagcagcugucagg

SEQ ID NO: 1420801 - RNA, 19 nt, Artificial Sequence
  Description of Artificial Sequence: Synthetic oligonucleotide
uaguauaaauagcagcagu

SEQ ID NO: 1420802 - RNA, 19 nt, Artificial Sequence
  Description of Artificial Sequence: Synthetic oligonucleotide
gaugcagaaauagaacaag

SEQ ID NO: 1420803 - RNA, 19 nt, Artificial Sequence
  Description of Artificial Sequence: Synthetic oligonucleotide
ugugcuuguugauaguccc

SEQ ID NO: 1420804 - RNA, 19 nt, Artificial Sequence
  Description of Artificial Sequence: Synthetic oligonucleotide
ucaggugaggugaagccag

SEQ ID NO: 1420805 - RNA, 19 nt, Artificial Sequence
  Description of Artificial Sequence: Synthetic oligonucleotide
cucauaguugucuugggug

SEQ ID NO: 1420806 - RNA, 19 nt, Artificial Sequence
  Description of Artificial Sequence: Synthetic oligonucleotide
cugggucuaguauaaauag

SEQ ID NO: 1420807 - RNA, 19 nt, Artificial Sequence
  Description of Artificial Sequence: Synthetic oligonucleotide
auaaauagcagcaguacca

SEQ ID NO: 1420808 - RNA, 19 nt, Artificial Sequence
  Description of Artificial Sequence: Synthetic oligonucleotide
ucuccguacagguaaauaa

SEQ ID NO: 1420809 - RNA, 19 nt, Artificial Sequence
  Description of Artificial Sequence: Synthetic oligonucleotide
uuagcagcugucaggacug

SEQ ID NO: 1420810 - RNA, 19 nt, Artificial Sequence
  Description of Artificial Sequence: Synthetic oligonucleotide
gauacauccugauaucaga

SEQ ID NO: 1420811 - RNA, 19 nt, Artificial Sequence
  Description of Artificial Sequence: Synthetic oligonucleotide
ugaaugcucacucccaccu

SEQ ID NO: 1420812 - RNA, 19 nt, Artificial Sequence
  Description of Artificial Sequence: Synthetic oligonucleotide
uguagaagggaaggggugg

SEQ ID NO: 1420813 - RNA, 19 nt, Artificial Sequence
  Description of Artificial Sequence: Synthetic oligonucleotide
guaauagagucauucccag

SEQ ID NO: 1420814 - RNA, 19 nt, Artificial Sequence
  Description of Artificial Sequence: Synthetic oligonucleotide
acugccuugaguccgggag

SEQ ID NO: 1420815 - RNA, 19 nt, Artificial Sequence
  Description of Artificial Sequence: Synthetic oligonucleotide
cuggaauuaagagggaggg

SEQ ID NO: 1420816 - RNA, 19 nt, Artificial Sequence
  Description of Artificial Sequence: Synthetic oligonucleotide
  modified_base (15)..(15): a, c, u, g, unknown or other
acugcaggucaccunaggg

SEQ ID NO: 1420817 - RNA, 19 nt, Artificial Sequence
  Description of Artificial Sequence: Synthetic oligonucleotide
ugaugcagaaauagaacaa

SEQ ID NO: 1420818 - RNA, 19 nt, Artificial Sequence
  Description of Artificial Sequence: Synthetic oligonucleotide
uaaauagcagcaguaccag

SEQ ID NO: 1420819 - RNA, 19 nt, Artificial Sequence
  Description of Artificial Sequence: Synthetic oligonucleotide
uccguacagguaaauaaug

SEQ ID NO: 1420820 - RNA, 19 nt, Artificial Sequence
  Description of Artificial Sequence: Synthetic oligonucleotide
aaauauggcaggguguaga

SEQ ID NO: 1420821 - RNA, 19 nt, Artificial Sequence
  Description of Artificial Sequence: Synthetic oligonucleotide
gugugugacagcugggucg

SEQ ID NO: 1420822 - RNA, 19 nt, Artificial Sequence
  Description of Artificial Sequence: Synthetic oligonucleotide
gaaauagaacaaguugacc

SEQ ID NO: 1420823 - RNA, 19 nt, Artificial Sequence
  Description of Artificial Sequence: Synthetic oligonucleotide
aacuuagcagcugucagga

SEQ ID NO: 1420824 - RNA, 19 nt, Artificial Sequence
  Description of Artificial Sequence: Synthetic oligonucleotide
guacagguaaauaaugaug

SEQ ID NO: 1420825 - RNA, 19 nt, Artificial Sequence
  Description of Artificial Sequence: Synthetic oligonucleotide
accagugguccccacauuc

SEQ ID NO: 1420826 - RNA, 19 nt, Artificial Sequence
  Description of Artificial Sequence: Synthetic oligonucleotide
ugauaucagagcugggucu

SEQ ID NO: 1420827 - RNA, 19 nt, Artificial Sequence
  Description of Artificial Sequence: Synthetic oligonucleotide
agucccauagccaaagguc

SEQ ID NO: 1420828 - RNA, 19 nt, Artificial Sequence
  Description of Artificial Sequence: Synthetic oligonucleotide
aauauggcaggguguagaa

SEQ ID NO: 1420829 - RNA, 19 nt, Artificial Sequence
  Description of Artificial Sequence: Synthetic oligonucleotide
uuaaauauggcagggugua

SEQ ID NO: 1420830 - RNA, 19 nt, Artificial Sequence
  Description of Artificial Sequence: Synthetic oligonucleotide
agagccagggccugggaac

SEQ ID NO: 1420831 - RNA, 19 nt, Artificial Sequence
  Description of Artificial Sequence: Synthetic oligonucleotide
cugaggacgauguuggcug

SEQ ID NO: 1420832 - RNA, 19 nt, Artificial Sequence
  Description of Artificial Sequence: Synthetic oligonucleotide
ggaauuaagagggagggug

SEQ ID NO: 1420833 - RNA, 19 nt, Artificial Sequence
  Description of Artificial Sequence: Synthetic oligonucleotide
gauagucccauagccaaag

SEQ ID NO: 1420834 - RNA, 19 nt, Artificial Sequence
  Description of Artificial Sequence: Synthetic oligonucleotide
ugggucuaguauaaauagc

SEQ ID NO: 1420835 - RNA, 19 nt, Artificial Sequence
  Description of Artificial Sequence: Synthetic oligonucleotide
aacucgccuuugaagaggc

SEQ ID NO: 1420836 - RNA, 19 nt, Artificial Sequence
  Description of Artificial Sequence: Synthetic oligonucleotide
  modified_base (7)..(7): a, c, u, g, unknown or other
ucaccunagggagaagggc

SEQ ID NO: 1420837 - RNA, 19 nt, Artificial Sequence
  Description of Artificial Sequence: Synthetic oligonucleotide
ugggaacucgccuuugaag

SEQ ID NO: 1420838 - RNA, 19 nt, Artificial Sequence
  Description of Artificial Sequence: Synthetic oligonucleotide
cacccuucaccccagaggc

SEQ ID NO: 1420839 - RNA, 19 nt, Artificial Sequence
  Description of Artificial Sequence: Synthetic oligonucleotide
uccuugaggguucugcaca

SEQ ID NO: 1420840 - RNA, 19 nt, Artificial Sequence
  Description of Artificial Sequence: Synthetic oligonucleotide
auaggcuccuguaauagag

SEQ ID NO: 1420841 - RNA, 19 nt, Artificial Sequence
  Description of Artificial Sequence: Synthetic oligonucleotide
agagcuagcgggugccacc

SEQ ID NO: 1420842 - RNA, 19 nt, Artificial Sequence
  Description of Artificial Sequence: Synthetic oligonucleotide
ucccauguggugaggacag

SEQ ID NO: 1420843 - RNA, 19 nt, Artificial Sequence
  Description of Artificial Sequence: Synthetic oligonucleotide
guugucuugggugaggaug

SEQ ID NO: 1420844 - RNA, 19 nt, Artificial Sequence
  Description of Artificial Sequence: Synthetic oligonucleotide
agguaaauaaugaugcaga

SEQ ID NO: 1420845 - RNA, 19 nt, Artificial Sequence
  Description of Artificial Sequence: Synthetic oligonucleotide
cauccaacagcauagcaga

SEQ ID NO: 1420846 - RNA, 19 nt, Artificial Sequence
  Description of Artificial Sequence: Synthetic oligonucleotide
gcaaguucccucaugaggg

SEQ ID NO: 1420847 - RNA, 19 nt, Artificial Sequence
  Description of Artificial Sequence: Synthetic oligonucleotide
ugagggagagacgagcaag

SEQ ID NO: 1420848 - RNA, 19 nt, Artificial Sequence
  Description of Artificial Sequence: Synthetic oligonucleotide
gucagauacauccugauau

SEQ ID NO: 1420849 - RNA, 19 nt, Artificial Sequence
  Description of Artificial Sequence: Synthetic oligonucleotide
ugugugacagcugggucgg

SEQ ID NO: 1420850 - RNA, 19 nt, Artificial Sequence
  Description of Artificial Sequence: Synthetic oligonucleotide
gagucauucccagacacac

SEQ ID NO: 1420851 - RNA, 19 nt, Artificial Sequence
  Description of Artificial Sequence: Synthetic oligonucleotide
ggagaaagcccacaguagc

SEQ ID NO: 1420852 - RNA, 19 nt, Artificial Sequence
  Description of Artificial Sequence: Synthetic oligonucleotide
augucacuaucugaggccg

SEQ ID NO: 1420853 - RNA, 19 nt, Artificial Sequence
  Description of Artificial Sequence: Synthetic oligonucleotide
auaaugaugcagaaauaga

SEQ ID NO: 1420854 - RNA, 19 nt, Artificial Sequence
  Description of Artificial Sequence: Synthetic oligonucleotide
ugucccuaccuccuguugu

SEQ ID NO: 1420855 - RNA, 19 nt, Artificial Sequence
  Description of Artificial Sequence: Synthetic oligonucleotide
aagguuggcugaugaacgu

SEQ ID NO: 1420856 - RNA, 19 nt, Artificial Sequence
  Description of Artificial Sequence: Synthetic oligonucleotide
cugaugaacgucucugcac

SEQ ID NO: 1420857 - RNA, 19 nt, Artificial Sequence
  Description of Artificial Sequence: Synthetic oligonucleotide
cugauaucagagcuggguc

SEQ ID NO: 1420858 - RNA, 19 nt, Artificial Sequence
  Description of Artificial Sequence: Synthetic oligonucleotide
aguauaaauagcagcagua

SEQ ID NO: 1420859 - RNA, 19 nt, Artificial Sequence
  Description of Artificial Sequence: Synthetic oligonucleotide
uaguggacggucgaggaug

SEQ ID NO: 1420860 - RNA, 19 nt, Artificial Sequence
  Description of Artificial Sequence: Synthetic oligonucleotide
auacauccugauaucagag

SEQ ID NO: 1420861 - RNA, 19 nt, Artificial Sequence
  Description of Artificial Sequence: Synthetic oligonucleotide
ucgccuuugaagaggcagc

SEQ ID NO: 1420862 - RNA, 19 nt, Artificial Sequence
  Description of Artificial Sequence: Synthetic oligonucleotide
cauuccuugaggguucugc

SEQ ID NO: 1420863 - RNA, 19 nt, Artificial Sequence
  Description of Artificial Sequence: Synthetic oligonucleotide
gaacucgccuuugaagagg

SEQ ID NO: 1420864 - RNA, 19 nt, Artificial Sequence
  Description of Artificial Sequence: Synthetic oligonucleotide
gaguggaggaaugugugug

SEQ ID NO: 1420865 - RNA, 19 nt, Artificial Sequence
  Description of Artificial Sequence: Synthetic oligonucleotide
acaaaggugguugucacaa

SEQ ID NO: 1420866 - RNA, 19 nt, Artificial Sequence
  Description of Artificial Sequence: Synthetic oligonucleotide
uguggugaggacagcugug

SEQ ID NO: 1420867 - RNA, 19 nt, Artificial Sequence
  Description of Artificial Sequence: Synthetic oligonucleotide
aaugugcccugcccaucac

SEQ ID NO: 1420868 - RNA, 19 nt, Artificial Sequence
  Description of Artificial Sequence: Synthetic oligonucleotide
gaugccggugcccgcauag

SEQ ID NO: 1420869 - RNA, 19 nt, Artificial Sequence
  Description of Artificial Sequence: Synthetic oligonucleotide
cagguuaggagagccaggg

SEQ ID NO: 1420870 - RNA, 19 nt, Artificial Sequence
  Description of Artificial Sequence: Synthetic oligonucleotide
aaugugugugacagcuggg

SEQ ID NO: 1420871 - RNA, 19 nt, Artificial Sequence
  Description of Artificial Sequence: Synthetic oligonucleotide
aggacugucaggaaaugug

SEQ ID NO: 1420872 - RNA, 19 nt, Artificial Sequence
  Description of Artificial Sequence: Synthetic oligonucleotide
cccacaguagcacaaaggc

SEQ ID NO: 1420873 - RNA, 19 nt, Artificial Sequence
  Description of Artificial Sequence: Synthetic oligonucleotide
aucacaaaggugguuguca

SEQ ID NO: 1420874 - RNA, 19 nt, Artificial Sequence
  Description of Artificial Sequence: Synthetic oligonucleotide
gaggucuccguacagguaa

SEQ ID NO: 1420875 - RNA, 19 nt, Artificial Sequence
  Description of Artificial Sequence: Synthetic oligonucleotide
acuaucugaggccguggag

SEQ ID NO: 1420876 - RNA, 19 nt, Artificial Sequence
  Description of Artificial Sequence: Synthetic oligonucleotide
ggaacuuagcagcugucag

SEQ ID NO: 1420877 - RNA, 19 nt, Artificial Sequence
  Description of Artificial Sequence: Synthetic oligonucleotide
ucuuggucccaugugguga

SEQ ID NO: 1420878 - RNA, 19 nt, Artificial Sequence
  Description of Artificial Sequence: Synthetic oligonucleotide
augacauacuggaugccgg

SEQ ID NO: 1420879 - RNA, 19 nt, Artificial Sequence
  Description of Artificial Sequence: Synthetic oligonucleotide
acgauguuggcugugacaa

SEQ ID NO: 1420880 - RNA, 19 nt, Artificial Sequence
  Description of Artificial Sequence: Synthetic oligonucleotide
agcagguuaggagagccag

SEQ ID NO: 1420881 - RNA, 19 nt, Artificial Sequence
  Description of Artificial Sequence: Synthetic oligonucleotide
acgagcaaggcacuggaau

SEQ ID NO: 1420882 - RNA, 19 nt, Artificial Sequence
  Description of Artificial Sequence: Synthetic oligonucleotide
gaugaacgucucugcacag

SEQ ID NO: 1420883 - RNA, 19 nt, Artificial Sequence
  Description of Artificial Sequence: Synthetic oligonucleotide
ucccauagccaaaggucag

SEQ ID NO: 1420884 - RNA, 19 nt, Artificial Sequence
  Description of Artificial Sequence: Synthetic oligonucleotide
ugugcccugcccaucacaa

SEQ ID NO: 1420885 - RNA, 19 nt, Artificial Sequence
  Description of Artificial Sequence: Synthetic oligonucleotide
  modified_base (9)..(9): a, c, u, g, unknown or other
ggucaccunagggagaagg

SEQ ID NO: 1420886 - RNA, 19 nt, Artificial Sequence
  Description of Artificial Sequence: Synthetic oligonucleotide
gcucaagcuuuaaauaugg

SEQ ID NO: 1420887 - RNA, 19 nt, Artificial Sequence
  Description of Artificial Sequence: Synthetic oligonucleotide
gauggcgaggucuccguac

SEQ ID NO: 1420888 - RNA, 19 nt, Artificial Sequence
  Description of Artificial Sequence: Synthetic oligonucleotide
auagagucauucccagaca

SEQ ID NO: 1420889 - RNA, 19 nt, Artificial Sequence
  Description of Artificial Sequence: Synthetic oligonucleotide
ugucagauacauccugaua

SEQ ID NO: 1420890 - RNA, 19 nt, Artificial Sequence
  Description of Artificial Sequence: Synthetic oligonucleotide
auagucccauagccaaagg

SEQ ID NO: 1420891 - RNA, 19 nt, Artificial Sequence
  Description of Artificial Sequence: Synthetic oligonucleotide
ugugugugacagcuggguc

SEQ ID NO: 1420892 - RNA, 19 nt, Artificial Sequence
  Description of Artificial Sequence: Synthetic oligonucleotide
aaauaaugaugcagaaaua

SEQ ID NO: 1420893 - RNA, 19 nt, Artificial Sequence
  Description of Artificial Sequence: Synthetic oligonucleotide
cucgccuuugaagaggcag

SEQ ID NO: 1420894 - RNA, 19 nt, Artificial Sequence
  Description of Artificial Sequence: Synthetic oligonucleotide
gaggguguggcggaacggg

SEQ ID NO: 1420895 - RNA, 19 nt, Artificial Sequence
  Description of Artificial Sequence: Synthetic oligonucleotide
ccuguaauagagucauucc

SEQ ID NO: 1420896 - RNA, 19 nt, Artificial Sequence
  Description of Artificial Sequence: Synthetic oligonucleotide
uggcugaugaacgucucug

SEQ ID NO: 1420897 - RNA, 19 nt, Artificial Sequence
  Description of Artificial Sequence: Synthetic oligonucleotide
uggaggagucuucaucuuc

SEQ ID NO: 1420898 - RNA, 19 nt, Artificial Sequence
  Description of Artificial Sequence: Synthetic oligonucleotide
gggucuaguauaaauagca

SEQ ID NO: 1420899 - RNA, 19 nt, Artificial Sequence
  Description of Artificial Sequence: Synthetic oligonucleotide
gcagggaugacauacugga

SEQ ID NO: 1420900 - RNA, 19 nt, Artificial Sequence
  Description of Artificial Sequence: Synthetic oligonucleotide
cuuggucccauguggugag

SEQ ID NO: 1420901 - RNA, 19 nt, Artificial Sequence
  Description of Artificial Sequence: Synthetic oligonucleotide
  modified_base (16)..(16): a, c, u, g, unknown or other
cacugcaggucaccunagg

SEQ ID NO: 1420902 - RNA, 19 nt, Artificial Sequence
  Description of Artificial Sequence: Synthetic oligonucleotide
aguggaggaauguguguga

SEQ ID NO: 1420903 - RNA, 19 nt, Artificial Sequence
  Description of Artificial Sequence: Synthetic oligonucleotide
guugauagucccauagcca

SEQ ID NO: 1420904 - RNA, 19 nt, Artificial Sequence
  Description of Artificial Sequence: Synthetic oligonucleotide
gauaucagagcugggucuc

SEQ ID NO: 1420905 - RNA, 19 nt, Artificial Sequence
  Description of Artificial Sequence: Synthetic oligonucleotide
uggacggucgaggaugcag

SEQ ID NO: 1420906 - RNA, 19 nt, Artificial Sequence
  Description of Artificial Sequence: Synthetic oligonucleotide
ucuaggaacuuagcagcug

SEQ ID NO: 1420907 - RNA, 19 nt, Artificial Sequence
  Description of Artificial Sequence: Synthetic oligonucleotide
  modified_base (8)..(8): a, c, u, g, unknown or other
gucaccunagggagaaggg

SEQ ID NO: 1420908 - RNA, 19 nt, Artificial Sequence
  Description of Artificial Sequence: Synthetic oligonucleotide
ugacauacuggaugccggu

SEQ ID NO: 1420909 - RNA, 19 nt, Artificial Sequence
  Description of Artificial Sequence: Synthetic oligonucleotide
acguggaaggccuucucca

SEQ ID NO: 1420910 - RNA, 19 nt, Artificial Sequence
  Description of Artificial Sequence: Synthetic oligonucleotide
uugucagauacauccugau

SEQ ID NO: 1420911 - RNA, 19 nt, Artificial Sequence
  Description of Artificial Sequence: Synthetic oligonucleotide
guagauggcgaggucuccg

SEQ ID NO: 1420912 - RNA, 19 nt, Artificial Sequence
  Description of Artificial Sequence: Synthetic oligonucleotide
auaguugucuugggugagg

SEQ ID NO: 1420913 - RNA, 19 nt, Artificial Sequence
  Description of Artificial Sequence: Synthetic oligonucleotide
  modified_base (5)..(5): a, c, u, g, unknown or other
accunagggagaagggcac

SEQ ID NO: 1420914 - RNA, 19 nt, Artificial Sequence
  Description of Artificial Sequence: Synthetic oligonucleotide
uuuccacccggucugugau

SEQ ID NO: 1420915 - RNA, 19 nt, Artificial Sequence
  Description of Artificial Sequence: Synthetic oligonucleotide
agcucaagcuuuaaauaug

SEQ ID NO: 1420916 - RNA, 19 nt, Artificial Sequence
  Description of Artificial Sequence: Synthetic oligonucleotide
guaaauaaugaugcagaaa

SEQ ID NO: 1420917 - RNA, 19 nt, Artificial Sequence
  Description of Artificial Sequence: Synthetic oligonucleotide
  modified_base (3)..(3): a, c, u, g, unknown or other
cunagggagaagggcacag

SEQ ID NO: 1420918 - RNA, 19 nt, Artificial Sequence
  Description of Artificial Sequence: Synthetic oligonucleotide
gaguccgggaggcuggcgc

SEQ ID NO: 1420919 - RNA, 19 nt, Artificial Sequence
  Description of Artificial Sequence: Synthetic oligonucleotide
cacuggaauuaagagggag

SEQ ID NO: 1420920 - RNA, 19 nt, Artificial Sequence
  Description of Artificial Sequence: Synthetic oligonucleotide
uaggcuccuguaauagagu

SEQ ID NO: 1420921 - RNA, 19 nt, Artificial Sequence
  Description of Artificial Sequence: Synthetic oligonucleotide
ugucaggaaaugugcccug

SEQ ID NO: 1420922 - RNA, 19 nt, Artificial Sequence
  Description of Artificial Sequence: Synthetic oligonucleotide
  modified_base (6)..(6): a, c, u, g, unknown or other
caccunagggagaagggca

SEQ ID NO: 1420923 - RNA, 19 nt, Artificial Sequence
  Description of Artificial Sequence: Synthetic oligonucleotide
uuggcugaugaacgucucu

SEQ ID NO: 1420924 - RNA, 19 nt, Artificial Sequence
  Description of Artificial Sequence: Synthetic oligonucleotide
agacacacugcaggucacc

SEQ ID NO: 1420925 - RNA, 19 nt, Artificial Sequence
  Description of Artificial Sequence: Synthetic oligonucleotide
uugggugaggaugucacua

SEQ ID NO: 1420926 - RNA, 19 nt, Artificial Sequence
  Description of Artificial Sequence: Synthetic oligonucleotide
augcagaaauagaacaagu

SEQ ID NO: 1420927 - RNA, 19 nt, Artificial Sequence
  Description of Artificial Sequence: Synthetic oligonucleotide
ugauagucccauagccaaa

SEQ ID NO: 1420928 - RNA, 19 nt, Artificial Sequence
  Description of Artificial Sequence: Synthetic oligonucleotide
gugaaugcucacucccacc

SEQ ID NO: 1420929 - RNA, 19 nt, Artificial Sequence
  Description of Artificial Sequence: Synthetic oligonucleotide
ucacuaucugaggccgugg

SEQ ID NO: 1420930 - RNA, 19 nt, Artificial Sequence
  Description of Artificial Sequence: Synthetic oligonucleotide
uagcgggugccaccagugg

SEQ ID NO: 1420931 - RNA, 19 nt, Artificial Sequence
  Description of Artificial Sequence: Synthetic oligonucleotide
caugagggagagacgagca

SEQ ID NO: 1420932 - RNA, 19 nt, Artificial Sequence
  Description of Artificial Sequence: Synthetic oligonucleotide
aggaacuuagcagcuguca

SEQ ID NO: 1420933 - RNA, 19 nt, Artificial Sequence
  Description of Artificial Sequence: Synthetic oligonucleotide
uggaggaaugugugugaca

SEQ ID NO: 1420934 - RNA, 19 nt, Artificial Sequence
  Description of Artificial Sequence: Synthetic oligonucleotide
uaguugucuugggugagga

SEQ ID NO: 1420935 - RNA, 19 nt, Artificial Sequence
  Description of Artificial Sequence: Synthetic oligonucleotide
cuuagcagcugucaggacu

SEQ ID NO: 1420936 - RNA, 19 nt, Artificial Sequence
  Description of Artificial Sequence: Synthetic oligonucleotide
gugacagcugggucgggag

SEQ ID NO: 1420937 - RNA, 19 nt, Artificial Sequence
  Description of Artificial Sequence: Synthetic oligonucleotide
agcuacccgccucagguga

SEQ ID NO: 1420938 - RNA, 19 nt, Artificial Sequence
  Description of Artificial Sequence: Synthetic oligonucleotide
ugcuuguugauagucccau

SEQ ID NO: 1420939 - RNA, 19 nt, Artificial Sequence
  Description of Artificial Sequence: Synthetic oligonucleotide
aaagcccacaguagcacaa

SEQ ID NO: 1420940 - RNA, 19 nt, Artificial Sequence
  Description of Artificial Sequence: Synthetic oligonucleotide
agacaggaugggccguuuc

SEQ ID NO: 1420941 - RNA, 19 nt, Artificial Sequence
  Description of Artificial Sequence: Synthetic oligonucleotide
guucugcacagaccccugg

SEQ ID NO: 1420942 - RNA, 19 nt, Artificial Sequence
  Description of Artificial Sequence: Synthetic oligonucleotide
cugccuugaguccgggagg

SEQ ID NO: 1420943 - RNA, 19 nt, Artificial Sequence
  Description of Artificial Sequence: Synthetic oligonucleotide
  modified_base (2)..(2): a, c, u, g, unknown or other
unagggagaagggcacagc

SEQ ID NO: 1420944 - RNA, 19 nt, Artificial Sequence
  Description of Artificial Sequence: Synthetic oligonucleotide
auagcagagcucaagcuuu

SEQ ID NO: 1420945 - RNA, 19 nt, Artificial Sequence
  Description of Artificial Sequence: Synthetic oligonucleotide
guugucagauacauccuga

SEQ ID NO: 1420946 - RNA, 19 nt, Artificial Sequence
  Description of Artificial Sequence: Synthetic oligonucleotide
cugggcguuggcugcagcc

SEQ ID NO: 1420947 - RNA, 19 nt, Artificial Sequence
  Description of Artificial Sequence: Synthetic oligonucleotide
agacguggaaggccuucuc

SEQ ID NO: 1420948 - RNA, 19 nt, Artificial Sequence
  Description of Artificial Sequence: Synthetic oligonucleotide
aggaguggaggaaugugug

SEQ ID NO: 1420949 - RNA, 19 nt, Artificial Sequence
  Description of Artificial Sequence: Synthetic oligonucleotide
cauagccaaaggucagcug

SEQ ID NO: 1420950 - RNA, 19 nt, Artificial Sequence
  Description of Artificial Sequence: Synthetic oligonucleotide
cucaugagggagagacgag

SEQ ID NO: 1420951 - RNA, 19 nt, Artificial Sequence
  Description of Artificial Sequence: Synthetic oligonucleotide
ggaacucgccuuugaagag

SEQ ID NO: 1420952 - RNA, 19 nt, Artificial Sequence
  Description of Artificial Sequence: Synthetic oligonucleotide
  modified_base (18)..(18): a, c, u, g, unknown or other
cacacugcaggucaccuna

SEQ ID NO: 1420953 - RNA, 19 nt, Artificial Sequence
  Description of Artificial Sequence: Synthetic oligonucleotide
cauaguugucuugggugag

SEQ ID NO: 1420954 - RNA, 19 nt, Artificial Sequence
  Description of Artificial Sequence: Synthetic oligonucleotide
ugucaccugccaucugccc

SEQ ID NO: 1420955 - RNA, 19 nt, Artificial Sequence
  Description of Artificial Sequence: Synthetic oligonucleotide
uggaauuaagagggagggu

SEQ ID NO: 1420956 - RNA, 19 nt, Artificial Sequence
  Description of Artificial Sequence: Synthetic oligonucleotide
ugugacagcugggucggga

SEQ ID NO: 1420957 - RNA, 19 nt, Artificial Sequence
  Description of Artificial Sequence: Synthetic oligonucleotide
auggcgaggucuccguaca

SEQ ID NO: 1420958 - RNA, 19 nt, Artificial Sequence
  Description of Artificial Sequence: Synthetic oligonucleotide
uguggcggaacggggaccu

SEQ ID NO: 1420959 - RNA, 19 nt, Artificial Sequence
  Description of Artificial Sequence: Synthetic oligonucleotide
auauggcaggguguagaag

SEQ ID NO: 1420960 - RNA, 19 nt, Artificial Sequence
  Description of Artificial Sequence: Synthetic oligonucleotide
ggacugucaggaaaugugc

SEQ ID NO: 1420961 - RNA, 19 nt, Artificial Sequence
  Description of Artificial Sequence: Synthetic oligonucleotide
gacacugggucuaguauaa

SEQ ID NO: 1420962 - RNA, 19 nt, Artificial Sequence
  Description of Artificial Sequence: Synthetic oligonucleotide
ucaggacugucaggaaaug

SEQ ID NO: 1420963 - RNA, 19 nt, Artificial Sequence
  Description of Artificial Sequence: Synthetic oligonucleotide
guagaagggaagggguggc

SEQ ID NO: 1420964 - RNA, 19 nt, Artificial Sequence
  Description of Artificial Sequence: Synthetic oligonucleotide
gacuggguggcaguuaaaa

SEQ ID NO: 1420965 - RNA, 19 nt, Artificial Sequence
  Description of Artificial Sequence: Synthetic oligonucleotide
cgcaaguucccucaugagg

SEQ ID NO: 1420966 - RNA, 19 nt, Artificial Sequence
  Description of Artificial Sequence: Synthetic oligonucleotide
uguccuugcggcagaggua

SEQ ID NO: 1420967 - RNA, 19 nt, Artificial Sequence
  Description of Artificial Sequence: Synthetic oligonucleotide
ggugaaugcucacucccac

SEQ ID NO: 1420968 - RNA, 19 nt, Artificial Sequence
  Description of Artificial Sequence: Synthetic oligonucleotide
aagggcacagcugccgcgu

SEQ ID NO: 1420969 - RNA, 19 nt, Artificial Sequence
  Description of Artificial Sequence: Synthetic oligonucleotide
guucccucaugagggagag

SEQ ID NO: 1420970 - RNA, 19 nt, Artificial Sequence
  Description of Artificial Sequence: Synthetic oligonucleotide
cugcacagaccccuggguc

SEQ ID NO: 1420971 - RNA, 19 nt, Artificial Sequence
  Description of Artificial Sequence: Synthetic oligonucleotide
ccaucugucccauuuccac

SEQ ID NO: 1420972 - RNA, 19 nt, Artificial Sequence
  Description of Artificial Sequence: Synthetic oligonucleotide
gcacaaaggccacccagag

SEQ ID NO: 1420973 - RNA, 19 nt, Artificial Sequence
  Description of Artificial Sequence: Synthetic oligonucleotide
aaggcagggaugacauacu

SEQ ID NO: 1420974 - RNA, 19 nt, Artificial Sequence
  Description of Artificial Sequence: Synthetic oligonucleotide
uccuguugucagauacauc

SEQ ID NO: 1420975 - RNA, 19 nt, Artificial Sequence
  Description of Artificial Sequence: Synthetic oligonucleotide
gucacuaucugaggccgug

SEQ ID NO: 1420976 - RNA, 19 nt, Artificial Sequence
  Description of Artificial Sequence: Synthetic oligonucleotide
ugucacuaucugaggccgu

SEQ ID NO: 1420977 - RNA, 19 nt, Artificial Sequence
  Description of Artificial Sequence: Synthetic oligonucleotide
gaacggggaccugugcuug

SEQ ID NO: 1420978 - RNA, 19 nt, Artificial Sequence
  Description of Artificial Sequence: Synthetic oligonucleotide
cauaggcuccuguaauaga

SEQ ID NO: 1420979 - RNA, 19 nt, Artificial Sequence
  Description of Artificial Sequence: Synthetic oligonucleotide
ggcgcaaguucccucauga

SEQ ID NO: 1420980 - RNA, 19 nt, Artificial Sequence
  Description of Artificial Sequence: Synthetic oligonucleotide
agaggguguggcggaacgg

SEQ ID NO: 1420981 - RNA, 19 nt, Artificial Sequence
  Description of Artificial Sequence: Synthetic oligonucleotide
ugaggacgauguuggcugu

SEQ ID NO: 1420982 - RNA, 19 nt, Artificial Sequence
  Description of Artificial Sequence: Synthetic oligonucleotide
augagggagagacgagcaa

SEQ ID NO: 1420983 - RNA, 19 nt, Artificial Sequence
  Description of Artificial Sequence: Synthetic oligonucleotide
ggacggucgaggaugcagg

SEQ ID NO: 1420984 - RNA, 19 nt, Artificial Sequence
  Description of Artificial Sequence: Synthetic oligonucleotide
agcugcuaguggacggucg

SEQ ID NO: 1420985 - RNA, 19 nt, Artificial Sequence
  Description of Artificial Sequence: Synthetic oligonucleotide
uggcgcaaguucccucaug

SEQ ID NO: 1420986 - RNA, 19 nt, Artificial Sequence
  Description of Artificial Sequence: Synthetic oligonucleotide
agagucauucccagacaca

SEQ ID NO: 1420987 - RNA, 19 nt, Artificial Sequence
  Description of Artificial Sequence: Synthetic oligonucleotide
gcugaugaacgucucugca

SEQ ID NO: 1420988 - RNA, 19 nt, Artificial Sequence
  Description of Artificial Sequence: Synthetic oligonucleotide
cugcccaucacaagcaggu

SEQ ID NO: 1420989 - RNA, 19 nt, Artificial Sequence
  Description of Artificial Sequence: Synthetic oligonucleotide
augaacgucucugcacaga

SEQ ID NO: 1420990 - RNA, 19 nt, Artificial Sequence
  Description of Artificial Sequence: Synthetic oligonucleotide
uggucccauguggugagga

SEQ ID NO: 1420991 - RNA, 19 nt, Artificial Sequence
  Description of Artificial Sequence: Synthetic oligonucleotide
ugccgcguagauggcgagg

SEQ ID NO: 1420992 - RNA, 19 nt, Artificial Sequence
  Description of Artificial Sequence: Synthetic oligonucleotide
uagcagagcucaagcuuua

SEQ ID NO: 1420993 - RNA, 19 nt, Artificial Sequence
  Description of Artificial Sequence: Synthetic oligonucleotide
uggguguccuugcggcaga

SEQ ID NO: 1420994 - RNA, 19 nt, Artificial Sequence
  Description of Artificial Sequence: Synthetic oligonucleotide
agcugccgcguagauggcg

SEQ ID NO: 1420995 - RNA, 19 nt, Artificial Sequence
  Description of Artificial Sequence: Synthetic oligonucleotide
ggucgaggaugcaggaggg

SEQ ID NO: 1420996 - RNA, 19 nt, Artificial Sequence
  Description of Artificial Sequence: Synthetic oligonucleotide
uccacccggucugugauuu

SEQ ID NO: 1420997 - RNA, 19 nt, Artificial Sequence
  Description of Artificial Sequence: Synthetic oligonucleotide
aguugucuugggugaggau

SEQ ID NO: 1420998 - RNA, 19 nt, Artificial Sequence
  Description of Artificial Sequence: Synthetic oligonucleotide
cacaaaggugguugucaca

SEQ ID NO: 1420999 - RNA, 19 nt, Artificial Sequence
  Description of Artificial Sequence: Synthetic oligonucleotide
aguccgggaggcuggcgcu

SEQ ID NO: 1421000 - RNA, 19 nt, Artificial Sequence
  Description of Artificial Sequence: Synthetic oligonucleotide
cacugaggacgauguuggc

SEQ ID NO: 1421001 - RNA, 19 nt, Artificial Sequence
  Description of Artificial Sequence: Synthetic oligonucleotide
gagcaaggcacuggaauua

SEQ ID NO: 1421002 - RNA, 19 nt, Artificial Sequence
  Description of Artificial Sequence: Synthetic oligonucleotide
aggacgauguuggcuguga

SEQ ID NO: 1421003 - RNA, 19 nt, Artificial Sequence
  Description of Artificial Sequence: Synthetic oligonucleotide
uuccagcggagcugggcgu

SEQ ID NO: 1421004 - RNA, 19 nt, Artificial Sequence
  Description of Artificial Sequence: Synthetic oligonucleotide
cagggcauccaacagcaua

SEQ ID NO: 1421005 - RNA, 19 nt, Artificial Sequence
  Description of Artificial Sequence: Synthetic oligonucleotide
cagcagcugcuaguggacg

SEQ ID NO: 1421006 - RNA, 19 nt, Artificial Sequence
  Description of Artificial Sequence: Synthetic oligonucleotide
cucaggugaggugaagcca

SEQ ID NO: 1421007 - RNA, 19 nt, Artificial Sequence
  Description of Artificial Sequence: Synthetic oligonucleotide
ccugcccaucacaagcagg

SEQ ID NO: 1421008 - RNA, 19 nt, Artificial Sequence
  Description of Artificial Sequence: Synthetic oligonucleotide
caggaguggaggaaugugu

SEQ ID NO: 1421009 - RNA, 19 nt, Artificial Sequence
  Description of Artificial Sequence: Synthetic oligonucleotide
guuaggagagccagggccu

SEQ ID NO: 1421010 - RNA, 19 nt, Artificial Sequence
  Description of Artificial Sequence: Synthetic oligonucleotide
aggguguggcggaacgggg

SEQ ID NO: 1421011 - RNA, 19 nt, Artificial Sequence
  Description of Artificial Sequence: Synthetic oligonucleotide
ugguugucacaaagcucau

SEQ ID NO: 1421012 - RNA, 19 nt, Artificial Sequence
  Description of Artificial Sequence: Synthetic oligonucleotide
ccguacagguaaauaauga

SEQ ID NO: 1421013 - RNA, 19 nt, Artificial Sequence
  Description of Artificial Sequence: Synthetic oligonucleotide
cuccguacagguaaauaau

SEQ ID NO: 1421014 - RNA, 19 nt, Artificial Sequence
  Description of Artificial Sequence: Synthetic oligonucleotide
agcucugucuaggaacuua

SEQ ID NO: 1421015 - RNA, 19 nt, Artificial Sequence
  Description of Artificial Sequence: Synthetic oligonucleotide
cugucccuaccuccuguug

SEQ ID NO: 1421016 - RNA, 19 nt, Artificial Sequence
  Description of Artificial Sequence: Synthetic oligonucleotide
caaguucccucaugaggga

SEQ ID NO: 1421017 - RNA, 19 nt, Artificial Sequence
  Description of Artificial Sequence: Synthetic oligonucleotide
ugggucgggagagggcacc

SEQ ID NO: 1421018 - RNA, 19 nt, Artificial Sequence
  Description of Artificial Sequence: Synthetic oligonucleotide
  modified_base (19)..(19): a, c, u, g, unknown or other
acacacugcaggucaccun

SEQ ID NO: 1421019 - RNA, 19 nt, Artificial Sequence
  Description of Artificial Sequence: Synthetic oligonucleotide
agucauucccagacacacu

SEQ ID NO: 1421020 - RNA, 19 nt, Artificial Sequence
  Description of Artificial Sequence: Synthetic oligonucleotide
gaagaacauggaagccauc

SEQ ID NO: 1421021 - RNA, 19 nt, Artificial Sequence
  Description of Artificial Sequence: Synthetic oligonucleotide
ggcauccaacagcauagca

SEQ ID NO: 1421022 - RNA, 19 nt, Artificial Sequence
  Description of Artificial Sequence: Synthetic oligonucleotide
ugcgggcugucaccugcca

SEQ ID NO: 1421023 - RNA, 19 nt, Artificial Sequence
  Description of Artificial Sequence: Synthetic oligonucleotide
auaucagagcugggucuca

SEQ ID NO: 1421024 - RNA, 19 nt, Artificial Sequence
  Description of Artificial Sequence: Synthetic oligonucleotide
agggcaccagcuggagacg

SEQ ID NO: 1421025 - RNA, 19 nt, Artificial Sequence
  Description of Artificial Sequence: Synthetic oligonucleotide
gaacgucucugcacagaca

SEQ ID NO: 1421026 - RNA, 19 nt, Artificial Sequence
  Description of Artificial Sequence: Synthetic oligonucleotide
gaggacgauguuggcugug

SEQ ID NO: 1421027 - RNA, 19 nt, Artificial Sequence
  Description of Artificial Sequence: Synthetic oligonucleotide
ccucaugagggagagacga

SEQ ID NO: 1421028 - RNA, 19 nt, Artificial Sequence
  Description of Artificial Sequence: Synthetic oligonucleotide
ccccacuuuauugaagaac

SEQ ID NO: 1421029 - RNA, 19 nt, Artificial Sequence
  Description of Artificial Sequence: Synthetic oligonucleotide
gaugcuggggccagagcua

SEQ ID NO: 1421030 - RNA, 19 nt, Artificial Sequence
  Description of Artificial Sequence: Synthetic oligonucleotide
cacugggucuaguauaaau

SEQ ID NO: 1421031 - RNA, 19 nt, Artificial Sequence
  Description of Artificial Sequence: Synthetic oligonucleotide
gagcuagcgggugccacca

SEQ ID NO: 1421032 - RNA, 19 nt, Artificial Sequence
  Description of Artificial Sequence: Synthetic oligonucleotide
ucccuaccuccuguuguca

SEQ ID NO: 1421033 - RNA, 19 nt, Artificial Sequence
  Description of Artificial Sequence: Synthetic oligonucleotide
guggcuggcgcaaguuccc

SEQ ID NO: 1421034 - RNA, 19 nt, Artificial Sequence
  Description of Artificial Sequence: Synthetic oligonucleotide
cagcuacccgccucaggug

SEQ ID NO: 1421035 - RNA, 19 nt, Artificial Sequence
  Description of Artificial Sequence: Synthetic oligonucleotide
gguguagaagggaaggggu

SEQ ID NO: 1421036 - RNA, 19 nt, Artificial Sequence
  Description of Artificial Sequence: Synthetic oligonucleotide
gcuggcgcaaguucccuca

SEQ ID NO: 1421037 - RNA, 19 nt, Artificial Sequence
  Description of Artificial Sequence: Synthetic oligonucleotide
cuacccgccucaggugagg

SEQ ID NO: 1421038 - RNA, 19 nt, Artificial Sequence
  Description of Artificial Sequence: Synthetic oligonucleotide
cugcuaguggacggucgag

SEQ ID NO: 1421039 - RNA, 19 nt, Artificial Sequence
  Description of Artificial Sequence: Synthetic oligonucleotide
uugaguccgggaggcuggc

SEQ ID NO: 1421040 - RNA, 19 nt, Artificial Sequence
  Description of Artificial Sequence: Synthetic oligonucleotide
cugcgggcugucaccugcc

SEQ ID NO: 1421041 - RNA, 19 nt, Artificial Sequence
  Description of Artificial Sequence: Synthetic oligonucleotide
gacacacugcaggucaccu

SEQ ID NO: 1421042 - RNA, 19 nt, Artificial Sequence
  Description of Artificial Sequence: Synthetic oligonucleotide
gaggggacacugggucuag

SEQ ID NO: 1421043 - RNA, 19 nt, Artificial Sequence
  Description of Artificial Sequence: Synthetic oligonucleotide
cugggaacucgccuuugaa

SEQ ID NO: 1421044 - RNA, 19 nt, Artificial Sequence
  Description of Artificial Sequence: Synthetic oligonucleotide
gucuugggugaggauguca

SEQ ID NO: 1421045 - RNA, 19 nt, Artificial Sequence
  Description of Artificial Sequence: Synthetic oligonucleotide
gccucaggugaggugaagc

SEQ ID NO: 1421046 - RNA, 19 nt, Artificial Sequence
  Description of Artificial Sequence: Synthetic oligonucleotide
uggagacuggguggcaguu

SEQ ID NO: 1421047 - RNA, 19 nt, Artificial Sequence
  Description of Artificial Sequence: Synthetic oligonucleotide
cagagcuagcgggugccac

SEQ ID NO: 1421048 - RNA, 19 nt, Artificial Sequence
  Description of Artificial Sequence: Synthetic oligonucleotide
cugaggccguggaggaguc

SEQ ID NO: 1421049 - RNA, 19 nt, Artificial Sequence
  Description of Artificial Sequence: Synthetic oligonucleotide
  modified_base (17)..(17): a, c, u, g, unknown or other
acacugcaggucaccunag

SEQ ID NO: 1421050 - RNA, 19 nt, Artificial Sequence
  Description of Artificial Sequence: Synthetic oligonucleotide
accugccaucugccccagc

SEQ ID NO: 1421051 - RNA, 19 nt, Artificial Sequence
  Description of Artificial Sequence: Synthetic oligonucleotide
gcgcaaguucccucaugag

SEQ ID NO: 1421052 - RNA, 19 nt, Artificial Sequence
  Description of Artificial Sequence: Synthetic oligonucleotide
ggugaggaugucacuaucu

SEQ ID NO: 1421053 - RNA, 19 nt, Artificial Sequence
  Description of Artificial Sequence: Synthetic oligonucleotide
cugggucgggagagggcac

SEQ ID NO: 1421054 - RNA, 19 nt, Artificial Sequence
  Description of Artificial Sequence: Synthetic oligonucleotide
gcugggucgggagagggca

SEQ ID NO: 1421055 - RNA, 19 nt, Artificial Sequence
  Description of Artificial Sequence: Synthetic oligonucleotide
gucuccguacagguaaaua

SEQ ID NO: 1421056 - RNA, 19 nt, Artificial Sequence
  Description of Artificial Sequence: Synthetic oligonucleotide
gcucauaguugucuugggu

SEQ ID NO: 1421057 - RNA, 19 nt, Artificial Sequence
  Description of Artificial Sequence: Synthetic oligonucleotide
agcuagcgggugccaccag

SEQ ID NO: 1421058 - RNA, 19 nt, Artificial Sequence
  Description of Artificial Sequence: Synthetic oligonucleotide
cacccggucugugauuuca

SEQ ID NO: 1421059 - RNA, 19 nt, Artificial Sequence
  Description of Artificial Sequence: Synthetic oligonucleotide
ugucuugggugaggauguc

SEQ ID NO: 1421060 - RNA, 19 nt, Artificial Sequence
  Description of Artificial Sequence: Synthetic oligonucleotide
acagacaggaugggccguu

SEQ ID NO: 1421061 - RNA, 19 nt, Artificial Sequence
  Description of Artificial Sequence: Synthetic oligonucleotide
ccguggaggagucuucauc

SEQ ID NO: 1421062 - RNA, 19 nt, Artificial Sequence
  Description of Artificial Sequence: Synthetic oligonucleotide
uacccgccucaggugaggu

SEQ ID NO: 1421063 - RNA, 19 nt, Artificial Sequence
  Description of Artificial Sequence: Synthetic oligonucleotide
gguuggcugaugaacgucu

SEQ ID NO: 1421064 - RNA, 19 nt, Artificial Sequence
  Description of Artificial Sequence: Synthetic oligonucleotide
uggaugccggugcccgcau

SEQ ID NO: 1421065 - RNA, 19 nt, Artificial Sequence
  Description of Artificial Sequence: Synthetic oligonucleotide
ggccagagcuagcgggugc

SEQ ID NO: 1421066 - RNA, 19 nt, Artificial Sequence
  Description of Artificial Sequence: Synthetic oligonucleotide
aggccguggaggagucuuc

SEQ ID NO: 1421067 - RNA, 19 nt, Artificial Sequence
  Description of Artificial Sequence: Synthetic oligonucleotide
gagacguggaaggccuucu

SEQ ID NO: 1421068 - RNA, 19 nt, Artificial Sequence
  Description of Artificial Sequence: Synthetic oligonucleotide
uuccacccggucugugauu

SEQ ID NO: 1421069 - RNA, 19 nt, Artificial Sequence
  Description of Artificial Sequence: Synthetic oligonucleotide
guguggcggaacggggacc

SEQ ID NO: 1421070 - RNA, 19 nt, Artificial Sequence
  Description of Artificial Sequence: Synthetic oligonucleotide
cuguguggccuugggccug

SEQ ID NO: 1421071 - RNA, 19 nt, Artificial Sequence
  Description of Artificial Sequence: Synthetic oligonucleotide
uggcuggcgcaaguucccu

SEQ ID NO: 1421072 - RNA, 19 nt, Artificial Sequence
  Description of Artificial Sequence: Synthetic oligonucleotide
agcagagcucaagcuuuaa

SEQ ID NO: 1421073 - RNA, 19 nt, Artificial Sequence
  Description of Artificial Sequence: Synthetic oligonucleotide
ccggucugugauuucaaaa

SEQ ID NO: 1421074 - RNA, 19 nt, Artificial Sequence
  Description of Artificial Sequence: Synthetic oligonucleotide
gggcacagcugccgcguag

SEQ ID NO: 1421075 - RNA, 19 nt, Artificial Sequence
  Description of Artificial Sequence: Synthetic oligonucleotide
uaccuccuguugucagaua

SEQ ID NO: 1421076 - RNA, 19 nt, Artificial Sequence
  Description of Artificial Sequence: Synthetic oligonucleotide
gacgagcaaggcacuggaa

SEQ ID NO: 1421077 - RNA, 19 nt, Artificial Sequence
  Description of Artificial Sequence: Synthetic oligonucleotide
ccagcuacccgccucaggu

SEQ ID NO: 1421078 - RNA, 19 nt, Artificial Sequence
  Description of Artificial Sequence: Synthetic oligonucleotide
ggggacacugggucuagua

SEQ ID NO: 1421079 - RNA, 19 nt, Artificial Sequence
  Description of Artificial Sequence: Synthetic oligonucleotide
gggacacugggucuaguau

SEQ ID NO: 1421080 - RNA, 19 nt, Artificial Sequence
  Description of Artificial Sequence: Synthetic oligonucleotide
cuugaggguucugcacaga

SEQ ID NO: 1421081 - RNA, 19 nt, Artificial Sequence
  Description of Artificial Sequence: Synthetic oligonucleotide
ggagacguggaaggccuuc

SEQ ID NO: 1421082 - RNA, 19 nt, Artificial Sequence
  Description of Artificial Sequence: Synthetic oligonucleotide
agccagggccugggaacuc

SEQ ID NO: 1421083 - RNA, 19 nt, Artificial Sequence
  Description of Artificial Sequence: Synthetic oligonucleotide
ugcccaucacaagcagguu

SEQ ID NO: 1421084 - RNA, 19 nt, Artificial Sequence
  Description of Artificial Sequence: Synthetic oligonucleotide
gcgaggucuccguacaggu

SEQ ID NO: 1421085 - RNA, 19 nt, Artificial Sequence
  Description of Artificial Sequence: Synthetic oligonucleotide
cgggcugucaccugccauc

SEQ ID NO: 1421086 - RNA, 19 nt, Artificial Sequence
  Description of Artificial Sequence: Synthetic oligonucleotide
ccuugcggcagagguacac

SEQ ID NO: 1421087 - RNA, 19 nt, Artificial Sequence
  Description of Artificial Sequence: Synthetic oligonucleotide
acacugggucuaguauaaa

SEQ ID NO: 1421088 - RNA, 19 nt, Artificial Sequence
  Description of Artificial Sequence: Synthetic oligonucleotide
cuaguggacggucgaggau

SEQ ID NO: 1421089 - RNA, 19 nt, Artificial Sequence
  Description of Artificial Sequence: Synthetic oligonucleotide
gcguagauggcgaggucuc

SEQ ID NO: 1421090 - RNA, 19 nt, Artificial Sequence
  Description of Artificial Sequence: Synthetic oligonucleotide
gaggccguggaggagucuu

SEQ ID NO: 1421091 - RNA, 19 nt, Artificial Sequence
  Description of Artificial Sequence: Synthetic oligonucleotide
cuaccuccuguugucagau

SEQ ID NO: 1421092 - RNA, 19 nt, Artificial Sequence
  Description of Artificial Sequence: Synthetic oligonucleotide
ggggucugacacccuucac

SEQ ID NO: 1421093 - RNA, 19 nt, Artificial Sequence
  Description of Artificial Sequence: Synthetic oligonucleotide
gcggaacggggaccugugc

SEQ ID NO: 1421094 - RNA, 19 nt, Artificial Sequence
  Description of Artificial Sequence: Synthetic oligonucleotide
cccagcuacccgccucagg

SEQ ID NO: 1421095 - RNA, 19 nt, Artificial Sequence
  Description of Artificial Sequence: Synthetic oligonucleotide
gggccguuucucugcccgc

SEQ ID NO: 1421096 - RNA, 19 nt, Artificial Sequence
  Description of Artificial Sequence: Synthetic oligonucleotide
ggaacggggaccugugcuu

SEQ ID NO: 1421097 - RNA, 19 nt, Artificial Sequence
  Description of Artificial Sequence: Synthetic oligonucleotide
gcuggguguccuugcggca

SEQ ID NO: 1421098 - RNA, 19 nt, Artificial Sequence
  Description of Artificial Sequence: Synthetic oligonucleotide
gcuacccgccucaggugag

SEQ ID NO: 1421099 - RNA, 19 nt, Artificial Sequence
  Description of Artificial Sequence: Synthetic oligonucleotide
ggcuggcgcaaguucccuc

SEQ ID NO: 1421100 - RNA, 19 nt, Artificial Sequence
  Description of Artificial Sequence: Synthetic oligonucleotide
ggguguggcggaacgggga

SEQ ID NO: 1421101 - RNA, 19 nt, Artificial Sequence
  Description of Artificial Sequence: Synthetic oligonucleotide
acccuucaccccagaggca

SEQ ID NO: 1421102 - RNA, 19 nt, Artificial Sequence
  Description of Artificial Sequence: Synthetic oligonucleotide
ggucgggagagggcaccag

SEQ ID NO: 1421103 - RNA, 19 nt, Artificial Sequence
  Description of Artificial Sequence: Synthetic oligonucleotide
guccgggaggcuggcgcug

SEQ ID NO: 1421104 - RNA, 19 nt, Artificial Sequence
  Description of Artificial Sequence: Synthetic oligonucleotide
cccgcauaggcuccuguaa

SEQ ID NO: 1421105 - RNA, 19 nt, Artificial Sequence
  Description of Artificial Sequence: Synthetic oligonucleotide
  modified_base (4)..(4): a, c, u, g, unknown or other
ccunagggagaagggcaca

SEQ ID NO: 1421106 - RNA, 19 nt, Artificial Sequence
  Description of Artificial Sequence: Synthetic oligonucleotide
acccggucugugauuucaa

SEQ ID NO: 1421107 - RNA, 19 nt, Artificial Sequence
  Description of Artificial Sequence: Synthetic oligonucleotide
gcuagcgggugccaccagu

SEQ ID NO: 1421108 - RNA, 19 nt, Artificial Sequence
  Description of Artificial Sequence: Synthetic oligonucleotide
agacuggguggcaguuaaa

SEQ ID NO: 1421109 - RNA, 19 nt, Artificial Sequence
  Description of Artificial Sequence: Synthetic oligonucleotide
  modified_base (12)..(12): a, c, u, g, unknown or other
gcaggucaccunagggaga

SEQ ID NO: 1421110 - RNA, 19 nt, Artificial Sequence
  Description of Artificial Sequence: Synthetic oligonucleotide
ggcguuggcugcagccaug

SEQ ID NO: 1421111 - RNA, 19 nt, Artificial Sequence
  Description of Artificial Sequence: Synthetic oligonucleotide
gccccagcuacccgccuca

SEQ ID NO: 1421112 - RNA, 19 nt, Artificial Sequence
  Description of Artificial Sequence: Synthetic oligonucleotide
acggggaccugugcuuguu

SEQ ID NO: 1421113 - RNA, 19 nt, Artificial Sequence
  Description of Artificial Sequence: Synthetic oligonucleotide
ggccguggaggagucuuca

SEQ ID NO: 1421114 - RNA, 19 nt, Artificial Sequence
  Description of Artificial Sequence: Synthetic oligonucleotide
ggcugucaccugccaucug

SEQ ID NO: 1421115 - RNA, 19 nt, Artificial Sequence
  Description of Artificial Sequence: Synthetic oligonucleotide
ggaaggcagggaugacaua

SEQ ID NO: 1421116 - RNA, 19 nt, Artificial Sequence
  Description of Artificial Sequence: Synthetic oligonucleotide
ccaucacaaaggugguugu

SEQ ID NO: 1421117 - RNA, 19 nt, Artificial Sequence
  Description of Artificial Sequence: Synthetic oligonucleotide
caccugccaucugccccag

SEQ ID NO: 1421118 - RNA, 19 nt, Artificial Sequence
  Description of Artificial Sequence: Synthetic oligonucleotide
gcacuggaauuaagaggga

SEQ ID NO: 1421119 - RNA, 19 nt, Artificial Sequence
  Description of Artificial Sequence: Synthetic oligonucleotide
gugccaccaguggucccca

SEQ ID NO: 1421120 - RNA, 19 nt, Artificial Sequence
  Description of Artificial Sequence: Synthetic oligonucleotide
ccauagccaaaggucagcu

SEQ ID NO: 1421121 - RNA, 19 nt, Artificial Sequence
  Description of Artificial Sequence: Synthetic oligonucleotide
ccuugggccuggccuggug

SEQ ID NO: 1421122 - RNA, 19 nt, Artificial Sequence
  Description of Artificial Sequence: Synthetic oligonucleotide
gggaccugugcuuguugau

SEQ ID NO: 1421123 - RNA, 19 nt, Artificial Sequence
  Description of Artificial Sequence: Synthetic oligonucleotide
ccauguggugaggacagcu

SEQ ID NO: 1421124 - RNA, 19 nt, Artificial Sequence
  Description of Artificial Sequence: Synthetic oligonucleotide
ccacuuuauugaagaacau

SEQ ID NO: 1421125 - RNA, 19 nt, Artificial Sequence
  Description of Artificial Sequence: Synthetic oligonucleotide
cgcauaggcuccuguaaua

SEQ ID NO: 1421126 - RNA, 19 nt, Artificial Sequence
  Description of Artificial Sequence: Synthetic oligonucleotide
gcgcugggcugucccuacc

SEQ ID NO: 1421127 - RNA, 19 nt, Artificial Sequence
  Description of Artificial Sequence: Synthetic oligonucleotide
cacagacaggaugggccgu

SEQ ID NO: 1421128 - RNA, 19 nt, Artificial Sequence
  Description of Artificial Sequence: Synthetic oligonucleotide
cgagcaaggcacuggaauu

SEQ ID NO: 1421129 - RNA, 19 nt, Artificial Sequence
  Description of Artificial Sequence: Synthetic oligonucleotide
guggacggucgaggaugca

SEQ ID NO: 1421130 - RNA, 19 nt, Artificial Sequence
  Description of Artificial Sequence: Synthetic oligonucleotide
ggggccagagcuagcgggu

SEQ ID NO: 1421131 - RNA, 19 nt, Artificial Sequence
  Description of Artificial Sequence: Synthetic oligonucleotide
ccgcauaggcuccuguaau

SEQ ID NO: 1421132 - RNA, 19 nt, Artificial Sequence
  Description of Artificial Sequence: Synthetic oligonucleotide
gggcguuggcugcagccau

SEQ ID NO: 1421133 - RNA, 19 nt, Artificial Sequence
  Description of Artificial Sequence: Synthetic oligonucleotide
ggccguuucucugcccgcu

SEQ ID NO: 1421134 - RNA, 19 nt, Artificial Sequence
  Description of Artificial Sequence: Synthetic oligonucleotide
cggaacggggaccugugcu

SEQ ID NO: 1421135 - RNA, 19 nt, Artificial Sequence
  Description of Artificial Sequence: Synthetic oligonucleotide
cagcaguguccugcgggcu

SEQ ID NO: 1421136 - RNA, 19 nt, Artificial Sequence
  Description of Artificial Sequence: Synthetic oligonucleotide
cuggcgcaaguucccucau

SEQ ID NO: 1421137 - RNA, 19 nt, Artificial Sequence
  Description of Artificial Sequence: Synthetic oligonucleotide
cgcguagauggcgaggucu

SEQ ID NO: 1421138 - RNA, 19 nt, Artificial Sequence
  Description of Artificial Sequence: Synthetic oligonucleotide
ccgcguagauggcgagguc

SEQ ID NO: 1421139 - RNA, 19 nt, Artificial Sequence
  Description of Artificial Sequence: Synthetic oligonucleotide
ccacccggucugugauuuc

SEQ ID NO: 1421140 - RNA, 19 nt, Artificial Sequence
  Description of Artificial Sequence: Synthetic oligonucleotide
ggaugccggugcccgcaua

SEQ ID NO: 1421141 - RNA, 19 nt, Artificial Sequence
  Description of Artificial Sequence: Synthetic oligonucleotide
ggucuccguacagguaaau

SEQ ID NO: 1421142 - RNA, 19 nt, Artificial Sequence
  Description of Artificial Sequence: Synthetic oligonucleotide
ggccugggaacucgccuuu

SEQ ID NO: 1421143 - RNA, 19 nt, Artificial Sequence
  Description of Artificial Sequence: Synthetic oligonucleotide
ccagagcuagcgggugcca

SEQ ID NO: 1421144 - RNA, 19 nt, Artificial Sequence
  Description of Artificial Sequence: Synthetic oligonucleotide
cagacaggaugggccguuu

SEQ ID NO: 1421145 - RNA, 19 nt, Artificial Sequence
  Description of Artificial Sequence: Synthetic oligonucleotide
ccauggccuccaucacaaa

SEQ ID NO: 1421146 - RNA, 19 nt, Artificial Sequence
  Description of Artificial Sequence: Synthetic oligonucleotide
ccccagcuacccgccucag

SEQ ID NO: 1421147 - RNA, 19 nt, Artificial Sequence
  Description of Artificial Sequence: Synthetic oligonucleotide
ccgccucaggugaggugaa

SEQ ID NO: 1421148 - RNA, 19 nt, Artificial Sequence
  Description of Artificial Sequence: Synthetic oligonucleotide
ccaggguuccuggcacugu

SEQ ID NO: 1421149 - RNA, 19 nt, Artificial Sequence
  Description of Artificial Sequence: Synthetic oligonucleotide
aaugaaaauacuugggucc

SEQ ID NO: 1421150 - RNA, 19 nt, Artificial Sequence
  Description of Artificial Sequence: Synthetic oligonucleotide
uuauaaugcauaaucaugg

SEQ ID NO: 1421151 - RNA, 19 nt, Artificial Sequence
  Description of Artificial Sequence: Synthetic oligonucleotide
aaugugauaauuguguggc

SEQ ID NO: 1421152 - RNA, 19 nt, Artificial Sequence
  Description of Artificial Sequence: Synthetic oligonucleotide
uuuagaaggacaaccaugg

SEQ ID NO: 1421153 - RNA, 19 nt, Artificial Sequence
  Description of Artificial Sequence: Synthetic oligonucleotide
ugaucaguacuuuagaagg

SEQ ID NO: 1421154 - RNA, 19 nt, Artificial Sequence
  Description of Artificial Sequence: Synthetic oligonucleotide
aaugcauaaucauggauuc

SEQ ID NO: 1421155 - RNA, 19 nt, Artificial Sequence
  Description of Artificial Sequence: Synthetic oligonucleotide
aaaugucgaauuuucauag

SEQ ID NO: 1421156 - RNA, 19 nt, Artificial Sequence
  Description of Artificial Sequence: Synthetic oligonucleotide
aaaaugaaaauacuugggu

SEQ ID NO: 1421157 - RNA, 19 nt, Artificial Sequence
  Description of Artificial Sequence: Synthetic oligonucleotide
uuaucuaugaccuucuuac

SEQ ID NO: 1421158 - RNA, 19 nt, Artificial Sequence
  Description of Artificial Sequence: Synthetic oligonucleotide
uccaauguaucuaaaacag

SEQ ID NO: 1421159 - RNA, 19 nt, Artificial Sequence
  Description of Artificial Sequence: Synthetic oligonucleotide
aguauucaaaacaugaagc

SEQ ID NO: 1421160 - RNA, 19 nt, Artificial Sequence
  Description of Artificial Sequence: Synthetic oligonucleotide
agaaguugcaucuacauca

SEQ ID NO: 1421161 - RNA, 19 nt, Artificial Sequence
  Description of Artificial Sequence: Synthetic oligonucleotide
aaaucaaugugauaauugu

SEQ ID NO: 1421162 - RNA, 19 nt, Artificial Sequence
  Description of Artificial Sequence: Synthetic oligonucleotide
uugaauccaaacaauaagc

SEQ ID NO: 1421163 - RNA, 19 nt, Artificial Sequence
  Description of Artificial Sequence: Synthetic oligonucleotide
ucagaaggacaacagagcg

SEQ ID NO: 1421164 - RNA, 19 nt, Artificial Sequence
  Description of Artificial Sequence: Synthetic oligonucleotide
ugaaagacaucucucauca

SEQ ID NO: 1421165 - RNA, 19 nt, Artificial Sequence
  Description of Artificial Sequence: Synthetic oligonucleotide
ucaacuaggauucgaaacc

SEQ ID NO: 1421166 - RNA, 19 nt, Artificial Sequence
  Description of Artificial Sequence: Synthetic oligonucleotide
gauaacuugauucaacuuc

SEQ ID NO: 1421167 - RNA, 19 nt, Artificial Sequence
  Description of Artificial Sequence: Synthetic oligonucleotide
aaacagucagagcacuugc

SEQ ID NO: 1421168 - RNA, 19 nt, Artificial Sequence
  Description of Artificial Sequence: Synthetic oligonucleotide
ugguuaaugagauucuggg

SEQ ID NO: 1421169 - RNA, 19 nt, Artificial Sequence
  Description of Artificial Sequence: Synthetic oligonucleotide
aucaacuaggauucgaaac

SEQ ID NO: 1421170 - RNA, 19 nt, Artificial Sequence
  Description of Artificial Sequence: Synthetic oligonucleotide
augucgaauuuucauagcc

SEQ ID NO: 1421171 - RNA, 19 nt, Artificial Sequence
  Description of Artificial Sequence: Synthetic oligonucleotide
agaagaauacacgugaagg

SEQ ID NO: 1421172 - RNA, 19 nt, Artificial Sequence
  Description of Artificial Sequence: Synthetic oligonucleotide
aagauaacuugauucaacu

SEQ ID NO: 1421173 - RNA, 19 nt, Artificial Sequence
  Description of Artificial Sequence: Synthetic oligonucleotide
uuuccaauguaucuaaaac

SEQ ID NO: 1421174 - RNA, 19 nt, Artificial Sequence
  Description of Artificial Sequence: Synthetic oligonucleotide
aaugucgaauuuucauagc

SEQ ID NO: 1421175 - RNA, 19 nt, Artificial Sequence
  Description of Artificial Sequence: Synthetic oligonucleotide
aauacuuggguccuguuau

SEQ ID NO: 1421176 - RNA, 19 nt, Artificial Sequence
  Description of Artificial Sequence: Synthetic oligonucleotide
ucuuacugcauucauucag

SEQ ID NO: 1421177 - RNA, 19 nt, Artificial Sequence
  Description of Artificial Sequence: Synthetic oligonucleotide
caucagaguauucugaggg

SEQ ID NO: 1421178 - RNA, 19 nt, Artificial Sequence
  Description of Artificial Sequence: Synthetic oligonucleotide
uguuuagagagucaggauc

SEQ ID NO: 1421179 - RNA, 19 nt, Artificial Sequence
  Description of Artificial Sequence: Synthetic oligonucleotide
ucuaaaacaguugacagaa

SEQ ID NO: 1421180 - RNA, 19 nt, Artificial Sequence
  Description of Artificial Sequence: Synthetic oligonucleotide
auaacuugauucaacuucc

SEQ ID NO: 1421181 - RNA, 19 nt, Artificial Sequence
  Description of Artificial Sequence: Synthetic oligonucleotide
agaauugaaagacaucucu

SEQ ID NO: 1421182 - RNA, 19 nt, Artificial Sequence
  Description of Artificial Sequence: Synthetic oligonucleotide
aaagauaacuugauucaac

SEQ ID NO: 1421183 - RNA, 19 nt, Artificial Sequence
  Description of Artificial Sequence: Synthetic oligonucleotide
uguucuaucuuccaaacuu

SEQ ID NO: 1421184 - RNA, 19 nt, Artificial Sequence
  Description of Artificial Sequence: Synthetic oligonucleotide
aagauauguucuaucuucc

SEQ ID NO: 1421185 - RNA, 19 nt, Artificial Sequence
  Description of Artificial Sequence: Synthetic oligonucleotide
uuuuguuuagagagucagg

SEQ ID NO: 1421186 - RNA, 19 nt, Artificial Sequence
  Description of Artificial Sequence: Synthetic oligonucleotide
uugagagaagaauacacgu

SEQ ID NO: 1421187 - RNA, 19 nt, Artificial Sequence
  Description of Artificial Sequence: Synthetic oligonucleotide
uauguguacagcuuuguaa

SEQ ID NO: 1421188 - RNA, 19 nt, Artificial Sequence
  Description of Artificial Sequence: Synthetic oligonucleotide
acucucugcauguuugugc

SEQ ID NO: 1421189 - RNA, 19 nt, Artificial Sequence
  Description of Artificial Sequence: Synthetic oligonucleotide
gugguuauaaugcauaauc

SEQ ID NO: 1421190 - RNA, 19 nt, Artificial Sequence
  Description of Artificial Sequence: Synthetic oligonucleotide
auaaucauggauucucuca

SEQ ID NO: 1421191 - RNA, 19 nt, Artificial Sequence
  Description of Artificial Sequence: Synthetic oligonucleotide
aaaacaguugacagaauug

SEQ ID NO: 1421192 - RNA, 19 nt, Artificial Sequence
  Description of Artificial Sequence: Synthetic oligonucleotide
uaaaacaguugacagaauu

SEQ ID NO: 1421193 - RNA, 19 nt, Artificial Sequence
  Description of Artificial Sequence: Synthetic oligonucleotide
ugguuauaaugcauaauca

SEQ ID NO: 1421194 - RNA, 19 nt, Artificial Sequence
  Description of Artificial Sequence: Synthetic oligonucleotide
agaucuuuauuuugguauc

SEQ ID NO: 1421195 - RNA, 19 nt, Artificial Sequence
  Description of Artificial Sequence: Synthetic oligonucleotide
guuauaaugcauaaucaug

SEQ ID NO: 1421196 - RNA, 19 nt, Artificial Sequence
  Description of Artificial Sequence: Synthetic oligonucleotide
ugagagaagaauacacgug

SEQ ID NO: 1421197 - RNA, 19 nt, Artificial Sequence
  Description of Artificial Sequence: Synthetic oligonucleotide
auggaaacccauuguauuc

SEQ ID NO: 1421198 - RNA, 19 nt, Artificial Sequence
  Description of Artificial Sequence: Synthetic oligonucleotide
aaacaguugacagaauuga

SEQ ID NO: 1421199 - RNA, 19 nt, Artificial Sequence
  Description of Artificial Sequence: Synthetic oligonucleotide
acaaccauggauauuaucu

SEQ ID NO: 1421200 - RNA, 19 nt, Artificial Sequence
  Description of Artificial Sequence: Synthetic oligonucleotide
cagacuuaggaacacacag

SEQ ID NO: 1421201 - RNA, 19 nt, Artificial Sequence
  Description of Artificial Sequence: Synthetic oligonucleotide
cuuuagaaggacaaccaug

SEQ ID NO: 1421202 - RNA, 19 nt, Artificial Sequence
  Description of Artificial Sequence: Synthetic oligonucleotide
cugaucaguacuuuagaag

SEQ ID NO: 1421203 - RNA, 19 nt, Artificial Sequence
  Description of Artificial Sequence: Synthetic oligonucleotide
uauucugagggacuccaag

SEQ ID NO: 1421204 - RNA, 19 nt, Artificial Sequence
  Description of Artificial Sequence: Synthetic oligonucleotide
gauugagagaagaauacac

SEQ ID NO: 1421205 - RNA, 19 nt, Artificial Sequence
  Description of Artificial Sequence: Synthetic oligonucleotide
aacccauuguauucaaaug

SEQ ID NO: 1421206 - RNA, 19 nt, Artificial Sequence
  Description of Artificial Sequence: Synthetic oligonucleotide
aguacuucaaacaugugcu

SEQ ID NO: 1421207 - RNA, 19 nt, Artificial Sequence
  Description of Artificial Sequence: Synthetic oligonucleotide
aaugaauacacagcacuca

SEQ ID NO: 1421208 - RNA, 19 nt, Artificial Sequence
  Description of Artificial Sequence: Synthetic oligonucleotide
ucaaugugauaauugugug

SEQ ID NO: 1421209 - RNA, 19 nt, Artificial Sequence
  Description of Artificial Sequence: Synthetic oligonucleotide
ugcugaucaacuaggauuc

SEQ ID NO: 1421210 - RNA, 19 nt, Artificial Sequence
  Description of Artificial Sequence: Synthetic oligonucleotide
gaagauaaacagucagagc

SEQ ID NO: 1421211 - RNA, 19 nt, Artificial Sequence
  Description of Artificial Sequence: Synthetic oligonucleotide
acccauuguauucaaaugu

SEQ ID NO: 1421212 - RNA, 19 nt, Artificial Sequence
  Description of Artificial Sequence: Synthetic oligonucleotide
aaucacccucagcagaguc

SEQ ID NO: 1421213 - RNA, 19 nt, Artificial Sequence
  Description of Artificial Sequence: Synthetic oligonucleotide
gaauacacgugaaggauag

SEQ ID NO: 1421214 - RNA, 19 nt, Artificial Sequence
  Description of Artificial Sequence: Synthetic oligonucleotide
aucuaugaccuucuuacug

SEQ ID NO: 1421215 - RNA, 19 nt, Artificial Sequence
  Description of Artificial Sequence: Synthetic oligonucleotide
uugcugaucaacuaggauu

SEQ ID NO: 1421216 - RNA, 19 nt, Artificial Sequence
  Description of Artificial Sequence: Synthetic oligonucleotide
ugacagaauugaaagacau

SEQ ID NO: 1421217 - RNA, 19 nt, Artificial Sequence
  Description of Artificial Sequence: Synthetic oligonucleotide
aucaaugugauaauugugu

SEQ ID NO: 1421218 - RNA, 19 nt, Artificial Sequence
  Description of Artificial Sequence: Synthetic oligonucleotide
uagaaggacaaccauggau

SEQ ID NO: 1421219 - RNA, 19 nt, Artificial Sequence
  Description of Artificial Sequence: Synthetic oligonucleotide
uauaaugcauaaucaugga

SEQ ID NO: 1421220 - RNA, 19 nt, Artificial Sequence
  Description of Artificial Sequence: Synthetic oligonucleotide
ugucgaauuuucauagcca

SEQ ID NO: 1421221 - RNA, 19 nt, Artificial Sequence
  Description of Artificial Sequence: Synthetic oligonucleotide
guacuuuagaaggacaacc

SEQ ID NO: 1421222 - RNA, 19 nt, Artificial Sequence
  Description of Artificial Sequence: Synthetic oligonucleotide
uguaauaggcgcuuucauc

SEQ ID NO: 1421223 - RNA, 19 nt, Artificial Sequence
  Description of Artificial Sequence: Synthetic oligonucleotide
uauguucuaucuuccaaac

SEQ ID NO: 1421224 - RNA, 19 nt, Artificial Sequence
  Description of Artificial Sequence: Synthetic oligonucleotide
guaucggagggcuuuacag

SEQ ID NO: 1421225 - RNA, 19 nt, Artificial Sequence
  Description of Artificial Sequence: Synthetic oligonucleotide
aauaggcgcuuucaucaag

SEQ ID NO: 1421226 - RNA, 19 nt, Artificial Sequence
  Description of Artificial Sequence: Synthetic oligonucleotide
guuuagagagucaggaucc

SEQ ID NO: 1421227 - RNA, 19 nt, Artificial Sequence
  Description of Artificial Sequence: Synthetic oligonucleotide
agauguggugaagauaaac

SEQ ID NO: 1421228 - RNA, 19 nt, Artificial Sequence
  Description of Artificial Sequence: Synthetic oligonucleotide
ucuuuauuuugguaucgga

SEQ ID NO: 1421229 - RNA, 19 nt, Artificial Sequence
  Description of Artificial Sequence: Synthetic oligonucleotide
aacaauaagcagacuuagg

SEQ ID NO: 1421230 - RNA, 19 nt, Artificial Sequence
  Description of Artificial Sequence: Synthetic oligonucleotide
ucaauagguuuucggaaga

SEQ ID NO: 1421231 - RNA, 19 nt, Artificial Sequence
  Description of Artificial Sequence: Synthetic oligonucleotide
gacaacagagcgguaaucc

SEQ ID NO: 1421232 - RNA, 19 nt, Artificial Sequence
  Description of Artificial Sequence: Synthetic oligonucleotide
gauguggugaagauaaaca

SEQ ID NO: 1421233 - RNA, 19 nt, Artificial Sequence
  Description of Artificial Sequence: Synthetic oligonucleotide
uucgaaacccugcucgaag

SEQ ID NO: 1421234 - RNA, 19 nt, Artificial Sequence
  Description of Artificial Sequence: Synthetic oligonucleotide
aucaguacuuuagaaggac

SEQ ID NO: 1421235 - RNA, 19 nt, Artificial Sequence
  Description of Artificial Sequence: Synthetic oligonucleotide
agagauguggugaagauaa

SEQ ID NO: 1421236 - RNA, 19 nt, Artificial Sequence
  Description of Artificial Sequence: Synthetic oligonucleotide
auauguucuaucuuccaaa

SEQ ID NO: 1421237 - RNA, 19 nt, Artificial Sequence
  Description of Artificial Sequence: Synthetic oligonucleotide
cuuuacacaguugugucag

SEQ ID NO: 1421238 - RNA, 19 nt, Artificial Sequence
  Description of Artificial Sequence: Synthetic oligonucleotide
uuuucggaagagauguggu

SEQ ID NO: 1421239 - RNA, 19 nt, Artificial Sequence
  Description of Artificial Sequence: Synthetic oligonucleotide
uaauuguguggcaacugca

SEQ ID NO: 1421240 - RNA, 19 nt, Artificial Sequence
  Description of Artificial Sequence: Synthetic oligonucleotide
aagaauacacgugaaggau

SEQ ID NO: 1421241 - RNA, 19 nt, Artificial Sequence
  Description of Artificial Sequence: Synthetic oligonucleotide
aaacaugugcuggcuauuc

SEQ ID NO: 1421242 - RNA, 19 nt, Artificial Sequence
  Description of Artificial Sequence: Synthetic oligonucleotide
auuucaaaaguuguagcca

SEQ ID NO: 1421243 - RNA, 19 nt, Artificial Sequence
  Description of Artificial Sequence: Synthetic oligonucleotide
guuuucggaagagaugugg

SEQ ID NO: 1421244 - RNA, 19 nt, Artificial Sequence
  Description of Artificial Sequence: Synthetic oligonucleotide
ucagacugaacagaaggug

SEQ ID NO: 1421245 - RNA, 19 nt, Artificial Sequence
  Description of Artificial Sequence: Synthetic oligonucleotide
ugcaguaugcugaucagua

SEQ ID NO: 1421246 - RNA, 19 nt, Artificial Sequence
  Description of Artificial Sequence: Synthetic oligonucleotide
ucgaagcgcauucacauuc

SEQ ID NO: 1421247 - RNA, 19 nt, Artificial Sequence
  Description of Artificial Sequence: Synthetic oligonucleotide
uaaacagucagagcacuug

SEQ ID NO: 1421248 - RNA, 19 nt, Artificial Sequence
  Description of Artificial Sequence: Synthetic oligonucleotide
agaaggacaacagagcggu

SEQ ID NO: 1421249 - RNA, 19 nt, Artificial Sequence
  Description of Artificial Sequence: Synthetic oligonucleotide
aguacuuuagaaggacaac

SEQ ID NO: 1421250 - RNA, 19 nt, Artificial Sequence
  Description of Artificial Sequence: Synthetic oligonucleotide
cagaaggucgaaaaccaag

SEQ ID NO: 1421251 - RNA, 19 nt, Artificial Sequence
  Description of Artificial Sequence: Synthetic oligonucleotide
auaaauuucaucacuguuu

SEQ ID NO: 1421252 - RNA, 19 nt, Artificial Sequence
  Description of Artificial Sequence: Synthetic oligonucleotide
aaaagauaacuugauucaa

SEQ ID NO: 1421253 - RNA, 19 nt, Artificial Sequence
  Description of Artificial Sequence: Synthetic oligonucleotide
uucaacuuccaaauuucaa

SEQ ID NO: 1421254 - RNA, 19 nt, Artificial Sequence
  Description of Artificial Sequence: Synthetic oligonucleotide
agguuuucggaagagaugu

SEQ ID NO: 1421255 - RNA, 19 nt, Artificial Sequence
  Description of Artificial Sequence: Synthetic oligonucleotide
ugcauaaucauggauucuc

SEQ ID NO: 1421256 - RNA, 19 nt, Artificial Sequence
  Description of Artificial Sequence: Synthetic oligonucleotide
ucuugagaagcacccuucc

SEQ ID NO: 1421257 - RNA, 19 nt, Artificial Sequence
  Description of Artificial Sequence: Synthetic oligonucleotide
gugaaggauagaaacaaug

SEQ ID NO: 1421258 - RNA, 19 nt, Artificial Sequence
  Description of Artificial Sequence: Synthetic oligonucleotide
uguuauuauccauucugau

SEQ ID NO: 1421259 - RNA, 19 nt, Artificial Sequence
  Description of Artificial Sequence: Synthetic oligonucleotide
auaaugcauaaucauggau

SEQ ID NO: 1421260 - RNA, 19 nt, Artificial Sequence
  Description of Artificial Sequence: Synthetic oligonucleotide
agauaaacagucagagcac

SEQ ID NO: 1421261 - RNA, 19 nt, Artificial Sequence
  Description of Artificial Sequence: Synthetic oligonucleotide
agcgguaauccauggcagc

SEQ ID NO: 1421262 - RNA, 19 nt, Artificial Sequence
  Description of Artificial Sequence: Synthetic oligonucleotide
uugaaagacaucucucauc

SEQ ID NO: 1421263 - RNA, 19 nt, Artificial Sequence
  Description of Artificial Sequence: Synthetic oligonucleotide
agcuuaggaauauucuucu

SEQ ID NO: 1421264 - RNA, 19 nt, Artificial Sequence
  Description of Artificial Sequence: Synthetic oligonucleotide
caugauugagagaagaaua

SEQ ID NO: 1421265 - RNA, 19 nt, Artificial Sequence
  Description of Artificial Sequence: Synthetic oligonucleotide
uuacaggacugcaguaugc

SEQ ID NO: 1421266 - RNA, 19 nt, Artificial Sequence
  Description of Artificial Sequence: Synthetic oligonucleotide
uuguauucaaaugucgaau

SEQ ID NO: 1421267 - RNA, 19 nt, Artificial Sequence
  Description of Artificial Sequence: Synthetic oligonucleotide
cuacaucagaaaaugaaaa

SEQ ID NO: 1421268 - RNA, 19 nt, Artificial Sequence
  Description of Artificial Sequence: Synthetic oligonucleotide
cuucuuaagagcaaguggu

SEQ ID NO: 1421269 - RNA, 19 nt, Artificial Sequence
  Description of Artificial Sequence: Synthetic oligonucleotide
acucaauagguuuucggaa

SEQ ID NO: 1421270 - RNA, 19 nt, Artificial Sequence
  Description of Artificial Sequence: Synthetic oligonucleotide
acauucaugcuugguuucc

SEQ ID NO: 1421271 - RNA, 19 nt, Artificial Sequence
  Description of Artificial Sequence: Synthetic oligonucleotide
auuaucuaugaccuucuua

SEQ ID NO: 1421272 - RNA, 19 nt, Artificial Sequence
  Description of Artificial Sequence: Synthetic oligonucleotide
aacuugauucaacuuccaa

SEQ ID NO: 1421273 - RNA, 19 nt, Artificial Sequence
  Description of Artificial Sequence: Synthetic oligonucleotide
aguggugugucuuucccga

SEQ ID NO: 1421274 - RNA, 19 nt, Artificial Sequence
  Description of Artificial Sequence: Synthetic oligonucleotide
agaaggugguuauaaugca

SEQ ID NO: 1421275 - RNA, 19 nt, Artificial Sequence
  Description of Artificial Sequence: Synthetic oligonucleotide
cuguucugguccuuguggg

SEQ ID NO: 1421276 - RNA, 19 nt, Artificial Sequence
  Description of Artificial Sequence: Synthetic oligonucleotide
ucagaguauucugagggac

SEQ ID NO: 1421277 - RNA, 19 nt, Artificial Sequence
  Description of Artificial Sequence: Synthetic oligonucleotide
ucaucaaguuucagacaag

SEQ ID NO: 1421278 - RNA, 19 nt, Artificial Sequence
  Description of Artificial Sequence: Synthetic oligonucleotide
ucccaguuauugaucaaga

SEQ ID NO: 1421279 - RNA, 19 nt, Artificial Sequence
  Description of Artificial Sequence: Synthetic oligonucleotide
guuucagacaaguauucaa

SEQ ID NO: 1421280 - RNA, 19 nt, Artificial Sequence
  Description of Artificial Sequence: Synthetic oligonucleotide
augcguuccugaaucaccc

SEQ ID NO: 1421281 - RNA, 19 nt, Artificial Sequence
  Description of Artificial Sequence: Synthetic oligonucleotide
agaaggacaaccauggaua

SEQ ID NO: 1421282 - RNA, 19 nt, Artificial Sequence
  Description of Artificial Sequence: Synthetic oligonucleotide
aggacaaccauggauauua

SEQ ID NO: 1421283 - RNA, 19 nt, Artificial Sequence
  Description of Artificial Sequence: Synthetic oligonucleotide
ugcuucuaggaacucucug

SEQ ID NO: 1421284 - RNA, 19 nt, Artificial Sequence
  Description of Artificial Sequence: Synthetic oligonucleotide
ucugcgacccugucacugg

SEQ ID NO: 1421285 - RNA, 19 nt, Artificial Sequence
  Description of Artificial Sequence: Synthetic oligonucleotide
ucgaaacccugcucgaagc

SEQ ID NO: 1421286 - RNA, 19 nt, Artificial Sequence
  Description of Artificial Sequence: Synthetic oligonucleotide
ucguugaugauguucuuuu

SEQ ID NO: 1421287 - RNA, 19 nt, Artificial Sequence
  Description of Artificial Sequence: Synthetic oligonucleotide
uuacacaguugugucagug

SEQ ID NO: 1421288 - RNA, 19 nt, Artificial Sequence
  Description of Artificial Sequence: Synthetic oligonucleotide
gugggcaugauugagagaa

SEQ ID NO: 1421289 - RNA, 19 nt, Artificial Sequence
  Description of Artificial Sequence: Synthetic oligonucleotide
ucgaauuuucauagccaac

SEQ ID NO: 1421290 - RNA, 19 nt, Artificial Sequence
  Description of Artificial Sequence: Synthetic oligonucleotide
cacucaauagguuuucgga

SEQ ID NO: 1421291 - RNA, 19 nt, Artificial Sequence
  Description of Artificial Sequence: Synthetic oligonucleotide
cuuacugcauucauucaga

SEQ ID NO: 1421292 - RNA, 19 nt, Artificial Sequence
  Description of Artificial Sequence: Synthetic oligonucleotide
aacagagcgguaauccaug

SEQ ID NO: 1421293 - RNA, 19 nt, Artificial Sequence
  Description of Artificial Sequence: Synthetic oligonucleotide
ucauuugcucacacagcug

SEQ ID NO: 1421294 - RNA, 19 nt, Artificial Sequence
  Description of Artificial Sequence: Synthetic oligonucleotide
uucuugagaagcacccuuc

SEQ ID NO: 1421295 - RNA, 19 nt, Artificial Sequence
  Description of Artificial Sequence: Synthetic oligonucleotide
auucaaggcagaaaaucug

SEQ ID NO: 1421296 - RNA, 19 nt, Artificial Sequence
  Description of Artificial Sequence: Synthetic oligonucleotide
cauaaucauggauucucuc

SEQ ID NO: 1421297 - RNA, 19 nt, Artificial Sequence
  Description of Artificial Sequence: Synthetic oligonucleotide
aacgccacggcauccucca

SEQ ID NO: 1421298 - RNA, 19 nt, Artificial Sequence
  Description of Artificial Sequence: Synthetic oligonucleotide
uauuuugguaucggagggc

SEQ ID NO: 1421299 - RNA, 19 nt, Artificial Sequence
  Description of Artificial Sequence: Synthetic oligonucleotide
agauauguucuaucuucca

SEQ ID NO: 1421300 - RNA, 19 nt, Artificial Sequence
  Description of Artificial Sequence: Synthetic oligonucleotide
cauggauauuaucuaugac

SEQ ID NO: 1421301 - RNA, 19 nt, Artificial Sequence
  Description of Artificial Sequence: Synthetic oligonucleotide
aguugcaucuacaucagaa

SEQ ID NO: 1421302 - RNA, 19 nt, Artificial Sequence
  Description of Artificial Sequence: Synthetic oligonucleotide
acaacagagcgguaaucca

SEQ ID NO: 1421303 - RNA, 19 nt, Artificial Sequence
  Description of Artificial Sequence: Synthetic oligonucleotide
ggcaacugcacauuucuug

SEQ ID NO: 1421304 - RNA, 19 nt, Artificial Sequence
  Description of Artificial Sequence: Synthetic oligonucleotide
auuuugguaucggagggcu

SEQ ID NO: 1421305 - RNA, 19 nt, Artificial Sequence
  Description of Artificial Sequence: Synthetic oligonucleotide
cuguuauuauccauucuga

SEQ ID NO: 1421306 - RNA, 19 nt, Artificial Sequence
  Description of Artificial Sequence: Synthetic oligonucleotide
uuuuaggagauggcugagc

SEQ ID NO: 1421307 - RNA, 19 nt, Artificial Sequence
  Description of Artificial Sequence: Synthetic oligonucleotide
ugaauacacagcacucaau

SEQ ID NO: 1421308 - RNA, 19 nt, Artificial Sequence
  Description of Artificial Sequence: Synthetic oligonucleotide
ccauuguauucaaaugucg

SEQ ID NO: 1421309 - RNA, 19 nt, Artificial Sequence
  Description of Artificial Sequence: Synthetic oligonucleotide
guggcaaugguauguguac

SEQ ID NO: 1421310 - RNA, 19 nt, Artificial Sequence
  Description of Artificial Sequence: Synthetic oligonucleotide
gucgaauuuucauagccaa

SEQ ID NO: 1421311 - RNA, 19 nt, Artificial Sequence
  Description of Artificial Sequence: Synthetic oligonucleotide
aggucgaaaaccaagguuu

SEQ ID NO: 1421312 - RNA, 19 nt, Artificial Sequence
  Description of Artificial Sequence: Synthetic oligonucleotide
agcucccaguuauugauca

SEQ ID NO: 1421313 - RNA, 19 nt, Artificial Sequence
  Description of Artificial Sequence: Synthetic oligonucleotide
agacaaguauucaaaacau

SEQ ID NO: 1421314 - RNA, 19 nt, Artificial Sequence
  Description of Artificial Sequence: Synthetic oligonucleotide
ggcuauucaaggcagaaaa

SEQ ID NO: 1421315 - RNA, 19 nt, Artificial Sequence
  Description of Artificial Sequence: Synthetic oligonucleotide
aagaucacauggaaaccca

SEQ ID NO: 1421316 - RNA, 19 nt, Artificial Sequence
  Description of Artificial Sequence: Synthetic oligonucleotide
cuuaggaauauucuucucu

SEQ ID NO: 1421317 - RNA, 19 nt, Artificial Sequence
  Description of Artificial Sequence: Synthetic oligonucleotide
caauaagcagacuuaggaa

SEQ ID NO: 1421318 - RNA, 19 nt, Artificial Sequence
  Description of Artificial Sequence: Synthetic oligonucleotide
caauguaucuaaaacaguu

SEQ ID NO: 1421319 - RNA, 19 nt, Artificial Sequence
  Description of Artificial Sequence: Synthetic oligonucleotide
uaucuaugaccuucuuacu

SEQ ID NO: 1421320 - RNA, 19 nt, Artificial Sequence
  Description of Artificial Sequence: Synthetic oligonucleotide
cugcuauccucuugaagag

SEQ ID NO: 1421321 - RNA, 19 nt, Artificial Sequence
  Description of Artificial Sequence: Synthetic oligonucleotide
ggcgcuuucaucaaguuuc

SEQ ID NO: 1421322 - RNA, 19 nt, Artificial Sequence
  Description of Artificial Sequence: Synthetic oligonucleotide
ugaccuucuuacugcauuc

SEQ ID NO: 1421323 - RNA, 19 nt, Artificial Sequence
  Description of Artificial Sequence: Synthetic oligonucleotide
gcagcuaguacuucaaaca

SEQ ID NO: 1421324 - RNA, 19 nt, Artificial Sequence
  Description of Artificial Sequence: Synthetic oligonucleotide
augaaaauacuuggguccu

SEQ ID NO: 1421325 - RNA, 19 nt, Artificial Sequence
  Description of Artificial Sequence: Synthetic oligonucleotide
ucucaucauuugcucacac

SEQ ID NO: 1421326 - RNA, 19 nt, Artificial Sequence
  Description of Artificial Sequence: Synthetic oligonucleotide
aucagaguauucugaggga

SEQ ID NO: 1421327 - RNA, 19 nt, Artificial Sequence
  Description of Artificial Sequence: Synthetic oligonucleotide
gaucaacuaggauucgaaa

SEQ ID NO: 1421328 - RNA, 19 nt, Artificial Sequence
  Description of Artificial Sequence: Synthetic oligonucleotide
gaaaagcgccaucugagua

SEQ ID NO: 1421329 - RNA, 19 nt, Artificial Sequence
  Description of Artificial Sequence: Synthetic oligonucleotide
gaaggauagaaacaauguu

SEQ ID NO: 1421330 - RNA, 19 nt, Artificial Sequence
  Description of Artificial Sequence: Synthetic oligonucleotide
aaggugguuauaaugcaua

SEQ ID NO: 1421331 - RNA, 19 nt, Artificial Sequence
  Description of Artificial Sequence: Synthetic oligonucleotide
augcugaucaguacuuuag

SEQ ID NO: 1421332 - RNA, 19 nt, Artificial Sequence
  Description of Artificial Sequence: Synthetic oligonucleotide
acaguugacagaauugaaa

SEQ ID NO: 1421333 - RNA, 19 nt, Artificial Sequence
  Description of Artificial Sequence: Synthetic oligonucleotide
guuggaaaagcgccaucug

SEQ ID NO: 1421334 - RNA, 19 nt, Artificial Sequence
  Description of Artificial Sequence: Synthetic oligonucleotide
acuaggauucgaaacccug

SEQ ID NO: 1421335 - RNA, 19 nt, Artificial Sequence
  Description of Artificial Sequence: Synthetic oligonucleotide
guacuucaaacaugugcug

SEQ ID NO: 1421336 - RNA, 19 nt, Artificial Sequence
  Description of Artificial Sequence: Synthetic oligonucleotide
uuugguaucggagggcuuu

SEQ ID NO: 1421337 - RNA, 19 nt, Artificial Sequence
  Description of Artificial Sequence: Synthetic oligonucleotide
aaaauacuuggguccuguu

SEQ ID NO: 1421338 - RNA, 19 nt, Artificial Sequence
  Description of Artificial Sequence: Synthetic oligonucleotide
gaaaaucugucuaacuccu

SEQ ID NO: 1421339 - RNA, 19 nt, Artificial Sequence
  Description of Artificial Sequence: Synthetic oligonucleotide
auguucuaucuuccaaacu

SEQ ID NO: 1421340 - RNA, 19 nt, Artificial Sequence
  Description of Artificial Sequence: Synthetic oligonucleotide
gaaacccugcucgaagcgc

SEQ ID NO: 1421341 - RNA, 19 nt, Artificial Sequence
  Description of Artificial Sequence: Synthetic oligonucleotide
gauucgaaacccugcucga

SEQ ID NO: 1421342 - RNA, 19 nt, Artificial Sequence
  Description of Artificial Sequence: Synthetic oligonucleotide
gacaaccauggauauuauc

SEQ ID NO: 1421343 - RNA, 19 nt, Artificial Sequence
  Description of Artificial Sequence: Synthetic oligonucleotide
guuauuauccauucugauu

SEQ ID NO: 1421344 - RNA, 19 nt, Artificial Sequence
  Description of Artificial Sequence: Synthetic oligonucleotide
ccgauaaauuucaucacug

SEQ ID NO: 1421345 - RNA, 19 nt, Artificial Sequence
  Description of Artificial Sequence: Synthetic oligonucleotide
gcacucaauagguuuucgg

SEQ ID NO: 1421346 - RNA, 19 nt, Artificial Sequence
  Description of Artificial Sequence: Synthetic oligonucleotide
ucacaaacgccacggcauc

SEQ ID NO: 1421347 - RNA, 19 nt, Artificial Sequence
  Description of Artificial Sequence: Synthetic oligonucleotide
cuugguuuccaauguaucu

SEQ ID NO: 1421348 - RNA, 19 nt, Artificial Sequence
  Description of Artificial Sequence: Synthetic oligonucleotide
caguacuuuagaaggacaa

SEQ ID NO: 1421349 - RNA, 19 nt, Artificial Sequence
  Description of Artificial Sequence: Synthetic oligonucleotide
aagagauguggugaagaua

SEQ ID NO: 1421350 - RNA, 19 nt, Artificial Sequence
  Description of Artificial Sequence: Synthetic oligonucleotide
uaagcagacuuaggaacac

SEQ ID NO: 1421351 - RNA, 19 nt, Artificial Sequence
  Description of Artificial Sequence: Synthetic oligonucleotide
agcgccaucugaguagauc

SEQ ID NO: 1421352 - RNA, 19 nt, Artificial Sequence
  Description of Artificial Sequence: Synthetic oligonucleotide
ucggaagagauguggugaa

SEQ ID NO: 1421353 - RNA, 19 nt, Artificial Sequence
  Description of Artificial Sequence: Synthetic oligonucleotide
ggcagcuaguacuucaaac

SEQ ID NO: 1421354 - RNA, 19 nt, Artificial Sequence
  Description of Artificial Sequence: Synthetic oligonucleotide
ccaacaauccucuggggug

SEQ ID NO: 1421355 - RNA, 19 nt, Artificial Sequence
  Description of Artificial Sequence: Synthetic oligonucleotide
uaauaggcgcuuucaucaa

SEQ ID NO: 1421356 - RNA, 19 nt, Artificial Sequence
  Description of Artificial Sequence: Synthetic oligonucleotide
aggugguuauaaugcauaa

SEQ ID NO: 1421357 - RNA, 19 nt, Artificial Sequence
  Description of Artificial Sequence: Synthetic oligonucleotide
agcaaguggugugucuuuc

SEQ ID NO: 1421358 - RNA, 19 nt, Artificial Sequence
  Description of Artificial Sequence: Synthetic oligonucleotide
gguuauaaugcauaaucau

SEQ ID NO: 1421359 - RNA, 19 nt, Artificial Sequence
  Description of Artificial Sequence: Synthetic oligonucleotide
caaguuucagacaaguauu

SEQ ID NO: 1421360 - RNA, 19 nt, Artificial Sequence
  Description of Artificial Sequence: Synthetic oligonucleotide
agcacucaauagguuuucg

SEQ ID NO: 1421361 - RNA, 19 nt, Artificial Sequence
  Description of Artificial Sequence: Synthetic oligonucleotide
uugcuucuaggaacucucu

SEQ ID NO: 1421362 - RNA, 19 nt, Artificial Sequence
  Description of Artificial Sequence: Synthetic oligonucleotide
gauaaacagucagagcacu

SEQ ID NO: 1421363 - RNA, 19 nt, Artificial Sequence
  Description of Artificial Sequence: Synthetic oligonucleotide
aacuaggauucgaaacccu

SEQ ID NO: 1421364 - RNA, 19 nt, Artificial Sequence
  Description of Artificial Sequence: Synthetic oligonucleotide
uuuagagagucaggauccu

SEQ ID NO: 1421365 - RNA, 19 nt, Artificial Sequence
  Description of Artificial Sequence: Synthetic oligonucleotide
ugcgacccugucacugggg

SEQ ID NO: 1421366 - RNA, 19 nt, Artificial Sequence
  Description of Artificial Sequence: Synthetic oligonucleotide
gcauguuugugccagaagu

SEQ ID NO: 1421367 - RNA, 19 nt, Artificial Sequence
  Description of Artificial Sequence: Synthetic oligonucleotide
aggacaacagagcgguaau

SEQ ID NO: 1421368 - RNA, 19 nt, Artificial Sequence
  Description of Artificial Sequence: Synthetic oligonucleotide
uggcaaugguauguguaca

SEQ ID NO: 1421369 - RNA, 19 nt, Artificial Sequence
  Description of Artificial Sequence: Synthetic oligonucleotide
uaugaccuucuuacugcau

SEQ ID NO: 1421370 - RNA, 19 nt, Artificial Sequence
  Description of Artificial Sequence: Synthetic oligonucleotide
gaagagauguggugaagau

SEQ ID NO: 1421371 - RNA, 19 nt, Artificial Sequence
  Description of Artificial Sequence: Synthetic oligonucleotide
gaaggucgaaaaccaaggu

SEQ ID NO: 1421372 - RNA, 19 nt, Artificial Sequence
  Description of Artificial Sequence: Synthetic oligonucleotide
agacugaacagaagguggu

SEQ ID NO: 1421373 - RNA, 19 nt, Artificial Sequence
  Description of Artificial Sequence: Synthetic oligonucleotide
auaggcgcuuucaucaagu

SEQ ID NO: 1421374 - RNA, 19 nt, Artificial Sequence
  Description of Artificial Sequence: Synthetic oligonucleotide
agaauacacgugaaggaua

SEQ ID NO: 1421375 - RNA, 19 nt, Artificial Sequence
  Description of Artificial Sequence: Synthetic oligonucleotide
uugugucagugguuggaaa

SEQ ID NO: 1421376 - RNA, 19 nt, Artificial Sequence
  Description of Artificial Sequence: Synthetic oligonucleotide
cuaugaccuucuuacugca

SEQ ID NO: 1421377 - RNA, 19 nt, Artificial Sequence
  Description of Artificial Sequence: Synthetic oligonucleotide
uucguugaugauguucuuu

SEQ ID NO: 1421378 - RNA, 19 nt, Artificial Sequence
  Description of Artificial Sequence: Synthetic oligonucleotide
ugcuacucucugcauguuu

SEQ ID NO: 1421379 - RNA, 19 nt, Artificial Sequence
  Description of Artificial Sequence: Synthetic oligonucleotide
gcuaguacuucaaacaugu

SEQ ID NO: 1421380 - RNA, 19 nt, Artificial Sequence
  Description of Artificial Sequence: Synthetic oligonucleotide
uggugugucuuucccgaua

SEQ ID NO: 1421381 - RNA, 19 nt, Artificial Sequence
  Description of Artificial Sequence: Synthetic oligonucleotide
uuagagagucaggauccuc

SEQ ID NO: 1421382 - RNA, 19 nt, Artificial Sequence
  Description of Artificial Sequence: Synthetic oligonucleotide
cugcauucauucagaagga

SEQ ID NO: 1421383 - RNA, 19 nt, Artificial Sequence
  Description of Artificial Sequence: Synthetic oligonucleotide
cagagcgguaauccauggc

SEQ ID NO: 1421384 - RNA, 19 nt, Artificial Sequence
  Description of Artificial Sequence: Synthetic oligonucleotide
agaagcacccuuccccuuu

SEQ ID NO: 1421385 - RNA, 19 nt, Artificial Sequence
  Description of Artificial Sequence: Synthetic oligonucleotide
ugcuauccucuugaagaga

SEQ ID NO: 1421386 - RNA, 19 nt, Artificial Sequence
  Description of Artificial Sequence: Synthetic oligonucleotide
ugugggcaugauugagaga

SEQ ID NO: 1421387 - RNA, 19 nt, Artificial Sequence
  Description of Artificial Sequence: Synthetic oligonucleotide
ucuguaccaucagaguauu

SEQ ID NO: 1421388 - RNA, 19 nt, Artificial Sequence
  Description of Artificial Sequence: Synthetic oligonucleotide
agagcaaguggugugucuu

SEQ ID NO: 1421389 - RNA, 19 nt, Artificial Sequence
  Description of Artificial Sequence: Synthetic oligonucleotide
agagaagaauacacgugaa

SEQ ID NO: 1421390 - RNA, 19 nt, Artificial Sequence
  Description of Artificial Sequence: Synthetic oligonucleotide
ggaagagauguggugaaga

SEQ ID NO: 1421391 - RNA, 19 nt, Artificial Sequence
  Description of Artificial Sequence: Synthetic oligonucleotide
ucggagggcuuuacaggac

SEQ ID NO: 1421392 - RNA, 19 nt, Artificial Sequence
  Description of Artificial Sequence: Synthetic oligonucleotide
cuauccucuugaagagauc

SEQ ID NO: 1421393 - RNA, 19 nt, Artificial Sequence
  Description of Artificial Sequence: Synthetic oligonucleotide
acuugcugaucaacuagga

SEQ ID NO: 1421394 - RNA, 19 nt, Artificial Sequence
  Description of Artificial Sequence: Synthetic oligonucleotide
gcugaucaguacuuuagaa

SEQ ID NO: 1421395 - RNA, 19 nt, Artificial Sequence
  Description of Artificial Sequence: Synthetic oligonucleotide
uacuuggguccuguuauua

SEQ ID NO: 1421396 - RNA, 19 nt, Artificial Sequence
  Description of Artificial Sequence: Synthetic oligonucleotide
ugagggacuccaagcuuua

SEQ ID NO: 1421397 - RNA, 19 nt, Artificial Sequence
  Description of Artificial Sequence: Synthetic oligonucleotide
gguuugaauccaaacaaua

SEQ ID NO: 1421398 - RNA, 19 nt, Artificial Sequence
  Description of Artificial Sequence: Synthetic oligonucleotide
gagucuguaccaucagagu

SEQ ID NO: 1421399 - RNA, 19 nt, Artificial Sequence
  Description of Artificial Sequence: Synthetic oligonucleotide
guauguguacagcuuugua

SEQ ID NO: 1421400 - RNA, 19 nt, Artificial Sequence
  Description of Artificial Sequence: Synthetic oligonucleotide
ucucugcauguuugugcca

SEQ ID NO: 1421401 - RNA, 19 nt, Artificial Sequence
  Description of Artificial Sequence: Synthetic oligonucleotide
gggugguuugaauccaaac

SEQ ID NO: 1421402 - RNA, 19 nt, Artificial Sequence
  Description of Artificial Sequence: Synthetic oligonucleotide
uggcuauucaaggcagaaa

SEQ ID NO: 1421403 - RNA, 19 nt, Artificial Sequence
  Description of Artificial Sequence: Synthetic oligonucleotide
ugguuggaaaagcgccauc

SEQ ID NO: 1421404 - RNA, 19 nt, Artificial Sequence
  Description of Artificial Sequence: Synthetic oligonucleotide
ggcagaaaaucugucuaac

SEQ ID NO: 1421405 - RNA, 19 nt, Artificial Sequence
  Description of Artificial Sequence: Synthetic oligonucleotide
gcuuuacacaguuguguca

SEQ ID NO: 1421406 - RNA, 19 nt, Artificial Sequence
  Description of Artificial Sequence: Synthetic oligonucleotide
aggcgcuuucaucaaguuu

SEQ ID NO: 1421407 - RNA, 19 nt, Artificial Sequence
  Description of Artificial Sequence: Synthetic oligonucleotide
ggugugucuuucccgauaa

SEQ ID NO: 1421408 - RNA, 19 nt, Artificial Sequence
  Description of Artificial Sequence: Synthetic oligonucleotide
ugcguuccugaaucacccu

SEQ ID NO: 1421409 - RNA, 19 nt, Artificial Sequence
  Description of Artificial Sequence: Synthetic oligonucleotide
gcaaugguauguguacagc

SEQ ID NO: 1421410 - RNA, 19 nt, Artificial Sequence
  Description of Artificial Sequence: Synthetic oligonucleotide
gcuucuaggaacucucugu

SEQ ID NO: 1421411 - RNA, 19 nt, Artificial Sequence
  Description of Artificial Sequence: Synthetic oligonucleotide
augcauaaucauggauucu

SEQ ID NO: 1421412 - RNA, 19 nt, Artificial Sequence
  Description of Artificial Sequence: Synthetic oligonucleotide
gaccuucuuacugcauuca

SEQ ID NO: 1421413 - RNA, 19 nt, Artificial Sequence
  Description of Artificial Sequence: Synthetic oligonucleotide
cugcgacccugucacuggg

SEQ ID NO: 1421414 - RNA, 19 nt, Artificial Sequence
  Description of Artificial Sequence: Synthetic oligonucleotide
cugaucaacuaggauucga

SEQ ID NO: 1421415 - RNA, 19 nt, Artificial Sequence
  Description of Artificial Sequence: Synthetic oligonucleotide
auaauucaucaggcaaaau

SEQ ID NO: 1421416 - RNA, 19 nt, Artificial Sequence
  Description of Artificial Sequence: Synthetic oligonucleotide
gcaguaugcugaucaguac

SEQ ID NO: 1421417 - RNA, 19 nt, Artificial Sequence
  Description of Artificial Sequence: Synthetic oligonucleotide
auacuuggguccuguuauu

SEQ ID NO: 1421418 - RNA, 19 nt, Artificial Sequence
  Description of Artificial Sequence: Synthetic oligonucleotide
auaaacagucagagcacuu

SEQ ID NO: 1421419 - RNA, 19 nt, Artificial Sequence
  Description of Artificial Sequence: Synthetic oligonucleotide
auucgaaacccugcucgaa

SEQ ID NO: 1421420 - RNA, 19 nt, Artificial Sequence
  Description of Artificial Sequence: Synthetic oligonucleotide
guugugucagugguuggaa

SEQ ID NO: 1421421 - RNA, 19 nt, Artificial Sequence
  Description of Artificial Sequence: Synthetic oligonucleotide
ggcugagcaccucugcgac

SEQ ID NO: 1421422 - RNA, 19 nt, Artificial Sequence
  Description of Artificial Sequence: Synthetic oligonucleotide
gucgaaaaccaagguuuuc

SEQ ID NO: 1421423 - RNA, 19 nt, Artificial Sequence
  Description of Artificial Sequence: Synthetic oligonucleotide
agagcacuugccauugcuu

SEQ ID NO: 1421424 - RNA, 19 nt, Artificial Sequence
  Description of Artificial Sequence: Synthetic oligonucleotide
agaucacauggaaacccau

SEQ ID NO: 1421425 - RNA, 19 nt, Artificial Sequence
  Description of Artificial Sequence: Synthetic oligonucleotide
gguuggaaaagcgccaucu

SEQ ID NO: 1421426 - RNA, 19 nt, Artificial Sequence
  Description of Artificial Sequence: Synthetic oligonucleotide
caacagagcgguaauccau

SEQ ID NO: 1421427 - RNA, 19 nt, Artificial Sequence
  Description of Artificial Sequence: Synthetic oligonucleotide
gacccugucacugggguau

SEQ ID NO: 1421428 - RNA, 19 nt, Artificial Sequence
  Description of Artificial Sequence: Synthetic oligonucleotide
caucagcuuguccaucaaa

SEQ ID NO: 1421429 - RNA, 19 nt, Artificial Sequence
  Description of Artificial Sequence: Synthetic oligonucleotide
gggcaugauugagagaaga

SEQ ID NO: 1421430 - RNA, 19 nt, Artificial Sequence
  Description of Artificial Sequence: Synthetic oligonucleotide
cuugcugaucaacuaggau

SEQ ID NO: 1421431 - RNA, 19 nt, Artificial Sequence
  Description of Artificial Sequence: Synthetic oligonucleotide
gcgccaucugaguagaucu

SEQ ID NO: 1421432 - RNA, 19 nt, Artificial Sequence
  Description of Artificial Sequence: Synthetic oligonucleotide
gccaacaauccucuggggu

SEQ ID NO: 1421433 - RNA, 19 nt, Artificial Sequence
  Description of Artificial Sequence: Synthetic oligonucleotide
cuggcuauucaaggcagaa

SEQ ID NO: 1421434 - RNA, 19 nt, Artificial Sequence
  Description of Artificial Sequence: Synthetic oligonucleotide
cgaaacccugcucgaagcg

SEQ ID NO: 1421435 - RNA, 19 nt, Artificial Sequence
  Description of Artificial Sequence: Synthetic oligonucleotide
gaucacauggaaacccauu

SEQ ID NO: 1421436 - RNA, 19 nt, Artificial Sequence
  Description of Artificial Sequence: Synthetic oligonucleotide
cugagggacuccaagcuuu

SEQ ID NO: 1421437 - RNA, 19 nt, Artificial Sequence
  Description of Artificial Sequence: Synthetic oligonucleotide
ggaaacccauuguauucaa

SEQ ID NO: 1421438 - RNA, 19 nt, Artificial Sequence
  Description of Artificial Sequence: Synthetic oligonucleotide
cagcuuuguaauaggcgcu

SEQ ID NO: 1421439 - RNA, 19 nt, Artificial Sequence
  Description of Artificial Sequence: Synthetic oligonucleotide
gcugaucaacuaggauucg

SEQ ID NO: 1421440 - RNA, 19 nt, Artificial Sequence
  Description of Artificial Sequence: Synthetic oligonucleotide
uugguaucggagggcuuua

SEQ ID NO: 1421441 - RNA, 19 nt, Artificial Sequence
  Description of Artificial Sequence: Synthetic oligonucleotide
gcaugauugagagaagaau

SEQ ID NO: 1421442 - RNA, 19 nt, Artificial Sequence
  Description of Artificial Sequence: Synthetic oligonucleotide
gaagcgcauucacauucau

SEQ ID NO: 1421443 - RNA, 19 nt, Artificial Sequence
  Description of Artificial Sequence: Synthetic oligonucleotide
cauugaugcguuccugaau

SEQ ID NO: 1421444 - RNA, 19 nt, Artificial Sequence
  Description of Artificial Sequence: Synthetic oligonucleotide
gcuuuacaggacugcagua

SEQ ID NO: 1421445 - RNA, 19 nt, Artificial Sequence
  Description of Artificial Sequence: Synthetic oligonucleotide
gagauguggugaagauaaa

SEQ ID NO: 1421446 - RNA, 19 nt, Artificial Sequence
  Description of Artificial Sequence: Synthetic oligonucleotide
cccgauaaauuucaucacu

SEQ ID NO: 1421447 - RNA, 19 nt, Artificial Sequence
  Description of Artificial Sequence: Synthetic oligonucleotide
ggacaacagagcgguaauc

SEQ ID NO: 1421448 - RNA, 19 nt, Artificial Sequence
  Description of Artificial Sequence: Synthetic oligonucleotide
gcuauccucuugaagagau

SEQ ID NO: 1421449 - RNA, 19 nt, Artificial Sequence
  Description of Artificial Sequence: Synthetic oligonucleotide
cugcauguuugugccagaa

SEQ ID NO: 1421450 - RNA, 19 nt, Artificial Sequence
  Description of Artificial Sequence: Synthetic oligonucleotide
ccaauguaucuaaaacagu

SEQ ID NO: 1421451 - RNA, 19 nt, Artificial Sequence
  Description of Artificial Sequence: Synthetic oligonucleotide
gccagaaguugcaucuaca

SEQ ID NO: 1421452 - RNA, 19 nt, Artificial Sequence
  Description of Artificial Sequence: Synthetic oligonucleotide
gguccuguuauuauccauu

SEQ ID NO: 1421453 - RNA, 19 nt, Artificial Sequence
  Description of Artificial Sequence: Synthetic oligonucleotide
gcauaaucauggauucucu

SEQ ID NO: 1421454 - RNA, 19 nt, Artificial Sequence
  Description of Artificial Sequence: Synthetic oligonucleotide
gaaucacccucagcagagu

SEQ ID NO: 1421455 - RNA, 19 nt, Artificial Sequence
  Description of Artificial Sequence: Synthetic oligonucleotide
ggugguuauaaugcauaau

SEQ ID NO: 1421456 - RNA, 19 nt, Artificial Sequence
  Description of Artificial Sequence: Synthetic oligonucleotide
gaagcacccuuccccuuuu

SEQ ID NO: 1421457 - RNA, 19 nt, Artificial Sequence
  Description of Artificial Sequence: Synthetic oligonucleotide
cuguggcaaugguaugugu

SEQ ID NO: 1421458 - RNA, 19 nt, Artificial Sequence
  Description of Artificial Sequence: Synthetic oligonucleotide
guucguugaugauguucuu

SEQ ID NO: 1421459 - RNA, 19 nt, Artificial Sequence
  Description of Artificial Sequence: Synthetic oligonucleotide
cucgaagcgcauucacauu

SEQ ID NO: 1421460 - RNA, 19 nt, Artificial Sequence
  Description of Artificial Sequence: Synthetic oligonucleotide
ggguccuguuauuauccau

SEQ ID NO: 1421461 - RNA, 19 nt, Artificial Sequence
  Description of Artificial Sequence: Synthetic oligonucleotide
aagcgccaucugaguagau

SEQ ID NO: 1421462 - RNA, 19 nt, Artificial Sequence
  Description of Artificial Sequence: Synthetic oligonucleotide
gguccuugugggcaugauu

SEQ ID NO: 1421463 - RNA, 19 nt, Artificial Sequence
  Description of Artificial Sequence: Synthetic oligonucleotide
cgaagcgcauucacauuca

SEQ ID NO: 1421464 - RNA, 19 nt, Artificial Sequence
  Description of Artificial Sequence: Synthetic oligonucleotide
gcgcauucacauucaugcu

SEQ ID NO: 1421465 - RNA, 19 nt, Artificial Sequence
  Description of Artificial Sequence: Synthetic oligonucleotide
gcgcuuucaucaaguuuca

SEQ ID NO: 1421466 - RNA, 19 nt, Artificial Sequence
  Description of Artificial Sequence: Synthetic oligonucleotide
caaacaugugcuggcuauu

SEQ ID NO: 1421467 - RNA, 19 nt, Artificial Sequence
  Description of Artificial Sequence: Synthetic oligonucleotide
ggggugguuugaauccaaa

SEQ ID NO: 1421468 - RNA, 19 nt, Artificial Sequence
  Description of Artificial Sequence: Synthetic oligonucleotide
acucucuguucugguccuu

SEQ ID NO: 1421469 - RNA, 19 nt, Artificial Sequence
  Description of Artificial Sequence: Synthetic oligonucleotide
ggucgaaaaccaagguuuu

SEQ ID NO: 1421470 - RNA, 19 nt, Artificial Sequence
  Description of Artificial Sequence: Synthetic oligonucleotide
acgccacggcauccuccau

SEQ ID NO: 1421471 - RNA, 19 nt, Artificial Sequence
  Description of Artificial Sequence: Synthetic oligonucleotide
acccugcucgaagcgcauu

SEQ ID NO: 1421472 - RNA, 19 nt, Artificial Sequence
  Description of Artificial Sequence: Synthetic oligonucleotide
gagggacuccaagcuuuau

SEQ ID NO: 1421473 - RNA, 19 nt, Artificial Sequence
  Description of Artificial Sequence: Synthetic oligonucleotide
ggacaaccauggauauuau

SEQ ID NO: 1421474 - RNA, 19 nt, Artificial Sequence
  Description of Artificial Sequence: Synthetic oligonucleotide
gcaguucguugaugauguu

SEQ ID NO: 1421475 - RNA, 19 nt, Artificial Sequence
  Description of Artificial Sequence: Synthetic oligonucleotide
uaauuuaugggaacaaugc

SEQ ID NO: 1421476 - RNA, 19 nt, Artificial Sequence
  Description of Artificial Sequence: Synthetic oligonucleotide
auguggaaauccuugaugc

SEQ ID NO: 1421477 - RNA, 19 nt, Artificial Sequence
  Description of Artificial Sequence: Synthetic oligonucleotide
uuaauuuaugggaacaaug

SEQ ID NO: 1421478 - RNA, 19 nt, Artificial Sequence
  Description of Artificial Sequence: Synthetic oligonucleotide
uacuuuaugggguagacgc

SEQ ID NO: 1421479 - RNA, 19 nt, Artificial Sequence
  Description of Artificial Sequence: Synthetic oligonucleotide
aaugcagcgccacagggac

SEQ ID NO: 1421480 - RNA, 19 nt, Artificial Sequence
  Description of Artificial Sequence: Synthetic oligonucleotide
aaaagcagaaccuccccac

SEQ ID NO: 1421481 - RNA, 19 nt, Artificial Sequence
  Description of Artificial Sequence: Synthetic oligonucleotide
aaacaggugcauuucgggc

SEQ ID NO: 1421482 - RNA, 19 nt, Artificial Sequence
  Description of Artificial Sequence: Synthetic oligonucleotide
caaucgauaaacucggugg

SEQ ID NO: 1421483 - RNA, 19 nt, Artificial Sequence
  Description of Artificial Sequence: Synthetic oligonucleotide
acagacagagcucaguggc

SEQ ID NO: 1421484 - RNA, 19 nt, Artificial Sequence
  Description of Artificial Sequence: Synthetic oligonucleotide
uuuaugggaacaaugcagc

SEQ ID NO: 1421485 - RNA, 19 nt, Artificial Sequence
  Description of Artificial Sequence: Synthetic oligonucleotide
guagcagaggcauaaaagg

SEQ ID NO: 1421486 - RNA, 19 nt, Artificial Sequence
  Description of Artificial Sequence: Synthetic oligonucleotide
aauuuaugggaacaaugca

SEQ ID NO: 1421487 - RNA, 19 nt, Artificial Sequence
  Description of Artificial Sequence: Synthetic oligonucleotide
uggacauaggcccaggugc

SEQ ID NO: 1421488 - RNA, 19 nt, Artificial Sequence
  Description of Artificial Sequence: Synthetic oligonucleotide
aaggaguugagauucuucu

SEQ ID NO: 1421489 - RNA, 19 nt, Artificial Sequence
  Description of Artificial Sequence: Synthetic oligonucleotide
aaggucaugucuuugagua

SEQ ID NO: 1421490 - RNA, 19 nt, Artificial Sequence
  Description of Artificial Sequence: Synthetic oligonucleotide
aguguugugacuccggcag

SEQ ID NO: 1421491 - RNA, 19 nt, Artificial Sequence
  Description of Artificial Sequence: Synthetic oligonucleotide
agugccaaucgauaaacuc

SEQ ID NO: 1421492 - RNA, 19 nt, Artificial Sequence
  Description of Artificial Sequence: Synthetic oligonucleotide
ugccaaucgauaaacucgg

SEQ ID NO: 1421493 - RNA, 19 nt, Artificial Sequence
  Description of Artificial Sequence: Synthetic oligonucleotide
uuucccucguggaugaagg

SEQ ID NO: 1421494 - RNA, 19 nt, Artificial Sequence
  Description of Artificial Sequence: Synthetic oligonucleotide
ugaaacggcgcaugaagcg

SEQ ID NO: 1421495 - RNA, 19 nt, Artificial Sequence
  Description of Artificial Sequence: Synthetic oligonucleotide
agaaaagcagaaccucccc

SEQ ID NO: 1421496 - RNA, 19 nt, Artificial Sequence
  Description of Artificial Sequence: Synthetic oligonucleotide
guuuaucucagaugugugg

SEQ ID NO: 1421497 - RNA, 19 nt, Artificial Sequence
  Description of Artificial Sequence: Synthetic oligonucleotide
auuuaugggaacaaugcag

SEQ ID NO: 1421498 - RNA, 19 nt, Artificial Sequence
  Description of Artificial Sequence: Synthetic oligonucleotide
agauguaggugcuucguuc

SEQ ID NO: 1421499 - RNA, 19 nt, Artificial Sequence
  Description of Artificial Sequence: Synthetic oligonucleotide
acacacacacaacacugcc

SEQ ID NO: 1421500 - RNA, 19 nt, Artificial Sequence
  Description of Artificial Sequence: Synthetic oligonucleotide
gauacucggcuucugagug

SEQ ID NO: 1421501 - RNA, 19 nt, Artificial Sequence
  Description of Artificial Sequence: Synthetic oligonucleotide
ucaguggccacccaguacu

SEQ ID NO: 1421502 - RNA, 19 nt, Artificial Sequence
  Description of Artificial Sequence: Synthetic oligonucleotide
uguuuaauuuaugggaaca

SEQ ID NO: 1421503 - RNA, 19 nt, Artificial Sequence
  Description of Artificial Sequence: Synthetic oligonucleotide
caugggaccguacagggcc

SEQ ID NO: 1421504 - RNA, 19 nt, Artificial Sequence
  Description of Artificial Sequence: Synthetic oligonucleotide
ucguagggaacuuuguccc

SEQ ID NO: 1421505 - RNA, 19 nt, Artificial Sequence
  Description of Artificial Sequence: Synthetic oligonucleotide
uggcuagggagccaaacag

SEQ ID NO: 1421506 - RNA, 19 nt, Artificial Sequence
  Description of Artificial Sequence: Synthetic oligonucleotide
gugccaaucgauaaacucg

SEQ ID NO: 1421507 - RNA, 19 nt, Artificial Sequence
  Description of Artificial Sequence: Synthetic oligonucleotide
aguagcagaggcauaaaag

SEQ ID NO: 1421508 - RNA, 19 nt, Artificial Sequence
  Description of Artificial Sequence: Synthetic oligonucleotide
aagcgcuccagguuugcgg

SEQ ID NO: 1421509 - RNA, 19 nt, Artificial Sequence
  Description of Artificial Sequence: Synthetic oligonucleotide
accccacacacacacacac

SEQ ID NO: 1421510 - RNA, 19 nt, Artificial Sequence
  Description of Artificial Sequence: Synthetic oligonucleotide
agcaugggaccguacaggg

SEQ ID NO: 1421511 - RNA, 19 nt, Artificial Sequence
  Description of Artificial Sequence: Synthetic oligonucleotide
cacacacacacacacacac

SEQ ID NO: 1421512 - RNA, 19 nt, Artificial Sequence
  Description of Artificial Sequence: Synthetic oligonucleotide
uccaaggcggaguacagcu

SEQ ID NO: 1421513 - RNA, 19 nt, Artificial Sequence
  Description of Artificial Sequence: Synthetic oligonucleotide
uucucuacgagcguguggu

SEQ ID NO: 1421514 - RNA, 19 nt, Artificial Sequence
  Description of Artificial Sequence: Synthetic oligonucleotide
uuuaauuuaugggaacaau

SEQ ID NO: 1421515 - RNA, 19 nt, Artificial Sequence
  Description of Artificial Sequence: Synthetic oligonucleotide
uucagcaaguugcuaaguc

SEQ ID NO: 1421516 - RNA, 19 nt, Artificial Sequence
  Description of Artificial Sequence: Synthetic oligonucleotide
uuguuuaauuuaugggaac

SEQ ID NO: 1421517 - RNA, 19 nt, Artificial Sequence
  Description of Artificial Sequence: Synthetic oligonucleotide
aacucggugguuccaugag

SEQ ID NO: 1421518 - RNA, 19 nt, Artificial Sequence
  Description of Artificial Sequence: Synthetic oligonucleotide
auucgcaucuucucaaagu

SEQ ID NO: 1421519 - RNA, 19 nt, Artificial Sequence
  Description of Artificial Sequence: Synthetic oligonucleotide
ggugcuucguuccugcucg

SEQ ID NO: 1421520 - RNA, 19 nt, Artificial Sequence
  Description of Artificial Sequence: Synthetic oligonucleotide
ugucccuugguccagugau

SEQ ID NO: 1421521 - RNA, 19 nt, Artificial Sequence
  Description of Artificial Sequence: Synthetic oligonucleotide
ugaucgggucugcagaugu

SEQ ID NO: 1421522 - RNA, 19 nt, Artificial Sequence
  Description of Artificial Sequence: Synthetic oligonucleotide
gaacaaugcagcgccacag

SEQ ID NO: 1421523 - RNA, 19 nt, Artificial Sequence
  Description of Artificial Sequence: Synthetic oligonucleotide
agcuuagugagugccaauc

SEQ ID NO: 1421524 - RNA, 19 nt, Artificial Sequence
  Description of Artificial Sequence: Synthetic oligonucleotide
gagcgugugguuucccucg

SEQ ID NO: 1421525 - RNA, 19 nt, Artificial Sequence
  Description of Artificial Sequence: Synthetic oligonucleotide
ucauugaaacggcgcauga

SEQ ID NO: 1421526 - RNA, 19 nt, Artificial Sequence
  Description of Artificial Sequence: Synthetic oligonucleotide
agugagugccaaucgauaa

SEQ ID NO: 1421527 - RNA, 19 nt, Artificial Sequence
  Description of Artificial Sequence: Synthetic oligonucleotide
aguugcugaggccaaacau

SEQ ID NO: 1421528 - RNA, 19 nt, Artificial Sequence
  Description of Artificial Sequence: Synthetic oligonucleotide
uggagcaugggaccguaca

SEQ ID NO: 1421529 - RNA, 19 nt, Artificial Sequence
  Description of Artificial Sequence: Synthetic oligonucleotide
agggauuccuccuggcuag

SEQ ID NO: 1421530 - RNA, 19 nt, Artificial Sequence
  Description of Artificial Sequence: Synthetic oligonucleotide
ugucguagggaacuuuguc

SEQ ID NO: 1421531 - RNA, 19 nt, Artificial Sequence
  Description of Artificial Sequence: Synthetic oligonucleotide
auucuccaaccuguggugc

SEQ ID NO: 1421532 - RNA, 19 nt, Artificial Sequence
  Description of Artificial Sequence: Synthetic oligonucleotide
ugcuaagucgggcaucccu

SEQ ID NO: 1421533 - RNA, 19 nt, Artificial Sequence
  Description of Artificial Sequence: Synthetic oligonucleotide
uccaugagggguccagcag

SEQ ID NO: 1421534 - RNA, 19 nt, Artificial Sequence
  Description of Artificial Sequence: Synthetic oligonucleotide
uuugcgguggugacauccc

SEQ ID NO: 1421535 - RNA, 19 nt, Artificial Sequence
  Description of Artificial Sequence: Synthetic oligonucleotide
cacacacacacacacaaca

SEQ ID NO: 1421536 - RNA, 19 nt, Artificial Sequence
  Description of Artificial Sequence: Synthetic oligonucleotide
ugaacuuccgaagcagcug

SEQ ID NO: 1421537 - RNA, 19 nt, Artificial Sequence
  Description of Artificial Sequence: Synthetic oligonucleotide
cugaguggagcaugggacc

SEQ ID NO: 1421538 - RNA, 19 nt, Artificial Sequence
  Description of Artificial Sequence: Synthetic oligonucleotide
augugggauacucggcuuc

SEQ ID NO: 1421539 - RNA, 19 nt, Artificial Sequence
  Description of Artificial Sequence: Synthetic oligonucleotide
gugauggagcauucgcacg

SEQ ID NO: 1421540 - RNA, 19 nt, Artificial Sequence
  Description of Artificial Sequence: Synthetic oligonucleotide
cuucguuccugcucgcugc

SEQ ID NO: 1421541 - RNA, 19 nt, Artificial Sequence
  Description of Artificial Sequence: Synthetic oligonucleotide
accgcaaagaaggaguuga

SEQ ID NO: 1421542 - RNA, 19 nt, Artificial Sequence
  Description of Artificial Sequence: Synthetic oligonucleotide
acacacacacacaacacug

SEQ ID NO: 1421543 - RNA, 19 nt, Artificial Sequence
  Description of Artificial Sequence: Synthetic oligonucleotide
acucggugguuccaugagg

SEQ ID NO: 1421544 - RNA, 19 nt, Artificial Sequence
  Description of Artificial Sequence: Synthetic oligonucleotide
cacacacacacaacacugc

SEQ ID NO: 1421545 - RNA, 19 nt, Artificial Sequence
  Description of Artificial Sequence: Synthetic oligonucleotide
gaaacggcgcaugaagcgc

SEQ ID NO: 1421546 - RNA, 19 nt, Artificial Sequence
  Description of Artificial Sequence: Synthetic oligonucleotide
ucgauaaacucggugguuc

SEQ ID NO: 1421547 - RNA, 19 nt, Artificial Sequence
  Description of Artificial Sequence: Synthetic oligonucleotide
ucagagcauguggaaaucc

SEQ ID NO: 1421548 - RNA, 19 nt, Artificial Sequence
  Description of Artificial Sequence: Synthetic oligonucleotide
uuccgaagcagcugagccc

SEQ ID NO: 1421549 - RNA, 19 nt, Artificial Sequence
  Description of Artificial Sequence: Synthetic oligonucleotide
gagcauguggaaauccuug

SEQ ID NO: 1421550 - RNA, 19 nt, Artificial Sequence
  Description of Artificial Sequence: Synthetic oligonucleotide
ucuacgagcgugugguuuc

SEQ ID NO: 1421551 - RNA, 19 nt, Artificial Sequence
  Description of Artificial Sequence: Synthetic oligonucleotide
acacacacacacacaacac

SEQ ID NO: 1421552 - RNA, 19 nt, Artificial Sequence
  Description of Artificial Sequence: Synthetic oligonucleotide
ugugguuucccucguggau

SEQ ID NO: 1421553 - RNA, 19 nt, Artificial Sequence
  Description of Artificial Sequence: Synthetic oligonucleotide
aucgggucugcagaugucg

SEQ ID NO: 1421554 - RNA, 19 nt, Artificial Sequence
  Description of Artificial Sequence: Synthetic oligonucleotide
ucaccaccgagugaucggg

SEQ ID NO: 1421555 - RNA, 19 nt, Artificial Sequence
  Description of Artificial Sequence: Synthetic oligonucleotide
guugcuaagucgggcaucc

SEQ ID NO: 1421556 - RNA, 19 nt, Artificial Sequence
  Description of Artificial Sequence: Synthetic oligonucleotide
aaguugcuaagucgggcau

SEQ ID NO: 1421557 - RNA, 19 nt, Artificial Sequence
  Description of Artificial Sequence: Synthetic oligonucleotide
acggcucuggccaucauuc

SEQ ID NO: 1421558 - RNA, 19 nt, Artificial Sequence
  Description of Artificial Sequence: Synthetic oligonucleotide
gaugcauucccacagccau

SEQ ID NO: 1421559 - RNA, 19 nt, Artificial Sequence
  Description of Artificial Sequence: Synthetic oligonucleotide
caugagggguccagcagcc

SEQ ID NO: 1421560 - RNA, 19 nt, Artificial Sequence
  Description of Artificial Sequence: Synthetic oligonucleotide
agauguguggagagaaaag

SEQ ID NO: 1421561 - RNA, 19 nt, Artificial Sequence
  Description of Artificial Sequence: Synthetic oligonucleotide
ucucugagagaagugccug

SEQ ID NO: 1421562 - RNA, 19 nt, Artificial Sequence
  Description of Artificial Sequence: Synthetic oligonucleotide
augaccgcaaagaaggagu

SEQ ID NO: 1421563 - RNA, 19 nt, Artificial Sequence
  Description of Artificial Sequence: Synthetic oligonucleotide
aggugcuucguuccugcuc

SEQ ID NO: 1421564 - RNA, 19 nt, Artificial Sequence
  Description of Artificial Sequence: Synthetic oligonucleotide
guacuuuaugggguagacg

SEQ ID NO: 1421565 - RNA, 19 nt, Artificial Sequence
  Description of Artificial Sequence: Synthetic oligonucleotide
augggguagacgcucccag

SEQ ID NO: 1421566 - RNA, 19 nt, Artificial Sequence
  Description of Artificial Sequence: Synthetic oligonucleotide
gagugaucgggucugcaga

SEQ ID NO: 1421567 - RNA, 19 nt, Artificial Sequence
  Description of Artificial Sequence: Synthetic oligonucleotide
cauucgcaucuucucaaag

SEQ ID NO: 1421568 - RNA, 19 nt, Artificial Sequence
  Description of Artificial Sequence: Synthetic oligonucleotide
cuaagucgggcaucccugc

SEQ ID NO: 1421569 - RNA, 19 nt, Artificial Sequence
  Description of Artificial Sequence: Synthetic oligonucleotide
uaaacucggugguuccaug

SEQ ID NO: 1421570 - RNA, 19 nt, Artificial Sequence
  Description of Artificial Sequence: Synthetic oligonucleotide
ggagaggcgggacaguucc

SEQ ID NO: 1421571 - RNA, 19 nt, Artificial Sequence
  Description of Artificial Sequence: Synthetic oligonucleotide
cuuuaugggguagacgcuc

SEQ ID NO: 1421572 - RNA, 19 nt, Artificial Sequence
  Description of Artificial Sequence: Synthetic oligonucleotide
caaguugcuaagucgggca

SEQ ID NO: 1421573 - RNA, 19 nt, Artificial Sequence
  Description of Artificial Sequence: Synthetic oligonucleotide
cuuagugagugccaaucga

SEQ ID NO: 1421574 - RNA, 19 nt, Artificial Sequence
  Description of Artificial Sequence: Synthetic oligonucleotide
uguugugacuccggcagug

SEQ ID NO: 1421575 - RNA, 19 nt, Artificial Sequence
  Description of Artificial Sequence: Synthetic oligonucleotide
gcuuagugagugccaaucg

SEQ ID NO: 1421576 - RNA, 19 nt, Artificial Sequence
  Description of Artificial Sequence: Synthetic oligonucleotide
guucucuacgagcgugugg

SEQ ID NO: 1421577 - RNA, 19 nt, Artificial Sequence
  Description of Artificial Sequence: Synthetic oligonucleotide
uugcgguggugacaucccg

SEQ ID NO: 1421578 - RNA, 19 nt, Artificial Sequence
  Description of Artificial Sequence: Synthetic oligonucleotide
accaccgagugaucggguc

SEQ ID NO: 1421579 - RNA, 19 nt, Artificial Sequence
  Description of Artificial Sequence: Synthetic oligonucleotide
uagugagugccaaucgaua

SEQ ID NO: 1421580 - RNA, 19 nt, Artificial Sequence
  Description of Artificial Sequence: Synthetic oligonucleotide
ugggguagacgcucccagg

SEQ ID NO: 1421581 - RNA, 19 nt, Artificial Sequence
  Description of Artificial Sequence: Synthetic oligonucleotide
uuaugggguagacgcuccc

SEQ ID NO: 1421582 - RNA, 19 nt, Artificial Sequence
  Description of Artificial Sequence: Synthetic oligonucleotide
accguacagggccacccac

SEQ ID NO: 1421583 - RNA, 19 nt, Artificial Sequence
  Description of Artificial Sequence: Synthetic oligonucleotide
cacacacacacacacacaa

SEQ ID NO: 1421584 - RNA, 19 nt, Artificial Sequence
  Description of Artificial Sequence: Synthetic oligonucleotide
ggucaugucuuugaguagc

SEQ ID NO: 1421585 - RNA, 19 nt, Artificial Sequence
  Description of Artificial Sequence: Synthetic oligonucleotide
caugaccgcaaagaaggag

SEQ ID NO: 1421586 - RNA, 19 nt, Artificial Sequence
  Description of Artificial Sequence: Synthetic oligonucleotide
ugcgguggugacaucccgc

SEQ ID NO: 1421587 - RNA, 19 nt, Artificial Sequence
  Description of Artificial Sequence: Synthetic oligonucleotide
caaggcggaguacagcuuc

SEQ ID NO: 1421588 - RNA, 19 nt, Artificial Sequence
  Description of Artificial Sequence: Synthetic oligonucleotide
gaguccucuccacgaagag

SEQ ID NO: 1421589 - RNA, 19 nt, Artificial Sequence
  Description of Artificial Sequence: Synthetic oligonucleotide
ugcauucccacagccauuc

SEQ ID NO: 1421590 - RNA, 19 nt, Artificial Sequence
  Description of Artificial Sequence: Synthetic oligonucleotide
uccucaugggccagagcug

SEQ ID NO: 1421591 - RNA, 19 nt, Artificial Sequence
  Description of Artificial Sequence: Synthetic oligonucleotide
gagguucucuacgagcgug

SEQ ID NO: 1421592 - RNA, 19 nt, Artificial Sequence
  Description of Artificial Sequence: Synthetic oligonucleotide
cuggacauaggcccaggug

SEQ ID NO: 1421593 - RNA, 19 nt, Artificial Sequence
  Description of Artificial Sequence: Synthetic oligonucleotide
ucgaugaccuucagcugcu

SEQ ID NO: 1421594 - RNA, 19 nt, Artificial Sequence
  Description of Artificial Sequence: Synthetic oligonucleotide
acggccccaccccacacac

SEQ ID NO: 1421595 - RNA, 19 nt, Artificial Sequence
  Description of Artificial Sequence: Synthetic oligonucleotide
gaguagcagaggcauaaaa

SEQ ID NO: 1421596 - RNA, 19 nt, Artificial Sequence
  Description of Artificial Sequence: Synthetic oligonucleotide
cuagccgcagaaucugcug

SEQ ID NO: 1421597 - RNA, 19 nt, Artificial Sequence
  Description of Artificial Sequence: Synthetic oligonucleotide
uguaggugcuucguuccug

SEQ ID NO: 1421598 - RNA, 19 nt, Artificial Sequence
  Description of Artificial Sequence: Synthetic oligonucleotide
guggaugaaggucaugucu

SEQ ID NO: 1421599 - RNA, 19 nt, Artificial Sequence
  Description of Artificial Sequence: Synthetic oligonucleotide
aguugcuaagucgggcauc

SEQ ID NO: 1421600 - RNA, 19 nt, Artificial Sequence
  Description of Artificial Sequence: Synthetic oligonucleotide
uuugaguagcagaggcaua

SEQ ID NO: 1421601 - RNA, 19 nt, Artificial Sequence
  Description of Artificial Sequence: Synthetic oligonucleotide
agugaucgggucugcagau

SEQ ID NO: 1421602 - RNA, 19 nt, Artificial Sequence
  Description of Artificial Sequence: Synthetic oligonucleotide
ucauucgcaucuucucaaa

SEQ ID NO: 1421603 - RNA, 19 nt, Artificial Sequence
  Description of Artificial Sequence: Synthetic oligonucleotide
agcagaaccuccccacccu

SEQ ID NO: 1421604 - RNA, 19 nt, Artificial Sequence
  Description of Artificial Sequence: Synthetic oligonucleotide
cauucgcacggcucuggcc

SEQ ID NO: 1421605 - RNA, 19 nt, Artificial Sequence
  Description of Artificial Sequence: Synthetic oligonucleotide
ugaccgcaaagaaggaguu

SEQ ID NO: 1421606 - RNA, 19 nt, Artificial Sequence
  Description of Artificial Sequence: Synthetic oligonucleotide
agcaaguugcuaagucggg

SEQ ID NO: 1421607 - RNA, 19 nt, Artificial Sequence
  Description of Artificial Sequence: Synthetic oligonucleotide
uucguuccugcucgcugcc

SEQ ID NO: 1421608 - RNA, 19 nt, Artificial Sequence
  Description of Artificial Sequence: Synthetic oligonucleotide
cagugauggagcauucgca

SEQ ID NO: 1421609 - RNA, 19 nt, Artificial Sequence
  Description of Artificial Sequence: Synthetic oligonucleotide
caaccuguggugccgccgc

SEQ ID NO: 1421610 - RNA, 19 nt, Artificial Sequence
  Description of Artificial Sequence: Synthetic oligonucleotide
cugcagaugucguagggaa

SEQ ID NO: 1421611 - RNA, 19 nt, Artificial Sequence
  Description of Artificial Sequence: Synthetic oligonucleotide
aaacggcgcaugaagcgcu

SEQ ID NO: 1421612 - RNA, 19 nt, Artificial Sequence
  Description of Artificial Sequence: Synthetic oligonucleotide
acacacacacacacacaac

SEQ ID NO: 1421613 - RNA, 19 nt, Artificial Sequence
  Description of Artificial Sequence: Synthetic oligonucleotide
ggaggggagagcuuaguga

SEQ ID NO: 1421614 - RNA, 19 nt, Artificial Sequence
  Description of Artificial Sequence: Synthetic oligonucleotide
ucguggaugugggauacuc

SEQ ID NO: 1421615 - RNA, 19 nt, Artificial Sequence
  Description of Artificial Sequence: Synthetic oligonucleotide
cacccuuucccaggcaacg

SEQ ID NO: 1421616 - RNA, 19 nt, Artificial Sequence
  Description of Artificial Sequence: Synthetic oligonucleotide
caggcaacggccccacccc

SEQ ID NO: 1421617 - RNA, 19 nt, Artificial Sequence
  Description of Artificial Sequence: Synthetic oligonucleotide
ccaaucgauaaacucggug

SEQ ID NO: 1421618 - RNA, 19 nt, Artificial Sequence
  Description of Artificial Sequence: Synthetic oligonucleotide
gaaggucaugucuuugagu

SEQ ID NO: 1421619 - RNA, 19 nt, Artificial Sequence
  Description of Artificial Sequence: Synthetic oligonucleotide
cccacacacacacacacac

SEQ ID NO: 1421620 - RNA, 19 nt, Artificial Sequence
  Description of Artificial Sequence: Synthetic oligonucleotide
uaugggguagacgcuccca

SEQ ID NO: 1421621 - RNA, 19 nt, Artificial Sequence
  Description of Artificial Sequence: Synthetic oligonucleotide
auaaacucggugguuccau

SEQ ID NO: 1421622 - RNA, 19 nt, Artificial Sequence
  Description of Artificial Sequence: Synthetic oligonucleotide
agagcuuagugagugccaa

SEQ ID NO: 1421623 - RNA, 19 nt, Artificial Sequence
  Description of Artificial Sequence: Synthetic oligonucleotide
uuccguacuuuauggggua

SEQ ID NO: 1421624 - RNA, 19 nt, Artificial Sequence
  Description of Artificial Sequence: Synthetic oligonucleotide
cucuaggcaacagcccugc

SEQ ID NO: 1421625 - RNA, 19 nt, Artificial Sequence
  Description of Artificial Sequence: Synthetic oligonucleotide
gaggccaaacaugaccgca

SEQ ID NO: 1421626 - RNA, 19 nt, Artificial Sequence
  Description of Artificial Sequence: Synthetic oligonucleotide
cuguuuaucucagaugugu

SEQ ID NO: 1421627 - RNA, 19 nt, Artificial Sequence
  Description of Artificial Sequence: Synthetic oligonucleotide
agguuugcgguggugacau

SEQ ID NO: 1421628 - RNA, 19 nt, Artificial Sequence
  Description of Artificial Sequence: Synthetic oligonucleotide
uccguacuuuaugggguag

SEQ ID NO: 1421629 - RNA, 19 nt, Artificial Sequence
  Description of Artificial Sequence: Synthetic oligonucleotide
ucgggucugcagaugucgu

SEQ ID NO: 1421630 - RNA, 19 nt, Artificial Sequence
  Description of Artificial Sequence: Synthetic oligonucleotide
cauaggcccaggugcuagc

SEQ ID NO: 1421631 - RNA, 19 nt, Artificial Sequence
  Description of Artificial Sequence: Synthetic oligonucleotide
ggucaccaccgagugaucg

SEQ ID NO: 1421632 - RNA, 19 nt, Artificial Sequence
  Description of Artificial Sequence: Synthetic oligonucleotide
aagaaggaguugagauucu

SEQ ID NO: 1421633 - RNA, 19 nt, Artificial Sequence
  Description of Artificial Sequence: Synthetic oligonucleotide
ucccgcugguugucgauga

SEQ ID NO: 1421634 - RNA, 19 nt, Artificial Sequence
  Description of Artificial Sequence: Synthetic oligonucleotide
ugcucgcugccuccagcag

SEQ ID NO: 1421635 - RNA, 19 nt, Artificial Sequence
  Description of Artificial Sequence: Synthetic oligonucleotide
gugagugccaaucgauaaa

SEQ ID NO: 1421636 - RNA, 19 nt, Artificial Sequence
  Description of Artificial Sequence: Synthetic oligonucleotide
gacaguucccgcugguugu

SEQ ID NO: 1421637 - RNA, 19 nt, Artificial Sequence
  Description of Artificial Sequence: Synthetic oligonucleotide
ggagaugcauucccacagc

SEQ ID NO: 1421638 - RNA, 19 nt, Artificial Sequence
  Description of Artificial Sequence: Synthetic oligonucleotide
ucccucguggaugaagguc

SEQ ID NO: 1421639 - RNA, 19 nt, Artificial Sequence
  Description of Artificial Sequence: Synthetic oligonucleotide
gacaggaggggagagcuua

SEQ ID NO: 1421640 - RNA, 19 nt, Artificial Sequence
  Description of Artificial Sequence: Synthetic oligonucleotide
cacgaagagcccugcccag

SEQ ID NO: 1421641 - RNA, 19 nt, Artificial Sequence
  Description of Artificial Sequence: Synthetic oligonucleotide
acgagcgugugguuucccu

SEQ ID NO: 1421642 - RNA, 19 nt, Artificial Sequence
  Description of Artificial Sequence: Synthetic oligonucleotide
agacgcucccagguguggg

SEQ ID NO: 1421643 - RNA, 19 nt, Artificial Sequence
  Description of Artificial Sequence: Synthetic oligonucleotide
gauccucaugggccagagc

SEQ ID NO: 1421644 - RNA, 19 nt, Artificial Sequence
  Description of Artificial Sequence: Synthetic oligonucleotide
uggacuccgggugcucagg

SEQ ID NO: 1421645 - RNA, 19 nt, Artificial Sequence
  Description of Artificial Sequence: Synthetic oligonucleotide
acgcucccaggugugggcc

SEQ ID NO: 1421646 - RNA, 19 nt, Artificial Sequence
  Description of Artificial Sequence: Synthetic oligonucleotide
uagggucaccaccgaguga

SEQ ID NO: 1421647 - RNA, 19 nt, Artificial Sequence
  Description of Artificial Sequence: Synthetic oligonucleotide
cacggggucugaguggagc

SEQ ID NO: 1421648 - RNA, 19 nt, Artificial Sequence
  Description of Artificial Sequence: Synthetic oligonucleotide
cuuugaguagcagaggcau

SEQ ID NO: 1421649 - RNA, 19 nt, Artificial Sequence
  Description of Artificial Sequence: Synthetic oligonucleotide
acuuuaugggguagacgcu

SEQ ID NO: 1421650 - RNA, 19 nt, Artificial Sequence
  Description of Artificial Sequence: Synthetic oligonucleotide
ugggaacaaugcagcgcca

SEQ ID NO: 1421651 - RNA, 19 nt, Artificial Sequence
  Description of Artificial Sequence: Synthetic oligonucleotide
gacuagccgcagaaucugc

SEQ ID NO: 1421652 - RNA, 19 nt, Artificial Sequence
  Description of Artificial Sequence: Synthetic oligonucleotide
acuagccgcagaaucugcu

SEQ ID NO: 1421653 - RNA, 19 nt, Artificial Sequence
  Description of Artificial Sequence: Synthetic oligonucleotide
aggugcuagcuggacuccg

SEQ ID NO: 1421654 - RNA, 19 nt, Artificial Sequence
  Description of Artificial Sequence: Synthetic oligonucleotide
gcuaagucgggcaucccug

SEQ ID NO: 1421655 - RNA, 19 nt, Artificial Sequence
  Description of Artificial Sequence: Synthetic oligonucleotide
gcaaguugcuaagucgggc

SEQ ID NO: 1421656 - RNA, 19 nt, Artificial Sequence
  Description of Artificial Sequence: Synthetic oligonucleotide
gagagcuuagugagugcca

SEQ ID NO: 1421657 - RNA, 19 nt, Artificial Sequence
  Description of Artificial Sequence: Synthetic oligonucleotide
guacagggccacccaccgg

SEQ ID NO: 1421658 - RNA, 19 nt, Artificial Sequence
  Description of Artificial Sequence: Synthetic oligonucleotide
cacccaguacugcagcuca

SEQ ID NO: 1421659 - RNA, 19 nt, Artificial Sequence
  Description of Artificial Sequence: Synthetic oligonucleotide
aacggcgcaugaagcgcuc

SEQ ID NO: 1421660 - RNA, 19 nt, Artificial Sequence
  Description of Artificial Sequence: Synthetic oligonucleotide
cagugauccucaugggcca

SEQ ID NO: 1421661 - RNA, 19 nt, Artificial Sequence
  Description of Artificial Sequence: Synthetic oligonucleotide
cacacacacacacaacacu

SEQ ID NO: 1421662 - RNA, 19 nt, Artificial Sequence
  Description of Artificial Sequence: Synthetic oligonucleotide
uucccucguggaugaaggu

SEQ ID NO: 1421663 - RNA, 19 nt, Artificial Sequence
  Description of Artificial Sequence: Synthetic oligonucleotide
gugugguuucccucgugga

SEQ ID NO: 1421664 - RNA, 19 nt, Artificial Sequence
  Description of Artificial Sequence: Synthetic oligonucleotide
gcuucguuccugcucgcug

SEQ ID NO: 1421665 - RNA, 19 nt, Artificial Sequence
  Description of Artificial Sequence: Synthetic oligonucleotide
ugaguagcagaggcauaaa

SEQ ID NO: 1421666 - RNA, 19 nt, Artificial Sequence
  Description of Artificial Sequence: Synthetic oligonucleotide
uccgggugcucagggacug

SEQ ID NO: 1421667 - RNA, 19 nt, Artificial Sequence
  Description of Artificial Sequence: Synthetic oligonucleotide
cugaguggugacagaggca

SEQ ID NO: 1421668 - RNA, 19 nt, Artificial Sequence
  Description of Artificial Sequence: Synthetic oligonucleotide
guagacgcucccaggugug

SEQ ID NO: 1421669 - RNA, 19 nt, Artificial Sequence
  Description of Artificial Sequence: Synthetic oligonucleotide
ggaugugggauacucggcu

SEQ ID NO: 1421670 - RNA, 19 nt, Artificial Sequence
  Description of Artificial Sequence: Synthetic oligonucleotide
ggugguuccaugagggguc

SEQ ID NO: 1421671 - RNA, 19 nt, Artificial Sequence
  Description of Artificial Sequence: Synthetic oligonucleotide
aggcggaguacagcuuccg

SEQ ID NO: 1421672 - RNA, 19 nt, Artificial Sequence
  Description of Artificial Sequence: Synthetic oligonucleotide
ccaccccacacacacacac

SEQ ID NO: 1421673 - RNA, 19 nt, Artificial Sequence
  Description of Artificial Sequence: Synthetic oligonucleotide
aucgauaaacucggugguu

SEQ ID NO: 1421674 - RNA, 19 nt, Artificial Sequence
  Description of Artificial Sequence: Synthetic oligonucleotide
ggacuccgggugcucaggg

SEQ ID NO: 1421675 - RNA, 19 nt, Artificial Sequence
  Description of Artificial Sequence: Synthetic oligonucleotide
ccaccggcugacuagccgc

SEQ ID NO: 1421676 - RNA, 19 nt, Artificial Sequence
  Description of Artificial Sequence: Synthetic oligonucleotide
acggcgcaugaagcgcucc

SEQ ID NO: 1421677 - RNA, 19 nt, Artificial Sequence
  Description of Artificial Sequence: Synthetic oligonucleotide
cagagcauguggaaauccu

SEQ ID NO: 1421678 - RNA, 19 nt, Artificial Sequence
  Description of Artificial Sequence: Synthetic oligonucleotide
augucguagggaacuuugu

SEQ ID NO: 1421679 - RNA, 19 nt, Artificial Sequence
  Description of Artificial Sequence: Synthetic oligonucleotide
acacacacacacacacaca

SEQ ID NO: 1421680 - RNA, 19 nt, Artificial Sequence
  Description of Artificial Sequence: Synthetic oligonucleotide
gaccguacagggccaccca

SEQ ID NO: 1421681 - RNA, 19 nt, Artificial Sequence
  Description of Artificial Sequence: Synthetic oligonucleotide
cgauaaacucggugguucc

SEQ ID NO: 1421682 - RNA, 19 nt, Artificial Sequence
  Description of Artificial Sequence: Synthetic oligonucleotide
cuacgagcgugugguuucc

SEQ ID NO: 1421683 - RNA, 19 nt, Artificial Sequence
  Description of Artificial Sequence: Synthetic oligonucleotide
gucaugucuuugaguagca

SEQ ID NO: 1421684 - RNA, 19 nt, Artificial Sequence
  Description of Artificial Sequence: Synthetic oligonucleotide
cauugaaacggcgcaugaa

SEQ ID NO: 1421685 - RNA, 19 nt, Artificial Sequence
  Description of Artificial Sequence: Synthetic oligonucleotide
cguacagggccacccaccg

SEQ ID NO: 1421686 - RNA, 19 nt, Artificial Sequence
  Description of Artificial Sequence: Synthetic oligonucleotide
agcgugugguuucccucgu

SEQ ID NO: 1421687 - RNA, 19 nt, Artificial Sequence
  Description of Artificial Sequence: Synthetic oligonucleotide
cuacacccagcuguuuauc

SEQ ID NO: 1421688 - RNA, 19 nt, Artificial Sequence
  Description of Artificial Sequence: Synthetic oligonucleotide
gaggccgucacaggcagcu

SEQ ID NO: 1421689 - RNA, 19 nt, Artificial Sequence
  Description of Artificial Sequence: Synthetic oligonucleotide
gaugugggauacucggcuu

SEQ ID NO: 1421690 - RNA, 19 nt, Artificial Sequence
  Description of Artificial Sequence: Synthetic oligonucleotide
gguagacgcucccaggugu

SEQ ID NO: 1421691 - RNA, 19 nt, Artificial Sequence
  Description of Artificial Sequence: Synthetic oligonucleotide
caucccugcucaccagguc

SEQ ID NO: 1421692 - RNA, 19 nt, Artificial Sequence
  Description of Artificial Sequence: Synthetic oligonucleotide
ccucaugggccagagcugc

SEQ ID NO: 1421693 - RNA, 19 nt, Artificial Sequence
  Description of Artificial Sequence: Synthetic oligonucleotide
agguucucuacgagcgugu

SEQ ID NO: 1421694 - RNA, 19 nt, Artificial Sequence
  Description of Artificial Sequence: Synthetic oligonucleotide
ggauacucggcuucugagu

SEQ ID NO: 1421695 - RNA, 19 nt, Artificial Sequence
  Description of Artificial Sequence: Synthetic oligonucleotide
cacccaccggcugacuagc

SEQ ID NO: 1421696 - RNA, 19 nt, Artificial Sequence
  Description of Artificial Sequence: Synthetic oligonucleotide
ccugccuacacccagcugu

SEQ ID NO: 1421697 - RNA, 19 nt, Artificial Sequence
  Description of Artificial Sequence: Synthetic oligonucleotide
ggguagacgcucccaggug

SEQ ID NO: 1421698 - RNA, 19 nt, Artificial Sequence
  Description of Artificial Sequence: Synthetic oligonucleotide
cagcugagcccuggggccg

SEQ ID NO: 1421699 - RNA, 19 nt, Artificial Sequence
  Description of Artificial Sequence: Synthetic oligonucleotide
ggccacggggucugagugg

SEQ ID NO: 1421700 - RNA, 19 nt, Artificial Sequence
  Description of Artificial Sequence: Synthetic oligonucleotide
aggccaaacaugaccgcaa

SEQ ID NO: 1421701 - RNA, 19 nt, Artificial Sequence
  Description of Artificial Sequence: Synthetic oligonucleotide
acaugaccgcaaagaagga

SEQ ID NO: 1421702 - RNA, 19 nt, Artificial Sequence
  Description of Artificial Sequence: Synthetic oligonucleotide
gagcauucgcacggcucug

SEQ ID NO: 1421703 - RNA, 19 nt, Artificial Sequence
  Description of Artificial Sequence: Synthetic oligonucleotide
ggaccguacagggccaccc

SEQ ID NO: 1421704 - RNA, 19 nt, Artificial Sequence
  Description of Artificial Sequence: Synthetic oligonucleotide
agccucuccaaggcggagu

SEQ ID NO: 1421705 - RNA, 19 nt, Artificial Sequence
  Description of Artificial Sequence: Synthetic oligonucleotide
gggaacaaugcagcgccac

SEQ ID NO: 1421706 - RNA, 19 nt, Artificial Sequence
  Description of Artificial Sequence: Synthetic oligonucleotide
gugaucgggucugcagaug

SEQ ID NO: 1421707 - RNA, 19 nt, Artificial Sequence
  Description of Artificial Sequence: Synthetic oligonucleotide
gcuguuuaucucagaugug

SEQ ID NO: 1421708 - RNA, 19 nt, Artificial Sequence
  Description of Artificial Sequence: Synthetic oligonucleotide
uacgagcgugugguuuccc

SEQ ID NO: 1421709 - RNA, 19 nt, Artificial Sequence
  Description of Artificial Sequence: Synthetic oligonucleotide
agugccugcucugcccagu

SEQ ID NO: 1421710 - RNA, 19 nt, Artificial Sequence
  Description of Artificial Sequence: Synthetic oligonucleotide
ccagguuugcgguggugac

SEQ ID NO: 1421711 - RNA, 19 nt, Artificial Sequence
  Description of Artificial Sequence: Synthetic oligonucleotide
ccguacagggccacccacc

SEQ ID NO: 1421712 - RNA, 19 nt, Artificial Sequence
  Description of Artificial Sequence: Synthetic oligonucleotide
uugcuaagucgggcauccc

SEQ ID NO: 1421713 - RNA, 19 nt, Artificial Sequence
  Description of Artificial Sequence: Synthetic oligonucleotide
gguugucgaugaccuucag

SEQ ID NO: 1421714 - RNA, 19 nt, Artificial Sequence
  Description of Artificial Sequence: Synthetic oligonucleotide
ucucuacgagcgugugguu

SEQ ID NO: 1421715 - RNA, 19 nt, Artificial Sequence
  Description of Artificial Sequence: Synthetic oligonucleotide
gagaggcgggacaguuccc

SEQ ID NO: 1421716 - RNA, 19 nt, Artificial Sequence
  Description of Artificial Sequence: Synthetic oligonucleotide
aguggagcaugggaccgua

SEQ ID NO: 1421717 - RNA, 19 nt, Artificial Sequence
  Description of Artificial Sequence: Synthetic oligonucleotide
cguacuuuaugggguagac

SEQ ID NO: 1421718 - RNA, 19 nt, Artificial Sequence
  Description of Artificial Sequence: Synthetic oligonucleotide
cccaccggcugacuagccg

SEQ ID NO: 1421719 - RNA, 19 nt, Artificial Sequence
  Description of Artificial Sequence: Synthetic oligonucleotide
gcgguggugacaucccgca

SEQ ID NO: 1421720 - RNA, 19 nt, Artificial Sequence
  Description of Artificial Sequence: Synthetic oligonucleotide
caccccacacacacacaca

SEQ ID NO: 1421721 - RNA, 19 nt, Artificial Sequence
  Description of Artificial Sequence: Synthetic oligonucleotide
ccacgaagagcccugccca

SEQ ID NO: 1421722 - RNA, 19 nt, Artificial Sequence
  Description of Artificial Sequence: Synthetic oligonucleotide
caacggccccaccccacac

SEQ ID NO: 1421723 - RNA, 19 nt, Artificial Sequence
  Description of Artificial Sequence: Synthetic oligonucleotide
ggugucccuugguccagug

SEQ ID NO: 1421724 - RNA, 19 nt, Artificial Sequence
  Description of Artificial Sequence: Synthetic oligonucleotide
cguagggaacuuugucccc

SEQ ID NO: 1421725 - RNA, 19 nt, Artificial Sequence
  Description of Artificial Sequence: Synthetic oligonucleotide
gagugccaaucgauaaacu

SEQ ID NO: 1421726 - RNA, 19 nt, Artificial Sequence
  Description of Artificial Sequence: Synthetic oligonucleotide
gggguagacgcucccaggu

SEQ ID NO: 1421727 - RNA, 19 nt, Artificial Sequence
  Description of Artificial Sequence: Synthetic oligonucleotide
cagguuugcgguggugaca

SEQ ID NO: 1421728 - RNA, 19 nt, Artificial Sequence
  Description of Artificial Sequence: Synthetic oligonucleotide
uccuggcuagggagccaaa

SEQ ID NO: 1421729 - RNA, 19 nt, Artificial Sequence
  Description of Artificial Sequence: Synthetic oligonucleotide
ugggaccguacagggccac

SEQ ID NO: 1421730 - RNA, 19 nt, Artificial Sequence
  Description of Artificial Sequence: Synthetic oligonucleotide
ccaaccuguggugccgccg

SEQ ID NO: 1421731 - RNA, 19 nt, Artificial Sequence
  Description of Artificial Sequence: Synthetic oligonucleotide
gccuacacccagcuguuua

SEQ ID NO: 1421732 - RNA, 19 nt, Artificial Sequence
  Description of Artificial Sequence: Synthetic oligonucleotide
gaguggugacagaggcaca

SEQ ID NO: 1421733 - RNA, 19 nt, Artificial Sequence
  Description of Artificial Sequence: Synthetic oligonucleotide
cagcgccacagggaccacc

SEQ ID NO: 1421734 - RNA, 19 nt, Artificial Sequence
  Description of Artificial Sequence: Synthetic oligonucleotide
gggccgggaacugagcaca

SEQ ID NO: 1421735 - RNA, 19 nt, Artificial Sequence
  Description of Artificial Sequence: Synthetic oligonucleotide
gucccuugguccagugauc

SEQ ID NO: 1421736 - RNA, 19 nt, Artificial Sequence
  Description of Artificial Sequence: Synthetic oligonucleotide
ccuggcuagggagccaaac

SEQ ID NO: 1421737 - RNA, 19 nt, Artificial Sequence
  Description of Artificial Sequence: Synthetic oligonucleotide
gacauaggcccaggugcua

SEQ ID NO: 1421738 - RNA, 19 nt, Artificial Sequence
  Description of Artificial Sequence: Synthetic oligonucleotide
gcaugggaccguacagggc

SEQ ID NO: 1421739 - RNA, 19 nt, Artificial Sequence
  Description of Artificial Sequence: Synthetic oligonucleotide
augagggguccagcagccu

SEQ ID NO: 1421740 - RNA, 19 nt, Artificial Sequence
  Description of Artificial Sequence: Synthetic oligonucleotide
ugguuccaugaggggucca

SEQ ID NO: 1421741 - RNA, 19 nt, Artificial Sequence
  Description of Artificial Sequence: Synthetic oligonucleotide
cuccggccacuguuccuuc

SEQ ID NO: 1421742 - RNA, 19 nt, Artificial Sequence
  Description of Artificial Sequence: Synthetic oligonucleotide
cuucagcaaguugcuaagu

SEQ ID NO: 1421743 - RNA, 19 nt, Artificial Sequence
  Description of Artificial Sequence: Synthetic oligonucleotide
ccacacacacacacacaca

SEQ ID NO: 1421744 - RNA, 19 nt, Artificial Sequence
  Description of Artificial Sequence: Synthetic oligonucleotide
cagauguaggugcuucguu

SEQ ID NO: 1421745 - RNA, 19 nt, Artificial Sequence
  Description of Artificial Sequence: Synthetic oligonucleotide
cuccuggcuagggagccaa

SEQ ID NO: 1421746 - RNA, 19 nt, Artificial Sequence
  Description of Artificial Sequence: Synthetic oligonucleotide
gccacggggucugagugga

SEQ ID NO: 1421747 - RNA, 19 nt, Artificial Sequence
  Description of Artificial Sequence: Synthetic oligonucleotide
gcaacggccccaccccaca

SEQ ID NO: 1421748 - RNA, 19 nt, Artificial Sequence
  Description of Artificial Sequence: Synthetic oligonucleotide
guggagcaugggaccguac

SEQ ID NO: 1421749 - RNA, 19 nt, Artificial Sequence
  Description of Artificial Sequence: Synthetic oligonucleotide
ggccgucacaggcagcugu

SEQ ID NO: 1421750 - RNA, 19 nt, Artificial Sequence
  Description of Artificial Sequence: Synthetic oligonucleotide
gcagauguaggugcuucgu

SEQ ID NO: 1421751 - RNA, 19 nt, Artificial Sequence
  Description of Artificial Sequence: Synthetic oligonucleotide
ccaacucggauggcaccag

SEQ ID NO: 1421752 - RNA, 19 nt, Artificial Sequence
  Description of Artificial Sequence: Synthetic oligonucleotide
cucuacgagcgugugguuu

SEQ ID NO: 1421753 - RNA, 19 nt, Artificial Sequence
  Description of Artificial Sequence: Synthetic oligonucleotide
ugccuacacccagcuguuu

SEQ ID NO: 1421754 - RNA, 19 nt, Artificial Sequence
  Description of Artificial Sequence: Synthetic oligonucleotide
cccaacucggauggcacca

SEQ ID NO: 1421755 - RNA, 19 nt, Artificial Sequence
  Description of Artificial Sequence: Synthetic oligonucleotide
caacucggauggcaccagu

SEQ ID NO: 1421756 - RNA, 19 nt, Artificial Sequence
  Description of Artificial Sequence: Synthetic oligonucleotide
cccacccuuucccaggcaa

SEQ ID NO: 1421757 - RNA, 19 nt, Artificial Sequence
  Description of Artificial Sequence: Synthetic oligonucleotide
ggcggaguacagcuuccgu

SEQ ID NO: 1421758 - RNA, 19 nt, Artificial Sequence
  Description of Artificial Sequence: Synthetic oligonucleotide
acccaguacugcagcucau

SEQ ID NO: 1421759 - RNA, 19 nt, Artificial Sequence
  Description of Artificial Sequence: Synthetic oligonucleotide
ggcaacggccccaccccac

SEQ ID NO: 1421760 - RNA, 19 nt, Artificial Sequence
  Description of Artificial Sequence: Synthetic oligonucleotide
gggaccguacagggccacc

SEQ ID NO: 1421761 - RNA, 19 nt, Artificial Sequence
  Description of Artificial Sequence: Synthetic oligonucleotide
ucgcacggcucuggccauc

SEQ ID NO: 1421762 - RNA, 19 nt, Artificial Sequence
  Description of Artificial Sequence: Synthetic oligonucleotide
ggccgggaacugagcacag

SEQ ID NO: 1421763 - RNA, 19 nt, Artificial Sequence
  Description of Artificial Sequence: Synthetic oligonucleotide
cugccuacacccagcuguu

SEQ ID NO: 1421764 - RNA, 19 nt, Artificial Sequence
  Description of Artificial Sequence: Synthetic oligonucleotide
gccacccaccggcugacua

SEQ ID NO: 1421765 - RNA, 19 nt, Artificial Sequence
  Description of Artificial Sequence: Synthetic oligonucleotide
ccuacacccagcuguuuau

SEQ ID NO: 1421766 - RNA, 19 nt, Artificial Sequence
  Description of Artificial Sequence: Synthetic oligonucleotide
ccccacacacacacacaca

SEQ ID NO: 1421767 - RNA, 19 nt, Artificial Sequence
  Description of Artificial Sequence: Synthetic oligonucleotide
ccguacuuuaugggguaga

SEQ ID NO: 1421768 - RNA, 19 nt, Artificial Sequence
  Description of Artificial Sequence: Synthetic oligonucleotide
ggagccaaacaggugcauu

SEQ ID NO: 1421769 - RNA, 19 nt, Artificial Sequence
  Description of Artificial Sequence: Synthetic oligonucleotide
caccaccgagugaucgggu

SEQ ID NO: 1421770 - RNA, 19 nt, Artificial Sequence
  Description of Artificial Sequence: Synthetic oligonucleotide
cccgcugguugucgaugac

SEQ ID NO: 1421771 - RNA, 19 nt, Artificial Sequence
  Description of Artificial Sequence: Synthetic oligonucleotide
ccaccgagugaucgggucu

SEQ ID NO: 1421772 - RNA, 19 nt, Artificial Sequence
  Description of Artificial Sequence: Synthetic oligonucleotide
gcagaaccuccccacccuu

SEQ ID NO: 1421773 - RNA, 19 nt, Artificial Sequence
  Description of Artificial Sequence: Synthetic oligonucleotide
ccacggggucugaguggag

SEQ ID NO: 1421774 - RNA, 19 nt, Artificial Sequence
  Description of Artificial Sequence: Synthetic oligonucleotide
caucccgcaggugucccuu

SEQ ID NO: 1421775 - RNA, 19 nt, Artificial Sequence
  Description of Artificial Sequence: Synthetic oligonucleotide
gccgucacaggcagcugua

SEQ ID NO: 1421776 - RNA, 19 nt, Artificial Sequence
  Description of Artificial Sequence: Synthetic oligonucleotide
ccgaagcagcugagcccug

SEQ ID NO: 1421777 - RNA, 19 nt, Artificial Sequence
  Description of Artificial Sequence: Synthetic oligonucleotide
cccaccccacacacacaca

SEQ ID NO: 1421778 - RNA, 19 nt, Artificial Sequence
  Description of Artificial Sequence: Synthetic oligonucleotide
gccaaucgauaaacucggu

SEQ ID NO: 1421779 - RNA, 19 nt, Artificial Sequence
  Description of Artificial Sequence: Synthetic oligonucleotide
gccgcagaaucugcugccu

SEQ ID NO: 1421780 - RNA, 19 nt, Artificial Sequence
  Description of Artificial Sequence: Synthetic oligonucleotide
ccucuccacgaagagcccu

SEQ ID NO: 1421781 - RNA, 19 nt, Artificial Sequence
  Description of Artificial Sequence: Synthetic oligonucleotide
ggcugacuagccgcagaau

SEQ ID NO: 1421782 - RNA, 19 nt, Artificial Sequence
  Description of Artificial Sequence: Synthetic oligonucleotide
ccaaggcggaguacagcuu

SEQ ID NO: 1421783 - RNA, 19 nt, Artificial Sequence
  Description of Artificial Sequence: Synthetic oligonucleotide
gcccuggggccgggaacug

SEQ ID NO: 1421784 - RNA, 19 nt, Artificial Sequence
  Description of Artificial Sequence: Synthetic oligonucleotide
cccaguacugcagcucauu

SEQ ID NO: 1421785 - RNA, 19 nt, Artificial Sequence
  Description of Artificial Sequence: Synthetic oligonucleotide
cgcacggcucuggccauca

SEQ ID NO: 1421786 - RNA, 19 nt, Artificial Sequence
  Description of Artificial Sequence: Synthetic oligonucleotide
cccgcaggugucccuuggu

SEQ ID NO: 1421787 - RNA, 19 nt, Artificial Sequence
  Description of Artificial Sequence: Synthetic oligonucleotide
caggugcauuucgggccuu

SEQ ID NO: 1421788 - RNA, 19 nt, Artificial Sequence
  Description of Artificial Sequence: Synthetic oligonucleotide
ggccacccaccggcugacu

SEQ ID NO: 1421789 - RNA, 19 nt, Artificial Sequence
  Description of Artificial Sequence: Synthetic oligonucleotide
uaugaagagagccagaagc

SEQ ID NO: 1421790 - RNA, 19 nt, Artificial Sequence
  Description of Artificial Sequence: Synthetic oligonucleotide
uucaucaucaucaucauca

SEQ ID NO: 1421791 - RNA, 19 nt, Artificial Sequence
  Description of Artificial Sequence: Synthetic oligonucleotide
aaagguacuguuuucggcg

SEQ ID NO: 1421792 - RNA, 19 nt, Artificial Sequence
  Description of Artificial Sequence: Synthetic oligonucleotide
ucucaaaccagucauuagg

SEQ ID NO: 1421793 - RNA, 19 nt, Artificial Sequence
  Description of Artificial Sequence: Synthetic oligonucleotide
aaagucuuaaguccuuaac

SEQ ID NO: 1421794 - RNA, 19 nt, Artificial Sequence
  Description of Artificial Sequence: Synthetic oligonucleotide
aaggccucuaucucaaacc

SEQ ID NO: 1421795 - RNA, 19 nt, Artificial Sequence
  Description of Artificial Sequence: Synthetic oligonucleotide
ucuuaaguccuuaacuagg

SEQ ID NO: 1421796 - RNA, 19 nt, Artificial Sequence
  Description of Artificial Sequence: Synthetic oligonucleotide
auaucagaaacacauaccu

SEQ ID NO: 1421797 - RNA, 19 nt, Artificial Sequence
  Description of Artificial Sequence: Synthetic oligonucleotide
uguaggaucaccauccaga

SEQ ID NO: 1421798 - RNA, 19 nt, Artificial Sequence
  Description of Artificial Sequence: Synthetic oligonucleotide
cacggaauguauaugaagg

SEQ ID NO: 1421799 - RNA, 19 nt, Artificial Sequence
  Description of Artificial Sequence: Synthetic oligonucleotide
uccuaauggggacugaagg

SEQ ID NO: 1421800 - RNA, 19 nt, Artificial Sequence
  Description of Artificial Sequence: Synthetic oligonucleotide
uuaacuaggacuacagcac

SEQ ID NO: 1421801 - RNA, 19 nt, Artificial Sequence
  Description of Artificial Sequence: Synthetic oligonucleotide
ucagaguugauucuccgag

SEQ ID NO: 1421802 - RNA, 19 nt, Artificial Sequence
  Description of Artificial Sequence: Synthetic oligonucleotide
uauaucagaaacacauacc

SEQ ID NO: 1421803 - RNA, 19 nt, Artificial Sequence
  Description of Artificial Sequence: Synthetic oligonucleotide
cuguuuucggcguagaggg

SEQ ID NO: 1421804 - RNA, 19 nt, Artificial Sequence
  Description of Artificial Sequence: Synthetic oligonucleotide
ucuuaagaccaauacaaca

SEQ ID NO: 1421805 - RNA, 19 nt, Artificial Sequence
  Description of Artificial Sequence: Synthetic oligonucleotide
ucauuagguaauuaggaga

SEQ ID NO: 1421806 - RNA, 19 nt, Artificial Sequence
  Description of Artificial Sequence: Synthetic oligonucleotide
agaugugcuagguagcuac

SEQ ID NO: 1421807 - RNA, 19 nt, Artificial Sequence
  Description of Artificial Sequence: Synthetic oligonucleotide
cuauaucagaaacacauac

SEQ ID NO: 1421808 - RNA, 19 nt, Artificial Sequence
  Description of Artificial Sequence: Synthetic oligonucleotide
uagguagaaagacucauga

SEQ ID NO: 1421809 - RNA, 19 nt, Artificial Sequence
  Description of Artificial Sequence: Synthetic oligonucleotide
aaagaucucgaaguguggg

SEQ ID NO: 1421810 - RNA, 19 nt, Artificial Sequence
  Description of Artificial Sequence: Synthetic oligonucleotide
agaaacaaauucccggagg

SEQ ID NO: 1421811 - RNA, 19 nt, Artificial Sequence
  Description of Artificial Sequence: Synthetic oligonucleotide
ugaucuauaucagaaacac

SEQ ID NO: 1421812 - RNA, 19 nt, Artificial Sequence
  Description of Artificial Sequence: Synthetic oligonucleotide
acacucuuaagaccaauac

SEQ ID NO: 1421813 - RNA, 19 nt, Artificial Sequence
  Description of Artificial Sequence: Synthetic oligonucleotide
agaagaucaagucuuggug

SEQ ID NO: 1421814 - RNA, 19 nt, Artificial Sequence
  Description of Artificial Sequence: Synthetic oligonucleotide
cuuaacuaggacuacagca

SEQ ID NO: 1421815 - RNA, 19 nt, Artificial Sequence
  Description of Artificial Sequence: Synthetic oligonucleotide
aaucgccugguguacaagg

SEQ ID NO: 1421816 - RNA, 19 nt, Artificial Sequence
  Description of Artificial Sequence: Synthetic oligonucleotide
caugaucuauaucagaaac

SEQ ID NO: 1421817 - RNA, 19 nt, Artificial Sequence
  Description of Artificial Sequence: Synthetic oligonucleotide
uuucugacuccucagggcc

SEQ ID NO: 1421818 - RNA, 19 nt, Artificial Sequence
  Description of Artificial Sequence: Synthetic oligonucleotide
uuucguucagaguugauuc

SEQ ID NO: 1421819 - RNA, 19 nt, Artificial Sequence
  Description of Artificial Sequence: Synthetic oligonucleotide
acggaauguauaugaaggc

SEQ ID NO: 1421820 - RNA, 19 nt, Artificial Sequence
  Description of Artificial Sequence: Synthetic oligonucleotide
agaguugauucuccgaggg

SEQ ID NO: 1421821 - RNA, 19 nt, Artificial Sequence
  Description of Artificial Sequence: Synthetic oligonucleotide
ugaaguuuguuguaggauc

SEQ ID NO: 1421822 - RNA, 19 nt, Artificial Sequence
  Description of Artificial Sequence: Synthetic oligonucleotide
ucuuuaugaagagagccag

SEQ ID NO: 1421823 - RNA, 19 nt, Artificial Sequence
  Description of Artificial Sequence: Synthetic oligonucleotide
acuaggaggaaagggaagc

SEQ ID NO: 1421824 - RNA, 19 nt, Artificial Sequence
  Description of Artificial Sequence: Synthetic oligonucleotide
ucccaacagaguaaggccg

SEQ ID NO: 1421825 - RNA, 19 nt, Artificial Sequence
  Description of Artificial Sequence: Synthetic oligonucleotide
aaacacauaccugggcacc

SEQ ID NO: 1421826 - RNA, 19 nt, Artificial Sequence
  Description of Artificial Sequence: Synthetic oligonucleotide
cagucauuagguaauuagg

SEQ ID NO: 1421827 - RNA, 19 nt, Artificial Sequence
  Description of Artificial Sequence: Synthetic oligonucleotide
acagacacccuuuacagga

SEQ ID NO: 1421828 - RNA, 19 nt, Artificial Sequence
  Description of Artificial Sequence: Synthetic oligonucleotide
ucgauacccacagaaaagg

SEQ ID NO: 1421829 - RNA, 19 nt, Artificial Sequence
  Description of Artificial Sequence: Synthetic oligonucleotide
ugguguacaaggcagggga

SEQ ID NO: 1421830 - RNA, 19 nt, Artificial Sequence
  Description of Artificial Sequence: Synthetic oligonucleotide
uuaagaccaauacaacagu

SEQ ID NO: 1421831 - RNA, 19 nt, Artificial Sequence
  Description of Artificial Sequence: Synthetic oligonucleotide
aucaucaucaucaucauaa

SEQ ID NO: 1421832 - RNA, 19 nt, Artificial Sequence
  Description of Artificial Sequence: Synthetic oligonucleotide
ugucgauacccacagaaaa

SEQ ID NO: 1421833 - RNA, 19 nt, Artificial Sequence
  Description of Artificial Sequence: Synthetic oligonucleotide
uugaguaaaagcccggcuc

SEQ ID NO: 1421834 - RNA, 19 nt, Artificial Sequence
  Description of Artificial Sequence: Synthetic oligonucleotide
aaagacucaugaucuauau

SEQ ID NO: 1421835 - RNA, 19 nt, Artificial Sequence
  Description of Artificial Sequence: Synthetic oligonucleotide
gucauuagguaauuaggag

SEQ ID NO: 1421836 - RNA, 19 nt, Artificial Sequence
  Description of Artificial Sequence: Synthetic oligonucleotide
ugcuagguagcuacguggg

SEQ ID NO: 1421837 - RNA, 19 nt, Artificial Sequence
  Description of Artificial Sequence: Synthetic oligonucleotide
ugaaggacuuacaaacaca

SEQ ID NO: 1421838 - RNA, 19 nt, Artificial Sequence
  Description of Artificial Sequence: Synthetic oligonucleotide
uuagguagaaagacucaug

SEQ ID NO: 1421839 - RNA, 19 nt, Artificial Sequence
  Description of Artificial Sequence: Synthetic oligonucleotide
ucaaucucacucgagagcu

SEQ ID NO: 1421840 - RNA, 19 nt, Artificial Sequence
  Description of Artificial Sequence: Synthetic oligonucleotide
uacaacagugaauacacua

SEQ ID NO: 1421841 - RNA, 19 nt, Artificial Sequence
  Description of Artificial Sequence: Synthetic oligonucleotide
auaugaaggccucuaucuc

SEQ ID NO: 1421842 - RNA, 19 nt, Artificial Sequence
  Description of Artificial Sequence: Synthetic oligonucleotide
gguagaaagacucaugauc

SEQ ID NO: 1421843 - RNA, 19 nt, Artificial Sequence
  Description of Artificial Sequence: Synthetic oligonucleotide
ugucccaaaagaagccacg

SEQ ID NO: 1421844 - RNA, 19 nt, Artificial Sequence
  Description of Artificial Sequence: Synthetic oligonucleotide
uugggaacccucauugaag

SEQ ID NO: 1421845 - RNA, 19 nt, Artificial Sequence
  Description of Artificial Sequence: Synthetic oligonucleotide
ugucccaacagaguaaggc

SEQ ID NO: 1421846 - RNA, 19 nt, Artificial Sequence
  Description of Artificial Sequence: Synthetic oligonucleotide
uuuaugaagagagccagaa

SEQ ID NO: 1421847 - RNA, 19 nt, Artificial Sequence
  Description of Artificial Sequence: Synthetic oligonucleotide
agacacggaauguauauga

SEQ ID NO: 1421848 - RNA, 19 nt, Artificial Sequence
  Description of Artificial Sequence: Synthetic oligonucleotide
uagguaauuaggagaauuc

SEQ ID NO: 1421849 - RNA, 19 nt, Artificial Sequence
  Description of Artificial Sequence: Synthetic oligonucleotide
ucgcuguuguagaagauca

SEQ ID NO: 1421850 - RNA, 19 nt, Artificial Sequence
  Description of Artificial Sequence: Synthetic oligonucleotide
uggaaagccacccuagaaa

SEQ ID NO: 1421851 - RNA, 19 nt, Artificial Sequence
  Description of Artificial Sequence: Synthetic oligonucleotide
ucauugaaguuuguuguag

SEQ ID NO: 1421852 - RNA, 19 nt, Artificial Sequence
  Description of Artificial Sequence: Synthetic oligonucleotide
uuaugaagagagccagaag

SEQ ID NO: 1421853 - RNA, 19 nt, Artificial Sequence
  Description of Artificial Sequence: Synthetic oligonucleotide
ugaauacacuagcugcucc

SEQ ID NO: 1421854 - RNA, 19 nt, Artificial Sequence
  Description of Artificial Sequence: Synthetic oligonucleotide
aauccacucucuccuaaug

SEQ ID NO: 1421855 - RNA, 19 nt, Artificial Sequence
  Description of Artificial Sequence: Synthetic oligonucleotide
aaaagcccggcucaugggu

SEQ ID NO: 1421856 - RNA, 19 nt, Artificial Sequence
  Description of Artificial Sequence: Synthetic oligonucleotide
aacaaauguuguucuuucu

SEQ ID NO: 1421857 - RNA, 19 nt, Artificial Sequence
  Description of Artificial Sequence: Synthetic oligonucleotide
aacagauggucgcuguugu

SEQ ID NO: 1421858 - RNA, 19 nt, Artificial Sequence
  Description of Artificial Sequence: Synthetic oligonucleotide
aauguccugguacgaguag

SEQ ID NO: 1421859 - RNA, 19 nt, Artificial Sequence
  Description of Artificial Sequence: Synthetic oligonucleotide
gaaggauuagcaguggcac

SEQ ID NO: 1421860 - RNA, 19 nt, Artificial Sequence
  Description of Artificial Sequence: Synthetic oligonucleotide
uguuagguagaaagacuca

SEQ ID NO: 1421861 - RNA, 19 nt, Artificial Sequence
  Description of Artificial Sequence: Synthetic oligonucleotide
cauuagguaauuaggagaa

SEQ ID NO: 1421862 - RNA, 19 nt, Artificial Sequence
  Description of Artificial Sequence: Synthetic oligonucleotide
gaagccacgcuuuccuagg

SEQ ID NO: 1421863 - RNA, 19 nt, Artificial Sequence
  Description of Artificial Sequence: Synthetic oligonucleotide
ugggugucgauacccacag

SEQ ID NO: 1421864 - RNA, 19 nt, Artificial Sequence
  Description of Artificial Sequence: Synthetic oligonucleotide
gaaacacauaccugggcac

SEQ ID NO: 1421865 - RNA, 19 nt, Artificial Sequence
  Description of Artificial Sequence: Synthetic oligonucleotide
uguacaaggcaggggacgg

SEQ ID NO: 1421866 - RNA, 19 nt, Artificial Sequence
  Description of Artificial Sequence: Synthetic oligonucleotide
gcgaguugucucuagaugg

SEQ ID NO: 1421867 - RNA, 19 nt, Artificial Sequence
  Description of Artificial Sequence: Synthetic oligonucleotide
augaaaagagagucaucag

SEQ ID NO: 1421868 - RNA, 19 nt, Artificial Sequence
  Description of Artificial Sequence: Synthetic oligonucleotide
ugugcuagguagcuacgug

SEQ ID NO: 1421869 - RNA, 19 nt, Artificial Sequence
  Description of Artificial Sequence: Synthetic oligonucleotide
gugcuagguagcuacgugg

SEQ ID NO: 1421870 - RNA, 19 nt, Artificial Sequence
  Description of Artificial Sequence: Synthetic oligonucleotide
aagcccggcucaugggucc

SEQ ID NO: 1421871 - RNA, 19 nt, Artificial Sequence
  Description of Artificial Sequence: Synthetic oligonucleotide
gaaccaugggugucgauac

SEQ ID NO: 1421872 - RNA, 19 nt, Artificial Sequence
  Description of Artificial Sequence: Synthetic oligonucleotide
aaccaugggugucgauacc

SEQ ID NO: 1421873 - RNA, 19 nt, Artificial Sequence
  Description of Artificial Sequence: Synthetic oligonucleotide
guacgaguagcccugacuc

SEQ ID NO: 1421874 - RNA, 19 nt, Artificial Sequence
  Description of Artificial Sequence: Synthetic oligonucleotide
ucugucccaacagaguaag

SEQ ID NO: 1421875 - RNA, 19 nt, Artificial Sequence
  Description of Artificial Sequence: Synthetic oligonucleotide
uuagguaauuaggagaauu

SEQ ID NO: 1421876 - RNA, 19 nt, Artificial Sequence
  Description of Artificial Sequence: Synthetic oligonucleotide
uguacuguuccagggguag

SEQ ID NO: 1421877 - RNA, 19 nt, Artificial Sequence
  Description of Artificial Sequence: Synthetic oligonucleotide
uguucugucccaacagagu

SEQ ID NO: 1421878 - RNA, 19 nt, Artificial Sequence
  Description of Artificial Sequence: Synthetic oligonucleotide
uaaaagcccggcucauggg

SEQ ID NO: 1421879 - RNA, 19 nt, Artificial Sequence
  Description of Artificial Sequence: Synthetic oligonucleotide
cauaccugggcaccaaggc

SEQ ID NO: 1421880 - RNA, 19 nt, Artificial Sequence
  Description of Artificial Sequence: Synthetic oligonucleotide
ucgagagcuguggugaggg

SEQ ID NO: 1421881 - RNA, 19 nt, Artificial Sequence
  Description of Artificial Sequence: Synthetic oligonucleotide
ugggaccucacugugaugu

SEQ ID NO: 1421882 - RNA, 19 nt, Artificial Sequence
  Description of Artificial Sequence: Synthetic oligonucleotide
gaucucgaagugugggagg

SEQ ID NO: 1421883 - RNA, 19 nt, Artificial Sequence
  Description of Artificial Sequence: Synthetic oligonucleotide
uggugguggaaagaucucg

SEQ ID NO: 1421884 - RNA, 19 nt, Artificial Sequence
  Description of Artificial Sequence: Synthetic oligonucleotide
aucaugaaaagagagucau

SEQ ID NO: 1421885 - RNA, 19 nt, Artificial Sequence
  Description of Artificial Sequence: Synthetic oligonucleotide
uuguaggaucaccauccag

SEQ ID NO: 1421886 - RNA, 19 nt, Artificial Sequence
  Description of Artificial Sequence: Synthetic oligonucleotide
uuaggcacaucguagccau

SEQ ID NO: 1421887 - RNA, 19 nt, Artificial Sequence
  Description of Artificial Sequence: Synthetic oligonucleotide
gucccaacagaguaaggcc

SEQ ID NO: 1421888 - RNA, 19 nt, Artificial Sequence
  Description of Artificial Sequence: Synthetic oligonucleotide
caaaccagucauuagguaa

SEQ ID NO: 1421889 - RNA, 19 nt, Artificial Sequence
  Description of Artificial Sequence: Synthetic oligonucleotide
ugggaacccucauugaagu

SEQ ID NO: 1421890 - RNA, 19 nt, Artificial Sequence
  Description of Artificial Sequence: Synthetic oligonucleotide
acucucuccuaauggggac

SEQ ID NO: 1421891 - RNA, 19 nt, Artificial Sequence
  Description of Artificial Sequence: Synthetic oligonucleotide
uggacaaucgccuggugua

SEQ ID NO: 1421892 - RNA, 19 nt, Artificial Sequence
  Description of Artificial Sequence: Synthetic oligonucleotide
aaucucacucgagagcugu

SEQ ID NO: 1421893 - RNA, 19 nt, Artificial Sequence
  Description of Artificial Sequence: Synthetic oligonucleotide
uacuguuuucggcguagag

SEQ ID NO: 1421894 - RNA, 19 nt, Artificial Sequence
  Description of Artificial Sequence: Synthetic oligonucleotide
uaccugggcaccaaggcaa

SEQ ID NO: 1421895 - RNA, 19 nt, Artificial Sequence
  Description of Artificial Sequence: Synthetic oligonucleotide
uuuucguucagaguugauu

SEQ ID NO: 1421896 - RNA, 19 nt, Artificial Sequence
  Description of Artificial Sequence: Synthetic oligonucleotide
cucuuaagaccaauacaac

SEQ ID NO: 1421897 - RNA, 19 nt, Artificial Sequence
  Description of Artificial Sequence: Synthetic oligonucleotide
gcuggcauuagagaugucg

SEQ ID NO: 1421898 - RNA, 19 nt, Artificial Sequence
  Description of Artificial Sequence: Synthetic oligonucleotide
aaaccagucauuagguaau

SEQ ID NO: 1421899 - RNA, 19 nt, Artificial Sequence
  Description of Artificial Sequence: Synthetic oligonucleotide
ugucucuagauggacaauc

SEQ ID NO: 1421900 - RNA, 19 nt, Artificial Sequence
  Description of Artificial Sequence: Synthetic oligonucleotide
cagcacagcacuucuacug

SEQ ID NO: 1421901 - RNA, 19 nt, Artificial Sequence
  Description of Artificial Sequence: Synthetic oligonucleotide
uagcccugacucaugagac

SEQ ID NO: 1421902 - RNA, 19 nt, Artificial Sequence
  Description of Artificial Sequence: Synthetic oligonucleotide
aauguauaugaaggccucu

SEQ ID NO: 1421903 - RNA, 19 nt, Artificial Sequence
  Description of Artificial Sequence: Synthetic oligonucleotide
auguccugguacgaguagc

SEQ ID NO: 1421904 - RNA, 19 nt, Artificial Sequence
  Description of Artificial Sequence: Synthetic oligonucleotide
aguugauucuccgagggaa

SEQ ID NO: 1421905 - RNA, 19 nt, Artificial Sequence
  Description of Artificial Sequence: Synthetic oligonucleotide
aagacacggaauguauaug

SEQ ID NO: 1421906 - RNA, 19 nt, Artificial Sequence
  Description of Artificial Sequence: Synthetic oligonucleotide
aguccggcgagccaguaca

SEQ ID NO: 1421907 - RNA, 19 nt, Artificial Sequence
  Description of Artificial Sequence: Synthetic oligonucleotide
agguaauuaggagaauuca

SEQ ID NO: 1421908 - RNA, 19 nt, Artificial Sequence
  Description of Artificial Sequence: Synthetic oligonucleotide
caaauucccuuccccaaag

SEQ ID NO: 1421909 - RNA, 19 nt, Artificial Sequence
  Description of Artificial Sequence: Synthetic oligonucleotide
guagaagaucaagucuugg

SEQ ID NO: 1421910 - RNA, 19 nt, Artificial Sequence
  Description of Artificial Sequence: Synthetic oligonucleotide
gucucuagauggacaaucg

SEQ ID NO: 1421911 - RNA, 19 nt, Artificial Sequence
  Description of Artificial Sequence: Synthetic oligonucleotide
augucggacagaguccggc

SEQ ID NO: 1421912 - RNA, 19 nt, Artificial Sequence
  Description of Artificial Sequence: Synthetic oligonucleotide
acccuagaaacaaauguug

SEQ ID NO: 1421913 - RNA, 19 nt, Artificial Sequence
  Description of Artificial Sequence: Synthetic oligonucleotide
gucgauacccacagaaaag

SEQ ID NO: 1421914 - RNA, 19 nt, Artificial Sequence
  Description of Artificial Sequence: Synthetic oligonucleotide
uguuuucggcguagagggg

SEQ ID NO: 1421915 - RNA, 19 nt, Artificial Sequence
  Description of Artificial Sequence: Synthetic oligonucleotide
aguacagccggcacaggcg

SEQ ID NO: 1421916 - RNA, 19 nt, Artificial Sequence
  Description of Artificial Sequence: Synthetic oligonucleotide
guagcccugacucaugaga

SEQ ID NO: 1421917 - RNA, 19 nt, Artificial Sequence
  Description of Artificial Sequence: Synthetic oligonucleotide
uccccaaagguacuguuuu

SEQ ID NO: 1421918 - RNA, 19 nt, Artificial Sequence
  Description of Artificial Sequence: Synthetic oligonucleotide
aagagagucaucagcucgu

SEQ ID NO: 1421919 - RNA, 19 nt, Artificial Sequence
  Description of Artificial Sequence: Synthetic oligonucleotide
aggauuagcaguggcacca

SEQ ID NO: 1421920 - RNA, 19 nt, Artificial Sequence
  Description of Artificial Sequence: Synthetic oligonucleotide
gaauguauaugaaggccuc

SEQ ID NO: 1421921 - RNA, 19 nt, Artificial Sequence
  Description of Artificial Sequence: Synthetic oligonucleotide
agccaaauucccuucccca

SEQ ID NO: 1421922 - RNA, 19 nt, Artificial Sequence
  Description of Artificial Sequence: Synthetic oligonucleotide
uucguucagaguugauucu

SEQ ID NO: 1421923 - RNA, 19 nt, Artificial Sequence
  Description of Artificial Sequence: Synthetic oligonucleotide
ucaugaaaagagagucauc

SEQ ID NO: 1421924 - RNA, 19 nt, Artificial Sequence
  Description of Artificial Sequence: Synthetic oligonucleotide
ucggacagaguccggcgag

SEQ ID NO: 1421925 - RNA, 19 nt, Artificial Sequence
  Description of Artificial Sequence: Synthetic oligonucleotide
aggccucuaucucaaacca

SEQ ID NO: 1421926 - RNA, 19 nt, Artificial Sequence
  Description of Artificial Sequence: Synthetic oligonucleotide
gaagacacggaauguauau

SEQ ID NO: 1421927 - RNA, 19 nt, Artificial Sequence
  Description of Artificial Sequence: Synthetic oligonucleotide
ggaaagggaagcuugugga

SEQ ID NO: 1421928 - RNA, 19 nt, Artificial Sequence
  Description of Artificial Sequence: Synthetic oligonucleotide
ugacucaugagacgcucaa

SEQ ID NO: 1421929 - RNA, 19 nt, Artificial Sequence
  Description of Artificial Sequence: Synthetic oligonucleotide
uccuaggugcuccuugagu

SEQ ID NO: 1421930 - RNA, 19 nt, Artificial Sequence
  Description of Artificial Sequence: Synthetic oligonucleotide
auaccugggcaccaaggca

SEQ ID NO: 1421931 - RNA, 19 nt, Artificial Sequence
  Description of Artificial Sequence: Synthetic oligonucleotide
caguacagccggcacaggc

SEQ ID NO: 1421932 - RNA, 19 nt, Artificial Sequence
  Description of Artificial Sequence: Synthetic oligonucleotide
gaaagucuuaaguccuuaa

SEQ ID NO: 1421933 - RNA, 19 nt, Artificial Sequence
  Description of Artificial Sequence: Synthetic oligonucleotide
uggcauuagagaugucgga

SEQ ID NO: 1421934 - RNA, 19 nt, Artificial Sequence
  Description of Artificial Sequence: Synthetic oligonucleotide
agaaggauuagcaguggca

SEQ ID NO: 1421935 - RNA, 19 nt, Artificial Sequence
  Description of Artificial Sequence: Synthetic oligonucleotide
aaagcccggcucauggguc

SEQ ID NO: 1421936 - RNA, 19 nt, Artificial Sequence
  Description of Artificial Sequence: Synthetic oligonucleotide
ggcaacagaccccacagac

SEQ ID NO: 1421937 - RNA, 19 nt, Artificial Sequence
  Description of Artificial Sequence: Synthetic oligonucleotide
aucguagccaucauccuca

SEQ ID NO: 1421938 - RNA, 19 nt, Artificial Sequence
  Description of Artificial Sequence: Synthetic oligonucleotide
acgcuuuccuaggugcucc

SEQ ID NO: 1421939 - RNA, 19 nt, Artificial Sequence
  Description of Artificial Sequence: Synthetic oligonucleotide
guguacaaggcaggggacg

SEQ ID NO: 1421940 - RNA, 19 nt, Artificial Sequence
  Description of Artificial Sequence: Synthetic oligonucleotide
gaugugcuagguagcuacg

SEQ ID NO: 1421941 - RNA, 19 nt, Artificial Sequence
  Description of Artificial Sequence: Synthetic oligonucleotide
cuccuaauggggacugaag

SEQ ID NO: 1421942 - RNA, 19 nt, Artificial Sequence
  Description of Artificial Sequence: Synthetic oligonucleotide
uugauucuccgagggaaug

SEQ ID NO: 1421943 - RNA, 19 nt, Artificial Sequence
  Description of Artificial Sequence: Synthetic oligonucleotide
augaagagagccagaagca

SEQ ID NO: 1421944 - RNA, 19 nt, Artificial Sequence
  Description of Artificial Sequence: Synthetic oligonucleotide
caucaugaaaagagaguca

SEQ ID NO: 1421945 - RNA, 19 nt, Artificial Sequence
  Description of Artificial Sequence: Synthetic oligonucleotide
guguucugucccaacagag

SEQ ID NO: 1421946 - RNA, 19 nt, Artificial Sequence
  Description of Artificial Sequence: Synthetic oligonucleotide
ucaucaucaucaucaucau

SEQ ID NO: 1421947 - RNA, 19 nt, Artificial Sequence
  Description of Artificial Sequence: Synthetic oligonucleotide
agauggucgcuguuguaga

SEQ ID NO: 1421948 - RNA, 19 nt, Artificial Sequence
  Description of Artificial Sequence: Synthetic oligonucleotide
uccgagggaaugguuuagg

SEQ ID NO: 1421949 - RNA, 19 nt, Artificial Sequence
  Description of Artificial Sequence: Synthetic oligonucleotide
ggugucgauacccacagaa

SEQ ID NO: 1421950 - RNA, 19 nt, Artificial Sequence
  Description of Artificial Sequence: Synthetic oligonucleotide
ugaggccguguucuguccc

SEQ ID NO: 1421951 - RNA, 19 nt, Artificial Sequence
  Description of Artificial Sequence: Synthetic oligonucleotide
ucugaggccguguucuguc

SEQ ID NO: 1421952 - RNA, 19 nt, Artificial Sequence
  Description of Artificial Sequence: Synthetic oligonucleotide
uuuucggcguagaggggac

SEQ ID NO: 1421953 - RNA, 19 nt, Artificial Sequence
  Description of Artificial Sequence: Synthetic oligonucleotide
aagcuuguggagccaugga

SEQ ID NO: 1421954 - RNA, 19 nt, Artificial Sequence
  Description of Artificial Sequence: Synthetic oligonucleotide
aucgccugguguacaaggc

SEQ ID NO: 1421955 - RNA, 19 nt, Artificial Sequence
  Description of Artificial Sequence: Synthetic oligonucleotide
ugugggcaaugaccaaagc

SEQ ID NO: 1421956 - RNA, 19 nt, Artificial Sequence
  Description of Artificial Sequence: Synthetic oligonucleotide
cagaguaaggccggucugg

SEQ ID NO: 1421957 - RNA, 19 nt, Artificial Sequence
  Description of Artificial Sequence: Synthetic oligonucleotide
agcccugacucaugagacg

SEQ ID NO: 1421958 - RNA, 19 nt, Artificial Sequence
  Description of Artificial Sequence: Synthetic oligonucleotide
ucgccugguguacaaggca

SEQ ID NO: 1421959 - RNA, 19 nt, Artificial Sequence
  Description of Artificial Sequence: Synthetic oligonucleotide
gguagguuaccauuuaaua

SEQ ID NO: 1421960 - RNA, 19 nt, Artificial Sequence
  Description of Artificial Sequence: Synthetic oligonucleotide
gacacccuuuacaggaaag

SEQ ID NO: 1421961 - RNA, 19 nt, Artificial Sequence
  Description of Artificial Sequence: Synthetic oligonucleotide
acauaccugggcaccaagg

SEQ ID NO: 1421962 - RNA, 19 nt, Artificial Sequence
  Description of Artificial Sequence: Synthetic oligonucleotide
auuagcaguggcaccaccu

SEQ ID NO: 1421963 - RNA, 19 nt, Artificial Sequence
  Description of Artificial Sequence: Synthetic oligonucleotide
agagaugugcuagguagcu

SEQ ID NO: 1421964 - RNA, 19 nt, Artificial Sequence
  Description of Artificial Sequence: Synthetic oligonucleotide
caaauguuguucuuucugu

SEQ ID NO: 1421965 - RNA, 19 nt, Artificial Sequence
  Description of Artificial Sequence: Synthetic oligonucleotide
uacgaguagcccugacuca

SEQ ID NO: 1421966 - RNA, 19 nt, Artificial Sequence
  Description of Artificial Sequence: Synthetic oligonucleotide
agguagaaagacucaugau

SEQ ID NO: 1421967 - RNA, 19 nt, Artificial Sequence
  Description of Artificial Sequence: Synthetic oligonucleotide
gacuauuuccuggggaaga

SEQ ID NO: 1421968 - RNA, 19 nt, Artificial Sequence
  Description of Artificial Sequence: Synthetic oligonucleotide
ccacagaaaaggugggugg

SEQ ID NO: 1421969 - RNA, 19 nt, Artificial Sequence
  Description of Artificial Sequence: Synthetic oligonucleotide
cucuaucucaaaccaguca

SEQ ID NO: 1421970 - RNA, 19 nt, Artificial Sequence
  Description of Artificial Sequence: Synthetic oligonucleotide
cagacuauuuccuggggaa

SEQ ID NO: 1421971 - RNA, 19 nt, Artificial Sequence
  Description of Artificial Sequence: Synthetic oligonucleotide
gaucuauaucagaaacaca

SEQ ID NO: 1421972 - RNA, 19 nt, Artificial Sequence
  Description of Artificial Sequence: Synthetic oligonucleotide
gaaaaggugggugggaccu

SEQ ID NO: 1421973 - RNA, 19 nt, Artificial Sequence
  Description of Artificial Sequence: Synthetic oligonucleotide
uucggcguagaggggacag

SEQ ID NO: 1421974 - RNA, 19 nt, Artificial Sequence
  Description of Artificial Sequence: Synthetic oligonucleotide
ggcagaaggauuagcagug

SEQ ID NO: 1421975 - RNA, 19 nt, Artificial Sequence
  Description of Artificial Sequence: Synthetic oligonucleotide
uacuguuccagggguaggu

SEQ ID NO: 1421976 - RNA, 19 nt, Artificial Sequence
  Description of Artificial Sequence: Synthetic oligonucleotide
gggacggucucugaggccg

SEQ ID NO: 1421977 - RNA, 19 nt, Artificial Sequence
  Description of Artificial Sequence: Synthetic oligonucleotide
cuagguagcuacgugggca

SEQ ID NO: 1421978 - RNA, 19 nt, Artificial Sequence
  Description of Artificial Sequence: Synthetic oligonucleotide
acagcacagcacuucuacu

SEQ ID NO: 1421979 - RNA, 19 nt, Artificial Sequence
  Description of Artificial Sequence: Synthetic oligonucleotide
cuugggaacccucauugaa

SEQ ID NO: 1421980 - RNA, 19 nt, Artificial Sequence
  Description of Artificial Sequence: Synthetic oligonucleotide
ucguucagaguugauucuc

SEQ ID NO: 1421981 - RNA, 19 nt, Artificial Sequence
  Description of Artificial Sequence: Synthetic oligonucleotide
guuuucggcguagagggga

SEQ ID NO: 1421982 - RNA, 19 nt, Artificial Sequence
  Description of Artificial Sequence: Synthetic oligonucleotide
aguugucucuagauggaca

SEQ ID NO: 1421983 - RNA, 19 nt, Artificial Sequence
  Description of Artificial Sequence: Synthetic oligonucleotide
gacgcucaaucucacucga

SEQ ID NO: 1421984 - RNA, 19 nt, Artificial Sequence
  Description of Artificial Sequence: Synthetic oligonucleotide
caccaaggcaacagacccc

SEQ ID NO: 1421985 - RNA, 19 nt, Artificial Sequence
  Description of Artificial Sequence: Synthetic oligonucleotide
ucuccgagggaaugguuua

SEQ ID NO: 1421986 - RNA, 19 nt, Artificial Sequence
  Description of Artificial Sequence: Synthetic oligonucleotide
cuuuaugaagagagccaga

SEQ ID NO: 1421987 - RNA, 19 nt, Artificial Sequence
  Description of Artificial Sequence: Synthetic oligonucleotide
caugggugucgauacccac

SEQ ID NO: 1421988 - RNA, 19 nt, Artificial Sequence
  Description of Artificial Sequence: Synthetic oligonucleotide
ggcgaguugucucuagaug

SEQ ID NO: 1421989 - RNA, 19 nt, Artificial Sequence
  Description of Artificial Sequence: Synthetic oligonucleotide
ccacagacuauuuccuggg

SEQ ID NO: 1421990 - RNA, 19 nt, Artificial Sequence
  Description of Artificial Sequence: Synthetic oligonucleotide
agccauggcagggagagau

SEQ ID NO: 1421991 - RNA, 19 nt, Artificial Sequence
  Description of Artificial Sequence: Synthetic oligonucleotide
acacccuuuacaggaaagu

SEQ ID NO: 1421992 - RNA, 19 nt, Artificial Sequence
  Description of Artificial Sequence: Synthetic oligonucleotide
ggcauuagagaugucggac

SEQ ID NO: 1421993 - RNA, 19 nt, Artificial Sequence
  Description of Artificial Sequence: Synthetic oligonucleotide
ugagacgcucaaucucacu

SEQ ID NO: 1421994 - RNA, 19 nt, Artificial Sequence
  Description of Artificial Sequence: Synthetic oligonucleotide
agauggacaaucgccuggu

SEQ ID NO: 1421995 - RNA, 19 nt, Artificial Sequence
  Description of Artificial Sequence: Synthetic oligonucleotide
aagccacgcuuuccuaggu

SEQ ID NO: 1421996 - RNA, 19 nt, Artificial Sequence
  Description of Artificial Sequence: Synthetic oligonucleotide
aauucccggaggauguuuu

SEQ ID NO: 1421997 - RNA, 19 nt, Artificial Sequence
  Description of Artificial Sequence: Synthetic oligonucleotide
guucaucaucaucaucauc

SEQ ID NO: 1421998 - RNA, 19 nt, Artificial Sequence
  Description of Artificial Sequence: Synthetic oligonucleotide
aucucgaagugugggaggu

SEQ ID NO: 1421999 - RNA, 19 nt, Artificial Sequence
  Description of Artificial Sequence: Synthetic oligonucleotide
uagcagggaacagaugguc

SEQ ID NO: 1422000 - RNA, 19 nt, Artificial Sequence
  Description of Artificial Sequence: Synthetic oligonucleotide
agccaguacagccggcaca

SEQ ID NO: 1422001 - RNA, 19 nt, Artificial Sequence
  Description of Artificial Sequence: Synthetic oligonucleotide
cccaaagguacuguuuucg

SEQ ID NO: 1422002 - RNA, 19 nt, Artificial Sequence
  Description of Artificial Sequence: Synthetic oligonucleotide
cacucucuccuaaugggga

SEQ ID NO: 1422003 - RNA, 19 nt, Artificial Sequence
  Description of Artificial Sequence: Synthetic oligonucleotide
gcauuagagaugucggaca

SEQ ID NO: 1422004 - RNA, 19 nt, Artificial Sequence
  Description of Artificial Sequence: Synthetic oligonucleotide
gucgcuguuguagaagauc

SEQ ID NO: 1422005 - RNA, 19 nt, Artificial Sequence
  Description of Artificial Sequence: Synthetic oligonucleotide
gaguugauucuccgaggga

SEQ ID NO: 1422006 - RNA, 19 nt, Artificial Sequence
  Description of Artificial Sequence: Synthetic oligonucleotide
acaaucgccugguguacaa

SEQ ID NO: 1422007 - RNA, 19 nt, Artificial Sequence
  Description of Artificial Sequence: Synthetic oligonucleotide
gaguugucucuagauggac

SEQ ID NO: 1422008 - RNA, 19 nt, Artificial Sequence
  Description of Artificial Sequence: Synthetic oligonucleotide
acucgagagcuguggugag

SEQ ID NO: 1422009 - RNA, 19 nt, Artificial Sequence
  Description of Artificial Sequence: Synthetic oligonucleotide
gccacgcuuuccuaggugc

SEQ ID NO: 1422010 - RNA, 19 nt, Artificial Sequence
  Description of Artificial Sequence: Synthetic oligonucleotide
auguauaugaaggccucua

SEQ ID NO: 1422011 - RNA, 19 nt, Artificial Sequence
  Description of Artificial Sequence: Synthetic oligonucleotide
caagucuugguggcacuag

SEQ ID NO: 1422012 - RNA, 19 nt, Artificial Sequence
  Description of Artificial Sequence: Synthetic oligonucleotide
gauggucgcuguuguagaa

SEQ ID NO: 1422013 - RNA, 19 nt, Artificial Sequence
  Description of Artificial Sequence: Synthetic oligonucleotide
uagcuacgugggcaggaga

SEQ ID NO: 1422014 - RNA, 19 nt, Artificial Sequence
  Description of Artificial Sequence: Synthetic oligonucleotide
ggaauguauaugaaggccu

SEQ ID NO: 1422015 - RNA, 19 nt, Artificial Sequence
  Description of Artificial Sequence: Synthetic oligonucleotide
guagcuacgugggcaggag

SEQ ID NO: 1422016 - RNA, 19 nt, Artificial Sequence
  Description of Artificial Sequence: Synthetic oligonucleotide
cacucgagagcugugguga

SEQ ID NO: 1422017 - RNA, 19 nt, Artificial Sequence
  Description of Artificial Sequence: Synthetic oligonucleotide
gguacuguuuucggcguag

SEQ ID NO: 1422018 - RNA, 19 nt, Artificial Sequence
  Description of Artificial Sequence: Synthetic oligonucleotide
cccagaacugaagagcuag

SEQ ID NO: 1422019 - RNA, 19 nt, Artificial Sequence
  Description of Artificial Sequence: Synthetic oligonucleotide
agacacccuuuacaggaaa

SEQ ID NO: 1422020 - RNA, 19 nt, Artificial Sequence
  Description of Artificial Sequence: Synthetic oligonucleotide
cucguucaucaucaucauc

SEQ ID NO: 1422021 - RNA, 19 nt, Artificial Sequence
  Description of Artificial Sequence: Synthetic oligonucleotide
gcugcuugcuuuucguuca

SEQ ID NO: 1422022 - RNA, 19 nt, Artificial Sequence
  Description of Artificial Sequence: Synthetic oligonucleotide
cugucccaacagaguaagg

SEQ ID NO: 1422023 - RNA, 19 nt, Artificial Sequence
  Description of Artificial Sequence: Synthetic oligonucleotide
uuccuggggaagacacgga

SEQ ID NO: 1422024 - RNA, 19 nt, Artificial Sequence
  Description of Artificial Sequence: Synthetic oligonucleotide
guuagguagaaagacucau

SEQ ID NO: 1422025 - RNA, 19 nt, Artificial Sequence
  Description of Artificial Sequence: Synthetic oligonucleotide
cugaggccguguucugucc

SEQ ID NO: 1422026 - RNA, 19 nt, Artificial Sequence
  Description of Artificial Sequence: Synthetic oligonucleotide
agaguaaggccggucugga

SEQ ID NO: 1422027 - RNA, 19 nt, Artificial Sequence
  Description of Artificial Sequence: Synthetic oligonucleotide
gacacggaauguauaugaa

SEQ ID NO: 1422028 - RNA, 19 nt, Artificial Sequence
  Description of Artificial Sequence: Synthetic oligonucleotide
gaugucggacagaguccgg

SEQ ID NO: 1422029 - RNA, 19 nt, Artificial Sequence
  Description of Artificial Sequence: Synthetic oligonucleotide
acgaguagcccugacucau

SEQ ID NO: 1422030 - RNA, 19 nt, Artificial Sequence
  Description of Artificial Sequence: Synthetic oligonucleotide
ccgagggaaugguuuaggg

SEQ ID NO: 1422031 - RNA, 19 nt, Artificial Sequence
  Description of Artificial Sequence: Synthetic oligonucleotide
guacuguuccagggguagg

SEQ ID NO: 1422032 - RNA, 19 nt, Artificial Sequence
  Description of Artificial Sequence: Synthetic oligonucleotide
cacacucuuaagaccaaua

SEQ ID NO: 1422033 - RNA, 19 nt, Artificial Sequence
  Description of Artificial Sequence: Synthetic oligonucleotide
gacagacagacacccuuua

SEQ ID NO: 1422034 - RNA, 19 nt, Artificial Sequence
  Description of Artificial Sequence: Synthetic oligonucleotide
ccuaauggggacugaagga

SEQ ID NO: 1422035 - RNA, 19 nt, Artificial Sequence
  Description of Artificial Sequence: Synthetic oligonucleotide
cggaauguauaugaaggcc

SEQ ID NO: 1422036 - RNA, 19 nt, Artificial Sequence
  Description of Artificial Sequence: Synthetic oligonucleotide
caaucucacucgagagcug

SEQ ID NO: 1422037 - RNA, 19 nt, Artificial Sequence
  Description of Artificial Sequence: Synthetic oligonucleotide
auuagguaauuaggagaau

SEQ ID NO: 1422038 - RNA, 19 nt, Artificial Sequence
  Description of Artificial Sequence: Synthetic oligonucleotide
agcuacgugggcaggagaa

SEQ ID NO: 1422039 - RNA, 19 nt, Artificial Sequence
  Description of Artificial Sequence: Synthetic oligonucleotide
cagcacuucuacugcuuuc

SEQ ID NO: 1422040 - RNA, 19 nt, Artificial Sequence
  Description of Artificial Sequence: Synthetic oligonucleotide
cucgagagcuguggugagg

SEQ ID NO: 1422041 - RNA, 19 nt, Artificial Sequence
  Description of Artificial Sequence: Synthetic oligonucleotide
gugggagguauuggcaaug

SEQ ID NO: 1422042 - RNA, 19 nt, Artificial Sequence
  Description of Artificial Sequence: Synthetic oligonucleotide
cuugaguaaaagcccggcu

SEQ ID NO: 1422043 - RNA, 19 nt, Artificial Sequence
  Description of Artificial Sequence: Synthetic oligonucleotide
ucggcguagaggggacagg

SEQ ID NO: 1422044 - RNA, 19 nt, Artificial Sequence
  Description of Artificial Sequence: Synthetic oligonucleotide
agcagccuuggaaguaguc

SEQ ID NO: 1422045 - RNA, 19 nt, Artificial Sequence
  Description of Artificial Sequence: Synthetic oligonucleotide
agggaacagauggucgcug

SEQ ID NO: 1422046 - RNA, 19 nt, Artificial Sequence
  Description of Artificial Sequence: Synthetic oligonucleotide
gagcuggcauuagagaugu

SEQ ID NO: 1422047 - RNA, 19 nt, Artificial Sequence
  Description of Artificial Sequence: Synthetic oligonucleotide
aaggugggugggaccucac

SEQ ID NO: 1422048 - RNA, 19 nt, Artificial Sequence
  Description of Artificial Sequence: Synthetic oligonucleotide
cacccuagaaacaaauguu

SEQ ID NO: 1422049 - RNA, 19 nt, Artificial Sequence
  Description of Artificial Sequence: Synthetic oligonucleotide
aaccagucauuagguaauu

SEQ ID NO: 1422050 - RNA, 19 nt, Artificial Sequence
  Description of Artificial Sequence: Synthetic oligonucleotide
cugacucaugagacgcuca

SEQ ID NO: 1422051 - RNA, 19 nt, Artificial Sequence
  Description of Artificial Sequence: Synthetic oligonucleotide
gauucuccgagggaauggu

SEQ ID NO: 1422052 - RNA, 19 nt, Artificial Sequence
  Description of Artificial Sequence: Synthetic oligonucleotide
gugguggaaagaucucgaa

SEQ ID NO: 1422053 - RNA, 19 nt, Artificial Sequence
  Description of Artificial Sequence: Synthetic oligonucleotide
gacaaucgccugguguaca

SEQ ID NO: 1422054 - RNA, 19 nt, Artificial Sequence
  Description of Artificial Sequence: Synthetic oligonucleotide
gaguccggcgagccaguac

SEQ ID NO: 1422055 - RNA, 19 nt, Artificial Sequence
  Description of Artificial Sequence: Synthetic oligonucleotide
gaggccguguucuguccca

SEQ ID NO: 1422056 - RNA, 19 nt, Artificial Sequence
  Description of Artificial Sequence: Synthetic oligonucleotide
agggguagguuaccauuua

SEQ ID NO: 1422057 - RNA, 19 nt, Artificial Sequence
  Description of Artificial Sequence: Synthetic oligonucleotide
ggaaccaugggugucgaua

SEQ ID NO: 1422058 - RNA, 19 nt, Artificial Sequence
  Description of Artificial Sequence: Synthetic oligonucleotide
gcccugacucaugagacgc

SEQ ID NO: 1422059 - RNA, 19 nt, Artificial Sequence
  Description of Artificial Sequence: Synthetic oligonucleotide
ucgaagugugggagguauu

SEQ ID NO: 1422060 - RNA, 19 nt, Artificial Sequence
  Description of Artificial Sequence: Synthetic oligonucleotide
caaucgccugguguacaag

SEQ ID NO: 1422061 - RNA, 19 nt, Artificial Sequence
  Description of Artificial Sequence: Synthetic oligonucleotide
gcuagguagcuacgugggc

SEQ ID NO: 1422062 - RNA, 19 nt, Artificial Sequence
  Description of Artificial Sequence: Synthetic oligonucleotide
agccacccuagaaacaaau

SEQ ID NO: 1422063 - RNA, 19 nt, Artificial Sequence
  Description of Artificial Sequence: Synthetic oligonucleotide
cuccgagggaaugguuuag

SEQ ID NO: 1422064 - RNA, 19 nt, Artificial Sequence
  Description of Artificial Sequence: Synthetic oligonucleotide
cuagcagggaacagauggu

SEQ ID NO: 1422065 - RNA, 19 nt, Artificial Sequence
  Description of Artificial Sequence: Synthetic oligonucleotide
uccggcgagccaguacagc

SEQ ID NO: 1422066 - RNA, 19 nt, Artificial Sequence
  Description of Artificial Sequence: Synthetic oligonucleotide
guccugguacgaguagccc

SEQ ID NO: 1422067 - RNA, 19 nt, Artificial Sequence
  Description of Artificial Sequence: Synthetic oligonucleotide
uugucucuagauggacaau

SEQ ID NO: 1422068 - RNA, 19 nt, Artificial Sequence
  Description of Artificial Sequence: Synthetic oligonucleotide
acccacagaaaaggugggu

SEQ ID NO: 1422069 - RNA, 19 nt, Artificial Sequence
  Description of Artificial Sequence: Synthetic oligonucleotide
acagauggucgcuguugua

SEQ ID NO: 1422070 - RNA, 19 nt, Artificial Sequence
  Description of Artificial Sequence: Synthetic oligonucleotide
ccguguucugucccaacag

SEQ ID NO: 1422071 - RNA, 19 nt, Artificial Sequence
  Description of Artificial Sequence: Synthetic oligonucleotide
agguagcuacgugggcagg

SEQ ID NO: 1422072 - RNA, 19 nt, Artificial Sequence
  Description of Artificial Sequence: Synthetic oligonucleotide
gaacuugggaacccucauu

SEQ ID NO: 1422073 - RNA, 19 nt, Artificial Sequence
  Description of Artificial Sequence: Synthetic oligonucleotide
guuccagggguagguuacc

SEQ ID NO: 1422074 - RNA, 19 nt, Artificial Sequence
  Description of Artificial Sequence: Synthetic oligonucleotide
gugucgauacccacagaaa

SEQ ID NO: 1422075 - RNA, 19 nt, Artificial Sequence
  Description of Artificial Sequence: Synthetic oligonucleotide
uuucggcguagaggggaca

SEQ ID NO: 1422076 - RNA, 19 nt, Artificial Sequence
  Description of Artificial Sequence: Synthetic oligonucleotide
ccucuaucucaaaccaguc

SEQ ID NO: 1422077 - RNA, 19 nt, Artificial Sequence
  Description of Artificial Sequence: Synthetic oligonucleotide
caucaucaucaucaucaua

SEQ ID NO: 1422078 - RNA, 19 nt, Artificial Sequence
  Description of Artificial Sequence: Synthetic oligonucleotide
gagcuagcagggaacagau

SEQ ID NO: 1422079 - RNA, 19 nt, Artificial Sequence
  Description of Artificial Sequence: Synthetic oligonucleotide
cacgcuuuccuaggugcuc

SEQ ID NO: 1422080 - RNA, 19 nt, Artificial Sequence
  Description of Artificial Sequence: Synthetic oligonucleotide
accagucauuagguaauua

SEQ ID NO: 1422081 - RNA, 19 nt, Artificial Sequence
  Description of Artificial Sequence: Synthetic oligonucleotide
gccguguucugucccaaca

SEQ ID NO: 1422082 - RNA, 19 nt, Artificial Sequence
  Description of Artificial Sequence: Synthetic oligonucleotide
agguacuguuuucggcgua

SEQ ID NO: 1422083 - RNA, 19 nt, Artificial Sequence
  Description of Artificial Sequence: Synthetic oligonucleotide
gguguacaaggcaggggac

SEQ ID NO: 1422084 - RNA, 19 nt, Artificial Sequence
  Description of Artificial Sequence: Synthetic oligonucleotide
aagccacccuagaaacaaa

SEQ ID NO: 1422085 - RNA, 19 nt, Artificial Sequence
  Description of Artificial Sequence: Synthetic oligonucleotide
ggccucuaucucaaaccag

SEQ ID NO: 1422086 - RNA, 19 nt, Artificial Sequence
  Description of Artificial Sequence: Synthetic oligonucleotide
ggcguagaggggacagggg

SEQ ID NO: 1422087 - RNA, 19 nt, Artificial Sequence
  Description of Artificial Sequence: Synthetic oligonucleotide
acgugggcaggagaagaaa

SEQ ID NO: 1422088 - RNA, 19 nt, Artificial Sequence
  Description of Artificial Sequence: Synthetic oligonucleotide
gcuacgugggcaggagaag

SEQ ID NO: 1422089 - RNA, 19 nt, Artificial Sequence
  Description of Artificial Sequence: Synthetic oligonucleotide
ucguagccaucauccucau

SEQ ID NO: 1422090 - RNA, 19 nt, Artificial Sequence
  Description of Artificial Sequence: Synthetic oligonucleotide
aucucacucgagagcugug

SEQ ID NO: 1422091 - RNA, 19 nt, Artificial Sequence
  Description of Artificial Sequence: Synthetic oligonucleotide
gagaugugcuagguagcua

SEQ ID NO: 1422092 - RNA, 19 nt, Artificial Sequence
  Description of Artificial Sequence: Synthetic oligonucleotide
gccucuaucucaaaccagu

SEQ ID NO: 1422093 - RNA, 19 nt, Artificial Sequence
  Description of Artificial Sequence: Synthetic oligonucleotide
ggugggaccucacugugau

SEQ ID NO: 1422094 - RNA, 19 nt, Artificial Sequence
  Description of Artificial Sequence: Synthetic oligonucleotide
cagacacccuuuacaggaa

SEQ ID NO: 1422095 - RNA, 19 nt, Artificial Sequence
  Description of Artificial Sequence: Synthetic oligonucleotide
gguagcuacgugggcagga

SEQ ID NO: 1422096 - RNA, 19 nt, Artificial Sequence
  Description of Artificial Sequence: Synthetic oligonucleotide
ggaagacacggaauguaua

SEQ ID NO: 1422097 - RNA, 19 nt, Artificial Sequence
  Description of Artificial Sequence: Synthetic oligonucleotide
agcuagcagggaacagaug

SEQ ID NO: 1422098 - RNA, 19 nt, Artificial Sequence
  Description of Artificial Sequence: Synthetic oligonucleotide
gggguagguuaccauuuaa

SEQ ID NO: 1422099 - RNA, 19 nt, Artificial Sequence
  Description of Artificial Sequence: Synthetic oligonucleotide
gcuuuucguucagaguuga

SEQ ID NO: 1422100 - RNA, 19 nt, Artificial Sequence
  Description of Artificial Sequence: Synthetic oligonucleotide
ggaacccucauugaaguuu

SEQ ID NO: 1422101 - RNA, 19 nt, Artificial Sequence
  Description of Artificial Sequence: Synthetic oligonucleotide
ggacaaucgccugguguac

SEQ ID NO: 1422102 - RNA, 19 nt, Artificial Sequence
  Description of Artificial Sequence: Synthetic oligonucleotide
cuguacuguuccaggggua

SEQ ID NO: 1422103 - RNA, 19 nt, Artificial Sequence
  Description of Artificial Sequence: Synthetic oligonucleotide
ggaaagucuuaaguccuua

SEQ ID NO: 1422104 - RNA, 19 nt, Artificial Sequence
  Description of Artificial Sequence: Synthetic oligonucleotide
cccuagaaacaaauguugu

SEQ ID NO: 1422105 - RNA, 19 nt, Artificial Sequence
  Description of Artificial Sequence: Synthetic oligonucleotide
cucgaagugugggagguau

SEQ ID NO: 1422106 - RNA, 19 nt, Artificial Sequence
  Description of Artificial Sequence: Synthetic oligonucleotide
ccugacucaugagacgcuc

SEQ ID NO: 1422107 - RNA, 19 nt, Artificial Sequence
  Description of Artificial Sequence: Synthetic oligonucleotide
ggaagcuuguggagccaug

SEQ ID NO: 1422108 - RNA, 19 nt, Artificial Sequence
  Description of Artificial Sequence: Synthetic oligonucleotide
gacggucucugaggccgug

SEQ ID NO: 1422109 - RNA, 19 nt, Artificial Sequence
  Description of Artificial Sequence: Synthetic oligonucleotide
cugcuccauuuucauucca

SEQ ID NO: 1422110 - RNA, 19 nt, Artificial Sequence
  Description of Artificial Sequence: Synthetic oligonucleotide
auucuccgagggaaugguu

SEQ ID NO: 1422111 - RNA, 19 nt, Artificial Sequence
  Description of Artificial Sequence: Synthetic oligonucleotide
ggggcgaguugucucuaga

SEQ ID NO: 1422112 - RNA, 19 nt, Artificial Sequence
  Description of Artificial Sequence: Synthetic oligonucleotide
cggcgagccaguacagccg

SEQ ID NO: 1422113 - RNA, 19 nt, Artificial Sequence
  Description of Artificial Sequence: Synthetic oligonucleotide
guccggcgagccaguacag

SEQ ID NO: 1422114 - RNA, 19 nt, Artificial Sequence
  Description of Artificial Sequence: Synthetic oligonucleotide
gaguaaaagcccggcucau

SEQ ID NO: 1422115 - RNA, 19 nt, Artificial Sequence
  Description of Artificial Sequence: Synthetic oligonucleotide
cggcguagaggggacaggg

SEQ ID NO: 1422116 - RNA, 19 nt, Artificial Sequence
  Description of Artificial Sequence: Synthetic oligonucleotide
ggggacggucucugaggcc

SEQ ID NO: 1422117 - RNA, 19 nt, Artificial Sequence
  Description of Artificial Sequence: Synthetic oligonucleotide
ggguagguuaccauuuaau

SEQ ID NO: 1422118 - RNA, 19 nt, Artificial Sequence
  Description of Artificial Sequence: Synthetic oligonucleotide
gggaacagauggucgcugu

SEQ ID NO: 1422119 - RNA, 19 nt, Artificial Sequence
  Description of Artificial Sequence: Synthetic oligonucleotide
cgaguugucucuagaugga

SEQ ID NO: 1422120 - RNA, 19 nt, Artificial Sequence
  Description of Artificial Sequence: Synthetic oligonucleotide
gacucaugagacgcucaau

SEQ ID NO: 1422121 - RNA, 19 nt, Artificial Sequence
  Description of Artificial Sequence: Synthetic oligonucleotide
ggaggaaagggaagcuugu

SEQ ID NO: 1422122 - RNA, 19 nt, Artificial Sequence
  Description of Artificial Sequence: Synthetic oligonucleotide
cguguucugucccaacaga

SEQ ID NO: 1422123 - RNA, 19 nt, Artificial Sequence
  Description of Artificial Sequence: Synthetic oligonucleotide
gggaagacacggaauguau

SEQ ID NO: 1422124 - RNA, 19 nt, Artificial Sequence
  Description of Artificial Sequence: Synthetic oligonucleotide
cuuuucguucagaguugau

SEQ ID NO: 1422125 - RNA, 19 nt, Artificial Sequence
  Description of Artificial Sequence: Synthetic oligonucleotide
gggcgaguugucucuagau

SEQ ID NO: 1422126 - RNA, 19 nt, Artificial Sequence
  Description of Artificial Sequence: Synthetic oligonucleotide
gccggcacaggcggcuuag

SEQ ID NO: 1422127 - RNA, 19 nt, Artificial Sequence
  Description of Artificial Sequence: Synthetic oligonucleotide
cuacugcuuucuguacugu

SEQ ID NO: 1422128 - RNA, 19 nt, Artificial Sequence
  Description of Artificial Sequence: Synthetic oligonucleotide
cgaguagcccugacucaug

SEQ ID NO: 1422129 - RNA, 19 nt, Artificial Sequence
  Description of Artificial Sequence: Synthetic oligonucleotide
agccggcacaggcggcuua

SEQ ID NO: 1422130 - RNA, 19 nt, Artificial Sequence
  Description of Artificial Sequence: Synthetic oligonucleotide
agaguccggcgagccagua

SEQ ID NO: 1422131 - RNA, 19 nt, Artificial Sequence
  Description of Artificial Sequence: Synthetic oligonucleotide
ggggccgcucaggaacuug

SEQ ID NO: 1422132 - RNA, 19 nt, Artificial Sequence
  Description of Artificial Sequence: Synthetic oligonucleotide
guacaaggcaggggacggu

SEQ ID NO: 1422133 - RNA, 19 nt, Artificial Sequence
  Description of Artificial Sequence: Synthetic oligonucleotide
cucugaggccguguucugu

SEQ ID NO: 1422134 - RNA, 19 nt, Artificial Sequence
  Description of Artificial Sequence: Synthetic oligonucleotide
ccagggguagguuaccauu

SEQ ID NO: 1422135 - RNA, 19 nt, Artificial Sequence
  Description of Artificial Sequence: Synthetic oligonucleotide
caauguuguugugggcaau

SEQ ID NO: 1422136 - RNA, 19 nt, Artificial Sequence
  Description of Artificial Sequence: Synthetic oligonucleotide
ccaguacagccggcacagg

SEQ ID NO: 1422137 - RNA, 19 nt, Artificial Sequence
  Description of Artificial Sequence: Synthetic oligonucleotide
cagaguccggcgagccagu

SEQ ID NO: 1422138 - RNA, 19 nt, Artificial Sequence
  Description of Artificial Sequence: Synthetic oligonucleotide
cggacagaguccggcgagc

SEQ ID NO: 1422139 - RNA, 19 nt, Artificial Sequence
  Description of Artificial Sequence: Synthetic oligonucleotide
gggaacccucauugaaguu

SEQ ID NO: 1422140 - RNA, 19 nt, Artificial Sequence
  Description of Artificial Sequence: Synthetic oligonucleotide
gggaagcuuguggagccau

SEQ ID NO: 1422141 - RNA, 19 nt, Artificial Sequence
  Description of Artificial Sequence: Synthetic oligonucleotide
ccggcucauggguccucug

SEQ ID NO: 1422142 - RNA, 19 nt, Artificial Sequence
  Description of Artificial Sequence: Synthetic oligonucleotide
ccacgcuuuccuaggugcu

SEQ ID NO: 1422143 - RNA, 19 nt, Artificial Sequence
  Description of Artificial Sequence: Synthetic oligonucleotide
ccggucuggaggagguggu

SEQ ID NO: 1422144 - RNA, 19 nt, Artificial Sequence
  Description of Artificial Sequence: Synthetic oligonucleotide
ggacggucucugaggccgu

SEQ ID NO: 1422145 - RNA, 19 nt, Artificial Sequence
  Description of Artificial Sequence: Synthetic oligonucleotide
cagccggcacaggcggcuu

SEQ ID NO: 1422146 - RNA, 19 nt, Artificial Sequence
  Description of Artificial Sequence: Synthetic oligonucleotide
aaugaagcucccuuggugc

SEQ ID NO: 1422147 - RNA, 19 nt, Artificial Sequence
  Description of Artificial Sequence: Synthetic oligonucleotide
agacgagccacucagagcc

SEQ ID NO: 1422148 - RNA, 19 nt, Artificial Sequence
  Description of Artificial Sequence: Synthetic oligonucleotide
ugaucuauggacagcaggg

SEQ ID NO: 1422149 - RNA, 19 nt, Artificial Sequence
  Description of Artificial Sequence: Synthetic oligonucleotide
ugugauuggauguagggcc

SEQ ID NO: 1422150 - RNA, 19 nt, Artificial Sequence
  Description of Artificial Sequence: Synthetic oligonucleotide
ugaacagaaacagggauag

SEQ ID NO: 1422151 - RNA, 19 nt, Artificial Sequence
  Description of Artificial Sequence: Synthetic oligonucleotide
uaaguaggaguacacuggg

SEQ ID NO: 1422152 - RNA, 19 nt, Artificial Sequence
  Description of Artificial Sequence: Synthetic oligonucleotide
ucaaacuguguuaucagcu

SEQ ID NO: 1422153 - RNA, 19 nt, Artificial Sequence
  Description of Artificial Sequence: Synthetic oligonucleotide
accugaucucccuaaaagc

SEQ ID NO: 1422154 - RNA, 19 nt, Artificial Sequence
  Description of Artificial Sequence: Synthetic oligonucleotide
caucaucucagccacaggg

SEQ ID NO: 1422155 - RNA, 19 nt, Artificial Sequence
  Description of Artificial Sequence: Synthetic oligonucleotide
cauaaguaggaguacacug

SEQ ID NO: 1422156 - RNA, 19 nt, Artificial Sequence
  Description of Artificial Sequence: Synthetic oligonucleotide
aaaugccuccuuuacuagg

SEQ ID NO: 1422157 - RNA, 19 nt, Artificial Sequence
  Description of Artificial Sequence: Synthetic oligonucleotide
auugcuuaccagccguugc

SEQ ID NO: 1422158 - RNA, 19 nt, Artificial Sequence
  Description of Artificial Sequence: Synthetic oligonucleotide
uaccagucggcucugauca

SEQ ID NO: 1422159 - RNA, 19 nt, Artificial Sequence
  Description of Artificial Sequence: Synthetic oligonucleotide
caaagauguaguuguagag

SEQ ID NO: 1422160 - RNA, 19 nt, Artificial Sequence
  Description of Artificial Sequence: Synthetic oligonucleotide
auaaguaggaguacacugg

SEQ ID NO: 1422161 - RNA, 19 nt, Artificial Sequence
  Description of Artificial Sequence: Synthetic oligonucleotide
caccacacaggcuaggugg

SEQ ID NO: 1422162 - RNA, 19 nt, Artificial Sequence
  Description of Artificial Sequence: Synthetic oligonucleotide
gaaagcaccuucuggauuc

SEQ ID NO: 1422163 - RNA, 19 nt, Artificial Sequence
  Description of Artificial Sequence: Synthetic oligonucleotide
accagcggcagcaaaaugc

SEQ ID NO: 1422164 - RNA, 19 nt, Artificial Sequence
  Description of Artificial Sequence: Synthetic oligonucleotide
ugucgcagcaggaugauuc

SEQ ID NO: 1422165 - RNA, 19 nt, Artificial Sequence
  Description of Artificial Sequence: Synthetic oligonucleotide
ggugcaagaagccuguggg

SEQ ID NO: 1422166 - RNA, 19 nt, Artificial Sequence
  Description of Artificial Sequence: Synthetic oligonucleotide
aucuauggacagcagggcg

SEQ ID NO: 1422167 - RNA, 19 nt, Artificial Sequence
  Description of Artificial Sequence: Synthetic oligonucleotide
uggucauccaccacacagg

SEQ ID NO: 1422168 - RNA, 19 nt, Artificial Sequence
  Description of Artificial Sequence: Synthetic oligonucleotide
gaaugaagcucccuuggug

SEQ ID NO: 1422169 - RNA, 19 nt, Artificial Sequence
  Description of Artificial Sequence: Synthetic oligonucleotide
caacgauugucauaccggg

SEQ ID NO: 1422170 - RNA, 19 nt, Artificial Sequence
  Description of Artificial Sequence: Synthetic oligonucleotide
ugguucucugcaaaccccg

SEQ ID NO: 1422171 - RNA, 19 nt, Artificial Sequence
  Description of Artificial Sequence: Synthetic oligonucleotide
agcggcagcaaaaugcucc

SEQ ID NO: 1422172 - RNA, 19 nt, Artificial Sequence
  Description of Artificial Sequence: Synthetic oligonucleotide
gugaucuauggacagcagg

SEQ ID NO: 1422173 - RNA, 19 nt, Artificial Sequence
  Description of Artificial Sequence: Synthetic oligonucleotide
aacauccuugucuugcagu

SEQ ID NO: 1422174 - RNA, 19 nt, Artificial Sequence
  Description of Artificial Sequence: Synthetic oligonucleotide
gaugauucucuccagauau

SEQ ID NO: 1422175 - RNA, 19 nt, Artificial Sequence
  Description of Artificial Sequence: Synthetic oligonucleotide
cagccuauugaauucuggg

SEQ ID NO: 1422176 - RNA, 19 nt, Artificial Sequence
  Description of Artificial Sequence: Synthetic oligonucleotide
uucucugcaaaccccgagc

SEQ ID NO: 1422177 - RNA, 19 nt, Artificial Sequence
  Description of Artificial Sequence: Synthetic oligonucleotide
acgauugucauaccggggu

SEQ ID NO: 1422178 - RNA, 19 nt, Artificial Sequence
  Description of Artificial Sequence: Synthetic oligonucleotide
uccuguacuuccuuugggc

SEQ ID NO: 1422179 - RNA, 19 nt, Artificial Sequence
  Description of Artificial Sequence: Synthetic oligonucleotide
ugcccuugguaccagucgg

SEQ ID NO: 1422180 - RNA, 19 nt, Artificial Sequence
  Description of Artificial Sequence: Synthetic oligonucleotide
uccauaaguaggaguacac

SEQ ID NO: 1422181 - RNA, 19 nt, Artificial Sequence
  Description of Artificial Sequence: Synthetic oligonucleotide
cuaaaagccccagcaagcg

SEQ ID NO: 1422182 - RNA, 19 nt, Artificial Sequence
  Description of Artificial Sequence: Synthetic oligonucleotide
guggagacgagccacucag

SEQ ID NO: 1422183 - RNA, 19 nt, Artificial Sequence
  Description of Artificial Sequence: Synthetic oligonucleotide
gccuauugaauucugggag

SEQ ID NO: 1422184 - RNA, 19 nt, Artificial Sequence
  Description of Artificial Sequence: Synthetic oligonucleotide
uagagggcaguccggaggc

SEQ ID NO: 1422185 - RNA, 19 nt, Artificial Sequence
  Description of Artificial Sequence: Synthetic oligonucleotide
guccuuuugccucuuagac

SEQ ID NO: 1422186 - RNA, 19 nt, Artificial Sequence
  Description of Artificial Sequence: Synthetic oligonucleotide
gauucgcuccuguacuucc

SEQ ID NO: 1422187 - RNA, 19 nt, Artificial Sequence
  Description of Artificial Sequence: Synthetic oligonucleotide
aggugcaagaagccugugg

SEQ ID NO: 1422188 - RNA, 19 nt, Artificial Sequence
  Description of Artificial Sequence: Synthetic oligonucleotide
agccuauugaauucuggga

SEQ ID NO: 1422189 - RNA, 19 nt, Artificial Sequence
  Description of Artificial Sequence: Synthetic oligonucleotide
uugcuuaccagccguugca

SEQ ID NO: 1422190 - RNA, 19 nt, Artificial Sequence
  Description of Artificial Sequence: Synthetic oligonucleotide
ggucucauugcuuaccagc

SEQ ID NO: 1422191 - RNA, 19 nt, Artificial Sequence
  Description of Artificial Sequence: Synthetic oligonucleotide
cacuggggagagcagaucc

SEQ ID NO: 1422192 - RNA, 19 nt, Artificial Sequence
  Description of Artificial Sequence: Synthetic oligonucleotide
ccagcugugaucuauggac

SEQ ID NO: 1422193 - RNA, 19 nt, Artificial Sequence
  Description of Artificial Sequence: Synthetic oligonucleotide
aaaccugaucucccuaaaa

SEQ ID NO: 1422194 - RNA, 19 nt, Artificial Sequence
  Description of Artificial Sequence: Synthetic oligonucleotide
aacgauugucauaccgggg

SEQ ID NO: 1422195 - RNA, 19 nt, Artificial Sequence
  Description of Artificial Sequence: Synthetic oligonucleotide
ugugaucuauggacagcag

SEQ ID NO: 1422196 - RNA, 19 nt, Artificial Sequence
  Description of Artificial Sequence: Synthetic oligonucleotide
ugucauaccggggugucug

SEQ ID NO: 1422197 - RNA, 19 nt, Artificial Sequence
  Description of Artificial Sequence: Synthetic oligonucleotide
agcugugaucuauggacag

SEQ ID NO: 1422198 - RNA, 19 nt, Artificial Sequence
  Description of Artificial Sequence: Synthetic oligonucleotide
acuucaugcugaguccagc

SEQ ID NO: 1422199 - RNA, 19 nt, Artificial Sequence
  Description of Artificial Sequence: Synthetic oligonucleotide
ggcggaagcggauagcagg

SEQ ID NO: 1422200 - RNA, 19 nt, Artificial Sequence
  Description of Artificial Sequence: Synthetic oligonucleotide
agcgcacucgcaccguggc

SEQ ID NO: 1422201 - RNA, 19 nt, Artificial Sequence
  Description of Artificial Sequence: Synthetic oligonucleotide
gauagcaggcuuggggucc

SEQ ID NO: 1422202 - RNA, 19 nt, Artificial Sequence
  Description of Artificial Sequence: Synthetic oligonucleotide
ugcgucugaggccugugca

SEQ ID NO: 1422203 - RNA, 19 nt, Artificial Sequence
  Description of Artificial Sequence: Synthetic oligonucleotide
agcaaugcgucugaggccu

SEQ ID NO: 1422204 - RNA, 19 nt, Artificial Sequence
  Description of Artificial Sequence: Synthetic oligonucleotide
caaaugccuccuuuacuag

SEQ ID NO: 1422205 - RNA, 19 nt, Artificial Sequence
  Description of Artificial Sequence: Synthetic oligonucleotide
uguacuuccuuugggccca

SEQ ID NO: 1422206 - RNA, 19 nt, Artificial Sequence
  Description of Artificial Sequence: Synthetic oligonucleotide
gaucuauggacagcagggc

SEQ ID NO: 1422207 - RNA, 19 nt, Artificial Sequence
  Description of Artificial Sequence: Synthetic oligonucleotide
gauaugcuggguccagaac

SEQ ID NO: 1422208 - RNA, 19 nt, Artificial Sequence
  Description of Artificial Sequence: Synthetic oligonucleotide
agaaugaagcucccuuggu

SEQ ID NO: 1422209 - RNA, 19 nt, Artificial Sequence
  Description of Artificial Sequence: Synthetic oligonucleotide
gagacgagccacucagagc

SEQ ID NO: 1422210 - RNA, 19 nt, Artificial Sequence
  Description of Artificial Sequence: Synthetic oligonucleotide
cuuagagguggagacgagc

SEQ ID NO: 1422211 - RNA, 19 nt, Artificial Sequence
  Description of Artificial Sequence: Synthetic oligonucleotide
guugauucccaaaugccuc

SEQ ID NO: 1422212 - RNA, 19 nt, Artificial Sequence
  Description of Artificial Sequence: Synthetic oligonucleotide
gucucauugcuuaccagcc

SEQ ID NO: 1422213 - RNA, 19 nt, Artificial Sequence
  Description of Artificial Sequence: Synthetic oligonucleotide
ggcgacuucaugcugaguc

SEQ ID NO: 1422214 - RNA, 19 nt, Artificial Sequence
  Description of Artificial Sequence: Synthetic oligonucleotide
uuagacagcuugcuaccau

SEQ ID NO: 1422215 - RNA, 19 nt, Artificial Sequence
  Description of Artificial Sequence: Synthetic oligonucleotide
gcaacgauugucauaccgg

SEQ ID NO: 1422216 - RNA, 19 nt, Artificial Sequence
  Description of Artificial Sequence: Synthetic oligonucleotide
aagcggauagcaggcuugg

SEQ ID NO: 1422217 - RNA, 19 nt, Artificial Sequence
  Description of Artificial Sequence: Synthetic oligonucleotide
gcuaccaucccuguugagg

SEQ ID NO: 1422218 - RNA, 19 nt, Artificial Sequence
  Description of Artificial Sequence: Synthetic oligonucleotide
gacuucagcaaugcgucug

SEQ ID NO: 1422219 - RNA, 19 nt, Artificial Sequence
  Description of Artificial Sequence: Synthetic oligonucleotide
augcgucugaggccugugc

SEQ ID NO: 1422220 - RNA, 19 nt, Artificial Sequence
  Description of Artificial Sequence: Synthetic oligonucleotide
auaccggggugucugccgg

SEQ ID NO: 1422221 - RNA, 19 nt, Artificial Sequence
  Description of Artificial Sequence: Synthetic oligonucleotide
agcguuugacaaucacguc

SEQ ID NO: 1422222 - RNA, 19 nt, Artificial Sequence
  Description of Artificial Sequence: Synthetic oligonucleotide
gugauaccgggucagguca

SEQ ID NO: 1422223 - RNA, 19 nt, Artificial Sequence
  Description of Artificial Sequence: Synthetic oligonucleotide
ccuaaaagccccagcaagc

SEQ ID NO: 1422224 - RNA, 19 nt, Artificial Sequence
  Description of Artificial Sequence: Synthetic oligonucleotide
cauaccggggugucugccg

SEQ ID NO: 1422225 - RNA, 19 nt, Artificial Sequence
  Description of Artificial Sequence: Synthetic oligonucleotide
cagguuccggcaacgauug

SEQ ID NO: 1422226 - RNA, 19 nt, Artificial Sequence
  Description of Artificial Sequence: Synthetic oligonucleotide
gauguagggcccugcagga

SEQ ID NO: 1422227 - RNA, 19 nt, Artificial Sequence
  Description of Artificial Sequence: Synthetic oligonucleotide
auugucauaccgggguguc

SEQ ID NO: 1422228 - RNA, 19 nt, Artificial Sequence
  Description of Artificial Sequence: Synthetic oligonucleotide
ggagacgagccacucagag

SEQ ID NO: 1422229 - RNA, 19 nt, Artificial Sequence
  Description of Artificial Sequence: Synthetic oligonucleotide
uucaccacauccugaguua

SEQ ID NO: 1422230 - RNA, 19 nt, Artificial Sequence
  Description of Artificial Sequence: Synthetic oligonucleotide
gaagcggauagcaggcuug

SEQ ID NO: 1422231 - RNA, 19 nt, Artificial Sequence
  Description of Artificial Sequence: Synthetic oligonucleotide
cucuguucaccacauccug

SEQ ID NO: 1422232 - RNA, 19 nt, Artificial Sequence
  Description of Artificial Sequence: Synthetic oligonucleotide
gacagcuugcuaccauccc

SEQ ID NO: 1422233 - RNA, 19 nt, Artificial Sequence
  Description of Artificial Sequence: Synthetic oligonucleotide
cucccuaaaagccccagca

SEQ ID NO: 1422234 - RNA, 19 nt, Artificial Sequence
  Description of Artificial Sequence: Synthetic oligonucleotide
gcggauagcaggcuugggg

SEQ ID NO: 1422235 - RNA, 19 nt, Artificial Sequence
  Description of Artificial Sequence: Synthetic oligonucleotide
ugcagccuauugaauucug

SEQ ID NO: 1422236 - RNA, 19 nt, Artificial Sequence
  Description of Artificial Sequence: Synthetic oligonucleotide
aaccagcggcagcaaaaug

SEQ ID NO: 1422237 - RNA, 19 nt, Artificial Sequence
  Description of Artificial Sequence: Synthetic oligonucleotide
ucccuaaaagccccagcaa

SEQ ID NO: 1422238 - RNA, 19 nt, Artificial Sequence
  Description of Artificial Sequence: Synthetic oligonucleotide
ggggacucucgucaggugg

SEQ ID NO: 1422239 - RNA, 19 nt, Artificial Sequence
  Description of Artificial Sequence: Synthetic oligonucleotide
ugaauucugggaguuucuc

SEQ ID NO: 1422240 - RNA, 19 nt, Artificial Sequence
  Description of Artificial Sequence: Synthetic oligonucleotide
ggucuagcagggcugagug

SEQ ID NO: 1422241 - RNA, 19 nt, Artificial Sequence
  Description of Artificial Sequence: Synthetic oligonucleotide
uccaccuuuuccgagucaa

SEQ ID NO: 1422242 - RNA, 19 nt, Artificial Sequence
  Description of Artificial Sequence: Synthetic oligonucleotide
agaaagcaccuucuggauu

SEQ ID NO: 1422243 - RNA, 19 nt, Artificial Sequence
  Description of Artificial Sequence: Synthetic oligonucleotide
aaaccagcggcagcaaaau

SEQ ID NO: 1422244 - RNA, 19 nt, Artificial Sequence
  Description of Artificial Sequence: Synthetic oligonucleotide
acuguguuaucagcuccgg

SEQ ID NO: 1422245 - RNA, 19 nt, Artificial Sequence
  Description of Artificial Sequence: Synthetic oligonucleotide
ugucugccgguuccuuagg

SEQ ID NO: 1422246 - RNA, 19 nt, Artificial Sequence
  Description of Artificial Sequence: Synthetic oligonucleotide
ucuugcaguugauucccaa

SEQ ID NO: 1422247 - RNA, 19 nt, Artificial Sequence
  Description of Artificial Sequence: Synthetic oligonucleotide
ugaaggcggcugauguggc

SEQ ID NO: 1422248 - RNA, 19 nt, Artificial Sequence
  Description of Artificial Sequence: Synthetic oligonucleotide
ccuuuuccgagucaaugcc

SEQ ID NO: 1422249 - RNA, 19 nt, Artificial Sequence
  Description of Artificial Sequence: Synthetic oligonucleotide
uuuccgagucaaugcccag

SEQ ID NO: 1422250 - RNA, 19 nt, Artificial Sequence
  Description of Artificial Sequence: Synthetic oligonucleotide
aucacucuucaggauaacu

SEQ ID NO: 1422251 - RNA, 19 nt, Artificial Sequence
  Description of Artificial Sequence: Synthetic oligonucleotide
gcucugaucaguguccucc

SEQ ID NO: 1422252 - RNA, 19 nt, Artificial Sequence
  Description of Artificial Sequence: Synthetic oligonucleotide
ugcuuaccagccguugcag

SEQ ID NO: 1422253 - RNA, 19 nt, Artificial Sequence
  Description of Artificial Sequence: Synthetic oligonucleotide
ggagcaggugcuuagaggu

SEQ ID NO: 1422254 - RNA, 19 nt, Artificial Sequence
  Description of Artificial Sequence: Synthetic oligonucleotide
augugguggucauccacca

SEQ ID NO: 1422255 - RNA, 19 nt, Artificial Sequence
  Description of Artificial Sequence: Synthetic oligonucleotide
gaacagaaacagggauagg

SEQ ID NO: 1422256 - RNA, 19 nt, Artificial Sequence
  Description of Artificial Sequence: Synthetic oligonucleotide
cugugaucuauggacagca

SEQ ID NO: 1422257 - RNA, 19 nt, Artificial Sequence
  Description of Artificial Sequence: Synthetic oligonucleotide
ucugggucucauugcuuac

SEQ ID NO: 1422258 - RNA, 19 nt, Artificial Sequence
  Description of Artificial Sequence: Synthetic oligonucleotide
cuguguuaucagcuccggc

SEQ ID NO: 1422259 - RNA, 19 nt, Artificial Sequence
  Description of Artificial Sequence: Synthetic oligonucleotide
gaaggcggcugauguggcc

SEQ ID NO: 1422260 - RNA, 19 nt, Artificial Sequence
  Description of Artificial Sequence: Synthetic oligonucleotide
caccacauccugaguuagg

SEQ ID NO: 1422261 - RNA, 19 nt, Artificial Sequence
  Description of Artificial Sequence: Synthetic oligonucleotide
gugauuggauguagggccc

SEQ ID NO: 1422262 - RNA, 19 nt, Artificial Sequence
  Description of Artificial Sequence: Synthetic oligonucleotide
gacggggacucucgucagg

SEQ ID NO: 1422263 - RNA, 19 nt, Artificial Sequence
  Description of Artificial Sequence: Synthetic oligonucleotide
gaagcgcacucgcaccgug

SEQ ID NO: 1422264 - RNA, 19 nt, Artificial Sequence
  Description of Artificial Sequence: Synthetic oligonucleotide
aaugcgucugaggccugug

SEQ ID NO: 1422265 - RNA, 19 nt, Artificial Sequence
  Description of Artificial Sequence: Synthetic oligonucleotide
ccggcaacgauugucauac

SEQ ID NO: 1422266 - RNA, 19 nt, Artificial Sequence
  Description of Artificial Sequence: Synthetic oligonucleotide
guuccggcaacgauuguca

SEQ ID NO: 1422267 - RNA, 19 nt, Artificial Sequence
  Description of Artificial Sequence: Synthetic oligonucleotide
cauucggaggagcuucauc

SEQ ID NO: 1422268 - RNA, 19 nt, Artificial Sequence
  Description of Artificial Sequence: Synthetic oligonucleotide
ggugauaccgggucagguc

SEQ ID NO: 1422269 - RNA, 19 nt, Artificial Sequence
  Description of Artificial Sequence: Synthetic oligonucleotide
guccauaaguaggaguaca

SEQ ID NO: 1422270 - RNA, 19 nt, Artificial Sequence
  Description of Artificial Sequence: Synthetic oligonucleotide
acuggcgacuucaugcuga

SEQ ID NO: 1422271 - RNA, 19 nt, Artificial Sequence
  Description of Artificial Sequence: Synthetic oligonucleotide
auaccgggucaggucaaac

SEQ ID NO: 1422272 - RNA, 19 nt, Artificial Sequence
  Description of Artificial Sequence: Synthetic oligonucleotide
auguaguuguagagggcag

SEQ ID NO: 1422273 - RNA, 19 nt, Artificial Sequence
  Description of Artificial Sequence: Synthetic oligonucleotide
gugcuuagagguggagacg

SEQ ID NO: 1422274 - RNA, 19 nt, Artificial Sequence
  Description of Artificial Sequence: Synthetic oligonucleotide
cauugcuuaccagccguug

SEQ ID NO: 1422275 - RNA, 19 nt, Artificial Sequence
  Description of Artificial Sequence: Synthetic oligonucleotide
aagcgcacucgcaccgugg

SEQ ID NO: 1422276 - RNA, 19 nt, Artificial Sequence
  Description of Artificial Sequence: Synthetic oligonucleotide
cugggucucauugcuuacc

SEQ ID NO: 1422277 - RNA, 19 nt, Artificial Sequence
  Description of Artificial Sequence: Synthetic oligonucleotide
ucauugcuuaccagccguu

SEQ ID NO: 1422278 - RNA, 19 nt, Artificial Sequence
  Description of Artificial Sequence: Synthetic oligonucleotide
cagcaagcguuugacaauc

SEQ ID NO: 1422279 - RNA, 19 nt, Artificial Sequence
  Description of Artificial Sequence: Synthetic oligonucleotide
ugagggucauucggaggag

SEQ ID NO: 1422280 - RNA, 19 nt, Artificial Sequence
  Description of Artificial Sequence: Synthetic oligonucleotide
ucauaccggggugucugcc

SEQ ID NO: 1422281 - RNA, 19 nt, Artificial Sequence
  Description of Artificial Sequence: Synthetic oligonucleotide
caaggacaccaucaucuca

SEQ ID NO: 1422282 - RNA, 19 nt, Artificial Sequence
  Description of Artificial Sequence: Synthetic oligonucleotide
ugauaccgggucaggucaa

SEQ ID NO: 1422283 - RNA, 19 nt, Artificial Sequence
  Description of Artificial Sequence: Synthetic oligonucleotide
cacguccaccuuuuccgag

SEQ ID NO: 1422284 - RNA, 19 nt, Artificial Sequence
  Description of Artificial Sequence: Synthetic oligonucleotide
uggagacgagccacucaga

SEQ ID NO: 1422285 - RNA, 19 nt, Artificial Sequence
  Description of Artificial Sequence: Synthetic oligonucleotide
cagcugugaucuauggaca

SEQ ID NO: 1422286 - RNA, 19 nt, Artificial Sequence
  Description of Artificial Sequence: Synthetic oligonucleotide
ugauguucauguggugguc

SEQ ID NO: 1422287 - RNA, 19 nt, Artificial Sequence
  Description of Artificial Sequence: Synthetic oligonucleotide
gcuuaccagccguugcagg

SEQ ID NO: 1422288 - RNA, 19 nt, Artificial Sequence
  Description of Artificial Sequence: Synthetic oligonucleotide
uccggcaacgauugucaua

SEQ ID NO: 1422289 - RNA, 19 nt, Artificial Sequence
  Description of Artificial Sequence: Synthetic oligonucleotide
uauugaauucugggaguuu

SEQ ID NO: 1422290 - RNA, 19 nt, Artificial Sequence
  Description of Artificial Sequence: Synthetic oligonucleotide
cuuaccagccguugcaggu

SEQ ID NO: 1422291 - RNA, 19 nt, Artificial Sequence
  Description of Artificial Sequence: Synthetic oligonucleotide
ccaaaugccuccuuuacua

SEQ ID NO: 1422292 - RNA, 19 nt, Artificial Sequence
  Description of Artificial Sequence: Synthetic oligonucleotide
caccaacuggggucucugg

SEQ ID NO: 1422293 - RNA, 19 nt, Artificial Sequence
  Description of Artificial Sequence: Synthetic oligonucleotide
gcgacuucaugcugagucc

SEQ ID NO: 1422294 - RNA, 19 nt, Artificial Sequence
  Description of Artificial Sequence: Synthetic oligonucleotide
gagggucauucggaggagc

SEQ ID NO: 1422295 - RNA, 19 nt, Artificial Sequence
  Description of Artificial Sequence: Synthetic oligonucleotide
aaaccccgagccacaguug

SEQ ID NO: 1422296 - RNA, 19 nt, Artificial Sequence
  Description of Artificial Sequence: Synthetic oligonucleotide
gcagccuauugaauucugg

SEQ ID NO: 1422297 - RNA, 19 nt, Artificial Sequence
  Description of Artificial Sequence: Synthetic oligonucleotide
uggauucgcuccuguacuu

SEQ ID NO: 1422298 - RNA, 19 nt, Artificial Sequence
  Description of Artificial Sequence: Synthetic oligonucleotide
caggaugauucucuccaga

SEQ ID NO: 1422299 - RNA, 19 nt, Artificial Sequence
  Description of Artificial Sequence: Synthetic oligonucleotide
gcgaagcgcacucgcaccg

SEQ ID NO: 1422300 - RNA, 19 nt, Artificial Sequence
  Description of Artificial Sequence: Synthetic oligonucleotide
gaagcucccuuggugcuuc

SEQ ID NO: 1422301 - RNA, 19 nt, Artificial Sequence
  Description of Artificial Sequence: Synthetic oligonucleotide
cauauacaagguccuggaa

SEQ ID NO: 1422302 - RNA, 19 nt, Artificial Sequence
  Description of Artificial Sequence: Synthetic oligonucleotide
ggucauucggaggagcuuc

SEQ ID NO: 1422303 - RNA, 19 nt, Artificial Sequence
  Description of Artificial Sequence: Synthetic oligonucleotide
augauucucuccagauaug

SEQ ID NO: 1422304 - RNA, 19 nt, Artificial Sequence
  Description of Artificial Sequence: Synthetic oligonucleotide
cccaggugcaagaagccug

SEQ ID NO: 1422305 - RNA, 19 nt, Artificial Sequence
  Description of Artificial Sequence: Synthetic oligonucleotide
aucucccuaaaagccccag

SEQ ID NO: 1422306 - RNA, 19 nt, Artificial Sequence
  Description of Artificial Sequence: Synthetic oligonucleotide
accaccccgacggggacuc

SEQ ID NO: 1422307 - RNA, 19 nt, Artificial Sequence
  Description of Artificial Sequence: Synthetic oligonucleotide
gucauaccggggugucugc

SEQ ID NO: 1422308 - RNA, 19 nt, Artificial Sequence
  Description of Artificial Sequence: Synthetic oligonucleotide
cugcaggaccaccccgacg

SEQ ID NO: 1422309 - RNA, 19 nt, Artificial Sequence
  Description of Artificial Sequence: Synthetic oligonucleotide
gcccauuugguucucugca

SEQ ID NO: 1422310 - RNA, 19 nt, Artificial Sequence
  Description of Artificial Sequence: Synthetic oligonucleotide
cagccgcugugauuggaug

SEQ ID NO: 1422311 - RNA, 19 nt, Artificial Sequence
  Description of Artificial Sequence: Synthetic oligonucleotide
caauguuuucugcugcccu

SEQ ID NO: 1422312 - RNA, 19 nt, Artificial Sequence
  Description of Artificial Sequence: Synthetic oligonucleotide
agguggagacgagccacuc

SEQ ID NO: 1422313 - RNA, 19 nt, Artificial Sequence
  Description of Artificial Sequence: Synthetic oligonucleotide
cuuagacagcuugcuacca

SEQ ID NO: 1422314 - RNA, 19 nt, Artificial Sequence
  Description of Artificial Sequence: Synthetic oligonucleotide
gcaaauugagguggcugcc

SEQ ID NO: 1422315 - RNA, 19 nt, Artificial Sequence
  Description of Artificial Sequence: Synthetic oligonucleotide
gagcaggugcuuagaggug

SEQ ID NO: 1422316 - RNA, 19 nt, Artificial Sequence
  Description of Artificial Sequence: Synthetic oligonucleotide
gggagcgaagcgcacucgc

SEQ ID NO: 1422317 - RNA, 19 nt, Artificial Sequence
  Description of Artificial Sequence: Synthetic oligonucleotide
gguuccggcaacgauuguc

SEQ ID NO: 1422318 - RNA, 19 nt, Artificial Sequence
  Description of Artificial Sequence: Synthetic oligonucleotide
uugucauaccggggugucu

SEQ ID NO: 1422319 - RNA, 19 nt, Artificial Sequence
  Description of Artificial Sequence: Synthetic oligonucleotide
cauguccucaauguuuucu

SEQ ID NO: 1422320 - RNA, 19 nt, Artificial Sequence
  Description of Artificial Sequence: Synthetic oligonucleotide
cguuugacaaucacgucca

SEQ ID NO: 1422321 - RNA, 19 nt, Artificial Sequence
  Description of Artificial Sequence: Synthetic oligonucleotide
uccuugucuugcaguugau

SEQ ID NO: 1422322 - RNA, 19 nt, Artificial Sequence
  Description of Artificial Sequence: Synthetic oligonucleotide
caaaccccgagccacaguu

SEQ ID NO: 1422323 - RNA, 19 nt, Artificial Sequence
  Description of Artificial Sequence: Synthetic oligonucleotide
ggcgaguccauaaguagga

SEQ ID NO: 1422324 - RNA, 19 nt, Artificial Sequence
  Description of Artificial Sequence: Synthetic oligonucleotide
cagggcgaguccauaagua

SEQ ID NO: 1422325 - RNA, 19 nt, Artificial Sequence
  Description of Artificial Sequence: Synthetic oligonucleotide
aaugcccagcugugaucua

SEQ ID NO: 1422326 - RNA, 19 nt, Artificial Sequence
  Description of Artificial Sequence: Synthetic oligonucleotide
agcggauagcaggcuuggg

SEQ ID NO: 1422327 - RNA, 19 nt, Artificial Sequence
  Description of Artificial Sequence: Synthetic oligonucleotide
uccaccaacuggggucucu

SEQ ID NO: 1422328 - RNA, 19 nt, Artificial Sequence
  Description of Artificial Sequence: Synthetic oligonucleotide
ggcuucaggcagaaaacca

SEQ ID NO: 1422329 - RNA, 19 nt, Artificial Sequence
  Description of Artificial Sequence: Synthetic oligonucleotide
cacuggcgacuucaugcug

SEQ ID NO: 1422330 - RNA, 19 nt, Artificial Sequence
  Description of Artificial Sequence: Synthetic oligonucleotide
uuccggcaacgauugucau

SEQ ID NO: 1422331 - RNA, 19 nt, Artificial Sequence
  Description of Artificial Sequence: Synthetic oligonucleotide
gcugugaucuauggacagc

SEQ ID NO: 1422332 - RNA, 19 nt, Artificial Sequence
  Description of Artificial Sequence: Synthetic oligonucleotide
acucgcaccguggccccgg

SEQ ID NO: 1422333 - RNA, 19 nt, Artificial Sequence
  Description of Artificial Sequence: Synthetic oligonucleotide
ugccagccgcugugauugg

SEQ ID NO: 1422334 - RNA, 19 nt, Artificial Sequence
  Description of Artificial Sequence: Synthetic oligonucleotide
ugaagcucccuuggugcuu

SEQ ID NO: 1422335 - RNA, 19 nt, Artificial Sequence
  Description of Artificial Sequence: Synthetic oligonucleotide
ggcuaggugguaggugggg

SEQ ID NO: 1422336 - RNA, 19 nt, Artificial Sequence
  Description of Artificial Sequence: Synthetic oligonucleotide
gcggaagcggauagcaggc

SEQ ID NO: 1422337 - RNA, 19 nt, Artificial Sequence
  Description of Artificial Sequence: Synthetic oligonucleotide
agccacucagagccccgca

SEQ ID NO: 1422338 - RNA, 19 nt, Artificial Sequence
  Description of Artificial Sequence: Synthetic oligonucleotide
uugguaccagucggcucug

SEQ ID NO: 1422339 - RNA, 19 nt, Artificial Sequence
  Description of Artificial Sequence: Synthetic oligonucleotide
auucgcuccuguacuuccu

SEQ ID NO: 1422340 - RNA, 19 nt, Artificial Sequence
  Description of Artificial Sequence: Synthetic oligonucleotide
ccacucagagccccgcagc

SEQ ID NO: 1422341 - RNA, 19 nt, Artificial Sequence
  Description of Artificial Sequence: Synthetic oligonucleotide
ucauucggaggagcuucau

SEQ ID NO: 1422342 - RNA, 19 nt, Artificial Sequence
  Description of Artificial Sequence: Synthetic oligonucleotide
accccgacggggacucucg

SEQ ID NO: 1422343 - RNA, 19 nt, Artificial Sequence
  Description of Artificial Sequence: Synthetic oligonucleotide
cagccauauacaagguccu

SEQ ID NO: 1422344 - RNA, 19 nt, Artificial Sequence
  Description of Artificial Sequence: Synthetic oligonucleotide
gguggagacgagccacuca

SEQ ID NO: 1422345 - RNA, 19 nt, Artificial Sequence
  Description of Artificial Sequence: Synthetic oligonucleotide
aggcggaagcggauagcag

SEQ ID NO: 1422346 - RNA, 19 nt, Artificial Sequence
  Description of Artificial Sequence: Synthetic oligonucleotide
gaucucccuaaaagcccca

SEQ ID NO: 1422347 - RNA, 19 nt, Artificial Sequence
  Description of Artificial Sequence: Synthetic oligonucleotide
ccugugcauacagugccag

SEQ ID NO: 1422348 - RNA, 19 nt, Artificial Sequence
  Description of Artificial Sequence: Synthetic oligonucleotide
cuauugaauucugggaguu

SEQ ID NO: 1422349 - RNA, 19 nt, Artificial Sequence
  Description of Artificial Sequence: Synthetic oligonucleotide
caggugcuuagagguggag

SEQ ID NO: 1422350 - RNA, 19 nt, Artificial Sequence
  Description of Artificial Sequence: Synthetic oligonucleotide
gucauucggaggagcuuca

SEQ ID NO: 1422351 - RNA, 19 nt, Artificial Sequence
  Description of Artificial Sequence: Synthetic oligonucleotide
cagcggcagcaaaaugcuc

SEQ ID NO: 1422352 - RNA, 19 nt, Artificial Sequence
  Description of Artificial Sequence: Synthetic oligonucleotide
ggcuaccugugccuggcuc

SEQ ID NO: 1422353 - RNA, 19 nt, Artificial Sequence
  Description of Artificial Sequence: Synthetic oligonucleotide
cagccgcuguggugaacag

SEQ ID NO: 1422354 - RNA, 19 nt, Artificial Sequence
  Description of Artificial Sequence: Synthetic oligonucleotide
gauaccgggucaggucaaa

SEQ ID NO: 1422355 - RNA, 19 nt, Artificial Sequence
  Description of Artificial Sequence: Synthetic oligonucleotide
ccgacggggacucucguca

SEQ ID NO: 1422356 - RNA, 19 nt, Artificial Sequence
  Description of Artificial Sequence: Synthetic oligonucleotide
caaaaugcuccaggaaaau

SEQ ID NO: 1422357 - RNA, 19 nt, Artificial Sequence
  Description of Artificial Sequence: Synthetic oligonucleotide
ggauucgcuccuguacuuc

SEQ ID NO: 1422358 - RNA, 19 nt, Artificial Sequence
  Description of Artificial Sequence: Synthetic oligonucleotide
ccagaacauccuugucuug

SEQ ID NO: 1422359 - RNA, 19 nt, Artificial Sequence
  Description of Artificial Sequence: Synthetic oligonucleotide
ccuugguaccagucggcuc

SEQ ID NO: 1422360 - RNA, 19 nt, Artificial Sequence
  Description of Artificial Sequence: Synthetic oligonucleotide
gagccccgcagcacauggc

SEQ ID NO: 1422361 - RNA, 19 nt, Artificial Sequence
  Description of Artificial Sequence: Synthetic oligonucleotide
ccauuugguucucugcaaa

SEQ ID NO: 1422362 - RNA, 19 nt, Artificial Sequence
  Description of Artificial Sequence: Synthetic oligonucleotide
cgcacucgcaccguggccc

SEQ ID NO: 1422363 - RNA, 19 nt, Artificial Sequence
  Description of Artificial Sequence: Synthetic oligonucleotide
cucgcaccguggccccggg

SEQ ID NO: 1422364 - RNA, 19 nt, Artificial Sequence
  Description of Artificial Sequence: Synthetic oligonucleotide
gcuaggugguaggugggga

SEQ ID NO: 1422365 - RNA, 19 nt, Artificial Sequence
  Description of Artificial Sequence: Synthetic oligonucleotide
agguuccggcaacgauugu

SEQ ID NO: 1422366 - RNA, 19 nt, Artificial Sequence
  Description of Artificial Sequence: Synthetic oligonucleotide
gcccaaggacaccaucauc

SEQ ID NO: 1422367 - RNA, 19 nt, Artificial Sequence
  Description of Artificial Sequence: Synthetic oligonucleotide
cucagguuccggcaacgau

SEQ ID NO: 1422368 - RNA, 19 nt, Artificial Sequence
  Description of Artificial Sequence: Synthetic oligonucleotide
ggagcgaagcgcacucgca

SEQ ID NO: 1422369 - RNA, 19 nt, Artificial Sequence
  Description of Artificial Sequence: Synthetic oligonucleotide
ucgcaccguggccccggga

SEQ ID NO: 1422370 - RNA, 19 nt, Artificial Sequence
  Description of Artificial Sequence: Synthetic oligonucleotide
gcagggcgaguccauaagu

SEQ ID NO: 1422371 - RNA, 19 nt, Artificial Sequence
  Description of Artificial Sequence: Synthetic oligonucleotide
ggaugccugcccacuccag

SEQ ID NO: 1422372 - RNA, 19 nt, Artificial Sequence
  Description of Artificial Sequence: Synthetic oligonucleotide
uggcgacuucaugcugagu

SEQ ID NO: 1422373 - RNA, 19 nt, Artificial Sequence
  Description of Artificial Sequence: Synthetic oligonucleotide
cggggugucugccgguucc

SEQ ID NO: 1422374 - RNA, 19 nt, Artificial Sequence
  Description of Artificial Sequence: Synthetic oligonucleotide
ggaagcggauagcaggcuu

SEQ ID NO: 1422375 - RNA, 19 nt, Artificial Sequence
  Description of Artificial Sequence: Synthetic oligonucleotide
cuccaggaaaauguccuuu

SEQ ID NO: 1422376 - RNA, 19 nt, Artificial Sequence
  Description of Artificial Sequence: Synthetic oligonucleotide
caccccgacggggacucuc

SEQ ID NO: 1422377 - RNA, 19 nt, Artificial Sequence
  Description of Artificial Sequence: Synthetic oligonucleotide
gcccuugguaccagucggc

SEQ ID NO: 1422378 - RNA, 19 nt, Artificial Sequence
  Description of Artificial Sequence: Synthetic oligonucleotide
cauccugaguuagguucaa

SEQ ID NO: 1422379 - RNA, 19 nt, Artificial Sequence
  Description of Artificial Sequence: Synthetic oligonucleotide
ccauaaguaggaguacacu

SEQ ID NO: 1422380 - RNA, 19 nt, Artificial Sequence
  Description of Artificial Sequence: Synthetic oligonucleotide
cgagccacucagagccccg

SEQ ID NO: 1422381 - RNA, 19 nt, Artificial Sequence
  Description of Artificial Sequence: Synthetic oligonucleotide
ccaccaacuggggucucug

SEQ ID NO: 1422382 - RNA, 19 nt, Artificial Sequence
  Description of Artificial Sequence: Synthetic oligonucleotide
cacucgcaccguggccccg

SEQ ID NO: 1422383 - RNA, 19 nt, Artificial Sequence
  Description of Artificial Sequence: Synthetic oligonucleotide
gguaccagucggcucugau

SEQ ID NO: 1422384 - RNA, 19 nt, Artificial Sequence
  Description of Artificial Sequence: Synthetic oligonucleotide
gcgcacucgcaccguggcc

SEQ ID NO: 1422385 - RNA, 19 nt, Artificial Sequence
  Description of Artificial Sequence: Synthetic oligonucleotide
accccgagccacaguuggu

SEQ ID NO: 1422386 - RNA, 19 nt, Artificial Sequence
  Description of Artificial Sequence: Synthetic oligonucleotide
cucgucaggugggaugccu

SEQ ID NO: 1422387 - RNA, 19 nt, Artificial Sequence
  Description of Artificial Sequence: Synthetic oligonucleotide
ccucuuagacagcuugcua

SEQ ID NO: 1422388 - RNA, 19 nt, Artificial Sequence
  Description of Artificial Sequence: Synthetic oligonucleotide
cucuccagauaugcugggu

SEQ ID NO: 1422389 - RNA, 19 nt, Artificial Sequence
  Description of Artificial Sequence: Synthetic oligonucleotide
guccagccauauacaaggu

SEQ ID NO: 1422390 - RNA, 19 nt, Artificial Sequence
  Description of Artificial Sequence: Synthetic oligonucleotide
cacaggcuaggugguaggu

SEQ ID NO: 1422391 - RNA, 19 nt, Artificial Sequence
  Description of Artificial Sequence: Synthetic oligonucleotide
gcaccguggccccgggauc

SEQ ID NO: 1422392 - RNA, 19 nt, Artificial Sequence
  Description of Artificial Sequence: Synthetic oligonucleotide
ccagcaagcguuugacaau

SEQ ID NO: 1422393 - RNA, 19 nt, Artificial Sequence
  Description of Artificial Sequence: Synthetic oligonucleotide
cgacggggacucucgucag

SEQ ID NO: 1422394 - RNA, 19 nt, Artificial Sequence
  Description of Artificial Sequence: Synthetic oligonucleotide
caaugcgucugaggccugu

SEQ ID NO: 1422395 - RNA, 19 nt, Artificial Sequence
  Description of Artificial Sequence: Synthetic oligonucleotide
gccccgcagcacauggcug

SEQ ID NO: 1422396 - RNA, 19 nt, Artificial Sequence
  Description of Artificial Sequence: Synthetic oligonucleotide
gaccaccccgacggggacu

SEQ ID NO: 1422397 - RNA, 19 nt, Artificial Sequence
  Description of Artificial Sequence: Synthetic oligonucleotide
ccgggucaggucaaacugu

SEQ ID NO: 1422398 - RNA, 19 nt, Artificial Sequence
  Description of Artificial Sequence: Synthetic oligonucleotide
gcaguccggaggccaccca

SEQ ID NO: 1422399 - RNA, 19 nt, Artificial Sequence
  Description of Artificial Sequence: Synthetic oligonucleotide
gcaaugcgucugaggccug

SEQ ID NO: 1422400 - RNA, 19 nt, Artificial Sequence
  Description of Artificial Sequence: Synthetic oligonucleotide
cuccaccaacuggggucuc

SEQ ID NO: 1422401 - RNA, 19 nt, Artificial Sequence
  Description of Artificial Sequence: Synthetic oligonucleotide
gcuugcuaccaucccuguu

SEQ ID NO: 1422402 - RNA, 19 nt, Artificial Sequence
  Description of Artificial Sequence: Synthetic oligonucleotide
gcaaaccccgagccacagu

SEQ ID NO: 1422403 - RNA, 19 nt, Artificial Sequence
  Description of Artificial Sequence: Synthetic oligonucleotide
guacuuccuuugggcccaa

SEQ ID NO: 1422404 - RNA, 19 nt, Artificial Sequence
  Description of Artificial Sequence: Synthetic oligonucleotide
ccguugcaggugcagccua

SEQ ID NO: 1422405 - RNA, 19 nt, Artificial Sequence
  Description of Artificial Sequence: Synthetic oligonucleotide
cccuugguaccagucggcu

SEQ ID NO: 1422406 - RNA, 19 nt, Artificial Sequence
  Description of Artificial Sequence: Synthetic oligonucleotide
ccucagaaugaagcucccu

SEQ ID NO: 1422407 - RNA, 19 nt, Artificial Sequence
  Description of Artificial Sequence: Synthetic oligonucleotide
ccgcuguggugaacagaaa

SEQ ID NO: 1422408 - RNA, 19 nt, Artificial Sequence
  Description of Artificial Sequence: Synthetic oligonucleotide
cugucgcagcaggaugauu

SEQ ID NO: 1422409 - RNA, 19 nt, Artificial Sequence
  Description of Artificial Sequence: Synthetic oligonucleotide
cgcaccguggccccgggau

SEQ ID NO: 1422410 - RNA, 19 nt, Artificial Sequence
  Description of Artificial Sequence: Synthetic oligonucleotide
gggcuaccugugccuggcu

SEQ ID NO: 1422411 - RNA, 19 nt, Artificial Sequence
  Description of Artificial Sequence: Synthetic oligonucleotide
cguugcaggugcagccuau

SEQ ID NO: 1422412 - RNA, 19 nt, Artificial Sequence
  Description of Artificial Sequence: Synthetic oligonucleotide
ccugucgcagcaggaugau

SEQ ID NO: 1422413 - RNA, 19 nt, Artificial Sequence
  Description of Artificial Sequence: Synthetic oligonucleotide
gcuguccacugagggucau

SEQ ID NO: 1422414 - RNA, 19 nt, Artificial Sequence
  Description of Artificial Sequence: Synthetic oligonucleotide
cgaagcgcacucgcaccgu

SEQ ID NO: 1422415 - RNA, 19 nt, Artificial Sequence
  Description of Artificial Sequence: Synthetic oligonucleotide
ccccgacggggacucucgu

SEQ ID NO: 1422416 - RNA, 19 nt, Artificial Sequence
  Description of Artificial Sequence: Synthetic oligonucleotide
ccaccccgacggggacucu

SEQ ID NO: 1422417 - RNA, 19 nt, Artificial Sequence
  Description of Artificial Sequence: Synthetic oligonucleotide
aauucggaggcuucgucuc

SEQ ID NO: 1422418 - RNA, 19 nt, Artificial Sequence
  Description of Artificial Sequence: Synthetic oligonucleotide
uucgggaggacaaucgacg

SEQ ID NO: 1422419 - RNA, 19 nt, Artificial Sequence
  Description of Artificial Sequence: Synthetic oligonucleotide
uggugcaucaucgaaaugc

SEQ ID NO: 1422420 - RNA, 19 nt, Artificial Sequence
  Description of Artificial Sequence: Synthetic oligonucleotide
aaacucguggaaaagcgcg

SEQ ID NO: 1422421 - RNA, 19 nt, Artificial Sequence
  Description of Artificial Sequence: Synthetic oligonucleotide
ucgaugaccgggauggacg

SEQ ID NO: 1422422 - RNA, 19 nt, Artificial Sequence
  Description of Artificial Sequence: Synthetic oligonucleotide
aaauucggaggcuucgucu

SEQ ID NO: 1422423 - RNA, 19 nt, Artificial Sequence
  Description of Artificial Sequence: Synthetic oligonucleotide
cuguuuacgcgcaugggcg

SEQ ID NO: 1422424 - RNA, 19 nt, Artificial Sequence
  Description of Artificial Sequence: Synthetic oligonucleotide
uaugcuguagucacggcgu

SEQ ID NO: 1422425 - RNA, 19 nt, Artificial Sequence
  Description of Artificial Sequence: Synthetic oligonucleotide
aaguaaggacuggagaguc

SEQ ID NO: 1422426 - RNA, 19 nt, Artificial Sequence
  Description of Artificial Sequence: Synthetic oligonucleotide
aucaucgaaaugcgggucg

SEQ ID NO: 1422427 - RNA, 19 nt, Artificial Sequence
  Description of Artificial Sequence: Synthetic oligonucleotide
cuaugcuguagucacggcg

SEQ ID NO: 1422428 - RNA, 19 nt, Artificial Sequence
  Description of Artificial Sequence: Synthetic oligonucleotide
aguggugccgcguuagggg

SEQ ID NO: 1422429 - RNA, 19 nt, Artificial Sequence
  Description of Artificial Sequence: Synthetic oligonucleotide
aggggaaccucuugugucc

SEQ ID NO: 1422430 - RNA, 19 nt, Artificial Sequence
  Description of Artificial Sequence: Synthetic oligonucleotide
aucaaguaaggacuggaga

SEQ ID NO: 1422431 - RNA, 19 nt, Artificial Sequence
  Description of Artificial Sequence: Synthetic oligonucleotide
ugugguccgaugcaguggc

SEQ ID NO: 1422432 - RNA, 19 nt, Artificial Sequence
  Description of Artificial Sequence: Synthetic oligonucleotide
ucgucuaugcuguagucac

SEQ ID NO: 1422433 - RNA, 19 nt, Artificial Sequence
  Description of Artificial Sequence: Synthetic oligonucleotide
ugugcugccggccucuuug

SEQ ID NO: 1422434 - RNA, 19 nt, Artificial Sequence
  Description of Artificial Sequence: Synthetic oligonucleotide
aggacaaucgacgcugucg

SEQ ID NO: 1422435 - RNA, 19 nt, Artificial Sequence
  Description of Artificial Sequence: Synthetic oligonucleotide
guaaggacuggagagucgg

SEQ ID NO: 1422436 - RNA, 19 nt, Artificial Sequence
  Description of Artificial Sequence: Synthetic oligonucleotide
uggagcgggaaauucggag

SEQ ID NO: 1422437 - RNA, 19 nt, Artificial Sequence
  Description of Artificial Sequence: Synthetic oligonucleotide
cuuguguccagacucgaug

SEQ ID NO: 1422438 - RNA, 19 nt, Artificial Sequence
  Description of Artificial Sequence: Synthetic oligonucleotide
uguacugaaugaaguccgc

SEQ ID NO: 1422439 - RNA, 19 nt, Artificial Sequence
  Description of Artificial Sequence: Synthetic oligonucleotide
aagcgcguccgucuucucg

SEQ ID NO: 1422440 - RNA, 19 nt, Artificial Sequence
  Description of Artificial Sequence: Synthetic oligonucleotide
gaugcaguggccgcguggg

SEQ ID NO: 1422441 - RNA, 19 nt, Artificial Sequence
  Description of Artificial Sequence: Synthetic oligonucleotide
agcacgaaggcuccacagg

SEQ ID NO: 1422442 - RNA, 19 nt, Artificial Sequence
  Description of Artificial Sequence: Synthetic oligonucleotide
uccgucuucucgucuaugc

SEQ ID NO: 1422443 - RNA, 19 nt, Artificial Sequence
  Description of Artificial Sequence: Synthetic oligonucleotide
cugaaugaaguccgcagug

SEQ ID NO: 1422444 - RNA, 19 nt, Artificial Sequence
  Description of Artificial Sequence: Synthetic oligonucleotide
gaggcuugagcugucgccg

SEQ ID NO: 1422445 - RNA, 19 nt, Artificial Sequence
  Description of Artificial Sequence: Synthetic oligonucleotide
aucgaaaugcgggucgugg

SEQ ID NO: 1422446 - RNA, 19 nt, Artificial Sequence
  Description of Artificial Sequence: Synthetic oligonucleotide
aaguggugccgcguuaggg

SEQ ID NO: 1422447 - RNA, 19 nt, Artificial Sequence
  Description of Artificial Sequence: Synthetic oligonucleotide
gaagagucucucgucgagg

SEQ ID NO: 1422448 - RNA, 19 nt, Artificial Sequence
  Description of Artificial Sequence: Synthetic oligonucleotide
gaaacucguggaaaagcgc

SEQ ID NO: 1422449 - RNA, 19 nt, Artificial Sequence
  Description of Artificial Sequence: Synthetic oligonucleotide
gagcgggaaauucggaggc

SEQ ID NO: 1422450 - RNA, 19 nt, Artificial Sequence
  Description of Artificial Sequence: Synthetic oligonucleotide
ugcguggccaggcucgcgg

SEQ ID NO: 1422451 - RNA, 19 nt, Artificial Sequence
  Description of Artificial Sequence: Synthetic oligonucleotide
cuucaccguccuuaggccg

SEQ ID NO: 1422452 - RNA, 19 nt, Artificial Sequence
  Description of Artificial Sequence: Synthetic oligonucleotide
ucguggaaaagcgcguccg

SEQ ID NO: 1422453 - RNA, 19 nt, Artificial Sequence
  Description of Artificial Sequence: Synthetic oligonucleotide
ucgagggaagcacgaaggc

SEQ ID NO: 1422454 - RNA, 19 nt, Artificial Sequence
  Description of Artificial Sequence: Synthetic oligonucleotide
cacauaccaccagagaagc

SEQ ID NO: 1422455 - RNA, 19 nt, Artificial Sequence
  Description of Artificial Sequence: Synthetic oligonucleotide
gguaacacugccacgugcg

SEQ ID NO: 1422456 - RNA, 19 nt, Artificial Sequence
  Description of Artificial Sequence: Synthetic oligonucleotide
ggagcgggaaauucggagg

SEQ ID NO: 1422457 - RNA, 19 nt, Artificial Sequence
  Description of Artificial Sequence: Synthetic oligonucleotide
ucgaaaugcgggucguggc

SEQ ID NO: 1422458 - RNA, 19 nt, Artificial Sequence
  Description of Artificial Sequence: Synthetic oligonucleotide
gacguccugcucuugcugc

SEQ ID NO: 1422459 - RNA, 19 nt, Artificial Sequence
  Description of Artificial Sequence: Synthetic oligonucleotide
cuagccugccgagaggugg

SEQ ID NO: 1422460 - RNA, 19 nt, Artificial Sequence
  Description of Artificial Sequence: Synthetic oligonucleotide
uaggggaaccucuuguguc

SEQ ID NO: 1422461 - RNA, 19 nt, Artificial Sequence
  Description of Artificial Sequence: Synthetic oligonucleotide
acgcgcaugggcgugaggg

SEQ ID NO: 1422462 - RNA, 19 nt, Artificial Sequence
  Description of Artificial Sequence: Synthetic oligonucleotide
gaaauucggaggcuucguc

SEQ ID NO: 1422463 - RNA, 19 nt, Artificial Sequence
  Description of Artificial Sequence: Synthetic oligonucleotide
ucgacacacagcccagagc

SEQ ID NO: 1422464 - RNA, 19 nt, Artificial Sequence
  Description of Artificial Sequence: Synthetic oligonucleotide
aacuaccgcuuccgcugcc

SEQ ID NO: 1422465 - RNA, 19 nt, Artificial Sequence
  Description of Artificial Sequence: Synthetic oligonucleotide
ucgaugcucgcauacccac

SEQ ID NO: 1422466 - RNA, 19 nt, Artificial Sequence
  Description of Artificial Sequence: Synthetic oligonucleotide
auggcguggugcaucaucg

SEQ ID NO: 1422467 - RNA, 19 nt, Artificial Sequence
  Description of Artificial Sequence: Synthetic oligonucleotide
ggacaaucgacgcugucgc

SEQ ID NO: 1422468 - RNA, 19 nt, Artificial Sequence
  Description of Artificial Sequence: Synthetic oligonucleotide
uccaucaaguaaggacugg

SEQ ID NO: 1422469 - RNA, 19 nt, Artificial Sequence
  Description of Artificial Sequence: Synthetic oligonucleotide
gcaacuaccgcuuccgcug

SEQ ID NO: 1422470 - RNA, 19 nt, Artificial Sequence
  Description of Artificial Sequence: Synthetic oligonucleotide
cuucgggaggacaaucgac

SEQ ID NO: 1422471 - RNA, 19 nt, Artificial Sequence
  Description of Artificial Sequence: Synthetic oligonucleotide
acggagucgcggucguucc

SEQ ID NO: 1422472 - RNA, 19 nt, Artificial Sequence
  Description of Artificial Sequence: Synthetic oligonucleotide
cugugcaugcucgacgucc

SEQ ID NO: 1422473 - RNA, 19 nt, Artificial Sequence
  Description of Artificial Sequence: Synthetic oligonucleotide
ucgggaggacaaucgacgc

SEQ ID NO: 1422474 - RNA, 19 nt, Artificial Sequence
  Description of Artificial Sequence: Synthetic oligonucleotide
ugcgcuggcaauguacuga

SEQ ID NO: 1422475 - RNA, 19 nt, Artificial Sequence
  Description of Artificial Sequence: Synthetic oligonucleotide
ugugcaugcucgacguccu

SEQ ID NO: 1422476 - RNA, 19 nt, Artificial Sequence
  Description of Artificial Sequence: Synthetic oligonucleotide
cuuaggccggcagagcagg

SEQ ID NO: 1422477 - RNA, 19 nt, Artificial Sequence
  Description of Artificial Sequence: Synthetic oligonucleotide
guugggacugggcugugug

SEQ ID NO: 1422478 - RNA, 19 nt, Artificial Sequence
  Description of Artificial Sequence: Synthetic oligonucleotide
aggcgggucgaguucacag

SEQ ID NO: 1422479 - RNA, 19 nt, Artificial Sequence
  Description of Artificial Sequence: Synthetic oligonucleotide
ggugcaucaucgaaaugcg

SEQ ID NO: 1422480 - RNA, 19 nt, Artificial Sequence
  Description of Artificial Sequence: Synthetic oligonucleotide
acaaucgacgcugucgcca

SEQ ID NO: 1422481 - RNA, 19 nt, Artificial Sequence
  Description of Artificial Sequence: Synthetic oligonucleotide
uggcgcagaaacucgugga

SEQ ID NO: 1422482 - RNA, 19 nt, Artificial Sequence
  Description of Artificial Sequence: Synthetic oligonucleotide
acgguagcugcacugugca

SEQ ID NO: 1422483 - RNA, 19 nt, Artificial Sequence
  Description of Artificial Sequence: Synthetic oligonucleotide
aucgacgcugucgccacgc

SEQ ID NO: 1422484 - RNA, 19 nt, Artificial Sequence
  Description of Artificial Sequence: Synthetic oligonucleotide
agacggggcgcgaagaguc

SEQ ID NO: 1422485 - RNA, 19 nt, Artificial Sequence
  Description of Artificial Sequence: Synthetic oligonucleotide
uguuuacgcgcaugggcgu

SEQ ID NO: 1422486 - RNA, 19 nt, Artificial Sequence
  Description of Artificial Sequence: Synthetic oligonucleotide
ucgccacgccgcaagggcg

SEQ ID NO: 1422487 - RNA, 19 nt, Artificial Sequence
  Description of Artificial Sequence: Synthetic oligonucleotide
acaugcacggcaacccugg

SEQ ID NO: 1422488 - RNA, 19 nt, Artificial Sequence
  Description of Artificial Sequence: Synthetic oligonucleotide
ucuaugcuguagucacggc

SEQ ID NO: 1422489 - RNA, 19 nt, Artificial Sequence
  Description of Artificial Sequence: Synthetic oligonucleotide
aaaugcgggucguggcgca

SEQ ID NO: 1422490 - RNA, 19 nt, Artificial Sequence
  Description of Artificial Sequence: Synthetic oligonucleotide
aaucgacgcugucgccacg

SEQ ID NO: 1422491 - RNA, 19 nt, Artificial Sequence
  Description of Artificial Sequence: Synthetic oligonucleotide
ucacgguagcugcacugug

SEQ ID NO: 1422492 - RNA, 19 nt, Artificial Sequence
  Description of Artificial Sequence: Synthetic oligonucleotide
cucgacacacagcccagag

SEQ ID NO: 1422493 - RNA, 19 nt, Artificial Sequence
  Description of Artificial Sequence: Synthetic oligonucleotide
ugcgcaguugggacugggc

SEQ ID NO: 1422494 - RNA, 19 nt, Artificial Sequence
  Description of Artificial Sequence: Synthetic oligonucleotide
acucguggaaaagcgcguc

SEQ ID NO: 1422495 - RNA, 19 nt, Artificial Sequence
  Description of Artificial Sequence: Synthetic oligonucleotide
aggccaccgaaucgccugc

SEQ ID NO: 1422496 - RNA, 19 nt, Artificial Sequence
  Description of Artificial Sequence: Synthetic oligonucleotide
cucguggaaaagcgcgucc

SEQ ID NO: 1422497 - RNA, 19 nt, Artificial Sequence
  Description of Artificial Sequence: Synthetic oligonucleotide
cucgacguccugcucuugc

SEQ ID NO: 1422498 - RNA, 19 nt, Artificial Sequence
  Description of Artificial Sequence: Synthetic oligonucleotide
ugcucgcauacccacuguc

SEQ ID NO: 1422499 - RNA, 19 nt, Artificial Sequence
  Description of Artificial Sequence: Synthetic oligonucleotide
cucggcugccucuagccug

SEQ ID NO: 1422500 - RNA, 19 nt, Artificial Sequence
  Description of Artificial Sequence: Synthetic oligonucleotide
accgaaucgccugcgcugg

SEQ ID NO: 1422501 - RNA, 19 nt, Artificial Sequence
  Description of Artificial Sequence: Synthetic oligonucleotide
agcgcguccgucuucucgu

SEQ ID NO: 1422502 - RNA, 19 nt, Artificial Sequence
  Description of Artificial Sequence: Synthetic oligonucleotide
ugaaaguggugccgcguua

SEQ ID NO: 1422503 - RNA, 19 nt, Artificial Sequence
  Description of Artificial Sequence: Synthetic oligonucleotide
ugggaaggcgggugcuacg

SEQ ID NO: 1422504 - RNA, 19 nt, Artificial Sequence
  Description of Artificial Sequence: Synthetic oligonucleotide
caaucgacgcugucgccac

SEQ ID NO: 1422505 - RNA, 19 nt, Artificial Sequence
  Description of Artificial Sequence: Synthetic oligonucleotide
gucgccgcugcguacggag

SEQ ID NO: 1422506 - RNA, 19 nt, Artificial Sequence
  Description of Artificial Sequence: Synthetic oligonucleotide
acguccugcucuugcugcg

SEQ ID NO: 1422507 - RNA, 19 nt, Artificial Sequence
  Description of Artificial Sequence: Synthetic oligonucleotide
gaagcacgaaggcuccaca

SEQ ID NO: 1422508 - RNA, 19 nt, Artificial Sequence
  Description of Artificial Sequence: Synthetic oligonucleotide
aacucguggaaaagcgcgu

SEQ ID NO: 1422509 - RNA, 19 nt, Artificial Sequence
  Description of Artificial Sequence: Synthetic oligonucleotide
gacaaucgacgcugucgcc

SEQ ID NO: 1422510 - RNA, 19 nt, Artificial Sequence
  Description of Artificial Sequence: Synthetic oligonucleotide
gucgccacgccgcaagggc

SEQ ID NO: 1422511 - RNA, 19 nt, Artificial Sequence
  Description of Artificial Sequence: Synthetic oligonucleotide
uugcugccacuguuuacgc

SEQ ID NO: 1422512 - RNA, 19 nt, Artificial Sequence
  Description of Artificial Sequence: Synthetic oligonucleotide
uuagaggcugggugccaug

SEQ ID NO: 1422513 - RNA, 19 nt, Artificial Sequence
  Description of Artificial Sequence: Synthetic oligonucleotide
gcacugugcaugcucgacg

SEQ ID NO: 1422514 - RNA, 19 nt, Artificial Sequence
  Description of Artificial Sequence: Synthetic oligonucleotide
aaagcgcguccgucuucuc

SEQ ID NO: 1422515 - RNA, 19 nt, Artificial Sequence
  Description of Artificial Sequence: Synthetic oligonucleotide
cucgcauacccacugucca

SEQ ID NO: 1422516 - RNA, 19 nt, Artificial Sequence
  Description of Artificial Sequence: Synthetic oligonucleotide
gggaaauucggaggcuucg

SEQ ID NO: 1422517 - RNA, 19 nt, Artificial Sequence
  Description of Artificial Sequence: Synthetic oligonucleotide
augaccgggauggacgugu

SEQ ID NO: 1422518 - RNA, 19 nt, Artificial Sequence
  Description of Artificial Sequence: Synthetic oligonucleotide
gguucggcagugcacggcc

SEQ ID NO: 1422519 - RNA, 19 nt, Artificial Sequence
  Description of Artificial Sequence: Synthetic oligonucleotide
ucucgucgaggcuggcugc

SEQ ID NO: 1422520 - RNA, 19 nt, Artificial Sequence
  Description of Artificial Sequence: Synthetic oligonucleotide
gucguggcgcagaaacucg

SEQ ID NO: 1422521 - RNA, 19 nt, Artificial Sequence
  Description of Artificial Sequence: Synthetic oligonucleotide
gaagugcccgagguaacac

SEQ ID NO: 1422522 - RNA, 19 nt, Artificial Sequence
  Description of Artificial Sequence: Synthetic oligonucleotide
ucgacguccugcucuugcu

SEQ ID NO: 1422523 - RNA, 19 nt, Artificial Sequence
  Description of Artificial Sequence: Synthetic oligonucleotide
ugucgccacgccgcaaggg

SEQ ID NO: 1422524 - RNA, 19 nt, Artificial Sequence
  Description of Artificial Sequence: Synthetic oligonucleotide
acugugcaugcucgacguc

SEQ ID NO: 1422525 - RNA, 19 nt, Artificial Sequence
  Description of Artificial Sequence: Synthetic oligonucleotide
uuuagaggcugggugccau

SEQ ID NO: 1422526 - RNA, 19 nt, Artificial Sequence
  Description of Artificial Sequence: Synthetic oligonucleotide
uacggagucgcggucguuc

SEQ ID NO: 1422527 - RNA, 19 nt, Artificial Sequence
  Description of Artificial Sequence: Synthetic oligonucleotide
ucguggcgcagaaacucgu

SEQ ID NO: 1422528 - RNA, 19 nt, Artificial Sequence
  Description of Artificial Sequence: Synthetic oligonucleotide
accgggauggacgugucgu

SEQ ID NO: 1422529 - RNA, 19 nt, Artificial Sequence
  Description of Artificial Sequence: Synthetic oligonucleotide
ucaucgaaaugcgggucgu

SEQ ID NO: 1422530 - RNA, 19 nt, Artificial Sequence
  Description of Artificial Sequence: Synthetic oligonucleotide
gaccgggauggacgugucg

SEQ ID NO: 1422531 - RNA, 19 nt, Artificial Sequence
  Description of Artificial Sequence: Synthetic oligonucleotide
gcuggagcgggaaauucgg

SEQ ID NO: 1422532 - RNA, 19 nt, Artificial Sequence
  Description of Artificial Sequence: Synthetic oligonucleotide
gguccaucaaguaaggacu

SEQ ID NO: 1422533 - RNA, 19 nt, Artificial Sequence
  Description of Artificial Sequence: Synthetic oligonucleotide
uuuaggccgggcugugguc

SEQ ID NO: 1422534 - RNA, 19 nt, Artificial Sequence
  Description of Artificial Sequence: Synthetic oligonucleotide
gaaaagcgcguccgucuuc

SEQ ID NO: 1422535 - RNA, 19 nt, Artificial Sequence
  Description of Artificial Sequence: Synthetic oligonucleotide
guccaucaaguaaggacug

SEQ ID NO: 1422536 - RNA, 19 nt, Artificial Sequence
  Description of Artificial Sequence: Synthetic oligonucleotide
gcugccgagaggcgggucg

SEQ ID NO: 1422537 - RNA, 19 nt, Artificial Sequence
  Description of Artificial Sequence: Synthetic oligonucleotide
gggaaggccaccgaaucgc

SEQ ID NO: 1422538 - RNA, 19 nt, Artificial Sequence
  Description of Artificial Sequence: Synthetic oligonucleotide
uucggaggcuucgucuccc

SEQ ID NO: 1422539 - RNA, 19 nt, Artificial Sequence
  Description of Artificial Sequence: Synthetic oligonucleotide
gcucgagggaagcacgaag

SEQ ID NO: 1422540 - RNA, 19 nt, Artificial Sequence
  Description of Artificial Sequence: Synthetic oligonucleotide
cugccacgugcgcaguugg

SEQ ID NO: 1422541 - RNA, 19 nt, Artificial Sequence
  Description of Artificial Sequence: Synthetic oligonucleotide
caacuaccgcuuccgcugc

SEQ ID NO: 1422542 - RNA, 19 nt, Artificial Sequence
  Description of Artificial Sequence: Synthetic oligonucleotide
cucagggagacggggcgcg

SEQ ID NO: 1422543 - RNA, 19 nt, Artificial Sequence
  Description of Artificial Sequence: Synthetic oligonucleotide
uuuacgcgcaugggcguga

SEQ ID NO: 1422544 - RNA, 19 nt, Artificial Sequence
  Description of Artificial Sequence: Synthetic oligonucleotide
cuccacaggucacgguagc

SEQ ID NO: 1422545 - RNA, 19 nt, Artificial Sequence
  Description of Artificial Sequence: Synthetic oligonucleotide
agggagacggggcgcgaag

SEQ ID NO: 1422546 - RNA, 19 nt, Artificial Sequence
  Description of Artificial Sequence: Synthetic oligonucleotide
ggagcucgagggaagcacg

SEQ ID NO: 1422547 - RNA, 19 nt, Artificial Sequence
  Description of Artificial Sequence: Synthetic oligonucleotide
aggcucgcgggcugcgugg

SEQ ID NO: 1422548 - RNA, 19 nt, Artificial Sequence
  Description of Artificial Sequence: Synthetic oligonucleotide
accguccuuaggccggcag

SEQ ID NO: 1422549 - RNA, 19 nt, Artificial Sequence
  Description of Artificial Sequence: Synthetic oligonucleotide
cccgagguaacacugccac

SEQ ID NO: 1422550 - RNA, 19 nt, Artificial Sequence
  Description of Artificial Sequence: Synthetic oligonucleotide
ucgaguucacagagcuuua

SEQ ID NO: 1422551 - RNA, 19 nt, Artificial Sequence
  Description of Artificial Sequence: Synthetic oligonucleotide
agcugucgccgcugcguac

SEQ ID NO: 1422552 - RNA, 19 nt, Artificial Sequence
  Description of Artificial Sequence: Synthetic oligonucleotide
agucucucgucgaggcugg

SEQ ID NO: 1422553 - RNA, 19 nt, Artificial Sequence
  Description of Artificial Sequence: Synthetic oligonucleotide
aaucgccugcgcuggcaau

SEQ ID NO: 1422554 - RNA, 19 nt, Artificial Sequence
  Description of Artificial Sequence: Synthetic oligonucleotide
guacugaaugaaguccgca

SEQ ID NO: 1422555 - RNA, 19 nt, Artificial Sequence
  Description of Artificial Sequence: Synthetic oligonucleotide
ucgcggucguucccgcugc

SEQ ID NO: 1422556 - RNA, 19 nt, Artificial Sequence
  Description of Artificial Sequence: Synthetic oligonucleotide
cucgucuaugcuguaguca

SEQ ID NO: 1422557 - RNA, 19 nt, Artificial Sequence
  Description of Artificial Sequence: Synthetic oligonucleotide
acugccacgugcgcaguug

SEQ ID NO: 1422558 - RNA, 19 nt, Artificial Sequence
  Description of Artificial Sequence: Synthetic oligonucleotide
agcaccggggaugaggcaa

SEQ ID NO: 1422559 - RNA, 19 nt, Artificial Sequence
  Description of Artificial Sequence: Synthetic oligonucleotide
ucgcauacccacuguccau

SEQ ID NO: 1422560 - RNA, 19 nt, Artificial Sequence
  Description of Artificial Sequence: Synthetic oligonucleotide
cacgaaggcuccacagguc

SEQ ID NO: 1422561 - RNA, 19 nt, Artificial Sequence
  Description of Artificial Sequence: Synthetic oligonucleotide
aaugcgggucguggcgcag

SEQ ID NO: 1422562 - RNA, 19 nt, Artificial Sequence
  Description of Artificial Sequence: Synthetic oligonucleotide
cucgaugcucgcauaccca

SEQ ID NO: 1422563 - RNA, 19 nt, Artificial Sequence
  Description of Artificial Sequence: Synthetic oligonucleotide
gugguucggcagugcacgg

SEQ ID NO: 1422564 - RNA, 19 nt, Artificial Sequence
  Description of Artificial Sequence: Synthetic oligonucleotide
augggcgugagggugcgcu

SEQ ID NO: 1422565 - RNA, 19 nt, Artificial Sequence
  Description of Artificial Sequence: Synthetic oligonucleotide
aucgccugcgcuggcaaug

SEQ ID NO: 1422566 - RNA, 19 nt, Artificial Sequence
  Description of Artificial Sequence: Synthetic oligonucleotide
ucgucucccgcgccgcggc

SEQ ID NO: 1422567 - RNA, 19 nt, Artificial Sequence
  Description of Artificial Sequence: Synthetic oligonucleotide
cccacauaccaccagagaa

SEQ ID NO: 1422568 - RNA, 19 nt, Artificial Sequence
  Description of Artificial Sequence: Synthetic oligonucleotide
gaaucgccugcgcuggcaa

SEQ ID NO: 1422569 - RNA, 19 nt, Artificial Sequence
  Description of Artificial Sequence: Synthetic oligonucleotide
ggagucgcggucguucccg

SEQ ID NO: 1422570 - RNA, 19 nt, Artificial Sequence
  Description of Artificial Sequence: Synthetic oligonucleotide
acggcaacccuggguuccc

SEQ ID NO: 1422571 - RNA, 19 nt, Artificial Sequence
  Description of Artificial Sequence: Synthetic oligonucleotide
gcugucgccacgccgcaag

SEQ ID NO: 1422572 - RNA, 19 nt, Artificial Sequence
  Description of Artificial Sequence: Synthetic oligonucleotide
ccgcgugggagcucgaggg

SEQ ID NO: 1422573 - RNA, 19 nt, Artificial Sequence
  Description of Artificial Sequence: Synthetic oligonucleotide
gcugcguacggagucgcgg

SEQ ID NO: 1422574 - RNA, 19 nt, Artificial Sequence
  Description of Artificial Sequence: Synthetic oligonucleotide
ugguucggcagugcacggc

SEQ ID NO: 1422575 - RNA, 19 nt, Artificial Sequence
  Description of Artificial Sequence: Synthetic oligonucleotide
guuuacgcgcaugggcgug

SEQ ID NO: 1422576 - RNA, 19 nt, Artificial Sequence
  Description of Artificial Sequence: Synthetic oligonucleotide
gcaauguacugaaugaagu

SEQ ID NO: 1422577 - RNA, 19 nt, Artificial Sequence
  Description of Artificial Sequence: Synthetic oligonucleotide
gcaagggcgcacgagcggg

SEQ ID NO: 1422578 - RNA, 19 nt, Artificial Sequence
  Description of Artificial Sequence: Synthetic oligonucleotide
gccgcaagggcgcacgagc

SEQ ID NO: 1422579 - RNA, 19 nt, Artificial Sequence
  Description of Artificial Sequence: Synthetic oligonucleotide
ggagacggggcgcgaagag

SEQ ID NO: 1422580 - RNA, 19 nt, Artificial Sequence
  Description of Artificial Sequence: Synthetic oligonucleotide
ugcguacggagucgcgguc

SEQ ID NO: 1422581 - RNA, 19 nt, Artificial Sequence
  Description of Artificial Sequence: Synthetic oligonucleotide
agggcgcacgagcgggacg

SEQ ID NO: 1422582 - RNA, 19 nt, Artificial Sequence
  Description of Artificial Sequence: Synthetic oligonucleotide
acgugcgcaguugggacug

SEQ ID NO: 1422583 - RNA, 19 nt, Artificial Sequence
  Description of Artificial Sequence: Synthetic oligonucleotide
gcugcgacccgcgaagugc

SEQ ID NO: 1422584 - RNA, 19 nt, Artificial Sequence
  Description of Artificial Sequence: Synthetic oligonucleotide
ucgacgcugucgccacgcc

SEQ ID NO: 1422585 - RNA, 19 nt, Artificial Sequence
  Description of Artificial Sequence: Synthetic oligonucleotide
ggucguggcgcagaaacuc

SEQ ID NO: 1422586 - RNA, 19 nt, Artificial Sequence
  Description of Artificial Sequence: Synthetic oligonucleotide
uggcguggugcaucaucga

SEQ ID NO: 1422587 - RNA, 19 nt, Artificial Sequence
  Description of Artificial Sequence: Synthetic oligonucleotide
gggucgaguucacagagcu

SEQ ID NO: 1422588 - RNA, 19 nt, Artificial Sequence
  Description of Artificial Sequence: Synthetic oligonucleotide
ggaugaggcaacaggcuca

SEQ ID NO: 1422589 - RNA, 19 nt, Artificial Sequence
  Description of Artificial Sequence: Synthetic oligonucleotide
gguccgaugcaguggccgc

SEQ ID NO: 1422590 - RNA, 19 nt, Artificial Sequence
  Description of Artificial Sequence: Synthetic oligonucleotide
gcugucgccgcugcguacg

SEQ ID NO: 1422591 - RNA, 19 nt, Artificial Sequence
  Description of Artificial Sequence: Synthetic oligonucleotide
cugcgcuggcaauguacug

SEQ ID NO: 1422592 - RNA, 19 nt, Artificial Sequence
  Description of Artificial Sequence: Synthetic oligonucleotide
acccgcgaagugcccgagg

SEQ ID NO: 1422593 - RNA, 19 nt, Artificial Sequence
  Description of Artificial Sequence: Synthetic oligonucleotide
cacgccgcaagggcgcacg

SEQ ID NO: 1422594 - RNA, 19 nt, Artificial Sequence
  Description of Artificial Sequence: Synthetic oligonucleotide
gagcgggacgcgaccaccc

SEQ ID NO: 1422595 - RNA, 19 nt, Artificial Sequence
  Description of Artificial Sequence: Synthetic oligonucleotide
ggggucgcugugcugccgg

SEQ ID NO: 1422596 - RNA, 19 nt, Artificial Sequence
  Description of Artificial Sequence: Synthetic oligonucleotide
uuacgcgcaugggcgugag

SEQ ID NO: 1422597 - RNA, 19 nt, Artificial Sequence
  Description of Artificial Sequence: Synthetic oligonucleotide
cuucgucucccgcgccgcg

SEQ ID NO: 1422598 - RNA, 19 nt, Artificial Sequence
  Description of Artificial Sequence: Synthetic oligonucleotide
cugucgccacgccgcaagg

SEQ ID NO: 1422599 - RNA, 19 nt, Artificial Sequence
  Description of Artificial Sequence: Synthetic oligonucleotide
ggcaacccuggguuccccg

SEQ ID NO: 1422600 - RNA, 19 nt, Artificial Sequence
  Description of Artificial Sequence: Synthetic oligonucleotide
cuuuaggccgggcuguggu

SEQ ID NO: 1422601 - RNA, 19 nt, Artificial Sequence
  Description of Artificial Sequence: Synthetic oligonucleotide
cacugugcaugcucgacgu

SEQ ID NO: 1422602 - RNA, 19 nt, Artificial Sequence
  Description of Artificial Sequence: Synthetic oligonucleotide
gagucgcggucguucccgc

SEQ ID NO: 1422603 - RNA, 19 nt, Artificial Sequence
  Description of Artificial Sequence: Synthetic oligonucleotide
gaugaccgggauggacgug

SEQ ID NO: 1422604 - RNA, 19 nt, Artificial Sequence
  Description of Artificial Sequence: Synthetic oligonucleotide
ugcgacccgcgaagugccc

SEQ ID NO: 1422605 - RNA, 19 nt, Artificial Sequence
  Description of Artificial Sequence: Synthetic oligonucleotide
gccgcugcgacccgcgaag

SEQ ID NO: 1422606 - RNA, 19 nt, Artificial Sequence
  Description of Artificial Sequence: Synthetic oligonucleotide
cucgucgaggcuggcugcc

SEQ ID NO: 1422607 - RNA, 19 nt, Artificial Sequence
  Description of Artificial Sequence: Synthetic oligonucleotide
gugcgcgauggcguggugc

SEQ ID NO: 1422608 - RNA, 19 nt, Artificial Sequence
  Description of Artificial Sequence: Synthetic oligonucleotide
ggagucucggggcuugcuc

SEQ ID NO: 1422609 - RNA, 19 nt, Artificial Sequence
  Description of Artificial Sequence: Synthetic oligonucleotide
uggugccgcguuaggggaa

SEQ ID NO: 1422610 - RNA, 19 nt, Artificial Sequence
  Description of Artificial Sequence: Synthetic oligonucleotide
ugaccgggauggacguguc

SEQ ID NO: 1422611 - RNA, 19 nt, Artificial Sequence
  Description of Artificial Sequence: Synthetic oligonucleotide
cacagagcuuuaggccggg

SEQ ID NO: 1422612 - RNA, 19 nt, Artificial Sequence
  Description of Artificial Sequence: Synthetic oligonucleotide
cgggucguggcgcagaaac

SEQ ID NO: 1422613 - RNA, 19 nt, Artificial Sequence
  Description of Artificial Sequence: Synthetic oligonucleotide
gcaguggccgcgugggagc

SEQ ID NO: 1422614 - RNA, 19 nt, Artificial Sequence
  Description of Artificial Sequence: Synthetic oligonucleotide
acggggcgcgaagagucuc

SEQ ID NO: 1422615 - RNA, 19 nt, Artificial Sequence
  Description of Artificial Sequence: Synthetic oligonucleotide
caucgaaaugcgggucgug

SEQ ID NO: 1422616 - RNA, 19 nt, Artificial Sequence
  Description of Artificial Sequence: Synthetic oligonucleotide
caugcucgacguccugcuc

SEQ ID NO: 1422617 - RNA, 19 nt, Artificial Sequence
  Description of Artificial Sequence: Synthetic oligonucleotide
ggaagcacgaaggcuccac

SEQ ID NO: 1422618 - RNA, 19 nt, Artificial Sequence
  Description of Artificial Sequence: Synthetic oligonucleotide
gcaacccuggguuccccgc

SEQ ID NO: 1422619 - RNA, 19 nt, Artificial Sequence
  Description of Artificial Sequence: Synthetic oligonucleotide
ccgcaagggcgcacgagcg

SEQ ID NO: 1422620 - RNA, 19 nt, Artificial Sequence
  Description of Artificial Sequence: Synthetic oligonucleotide
ggcgcagaaacucguggaa

SEQ ID NO: 1422621 - RNA, 19 nt, Artificial Sequence
  Description of Artificial Sequence: Synthetic oligonucleotide
gccgcgugggagcucgagg

SEQ ID NO: 1422622 - RNA, 19 nt, Artificial Sequence
  Description of Artificial Sequence: Synthetic oligonucleotide
cacgcgugcgccgccgggg

SEQ ID NO: 1422623 - RNA, 19 nt, Artificial Sequence
  Description of Artificial Sequence: Synthetic oligonucleotide
gagcucgagggaagcacga

SEQ ID NO: 1422624 - RNA, 19 nt, Artificial Sequence
  Description of Artificial Sequence: Synthetic oligonucleotide
ucgugcgcgauggcguggu

SEQ ID NO: 1422625 - RNA, 19 nt, Artificial Sequence
  Description of Artificial Sequence: Synthetic oligonucleotide
gggagcucgagggaagcac

SEQ ID NO: 1422626 - RNA, 19 nt, Artificial Sequence
  Description of Artificial Sequence: Synthetic oligonucleotide
agcgggaaauucggaggcu

SEQ ID NO: 1422627 - RNA, 19 nt, Artificial Sequence
  Description of Artificial Sequence: Synthetic oligonucleotide
ugccgcguuaggggaaccu

SEQ ID NO: 1422628 - RNA, 19 nt, Artificial Sequence
  Description of Artificial Sequence: Synthetic oligonucleotide
ccacgugcgcaguugggac

SEQ ID NO: 1422629 - RNA, 19 nt, Artificial Sequence
  Description of Artificial Sequence: Synthetic oligonucleotide
cuggagcgggaaauucgga

SEQ ID NO: 1422630 - RNA, 19 nt, Artificial Sequence
  Description of Artificial Sequence: Synthetic oligonucleotide
gcguacggagucgcggucg

SEQ ID NO: 1422631 - RNA, 19 nt, Artificial Sequence
  Description of Artificial Sequence: Synthetic oligonucleotide
gccggggucgcugugcugc

SEQ ID NO: 1422632 - RNA, 19 nt, Artificial Sequence
  Description of Artificial Sequence: Synthetic oligonucleotide
cugucgccgcugcguacgg

SEQ ID NO: 1422633 - RNA, 19 nt, Artificial Sequence
  Description of Artificial Sequence: Synthetic oligonucleotide
ccgagguaacacugccacg

SEQ ID NO: 1422634 - RNA, 19 nt, Artificial Sequence
  Description of Artificial Sequence: Synthetic oligonucleotide
cugcgcaugcucgggcccc

SEQ ID NO: 1422635 - RNA, 19 nt, Artificial Sequence
  Description of Artificial Sequence: Synthetic oligonucleotide
ucgccugcgcuggcaaugu

SEQ ID NO: 1422636 - RNA, 19 nt, Artificial Sequence
  Description of Artificial Sequence: Synthetic oligonucleotide
gggcgcgaagagucucucg

SEQ ID NO: 1422637 - RNA, 19 nt, Artificial Sequence
  Description of Artificial Sequence: Synthetic oligonucleotide
agaggcgggucgaguucac

SEQ ID NO: 1422638 - RNA, 19 nt, Artificial Sequence
  Description of Artificial Sequence: Synthetic oligonucleotide
gugcgcaguugggacuggg

SEQ ID NO: 1422639 - RNA, 19 nt, Artificial Sequence
  Description of Artificial Sequence: Synthetic oligonucleotide
ggccucgcgcccugggagg

SEQ ID NO: 1422640 - RNA, 19 nt, Artificial Sequence
  Description of Artificial Sequence: Synthetic oligonucleotide
ggcguggugcaucaucgaa

SEQ ID NO: 1422641 - RNA, 19 nt, Artificial Sequence
  Description of Artificial Sequence: Synthetic oligonucleotide
ggcgggucgaguucacaga

SEQ ID NO: 1422642 - RNA, 19 nt, Artificial Sequence
  Description of Artificial Sequence: Synthetic oligonucleotide
agucgcggucguucccgcu

SEQ ID NO: 1422643 - RNA, 19 nt, Artificial Sequence
  Description of Artificial Sequence: Synthetic oligonucleotide
ggcaacuaccgcuuccgcu

SEQ ID NO: 1422644 - RNA, 19 nt, Artificial Sequence
  Description of Artificial Sequence: Synthetic oligonucleotide
cucgugcgcgauggcgugg

SEQ ID NO: 1422645 - RNA, 19 nt, Artificial Sequence
  Description of Artificial Sequence: Synthetic oligonucleotide
gagcugucgccgcugcgua

SEQ ID NO: 1422646 - RNA, 19 nt, Artificial Sequence
  Description of Artificial Sequence: Synthetic oligonucleotide
gcguuaggggaaccucuug

SEQ ID NO: 1422647 - RNA, 19 nt, Artificial Sequence
  Description of Artificial Sequence: Synthetic oligonucleotide
ugggcgugagggugcgcuc

SEQ ID NO: 1422648 - RNA, 19 nt, Artificial Sequence
  Description of Artificial Sequence: Synthetic oligonucleotide
cucuagccugccgagaggu

SEQ ID NO: 1422649 - RNA, 19 nt, Artificial Sequence
  Description of Artificial Sequence: Synthetic oligonucleotide
cgucuaugcuguagucacg

SEQ ID NO: 1422650 - RNA, 19 nt, Artificial Sequence
  Description of Artificial Sequence: Synthetic oligonucleotide
acccuggguuccccgcugu

SEQ ID NO: 1422651 - RNA, 19 nt, Artificial Sequence
  Description of Artificial Sequence: Synthetic oligonucleotide
gugcaugcucgacguccug

SEQ ID NO: 1422652 - RNA, 19 nt, Artificial Sequence
  Description of Artificial Sequence: Synthetic oligonucleotide
gcugcgcaugcucgggccc

SEQ ID NO: 1422653 - RNA, 19 nt, Artificial Sequence
  Description of Artificial Sequence: Synthetic oligonucleotide
ucgucgaggcuggcugcca

SEQ ID NO: 1422654 - RNA, 19 nt, Artificial Sequence
  Description of Artificial Sequence: Synthetic oligonucleotide
ugccgagaggcgggucgag

SEQ ID NO: 1422655 - RNA, 19 nt, Artificial Sequence
  Description of Artificial Sequence: Synthetic oligonucleotide
gucacgguagcugcacugu

SEQ ID NO: 1422656 - RNA, 19 nt, Artificial Sequence
  Description of Artificial Sequence: Synthetic oligonucleotide
ucagggagacggggcgcga

SEQ ID NO: 1422657 - RNA, 19 nt, Artificial Sequence
  Description of Artificial Sequence: Synthetic oligonucleotide
gucgcugugcugccggccu

SEQ ID NO: 1422658 - RNA, 19 nt, Artificial Sequence
  Description of Artificial Sequence: Synthetic oligonucleotide
agcucgagggaagcacgaa

SEQ ID NO: 1422659 - RNA, 19 nt, Artificial Sequence
  Description of Artificial Sequence: Synthetic oligonucleotide
guccgucuucucgucuaug

SEQ ID NO: 1422660 - RNA, 19 nt, Artificial Sequence
  Description of Artificial Sequence: Synthetic oligonucleotide
gcccucgaugcucgcauac

SEQ ID NO: 1422661 - RNA, 19 nt, Artificial Sequence
  Description of Artificial Sequence: Synthetic oligonucleotide
gcucgugcgcgauggcgug

SEQ ID NO: 1422662 - RNA, 19 nt, Artificial Sequence
  Description of Artificial Sequence: Synthetic oligonucleotide
gacccgcgaagugcccgag

SEQ ID NO: 1422663 - RNA, 19 nt, Artificial Sequence
  Description of Artificial Sequence: Synthetic oligonucleotide
gcgcucgugcgcgauggcg

SEQ ID NO: 1422664 - RNA, 19 nt, Artificial Sequence
  Description of Artificial Sequence: Synthetic oligonucleotide
gggcaacuaccgcuuccgc

SEQ ID NO: 1422665 - RNA, 19 nt, Artificial Sequence
  Description of Artificial Sequence: Synthetic oligonucleotide
cugcguacggagucgcggu

SEQ ID NO: 1422666 - RNA, 19 nt, Artificial Sequence
  Description of Artificial Sequence: Synthetic oligonucleotide
cugaaaguggugccgcguu

SEQ ID NO: 1422667 - RNA, 19 nt, Artificial Sequence
  Description of Artificial Sequence: Synthetic oligonucleotide
gccugcgcuggcaauguac

SEQ ID NO: 1422668 - RNA, 19 nt, Artificial Sequence
  Description of Artificial Sequence: Synthetic oligonucleotide
gccgcugcguacggagucg

SEQ ID NO: 1422669 - RNA, 19 nt, Artificial Sequence
  Description of Artificial Sequence: Synthetic oligonucleotide
gaucagcaccggggaugag

SEQ ID NO: 1422670 - RNA, 19 nt, Artificial Sequence
  Description of Artificial Sequence: Synthetic oligonucleotide
ccgccccggagccugaggc

SEQ ID NO: 1422671 - RNA, 19 nt, Artificial Sequence
  Description of Artificial Sequence: Synthetic oligonucleotide
gagacggggcgcgaagagu

SEQ ID NO: 1422672 - RNA, 19 nt, Artificial Sequence
  Description of Artificial Sequence: Synthetic oligonucleotide
ugcgcaugcucgggcccca

SEQ ID NO: 1422673 - RNA, 19 nt, Artificial Sequence
  Description of Artificial Sequence: Synthetic oligonucleotide
acgcugucgccacgccgca

SEQ ID NO: 1422674 - RNA, 19 nt, Artificial Sequence
  Description of Artificial Sequence: Synthetic oligonucleotide
gcgacccgcgaagugcccg

SEQ ID NO: 1422675 - RNA, 19 nt, Artificial Sequence
  Description of Artificial Sequence: Synthetic oligonucleotide
ugucgccgcugcguacgga

SEQ ID NO: 1422676 - RNA, 19 nt, Artificial Sequence
  Description of Artificial Sequence: Synthetic oligonucleotide
gcacgagcgggacgcgacc

SEQ ID NO: 1422677 - RNA, 19 nt, Artificial Sequence
  Description of Artificial Sequence: Synthetic oligonucleotide
gcgcuggcaauguacugaa

SEQ ID NO: 1422678 - RNA, 19 nt, Artificial Sequence
  Description of Artificial Sequence: Synthetic oligonucleotide
cgugggagcucgagggaag

SEQ ID NO: 1422679 - RNA, 19 nt, Artificial Sequence
  Description of Artificial Sequence: Synthetic oligonucleotide
ccgugguucggcagugcac

SEQ ID NO: 1422680 - RNA, 19 nt, Artificial Sequence
  Description of Artificial Sequence: Synthetic oligonucleotide
cgggacgcgaccaccccgg

SEQ ID NO: 1422681 - RNA, 19 nt, Artificial Sequence
  Description of Artificial Sequence: Synthetic oligonucleotide
gccccggcgggcucgacac

SEQ ID NO: 1422682 - RNA, 19 nt, Artificial Sequence
  Description of Artificial Sequence: Synthetic oligonucleotide
gcgcaguugggacugggcu

SEQ ID NO: 1422683 - RNA, 19 nt, Artificial Sequence
  Description of Artificial Sequence: Synthetic oligonucleotide
gaggcgggucgaguucaca

SEQ ID NO: 1422684 - RNA, 19 nt, Artificial Sequence
  Description of Artificial Sequence: Synthetic oligonucleotide
ggaaauucggaggcuucgu

SEQ ID NO: 1422685 - RNA, 19 nt, Artificial Sequence
  Description of Artificial Sequence: Synthetic oligonucleotide
ccgcugaaaguggugccgc

SEQ ID NO: 1422686 - RNA, 19 nt, Artificial Sequence
  Description of Artificial Sequence: Synthetic oligonucleotide
cacgugcgcaguugggacu

SEQ ID NO: 1422687 - RNA, 19 nt, Artificial Sequence
  Description of Artificial Sequence: Synthetic oligonucleotide
gcguggugcaucaucgaaa

SEQ ID NO: 1422688 - RNA, 19 nt, Artificial Sequence
  Description of Artificial Sequence: Synthetic oligonucleotide
ggugccgcguuaggggaac

SEQ ID NO: 1422689 - RNA, 19 nt, Artificial Sequence
  Description of Artificial Sequence: Synthetic oligonucleotide
cacgagcgggacgcgacca

SEQ ID NO: 1422690 - RNA, 19 nt, Artificial Sequence
  Description of Artificial Sequence: Synthetic oligonucleotide
gugcuacgccgccgccccg

SEQ ID NO: 1422691 - RNA, 19 nt, Artificial Sequence
  Description of Artificial Sequence: Synthetic oligonucleotide
ggggcguggccacgcgugc

SEQ ID NO: 1422692 - RNA, 19 nt, Artificial Sequence
  Description of Artificial Sequence: Synthetic oligonucleotide
cuacgccgccgccccggag

SEQ ID NO: 1422693 - RNA, 19 nt, Artificial Sequence
  Description of Artificial Sequence: Synthetic oligonucleotide
cugcguggccaggcucgcg

SEQ ID NO: 1422694 - RNA, 19 nt, Artificial Sequence
  Description of Artificial Sequence: Synthetic oligonucleotide
gggacgcgaccaccccggg

SEQ ID NO: 1422695 - RNA, 19 nt, Artificial Sequence
  Description of Artificial Sequence: Synthetic oligonucleotide
acgccgcaagggcgcacga

SEQ ID NO: 1422696 - RNA, 19 nt, Artificial Sequence
  Description of Artificial Sequence: Synthetic oligonucleotide
cgggauggacgugucgucc

SEQ ID NO: 1422697 - RNA, 19 nt, Artificial Sequence
  Description of Artificial Sequence: Synthetic oligonucleotide
cgagguaacacugccacgu

SEQ ID NO: 1422698 - RNA, 19 nt, Artificial Sequence
  Description of Artificial Sequence: Synthetic oligonucleotide
ccugcgcuggcaauguacu

SEQ ID NO: 1422699 - RNA, 19 nt, Artificial Sequence
  Description of Artificial Sequence: Synthetic oligonucleotide
gcgcagaaacucguggaaa

SEQ ID NO: 1422700 - RNA, 19 nt, Artificial Sequence
  Description of Artificial Sequence: Synthetic oligonucleotide
ggcgggugcuacgccgccg

SEQ ID NO: 1422701 - RNA, 19 nt, Artificial Sequence
  Description of Artificial Sequence: Synthetic oligonucleotide
cugcauccucccugcagcu

SEQ ID NO: 1422702 - RNA, 19 nt, Artificial Sequence
  Description of Artificial Sequence: Synthetic oligonucleotide
ccgcagcggccccacauac

SEQ ID NO: 1422703 - RNA, 19 nt, Artificial Sequence
  Description of Artificial Sequence: Synthetic oligonucleotide
ccgggauggacgugucguc

SEQ ID NO: 1422704 - RNA, 19 nt, Artificial Sequence
  Description of Artificial Sequence: Synthetic oligonucleotide
gcgccgcggcccucgaugc

SEQ ID NO: 1422705 - RNA, 19 nt, Artificial Sequence
  Description of Artificial Sequence: Synthetic oligonucleotide
ccgggcuguggucagggga

SEQ ID NO: 1422706 - RNA, 19 nt, Artificial Sequence
  Description of Artificial Sequence: Synthetic oligonucleotide
gccgcguuaggggaaccuc

SEQ ID NO: 1422707 - RNA, 19 nt, Artificial Sequence
  Description of Artificial Sequence: Synthetic oligonucleotide
cgcacgagcgggacgcgac

SEQ ID NO: 1422708 - RNA, 19 nt, Artificial Sequence
  Description of Artificial Sequence: Synthetic oligonucleotide
gccgggcuguggucagggg

SEQ ID NO: 1422709 - RNA, 19 nt, Artificial Sequence
  Description of Artificial Sequence: Synthetic oligonucleotide
cugccgggcuccuccucga

SEQ ID NO: 1422710 - RNA, 19 nt, Artificial Sequence
  Description of Artificial Sequence: Synthetic oligonucleotide
cgacguccugcucuugcug

SEQ ID NO: 1422711 - RNA, 19 nt, Artificial Sequence
  Description of Artificial Sequence: Synthetic oligonucleotide
cggggcuugcuccucccgc

SEQ ID NO: 1422712 - RNA, 19 nt, Artificial Sequence
  Description of Artificial Sequence: Synthetic oligonucleotide
cagcgacgaucagcaccgg

SEQ ID NO: 1422713 - RNA, 19 nt, Artificial Sequence
  Description of Artificial Sequence: Synthetic oligonucleotide
cacggccuucgggaggaca

SEQ ID NO: 1422714 - RNA, 19 nt, Artificial Sequence
  Description of Artificial Sequence: Synthetic oligonucleotide
gcacggcaacccuggguuc

SEQ ID NO: 1422715 - RNA, 19 nt, Artificial Sequence
  Description of Artificial Sequence: Synthetic oligonucleotide
cagcgccccggcgggcucg

SEQ ID NO: 1422716 - RNA, 19 nt, Artificial Sequence
  Description of Artificial Sequence: Synthetic oligonucleotide
gcgaagugcccgagguaac

SEQ ID NO: 1422717 - RNA, 19 nt, Artificial Sequence
  Description of Artificial Sequence: Synthetic oligonucleotide
cgcgaagugcccgagguaa

SEQ ID NO: 1422718 - RNA, 19 nt, Artificial Sequence
  Description of Artificial Sequence: Synthetic oligonucleotide
gccacgcgugcgccgccgg

SEQ ID NO: 1422719 - RNA, 19 nt, Artificial Sequence
  Description of Artificial Sequence: Synthetic oligonucleotide
gacggggcgcgaagagucu

SEQ ID NO: 1422720 - RNA, 19 nt, Artificial Sequence
  Description of Artificial Sequence: Synthetic oligonucleotide
gccgccccggagccugagg

SEQ ID NO: 1422721 - RNA, 19 nt, Artificial Sequence
  Description of Artificial Sequence: Synthetic oligonucleotide
ccguccuuaggccggcaga

SEQ ID NO: 1422722 - RNA, 19 nt, Artificial Sequence
  Description of Artificial Sequence: Synthetic oligonucleotide
gucucucgucgaggcuggc

SEQ ID NO: 1422723 - RNA, 19 nt, Artificial Sequence
  Description of Artificial Sequence: Synthetic oligonucleotide
cgcagcggccccacauacc

SEQ ID NO: 1422724 - RNA, 19 nt, Artificial Sequence
  Description of Artificial Sequence: Synthetic oligonucleotide
gugccgcguuaggggaacc

SEQ ID NO: 1422725 - RNA, 19 nt, Artificial Sequence
  Description of Artificial Sequence: Synthetic oligonucleotide
gcggcgggcuucaccgucc

SEQ ID NO: 1422726 - RNA, 19 nt, Artificial Sequence
  Description of Artificial Sequence: Synthetic oligonucleotide
cccggcgggcucgacacac

SEQ ID NO: 1422727 - RNA, 19 nt, Artificial Sequence
  Description of Artificial Sequence: Synthetic oligonucleotide
cgcgccgcggcccucgaug

SEQ ID NO: 1422728 - RNA, 19 nt, Artificial Sequence
  Description of Artificial Sequence: Synthetic oligonucleotide
ccacgcgugcgccgccggg

SEQ ID NO: 1422729 - RNA, 19 nt, Artificial Sequence
  Description of Artificial Sequence: Synthetic oligonucleotide
uggccgcgugggagcucga

SEQ ID NO: 1422730 - RNA, 19 nt, Artificial Sequence
  Description of Artificial Sequence: Synthetic oligonucleotide
ggccgcgugggagcucgag

SEQ ID NO: 1422731 - RNA, 19 nt, Artificial Sequence
  Description of Artificial Sequence: Synthetic oligonucleotide
cgagcgggacgcgaccacc

SEQ ID NO: 1422732 - RNA, 19 nt, Artificial Sequence
  Description of Artificial Sequence: Synthetic oligonucleotide
gcucgacacacagcccaga

SEQ ID NO: 1422733 - RNA, 19 nt, Artificial Sequence
  Description of Artificial Sequence: Synthetic oligonucleotide
cagggagacggggcgcgaa

SEQ ID NO: 1422734 - RNA, 19 nt, Artificial Sequence
  Description of Artificial Sequence: Synthetic oligonucleotide
cgcugcguacggagucgcg

SEQ ID NO: 1422735 - RNA, 19 nt, Artificial Sequence
  Description of Artificial Sequence: Synthetic oligonucleotide
cgaagugcccgagguaaca

SEQ ID NO: 1422736 - RNA, 19 nt, Artificial Sequence
  Description of Artificial Sequence: Synthetic oligonucleotide
guucggcagugcacggccu

SEQ ID NO: 1422737 - RNA, 19 nt, Artificial Sequence
  Description of Artificial Sequence: Synthetic oligonucleotide
cccgcgaagugcccgaggu

SEQ ID NO: 1422738 - RNA, 19 nt, Artificial Sequence
  Description of Artificial Sequence: Synthetic oligonucleotide
ccgaaucgccugcgcuggc

SEQ ID NO: 1422739 - RNA, 19 nt, Artificial Sequence
  Description of Artificial Sequence: Synthetic oligonucleotide
ccgcguuaggggaaccucu

SEQ ID NO: 1422740 - RNA, 19 nt, Artificial Sequence
  Description of Artificial Sequence: Synthetic oligonucleotide
ggggcgcgaagagucucuc

SEQ ID NO: 1422741 - RNA, 19 nt, Artificial Sequence
  Description of Artificial Sequence: Synthetic oligonucleotide
gggaagcacgaaggcucca

SEQ ID NO: 1422742 - RNA, 19 nt, Artificial Sequence
  Description of Artificial Sequence: Synthetic oligonucleotide
caccggggaugaggcaaca

SEQ ID NO: 1422743 - RNA, 19 nt, Artificial Sequence
  Description of Artificial Sequence: Synthetic oligonucleotide
ccaccgaaucgccugcgcu

SEQ ID NO: 1422744 - RNA, 19 nt, Artificial Sequence
  Description of Artificial Sequence: Synthetic oligonucleotide
ccgcugcguacggagucgc

SEQ ID NO: 1422745 - RNA, 19 nt, Artificial Sequence
  Description of Artificial Sequence: Synthetic oligonucleotide
ccgucuucucgucuaugcu

SEQ ID NO: 1422746 - RNA, 19 nt, Artificial Sequence
  Description of Artificial Sequence: Synthetic oligonucleotide
cggagucgcggucguuccc

SEQ ID NO: 1422747 - RNA, 19 nt, Artificial Sequence
  Description of Artificial Sequence: Synthetic oligonucleotide
cgccgcugcguacggaguc

SEQ ID NO: 1422748 - RNA, 19 nt, Artificial Sequence
  Description of Artificial Sequence: Synthetic oligonucleotide
ggggagucucggggcuugc

SEQ ID NO: 1422749 - RNA, 19 nt, Artificial Sequence
  Description of Artificial Sequence: Synthetic oligonucleotide
gcguggccacgcgugcgcc

SEQ ID NO: 1422750 - RNA, 19 nt, Artificial Sequence
  Description of Artificial Sequence: Synthetic oligonucleotide
gcgcguccgucuucucguc

SEQ ID NO: 1422751 - RNA, 19 nt, Artificial Sequence
  Description of Artificial Sequence: Synthetic oligonucleotide
gcgggaaauucggaggcuu

SEQ ID NO: 1422752 - RNA, 19 nt, Artificial Sequence
  Description of Artificial Sequence: Synthetic oligonucleotide
ccgaugcaguggccgcgug

SEQ ID NO: 1422753 - RNA, 19 nt, Artificial Sequence
  Description of Artificial Sequence: Synthetic oligonucleotide
cgaugaccgggauggacgu

SEQ ID NO: 1422754 - RNA, 19 nt, Artificial Sequence
  Description of Artificial Sequence: Synthetic oligonucleotide
gcuacgccgccgccccgga

SEQ ID NO: 1422755 - RNA, 19 nt, Artificial Sequence
  Description of Artificial Sequence: Synthetic oligonucleotide
ggcccucgaugcucgcaua

SEQ ID NO: 1422756 - RNA, 19 nt, Artificial Sequence
  Description of Artificial Sequence: Synthetic oligonucleotide
gcgugagggugcgcucgug

SEQ ID NO: 1422757 - RNA, 19 nt, Artificial Sequence
  Description of Artificial Sequence: Synthetic oligonucleotide
agcgccccggcgggcucga

SEQ ID NO: 1422758 - RNA, 19 nt, Artificial Sequence
  Description of Artificial Sequence: Synthetic oligonucleotide
gcgggcuggagcgggaaau

SEQ ID NO: 1422759 - RNA, 19 nt, Artificial Sequence
  Description of Artificial Sequence: Synthetic oligonucleotide
cgaaucgccugcgcuggca

SEQ ID NO: 1422760 - RNA, 19 nt, Artificial Sequence
  Description of Artificial Sequence: Synthetic oligonucleotide
cgcucgugcgcgauggcgu

SEQ ID NO: 1422761 - RNA, 19 nt, Artificial Sequence
  Description of Artificial Sequence: Synthetic oligonucleotide
gcggcccucgaugcucgca

SEQ ID NO: 1422762 - RNA, 19 nt, Artificial Sequence
  Description of Artificial Sequence: Synthetic oligonucleotide
ggucgaguucacagagcuu

SEQ ID NO: 1422763 - RNA, 19 nt, Artificial Sequence
  Description of Artificial Sequence: Synthetic oligonucleotide
ccccgugguucggcagugc

SEQ ID NO: 1422764 - RNA, 19 nt, Artificial Sequence
  Description of Artificial Sequence: Synthetic oligonucleotide
cgacccgcgaagugcccga

SEQ ID NO: 1422765 - RNA, 19 nt, Artificial Sequence
  Description of Artificial Sequence: Synthetic oligonucleotide
gcgcacgagcgggacgcga

SEQ ID NO: 1422766 - RNA, 19 nt, Artificial Sequence
  Description of Artificial Sequence: Synthetic oligonucleotide
cgugcgcaguugggacugg

SEQ ID NO: 1422767 - RNA, 19 nt, Artificial Sequence
  Description of Artificial Sequence: Synthetic oligonucleotide
ccucgcgcccugggaggcc

SEQ ID NO: 1422768 - RNA, 19 nt, Artificial Sequence
  Description of Artificial Sequence: Synthetic oligonucleotide
cccgcagcggccccacaua

SEQ ID NO: 1422769 - RNA, 19 nt, Artificial Sequence
  Description of Artificial Sequence: Synthetic oligonucleotide
cgccgcaagggcgcacgag

SEQ ID NO: 1422770 - RNA, 19 nt, Artificial Sequence
  Description of Artificial Sequence: Synthetic oligonucleotide
cgggaggacaaucgacgcu

SEQ ID NO: 1422771 - RNA, 19 nt, Artificial Sequence
  Description of Artificial Sequence: Synthetic oligonucleotide
gcgcccugggaggccgcug

SEQ ID NO: 1422772 - RNA, 19 nt, Artificial Sequence
  Description of Artificial Sequence: Synthetic oligonucleotide
ccggcgggcucgacacaca

SEQ ID NO: 1422773 - RNA, 19 nt, Artificial Sequence
  Description of Artificial Sequence: Synthetic oligonucleotide
ccgcgaagugcccgaggua

SEQ ID NO: 1422774 - RNA, 19 nt, Artificial Sequence
  Description of Artificial Sequence: Synthetic oligonucleotide
ccggagccugaggcuugag

SEQ ID NO: 1422775 - RNA, 19 nt, Artificial Sequence
  Description of Artificial Sequence: Synthetic oligonucleotide
cguacggagucgcggucgu

SEQ ID NO: 1422776 - RNA, 19 nt, Artificial Sequence
  Description of Artificial Sequence: Synthetic oligonucleotide
guacggagucgcggucguu

SEQ ID NO: 1422777 - RNA, 19 nt, Artificial Sequence
  Description of Artificial Sequence: Synthetic oligonucleotide
cgugcgcgauggcguggug

SEQ ID NO: 1422778 - RNA, 19 nt, Artificial Sequence
  Description of Artificial Sequence: Synthetic oligonucleotide
cgcguuaggggaaccucuu

SEQ ID NO: 1422779 - RNA, 19 nt, Artificial Sequence
  Description of Artificial Sequence: Synthetic oligonucleotide
ccacgccgcaagggcgcac

SEQ ID NO: 1422780 - RNA, 19 nt, Artificial Sequence
  Description of Artificial Sequence: Synthetic oligonucleotide
cgcggcccucgaugcucgc

SEQ ID NO: 1422781 - RNA, 19 nt, Artificial Sequence
  Description of Artificial Sequence: Synthetic oligonucleotide
cggggcgcgaagagucucu

SEQ ID NO: 1422782 - RNA, 19 nt, Artificial Sequence
  Description of Artificial Sequence: Synthetic oligonucleotide
cgccccggcgggcucgaca

SEQ ID NO: 1422783 - RNA, 19 nt, Artificial Sequence
  Description of Artificial Sequence: Synthetic oligonucleotide
gcacggccuucgggaggac

SEQ ID NO: 1422784 - RNA, 19 nt, Artificial Sequence
  Description of Artificial Sequence: Synthetic oligonucleotide
cgcaugcucgggccccaaa

SEQ ID NO: 1422785 - RNA, 19 nt, Artificial Sequence
  Description of Artificial Sequence: Synthetic oligonucleotide
cgcgugcgccgccgggguc

SEQ ID NO: 1422786 - RNA, 19 nt, Artificial Sequence
  Description of Artificial Sequence: Synthetic oligonucleotide
ccgccggggucgcugugcu

SEQ ID NO: 1422787 - RNA, 19 nt, Artificial Sequence
  Description of Artificial Sequence: Synthetic oligonucleotide
cguccgucuucucgucuau

SEQ ID NO: 1422788 - RNA, 19 nt, Artificial Sequence
  Description of Artificial Sequence: Synthetic oligonucleotide
ccgcugcgacccgcgaagu

SEQ ID NO: 1422789 - RNA, 19 nt, Artificial Sequence
  Description of Artificial Sequence: Synthetic oligonucleotide
cgccugcgcuggcaaugua

SEQ ID NO: 1422790 - RNA, 19 nt, Artificial Sequence
  Description of Artificial Sequence: Synthetic oligonucleotide
cgggcuggagcgggaaauu

SEQ ID NO: 1422791 - RNA, 19 nt, Artificial Sequence
  Description of Artificial Sequence: Synthetic oligonucleotide
cgccgcggcccucgaugcu

SEQ ID NO: 1422792 - RNA, 19 nt, Artificial Sequence
  Description of Artificial Sequence: Synthetic oligonucleotide
cgcgcccugggaggccgcu

SEQ ID NO: 1422793 - RNA, 19 nt, Artificial Sequence
  Description of Artificial Sequence: Synthetic oligonucleotide
aguaauaaauuuuaguccc

SEQ ID NO: 1422794 - RNA, 19 nt, Artificial Sequence
  Description of Artificial Sequence: Synthetic oligonucleotide
uuuauuuaaauucaggccc

SEQ ID NO: 1422795 - RNA, 19 nt, Artificial Sequence
  Description of Artificial Sequence: Synthetic oligonucleotide
aaauuuuagucccugggcg

SEQ ID NO: 1422796 - RNA, 19 nt, Artificial Sequence
  Description of Artificial Sequence: Synthetic oligonucleotide
aaagccauaauccauguga

SEQ ID NO: 1422797 - RNA, 19 nt, Artificial Sequence
  Description of Artificial Sequence: Synthetic oligonucleotide
aauuuuagucccugggcgc

SEQ ID NO: 1422798 - RNA, 19 nt, Artificial Sequence
  Description of Artificial Sequence: Synthetic oligonucleotide
aucaaaguuucuaagaacc

SEQ ID NO: 1422799 - RNA, 19 nt, Artificial Sequence
  Description of Artificial Sequence: Synthetic oligonucleotide
aauaaauuuuagucccugg

SEQ ID NO: 1422800 - RNA, 19 nt, Artificial Sequence
  Description of Artificial Sequence: Synthetic oligonucleotide
auaggcaucacgcuucucc

SEQ ID NO: 1422801 - RNA, 19 nt, Artificial Sequence
  Description of Artificial Sequence: Synthetic oligonucleotide
auaaauuuuagucccuggg

SEQ ID NO: 1422802 - RNA, 19 nt, Artificial Sequence
  Description of Artificial Sequence: Synthetic oligonucleotide
acucucacaauucugaaag

SEQ ID NO: 1422803 - RNA, 19 nt, Artificial Sequence
  Description of Artificial Sequence: Synthetic oligonucleotide
uuuaaauucaggccccuag

SEQ ID NO: 1422804 - RNA, 19 nt, Artificial Sequence
  Description of Artificial Sequence: Synthetic oligonucleotide
uaagagaugucuuggagcc

SEQ ID NO: 1422805 - RNA, 19 nt, Artificial Sequence
  Description of Artificial Sequence: Synthetic oligonucleotide
uaaauuuuagucccugggc

SEQ ID NO: 1422806 - RNA, 19 nt, Artificial Sequence
  Description of Artificial Sequence: Synthetic oligonucleotide
uggaugauuucuauguggg

SEQ ID NO: 1422807 - RNA, 19 nt, Artificial Sequence
  Description of Artificial Sequence: Synthetic oligonucleotide
aaagccuugaagcauuuca

SEQ ID NO: 1422808 - RNA, 19 nt, Artificial Sequence
  Description of Artificial Sequence: Synthetic oligonucleotide
acacauccgacauucacgc

SEQ ID NO: 1422809 - RNA, 19 nt, Artificial Sequence
  Description of Artificial Sequence: Synthetic oligonucleotide
uguggucacagcaugauac

SEQ ID NO: 1422810 - RNA, 19 nt, Artificial Sequence
  Description of Artificial Sequence: Synthetic oligonucleotide
aauucaggccccuagaauu

SEQ ID NO: 1422811 - RNA, 19 nt, Artificial Sequence
  Description of Artificial Sequence: Synthetic oligonucleotide
augccaauugaauuuacuc

SEQ ID NO: 1422812 - RNA, 19 nt, Artificial Sequence
  Description of Artificial Sequence: Synthetic oligonucleotide
ucucuugaggaacuguggg

SEQ ID NO: 1422813 - RNA, 19 nt, Artificial Sequence
  Description of Artificial Sequence: Synthetic oligonucleotide
uggaauucgucuacgauga

SEQ ID NO: 1422814 - RNA, 19 nt, Artificial Sequence
  Description of Artificial Sequence: Synthetic oligonucleotide
aaccuuaucaugccuuauc

SEQ ID NO: 1422815 - RNA, 19 nt, Artificial Sequence
  Description of Artificial Sequence: Synthetic oligonucleotide
aaugacacugcggcuaggc

SEQ ID NO: 1422816 - RNA, 19 nt, Artificial Sequence
  Description of Artificial Sequence: Synthetic oligonucleotide
ucaugccuuaucauaagag

SEQ ID NO: 1422817 - RNA, 19 nt, Artificial Sequence
  Description of Artificial Sequence: Synthetic oligonucleotide
cacagcaugauacauuggg

SEQ ID NO: 1422818 - RNA, 19 nt, Artificial Sequence
  Description of Artificial Sequence: Synthetic oligonucleotide
acagacaucucccacagca

SEQ ID NO: 1422819 - RNA, 19 nt, Artificial Sequence
  Description of Artificial Sequence: Synthetic oligonucleotide
ugguagauaguguucaggc

SEQ ID NO: 1422820 - RNA, 19 nt, Artificial Sequence
  Description of Artificial Sequence: Synthetic oligonucleotide
uuaucaugccuuaucauaa

SEQ ID NO: 1422821 - RNA, 19 nt, Artificial Sequence
  Description of Artificial Sequence: Synthetic oligonucleotide
uaucauaagagaugucuug

SEQ ID NO: 1422822 - RNA, 19 nt, Artificial Sequence
  Description of Artificial Sequence: Synthetic oligonucleotide
ugauacauugggguaaagg

SEQ ID NO: 1422823 - RNA, 19 nt, Artificial Sequence
  Description of Artificial Sequence: Synthetic oligonucleotide
auagacgccuuucacauug

SEQ ID NO: 1422824 - RNA, 19 nt, Artificial Sequence
  Description of Artificial Sequence: Synthetic oligonucleotide
gaagagguagggugaaugg

SEQ ID NO: 1422825 - RNA, 19 nt, Artificial Sequence
  Description of Artificial Sequence: Synthetic oligonucleotide
cauagucuaauuuggaauc

SEQ ID NO: 1422826 - RNA, 19 nt, Artificial Sequence
  Description of Artificial Sequence: Synthetic oligonucleotide
ugcugcauagccauggaug

SEQ ID NO: 1422827 - RNA, 19 nt, Artificial Sequence
  Description of Artificial Sequence: Synthetic oligonucleotide
aauucgucuacgaugauau

SEQ ID NO: 1422828 - RNA, 19 nt, Artificial Sequence
  Description of Artificial Sequence: Synthetic oligonucleotide
gaugauuucuaugugggac

SEQ ID NO: 1422829 - RNA, 19 nt, Artificial Sequence
  Description of Artificial Sequence: Synthetic oligonucleotide
uuaaauucaggccccuaga

SEQ ID NO: 1422830 - RNA, 19 nt, Artificial Sequence
  Description of Artificial Sequence: Synthetic oligonucleotide
ucgucuacgaugauauggc

SEQ ID NO: 1422831 - RNA, 19 nt, Artificial Sequence
  Description of Artificial Sequence: Synthetic oligonucleotide
uuuaccugugagaacuuca

SEQ ID NO: 1422832 - RNA, 19 nt, Artificial Sequence
  Description of Artificial Sequence: Synthetic oligonucleotide
uugacuucaaccgugggcu

SEQ ID NO: 1422833 - RNA, 19 nt, Artificial Sequence
  Description of Artificial Sequence: Synthetic oligonucleotide
aaccguguugucaaagucg

SEQ ID NO: 1422834 - RNA, 19 nt, Artificial Sequence
  Description of Artificial Sequence: Synthetic oligonucleotide
uagucgaaggaaacggcgg

SEQ ID NO: 1422835 - RNA, 19 nt, Artificial Sequence
  Description of Artificial Sequence: Synthetic oligonucleotide
gaugccagcuaucuccacg

SEQ ID NO: 1422836 - RNA, 19 nt, Artificial Sequence
  Description of Artificial Sequence: Synthetic oligonucleotide
cuggaauucgucuacgaug

SEQ ID NO: 1422837 - RNA, 19 nt, Artificial Sequence
  Description of Artificial Sequence: Synthetic oligonucleotide
agucgaaggaaacggcggc

SEQ ID NO: 1422838 - RNA, 19 nt, Artificial Sequence
  Description of Artificial Sequence: Synthetic oligonucleotide
agcuguguuccacauuacc

SEQ ID NO: 1422839 - RNA, 19 nt, Artificial Sequence
  Description of Artificial Sequence: Synthetic oligonucleotide
ucucacaauucugaaagcc

SEQ ID NO: 1422840 - RNA, 19 nt, Artificial Sequence
  Description of Artificial Sequence: Synthetic oligonucleotide
gacacauccgacauucacg

SEQ ID NO: 1422841 - RNA, 19 nt, Artificial Sequence
  Description of Artificial Sequence: Synthetic oligonucleotide
aguguaaccagcucuucug

SEQ ID NO: 1422842 - RNA, 19 nt, Artificial Sequence
  Description of Artificial Sequence: Synthetic oligonucleotide
ugccuuaucauaagagaug

SEQ ID NO: 1422843 - RNA, 19 nt, Artificial Sequence
  Description of Artificial Sequence: Synthetic oligonucleotide
gugaaucaaaguuucuaag

SEQ ID NO: 1422844 - RNA, 19 nt, Artificial Sequence
  Description of Artificial Sequence: Synthetic oligonucleotide
ugaucgugcaugaauucug

SEQ ID NO: 1422845 - RNA, 19 nt, Artificial Sequence
  Description of Artificial Sequence: Synthetic oligonucleotide
ucacugguuauucccaagc

SEQ ID NO: 1422846 - RNA, 19 nt, Artificial Sequence
  Description of Artificial Sequence: Synthetic oligonucleotide
ucuaugugggacuugguua

SEQ ID NO: 1422847 - RNA, 19 nt, Artificial Sequence
  Description of Artificial Sequence: Synthetic oligonucleotide
cuaagaaccuuaucaugcc

SEQ ID NO: 1422848 - RNA, 19 nt, Artificial Sequence
  Description of Artificial Sequence: Synthetic oligonucleotide
cauaagagaugucuuggag

SEQ ID NO: 1422849 - RNA, 19 nt, Artificial Sequence
  Description of Artificial Sequence: Synthetic oligonucleotide
ucaacggaguguaaccagc

SEQ ID NO: 1422850 - RNA, 19 nt, Artificial Sequence
  Description of Artificial Sequence: Synthetic oligonucleotide
guuggcacaaaccauuuuc

SEQ ID NO: 1422851 - RNA, 19 nt, Artificial Sequence
  Description of Artificial Sequence: Synthetic oligonucleotide
cugaaagccauaauccaug

SEQ ID NO: 1422852 - RNA, 19 nt, Artificial Sequence
  Description of Artificial Sequence: Synthetic oligonucleotide
uaauccaugugaucgugca

SEQ ID NO: 1422853 - RNA, 19 nt, Artificial Sequence
  Description of Artificial Sequence: Synthetic oligonucleotide
acgccuuucacauugguau

SEQ ID NO: 1422854 - RNA, 19 nt, Artificial Sequence
  Description of Artificial Sequence: Synthetic oligonucleotide
uuggcacaaaccauuuuca

SEQ ID NO: 1422855 - RNA, 19 nt, Artificial Sequence
  Description of Artificial Sequence: Synthetic oligonucleotide
aaauucaggccccuagaau

SEQ ID NO: 1422856 - RNA, 19 nt, Artificial Sequence
  Description of Artificial Sequence: Synthetic oligonucleotide
auucacgcaagugccaccc

SEQ ID NO: 1422857 - RNA, 19 nt, Artificial Sequence
  Description of Artificial Sequence: Synthetic oligonucleotide
uuaucauaagagaugucuu

SEQ ID NO: 1422858 - RNA, 19 nt, Artificial Sequence
  Description of Artificial Sequence: Synthetic oligonucleotide
ucuacgaugauauggccuu

SEQ ID NO: 1422859 - RNA, 19 nt, Artificial Sequence
  Description of Artificial Sequence: Synthetic oligonucleotide
auauuuaugaacggcuuca

SEQ ID NO: 1422860 - RNA, 19 nt, Artificial Sequence
  Description of Artificial Sequence: Synthetic oligonucleotide
guaacccgcacccacaaug

SEQ ID NO: 1422861 - RNA, 19 nt, Artificial Sequence
  Description of Artificial Sequence: Synthetic oligonucleotide
guuaaauuguucugguaga

SEQ ID NO: 1422862 - RNA, 19 nt, Artificial Sequence
  Description of Artificial Sequence: Synthetic oligonucleotide
ugcaguuggaacugaugag

SEQ ID NO: 1422863 - RNA, 19 nt, Artificial Sequence
  Description of Artificial Sequence: Synthetic oligonucleotide
aguuucuaagaaccuuauc

SEQ ID NO: 1422864 - RNA, 19 nt, Artificial Sequence
  Description of Artificial Sequence: Synthetic oligonucleotide
cuaugggccaguuuccggc

SEQ ID NO: 1422865 - RNA, 19 nt, Artificial Sequence
  Description of Artificial Sequence: Synthetic oligonucleotide
augauuucuaugugggacu

SEQ ID NO: 1422866 - RNA, 19 nt, Artificial Sequence
  Description of Artificial Sequence: Synthetic oligonucleotide
accuuaucaugccuuauca

SEQ ID NO: 1422867 - RNA, 19 nt, Artificial Sequence
  Description of Artificial Sequence: Synthetic oligonucleotide
aacggaguguaaccagcuc

SEQ ID NO: 1422868 - RNA, 19 nt, Artificial Sequence
  Description of Artificial Sequence: Synthetic oligonucleotide
ucauaagagaugucuugga

SEQ ID NO: 1422869 - RNA, 19 nt, Artificial Sequence
  Description of Artificial Sequence: Synthetic oligonucleotide
augccagcuaucuccacgg

SEQ ID NO: 1422870 - RNA, 19 nt, Artificial Sequence
  Description of Artificial Sequence: Synthetic oligonucleotide
gaacuucagcacuuccacg

SEQ ID NO: 1422871 - RNA, 19 nt, Artificial Sequence
  Description of Artificial Sequence: Synthetic oligonucleotide
uaucaugccuuaucauaag

SEQ ID NO: 1422872 - RNA, 19 nt, Artificial Sequence
  Description of Artificial Sequence: Synthetic oligonucleotide
ucgguacucgccauggcgc

SEQ ID NO: 1422873 - RNA, 19 nt, Artificial Sequence
  Description of Artificial Sequence: Synthetic oligonucleotide
ucgugcaugaauucugagu

SEQ ID NO: 1422874 - RNA, 19 nt, Artificial Sequence
  Description of Artificial Sequence: Synthetic oligonucleotide
uaguugaguagauuuucac

SEQ ID NO: 1422875 - RNA, 19 nt, Artificial Sequence
  Description of Artificial Sequence: Synthetic oligonucleotide
ggcaauguaacccgcaccc

SEQ ID NO: 1422876 - RNA, 19 nt, Artificial Sequence
  Description of Artificial Sequence: Synthetic oligonucleotide
aacccaucacugguuauuc

SEQ ID NO: 1422877 - RNA, 19 nt, Artificial Sequence
  Description of Artificial Sequence: Synthetic oligonucleotide
uugguauucuggaauucgu

SEQ ID NO: 1422878 - RNA, 19 nt, Artificial Sequence
  Description of Artificial Sequence: Synthetic oligonucleotide
ugggguaaagguaguugag

SEQ ID NO: 1422879 - RNA, 19 nt, Artificial Sequence
  Description of Artificial Sequence: Synthetic oligonucleotide
uucccaagcuggcaccugg

SEQ ID NO: 1422880 - RNA, 19 nt, Artificial Sequence
  Description of Artificial Sequence: Synthetic oligonucleotide
cuugugacucuccaccacc

SEQ ID NO: 1422881 - RNA, 19 nt, Artificial Sequence
  Description of Artificial Sequence: Synthetic oligonucleotide
guugugguggguuuccuac

SEQ ID NO: 1422882 - RNA, 19 nt, Artificial Sequence
  Description of Artificial Sequence: Synthetic oligonucleotide
uucuaugugggacuugguu

SEQ ID NO: 1422883 - RNA, 19 nt, Artificial Sequence
  Description of Artificial Sequence: Synthetic oligonucleotide
acauccgacauucacgcaa

SEQ ID NO: 1422884 - RNA, 19 nt, Artificial Sequence
  Description of Artificial Sequence: Synthetic oligonucleotide
ugcaugaauucugagugga

SEQ ID NO: 1422885 - RNA, 19 nt, Artificial Sequence
  Description of Artificial Sequence: Synthetic oligonucleotide
uuauucccaagcuggcacc

SEQ ID NO: 1422886 - RNA, 19 nt, Artificial Sequence
  Description of Artificial Sequence: Synthetic oligonucleotide
acggaguguaaccagcucu

SEQ ID NO: 1422887 - RNA, 19 nt, Artificial Sequence
  Description of Artificial Sequence: Synthetic oligonucleotide
auaauccaugugaucgugc

SEQ ID NO: 1422888 - RNA, 19 nt, Artificial Sequence
  Description of Artificial Sequence: Synthetic oligonucleotide
cuuaucauaagagaugucu

SEQ ID NO: 1422889 - RNA, 19 nt, Artificial Sequence
  Description of Artificial Sequence: Synthetic oligonucleotide
ggaguuccaagccggaugg

SEQ ID NO: 1422890 - RNA, 19 nt, Artificial Sequence
  Description of Artificial Sequence: Synthetic oligonucleotide
ugugguggguuuccuacca

SEQ ID NO: 1422891 - RNA, 19 nt, Artificial Sequence
  Description of Artificial Sequence: Synthetic oligonucleotide
ucugucugaauccccaguu

SEQ ID NO: 1422892 - RNA, 19 nt, Artificial Sequence
  Description of Artificial Sequence: Synthetic oligonucleotide
aagucggccuugguggccc

SEQ ID NO: 1422893 - RNA, 19 nt, Artificial Sequence
  Description of Artificial Sequence: Synthetic oligonucleotide
acggcaauguaacccgcac

SEQ ID NO: 1422894 - RNA, 19 nt, Artificial Sequence
  Description of Artificial Sequence: Synthetic oligonucleotide
aagcauuucaucacaccca

SEQ ID NO: 1422895 - RNA, 19 nt, Artificial Sequence
  Description of Artificial Sequence: Synthetic oligonucleotide
gacacugcggcuaggcagg

SEQ ID NO: 1422896 - RNA, 19 nt, Artificial Sequence
  Description of Artificial Sequence: Synthetic oligonucleotide
ucacgcaagugccacccag

SEQ ID NO: 1422897 - RNA, 19 nt, Artificial Sequence
  Description of Artificial Sequence: Synthetic oligonucleotide
auccaugugaucgugcaug

SEQ ID NO: 1422898 - RNA, 19 nt, Artificial Sequence
  Description of Artificial Sequence: Synthetic oligonucleotide
acaaugacacugcggcuag

SEQ ID NO: 1422899 - RNA, 19 nt, Artificial Sequence
  Description of Artificial Sequence: Synthetic oligonucleotide
ugugagaacuucagcacuu

SEQ ID NO: 1422900 - RNA, 19 nt, Artificial Sequence
  Description of Artificial Sequence: Synthetic oligonucleotide
aaggaaacggcggccgggg

SEQ ID NO: 1422901 - RNA, 19 nt, Artificial Sequence
  Description of Artificial Sequence: Synthetic oligonucleotide
uuaugaacggcuucaucuu

SEQ ID NO: 1422902 - RNA, 19 nt, Artificial Sequence
  Description of Artificial Sequence: Synthetic oligonucleotide
aaugcugcauagccaugga

SEQ ID NO: 1422903 - RNA, 19 nt, Artificial Sequence
  Description of Artificial Sequence: Synthetic oligonucleotide
uaugaacggcuucaucuuc

SEQ ID NO: 1422904 - RNA, 19 nt, Artificial Sequence
  Description of Artificial Sequence: Synthetic oligonucleotide
accguguugucaaagucgg

SEQ ID NO: 1422905 - RNA, 19 nt, Artificial Sequence
  Description of Artificial Sequence: Synthetic oligonucleotide
acagcauagacgccuuuca

SEQ ID NO: 1422906 - RNA, 19 nt, Artificial Sequence
  Description of Artificial Sequence: Synthetic oligonucleotide
gaucccgaccaccuuuucc

SEQ ID NO: 1422907 - RNA, 19 nt, Artificial Sequence
  Description of Artificial Sequence: Synthetic oligonucleotide
caauguaacccgcacccac

SEQ ID NO: 1422908 - RNA, 19 nt, Artificial Sequence
  Description of Artificial Sequence: Synthetic oligonucleotide
aacccgcacccacaaugac

SEQ ID NO: 1422909 - RNA, 19 nt, Artificial Sequence
  Description of Artificial Sequence: Synthetic oligonucleotide
uaacccgcacccacaauga

SEQ ID NO: 1422910 - RNA, 19 nt, Artificial Sequence
  Description of Artificial Sequence: Synthetic oligonucleotide
cucaacggaguguaaccag

SEQ ID NO: 1422911 - RNA, 19 nt, Artificial Sequence
  Description of Artificial Sequence: Synthetic oligonucleotide
augaggaguuccaagccgg

SEQ ID NO: 1422912 - RNA, 19 nt, Artificial Sequence
  Description of Artificial Sequence: Synthetic oligonucleotide
aucaugccuuaucauaaga

SEQ ID NO: 1422913 - RNA, 19 nt, Artificial Sequence
  Description of Artificial Sequence: Synthetic oligonucleotide
ugagugaaucaaaguuucu

SEQ ID NO: 1422914 - RNA, 19 nt, Artificial Sequence
  Description of Artificial Sequence: Synthetic oligonucleotide
gccaauugaauuuacucuc

SEQ ID NO: 1422915 - RNA, 19 nt, Artificial Sequence
  Description of Artificial Sequence: Synthetic oligonucleotide
gaaagccauaauccaugug

SEQ ID NO: 1422916 - RNA, 19 nt, Artificial Sequence
  Description of Artificial Sequence: Synthetic oligonucleotide
ccgacauucacgcaagugc

SEQ ID NO: 1422917 - RNA, 19 nt, Artificial Sequence
  Description of Artificial Sequence: Synthetic oligonucleotide
acccaucacugguuauucc

SEQ ID NO: 1422918 - RNA, 19 nt, Artificial Sequence
  Description of Artificial Sequence: Synthetic oligonucleotide
ucaaccgugggcugaggac

SEQ ID NO: 1422919 - RNA, 19 nt, Artificial Sequence
  Description of Artificial Sequence: Synthetic oligonucleotide
ugugaucgugcaugaauuc

SEQ ID NO: 1422920 - RNA, 19 nt, Artificial Sequence
  Description of Artificial Sequence: Synthetic oligonucleotide
acauugguauucuggaauu

SEQ ID NO: 1422921 - RNA, 19 nt, Artificial Sequence
  Description of Artificial Sequence: Synthetic oligonucleotide
gugcaugaauucugagugg

SEQ ID NO: 1422922 - RNA, 19 nt, Artificial Sequence
  Description of Artificial Sequence: Synthetic oligonucleotide
uaccugugagaacuucagc

SEQ ID NO: 1422923 - RNA, 19 nt, Artificial Sequence
  Description of Artificial Sequence: Synthetic oligonucleotide
aauuguucugguagauagu

SEQ ID NO: 1422924 - RNA, 19 nt, Artificial Sequence
  Description of Artificial Sequence: Synthetic oligonucleotide
aucacugguuauucccaag

SEQ ID NO: 1422925 - RNA, 19 nt, Artificial Sequence
  Description of Artificial Sequence: Synthetic oligonucleotide
agaggaugccagcuaucuc

SEQ ID NO: 1422926 - RNA, 19 nt, Artificial Sequence
  Description of Artificial Sequence: Synthetic oligonucleotide
cauggcgcaggugagcgcg

SEQ ID NO: 1422927 - RNA, 19 nt, Artificial Sequence
  Description of Artificial Sequence: Synthetic oligonucleotide
cgugcaugaauucugagug

SEQ ID NO: 1422928 - RNA, 19 nt, Artificial Sequence
  Description of Artificial Sequence: Synthetic oligonucleotide
agcaugauacauuggggua

SEQ ID NO: 1422929 - RNA, 19 nt, Artificial Sequence
  Description of Artificial Sequence: Synthetic oligonucleotide
caugaauucugaguggaca

SEQ ID NO: 1422930 - RNA, 19 nt, Artificial Sequence
  Description of Artificial Sequence: Synthetic oligonucleotide
cauccgacauucacgcaag

SEQ ID NO: 1422931 - RNA, 19 nt, Artificial Sequence
  Description of Artificial Sequence: Synthetic oligonucleotide
auagucuaauuuggaaucu

SEQ ID NO: 1422932 - RNA, 19 nt, Artificial Sequence
  Description of Artificial Sequence: Synthetic oligonucleotide
aauccaugugaucgugcau

SEQ ID NO: 1422933 - RNA, 19 nt, Artificial Sequence
  Description of Artificial Sequence: Synthetic oligonucleotide
cuccacggcaauguaaccc

SEQ ID NO: 1422934 - RNA, 19 nt, Artificial Sequence
  Description of Artificial Sequence: Synthetic oligonucleotide
cagguagucgaaggaaacg

SEQ ID NO: 1422935 - RNA, 19 nt, Artificial Sequence
  Description of Artificial Sequence: Synthetic oligonucleotide
aagaaccuuaucaugccuu

SEQ ID NO: 1422936 - RNA, 19 nt, Artificial Sequence
  Description of Artificial Sequence: Synthetic oligonucleotide
ugugggacuugguuaaauu

SEQ ID NO: 1422937 - RNA, 19 nt, Artificial Sequence
  Description of Artificial Sequence: Synthetic oligonucleotide
ucugaguggacagcugugu

SEQ ID NO: 1422938 - RNA, 19 nt, Artificial Sequence
  Description of Artificial Sequence: Synthetic oligonucleotide
cucuucugaagagguaggg

SEQ ID NO: 1422939 - RNA, 19 nt, Artificial Sequence
  Description of Artificial Sequence: Synthetic oligonucleotide
aaacccaucacugguuauu

SEQ ID NO: 1422940 - RNA, 19 nt, Artificial Sequence
  Description of Artificial Sequence: Synthetic oligonucleotide
ugaagaccacgguagggau

SEQ ID NO: 1422941 - RNA, 19 nt, Artificial Sequence
  Description of Artificial Sequence: Synthetic oligonucleotide
cuaugugggacuugguuaa

SEQ ID NO: 1422942 - RNA, 19 nt, Artificial Sequence
  Description of Artificial Sequence: Synthetic oligonucleotide
caaccgugggcugaggacc

SEQ ID NO: 1422943 - RNA, 19 nt, Artificial Sequence
  Description of Artificial Sequence: Synthetic oligonucleotide
aaagucuaugggccaguuu

SEQ ID NO: 1422944 - RNA, 19 nt, Artificial Sequence
  Description of Artificial Sequence: Synthetic oligonucleotide
ucgucgguacucgccaugg

SEQ ID NO: 1422945 - RNA, 19 nt, Artificial Sequence
  Description of Artificial Sequence: Synthetic oligonucleotide
gcucacauaggcaucacgc

SEQ ID NO: 1422946 - RNA, 19 nt, Artificial Sequence
  Description of Artificial Sequence: Synthetic oligonucleotide
augccuuaucauaagagau

SEQ ID NO: 1422947 - RNA, 19 nt, Artificial Sequence
  Description of Artificial Sequence: Synthetic oligonucleotide
guuggaacugaugagugaa

SEQ ID NO: 1422948 - RNA, 19 nt, Artificial Sequence
  Description of Artificial Sequence: Synthetic oligonucleotide
uccgacauucacgcaagug

SEQ ID NO: 1422949 - RNA, 19 nt, Artificial Sequence
  Description of Artificial Sequence: Synthetic oligonucleotide
aagccauaauccaugugau

SEQ ID NO: 1422950 - RNA, 19 nt, Artificial Sequence
  Description of Artificial Sequence: Synthetic oligonucleotide
aaagguaguugaguagauu

SEQ ID NO: 1422951 - RNA, 19 nt, Artificial Sequence
  Description of Artificial Sequence: Synthetic oligonucleotide
gagugaaucaaaguuucua

SEQ ID NO: 1422952 - RNA, 19 nt, Artificial Sequence
  Description of Artificial Sequence: Synthetic oligonucleotide
uagacgccuuucacauugg

SEQ ID NO: 1422953 - RNA, 19 nt, Artificial Sequence
  Description of Artificial Sequence: Synthetic oligonucleotide
aucgugcaugaauucugag

SEQ ID NO: 1422954 - RNA, 19 nt, Artificial Sequence
  Description of Artificial Sequence: Synthetic oligonucleotide
uauuuaaauucaggccccu

SEQ ID NO: 1422955 - RNA, 19 nt, Artificial Sequence
  Description of Artificial Sequence: Synthetic oligonucleotide
cuagcgccgagcuccgccg

SEQ ID NO: 1422956 - RNA, 19 nt, Artificial Sequence
  Description of Artificial Sequence: Synthetic oligonucleotide
aaguuucuaagaaccuuau

SEQ ID NO: 1422957 - RNA, 19 nt, Artificial Sequence
  Description of Artificial Sequence: Synthetic oligonucleotide
auuuuagucccugggcgcu

SEQ ID NO: 1422958 - RNA, 19 nt, Artificial Sequence
  Description of Artificial Sequence: Synthetic oligonucleotide
caaagucggccuugguggc

SEQ ID NO: 1422959 - RNA, 19 nt, Artificial Sequence
  Description of Artificial Sequence: Synthetic oligonucleotide
ugguuaaauuguucuggua

SEQ ID NO: 1422960 - RNA, 19 nt, Artificial Sequence
  Description of Artificial Sequence: Synthetic oligonucleotide
cccaucacugguuauuccc

SEQ ID NO: 1422961 - RNA, 19 nt, Artificial Sequence
  Description of Artificial Sequence: Synthetic oligonucleotide
acgguagggauguugucau

SEQ ID NO: 1422962 - RNA, 19 nt, Artificial Sequence
  Description of Artificial Sequence: Synthetic oligonucleotide
uauuuaugaacggcuucau

SEQ ID NO: 1422963 - RNA, 19 nt, Artificial Sequence
  Description of Artificial Sequence: Synthetic oligonucleotide
uuggaacugaugagugaau

SEQ ID NO: 1422964 - RNA, 19 nt, Artificial Sequence
  Description of Artificial Sequence: Synthetic oligonucleotide
cacgcaagugccacccagc

SEQ ID NO: 1422965 - RNA, 19 nt, Artificial Sequence
  Description of Artificial Sequence: Synthetic oligonucleotide
gaugugaggugcaguguac

SEQ ID NO: 1422966 - RNA, 19 nt, Artificial Sequence
  Description of Artificial Sequence: Synthetic oligonucleotide
uuccuaccaggaacagcag

SEQ ID NO: 1422967 - RNA, 19 nt, Artificial Sequence
  Description of Artificial Sequence: Synthetic oligonucleotide
caggccccuagaauuuggg

SEQ ID NO: 1422968 - RNA, 19 nt, Artificial Sequence
  Description of Artificial Sequence: Synthetic oligonucleotide
gguaguugaguagauuuuc

SEQ ID NO: 1422969 - RNA, 19 nt, Artificial Sequence
  Description of Artificial Sequence: Synthetic oligonucleotide
gaauucgucuacgaugaua

SEQ ID NO: 1422970 - RNA, 19 nt, Artificial Sequence
  Description of Artificial Sequence: Synthetic oligonucleotide
accucgucgguacucgcca

SEQ ID NO: 1422971 - RNA, 19 nt, Artificial Sequence
  Description of Artificial Sequence: Synthetic oligonucleotide
gaagaccacgguagggaug

SEQ ID NO: 1422972 - RNA, 19 nt, Artificial Sequence
  Description of Artificial Sequence: Synthetic oligonucleotide
ucugaauccccaguuuauu

SEQ ID NO: 1422973 - RNA, 19 nt, Artificial Sequence
  Description of Artificial Sequence: Synthetic oligonucleotide
acaugccaauugaauuuac

SEQ ID NO: 1422974 - RNA, 19 nt, Artificial Sequence
  Description of Artificial Sequence: Synthetic oligonucleotide
gaucgugcaugaauucuga

SEQ ID NO: 1422975 - RNA, 19 nt, Artificial Sequence
  Description of Artificial Sequence: Synthetic oligonucleotide
cauguggaucccgaccacc

SEQ ID NO: 1422976 - RNA, 19 nt, Artificial Sequence
  Description of Artificial Sequence: Synthetic oligonucleotide
uuguggucacagcaugaua

SEQ ID NO: 1422977 - RNA, 19 nt, Artificial Sequence
  Description of Artificial Sequence: Synthetic oligonucleotide
ggacacauccgacauucac

SEQ ID NO: 1422978 - RNA, 19 nt, Artificial Sequence
  Description of Artificial Sequence: Synthetic oligonucleotide
ugaggaacugugggcacac

SEQ ID NO: 1422979 - RNA, 19 nt, Artificial Sequence
  Description of Artificial Sequence: Synthetic oligonucleotide
aaaagucuaugggccaguu

SEQ ID NO: 1422980 - RNA, 19 nt, Artificial Sequence
  Description of Artificial Sequence: Synthetic oligonucleotide
ggccccuagaauuuggguc

SEQ ID NO: 1422981 - RNA, 19 nt, Artificial Sequence
  Description of Artificial Sequence: Synthetic oligonucleotide
augugaucgugcaugaauu

SEQ ID NO: 1422982 - RNA, 19 nt, Artificial Sequence
  Description of Artificial Sequence: Synthetic oligonucleotide
acgcaagugccacccagcu

SEQ ID NO: 1422983 - RNA, 19 nt, Artificial Sequence
  Description of Artificial Sequence: Synthetic oligonucleotide
uguuggcacaaaccauuuu

SEQ ID NO: 1422984 - RNA, 19 nt, Artificial Sequence
  Description of Artificial Sequence: Synthetic oligonucleotide
cagcaugauacauuggggu

SEQ ID NO: 1422985 - RNA, 19 nt, Artificial Sequence
  Description of Artificial Sequence: Synthetic oligonucleotide
guguaaccagcucuucuga

SEQ ID NO: 1422986 - RNA, 19 nt, Artificial Sequence
  Description of Artificial Sequence: Synthetic oligonucleotide
agggugaauggcaaccgug

SEQ ID NO: 1422987 - RNA, 19 nt, Artificial Sequence
  Description of Artificial Sequence: Synthetic oligonucleotide
ugauuucuaugugggacuu

SEQ ID NO: 1422988 - RNA, 19 nt, Artificial Sequence
  Description of Artificial Sequence: Synthetic oligonucleotide
uguucaggcggcucacaua

SEQ ID NO: 1422989 - RNA, 19 nt, Artificial Sequence
  Description of Artificial Sequence: Synthetic oligonucleotide
aaucaggaugugaggugca

SEQ ID NO: 1422990 - RNA, 19 nt, Artificial Sequence
  Description of Artificial Sequence: Synthetic oligonucleotide
augacacugcggcuaggca

SEQ ID NO: 1422991 - RNA, 19 nt, Artificial Sequence
  Description of Artificial Sequence: Synthetic oligonucleotide
ugacuucaaccgugggcug

SEQ ID NO: 1422992 - RNA, 19 nt, Artificial Sequence
  Description of Artificial Sequence: Synthetic oligonucleotide
gcuauugcaacugggguga

SEQ ID NO: 1422993 - RNA, 19 nt, Artificial Sequence
  Description of Artificial Sequence: Synthetic oligonucleotide
cguguugucaaagucggcc

SEQ ID NO: 1422994 - RNA, 19 nt, Artificial Sequence
  Description of Artificial Sequence: Synthetic oligonucleotide
auguaacccgcacccacaa

SEQ ID NO: 1422995 - RNA, 19 nt, Artificial Sequence
  Description of Artificial Sequence: Synthetic oligonucleotide
cuuuaccugugagaacuuc

SEQ ID NO: 1422996 - RNA, 19 nt, Artificial Sequence
  Description of Artificial Sequence: Synthetic oligonucleotide
cccgcacccacaaugacac

SEQ ID NO: 1422997 - RNA, 19 nt, Artificial Sequence
  Description of Artificial Sequence: Synthetic oligonucleotide
ggcucacauaggcaucacg

SEQ ID NO: 1422998 - RNA, 19 nt, Artificial Sequence
  Description of Artificial Sequence: Synthetic oligonucleotide
ggguaaagguaguugagua

SEQ ID NO: 1422999 - RNA, 19 nt, Artificial Sequence
  Description of Artificial Sequence: Synthetic oligonucleotide
caccucgucgguacucgcc

SEQ ID NO: 1423000 - RNA, 19 nt, Artificial Sequence
  Description of Artificial Sequence: Synthetic oligonucleotide
cacgcuucuccuugaugac

SEQ ID NO: 1423001 - RNA, 19 nt, Artificial Sequence
  Description of Artificial Sequence: Synthetic oligonucleotide
gucacguccaauggcccag

SEQ ID NO: 1423002 - RNA, 19 nt, Artificial Sequence
  Description of Artificial Sequence: Synthetic oligonucleotide
uucaggccccuagaauuug

SEQ ID NO: 1423003 - RNA, 19 nt, Artificial Sequence
  Description of Artificial Sequence: Synthetic oligonucleotide
caugugaucgugcaugaau

SEQ ID NO: 1423004 - RNA, 19 nt, Artificial Sequence
  Description of Artificial Sequence: Synthetic oligonucleotide
uuuccggccagcagcuauu

SEQ ID NO: 1423005 - RNA, 19 nt, Artificial Sequence
  Description of Artificial Sequence: Synthetic oligonucleotide
cacgguagggauguuguca

SEQ ID NO: 1423006 - RNA, 19 nt, Artificial Sequence
  Description of Artificial Sequence: Synthetic oligonucleotide
uggucacagcaugauacau

SEQ ID NO: 1423007 - RNA, 19 nt, Artificial Sequence
  Description of Artificial Sequence: Synthetic oligonucleotide
guucugguagauaguguuc

SEQ ID NO: 1423008 - RNA, 19 nt, Artificial Sequence
  Description of Artificial Sequence: Synthetic oligonucleotide
gccccuagaauuuggguca

SEQ ID NO: 1423009 - RNA, 19 nt, Artificial Sequence
  Description of Artificial Sequence: Synthetic oligonucleotide
aggccccuagaauuugggu

SEQ ID NO: 1423010 - RNA, 19 nt, Artificial Sequence
  Description of Artificial Sequence: Synthetic oligonucleotide
cagucaacaucuggaauca

SEQ ID NO: 1423011 - RNA, 19 nt, Artificial Sequence
  Description of Artificial Sequence: Synthetic oligonucleotide
acgccagcguucuccagcu

SEQ ID NO: 1423012 - RNA, 19 nt, Artificial Sequence
  Description of Artificial Sequence: Synthetic oligonucleotide
uggaucccgaccaccuuuu

SEQ ID NO: 1423013 - RNA, 19 nt, Artificial Sequence
  Description of Artificial Sequence: Synthetic oligonucleotide
ggggacacauccgacauuc

SEQ ID NO: 1423014 - RNA, 19 nt, Artificial Sequence
  Description of Artificial Sequence: Synthetic oligonucleotide
agacgccuuucacauuggu

SEQ ID NO: 1423015 - RNA, 19 nt, Artificial Sequence
  Description of Artificial Sequence: Synthetic oligonucleotide
uguaacccgcacccacaau

SEQ ID NO: 1423016 - RNA, 19 nt, Artificial Sequence
  Description of Artificial Sequence: Synthetic oligonucleotide
gcucucuugaggaacugug

SEQ ID NO: 1423017 - RNA, 19 nt, Artificial Sequence
  Description of Artificial Sequence: Synthetic oligonucleotide
caugccaauugaauuuacu

SEQ ID NO: 1423018 - RNA, 19 nt, Artificial Sequence
  Description of Artificial Sequence: Synthetic oligonucleotide
cauagccauggaugauuuc

SEQ ID NO: 1423019 - RNA, 19 nt, Artificial Sequence
  Description of Artificial Sequence: Synthetic oligonucleotide
ugccagcuaucuccacggc

SEQ ID NO: 1423020 - RNA, 19 nt, Artificial Sequence
  Description of Artificial Sequence: Synthetic oligonucleotide
agcuaucuccacggcaaug

SEQ ID NO: 1423021 - RNA, 19 nt, Artificial Sequence
  Description of Artificial Sequence: Synthetic oligonucleotide
ccagguagucgaaggaaac

SEQ ID NO: 1423022 - RNA, 19 nt, Artificial Sequence
  Description of Artificial Sequence: Synthetic oligonucleotide
uguggaucccgaccaccuu

SEQ ID NO: 1423023 - RNA, 19 nt, Artificial Sequence
  Description of Artificial Sequence: Synthetic oligonucleotide
ggaugauuucuauguggga

SEQ ID NO: 1423024 - RNA, 19 nt, Artificial Sequence
  Description of Artificial Sequence: Synthetic oligonucleotide
uacgaugauauggccuuuu

SEQ ID NO: 1423025 - RNA, 19 nt, Artificial Sequence
  Description of Artificial Sequence: Synthetic oligonucleotide
gccauggcgcaggugagcg

SEQ ID NO: 1423026 - RNA, 19 nt, Artificial Sequence
  Description of Artificial Sequence: Synthetic oligonucleotide
ggaugugaggugcagugua

SEQ ID NO: 1423027 - RNA, 19 nt, Artificial Sequence
  Description of Artificial Sequence: Synthetic oligonucleotide
gcauagacgccuuucacau

SEQ ID NO: 1423028 - RNA, 19 nt, Artificial Sequence
  Description of Artificial Sequence: Synthetic oligonucleotide
uaguguucaggcggcucac

SEQ ID NO: 1423029 - RNA, 19 nt, Artificial Sequence
  Description of Artificial Sequence: Synthetic oligonucleotide
gacgccuuucacauuggua

SEQ ID NO: 1423030 - RNA, 19 nt, Artificial Sequence
  Description of Artificial Sequence: Synthetic oligonucleotide
cucgucgguacucgccaug

SEQ ID NO: 1423031 - RNA, 19 nt, Artificial Sequence
  Description of Artificial Sequence: Synthetic oligonucleotide
augauacauugggguaaag

SEQ ID NO: 1423032 - RNA, 19 nt, Artificial Sequence
  Description of Artificial Sequence: Synthetic oligonucleotide
agucggccuugguggcccc

SEQ ID NO: 1423033 - RNA, 19 nt, Artificial Sequence
  Description of Artificial Sequence: Synthetic oligonucleotide
auucaggccccuagaauuu

SEQ ID NO: 1423034 - RNA, 19 nt, Artificial Sequence
  Description of Artificial Sequence: Synthetic oligonucleotide
cugggcgcucaacggagug

SEQ ID NO: 1423035 - RNA, 19 nt, Artificial Sequence
  Description of Artificial Sequence: Synthetic oligonucleotide
uuuuagucccugggcgcuc

SEQ ID NO: 1423036 - RNA, 19 nt, Artificial Sequence
  Description of Artificial Sequence: Synthetic oligonucleotide
ggcaaccguguugucaaag

SEQ ID NO: 1423037 - RNA, 19 nt, Artificial Sequence
  Description of Artificial Sequence: Synthetic oligonucleotide
gugaucgugcaugaauucu

SEQ ID NO: 1423038 - RNA, 19 nt, Artificial Sequence
  Description of Artificial Sequence: Synthetic oligonucleotide
acccgcacccacaaugaca

SEQ ID NO: 1423039 - RNA, 19 nt, Artificial Sequence
  Description of Artificial Sequence: Synthetic oligonucleotide
gaaacggcggccggggucu

SEQ ID NO: 1423040 - RNA, 19 nt, Artificial Sequence
  Description of Artificial Sequence: Synthetic oligonucleotide
guggacagcuguguuccac

SEQ ID NO: 1423041 - RNA, 19 nt, Artificial Sequence
  Description of Artificial Sequence: Synthetic oligonucleotide
cgcucaacggaguguaacc

SEQ ID NO: 1423042 - RNA, 19 nt, Artificial Sequence
  Description of Artificial Sequence: Synthetic oligonucleotide
gcaacuggggugagaagug

SEQ ID NO: 1423043 - RNA, 19 nt, Artificial Sequence
  Description of Artificial Sequence: Synthetic oligonucleotide
aacggcggccggggucugc

SEQ ID NO: 1423044 - RNA, 19 nt, Artificial Sequence
  Description of Artificial Sequence: Synthetic oligonucleotide
gccuuaucauaagagaugu

SEQ ID NO: 1423045 - RNA, 19 nt, Artificial Sequence
  Description of Artificial Sequence: Synthetic oligonucleotide
guagggauguugucauagu

SEQ ID NO: 1423046 - RNA, 19 nt, Artificial Sequence
  Description of Artificial Sequence: Synthetic oligonucleotide
cacggcaauguaacccgca

SEQ ID NO: 1423047 - RNA, 19 nt, Artificial Sequence
  Description of Artificial Sequence: Synthetic oligonucleotide
augugggacuugguuaaau

SEQ ID NO: 1423048 - RNA, 19 nt, Artificial Sequence
  Description of Artificial Sequence: Synthetic oligonucleotide
uaugugggacuugguuaaa

SEQ ID NO: 1423049 - RNA, 19 nt, Artificial Sequence
  Description of Artificial Sequence: Synthetic oligonucleotide
cagcuauugcaacuggggu

SEQ ID NO: 1423050 - RNA, 19 nt, Artificial Sequence
  Description of Artificial Sequence: Synthetic oligonucleotide
gguuauucccaagcuggca

SEQ ID NO: 1423051 - RNA, 19 nt, Artificial Sequence
  Description of Artificial Sequence: Synthetic oligonucleotide
gcuguguuccacauuaccu

SEQ ID NO: 1423052 - RNA, 19 nt, Artificial Sequence
  Description of Artificial Sequence: Synthetic oligonucleotide
guccaauggcccagagcag

SEQ ID NO: 1423053 - RNA, 19 nt, Artificial Sequence
  Description of Artificial Sequence: Synthetic oligonucleotide
auccgacauucacgcaagu

SEQ ID NO: 1423054 - RNA, 19 nt, Artificial Sequence
  Description of Artificial Sequence: Synthetic oligonucleotide
cacguccaauggcccagag

SEQ ID NO: 1423055 - RNA, 19 nt, Artificial Sequence
  Description of Artificial Sequence: Synthetic oligonucleotide
caacggaguguaaccagcu

SEQ ID NO: 1423056 - RNA, 19 nt, Artificial Sequence
  Description of Artificial Sequence: Synthetic oligonucleotide
ggucacguccaauggccca

SEQ ID NO: 1423057 - RNA, 19 nt, Artificial Sequence
  Description of Artificial Sequence: Synthetic oligonucleotide
guuuccggccagcagcuau

SEQ ID NO: 1423058 - RNA, 19 nt, Artificial Sequence
  Description of Artificial Sequence: Synthetic oligonucleotide
acccaauccccugcaugug

SEQ ID NO: 1423059 - RNA, 19 nt, Artificial Sequence
  Description of Artificial Sequence: Synthetic oligonucleotide
ucacguccaauggcccaga

SEQ ID NO: 1423060 - RNA, 19 nt, Artificial Sequence
  Description of Artificial Sequence: Synthetic oligonucleotide
cuucaaccgugggcugagg

SEQ ID NO: 1423061 - RNA, 19 nt, Artificial Sequence
  Description of Artificial Sequence: Synthetic oligonucleotide
ccuuaucauaagagauguc

SEQ ID NO: 1423062 - RNA, 19 nt, Artificial Sequence
  Description of Artificial Sequence: Synthetic oligonucleotide
cgucuacgaugauauggcc

SEQ ID NO: 1423063 - RNA, 19 nt, Artificial Sequence
  Description of Artificial Sequence: Synthetic oligonucleotide
cuaucuccacggcaaugua

SEQ ID NO: 1423064 - RNA, 19 nt, Artificial Sequence
  Description of Artificial Sequence: Synthetic oligonucleotide
caguuuccggccagcagcu

SEQ ID NO: 1423065 - RNA, 19 nt, Artificial Sequence
  Description of Artificial Sequence: Synthetic oligonucleotide
cacauccgacauucacgca

SEQ ID NO: 1423066 - RNA, 19 nt, Artificial Sequence
  Description of Artificial Sequence: Synthetic oligonucleotide
uggcaaccguguugucaaa

SEQ ID NO: 1423067 - RNA, 19 nt, Artificial Sequence
  Description of Artificial Sequence: Synthetic oligonucleotide
guggaucccgaccaccuuu

SEQ ID NO: 1423068 - RNA, 19 nt, Artificial Sequence
  Description of Artificial Sequence: Synthetic oligonucleotide
gugagccccacugucccaa

SEQ ID NO: 1423069 - RNA, 19 nt, Artificial Sequence
  Description of Artificial Sequence: Synthetic oligonucleotide
gggucacguccaauggccc

SEQ ID NO: 1423070 - RNA, 19 nt, Artificial Sequence
  Description of Artificial Sequence: Synthetic oligonucleotide
gcgcucaacggaguguaac

SEQ ID NO: 1423071 - RNA, 19 nt, Artificial Sequence
  Description of Artificial Sequence: Synthetic oligonucleotide
ugcggcuaggcagguccuc

SEQ ID NO: 1423072 - RNA, 19 nt, Artificial Sequence
  Description of Artificial Sequence: Synthetic oligonucleotide
cugcaccucgucgguacuc

SEQ ID NO: 1423073 - RNA, 19 nt, Artificial Sequence
  Description of Artificial Sequence: Synthetic oligonucleotide
gcagagaggaugccagcua

SEQ ID NO: 1423074 - RNA, 19 nt, Artificial Sequence
  Description of Artificial Sequence: Synthetic oligonucleotide
ccacggcaauguaacccgc

SEQ ID NO: 1423075 - RNA, 19 nt, Artificial Sequence
  Description of Artificial Sequence: Synthetic oligonucleotide
ggaguguaaccagcucuuc

SEQ ID NO: 1423076 - RNA, 19 nt, Artificial Sequence
  Description of Artificial Sequence: Synthetic oligonucleotide
cgaaggaaacggcggccgg

SEQ ID NO: 1423077 - RNA, 19 nt, Artificial Sequence
  Description of Artificial Sequence: Synthetic oligonucleotide
gcauguggaucccgaccac

SEQ ID NO: 1423078 - RNA, 19 nt, Artificial Sequence
  Description of Artificial Sequence: Synthetic oligonucleotide
cggggucugcaccucgucg

SEQ ID NO: 1423079 - RNA, 19 nt, Artificial Sequence
  Description of Artificial Sequence: Synthetic oligonucleotide
cagacaucucccacagcau

SEQ ID NO: 1423080 - RNA, 19 nt, Artificial Sequence
  Description of Artificial Sequence: Synthetic oligonucleotide
caguaaccaugaggaguuc

SEQ ID NO: 1423081 - RNA, 19 nt, Artificial Sequence
  Description of Artificial Sequence: Synthetic oligonucleotide
gcggcuaggcagguccucc

SEQ ID NO: 1423082 - RNA, 19 nt, Artificial Sequence
  Description of Artificial Sequence: Synthetic oligonucleotide
gcaauguaacccgcaccca

SEQ ID NO: 1423083 - RNA, 19 nt, Artificial Sequence
  Description of Artificial Sequence: Synthetic oligonucleotide
gccacccagcuugugacuc

SEQ ID NO: 1423084 - RNA, 19 nt, Artificial Sequence
  Description of Artificial Sequence: Synthetic oligonucleotide
ggaugccagcuaucuccac

SEQ ID NO: 1423085 - RNA, 19 nt, Artificial Sequence
  Description of Artificial Sequence: Synthetic oligonucleotide
gcggcucacauaggcauca

SEQ ID NO: 1423086 - RNA, 19 nt, Artificial Sequence
  Description of Artificial Sequence: Synthetic oligonucleotide
cagcccucccgagccgccg

SEQ ID NO: 1423087 - RNA, 19 nt, Artificial Sequence
  Description of Artificial Sequence: Synthetic oligonucleotide
cagcucuucugaagaggua

SEQ ID NO: 1423088 - RNA, 19 nt, Artificial Sequence
  Description of Artificial Sequence: Synthetic oligonucleotide
gagccccacugucccaaua

SEQ ID NO: 1423089 - RNA, 19 nt, Artificial Sequence
  Description of Artificial Sequence: Synthetic oligonucleotide
cugucugaauccccaguuu

SEQ ID NO: 1423090 - RNA, 19 nt, Artificial Sequence
  Description of Artificial Sequence: Synthetic oligonucleotide
gcaccucgucgguacucgc

SEQ ID NO: 1423091 - RNA, 19 nt, Artificial Sequence
  Description of Artificial Sequence: Synthetic oligonucleotide
ggaucccgaccaccuuuuc

SEQ ID NO: 1423092 - RNA, 19 nt, Artificial Sequence
  Description of Artificial Sequence: Synthetic oligonucleotide
cuuccacgccagcguucuc

SEQ ID NO: 1423093 - RNA, 19 nt, Artificial Sequence
  Description of Artificial Sequence: Synthetic oligonucleotide
accgcggcccuagcgccga

SEQ ID NO: 1423094 - RNA, 19 nt, Artificial Sequence
  Description of Artificial Sequence: Synthetic oligonucleotide
acacugcggcuaggcaggu

SEQ ID NO: 1423095 - RNA, 19 nt, Artificial Sequence
  Description of Artificial Sequence: Synthetic oligonucleotide
cauagacgccuuucacauu

SEQ ID NO: 1423096 - RNA, 19 nt, Artificial Sequence
  Description of Artificial Sequence: Synthetic oligonucleotide
caagugccacccagcuugu

SEQ ID NO: 1423097 - RNA, 19 nt, Artificial Sequence
  Description of Artificial Sequence: Synthetic oligonucleotide
gggcgcucaacggagugua

SEQ ID NO: 1423098 - RNA, 19 nt, Artificial Sequence
  Description of Artificial Sequence: Synthetic oligonucleotide
aguuuccggccagcagcua

SEQ ID NO: 1423099 - RNA, 19 nt, Artificial Sequence
  Description of Artificial Sequence: Synthetic oligonucleotide
ccgccgaucaccagguagu

SEQ ID NO: 1423100 - RNA, 19 nt, Artificial Sequence
  Description of Artificial Sequence: Synthetic oligonucleotide
gaguuccaagccggauggu

SEQ ID NO: 1423101 - RNA, 19 nt, Artificial Sequence
  Description of Artificial Sequence: Synthetic oligonucleotide
cacugcggcuaggcagguc

SEQ ID NO: 1423102 - RNA, 19 nt, Artificial Sequence
  Description of Artificial Sequence: Synthetic oligonucleotide
cgucgguacucgccauggc

SEQ ID NO: 1423103 - RNA, 19 nt, Artificial Sequence
  Description of Artificial Sequence: Synthetic oligonucleotide
cccgccgcgcgcuggccag

SEQ ID NO: 1423104 - RNA, 19 nt, Artificial Sequence
  Description of Artificial Sequence: Synthetic oligonucleotide
caccuguggcaaucaggau

SEQ ID NO: 1423105 - RNA, 19 nt, Artificial Sequence
  Description of Artificial Sequence: Synthetic oligonucleotide
gcggcccuagcgccgagcu

SEQ ID NO: 1423106 - RNA, 19 nt, Artificial Sequence
  Description of Artificial Sequence: Synthetic oligonucleotide
ggaauucgucuacgaugau

SEQ ID NO: 1423107 - RNA, 19 nt, Artificial Sequence
  Description of Artificial Sequence: Synthetic oligonucleotide
agcuggcaccugggaucug

SEQ ID NO: 1423108 - RNA, 19 nt, Artificial Sequence
  Description of Artificial Sequence: Synthetic oligonucleotide
ccggggucugcaccucguc

SEQ ID NO: 1423109 - RNA, 19 nt, Artificial Sequence
  Description of Artificial Sequence: Synthetic oligonucleotide
cuacgaugauauggccuuu

SEQ ID NO: 1423110 - RNA, 19 nt, Artificial Sequence
  Description of Artificial Sequence: Synthetic oligonucleotide
cccgaccaccuuuuccucu

SEQ ID NO: 1423111 - RNA, 19 nt, Artificial Sequence
  Description of Artificial Sequence: Synthetic oligonucleotide
ggucugcaccucgucggua

SEQ ID NO: 1423112 - RNA, 19 nt, Artificial Sequence
  Description of Artificial Sequence: Synthetic oligonucleotide
ggcgcucaacggaguguaa

SEQ ID NO: 1423113 - RNA, 19 nt, Artificial Sequence
  Description of Artificial Sequence: Synthetic oligonucleotide
cgccgaucaccagguaguc

SEQ ID NO: 1423114 - RNA, 19 nt, Artificial Sequence
  Description of Artificial Sequence: Synthetic oligonucleotide
ccgccgccgaucaccaggu

SEQ ID NO: 1423115 - RNA, 19 nt, Artificial Sequence
  Description of Artificial Sequence: Synthetic oligonucleotide
cccuagcgccgagcuccgc

SEQ ID NO: 1423116 - RNA, 19 nt, Artificial Sequence
  Description of Artificial Sequence: Synthetic oligonucleotide
cgcggcccuagcgccgagc

SEQ ID NO: 1423117 - RNA, 19 nt, Artificial Sequence
  Description of Artificial Sequence: Synthetic oligonucleotide
ccgcgcgcuggccagcccu

SEQ ID NO: 1423118 - RNA, 19 nt, Artificial Sequence
  Description of Artificial Sequence: Synthetic oligonucleotide
ccucgucgguacucgccau

SEQ ID NO: 1423119 - RNA, 19 nt, Artificial Sequence
  Description of Artificial Sequence: Synthetic oligonucleotide
cggcccuagcgccgagcuc

SEQ ID NO: 1423120 - RNA, 19 nt, Artificial Sequence
  Description of Artificial Sequence: Synthetic oligonucleotide
cgcaagugccacccagcuu

SEQ ID NO: 1423121 - RNA, 19 nt, Artificial Sequence
  Description of Artificial Sequence: Synthetic oligonucleotide
ccgcggcccuagcgccgag

SEQ ID NO: 1423122 - RNA, 19 nt, Artificial Sequence
  Description of Artificial Sequence: Synthetic oligonucleotide
ccgcacccacaaugacacu

SEQ ID NO: 1423123 - RNA, 19 nt, Artificial Sequence
  Description of Artificial Sequence: Synthetic oligonucleotide
agauaggugaacucgaagc

SEQ ID NO: 1423124 - RNA, 19 nt, Artificial Sequence
  Description of Artificial Sequence: Synthetic oligonucleotide
uucauuaaaguccugaagu

SEQ ID NO: 1423125 - RNA, 19 nt, Artificial Sequence
  Description of Artificial Sequence: Synthetic oligonucleotide
uuaguuagcaacagguugg

SEQ ID NO: 1423126 - RNA, 19 nt, Artificial Sequence
  Description of Artificial Sequence: Synthetic oligonucleotide
uauuuaguuagcaacaggu

SEQ ID NO: 1423127 - RNA, 19 nt, Artificial Sequence
  Description of Artificial Sequence: Synthetic oligonucleotide
uuuaguuagcaacagguug

SEQ ID NO: 1423128 - RNA, 19 nt, Artificial Sequence
  Description of Artificial Sequence: Synthetic oligonucleotide
aaaggcucugccuuguggc

SEQ ID NO: 1423129 - RNA, 19 nt, Artificial Sequence
  Description of Artificial Sequence: Synthetic oligonucleotide
aacaccauuacaccugugg

SEQ ID NO: 1423130 - RNA, 19 nt, Artificial Sequence
  Description of Artificial Sequence: Synthetic oligonucleotide
auaaccauuaguuugugug

SEQ ID NO: 1423131 - RNA, 19 nt, Artificial Sequence
  Description of Artificial Sequence: Synthetic oligonucleotide
aaagagaccucucaaggag

SEQ ID NO: 1423132 - RNA, 19 nt, Artificial Sequence
  Description of Artificial Sequence: Synthetic oligonucleotide
uucaacuuaucccaccugg

SEQ ID NO: 1423133 - RNA, 19 nt, Artificial Sequence
  Description of Artificial Sequence: Synthetic oligonucleotide
uuagcaagcacauuggggu

SEQ ID NO: 1423134 - RNA, 19 nt, Artificial Sequence
  Description of Artificial Sequence: Synthetic oligonucleotide
aaccuuuacccauuuuccc

SEQ ID NO: 1423135 - RNA, 19 nt, Artificial Sequence
  Description of Artificial Sequence: Synthetic oligonucleotide
guaaagagaccucucaagg

SEQ ID NO: 1423136 - RNA, 19 nt, Artificial Sequence
  Description of Artificial Sequence: Synthetic oligonucleotide
gauguuuuauuccaguaac

SEQ ID NO: 1423137 - RNA, 19 nt, Artificial Sequence
  Description of Artificial Sequence: Synthetic oligonucleotide
uucucuaagagaaaacaga

SEQ ID NO: 1423138 - RNA, 19 nt, Artificial Sequence
  Description of Artificial Sequence: Synthetic oligonucleotide
uacgguuuauuaaugacca

SEQ ID NO: 1423139 - RNA, 19 nt, Artificial Sequence
  Description of Artificial Sequence: Synthetic oligonucleotide
uuauuuaguuagcaacagg

SEQ ID NO: 1423140 - RNA, 19 nt, Artificial Sequence
  Description of Artificial Sequence: Synthetic oligonucleotide
gacuugaugugccauaucc

SEQ ID NO: 1423141 - RNA, 19 nt, Artificial Sequence
  Description of Artificial Sequence: Synthetic oligonucleotide
guuagcaacagguugggag

SEQ ID NO: 1423142 - RNA, 19 nt, Artificial Sequence
  Description of Artificial Sequence: Synthetic oligonucleotide
aacuuaucccaccuggcuc

SEQ ID NO: 1423143 - RNA, 19 nt, Artificial Sequence
  Description of Artificial Sequence: Synthetic oligonucleotide
aguucuaaacaguuccugg

SEQ ID NO: 1423144 - RNA, 19 nt, Artificial Sequence
  Description of Artificial Sequence: Synthetic oligonucleotide
uuugacucuccuuuacugg

SEQ ID NO: 1423145 - RNA, 19 nt, Artificial Sequence
  Description of Artificial Sequence: Synthetic oligonucleotide
uguccauacgguaacucgg

SEQ ID NO: 1423146 - RNA, 19 nt, Artificial Sequence
  Description of Artificial Sequence: Synthetic oligonucleotide
auacgguuuauuaaugacc

SEQ ID NO: 1423147 - RNA, 19 nt, Artificial Sequence
  Description of Artificial Sequence: Synthetic oligonucleotide
guccugauagcucagaagc

SEQ ID NO: 1423148 - RNA, 19 nt, Artificial Sequence
  Description of Artificial Sequence: Synthetic oligonucleotide
ucaccuaaccaaccaaggg

SEQ ID NO: 1423149 - RNA, 19 nt, Artificial Sequence
  Description of Artificial Sequence: Synthetic oligonucleotide
uuuauuuaguuagcaacag

SEQ ID NO: 1423150 - RNA, 19 nt, Artificial Sequence
  Description of Artificial Sequence: Synthetic oligonucleotide
aacagugauggcccaguac

SEQ ID NO: 1423151 - RNA, 19 nt, Artificial Sequence
  Description of Artificial Sequence: Synthetic oligonucleotide
cagacgguggcacagaugc

SEQ ID NO: 1423152 - RNA, 19 nt, Artificial Sequence
  Description of Artificial Sequence: Synthetic oligonucleotide
ugugcuucuacacgccugg

SEQ ID NO: 1423153 - RNA, 19 nt, Artificial Sequence
  Description of Artificial Sequence: Synthetic oligonucleotide
uuguccauacgguaacucg

SEQ ID NO: 1423154 - RNA, 19 nt, Artificial Sequence
  Description of Artificial Sequence: Synthetic oligonucleotide
uuuaccucaccuaaccaac

SEQ ID NO: 1423155 - RNA, 19 nt, Artificial Sequence
  Description of Artificial Sequence: Synthetic oligonucleotide
aagauaggugaacucgaag

SEQ ID NO: 1423156 - RNA, 19 nt, Artificial Sequence
  Description of Artificial Sequence: Synthetic oligonucleotide
ugugccauauccuucuccc

SEQ ID NO: 1423157 - RNA, 19 nt, Artificial Sequence
  Description of Artificial Sequence: Synthetic oligonucleotide
caucuugugguguugcugg

SEQ ID NO: 1423158 - RNA, 19 nt, Artificial Sequence
  Description of Artificial Sequence: Synthetic oligonucleotide
uguagucucuuccaaguga

SEQ ID NO: 1423159 - RNA, 19 nt, Artificial Sequence
  Description of Artificial Sequence: Synthetic oligonucleotide
ugauuuggcaucuccaaac

SEQ ID NO: 1423160 - RNA, 19 nt, Artificial Sequence
  Description of Artificial Sequence: Synthetic oligonucleotide
uccugguucucuaagagaa

SEQ ID NO: 1423161 - RNA, 19 nt, Artificial Sequence
  Description of Artificial Sequence: Synthetic oligonucleotide
ugauguuuuauuccaguaa

SEQ ID NO: 1423162 - RNA, 19 nt, Artificial Sequence
  Description of Artificial Sequence: Synthetic oligonucleotide
uuagcaacagguugggaga

SEQ ID NO: 1423163 - RNA, 19 nt, Artificial Sequence
  Description of Artificial Sequence: Synthetic oligonucleotide
uccuuagcaagcacauugg

SEQ ID NO: 1423164 - RNA, 19 nt, Artificial Sequence
  Description of Artificial Sequence: Synthetic oligonucleotide
agaccucucaaggagagac

SEQ ID NO: 1423165 - RNA, 19 nt, Artificial Sequence
  Description of Artificial Sequence: Synthetic oligonucleotide
accuauuccagucugagua

SEQ ID NO: 1423166 - RNA, 19 nt, Artificial Sequence
  Description of Artificial Sequence: Synthetic oligonucleotide
auuggggugaacuucucug

SEQ ID NO: 1423167 - RNA, 19 nt, Artificial Sequence
  Description of Artificial Sequence: Synthetic oligonucleotide
gaaaauuugcccacagggc

SEQ ID NO: 1423168 - RNA, 19 nt, Artificial Sequence
  Description of Artificial Sequence: Synthetic oligonucleotide
uaaagagaccucucaagga

SEQ ID NO: 1423169 - RNA, 19 nt, Artificial Sequence
  Description of Artificial Sequence: Synthetic oligonucleotide
ucuaaacaguuccuggacu

SEQ ID NO: 1423170 - RNA, 19 nt, Artificial Sequence
  Description of Artificial Sequence: Synthetic oligonucleotide
ugacauacagcagagcucu

SEQ ID NO: 1423171 - RNA, 19 nt, Artificial Sequence
  Description of Artificial Sequence: Synthetic oligonucleotide
ucuguagucucuuccaagu

SEQ ID NO: 1423172 - RNA, 19 nt, Artificial Sequence
  Description of Artificial Sequence: Synthetic oligonucleotide
aauaaccauuaguuugugu

SEQ ID NO: 1423173 - RNA, 19 nt, Artificial Sequence
  Description of Artificial Sequence: Synthetic oligonucleotide
auauccuucucccaagcca

SEQ ID NO: 1423174 - RNA, 19 nt, Artificial Sequence
  Description of Artificial Sequence: Synthetic oligonucleotide
cauacgguuuauuaaugac

SEQ ID NO: 1423175 - RNA, 19 nt, Artificial Sequence
  Description of Artificial Sequence: Synthetic oligonucleotide
gauuuggcaucuccaaacc

SEQ ID NO: 1423176 - RNA, 19 nt, Artificial Sequence
  Description of Artificial Sequence: Synthetic oligonucleotide
gccaauaaccauuaguuug

SEQ ID NO: 1423177 - RNA, 19 nt, Artificial Sequence
  Description of Artificial Sequence: Synthetic oligonucleotide
agcucuagggccaaccugc

SEQ ID NO: 1423178 - RNA, 19 nt, Artificial Sequence
  Description of Artificial Sequence: Synthetic oligonucleotide
uaggugaacucgaagcuga

SEQ ID NO: 1423179 - RNA, 19 nt, Artificial Sequence
  Description of Artificial Sequence: Synthetic oligonucleotide
ggugaaucgcacuaguucc

SEQ ID NO: 1423180 - RNA, 19 nt, Artificial Sequence
  Description of Artificial Sequence: Synthetic oligonucleotide
auuccggcuggcccgaacc

SEQ ID NO: 1423181 - RNA, 19 nt, Artificial Sequence
  Description of Artificial Sequence: Synthetic oligonucleotide
cauacgguaacucggggac

SEQ ID NO: 1423182 - RNA, 19 nt, Artificial Sequence
  Description of Artificial Sequence: Synthetic oligonucleotide
aggauugggcaauccaaac

SEQ ID NO: 1423183 - RNA, 19 nt, Artificial Sequence
  Description of Artificial Sequence: Synthetic oligonucleotide
cuuccaucuugguaaagag

SEQ ID NO: 1423184 - RNA, 19 nt, Artificial Sequence
  Description of Artificial Sequence: Synthetic oligonucleotide
uauagcgggccuuugucug

SEQ ID NO: 1423185 - RNA, 19 nt, Artificial Sequence
  Description of Artificial Sequence: Synthetic oligonucleotide
gacgauguagggaaugugc

SEQ ID NO: 1423186 - RNA, 19 nt, Artificial Sequence
  Description of Artificial Sequence: Synthetic oligonucleotide
uucucccaagccaacacca

SEQ ID NO: 1423187 - RNA, 19 nt, Artificial Sequence
  Description of Artificial Sequence: Synthetic oligonucleotide
cauacagcagagcucuagg

SEQ ID NO: 1423188 - RNA, 19 nt, Artificial Sequence
  Description of Artificial Sequence: Synthetic oligonucleotide
cucaccuaaccaaccaagg

SEQ ID NO: 1423189 - RNA, 19 nt, Artificial Sequence
  Description of Artificial Sequence: Synthetic oligonucleotide
gguaaagagaccucucaag

SEQ ID NO: 1423190 - RNA, 19 nt, Artificial Sequence
  Description of Artificial Sequence: Synthetic oligonucleotide
auuaaaguccugaaguggu

SEQ ID NO: 1423191 - RNA, 19 nt, Artificial Sequence
  Description of Artificial Sequence: Synthetic oligonucleotide
cuaagcaccugguacugag

SEQ ID NO: 1423192 - RNA, 19 nt, Artificial Sequence
  Description of Artificial Sequence: Synthetic oligonucleotide
gauauagcgggccuuuguc

SEQ ID NO: 1423193 - RNA, 19 nt, Artificial Sequence
  Description of Artificial Sequence: Synthetic oligonucleotide
uauccuucucccaagccaa

SEQ ID NO: 1423194 - RNA, 19 nt, Artificial Sequence
  Description of Artificial Sequence: Synthetic oligonucleotide
aacagguugggagauuuca

SEQ ID NO: 1423195 - RNA, 19 nt, Artificial Sequence
  Description of Artificial Sequence: Synthetic oligonucleotide
uggagaauccccucgggcu

SEQ ID NO: 1423196 - RNA, 19 nt, Artificial Sequence
  Description of Artificial Sequence: Synthetic oligonucleotide
cuuguggccacgaagcauc

SEQ ID NO: 1423197 - RNA, 19 nt, Artificial Sequence
  Description of Artificial Sequence: Synthetic oligonucleotide
ugugcaaagaagugaggaa

SEQ ID NO: 1423198 - RNA, 19 nt, Artificial Sequence
  Description of Artificial Sequence: Synthetic oligonucleotide
uccacgagggcagaagagg

SEQ ID NO: 1423199 - RNA, 19 nt, Artificial Sequence
  Description of Artificial Sequence: Synthetic oligonucleotide
uuuacugguccaaucuguc

SEQ ID NO: 1423200 - RNA, 19 nt, Artificial Sequence
  Description of Artificial Sequence: Synthetic oligonucleotide
gugaucaccaaggauuggg

SEQ ID NO: 1423201 - RNA, 19 nt, Artificial Sequence
  Description of Artificial Sequence: Synthetic oligonucleotide
cagacugacaguaaauaca

SEQ ID NO: 1423202 - RNA, 19 nt, Artificial Sequence
  Description of Artificial Sequence: Synthetic oligonucleotide
acuuaucccaccuggcucu

SEQ ID NO: 1423203 - RNA, 19 nt, Artificial Sequence
  Description of Artificial Sequence: Synthetic oligonucleotide
aagcacauuggggugaacu

SEQ ID NO: 1423204 - RNA, 19 nt, Artificial Sequence
  Description of Artificial Sequence: Synthetic oligonucleotide
gcgaguucuaaacaguucc

SEQ ID NO: 1423205 - RNA, 19 nt, Artificial Sequence
  Description of Artificial Sequence: Synthetic oligonucleotide
aacaggcuguagcuccacg

SEQ ID NO: 1423206 - RNA, 19 nt, Artificial Sequence
  Description of Artificial Sequence: Synthetic oligonucleotide
cauuaguuugugugcguag

SEQ ID NO: 1423207 - RNA, 19 nt, Artificial Sequence
  Description of Artificial Sequence: Synthetic oligonucleotide
uuaccucaccuaaccaacc

SEQ ID NO: 1423208 - RNA, 19 nt, Artificial Sequence
  Description of Artificial Sequence: Synthetic oligonucleotide
acaccauuacaccuguggu

SEQ ID NO: 1423209 - RNA, 19 nt, Artificial Sequence
  Description of Artificial Sequence: Synthetic oligonucleotide
uccauacgguaacucgggg

SEQ ID NO: 1423210 - RNA, 19 nt, Artificial Sequence
  Description of Artificial Sequence: Synthetic oligonucleotide
gagaccauacgguuuauua

SEQ ID NO: 1423211 - RNA, 19 nt, Artificial Sequence
  Description of Artificial Sequence: Synthetic oligonucleotide
guagucucuuccaagugag

SEQ ID NO: 1423212 - RNA, 19 nt, Artificial Sequence
  Description of Artificial Sequence: Synthetic oligonucleotide
uuaguuugugugcguaguc

SEQ ID NO: 1423213 - RNA, 19 nt, Artificial Sequence
  Description of Artificial Sequence: Synthetic oligonucleotide
agaccauacgguuuauuaa

SEQ ID NO: 1423214 - RNA, 19 nt, Artificial Sequence
  Description of Artificial Sequence: Synthetic oligonucleotide
uuaaaguccugaagugguc

SEQ ID NO: 1423215 - RNA, 19 nt, Artificial Sequence
  Description of Artificial Sequence: Synthetic oligonucleotide
cuggcccgaaccuuuaccc

SEQ ID NO: 1423216 - RNA, 19 nt, Artificial Sequence
  Description of Artificial Sequence: Synthetic oligonucleotide
ugggcauuccggcuggccc

SEQ ID NO: 1423217 - RNA, 19 nt, Artificial Sequence
  Description of Artificial Sequence: Synthetic oligonucleotide
gauaggugaacucgaagcu

SEQ ID NO: 1423218 - RNA, 19 nt, Artificial Sequence
  Description of Artificial Sequence: Synthetic oligonucleotide
gacagcgucaucuuguggu

SEQ ID NO: 1423219 - RNA, 19 nt, Artificial Sequence
  Description of Artificial Sequence: Synthetic oligonucleotide
auauagcgggccuuugucu

SEQ ID NO: 1423220 - RNA, 19 nt, Artificial Sequence
  Description of Artificial Sequence: Synthetic oligonucleotide
gguacugaguuacagcaac

SEQ ID NO: 1423221 - RNA, 19 nt, Artificial Sequence
  Description of Artificial Sequence: Synthetic oligonucleotide
aucgcacuaguuccugcac

SEQ ID NO: 1423222 - RNA, 19 nt, Artificial Sequence
  Description of Artificial Sequence: Synthetic oligonucleotide
augacauacagcagagcuc

SEQ ID NO: 1423223 - RNA, 19 nt, Artificial Sequence
  Description of Artificial Sequence: Synthetic oligonucleotide
caugacauacagcagagcu

SEQ ID NO: 1423224 - RNA, 19 nt, Artificial Sequence
  Description of Artificial Sequence: Synthetic oligonucleotide
ggcaauccaaaccaaaaga

SEQ ID NO: 1423225 - RNA, 19 nt, Artificial Sequence
  Description of Artificial Sequence: Synthetic oligonucleotide
aaccuauuccagucugagu

SEQ ID NO: 1423226 - RNA, 19 nt, Artificial Sequence
  Description of Artificial Sequence: Synthetic oligonucleotide
ccacacuacagucagacug

SEQ ID NO: 1423227 - RNA, 19 nt, Artificial Sequence
  Description of Artificial Sequence: Synthetic oligonucleotide
ucaucuugugguguugcug

SEQ ID NO: 1423228 - RNA, 19 nt, Artificial Sequence
  Description of Artificial Sequence: Synthetic oligonucleotide
ucgcacuaguuccugcacc

SEQ ID NO: 1423229 - RNA, 19 nt, Artificial Sequence
  Description of Artificial Sequence: Synthetic oligonucleotide
ucacuuacucaggucaucu

SEQ ID NO: 1423230 - RNA, 19 nt, Artificial Sequence
  Description of Artificial Sequence: Synthetic oligonucleotide
cuuugauccugauuuggca

SEQ ID NO: 1423231 - RNA, 19 nt, Artificial Sequence
  Description of Artificial Sequence: Synthetic oligonucleotide
cugaguacuugugaucacc

SEQ ID NO: 1423232 - RNA, 19 nt, Artificial Sequence
  Description of Artificial Sequence: Synthetic oligonucleotide
uacgguaacucggggacag

SEQ ID NO: 1423233 - RNA, 19 nt, Artificial Sequence
  Description of Artificial Sequence: Synthetic oligonucleotide
gauguagggaaugugcaaa

SEQ ID NO: 1423234 - RNA, 19 nt, Artificial Sequence
  Description of Artificial Sequence: Synthetic oligonucleotide
uuacugguccaaucugucu

SEQ ID NO: 1423235 - RNA, 19 nt, Artificial Sequence
  Description of Artificial Sequence: Synthetic oligonucleotide
uccugauagcucagaagcu

SEQ ID NO: 1423236 - RNA, 19 nt, Artificial Sequence
  Description of Artificial Sequence: Synthetic oligonucleotide
uugauccugauuuggcauc

SEQ ID NO: 1423237 - RNA, 19 nt, Artificial Sequence
  Description of Artificial Sequence: Synthetic oligonucleotide
acgguuuauuaaugaccac

SEQ ID NO: 1423238 - RNA, 19 nt, Artificial Sequence
  Description of Artificial Sequence: Synthetic oligonucleotide
cugguggagaauccccucg

SEQ ID NO: 1423239 - RNA, 19 nt, Artificial Sequence
  Description of Artificial Sequence: Synthetic oligonucleotide
gcugcuaagcaccugguac

SEQ ID NO: 1423240 - RNA, 19 nt, Artificial Sequence
  Description of Artificial Sequence: Synthetic oligonucleotide
agacugacaguaaauacaa

SEQ ID NO: 1423241 - RNA, 19 nt, Artificial Sequence
  Description of Artificial Sequence: Synthetic oligonucleotide
ggauugggcaauccaaacc

SEQ ID NO: 1423242 - RNA, 19 nt, Artificial Sequence
  Description of Artificial Sequence: Synthetic oligonucleotide
caucauuuaccucaccuaa

SEQ ID NO: 1423243 - RNA, 19 nt, Artificial Sequence
  Description of Artificial Sequence: Synthetic oligonucleotide
guagggaaugugcaaagaa

SEQ ID NO: 1423244 - RNA, 19 nt, Artificial Sequence
  Description of Artificial Sequence: Synthetic oligonucleotide
uaguuugugugcguagucu

SEQ ID NO: 1423245 - RNA, 19 nt, Artificial Sequence
  Description of Artificial Sequence: Synthetic oligonucleotide
auaggugaacucgaagcug

SEQ ID NO: 1423246 - RNA, 19 nt, Artificial Sequence
  Description of Artificial Sequence: Synthetic oligonucleotide
uuugucugauguaguccca

SEQ ID NO: 1423247 - RNA, 19 nt, Artificial Sequence
  Description of Artificial Sequence: Synthetic oligonucleotide
caagugagaaggcagcaga

SEQ ID NO: 1423248 - RNA, 19 nt, Artificial Sequence
  Description of Artificial Sequence: Synthetic oligonucleotide
uccccauuguccauacggu

SEQ ID NO: 1423249 - RNA, 19 nt, Artificial Sequence
  Description of Artificial Sequence: Synthetic oligonucleotide
acaggcuguagcuccacga

SEQ ID NO: 1423250 - RNA, 19 nt, Artificial Sequence
  Description of Artificial Sequence: Synthetic oligonucleotide
uacagcaacaugggcauuc

SEQ ID NO: 1423251 - RNA, 19 nt, Artificial Sequence
  Description of Artificial Sequence: Synthetic oligonucleotide
accauuacaccugugguuu

SEQ ID NO: 1423252 - RNA, 19 nt, Artificial Sequence
  Description of Artificial Sequence: Synthetic oligonucleotide
aaagauaggugaacucgaa

SEQ ID NO: 1423253 - RNA, 19 nt, Artificial Sequence
  Description of Artificial Sequence: Synthetic oligonucleotide
guacaucacugaugcagag

SEQ ID NO: 1423254 - RNA, 19 nt, Artificial Sequence
  Description of Artificial Sequence: Synthetic oligonucleotide
aggaaguuucugaggggcc

SEQ ID NO: 1423255 - RNA, 19 nt, Artificial Sequence
  Description of Artificial Sequence: Synthetic oligonucleotide
gguucucuaagagaaaaca

SEQ ID NO: 1423256 - RNA, 19 nt, Artificial Sequence
  Description of Artificial Sequence: Synthetic oligonucleotide
gaccauacgguuuauuaau

SEQ ID NO: 1423257 - RNA, 19 nt, Artificial Sequence
  Description of Artificial Sequence: Synthetic oligonucleotide
aaccaagggagccguccug

SEQ ID NO: 1423258 - RNA, 19 nt, Artificial Sequence
  Description of Artificial Sequence: Synthetic oligonucleotide
aaauuugcccacagggcaa

SEQ ID NO: 1423259 - RNA, 19 nt, Artificial Sequence
  Description of Artificial Sequence: Synthetic oligonucleotide
ugcugggugaaucgcacua

SEQ ID NO: 1423260 - RNA, 19 nt, Artificial Sequence
  Description of Artificial Sequence: Synthetic oligonucleotide
gagggagugcugcuaagca

SEQ ID NO: 1423261 - RNA, 19 nt, Artificial Sequence
  Description of Artificial Sequence: Synthetic oligonucleotide
guggagaauccccucgggc

SEQ ID NO: 1423262 - RNA, 19 nt, Artificial Sequence
  Description of Artificial Sequence: Synthetic oligonucleotide
acagcgucaucuuguggug

SEQ ID NO: 1423263 - RNA, 19 nt, Artificial Sequence
  Description of Artificial Sequence: Synthetic oligonucleotide
guaacucggggacagcguc

SEQ ID NO: 1423264 - RNA, 19 nt, Artificial Sequence
  Description of Artificial Sequence: Synthetic oligonucleotide
ugaaucgcacuaguuccug

SEQ ID NO: 1423265 - RNA, 19 nt, Artificial Sequence
  Description of Artificial Sequence: Synthetic oligonucleotide
aauccccucgggcucaguu

SEQ ID NO: 1423266 - RNA, 19 nt, Artificial Sequence
  Description of Artificial Sequence: Synthetic oligonucleotide
ugugaucaccaaggauugg

SEQ ID NO: 1423267 - RNA, 19 nt, Artificial Sequence
  Description of Artificial Sequence: Synthetic oligonucleotide
gagcucuagggccaaccug

SEQ ID NO: 1423268 - RNA, 19 nt, Artificial Sequence
  Description of Artificial Sequence: Synthetic oligonucleotide
caccuggcgaguucuaaac

SEQ ID NO: 1423269 - RNA, 19 nt, Artificial Sequence
  Description of Artificial Sequence: Synthetic oligonucleotide
acgagggcagaagagggag

SEQ ID NO: 1423270 - RNA, 19 nt, Artificial Sequence
  Description of Artificial Sequence: Synthetic oligonucleotide
agccaauaaccauuaguuu

SEQ ID NO: 1423271 - RNA, 19 nt, Artificial Sequence
  Description of Artificial Sequence: Synthetic oligonucleotide
gaagagggagugcugcuaa

SEQ ID NO: 1423272 - RNA, 19 nt, Artificial Sequence
  Description of Artificial Sequence: Synthetic oligonucleotide
agagcucuagggccaaccu

SEQ ID NO: 1423273 - RNA, 19 nt, Artificial Sequence
  Description of Artificial Sequence: Synthetic oligonucleotide
uaacucggggacagcguca

SEQ ID NO: 1423274 - RNA, 19 nt, Artificial Sequence
  Description of Artificial Sequence: Synthetic oligonucleotide
uggcgaguucuaaacaguu

SEQ ID NO: 1423275 - RNA, 19 nt, Artificial Sequence
  Description of Artificial Sequence: Synthetic oligonucleotide
auccccucgggcucaguuc

SEQ ID NO: 1423276 - RNA, 19 nt, Artificial Sequence
  Description of Artificial Sequence: Synthetic oligonucleotide
gggugaaucgcacuaguuc

SEQ ID NO: 1423277 - RNA, 19 nt, Artificial Sequence
  Description of Artificial Sequence: Synthetic oligonucleotide
caggcuguagcuccacgag

SEQ ID NO: 1423278 - RNA, 19 nt, Artificial Sequence
  Description of Artificial Sequence: Synthetic oligonucleotide
guggguaguacaucacuga

SEQ ID NO: 1423279 - RNA, 19 nt, Artificial Sequence
  Description of Artificial Sequence: Synthetic oligonucleotide
uguugcuggauggggauau

SEQ ID NO: 1423280 - RNA, 19 nt, Artificial Sequence
  Description of Artificial Sequence: Synthetic oligonucleotide
ugcguagucuguuguccca

SEQ ID NO: 1423281 - RNA, 19 nt, Artificial Sequence
  Description of Artificial Sequence: Synthetic oligonucleotide
ccuggcgaguucuaaacag

SEQ ID NO: 1423282 - RNA, 19 nt, Artificial Sequence
  Description of Artificial Sequence: Synthetic oligonucleotide
cuucaacuuaucccaccug

SEQ ID NO: 1423283 - RNA, 19 nt, Artificial Sequence
  Description of Artificial Sequence: Synthetic oligonucleotide
ucgggcucaguuccuuagc

SEQ ID NO: 1423284 - RNA, 19 nt, Artificial Sequence
  Description of Artificial Sequence: Synthetic oligonucleotide
auuuaguuagcaacagguu

SEQ ID NO: 1423285 - RNA, 19 nt, Artificial Sequence
  Description of Artificial Sequence: Synthetic oligonucleotide
ucgaagcugauguuuuauu

SEQ ID NO: 1423286 - RNA, 19 nt, Artificial Sequence
  Description of Artificial Sequence: Synthetic oligonucleotide
cuguagucucuuccaagug

SEQ ID NO: 1423287 - RNA, 19 nt, Artificial Sequence
  Description of Artificial Sequence: Synthetic oligonucleotide
acugugcuucuacacgccu

SEQ ID NO: 1423288 - RNA, 19 nt, Artificial Sequence
  Description of Artificial Sequence: Synthetic oligonucleotide
aaccaaccaagggagccgu

SEQ ID NO: 1423289 - RNA, 19 nt, Artificial Sequence
  Description of Artificial Sequence: Synthetic oligonucleotide
uugcuggauggggauauca

SEQ ID NO: 1423290 - RNA, 19 nt, Artificial Sequence
  Description of Artificial Sequence: Synthetic oligonucleotide
cucgggcucaguuccuuag

SEQ ID NO: 1423291 - RNA, 19 nt, Artificial Sequence
  Description of Artificial Sequence: Synthetic oligonucleotide
gggagugcugcuaagcacc

SEQ ID NO: 1423292 - RNA, 19 nt, Artificial Sequence
  Description of Artificial Sequence: Synthetic oligonucleotide
uauuccagucugaguacuu

SEQ ID NO: 1423293 - RNA, 19 nt, Artificial Sequence
  Description of Artificial Sequence: Synthetic oligonucleotide
gguuuauuaaugaccacaa

SEQ ID NO: 1423294 - RNA, 19 nt, Artificial Sequence
  Description of Artificial Sequence: Synthetic oligonucleotide
accauacgguuuauuaaug

SEQ ID NO: 1423295 - RNA, 19 nt, Artificial Sequence
  Description of Artificial Sequence: Synthetic oligonucleotide
caggguggguaguacauca

SEQ ID NO: 1423296 - RNA, 19 nt, Artificial Sequence
  Description of Artificial Sequence: Synthetic oligonucleotide
uaguugcugggugaaucgc

SEQ ID NO: 1423297 - RNA, 19 nt, Artificial Sequence
  Description of Artificial Sequence: Synthetic oligonucleotide
gccucacuuacucagguca

SEQ ID NO: 1423298 - RNA, 19 nt, Artificial Sequence
  Description of Artificial Sequence: Synthetic oligonucleotide
cgaaccuuuacccauuuuc

SEQ ID NO: 1423299 - RNA, 19 nt, Artificial Sequence
  Description of Artificial Sequence: Synthetic oligonucleotide
uggacuugaugugccauau

SEQ ID NO: 1423300 - RNA, 19 nt, Artificial Sequence
  Description of Artificial Sequence: Synthetic oligonucleotide
cuuuacugguccaaucugu

SEQ ID NO: 1423301 - RNA, 19 nt, Artificial Sequence
  Description of Artificial Sequence: Synthetic oligonucleotide
uggcccaguacuucuuuuc

SEQ ID NO: 1423302 - RNA, 19 nt, Artificial Sequence
  Description of Artificial Sequence: Synthetic oligonucleotide
gauggggauaucaaccacu

SEQ ID NO: 1423303 - RNA, 19 nt, Artificial Sequence
  Description of Artificial Sequence: Synthetic oligonucleotide
ggggugaacuucucuguag

SEQ ID NO: 1423304 - RNA, 19 nt, Artificial Sequence
  Description of Artificial Sequence: Synthetic oligonucleotide
ccucaccuaaccaaccaag

SEQ ID NO: 1423305 - RNA, 19 nt, Artificial Sequence
  Description of Artificial Sequence: Synthetic oligonucleotide
ccaaaagauaggugaacuc

SEQ ID NO: 1423306 - RNA, 19 nt, Artificial Sequence
  Description of Artificial Sequence: Synthetic oligonucleotide
gacgguggcacagaugcaa

SEQ ID NO: 1423307 - RNA, 19 nt, Artificial Sequence
  Description of Artificial Sequence: Synthetic oligonucleotide
aggggacacgaacagugau

SEQ ID NO: 1423308 - RNA, 19 nt, Artificial Sequence
  Description of Artificial Sequence: Synthetic oligonucleotide
agacgauguagggaaugug

SEQ ID NO: 1423309 - RNA, 19 nt, Artificial Sequence
  Description of Artificial Sequence: Synthetic oligonucleotide
uggcccgaaccuuuaccca

SEQ ID NO: 1423310 - RNA, 19 nt, Artificial Sequence
  Description of Artificial Sequence: Synthetic oligonucleotide
agggagccguccugauagc

SEQ ID NO: 1423311 - RNA, 19 nt, Artificial Sequence
  Description of Artificial Sequence: Synthetic oligonucleotide
gguggagaauccccucggg

SEQ ID NO: 1423312 - RNA, 19 nt, Artificial Sequence
  Description of Artificial Sequence: Synthetic oligonucleotide
cuuccacccuaccagccuc

SEQ ID NO: 1423313 - RNA, 19 nt, Artificial Sequence
  Description of Artificial Sequence: Synthetic oligonucleotide
ggauaucaaccacuuccug

SEQ ID NO: 1423314 - RNA, 19 nt, Artificial Sequence
  Description of Artificial Sequence: Synthetic oligonucleotide
auagcgggccuuugucuga

SEQ ID NO: 1423315 - RNA, 19 nt, Artificial Sequence
  Description of Artificial Sequence: Synthetic oligonucleotide
uccaaacccagacgaugua

SEQ ID NO: 1423316 - RNA, 19 nt, Artificial Sequence
  Description of Artificial Sequence: Synthetic oligonucleotide
caauaaccauuaguuugug

SEQ ID NO: 1423317 - RNA, 19 nt, Artificial Sequence
  Description of Artificial Sequence: Synthetic oligonucleotide
gaugcagagcuggacucca

SEQ ID NO: 1423318 - RNA, 19 nt, Artificial Sequence
  Description of Artificial Sequence: Synthetic oligonucleotide
uccagacgguggcacagau

SEQ ID NO: 1423319 - RNA, 19 nt, Artificial Sequence
  Description of Artificial Sequence: Synthetic oligonucleotide
ggcccaguacuucuuuucc

SEQ ID NO: 1423320 - RNA, 19 nt, Artificial Sequence
  Description of Artificial Sequence: Synthetic oligonucleotide
cugguucucuaagagaaaa

SEQ ID NO: 1423321 - RNA, 19 nt, Artificial Sequence
  Description of Artificial Sequence: Synthetic oligonucleotide
agucagacugacaguaaau

SEQ ID NO: 1423322 - RNA, 19 nt, Artificial Sequence
  Description of Artificial Sequence: Synthetic oligonucleotide
ucuccuuuacugguccaau

SEQ ID NO: 1423323 - RNA, 19 nt, Artificial Sequence
  Description of Artificial Sequence: Synthetic oligonucleotide
aacucggggacagcgucau

SEQ ID NO: 1423324 - RNA, 19 nt, Artificial Sequence
  Description of Artificial Sequence: Synthetic oligonucleotide
caucacugaugcagagcug

SEQ ID NO: 1423325 - RNA, 19 nt, Artificial Sequence
  Description of Artificial Sequence: Synthetic oligonucleotide
aacaaccagcuggagccaa

SEQ ID NO: 1423326 - RNA, 19 nt, Artificial Sequence
  Description of Artificial Sequence: Synthetic oligonucleotide
uuguggccacgaagcaucu

SEQ ID NO: 1423327 - RNA, 19 nt, Artificial Sequence
  Description of Artificial Sequence: Synthetic oligonucleotide
gugaggaagcuugcaggcc

SEQ ID NO: 1423328 - RNA, 19 nt, Artificial Sequence
  Description of Artificial Sequence: Synthetic oligonucleotide
agcgucaucuugugguguu

SEQ ID NO: 1423329 - RNA, 19 nt, Artificial Sequence
  Description of Artificial Sequence: Synthetic oligonucleotide
cugaggggccaaccuauuc

SEQ ID NO: 1423330 - RNA, 19 nt, Artificial Sequence
  Description of Artificial Sequence: Synthetic oligonucleotide
ccuauuccagucugaguac

SEQ ID NO: 1423331 - RNA, 19 nt, Artificial Sequence
  Description of Artificial Sequence: Synthetic oligonucleotide
aggguggguaguacaucac

SEQ ID NO: 1423332 - RNA, 19 nt, Artificial Sequence
  Description of Artificial Sequence: Synthetic oligonucleotide
cacagaugcaaaggcucug

SEQ ID NO: 1423333 - RNA, 19 nt, Artificial Sequence
  Description of Artificial Sequence: Synthetic oligonucleotide
cucuagggccaaccugccc

SEQ ID NO: 1423334 - RNA, 19 nt, Artificial Sequence
  Description of Artificial Sequence: Synthetic oligonucleotide
ggauggggauaucaaccac

SEQ ID NO: 1423335 - RNA, 19 nt, Artificial Sequence
  Description of Artificial Sequence: Synthetic oligonucleotide
cugcuaagcaccugguacu

SEQ ID NO: 1423336 - RNA, 19 nt, Artificial Sequence
  Description of Artificial Sequence: Synthetic oligonucleotide
ccaaacccagacgauguag

SEQ ID NO: 1423337 - RNA, 19 nt, Artificial Sequence
  Description of Artificial Sequence: Synthetic oligonucleotide
ggacagcgucaucuugugg

SEQ ID NO: 1423338 - RNA, 19 nt, Artificial Sequence
  Description of Artificial Sequence: Synthetic oligonucleotide
ggggacacgaacagugaug

SEQ ID NO: 1423339 - RNA, 19 nt, Artificial Sequence
  Description of Artificial Sequence: Synthetic oligonucleotide
ccauacgguuuauuaauga

SEQ ID NO: 1423340 - RNA, 19 nt, Artificial Sequence
  Description of Artificial Sequence: Synthetic oligonucleotide
cgcacuaguuccugcaccc

SEQ ID NO: 1423341 - RNA, 19 nt, Artificial Sequence
  Description of Artificial Sequence: Synthetic oligonucleotide
acgguaacucggggacagc

SEQ ID NO: 1423342 - RNA, 19 nt, Artificial Sequence
  Description of Artificial Sequence: Synthetic oligonucleotide
ggccacgaagcaucuuugc

SEQ ID NO: 1423343 - RNA, 19 nt, Artificial Sequence
  Description of Artificial Sequence: Synthetic oligonucleotide
cacccuaccagccucacuu

SEQ ID NO: 1423344 - RNA, 19 nt, Artificial Sequence
  Description of Artificial Sequence: Synthetic oligonucleotide
auacgguaacucggggaca

SEQ ID NO: 1423345 - RNA, 19 nt, Artificial Sequence
  Description of Artificial Sequence: Synthetic oligonucleotide
aguuagcaacagguuggga

SEQ ID NO: 1423346 - RNA, 19 nt, Artificial Sequence
  Description of Artificial Sequence: Synthetic oligonucleotide
acagggcaacaaccagcug

SEQ ID NO: 1423347 - RNA, 19 nt, Artificial Sequence
  Description of Artificial Sequence: Synthetic oligonucleotide
uaacaggcuguagcuccac

SEQ ID NO: 1423348 - RNA, 19 nt, Artificial Sequence
  Description of Artificial Sequence: Synthetic oligonucleotide
ccaaccaagggagccgucc

SEQ ID NO: 1423349 - RNA, 19 nt, Artificial Sequence
  Description of Artificial Sequence: Synthetic oligonucleotide
gucaucugcccaucauuua

SEQ ID NO: 1423350 - RNA, 19 nt, Artificial Sequence
  Description of Artificial Sequence: Synthetic oligonucleotide
caacaccauuacaccugug

SEQ ID NO: 1423351 - RNA, 19 nt, Artificial Sequence
  Description of Artificial Sequence: Synthetic oligonucleotide
guggccacgaagcaucuuu

SEQ ID NO: 1423352 - RNA, 19 nt, Artificial Sequence
  Description of Artificial Sequence: Synthetic oligonucleotide
ccaagugagaaggcagcag

SEQ ID NO: 1423353 - RNA, 19 nt, Artificial Sequence
  Description of Artificial Sequence: Synthetic oligonucleotide
cuggcgaguucuaaacagu

SEQ ID NO: 1423354 - RNA, 19 nt, Artificial Sequence
  Description of Artificial Sequence: Synthetic oligonucleotide
ccauacgguaacucgggga

SEQ ID NO: 1423355 - RNA, 19 nt, Artificial Sequence
  Description of Artificial Sequence: Synthetic oligonucleotide
cucggggacagcgucaucu

SEQ ID NO: 1423356 - RNA, 19 nt, Artificial Sequence
  Description of Artificial Sequence: Synthetic oligonucleotide
acagucagacugacaguaa

SEQ ID NO: 1423357 - RNA, 19 nt, Artificial Sequence
  Description of Artificial Sequence: Synthetic oligonucleotide
cauuccggcuggcccgaac

SEQ ID NO: 1423358 - RNA, 19 nt, Artificial Sequence
  Description of Artificial Sequence: Synthetic oligonucleotide
cugauagcucagaagcuuu

SEQ ID NO: 1423359 - RNA, 19 nt, Artificial Sequence
  Description of Artificial Sequence: Synthetic oligonucleotide
gcuguagcuccacgagggc

SEQ ID NO: 1423360 - RNA, 19 nt, Artificial Sequence
  Description of Artificial Sequence: Synthetic oligonucleotide
caccauuacaccugugguu

SEQ ID NO: 1423361 - RNA, 19 nt, Artificial Sequence
  Description of Artificial Sequence: Synthetic oligonucleotide
guuugugugcguagucugu

SEQ ID NO: 1423362 - RNA, 19 nt, Artificial Sequence
  Description of Artificial Sequence: Synthetic oligonucleotide
ggauauagcgggccuuugu

SEQ ID NO: 1423363 - RNA, 19 nt, Artificial Sequence
  Description of Artificial Sequence: Synthetic oligonucleotide
cauuggggugaacuucucu

SEQ ID NO: 1423364 - RNA, 19 nt, Artificial Sequence
  Description of Artificial Sequence: Synthetic oligonucleotide
acucggggacagcgucauc

SEQ ID NO: 1423365 - RNA, 19 nt, Artificial Sequence
  Description of Artificial Sequence: Synthetic oligonucleotide
gauggcccaguacuucuuu

SEQ ID NO: 1423366 - RNA, 19 nt, Artificial Sequence
  Description of Artificial Sequence: Synthetic oligonucleotide
gagaccucucaaggagaga

SEQ ID NO: 1423367 - RNA, 19 nt, Artificial Sequence
  Description of Artificial Sequence: Synthetic oligonucleotide
ggacacgaacagugauggc

SEQ ID NO: 1423368 - RNA, 19 nt, Artificial Sequence
  Description of Artificial Sequence: Synthetic oligonucleotide
ucccagcuacugccuucca

SEQ ID NO: 1423369 - RNA, 19 nt, Artificial Sequence
  Description of Artificial Sequence: Synthetic oligonucleotide
cuuuguccagacgguggca

SEQ ID NO: 1423370 - RNA, 19 nt, Artificial Sequence
  Description of Artificial Sequence: Synthetic oligonucleotide
cagaagcuuuucuucuggu

SEQ ID NO: 1423371 - RNA, 19 nt, Artificial Sequence
  Description of Artificial Sequence: Synthetic oligonucleotide
gcguagucuguugucccag

SEQ ID NO: 1423372 - RNA, 19 nt, Artificial Sequence
  Description of Artificial Sequence: Synthetic oligonucleotide
ccuagguccucuuccaucu

SEQ ID NO: 1423373 - RNA, 19 nt, Artificial Sequence
  Description of Artificial Sequence: Synthetic oligonucleotide
gugaaucgcacuaguuccu

SEQ ID NO: 1423374 - RNA, 19 nt, Artificial Sequence
  Description of Artificial Sequence: Synthetic oligonucleotide
cgguaacucggggacagcg

SEQ ID NO: 1423375 - RNA, 19 nt, Artificial Sequence
  Description of Artificial Sequence: Synthetic oligonucleotide
cccaagccaacaccauuac

SEQ ID NO: 1423376 - RNA, 19 nt, Artificial Sequence
  Description of Artificial Sequence: Synthetic oligonucleotide
acccuaccagccucacuua

SEQ ID NO: 1423377 - RNA, 19 nt, Artificial Sequence
  Description of Artificial Sequence: Synthetic oligonucleotide
uccacccuaccagccucac

SEQ ID NO: 1423378 - RNA, 19 nt, Artificial Sequence
  Description of Artificial Sequence: Synthetic oligonucleotide
ucuacacgccuggccucac

SEQ ID NO: 1423379 - RNA, 19 nt, Artificial Sequence
  Description of Artificial Sequence: Synthetic oligonucleotide
cauuacaccugugguuucu

SEQ ID NO: 1423380 - RNA, 19 nt, Artificial Sequence
  Description of Artificial Sequence: Synthetic oligonucleotide
accaaccaagggagccguc

SEQ ID NO: 1423381 - RNA, 19 nt, Artificial Sequence
  Description of Artificial Sequence: Synthetic oligonucleotide
ggacuugaugugccauauc

SEQ ID NO: 1423382 - RNA, 19 nt, Artificial Sequence
  Description of Artificial Sequence: Synthetic oligonucleotide
uagcgggccuuugucugau

SEQ ID NO: 1423383 - RNA, 19 nt, Artificial Sequence
  Description of Artificial Sequence: Synthetic oligonucleotide
uuacagcaacaugggcauu

SEQ ID NO: 1423384 - RNA, 19 nt, Artificial Sequence
  Description of Artificial Sequence: Synthetic oligonucleotide
caaccaagggagccguccu

SEQ ID NO: 1423385 - RNA, 19 nt, Artificial Sequence
  Description of Artificial Sequence: Synthetic oligonucleotide
ugccgagggcaaggggaca

SEQ ID NO: 1423386 - RNA, 19 nt, Artificial Sequence
  Description of Artificial Sequence: Synthetic oligonucleotide
ccagacgguggcacagaug

SEQ ID NO: 1423387 - RNA, 19 nt, Artificial Sequence
  Description of Artificial Sequence: Synthetic oligonucleotide
cguagucuguugucccagc

SEQ ID NO: 1423388 - RNA, 19 nt, Artificial Sequence
  Description of Artificial Sequence: Synthetic oligonucleotide
cccuaccagccucacuuac

SEQ ID NO: 1423389 - RNA, 19 nt, Artificial Sequence
  Description of Artificial Sequence: Synthetic oligonucleotide
acgguggcacagaugcaaa

SEQ ID NO: 1423390 - RNA, 19 nt, Artificial Sequence
  Description of Artificial Sequence: Synthetic oligonucleotide
agcgggccuuugucugaug

SEQ ID NO: 1423391 - RNA, 19 nt, Artificial Sequence
  Description of Artificial Sequence: Synthetic oligonucleotide
uagggccaaccugcccagc

SEQ ID NO: 1423392 - RNA, 19 nt, Artificial Sequence
  Description of Artificial Sequence: Synthetic oligonucleotide
gaccucucaaggagagacu

SEQ ID NO: 1423393 - RNA, 19 nt, Artificial Sequence
  Description of Artificial Sequence: Synthetic oligonucleotide
gggauauagcgggccuuug

SEQ ID NO: 1423394 - RNA, 19 nt, Artificial Sequence
  Description of Artificial Sequence: Synthetic oligonucleotide
guugucccagcuacugccu

SEQ ID NO: 1423395 - RNA, 19 nt, Artificial Sequence
  Description of Artificial Sequence: Synthetic oligonucleotide
caggggagaccauacgguu

SEQ ID NO: 1423396 - RNA, 19 nt, Artificial Sequence
  Description of Artificial Sequence: Synthetic oligonucleotide
ccauuacaccugugguuuc

SEQ ID NO: 1423397 - RNA, 19 nt, Artificial Sequence
  Description of Artificial Sequence: Synthetic oligonucleotide
guugcuggauggggauauc

SEQ ID NO: 1423398 - RNA, 19 nt, Artificial Sequence
  Description of Artificial Sequence: Synthetic oligonucleotide
agcaacagguugggagauu

SEQ ID NO: 1423399 - RNA, 19 nt, Artificial Sequence
  Description of Artificial Sequence: Synthetic oligonucleotide
caccugguacugaguuaca

SEQ ID NO: 1423400 - RNA, 19 nt, Artificial Sequence
  Description of Artificial Sequence: Synthetic oligonucleotide
ggggacagcgucaucuugu

SEQ ID NO: 1423401 - RNA, 19 nt, Artificial Sequence
  Description of Artificial Sequence: Synthetic oligonucleotide
ccaagccaacaccauuaca

SEQ ID NO: 1423402 - RNA, 19 nt, Artificial Sequence
  Description of Artificial Sequence: Synthetic oligonucleotide
gccuuguggccacgaagca

SEQ ID NO: 1423403 - RNA, 19 nt, Artificial Sequence
  Description of Artificial Sequence: Synthetic oligonucleotide
agacgguggcacagaugca

SEQ ID NO: 1423404 - RNA, 19 nt, Artificial Sequence
  Description of Artificial Sequence: Synthetic oligonucleotide
ccguggacaggggagacca

SEQ ID NO: 1423405 - RNA, 19 nt, Artificial Sequence
  Description of Artificial Sequence: Synthetic oligonucleotide
gccgagggcaaggggacac

SEQ ID NO: 1423406 - RNA, 19 nt, Artificial Sequence
  Description of Artificial Sequence: Synthetic oligonucleotide
ggcccgaaccuuuacccau

SEQ ID NO: 1423407 - RNA, 19 nt, Artificial Sequence
  Description of Artificial Sequence: Synthetic oligonucleotide
gcaacagguugggagauuu

SEQ ID NO: 1423408 - RNA, 19 nt, Artificial Sequence
  Description of Artificial Sequence: Synthetic oligonucleotide
gguaacucggggacagcgu

SEQ ID NO: 1423409 - RNA, 19 nt, Artificial Sequence
  Description of Artificial Sequence: Synthetic oligonucleotide
cacuuccugccgagggcaa

SEQ ID NO: 1423410 - RNA, 19 nt, Artificial Sequence
  Description of Artificial Sequence: Synthetic oligonucleotide
gcgucaucuugugguguug

SEQ ID NO: 1423411 - RNA, 19 nt, Artificial Sequence
  Description of Artificial Sequence: Synthetic oligonucleotide
gcccaucauuuaccucacc

SEQ ID NO: 1423412 - RNA, 19 nt, Artificial Sequence
  Description of Artificial Sequence: Synthetic oligonucleotide
ccauuaguuugugugcgua

SEQ ID NO: 1423413 - RNA, 19 nt, Artificial Sequence
  Description of Artificial Sequence: Synthetic oligonucleotide
gcgggccuuugucugaugu

SEQ ID NO: 1423414 - RNA, 19 nt, Artificial Sequence
  Description of Artificial Sequence: Synthetic oligonucleotide
ccuaccagccucacuuacu

SEQ ID NO: 1423415 - RNA, 19 nt, Artificial Sequence
  Description of Artificial Sequence: Synthetic oligonucleotide
gcaagcacauuggggugaa

SEQ ID NO: 1423416 - RNA, 19 nt, Artificial Sequence
  Description of Artificial Sequence: Synthetic oligonucleotide
guuccuuagcaagcacauu

SEQ ID NO: 1423417 - RNA, 19 nt, Artificial Sequence
  Description of Artificial Sequence: Synthetic oligonucleotide
cgggcucaguuccuuagca

SEQ ID NO: 1423418 - RNA, 19 nt, Artificial Sequence
  Description of Artificial Sequence: Synthetic oligonucleotide
ccugauagcucagaagcuu

SEQ ID NO: 1423419 - RNA, 19 nt, Artificial Sequence
  Description of Artificial Sequence: Synthetic oligonucleotide
cgaguucuaaacaguuccu

SEQ ID NO: 1423420 - RNA, 19 nt, Artificial Sequence
  Description of Artificial Sequence: Synthetic oligonucleotide
ccguccugauagcucagaa

SEQ ID NO: 1423421 - RNA, 19 nt, Artificial Sequence
  Description of Artificial Sequence: Synthetic oligonucleotide
ggagugcugcuaagcaccu

SEQ ID NO: 1423422 - RNA, 19 nt, Artificial Sequence
  Description of Artificial Sequence: Synthetic oligonucleotide
cuacacgccuggccucacu

SEQ ID NO: 1423423 - RNA, 19 nt, Artificial Sequence
  Description of Artificial Sequence: Synthetic oligonucleotide
cagcgucaucuuguggugu

SEQ ID NO: 1423424 - RNA, 19 nt, Artificial Sequence
  Description of Artificial Sequence: Synthetic oligonucleotide
ggcauuccggcuggcccga

SEQ ID NO: 1423425 - RNA, 19 nt, Artificial Sequence
  Description of Artificial Sequence: Synthetic oligonucleotide
cuuuuccaccuggcgaguu

SEQ ID NO: 1423426 - RNA, 19 nt, Artificial Sequence
  Description of Artificial Sequence: Synthetic oligonucleotide
ggccuuugucugauguagu

SEQ ID NO: 1423427 - RNA, 19 nt, Artificial Sequence
  Description of Artificial Sequence: Synthetic oligonucleotide
caucuuugccagggugggu

SEQ ID NO: 1423428 - RNA, 19 nt, Artificial Sequence
  Description of Artificial Sequence: Synthetic oligonucleotide
ccaccguggacaggggaga

SEQ ID NO: 1423429 - RNA, 19 nt, Artificial Sequence
  Description of Artificial Sequence: Synthetic oligonucleotide
gccguccugauagcucaga

SEQ ID NO: 1423430 - RNA, 19 nt, Artificial Sequence
  Description of Artificial Sequence: Synthetic oligonucleotide
ggggauauagcgggccuuu

SEQ ID NO: 1423431 - RNA, 19 nt, Artificial Sequence
  Description of Artificial Sequence: Synthetic oligonucleotide
gggagccguccugauagcu

SEQ ID NO: 1423432 - RNA, 19 nt, Artificial Sequence
  Description of Artificial Sequence: Synthetic oligonucleotide
ccucacuuacucaggucau

SEQ ID NO: 1423433 - RNA, 19 nt, Artificial Sequence
  Description of Artificial Sequence: Synthetic oligonucleotide
gccuggcaugcagguggag

SEQ ID NO: 1423434 - RNA, 19 nt, Artificial Sequence
  Description of Artificial Sequence: Synthetic oligonucleotide
cuuaucccaccuggcucuu

SEQ ID NO: 1423435 - RNA, 19 nt, Artificial Sequence
  Description of Artificial Sequence: Synthetic oligonucleotide
ccucgggcucaguuccuua

SEQ ID NO: 1423436 - RNA, 19 nt, Artificial Sequence
  Description of Artificial Sequence: Synthetic oligonucleotide
cgggccuuugucugaugua

SEQ ID NO: 1423437 - RNA, 19 nt, Artificial Sequence
  Description of Artificial Sequence: Synthetic oligonucleotide
gcccgaaccuuuacccauu

SEQ ID NO: 1423438 - RNA, 19 nt, Artificial Sequence
  Description of Artificial Sequence: Synthetic oligonucleotide
cccgaaccuuuacccauuu

SEQ ID NO: 1423439 - RNA, 19 nt, Artificial Sequence
  Description of Artificial Sequence: Synthetic oligonucleotide
ccacccuaccagccucacu

SEQ ID NO: 1423440 - RNA, 19 nt, Artificial Sequence
  Description of Artificial Sequence: Synthetic oligonucleotide
ccgaaccuuuacccauuuu

SEQ ID NO: 1423441 - RNA, 19 nt, Artificial Sequence
  Description of Artificial Sequence: Synthetic oligonucleotide
gcauuccggcuggcccgaa

SEQ ID NO: 1423442 - RNA, 19 nt, Artificial Sequence
  Description of Artificial Sequence: Synthetic oligonucleotide
cggcuggcccgaaccuuua

SEQ ID NO: 1423443 - RNA, 19 nt, Artificial Sequence
  Description of Artificial Sequence: Synthetic oligonucleotide
ccccucgggcucaguuccu

SEQ ID NO: 1423444 - RNA, 19 nt, Artificial Sequence
  Description of Artificial Sequence: Synthetic oligonucleotide
cguggacaggggagaccau

SEQ ID NO: 1423445 - RNA, 19 nt, Artificial Sequence
  Description of Artificial Sequence: Synthetic oligonucleotide
cccucgggcucaguuccuu

SEQ ID NO: 1423446 - RNA, 19 nt, Artificial Sequence
  Description of Artificial Sequence: Synthetic oligonucleotide
uaauuauagauccuguagg

SEQ ID NO: 1423447 - RNA, 19 nt, Artificial Sequence
  Description of Artificial Sequence: Synthetic oligonucleotide
uaaguuugggauaaguagg

SEQ ID NO: 1423448 - RNA, 19 nt, Artificial Sequence
  Description of Artificial Sequence: Synthetic oligonucleotide
uucgguuucauuuauagga

SEQ ID NO: 1423449 - RNA, 19 nt, Artificial Sequence
  Description of Artificial Sequence: Synthetic oligonucleotide
auaaguuugggauaaguag

SEQ ID NO: 1423450 - RNA, 19 nt, Artificial Sequence
  Description of Artificial Sequence: Synthetic oligonucleotide
aauucgguuucauuuauag

SEQ ID NO: 1423451 - RNA, 19 nt, Artificial Sequence
  Description of Artificial Sequence: Synthetic oligonucleotide
caucguaucuccaauaucg

SEQ ID NO: 1423452 - RNA, 19 nt, Artificial Sequence
  Description of Artificial Sequence: Synthetic oligonucleotide
aauacuuuguaugucauca

SEQ ID NO: 1423453 - RNA, 19 nt, Artificial Sequence
  Description of Artificial Sequence: Synthetic oligonucleotide
aagcaugugcuauugugcc

SEQ ID NO: 1423454 - RNA, 19 nt, Artificial Sequence
  Description of Artificial Sequence: Synthetic oligonucleotide
aaaagcaugugcuauugug

SEQ ID NO: 1423455 - RNA, 19 nt, Artificial Sequence
  Description of Artificial Sequence: Synthetic oligonucleotide
ucauauuccaauugauugg

SEQ ID NO: 1423456 - RNA, 19 nt, Artificial Sequence
  Description of Artificial Sequence: Synthetic oligonucleotide
acuaaguuguuuauuaacc

SEQ ID NO: 1423457 - RNA, 19 nt, Artificial Sequence
  Description of Artificial Sequence: Synthetic oligonucleotide
caauuuuaggcuuaauucc

SEQ ID NO: 1423458 - RNA, 19 nt, Artificial Sequence
  Description of Artificial Sequence: Synthetic oligonucleotide
auaacuauagcuaggguac

SEQ ID NO: 1423459 - RNA, 19 nt, Artificial Sequence
  Description of Artificial Sequence: Synthetic oligonucleotide
aauuauagauccuguaggu

SEQ ID NO: 1423460 - RNA, 19 nt, Artificial Sequence
  Description of Artificial Sequence: Synthetic oligonucleotide
aacauaacuauagcuaggg

SEQ ID NO: 1423461 - RNA, 19 nt, Artificial Sequence
  Description of Artificial Sequence: Synthetic oligonucleotide
aauuuugucaaguaccuuu

SEQ ID NO: 1423462 - RNA, 19 nt, Artificial Sequence
  Description of Artificial Sequence: Synthetic oligonucleotide
guaauuauagauccuguag

SEQ ID NO: 1423463 - RNA, 19 nt, Artificial Sequence
  Description of Artificial Sequence: Synthetic oligonucleotide
aaagcaugugcuauugugc

SEQ ID NO: 1423464 - RNA, 19 nt, Artificial Sequence
  Description of Artificial Sequence: Synthetic oligonucleotide
uuauagauccuguagguga

SEQ ID NO: 1423465 - RNA, 19 nt, Artificial Sequence
  Description of Artificial Sequence: Synthetic oligonucleotide
aaauugaagugacgguggc

SEQ ID NO: 1423466 - RNA, 19 nt, Artificial Sequence
  Description of Artificial Sequence: Synthetic oligonucleotide
uccaauaucgucuauccga

SEQ ID NO: 1423467 - RNA, 19 nt, Artificial Sequence
  Description of Artificial Sequence: Synthetic oligonucleotide
uugaauaccagaugggaug

SEQ ID NO: 1423468 - RNA, 19 nt, Artificial Sequence
  Description of Artificial Sequence: Synthetic oligonucleotide
aguaccuuucagcaaauuc

SEQ ID NO: 1423469 - RNA, 19 nt, Artificial Sequence
  Description of Artificial Sequence: Synthetic oligonucleotide
gaagaaguagaccuuauga

SEQ ID NO: 1423470 - RNA, 19 nt, Artificial Sequence
  Description of Artificial Sequence: Synthetic oligonucleotide
aauaucgucuauccgagaa

SEQ ID NO: 1423471 - RNA, 19 nt, Artificial Sequence
  Description of Artificial Sequence: Synthetic oligonucleotide
gaagaacuagcgaagaucc

SEQ ID NO: 1423472 - RNA, 19 nt, Artificial Sequence
  Description of Artificial Sequence: Synthetic oligonucleotide
ugcaucauuucaaacaaac

SEQ ID NO: 1423473 - RNA, 19 nt, Artificial Sequence
  Description of Artificial Sequence: Synthetic oligonucleotide
acgaggaacagguuugugc

SEQ ID NO: 1423474 - RNA, 19 nt, Artificial Sequence
  Description of Artificial Sequence: Synthetic oligonucleotide
agaaguagaccuuaugaug

SEQ ID NO: 1423475 - RNA, 19 nt, Artificial Sequence
  Description of Artificial Sequence: Synthetic oligonucleotide
agaccuuaugaugagaugg

SEQ ID NO: 1423476 - RNA, 19 nt, Artificial Sequence
  Description of Artificial Sequence: Synthetic oligonucleotide
aaagaaagaguugauuucu

SEQ ID NO: 1423477 - RNA, 19 nt, Artificial Sequence
  Description of Artificial Sequence: Synthetic oligonucleotide
uaaacugaagaacuagcga

SEQ ID NO: 1423478 - RNA, 19 nt, Artificial Sequence
  Description of Artificial Sequence: Synthetic oligonucleotide
acggcaucaaagcucaagc

SEQ ID NO: 1423479 - RNA, 19 nt, Artificial Sequence
  Description of Artificial Sequence: Synthetic oligonucleotide
ucaaguaccuuucagcaaa

SEQ ID NO: 1423480 - RNA, 19 nt, Artificial Sequence
  Description of Artificial Sequence: Synthetic oligonucleotide
ugucaaguaccuuucagca

SEQ ID NO: 1423481 - RNA, 19 nt, Artificial Sequence
  Description of Artificial Sequence: Synthetic oligonucleotide
uaccuuucagcaaauucgg

SEQ ID NO: 1423482 - RNA, 19 nt, Artificial Sequence
  Description of Artificial Sequence: Synthetic oligonucleotide
gaugcaaacaguaucauaa

SEQ ID NO: 1423483 - RNA, 19 nt, Artificial Sequence
  Description of Artificial Sequence: Synthetic oligonucleotide
ugugauaaauacuuauuaa

SEQ ID NO: 1423484 - RNA, 19 nt, Artificial Sequence
  Description of Artificial Sequence: Synthetic oligonucleotide
ucaaggagguuucucuugg

SEQ ID NO: 1423485 - RNA, 19 nt, Artificial Sequence
  Description of Artificial Sequence: Synthetic oligonucleotide
auuguuggaaugccgcagc

SEQ ID NO: 1423486 - RNA, 19 nt, Artificial Sequence
  Description of Artificial Sequence: Synthetic oligonucleotide
uaacauaacuauagcuagg

SEQ ID NO: 1423487 - RNA, 19 nt, Artificial Sequence
  Description of Artificial Sequence: Synthetic oligonucleotide
agacugaauacuuuguaug

SEQ ID NO: 1423488 - RNA, 19 nt, Artificial Sequence
  Description of Artificial Sequence: Synthetic oligonucleotide
gaaauugaagugacggugg

SEQ ID NO: 1423489 - RNA, 19 nt, Artificial Sequence
  Description of Artificial Sequence: Synthetic oligonucleotide
uuauuaaccaguacuuguc

SEQ ID NO: 1423490 - RNA, 19 nt, Artificial Sequence
  Description of Artificial Sequence: Synthetic oligonucleotide
aagaaauugaagugacggu

SEQ ID NO: 1423491 - RNA, 19 nt, Artificial Sequence
  Description of Artificial Sequence: Synthetic oligonucleotide
agaaauugaagugacggug

SEQ ID NO: 1423492 - RNA, 19 nt, Artificial Sequence
  Description of Artificial Sequence: Synthetic oligonucleotide
uauagauccuguaggugag

SEQ ID NO: 1423493 - RNA, 19 nt, Artificial Sequence
  Description of Artificial Sequence: Synthetic oligonucleotide
ugugcuacuaaguuguuua

SEQ ID NO: 1423494 - RNA, 19 nt, Artificial Sequence
  Description of Artificial Sequence: Synthetic oligonucleotide
ugcaaacaguaucauaaug

SEQ ID NO: 1423495 - RNA, 19 nt, Artificial Sequence
  Description of Artificial Sequence: Synthetic oligonucleotide
cuuaugaugagauggguca

SEQ ID NO: 1423496 - RNA, 19 nt, Artificial Sequence
  Description of Artificial Sequence: Synthetic oligonucleotide
agugcaaggaaauaaguuu

SEQ ID NO: 1423497 - RNA, 19 nt, Artificial Sequence
  Description of Artificial Sequence: Synthetic oligonucleotide
agagaggauauguuucugg

SEQ ID NO: 1423498 - RNA, 19 nt, Artificial Sequence
  Description of Artificial Sequence: Synthetic oligonucleotide
aauuuuaggcuuaauuccu

SEQ ID NO: 1423499 - RNA, 19 nt, Artificial Sequence
  Description of Artificial Sequence: Synthetic oligonucleotide
uacuuuguaugucaucagc

SEQ ID NO: 1423500 - RNA, 19 nt, Artificial Sequence
  Description of Artificial Sequence: Synthetic oligonucleotide
aguaucauaauguccgccu

SEQ ID NO: 1423501 - RNA, 19 nt, Artificial Sequence
  Description of Artificial Sequence: Synthetic oligonucleotide
cagcuugaauaccagaugg

SEQ ID NO: 1423502 - RNA, 19 nt, Artificial Sequence
  Description of Artificial Sequence: Synthetic oligonucleotide
uuuggugacacgauucgac

SEQ ID NO: 1423503 - RNA, 19 nt, Artificial Sequence
  Description of Artificial Sequence: Synthetic oligonucleotide
uggauuguuggaaugccgc

SEQ ID NO: 1423504 - RNA, 19 nt, Artificial Sequence
  Description of Artificial Sequence: Synthetic oligonucleotide
uauuaaccaguacuuguca

SEQ ID NO: 1423505 - RNA, 19 nt, Artificial Sequence
  Description of Artificial Sequence: Synthetic oligonucleotide
agcgaagauccucaacugc

SEQ ID NO: 1423506 - RNA, 19 nt, Artificial Sequence
  Description of Artificial Sequence: Synthetic oligonucleotide
aaguuugggauaaguaggg

SEQ ID NO: 1423507 - RNA, 19 nt, Artificial Sequence
  Description of Artificial Sequence: Synthetic oligonucleotide
cuuuguaugucaucagcag

SEQ ID NO: 1423508 - RNA, 19 nt, Artificial Sequence
  Description of Artificial Sequence: Synthetic oligonucleotide
auagcuaggguacauuacu

SEQ ID NO: 1423509 - RNA, 19 nt, Artificial Sequence
  Description of Artificial Sequence: Synthetic oligonucleotide
caucaggaacuccacaucg

SEQ ID NO: 1423510 - RNA, 19 nt, Artificial Sequence
  Description of Artificial Sequence: Synthetic oligonucleotide
uauguuucugggauagugu

SEQ ID NO: 1423511 - RNA, 19 nt, Artificial Sequence
  Description of Artificial Sequence: Synthetic oligonucleotide
uauugugccaccucugcca

SEQ ID NO: 1423512 - RNA, 19 nt, Artificial Sequence
  Description of Artificial Sequence: Synthetic oligonucleotide
uuggauuguuggaaugccg

SEQ ID NO: 1423513 - RNA, 19 nt, Artificial Sequence
  Description of Artificial Sequence: Synthetic oligonucleotide
aaaugcccugucaacgucc

SEQ ID NO: 1423514 - RNA, 19 nt, Artificial Sequence
  Description of Artificial Sequence: Synthetic oligonucleotide
agaugugauaaauacuuau

SEQ ID NO: 1423515 - RNA, 19 nt, Artificial Sequence
  Description of Artificial Sequence: Synthetic oligonucleotide
uaaguaggguccauggacu

SEQ ID NO: 1423516 - RNA, 19 nt, Artificial Sequence
  Description of Artificial Sequence: Synthetic oligonucleotide
agaacuagcgaagauccuc

SEQ ID NO: 1423517 - RNA, 19 nt, Artificial Sequence
  Description of Artificial Sequence: Synthetic oligonucleotide
cuuuuggugacacgauucg

SEQ ID NO: 1423518 - RNA, 19 nt, Artificial Sequence
  Description of Artificial Sequence: Synthetic oligonucleotide
augugauaaauacuuauua

SEQ ID NO: 1423519 - RNA, 19 nt, Artificial Sequence
  Description of Artificial Sequence: Synthetic oligonucleotide
cauuuauaggaauggcccc

SEQ ID NO: 1423520 - RNA, 19 nt, Artificial Sequence
  Description of Artificial Sequence: Synthetic oligonucleotide
uuuaggcuuaauuccugag

SEQ ID NO: 1423521 - RNA, 19 nt, Artificial Sequence
  Description of Artificial Sequence: Synthetic oligonucleotide
uugggguuaacauaacuau

SEQ ID NO: 1423522 - RNA, 19 nt, Artificial Sequence
  Description of Artificial Sequence: Synthetic oligonucleotide
auugugaccagaucucuca

SEQ ID NO: 1423523 - RNA, 19 nt, Artificial Sequence
  Description of Artificial Sequence: Synthetic oligonucleotide
uugcuuugagcccaaagaa

SEQ ID NO: 1423524 - RNA, 19 nt, Artificial Sequence
  Description of Artificial Sequence: Synthetic oligonucleotide
auucgguuucauuuauagg

SEQ ID NO: 1423525 - RNA, 19 nt, Artificial Sequence
  Description of Artificial Sequence: Synthetic oligonucleotide
uguaauuauagauccugua

SEQ ID NO: 1423526 - RNA, 19 nt, Artificial Sequence
  Description of Artificial Sequence: Synthetic oligonucleotide
acaguaucauaauguccgc

SEQ ID NO: 1423527 - RNA, 19 nt, Artificial Sequence
  Description of Artificial Sequence: Synthetic oligonucleotide
uggggauccauagagagac

SEQ ID NO: 1423528 - RNA, 19 nt, Artificial Sequence
  Description of Artificial Sequence: Synthetic oligonucleotide
guuaacauaacuauagcua

SEQ ID NO: 1423529 - RNA, 19 nt, Artificial Sequence
  Description of Artificial Sequence: Synthetic oligonucleotide
aauaaguuugggauaagua

SEQ ID NO: 1423530 - RNA, 19 nt, Artificial Sequence
  Description of Artificial Sequence: Synthetic oligonucleotide
gacgaaccugucuuuaaag

SEQ ID NO: 1423531 - RNA, 19 nt, Artificial Sequence
  Description of Artificial Sequence: Synthetic oligonucleotide
uauuccaauugauuggcuc

SEQ ID NO: 1423532 - RNA, 19 nt, Artificial Sequence
  Description of Artificial Sequence: Synthetic oligonucleotide
uauccgagaagaaguagac

SEQ ID NO: 1423533 - RNA, 19 nt, Artificial Sequence
  Description of Artificial Sequence: Synthetic oligonucleotide
aacgcagggaagcccagag

SEQ ID NO: 1423534 - RNA, 19 nt, Artificial Sequence
  Description of Artificial Sequence: Synthetic oligonucleotide
guuggaaugccgcagcccc

SEQ ID NO: 1423535 - RNA, 19 nt, Artificial Sequence
  Description of Artificial Sequence: Synthetic oligonucleotide
uaggguacauuacugaguu

SEQ ID NO: 1423536 - RNA, 19 nt, Artificial Sequence
  Description of Artificial Sequence: Synthetic oligonucleotide
aaguagaccuuaugaugag

SEQ ID NO: 1423537 - RNA, 19 nt, Artificial Sequence
  Description of Artificial Sequence: Synthetic oligonucleotide
cauaacuauagcuagggua

SEQ ID NO: 1423538 - RNA, 19 nt, Artificial Sequence
  Description of Artificial Sequence: Synthetic oligonucleotide
uucauugugaccagaucuc

SEQ ID NO: 1423539 - RNA, 19 nt, Artificial Sequence
  Description of Artificial Sequence: Synthetic oligonucleotide
caaaaugugcgucuccuug

SEQ ID NO: 1423540 - RNA, 19 nt, Artificial Sequence
  Description of Artificial Sequence: Synthetic oligonucleotide
gauucuccacaucaggaac

SEQ ID NO: 1423541 - RNA, 19 nt, Artificial Sequence
  Description of Artificial Sequence: Synthetic oligonucleotide
gugcagaugugauaaauac

SEQ ID NO: 1423542 - RNA, 19 nt, Artificial Sequence
  Description of Artificial Sequence: Synthetic oligonucleotide
auguuucugggauagugug

SEQ ID NO: 1423543 - RNA, 19 nt, Artificial Sequence
  Description of Artificial Sequence: Synthetic oligonucleotide
aacugaagaacuagcgaag

SEQ ID NO: 1423544 - RNA, 19 nt, Artificial Sequence
  Description of Artificial Sequence: Synthetic oligonucleotide
auauguuucugggauagug

SEQ ID NO: 1423545 - RNA, 19 nt, Artificial Sequence
  Description of Artificial Sequence: Synthetic oligonucleotide
agcacugaagucuccauga

SEQ ID NO: 1423546 - RNA, 19 nt, Artificial Sequence
  Description of Artificial Sequence: Synthetic oligonucleotide
uacauuacugaguuuggau

SEQ ID NO: 1423547 - RNA, 19 nt, Artificial Sequence
  Description of Artificial Sequence: Synthetic oligonucleotide
cagcucguacuuuugagcc

SEQ ID NO: 1423548 - RNA, 19 nt, Artificial Sequence
  Description of Artificial Sequence: Synthetic oligonucleotide
caaacaaaccagcucguac

SEQ ID NO: 1423549 - RNA, 19 nt, Artificial Sequence
  Description of Artificial Sequence: Synthetic oligonucleotide
uuuuaggcuuaauuccuga

SEQ ID NO: 1423550 - RNA, 19 nt, Artificial Sequence
  Description of Artificial Sequence: Synthetic oligonucleotide
gagcauaaagugcagaugu

SEQ ID NO: 1423551 - RNA, 19 nt, Artificial Sequence
  Description of Artificial Sequence: Synthetic oligonucleotide
auaauguccgccuggccug

SEQ ID NO: 1423552 - RNA, 19 nt, Artificial Sequence
  Description of Artificial Sequence: Synthetic oligonucleotide
ugcuuugagcccaaagaac

SEQ ID NO: 1423553 - RNA, 19 nt, Artificial Sequence
  Description of Artificial Sequence: Synthetic oligonucleotide
agggguguaauuauagauc

SEQ ID NO: 1423554 - RNA, 19 nt, Artificial Sequence
  Description of Artificial Sequence: Synthetic oligonucleotide
gucauaaaauuuugucaag

SEQ ID NO: 1423555 - RNA, 19 nt, Artificial Sequence
  Description of Artificial Sequence: Synthetic oligonucleotide
acauuacugaguuuggauu

SEQ ID NO: 1423556 - RNA, 19 nt, Artificial Sequence
  Description of Artificial Sequence: Synthetic oligonucleotide
ggucauaaaauuuugucaa

SEQ ID NO: 1423557 - RNA, 19 nt, Artificial Sequence
  Description of Artificial Sequence: Synthetic oligonucleotide
auggaagaaauugaaguga

SEQ ID NO: 1423558 - RNA, 19 nt, Artificial Sequence
  Description of Artificial Sequence: Synthetic oligonucleotide
uaucgucuauccgagaaga

SEQ ID NO: 1423559 - RNA, 19 nt, Artificial Sequence
  Description of Artificial Sequence: Synthetic oligonucleotide
auuuugucaaguaccuuuc

SEQ ID NO: 1423560 - RNA, 19 nt, Artificial Sequence
  Description of Artificial Sequence: Synthetic oligonucleotide
aagaguugauuucugccuu

SEQ ID NO: 1423561 - RNA, 19 nt, Artificial Sequence
  Description of Artificial Sequence: Synthetic oligonucleotide
acaucguaucuccaauauc

SEQ ID NO: 1423562 - RNA, 19 nt, Artificial Sequence
  Description of Artificial Sequence: Synthetic oligonucleotide
auaucgucuauccgagaag

SEQ ID NO: 1423563 - RNA, 19 nt, Artificial Sequence
  Description of Artificial Sequence: Synthetic oligonucleotide
acugaauacuuuguauguc

SEQ ID NO: 1423564 - RNA, 19 nt, Artificial Sequence
  Description of Artificial Sequence: Synthetic oligonucleotide
uggccuguauaaaucuucc

SEQ ID NO: 1423565 - RNA, 19 nt, Artificial Sequence
  Description of Artificial Sequence: Synthetic oligonucleotide
ugugcgucuccuuggauac

SEQ ID NO: 1423566 - RNA, 19 nt, Artificial Sequence
  Description of Artificial Sequence: Synthetic oligonucleotide
gaaccuuuacuccaggucu

SEQ ID NO: 1423567 - RNA, 19 nt, Artificial Sequence
  Description of Artificial Sequence: Synthetic oligonucleotide
ucgagaaccuuuacuccag

SEQ ID NO: 1423568 - RNA, 19 nt, Artificial Sequence
  Description of Artificial Sequence: Synthetic oligonucleotide
uuccucacaucguaucucc

SEQ ID NO: 1423569 - RNA, 19 nt, Artificial Sequence
  Description of Artificial Sequence: Synthetic oligonucleotide
gauuguuggaaugccgcag

SEQ ID NO: 1423570 - RNA, 19 nt, Artificial Sequence
  Description of Artificial Sequence: Synthetic oligonucleotide
agugacgguggcuggacuc

SEQ ID NO: 1423571 - RNA, 19 nt, Artificial Sequence
  Description of Artificial Sequence: Synthetic oligonucleotide
gaccuuaugaugagauggg

SEQ ID NO: 1423572 - RNA, 19 nt, Artificial Sequence
  Description of Artificial Sequence: Synthetic oligonucleotide
aguugcuuugagcccaaag

SEQ ID NO: 1423573 - RNA, 19 nt, Artificial Sequence
  Description of Artificial Sequence: Synthetic oligonucleotide
ucgguuucauuuauaggaa

SEQ ID NO: 1423574 - RNA, 19 nt, Artificial Sequence
  Description of Artificial Sequence: Synthetic oligonucleotide
uuuugucaaguaccuuuca

SEQ ID NO: 1423575 - RNA, 19 nt, Artificial Sequence
  Description of Artificial Sequence: Synthetic oligonucleotide
ugagcauaaagugcagaug

SEQ ID NO: 1423576 - RNA, 19 nt, Artificial Sequence
  Description of Artificial Sequence: Synthetic oligonucleotide
acucgaaaagcuuucugaa

SEQ ID NO: 1423577 - RNA, 19 nt, Artificial Sequence
  Description of Artificial Sequence: Synthetic oligonucleotide
uagcuaggguacauuacug

SEQ ID NO: 1423578 - RNA, 19 nt, Artificial Sequence
  Description of Artificial Sequence: Synthetic oligonucleotide
auacuuuguaugucaucag

SEQ ID NO: 1423579 - RNA, 19 nt, Artificial Sequence
  Description of Artificial Sequence: Synthetic oligonucleotide
uuuugagccuuuuggugac

SEQ ID NO: 1423580 - RNA, 19 nt, Artificial Sequence
  Description of Artificial Sequence: Synthetic oligonucleotide
ucuauccgagaagaaguag

SEQ ID NO: 1423581 - RNA, 19 nt, Artificial Sequence
  Description of Artificial Sequence: Synthetic oligonucleotide
gugcaaggaaauaaguuug

SEQ ID NO: 1423582 - RNA, 19 nt, Artificial Sequence
  Description of Artificial Sequence: Synthetic oligonucleotide
gguguaauuauagauccug

SEQ ID NO: 1423583 - RNA, 19 nt, Artificial Sequence
  Description of Artificial Sequence: Synthetic oligonucleotide
uuggugacacgauucgaca

SEQ ID NO: 1423584 - RNA, 19 nt, Artificial Sequence
  Description of Artificial Sequence: Synthetic oligonucleotide
cuauccgagaagaaguaga

SEQ ID NO: 1423585 - RNA, 19 nt, Artificial Sequence
  Description of Artificial Sequence: Synthetic oligonucleotide
auaagcagcuugaauacca

SEQ ID NO: 1423586 - RNA, 19 nt, Artificial Sequence
  Description of Artificial Sequence: Synthetic oligonucleotide
gauaaguaggguccaugga

SEQ ID NO: 1423587 - RNA, 19 nt, Artificial Sequence
  Description of Artificial Sequence: Synthetic oligonucleotide
gaaugccgcagccccaagg

SEQ ID NO: 1423588 - RNA, 19 nt, Artificial Sequence
  Description of Artificial Sequence: Synthetic oligonucleotide
agauucuccacaucaggaa

SEQ ID NO: 1423589 - RNA, 19 nt, Artificial Sequence
  Description of Artificial Sequence: Synthetic oligonucleotide
agguuugugccucgagaac

SEQ ID NO: 1423590 - RNA, 19 nt, Artificial Sequence
  Description of Artificial Sequence: Synthetic oligonucleotide
agcaacgaggaacagguuu

SEQ ID NO: 1423591 - RNA, 19 nt, Artificial Sequence
  Description of Artificial Sequence: Synthetic oligonucleotide
auuaaccaguacuugucau

SEQ ID NO: 1423592 - RNA, 19 nt, Artificial Sequence
  Description of Artificial Sequence: Synthetic oligonucleotide
uccagacucgaaaagcuuu

SEQ ID NO: 1423593 - RNA, 19 nt, Artificial Sequence
  Description of Artificial Sequence: Synthetic oligonucleotide
ucacaucacuccagacucg

SEQ ID NO: 1423594 - RNA, 19 nt, Artificial Sequence
  Description of Artificial Sequence: Synthetic oligonucleotide
ucaacggggucacaucacu

SEQ ID NO: 1423595 - RNA, 19 nt, Artificial Sequence
  Description of Artificial Sequence: Synthetic oligonucleotide
aaguaguaguguccuuuga

SEQ ID NO: 1423596 - RNA, 19 nt, Artificial Sequence
  Description of Artificial Sequence: Synthetic oligonucleotide
aacaaaccagcucguacuu

SEQ ID NO: 1423597 - RNA, 19 nt, Artificial Sequence
  Description of Artificial Sequence: Synthetic oligonucleotide
ugugaccagaucucucagc

SEQ ID NO: 1423598 - RNA, 19 nt, Artificial Sequence
  Description of Artificial Sequence: Synthetic oligonucleotide
ggugacacgauucgacagg

SEQ ID NO: 1423599 - RNA, 19 nt, Artificial Sequence
  Description of Artificial Sequence: Synthetic oligonucleotide
agaggauauguuucuggga

SEQ ID NO: 1423600 - RNA, 19 nt, Artificial Sequence
  Description of Artificial Sequence: Synthetic oligonucleotide
uugugaccagaucucucag

SEQ ID NO: 1423601 - RNA, 19 nt, Artificial Sequence
  Description of Artificial Sequence: Synthetic oligonucleotide
aaucucaacggggucacau

SEQ ID NO: 1423602 - RNA, 19 nt, Artificial Sequence
  Description of Artificial Sequence: Synthetic oligonucleotide
uagaccuuaugaugagaug

SEQ ID NO: 1423603 - RNA, 19 nt, Artificial Sequence
  Description of Artificial Sequence: Synthetic oligonucleotide
agaugggaugguuggccac

SEQ ID NO: 1423604 - RNA, 19 nt, Artificial Sequence
  Description of Artificial Sequence: Synthetic oligonucleotide
gacagauaguugcugcuga

SEQ ID NO: 1423605 - RNA, 19 nt, Artificial Sequence
  Description of Artificial Sequence: Synthetic oligonucleotide
guaucauaauguccgccug

SEQ ID NO: 1423606 - RNA, 19 nt, Artificial Sequence
  Description of Artificial Sequence: Synthetic oligonucleotide
ugugcuauugugccaccuc

SEQ ID NO: 1423607 - RNA, 19 nt, Artificial Sequence
  Description of Artificial Sequence: Synthetic oligonucleotide
guaguaguguccuuugaaa

SEQ ID NO: 1423608 - RNA, 19 nt, Artificial Sequence
  Description of Artificial Sequence: Synthetic oligonucleotide
aucucaacggggucacauc

SEQ ID NO: 1423609 - RNA, 19 nt, Artificial Sequence
  Description of Artificial Sequence: Synthetic oligonucleotide
agcuaggguacauuacuga

SEQ ID NO: 1423610 - RNA, 19 nt, Artificial Sequence
  Description of Artificial Sequence: Synthetic oligonucleotide
agagacugaauacuuugua

SEQ ID NO: 1423611 - RNA, 19 nt, Artificial Sequence
  Description of Artificial Sequence: Synthetic oligonucleotide
aauugaagugacgguggcu

SEQ ID NO: 1423612 - RNA, 19 nt, Artificial Sequence
  Description of Artificial Sequence: Synthetic oligonucleotide
gaauguguugggguuaaca

SEQ ID NO: 1423613 - RNA, 19 nt, Artificial Sequence
  Description of Artificial Sequence: Synthetic oligonucleotide
cuauugugccaccucugcc

SEQ ID NO: 1423614 - RNA, 19 nt, Artificial Sequence
  Description of Artificial Sequence: Synthetic oligonucleotide
cuuugagcccaaagaacug

SEQ ID NO: 1423615 - RNA, 19 nt, Artificial Sequence
  Description of Artificial Sequence: Synthetic oligonucleotide
uccuuggaagaaguaguag

SEQ ID NO: 1423616 - RNA, 19 nt, Artificial Sequence
  Description of Artificial Sequence: Synthetic oligonucleotide
agacucgaaaagcuuucug

SEQ ID NO: 1423617 - RNA, 19 nt, Artificial Sequence
  Description of Artificial Sequence: Synthetic oligonucleotide
gcuaggguacauuacugag

SEQ ID NO: 1423618 - RNA, 19 nt, Artificial Sequence
  Description of Artificial Sequence: Synthetic oligonucleotide
ugggguuaacauaacuaua

SEQ ID NO: 1423619 - RNA, 19 nt, Artificial Sequence
  Description of Artificial Sequence: Synthetic oligonucleotide
ugcuauugugccaccucug

SEQ ID NO: 1423620 - RNA, 19 nt, Artificial Sequence
  Description of Artificial Sequence: Synthetic oligonucleotide
augagaugggucaaagaug

SEQ ID NO: 1423621 - RNA, 19 nt, Artificial Sequence
  Description of Artificial Sequence: Synthetic oligonucleotide
ucauaauguccgccuggcc

SEQ ID NO: 1423622 - RNA, 19 nt, Artificial Sequence
  Description of Artificial Sequence: Synthetic oligonucleotide
aucaaagcucaagcuuugc

SEQ ID NO: 1423623 - RNA, 19 nt, Artificial Sequence
  Description of Artificial Sequence: Synthetic oligonucleotide
aguaggguccauggacugc

SEQ ID NO: 1423624 - RNA, 19 nt, Artificial Sequence
  Description of Artificial Sequence: Synthetic oligonucleotide
aggagcaugaggaacuuca

SEQ ID NO: 1423625 - RNA, 19 nt, Artificial Sequence
  Description of Artificial Sequence: Synthetic oligonucleotide
uggcugugcuacuaaguug

SEQ ID NO: 1423626 - RNA, 19 nt, Artificial Sequence
  Description of Artificial Sequence: Synthetic oligonucleotide
guaugucaucagcaggaag

SEQ ID NO: 1423627 - RNA, 19 nt, Artificial Sequence
  Description of Artificial Sequence: Synthetic oligonucleotide
gacggcaucaaagcucaag

SEQ ID NO: 1423628 - RNA, 19 nt, Artificial Sequence
  Description of Artificial Sequence: Synthetic oligonucleotide
gugaggugaugcuucgucc

SEQ ID NO: 1423629 - RNA, 19 nt, Artificial Sequence
  Description of Artificial Sequence: Synthetic oligonucleotide
ugccucgagaaccuuuacu

SEQ ID NO: 1423630 - RNA, 19 nt, Artificial Sequence
  Description of Artificial Sequence: Synthetic oligonucleotide
ccugucaacguccucacgc

SEQ ID NO: 1423631 - RNA, 19 nt, Artificial Sequence
  Description of Artificial Sequence: Synthetic oligonucleotide
acaccugcaagaccacgag

SEQ ID NO: 1423632 - RNA, 19 nt, Artificial Sequence
  Description of Artificial Sequence: Synthetic oligonucleotide
gguuaacauaacuauagcu

SEQ ID NO: 1423633 - RNA, 19 nt, Artificial Sequence
  Description of Artificial Sequence: Synthetic oligonucleotide
ugcccugucaacguccuca

SEQ ID NO: 1423634 - RNA, 19 nt, Artificial Sequence
  Description of Artificial Sequence: Synthetic oligonucleotide
acauaacuauagcuagggu

SEQ ID NO: 1423635 - RNA, 19 nt, Artificial Sequence
  Description of Artificial Sequence: Synthetic oligonucleotide
ucguaucuccaauaucguc

SEQ ID NO: 1423636 - RNA, 19 nt, Artificial Sequence
  Description of Artificial Sequence: Synthetic oligonucleotide
cucgagaaccuuuacucca

SEQ ID NO: 1423637 - RNA, 19 nt, Artificial Sequence
  Description of Artificial Sequence: Synthetic oligonucleotide
cuuucugaaaugcccuguc

SEQ ID NO: 1423638 - RNA, 19 nt, Artificial Sequence
  Description of Artificial Sequence: Synthetic oligonucleotide
gcuacuaaguuguuuauua

SEQ ID NO: 1423639 - RNA, 19 nt, Artificial Sequence
  Description of Artificial Sequence: Synthetic oligonucleotide
ugacacgauucgacagggg

SEQ ID NO: 1423640 - RNA, 19 nt, Artificial Sequence
  Description of Artificial Sequence: Synthetic oligonucleotide
agcuugaauaccagauggg

SEQ ID NO: 1423641 - RNA, 19 nt, Artificial Sequence
  Description of Artificial Sequence: Synthetic oligonucleotide
uuuauaggaauggccccac

SEQ ID NO: 1423642 - RNA, 19 nt, Artificial Sequence
  Description of Artificial Sequence: Synthetic oligonucleotide
gguuugugccucgagaacc

SEQ ID NO: 1423643 - RNA, 19 nt, Artificial Sequence
  Description of Artificial Sequence: Synthetic oligonucleotide
gaacuagcgaagauccuca

SEQ ID NO: 1423644 - RNA, 19 nt, Artificial Sequence
  Description of Artificial Sequence: Synthetic oligonucleotide
uccaugagcuccagaugca

SEQ ID NO: 1423645 - RNA, 19 nt, Artificial Sequence
  Description of Artificial Sequence: Synthetic oligonucleotide
ucauugugaccagaucucu

SEQ ID NO: 1423646 - RNA, 19 nt, Artificial Sequence
  Description of Artificial Sequence: Synthetic oligonucleotide
gugacacgauucgacaggg

SEQ ID NO: 1423647 - RNA, 19 nt, Artificial Sequence
  Description of Artificial Sequence: Synthetic oligonucleotide
ccaauaucgucuauccgag

SEQ ID NO: 1423648 - RNA, 19 nt, Artificial Sequence
  Description of Artificial Sequence: Synthetic oligonucleotide
cauaauguccgccuggccu

SEQ ID NO: 1423649 - RNA, 19 nt, Artificial Sequence
  Description of Artificial Sequence: Synthetic oligonucleotide
gauuuugucucccacuguu

SEQ ID NO: 1423650 - RNA, 19 nt, Artificial Sequence
  Description of Artificial Sequence: Synthetic oligonucleotide
gagacugaauacuuuguau

SEQ ID NO: 1423651 - RNA, 19 nt, Artificial Sequence
  Description of Artificial Sequence: Synthetic oligonucleotide
ggaaauaaguuugggauaa

SEQ ID NO: 1423652 - RNA, 19 nt, Artificial Sequence
  Description of Artificial Sequence: Synthetic oligonucleotide
gaaauaaguuugggauaag

SEQ ID NO: 1423653 - RNA, 19 nt, Artificial Sequence
  Description of Artificial Sequence: Synthetic oligonucleotide
cuauagcuaggguacauua

SEQ ID NO: 1423654 - RNA, 19 nt, Artificial Sequence
  Description of Artificial Sequence: Synthetic oligonucleotide
agaugcaaacaguaucaua

SEQ ID NO: 1423655 - RNA, 19 nt, Artificial Sequence
  Description of Artificial Sequence: Synthetic oligonucleotide
auggacugcuuccucacau

SEQ ID NO: 1423656 - RNA, 19 nt, Artificial Sequence
  Description of Artificial Sequence: Synthetic oligonucleotide
guugggguuaacauaacua

SEQ ID NO: 1423657 - RNA, 19 nt, Artificial Sequence
  Description of Artificial Sequence: Synthetic oligonucleotide
uuccaauugauuggcuccu

SEQ ID NO: 1423658 - RNA, 19 nt, Artificial Sequence
  Description of Artificial Sequence: Synthetic oligonucleotide
ucacaucguaucuccaaua

SEQ ID NO: 1423659 - RNA, 19 nt, Artificial Sequence
  Description of Artificial Sequence: Synthetic oligonucleotide
caguaucauaauguccgcc

SEQ ID NO: 1423660 - RNA, 19 nt, Artificial Sequence
  Description of Artificial Sequence: Synthetic oligonucleotide
aacuauagcuaggguacau

SEQ ID NO: 1423661 - RNA, 19 nt, Artificial Sequence
  Description of Artificial Sequence: Synthetic oligonucleotide
augucagggguguaauuau

SEQ ID NO: 1423662 - RNA, 19 nt, Artificial Sequence
  Description of Artificial Sequence: Synthetic oligonucleotide
cauugugaccagaucucuc

SEQ ID NO: 1423663 - RNA, 19 nt, Artificial Sequence
  Description of Artificial Sequence: Synthetic oligonucleotide
gccucgagaaccuuuacuc

SEQ ID NO: 1423664 - RNA, 19 nt, Artificial Sequence
  Description of Artificial Sequence: Synthetic oligonucleotide
acaaacgcagggaagccca

SEQ ID NO: 1423665 - RNA, 19 nt, Artificial Sequence
  Description of Artificial Sequence: Synthetic oligonucleotide
cucacgcuucaugucaggg

SEQ ID NO: 1423666 - RNA, 19 nt, Artificial Sequence
  Description of Artificial Sequence: Synthetic oligonucleotide
cugccucaucaaaaugugc

SEQ ID NO: 1423667 - RNA, 19 nt, Artificial Sequence
  Description of Artificial Sequence: Synthetic oligonucleotide
aguugauuucugccuuuga

SEQ ID NO: 1423668 - RNA, 19 nt, Artificial Sequence
  Description of Artificial Sequence: Synthetic oligonucleotide
uagauccuguaggugaggu

SEQ ID NO: 1423669 - RNA, 19 nt, Artificial Sequence
  Description of Artificial Sequence: Synthetic oligonucleotide
auagagagacugaauacuu

SEQ ID NO: 1423670 - RNA, 19 nt, Artificial Sequence
  Description of Artificial Sequence: Synthetic oligonucleotide
aggcagacaccugcaagac

SEQ ID NO: 1423671 - RNA, 19 nt, Artificial Sequence
  Description of Artificial Sequence: Synthetic oligonucleotide
uuaugaugagaugggucaa

SEQ ID NO: 1423672 - RNA, 19 nt, Artificial Sequence
  Description of Artificial Sequence: Synthetic oligonucleotide
ugucagggguguaauuaua

SEQ ID NO: 1423673 - RNA, 19 nt, Artificial Sequence
  Description of Artificial Sequence: Synthetic oligonucleotide
uggcuggacucccaggcaa

SEQ ID NO: 1423674 - RNA, 19 nt, Artificial Sequence
  Description of Artificial Sequence: Synthetic oligonucleotide
gcuauugugccaccucugc

SEQ ID NO: 1423675 - RNA, 19 nt, Artificial Sequence
  Description of Artificial Sequence: Synthetic oligonucleotide
cuacuaaguuguuuauuaa

SEQ ID NO: 1423676 - RNA, 19 nt, Artificial Sequence
  Description of Artificial Sequence: Synthetic oligonucleotide
ugcauccccggcaauucuc

SEQ ID NO: 1423677 - RNA, 19 nt, Artificial Sequence
  Description of Artificial Sequence: Synthetic oligonucleotide
uaacuauagcuaggguaca

SEQ ID NO: 1423678 - RNA, 19 nt, Artificial Sequence
  Description of Artificial Sequence: Synthetic oligonucleotide
uguaugucaucagcaggaa

SEQ ID NO: 1423679 - RNA, 19 nt, Artificial Sequence
  Description of Artificial Sequence: Synthetic oligonucleotide
aacuagcgaagauccucaa

SEQ ID NO: 1423680 - RNA, 19 nt, Artificial Sequence
  Description of Artificial Sequence: Synthetic oligonucleotide
agcaugugcuauugugcca

SEQ ID NO: 1423681 - RNA, 19 nt, Artificial Sequence
  Description of Artificial Sequence: Synthetic oligonucleotide
aagaaguaguaguguccuu

SEQ ID NO: 1423682 - RNA, 19 nt, Artificial Sequence
  Description of Artificial Sequence: Synthetic oligonucleotide
caaggagguuucucuuggc

SEQ ID NO: 1423683 - RNA, 19 nt, Artificial Sequence
  Description of Artificial Sequence: Synthetic oligonucleotide
ccuuaugaugagauggguc

SEQ ID NO: 1423684 - RNA, 19 nt, Artificial Sequence
  Description of Artificial Sequence: Synthetic oligonucleotide
cagguuugugccucgagaa

SEQ ID NO: 1423685 - RNA, 19 nt, Artificial Sequence
  Description of Artificial Sequence: Synthetic oligonucleotide
uugggauaaguagggucca

SEQ ID NO: 1423686 - RNA, 19 nt, Artificial Sequence
  Description of Artificial Sequence: Synthetic oligonucleotide
agagaagccugcaucaauu

SEQ ID NO: 1423687 - RNA, 19 nt, Artificial Sequence
  Description of Artificial Sequence: Synthetic oligonucleotide
aaaccagcucguacuuuug

SEQ ID NO: 1423688 - RNA, 19 nt, Artificial Sequence
  Description of Artificial Sequence: Synthetic oligonucleotide
acagauaguugcugcugau

SEQ ID NO: 1423689 - RNA, 19 nt, Artificial Sequence
  Description of Artificial Sequence: Synthetic oligonucleotide
gugacggcaucaaagcuca

SEQ ID NO: 1423690 - RNA, 19 nt, Artificial Sequence
  Description of Artificial Sequence: Synthetic oligonucleotide
ucgaggugugugcauuauc

SEQ ID NO: 1423691 - RNA, 19 nt, Artificial Sequence
  Description of Artificial Sequence: Synthetic oligonucleotide
aguagaccuuaugaugaga

SEQ ID NO: 1423692 - RNA, 19 nt, Artificial Sequence
  Description of Artificial Sequence: Synthetic oligonucleotide
caccugcaagaccacgagg

SEQ ID NO: 1423693 - RNA, 19 nt, Artificial Sequence
  Description of Artificial Sequence: Synthetic oligonucleotide
ugggauaguguggcugugc

SEQ ID NO: 1423694 - RNA, 19 nt, Artificial Sequence
  Description of Artificial Sequence: Synthetic oligonucleotide
guaucuccaauaucgucua

SEQ ID NO: 1423695 - RNA, 19 nt, Artificial Sequence
  Description of Artificial Sequence: Synthetic oligonucleotide
ccagcucguacuuuugagc

SEQ ID NO: 1423696 - RNA, 19 nt, Artificial Sequence
  Description of Artificial Sequence: Synthetic oligonucleotide
uuggaaugccgcagcccca

SEQ ID NO: 1423697 - RNA, 19 nt, Artificial Sequence
  Description of Artificial Sequence: Synthetic oligonucleotide
cucgaaaagcuuucugaaa

SEQ ID NO: 1423698 - RNA, 19 nt, Artificial Sequence
  Description of Artificial Sequence: Synthetic oligonucleotide
cucaacggggucacaucac

SEQ ID NO: 1423699 - RNA, 19 nt, Artificial Sequence
  Description of Artificial Sequence: Synthetic oligonucleotide
gcaacgaggaacagguuug

SEQ ID NO: 1423700 - RNA, 19 nt, Artificial Sequence
  Description of Artificial Sequence: Synthetic oligonucleotide
uccucacaucguaucucca

SEQ ID NO: 1423701 - RNA, 19 nt, Artificial Sequence
  Description of Artificial Sequence: Synthetic oligonucleotide
agcucguacuuuugagccu

SEQ ID NO: 1423702 - RNA, 19 nt, Artificial Sequence
  Description of Artificial Sequence: Synthetic oligonucleotide
ggugaggugaugcuucguc

SEQ ID NO: 1423703 - RNA, 19 nt, Artificial Sequence
  Description of Artificial Sequence: Synthetic oligonucleotide
ccaaggaauggccaaguuc

SEQ ID NO: 1423704 - RNA, 19 nt, Artificial Sequence
  Description of Artificial Sequence: Synthetic oligonucleotide
caugucagggguguaauua

SEQ ID NO: 1423705 - RNA, 19 nt, Artificial Sequence
  Description of Artificial Sequence: Synthetic oligonucleotide
uggacugcuuccucacauc

SEQ ID NO: 1423706 - RNA, 19 nt, Artificial Sequence
  Description of Artificial Sequence: Synthetic oligonucleotide
aaauucgguuucauuuaua

SEQ ID NO: 1423707 - RNA, 19 nt, Artificial Sequence
  Description of Artificial Sequence: Synthetic oligonucleotide
cccagagaggauauguuuc

SEQ ID NO: 1423708 - RNA, 19 nt, Artificial Sequence
  Description of Artificial Sequence: Synthetic oligonucleotide
gaagugacgguggcuggac

SEQ ID NO: 1423709 - RNA, 19 nt, Artificial Sequence
  Description of Artificial Sequence: Synthetic oligonucleotide
gucaaguaccuuucagcaa

SEQ ID NO: 1423710 - RNA, 19 nt, Artificial Sequence
  Description of Artificial Sequence: Synthetic oligonucleotide
ccucgagaaccuuuacucc

SEQ ID NO: 1423711 - RNA, 19 nt, Artificial Sequence
  Description of Artificial Sequence: Synthetic oligonucleotide
guacauuacugaguuugga

SEQ ID NO: 1423712 - RNA, 19 nt, Artificial Sequence
  Description of Artificial Sequence: Synthetic oligonucleotide
cuaggguacauuacugagu

SEQ ID NO: 1423713 - RNA, 19 nt, Artificial Sequence
  Description of Artificial Sequence: Synthetic oligonucleotide
accuuaugaugagaugggu

SEQ ID NO: 1423714 - RNA, 19 nt, Artificial Sequence
  Description of Artificial Sequence: Synthetic oligonucleotide
uccaccagacgaaccuguc

SEQ ID NO: 1423715 - RNA, 19 nt, Artificial Sequence
  Description of Artificial Sequence: Synthetic oligonucleotide
gcaaauucgguuucauuua

SEQ ID NO: 1423716 - RNA, 19 nt, Artificial Sequence
  Description of Artificial Sequence: Synthetic oligonucleotide
ggaacagguuugugccucg

SEQ ID NO: 1423717 - RNA, 19 nt, Artificial Sequence
  Description of Artificial Sequence: Synthetic oligonucleotide
uugugccucgagaaccuuu

SEQ ID NO: 1423718 - RNA, 19 nt, Artificial Sequence
  Description of Artificial Sequence: Synthetic oligonucleotide
ggcuuaauuccugagaagu

SEQ ID NO: 1423719 - RNA, 19 nt, Artificial Sequence
  Description of Artificial Sequence: Synthetic oligonucleotide
caugugcuauugugccacc

SEQ ID NO: 1423720 - RNA, 19 nt, Artificial Sequence
  Description of Artificial Sequence: Synthetic oligonucleotide
acuauagcuaggguacauu

SEQ ID NO: 1423721 - RNA, 19 nt, Artificial Sequence
  Description of Artificial Sequence: Synthetic oligonucleotide
gcagaugugauaaauacuu

SEQ ID NO: 1423722 - RNA, 19 nt, Artificial Sequence
  Description of Artificial Sequence: Synthetic oligonucleotide
aucguaucuccaauaucgu

SEQ ID NO: 1423723 - RNA, 19 nt, Artificial Sequence
  Description of Artificial Sequence: Synthetic oligonucleotide
caacggggucacaucacuc

SEQ ID NO: 1423724 - RNA, 19 nt, Artificial Sequence
  Description of Artificial Sequence: Synthetic oligonucleotide
gauaccggguccaggguaa

SEQ ID NO: 1423725 - RNA, 19 nt, Artificial Sequence
  Description of Artificial Sequence: Synthetic oligonucleotide
gucucccacuguugugacg

SEQ ID NO: 1423726 - RNA, 19 nt, Artificial Sequence
  Description of Artificial Sequence: Synthetic oligonucleotide
ugucaacguccucacgcuu

SEQ ID NO: 1423727 - RNA, 19 nt, Artificial Sequence
  Description of Artificial Sequence: Synthetic oligonucleotide
guagaccuuaugaugagau

SEQ ID NO: 1423728 - RNA, 19 nt, Artificial Sequence
  Description of Artificial Sequence: Synthetic oligonucleotide
gauuucucaaggguggguu

SEQ ID NO: 1423729 - RNA, 19 nt, Artificial Sequence
  Description of Artificial Sequence: Synthetic oligonucleotide
ggauuguuggaaugccgca

SEQ ID NO: 1423730 - RNA, 19 nt, Artificial Sequence
  Description of Artificial Sequence: Synthetic oligonucleotide
cagagaggauauguuucug

SEQ ID NO: 1423731 - RNA, 19 nt, Artificial Sequence
  Description of Artificial Sequence: Synthetic oligonucleotide
gcuuugagcccaaagaacu

SEQ ID NO: 1423732 - RNA, 19 nt, Artificial Sequence
  Description of Artificial Sequence: Synthetic oligonucleotide
uggaaugccgcagccccaa

SEQ ID NO: 1423733 - RNA, 19 nt, Artificial Sequence
  Description of Artificial Sequence: Synthetic oligonucleotide
gcgaagauccucaacugca

SEQ ID NO: 1423734 - RNA, 19 nt, Artificial Sequence
  Description of Artificial Sequence: Synthetic oligonucleotide
ccagaugggaugguuggcc

SEQ ID NO: 1423735 - RNA, 19 nt, Artificial Sequence
  Description of Artificial Sequence: Synthetic oligonucleotide
gugcuauugugccaccucu

SEQ ID NO: 1423736 - RNA, 19 nt, Artificial Sequence
  Description of Artificial Sequence: Synthetic oligonucleotide
gggauaaguaggguccaug

SEQ ID NO: 1423737 - RNA, 19 nt, Artificial Sequence
  Description of Artificial Sequence: Synthetic oligonucleotide
ugggaugguuggccacaug

SEQ ID NO: 1423738 - RNA, 19 nt, Artificial Sequence
  Description of Artificial Sequence: Synthetic oligonucleotide
cgaggugugugcauuauca

SEQ ID NO: 1423739 - RNA, 19 nt, Artificial Sequence
  Description of Artificial Sequence: Synthetic oligonucleotide
aaguaccuuucagcaaauu

SEQ ID NO: 1423740 - RNA, 19 nt, Artificial Sequence
  Description of Artificial Sequence: Synthetic oligonucleotide
uguccgccuggccuguaua

SEQ ID NO: 1423741 - RNA, 19 nt, Artificial Sequence
  Description of Artificial Sequence: Synthetic oligonucleotide
ccagacucgaaaagcuuuc

SEQ ID NO: 1423742 - RNA, 19 nt, Artificial Sequence
  Description of Artificial Sequence: Synthetic oligonucleotide
acaucgaggugugugcauu

SEQ ID NO: 1423743 - RNA, 19 nt, Artificial Sequence
  Description of Artificial Sequence: Synthetic oligonucleotide
cugacagauaguugcugcu

SEQ ID NO: 1423744 - RNA, 19 nt, Artificial Sequence
  Description of Artificial Sequence: Synthetic oligonucleotide
auccaccagacgaaccugu

SEQ ID NO: 1423745 - RNA, 19 nt, Artificial Sequence
  Description of Artificial Sequence: Synthetic oligonucleotide
augugcuauugugccaccu

SEQ ID NO: 1423746 - RNA, 19 nt, Artificial Sequence
  Description of Artificial Sequence: Synthetic oligonucleotide
cacaucguaucuccaauau

SEQ ID NO: 1423747 - RNA, 19 nt, Artificial Sequence
  Description of Artificial Sequence: Synthetic oligonucleotide
acgcagggaagcccagaga

SEQ ID NO: 1423748 - RNA, 19 nt, Artificial Sequence
  Description of Artificial Sequence: Synthetic oligonucleotide
cggcaauucucugagauuc

SEQ ID NO: 1423749 - RNA, 19 nt, Artificial Sequence
  Description of Artificial Sequence: Synthetic oligonucleotide
caauaucgucuauccgaga

SEQ ID NO: 1423750 - RNA, 19 nt, Artificial Sequence
  Description of Artificial Sequence: Synthetic oligonucleotide
cagacgaaccugucuuuaa

SEQ ID NO: 1423751 - RNA, 19 nt, Artificial Sequence
  Description of Artificial Sequence: Synthetic oligonucleotide
cauccccggcaauucucug

SEQ ID NO: 1423752 - RNA, 19 nt, Artificial Sequence
  Description of Artificial Sequence: Synthetic oligonucleotide
gucuauccgagaagaagua

SEQ ID NO: 1423753 - RNA, 19 nt, Artificial Sequence
  Description of Artificial Sequence: Synthetic oligonucleotide
cacuguugugacggcauca

SEQ ID NO: 1423754 - RNA, 19 nt, Artificial Sequence
  Description of Artificial Sequence: Synthetic oligonucleotide
uccgccuggccuguauaaa

SEQ ID NO: 1423755 - RNA, 19 nt, Artificial Sequence
  Description of Artificial Sequence: Synthetic oligonucleotide
ugggauaaguaggguccau

SEQ ID NO: 1423756 - RNA, 19 nt, Artificial Sequence
  Description of Artificial Sequence: Synthetic oligonucleotide
cucacaucguaucuccaau

SEQ ID NO: 1423757 - RNA, 19 nt, Artificial Sequence
  Description of Artificial Sequence: Synthetic oligonucleotide
cugucaacguccucacgcu

SEQ ID NO: 1423758 - RNA, 19 nt, Artificial Sequence
  Description of Artificial Sequence: Synthetic oligonucleotide
augcccugucaacguccuc

SEQ ID NO: 1423759 - RNA, 19 nt, Artificial Sequence
  Description of Artificial Sequence: Synthetic oligonucleotide
gaggagcaugaggaacuuc

SEQ ID NO: 1423760 - RNA, 19 nt, Artificial Sequence
  Description of Artificial Sequence: Synthetic oligonucleotide
aucgaggugugugcauuau

SEQ ID NO: 1423761 - RNA, 19 nt, Artificial Sequence
  Description of Artificial Sequence: Synthetic oligonucleotide
cugauggaaugacaggauu

SEQ ID NO: 1423762 - RNA, 19 nt, Artificial Sequence
  Description of Artificial Sequence: Synthetic oligonucleotide
guuugugccucgagaaccu

SEQ ID NO: 1423763 - RNA, 19 nt, Artificial Sequence
  Description of Artificial Sequence: Synthetic oligonucleotide
uccaauugauuggcuccuu

SEQ ID NO: 1423764 - RNA, 19 nt, Artificial Sequence
  Description of Artificial Sequence: Synthetic oligonucleotide
ggauaccggguccagggua

SEQ ID NO: 1423765 - RNA, 19 nt, Artificial Sequence
  Description of Artificial Sequence: Synthetic oligonucleotide
gggucacaucacuccagac

SEQ ID NO: 1423766 - RNA, 19 nt, Artificial Sequence
  Description of Artificial Sequence: Synthetic oligonucleotide
uuugugccucgagaaccuu

SEQ ID NO: 1423767 - RNA, 19 nt, Artificial Sequence
  Description of Artificial Sequence: Synthetic oligonucleotide
ucguacuuuugagccuuuu

SEQ ID NO: 1423768 - RNA, 19 nt, Artificial Sequence
  Description of Artificial Sequence: Synthetic oligonucleotide
guccgccuggccuguauaa

SEQ ID NO: 1423769 - RNA, 19 nt, Artificial Sequence
  Description of Artificial Sequence: Synthetic oligonucleotide
aucgucuauccgagaagaa

SEQ ID NO: 1423770 - RNA, 19 nt, Artificial Sequence
  Description of Artificial Sequence: Synthetic oligonucleotide
auguccgccuggccuguau

SEQ ID NO: 1423771 - RNA, 19 nt, Artificial Sequence
  Description of Artificial Sequence: Synthetic oligonucleotide
gugccucgagaaccuuuac

SEQ ID NO: 1423772 - RNA, 19 nt, Artificial Sequence
  Description of Artificial Sequence: Synthetic oligonucleotide
caucgaggugugugcauua

SEQ ID NO: 1423773 - RNA, 19 nt, Artificial Sequence
  Description of Artificial Sequence: Synthetic oligonucleotide
cgucuauccgagaagaagu

SEQ ID NO: 1423774 - RNA, 19 nt, Artificial Sequence
  Description of Artificial Sequence: Synthetic oligonucleotide
gugcuacuaaguuguuuau

SEQ ID NO: 1423775 - RNA, 19 nt, Artificial Sequence
  Description of Artificial Sequence: Synthetic oligonucleotide
gccucaucaaaaugugcgu

SEQ ID NO: 1423776 - RNA, 19 nt, Artificial Sequence
  Description of Artificial Sequence: Synthetic oligonucleotide
ggugaugcuucguccauuu

SEQ ID NO: 1423777 - RNA, 19 nt, Artificial Sequence
  Description of Artificial Sequence: Synthetic oligonucleotide
augggaugguuggccacau

SEQ ID NO: 1423778 - RNA, 19 nt, Artificial Sequence
  Description of Artificial Sequence: Synthetic oligonucleotide
ccucacaucguaucuccaa

SEQ ID NO: 1423779 - RNA, 19 nt, Artificial Sequence
  Description of Artificial Sequence: Synthetic oligonucleotide
uaccggguccaggguaaaa

SEQ ID NO: 1423780 - RNA, 19 nt, Artificial Sequence
  Description of Artificial Sequence: Synthetic oligonucleotide
gcuuugcugacagauaguu

SEQ ID NO: 1423781 - RNA, 19 nt, Artificial Sequence
  Description of Artificial Sequence: Synthetic oligonucleotide
gaaucucaacggggucaca

SEQ ID NO: 1423782 - RNA, 19 nt, Artificial Sequence
  Description of Artificial Sequence: Synthetic oligonucleotide
ccagagaggauauguuucu

SEQ ID NO: 1423783 - RNA, 19 nt, Artificial Sequence
  Description of Artificial Sequence: Synthetic oligonucleotide
ugacggcaucaaagcucaa

SEQ ID NO: 1423784 - RNA, 19 nt, Artificial Sequence
  Description of Artificial Sequence: Synthetic oligonucleotide
ggaaugccgcagccccaag

SEQ ID NO: 1423785 - RNA, 19 nt, Artificial Sequence
  Description of Artificial Sequence: Synthetic oligonucleotide
caaguaccuuucagcaaau

SEQ ID NO: 1423786 - RNA, 19 nt, Artificial Sequence
  Description of Artificial Sequence: Synthetic oligonucleotide
cccaguugcuuugagccca

SEQ ID NO: 1423787 - RNA, 19 nt, Artificial Sequence
  Description of Artificial Sequence: Synthetic oligonucleotide
gacgguggcuggacuccca

SEQ ID NO: 1423788 - RNA, 19 nt, Artificial Sequence
  Description of Artificial Sequence: Synthetic oligonucleotide
cagcaaauucgguuucauu

SEQ ID NO: 1423789 - RNA, 19 nt, Artificial Sequence
  Description of Artificial Sequence: Synthetic oligonucleotide
gugcgucuccuuggauacc

SEQ ID NO: 1423790 - RNA, 19 nt, Artificial Sequence
  Description of Artificial Sequence: Synthetic oligonucleotide
ggcggaauguguugggguu

SEQ ID NO: 1423791 - RNA, 19 nt, Artificial Sequence
  Description of Artificial Sequence: Synthetic oligonucleotide
cagacucgaaaagcuuucu

SEQ ID NO: 1423792 - RNA, 19 nt, Artificial Sequence
  Description of Artificial Sequence: Synthetic oligonucleotide
aauguccgccuggccugua

SEQ ID NO: 1423793 - RNA, 19 nt, Artificial Sequence
  Description of Artificial Sequence: Synthetic oligonucleotide
gcaggaaggcggaaugugu

SEQ ID NO: 1423794 - RNA, 19 nt, Artificial Sequence
  Description of Artificial Sequence: Synthetic oligonucleotide
cacaucgaggugugugcau

SEQ ID NO: 1423795 - RNA, 19 nt, Artificial Sequence
  Description of Artificial Sequence: Synthetic oligonucleotide
auaccggguccaggguaaa

SEQ ID NO: 1423796 - RNA, 19 nt, Artificial Sequence
  Description of Artificial Sequence: Synthetic oligonucleotide
caacgaggaacagguuugu

SEQ ID NO: 1423797 - RNA, 19 nt, Artificial Sequence
  Description of Artificial Sequence: Synthetic oligonucleotide
gcgucuccuuggauaccgg

SEQ ID NO: 1423798 - RNA, 19 nt, Artificial Sequence
  Description of Artificial Sequence: Synthetic oligonucleotide
gcugauggaaugacaggau

SEQ ID NO: 1423799 - RNA, 19 nt, Artificial Sequence
  Description of Artificial Sequence: Synthetic oligonucleotide
ggaauguguugggguuaac

SEQ ID NO: 1423800 - RNA, 19 nt, Artificial Sequence
  Description of Artificial Sequence: Synthetic oligonucleotide
cugugcuacuaaguuguuu

SEQ ID NO: 1423801 - RNA, 19 nt, Artificial Sequence
  Description of Artificial Sequence: Synthetic oligonucleotide
ggguguaauuauagauccu

SEQ ID NO: 1423802 - RNA, 19 nt, Artificial Sequence
  Description of Artificial Sequence: Synthetic oligonucleotide
gcucguacuuuugagccuu

SEQ ID NO: 1423803 - RNA, 19 nt, Artificial Sequence
  Description of Artificial Sequence: Synthetic oligonucleotide
gcggaauguguugggguua

SEQ ID NO: 1423804 - RNA, 19 nt, Artificial Sequence
  Description of Artificial Sequence: Synthetic oligonucleotide
gcauccccggcaauucucu

SEQ ID NO: 1423805 - RNA, 19 nt, Artificial Sequence
  Description of Artificial Sequence: Synthetic oligonucleotide
ccgagaagaaguagaccuu

SEQ ID NO: 1423806 - RNA, 19 nt, Artificial Sequence
  Description of Artificial Sequence: Synthetic oligonucleotide
ccaguugcuuugagcccaa

SEQ ID NO: 1423807 - RNA, 19 nt, Artificial Sequence
  Description of Artificial Sequence: Synthetic oligonucleotide
cucguacuuuugagccuuu

SEQ ID NO: 1423808 - RNA, 19 nt, Artificial Sequence
  Description of Artificial Sequence: Synthetic oligonucleotide
ccuggccuguauaaaucuu

SEQ ID NO: 1423809 - RNA, 19 nt, Artificial Sequence
  Description of Artificial Sequence: Synthetic oligonucleotide
ccgccuggccuguauaaau

SEQ ID NO: 1423810 - RNA, 19 nt, Artificial Sequence
  Description of Artificial Sequence: Synthetic oligonucleotide
cagcaacgaggaacagguu

SEQ ID NO: 1423811 - RNA, 19 nt, Artificial Sequence
  Description of Artificial Sequence: Synthetic oligonucleotide
cggaauguguugggguuaa

SEQ ID NO: 1423812 - RNA, 19 nt, Artificial Sequence
  Description of Artificial Sequence: Synthetic oligonucleotide
ccggcaauucucugagauu

SEQ ID NO: 1423813 - RNA, 19 nt, Artificial Sequence
  Description of Artificial Sequence: Synthetic oligonucleotide
auucaagugauacaaaacc

SEQ ID NO: 1423814 - RNA, 19 nt, Artificial Sequence
  Description of Artificial Sequence: Synthetic oligonucleotide
uguguuuauaacauuaaag

SEQ ID NO: 1423815 - RNA, 19 nt, Artificial Sequence
  Description of Artificial Sequence: Synthetic oligonucleotide
agcuauguaaauuacaauc

SEQ ID NO: 1423816 - RNA, 19 nt, Artificial Sequence
  Description of Artificial Sequence: Synthetic oligonucleotide
uuggauaauaaauaaaaug

SEQ ID NO: 1423817 - RNA, 19 nt, Artificial Sequence
  Description of Artificial Sequence: Synthetic oligonucleotide
auauuaaaaguuuauagca

SEQ ID NO: 1423818 - RNA, 19 nt, Artificial Sequence
  Description of Artificial Sequence: Synthetic oligonucleotide
aaccaggacacacuaaagc

SEQ ID NO: 1423819 - RNA, 19 nt, Artificial Sequence
  Description of Artificial Sequence: Synthetic oligonucleotide
aagaauccuauucagcacg

SEQ ID NO: 1423820 - RNA, 19 nt, Artificial Sequence
  Description of Artificial Sequence: Synthetic oligonucleotide
uuccauauuauauaaagga

SEQ ID NO: 1423821 - RNA, 19 nt, Artificial Sequence
  Description of Artificial Sequence: Synthetic oligonucleotide
uaucagaugggcaugauug

SEQ ID NO: 1423822 - RNA, 19 nt, Artificial Sequence
  Description of Artificial Sequence: Synthetic oligonucleotide
aagaaaguuauauugaguu

SEQ ID NO: 1423823 - RNA, 19 nt, Artificial Sequence
  Description of Artificial Sequence: Synthetic oligonucleotide
uauauuaucucuucugugc

SEQ ID NO: 1423824 - RNA, 19 nt, Artificial Sequence
  Description of Artificial Sequence: Synthetic oligonucleotide
cauagugacagccacagcg

SEQ ID NO: 1423825 - RNA, 19 nt, Artificial Sequence
  Description of Artificial Sequence: Synthetic oligonucleotide
aguuauguggcucuuuagc

SEQ ID NO: 1423826 - RNA, 19 nt, Artificial Sequence
  Description of Artificial Sequence: Synthetic oligonucleotide
ucauacaucacaaaucugu

SEQ ID NO: 1423827 - RNA, 19 nt, Artificial Sequence
  Description of Artificial Sequence: Synthetic oligonucleotide
uguuaaaucuccuaguuaa

SEQ ID NO: 1423828 - RNA, 19 nt, Artificial Sequence
  Description of Artificial Sequence: Synthetic oligonucleotide
uucaggaaagauuauauac

SEQ ID NO: 1423829 - RNA, 19 nt, Artificial Sequence
  Description of Artificial Sequence: Synthetic oligonucleotide
cuuuaagacccaaagaaag

SEQ ID NO: 1423830 - RNA, 19 nt, Artificial Sequence
  Description of Artificial Sequence: Synthetic oligonucleotide
aauacaaccaguaccauca

SEQ ID NO: 1423831 - RNA, 19 nt, Artificial Sequence
  Description of Artificial Sequence: Synthetic oligonucleotide
aagugaaaaguuauguggc

SEQ ID NO: 1423832 - RNA, 19 nt, Artificial Sequence
  Description of Artificial Sequence: Synthetic oligonucleotide
aagccauuaacugaccugc

SEQ ID NO: 1423833 - RNA, 19 nt, Artificial Sequence
  Description of Artificial Sequence: Synthetic oligonucleotide
auuauaaucaucugugaca

SEQ ID NO: 1423834 - RNA, 19 nt, Artificial Sequence
  Description of Artificial Sequence: Synthetic oligonucleotide
guuuauagcaucuuuucag

SEQ ID NO: 1423835 - RNA, 19 nt, Artificial Sequence
  Description of Artificial Sequence: Synthetic oligonucleotide
ucauauaaggcuaccaaca

SEQ ID NO: 1423836 - RNA, 19 nt, Artificial Sequence
  Description of Artificial Sequence: Synthetic oligonucleotide
gacauaaugguucaucccc

SEQ ID NO: 1423837 - RNA, 19 nt, Artificial Sequence
  Description of Artificial Sequence: Synthetic oligonucleotide
agauaaaauuaauucgagg

SEQ ID NO: 1423838 - RNA, 19 nt, Artificial Sequence
  Description of Artificial Sequence: Synthetic oligonucleotide
uuauauacuauacaagcua

SEQ ID NO: 1423839 - RNA, 19 nt, Artificial Sequence
  Description of Artificial Sequence: Synthetic oligonucleotide
aaucuccuaguuaaaauac

SEQ ID NO: 1423840 - RNA, 19 nt, Artificial Sequence
  Description of Artificial Sequence: Synthetic oligonucleotide
uaaggaacuaacuaaguaa

SEQ ID NO: 1423841 - RNA, 19 nt, Artificial Sequence
  Description of Artificial Sequence: Synthetic oligonucleotide
ucaacuaaggaacuaacua

SEQ ID NO: 1423842 - RNA, 19 nt, Artificial Sequence
  Description of Artificial Sequence: Synthetic oligonucleotide
aaauaucagucuuuggccu

SEQ ID NO: 1423843 - RNA, 19 nt, Artificial Sequence
  Description of Artificial Sequence: Synthetic oligonucleotide
uccuaauuggauaauaaau

SEQ ID NO: 1423844 - RNA, 19 nt, Artificial Sequence
  Description of Artificial Sequence: Synthetic oligonucleotide
auacaucacaaaucugucc

SEQ ID NO: 1423845 - RNA, 19 nt, Artificial Sequence
  Description of Artificial Sequence: Synthetic oligonucleotide
aaagugguggcaaagaaga

SEQ ID NO: 1423846 - RNA, 19 nt, Artificial Sequence
  Description of Artificial Sequence: Synthetic oligonucleotide
aguuaucuaaggcaaagug

SEQ ID NO: 1423847 - RNA, 19 nt, Artificial Sequence
  Description of Artificial Sequence: Synthetic oligonucleotide
auuaauucgaggcucaaaa

SEQ ID NO: 1423848 - RNA, 19 nt, Artificial Sequence
  Description of Artificial Sequence: Synthetic oligonucleotide
auuaaagugugaugagugg

SEQ ID NO: 1423849 - RNA, 19 nt, Artificial Sequence
  Description of Artificial Sequence: Synthetic oligonucleotide
uuugaccucacaacaaccc

SEQ ID NO: 1423850 - RNA, 19 nt, Artificial Sequence
  Description of Artificial Sequence: Synthetic oligonucleotide
uacuauacaagcuauucaa

SEQ ID NO: 1423851 - RNA, 19 nt, Artificial Sequence
  Description of Artificial Sequence: Synthetic oligonucleotide
uuuauuggugauucuaugu

SEQ ID NO: 1423852 - RNA, 19 nt, Artificial Sequence
  Description of Artificial Sequence: Synthetic oligonucleotide
guuaucuaaggcaaagugg

SEQ ID NO: 1423853 - RNA, 19 nt, Artificial Sequence
  Description of Artificial Sequence: Synthetic oligonucleotide
uucauauaaauaucagucu

SEQ ID NO: 1423854 - RNA, 19 nt, Artificial Sequence
  Description of Artificial Sequence: Synthetic oligonucleotide
uauuaaaaguuuauagcau

SEQ ID NO: 1423855 - RNA, 19 nt, Artificial Sequence
  Description of Artificial Sequence: Synthetic oligonucleotide
cauauuauauaaaggagca

SEQ ID NO: 1423856 - RNA, 19 nt, Artificial Sequence
  Description of Artificial Sequence: Synthetic oligonucleotide
uucuagacgaagcagcucu

SEQ ID NO: 1423857 - RNA, 19 nt, Artificial Sequence
  Description of Artificial Sequence: Synthetic oligonucleotide
aauucagcacccaaccucg

SEQ ID NO: 1423858 - RNA, 19 nt, Artificial Sequence
  Description of Artificial Sequence: Synthetic oligonucleotide
ucauauaaauaucagucuu

SEQ ID NO: 1423859 - RNA, 19 nt, Artificial Sequence
  Description of Artificial Sequence: Synthetic oligonucleotide
caauucuagacgaagcagc

SEQ ID NO: 1423860 - RNA, 19 nt, Artificial Sequence
  Description of Artificial Sequence: Synthetic oligonucleotide
auaacauuaaagugugaug

SEQ ID NO: 1423861 - RNA, 19 nt, Artificial Sequence
  Description of Artificial Sequence: Synthetic oligonucleotide
aaccucgccucauacuugc

SEQ ID NO: 1423862 - RNA, 19 nt, Artificial Sequence
  Description of Artificial Sequence: Synthetic oligonucleotide
uauauacuauacaagcuau

SEQ ID NO: 1423863 - RNA, 19 nt, Artificial Sequence
  Description of Artificial Sequence: Synthetic oligonucleotide
uuuguuccauauuauauaa

SEQ ID NO: 1423864 - RNA, 19 nt, Artificial Sequence
  Description of Artificial Sequence: Synthetic oligonucleotide
aaaaguuuauagcaucuuu

SEQ ID NO: 1423865 - RNA, 19 nt, Artificial Sequence
  Description of Artificial Sequence: Synthetic oligonucleotide
aacuaaggaacuaacuaag

SEQ ID NO: 1423866 - RNA, 19 nt, Artificial Sequence
  Description of Artificial Sequence: Synthetic oligonucleotide
auagaaagaaaauguggug

SEQ ID NO: 1423867 - RNA, 19 nt, Artificial Sequence
  Description of Artificial Sequence: Synthetic oligonucleotide
aaggcuaccaacacuuucg

SEQ ID NO: 1423868 - RNA, 19 nt, Artificial Sequence
  Description of Artificial Sequence: Synthetic oligonucleotide
guauacacugucaagaaug

SEQ ID NO: 1423869 - RNA, 19 nt, Artificial Sequence
  Description of Artificial Sequence: Synthetic oligonucleotide
uuauauuaucucuucugug

SEQ ID NO: 1423870 - RNA, 19 nt, Artificial Sequence
  Description of Artificial Sequence: Synthetic oligonucleotide
uguaaugggccauagugac

SEQ ID NO: 1423871 - RNA, 19 nt, Artificial Sequence
  Description of Artificial Sequence: Synthetic oligonucleotide
uuucugccaauucuagacg

SEQ ID NO: 1423872 - RNA, 19 nt, Artificial Sequence
  Description of Artificial Sequence: Synthetic oligonucleotide
aguucuuuguuccauauua

SEQ ID NO: 1423873 - RNA, 19 nt, Artificial Sequence
  Description of Artificial Sequence: Synthetic oligonucleotide
uaaugggccauagugacag

SEQ ID NO: 1423874 - RNA, 19 nt, Artificial Sequence
  Description of Artificial Sequence: Synthetic oligonucleotide
uucauauaaggcuaccaac

SEQ ID NO: 1423875 - RNA, 19 nt, Artificial Sequence
  Description of Artificial Sequence: Synthetic oligonucleotide
acacaaguuaucuaaggca

SEQ ID NO: 1423876 - RNA, 19 nt, Artificial Sequence
  Description of Artificial Sequence: Synthetic oligonucleotide
aguaccaucauuccuaauu

SEQ ID NO: 1423877 - RNA, 19 nt, Artificial Sequence
  Description of Artificial Sequence: Synthetic oligonucleotide
ugaacccagaauuuuauau

SEQ ID NO: 1423878 - RNA, 19 nt, Artificial Sequence
  Description of Artificial Sequence: Synthetic oligonucleotide
uauacuauacaagcuauuc

SEQ ID NO: 1423879 - RNA, 19 nt, Artificial Sequence
  Description of Artificial Sequence: Synthetic oligonucleotide
cuauguaaauuacaaucag

SEQ ID NO: 1423880 - RNA, 19 nt, Artificial Sequence
  Description of Artificial Sequence: Synthetic oligonucleotide
gaacuaacuaaguaaggca

SEQ ID NO: 1423881 - RNA, 19 nt, Artificial Sequence
  Description of Artificial Sequence: Synthetic oligonucleotide
guguuuauaacauuaaagu

SEQ ID NO: 1423882 - RNA, 19 nt, Artificial Sequence
  Description of Artificial Sequence: Synthetic oligonucleotide
uuauauaaaggagcaagac

SEQ ID NO: 1423883 - RNA, 19 nt, Artificial Sequence
  Description of Artificial Sequence: Synthetic oligonucleotide
aaucaggauagcugcagca

SEQ ID NO: 1423884 - RNA, 19 nt, Artificial Sequence
  Description of Artificial Sequence: Synthetic oligonucleotide
ugauacaaaaccaguuuuc

SEQ ID NO: 1423885 - RNA, 19 nt, Artificial Sequence
  Description of Artificial Sequence: Synthetic oligonucleotide
ucauacuugcccuaccuac

SEQ ID NO: 1423886 - RNA, 19 nt, Artificial Sequence
  Description of Artificial Sequence: Synthetic oligonucleotide
cugugcucaacuaaggaac

SEQ ID NO: 1423887 - RNA, 19 nt, Artificial Sequence
  Description of Artificial Sequence: Synthetic oligonucleotide
ugcccuaccuacuucacag

SEQ ID NO: 1423888 - RNA, 19 nt, Artificial Sequence
  Description of Artificial Sequence: Synthetic oligonucleotide
ucuccuaguuaaaauacaa

SEQ ID NO: 1423889 - RNA, 19 nt, Artificial Sequence
  Description of Artificial Sequence: Synthetic oligonucleotide
aaaguuauguggcucuuua

SEQ ID NO: 1423890 - RNA, 19 nt, Artificial Sequence
  Description of Artificial Sequence: Synthetic oligonucleotide
aacccagaauuuuauauua

SEQ ID NO: 1423891 - RNA, 19 nt, Artificial Sequence
  Description of Artificial Sequence: Synthetic oligonucleotide
augagugugccuacuaugc

SEQ ID NO: 1423892 - RNA, 19 nt, Artificial Sequence
  Description of Artificial Sequence: Synthetic oligonucleotide
acuacugugcaaccaggac

SEQ ID NO: 1423893 - RNA, 19 nt, Artificial Sequence
  Description of Artificial Sequence: Synthetic oligonucleotide
aacugaccugcccaguuag

SEQ ID NO: 1423894 - RNA, 19 nt, Artificial Sequence
  Description of Artificial Sequence: Synthetic oligonucleotide
gugacauaaugguucaucc

SEQ ID NO: 1423895 - RNA, 19 nt, Artificial Sequence
  Description of Artificial Sequence: Synthetic oligonucleotide
cacacaaguuaucuaaggc

SEQ ID NO: 1423896 - RNA, 19 nt, Artificial Sequence
  Description of Artificial Sequence: Synthetic oligonucleotide
uuaaagugugaugagugga

SEQ ID NO: 1423897 - RNA, 19 nt, Artificial Sequence
  Description of Artificial Sequence: Synthetic oligonucleotide
aaagaaaguuauauugagu

SEQ ID NO: 1423898 - RNA, 19 nt, Artificial Sequence
  Description of Artificial Sequence: Synthetic oligonucleotide
auacuauacaagcuauuca

SEQ ID NO: 1423899 - RNA, 19 nt, Artificial Sequence
  Description of Artificial Sequence: Synthetic oligonucleotide
ucuaaggcaaagugguggc

SEQ ID NO: 1423900 - RNA, 19 nt, Artificial Sequence
  Description of Artificial Sequence: Synthetic oligonucleotide
aaguuauguggcucuuuag

SEQ ID NO: 1423901 - RNA, 19 nt, Artificial Sequence
  Description of Artificial Sequence: Synthetic oligonucleotide
ucuccaagccauuaacuga

SEQ ID NO: 1423902 - RNA, 19 nt, Artificial Sequence
  Description of Artificial Sequence: Synthetic oligonucleotide
ucugugcucaacuaaggaa

SEQ ID NO: 1423903 - RNA, 19 nt, Artificial Sequence
  Description of Artificial Sequence: Synthetic oligonucleotide
ucucaugguacagacaaga

SEQ ID NO: 1423904 - RNA, 19 nt, Artificial Sequence
  Description of Artificial Sequence: Synthetic oligonucleotide
ugacauaaugguucauccc

SEQ ID NO: 1423905 - RNA, 19 nt, Artificial Sequence
  Description of Artificial Sequence: Synthetic oligonucleotide
ucucugguucuucauauaa

SEQ ID NO: 1423906 - RNA, 19 nt, Artificial Sequence
  Description of Artificial Sequence: Synthetic oligonucleotide
guaccaucauuccuaauug

SEQ ID NO: 1423907 - RNA, 19 nt, Artificial Sequence
  Description of Artificial Sequence: Synthetic oligonucleotide
aaggaauagcuccauguua

SEQ ID NO: 1423908 - RNA, 19 nt, Artificial Sequence
  Description of Artificial Sequence: Synthetic oligonucleotide
agcaaacugaaaacaacac

SEQ ID NO: 1423909 - RNA, 19 nt, Artificial Sequence
  Description of Artificial Sequence: Synthetic oligonucleotide
ugccaauucuagacgaagc

SEQ ID NO: 1423910 - RNA, 19 nt, Artificial Sequence
  Description of Artificial Sequence: Synthetic oligonucleotide
cauagaaagaaaauguggu

SEQ ID NO: 1423911 - RNA, 19 nt, Artificial Sequence
  Description of Artificial Sequence: Synthetic oligonucleotide
agguaggcagcacaaguuc

SEQ ID NO: 1423912 - RNA, 19 nt, Artificial Sequence
  Description of Artificial Sequence: Synthetic oligonucleotide
agggauaauaaagauaaaa

SEQ ID NO: 1423913 - RNA, 19 nt, Artificial Sequence
  Description of Artificial Sequence: Synthetic oligonucleotide
uaaagugugaugaguggau

SEQ ID NO: 1423914 - RNA, 19 nt, Artificial Sequence
  Description of Artificial Sequence: Synthetic oligonucleotide
aucauuccuaauuggauaa

SEQ ID NO: 1423915 - RNA, 19 nt, Artificial Sequence
  Description of Artificial Sequence: Synthetic oligonucleotide
aagugaaucuccaagccau

SEQ ID NO: 1423916 - RNA, 19 nt, Artificial Sequence
  Description of Artificial Sequence: Synthetic oligonucleotide
agugaaaaguuauguggcu

SEQ ID NO: 1423917 - RNA, 19 nt, Artificial Sequence
  Description of Artificial Sequence: Synthetic oligonucleotide
aauucuagacgaagcagcu

SEQ ID NO: 1423918 - RNA, 19 nt, Artificial Sequence
  Description of Artificial Sequence: Synthetic oligonucleotide
uucugugcucaacuaagga

SEQ ID NO: 1423919 - RNA, 19 nt, Artificial Sequence
  Description of Artificial Sequence: Synthetic oligonucleotide
cacuaaagcacacagcaca

SEQ ID NO: 1423920 - RNA, 19 nt, Artificial Sequence
  Description of Artificial Sequence: Synthetic oligonucleotide
ggaacuaacuaaguaaggc

SEQ ID NO: 1423921 - RNA, 19 nt, Artificial Sequence
  Description of Artificial Sequence: Synthetic oligonucleotide
accaacacuuucgucagcg

SEQ ID NO: 1423922 - RNA, 19 nt, Artificial Sequence
  Description of Artificial Sequence: Synthetic oligonucleotide
cugguucuucauauaaggc

SEQ ID NO: 1423923 - RNA, 19 nt, Artificial Sequence
  Description of Artificial Sequence: Synthetic oligonucleotide
ggcucuuuagcuuuucucc

SEQ ID NO: 1423924 - RNA, 19 nt, Artificial Sequence
  Description of Artificial Sequence: Synthetic oligonucleotide
aaagcacuauauaauuaca

SEQ ID NO: 1423925 - RNA, 19 nt, Artificial Sequence
  Description of Artificial Sequence: Synthetic oligonucleotide
cauacaucacaaaucuguc

SEQ ID NO: 1423926 - RNA, 19 nt, Artificial Sequence
  Description of Artificial Sequence: Synthetic oligonucleotide
ggugucagaguucacacug

SEQ ID NO: 1423927 - RNA, 19 nt, Artificial Sequence
  Description of Artificial Sequence: Synthetic oligonucleotide
uguggugucagaguucaca

SEQ ID NO: 1423928 - RNA, 19 nt, Artificial Sequence
  Description of Artificial Sequence: Synthetic oligonucleotide
cauguuggaagcuauguaa

SEQ ID NO: 1423929 - RNA, 19 nt, Artificial Sequence
  Description of Artificial Sequence: Synthetic oligonucleotide
aaccaguaccaucauuccu

SEQ ID NO: 1423930 - RNA, 19 nt, Artificial Sequence
  Description of Artificial Sequence: Synthetic oligonucleotide
agcacuauauaauuacaua

SEQ ID NO: 1423931 - RNA, 19 nt, Artificial Sequence
  Description of Artificial Sequence: Synthetic oligonucleotide
caaguuaucuaaggcaaag

SEQ ID NO: 1423932 - RNA, 19 nt, Artificial Sequence
  Description of Artificial Sequence: Synthetic oligonucleotide
uccuaagugaugcuuuaaa

SEQ ID NO: 1423933 - RNA, 19 nt, Artificial Sequence
  Description of Artificial Sequence: Synthetic oligonucleotide
aucuuuucaggaaagauua

SEQ ID NO: 1423934 - RNA, 19 nt, Artificial Sequence
  Description of Artificial Sequence: Synthetic oligonucleotide
acuaacuaaguaaggcagg

SEQ ID NO: 1423935 - RNA, 19 nt, Artificial Sequence
  Description of Artificial Sequence: Synthetic oligonucleotide
uccaaguaccuccggaacu

SEQ ID NO: 1423936 - RNA, 19 nt, Artificial Sequence
  Description of Artificial Sequence: Synthetic oligonucleotide
ugugaugaguggauuuaac

SEQ ID NO: 1423937 - RNA, 19 nt, Artificial Sequence
  Description of Artificial Sequence: Synthetic oligonucleotide
ugaaucuccaagccauuaa

SEQ ID NO: 1423938 - RNA, 19 nt, Artificial Sequence
  Description of Artificial Sequence: Synthetic oligonucleotide
aauaucagucuuuggccua

SEQ ID NO: 1423939 - RNA, 19 nt, Artificial Sequence
  Description of Artificial Sequence: Synthetic oligonucleotide
uuucaggaaagauuauaua

SEQ ID NO: 1423940 - RNA, 19 nt, Artificial Sequence
  Description of Artificial Sequence: Synthetic oligonucleotide
accuauuuacacaucuuuc

SEQ ID NO: 1423941 - RNA, 19 nt, Artificial Sequence
  Description of Artificial Sequence: Synthetic oligonucleotide
uacaagcuauucaagugau

SEQ ID NO: 1423942 - RNA, 19 nt, Artificial Sequence
  Description of Artificial Sequence: Synthetic oligonucleotide
ucuucauauaaggcuacca

SEQ ID NO: 1423943 - RNA, 19 nt, Artificial Sequence
  Description of Artificial Sequence: Synthetic oligonucleotide
uaaggcuaccaacacuuuc

SEQ ID NO: 1423944 - RNA, 19 nt, Artificial Sequence
  Description of Artificial Sequence: Synthetic oligonucleotide
uauucagcacgcuucuccu

SEQ ID NO: 1423945 - RNA, 19 nt, Artificial Sequence
  Description of Artificial Sequence: Synthetic oligonucleotide
ucuacuggguauacacugu

SEQ ID NO: 1423946 - RNA, 19 nt, Artificial Sequence
  Description of Artificial Sequence: Synthetic oligonucleotide
caacuaaggaacuaacuaa

SEQ ID NO: 1423947 - RNA, 19 nt, Artificial Sequence
  Description of Artificial Sequence: Synthetic oligonucleotide
cacaaguuaucuaaggcaa

SEQ ID NO: 1423948 - RNA, 19 nt, Artificial Sequence
  Description of Artificial Sequence: Synthetic oligonucleotide
acagcggcguagcuggcgc

SEQ ID NO: 1423949 - RNA, 19 nt, Artificial Sequence
  Description of Artificial Sequence: Synthetic oligonucleotide
auauguguuuauaacauua

SEQ ID NO: 1423950 - RNA, 19 nt, Artificial Sequence
  Description of Artificial Sequence: Synthetic oligonucleotide
ucagcacccaaccucgccu

SEQ ID NO: 1423951 - RNA, 19 nt, Artificial Sequence
  Description of Artificial Sequence: Synthetic oligonucleotide
aagcacuauauaauuacau

SEQ ID NO: 1423952 - RNA, 19 nt, Artificial Sequence
  Description of Artificial Sequence: Synthetic oligonucleotide
uucuuuguuccauauuaua

SEQ ID NO: 1423953 - RNA, 19 nt, Artificial Sequence
  Description of Artificial Sequence: Synthetic oligonucleotide
guaccuccggaacugcucg

SEQ ID NO: 1423954 - RNA, 19 nt, Artificial Sequence
  Description of Artificial Sequence: Synthetic oligonucleotide
aagugugaugaguggauuu

SEQ ID NO: 1423955 - RNA, 19 nt, Artificial Sequence
  Description of Artificial Sequence: Synthetic oligonucleotide
aaguuaucuaaggcaaagu

SEQ ID NO: 1423956 - RNA, 19 nt, Artificial Sequence
  Description of Artificial Sequence: Synthetic oligonucleotide
ucauguuggaagcuaugua

SEQ ID NO: 1423957 - RNA, 19 nt, Artificial Sequence
  Description of Artificial Sequence: Synthetic oligonucleotide
cagacuacugugcaaccag

SEQ ID NO: 1423958 - RNA, 19 nt, Artificial Sequence
  Description of Artificial Sequence: Synthetic oligonucleotide
ucuccgauauuugcuuugg

SEQ ID NO: 1423959 - RNA, 19 nt, Artificial Sequence
  Description of Artificial Sequence: Synthetic oligonucleotide
ggagauacgggcuggcggg

SEQ ID NO: 1423960 - RNA, 19 nt, Artificial Sequence
  Description of Artificial Sequence: Synthetic oligonucleotide
gaguggauuuaacauauua

SEQ ID NO: 1423961 - RNA, 19 nt, Artificial Sequence
  Description of Artificial Sequence: Synthetic oligonucleotide
uauauguguuuauaacauu

SEQ ID NO: 1423962 - RNA, 19 nt, Artificial Sequence
  Description of Artificial Sequence: Synthetic oligonucleotide
ucacagggauaauaaagau

SEQ ID NO: 1423963 - RNA, 19 nt, Artificial Sequence
  Description of Artificial Sequence: Synthetic oligonucleotide
agaauccuauucagcacgc

SEQ ID NO: 1423964 - RNA, 19 nt, Artificial Sequence
  Description of Artificial Sequence: Synthetic oligonucleotide
acuauacaagcuauucaag

SEQ ID NO: 1423965 - RNA, 19 nt, Artificial Sequence
  Description of Artificial Sequence: Synthetic oligonucleotide
aagacccaaagaaaguuau

SEQ ID NO: 1423966 - RNA, 19 nt, Artificial Sequence
  Description of Artificial Sequence: Synthetic oligonucleotide
aaugggccauagugacagc

SEQ ID NO: 1423967 - RNA, 19 nt, Artificial Sequence
  Description of Artificial Sequence: Synthetic oligonucleotide
ugucuacuggguauacacu

SEQ ID NO: 1423968 - RNA, 19 nt, Artificial Sequence
  Description of Artificial Sequence: Synthetic oligonucleotide
uucuccgauauuugcuuug

SEQ ID NO: 1423969 - RNA, 19 nt, Artificial Sequence
  Description of Artificial Sequence: Synthetic oligonucleotide
aacacagacuacugugcaa

SEQ ID NO: 1423970 - RNA, 19 nt, Artificial Sequence
  Description of Artificial Sequence: Synthetic oligonucleotide
acuugcccuaccuacuuca

SEQ ID NO: 1423971 - RNA, 19 nt, Artificial Sequence
  Description of Artificial Sequence: Synthetic oligonucleotide
uucgucagcguguccagca

SEQ ID NO: 1423972 - RNA, 19 nt, Artificial Sequence
  Description of Artificial Sequence: Synthetic oligonucleotide
ucuccaaguaccuccggaa

SEQ ID NO: 1423973 - RNA, 19 nt, Artificial Sequence
  Description of Artificial Sequence: Synthetic oligonucleotide
uuauguggcucuuuagcuu

SEQ ID NO: 1423974 - RNA, 19 nt, Artificial Sequence
  Description of Artificial Sequence: Synthetic oligonucleotide
acuuucgucagcgugucca

SEQ ID NO: 1423975 - RNA, 19 nt, Artificial Sequence
  Description of Artificial Sequence: Synthetic oligonucleotide
uuaacugaccugcccaguu

SEQ ID NO: 1423976 - RNA, 19 nt, Artificial Sequence
  Description of Artificial Sequence: Synthetic oligonucleotide
aggguaagaguguagucau

SEQ ID NO: 1423977 - RNA, 19 nt, Artificial Sequence
  Description of Artificial Sequence: Synthetic oligonucleotide
uguuggaagcuauguaaau

SEQ ID NO: 1423978 - RNA, 19 nt, Artificial Sequence
  Description of Artificial Sequence: Synthetic oligonucleotide
gagugugccuacuaugcuc

SEQ ID NO: 1423979 - RNA, 19 nt, Artificial Sequence
  Description of Artificial Sequence: Synthetic oligonucleotide
gaaaauguggugucagagu

SEQ ID NO: 1423980 - RNA, 19 nt, Artificial Sequence
  Description of Artificial Sequence: Synthetic oligonucleotide
ucuuuagcuuuucuccgau

SEQ ID NO: 1423981 - RNA, 19 nt, Artificial Sequence
  Description of Artificial Sequence: Synthetic oligonucleotide
uucagcacccaaccucgcc

SEQ ID NO: 1423982 - RNA, 19 nt, Artificial Sequence
  Description of Artificial Sequence: Synthetic oligonucleotide
uacuggguauacacuguca

SEQ ID NO: 1423983 - RNA, 19 nt, Artificial Sequence
  Description of Artificial Sequence: Synthetic oligonucleotide
uacugagcaagcuuugcuu

SEQ ID NO: 1423984 - RNA, 19 nt, Artificial Sequence
  Description of Artificial Sequence: Synthetic oligonucleotide
aggaauagcuccauguuaa

SEQ ID NO: 1423985 - RNA, 19 nt, Artificial Sequence
  Description of Artificial Sequence: Synthetic oligonucleotide
ucguuugaccucacaacaa

SEQ ID NO: 1423986 - RNA, 19 nt, Artificial Sequence
  Description of Artificial Sequence: Synthetic oligonucleotide
gcuauguaaauuacaauca

SEQ ID NO: 1423987 - RNA, 19 nt, Artificial Sequence
  Description of Artificial Sequence: Synthetic oligonucleotide
ugcucaacuaaggaacuaa

SEQ ID NO: 1423988 - RNA, 19 nt, Artificial Sequence
  Description of Artificial Sequence: Synthetic oligonucleotide
accuacuucacagggauaa

SEQ ID NO: 1423989 - RNA, 19 nt, Artificial Sequence
  Description of Artificial Sequence: Synthetic oligonucleotide
caggaaagauuauauacua

SEQ ID NO: 1423990 - RNA, 19 nt, Artificial Sequence
  Description of Artificial Sequence: Synthetic oligonucleotide
cuaugcucaaguccucaac

SEQ ID NO: 1423991 - RNA, 19 nt, Artificial Sequence
  Description of Artificial Sequence: Synthetic oligonucleotide
gccacagcggcguagcugg

SEQ ID NO: 1423992 - RNA, 19 nt, Artificial Sequence
  Description of Artificial Sequence: Synthetic oligonucleotide
uggcucauacugagcaagc

SEQ ID NO: 1423993 - RNA, 19 nt, Artificial Sequence
  Description of Artificial Sequence: Synthetic oligonucleotide
uagucauguuggaagcuau

SEQ ID NO: 1423994 - RNA, 19 nt, Artificial Sequence
  Description of Artificial Sequence: Synthetic oligonucleotide
uggcucuuuagcuuuucuc

SEQ ID NO: 1423995 - RNA, 19 nt, Artificial Sequence
  Description of Artificial Sequence: Synthetic oligonucleotide
aacugagaagaauccuauu

SEQ ID NO: 1423996 - RNA, 19 nt, Artificial Sequence
  Description of Artificial Sequence: Synthetic oligonucleotide
aaggcaaagugguggcaaa

SEQ ID NO: 1423997 - RNA, 19 nt, Artificial Sequence
  Description of Artificial Sequence: Synthetic oligonucleotide
caucauuccuaauuggaua

SEQ ID NO: 1423998 - RNA, 19 nt, Artificial Sequence
  Description of Artificial Sequence: Synthetic oligonucleotide
caagaaugagugugccuac

SEQ ID NO: 1423999 - RNA, 19 nt, Artificial Sequence
  Description of Artificial Sequence: Synthetic oligonucleotide
aagaaugagugugccuacu

SEQ ID NO: 1424000 - RNA, 19 nt, Artificial Sequence
  Description of Artificial Sequence: Synthetic oligonucleotide
ucggcggcuuuguaauggg

SEQ ID NO: 1424001 - RNA, 19 nt, Artificial Sequence
  Description of Artificial Sequence: Synthetic oligonucleotide
aguaccuccggaacugcuc

SEQ ID NO: 1424002 - RNA, 19 nt, Artificial Sequence
  Description of Artificial Sequence: Synthetic oligonucleotide
ucgcgcuucgagucggcgg

SEQ ID NO: 1424003 - RNA, 19 nt, Artificial Sequence
  Description of Artificial Sequence: Synthetic oligonucleotide
agugugccuacuaugcuca

SEQ ID NO: 1424004 - RNA, 19 nt, Artificial Sequence
  Description of Artificial Sequence: Synthetic oligonucleotide
acgaagcagcucuauuucu

SEQ ID NO: 1424005 - RNA, 19 nt, Artificial Sequence
  Description of Artificial Sequence: Synthetic oligonucleotide
cuuucgucagcguguccag

SEQ ID NO: 1424006 - RNA, 19 nt, Artificial Sequence
  Description of Artificial Sequence: Synthetic oligonucleotide
caggguaagaguguaguca

SEQ ID NO: 1424007 - RNA, 19 nt, Artificial Sequence
  Description of Artificial Sequence: Synthetic oligonucleotide
agcaagacgcauggggauc

SEQ ID NO: 1424008 - RNA, 19 nt, Artificial Sequence
  Description of Artificial Sequence: Synthetic oligonucleotide
acuaaguaaggcaggguaa

SEQ ID NO: 1424009 - RNA, 19 nt, Artificial Sequence
  Description of Artificial Sequence: Synthetic oligonucleotide
uacuaugcucaaguccuca

SEQ ID NO: 1424010 - RNA, 19 nt, Artificial Sequence
  Description of Artificial Sequence: Synthetic oligonucleotide
aaaaguuauguggcucuuu

SEQ ID NO: 1424011 - RNA, 19 nt, Artificial Sequence
  Description of Artificial Sequence: Synthetic oligonucleotide
uugcccuaccuacuucaca

SEQ ID NO: 1424012 - RNA, 19 nt, Artificial Sequence
  Description of Artificial Sequence: Synthetic oligonucleotide
agaaugagugugccuacua

SEQ ID NO: 1424013 - RNA, 19 nt, Artificial Sequence
  Description of Artificial Sequence: Synthetic oligonucleotide
cacaaguucucaugguaca

SEQ ID NO: 1424014 - RNA, 19 nt, Artificial Sequence
  Description of Artificial Sequence: Synthetic oligonucleotide
cacagacuacugugcaacc

SEQ ID NO: 1424015 - RNA, 19 nt, Artificial Sequence
  Description of Artificial Sequence: Synthetic oligonucleotide
cuacuggguauacacuguc

SEQ ID NO: 1424016 - RNA, 19 nt, Artificial Sequence
  Description of Artificial Sequence: Synthetic oligonucleotide
cucaaccaaggaauagcuc

SEQ ID NO: 1424017 - RNA, 19 nt, Artificial Sequence
  Description of Artificial Sequence: Synthetic oligonucleotide
gucggcggcuuuguaaugg

SEQ ID NO: 1424018 - RNA, 19 nt, Artificial Sequence
  Description of Artificial Sequence: Synthetic oligonucleotide
accaguaccaucauuccua

SEQ ID NO: 1424019 - RNA, 19 nt, Artificial Sequence
  Description of Artificial Sequence: Synthetic oligonucleotide
cuuuucuccgauauuugcu

SEQ ID NO: 1424020 - RNA, 19 nt, Artificial Sequence
  Description of Artificial Sequence: Synthetic oligonucleotide
cugccaauucuagacgaag

SEQ ID NO: 1424021 - RNA, 19 nt, Artificial Sequence
  Description of Artificial Sequence: Synthetic oligonucleotide
cuccaaguaccuccggaac

SEQ ID NO: 1424022 - RNA, 19 nt, Artificial Sequence
  Description of Artificial Sequence: Synthetic oligonucleotide
agacuacugugcaaccagg

SEQ ID NO: 1424023 - RNA, 19 nt, Artificial Sequence
  Description of Artificial Sequence: Synthetic oligonucleotide
uccaugcagaagcaucaua

SEQ ID NO: 1424024 - RNA, 19 nt, Artificial Sequence
  Description of Artificial Sequence: Synthetic oligonucleotide
gaacccagaauuuuauauu

SEQ ID NO: 1424025 - RNA, 19 nt, Artificial Sequence
  Description of Artificial Sequence: Synthetic oligonucleotide
cauuucugccaauucuaga

SEQ ID NO: 1424026 - RNA, 19 nt, Artificial Sequence
  Description of Artificial Sequence: Synthetic oligonucleotide
ugaccugcccaguuagcaa

SEQ ID NO: 1424027 - RNA, 19 nt, Artificial Sequence
  Description of Artificial Sequence: Synthetic oligonucleotide
aaggagcaagacgcauggg

SEQ ID NO: 1424028 - RNA, 19 nt, Artificial Sequence
  Description of Artificial Sequence: Synthetic oligonucleotide
cucucguuugaccucacaa

SEQ ID NO: 1424029 - RNA, 19 nt, Artificial Sequence
  Description of Artificial Sequence: Synthetic oligonucleotide
uuucuccgauauuugcuuu

SEQ ID NO: 1424030 - RNA, 19 nt, Artificial Sequence
  Description of Artificial Sequence: Synthetic oligonucleotide
cugagcaagcuuugcuuuc

SEQ ID NO: 1424031 - RNA, 19 nt, Artificial Sequence
  Description of Artificial Sequence: Synthetic oligonucleotide
agugugaugaguggauuua

SEQ ID NO: 1424032 - RNA, 19 nt, Artificial Sequence
  Description of Artificial Sequence: Synthetic oligonucleotide
acagacuacugugcaacca

SEQ ID NO: 1424033 - RNA, 19 nt, Artificial Sequence
  Description of Artificial Sequence: Synthetic oligonucleotide
aucuccuaguuaaaauaca

SEQ ID NO: 1424034 - RNA, 19 nt, Artificial Sequence
  Description of Artificial Sequence: Synthetic oligonucleotide
auacuugcccuaccuacuu

SEQ ID NO: 1424035 - RNA, 19 nt, Artificial Sequence
  Description of Artificial Sequence: Synthetic oligonucleotide
caucuuuucaggaaagauu

SEQ ID NO: 1424036 - RNA, 19 nt, Artificial Sequence
  Description of Artificial Sequence: Synthetic oligonucleotide
caacacagacuacugugca

SEQ ID NO: 1424037 - RNA, 19 nt, Artificial Sequence
  Description of Artificial Sequence: Synthetic oligonucleotide
acacaucuuucuauguaca

SEQ ID NO: 1424038 - RNA, 19 nt, Artificial Sequence
  Description of Artificial Sequence: Synthetic oligonucleotide
cugugcaaccaggacacac

SEQ ID NO: 1424039 - RNA, 19 nt, Artificial Sequence
  Description of Artificial Sequence: Synthetic oligonucleotide
gugauacaaaaccaguuuu

SEQ ID NO: 1424040 - RNA, 19 nt, Artificial Sequence
  Description of Artificial Sequence: Synthetic oligonucleotide
ucucucguuugaccucaca

SEQ ID NO: 1424041 - RNA, 19 nt, Artificial Sequence
  Description of Artificial Sequence: Synthetic oligonucleotide
augaacccagaauuuuaua

SEQ ID NO: 1424042 - RNA, 19 nt, Artificial Sequence
  Description of Artificial Sequence: Synthetic oligonucleotide
ucuagacgaagcagcucua

SEQ ID NO: 1424043 - RNA, 19 nt, Artificial Sequence
  Description of Artificial Sequence: Synthetic oligonucleotide
cucauacugagcaagcuuu

SEQ ID NO: 1424044 - RNA, 19 nt, Artificial Sequence
  Description of Artificial Sequence: Synthetic oligonucleotide
gaaugagugugccuacuau

SEQ ID NO: 1424045 - RNA, 19 nt, Artificial Sequence
  Description of Artificial Sequence: Synthetic oligonucleotide
uagcuggcgccggagauac

SEQ ID NO: 1424046 - RNA, 19 nt, Artificial Sequence
  Description of Artificial Sequence: Synthetic oligonucleotide
caagaaagugaaucuccaa

SEQ ID NO: 1424047 - RNA, 19 nt, Artificial Sequence
  Description of Artificial Sequence: Synthetic oligonucleotide
gacuacugugcaaccagga

SEQ ID NO: 1424048 - RNA, 19 nt, Artificial Sequence
  Description of Artificial Sequence: Synthetic oligonucleotide
aaggcaggguaagagugua

SEQ ID NO: 1424049 - RNA, 19 nt, Artificial Sequence
  Description of Artificial Sequence: Synthetic oligonucleotide
cuugcccuaccuacuucac

SEQ ID NO: 1424050 - RNA, 19 nt, Artificial Sequence
  Description of Artificial Sequence: Synthetic oligonucleotide
auuaacugaccugcccagu

SEQ ID NO: 1424051 - RNA, 19 nt, Artificial Sequence
  Description of Artificial Sequence: Synthetic oligonucleotide
cauguuaaaucuccuaguu

SEQ ID NO: 1424052 - RNA, 19 nt, Artificial Sequence
  Description of Artificial Sequence: Synthetic oligonucleotide
uacuugcccuaccuacuuc

SEQ ID NO: 1424053 - RNA, 19 nt, Artificial Sequence
  Description of Artificial Sequence: Synthetic oligonucleotide
acugaccugcccaguuagc

SEQ ID NO: 1424054 - RNA, 19 nt, Artificial Sequence
  Description of Artificial Sequence: Synthetic oligonucleotide
cccuaccuacuucacaggg

SEQ ID NO: 1424055 - RNA, 19 nt, Artificial Sequence
  Description of Artificial Sequence: Synthetic oligonucleotide
uauaaucaucugugacaua

SEQ ID NO: 1424056 - RNA, 19 nt, Artificial Sequence
  Description of Artificial Sequence: Synthetic oligonucleotide
caaccucgccucauacuug

SEQ ID NO: 1424057 - RNA, 19 nt, Artificial Sequence
  Description of Artificial Sequence: Synthetic oligonucleotide
gcucaaguccucaaccaag

SEQ ID NO: 1424058 - RNA, 19 nt, Artificial Sequence
  Description of Artificial Sequence: Synthetic oligonucleotide
aggcaaagugguggcaaag

SEQ ID NO: 1424059 - RNA, 19 nt, Artificial Sequence
  Description of Artificial Sequence: Synthetic oligonucleotide
auacgggcuggcgggcucc

SEQ ID NO: 1424060 - RNA, 19 nt, Artificial Sequence
  Description of Artificial Sequence: Synthetic oligonucleotide
ucgucagcguguccagcac

SEQ ID NO: 1424061 - RNA, 19 nt, Artificial Sequence
  Description of Artificial Sequence: Synthetic oligonucleotide
agcugucuacuggguauac

SEQ ID NO: 1424062 - RNA, 19 nt, Artificial Sequence
  Description of Artificial Sequence: Synthetic oligonucleotide
cauuaucagaugggcauga

SEQ ID NO: 1424063 - RNA, 19 nt, Artificial Sequence
  Description of Artificial Sequence: Synthetic oligonucleotide
gcuggcgccggagauacgg

SEQ ID NO: 1424064 - RNA, 19 nt, Artificial Sequence
  Description of Artificial Sequence: Synthetic oligonucleotide
auauacuauacaagcuauu

SEQ ID NO: 1424065 - RNA, 19 nt, Artificial Sequence
  Description of Artificial Sequence: Synthetic oligonucleotide
ggcggcuuuguaaugggcc

SEQ ID NO: 1424066 - RNA, 19 nt, Artificial Sequence
  Description of Artificial Sequence: Synthetic oligonucleotide
aaguaccuccggaacugcu

SEQ ID NO: 1424067 - RNA, 19 nt, Artificial Sequence
  Description of Artificial Sequence: Synthetic oligonucleotide
accuccggaacugcucgcg

SEQ ID NO: 1424068 - RNA, 19 nt, Artificial Sequence
  Description of Artificial Sequence: Synthetic oligonucleotide
cuaccuacuucacagggau

SEQ ID NO: 1424069 - RNA, 19 nt, Artificial Sequence
  Description of Artificial Sequence: Synthetic oligonucleotide
uuucgucagcguguccagc

SEQ ID NO: 1424070 - RNA, 19 nt, Artificial Sequence
  Description of Artificial Sequence: Synthetic oligonucleotide
agacgcauggggauccaug

SEQ ID NO: 1424071 - RNA, 19 nt, Artificial Sequence
  Description of Artificial Sequence: Synthetic oligonucleotide
auucagcacccaaccucgc

SEQ ID NO: 1424072 - RNA, 19 nt, Artificial Sequence
  Description of Artificial Sequence: Synthetic oligonucleotide
ucauuccuaauuggauaau

SEQ ID NO: 1424073 - RNA, 19 nt, Artificial Sequence
  Description of Artificial Sequence: Synthetic oligonucleotide
gguaagaguguagucaugu

SEQ ID NO: 1424074 - RNA, 19 nt, Artificial Sequence
  Description of Artificial Sequence: Synthetic oligonucleotide
caaguucucaugguacaga

SEQ ID NO: 1424075 - RNA, 19 nt, Artificial Sequence
  Description of Artificial Sequence: Synthetic oligonucleotide
gagucggcggcuuuguaau

SEQ ID NO: 1424076 - RNA, 19 nt, Artificial Sequence
  Description of Artificial Sequence: Synthetic oligonucleotide
ccuaagugaugcuuuaaaa

SEQ ID NO: 1424077 - RNA, 19 nt, Artificial Sequence
  Description of Artificial Sequence: Synthetic oligonucleotide
cuuuccgucccagcuggug

SEQ ID NO: 1424078 - RNA, 19 nt, Artificial Sequence
  Description of Artificial Sequence: Synthetic oligonucleotide
ccauuaacugaccugccca

SEQ ID NO: 1424079 - RNA, 19 nt, Artificial Sequence
  Description of Artificial Sequence: Synthetic oligonucleotide
acaaguuaucuaaggcaaa

SEQ ID NO: 1424080 - RNA, 19 nt, Artificial Sequence
  Description of Artificial Sequence: Synthetic oligonucleotide
ggagcaagacgcaugggga

SEQ ID NO: 1424081 - RNA, 19 nt, Artificial Sequence
  Description of Artificial Sequence: Synthetic oligonucleotide
guagucauguuggaagcua

SEQ ID NO: 1424082 - RNA, 19 nt, Artificial Sequence
  Description of Artificial Sequence: Synthetic oligonucleotide
cauuccuaauuggauaaua

SEQ ID NO: 1424083 - RNA, 19 nt, Artificial Sequence
  Description of Artificial Sequence: Synthetic oligonucleotide
gauacgggcuggcgggcuc

SEQ ID NO: 1424084 - RNA, 19 nt, Artificial Sequence
  Description of Artificial Sequence: Synthetic oligonucleotide
cuggcgccggagauacggg

SEQ ID NO: 1424085 - RNA, 19 nt, Artificial Sequence
  Description of Artificial Sequence: Synthetic oligonucleotide
gcuuuaagacccaaagaaa

SEQ ID NO: 1424086 - RNA, 19 nt, Artificial Sequence
  Description of Artificial Sequence: Synthetic oligonucleotide
ucagcacgcuucuccuccu

SEQ ID NO: 1424087 - RNA, 19 nt, Artificial Sequence
  Description of Artificial Sequence: Synthetic oligonucleotide
caaguaccuccggaacugc

SEQ ID NO: 1424088 - RNA, 19 nt, Artificial Sequence
  Description of Artificial Sequence: Synthetic oligonucleotide
auacaaccaguaccaucau

SEQ ID NO: 1424089 - RNA, 19 nt, Artificial Sequence
  Description of Artificial Sequence: Synthetic oligonucleotide
agcggcguagcuggcgccg

SEQ ID NO: 1424090 - RNA, 19 nt, Artificial Sequence
  Description of Artificial Sequence: Synthetic oligonucleotide
agucggcggcuuuguaaug

SEQ ID NO: 1424091 - RNA, 19 nt, Artificial Sequence
  Description of Artificial Sequence: Synthetic oligonucleotide
uucgagucggcggcuuugu

SEQ ID NO: 1424092 - RNA, 19 nt, Artificial Sequence
  Description of Artificial Sequence: Synthetic oligonucleotide
uaccuccggaacugcucgc

SEQ ID NO: 1424093 - RNA, 19 nt, Artificial Sequence
  Description of Artificial Sequence: Synthetic oligonucleotide
cguuugaccucacaacaac

SEQ ID NO: 1424094 - RNA, 19 nt, Artificial Sequence
  Description of Artificial Sequence: Synthetic oligonucleotide
gucaagaaugagugugccu

SEQ ID NO: 1424095 - RNA, 19 nt, Artificial Sequence
  Description of Artificial Sequence: Synthetic oligonucleotide
guaaugggccauagugaca

SEQ ID NO: 1424096 - RNA, 19 nt, Artificial Sequence
  Description of Artificial Sequence: Synthetic oligonucleotide
cuucgagucggcggcuuug

SEQ ID NO: 1424097 - RNA, 19 nt, Artificial Sequence
  Description of Artificial Sequence: Synthetic oligonucleotide
gucagaguucacacuggca

SEQ ID NO: 1424098 - RNA, 19 nt, Artificial Sequence
  Description of Artificial Sequence: Synthetic oligonucleotide
cacagcggcguagcuggcg

SEQ ID NO: 1424099 - RNA, 19 nt, Artificial Sequence
  Description of Artificial Sequence: Synthetic oligonucleotide
gcaagacgcauggggaucc

SEQ ID NO: 1424100 - RNA, 19 nt, Artificial Sequence
  Description of Artificial Sequence: Synthetic oligonucleotide
ccaaguaccuccggaacug

SEQ ID NO: 1424101 - RNA, 19 nt, Artificial Sequence
  Description of Artificial Sequence: Synthetic oligonucleotide
gagauacgggcuggcgggc

SEQ ID NO: 1424102 - RNA, 19 nt, Artificial Sequence
  Description of Artificial Sequence: Synthetic oligonucleotide
gcuuuguaaugggccauag

SEQ ID NO: 1424103 - RNA, 19 nt, Artificial Sequence
  Description of Artificial Sequence: Synthetic oligonucleotide
gcucaacuaaggaacuaac

SEQ ID NO: 1424104 - RNA, 19 nt, Artificial Sequence
  Description of Artificial Sequence: Synthetic oligonucleotide
ccaaggaauagcuccaugu

SEQ ID NO: 1424105 - RNA, 19 nt, Artificial Sequence
  Description of Artificial Sequence: Synthetic oligonucleotide
gagcaagacgcauggggau

SEQ ID NO: 1424106 - RNA, 19 nt, Artificial Sequence
  Description of Artificial Sequence: Synthetic oligonucleotide
cucgccucauacuugcccu

SEQ ID NO: 1424107 - RNA, 19 nt, Artificial Sequence
  Description of Artificial Sequence: Synthetic oligonucleotide
cucauacuugcccuaccua

SEQ ID NO: 1424108 - RNA, 19 nt, Artificial Sequence
  Description of Artificial Sequence: Synthetic oligonucleotide
cgcauggggauccaugcag

SEQ ID NO: 1424109 - RNA, 19 nt, Artificial Sequence
  Description of Artificial Sequence: Synthetic oligonucleotide
caaggaauagcuccauguu

SEQ ID NO: 1424110 - RNA, 19 nt, Artificial Sequence
  Description of Artificial Sequence: Synthetic oligonucleotide
cggagauacgggcuggcgg

SEQ ID NO: 1424111 - RNA, 19 nt, Artificial Sequence
  Description of Artificial Sequence: Synthetic oligonucleotide
gcggcuuuguaaugggcca

SEQ ID NO: 1424112 - RNA, 19 nt, Artificial Sequence
  Description of Artificial Sequence: Synthetic oligonucleotide
cuauguacauucucucguu

SEQ ID NO: 1424113 - RNA, 19 nt, Artificial Sequence
  Description of Artificial Sequence: Synthetic oligonucleotide
aagacgcauggggauccau

SEQ ID NO: 1424114 - RNA, 19 nt, Artificial Sequence
  Description of Artificial Sequence: Synthetic oligonucleotide
cuuuguaaugggccauagu

SEQ ID NO: 1424115 - RNA, 19 nt, Artificial Sequence
  Description of Artificial Sequence: Synthetic oligonucleotide
gugugaugaguggauuuaa

SEQ ID NO: 1424116 - RNA, 19 nt, Artificial Sequence
  Description of Artificial Sequence: Synthetic oligonucleotide
gguauacacugucaagaau

SEQ ID NO: 1424117 - RNA, 19 nt, Artificial Sequence
  Description of Artificial Sequence: Synthetic oligonucleotide
cuuuagcuuuucuccgaua

SEQ ID NO: 1424118 - RNA, 19 nt, Artificial Sequence
  Description of Artificial Sequence: Synthetic oligonucleotide
cucgcgcuucgagucggcg

SEQ ID NO: 1424119 - RNA, 19 nt, Artificial Sequence
  Description of Artificial Sequence: Synthetic oligonucleotide
gagguaggcagcacaaguu

SEQ ID NO: 1424120 - RNA, 19 nt, Artificial Sequence
  Description of Artificial Sequence: Synthetic oligonucleotide
accucgccucauacuugcc

SEQ ID NO: 1424121 - RNA, 19 nt, Artificial Sequence
  Description of Artificial Sequence: Synthetic oligonucleotide
guaagaguguagucauguu

SEQ ID NO: 1424122 - RNA, 19 nt, Artificial Sequence
  Description of Artificial Sequence: Synthetic oligonucleotide
cagggauaauaaagauaaa

SEQ ID NO: 1424123 - RNA, 19 nt, Artificial Sequence
  Description of Artificial Sequence: Synthetic oligonucleotide
cacuuucgucagcgugucc

SEQ ID NO: 1424124 - RNA, 19 nt, Artificial Sequence
  Description of Artificial Sequence: Synthetic oligonucleotide
agauacgggcuggcgggcu

SEQ ID NO: 1424125 - RNA, 19 nt, Artificial Sequence
  Description of Artificial Sequence: Synthetic oligonucleotide
cagaugggcaugauugcau

SEQ ID NO: 1424126 - RNA, 19 nt, Artificial Sequence
  Description of Artificial Sequence: Synthetic oligonucleotide
acaagcuauucaagugaua

SEQ ID NO: 1424127 - RNA, 19 nt, Artificial Sequence
  Description of Artificial Sequence: Synthetic oligonucleotide
ccuaccuacuucacaggga

SEQ ID NO: 1424128 - RNA, 19 nt, Artificial Sequence
  Description of Artificial Sequence: Synthetic oligonucleotide
agugaaucuccaagccauu

SEQ ID NO: 1424129 - RNA, 19 nt, Artificial Sequence
  Description of Artificial Sequence: Synthetic oligonucleotide
gaaaaguuauguggcucuu

SEQ ID NO: 1424130 - RNA, 19 nt, Artificial Sequence
  Description of Artificial Sequence: Synthetic oligonucleotide
cuccgauauuugcuuugga

SEQ ID NO: 1424131 - RNA, 19 nt, Artificial Sequence
  Description of Artificial Sequence: Synthetic oligonucleotide
gaauccuauucagcacgcu

SEQ ID NO: 1424132 - RNA, 19 nt, Artificial Sequence
  Description of Artificial Sequence: Synthetic oligonucleotide
ccucaaccaaggaauagcu

SEQ ID NO: 1424133 - RNA, 19 nt, Artificial Sequence
  Description of Artificial Sequence: Synthetic oligonucleotide
ggcaggguaagaguguagu

SEQ ID NO: 1424134 - RNA, 19 nt, Artificial Sequence
  Description of Artificial Sequence: Synthetic oligonucleotide
cagcggcguagcuggcgcc

SEQ ID NO: 1424135 - RNA, 19 nt, Artificial Sequence
  Description of Artificial Sequence: Synthetic oligonucleotide
cgcgcuucgagucggcggc

SEQ ID NO: 1424136 - RNA, 19 nt, Artificial Sequence
  Description of Artificial Sequence: Synthetic oligonucleotide
gguggcucauacugagcaa

SEQ ID NO: 1424137 - RNA, 19 nt, Artificial Sequence
  Description of Artificial Sequence: Synthetic oligonucleotide
guggcucuuuagcuuuucu

SEQ ID NO: 1424138 - RNA, 19 nt, Artificial Sequence
  Description of Artificial Sequence: Synthetic oligonucleotide
ggcuggcgggcuccaagcc

SEQ ID NO: 1424139 - RNA, 19 nt, Artificial Sequence
  Description of Artificial Sequence: Synthetic oligonucleotide
ggguaagaguguagucaug

SEQ ID NO: 1424140 - RNA, 19 nt, Artificial Sequence
  Description of Artificial Sequence: Synthetic oligonucleotide
gcuccuaagugaugcuuua

SEQ ID NO: 1424141 - RNA, 19 nt, Artificial Sequence
  Description of Artificial Sequence: Synthetic oligonucleotide
cuccuaagugaugcuuuaa

SEQ ID NO: 1424142 - RNA, 19 nt, Artificial Sequence
  Description of Artificial Sequence: Synthetic oligonucleotide
guagcuggcgccggagaua

SEQ ID NO: 1424143 - RNA, 19 nt, Artificial Sequence
  Description of Artificial Sequence: Synthetic oligonucleotide
cugcccaguuagcaacaaa

SEQ ID NO: 1424144 - RNA, 19 nt, Artificial Sequence
  Description of Artificial Sequence: Synthetic oligonucleotide
ccuccggaacugcucgcgc

SEQ ID NO: 1424145 - RNA, 19 nt, Artificial Sequence
  Description of Artificial Sequence: Synthetic oligonucleotide
gcugucuacuggguauaca

SEQ ID NO: 1424146 - RNA, 19 nt, Artificial Sequence
  Description of Artificial Sequence: Synthetic oligonucleotide
ccaaccucgccucauacuu

SEQ ID NO: 1424147 - RNA, 19 nt, Artificial Sequence
  Description of Artificial Sequence: Synthetic oligonucleotide
cuagacgaagcagcucuau

SEQ ID NO: 1424148 - RNA, 19 nt, Artificial Sequence
  Description of Artificial Sequence: Synthetic oligonucleotide
ccggagauacgggcuggcg

SEQ ID NO: 1424149 - RNA, 19 nt, Artificial Sequence
  Description of Artificial Sequence: Synthetic oligonucleotide
ccccgacuucuccaaguac

SEQ ID NO: 1424150 - RNA, 19 nt, Artificial Sequence
  Description of Artificial Sequence: Synthetic oligonucleotide
ggccauagugacagccaca

SEQ ID NO: 1424151 - RNA, 19 nt, Artificial Sequence
  Description of Artificial Sequence: Synthetic oligonucleotide
ccagcugucuacuggguau

SEQ ID NO: 1424152 - RNA, 19 nt, Artificial Sequence
  Description of Artificial Sequence: Synthetic oligonucleotide
uacgggcuggcgggcucca

SEQ ID NO: 1424153 - RNA, 19 nt, Artificial Sequence
  Description of Artificial Sequence: Synthetic oligonucleotide
gugugccuacuaugcucaa

SEQ ID NO: 1424154 - RNA, 19 nt, Artificial Sequence
  Description of Artificial Sequence: Synthetic oligonucleotide
cagcugucuacuggguaua

SEQ ID NO: 1424155 - RNA, 19 nt, Artificial Sequence
  Description of Artificial Sequence: Synthetic oligonucleotide
ggcuuuguaaugggccaua

SEQ ID NO: 1424156 - RNA, 19 nt, Artificial Sequence
  Description of Artificial Sequence: Synthetic oligonucleotide
caagacgcauggggaucca

SEQ ID NO: 1424157 - RNA, 19 nt, Artificial Sequence
  Description of Artificial Sequence: Synthetic oligonucleotide
ccuauucagcacgcuucuc

SEQ ID NO: 1424158 - RNA, 19 nt, Artificial Sequence
  Description of Artificial Sequence: Synthetic oligonucleotide
cggcggcuuuguaaugggc

SEQ ID NO: 1424159 - RNA, 19 nt, Artificial Sequence
  Description of Artificial Sequence: Synthetic oligonucleotide
gccggagauacgggcuggc

SEQ ID NO: 1424160 - RNA, 19 nt, Artificial Sequence
  Description of Artificial Sequence: Synthetic oligonucleotide
agcuggcgccggagauacg

SEQ ID NO: 1424161 - RNA, 19 nt, Artificial Sequence
  Description of Artificial Sequence: Synthetic oligonucleotide
ggcgccggagauacgggcu

SEQ ID NO: 1424162 - RNA, 19 nt, Artificial Sequence
  Description of Artificial Sequence: Synthetic oligonucleotide
caguaccaucauuccuaau

SEQ ID NO: 1424163 - RNA, 19 nt, Artificial Sequence
  Description of Artificial Sequence: Synthetic oligonucleotide
ccuacuucacagggauaau

SEQ ID NO: 1424164 - RNA, 19 nt, Artificial Sequence
  Description of Artificial Sequence: Synthetic oligonucleotide
ccgggguggcagcuccuaa

SEQ ID NO: 1424165 - RNA, 19 nt, Artificial Sequence
  Description of Artificial Sequence: Synthetic oligonucleotide
gcacccaaccucgccucau

SEQ ID NO: 1424166 - RNA, 19 nt, Artificial Sequence
  Description of Artificial Sequence: Synthetic oligonucleotide
gcgcuucgagucggcggcu

SEQ ID NO: 1424167 - RNA, 19 nt, Artificial Sequence
  Description of Artificial Sequence: Synthetic oligonucleotide
cggcguagcuggcgccgga

SEQ ID NO: 1424168 - RNA, 19 nt, Artificial Sequence
  Description of Artificial Sequence: Synthetic oligonucleotide
ugcacuuuggguaugaugg

SEQ ID NO: 1424169 - RNA, 19 nt, Artificial Sequence
  Description of Artificial Sequence: Synthetic oligonucleotide
cuugauaggauauagguac

SEQ ID NO: 1424170 - RNA, 19 nt, Artificial Sequence
  Description of Artificial Sequence: Synthetic oligonucleotide
uugaucuugaucauaagug

SEQ ID NO: 1424171 - RNA, 19 nt, Artificial Sequence
  Description of Artificial Sequence: Synthetic oligonucleotide
aauaucgucgaaguugcgc

SEQ ID NO: 1424172 - RNA, 19 nt, Artificial Sequence
  Description of Artificial Sequence: Synthetic oligonucleotide
auaucgucgaaguugcgcc

SEQ ID NO: 1424173 - RNA, 19 nt, Artificial Sequence
  Description of Artificial Sequence: Synthetic oligonucleotide
aaugagcauagucagcuag

SEQ ID NO: 1424174 - RNA, 19 nt, Artificial Sequence
  Description of Artificial Sequence: Synthetic oligonucleotide
aaucgauccugauugaucu

SEQ ID NO: 1424175 - RNA, 19 nt, Artificial Sequence
  Description of Artificial Sequence: Synthetic oligonucleotide
uguugagguacacauaacc

SEQ ID NO: 1424176 - RNA, 19 nt, Artificial Sequence
  Description of Artificial Sequence: Synthetic oligonucleotide
aaagguuccagcauccagc

SEQ ID NO: 1424177 - RNA, 19 nt, Artificial Sequence
  Description of Artificial Sequence: Synthetic oligonucleotide
gauaguucaguuccaagag

SEQ ID NO: 1424178 - RNA, 19 nt, Artificial Sequence
  Description of Artificial Sequence: Synthetic oligonucleotide
ugaauaucgucgaaguugc

SEQ ID NO: 1424179 - RNA, 19 nt, Artificial Sequence
  Description of Artificial Sequence: Synthetic oligonucleotide
uucuugauaggauauaggu

SEQ ID NO: 1424180 - RNA, 19 nt, Artificial Sequence
  Description of Artificial Sequence: Synthetic oligonucleotide
uuuggaaucacgcccacca

SEQ ID NO: 1424181 - RNA, 19 nt, Artificial Sequence
  Description of Artificial Sequence: Synthetic oligonucleotide
ucagccauuuccaugaaga

SEQ ID NO: 1424182 - RNA, 19 nt, Artificial Sequence
  Description of Artificial Sequence: Synthetic oligonucleotide
aauguuacagcggaaacgu

SEQ ID NO: 1424183 - RNA, 19 nt, Artificial Sequence
  Description of Artificial Sequence: Synthetic oligonucleotide
uugaacaccucaauuuggg

SEQ ID NO: 1424184 - RNA, 19 nt, Artificial Sequence
  Description of Artificial Sequence: Synthetic oligonucleotide
uggagaaacagccauccag

SEQ ID NO: 1424185 - RNA, 19 nt, Artificial Sequence
  Description of Artificial Sequence: Synthetic oligonucleotide
ugggauuuacucuugaaga

SEQ ID NO: 1424186 - RNA, 19 nt, Artificial Sequence
  Description of Artificial Sequence: Synthetic oligonucleotide
auuuugucuagaguggugc

SEQ ID NO: 1424187 - RNA, 19 nt, Artificial Sequence
  Description of Artificial Sequence: Synthetic oligonucleotide
aacugggcccugcaaaugc

SEQ ID NO: 1424188 - RNA, 19 nt, Artificial Sequence
  Description of Artificial Sequence: Synthetic oligonucleotide
uaauguuacagcggaaacg

SEQ ID NO: 1424189 - RNA, 19 nt, Artificial Sequence
  Description of Artificial Sequence: Synthetic oligonucleotide
ugggauaccccacugcacg

SEQ ID NO: 1424190 - RNA, 19 nt, Artificial Sequence
  Description of Artificial Sequence: Synthetic oligonucleotide
gaaggcaaucccaugaggg

SEQ ID NO: 1424191 - RNA, 19 nt, Artificial Sequence
  Description of Artificial Sequence: Synthetic oligonucleotide
aaccccugguucuugauag

SEQ ID NO: 1424192 - RNA, 19 nt, Artificial Sequence
  Description of Artificial Sequence: Synthetic oligonucleotide
ugauugaucuugaucauaa

SEQ ID NO: 1424193 - RNA, 19 nt, Artificial Sequence
  Description of Artificial Sequence: Synthetic oligonucleotide
agcggaaacguucccaggc

SEQ ID NO: 1424194 - RNA, 19 nt, Artificial Sequence
  Description of Artificial Sequence: Synthetic oligonucleotide
cauaaguggauucugaaga

SEQ ID NO: 1424195 - RNA, 19 nt, Artificial Sequence
  Description of Artificial Sequence: Synthetic oligonucleotide
uuuggaaguggagaaacag

SEQ ID NO: 1424196 - RNA, 19 nt, Artificial Sequence
  Description of Artificial Sequence: Synthetic oligonucleotide
aagagccguucacugauac

SEQ ID NO: 1424197 - RNA, 19 nt, Artificial Sequence
  Description of Artificial Sequence: Synthetic oligonucleotide
uagucggucagccauuucc

SEQ ID NO: 1424198 - RNA, 19 nt, Artificial Sequence
  Description of Artificial Sequence: Synthetic oligonucleotide
auuagcaggacccaaccga

SEQ ID NO: 1424199 - RNA, 19 nt, Artificial Sequence
  Description of Artificial Sequence: Synthetic oligonucleotide
uuaauguuacagcggaaac

SEQ ID NO: 1424200 - RNA, 19 nt, Artificial Sequence
  Description of Artificial Sequence: Synthetic oligonucleotide
uguuacagcggaaacguuc

SEQ ID NO: 1424201 - RNA, 19 nt, Artificial Sequence
  Description of Artificial Sequence: Synthetic oligonucleotide
gacauucuggcccucauac

SEQ ID NO: 1424202 - RNA, 19 nt, Artificial Sequence
  Description of Artificial Sequence: Synthetic oligonucleotide
aguucuuuggguccugguc

SEQ ID NO: 1424203 - RNA, 19 nt, Artificial Sequence
  Description of Artificial Sequence: Synthetic oligonucleotide
auaguucaguuccaagagg

SEQ ID NO: 1424204 - RNA, 19 nt, Artificial Sequence
  Description of Artificial Sequence: Synthetic oligonucleotide
uucagcaaagguuccagca

SEQ ID NO: 1424205 - RNA, 19 nt, Artificial Sequence
  Description of Artificial Sequence: Synthetic oligonucleotide
acggcaugaaacugggccc

SEQ ID NO: 1424206 - RNA, 19 nt, Artificial Sequence
  Description of Artificial Sequence: Synthetic oligonucleotide
auuugggauaguucaguuc

SEQ ID NO: 1424207 - RNA, 19 nt, Artificial Sequence
  Description of Artificial Sequence: Synthetic oligonucleotide
cacggcaugaaacugggcc

SEQ ID NO: 1424208 - RNA, 19 nt, Artificial Sequence
  Description of Artificial Sequence: Synthetic oligonucleotide
ucgaaguugcgccagagau

SEQ ID NO: 1424209 - RNA, 19 nt, Artificial Sequence
  Description of Artificial Sequence: Synthetic oligonucleotide
uuggaaguggagaaacagc

SEQ ID NO: 1424210 - RNA, 19 nt, Artificial Sequence
  Description of Artificial Sequence: Synthetic oligonucleotide
ucgauguugagguacacau

SEQ ID NO: 1424211 - RNA, 19 nt, Artificial Sequence
  Description of Artificial Sequence: Synthetic oligonucleotide
acaauuaauguuacagcgg

SEQ ID NO: 1424212 - RNA, 19 nt, Artificial Sequence
  Description of Artificial Sequence: Synthetic oligonucleotide
ugauggggucacaucaccg

SEQ ID NO: 1424213 - RNA, 19 nt, Artificial Sequence
  Description of Artificial Sequence: Synthetic oligonucleotide
augauggggucacaucacc

SEQ ID NO: 1424214 - RNA, 19 nt, Artificial Sequence
  Description of Artificial Sequence: Synthetic oligonucleotide
auaggauauagguaccaca

SEQ ID NO: 1424215 - RNA, 19 nt, Artificial Sequence
  Description of Artificial Sequence: Synthetic oligonucleotide
gcuagcacuguccaaaggg

SEQ ID NO: 1424216 - RNA, 19 nt, Artificial Sequence
  Description of Artificial Sequence: Synthetic oligonucleotide
uagccugucauucuugggu

SEQ ID NO: 1424217 - RNA, 19 nt, Artificial Sequence
  Description of Artificial Sequence: Synthetic oligonucleotide
aggauugaugaucacggug

SEQ ID NO: 1424218 - RNA, 19 nt, Artificial Sequence
  Description of Artificial Sequence: Synthetic oligonucleotide
uuggcaaucagaguguagu

SEQ ID NO: 1424219 - RNA, 19 nt, Artificial Sequence
  Description of Artificial Sequence: Synthetic oligonucleotide
ugaaacugggcccugcaaa

SEQ ID NO: 1424220 - RNA, 19 nt, Artificial Sequence
  Description of Artificial Sequence: Synthetic oligonucleotide
agcucuauuuugucuagag

SEQ ID NO: 1424221 - RNA, 19 nt, Artificial Sequence
  Description of Artificial Sequence: Synthetic oligonucleotide
agaugccuagcuucagacc

SEQ ID NO: 1424222 - RNA, 19 nt, Artificial Sequence
  Description of Artificial Sequence: Synthetic oligonucleotide
gacagaugccgcuugaaca

SEQ ID NO: 1424223 - RNA, 19 nt, Artificial Sequence
  Description of Artificial Sequence: Synthetic oligonucleotide
uagguaccacaucacaacc

SEQ ID NO: 1424224 - RNA, 19 nt, Artificial Sequence
  Description of Artificial Sequence: Synthetic oligonucleotide
uuugucuagaguggugccg

SEQ ID NO: 1424225 - RNA, 19 nt, Artificial Sequence
  Description of Artificial Sequence: Synthetic oligonucleotide
caauuaauguuacagcgga

SEQ ID NO: 1424226 - RNA, 19 nt, Artificial Sequence
  Description of Artificial Sequence: Synthetic oligonucleotide
caagagggagcaauggaag

SEQ ID NO: 1424227 - RNA, 19 nt, Artificial Sequence
  Description of Artificial Sequence: Synthetic oligonucleotide
guaggaaggccaaucacgg

SEQ ID NO: 1424228 - RNA, 19 nt, Artificial Sequence
  Description of Artificial Sequence: Synthetic oligonucleotide
auauagguaccacaucaca

SEQ ID NO: 1424229 - RNA, 19 nt, Artificial Sequence
  Description of Artificial Sequence: Synthetic oligonucleotide
gccuaaucgauccugauug

SEQ ID NO: 1424230 - RNA, 19 nt, Artificial Sequence
  Description of Artificial Sequence: Synthetic oligonucleotide
uagaccagggcacucgccc

SEQ ID NO: 1424231 - RNA, 19 nt, Artificial Sequence
  Description of Artificial Sequence: Synthetic oligonucleotide
uccugaauaucgucgaagu

SEQ ID NO: 1424232 - RNA, 19 nt, Artificial Sequence
  Description of Artificial Sequence: Synthetic oligonucleotide
guugagguacacauaaccc

SEQ ID NO: 1424233 - RNA, 19 nt, Artificial Sequence
  Description of Artificial Sequence: Synthetic oligonucleotide
uaaucgauccugauugauc

SEQ ID NO: 1424234 - RNA, 19 nt, Artificial Sequence
  Description of Artificial Sequence: Synthetic oligonucleotide
aucagaguguaguucaccu

SEQ ID NO: 1424235 - RNA, 19 nt, Artificial Sequence
  Description of Artificial Sequence: Synthetic oligonucleotide
ugaagagccguucacugau

SEQ ID NO: 1424236 - RNA, 19 nt, Artificial Sequence
  Description of Artificial Sequence: Synthetic oligonucleotide
ucuuuggaaguggagaaac

SEQ ID NO: 1424237 - RNA, 19 nt, Artificial Sequence
  Description of Artificial Sequence: Synthetic oligonucleotide
cuagcacuguccaaagggc

SEQ ID NO: 1424238 - RNA, 19 nt, Artificial Sequence
  Description of Artificial Sequence: Synthetic oligonucleotide
guaagaacacugucuuccg

SEQ ID NO: 1424239 - RNA, 19 nt, Artificial Sequence
  Description of Artificial Sequence: Synthetic oligonucleotide
ggauauagguaccacauca

SEQ ID NO: 1424240 - RNA, 19 nt, Artificial Sequence
  Description of Artificial Sequence: Synthetic oligonucleotide
ugcgccagagauuacagau

SEQ ID NO: 1424241 - RNA, 19 nt, Artificial Sequence
  Description of Artificial Sequence: Synthetic oligonucleotide
accaauccagcagucaucg

SEQ ID NO: 1424242 - RNA, 19 nt, Artificial Sequence
  Description of Artificial Sequence: Synthetic oligonucleotide
cagaguguaguucaccuug

SEQ ID NO: 1424243 - RNA, 19 nt, Artificial Sequence
  Description of Artificial Sequence: Synthetic oligonucleotide
acauaacccaggucucgcc

SEQ ID NO: 1424244 - RNA, 19 nt, Artificial Sequence
  Description of Artificial Sequence: Synthetic oligonucleotide
ucuggauuugggauaguuc

SEQ ID NO: 1424245 - RNA, 19 nt, Artificial Sequence
  Description of Artificial Sequence: Synthetic oligonucleotide
gaugguacgaaggucugug

SEQ ID NO: 1424246 - RNA, 19 nt, Artificial Sequence
  Description of Artificial Sequence: Synthetic oligonucleotide
caugggugguguucgaagg

SEQ ID NO: 1424247 - RNA, 19 nt, Artificial Sequence
  Description of Artificial Sequence: Synthetic oligonucleotide
aagagggagcaauggaagu

SEQ ID NO: 1424248 - RNA, 19 nt, Artificial Sequence
  Description of Artificial Sequence: Synthetic oligonucleotide
aguggugccgggguaaccc

SEQ ID NO: 1424249 - RNA, 19 nt, Artificial Sequence
  Description of Artificial Sequence: Synthetic oligonucleotide
uugggaucaggcaccaggc

SEQ ID NO: 1424250 - RNA, 19 nt, Artificial Sequence
  Description of Artificial Sequence: Synthetic oligonucleotide
uugucuagaguggugccgg

SEQ ID NO: 1424251 - RNA, 19 nt, Artificial Sequence
  Description of Artificial Sequence: Synthetic oligonucleotide
ucgaaggagcccauucucc

SEQ ID NO: 1424252 - RNA, 19 nt, Artificial Sequence
  Description of Artificial Sequence: Synthetic oligonucleotide
uguucgaaggagcccauuc

SEQ ID NO: 1424253 - RNA, 19 nt, Artificial Sequence
  Description of Artificial Sequence: Synthetic oligonucleotide
auugccuuggagucgauua

SEQ ID NO: 1424254 - RNA, 19 nt, Artificial Sequence
  Description of Artificial Sequence: Synthetic oligonucleotide
uagaugccuagcuucagac

SEQ ID NO: 1424255 - RNA, 19 nt, Artificial Sequence
  Description of Artificial Sequence: Synthetic oligonucleotide
gaugccuagcuucagaccu

SEQ ID NO: 1424256 - RNA, 19 nt, Artificial Sequence
  Description of Artificial Sequence: Synthetic oligonucleotide
cauacacucuggauuuggg

SEQ ID NO: 1424257 - RNA, 19 nt, Artificial Sequence
  Description of Artificial Sequence: Synthetic oligonucleotide
cuagggaaugagcauaguc

SEQ ID NO: 1424258 - RNA, 19 nt, Artificial Sequence
  Description of Artificial Sequence: Synthetic oligonucleotide
acagcggaaacguucccag

SEQ ID NO: 1424259 - RNA, 19 nt, Artificial Sequence
  Description of Artificial Sequence: Synthetic oligonucleotide
gauugaucuugaucauaag

SEQ ID NO: 1424260 - RNA, 19 nt, Artificial Sequence
  Description of Artificial Sequence: Synthetic oligonucleotide
auuagacagaugccgcuug

SEQ ID NO: 1424261 - RNA, 19 nt, Artificial Sequence
  Description of Artificial Sequence: Synthetic oligonucleotide
ucuugggauaccccacugc

SEQ ID NO: 1424262 - RNA, 19 nt, Artificial Sequence
  Description of Artificial Sequence: Synthetic oligonucleotide
ugcaauauguccugguauu

SEQ ID NO: 1424263 - RNA, 19 nt, Artificial Sequence
  Description of Artificial Sequence: Synthetic oligonucleotide
uaugauggggucacaucac

SEQ ID NO: 1424264 - RNA, 19 nt, Artificial Sequence
  Description of Artificial Sequence: Synthetic oligonucleotide
ugguacgaaggucugugga

SEQ ID NO: 1424265 - RNA, 19 nt, Artificial Sequence
  Description of Artificial Sequence: Synthetic oligonucleotide
caaagggccaucugugccc

SEQ ID NO: 1424266 - RNA, 19 nt, Artificial Sequence
  Description of Artificial Sequence: Synthetic oligonucleotide
guuacagcggaaacguucc

SEQ ID NO: 1424267 - RNA, 19 nt, Artificial Sequence
  Description of Artificial Sequence: Synthetic oligonucleotide
aucacggugaaguugcuuu

SEQ ID NO: 1424268 - RNA, 19 nt, Artificial Sequence
  Description of Artificial Sequence: Synthetic oligonucleotide
agaacacugucuuccgcag

SEQ ID NO: 1424269 - RNA, 19 nt, Artificial Sequence
  Description of Artificial Sequence: Synthetic oligonucleotide
ugaucauaaguggauucug

SEQ ID NO: 1424270 - RNA, 19 nt, Artificial Sequence
  Description of Artificial Sequence: Synthetic oligonucleotide
ucaucgauguugagguaca

SEQ ID NO: 1424271 - RNA, 19 nt, Artificial Sequence
  Description of Artificial Sequence: Synthetic oligonucleotide
uuagcaggacccaaccgaa

SEQ ID NO: 1424272 - RNA, 19 nt, Artificial Sequence
  Description of Artificial Sequence: Synthetic oligonucleotide
gucccuggaugccuaaucg

SEQ ID NO: 1424273 - RNA, 19 nt, Artificial Sequence
  Description of Artificial Sequence: Synthetic oligonucleotide
cagaccuagggaaugagca

SEQ ID NO: 1424274 - RNA, 19 nt, Artificial Sequence
  Description of Artificial Sequence: Synthetic oligonucleotide
ggauaguucaguuccaaga

SEQ ID NO: 1424275 - RNA, 19 nt, Artificial Sequence
  Description of Artificial Sequence: Synthetic oligonucleotide
uucgaaggagcccauucuc

SEQ ID NO: 1424276 - RNA, 19 nt, Artificial Sequence
  Description of Artificial Sequence: Synthetic oligonucleotide
aucauaaguggauucugaa

SEQ ID NO: 1424277 - RNA, 19 nt, Artificial Sequence
  Description of Artificial Sequence: Synthetic oligonucleotide
auaaguggauucugaagaa

SEQ ID NO: 1424278 - RNA, 19 nt, Artificial Sequence
  Description of Artificial Sequence: Synthetic oligonucleotide
aggaguccugaauaucguc

SEQ ID NO: 1424279 - RNA, 19 nt, Artificial Sequence
  Description of Artificial Sequence: Synthetic oligonucleotide
gauauagguaccacaucac

SEQ ID NO: 1424280 - RNA, 19 nt, Artificial Sequence
  Description of Artificial Sequence: Synthetic oligonucleotide
ucgauuagcaggacccaac

SEQ ID NO: 1424281 - RNA, 19 nt, Artificial Sequence
  Description of Artificial Sequence: Synthetic oligonucleotide
ucugggucguuccaguguc

SEQ ID NO: 1424282 - RNA, 19 nt, Artificial Sequence
  Description of Artificial Sequence: Synthetic oligonucleotide
cugcaagaaaaggcgaugg

SEQ ID NO: 1424283 - RNA, 19 nt, Artificial Sequence
  Description of Artificial Sequence: Synthetic oligonucleotide
gguaccacaucacaacccc

SEQ ID NO: 1424284 - RNA, 19 nt, Artificial Sequence
  Description of Artificial Sequence: Synthetic oligonucleotide
caaagguuccagcauccag

SEQ ID NO: 1424285 - RNA, 19 nt, Artificial Sequence
  Description of Artificial Sequence: Synthetic oligonucleotide
gaguagcaugucugggucg

SEQ ID NO: 1424286 - RNA, 19 nt, Artificial Sequence
  Description of Artificial Sequence: Synthetic oligonucleotide
gaaguugcgccagagauua

SEQ ID NO: 1424287 - RNA, 19 nt, Artificial Sequence
  Description of Artificial Sequence: Synthetic oligonucleotide
auacacucuggauuuggga

SEQ ID NO: 1424288 - RNA, 19 nt, Artificial Sequence
  Description of Artificial Sequence: Synthetic oligonucleotide
aggaccaguaagaacacug

SEQ ID NO: 1424289 - RNA, 19 nt, Artificial Sequence
  Description of Artificial Sequence: Synthetic oligonucleotide
aagugguaaggcaugucug

SEQ ID NO: 1424290 - RNA, 19 nt, Artificial Sequence
  Description of Artificial Sequence: Synthetic oligonucleotide
ugagggaagcgcuugggau

SEQ ID NO: 1424291 - RNA, 19 nt, Artificial Sequence
  Description of Artificial Sequence: Synthetic oligonucleotide
uccugguauuucacaaacc

SEQ ID NO: 1424292 - RNA, 19 nt, Artificial Sequence
  Description of Artificial Sequence: Synthetic oligonucleotide
cuggucacaauuaauguua

SEQ ID NO: 1424293 - RNA, 19 nt, Artificial Sequence
  Description of Artificial Sequence: Synthetic oligonucleotide
gagcaauggaagugguaag

SEQ ID NO: 1424294 - RNA, 19 nt, Artificial Sequence
  Description of Artificial Sequence: Synthetic oligonucleotide
ugaacaccucaauuuggga

SEQ ID NO: 1424295 - RNA, 19 nt, Artificial Sequence
  Description of Artificial Sequence: Synthetic oligonucleotide
ugauaggauauagguacca

SEQ ID NO: 1424296 - RNA, 19 nt, Artificial Sequence
  Description of Artificial Sequence: Synthetic oligonucleotide
auagccugucauucuuggg

SEQ ID NO: 1424297 - RNA, 19 nt, Artificial Sequence
  Description of Artificial Sequence: Synthetic oligonucleotide
gaaucacgcccaccaaucc

SEQ ID NO: 1424298 - RNA, 19 nt, Artificial Sequence
  Description of Artificial Sequence: Synthetic oligonucleotide
agguaccacaucacaaccc

SEQ ID NO: 1424299 - RNA, 19 nt, Artificial Sequence
  Description of Artificial Sequence: Synthetic oligonucleotide
aguugcuuucacucuugag

SEQ ID NO: 1424300 - RNA, 19 nt, Artificial Sequence
  Description of Artificial Sequence: Synthetic oligonucleotide
accucaauuugggauuuac

SEQ ID NO: 1424301 - RNA, 19 nt, Artificial Sequence
  Description of Artificial Sequence: Synthetic oligonucleotide
gauaggauauagguaccac

SEQ ID NO: 1424302 - RNA, 19 nt, Artificial Sequence
  Description of Artificial Sequence: Synthetic oligonucleotide
auagaugccuagcuucaga

SEQ ID NO: 1424303 - RNA, 19 nt, Artificial Sequence
  Description of Artificial Sequence: Synthetic oligonucleotide
ucaaagcugaggccguagu

SEQ ID NO: 1424304 - RNA, 19 nt, Artificial Sequence
  Description of Artificial Sequence: Synthetic oligonucleotide
uggucacaauuaauguuac

SEQ ID NO: 1424305 - RNA, 19 nt, Artificial Sequence
  Description of Artificial Sequence: Synthetic oligonucleotide
aggacagagcccuaccaca

SEQ ID NO: 1424306 - RNA, 19 nt, Artificial Sequence
  Description of Artificial Sequence: Synthetic oligonucleotide
aacccaggucucgccaucc

SEQ ID NO: 1424307 - RNA, 19 nt, Artificial Sequence
  Description of Artificial Sequence: Synthetic oligonucleotide
ugguguucgaaggagccca

SEQ ID NO: 1424308 - RNA, 19 nt, Artificial Sequence
  Description of Artificial Sequence: Synthetic oligonucleotide
uggaaucacgcccaccaau

SEQ ID NO: 1424309 - RNA, 19 nt, Artificial Sequence
  Description of Artificial Sequence: Synthetic oligonucleotide
acggugaaguugcuuucac

SEQ ID NO: 1424310 - RNA, 19 nt, Artificial Sequence
  Description of Artificial Sequence: Synthetic oligonucleotide
guaguucccgaugaguagc

SEQ ID NO: 1424311 - RNA, 19 nt, Artificial Sequence
  Description of Artificial Sequence: Synthetic oligonucleotide
ugagcauagucagcuagga

SEQ ID NO: 1424312 - RNA, 19 nt, Artificial Sequence
  Description of Artificial Sequence: Synthetic oligonucleotide
gaucauaaguggauucuga

SEQ ID NO: 1424313 - RNA, 19 nt, Artificial Sequence
  Description of Artificial Sequence: Synthetic oligonucleotide
aauuugggauuuacucuug

SEQ ID NO: 1424314 - RNA, 19 nt, Artificial Sequence
  Description of Artificial Sequence: Synthetic oligonucleotide
caggucucgccauccaucc

SEQ ID NO: 1424315 - RNA, 19 nt, Artificial Sequence
  Description of Artificial Sequence: Synthetic oligonucleotide
cuugggauaccccacugca

SEQ ID NO: 1424316 - RNA, 19 nt, Artificial Sequence
  Description of Artificial Sequence: Synthetic oligonucleotide
ggagaaacagccauccagc

SEQ ID NO: 1424317 - RNA, 19 nt, Artificial Sequence
  Description of Artificial Sequence: Synthetic oligonucleotide
aguuccaagagggagcaau

SEQ ID NO: 1424318 - RNA, 19 nt, Artificial Sequence
  Description of Artificial Sequence: Synthetic oligonucleotide
gaccaguaagaacacuguc

SEQ ID NO: 1424319 - RNA, 19 nt, Artificial Sequence
  Description of Artificial Sequence: Synthetic oligonucleotide
aagcgcuugggaucaggca

SEQ ID NO: 1424320 - RNA, 19 nt, Artificial Sequence
  Description of Artificial Sequence: Synthetic oligonucleotide
cacuuuggguaugaugggg

SEQ ID NO: 1424321 - RNA, 19 nt, Artificial Sequence
  Description of Artificial Sequence: Synthetic oligonucleotide
gaacaccucaauuugggau

SEQ ID NO: 1424322 - RNA, 19 nt, Artificial Sequence
  Description of Artificial Sequence: Synthetic oligonucleotide
aaaccccugguucuugaua

SEQ ID NO: 1424323 - RNA, 19 nt, Artificial Sequence
  Description of Artificial Sequence: Synthetic oligonucleotide
aucacggcaugaaacuggg

SEQ ID NO: 1424324 - RNA, 19 nt, Artificial Sequence
  Description of Artificial Sequence: Synthetic oligonucleotide
ggccuuuggaaucacgccc

SEQ ID NO: 1424325 - RNA, 19 nt, Artificial Sequence
  Description of Artificial Sequence: Synthetic oligonucleotide
uuccgcagcauugccuugg

SEQ ID NO: 1424326 - RNA, 19 nt, Artificial Sequence
  Description of Artificial Sequence: Synthetic oligonucleotide
cagucaucgauguugaggu

SEQ ID NO: 1424327 - RNA, 19 nt, Artificial Sequence
  Description of Artificial Sequence: Synthetic oligonucleotide
uguccugguauuucacaaa

SEQ ID NO: 1424328 - RNA, 19 nt, Artificial Sequence
  Description of Artificial Sequence: Synthetic oligonucleotide
ccagagauuacagauguug

SEQ ID NO: 1424329 - RNA, 19 nt, Artificial Sequence
  Description of Artificial Sequence: Synthetic oligonucleotide
aaaaccccugguucuugau

SEQ ID NO: 1424330 - RNA, 19 nt, Artificial Sequence
  Description of Artificial Sequence: Synthetic oligonucleotide
uugggauaccccacugcac

SEQ ID NO: 1424331 - RNA, 19 nt, Artificial Sequence
  Description of Artificial Sequence: Synthetic oligonucleotide
auccugcgucccuggaugc

SEQ ID NO: 1424332 - RNA, 19 nt, Artificial Sequence
  Description of Artificial Sequence: Synthetic oligonucleotide
acgcccaccaauccagcag

SEQ ID NO: 1424333 - RNA, 19 nt, Artificial Sequence
  Description of Artificial Sequence: Synthetic oligonucleotide
gaagcgcuugggaucaggc

SEQ ID NO: 1424334 - RNA, 19 nt, Artificial Sequence
  Description of Artificial Sequence: Synthetic oligonucleotide
ggaaggcaaucccaugagg

SEQ ID NO: 1424335 - RNA, 19 nt, Artificial Sequence
  Description of Artificial Sequence: Synthetic oligonucleotide
uucuuuggguccuggucac

SEQ ID NO: 1424336 - RNA, 19 nt, Artificial Sequence
  Description of Artificial Sequence: Synthetic oligonucleotide
guccugaauaucgucgaag

SEQ ID NO: 1424337 - RNA, 19 nt, Artificial Sequence
  Description of Artificial Sequence: Synthetic oligonucleotide
cucgccauccauccugggc

SEQ ID NO: 1424338 - RNA, 19 nt, Artificial Sequence
  Description of Artificial Sequence: Synthetic oligonucleotide
cuugaagauccugcguccc

SEQ ID NO: 1424339 - RNA, 19 nt, Artificial Sequence
  Description of Artificial Sequence: Synthetic oligonucleotide
aauuaauguuacagcggaa

SEQ ID NO: 1424340 - RNA, 19 nt, Artificial Sequence
  Description of Artificial Sequence: Synthetic oligonucleotide
uacagcggaaacguuccca

SEQ ID NO: 1424341 - RNA, 19 nt, Artificial Sequence
  Description of Artificial Sequence: Synthetic oligonucleotide
aguugcgccagagauuaca

SEQ ID NO: 1424342 - RNA, 19 nt, Artificial Sequence
  Description of Artificial Sequence: Synthetic oligonucleotide
uaucgucgaaguugcgcca

SEQ ID NO: 1424343 - RNA, 19 nt, Artificial Sequence
  Description of Artificial Sequence: Synthetic oligonucleotide
gaggccguaguucccgaug

SEQ ID NO: 1424344 - RNA, 19 nt, Artificial Sequence
  Description of Artificial Sequence: Synthetic oligonucleotide
gguacgaaggucuguggac

SEQ ID NO: 1424345 - RNA, 19 nt, Artificial Sequence
  Description of Artificial Sequence: Synthetic oligonucleotide
auagucagcuaggaaggca

SEQ ID NO: 1424346 - RNA, 19 nt, Artificial Sequence
  Description of Artificial Sequence: Synthetic oligonucleotide
ugucuagaguggugccggg

SEQ ID NO: 1424347 - RNA, 19 nt, Artificial Sequence
  Description of Artificial Sequence: Synthetic oligonucleotide
gaaaaggcgaugggacggc

SEQ ID NO: 1424348 - RNA, 19 nt, Artificial Sequence
  Description of Artificial Sequence: Synthetic oligonucleotide
cgccccauuagacagaugc

SEQ ID NO: 1424349 - RNA, 19 nt, Artificial Sequence
  Description of Artificial Sequence: Synthetic oligonucleotide
aguagcaugucugggucgu

SEQ ID NO: 1424350 - RNA, 19 nt, Artificial Sequence
  Description of Artificial Sequence: Synthetic oligonucleotide
uuacagcggaaacguuccc

SEQ ID NO: 1424351 - RNA, 19 nt, Artificial Sequence
  Description of Artificial Sequence: Synthetic oligonucleotide
guugcgccagagauuacag

SEQ ID NO: 1424352 - RNA, 19 nt, Artificial Sequence
  Description of Artificial Sequence: Synthetic oligonucleotide
aaggccaaucacggcauga

SEQ ID NO: 1424353 - RNA, 19 nt, Artificial Sequence
  Description of Artificial Sequence: Synthetic oligonucleotide
ggucguuccaguguccagg

SEQ ID NO: 1424354 - RNA, 19 nt, Artificial Sequence
  Description of Artificial Sequence: Synthetic oligonucleotide
aucuugggauaccccacug

SEQ ID NO: 1424355 - RNA, 19 nt, Artificial Sequence
  Description of Artificial Sequence: Synthetic oligonucleotide
gaugccuaaucgauccuga

SEQ ID NO: 1424356 - RNA, 19 nt, Artificial Sequence
  Description of Artificial Sequence: Synthetic oligonucleotide
cuggcccucauacacucug

SEQ ID NO: 1424357 - RNA, 19 nt, Artificial Sequence
  Description of Artificial Sequence: Synthetic oligonucleotide
acuuuggguaugauggggu

SEQ ID NO: 1424358 - RNA, 19 nt, Artificial Sequence
  Description of Artificial Sequence: Synthetic oligonucleotide
ugccuuggagucgauuagc

SEQ ID NO: 1424359 - RNA, 19 nt, Artificial Sequence
  Description of Artificial Sequence: Synthetic oligonucleotide
ggagucgauuagcaggacc

SEQ ID NO: 1424360 - RNA, 19 nt, Artificial Sequence
  Description of Artificial Sequence: Synthetic oligonucleotide
acacucuggauuugggaua

SEQ ID NO: 1424361 - RNA, 19 nt, Artificial Sequence
  Description of Artificial Sequence: Synthetic oligonucleotide
gccgggguaacccaugcag

SEQ ID NO: 1424362 - RNA, 19 nt, Artificial Sequence
  Description of Artificial Sequence: Synthetic oligonucleotide
ggucucgccauccauccug

SEQ ID NO: 1424363 - RNA, 19 nt, Artificial Sequence
  Description of Artificial Sequence: Synthetic oligonucleotide
aggccguaguucccgauga

SEQ ID NO: 1424364 - RNA, 19 nt, Artificial Sequence
  Description of Artificial Sequence: Synthetic oligonucleotide
ugucauucuuggguccuca

SEQ ID NO: 1424365 - RNA, 19 nt, Artificial Sequence
  Description of Artificial Sequence: Synthetic oligonucleotide
auguugagguacacauaac

SEQ ID NO: 1424366 - RNA, 19 nt, Artificial Sequence
  Description of Artificial Sequence: Synthetic oligonucleotide
cauagucagcuaggaaggc

SEQ ID NO: 1424367 - RNA, 19 nt, Artificial Sequence
  Description of Artificial Sequence: Synthetic oligonucleotide
gaauaucgucgaaguugcg

SEQ ID NO: 1424368 - RNA, 19 nt, Artificial Sequence
  Description of Artificial Sequence: Synthetic oligonucleotide
gauaccccacugcacgcuc

SEQ ID NO: 1424369 - RNA, 19 nt, Artificial Sequence
  Description of Artificial Sequence: Synthetic oligonucleotide
gggauaguucaguuccaag

SEQ ID NO: 1424370 - RNA, 19 nt, Artificial Sequence
  Description of Artificial Sequence: Synthetic oligonucleotide
uuggaaucacgcccaccaa

SEQ ID NO: 1424371 - RNA, 19 nt, Artificial Sequence
  Description of Artificial Sequence: Synthetic oligonucleotide
accuagggaaugagcauag

SEQ ID NO: 1424372 - RNA, 19 nt, Artificial Sequence
  Description of Artificial Sequence: Synthetic oligonucleotide
cccauuagacagaugccgc

SEQ ID NO: 1424373 - RNA, 19 nt, Artificial Sequence
  Description of Artificial Sequence: Synthetic oligonucleotide
ccccauuagacagaugccg

SEQ ID NO: 1424374 - RNA, 19 nt, Artificial Sequence
  Description of Artificial Sequence: Synthetic oligonucleotide
guacgaaggucuguggaca

SEQ ID NO: 1424375 - RNA, 19 nt, Artificial Sequence
  Description of Artificial Sequence: Synthetic oligonucleotide
ccgaugaguagcaugucug

SEQ ID NO: 1424376 - RNA, 19 nt, Artificial Sequence
  Description of Artificial Sequence: Synthetic oligonucleotide
caccgagcagccugggaag

SEQ ID NO: 1424377 - RNA, 19 nt, Artificial Sequence
  Description of Artificial Sequence: Synthetic oligonucleotide
cgaaggauugaugaucacg

SEQ ID NO: 1424378 - RNA, 19 nt, Artificial Sequence
  Description of Artificial Sequence: Synthetic oligonucleotide
gguaugauggggucacauc

SEQ ID NO: 1424379 - RNA, 19 nt, Artificial Sequence
  Description of Artificial Sequence: Synthetic oligonucleotide
agagccguucacugauaca

SEQ ID NO: 1424380 - RNA, 19 nt, Artificial Sequence
  Description of Artificial Sequence: Synthetic oligonucleotide
uggaagugguaaggcaugu

SEQ ID NO: 1424381 - RNA, 19 nt, Artificial Sequence
  Description of Artificial Sequence: Synthetic oligonucleotide
ggugguguucgaaggagcc

SEQ ID NO: 1424382 - RNA, 19 nt, Artificial Sequence
  Description of Artificial Sequence: Synthetic oligonucleotide
ccaaagggccaucugugcc

SEQ ID NO: 1424383 - RNA, 19 nt, Artificial Sequence
  Description of Artificial Sequence: Synthetic oligonucleotide
cguuccaguguccaggacc

SEQ ID NO: 1424384 - RNA, 19 nt, Artificial Sequence
  Description of Artificial Sequence: Synthetic oligonucleotide
gggacaucuguuuggaaaa

SEQ ID NO: 1424385 - RNA, 19 nt, Artificial Sequence
  Description of Artificial Sequence: Synthetic oligonucleotide
ggguaacccaugcagguca

SEQ ID NO: 1424386 - RNA, 19 nt, Artificial Sequence
  Description of Artificial Sequence: Synthetic oligonucleotide
cauagaugccuagcuucag

SEQ ID NO: 1424387 - RNA, 19 nt, Artificial Sequence
  Description of Artificial Sequence: Synthetic oligonucleotide
agccaucuugggauacccc

SEQ ID NO: 1424388 - RNA, 19 nt, Artificial Sequence
  Description of Artificial Sequence: Synthetic oligonucleotide
gagaaacagccauccagcu

SEQ ID NO: 1424389 - RNA, 19 nt, Artificial Sequence
  Description of Artificial Sequence: Synthetic oligonucleotide
aaaggcgaugggacggccu

SEQ ID NO: 1424390 - RNA, 19 nt, Artificial Sequence
  Description of Artificial Sequence: Synthetic oligonucleotide
agauccugcgucccuggau

SEQ ID NO: 1424391 - RNA, 19 nt, Artificial Sequence
  Description of Artificial Sequence: Synthetic oligonucleotide
aucgucgaaguugcgccag

SEQ ID NO: 1424392 - RNA, 19 nt, Artificial Sequence
  Description of Artificial Sequence: Synthetic oligonucleotide
agggaagcgcuugggauca

SEQ ID NO: 1424393 - RNA, 19 nt, Artificial Sequence
  Description of Artificial Sequence: Synthetic oligonucleotide
guuggcaaucagaguguag

SEQ ID NO: 1424394 - RNA, 19 nt, Artificial Sequence
  Description of Artificial Sequence: Synthetic oligonucleotide
cugggcuagucggucagcc

SEQ ID NO: 1424395 - RNA, 19 nt, Artificial Sequence
  Description of Artificial Sequence: Synthetic oligonucleotide
cuuuggaaucacgcccacc

SEQ ID NO: 1424396 - RNA, 19 nt, Artificial Sequence
  Description of Artificial Sequence: Synthetic oligonucleotide
gauuugggauaguucaguu

SEQ ID NO: 1424397 - RNA, 19 nt, Artificial Sequence
  Description of Artificial Sequence: Synthetic oligonucleotide
caccuuccauucagcaaag

SEQ ID NO: 1424398 - RNA, 19 nt, Artificial Sequence
  Description of Artificial Sequence: Synthetic oligonucleotide
agaguggugccgggguaac

SEQ ID NO: 1424399 - RNA, 19 nt, Artificial Sequence
  Description of Artificial Sequence: Synthetic oligonucleotide
cagcggaaacguucccagg

SEQ ID NO: 1424400 - RNA, 19 nt, Artificial Sequence
  Description of Artificial Sequence: Synthetic oligonucleotide
ucacgcccaccaauccagc

SEQ ID NO: 1424401 - RNA, 19 nt, Artificial Sequence
  Description of Artificial Sequence: Synthetic oligonucleotide
uccaggaguccugaauauc

SEQ ID NO: 1424402 - RNA, 19 nt, Artificial Sequence
  Description of Artificial Sequence: Synthetic oligonucleotide
ugcacgcucuuuggaagug

SEQ ID NO: 1424403 - RNA, 19 nt, Artificial Sequence
  Description of Artificial Sequence: Synthetic oligonucleotide
uaacccaggucucgccauc

SEQ ID NO: 1424404 - RNA, 19 nt, Artificial Sequence
  Description of Artificial Sequence: Synthetic oligonucleotide
gaccuagggaaugagcaua

SEQ ID NO: 1424405 - RNA, 19 nt, Artificial Sequence
  Description of Artificial Sequence: Synthetic oligonucleotide
ucacggcaugaaacugggc

SEQ ID NO: 1424406 - RNA, 19 nt, Artificial Sequence
  Description of Artificial Sequence: Synthetic oligonucleotide
agucggucagccauuucca

SEQ ID NO: 1424407 - RNA, 19 nt, Artificial Sequence
  Description of Artificial Sequence: Synthetic oligonucleotide
aguccugaauaucgucgaa

SEQ ID NO: 1424408 - RNA, 19 nt, Artificial Sequence
  Description of Artificial Sequence: Synthetic oligonucleotide
guccucauagaugccuagc

SEQ ID NO: 1424409 - RNA, 19 nt, Artificial Sequence
  Description of Artificial Sequence: Synthetic oligonucleotide
ggagaugguacgaaggucu

SEQ ID NO: 1424410 - RNA, 19 nt, Artificial Sequence
  Description of Artificial Sequence: Synthetic oligonucleotide
ugggcuagucggucagcca

SEQ ID NO: 1424411 - RNA, 19 nt, Artificial Sequence
  Description of Artificial Sequence: Synthetic oligonucleotide
ggaaucacgcccaccaauc

SEQ ID NO: 1424412 - RNA, 19 nt, Artificial Sequence
  Description of Artificial Sequence: Synthetic oligonucleotide
gagcauagucagcuaggaa

SEQ ID NO: 1424413 - RNA, 19 nt, Artificial Sequence
  Description of Artificial Sequence: Synthetic oligonucleotide
agcagucaucgauguugag

SEQ ID NO: 1424414 - RNA, 19 nt, Artificial Sequence
  Description of Artificial Sequence: Synthetic oligonucleotide
uuuggguccuggucacaau

SEQ ID NO: 1424415 - RNA, 19 nt, Artificial Sequence
  Description of Artificial Sequence: Synthetic oligonucleotide
ggaucaggcaccaggcggc

SEQ ID NO: 1424416 - RNA, 19 nt, Artificial Sequence
  Description of Artificial Sequence: Synthetic oligonucleotide
uagacagaugccgcuugaa

SEQ ID NO: 1424417 - RNA, 19 nt, Artificial Sequence
  Description of Artificial Sequence: Synthetic oligonucleotide
guucgaaggagcccauucu

SEQ ID NO: 1424418 - RNA, 19 nt, Artificial Sequence
  Description of Artificial Sequence: Synthetic oligonucleotide
agagcccuaccacauccuu

SEQ ID NO: 1424419 - RNA, 19 nt, Artificial Sequence
  Description of Artificial Sequence: Synthetic oligonucleotide
agucgauuagcaggaccca

SEQ ID NO: 1424420 - RNA, 19 nt, Artificial Sequence
  Description of Artificial Sequence: Synthetic oligonucleotide
gucguuccaguguccagga

SEQ ID NO: 1424421 - RNA, 19 nt, Artificial Sequence
  Description of Artificial Sequence: Synthetic oligonucleotide
gucgaaguugcgccagaga

SEQ ID NO: 1424422 - RNA, 19 nt, Artificial Sequence
  Description of Artificial Sequence: Synthetic oligonucleotide
accgagcagccugggaagg

SEQ ID NO: 1424423 - RNA, 19 nt, Artificial Sequence
  Description of Artificial Sequence: Synthetic oligonucleotide
cacugcacgcucuuuggaa

SEQ ID NO: 1424424 - RNA, 19 nt, Artificial Sequence
  Description of Artificial Sequence: Synthetic oligonucleotide
acggccuguggcauucagg

SEQ ID NO: 1424425 - RNA, 19 nt, Artificial Sequence
  Description of Artificial Sequence: Synthetic oligonucleotide
agaugguacgaaggucugu

SEQ ID NO: 1424426 - RNA, 19 nt, Artificial Sequence
  Description of Artificial Sequence: Synthetic oligonucleotide
auccugggcuagucgguca

SEQ ID NO: 1424427 - RNA, 19 nt, Artificial Sequence
  Description of Artificial Sequence: Synthetic oligonucleotide
aucaccgagcagccuggga

SEQ ID NO: 1424428 - RNA, 19 nt, Artificial Sequence
  Description of Artificial Sequence: Synthetic oligonucleotide
ugccgggguaacccaugca

SEQ ID NO: 1424429 - RNA, 19 nt, Artificial Sequence
  Description of Artificial Sequence: Synthetic oligonucleotide
ccgggguaacccaugcagg

SEQ ID NO: 1424430 - RNA, 19 nt, Artificial Sequence
  Description of Artificial Sequence: Synthetic oligonucleotide
uagcaggacccaaccgaau

SEQ ID NO: 1424431 - RNA, 19 nt, Artificial Sequence
  Description of Artificial Sequence: Synthetic oligonucleotide
gcggaaacguucccaggcc

SEQ ID NO: 1424432 - RNA, 19 nt, Artificial Sequence
  Description of Artificial Sequence: Synthetic oligonucleotide
cauaggcuggccagcugca

SEQ ID NO: 1424433 - RNA, 19 nt, Artificial Sequence
  Description of Artificial Sequence: Synthetic oligonucleotide
cugggucguuccagugucc

SEQ ID NO: 1424434 - RNA, 19 nt, Artificial Sequence
  Description of Artificial Sequence: Synthetic oligonucleotide
uuuugcccauguccucaua

SEQ ID NO: 1424435 - RNA, 19 nt, Artificial Sequence
  Description of Artificial Sequence: Synthetic oligonucleotide
cguaguucccgaugaguag

SEQ ID NO: 1424436 - RNA, 19 nt, Artificial Sequence
  Description of Artificial Sequence: Synthetic oligonucleotide
gcuucagaccuagggaaug

SEQ ID NO: 1424437 - RNA, 19 nt, Artificial Sequence
  Description of Artificial Sequence: Synthetic oligonucleotide
cugguucuugauaggauau

SEQ ID NO: 1424438 - RNA, 19 nt, Artificial Sequence
  Description of Artificial Sequence: Synthetic oligonucleotide
aaguugcgccagagauuac

SEQ ID NO: 1424439 - RNA, 19 nt, Artificial Sequence
  Description of Artificial Sequence: Synthetic oligonucleotide
cugcaauauguccugguau

SEQ ID NO: 1424440 - RNA, 19 nt, Artificial Sequence
  Description of Artificial Sequence: Synthetic oligonucleotide
gggauuuacucuugaagau

SEQ ID NO: 1424441 - RNA, 19 nt, Artificial Sequence
  Description of Artificial Sequence: Synthetic oligonucleotide
guagaccagggcacucgcc

SEQ ID NO: 1424442 - RNA, 19 nt, Artificial Sequence
  Description of Artificial Sequence: Synthetic oligonucleotide
cccgaaggauugaugauca

SEQ ID NO: 1424443 - RNA, 19 nt, Artificial Sequence
  Description of Artificial Sequence: Synthetic oligonucleotide
aggccaaucacggcaugaa

SEQ ID NO: 1424444 - RNA, 19 nt, Artificial Sequence
  Description of Artificial Sequence: Synthetic oligonucleotide
ugaggccguaguucccgau

SEQ ID NO: 1424445 - RNA, 19 nt, Artificial Sequence
  Description of Artificial Sequence: Synthetic oligonucleotide
cuuccgcagcauugccuug

SEQ ID NO: 1424446 - RNA, 19 nt, Artificial Sequence
  Description of Artificial Sequence: Synthetic oligonucleotide
ucuuuggguccuggucaca

SEQ ID NO: 1424447 - RNA, 19 nt, Artificial Sequence
  Description of Artificial Sequence: Synthetic oligonucleotide
caucgauguugagguacac

SEQ ID NO: 1424448 - RNA, 19 nt, Artificial Sequence
  Description of Artificial Sequence: Synthetic oligonucleotide
ggcacucgccccauuagac

SEQ ID NO: 1424449 - RNA, 19 nt, Artificial Sequence
  Description of Artificial Sequence: Synthetic oligonucleotide
uggugccgggguaacccau

SEQ ID NO: 1424450 - RNA, 19 nt, Artificial Sequence
  Description of Artificial Sequence: Synthetic oligonucleotide
cauccugggcuagucgguc

SEQ ID NO: 1424451 - RNA, 19 nt, Artificial Sequence
  Description of Artificial Sequence: Synthetic oligonucleotide
agcuucagaccuagggaau

SEQ ID NO: 1424452 - RNA, 19 nt, Artificial Sequence
  Description of Artificial Sequence: Synthetic oligonucleotide
ccaggucucgccauccauc

SEQ ID NO: 1424453 - RNA, 19 nt, Artificial Sequence
  Description of Artificial Sequence: Synthetic oligonucleotide
gccugucauucuugggucc

SEQ ID NO: 1424454 - RNA, 19 nt, Artificial Sequence
  Description of Artificial Sequence: Synthetic oligonucleotide
gauccugauugaucuugau

SEQ ID NO: 1424455 - RNA, 19 nt, Artificial Sequence
  Description of Artificial Sequence: Synthetic oligonucleotide
acgcucuuuggaaguggag

SEQ ID NO: 1424456 - RNA, 19 nt, Artificial Sequence
  Description of Artificial Sequence: Synthetic oligonucleotide
ccguucacugauacaguuc

SEQ ID NO: 1424457 - RNA, 19 nt, Artificial Sequence
  Description of Artificial Sequence: Synthetic oligonucleotide
ccaggaccaguaagaacac

SEQ ID NO: 1424458 - RNA, 19 nt, Artificial Sequence
  Description of Artificial Sequence: Synthetic oligonucleotide
aggucucgccauccauccu

SEQ ID NO: 1424459 - RNA, 19 nt, Artificial Sequence
  Description of Artificial Sequence: Synthetic oligonucleotide
gcucuauuuugucuagagu

SEQ ID NO: 1424460 - RNA, 19 nt, Artificial Sequence
  Description of Artificial Sequence: Synthetic oligonucleotide
caucaccgagcagccuggg

SEQ ID NO: 1424461 - RNA, 19 nt, Artificial Sequence
  Description of Artificial Sequence: Synthetic oligonucleotide
gcacgcucuuuggaagugg

SEQ ID NO: 1424462 - RNA, 19 nt, Artificial Sequence
  Description of Artificial Sequence: Synthetic oligonucleotide
ggauuugggauaguucagu

SEQ ID NO: 1424463 - RNA, 19 nt, Artificial Sequence
  Description of Artificial Sequence: Synthetic oligonucleotide
gcacucgccccauuagaca

SEQ ID NO: 1424464 - RNA, 19 nt, Artificial Sequence
  Description of Artificial Sequence: Synthetic oligonucleotide
cacgcccaccaauccagca

SEQ ID NO: 1424465 - RNA, 19 nt, Artificial Sequence
  Description of Artificial Sequence: Synthetic oligonucleotide
agccguucacugauacagu

SEQ ID NO: 1424466 - RNA, 19 nt, Artificial Sequence
  Description of Artificial Sequence: Synthetic oligonucleotide
gggucguuccaguguccag

SEQ ID NO: 1424467 - RNA, 19 nt, Artificial Sequence
  Description of Artificial Sequence: Synthetic oligonucleotide
cuaaucgauccugauugau

SEQ ID NO: 1424468 - RNA, 19 nt, Artificial Sequence
  Description of Artificial Sequence: Synthetic oligonucleotide
ccguaguucccgaugagua

SEQ ID NO: 1424469 - RNA, 19 nt, Artificial Sequence
  Description of Artificial Sequence: Synthetic oligonucleotide
caggaguccugaauaucgu

SEQ ID NO: 1424470 - RNA, 19 nt, Artificial Sequence
  Description of Artificial Sequence: Synthetic oligonucleotide
ggguccuggucacaauuaa

SEQ ID NO: 1424471 - RNA, 19 nt, Artificial Sequence
  Description of Artificial Sequence: Synthetic oligonucleotide
auaccccacugcacgcucu

SEQ ID NO: 1424472 - RNA, 19 nt, Artificial Sequence
  Description of Artificial Sequence: Synthetic oligonucleotide
ccaggcggccuuuggaauc

SEQ ID NO: 1424473 - RNA, 19 nt, Artificial Sequence
  Description of Artificial Sequence: Synthetic oligonucleotide
cugucauucuuggguccuc

SEQ ID NO: 1424474 - RNA, 19 nt, Artificial Sequence
  Description of Artificial Sequence: Synthetic oligonucleotide
gccccauuagacagaugcc

SEQ ID NO: 1424475 - RNA, 19 nt, Artificial Sequence
  Description of Artificial Sequence: Synthetic oligonucleotide
gcgccagagauuacagaug

SEQ ID NO: 1424476 - RNA, 19 nt, Artificial Sequence
  Description of Artificial Sequence: Synthetic oligonucleotide
gaaggucuguggacaugaa

SEQ ID NO: 1424477 - RNA, 19 nt, Artificial Sequence
  Description of Artificial Sequence: Synthetic oligonucleotide
ucccgaugaguagcauguc

SEQ ID NO: 1424478 - RNA, 19 nt, Artificial Sequence
  Description of Artificial Sequence: Synthetic oligonucleotide
ggccguaguucccgaugag

SEQ ID NO: 1424479 - RNA, 19 nt, Artificial Sequence
  Description of Artificial Sequence: Synthetic oligonucleotide
ugcgucccuggaugccuaa

SEQ ID NO: 1424480 - RNA, 19 nt, Artificial Sequence
  Description of Artificial Sequence: Synthetic oligonucleotide
gggcacucgccccauuaga

SEQ ID NO: 1424481 - RNA, 19 nt, Artificial Sequence
  Description of Artificial Sequence: Synthetic oligonucleotide
gaagagccguucacugaua

SEQ ID NO: 1424482 - RNA, 19 nt, Artificial Sequence
  Description of Artificial Sequence: Synthetic oligonucleotide
ccuaaucgauccugauuga

SEQ ID NO: 1424483 - RNA, 19 nt, Artificial Sequence
  Description of Artificial Sequence: Synthetic oligonucleotide
ggaccaguaagaacacugu

SEQ ID NO: 1424484 - RNA, 19 nt, Artificial Sequence
  Description of Artificial Sequence: Synthetic oligonucleotide
gcgaugggacggccugugg

SEQ ID NO: 1424485 - RNA, 19 nt, Artificial Sequence
  Description of Artificial Sequence: Synthetic oligonucleotide
acucgccccauuagacaga

SEQ ID NO: 1424486 - RNA, 19 nt, Artificial Sequence
  Description of Artificial Sequence: Synthetic oligonucleotide
cgaaggagcccauucucca

SEQ ID NO: 1424487 - RNA, 19 nt, Artificial Sequence
  Description of Artificial Sequence: Synthetic oligonucleotide
cccaugagggaagcgcuug

SEQ ID NO: 1424488 - RNA, 19 nt, Artificial Sequence
  Description of Artificial Sequence: Synthetic oligonucleotide
cuccaggaguccugaauau

SEQ ID NO: 1424489 - RNA, 19 nt, Artificial Sequence
  Description of Artificial Sequence: Synthetic oligonucleotide
gggcuagucggucagccau

SEQ ID NO: 1424490 - RNA, 19 nt, Artificial Sequence
  Description of Artificial Sequence: Synthetic oligonucleotide
cauuagacagaugccgcuu

SEQ ID NO: 1424491 - RNA, 19 nt, Artificial Sequence
  Description of Artificial Sequence: Synthetic oligonucleotide
gcugucauagccugucauu

SEQ ID NO: 1424492 - RNA, 19 nt, Artificial Sequence
  Description of Artificial Sequence: Synthetic oligonucleotide
ggugccgggguaacccaug

SEQ ID NO: 1424493 - RNA, 19 nt, Artificial Sequence
  Description of Artificial Sequence: Synthetic oligonucleotide
gggguaacccaugcagguc

SEQ ID NO: 1424494 - RNA, 19 nt, Artificial Sequence
  Description of Artificial Sequence: Synthetic oligonucleotide
cagcucuauuuugucuaga

SEQ ID NO: 1424495 - RNA, 19 nt, Artificial Sequence
  Description of Artificial Sequence: Synthetic oligonucleotide
auguuacagcggaaacguu

SEQ ID NO: 1424496 - RNA, 19 nt, Artificial Sequence
  Description of Artificial Sequence: Synthetic oligonucleotide
ggcgaugggacggccugug

SEQ ID NO: 1424497 - RNA, 19 nt, Artificial Sequence
  Description of Artificial Sequence: Synthetic oligonucleotide
ccuggucacaauuaauguu

SEQ ID NO: 1424498 - RNA, 19 nt, Artificial Sequence
  Description of Artificial Sequence: Synthetic oligonucleotide
ccucaauuugggauuuacu

SEQ ID NO: 1424499 - RNA, 19 nt, Artificial Sequence
  Description of Artificial Sequence: Synthetic oligonucleotide
cucuggauuugggauaguu

SEQ ID NO: 1424500 - RNA, 19 nt, Artificial Sequence
  Description of Artificial Sequence: Synthetic oligonucleotide
gcaaagguuccagcaucca

SEQ ID NO: 1424501 - RNA, 19 nt, Artificial Sequence
  Description of Artificial Sequence: Synthetic oligonucleotide
ccauuagacagaugccgcu

SEQ ID NO: 1424502 - RNA, 19 nt, Artificial Sequence
  Description of Artificial Sequence: Synthetic oligonucleotide
ccgaaggauugaugaucac

SEQ ID NO: 1424503 - RNA, 19 nt, Artificial Sequence
  Description of Artificial Sequence: Synthetic oligonucleotide
ggcugucauagccugucau

SEQ ID NO: 1424504 - RNA, 19 nt, Artificial Sequence
  Description of Artificial Sequence: Synthetic oligonucleotide
gccguucacugauacaguu

SEQ ID NO: 1424505 - RNA, 19 nt, Artificial Sequence
  Description of Artificial Sequence: Synthetic oligonucleotide
cgcuugaacaccucaauuu

SEQ ID NO: 1424506 - RNA, 19 nt, Artificial Sequence
  Description of Artificial Sequence: Synthetic oligonucleotide
cccgaugaguagcaugucu

SEQ ID NO: 1424507 - RNA, 19 nt, Artificial Sequence
  Description of Artificial Sequence: Synthetic oligonucleotide
ggaaggccaaucacggcau

SEQ ID NO: 1424508 - RNA, 19 nt, Artificial Sequence
  Description of Artificial Sequence: Synthetic oligonucleotide
ggacagagcccuaccacau

SEQ ID NO: 1424509 - RNA, 19 nt, Artificial Sequence
  Description of Artificial Sequence: Synthetic oligonucleotide
cgucgaaguugcgccagag

SEQ ID NO: 1424510 - RNA, 19 nt, Artificial Sequence
  Description of Artificial Sequence: Synthetic oligonucleotide
uccucacaacugggacauc

SEQ ID NO: 1424511 - RNA, 19 nt, Artificial Sequence
  Description of Artificial Sequence: Synthetic oligonucleotide
gccauccauccugggcuag

SEQ ID NO: 1424512 - RNA, 19 nt, Artificial Sequence
  Description of Artificial Sequence: Synthetic oligonucleotide
ggguaugauggggucacau

SEQ ID NO: 1424513 - RNA, 19 nt, Artificial Sequence
  Description of Artificial Sequence: Synthetic oligonucleotide
ccccugguucuugauagga

SEQ ID NO: 1424514 - RNA, 19 nt, Artificial Sequence
  Description of Artificial Sequence: Synthetic oligonucleotide
ccacugcacgcucuuugga

SEQ ID NO: 1424515 - RNA, 19 nt, Artificial Sequence
  Description of Artificial Sequence: Synthetic oligonucleotide
gccuagcuucagaccuagg

SEQ ID NO: 1424516 - RNA, 19 nt, Artificial Sequence
  Description of Artificial Sequence: Synthetic oligonucleotide
cugcgucccuggaugccua

SEQ ID NO: 1424517 - RNA, 19 nt, Artificial Sequence
  Description of Artificial Sequence: Synthetic oligonucleotide
ggauaccccacugcacgcu

SEQ ID NO: 1424518 - RNA, 19 nt, Artificial Sequence
  Description of Artificial Sequence: Synthetic oligonucleotide
gcccucauacacucuggau

SEQ ID NO: 1424519 - RNA, 19 nt, Artificial Sequence
  Description of Artificial Sequence: Synthetic oligonucleotide
ccgcagcauugccuuggag

SEQ ID NO: 1424520 - RNA, 19 nt, Artificial Sequence
  Description of Artificial Sequence: Synthetic oligonucleotide
gcuugggaucaggcaccag

SEQ ID NO: 1424521 - RNA, 19 nt, Artificial Sequence
  Description of Artificial Sequence: Synthetic oligonucleotide
guucacugauacaguucuu

SEQ ID NO: 1424522 - RNA, 19 nt, Artificial Sequence
  Description of Artificial Sequence: Synthetic oligonucleotide
cccgccacuggcugcaaua

SEQ ID NO: 1424523 - RNA, 19 nt, Artificial Sequence
  Description of Artificial Sequence: Synthetic oligonucleotide
ccugaauaucgucgaaguu

SEQ ID NO: 1424524 - RNA, 19 nt, Artificial Sequence
  Description of Artificial Sequence: Synthetic oligonucleotide
cauugccuuggagucgauu

SEQ ID NO: 1424525 - RNA, 19 nt, Artificial Sequence
  Description of Artificial Sequence: Synthetic oligonucleotide
cgggguaacccaugcaggu

SEQ ID NO: 1424526 - RNA, 19 nt, Artificial Sequence
  Description of Artificial Sequence: Synthetic oligonucleotide
ccauccugggcuagucggu

SEQ ID NO: 1424527 - RNA, 19 nt, Artificial Sequence
  Description of Artificial Sequence: Synthetic oligonucleotide
guaacccaugcaggucauu

SEQ ID NO: 1424528 - RNA, 19 nt, Artificial Sequence
  Description of Artificial Sequence: Synthetic oligonucleotide
ccgcuugaacaccucaauu

SEQ ID NO: 1424529 - RNA, 19 nt, Artificial Sequence
  Description of Artificial Sequence: Synthetic oligonucleotide
cggugaaguugcuuucacu

SEQ ID NO: 1424530 - RNA, 19 nt, Artificial Sequence
  Description of Artificial Sequence: Synthetic oligonucleotide
gguguucgaaggagcccau

SEQ ID NO: 1424531 - RNA, 19 nt, Artificial Sequence
  Description of Artificial Sequence: Synthetic oligonucleotide
guagcaugucugggucguu

SEQ ID NO: 1424532 - RNA, 19 nt, Artificial Sequence
  Description of Artificial Sequence: Synthetic oligonucleotide
ccugcgucccuggaugccu

SEQ ID NO: 1424533 - RNA, 19 nt, Artificial Sequence
  Description of Artificial Sequence: Synthetic oligonucleotide
ccgagcagccugggaagga

SEQ ID NO: 1424534 - RNA, 19 nt, Artificial Sequence
  Description of Artificial Sequence: Synthetic oligonucleotide
ggcuagucggucagccauu

SEQ ID NO: 1424535 - RNA, 19 nt, Artificial Sequence
  Description of Artificial Sequence: Synthetic oligonucleotide
ccuagggaaugagcauagu

SEQ ID NO: 1424536 - RNA, 19 nt, Artificial Sequence
  Description of Artificial Sequence: Synthetic oligonucleotide
cggcaugaaacugggcccu

SEQ ID NO: 1424537 - RNA, 19 nt, Artificial Sequence
  Description of Artificial Sequence: Synthetic oligonucleotide
gccagagauuacagauguu

SEQ ID NO: 1424538 - RNA, 19 nt, Artificial Sequence
  Description of Artificial Sequence: Synthetic oligonucleotide
ccgccacuggcugcaauau

SEQ ID NO: 1424539 - RNA, 19 nt, Artificial Sequence
  Description of Artificial Sequence: Synthetic oligonucleotide
gcgucccuggaugccuaau

SEQ ID NO: 1424540 - RNA, 19 nt, Artificial Sequence
  Description of Artificial Sequence: Synthetic oligonucleotide
gcauugccuuggagucgau

SEQ ID NO: 1424541 - RNA, 19 nt, Artificial Sequence
  Description of Artificial Sequence: Synthetic oligonucleotide
ccagggcacucgccccauu

SEQ ID NO: 1424542 - RNA, 19 nt, Artificial Sequence
  Description of Artificial Sequence: Synthetic oligonucleotide
aacaaauugaacuucauga

SEQ ID NO: 1424543 - RNA, 19 nt, Artificial Sequence
  Description of Artificial Sequence: Synthetic oligonucleotide
uaauaauacaagaagggcg

SEQ ID NO: 1424544 - RNA, 19 nt, Artificial Sequence
  Description of Artificial Sequence: Synthetic oligonucleotide
ucuaauaauacaagaaggg

SEQ ID NO: 1424545 - RNA, 19 nt, Artificial Sequence
  Description of Artificial Sequence: Synthetic oligonucleotide
auuacaaagaugcaauggc

SEQ ID NO: 1424546 - RNA, 19 nt, Artificial Sequence
  Description of Artificial Sequence: Synthetic oligonucleotide
aauauaauugacagcaacc

SEQ ID NO: 1424547 - RNA, 19 nt, Artificial Sequence
  Description of Artificial Sequence: Synthetic oligonucleotide
aaauuguagcuucaagugc

SEQ ID NO: 1424548 - RNA, 19 nt, Artificial Sequence
  Description of Artificial Sequence: Synthetic oligonucleotide
uaugguauuauuaaaacaa

SEQ ID NO: 1424549 - RNA, 19 nt, Artificial Sequence
  Description of Artificial Sequence: Synthetic oligonucleotide
aguaugcuuauacauaugc

SEQ ID NO: 1424550 - RNA, 19 nt, Artificial Sequence
  Description of Artificial Sequence: Synthetic oligonucleotide
augcuuauuacaaagaugc

SEQ ID NO: 1424551 - RNA, 19 nt, Artificial Sequence
  Description of Artificial Sequence: Synthetic oligonucleotide
accaacuugagcuaaauuc

SEQ ID NO: 1424552 - RNA, 19 nt, Artificial Sequence
  Description of Artificial Sequence: Synthetic oligonucleotide
gaucuaauaauacaagaag

SEQ ID NO: 1424553 - RNA, 19 nt, Artificial Sequence
  Description of Artificial Sequence: Synthetic oligonucleotide
aacccaaaguaacuuagcc

SEQ ID NO: 1424554 - RNA, 19 nt, Artificial Sequence
  Description of Artificial Sequence: Synthetic oligonucleotide
uauaguagucuucagguag

SEQ ID NO: 1424555 - RNA, 19 nt, Artificial Sequence
  Description of Artificial Sequence: Synthetic oligonucleotide
uggaauauaauugacagca

SEQ ID NO: 1424556 - RNA, 19 nt, Artificial Sequence
  Description of Artificial Sequence: Synthetic oligonucleotide
uauuucacuacauuaagca

SEQ ID NO: 1424557 - RNA, 19 nt, Artificial Sequence
  Description of Artificial Sequence: Synthetic oligonucleotide
acuuuugguguguaaaucc

SEQ ID NO: 1424558 - RNA, 19 nt, Artificial Sequence
  Description of Artificial Sequence: Synthetic oligonucleotide
uacuaguuauccuuaaugg

SEQ ID NO: 1424559 - RNA, 19 nt, Artificial Sequence
  Description of Artificial Sequence: Synthetic oligonucleotide
aaccgugacagguacaugg

SEQ ID NO: 1424560 - RNA, 19 nt, Artificial Sequence
  Description of Artificial Sequence: Synthetic oligonucleotide
gguucuuucagucaaaccg

SEQ ID NO: 1424561 - RNA, 19 nt, Artificial Sequence
  Description of Artificial Sequence: Synthetic oligonucleotide
uuuugaacuugauagaugu

SEQ ID NO: 1424562 - RNA, 19 nt, Artificial Sequence
  Description of Artificial Sequence: Synthetic oligonucleotide
aauacaagaagggcgauag

SEQ ID NO: 1424563 - RNA, 19 nt, Artificial Sequence
  Description of Artificial Sequence: Synthetic oligonucleotide
uugcuugcaacucaaaucc

SEQ ID NO: 1424564 - RNA, 19 nt, Artificial Sequence
  Description of Artificial Sequence: Synthetic oligonucleotide
aaggaugcuuauuacaaag

SEQ ID NO: 1424565 - RNA, 19 nt, Artificial Sequence
  Description of Artificial Sequence: Synthetic oligonucleotide
uaccaaaccaacuugagcu

SEQ ID NO: 1424566 - RNA, 19 nt, Artificial Sequence
  Description of Artificial Sequence: Synthetic oligonucleotide
uuacuaguuauccuuaaug

SEQ ID NO: 1424567 - RNA, 19 nt, Artificial Sequence
  Description of Artificial Sequence: Synthetic oligonucleotide
auugcuugcaacucaaauc

SEQ ID NO: 1424568 - RNA, 19 nt, Artificial Sequence
  Description of Artificial Sequence: Synthetic oligonucleotide
aaugaacagcaauugguag

SEQ ID NO: 1424569 - RNA, 19 nt, Artificial Sequence
  Description of Artificial Sequence: Synthetic oligonucleotide
uuucuaagaauaccaaacc

SEQ ID NO: 1424570 - RNA, 19 nt, Artificial Sequence
  Description of Artificial Sequence: Synthetic oligonucleotide
ucugaauuaccauucuagg

SEQ ID NO: 1424571 - RNA, 19 nt, Artificial Sequence
  Description of Artificial Sequence: Synthetic oligonucleotide
uuauaauuacuaguuaucc

SEQ ID NO: 1424572 - RNA, 19 nt, Artificial Sequence
  Description of Artificial Sequence: Synthetic oligonucleotide
agucacaugggucagguuc

SEQ ID NO: 1424573 - RNA, 19 nt, Artificial Sequence
  Description of Artificial Sequence: Synthetic oligonucleotide
uauuacaaagaugcaaugg

SEQ ID NO: 1424574 - RNA, 19 nt, Artificial Sequence
  Description of Artificial Sequence: Synthetic oligonucleotide
acacaaauccuauuucacc

SEQ ID NO: 1424575 - RNA, 19 nt, Artificial Sequence
  Description of Artificial Sequence: Synthetic oligonucleotide
uguuaugguauuauuaaaa

SEQ ID NO: 1424576 - RNA, 19 nt, Artificial Sequence
  Description of Artificial Sequence: Synthetic oligonucleotide
aaacagaaaccuguuauuc

SEQ ID NO: 1424577 - RNA, 19 nt, Artificial Sequence
  Description of Artificial Sequence: Synthetic oligonucleotide
aauaauacaagaagggcga

SEQ ID NO: 1424578 - RNA, 19 nt, Artificial Sequence
  Description of Artificial Sequence: Synthetic oligonucleotide
uuuguaagagucaggagga

SEQ ID NO: 1424579 - RNA, 19 nt, Artificial Sequence
  Description of Artificial Sequence: Synthetic oligonucleotide
ugaauuaccauucuagguu

SEQ ID NO: 1424580 - RNA, 19 nt, Artificial Sequence
  Description of Artificial Sequence: Synthetic oligonucleotide
uuauccuuaauggaauucg

SEQ ID NO: 1424581 - RNA, 19 nt, Artificial Sequence
  Description of Artificial Sequence: Synthetic oligonucleotide
ucuguaguccuuuacaaga

SEQ ID NO: 1424582 - RNA, 19 nt, Artificial Sequence
  Description of Artificial Sequence: Synthetic oligonucleotide
uguuauucauaagucaagg

SEQ ID NO: 1424583 - RNA, 19 nt, Artificial Sequence
  Description of Artificial Sequence: Synthetic oligonucleotide
aucuaauaauacaagaagg

SEQ ID NO: 1424584 - RNA, 19 nt, Artificial Sequence
  Description of Artificial Sequence: Synthetic oligonucleotide
uacauuaagcaauaaggca

SEQ ID NO: 1424585 - RNA, 19 nt, Artificial Sequence
  Description of Artificial Sequence: Synthetic oligonucleotide
uguuggauuaaauucuggc

SEQ ID NO: 1424586 - RNA, 19 nt, Artificial Sequence
  Description of Artificial Sequence: Synthetic oligonucleotide
gaggauaaagcugugaagc

SEQ ID NO: 1424587 - RNA, 19 nt, Artificial Sequence
  Description of Artificial Sequence: Synthetic oligonucleotide
caaauuguagcuucaagug

SEQ ID NO: 1424588 - RNA, 19 nt, Artificial Sequence
  Description of Artificial Sequence: Synthetic oligonucleotide
aaauucaccuugaaacagc

SEQ ID NO: 1424589 - RNA, 19 nt, Artificial Sequence
  Description of Artificial Sequence: Synthetic oligonucleotide
acauguaauugcuugcaac

SEQ ID NO: 1424590 - RNA, 19 nt, Artificial Sequence
  Description of Artificial Sequence: Synthetic oligonucleotide
aauucaccuugaaacagcc

SEQ ID NO: 1424591 - RNA, 19 nt, Artificial Sequence
  Description of Artificial Sequence: Synthetic oligonucleotide
uucuaagaauaccaaacca

SEQ ID NO: 1424592 - RNA, 19 nt, Artificial Sequence
  Description of Artificial Sequence: Synthetic oligonucleotide
uuaaguuguguucacauuu

SEQ ID NO: 1424593 - RNA, 19 nt, Artificial Sequence
  Description of Artificial Sequence: Synthetic oligonucleotide
augaacagcaauugguagg

SEQ ID NO: 1424594 - RNA, 19 nt, Artificial Sequence
  Description of Artificial Sequence: Synthetic oligonucleotide
uuguaaguuaacuugacuu

SEQ ID NO: 1424595 - RNA, 19 nt, Artificial Sequence
  Description of Artificial Sequence: Synthetic oligonucleotide
agugaaggguuauaauuac

SEQ ID NO: 1424596 - RNA, 19 nt, Artificial Sequence
  Description of Artificial Sequence: Synthetic oligonucleotide
cucugaauuaccauucuag

SEQ ID NO: 1424597 - RNA, 19 nt, Artificial Sequence
  Description of Artificial Sequence: Synthetic oligonucleotide
gaagucaauggucaaauga

SEQ ID NO: 1424598 - RNA, 19 nt, Artificial Sequence
  Description of Artificial Sequence: Synthetic oligonucleotide
acaacuguuauuuguaagu

SEQ ID NO: 1424599 - RNA, 19 nt, Artificial Sequence
  Description of Artificial Sequence: Synthetic oligonucleotide
augacauguaauugcuugc

SEQ ID NO: 1424600 - RNA, 19 nt, Artificial Sequence
  Description of Artificial Sequence: Synthetic oligonucleotide
uguacuacugaggaaaaug

SEQ ID NO: 1424601 - RNA, 19 nt, Artificial Sequence
  Description of Artificial Sequence: Synthetic oligonucleotide
aagaaggaugcuuauuaca

SEQ ID NO: 1424602 - RNA, 19 nt, Artificial Sequence
  Description of Artificial Sequence: Synthetic oligonucleotide
agggaguaaaucuaauguc

SEQ ID NO: 1424603 - RNA, 19 nt, Artificial Sequence
  Description of Artificial Sequence: Synthetic oligonucleotide
cuugugucgaggauaaagc

SEQ ID NO: 1424604 - RNA, 19 nt, Artificial Sequence
  Description of Artificial Sequence: Synthetic oligonucleotide
ucaauggucaaaugaaagu

SEQ ID NO: 1424605 - RNA, 19 nt, Artificial Sequence
  Description of Artificial Sequence: Synthetic oligonucleotide
uguaaguuaacuugacuuc

SEQ ID NO: 1424606 - RNA, 19 nt, Artificial Sequence
  Description of Artificial Sequence: Synthetic oligonucleotide
aaaucuaaugucccucuga

SEQ ID NO: 1424607 - RNA, 19 nt, Artificial Sequence
  Description of Artificial Sequence: Synthetic oligonucleotide
uaauugacagcaaccaacu

SEQ ID NO: 1424608 - RNA, 19 nt, Artificial Sequence
  Description of Artificial Sequence: Synthetic oligonucleotide
uaacuugacuucuuaaaca

SEQ ID NO: 1424609 - RNA, 19 nt, Artificial Sequence
  Description of Artificial Sequence: Synthetic oligonucleotide
uaacuuagccuuaaguuuc

SEQ ID NO: 1424610 - RNA, 19 nt, Artificial Sequence
  Description of Artificial Sequence: Synthetic oligonucleotide
aacagaaaccuguuauuca

SEQ ID NO: 1424611 - RNA, 19 nt, Artificial Sequence
  Description of Artificial Sequence: Synthetic oligonucleotide
aauugcuugcaacucaaau

SEQ ID NO: 1424612 - RNA, 19 nt, Artificial Sequence
  Description of Artificial Sequence: Synthetic oligonucleotide
uucagucaaaccgugacag

SEQ ID NO: 1424613 - RNA, 19 nt, Artificial Sequence
  Description of Artificial Sequence: Synthetic oligonucleotide
aaauugaacuucaugacau

SEQ ID NO: 1424614 - RNA, 19 nt, Artificial Sequence
  Description of Artificial Sequence: Synthetic oligonucleotide
gaaggguuauaauuacuag

SEQ ID NO: 1424615 - RNA, 19 nt, Artificial Sequence
  Description of Artificial Sequence: Synthetic oligonucleotide
ugaaggguuauaauuacua

SEQ ID NO: 1424616 - RNA, 19 nt, Artificial Sequence
  Description of Artificial Sequence: Synthetic oligonucleotide
uguccugucaucacaaagu

SEQ ID NO: 1424617 - RNA, 19 nt, Artificial Sequence
  Description of Artificial Sequence: Synthetic oligonucleotide
agaauaccaaaccaacuug

SEQ ID NO: 1424618 - RNA, 19 nt, Artificial Sequence
  Description of Artificial Sequence: Synthetic oligonucleotide
ucacauuuccgacagcgca

SEQ ID NO: 1424619 - RNA, 19 nt, Artificial Sequence
  Description of Artificial Sequence: Synthetic oligonucleotide
agcuucaagugcuaagacg

SEQ ID NO: 1424620 - RNA, 19 nt, Artificial Sequence
  Description of Artificial Sequence: Synthetic oligonucleotide
uccuuaaagucccauguac

SEQ ID NO: 1424621 - RNA, 19 nt, Artificial Sequence
  Description of Artificial Sequence: Synthetic oligonucleotide
augaauagcaggucugcuc

SEQ ID NO: 1424622 - RNA, 19 nt, Artificial Sequence
  Description of Artificial Sequence: Synthetic oligonucleotide
auagacacaaauccuauuu

SEQ ID NO: 1424623 - RNA, 19 nt, Artificial Sequence
  Description of Artificial Sequence: Synthetic oligonucleotide
agugcuaagacgcccaacu

SEQ ID NO: 1424624 - RNA, 19 nt, Artificial Sequence
  Description of Artificial Sequence: Synthetic oligonucleotide
auauaauugacagcaacca

SEQ ID NO: 1424625 - RNA, 19 nt, Artificial Sequence
  Description of Artificial Sequence: Synthetic oligonucleotide
uguccaauggaagucaaug

SEQ ID NO: 1424626 - RNA, 19 nt, Artificial Sequence
  Description of Artificial Sequence: Synthetic oligonucleotide
auagauguuggauuaaauu

SEQ ID NO: 1424627 - RNA, 19 nt, Artificial Sequence
  Description of Artificial Sequence: Synthetic oligonucleotide
caaauggagugccuuaagg

SEQ ID NO: 1424628 - RNA, 19 nt, Artificial Sequence
  Description of Artificial Sequence: Synthetic oligonucleotide
uacaagagacaaauggagu

SEQ ID NO: 1424629 - RNA, 19 nt, Artificial Sequence
  Description of Artificial Sequence: Synthetic oligonucleotide
caaacccaaaguaacuuag

SEQ ID NO: 1424630 - RNA, 19 nt, Artificial Sequence
  Description of Artificial Sequence: Synthetic oligonucleotide
auccuauuucaccagucac

SEQ ID NO: 1424631 - RNA, 19 nt, Artificial Sequence
  Description of Artificial Sequence: Synthetic oligonucleotide
uccaaauuguagcuucaag

SEQ ID NO: 1424632 - RNA, 19 nt, Artificial Sequence
  Description of Artificial Sequence: Synthetic oligonucleotide
ucucuacuggauuuguaag

SEQ ID NO: 1424633 - RNA, 19 nt, Artificial Sequence
  Description of Artificial Sequence: Synthetic oligonucleotide
acuaguuauccuuaaugga

SEQ ID NO: 1424634 - RNA, 19 nt, Artificial Sequence
  Description of Artificial Sequence: Synthetic oligonucleotide
aaacuuuugguguguaaau

SEQ ID NO: 1424635 - RNA, 19 nt, Artificial Sequence
  Description of Artificial Sequence: Synthetic oligonucleotide
uggauuaaauucuggcuug

SEQ ID NO: 1424636 - RNA, 19 nt, Artificial Sequence
  Description of Artificial Sequence: Synthetic oligonucleotide
aagggaccaagaaggaugc

SEQ ID NO: 1424637 - RNA, 19 nt, Artificial Sequence
  Description of Artificial Sequence: Synthetic oligonucleotide
ucccauguacuacugagga

SEQ ID NO: 1424638 - RNA, 19 nt, Artificial Sequence
  Description of Artificial Sequence: Synthetic oligonucleotide
aaacccaaaguaacuuagc

SEQ ID NO: 1424639 - RNA, 19 nt, Artificial Sequence
  Description of Artificial Sequence: Synthetic oligonucleotide
uuauacauaugcucagaac

SEQ ID NO: 1424640 - RNA, 19 nt, Artificial Sequence
  Description of Artificial Sequence: Synthetic oligonucleotide
auugguaggcauucuguag

SEQ ID NO: 1424641 - RNA, 19 nt, Artificial Sequence
  Description of Artificial Sequence: Synthetic oligonucleotide
caagaagggcgauagacac

SEQ ID NO: 1424642 - RNA, 19 nt, Artificial Sequence
  Description of Artificial Sequence: Synthetic oligonucleotide
ggaccguuugaucagaagg

SEQ ID NO: 1424643 - RNA, 19 nt, Artificial Sequence
  Description of Artificial Sequence: Synthetic oligonucleotide
cuccaacagagucacaugg

SEQ ID NO: 1424644 - RNA, 19 nt, Artificial Sequence
  Description of Artificial Sequence: Synthetic oligonucleotide
ugaacagcaauugguaggc

SEQ ID NO: 1424645 - RNA, 19 nt, Artificial Sequence
  Description of Artificial Sequence: Synthetic oligonucleotide
ucucacuucuggaauauaa

SEQ ID NO: 1424646 - RNA, 19 nt, Artificial Sequence
  Description of Artificial Sequence: Synthetic oligonucleotide
guuaaguucacuggucgcg

SEQ ID NO: 1424647 - RNA, 19 nt, Artificial Sequence
  Description of Artificial Sequence: Synthetic oligonucleotide
uccaacagagucacauggg

SEQ ID NO: 1424648 - RNA, 19 nt, Artificial Sequence
  Description of Artificial Sequence: Synthetic oligonucleotide
uuuccgacagcgcagggac

SEQ ID NO: 1424649 - RNA, 19 nt, Artificial Sequence
  Description of Artificial Sequence: Synthetic oligonucleotide
ucgaggauaaagcugugaa

SEQ ID NO: 1424650 - RNA, 19 nt, Artificial Sequence
  Description of Artificial Sequence: Synthetic oligonucleotide
uugguaggcauucuguagu

SEQ ID NO: 1424651 - RNA, 19 nt, Artificial Sequence
  Description of Artificial Sequence: Synthetic oligonucleotide
uaaagucccauguacuacu

SEQ ID NO: 1424652 - RNA, 19 nt, Artificial Sequence
  Description of Artificial Sequence: Synthetic oligonucleotide
aauaccaaaccaacuugag

SEQ ID NO: 1424653 - RNA, 19 nt, Artificial Sequence
  Description of Artificial Sequence: Synthetic oligonucleotide
gaauucggacagcagcugg

SEQ ID NO: 1424654 - RNA, 19 nt, Artificial Sequence
  Description of Artificial Sequence: Synthetic oligonucleotide
ugagcuaaauucaccuuga

SEQ ID NO: 1424655 - RNA, 19 nt, Artificial Sequence
  Description of Artificial Sequence: Synthetic oligonucleotide
ugaaggguggucaccuccg

SEQ ID NO: 1424656 - RNA, 19 nt, Artificial Sequence
  Description of Artificial Sequence: Synthetic oligonucleotide
cuuucagucaaaccgugac

SEQ ID NO: 1424657 - RNA, 19 nt, Artificial Sequence
  Description of Artificial Sequence: Synthetic oligonucleotide
agguacauggcccauuucu

SEQ ID NO: 1424658 - RNA, 19 nt, Artificial Sequence
  Description of Artificial Sequence: Synthetic oligonucleotide
cacuacauuaagcaauaag

SEQ ID NO: 1424659 - RNA, 19 nt, Artificial Sequence
  Description of Artificial Sequence: Synthetic oligonucleotide
ugcuaagacgcccaacucu

SEQ ID NO: 1424660 - RNA, 19 nt, Artificial Sequence
  Description of Artificial Sequence: Synthetic oligonucleotide
gauggagcuaggcuguuug

SEQ ID NO: 1424661 - RNA, 19 nt, Artificial Sequence
  Description of Artificial Sequence: Synthetic oligonucleotide
aaauccuauuucaccaguc

SEQ ID NO: 1424662 - RNA, 19 nt, Artificial Sequence
  Description of Artificial Sequence: Synthetic oligonucleotide
uacugaaccuuuucuaaga

SEQ ID NO: 1424663 - RNA, 19 nt, Artificial Sequence
  Description of Artificial Sequence: Synthetic oligonucleotide
ugguguguaaauccauuca

SEQ ID NO: 1424664 - RNA, 19 nt, Artificial Sequence
  Description of Artificial Sequence: Synthetic oligonucleotide
gcuguugauauuaucaggg

SEQ ID NO: 1424665 - RNA, 19 nt, Artificial Sequence
  Description of Artificial Sequence: Synthetic oligonucleotide
ugacaugauucucacuucu

SEQ ID NO: 1424666 - RNA, 19 nt, Artificial Sequence
  Description of Artificial Sequence: Synthetic oligonucleotide
aauuacuaguuauccuuaa

SEQ ID NO: 1424667 - RNA, 19 nt, Artificial Sequence
  Description of Artificial Sequence: Synthetic oligonucleotide
aagggcgauagacacaaau

SEQ ID NO: 1424668 - RNA, 19 nt, Artificial Sequence
  Description of Artificial Sequence: Synthetic oligonucleotide
ugcuuauacauaugcucag

SEQ ID NO: 1424669 - RNA, 19 nt, Artificial Sequence
  Description of Artificial Sequence: Synthetic oligonucleotide
ucggacagcagcuggaaca

SEQ ID NO: 1424670 - RNA, 19 nt, Artificial Sequence
  Description of Artificial Sequence: Synthetic oligonucleotide
ugggaauugacaugauucu

SEQ ID NO: 1424671 - RNA, 19 nt, Artificial Sequence
  Description of Artificial Sequence: Synthetic oligonucleotide
uuucagucaaaccgugaca

SEQ ID NO: 1424672 - RNA, 19 nt, Artificial Sequence
  Description of Artificial Sequence: Synthetic oligonucleotide
uaauuacuaguuauccuua

SEQ ID NO: 1424673 - RNA, 19 nt, Artificial Sequence
  Description of Artificial Sequence: Synthetic oligonucleotide
ucaagugcuaagacgccca

SEQ ID NO: 1424674 - RNA, 19 nt, Artificial Sequence
  Description of Artificial Sequence: Synthetic oligonucleotide
accccuuuuacugggaugg

SEQ ID NO: 1424675 - RNA, 19 nt, Artificial Sequence
  Description of Artificial Sequence: Synthetic oligonucleotide
caauggucaaaugaaaguc

SEQ ID NO: 1424676 - RNA, 19 nt, Artificial Sequence
  Description of Artificial Sequence: Synthetic oligonucleotide
gucaauggucaaaugaaag

SEQ ID NO: 1424677 - RNA, 19 nt, Artificial Sequence
  Description of Artificial Sequence: Synthetic oligonucleotide
uguaagagucaggaggacc

SEQ ID NO: 1424678 - RNA, 19 nt, Artificial Sequence
  Description of Artificial Sequence: Synthetic oligonucleotide
uaaaucuaaugucccucug

SEQ ID NO: 1424679 - RNA, 19 nt, Artificial Sequence
  Description of Artificial Sequence: Synthetic oligonucleotide
aacuuagccuuaaguuucc

SEQ ID NO: 1424680 - RNA, 19 nt, Artificial Sequence
  Description of Artificial Sequence: Synthetic oligonucleotide
uaguuauccuuaauggaau

SEQ ID NO: 1424681 - RNA, 19 nt, Artificial Sequence
  Description of Artificial Sequence: Synthetic oligonucleotide
ugacaauccuacuucucug

SEQ ID NO: 1424682 - RNA, 19 nt, Artificial Sequence
  Description of Artificial Sequence: Synthetic oligonucleotide
uagacacaaauccuauuuc

SEQ ID NO: 1424683 - RNA, 19 nt, Artificial Sequence
  Description of Artificial Sequence: Synthetic oligonucleotide
uguggcagcauuagucucu

SEQ ID NO: 1424684 - RNA, 19 nt, Artificial Sequence
  Description of Artificial Sequence: Synthetic oligonucleotide
accuguuauucauaaguca

SEQ ID NO: 1424685 - RNA, 19 nt, Artificial Sequence
  Description of Artificial Sequence: Synthetic oligonucleotide
accuccguuaaguucacug

SEQ ID NO: 1424686 - RNA, 19 nt, Artificial Sequence
  Description of Artificial Sequence: Synthetic oligonucleotide
uacauggcccauuucucag

SEQ ID NO: 1424687 - RNA, 19 nt, Artificial Sequence
  Description of Artificial Sequence: Synthetic oligonucleotide
aagugaaggguuauaauua

SEQ ID NO: 1424688 - RNA, 19 nt, Artificial Sequence
  Description of Artificial Sequence: Synthetic oligonucleotide
aagaugcaauggcauuuag

SEQ ID NO: 1424689 - RNA, 19 nt, Artificial Sequence
  Description of Artificial Sequence: Synthetic oligonucleotide
gcuucaagugcuaagacgc

SEQ ID NO: 1424690 - RNA, 19 nt, Artificial Sequence
  Description of Artificial Sequence: Synthetic oligonucleotide
uuaaagucccauguacuac

SEQ ID NO: 1424691 - RNA, 19 nt, Artificial Sequence
  Description of Artificial Sequence: Synthetic oligonucleotide
uugaaacagccaacaacug

SEQ ID NO: 1424692 - RNA, 19 nt, Artificial Sequence
  Description of Artificial Sequence: Synthetic oligonucleotide
acccaaaguaacuuagccu

SEQ ID NO: 1424693 - RNA, 19 nt, Artificial Sequence
  Description of Artificial Sequence: Synthetic oligonucleotide
agucaaggagugccuuucc

SEQ ID NO: 1424694 - RNA, 19 nt, Artificial Sequence
  Description of Artificial Sequence: Synthetic oligonucleotide
aaagaaacuuuuggugugu

SEQ ID NO: 1424695 - RNA, 19 nt, Artificial Sequence
  Description of Artificial Sequence: Synthetic oligonucleotide
gggcgauagacacaaaucc

SEQ ID NO: 1424696 - RNA, 19 nt, Artificial Sequence
  Description of Artificial Sequence: Synthetic oligonucleotide
caagagacaaauggagugc

SEQ ID NO: 1424697 - RNA, 19 nt, Artificial Sequence
  Description of Artificial Sequence: Synthetic oligonucleotide
uuuagugcaguaugcuuau

SEQ ID NO: 1424698 - RNA, 19 nt, Artificial Sequence
  Description of Artificial Sequence: Synthetic oligonucleotide
uucagguagagguuccacu

SEQ ID NO: 1424699 - RNA, 19 nt, Artificial Sequence
  Description of Artificial Sequence: Synthetic oligonucleotide
gaagguugggaauugacau

SEQ ID NO: 1424700 - RNA, 19 nt, Artificial Sequence
  Description of Artificial Sequence: Synthetic oligonucleotide
uucucagggaguaaaucua

SEQ ID NO: 1424701 - RNA, 19 nt, Artificial Sequence
  Description of Artificial Sequence: Synthetic oligonucleotide
uuugguguguaaauccauu

SEQ ID NO: 1424702 - RNA, 19 nt, Artificial Sequence
  Description of Artificial Sequence: Synthetic oligonucleotide
uuguguucacauuuccgac

SEQ ID NO: 1424703 - RNA, 19 nt, Artificial Sequence
  Description of Artificial Sequence: Synthetic oligonucleotide
aauggaagucaauggucaa

SEQ ID NO: 1424704 - RNA, 19 nt, Artificial Sequence
  Description of Artificial Sequence: Synthetic oligonucleotide
aggagugccuuuccuuccc

SEQ ID NO: 1424705 - RNA, 19 nt, Artificial Sequence
  Description of Artificial Sequence: Synthetic oligonucleotide
caagaaggaugcuuauuac

SEQ ID NO: 1424706 - RNA, 19 nt, Artificial Sequence
  Description of Artificial Sequence: Synthetic oligonucleotide
gaauaccaaaccaacuuga

SEQ ID NO: 1424707 - RNA, 19 nt, Artificial Sequence
  Description of Artificial Sequence: Synthetic oligonucleotide
augauucucacuucuggaa

SEQ ID NO: 1424708 - RNA, 19 nt, Artificial Sequence
  Description of Artificial Sequence: Synthetic oligonucleotide
aguuguguucacauuuccg

SEQ ID NO: 1424709 - RNA, 19 nt, Artificial Sequence
  Description of Artificial Sequence: Synthetic oligonucleotide
cuugauagauguuggauua

SEQ ID NO: 1424710 - RNA, 19 nt, Artificial Sequence
  Description of Artificial Sequence: Synthetic oligonucleotide
ucacuggucgcguauagua

SEQ ID NO: 1424711 - RNA, 19 nt, Artificial Sequence
  Description of Artificial Sequence: Synthetic oligonucleotide
gggaguaaaucuaaugucc

SEQ ID NO: 1424712 - RNA, 19 nt, Artificial Sequence
  Description of Artificial Sequence: Synthetic oligonucleotide
uggagugccuuaaggaagu

SEQ ID NO: 1424713 - RNA, 19 nt, Artificial Sequence
  Description of Artificial Sequence: Synthetic oligonucleotide
ugacauguaauugcuugca

SEQ ID NO: 1424714 - RNA, 19 nt, Artificial Sequence
  Description of Artificial Sequence: Synthetic oligonucleotide
aaguuaacuugacuucuua

SEQ ID NO: 1424715 - RNA, 19 nt, Artificial Sequence
  Description of Artificial Sequence: Synthetic oligonucleotide
uaagacgcccaacucuugu

SEQ ID NO: 1424716 - RNA, 19 nt, Artificial Sequence
  Description of Artificial Sequence: Synthetic oligonucleotide
agaaggaugcuuauuacaa

SEQ ID NO: 1424717 - RNA, 19 nt, Artificial Sequence
  Description of Artificial Sequence: Synthetic oligonucleotide
uugaacuucaugacaugua

SEQ ID NO: 1424718 - RNA, 19 nt, Artificial Sequence
  Description of Artificial Sequence: Synthetic oligonucleotide
acgcccaacucuugugucc

SEQ ID NO: 1424719 - RNA, 19 nt, Artificial Sequence
  Description of Artificial Sequence: Synthetic oligonucleotide
uuuugguguguaaauccau

SEQ ID NO: 1424720 - RNA, 19 nt, Artificial Sequence
  Description of Artificial Sequence: Synthetic oligonucleotide
uucaagugcuaagacgccc

SEQ ID NO: 1424721 - RNA, 19 nt, Artificial Sequence
  Description of Artificial Sequence: Synthetic oligonucleotide
ugcuuuauuucacuacauu

SEQ ID NO: 1424722 - RNA, 19 nt, Artificial Sequence
  Description of Artificial Sequence: Synthetic oligonucleotide
ucucagggaguaaaucuaa

SEQ ID NO: 1424723 - RNA, 19 nt, Artificial Sequence
  Description of Artificial Sequence: Synthetic oligonucleotide
gguguguaaauccauucac

SEQ ID NO: 1424724 - RNA, 19 nt, Artificial Sequence
  Description of Artificial Sequence: Synthetic oligonucleotide
uccgacagcgcagggaccg

SEQ ID NO: 1424725 - RNA, 19 nt, Artificial Sequence
  Description of Artificial Sequence: Synthetic oligonucleotide
auuacuaguuauccuuaau

SEQ ID NO: 1424726 - RNA, 19 nt, Artificial Sequence
  Description of Artificial Sequence: Synthetic oligonucleotide
ugcuuauuacaaagaugca

SEQ ID NO: 1424727 - RNA, 19 nt, Artificial Sequence
  Description of Artificial Sequence: Synthetic oligonucleotide
auggagcuaggcuguuugc

SEQ ID NO: 1424728 - RNA, 19 nt, Artificial Sequence
  Description of Artificial Sequence: Synthetic oligonucleotide
caaggagugccuuuccuuc

SEQ ID NO: 1424729 - RNA, 19 nt, Artificial Sequence
  Description of Artificial Sequence: Synthetic oligonucleotide
guuauuuguaaguuaacuu

SEQ ID NO: 1424730 - RNA, 19 nt, Artificial Sequence
  Description of Artificial Sequence: Synthetic oligonucleotide
auuuagugcaguaugcuua

SEQ ID NO: 1424731 - RNA, 19 nt, Artificial Sequence
  Description of Artificial Sequence: Synthetic oligonucleotide
gcguauaguagucuucagg

SEQ ID NO: 1424732 - RNA, 19 nt, Artificial Sequence
  Description of Artificial Sequence: Synthetic oligonucleotide
agucacagauacugaaccu

SEQ ID NO: 1424733 - RNA, 19 nt, Artificial Sequence
  Description of Artificial Sequence: Synthetic oligonucleotide
acuggucgcguauaguagu

SEQ ID NO: 1424734 - RNA, 19 nt, Artificial Sequence
  Description of Artificial Sequence: Synthetic oligonucleotide
aaggugcuugugucgagga

SEQ ID NO: 1424735 - RNA, 19 nt, Artificial Sequence
  Description of Artificial Sequence: Synthetic oligonucleotide
cuuuugguguguaaaucca

SEQ ID NO: 1424736 - RNA, 19 nt, Artificial Sequence
  Description of Artificial Sequence: Synthetic oligonucleotide
guaguccuuuacaagagac

SEQ ID NO: 1424737 - RNA, 19 nt, Artificial Sequence
  Description of Artificial Sequence: Synthetic oligonucleotide
agaagggcgauagacacaa

SEQ ID NO: 1424738 - RNA, 19 nt, Artificial Sequence
  Description of Artificial Sequence: Synthetic oligonucleotide
agguugggaauugacauga

SEQ ID NO: 1424739 - RNA, 19 nt, Artificial Sequence
  Description of Artificial Sequence: Synthetic oligonucleotide
uaaugucccucugaggaac

SEQ ID NO: 1424740 - RNA, 19 nt, Artificial Sequence
  Description of Artificial Sequence: Synthetic oligonucleotide
aauagcaggucugcucuga

SEQ ID NO: 1424741 - RNA, 19 nt, Artificial Sequence
  Description of Artificial Sequence: Synthetic oligonucleotide
cauguaauugcuugcaacu

SEQ ID NO: 1424742 - RNA, 19 nt, Artificial Sequence
  Description of Artificial Sequence: Synthetic oligonucleotide
aguccuguccugucaucac

SEQ ID NO: 1424743 - RNA, 19 nt, Artificial Sequence
  Description of Artificial Sequence: Synthetic oligonucleotide
uccguuaaguucacugguc

SEQ ID NO: 1424744 - RNA, 19 nt, Artificial Sequence
  Description of Artificial Sequence: Synthetic oligonucleotide
cugugaagcagagacuggc

SEQ ID NO: 1424745 - RNA, 19 nt, Artificial Sequence
  Description of Artificial Sequence: Synthetic oligonucleotide
acaaagaugcaauggcauu

SEQ ID NO: 1424746 - RNA, 19 nt, Artificial Sequence
  Description of Artificial Sequence: Synthetic oligonucleotide
uguagcgaagguugggaau

SEQ ID NO: 1424747 - RNA, 19 nt, Artificial Sequence
  Description of Artificial Sequence: Synthetic oligonucleotide
ccuuuuacugggauggagc

SEQ ID NO: 1424748 - RNA, 19 nt, Artificial Sequence
  Description of Artificial Sequence: Synthetic oligonucleotide
ugauagauguuggauuaaa

SEQ ID NO: 1424749 - RNA, 19 nt, Artificial Sequence
  Description of Artificial Sequence: Synthetic oligonucleotide
aaguccuguccugucauca

SEQ ID NO: 1424750 - RNA, 19 nt, Artificial Sequence
  Description of Artificial Sequence: Synthetic oligonucleotide
ggauuuguaagagucagga

SEQ ID NO: 1424751 - RNA, 19 nt, Artificial Sequence
  Description of Artificial Sequence: Synthetic oligonucleotide
gucaaaccgugacagguac

SEQ ID NO: 1424752 - RNA, 19 nt, Artificial Sequence
  Description of Artificial Sequence: Synthetic oligonucleotide
cuuaaagucccauguacua

SEQ ID NO: 1424753 - RNA, 19 nt, Artificial Sequence
  Description of Artificial Sequence: Synthetic oligonucleotide
acuuucuuugggaggcacc

SEQ ID NO: 1424754 - RNA, 19 nt, Artificial Sequence
  Description of Artificial Sequence: Synthetic oligonucleotide
cuuauacauaugcucagaa

SEQ ID NO: 1424755 - RNA, 19 nt, Artificial Sequence
  Description of Artificial Sequence: Synthetic oligonucleotide
uccuucauguagcgaaggu

SEQ ID NO: 1424756 - RNA, 19 nt, Artificial Sequence
  Description of Artificial Sequence: Synthetic oligonucleotide
cagagaccaaugcuggggc

SEQ ID NO: 1424757 - RNA, 19 nt, Artificial Sequence
  Description of Artificial Sequence: Synthetic oligonucleotide
accauucuagguucuuuca

SEQ ID NO: 1424758 - RNA, 19 nt, Artificial Sequence
  Description of Artificial Sequence: Synthetic oligonucleotide
ucgcguauaguagucuuca

SEQ ID NO: 1424759 - RNA, 19 nt, Artificial Sequence
  Description of Artificial Sequence: Synthetic oligonucleotide
ccagaucuaauaauacaag

SEQ ID NO: 1424760 - RNA, 19 nt, Artificial Sequence
  Description of Artificial Sequence: Synthetic oligonucleotide
accaccaccuuagcagugc

SEQ ID NO: 1424761 - RNA, 19 nt, Artificial Sequence
  Description of Artificial Sequence: Synthetic oligonucleotide
cucuacuggauuuguaaga

SEQ ID NO: 1424762 - RNA, 19 nt, Artificial Sequence
  Description of Artificial Sequence: Synthetic oligonucleotide
ggaguaaaucuaauguccc

SEQ ID NO: 1424763 - RNA, 19 nt, Artificial Sequence
  Description of Artificial Sequence: Synthetic oligonucleotide
aauucggacagcagcugga

SEQ ID NO: 1424764 - RNA, 19 nt, Artificial Sequence
  Description of Artificial Sequence: Synthetic oligonucleotide
acaagaagggcgauagaca

SEQ ID NO: 1424765 - RNA, 19 nt, Artificial Sequence
  Description of Artificial Sequence: Synthetic oligonucleotide
ugcucugaauuaccauucu

SEQ ID NO: 1424766 - RNA, 19 nt, Artificial Sequence
  Description of Artificial Sequence: Synthetic oligonucleotide
gcuugugucgaggauaaag

SEQ ID NO: 1424767 - RNA, 19 nt, Artificial Sequence
  Description of Artificial Sequence: Synthetic oligonucleotide
uucauaagucaaggagugc

SEQ ID NO: 1424768 - RNA, 19 nt, Artificial Sequence
  Description of Artificial Sequence: Synthetic oligonucleotide
uacauaugcucagaacaaa

SEQ ID NO: 1424769 - RNA, 19 nt, Artificial Sequence
  Description of Artificial Sequence: Synthetic oligonucleotide
cacuggucgcguauaguag

SEQ ID NO: 1424770 - RNA, 19 nt, Artificial Sequence
  Description of Artificial Sequence: Synthetic oligonucleotide
aagucccauguacuacuga

SEQ ID NO: 1424771 - RNA, 19 nt, Artificial Sequence
  Description of Artificial Sequence: Synthetic oligonucleotide
caccagaucuaauaauaca

SEQ ID NO: 1424772 - RNA, 19 nt, Artificial Sequence
  Description of Artificial Sequence: Synthetic oligonucleotide
auacauaugcucagaacaa

SEQ ID NO: 1424773 - RNA, 19 nt, Artificial Sequence
  Description of Artificial Sequence: Synthetic oligonucleotide
aguagucuucagguagagg

SEQ ID NO: 1424774 - RNA, 19 nt, Artificial Sequence
  Description of Artificial Sequence: Synthetic oligonucleotide
ggaauugacaugauucuca

SEQ ID NO: 1424775 - RNA, 19 nt, Artificial Sequence
  Description of Artificial Sequence: Synthetic oligonucleotide
uggauguuaugguauuauu

SEQ ID NO: 1424776 - RNA, 19 nt, Artificial Sequence
  Description of Artificial Sequence: Synthetic oligonucleotide
aaaccaacuugagcuaaau

SEQ ID NO: 1424777 - RNA, 19 nt, Artificial Sequence
  Description of Artificial Sequence: Synthetic oligonucleotide
aaagucccauguacuacug

SEQ ID NO: 1424778 - RNA, 19 nt, Artificial Sequence
  Description of Artificial Sequence: Synthetic oligonucleotide
agaaacuuuugguguguaa

SEQ ID NO: 1424779 - RNA, 19 nt, Artificial Sequence
  Description of Artificial Sequence: Synthetic oligonucleotide
aguuauccuuaauggaauu

SEQ ID NO: 1424780 - RNA, 19 nt, Artificial Sequence
  Description of Artificial Sequence: Synthetic oligonucleotide
accgugacagguacauggc

SEQ ID NO: 1424781 - RNA, 19 nt, Artificial Sequence
  Description of Artificial Sequence: Synthetic oligonucleotide
guaaaucuaaugucccucu

SEQ ID NO: 1424782 - RNA, 19 nt, Artificial Sequence
  Description of Artificial Sequence: Synthetic oligonucleotide
ggaaaucaggcuguaggag

SEQ ID NO: 1424783 - RNA, 19 nt, Artificial Sequence
  Description of Artificial Sequence: Synthetic oligonucleotide
cuuaaggaaguccuguccu

SEQ ID NO: 1424784 - RNA, 19 nt, Artificial Sequence
  Description of Artificial Sequence: Synthetic oligonucleotide
guucacuggucgcguauag

SEQ ID NO: 1424785 - RNA, 19 nt, Artificial Sequence
  Description of Artificial Sequence: Synthetic oligonucleotide
ucauggcaagugaaggguu

SEQ ID NO: 1424786 - RNA, 19 nt, Artificial Sequence
  Description of Artificial Sequence: Synthetic oligonucleotide
ccuccguuaaguucacugg

SEQ ID NO: 1424787 - RNA, 19 nt, Artificial Sequence
  Description of Artificial Sequence: Synthetic oligonucleotide
gcaauugguaggcauucug

SEQ ID NO: 1424788 - RNA, 19 nt, Artificial Sequence
  Description of Artificial Sequence: Synthetic oligonucleotide
uaauacaagaagggcgaua

SEQ ID NO: 1424789 - RNA, 19 nt, Artificial Sequence
  Description of Artificial Sequence: Synthetic oligonucleotide
auaguagucuucagguaga

SEQ ID NO: 1424790 - RNA, 19 nt, Artificial Sequence
  Description of Artificial Sequence: Synthetic oligonucleotide
accguuugaucagaaggug

SEQ ID NO: 1424791 - RNA, 19 nt, Artificial Sequence
  Description of Artificial Sequence: Synthetic oligonucleotide
ccguuaaguucacuggucg

SEQ ID NO: 1424792 - RNA, 19 nt, Artificial Sequence
  Description of Artificial Sequence: Synthetic oligonucleotide
ugcuugcaacucaaauccu

SEQ ID NO: 1424793 - RNA, 19 nt, Artificial Sequence
  Description of Artificial Sequence: Synthetic oligonucleotide
gacauguaauugcuugcaa

SEQ ID NO: 1424794 - RNA, 19 nt, Artificial Sequence
  Description of Artificial Sequence: Synthetic oligonucleotide
cuugcaacucaaauccuua

SEQ ID NO: 1424795 - RNA, 19 nt, Artificial Sequence
  Description of Artificial Sequence: Synthetic oligonucleotide
guguguaaauccauucaca

SEQ ID NO: 1424796 - RNA, 19 nt, Artificial Sequence
  Description of Artificial Sequence: Synthetic oligonucleotide
ccuuaauggaauucggaca

SEQ ID NO: 1424797 - RNA, 19 nt, Artificial Sequence
  Description of Artificial Sequence: Synthetic oligonucleotide
ggcauuuagugcaguaugc

SEQ ID NO: 1424798 - RNA, 19 nt, Artificial Sequence
  Description of Artificial Sequence: Synthetic oligonucleotide
aggguggucaccuccguua

SEQ ID NO: 1424799 - RNA, 19 nt, Artificial Sequence
  Description of Artificial Sequence: Synthetic oligonucleotide
ccuguuauucauaagucaa

SEQ ID NO: 1424800 - RNA, 19 nt, Artificial Sequence
  Description of Artificial Sequence: Synthetic oligonucleotide
uccugucaucacaaaguua

SEQ ID NO: 1424801 - RNA, 19 nt, Artificial Sequence
  Description of Artificial Sequence: Synthetic oligonucleotide
auccuuaauggaauucgga

SEQ ID NO: 1424802 - RNA, 19 nt, Artificial Sequence
  Description of Artificial Sequence: Synthetic oligonucleotide
gaagcagagacuggcugga

SEQ ID NO: 1424803 - RNA, 19 nt, Artificial Sequence
  Description of Artificial Sequence: Synthetic oligonucleotide
auuuccgacagcgcaggga

SEQ ID NO: 1424804 - RNA, 19 nt, Artificial Sequence
  Description of Artificial Sequence: Synthetic oligonucleotide
ugucgaggauaaagcugug

SEQ ID NO: 1424805 - RNA, 19 nt, Artificial Sequence
  Description of Artificial Sequence: Synthetic oligonucleotide
guaauugcuugcaacucaa

SEQ ID NO: 1424806 - RNA, 19 nt, Artificial Sequence
  Description of Artificial Sequence: Synthetic oligonucleotide
accaaaccaacuugagcua

SEQ ID NO: 1424807 - RNA, 19 nt, Artificial Sequence
  Description of Artificial Sequence: Synthetic oligonucleotide
augcuggggcaugaauagc

SEQ ID NO: 1424808 - RNA, 19 nt, Artificial Sequence
  Description of Artificial Sequence: Synthetic oligonucleotide
caccuuagcagugcuguug

SEQ ID NO: 1424809 - RNA, 19 nt, Artificial Sequence
  Description of Artificial Sequence: Synthetic oligonucleotide
ccaaauuguagcuucaagu

SEQ ID NO: 1424810 - RNA, 19 nt, Artificial Sequence
  Description of Artificial Sequence: Synthetic oligonucleotide
uugauagauguuggauuaa

SEQ ID NO: 1424811 - RNA, 19 nt, Artificial Sequence
  Description of Artificial Sequence: Synthetic oligonucleotide
cuuagccuuaaguuuccaa

SEQ ID NO: 1424812 - RNA, 19 nt, Artificial Sequence
  Description of Artificial Sequence: Synthetic oligonucleotide
gcacugaccaguaauaaaa

SEQ ID NO: 1424813 - RNA, 19 nt, Artificial Sequence
  Description of Artificial Sequence: Synthetic oligonucleotide
cuccuucauguagcgaagg

SEQ ID NO: 1424814 - RNA, 19 nt, Artificial Sequence
  Description of Artificial Sequence: Synthetic oligonucleotide
ggauguuaugguauuauua

SEQ ID NO: 1424815 - RNA, 19 nt, Artificial Sequence
  Description of Artificial Sequence: Synthetic oligonucleotide
cuaagacgcccaacucuug

SEQ ID NO: 1424816 - RNA, 19 nt, Artificial Sequence
  Description of Artificial Sequence: Synthetic oligonucleotide
uuaccauucuagguucuuu

SEQ ID NO: 1424817 - RNA, 19 nt, Artificial Sequence
  Description of Artificial Sequence: Synthetic oligonucleotide
caauugguaggcauucugu

SEQ ID NO: 1424818 - RNA, 19 nt, Artificial Sequence
  Description of Artificial Sequence: Synthetic oligonucleotide
gugucgaggauaaagcugu

SEQ ID NO: 1424819 - RNA, 19 nt, Artificial Sequence
  Description of Artificial Sequence: Synthetic oligonucleotide
ccauucuagguucuuucag

SEQ ID NO: 1424820 - RNA, 19 nt, Artificial Sequence
  Description of Artificial Sequence: Synthetic oligonucleotide
aaaccgugacagguacaug

SEQ ID NO: 1424821 - RNA, 19 nt, Artificial Sequence
  Description of Artificial Sequence: Synthetic oligonucleotide
auacaagaagggcgauaga

SEQ ID NO: 1424822 - RNA, 19 nt, Artificial Sequence
  Description of Artificial Sequence: Synthetic oligonucleotide
aagaaacuuuuggugugua

SEQ ID NO: 1424823 - RNA, 19 nt, Artificial Sequence
  Description of Artificial Sequence: Synthetic oligonucleotide
cauguagcgaagguuggga

SEQ ID NO: 1424824 - RNA, 19 nt, Artificial Sequence
  Description of Artificial Sequence: Synthetic oligonucleotide
ccguuugaucagaaggugc

SEQ ID NO: 1424825 - RNA, 19 nt, Artificial Sequence
  Description of Artificial Sequence: Synthetic oligonucleotide
gaccguuugaucagaaggu

SEQ ID NO: 1424826 - RNA, 19 nt, Artificial Sequence
  Description of Artificial Sequence: Synthetic oligonucleotide
accuugaaacagccaacaa

SEQ ID NO: 1424827 - RNA, 19 nt, Artificial Sequence
  Description of Artificial Sequence: Synthetic oligonucleotide
gacgcccaacucuuguguc

SEQ ID NO: 1424828 - RNA, 19 nt, Artificial Sequence
  Description of Artificial Sequence: Synthetic oligonucleotide
cuggucgcguauaguaguc

SEQ ID NO: 1424829 - RNA, 19 nt, Artificial Sequence
  Description of Artificial Sequence: Synthetic oligonucleotide
cuucagguagagguuccac

SEQ ID NO: 1424830 - RNA, 19 nt, Artificial Sequence
  Description of Artificial Sequence: Synthetic oligonucleotide
auaagucaaggagugccuu

SEQ ID NO: 1424831 - RNA, 19 nt, Artificial Sequence
  Description of Artificial Sequence: Synthetic oligonucleotide
guaggaggcgcugcugaag

SEQ ID NO: 1424832 - RNA, 19 nt, Artificial Sequence
  Description of Artificial Sequence: Synthetic oligonucleotide
cugaggaacagccaccccu

SEQ ID NO: 1424833 - RNA, 19 nt, Artificial Sequence
  Description of Artificial Sequence: Synthetic oligonucleotide
uucacuggucgcguauagu

SEQ ID NO: 1424834 - RNA, 19 nt, Artificial Sequence
  Description of Artificial Sequence: Synthetic oligonucleotide
uaaguucacuggucgcgua

SEQ ID NO: 1424835 - RNA, 19 nt, Artificial Sequence
  Description of Artificial Sequence: Synthetic oligonucleotide
cccuguggcagcauuaguc

SEQ ID NO: 1424836 - RNA, 19 nt, Artificial Sequence
  Description of Artificial Sequence: Synthetic oligonucleotide
ccaagaaggaugcuuauua

SEQ ID NO: 1424837 - RNA, 19 nt, Artificial Sequence
  Description of Artificial Sequence: Synthetic oligonucleotide
auaauacaagaagggcgau

SEQ ID NO: 1424838 - RNA, 19 nt, Artificial Sequence
  Description of Artificial Sequence: Synthetic oligonucleotide
ggcaugaauagcaggucug

SEQ ID NO: 1424839 - RNA, 19 nt, Artificial Sequence
  Description of Artificial Sequence: Synthetic oligonucleotide
uggugugcacugaccagua

SEQ ID NO: 1424840 - RNA, 19 nt, Artificial Sequence
  Description of Artificial Sequence: Synthetic oligonucleotide
ggauuaaauucuggcuugc

SEQ ID NO: 1424841 - RNA, 19 nt, Artificial Sequence
  Description of Artificial Sequence: Synthetic oligonucleotide
acagcaauugguaggcauu

SEQ ID NO: 1424842 - RNA, 19 nt, Artificial Sequence
  Description of Artificial Sequence: Synthetic oligonucleotide
auuaagcaauaaggcaaaa

SEQ ID NO: 1424843 - RNA, 19 nt, Artificial Sequence
  Description of Artificial Sequence: Synthetic oligonucleotide
cauuuccgacagcgcaggg

SEQ ID NO: 1424844 - RNA, 19 nt, Artificial Sequence
  Description of Artificial Sequence: Synthetic oligonucleotide
gcaugaauagcaggucugc

SEQ ID NO: 1424845 - RNA, 19 nt, Artificial Sequence
  Description of Artificial Sequence: Synthetic oligonucleotide
caaaguaacuuagccuuaa

SEQ ID NO: 1424846 - RNA, 19 nt, Artificial Sequence
  Description of Artificial Sequence: Synthetic oligonucleotide
uuccgacagcgcagggacc

SEQ ID NO: 1424847 - RNA, 19 nt, Artificial Sequence
  Description of Artificial Sequence: Synthetic oligonucleotide
gauuaaauucuggcuugcu

SEQ ID NO: 1424848 - RNA, 19 nt, Artificial Sequence
  Description of Artificial Sequence: Synthetic oligonucleotide
cgaggauaaagcugugaag

SEQ ID NO: 1424849 - RNA, 19 nt, Artificial Sequence
  Description of Artificial Sequence: Synthetic oligonucleotide
gccaacaacuguuauuugu

SEQ ID NO: 1424850 - RNA, 19 nt, Artificial Sequence
  Description of Artificial Sequence: Synthetic oligonucleotide
ggucagguucucuacugga

SEQ ID NO: 1424851 - RNA, 19 nt, Artificial Sequence
  Description of Artificial Sequence: Synthetic oligonucleotide
gagcuaaauucaccuugaa

SEQ ID NO: 1424852 - RNA, 19 nt, Artificial Sequence
  Description of Artificial Sequence: Synthetic oligonucleotide
agaccaaugcuggggcaug

SEQ ID NO: 1424853 - RNA, 19 nt, Artificial Sequence
  Description of Artificial Sequence: Synthetic oligonucleotide
agcaauugguaggcauucu

SEQ ID NO: 1424854 - RNA, 19 nt, Artificial Sequence
  Description of Artificial Sequence: Synthetic oligonucleotide
caaaccaacuugagcuaaa

SEQ ID NO: 1424855 - RNA, 19 nt, Artificial Sequence
  Description of Artificial Sequence: Synthetic oligonucleotide
gggaccguuugaucagaag

SEQ ID NO: 1424856 - RNA, 19 nt, Artificial Sequence
  Description of Artificial Sequence: Synthetic oligonucleotide
agcaaccaacuggauuuug

SEQ ID NO: 1424857 - RNA, 19 nt, Artificial Sequence
  Description of Artificial Sequence: Synthetic oligonucleotide
ucacuacauuaagcaauaa

SEQ ID NO: 1424858 - RNA, 19 nt, Artificial Sequence
  Description of Artificial Sequence: Synthetic oligonucleotide
uggucgcguauaguagucu

SEQ ID NO: 1424859 - RNA, 19 nt, Artificial Sequence
  Description of Artificial Sequence: Synthetic oligonucleotide
ccaacaacuguuauuugua

SEQ ID NO: 1424860 - RNA, 19 nt, Artificial Sequence
  Description of Artificial Sequence: Synthetic oligonucleotide
ggcaagugaaggguuauaa

SEQ ID NO: 1424861 - RNA, 19 nt, Artificial Sequence
  Description of Artificial Sequence: Synthetic oligonucleotide
gggaauugacaugauucuc

SEQ ID NO: 1424862 - RNA, 19 nt, Artificial Sequence
  Description of Artificial Sequence: Synthetic oligonucleotide
agcgcagggaccguuugau

SEQ ID NO: 1424863 - RNA, 19 nt, Artificial Sequence
  Description of Artificial Sequence: Synthetic oligonucleotide
cuuaaguuguguucacauu

SEQ ID NO: 1424864 - RNA, 19 nt, Artificial Sequence
  Description of Artificial Sequence: Synthetic oligonucleotide
ggguuauaauuacuaguua

SEQ ID NO: 1424865 - RNA, 19 nt, Artificial Sequence
  Description of Artificial Sequence: Synthetic oligonucleotide
auguacuacugaggaaaau

SEQ ID NO: 1424866 - RNA, 19 nt, Artificial Sequence
  Description of Artificial Sequence: Synthetic oligonucleotide
cuccguuaaguucacuggu

SEQ ID NO: 1424867 - RNA, 19 nt, Artificial Sequence
  Description of Artificial Sequence: Synthetic oligonucleotide
ggaauucggacagcagcug

SEQ ID NO: 1424868 - RNA, 19 nt, Artificial Sequence
  Description of Artificial Sequence: Synthetic oligonucleotide
gucgaggauaaagcuguga

SEQ ID NO: 1424869 - RNA, 19 nt, Artificial Sequence
  Description of Artificial Sequence: Synthetic oligonucleotide
gucgcguauaguagucuuc

SEQ ID NO: 1424870 - RNA, 19 nt, Artificial Sequence
  Description of Artificial Sequence: Synthetic oligonucleotide
cuguuugcugagugagcca

SEQ ID NO: 1424871 - RNA, 19 nt, Artificial Sequence
  Description of Artificial Sequence: Synthetic oligonucleotide
caaagaugcaauggcauuu

SEQ ID NO: 1424872 - RNA, 19 nt, Artificial Sequence
  Description of Artificial Sequence: Synthetic oligonucleotide
gcaaccaacuggauuuuga

SEQ ID NO: 1424873 - RNA, 19 nt, Artificial Sequence
  Description of Artificial Sequence: Synthetic oligonucleotide
gcuuauacauaugcucaga

SEQ ID NO: 1424874 - RNA, 19 nt, Artificial Sequence
  Description of Artificial Sequence: Synthetic oligonucleotide
gcugugaagcagagacugg

SEQ ID NO: 1424875 - RNA, 19 nt, Artificial Sequence
  Description of Artificial Sequence: Synthetic oligonucleotide
ggaccaagaaggaugcuua

SEQ ID NO: 1424876 - RNA, 19 nt, Artificial Sequence
  Description of Artificial Sequence: Synthetic oligonucleotide
caccagucacagauacuga

SEQ ID NO: 1424877 - RNA, 19 nt, Artificial Sequence
  Description of Artificial Sequence: Synthetic oligonucleotide
acuuagccuuaaguuucca

SEQ ID NO: 1424878 - RNA, 19 nt, Artificial Sequence
  Description of Artificial Sequence: Synthetic oligonucleotide
aguucacuggucgcguaua

SEQ ID NO: 1424879 - RNA, 19 nt, Artificial Sequence
  Description of Artificial Sequence: Synthetic oligonucleotide
gccuuaaggaaguccuguc

SEQ ID NO: 1424880 - RNA, 19 nt, Artificial Sequence
  Description of Artificial Sequence: Synthetic oligonucleotide
gcgauagacacaaauccua

SEQ ID NO: 1424881 - RNA, 19 nt, Artificial Sequence
  Description of Artificial Sequence: Synthetic oligonucleotide
caaaccgugacagguacau

SEQ ID NO: 1424882 - RNA, 19 nt, Artificial Sequence
  Description of Artificial Sequence: Synthetic oligonucleotide
guagcgaagguugggaauu

SEQ ID NO: 1424883 - RNA, 19 nt, Artificial Sequence
  Description of Artificial Sequence: Synthetic oligonucleotide
cauuagucucuggauguua

SEQ ID NO: 1424884 - RNA, 19 nt, Artificial Sequence
  Description of Artificial Sequence: Synthetic oligonucleotide
gugaaggguuauaauuacu

SEQ ID NO: 1424885 - RNA, 19 nt, Artificial Sequence
  Description of Artificial Sequence: Synthetic oligonucleotide
aagcccuguggcagcauua

SEQ ID NO: 1424886 - RNA, 19 nt, Artificial Sequence
  Description of Artificial Sequence: Synthetic oligonucleotide
agguuccacuucagcgacg

SEQ ID NO: 1424887 - RNA, 19 nt, Artificial Sequence
  Description of Artificial Sequence: Synthetic oligonucleotide
cccaacucuuguguccugg

SEQ ID NO: 1424888 - RNA, 19 nt, Artificial Sequence
  Description of Artificial Sequence: Synthetic oligonucleotide
gcuggaaaucaggcuguag

SEQ ID NO: 1424889 - RNA, 19 nt, Artificial Sequence
  Description of Artificial Sequence: Synthetic oligonucleotide
gagaccaaugcuggggcau

SEQ ID NO: 1424890 - RNA, 19 nt, Artificial Sequence
  Description of Artificial Sequence: Synthetic oligonucleotide
uuagugcaguaugcuuaua

SEQ ID NO: 1424891 - RNA, 19 nt, Artificial Sequence
  Description of Artificial Sequence: Synthetic oligonucleotide
gcagcauuagucucuggau

SEQ ID NO: 1424892 - RNA, 19 nt, Artificial Sequence
  Description of Artificial Sequence: Synthetic oligonucleotide
caacuguuauuuguaaguu

SEQ ID NO: 1424893 - RNA, 19 nt, Artificial Sequence
  Description of Artificial Sequence: Synthetic oligonucleotide
cuggauguuaugguauuau

SEQ ID NO: 1424894 - RNA, 19 nt, Artificial Sequence
  Description of Artificial Sequence: Synthetic oligonucleotide
ggcgauagacacaaauccu

SEQ ID NO: 1424895 - RNA, 19 nt, Artificial Sequence
  Description of Artificial Sequence: Synthetic oligonucleotide
agcgacggccugagcuggc

SEQ ID NO: 1424896 - RNA, 19 nt, Artificial Sequence
  Description of Artificial Sequence: Synthetic oligonucleotide
caagugcuaagacgcccaa

SEQ ID NO: 1424897 - RNA, 19 nt, Artificial Sequence
  Description of Artificial Sequence: Synthetic oligonucleotide
gcucugaauuaccauucua

SEQ ID NO: 1424898 - RNA, 19 nt, Artificial Sequence
  Description of Artificial Sequence: Synthetic oligonucleotide
auccuacuucucuguccaa

SEQ ID NO: 1424899 - RNA, 19 nt, Artificial Sequence
  Description of Artificial Sequence: Synthetic oligonucleotide
gcauuuagugcaguaugcu

SEQ ID NO: 1424900 - RNA, 19 nt, Artificial Sequence
  Description of Artificial Sequence: Synthetic oligonucleotide
cucagggaguaaaucuaau

SEQ ID NO: 1424901 - RNA, 19 nt, Artificial Sequence
  Description of Artificial Sequence: Synthetic oligonucleotide
cguuugaucagaaggugcu

SEQ ID NO: 1424902 - RNA, 19 nt, Artificial Sequence
  Description of Artificial Sequence: Synthetic oligonucleotide
caaauccuuaaagucccau

SEQ ID NO: 1424903 - RNA, 19 nt, Artificial Sequence
  Description of Artificial Sequence: Synthetic oligonucleotide
ggggcaugaauagcagguc

SEQ ID NO: 1424904 - RNA, 19 nt, Artificial Sequence
  Description of Artificial Sequence: Synthetic oligonucleotide
cccugcaccagaucuaaua

SEQ ID NO: 1424905 - RNA, 19 nt, Artificial Sequence
  Description of Artificial Sequence: Synthetic oligonucleotide
ggagugccuuuccuuccca

SEQ ID NO: 1424906 - RNA, 19 nt, Artificial Sequence
  Description of Artificial Sequence: Synthetic oligonucleotide
agggaccaagaaggaugcu

SEQ ID NO: 1424907 - RNA, 19 nt, Artificial Sequence
  Description of Artificial Sequence: Synthetic oligonucleotide
gccugagcuggcucaaucu

SEQ ID NO: 1424908 - RNA, 19 nt, Artificial Sequence
  Description of Artificial Sequence: Synthetic oligonucleotide
cgcguauaguagucuucag

SEQ ID NO: 1424909 - RNA, 19 nt, Artificial Sequence
  Description of Artificial Sequence: Synthetic oligonucleotide
ggcauucuguaguccuuua

SEQ ID NO: 1424910 - RNA, 19 nt, Artificial Sequence
  Description of Artificial Sequence: Synthetic oligonucleotide
gguucucuacuggauuugu

SEQ ID NO: 1424911 - RNA, 19 nt, Artificial Sequence
  Description of Artificial Sequence: Synthetic oligonucleotide
agggaccguuugaucagaa

SEQ ID NO: 1424912 - RNA, 19 nt, Artificial Sequence
  Description of Artificial Sequence: Synthetic oligonucleotide
gggaccaagaaggaugcuu

SEQ ID NO: 1424913 - RNA, 19 nt, Artificial Sequence
  Description of Artificial Sequence: Synthetic oligonucleotide
cagggaccguuugaucaga

SEQ ID NO: 1424914 - RNA, 19 nt, Artificial Sequence
  Description of Artificial Sequence: Synthetic oligonucleotide
ggucgcguauaguagucuu

SEQ ID NO: 1424915 - RNA, 19 nt, Artificial Sequence
  Description of Artificial Sequence: Synthetic oligonucleotide
gcccauuucucagggagua

SEQ ID NO: 1424916 - RNA, 19 nt, Artificial Sequence
  Description of Artificial Sequence: Synthetic oligonucleotide
cuguccaauggaagucaau

SEQ ID NO: 1424917 - RNA, 19 nt, Artificial Sequence
  Description of Artificial Sequence: Synthetic oligonucleotide
ggcuugcuuaaguuguguu

SEQ ID NO: 1424918 - RNA, 19 nt, Artificial Sequence
  Description of Artificial Sequence: Synthetic oligonucleotide
gcuugcaacucaaauccuu

SEQ ID NO: 1424919 - RNA, 19 nt, Artificial Sequence
  Description of Artificial Sequence: Synthetic oligonucleotide
gggaggcaccaccaccuua

SEQ ID NO: 1424920 - RNA, 19 nt, Artificial Sequence
  Description of Artificial Sequence: Synthetic oligonucleotide
gagucacaugggucagguu

SEQ ID NO: 1424921 - RNA, 19 nt, Artificial Sequence
  Description of Artificial Sequence: Synthetic oligonucleotide
cgauagacacaaauccuau

SEQ ID NO: 1424922 - RNA, 19 nt, Artificial Sequence
  Description of Artificial Sequence: Synthetic oligonucleotide
gaagggcgauagacacaaa

SEQ ID NO: 1424923 - RNA, 19 nt, Artificial Sequence
  Description of Artificial Sequence: Synthetic oligonucleotide
gcgcagggaccguuugauc

SEQ ID NO: 1424924 - RNA, 19 nt, Artificial Sequence
  Description of Artificial Sequence: Synthetic oligonucleotide
ggagugccuuaaggaaguc

SEQ ID NO: 1424925 - RNA, 19 nt, Artificial Sequence
  Description of Artificial Sequence: Synthetic oligonucleotide
gcccaacucuuguguccug

SEQ ID NO: 1424926 - RNA, 19 nt, Artificial Sequence
  Description of Artificial Sequence: Synthetic oligonucleotide
ccuucauguagcgaagguu

SEQ ID NO: 1424927 - RNA, 19 nt, Artificial Sequence
  Description of Artificial Sequence: Synthetic oligonucleotide
ccaacucuuguguccuggu

SEQ ID NO: 1424928 - RNA, 19 nt, Artificial Sequence
  Description of Artificial Sequence: Synthetic oligonucleotide
gcuaggcuguuugcugagu

SEQ ID NO: 1424929 - RNA, 19 nt, Artificial Sequence
  Description of Artificial Sequence: Synthetic oligonucleotide
cgacggccugagcuggcuc

SEQ ID NO: 1424930 - RNA, 19 nt, Artificial Sequence
  Description of Artificial Sequence: Synthetic oligonucleotide
ggauggagcuaggcuguuu

SEQ ID NO: 1424931 - RNA, 19 nt, Artificial Sequence
  Description of Artificial Sequence: Synthetic oligonucleotide
ccaccccuuuuacugggau

SEQ ID NO: 1424932 - RNA, 19 nt, Artificial Sequence
  Description of Artificial Sequence: Synthetic oligonucleotide
ccccuuuuacugggaugga

SEQ ID NO: 1424933 - RNA, 19 nt, Artificial Sequence
  Description of Artificial Sequence: Synthetic oligonucleotide
gcgcugcugaagggugguc

SEQ ID NO: 1424934 - RNA, 19 nt, Artificial Sequence
  Description of Artificial Sequence: Synthetic oligonucleotide
caccuccguuaaguucacu

SEQ ID NO: 1424935 - RNA, 19 nt, Artificial Sequence
  Description of Artificial Sequence: Synthetic oligonucleotide
cgcccaacucuuguguccu

SEQ ID NO: 1424936 - RNA, 19 nt, Artificial Sequence
  Description of Artificial Sequence: Synthetic oligonucleotide
ccgacagcgcagggaccgu

SEQ ID NO: 1424937 - RNA, 19 nt, Artificial Sequence
  Description of Artificial Sequence: Synthetic oligonucleotide
cgacagcgcagggaccguu

SEQ ID NO: 1424938 - RNA, 19 nt, Artificial Sequence
  Description of Artificial Sequence: Synthetic oligonucleotide
aauaaaaucaguguucucc

SEQ ID NO: 1424939 - RNA, 19 nt, Artificial Sequence
  Description of Artificial Sequence: Synthetic oligonucleotide
uguaugauagcuuugacag

SEQ ID NO: 1424940 - RNA, 19 nt, Artificial Sequence
  Description of Artificial Sequence: Synthetic oligonucleotide
aacuaagggaucuucaaac

SEQ ID NO: 1424941 - RNA, 19 nt, Artificial Sequence
  Description of Artificial Sequence: Synthetic oligonucleotide
aauuuccccauccagcgcc

SEQ ID NO: 1424942 - RNA, 19 nt, Artificial Sequence
  Description of Artificial Sequence: Synthetic oligonucleotide
uguggaauagcacagaagu

SEQ ID NO: 1424943 - RNA, 19 nt, Artificial Sequence
  Description of Artificial Sequence: Synthetic oligonucleotide
aauagcacagaaguuaaac

SEQ ID NO: 1424944 - RNA, 19 nt, Artificial Sequence
  Description of Artificial Sequence: Synthetic oligonucleotide
uuugaaaaccugcugauug

SEQ ID NO: 1424945 - RNA, 19 nt, Artificial Sequence
  Description of Artificial Sequence: Synthetic oligonucleotide
uguuugauauuucucagcc

SEQ ID NO: 1424946 - RNA, 19 nt, Artificial Sequence
  Description of Artificial Sequence: Synthetic oligonucleotide
cuaaacuccaaggagaucg

SEQ ID NO: 1424947 - RNA, 19 nt, Artificial Sequence
  Description of Artificial Sequence: Synthetic oligonucleotide
uagaagaugggucugagcu

SEQ ID NO: 1424948 - RNA, 19 nt, Artificial Sequence
  Description of Artificial Sequence: Synthetic oligonucleotide
uugguuaugaaauuccgcc

SEQ ID NO: 1424949 - RNA, 19 nt, Artificial Sequence
  Description of Artificial Sequence: Synthetic oligonucleotide
ugguuuugcuagaagaugg

SEQ ID NO: 1424950 - RNA, 19 nt, Artificial Sequence
  Description of Artificial Sequence: Synthetic oligonucleotide
aauagacccauugaauugg

SEQ ID NO: 1424951 - RNA, 19 nt, Artificial Sequence
  Description of Artificial Sequence: Synthetic oligonucleotide
aauuggcacacucuguguc

SEQ ID NO: 1424952 - RNA, 19 nt, Artificial Sequence
  Description of Artificial Sequence: Synthetic oligonucleotide
ugauuguuguaacaggcag

SEQ ID NO: 1424953 - RNA, 19 nt, Artificial Sequence
  Description of Artificial Sequence: Synthetic oligonucleotide
aacauaucugccccacacc

SEQ ID NO: 1424954 - RNA, 19 nt, Artificial Sequence
  Description of Artificial Sequence: Synthetic oligonucleotide
aaauccaccuggaagaaag

SEQ ID NO: 1424955 - RNA, 19 nt, Artificial Sequence
  Description of Artificial Sequence: Synthetic oligonucleotide
ucgagaacagacgagaaag

SEQ ID NO: 1424956 - RNA, 19 nt, Artificial Sequence
  Description of Artificial Sequence: Synthetic oligonucleotide
agacccauugaauuggcac

SEQ ID NO: 1424957 - RNA, 19 nt, Artificial Sequence
  Description of Artificial Sequence: Synthetic oligonucleotide
guagugacaauacuugucc

SEQ ID NO: 1424958 - RNA, 19 nt, Artificial Sequence
  Description of Artificial Sequence: Synthetic oligonucleotide
aaaaccugcugauuguugu

SEQ ID NO: 1424959 - RNA, 19 nt, Artificial Sequence
  Description of Artificial Sequence: Synthetic oligonucleotide
aaaguugcgcagcaucggg

SEQ ID NO: 1424960 - RNA, 19 nt, Artificial Sequence
  Description of Artificial Sequence: Synthetic oligonucleotide
uuaccuguggaauagcaca

SEQ ID NO: 1424961 - RNA, 19 nt, Artificial Sequence
  Description of Artificial Sequence: Synthetic oligonucleotide
ugauauuuguuuucugcag

SEQ ID NO: 1424962 - RNA, 19 nt, Artificial Sequence
  Description of Artificial Sequence: Synthetic oligonucleotide
auagaggaaagugugaaag

SEQ ID NO: 1424963 - RNA, 19 nt, Artificial Sequence
  Description of Artificial Sequence: Synthetic oligonucleotide
uaugauagcuuugacagcu

SEQ ID NO: 1424964 - RNA, 19 nt, Artificial Sequence
  Description of Artificial Sequence: Synthetic oligonucleotide
uucuaaaggucccacacac

SEQ ID NO: 1424965 - RNA, 19 nt, Artificial Sequence
  Description of Artificial Sequence: Synthetic oligonucleotide
guuaugaguucauucaagc

SEQ ID NO: 1424966 - RNA, 19 nt, Artificial Sequence
  Description of Artificial Sequence: Synthetic oligonucleotide
agguaaaaccauuucaugu

SEQ ID NO: 1424967 - RNA, 19 nt, Artificial Sequence
  Description of Artificial Sequence: Synthetic oligonucleotide
gaaagugugaaaguugcgc

SEQ ID NO: 1424968 - RNA, 19 nt, Artificial Sequence
  Description of Artificial Sequence: Synthetic oligonucleotide
gaauagacccauugaauug

SEQ ID NO: 1424969 - RNA, 19 nt, Artificial Sequence
  Description of Artificial Sequence: Synthetic oligonucleotide
uuaaaguagggaaaacgaa

SEQ ID NO: 1424970 - RNA, 19 nt, Artificial Sequence
  Description of Artificial Sequence: Synthetic oligonucleotide
cuuccagccaaauaaaauc

SEQ ID NO: 1424971 - RNA, 19 nt, Artificial Sequence
  Description of Artificial Sequence: Synthetic oligonucleotide
auaaucacgaaugauauuu

SEQ ID NO: 1424972 - RNA, 19 nt, Artificial Sequence
  Description of Artificial Sequence: Synthetic oligonucleotide
aggaaagugugaaaguugc

SEQ ID NO: 1424973 - RNA, 19 nt, Artificial Sequence
  Description of Artificial Sequence: Synthetic oligonucleotide
gagagauuaaaguagggaa

SEQ ID NO: 1424974 - RNA, 19 nt, Artificial Sequence
  Description of Artificial Sequence: Synthetic oligonucleotide
gauuucuaaacuccaagga

SEQ ID NO: 1424975 - RNA, 19 nt, Artificial Sequence
  Description of Artificial Sequence: Synthetic oligonucleotide
aacucugaggucgagaaca

SEQ ID NO: 1424976 - RNA, 19 nt, Artificial Sequence
  Description of Artificial Sequence: Synthetic oligonucleotide
gagaugaguugacaguugg

SEQ ID NO: 1424977 - RNA, 19 nt, Artificial Sequence
  Description of Artificial Sequence: Synthetic oligonucleotide
ugguuaugaaauuccgccg

SEQ ID NO: 1424978 - RNA, 19 nt, Artificial Sequence
  Description of Artificial Sequence: Synthetic oligonucleotide
cauuucaugugaacguugg

SEQ ID NO: 1424979 - RNA, 19 nt, Artificial Sequence
  Description of Artificial Sequence: Synthetic oligonucleotide
acaauacuugucccagucc

SEQ ID NO: 1424980 - RNA, 19 nt, Artificial Sequence
  Description of Artificial Sequence: Synthetic oligonucleotide
ugauagcuuugacagcugg

SEQ ID NO: 1424981 - RNA, 19 nt, Artificial Sequence
  Description of Artificial Sequence: Synthetic oligonucleotide
auuaaaguagggaaaacga

SEQ ID NO: 1424982 - RNA, 19 nt, Artificial Sequence
  Description of Artificial Sequence: Synthetic oligonucleotide
gaaguuaaacacacuuugg

SEQ ID NO: 1424983 - RNA, 19 nt, Artificial Sequence
  Description of Artificial Sequence: Synthetic oligonucleotide
aaucacgaaugauauuugu

SEQ ID NO: 1424984 - RNA, 19 nt, Artificial Sequence
  Description of Artificial Sequence: Synthetic oligonucleotide
ugcaggaauagacccauug

SEQ ID NO: 1424985 - RNA, 19 nt, Artificial Sequence
  Description of Artificial Sequence: Synthetic oligonucleotide
agggaagucaaaauccacc

SEQ ID NO: 1424986 - RNA, 19 nt, Artificial Sequence
  Description of Artificial Sequence: Synthetic oligonucleotide
acgaaugauauuuguuuuc

SEQ ID NO: 1424987 - RNA, 19 nt, Artificial Sequence
  Description of Artificial Sequence: Synthetic oligonucleotide
ucacgaaugauauuuguuu

SEQ ID NO: 1424988 - RNA, 19 nt, Artificial Sequence
  Description of Artificial Sequence: Synthetic oligonucleotide
auggcgaauuuccccaucc

SEQ ID NO: 1424989 - RNA, 19 nt, Artificial Sequence
  Description of Artificial Sequence: Synthetic oligonucleotide
ugagagauuaaaguaggga

SEQ ID NO: 1424990 - RNA, 19 nt, Artificial Sequence
  Description of Artificial Sequence: Synthetic oligonucleotide
auaaccgcggcgaagcugc

SEQ ID NO: 1424991 - RNA, 19 nt, Artificial Sequence
  Description of Artificial Sequence: Synthetic oligonucleotide
aauuccuaccaguccagca

SEQ ID NO: 1424992 - RNA, 19 nt, Artificial Sequence
  Description of Artificial Sequence: Synthetic oligonucleotide
auuucaugugaacguuggc

SEQ ID NO: 1424993 - RNA, 19 nt, Artificial Sequence
  Description of Artificial Sequence: Synthetic oligonucleotide
uccaucaugaggguaacug

SEQ ID NO: 1424994 - RNA, 19 nt, Artificial Sequence
  Description of Artificial Sequence: Synthetic oligonucleotide
uguagcgauggccauuacc

SEQ ID NO: 1424995 - RNA, 19 nt, Artificial Sequence
  Description of Artificial Sequence: Synthetic oligonucleotide
gguuaugaaauuccgccgg

SEQ ID NO: 1424996 - RNA, 19 nt, Artificial Sequence
  Description of Artificial Sequence: Synthetic oligonucleotide
ucagauacuuguagcaggu

SEQ ID NO: 1424997 - RNA, 19 nt, Artificial Sequence
  Description of Artificial Sequence: Synthetic oligonucleotide
gaggguaacugcuugcccc

SEQ ID NO: 1424998 - RNA, 19 nt, Artificial Sequence
  Description of Artificial Sequence: Synthetic oligonucleotide
uaugaaauuccgccggccu

SEQ ID NO: 1424999 - RNA, 19 nt, Artificial Sequence
  Description of Artificial Sequence: Synthetic oligonucleotide
aaaacgaaagggaagucaa

SEQ ID NO: 1425000 - RNA, 19 nt, Artificial Sequence
  Description of Artificial Sequence: Synthetic oligonucleotide
ucagcaaucacuguuugau

SEQ ID NO: 1425001 - RNA, 19 nt, Artificial Sequence
  Description of Artificial Sequence: Synthetic oligonucleotide
agugugaaaguugcgcagc

SEQ ID NO: 1425002 - RNA, 19 nt, Artificial Sequence
  Description of Artificial Sequence: Synthetic oligonucleotide
uggaauagcacagaaguua

SEQ ID NO: 1425003 - RNA, 19 nt, Artificial Sequence
  Description of Artificial Sequence: Synthetic oligonucleotide
guugguuaugaguucauuc

SEQ ID NO: 1425004 - RNA, 19 nt, Artificial Sequence
  Description of Artificial Sequence: Synthetic oligonucleotide
agcaaucacuguuugauau

SEQ ID NO: 1425005 - RNA, 19 nt, Artificial Sequence
  Description of Artificial Sequence: Synthetic oligonucleotide
uuucuaaaggucccacaca

SEQ ID NO: 1425006 - RNA, 19 nt, Artificial Sequence
  Description of Artificial Sequence: Synthetic oligonucleotide
agugacaauacuuguccca

SEQ ID NO: 1425007 - RNA, 19 nt, Artificial Sequence
  Description of Artificial Sequence: Synthetic oligonucleotide
gaugaguugacaguuggga

SEQ ID NO: 1425008 - RNA, 19 nt, Artificial Sequence
  Description of Artificial Sequence: Synthetic oligonucleotide
ugcacggccacaucuaugu

SEQ ID NO: 1425009 - RNA, 19 nt, Artificial Sequence
  Description of Artificial Sequence: Synthetic oligonucleotide
aacgaaagggaagucaaaa

SEQ ID NO: 1425010 - RNA, 19 nt, Artificial Sequence
  Description of Artificial Sequence: Synthetic oligonucleotide
uaccccuuugaaaaccugc

SEQ ID NO: 1425011 - RNA, 19 nt, Artificial Sequence
  Description of Artificial Sequence: Synthetic oligonucleotide
ucaugaggguaacugcuug

SEQ ID NO: 1425012 - RNA, 19 nt, Artificial Sequence
  Description of Artificial Sequence: Synthetic oligonucleotide
agacgagaaaggccaauuc

SEQ ID NO: 1425013 - RNA, 19 nt, Artificial Sequence
  Description of Artificial Sequence: Synthetic oligonucleotide
aaaaggcagagggaccacg

SEQ ID NO: 1425014 - RNA, 19 nt, Artificial Sequence
  Description of Artificial Sequence: Synthetic oligonucleotide
uccgugaaccgccacucgg

SEQ ID NO: 1425015 - RNA, 19 nt, Artificial Sequence
  Description of Artificial Sequence: Synthetic oligonucleotide
gacaauacuugucccaguc

SEQ ID NO: 1425016 - RNA, 19 nt, Artificial Sequence
  Description of Artificial Sequence: Synthetic oligonucleotide
acuaagggaucuucaaacu

SEQ ID NO: 1425017 - RNA, 19 nt, Artificial Sequence
  Description of Artificial Sequence: Synthetic oligonucleotide
ucggagaaccagauaaaac

SEQ ID NO: 1425018 - RNA, 19 nt, Artificial Sequence
  Description of Artificial Sequence: Synthetic oligonucleotide
augaaauuccgccggccuc

SEQ ID NO: 1425019 - RNA, 19 nt, Artificial Sequence
  Description of Artificial Sequence: Synthetic oligonucleotide
cagauaaucacgaaugaua

SEQ ID NO: 1425020 - RNA, 19 nt, Artificial Sequence
  Description of Artificial Sequence: Synthetic oligonucleotide
aucaguguucuccugucug

SEQ ID NO: 1425021 - RNA, 19 nt, Artificial Sequence
  Description of Artificial Sequence: Synthetic oligonucleotide
auuaccuguggaauagcac

SEQ ID NO: 1425022 - RNA, 19 nt, Artificial Sequence
  Description of Artificial Sequence: Synthetic oligonucleotide
uugguuuugcuagaagaug

SEQ ID NO: 1425023 - RNA, 19 nt, Artificial Sequence
  Description of Artificial Sequence: Synthetic oligonucleotide
agauaaucacgaaugauau

SEQ ID NO: 1425024 - RNA, 19 nt, Artificial Sequence
  Description of Artificial Sequence: Synthetic oligonucleotide
auggcuacaaaaggcagag

SEQ ID NO: 1425025 - RNA, 19 nt, Artificial Sequence
  Description of Artificial Sequence: Synthetic oligonucleotide
auucagauacuuguagcag

SEQ ID NO: 1425026 - RNA, 19 nt, Artificial Sequence
  Description of Artificial Sequence: Synthetic oligonucleotide
agauuaaaguagggaaaac

SEQ ID NO: 1425027 - RNA, 19 nt, Artificial Sequence
  Description of Artificial Sequence: Synthetic oligonucleotide
acugguguaugauagcuuu

SEQ ID NO: 1425028 - RNA, 19 nt, Artificial Sequence
  Description of Artificial Sequence: Synthetic oligonucleotide
auguacugguguaugauag

SEQ ID NO: 1425029 - RNA, 19 nt, Artificial Sequence
  Description of Artificial Sequence: Synthetic oligonucleotide
aacguuggcuuccagccaa

SEQ ID NO: 1425030 - RNA, 19 nt, Artificial Sequence
  Description of Artificial Sequence: Synthetic oligonucleotide
ugugugcucuccgugaacc

SEQ ID NO: 1425031 - RNA, 19 nt, Artificial Sequence
  Description of Artificial Sequence: Synthetic oligonucleotide
uggauaaccgcggcgaagc

SEQ ID NO: 1425032 - RNA, 19 nt, Artificial Sequence
  Description of Artificial Sequence: Synthetic oligonucleotide
auauggugcaggguguugg

SEQ ID NO: 1425033 - RNA, 19 nt, Artificial Sequence
  Description of Artificial Sequence: Synthetic oligonucleotide
uaaaaccauuucaugugaa

SEQ ID NO: 1425034 - RNA, 19 nt, Artificial Sequence
  Description of Artificial Sequence: Synthetic oligonucleotide
cugaggucgagaacagacg

SEQ ID NO: 1425035 - RNA, 19 nt, Artificial Sequence
  Description of Artificial Sequence: Synthetic oligonucleotide
ugaaauuccgccggccucc

SEQ ID NO: 1425036 - RNA, 19 nt, Artificial Sequence
  Description of Artificial Sequence: Synthetic oligonucleotide
cugagagauuaaaguaggg

SEQ ID NO: 1425037 - RNA, 19 nt, Artificial Sequence
  Description of Artificial Sequence: Synthetic oligonucleotide
guguaugauagcuuugaca

SEQ ID NO: 1425038 - RNA, 19 nt, Artificial Sequence
  Description of Artificial Sequence: Synthetic oligonucleotide
aauggcuacaaaaggcaga

SEQ ID NO: 1425039 - RNA, 19 nt, Artificial Sequence
  Description of Artificial Sequence: Synthetic oligonucleotide
gaaaguugcgcagcaucgg

SEQ ID NO: 1425040 - RNA, 19 nt, Artificial Sequence
  Description of Artificial Sequence: Synthetic oligonucleotide
caauggcuacaaaaggcag

SEQ ID NO: 1425041 - RNA, 19 nt, Artificial Sequence
  Description of Artificial Sequence: Synthetic oligonucleotide
uggcuuagcaaagucuucc

SEQ ID NO: 1425042 - RNA, 19 nt, Artificial Sequence
  Description of Artificial Sequence: Synthetic oligonucleotide
agcuuugacagcuggcaug

SEQ ID NO: 1425043 - RNA, 19 nt, Artificial Sequence
  Description of Artificial Sequence: Synthetic oligonucleotide
cuuccgaaucuucacuacc

SEQ ID NO: 1425044 - RNA, 19 nt, Artificial Sequence
  Description of Artificial Sequence: Synthetic oligonucleotide
gacccauugaauuggcaca

SEQ ID NO: 1425045 - RNA, 19 nt, Artificial Sequence
  Description of Artificial Sequence: Synthetic oligonucleotide
aaggagaucguggggaagu

SEQ ID NO: 1425046 - RNA, 19 nt, Artificial Sequence
  Description of Artificial Sequence: Synthetic oligonucleotide
aacugcuugccccuuccga

SEQ ID NO: 1425047 - RNA, 19 nt, Artificial Sequence
  Description of Artificial Sequence: Synthetic oligonucleotide
uagugacaauacuuguccc

SEQ ID NO: 1425048 - RNA, 19 nt, Artificial Sequence
  Description of Artificial Sequence: Synthetic oligonucleotide
ugguguaugauagcuuuga

SEQ ID NO: 1425049 - RNA, 19 nt, Artificial Sequence
  Description of Artificial Sequence: Synthetic oligonucleotide
uugauauuucucagccaga

SEQ ID NO: 1425050 - RNA, 19 nt, Artificial Sequence
  Description of Artificial Sequence: Synthetic oligonucleotide
uggccuaggcacuucacga

SEQ ID NO: 1425051 - RNA, 19 nt, Artificial Sequence
  Description of Artificial Sequence: Synthetic oligonucleotide
cauucaagcacugcacggc

SEQ ID NO: 1425052 - RNA, 19 nt, Artificial Sequence
  Description of Artificial Sequence: Synthetic oligonucleotide
guuaugaaauuccgccggc

SEQ ID NO: 1425053 - RNA, 19 nt, Artificial Sequence
  Description of Artificial Sequence: Synthetic oligonucleotide
uuaacauaucugccccaca

SEQ ID NO: 1425054 - RNA, 19 nt, Artificial Sequence
  Description of Artificial Sequence: Synthetic oligonucleotide
ugaggguaacugcuugccc

SEQ ID NO: 1425055 - RNA, 19 nt, Artificial Sequence
  Description of Artificial Sequence: Synthetic oligonucleotide
acacacuuugguuccggag

SEQ ID NO: 1425056 - RNA, 19 nt, Artificial Sequence
  Description of Artificial Sequence: Synthetic oligonucleotide
uuaugaaauuccgccggcc

SEQ ID NO: 1425057 - RNA, 19 nt, Artificial Sequence
  Description of Artificial Sequence: Synthetic oligonucleotide
gugacaauacuugucccag

SEQ ID NO: 1425058 - RNA, 19 nt, Artificial Sequence
  Description of Artificial Sequence: Synthetic oligonucleotide
ugacaaacgacagguaaau

SEQ ID NO: 1425059 - RNA, 19 nt, Artificial Sequence
  Description of Artificial Sequence: Synthetic oligonucleotide
caugaggguaacugcuugc

SEQ ID NO: 1425060 - RNA, 19 nt, Artificial Sequence
  Description of Artificial Sequence: Synthetic oligonucleotide
aauuccgccggccucccau

SEQ ID NO: 1425061 - RNA, 19 nt, Artificial Sequence
  Description of Artificial Sequence: Synthetic oligonucleotide
cucagccagauuucuaaac

SEQ ID NO: 1425062 - RNA, 19 nt, Artificial Sequence
  Description of Artificial Sequence: Synthetic oligonucleotide
ucuuaacauaucugcccca

SEQ ID NO: 1425063 - RNA, 19 nt, Artificial Sequence
  Description of Artificial Sequence: Synthetic oligonucleotide
gaggucacaugcuugucca

SEQ ID NO: 1425064 - RNA, 19 nt, Artificial Sequence
  Description of Artificial Sequence: Synthetic oligonucleotide
aggucccacacacaguucu

SEQ ID NO: 1425065 - RNA, 19 nt, Artificial Sequence
  Description of Artificial Sequence: Synthetic oligonucleotide
cuagaagaugggucugagc

SEQ ID NO: 1425066 - RNA, 19 nt, Artificial Sequence
  Description of Artificial Sequence: Synthetic oligonucleotide
agcgauggccauuaccugu

SEQ ID NO: 1425067 - RNA, 19 nt, Artificial Sequence
  Description of Artificial Sequence: Synthetic oligonucleotide
guggccuaggcacuucacg

SEQ ID NO: 1425068 - RNA, 19 nt, Artificial Sequence
  Description of Artificial Sequence: Synthetic oligonucleotide
uccuaccaguccagcaacg

SEQ ID NO: 1425069 - RNA, 19 nt, Artificial Sequence
  Description of Artificial Sequence: Synthetic oligonucleotide
cuuaacauaucugccccac

SEQ ID NO: 1425070 - RNA, 19 nt, Artificial Sequence
  Description of Artificial Sequence: Synthetic oligonucleotide
accgcggcgaagcugcgac

SEQ ID NO: 1425071 - RNA, 19 nt, Artificial Sequence
  Description of Artificial Sequence: Synthetic oligonucleotide
acgaaagggaagucaaaau

SEQ ID NO: 1425072 - RNA, 19 nt, Artificial Sequence
  Description of Artificial Sequence: Synthetic oligonucleotide
agggaaaacgaaagggaag

SEQ ID NO: 1425073 - RNA, 19 nt, Artificial Sequence
  Description of Artificial Sequence: Synthetic oligonucleotide
aauccaccuggaagaaagg

SEQ ID NO: 1425074 - RNA, 19 nt, Artificial Sequence
  Description of Artificial Sequence: Synthetic oligonucleotide
guagaacuccucagggugg

SEQ ID NO: 1425075 - RNA, 19 nt, Artificial Sequence
  Description of Artificial Sequence: Synthetic oligonucleotide
guaugauagcuuugacagc

SEQ ID NO: 1425076 - RNA, 19 nt, Artificial Sequence
  Description of Artificial Sequence: Synthetic oligonucleotide
uaacugcuugccccuuccg

SEQ ID NO: 1425077 - RNA, 19 nt, Artificial Sequence
  Description of Artificial Sequence: Synthetic oligonucleotide
auagacccauugaauuggc

SEQ ID NO: 1425078 - RNA, 19 nt, Artificial Sequence
  Description of Artificial Sequence: Synthetic oligonucleotide
acgagaaaggccaauuccu

SEQ ID NO: 1425079 - RNA, 19 nt, Artificial Sequence
  Description of Artificial Sequence: Synthetic oligonucleotide
gaugaaucucuucuaugua

SEQ ID NO: 1425080 - RNA, 19 nt, Artificial Sequence
  Description of Artificial Sequence: Synthetic oligonucleotide
acguagugacaauacuugu

SEQ ID NO: 1425081 - RNA, 19 nt, Artificial Sequence
  Description of Artificial Sequence: Synthetic oligonucleotide
gcugauuguuguaacaggc

SEQ ID NO: 1425082 - RNA, 19 nt, Artificial Sequence
  Description of Artificial Sequence: Synthetic oligonucleotide
ucccaugcggaaucgcagc

SEQ ID NO: 1425083 - RNA, 19 nt, Artificial Sequence
  Description of Artificial Sequence: Synthetic oligonucleotide
gagaaccagauaaaacaca

SEQ ID NO: 1425084 - RNA, 19 nt, Artificial Sequence
  Description of Artificial Sequence: Synthetic oligonucleotide
guagcgauggccauuaccu

SEQ ID NO: 1425085 - RNA, 19 nt, Artificial Sequence
  Description of Artificial Sequence: Synthetic oligonucleotide
cauuaccuguggaauagca

SEQ ID NO: 1425086 - RNA, 19 nt, Artificial Sequence
  Description of Artificial Sequence: Synthetic oligonucleotide
gcugcgacuggucugauuc

SEQ ID NO: 1425087 - RNA, 19 nt, Artificial Sequence
  Description of Artificial Sequence: Synthetic oligonucleotide
uucaagcacugcacggcca

SEQ ID NO: 1425088 - RNA, 19 nt, Artificial Sequence
  Description of Artificial Sequence: Synthetic oligonucleotide
acaguucucugagagauua

SEQ ID NO: 1425089 - RNA, 19 nt, Artificial Sequence
  Description of Artificial Sequence: Synthetic oligonucleotide
uuugguuccggagccuuga

SEQ ID NO: 1425090 - RNA, 19 nt, Artificial Sequence
  Description of Artificial Sequence: Synthetic oligonucleotide
gguuaugaguucauucaag

SEQ ID NO: 1425091 - RNA, 19 nt, Artificial Sequence
  Description of Artificial Sequence: Synthetic oligonucleotide
acugcuugccccuuccgaa

SEQ ID NO: 1425092 - RNA, 19 nt, Artificial Sequence
  Description of Artificial Sequence: Synthetic oligonucleotide
cugauuguuguaacaggca

SEQ ID NO: 1425093 - RNA, 19 nt, Artificial Sequence
  Description of Artificial Sequence: Synthetic oligonucleotide
agaugaguugacaguuggg

SEQ ID NO: 1425094 - RNA, 19 nt, Artificial Sequence
  Description of Artificial Sequence: Synthetic oligonucleotide
ggagaaccagauaaaacac

SEQ ID NO: 1425095 - RNA, 19 nt, Artificial Sequence
  Description of Artificial Sequence: Synthetic oligonucleotide
gggaccacggcccaacaag

SEQ ID NO: 1425096 - RNA, 19 nt, Artificial Sequence
  Description of Artificial Sequence: Synthetic oligonucleotide
aggucgagaacagacgaga

SEQ ID NO: 1425097 - RNA, 19 nt, Artificial Sequence
  Description of Artificial Sequence: Synthetic oligonucleotide
ugcgacuggucugauucag

SEQ ID NO: 1425098 - RNA, 19 nt, Artificial Sequence
  Description of Artificial Sequence: Synthetic oligonucleotide
cucccaugcggaaucgcag

SEQ ID NO: 1425099 - RNA, 19 nt, Artificial Sequence
  Description of Artificial Sequence: Synthetic oligonucleotide
ggcgaauuuccccauccag

SEQ ID NO: 1425100 - RNA, 19 nt, Artificial Sequence
  Description of Artificial Sequence: Synthetic oligonucleotide
ugugaacguuggcuuccag

SEQ ID NO: 1425101 - RNA, 19 nt, Artificial Sequence
  Description of Artificial Sequence: Synthetic oligonucleotide
ugcugagcgaguccugguc

SEQ ID NO: 1425102 - RNA, 19 nt, Artificial Sequence
  Description of Artificial Sequence: Synthetic oligonucleotide
cacucggguucauagagga

SEQ ID NO: 1425103 - RNA, 19 nt, Artificial Sequence
  Description of Artificial Sequence: Synthetic oligonucleotide
aaccugcugauuguuguaa

SEQ ID NO: 1425104 - RNA, 19 nt, Artificial Sequence
  Description of Artificial Sequence: Synthetic oligonucleotide
cacuaccccuuugaaaacc

SEQ ID NO: 1425105 - RNA, 19 nt, Artificial Sequence
  Description of Artificial Sequence: Synthetic oligonucleotide
gccacucggguucauagag

SEQ ID NO: 1425106 - RNA, 19 nt, Artificial Sequence
  Description of Artificial Sequence: Synthetic oligonucleotide
ugacaauacuugucccagu

SEQ ID NO: 1425107 - RNA, 19 nt, Artificial Sequence
  Description of Artificial Sequence: Synthetic oligonucleotide
aggguaacugcuugccccu

SEQ ID NO: 1425108 - RNA, 19 nt, Artificial Sequence
  Description of Artificial Sequence: Synthetic oligonucleotide
ucucagccagauuucuaaa

SEQ ID NO: 1425109 - RNA, 19 nt, Artificial Sequence
  Description of Artificial Sequence: Synthetic oligonucleotide
gguuuugcuagaagauggg

SEQ ID NO: 1425110 - RNA, 19 nt, Artificial Sequence
  Description of Artificial Sequence: Synthetic oligonucleotide
ucacuaccccuuugaaaac

SEQ ID NO: 1425111 - RNA, 19 nt, Artificial Sequence
  Description of Artificial Sequence: Synthetic oligonucleotide
uagcgauggccauuaccug

SEQ ID NO: 1425112 - RNA, 19 nt, Artificial Sequence
  Description of Artificial Sequence: Synthetic oligonucleotide
ccaucaugaggguaacugc

SEQ ID NO: 1425113 - RNA, 19 nt, Artificial Sequence
  Description of Artificial Sequence: Synthetic oligonucleotide
cggagaaccagauaaaaca

SEQ ID NO: 1425114 - RNA, 19 nt, Artificial Sequence
  Description of Artificial Sequence: Synthetic oligonucleotide
uggcgaauuuccccaucca

SEQ ID NO: 1425115 - RNA, 19 nt, Artificial Sequence
  Description of Artificial Sequence: Synthetic oligonucleotide
cuaggcacuucacgaacuc

SEQ ID NO: 1425116 - RNA, 19 nt, Artificial Sequence
  Description of Artificial Sequence: Synthetic oligonucleotide
cagcgccuggauaaccgcg

SEQ ID NO: 1425117 - RNA, 19 nt, Artificial Sequence
  Description of Artificial Sequence: Synthetic oligonucleotide
cugguguaugauagcuuug

SEQ ID NO: 1425118 - RNA, 19 nt, Artificial Sequence
  Description of Artificial Sequence: Synthetic oligonucleotide
gguccuccagauaaucacg

SEQ ID NO: 1425119 - RNA, 19 nt, Artificial Sequence
  Description of Artificial Sequence: Synthetic oligonucleotide
guuccggagccuugacagg

SEQ ID NO: 1425120 - RNA, 19 nt, Artificial Sequence
  Description of Artificial Sequence: Synthetic oligonucleotide
uggucugauucagauacuu

SEQ ID NO: 1425121 - RNA, 19 nt, Artificial Sequence
  Description of Artificial Sequence: Synthetic oligonucleotide
caucaugaggguaacugcu

SEQ ID NO: 1425122 - RNA, 19 nt, Artificial Sequence
  Description of Artificial Sequence: Synthetic oligonucleotide
aaacgaaagggaagucaaa

SEQ ID NO: 1425123 - RNA, 19 nt, Artificial Sequence
  Description of Artificial Sequence: Synthetic oligonucleotide
gauccggugaugaaucucu

SEQ ID NO: 1425124 - RNA, 19 nt, Artificial Sequence
  Description of Artificial Sequence: Synthetic oligonucleotide
uggccauuaccuguggaau

SEQ ID NO: 1425125 - RNA, 19 nt, Artificial Sequence
  Description of Artificial Sequence: Synthetic oligonucleotide
aucacgaaugauauuuguu

SEQ ID NO: 1425126 - RNA, 19 nt, Artificial Sequence
  Description of Artificial Sequence: Synthetic oligonucleotide
uucgggagaugaguugaca

SEQ ID NO: 1425127 - RNA, 19 nt, Artificial Sequence
  Description of Artificial Sequence: Synthetic oligonucleotide
caacuaagggaucuucaaa

SEQ ID NO: 1425128 - RNA, 19 nt, Artificial Sequence
  Description of Artificial Sequence: Synthetic oligonucleotide
ucuccgugaaccgccacuc

SEQ ID NO: 1425129 - RNA, 19 nt, Artificial Sequence
  Description of Artificial Sequence: Synthetic oligonucleotide
cauagaggaaagugugaaa

SEQ ID NO: 1425130 - RNA, 19 nt, Artificial Sequence
  Description of Artificial Sequence: Synthetic oligonucleotide
ggaaagugugaaaguugcg

SEQ ID NO: 1425131 - RNA, 19 nt, Artificial Sequence
  Description of Artificial Sequence: Synthetic oligonucleotide
aguguagcgauggccauua

SEQ ID NO: 1425132 - RNA, 19 nt, Artificial Sequence
  Description of Artificial Sequence: Synthetic oligonucleotide
gcgaauuuccccauccagc

SEQ ID NO: 1425133 - RNA, 19 nt, Artificial Sequence
  Description of Artificial Sequence: Synthetic oligonucleotide
gccauuaccuguggaauag

SEQ ID NO: 1425134 - RNA, 19 nt, Artificial Sequence
  Description of Artificial Sequence: Synthetic oligonucleotide
cuuugguuccggagccuug

SEQ ID NO: 1425135 - RNA, 19 nt, Artificial Sequence
  Description of Artificial Sequence: Synthetic oligonucleotide
gaacguuggcuuccagcca

SEQ ID NO: 1425136 - RNA, 19 nt, Artificial Sequence
  Description of Artificial Sequence: Synthetic oligonucleotide
gucgagaacagacgagaaa

SEQ ID NO: 1425137 - RNA, 19 nt, Artificial Sequence
  Description of Artificial Sequence: Synthetic oligonucleotide
ugcuugccccuuccgaauc

SEQ ID NO: 1425138 - RNA, 19 nt, Artificial Sequence
  Description of Artificial Sequence: Synthetic oligonucleotide
gaauuggcacacucugugu

SEQ ID NO: 1425139 - RNA, 19 nt, Artificial Sequence
  Description of Artificial Sequence: Synthetic oligonucleotide
ggcaaggugucuuuuccuc

SEQ ID NO: 1425140 - RNA, 19 nt, Artificial Sequence
  Description of Artificial Sequence: Synthetic oligonucleotide
agcgccuggauaaccgcgg

SEQ ID NO: 1425141 - RNA, 19 nt, Artificial Sequence
  Description of Artificial Sequence: Synthetic oligonucleotide
cuucgggagaugaguugac

SEQ ID NO: 1425142 - RNA, 19 nt, Artificial Sequence
  Description of Artificial Sequence: Synthetic oligonucleotide
ucgggaucuucuucuccac

SEQ ID NO: 1425143 - RNA, 19 nt, Artificial Sequence
  Description of Artificial Sequence: Synthetic oligonucleotide
gcaggaauagacccauuga

SEQ ID NO: 1425144 - RNA, 19 nt, Artificial Sequence
  Description of Artificial Sequence: Synthetic oligonucleotide
uccuccagauaaucacgaa

SEQ ID NO: 1425145 - RNA, 19 nt, Artificial Sequence
  Description of Artificial Sequence: Synthetic oligonucleotide
gguguaugauagcuuugac

SEQ ID NO: 1425146 - RNA, 19 nt, Artificial Sequence
  Description of Artificial Sequence: Synthetic oligonucleotide
acuaccccuuugaaaaccu

SEQ ID NO: 1425147 - RNA, 19 nt, Artificial Sequence
  Description of Artificial Sequence: Synthetic oligonucleotide
uguugguuaugaguucauu

SEQ ID NO: 1425148 - RNA, 19 nt, Artificial Sequence
  Description of Artificial Sequence: Synthetic oligonucleotide
gcugagcgaguccuggucc

SEQ ID NO: 1425149 - RNA, 19 nt, Artificial Sequence
  Description of Artificial Sequence: Synthetic oligonucleotide
caacguagugacaauacuu

SEQ ID NO: 1425150 - RNA, 19 nt, Artificial Sequence
  Description of Artificial Sequence: Synthetic oligonucleotide
aguccuguuuggaggucac

SEQ ID NO: 1425151 - RNA, 19 nt, Artificial Sequence
  Description of Artificial Sequence: Synthetic oligonucleotide
gugugaaaguugcgcagca

SEQ ID NO: 1425152 - RNA, 19 nt, Artificial Sequence
  Description of Artificial Sequence: Synthetic oligonucleotide
gggaguaguggcuucggga

SEQ ID NO: 1425153 - RNA, 19 nt, Artificial Sequence
  Description of Artificial Sequence: Synthetic oligonucleotide
gaugaccuccuugguuuug

SEQ ID NO: 1425154 - RNA, 19 nt, Artificial Sequence
  Description of Artificial Sequence: Synthetic oligonucleotide
gguguugguuaugaguuca

SEQ ID NO: 1425155 - RNA, 19 nt, Artificial Sequence
  Description of Artificial Sequence: Synthetic oligonucleotide
uggcuacaaaaggcagagg

SEQ ID NO: 1425156 - RNA, 19 nt, Artificial Sequence
  Description of Artificial Sequence: Synthetic oligonucleotide
aggagaucguggggaaguc

SEQ ID NO: 1425157 - RNA, 19 nt, Artificial Sequence
  Description of Artificial Sequence: Synthetic oligonucleotide
cguagugacaauacuuguc

SEQ ID NO: 1425158 - RNA, 19 nt, Artificial Sequence
  Description of Artificial Sequence: Synthetic oligonucleotide
uugguuccggagccuugac

SEQ ID NO: 1425159 - RNA, 19 nt, Artificial Sequence
  Description of Artificial Sequence: Synthetic oligonucleotide
cagaaguuaaacacacuuu

SEQ ID NO: 1425160 - RNA, 19 nt, Artificial Sequence
  Description of Artificial Sequence: Synthetic oligonucleotide
cuccgugaaccgccacucg

SEQ ID NO: 1425161 - RNA, 19 nt, Artificial Sequence
  Description of Artificial Sequence: Synthetic oligonucleotide
caaggagaucguggggaag

SEQ ID NO: 1425162 - RNA, 19 nt, Artificial Sequence
  Description of Artificial Sequence: Synthetic oligonucleotide
gacuggucugauucagaua

SEQ ID NO: 1425163 - RNA, 19 nt, Artificial Sequence
  Description of Artificial Sequence: Synthetic oligonucleotide
ccacggcccaacaagcacc

SEQ ID NO: 1425164 - RNA, 19 nt, Artificial Sequence
  Description of Artificial Sequence: Synthetic oligonucleotide
cucggagaaccagauaaaa

SEQ ID NO: 1425165 - RNA, 19 nt, Artificial Sequence
  Description of Artificial Sequence: Synthetic oligonucleotide
cugcacggccacaucuaug

SEQ ID NO: 1425166 - RNA, 19 nt, Artificial Sequence
  Description of Artificial Sequence: Synthetic oligonucleotide
gugcucuccgugaaccgcc

SEQ ID NO: 1425167 - RNA, 19 nt, Artificial Sequence
  Description of Artificial Sequence: Synthetic oligonucleotide
auuccgccggccucccaug

SEQ ID NO: 1425168 - RNA, 19 nt, Artificial Sequence
  Description of Artificial Sequence: Synthetic oligonucleotide
gaauagcacagaaguuaaa

SEQ ID NO: 1425169 - RNA, 19 nt, Artificial Sequence
  Description of Artificial Sequence: Synthetic oligonucleotide
cacgaaugauauuuguuuu

SEQ ID NO: 1425170 - RNA, 19 nt, Artificial Sequence
  Description of Artificial Sequence: Synthetic oligonucleotide
uuccgccggccucccaugc

SEQ ID NO: 1425171 - RNA, 19 nt, Artificial Sequence
  Description of Artificial Sequence: Synthetic oligonucleotide
ggggaguaguggcuucggg

SEQ ID NO: 1425172 - RNA, 19 nt, Artificial Sequence
  Description of Artificial Sequence: Synthetic oligonucleotide
ccgugaaccgccacucggg

SEQ ID NO: 1425173 - RNA, 19 nt, Artificial Sequence
  Description of Artificial Sequence: Synthetic oligonucleotide
aacagacgagaaaggccaa

SEQ ID NO: 1425174 - RNA, 19 nt, Artificial Sequence
  Description of Artificial Sequence: Synthetic oligonucleotide
ggcuucgggagaugaguug

SEQ ID NO: 1425175 - RNA, 19 nt, Artificial Sequence
  Description of Artificial Sequence: Synthetic oligonucleotide
augauagcuuugacagcug

SEQ ID NO: 1425176 - RNA, 19 nt, Artificial Sequence
  Description of Artificial Sequence: Synthetic oligonucleotide
ugccaucccacaucccauu

SEQ ID NO: 1425177 - RNA, 19 nt, Artificial Sequence
  Description of Artificial Sequence: Synthetic oligonucleotide
ggcuuagcaaagucuucca

SEQ ID NO: 1425178 - RNA, 19 nt, Artificial Sequence
  Description of Artificial Sequence: Synthetic oligonucleotide
aucaugaggguaacugcuu

SEQ ID NO: 1425179 - RNA, 19 nt, Artificial Sequence
  Description of Artificial Sequence: Synthetic oligonucleotide
ccacucggguucauagagg

SEQ ID NO: 1425180 - RNA, 19 nt, Artificial Sequence
  Description of Artificial Sequence: Synthetic oligonucleotide
cugagcgaguccuggucca

SEQ ID NO: 1425181 - RNA, 19 nt, Artificial Sequence
  Description of Artificial Sequence: Synthetic oligonucleotide
acuuugguuccggagccuu

SEQ ID NO: 1425182 - RNA, 19 nt, Artificial Sequence
  Description of Artificial Sequence: Synthetic oligonucleotide
acagacgagaaaggccaau

SEQ ID NO: 1425183 - RNA, 19 nt, Artificial Sequence
  Description of Artificial Sequence: Synthetic oligonucleotide
accuguggaauagcacaga

SEQ ID NO: 1425184 - RNA, 19 nt, Artificial Sequence
  Description of Artificial Sequence: Synthetic oligonucleotide
gccuaggcacuucacgaac

SEQ ID NO: 1425185 - RNA, 19 nt, Artificial Sequence
  Description of Artificial Sequence: Synthetic oligonucleotide
ggucacaugcuuguccaca

SEQ ID NO: 1425186 - RNA, 19 nt, Artificial Sequence
  Description of Artificial Sequence: Synthetic oligonucleotide
ccaacuaagggaucuucaa

SEQ ID NO: 1425187 - RNA, 19 nt, Artificial Sequence
  Description of Artificial Sequence: Synthetic oligonucleotide
agggaccacggcccaacaa

SEQ ID NO: 1425188 - RNA, 19 nt, Artificial Sequence
  Description of Artificial Sequence: Synthetic oligonucleotide
ggaccacggcccaacaagc

SEQ ID NO: 1425189 - RNA, 19 nt, Artificial Sequence
  Description of Artificial Sequence: Synthetic oligonucleotide
ggagaucguggggaagucc

SEQ ID NO: 1425190 - RNA, 19 nt, Artificial Sequence
  Description of Artificial Sequence: Synthetic oligonucleotide
cuaccaguccagcaacgua

SEQ ID NO: 1425191 - RNA, 19 nt, Artificial Sequence
  Description of Artificial Sequence: Synthetic oligonucleotide
ggcagaugucagcaaucac

SEQ ID NO: 1425192 - RNA, 19 nt, Artificial Sequence
  Description of Artificial Sequence: Synthetic oligonucleotide
ggaaaacgaaagggaaguc

SEQ ID NO: 1425193 - RNA, 19 nt, Artificial Sequence
  Description of Artificial Sequence: Synthetic oligonucleotide
gaccacggcccaacaagca

SEQ ID NO: 1425194 - RNA, 19 nt, Artificial Sequence
  Description of Artificial Sequence: Synthetic oligonucleotide
cagauacuuguagcagguc

SEQ ID NO: 1425195 - RNA, 19 nt, Artificial Sequence
  Description of Artificial Sequence: Synthetic oligonucleotide
ccauuuucuggcagauguc

SEQ ID NO: 1425196 - RNA, 19 nt, Artificial Sequence
  Description of Artificial Sequence: Synthetic oligonucleotide
gguaacugcuugccccuuc

SEQ ID NO: 1425197 - RNA, 19 nt, Artificial Sequence
  Description of Artificial Sequence: Synthetic oligonucleotide
augugaacguuggcuucca

SEQ ID NO: 1425198 - RNA, 19 nt, Artificial Sequence
  Description of Artificial Sequence: Synthetic oligonucleotide
ccgccacucggguucauag

SEQ ID NO: 1425199 - RNA, 19 nt, Artificial Sequence
  Description of Artificial Sequence: Synthetic oligonucleotide
cuuguugguccuccagaua

SEQ ID NO: 1425200 - RNA, 19 nt, Artificial Sequence
  Description of Artificial Sequence: Synthetic oligonucleotide
gcaacguagugacaauacu

SEQ ID NO: 1425201 - RNA, 19 nt, Artificial Sequence
  Description of Artificial Sequence: Synthetic oligonucleotide
cagcaaucacuguuugaua

SEQ ID NO: 1425202 - RNA, 19 nt, Artificial Sequence
  Description of Artificial Sequence: Synthetic oligonucleotide
gcgauggccauuaccugug

SEQ ID NO: 1425203 - RNA, 19 nt, Artificial Sequence
  Description of Artificial Sequence: Synthetic oligonucleotide
auggcggagaugaccuccu

SEQ ID NO: 1425204 - RNA, 19 nt, Artificial Sequence
  Description of Artificial Sequence: Synthetic oligonucleotide
cggcccaacaagcaccagg

SEQ ID NO: 1425205 - RNA, 19 nt, Artificial Sequence
  Description of Artificial Sequence: Synthetic oligonucleotide
ggagccuugacagguaggu

SEQ ID NO: 1425206 - RNA, 19 nt, Artificial Sequence
  Description of Artificial Sequence: Synthetic oligonucleotide
auccaucaugaggguaacu

SEQ ID NO: 1425207 - RNA, 19 nt, Artificial Sequence
  Description of Artificial Sequence: Synthetic oligonucleotide
cagccaagagcaugacaaa

SEQ ID NO: 1425208 - RNA, 19 nt, Artificial Sequence
  Description of Artificial Sequence: Synthetic oligonucleotide
cauccagcgccuggauaac

SEQ ID NO: 1425209 - RNA, 19 nt, Artificial Sequence
  Description of Artificial Sequence: Synthetic oligonucleotide
ccagcgccuggauaaccgc

SEQ ID NO: 1425210 - RNA, 19 nt, Artificial Sequence
  Description of Artificial Sequence: Synthetic oligonucleotide
ugagcgaguccugguccau

SEQ ID NO: 1425211 - RNA, 19 nt, Artificial Sequence
  Description of Artificial Sequence: Synthetic oligonucleotide
cugcgacuggucugauuca

SEQ ID NO: 1425212 - RNA, 19 nt, Artificial Sequence
  Description of Artificial Sequence: Synthetic oligonucleotide
augcggaaucgcagcaggu

SEQ ID NO: 1425213 - RNA, 19 nt, Artificial Sequence
  Description of Artificial Sequence: Synthetic oligonucleotide
ccuguggaauagcacagaa

SEQ ID NO: 1425214 - RNA, 19 nt, Artificial Sequence
  Description of Artificial Sequence: Synthetic oligonucleotide
ggauccggugaugaaucuc

SEQ ID NO: 1425215 - RNA, 19 nt, Artificial Sequence
  Description of Artificial Sequence: Synthetic oligonucleotide
cacggccacaucuauguuu

SEQ ID NO: 1425216 - RNA, 19 nt, Artificial Sequence
  Description of Artificial Sequence: Synthetic oligonucleotide
gcaaggugucuuuuccucu

SEQ ID NO: 1425217 - RNA, 19 nt, Artificial Sequence
  Description of Artificial Sequence: Synthetic oligonucleotide
caguucucugagagauuaa

SEQ ID NO: 1425218 - RNA, 19 nt, Artificial Sequence
  Description of Artificial Sequence: Synthetic oligonucleotide
ggccuaggcacuucacgaa

SEQ ID NO: 1425219 - RNA, 19 nt, Artificial Sequence
  Description of Artificial Sequence: Synthetic oligonucleotide
cucuccgugaaccgccacu

SEQ ID NO: 1425220 - RNA, 19 nt, Artificial Sequence
  Description of Artificial Sequence: Synthetic oligonucleotide
ccauuaccuguggaauagc

SEQ ID NO: 1425221 - RNA, 19 nt, Artificial Sequence
  Description of Artificial Sequence: Synthetic oligonucleotide
agcugcgacuggucugauu

SEQ ID NO: 1425222 - RNA, 19 nt, Artificial Sequence
  Description of Artificial Sequence: Synthetic oligonucleotide
gcggcgaagcugcgacugg

SEQ ID NO: 1425223 - RNA, 19 nt, Artificial Sequence
  Description of Artificial Sequence: Synthetic oligonucleotide
ggcuuccagccaaauaaaa

SEQ ID NO: 1425224 - RNA, 19 nt, Artificial Sequence
  Description of Artificial Sequence: Synthetic oligonucleotide
guggaauagcacagaaguu

SEQ ID NO: 1425225 - RNA, 19 nt, Artificial Sequence
  Description of Artificial Sequence: Synthetic oligonucleotide
uggcggagaugaccuccuu

SEQ ID NO: 1425226 - RNA, 19 nt, Artificial Sequence
  Description of Artificial Sequence: Synthetic oligonucleotide
gaaccgccacucggguuca

SEQ ID NO: 1425227 - RNA, 19 nt, Artificial Sequence
  Description of Artificial Sequence: Synthetic oligonucleotide
cuccuugguuuugcuagaa

SEQ ID NO: 1425228 - RNA, 19 nt, Artificial Sequence
  Description of Artificial Sequence: Synthetic oligonucleotide
ccuccagauaaucacgaau

SEQ ID NO: 1425229 - RNA, 19 nt, Artificial Sequence
  Description of Artificial Sequence: Synthetic oligonucleotide
ggguggccuaggcacuuca

SEQ ID NO: 1425230 - RNA, 19 nt, Artificial Sequence
  Description of Artificial Sequence: Synthetic oligonucleotide
gcgaagcugcgacuggucu

SEQ ID NO: 1425231 - RNA, 19 nt, Artificial Sequence
  Description of Artificial Sequence: Synthetic oligonucleotide
cccuuccgaaucuucacua

SEQ ID NO: 1425232 - RNA, 19 nt, Artificial Sequence
  Description of Artificial Sequence: Synthetic oligonucleotide
gguggccuaggcacuucac

SEQ ID NO: 1425233 - RNA, 19 nt, Artificial Sequence
  Description of Artificial Sequence: Synthetic oligonucleotide
cagacgagaaaggccaauu

SEQ ID NO: 1425234 - RNA, 19 nt, Artificial Sequence
  Description of Artificial Sequence: Synthetic oligonucleotide
ggccucccaugcggaaucg

SEQ ID NO: 1425235 - RNA, 19 nt, Artificial Sequence
  Description of Artificial Sequence: Synthetic oligonucleotide
caagcacugcacggccaca

SEQ ID NO: 1425236 - RNA, 19 nt, Artificial Sequence
  Description of Artificial Sequence: Synthetic oligonucleotide
ccuaggcacuucacgaacu

SEQ ID NO: 1425237 - RNA, 19 nt, Artificial Sequence
  Description of Artificial Sequence: Synthetic oligonucleotide
auccggugaugaaucucuu

SEQ ID NO: 1425238 - RNA, 19 nt, Artificial Sequence
  Description of Artificial Sequence: Synthetic oligonucleotide
gcucggagaaccagauaaa

SEQ ID NO: 1425239 - RNA, 19 nt, Artificial Sequence
  Description of Artificial Sequence: Synthetic oligonucleotide
cugcuugccccuuccgaau

SEQ ID NO: 1425240 - RNA, 19 nt, Artificial Sequence
  Description of Artificial Sequence: Synthetic oligonucleotide
gggauauggugcagggugu

SEQ ID NO: 1425241 - RNA, 19 nt, Artificial Sequence
  Description of Artificial Sequence: Synthetic oligonucleotide
aagcugcgacuggucugau

SEQ ID NO: 1425242 - RNA, 19 nt, Artificial Sequence
  Description of Artificial Sequence: Synthetic oligonucleotide
ccgaaucuucacuaccccu

SEQ ID NO: 1425243 - RNA, 19 nt, Artificial Sequence
  Description of Artificial Sequence: Synthetic oligonucleotide
ccagauaaucacgaaugau

SEQ ID NO: 1425244 - RNA, 19 nt, Artificial Sequence
  Description of Artificial Sequence: Synthetic oligonucleotide
ugcgcagcaucgggaucuu

SEQ ID NO: 1425245 - RNA, 19 nt, Artificial Sequence
  Description of Artificial Sequence: Synthetic oligonucleotide
accgccacucggguucaua

SEQ ID NO: 1425246 - RNA, 19 nt, Artificial Sequence
  Description of Artificial Sequence: Synthetic oligonucleotide
gugaaccgccacucggguu

SEQ ID NO: 1425247 - RNA, 19 nt, Artificial Sequence
  Description of Artificial Sequence: Synthetic oligonucleotide
gggauccggugaugaaucu

SEQ ID NO: 1425248 - RNA, 19 nt, Artificial Sequence
  Description of Artificial Sequence: Synthetic oligonucleotide
ggauaaccgcggcgaagcu

SEQ ID NO: 1425249 - RNA, 19 nt, Artificial Sequence
  Description of Artificial Sequence: Synthetic oligonucleotide
gcgacuggucugauucaga

SEQ ID NO: 1425250 - RNA, 19 nt, Artificial Sequence
  Description of Artificial Sequence: Synthetic oligonucleotide
ccuugacagguaggugaug

SEQ ID NO: 1425251 - RNA, 19 nt, Artificial Sequence
  Description of Artificial Sequence: Synthetic oligonucleotide
acguuggcuuccagccaaa

SEQ ID NO: 1425252 - RNA, 19 nt, Artificial Sequence
  Description of Artificial Sequence: Synthetic oligonucleotide
cgcggcgaagcugcgacug

SEQ ID NO: 1425253 - RNA, 19 nt, Artificial Sequence
  Description of Artificial Sequence: Synthetic oligonucleotide
gcuugccccuuccgaaucu

SEQ ID NO: 1425254 - RNA, 19 nt, Artificial Sequence
  Description of Artificial Sequence: Synthetic oligonucleotide
gcucuccgugaaccgccac

SEQ ID NO: 1425255 - RNA, 19 nt, Artificial Sequence
  Description of Artificial Sequence: Synthetic oligonucleotide
caacaagcaccaggcugcu

SEQ ID NO: 1425256 - RNA, 19 nt, Artificial Sequence
  Description of Artificial Sequence: Synthetic oligonucleotide
cgacuggucugauucagau

SEQ ID NO: 1425257 - RNA, 19 nt, Artificial Sequence
  Description of Artificial Sequence: Synthetic oligonucleotide
aaccgccacucggguucau

SEQ ID NO: 1425258 - RNA, 19 nt, Artificial Sequence
  Description of Artificial Sequence: Synthetic oligonucleotide
ggauauggugcaggguguu

SEQ ID NO: 1425259 - RNA, 19 nt, Artificial Sequence
  Description of Artificial Sequence: Synthetic oligonucleotide
cggccucccaugcggaauc

SEQ ID NO: 1425260 - RNA, 19 nt, Artificial Sequence
  Description of Artificial Sequence: Synthetic oligonucleotide
gcauggcgaauuuccccau

SEQ ID NO: 1425261 - RNA, 19 nt, Artificial Sequence
  Description of Artificial Sequence: Synthetic oligonucleotide
ccuaccaguccagcaacgu

SEQ ID NO: 1425262 - RNA, 19 nt, Artificial Sequence
  Description of Artificial Sequence: Synthetic oligonucleotide
caguguagcgauggccauu

SEQ ID NO: 1425263 - RNA, 19 nt, Artificial Sequence
  Description of Artificial Sequence: Synthetic oligonucleotide
cugcaggaauagacccauu

SEQ ID NO: 1425264 - RNA, 19 nt, Artificial Sequence
  Description of Artificial Sequence: Synthetic oligonucleotide
ccaguguagcgauggccau

SEQ ID NO: 1425265 - RNA, 19 nt, Artificial Sequence
  Description of Artificial Sequence: Synthetic oligonucleotide
cgugaaccgccacucgggu

SEQ ID NO: 1425266 - RNA, 19 nt, Artificial Sequence
  Description of Artificial Sequence: Synthetic oligonucleotide
caggguggccuaggcacuu

SEQ ID NO: 1425267 - RNA, 19 nt, Artificial Sequence
  Description of Artificial Sequence: Synthetic oligonucleotide
gcgcagcaucgggaucuuc

SEQ ID NO: 1425268 - RNA, 19 nt, Artificial Sequence
  Description of Artificial Sequence: Synthetic oligonucleotide
ggguaacugcuugccccuu

SEQ ID NO: 1425269 - RNA, 19 nt, Artificial Sequence
  Description of Artificial Sequence: Synthetic oligonucleotide
cggcgaagcugcgacuggu

SEQ ID NO: 1425270 - RNA, 19 nt, Artificial Sequence
  Description of Artificial Sequence: Synthetic oligonucleotide
ccgcggcgaagcugcgacu

SEQ ID NO: 1425271 - RNA, 19 nt, Artificial Sequence
  Description of Artificial Sequence: Synthetic oligonucleotide
uuuaauaaggaucacuucg

SEQ ID NO: 1425272 - RNA, 19 nt, Artificial Sequence
  Description of Artificial Sequence: Synthetic oligonucleotide
cuugcuagcaaccagaaag

SEQ ID NO: 1425273 - RNA, 19 nt, Artificial Sequence
  Description of Artificial Sequence: Synthetic oligonucleotide
aaaauggucuugcaaugcc

SEQ ID NO: 1425274 - RNA, 19 nt, Artificial Sequence
  Description of Artificial Sequence: Synthetic oligonucleotide
aaggagaggacaaugacgc

SEQ ID NO: 1425275 - RNA, 19 nt, Artificial Sequence
  Description of Artificial Sequence: Synthetic oligonucleotide
aacucaacccauucugugc

SEQ ID NO: 1425276 - RNA, 19 nt, Artificial Sequence
  Description of Artificial Sequence: Synthetic oligonucleotide
uuguguuuaauaaggauca

SEQ ID NO: 1425277 - RNA, 19 nt, Artificial Sequence
  Description of Artificial Sequence: Synthetic oligonucleotide
aauuuaccgcuucuugugc

SEQ ID NO: 1425278 - RNA, 19 nt, Artificial Sequence
  Description of Artificial Sequence: Synthetic oligonucleotide
acaaugacgcuccaggggc

SEQ ID NO: 1425279 - RNA, 19 nt, Artificial Sequence
  Description of Artificial Sequence: Synthetic oligonucleotide
aagcacgucgcccauuucc

SEQ ID NO: 1425280 - RNA, 19 nt, Artificial Sequence
  Description of Artificial Sequence: Synthetic oligonucleotide
uccugaaacagaaauaacu

SEQ ID NO: 1425281 - RNA, 19 nt, Artificial Sequence
  Description of Artificial Sequence: Synthetic oligonucleotide
ugugccaggaaacuggucc

SEQ ID NO: 1425282 - RNA, 19 nt, Artificial Sequence
  Description of Artificial Sequence: Synthetic oligonucleotide
agaaauaacugcuggcugg

SEQ ID NO: 1425283 - RNA, 19 nt, Artificial Sequence
  Description of Artificial Sequence: Synthetic oligonucleotide
ucccaauaaaagcacgucg

SEQ ID NO: 1425284 - RNA, 19 nt, Artificial Sequence
  Description of Artificial Sequence: Synthetic oligonucleotide
uucaaugcggaccacgaag

SEQ ID NO: 1425285 - RNA, 19 nt, Artificial Sequence
  Description of Artificial Sequence: Synthetic oligonucleotide
caaaacuggacccagccgg

SEQ ID NO: 1425286 - RNA, 19 nt, Artificial Sequence
  Description of Artificial Sequence: Synthetic oligonucleotide
uuaauaaggaucacuucgu

SEQ ID NO: 1425287 - RNA, 19 nt, Artificial Sequence
  Description of Artificial Sequence: Synthetic oligonucleotide
aggacaaugacgcuccagg

SEQ ID NO: 1425288 - RNA, 19 nt, Artificial Sequence
  Description of Artificial Sequence: Synthetic oligonucleotide
uguggauuuggugaagucg

SEQ ID NO: 1425289 - RNA, 19 nt, Artificial Sequence
  Description of Artificial Sequence: Synthetic oligonucleotide
aaacucacucuguuguuuc

SEQ ID NO: 1425290 - RNA, 19 nt, Artificial Sequence
  Description of Artificial Sequence: Synthetic oligonucleotide
aucacuucgugaaagaagg

SEQ ID NO: 1425291 - RNA, 19 nt, Artificial Sequence
  Description of Artificial Sequence: Synthetic oligonucleotide
ugcaaacucacucuguugu

SEQ ID NO: 1425292 - RNA, 19 nt, Artificial Sequence
  Description of Artificial Sequence: Synthetic oligonucleotide
auaaggaucacuucgugaa

SEQ ID NO: 1425293 - RNA, 19 nt, Artificial Sequence
  Description of Artificial Sequence: Synthetic oligonucleotide
uccggcuugacacagagaa

SEQ ID NO: 1425294 - RNA, 19 nt, Artificial Sequence
  Description of Artificial Sequence: Synthetic oligonucleotide
uugcuagcaaccagaaagg

SEQ ID NO: 1425295 - RNA, 19 nt, Artificial Sequence
  Description of Artificial Sequence: Synthetic oligonucleotide
auuuccaucuucaaugcgg

SEQ ID NO: 1425296 - RNA, 19 nt, Artificial Sequence
  Description of Artificial Sequence: Synthetic oligonucleotide
aaacucaacccauucugug

SEQ ID NO: 1425297 - RNA, 19 nt, Artificial Sequence
  Description of Artificial Sequence: Synthetic oligonucleotide
acuccugccaacccgacgg

SEQ ID NO: 1425298 - RNA, 19 nt, Artificial Sequence
  Description of Artificial Sequence: Synthetic oligonucleotide
uucgcagugauccguagcc

SEQ ID NO: 1425299 - RNA, 19 nt, Artificial Sequence
  Description of Artificial Sequence: Synthetic oligonucleotide
aaaucugggacuccugcca

SEQ ID NO: 1425300 - RNA, 19 nt, Artificial Sequence
  Description of Artificial Sequence: Synthetic oligonucleotide
gacaaugacgcuccagggg

SEQ ID NO: 1425301 - RNA, 19 nt, Artificial Sequence
  Description of Artificial Sequence: Synthetic oligonucleotide
aaugcggaccacgaaguac

SEQ ID NO: 1425302 - RNA, 19 nt, Artificial Sequence
  Description of Artificial Sequence: Synthetic oligonucleotide
aagccaaucccaauaaaag

SEQ ID NO: 1425303 - RNA, 19 nt, Artificial Sequence
  Description of Artificial Sequence: Synthetic oligonucleotide
agaaccgacucguacucgc

SEQ ID NO: 1425304 - RNA, 19 nt, Artificial Sequence
  Description of Artificial Sequence: Synthetic oligonucleotide
ugacagugaaaucugggac

SEQ ID NO: 1425305 - RNA, 19 nt, Artificial Sequence
  Description of Artificial Sequence: Synthetic oligonucleotide
auaagaguggaggucuugc

SEQ ID NO: 1425306 - RNA, 19 nt, Artificial Sequence
  Description of Artificial Sequence: Synthetic oligonucleotide
gauuuggugaagucgcccc

SEQ ID NO: 1425307 - RNA, 19 nt, Artificial Sequence
  Description of Artificial Sequence: Synthetic oligonucleotide
uguuucacccacuuaaaau

SEQ ID NO: 1425308 - RNA, 19 nt, Artificial Sequence
  Description of Artificial Sequence: Synthetic oligonucleotide
ugcgauguugaucuugaug

SEQ ID NO: 1425309 - RNA, 19 nt, Artificial Sequence
  Description of Artificial Sequence: Synthetic oligonucleotide
ugcccuuucgcagugaucc

SEQ ID NO: 1425310 - RNA, 19 nt, Artificial Sequence
  Description of Artificial Sequence: Synthetic oligonucleotide
uugugcaucaaaacuggac

SEQ ID NO: 1425311 - RNA, 19 nt, Artificial Sequence
  Description of Artificial Sequence: Synthetic oligonucleotide
aaggaucacuucgugaaag

SEQ ID NO: 1425312 - RNA, 19 nt, Artificial Sequence
  Description of Artificial Sequence: Synthetic oligonucleotide
uggaccuccggcuugacac

SEQ ID NO: 1425313 - RNA, 19 nt, Artificial Sequence
  Description of Artificial Sequence: Synthetic oligonucleotide
guagacauggaccuccggc

SEQ ID NO: 1425314 - RNA, 19 nt, Artificial Sequence
  Description of Artificial Sequence: Synthetic oligonucleotide
agcauguauuaacauuuuc

SEQ ID NO: 1425315 - RNA, 19 nt, Artificial Sequence
  Description of Artificial Sequence: Synthetic oligonucleotide
agagaaccgacucguacuc

SEQ ID NO: 1425316 - RNA, 19 nt, Artificial Sequence
  Description of Artificial Sequence: Synthetic oligonucleotide
ugucauggugccaauuuac

SEQ ID NO: 1425317 - RNA, 19 nt, Artificial Sequence
  Description of Artificial Sequence: Synthetic oligonucleotide
ucuucaaugcggaccacga

SEQ ID NO: 1425318 - RNA, 19 nt, Artificial Sequence
  Description of Artificial Sequence: Synthetic oligonucleotide
ucuugcaaugccacguuga

SEQ ID NO: 1425319 - RNA, 19 nt, Artificial Sequence
  Description of Artificial Sequence: Synthetic oligonucleotide
agcauauuagcagagcaug

SEQ ID NO: 1425320 - RNA, 19 nt, Artificial Sequence
  Description of Artificial Sequence: Synthetic oligonucleotide
uccaucuucaaugcggacc

SEQ ID NO: 1425321 - RNA, 19 nt, Artificial Sequence
  Description of Artificial Sequence: Synthetic oligonucleotide
ucaaugcggaccacgaagu

SEQ ID NO: 1425322 - RNA, 19 nt, Artificial Sequence
  Description of Artificial Sequence: Synthetic oligonucleotide
uaaaauggucuugcaaugc

SEQ ID NO: 1425323 - RNA, 19 nt, Artificial Sequence
  Description of Artificial Sequence: Synthetic oligonucleotide
gacccuguggauuugguga

SEQ ID NO: 1425324 - RNA, 19 nt, Artificial Sequence
  Description of Artificial Sequence: Synthetic oligonucleotide
cuagcaaccagaaaggacu

SEQ ID NO: 1425325 - RNA, 19 nt, Artificial Sequence
  Description of Artificial Sequence: Synthetic oligonucleotide
agucgccccagauaucagc

SEQ ID NO: 1425326 - RNA, 19 nt, Artificial Sequence
  Description of Artificial Sequence: Synthetic oligonucleotide
caaaagacaacugcucccc

SEQ ID NO: 1425327 - RNA, 19 nt, Artificial Sequence
  Description of Artificial Sequence: Synthetic oligonucleotide
uagggguuguguuuaauaa

SEQ ID NO: 1425328 - RNA, 19 nt, Artificial Sequence
  Description of Artificial Sequence: Synthetic oligonucleotide
auauuagcagagcauguau

SEQ ID NO: 1425329 - RNA, 19 nt, Artificial Sequence
  Description of Artificial Sequence: Synthetic oligonucleotide
uggucagcauauuagcaga

SEQ ID NO: 1425330 - RNA, 19 nt, Artificial Sequence
  Description of Artificial Sequence: Synthetic oligonucleotide
auuagcagagcauguauua

SEQ ID NO: 1425331 - RNA, 19 nt, Artificial Sequence
  Description of Artificial Sequence: Synthetic oligonucleotide
augcggaccacgaaguacc

SEQ ID NO: 1425332 - RNA, 19 nt, Artificial Sequence
  Description of Artificial Sequence: Synthetic oligonucleotide
aguguuugcuccugucuuc

SEQ ID NO: 1425333 - RNA, 19 nt, Artificial Sequence
  Description of Artificial Sequence: Synthetic oligonucleotide
aaucccaauaaaagcacgu

SEQ ID NO: 1425334 - RNA, 19 nt, Artificial Sequence
  Description of Artificial Sequence: Synthetic oligonucleotide
aaaagcacgucgcccauuu

SEQ ID NO: 1425335 - RNA, 19 nt, Artificial Sequence
  Description of Artificial Sequence: Synthetic oligonucleotide
uucgucuggguucugggcu

SEQ ID NO: 1425336 - RNA, 19 nt, Artificial Sequence
  Description of Artificial Sequence: Synthetic oligonucleotide
ugcuggucagcauauuagc

SEQ ID NO: 1425337 - RNA, 19 nt, Artificial Sequence
  Description of Artificial Sequence: Synthetic oligonucleotide
uuuugcaaacucacucugu

SEQ ID NO: 1425338 - RNA, 19 nt, Artificial Sequence
  Description of Artificial Sequence: Synthetic oligonucleotide
acuucgugaaagaaggcag

SEQ ID NO: 1425339 - RNA, 19 nt, Artificial Sequence
  Description of Artificial Sequence: Synthetic oligonucleotide
caauaaaagcacgucgccc

SEQ ID NO: 1425340 - RNA, 19 nt, Artificial Sequence
  Description of Artificial Sequence: Synthetic oligonucleotide
ucacucuguuguuucaccc

SEQ ID NO: 1425341 - RNA, 19 nt, Artificial Sequence
  Description of Artificial Sequence: Synthetic oligonucleotide
aaauaacugcuggcugggc

SEQ ID NO: 1425342 - RNA, 19 nt, Artificial Sequence
  Description of Artificial Sequence: Synthetic oligonucleotide
ggagggauaagaguggagg

SEQ ID NO: 1425343 - RNA, 19 nt, Artificial Sequence
  Description of Artificial Sequence: Synthetic oligonucleotide
aaccgacucguacucgcuc

SEQ ID NO: 1425344 - RNA, 19 nt, Artificial Sequence
  Description of Artificial Sequence: Synthetic oligonucleotide
uuagacuguggccaggguu

SEQ ID NO: 1425345 - RNA, 19 nt, Artificial Sequence
  Description of Artificial Sequence: Synthetic oligonucleotide
uauccuuccagugucccug

SEQ ID NO: 1425346 - RNA, 19 nt, Artificial Sequence
  Description of Artificial Sequence: Synthetic oligonucleotide
acagugaaaucugggacuc

SEQ ID NO: 1425347 - RNA, 19 nt, Artificial Sequence
  Description of Artificial Sequence: Synthetic oligonucleotide
agguucagcccuccugugc

SEQ ID NO: 1425348 - RNA, 19 nt, Artificial Sequence
  Description of Artificial Sequence: Synthetic oligonucleotide
uuagggguuguguuuaaua

SEQ ID NO: 1425349 - RNA, 19 nt, Artificial Sequence
  Description of Artificial Sequence: Synthetic oligonucleotide
gugcaucaaaacuggaccc

SEQ ID NO: 1425350 - RNA, 19 nt, Artificial Sequence
  Description of Artificial Sequence: Synthetic oligonucleotide
acgguuguuggcccgcggc

SEQ ID NO: 1425351 - RNA, 19 nt, Artificial Sequence
  Description of Artificial Sequence: Synthetic oligonucleotide
uuucgcagugauccguagc

SEQ ID NO: 1425352 - RNA, 19 nt, Artificial Sequence
  Description of Artificial Sequence: Synthetic oligonucleotide
ucuugcucccuggaggagg

SEQ ID NO: 1425353 - RNA, 19 nt, Artificial Sequence
  Description of Artificial Sequence: Synthetic oligonucleotide
gaugaggcagcuccuuccc

SEQ ID NO: 1425354 - RNA, 19 nt, Artificial Sequence
  Description of Artificial Sequence: Synthetic oligonucleotide
gaggacgacgacccugugg

SEQ ID NO: 1425355 - RNA, 19 nt, Artificial Sequence
  Description of Artificial Sequence: Synthetic oligonucleotide
uaggccaccugcccuuucg

SEQ ID NO: 1425356 - RNA, 19 nt, Artificial Sequence
  Description of Artificial Sequence: Synthetic oligonucleotide
uuugccuccuucugugggc

SEQ ID NO: 1425357 - RNA, 19 nt, Artificial Sequence
  Description of Artificial Sequence: Synthetic oligonucleotide
gugagagccccucaccagg

SEQ ID NO: 1425358 - RNA, 19 nt, Artificial Sequence
  Description of Artificial Sequence: Synthetic oligonucleotide
gaagcccagguccaauuug

SEQ ID NO: 1425359 - RNA, 19 nt, Artificial Sequence
  Description of Artificial Sequence: Synthetic oligonucleotide
cagaaauaacugcuggcug

SEQ ID NO: 1425360 - RNA, 19 nt, Artificial Sequence
  Description of Artificial Sequence: Synthetic oligonucleotide
aaugccacguugaagucaa

SEQ ID NO: 1425361 - RNA, 19 nt, Artificial Sequence
  Description of Artificial Sequence: Synthetic oligonucleotide
gacugguuggaggacgacg

SEQ ID NO: 1425362 - RNA, 19 nt, Artificial Sequence
  Description of Artificial Sequence: Synthetic oligonucleotide
agggauaagaguggagguc

SEQ ID NO: 1425363 - RNA, 19 nt, Artificial Sequence
  Description of Artificial Sequence: Synthetic oligonucleotide
aaauggucuugcaaugcca

SEQ ID NO: 1425364 - RNA, 19 nt, Artificial Sequence
  Description of Artificial Sequence: Synthetic oligonucleotide
gaagucgccccagauauca

SEQ ID NO: 1425365 - RNA, 19 nt, Artificial Sequence
  Description of Artificial Sequence: Synthetic oligonucleotide
auuuaccgcuucuugugcu

SEQ ID NO: 1425366 - RNA, 19 nt, Artificial Sequence
  Description of Artificial Sequence: Synthetic oligonucleotide
cuggcugggcugcagagcc

SEQ ID NO: 1425367 - RNA, 19 nt, Artificial Sequence
  Description of Artificial Sequence: Synthetic oligonucleotide
gagucagucacgcucucca

SEQ ID NO: 1425368 - RNA, 19 nt, Artificial Sequence
  Description of Artificial Sequence: Synthetic oligonucleotide
uccaauuuggggccuucgu

SEQ ID NO: 1425369 - RNA, 19 nt, Artificial Sequence
  Description of Artificial Sequence: Synthetic oligonucleotide
ucgcccauuuccaucuuca

SEQ ID NO: 1425370 - RNA, 19 nt, Artificial Sequence
  Description of Artificial Sequence: Synthetic oligonucleotide
agucacgcucuccacagcu

SEQ ID NO: 1425371 - RNA, 19 nt, Artificial Sequence
  Description of Artificial Sequence: Synthetic oligonucleotide
ccacguugaagucaaaggc

SEQ ID NO: 1425372 - RNA, 19 nt, Artificial Sequence
  Description of Artificial Sequence: Synthetic oligonucleotide
uccguagccggccacucca

SEQ ID NO: 1425373 - RNA, 19 nt, Artificial Sequence
  Description of Artificial Sequence: Synthetic oligonucleotide
auggugccaauuuaccgcu

SEQ ID NO: 1425374 - RNA, 19 nt, Artificial Sequence
  Description of Artificial Sequence: Synthetic oligonucleotide
aacucacucuguuguuuca

SEQ ID NO: 1425375 - RNA, 19 nt, Artificial Sequence
  Description of Artificial Sequence: Synthetic oligonucleotide
guagccacgguuguuggcc

SEQ ID NO: 1425376 - RNA, 19 nt, Artificial Sequence
  Description of Artificial Sequence: Synthetic oligonucleotide
auggucuugcaaugccacg

SEQ ID NO: 1425377 - RNA, 19 nt, Artificial Sequence
  Description of Artificial Sequence: Synthetic oligonucleotide
ugaagucaaaggcgucccc

SEQ ID NO: 1425378 - RNA, 19 nt, Artificial Sequence
  Description of Artificial Sequence: Synthetic oligonucleotide
cuugcucccuggaggaggg

SEQ ID NO: 1425379 - RNA, 19 nt, Artificial Sequence
  Description of Artificial Sequence: Synthetic oligonucleotide
uuuggggccuucgucuggg

SEQ ID NO: 1425380 - RNA, 19 nt, Artificial Sequence
  Description of Artificial Sequence: Synthetic oligonucleotide
uggauuuggugaagucgcc

SEQ ID NO: 1425381 - RNA, 19 nt, Artificial Sequence
  Description of Artificial Sequence: Synthetic oligonucleotide
gcauguauuaacauuuuca

SEQ ID NO: 1425382 - RNA, 19 nt, Artificial Sequence
  Description of Artificial Sequence: Synthetic oligonucleotide
uuuggugaagucgccccag

SEQ ID NO: 1425383 - RNA, 19 nt, Artificial Sequence
  Description of Artificial Sequence: Synthetic oligonucleotide
aaagcacgucgcccauuuc

SEQ ID NO: 1425384 - RNA, 19 nt, Artificial Sequence
  Description of Artificial Sequence: Synthetic oligonucleotide
guuagugcuggucagcaua

SEQ ID NO: 1425385 - RNA, 19 nt, Artificial Sequence
  Description of Artificial Sequence: Synthetic oligonucleotide
uggucuugcaaugccacgu

SEQ ID NO: 1425386 - RNA, 19 nt, Artificial Sequence
  Description of Artificial Sequence: Synthetic oligonucleotide
uggaggacgacgacccugu

SEQ ID NO: 1425387 - RNA, 19 nt, Artificial Sequence
  Description of Artificial Sequence: Synthetic oligonucleotide
ucacuucgugaaagaaggc

SEQ ID NO: 1425388 - RNA, 19 nt, Artificial Sequence
  Description of Artificial Sequence: Synthetic oligonucleotide
uuagcagagcauguauuaa

SEQ ID NO: 1425389 - RNA, 19 nt, Artificial Sequence
  Description of Artificial Sequence: Synthetic oligonucleotide
agaaaggacuccucuggaa

SEQ ID NO: 1425390 - RNA, 19 nt, Artificial Sequence
  Description of Artificial Sequence: Synthetic oligonucleotide
acgaaguaccugcuggagu

SEQ ID NO: 1425391 - RNA, 19 nt, Artificial Sequence
  Description of Artificial Sequence: Synthetic oligonucleotide
cuguggacagugugcagag

SEQ ID NO: 1425392 - RNA, 19 nt, Artificial Sequence
  Description of Artificial Sequence: Synthetic oligonucleotide
ucccugacagcccacucaa

SEQ ID NO: 1425393 - RNA, 19 nt, Artificial Sequence
  Description of Artificial Sequence: Synthetic oligonucleotide
cuuauccuuccaguguccc

SEQ ID NO: 1425394 - RNA, 19 nt, Artificial Sequence
  Description of Artificial Sequence: Synthetic oligonucleotide
cugggcuuguuuugcaaac

SEQ ID NO: 1425395 - RNA, 19 nt, Artificial Sequence
  Description of Artificial Sequence: Synthetic oligonucleotide
cuucgucuggguucugggc

SEQ ID NO: 1425396 - RNA, 19 nt, Artificial Sequence
  Description of Artificial Sequence: Synthetic oligonucleotide
auuuggugaagucgcccca

SEQ ID NO: 1425397 - RNA, 19 nt, Artificial Sequence
  Description of Artificial Sequence: Synthetic oligonucleotide
ggacaaugacgcuccaggg

SEQ ID NO: 1425398 - RNA, 19 nt, Artificial Sequence
  Description of Artificial Sequence: Synthetic oligonucleotide
gugcuggucagcauauuag

SEQ ID NO: 1425399 - RNA, 19 nt, Artificial Sequence
  Description of Artificial Sequence: Synthetic oligonucleotide
aggggcuagccaaggagcc

SEQ ID NO: 1425400 - RNA, 19 nt, Artificial Sequence
  Description of Artificial Sequence: Synthetic oligonucleotide
ucaaaggcguccccucggu

SEQ ID NO: 1425401 - RNA, 19 nt, Artificial Sequence
  Description of Artificial Sequence: Synthetic oligonucleotide
acucguacucgcucuccuc

SEQ ID NO: 1425402 - RNA, 19 nt, Artificial Sequence
  Description of Artificial Sequence: Synthetic oligonucleotide
ugguuggaggacgacgacc

SEQ ID NO: 1425403 - RNA, 19 nt, Artificial Sequence
  Description of Artificial Sequence: Synthetic oligonucleotide
uuauccuuccagugucccu

SEQ ID NO: 1425404 - RNA, 19 nt, Artificial Sequence
  Description of Artificial Sequence: Synthetic oligonucleotide
cccaaaagacaacugcucc

SEQ ID NO: 1425405 - RNA, 19 nt, Artificial Sequence
  Description of Artificial Sequence: Synthetic oligonucleotide
gacauggaccuccggcuug

SEQ ID NO: 1425406 - RNA, 19 nt, Artificial Sequence
  Description of Artificial Sequence: Synthetic oligonucleotide
acgucgcccauuuccaucu

SEQ ID NO: 1425407 - RNA, 19 nt, Artificial Sequence
  Description of Artificial Sequence: Synthetic oligonucleotide
uugcaaugccacguugaag

SEQ ID NO: 1425408 - RNA, 19 nt, Artificial Sequence
  Description of Artificial Sequence: Synthetic oligonucleotide
caggcuuagacuguggcca

SEQ ID NO: 1425409 - RNA, 19 nt, Artificial Sequence
  Description of Artificial Sequence: Synthetic oligonucleotide
acguugaagucaaaggcgu

SEQ ID NO: 1425410 - RNA, 19 nt, Artificial Sequence
  Description of Artificial Sequence: Synthetic oligonucleotide
gugaagucgccccagauau

SEQ ID NO: 1425411 - RNA, 19 nt, Artificial Sequence
  Description of Artificial Sequence: Synthetic oligonucleotide
caguggcaugucauggugc

SEQ ID NO: 1425412 - RNA, 19 nt, Artificial Sequence
  Description of Artificial Sequence: Synthetic oligonucleotide
gacuccugccaacccgacg

SEQ ID NO: 1425413 - RNA, 19 nt, Artificial Sequence
  Description of Artificial Sequence: Synthetic oligonucleotide
gcugcuuauccuuccagug

SEQ ID NO: 1425414 - RNA, 19 nt, Artificial Sequence
  Description of Artificial Sequence: Synthetic oligonucleotide
auccguagccggccacucc

SEQ ID NO: 1425415 - RNA, 19 nt, Artificial Sequence
  Description of Artificial Sequence: Synthetic oligonucleotide
uuggaggacgacgacccug

SEQ ID NO: 1425416 - RNA, 19 nt, Artificial Sequence
  Description of Artificial Sequence: Synthetic oligonucleotide
gguuggaggacgacgaccc

SEQ ID NO: 1425417 - RNA, 19 nt, Artificial Sequence
  Description of Artificial Sequence: Synthetic oligonucleotide
ccaauaaaagcacgucgcc

SEQ ID NO: 1425418 - RNA, 19 nt, Artificial Sequence
  Description of Artificial Sequence: Synthetic oligonucleotide
uguguuuaauaaggaucac

SEQ ID NO: 1425419 - RNA, 19 nt, Artificial Sequence
  Description of Artificial Sequence: Synthetic oligonucleotide
ugaagcccagguccaauuu

SEQ ID NO: 1425420 - RNA, 19 nt, Artificial Sequence
  Description of Artificial Sequence: Synthetic oligonucleotide
gagccccucaccagggugg

SEQ ID NO: 1425421 - RNA, 19 nt, Artificial Sequence
  Description of Artificial Sequence: Synthetic oligonucleotide
ugcuagcaaccagaaagga

SEQ ID NO: 1425422 - RNA, 19 nt, Artificial Sequence
  Description of Artificial Sequence: Synthetic oligonucleotide
uggcaugucauggugccaa

SEQ ID NO: 1425423 - RNA, 19 nt, Artificial Sequence
  Description of Artificial Sequence: Synthetic oligonucleotide
accgacucguacucgcucu

SEQ ID NO: 1425424 - RNA, 19 nt, Artificial Sequence
  Description of Artificial Sequence: Synthetic oligonucleotide
uggaugaggcagcuccuuc

SEQ ID NO: 1425425 - RNA, 19 nt, Artificial Sequence
  Description of Artificial Sequence: Synthetic oligonucleotide
ccgacaagggcuacugugg

SEQ ID NO: 1425426 - RNA, 19 nt, Artificial Sequence
  Description of Artificial Sequence: Synthetic oligonucleotide
ucuggcccuccuugaagcc

SEQ ID NO: 1425427 - RNA, 19 nt, Artificial Sequence
  Description of Artificial Sequence: Synthetic oligonucleotide
aggccaccugcccuuucgc

SEQ ID NO: 1425428 - RNA, 19 nt, Artificial Sequence
  Description of Artificial Sequence: Synthetic oligonucleotide
gaguggaggucuugcuccc

SEQ ID NO: 1425429 - RNA, 19 nt, Artificial Sequence
  Description of Artificial Sequence: Synthetic oligonucleotide
gagaaccgacucguacucg

SEQ ID NO: 1425430 - RNA, 19 nt, Artificial Sequence
  Description of Artificial Sequence: Synthetic oligonucleotide
agguauggaggcugacucu

SEQ ID NO: 1425431 - RNA, 19 nt, Artificial Sequence
  Description of Artificial Sequence: Synthetic oligonucleotide
cuuucgcagugauccguag

SEQ ID NO: 1425432 - RNA, 19 nt, Artificial Sequence
  Description of Artificial Sequence: Synthetic oligonucleotide
cacuucgugaaagaaggca

SEQ ID NO: 1425433 - RNA, 19 nt, Artificial Sequence
  Description of Artificial Sequence: Synthetic oligonucleotide
aacuugcuagcaaccagaa

SEQ ID NO: 1425434 - RNA, 19 nt, Artificial Sequence
  Description of Artificial Sequence: Synthetic oligonucleotide
gagaagggugugugagagc

SEQ ID NO: 1425435 - RNA, 19 nt, Artificial Sequence
  Description of Artificial Sequence: Synthetic oligonucleotide
ucgcagugauccguagccg

SEQ ID NO: 1425436 - RNA, 19 nt, Artificial Sequence
  Description of Artificial Sequence: Synthetic oligonucleotide
gagggauaagaguggaggu

SEQ ID NO: 1425437 - RNA, 19 nt, Artificial Sequence
  Description of Artificial Sequence: Synthetic oligonucleotide
gcuacuguggacagugugc

SEQ ID NO: 1425438 - RNA, 19 nt, Artificial Sequence
  Description of Artificial Sequence: Synthetic oligonucleotide
uuggugaagucgccccaga

SEQ ID NO: 1425439 - RNA, 19 nt, Artificial Sequence
  Description of Artificial Sequence: Synthetic oligonucleotide
gaggacaaugacgcuccag

SEQ ID NO: 1425440 - RNA, 19 nt, Artificial Sequence
  Description of Artificial Sequence: Synthetic oligonucleotide
acgacgacccuguggauuu

SEQ ID NO: 1425441 - RNA, 19 nt, Artificial Sequence
  Description of Artificial Sequence: Synthetic oligonucleotide
cuguggcaccuccugaaac

SEQ ID NO: 1425442 - RNA, 19 nt, Artificial Sequence
  Description of Artificial Sequence: Synthetic oligonucleotide
gucuugcaaugccacguug

SEQ ID NO: 1425443 - RNA, 19 nt, Artificial Sequence
  Description of Artificial Sequence: Synthetic oligonucleotide
ugggucccucgcaagggca

SEQ ID NO: 1425444 - RNA, 19 nt, Artificial Sequence
  Description of Artificial Sequence: Synthetic oligonucleotide
gaggcugacucucacugcu

SEQ ID NO: 1425445 - RNA, 19 nt, Artificial Sequence
  Description of Artificial Sequence: Synthetic oligonucleotide
ggaaacugguccacugggg

SEQ ID NO: 1425446 - RNA, 19 nt, Artificial Sequence
  Description of Artificial Sequence: Synthetic oligonucleotide
guccccucgguccccaaag

SEQ ID NO: 1425447 - RNA, 19 nt, Artificial Sequence
  Description of Artificial Sequence: Synthetic oligonucleotide
aggcuuagacuguggccag

SEQ ID NO: 1425448 - RNA, 19 nt, Artificial Sequence
  Description of Artificial Sequence: Synthetic oligonucleotide
ucgcaagggcacguuagug

SEQ ID NO: 1425449 - RNA, 19 nt, Artificial Sequence
  Description of Artificial Sequence: Synthetic oligonucleotide
uuaccgcuucuugugcuca

SEQ ID NO: 1425450 - RNA, 19 nt, Artificial Sequence
  Description of Artificial Sequence: Synthetic oligonucleotide
cuguggauuuggugaaguc

SEQ ID NO: 1425451 - RNA, 19 nt, Artificial Sequence
  Description of Artificial Sequence: Synthetic oligonucleotide
gacgacccuguggauuugg

SEQ ID NO: 1425452 - RNA, 19 nt, Artificial Sequence
  Description of Artificial Sequence: Synthetic oligonucleotide
agugauccguagccggcca

SEQ ID NO: 1425453 - RNA, 19 nt, Artificial Sequence
  Description of Artificial Sequence: Synthetic oligonucleotide
uggugaagucgccccagau

SEQ ID NO: 1425454 - RNA, 19 nt, Artificial Sequence
  Description of Artificial Sequence: Synthetic oligonucleotide
aaacuggacccagccggug

SEQ ID NO: 1425455 - RNA, 19 nt, Artificial Sequence
  Description of Artificial Sequence: Synthetic oligonucleotide
ggagaggacaaugacgcuc

SEQ ID NO: 1425456 - RNA, 19 nt, Artificial Sequence
  Description of Artificial Sequence: Synthetic oligonucleotide
acguuagugcuggucagca

SEQ ID NO: 1425457 - RNA, 19 nt, Artificial Sequence
  Description of Artificial Sequence: Synthetic oligonucleotide
cuuguuuugcaaacucacu

SEQ ID NO: 1425458 - RNA, 19 nt, Artificial Sequence
  Description of Artificial Sequence: Synthetic oligonucleotide
ugggcuuguuuugcaaacu

SEQ ID NO: 1425459 - RNA, 19 nt, Artificial Sequence
  Description of Artificial Sequence: Synthetic oligonucleotide
cggaccacgaaguaccugc

SEQ ID NO: 1425460 - RNA, 19 nt, Artificial Sequence
  Description of Artificial Sequence: Synthetic oligonucleotide
ucgugaaagaaggcagguc

SEQ ID NO: 1425461 - RNA, 19 nt, Artificial Sequence
  Description of Artificial Sequence: Synthetic oligonucleotide
ccagguccaauuuggggcc

SEQ ID NO: 1425462 - RNA, 19 nt, Artificial Sequence
  Description of Artificial Sequence: Synthetic oligonucleotide
gcaggcuuagacuguggcc

SEQ ID NO: 1425463 - RNA, 19 nt, Artificial Sequence
  Description of Artificial Sequence: Synthetic oligonucleotide
gugugugagagccccucac

SEQ ID NO: 1425464 - RNA, 19 nt, Artificial Sequence
  Description of Artificial Sequence: Synthetic oligonucleotide
cauauuagcagagcaugua

SEQ ID NO: 1425465 - RNA, 19 nt, Artificial Sequence
  Description of Artificial Sequence: Synthetic oligonucleotide
ucgccccagauaucagcag

SEQ ID NO: 1425466 - RNA, 19 nt, Artificial Sequence
  Description of Artificial Sequence: Synthetic oligonucleotide
gacagugugcagagucccc

SEQ ID NO: 1425467 - RNA, 19 nt, Artificial Sequence
  Description of Artificial Sequence: Synthetic oligonucleotide
cuugcaaugccacguugaa

SEQ ID NO: 1425468 - RNA, 19 nt, Artificial Sequence
  Description of Artificial Sequence: Synthetic oligonucleotide
guaccugcuggagucaguc

SEQ ID NO: 1425469 - RNA, 19 nt, Artificial Sequence
  Description of Artificial Sequence: Synthetic oligonucleotide
cgaaguaccugcuggaguc

SEQ ID NO: 1425470 - RNA, 19 nt, Artificial Sequence
  Description of Artificial Sequence: Synthetic oligonucleotide
cggcuugacacagagaacc

SEQ ID NO: 1425471 - RNA, 19 nt, Artificial Sequence
  Description of Artificial Sequence: Synthetic oligonucleotide
uuuagggguuguguuuaau

SEQ ID NO: 1425472 - RNA, 19 nt, Artificial Sequence
  Description of Artificial Sequence: Synthetic oligonucleotide
cacuuaaaauggucuugca

SEQ ID NO: 1425473 - RNA, 19 nt, Artificial Sequence
  Description of Artificial Sequence: Synthetic oligonucleotide
ugaagucgccccagauauc

SEQ ID NO: 1425474 - RNA, 19 nt, Artificial Sequence
  Description of Artificial Sequence: Synthetic oligonucleotide
cagagaaccgacucguacu

SEQ ID NO: 1425475 - RNA, 19 nt, Artificial Sequence
  Description of Artificial Sequence: Synthetic oligonucleotide
cacgucgcccauuuccauc

SEQ ID NO: 1425476 - RNA, 19 nt, Artificial Sequence
  Description of Artificial Sequence: Synthetic oligonucleotide
guagccggccacuccacca

SEQ ID NO: 1425477 - RNA, 19 nt, Artificial Sequence
  Description of Artificial Sequence: Synthetic oligonucleotide
uuccaucuucaaugcggac

SEQ ID NO: 1425478 - RNA, 19 nt, Artificial Sequence
  Description of Artificial Sequence: Synthetic oligonucleotide
ggauuuggugaagucgccc

SEQ ID NO: 1425479 - RNA, 19 nt, Artificial Sequence
  Description of Artificial Sequence: Synthetic oligonucleotide
agacauggaccuccggcuu

SEQ ID NO: 1425480 - RNA, 19 nt, Artificial Sequence
  Description of Artificial Sequence: Synthetic oligonucleotide
guccaauuuggggccuucg

SEQ ID NO: 1425481 - RNA, 19 nt, Artificial Sequence
  Description of Artificial Sequence: Synthetic oligonucleotide
cuccccugagguccugucc

SEQ ID NO: 1425482 - RNA, 19 nt, Artificial Sequence
  Description of Artificial Sequence: Synthetic oligonucleotide
acccuguggauuuggugaa

SEQ ID NO: 1425483 - RNA, 19 nt, Artificial Sequence
  Description of Artificial Sequence: Synthetic oligonucleotide
cacguuagugcuggucagc

SEQ ID NO: 1425484 - RNA, 19 nt, Artificial Sequence
  Description of Artificial Sequence: Synthetic oligonucleotide
ugauccguagccggccacu

SEQ ID NO: 1425485 - RNA, 19 nt, Artificial Sequence
  Description of Artificial Sequence: Synthetic oligonucleotide
uccccucgguccccaaagc

SEQ ID NO: 1425486 - RNA, 19 nt, Artificial Sequence
  Description of Artificial Sequence: Synthetic oligonucleotide
gcuagcaaccagaaaggac

SEQ ID NO: 1425487 - RNA, 19 nt, Artificial Sequence
  Description of Artificial Sequence: Synthetic oligonucleotide
gcgaagagcuccccugagg

SEQ ID NO: 1425488 - RNA, 19 nt, Artificial Sequence
  Description of Artificial Sequence: Synthetic oligonucleotide
ugucccugacagcccacuc

SEQ ID NO: 1425489 - RNA, 19 nt, Artificial Sequence
  Description of Artificial Sequence: Synthetic oligonucleotide
gguucugggcuuguuuugc

SEQ ID NO: 1425490 - RNA, 19 nt, Artificial Sequence
  Description of Artificial Sequence: Synthetic oligonucleotide
gaguguuugcuccugucuu

SEQ ID NO: 1425491 - RNA, 19 nt, Artificial Sequence
  Description of Artificial Sequence: Synthetic oligonucleotide
gcaucaaaacuggacccag

SEQ ID NO: 1425492 - RNA, 19 nt, Artificial Sequence
  Description of Artificial Sequence: Synthetic oligonucleotide
aacccgacgggcagagcug

SEQ ID NO: 1425493 - RNA, 19 nt, Artificial Sequence
  Description of Artificial Sequence: Synthetic oligonucleotide
uggucuggcccuccuugaa

SEQ ID NO: 1425494 - RNA, 19 nt, Artificial Sequence
  Description of Artificial Sequence: Synthetic oligonucleotide
ucaacccauucugugcuuu

SEQ ID NO: 1425495 - RNA, 19 nt, Artificial Sequence
  Description of Artificial Sequence: Synthetic oligonucleotide
aggagaggacaaugacgcu

SEQ ID NO: 1425496 - RNA, 19 nt, Artificial Sequence
  Description of Artificial Sequence: Synthetic oligonucleotide
ggucuggcccuccuugaag

SEQ ID NO: 1425497 - RNA, 19 nt, Artificial Sequence
  Description of Artificial Sequence: Synthetic oligonucleotide
gguagacauggaccuccgg

SEQ ID NO: 1425498 - RNA, 19 nt, Artificial Sequence
  Description of Artificial Sequence: Synthetic oligonucleotide
ccaauuuggggccuucguc

SEQ ID NO: 1425499 - RNA, 19 nt, Artificial Sequence
  Description of Artificial Sequence: Synthetic oligonucleotide
cagugauccguagccggcc

SEQ ID NO: 1425500 - RNA, 19 nt, Artificial Sequence
  Description of Artificial Sequence: Synthetic oligonucleotide
gguuguguuuaauaaggau

SEQ ID NO: 1425501 - RNA, 19 nt, Artificial Sequence
  Description of Artificial Sequence: Synthetic oligonucleotide
ggucuugcucccuggagga

SEQ ID NO: 1425502 - RNA, 19 nt, Artificial Sequence
  Description of Artificial Sequence: Synthetic oligonucleotide
ugcggaccacgaaguaccu

SEQ ID NO: 1425503 - RNA, 19 nt, Artificial Sequence
  Description of Artificial Sequence: Synthetic oligonucleotide
ugccauucugaugcccugu

SEQ ID NO: 1425504 - RNA, 19 nt, Artificial Sequence
  Description of Artificial Sequence: Synthetic oligonucleotide
ggugccaauuuaccgcuuc

SEQ ID NO: 1425505 - RNA, 19 nt, Artificial Sequence
  Description of Artificial Sequence: Synthetic oligonucleotide
agcacgucgcccauuucca

SEQ ID NO: 1425506 - RNA, 19 nt, Artificial Sequence
  Description of Artificial Sequence: Synthetic oligonucleotide
ggcuugacacagagaaccg

SEQ ID NO: 1425507 - RNA, 19 nt, Artificial Sequence
  Description of Artificial Sequence: Synthetic oligonucleotide
gaccuccggcuugacacag

SEQ ID NO: 1425508 - RNA, 19 nt, Artificial Sequence
  Description of Artificial Sequence: Synthetic oligonucleotide
ccugcuggagucagucacg

SEQ ID NO: 1425509 - RNA, 19 nt, Artificial Sequence
  Description of Artificial Sequence: Synthetic oligonucleotide
agacugguuggaggacgac

SEQ ID NO: 1425510 - RNA, 19 nt, Artificial Sequence
  Description of Artificial Sequence: Synthetic oligonucleotide
aaugacgcuccaggggcua

SEQ ID NO: 1425511 - RNA, 19 nt, Artificial Sequence
  Description of Artificial Sequence: Synthetic oligonucleotide
cgggaugcgguagacaugg

SEQ ID NO: 1425512 - RNA, 19 nt, Artificial Sequence
  Description of Artificial Sequence: Synthetic oligonucleotide
auggaccuccggcuugaca

SEQ ID NO: 1425513 - RNA, 19 nt, Artificial Sequence
  Description of Artificial Sequence: Synthetic oligonucleotide
ugccaauuuaccgcuucuu

SEQ ID NO: 1425514 - RNA, 19 nt, Artificial Sequence
  Description of Artificial Sequence: Synthetic oligonucleotide
caaugccacguugaaguca

SEQ ID NO: 1425515 - RNA, 19 nt, Artificial Sequence
  Description of Artificial Sequence: Synthetic oligonucleotide
accgcuucuugugcucagg

SEQ ID NO: 1425516 - RNA, 19 nt, Artificial Sequence
  Description of Artificial Sequence: Synthetic oligonucleotide
cagagcauguauuaacauu

SEQ ID NO: 1425517 - RNA, 19 nt, Artificial Sequence
  Description of Artificial Sequence: Synthetic oligonucleotide
aagucgccccagauaucag

SEQ ID NO: 1425518 - RNA, 19 nt, Artificial Sequence
  Description of Artificial Sequence: Synthetic oligonucleotide
gggcuuguuuugcaaacuc

SEQ ID NO: 1425519 - RNA, 19 nt, Artificial Sequence
  Description of Artificial Sequence: Synthetic oligonucleotide
gucgccccagauaucagca

SEQ ID NO: 1425520 - RNA, 19 nt, Artificial Sequence
  Description of Artificial Sequence: Synthetic oligonucleotide
uggggccugggcgaagagc

SEQ ID NO: 1425521 - RNA, 19 nt, Artificial Sequence
  Description of Artificial Sequence: Synthetic oligonucleotide
ggagccuuuugccuccuuc

SEQ ID NO: 1425522 - RNA, 19 nt, Artificial Sequence
  Description of Artificial Sequence: Synthetic oligonucleotide
ccucgcaagggcacguuag

SEQ ID NO: 1425523 - RNA, 19 nt, Artificial Sequence
  Description of Artificial Sequence: Synthetic oligonucleotide
gacgcuccaggggcuagcc

SEQ ID NO: 1425524 - RNA, 19 nt, Artificial Sequence
  Description of Artificial Sequence: Synthetic oligonucleotide
ccuguagccacgguuguug

SEQ ID NO: 1425525 - RNA, 19 nt, Artificial Sequence
  Description of Artificial Sequence: Synthetic oligonucleotide
caugucauggugccaauuu

SEQ ID NO: 1425526 - RNA, 19 nt, Artificial Sequence
  Description of Artificial Sequence: Synthetic oligonucleotide
gcacguuagugcuggucag

SEQ ID NO: 1425527 - RNA, 19 nt, Artificial Sequence
  Description of Artificial Sequence: Synthetic oligonucleotide
ggggccuucgucuggguuc

SEQ ID NO: 1425528 - RNA, 19 nt, Artificial Sequence
  Description of Artificial Sequence: Synthetic oligonucleotide
gcgguagacauggaccucc

SEQ ID NO: 1425529 - RNA, 19 nt, Artificial Sequence
  Description of Artificial Sequence: Synthetic oligonucleotide
ucgucuggguucugggcuu

SEQ ID NO: 1425530 - RNA, 19 nt, Artificial Sequence
  Description of Artificial Sequence: Synthetic oligonucleotide
ggcaaggagaggacaauga

SEQ ID NO: 1425531 - RNA, 19 nt, Artificial Sequence
  Description of Artificial Sequence: Synthetic oligonucleotide
agcccagguccaauuuggg

SEQ ID NO: 1425532 - RNA, 19 nt, Artificial Sequence
  Description of Artificial Sequence: Synthetic oligonucleotide
ggugaagucgccccagaua

SEQ ID NO: 1425533 - RNA, 19 nt, Artificial Sequence
  Description of Artificial Sequence: Synthetic oligonucleotide
caacccgacgggcagagcu

SEQ ID NO: 1425534 - RNA, 19 nt, Artificial Sequence
  Description of Artificial Sequence: Synthetic oligonucleotide
cacccgacaagggcuacug

SEQ ID NO: 1425535 - RNA, 19 nt, Artificial Sequence
  Description of Artificial Sequence: Synthetic oligonucleotide
ggaggcugacucucacugc

SEQ ID NO: 1425536 - RNA, 19 nt, Artificial Sequence
  Description of Artificial Sequence: Synthetic oligonucleotide
ugccaggaaacugguccac

SEQ ID NO: 1425537 - RNA, 19 nt, Artificial Sequence
  Description of Artificial Sequence: Synthetic oligonucleotide
ggguucugggcuuguuuug

SEQ ID NO: 1425538 - RNA, 19 nt, Artificial Sequence
  Description of Artificial Sequence: Synthetic oligonucleotide
ucuuggcgucccaggugcu

SEQ ID NO: 1425539 - RNA, 19 nt, Artificial Sequence
  Description of Artificial Sequence: Synthetic oligonucleotide
ccugacagcccacucaaga

SEQ ID NO: 1425540 - RNA, 19 nt, Artificial Sequence
  Description of Artificial Sequence: Synthetic oligonucleotide
guucagcccuccugugcug

SEQ ID NO: 1425541 - RNA, 19 nt, Artificial Sequence
  Description of Artificial Sequence: Synthetic oligonucleotide
uccugccaacccgacgggc

SEQ ID NO: 1425542 - RNA, 19 nt, Artificial Sequence
  Description of Artificial Sequence: Synthetic oligonucleotide
cgcagugauccguagccgg

SEQ ID NO: 1425543 - RNA, 19 nt, Artificial Sequence
  Description of Artificial Sequence: Synthetic oligonucleotide
gggauaagaguggaggucu

SEQ ID NO: 1425544 - RNA, 19 nt, Artificial Sequence
  Description of Artificial Sequence: Synthetic oligonucleotide
acauggaccuccggcuuga

SEQ ID NO: 1425545 - RNA, 19 nt, Artificial Sequence
  Description of Artificial Sequence: Synthetic oligonucleotide
ggcaccuccugaaacagaa

SEQ ID NO: 1425546 - RNA, 19 nt, Artificial Sequence
  Description of Artificial Sequence: Synthetic oligonucleotide
agaggacaaugacgcucca

SEQ ID NO: 1425547 - RNA, 19 nt, Artificial Sequence
  Description of Artificial Sequence: Synthetic oligonucleotide
uaaaagcacgucgcccauu

SEQ ID NO: 1425548 - RNA, 19 nt, Artificial Sequence
  Description of Artificial Sequence: Synthetic oligonucleotide
guacucgcucuccuccauc

SEQ ID NO: 1425549 - RNA, 19 nt, Artificial Sequence
  Description of Artificial Sequence: Synthetic oligonucleotide
cugcuuauccuuccagugu

SEQ ID NO: 1425550 - RNA, 19 nt, Artificial Sequence
  Description of Artificial Sequence: Synthetic oligonucleotide
gcuggucagcauauuagca

SEQ ID NO: 1425551 - RNA, 19 nt, Artificial Sequence
  Description of Artificial Sequence: Synthetic oligonucleotide
cacgguuguuggcccgcgg

SEQ ID NO: 1425552 - RNA, 19 nt, Artificial Sequence
  Description of Artificial Sequence: Synthetic oligonucleotide
cagcauauuagcagagcau

SEQ ID NO: 1425553 - RNA, 19 nt, Artificial Sequence
  Description of Artificial Sequence: Synthetic oligonucleotide
uguggacagugugcagagu

SEQ ID NO: 1425554 - RNA, 19 nt, Artificial Sequence
  Description of Artificial Sequence: Synthetic oligonucleotide
cagugaaaucugggacucc

SEQ ID NO: 1425555 - RNA, 19 nt, Artificial Sequence
  Description of Artificial Sequence: Synthetic oligonucleotide
caaaggcguccccucgguc

SEQ ID NO: 1425556 - RNA, 19 nt, Artificial Sequence
  Description of Artificial Sequence: Synthetic oligonucleotide
uggggccuucgucuggguu

SEQ ID NO: 1425557 - RNA, 19 nt, Artificial Sequence
  Description of Artificial Sequence: Synthetic oligonucleotide
gucgcccauuuccaucuuc

SEQ ID NO: 1425558 - RNA, 19 nt, Artificial Sequence
  Description of Artificial Sequence: Synthetic oligonucleotide
gauccguagccggccacuc

SEQ ID NO: 1425559 - RNA, 19 nt, Artificial Sequence
  Description of Artificial Sequence: Synthetic oligonucleotide
gccggugccuggcugagac

SEQ ID NO: 1425560 - RNA, 19 nt, Artificial Sequence
  Description of Artificial Sequence: Synthetic oligonucleotide
uugcgauguugaucuugau

SEQ ID NO: 1425561 - RNA, 19 nt, Artificial Sequence
  Description of Artificial Sequence: Synthetic oligonucleotide
cugacagcccacucaagau

SEQ ID NO: 1425562 - RNA, 19 nt, Artificial Sequence
  Description of Artificial Sequence: Synthetic oligonucleotide
cagucacgcucuccacagc

SEQ ID NO: 1425563 - RNA, 19 nt, Artificial Sequence
  Description of Artificial Sequence: Synthetic oligonucleotide
gugauccguagccggccac

SEQ ID NO: 1425564 - RNA, 19 nt, Artificial Sequence
  Description of Artificial Sequence: Synthetic oligonucleotide
acuggggccugggcgaaga

SEQ ID NO: 1425565 - RNA, 19 nt, Artificial Sequence
  Description of Artificial Sequence: Synthetic oligonucleotide
ccaaagccaaucccaauaa

SEQ ID NO: 1425566 - RNA, 19 nt, Artificial Sequence
  Description of Artificial Sequence: Synthetic oligonucleotide
gucccucccaugaggagga

SEQ ID NO: 1425567 - RNA, 19 nt, Artificial Sequence
  Description of Artificial Sequence: Synthetic oligonucleotide
cgacgggcagagcugaacc

SEQ ID NO: 1425568 - RNA, 19 nt, Artificial Sequence
  Description of Artificial Sequence: Synthetic oligonucleotide
ggcgggaugcgguagacau

SEQ ID NO: 1425569 - RNA, 19 nt, Artificial Sequence
  Description of Artificial Sequence: Synthetic oligonucleotide
augacgcuccaggggcuag

SEQ ID NO: 1425570 - RNA, 19 nt, Artificial Sequence
  Description of Artificial Sequence: Synthetic oligonucleotide
acccgacaagggcuacugu

SEQ ID NO: 1425571 - RNA, 19 nt, Artificial Sequence
  Description of Artificial Sequence: Synthetic oligonucleotide
uguuugcgauguugaucuu

SEQ ID NO: 1425572 - RNA, 19 nt, Artificial Sequence
  Description of Artificial Sequence: Synthetic oligonucleotide
gcuuauccuuccagugucc

SEQ ID NO: 1425573 - RNA, 19 nt, Artificial Sequence
  Description of Artificial Sequence: Synthetic oligonucleotide
gcagugauccguagccggc

SEQ ID NO: 1425574 - RNA, 19 nt, Artificial Sequence
  Description of Artificial Sequence: Synthetic oligonucleotide
gcaaugccacguugaaguc

SEQ ID NO: 1425575 - RNA, 19 nt, Artificial Sequence
  Description of Artificial Sequence: Synthetic oligonucleotide
aaggagccuuuugccuccu

SEQ ID NO: 1425576 - RNA, 19 nt, Artificial Sequence
  Description of Artificial Sequence: Synthetic oligonucleotide
aguaccugcuggagucagu

SEQ ID NO: 1425577 - RNA, 19 nt, Artificial Sequence
  Description of Artificial Sequence: Synthetic oligonucleotide
gucuugcucccuggaggag

SEQ ID NO: 1425578 - RNA, 19 nt, Artificial Sequence
  Description of Artificial Sequence: Synthetic oligonucleotide
gugccaauuuaccgcuucu

SEQ ID NO: 1425579 - RNA, 19 nt, Artificial Sequence
  Description of Artificial Sequence: Synthetic oligonucleotide
gcccuuucgcagugauccg

SEQ ID NO: 1425580 - RNA, 19 nt, Artificial Sequence
  Description of Artificial Sequence: Synthetic oligonucleotide
uggugccaauuuaccgcuu

SEQ ID NO: 1425581 - RNA, 19 nt, Artificial Sequence
  Description of Artificial Sequence: Synthetic oligonucleotide
gccuucgucuggguucugg

SEQ ID NO: 1425582 - RNA, 19 nt, Artificial Sequence
  Description of Artificial Sequence: Synthetic oligonucleotide
ugccaacccgacgggcaga

SEQ ID NO: 1425583 - RNA, 19 nt, Artificial Sequence
  Description of Artificial Sequence: Synthetic oligonucleotide
acccgacgggcagagcuga

SEQ ID NO: 1425584 - RNA, 19 nt, Artificial Sequence
  Description of Artificial Sequence: Synthetic oligonucleotide
ggucccucgcaagggcacg

SEQ ID NO: 1425585 - RNA, 19 nt, Artificial Sequence
  Description of Artificial Sequence: Synthetic oligonucleotide
gacgacgacccuguggauu

SEQ ID NO: 1425586 - RNA, 19 nt, Artificial Sequence
  Description of Artificial Sequence: Synthetic oligonucleotide
cuguuguuucacccacuua

SEQ ID NO: 1425587 - RNA, 19 nt, Artificial Sequence
  Description of Artificial Sequence: Synthetic oligonucleotide
caaugcggaccacgaagua

SEQ ID NO: 1425588 - RNA, 19 nt, Artificial Sequence
  Description of Artificial Sequence: Synthetic oligonucleotide
cagggugggucccucgcaa

SEQ ID NO: 1425589 - RNA, 19 nt, Artificial Sequence
  Description of Artificial Sequence: Synthetic oligonucleotide
caaacucacucuguuguuu

SEQ ID NO: 1425590 - RNA, 19 nt, Artificial Sequence
  Description of Artificial Sequence: Synthetic oligonucleotide
gcauauuagcagagcaugu

SEQ ID NO: 1425591 - RNA, 19 nt, Artificial Sequence
  Description of Artificial Sequence: Synthetic oligonucleotide
uguuggcccgcggcgggau

SEQ ID NO: 1425592 - RNA, 19 nt, Artificial Sequence
  Description of Artificial Sequence: Synthetic oligonucleotide
ccagccugacagugaaauc

SEQ ID NO: 1425593 - RNA, 19 nt, Artificial Sequence
  Description of Artificial Sequence: Synthetic oligonucleotide
gcuccugucuucuggcugu

SEQ ID NO: 1425594 - RNA, 19 nt, Artificial Sequence
  Description of Artificial Sequence: Synthetic oligonucleotide
gaaccgacucguacucgcu

SEQ ID NO: 1425595 - RNA, 19 nt, Artificial Sequence
  Description of Artificial Sequence: Synthetic oligonucleotide
cuggggccugggcgaagag

SEQ ID NO: 1425596 - RNA, 19 nt, Artificial Sequence
  Description of Artificial Sequence: Synthetic oligonucleotide
gggcgaagagcuccccuga

SEQ ID NO: 1425597 - RNA, 19 nt, Artificial Sequence
  Description of Artificial Sequence: Synthetic oligonucleotide
cucgcaagggcacguuagu

SEQ ID NO: 1425598 - RNA, 19 nt, Artificial Sequence
  Description of Artificial Sequence: Synthetic oligonucleotide
ggaccuccggcuugacaca

SEQ ID NO: 1425599 - RNA, 19 nt, Artificial Sequence
  Description of Artificial Sequence: Synthetic oligonucleotide
cucuguuguuucacccacu

SEQ ID NO: 1425600 - RNA, 19 nt, Artificial Sequence
  Description of Artificial Sequence: Synthetic oligonucleotide
cguugaagucaaaggcguc

SEQ ID NO: 1425601 - RNA, 19 nt, Artificial Sequence
  Description of Artificial Sequence: Synthetic oligonucleotide
caaugacgcuccaggggcu

SEQ ID NO: 1425602 - RNA, 19 nt, Artificial Sequence
  Description of Artificial Sequence: Synthetic oligonucleotide
ccggcuugacacagagaac

SEQ ID NO: 1425603 - RNA, 19 nt, Artificial Sequence
  Description of Artificial Sequence: Synthetic oligonucleotide
ccucuggaaggcacccgac

SEQ ID NO: 1425604 - RNA, 19 nt, Artificial Sequence
  Description of Artificial Sequence: Synthetic oligonucleotide
cuuagacuguggccagggu

SEQ ID NO: 1425605 - RNA, 19 nt, Artificial Sequence
  Description of Artificial Sequence: Synthetic oligonucleotide
cgacccuguggauuuggug

SEQ ID NO: 1425606 - RNA, 19 nt, Artificial Sequence
  Description of Artificial Sequence: Synthetic oligonucleotide
gccuuuugccuccuucugu

SEQ ID NO: 1425607 - RNA, 19 nt, Artificial Sequence
  Description of Artificial Sequence: Synthetic oligonucleotide
cgguagacauggaccuccg

SEQ ID NO: 1425608 - RNA, 19 nt, Artificial Sequence
  Description of Artificial Sequence: Synthetic oligonucleotide
cuccggcuugacacagaga

SEQ ID NO: 1425609 - RNA, 19 nt, Artificial Sequence
  Description of Artificial Sequence: Synthetic oligonucleotide
guuggaggacgacgacccu

SEQ ID NO: 1425610 - RNA, 19 nt, Artificial Sequence
  Description of Artificial Sequence: Synthetic oligonucleotide
cggugccuggcugagacug

SEQ ID NO: 1425611 - RNA, 19 nt, Artificial Sequence
  Description of Artificial Sequence: Synthetic oligonucleotide
ccucgguccccaaagccaa

SEQ ID NO: 1425612 - RNA, 19 nt, Artificial Sequence
  Description of Artificial Sequence: Synthetic oligonucleotide
gagagccccucaccagggu

SEQ ID NO: 1425613 - RNA, 19 nt, Artificial Sequence
  Description of Artificial Sequence: Synthetic oligonucleotide
agggcacguuagugcuggu

SEQ ID NO: 1425614 - RNA, 19 nt, Artificial Sequence
  Description of Artificial Sequence: Synthetic oligonucleotide
cagccggugccuggcugag

SEQ ID NO: 1425615 - RNA, 19 nt, Artificial Sequence
  Description of Artificial Sequence: Synthetic oligonucleotide
gccauucugaugcccugua

SEQ ID NO: 1425616 - RNA, 19 nt, Artificial Sequence
  Description of Artificial Sequence: Synthetic oligonucleotide
cuggaguguuugcuccugu

SEQ ID NO: 1425617 - RNA, 19 nt, Artificial Sequence
  Description of Artificial Sequence: Synthetic oligonucleotide
ggaggacgacgacccugug

SEQ ID NO: 1425618 - RNA, 19 nt, Artificial Sequence
  Description of Artificial Sequence: Synthetic oligonucleotide
cuugaagcccagguccaau

SEQ ID NO: 1425619 - RNA, 19 nt, Artificial Sequence
  Description of Artificial Sequence: Synthetic oligonucleotide
cauggaccuccggcuugac

SEQ ID NO: 1425620 - RNA, 19 nt, Artificial Sequence
  Description of Artificial Sequence: Synthetic oligonucleotide
gggcacguuagugcugguc

SEQ ID NO: 1425621 - RNA, 19 nt, Artificial Sequence
  Description of Artificial Sequence: Synthetic oligonucleotide
ccacaacaguggcauguca

SEQ ID NO: 1425622 - RNA, 19 nt, Artificial Sequence
  Description of Artificial Sequence: Synthetic oligonucleotide
gccacgguuguuggcccgc

SEQ ID NO: 1425623 - RNA, 19 nt, Artificial Sequence
  Description of Artificial Sequence: Synthetic oligonucleotide
cugggcgaagagcuccccu

SEQ ID NO: 1425624 - RNA, 19 nt, Artificial Sequence
  Description of Artificial Sequence: Synthetic oligonucleotide
agggugugugagagccccu

SEQ ID NO: 1425625 - RNA, 19 nt, Artificial Sequence
  Description of Artificial Sequence: Synthetic oligonucleotide
gcuccccugagguccuguc

SEQ ID NO: 1425626 - RNA, 19 nt, Artificial Sequence
  Description of Artificial Sequence: Synthetic oligonucleotide
gcaaacucacucuguuguu

SEQ ID NO: 1425627 - RNA, 19 nt, Artificial Sequence
  Description of Artificial Sequence: Synthetic oligonucleotide
aggagccuuuugccuccuu

SEQ ID NO: 1425628 - RNA, 19 nt, Artificial Sequence
  Description of Artificial Sequence: Synthetic oligonucleotide
ucccucgcaagggcacguu

SEQ ID NO: 1425629 - RNA, 19 nt, Artificial Sequence
  Description of Artificial Sequence: Synthetic oligonucleotide
gcgggaugcgguagacaug

SEQ ID NO: 1425630 - RNA, 19 nt, Artificial Sequence
  Description of Artificial Sequence: Synthetic oligonucleotide
cccugacagcccacucaag

SEQ ID NO: 1425631 - RNA, 19 nt, Artificial Sequence
  Description of Artificial Sequence: Synthetic oligonucleotide
cguagccggccacuccacc

SEQ ID NO: 1425632 - RNA, 19 nt, Artificial Sequence
  Description of Artificial Sequence: Synthetic oligonucleotide
ccagccggugccuggcuga

SEQ ID NO: 1425633 - RNA, 19 nt, Artificial Sequence
  Description of Artificial Sequence: Synthetic oligonucleotide
gcggaccacgaaguaccug

SEQ ID NO: 1425634 - RNA, 19 nt, Artificial Sequence
  Description of Artificial Sequence: Synthetic oligonucleotide
ccgacucguacucgcucuc

SEQ ID NO: 1425635 - RNA, 19 nt, Artificial Sequence
  Description of Artificial Sequence: Synthetic oligonucleotide
accugcccuuucgcaguga

SEQ ID NO: 1425636 - RNA, 19 nt, Artificial Sequence
  Description of Artificial Sequence: Synthetic oligonucleotide
ccgacgggcagagcugaac

SEQ ID NO: 1425637 - RNA, 19 nt, Artificial Sequence
  Description of Artificial Sequence: Synthetic oligonucleotide
cccuguggauuuggugaag

SEQ ID NO: 1425638 - RNA, 19 nt, Artificial Sequence
  Description of Artificial Sequence: Synthetic oligonucleotide
ggccacaaacucaacccau

SEQ ID NO: 1425639 - RNA, 19 nt, Artificial Sequence
  Description of Artificial Sequence: Synthetic oligonucleotide
cucaacccauucugugcuu

SEQ ID NO: 1425640 - RNA, 19 nt, Artificial Sequence
  Description of Artificial Sequence: Synthetic oligonucleotide
cgacucguacucgcucucc

SEQ ID NO: 1425641 - RNA, 19 nt, Artificial Sequence
  Description of Artificial Sequence: Synthetic oligonucleotide
ccacgguuguuggcccgcg

SEQ ID NO: 1425642 - RNA, 19 nt, Artificial Sequence
  Description of Artificial Sequence: Synthetic oligonucleotide
ggacuccugccaacccgac

SEQ ID NO: 1425643 - RNA, 19 nt, Artificial Sequence
  Description of Artificial Sequence: Synthetic oligonucleotide
ccguagccggccacuccac

SEQ ID NO: 1425644 - RNA, 19 nt, Artificial Sequence
  Description of Artificial Sequence: Synthetic oligonucleotide
ccuguggauuuggugaagu

SEQ ID NO: 1425645 - RNA, 19 nt, Artificial Sequence
  Description of Artificial Sequence: Synthetic oligonucleotide
ccagggugggucccucgca

SEQ ID NO: 1425646 - RNA, 19 nt, Artificial Sequence
  Description of Artificial Sequence: Synthetic oligonucleotide
agccggugccuggcugaga

SEQ ID NO: 1425647 - RNA, 19 nt, Artificial Sequence
  Description of Artificial Sequence: Synthetic oligonucleotide
ggaccacgaaguaccugcu

SEQ ID NO: 1425648 - RNA, 19 nt, Artificial Sequence
  Description of Artificial Sequence: Synthetic oligonucleotide
ggcugguccagcugccauu

SEQ ID NO: 1425649 - RNA, 19 nt, Artificial Sequence
  Description of Artificial Sequence: Synthetic oligonucleotide
ggcacccgacaagggcuac

SEQ ID NO: 1425650 - RNA, 19 nt, Artificial Sequence
  Description of Artificial Sequence: Synthetic oligonucleotide
gggcuagccaaggagccuu

SEQ ID NO: 1425651 - RNA, 19 nt, Artificial Sequence
  Description of Artificial Sequence: Synthetic oligonucleotide
gucccucgcaagggcacgu

SEQ ID NO: 1425652 - RNA, 19 nt, Artificial Sequence
  Description of Artificial Sequence: Synthetic oligonucleotide
gggccuucgucuggguucu

SEQ ID NO: 1425653 - RNA, 19 nt, Artificial Sequence
  Description of Artificial Sequence: Synthetic oligonucleotide
ggcaugucauggugccaau

SEQ ID NO: 1425654 - RNA, 19 nt, Artificial Sequence
  Description of Artificial Sequence: Synthetic oligonucleotide
gcggcgggaugcgguagac

SEQ ID NO: 1425655 - RNA, 19 nt, Artificial Sequence
  Description of Artificial Sequence: Synthetic oligonucleotide
cagguccaauuuggggccu

SEQ ID NO: 1425656 - RNA, 19 nt, Artificial Sequence
  Description of Artificial Sequence: Synthetic oligonucleotide
gcacgucgcccauuuccau

SEQ ID NO: 1425657 - RNA, 19 nt, Artificial Sequence
  Description of Artificial Sequence: Synthetic oligonucleotide
cccuuucgcagugauccgu

SEQ ID NO: 1425658 - RNA, 19 nt, Artificial Sequence
  Description of Artificial Sequence: Synthetic oligonucleotide
ccugcccuuucgcagugau

SEQ ID NO: 1425659 - RNA, 19 nt, Artificial Sequence
  Description of Artificial Sequence: Synthetic oligonucleotide
cccucgcaagggcacguua

SEQ ID NO: 1425660 - RNA, 19 nt, Artificial Sequence
  Description of Artificial Sequence: Synthetic oligonucleotide
caggugcugcuuccuucuu

SEQ ID NO: 1425661 - RNA, 19 nt, Artificial Sequence
  Description of Artificial Sequence: Synthetic oligonucleotide
ggacgacgacccuguggau

SEQ ID NO: 1425662 - RNA, 19 nt, Artificial Sequence
  Description of Artificial Sequence: Synthetic oligonucleotide
gcacccgacaagggcuacu

SEQ ID NO: 1425663 - RNA, 19 nt, Artificial Sequence
  Description of Artificial Sequence: Synthetic oligonucleotide
cgacgacccuguggauuug

SEQ ID NO: 1425664 - RNA, 19 nt, Artificial Sequence
  Description of Artificial Sequence: Synthetic oligonucleotide
cccgacgggcagagcugaa

SEQ ID NO: 1425665 - RNA, 19 nt, Artificial Sequence
  Description of Artificial Sequence: Synthetic oligonucleotide
cguccccucgguccccaaa

SEQ ID NO: 1425666 - RNA, 19 nt, Artificial Sequence
  Description of Artificial Sequence: Synthetic oligonucleotide
gcguccccucgguccccaa

SEQ ID NO: 1425667 - RNA, 19 nt, Artificial Sequence
  Description of Artificial Sequence: Synthetic oligonucleotide
cggcgggaugcgguagaca

SEQ ID NO: 1425668 - RNA, 19 nt, Artificial Sequence
  Description of Artificial Sequence: Synthetic oligonucleotide
ggcgucccaggugcugcuu

SEQ ID NO: 1425669 - RNA, 19 nt, Artificial Sequence
  Description of Artificial Sequence: Synthetic oligonucleotide
ccacuccaccauggcuggu

SEQ ID NO: 1425670 - RNA, 19 nt, Artificial Sequence
  Description of Artificial Sequence: Synthetic oligonucleotide
aaauuuauaaagucuagac

SEQ ID NO: 1425671 - RNA, 19 nt, Artificial Sequence
  Description of Artificial Sequence: Synthetic oligonucleotide
aaaagacuagcuuuuagcc

SEQ ID NO: 1425672 - RNA, 19 nt, Artificial Sequence
  Description of Artificial Sequence: Synthetic oligonucleotide
aggaucauuuucuagaugc

SEQ ID NO: 1425673 - RNA, 19 nt, Artificial Sequence
  Description of Artificial Sequence: Synthetic oligonucleotide
auacuuauuacucauagag

SEQ ID NO: 1425674 - RNA, 19 nt, Artificial Sequence
  Description of Artificial Sequence: Synthetic oligonucleotide
aaacaguacucuuaauucc

SEQ ID NO: 1425675 - RNA, 19 nt, Artificial Sequence
  Description of Artificial Sequence: Synthetic oligonucleotide
uguaucaagauuacaauag

SEQ ID NO: 1425676 - RNA, 19 nt, Artificial Sequence
  Description of Artificial Sequence: Synthetic oligonucleotide
agcuauuucaaauccaugc

SEQ ID NO: 1425677 - RNA, 19 nt, Artificial Sequence
  Description of Artificial Sequence: Synthetic oligonucleotide
uuagacugaacaaauaaag

SEQ ID NO: 1425678 - RNA, 19 nt, Artificial Sequence
  Description of Artificial Sequence: Synthetic oligonucleotide
ugaaauuuaacguaacgga

SEQ ID NO: 1425679 - RNA, 19 nt, Artificial Sequence
  Description of Artificial Sequence: Synthetic oligonucleotide
auagaaacacaagugaugc

SEQ ID NO: 1425680 - RNA, 19 nt, Artificial Sequence
  Description of Artificial Sequence: Synthetic oligonucleotide
aauuuaacguaacggagag

SEQ ID NO: 1425681 - RNA, 19 nt, Artificial Sequence
  Description of Artificial Sequence: Synthetic oligonucleotide
gaaucaagcaauuauccag

SEQ ID NO: 1425682 - RNA, 19 nt, Artificial Sequence
  Description of Artificial Sequence: Synthetic oligonucleotide
aauaaagcuugacagguug

SEQ ID NO: 1425683 - RNA, 19 nt, Artificial Sequence
  Description of Artificial Sequence: Synthetic oligonucleotide
aaauacgaaauucucguug

SEQ ID NO: 1425684 - RNA, 19 nt, Artificial Sequence
  Description of Artificial Sequence: Synthetic oligonucleotide
ugugauuccagacacagcu

SEQ ID NO: 1425685 - RNA, 19 nt, Artificial Sequence
  Description of Artificial Sequence: Synthetic oligonucleotide
acuuauuacucauagagcu

SEQ ID NO: 1425686 - RNA, 19 nt, Artificial Sequence
  Description of Artificial Sequence: Synthetic oligonucleotide
ucaaaauccauagagcggg

SEQ ID NO: 1425687 - RNA, 19 nt, Artificial Sequence
  Description of Artificial Sequence: Synthetic oligonucleotide
aaugcaagucaauucuuac

SEQ ID NO: 1425688 - RNA, 19 nt, Artificial Sequence
  Description of Artificial Sequence: Synthetic oligonucleotide
ugauuuauugguaauggca

SEQ ID NO: 1425689 - RNA, 19 nt, Artificial Sequence
  Description of Artificial Sequence: Synthetic oligonucleotide
uuucauggaauaaagcuug

SEQ ID NO: 1425690 - RNA, 19 nt, Artificial Sequence
  Description of Artificial Sequence: Synthetic oligonucleotide
aagccaauaauucaaacaa

SEQ ID NO: 1425691 - RNA, 19 nt, Artificial Sequence
  Description of Artificial Sequence: Synthetic oligonucleotide
uuuaacguaacggagagga

SEQ ID NO: 1425692 - RNA, 19 nt, Artificial Sequence
  Description of Artificial Sequence: Synthetic oligonucleotide
uguaucaaaacacucuaug

SEQ ID NO: 1425693 - RNA, 19 nt, Artificial Sequence
  Description of Artificial Sequence: Synthetic oligonucleotide
ugaacauuacuuaaugaca

SEQ ID NO: 1425694 - RNA, 19 nt, Artificial Sequence
  Description of Artificial Sequence: Synthetic oligonucleotide
aagcuugacagguugauug

SEQ ID NO: 1425695 - RNA, 19 nt, Artificial Sequence
  Description of Artificial Sequence: Synthetic oligonucleotide
aacggagaggaacaaugcc

SEQ ID NO: 1425696 - RNA, 19 nt, Artificial Sequence
  Description of Artificial Sequence: Synthetic oligonucleotide
uuacucauagagcugaaug

SEQ ID NO: 1425697 - RNA, 19 nt, Artificial Sequence
  Description of Artificial Sequence: Synthetic oligonucleotide
agucuagacacccagaugu

SEQ ID NO: 1425698 - RNA, 19 nt, Artificial Sequence
  Description of Artificial Sequence: Synthetic oligonucleotide
aacugugaaauacauaaaa

SEQ ID NO: 1425699 - RNA, 19 nt, Artificial Sequence
  Description of Artificial Sequence: Synthetic oligonucleotide
aauacgaaauucucguugu

SEQ ID NO: 1425700 - RNA, 19 nt, Artificial Sequence
  Description of Artificial Sequence: Synthetic oligonucleotide
aaugugauuccagacacag

SEQ ID NO: 1425701 - RNA, 19 nt, Artificial Sequence
  Description of Artificial Sequence: Synthetic oligonucleotide
cugaacauuacuuaaugac

SEQ ID NO: 1425702 - RNA, 19 nt, Artificial Sequence
  Description of Artificial Sequence: Synthetic oligonucleotide
cuuaaugacacaaauuuca

SEQ ID NO: 1425703 - RNA, 19 nt, Artificial Sequence
  Description of Artificial Sequence: Synthetic oligonucleotide
uuaagcuuggcaaaaguaa

SEQ ID NO: 1425704 - RNA, 19 nt, Artificial Sequence
  Description of Artificial Sequence: Synthetic oligonucleotide
guaaaauacgaaauucucg

SEQ ID NO: 1425705 - RNA, 19 nt, Artificial Sequence
  Description of Artificial Sequence: Synthetic oligonucleotide
cugaaauuuaacguaacgg

SEQ ID NO: 1425706 - RNA, 19 nt, Artificial Sequence
  Description of Artificial Sequence: Synthetic oligonucleotide
aguuacacuguuaacauuc

SEQ ID NO: 1425707 - RNA, 19 nt, Artificial Sequence
  Description of Artificial Sequence: Synthetic oligonucleotide
aaauccauauagcccuucg

SEQ ID NO: 1425708 - RNA, 19 nt, Artificial Sequence
  Description of Artificial Sequence: Synthetic oligonucleotide
ucuuuuguacccuaauggc

SEQ ID NO: 1425709 - RNA, 19 nt, Artificial Sequence
  Description of Artificial Sequence: Synthetic oligonucleotide
ucuuacucaaacaugguua

SEQ ID NO: 1425710 - RNA, 19 nt, Artificial Sequence
  Description of Artificial Sequence: Synthetic oligonucleotide
uuauauagaaugacaaaau

SEQ ID NO: 1425711 - RNA, 19 nt, Artificial Sequence
  Description of Artificial Sequence: Synthetic oligonucleotide
uggaauaaagcuugacagg

SEQ ID NO: 1425712 - RNA, 19 nt, Artificial Sequence
  Description of Artificial Sequence: Synthetic oligonucleotide
aauagaaacacaagugaug

SEQ ID NO: 1425713 - RNA, 19 nt, Artificial Sequence
  Description of Artificial Sequence: Synthetic oligonucleotide
uguucuaaaucaacaaaac

SEQ ID NO: 1425714 - RNA, 19 nt, Artificial Sequence
  Description of Artificial Sequence: Synthetic oligonucleotide
auaaagucuagacacccag

SEQ ID NO: 1425715 - RNA, 19 nt, Artificial Sequence
  Description of Artificial Sequence: Synthetic oligonucleotide
auuacuuaaugacacaaau

SEQ ID NO: 1425716 - RNA, 19 nt, Artificial Sequence
  Description of Artificial Sequence: Synthetic oligonucleotide
aguaauaaguagcugcuca

SEQ ID NO: 1425717 - RNA, 19 nt, Artificial Sequence
  Description of Artificial Sequence: Synthetic oligonucleotide
aaaguuuaagccaauaauu

SEQ ID NO: 1425718 - RNA, 19 nt, Artificial Sequence
  Description of Artificial Sequence: Synthetic oligonucleotide
aauccauauagcccuucgg

SEQ ID NO: 1425719 - RNA, 19 nt, Artificial Sequence
  Description of Artificial Sequence: Synthetic oligonucleotide
accuugauuagacugaaca

SEQ ID NO: 1425720 - RNA, 19 nt, Artificial Sequence
  Description of Artificial Sequence: Synthetic oligonucleotide
agaaggacaugucuuuucg

SEQ ID NO: 1425721 - RNA, 19 nt, Artificial Sequence
  Description of Artificial Sequence: Synthetic oligonucleotide
gauuagacugaacaaauaa

SEQ ID NO: 1425722 - RNA, 19 nt, Artificial Sequence
  Description of Artificial Sequence: Synthetic oligonucleotide
acagacaucaccacagacc

SEQ ID NO: 1425723 - RNA, 19 nt, Artificial Sequence
  Description of Artificial Sequence: Synthetic oligonucleotide
gcugauauauuguuggugg

SEQ ID NO: 1425724 - RNA, 19 nt, Artificial Sequence
  Description of Artificial Sequence: Synthetic oligonucleotide
uacuuauuacucauagagc

SEQ ID NO: 1425725 - RNA, 19 nt, Artificial Sequence
  Description of Artificial Sequence: Synthetic oligonucleotide
aaagucuagacacccagau

SEQ ID NO: 1425726 - RNA, 19 nt, Artificial Sequence
  Description of Artificial Sequence: Synthetic oligonucleotide
uuauaaagucuagacaccc

SEQ ID NO: 1425727 - RNA, 19 nt, Artificial Sequence
  Description of Artificial Sequence: Synthetic oligonucleotide
cuuuuagccaaugugauuc

SEQ ID NO: 1425728 - RNA, 19 nt, Artificial Sequence
  Description of Artificial Sequence: Synthetic oligonucleotide
acaaauuucagaagaggac

SEQ ID NO: 1425729 - RNA, 19 nt, Artificial Sequence
  Description of Artificial Sequence: Synthetic oligonucleotide
ugacuuuuauuuacaacug

SEQ ID NO: 1425730 - RNA, 19 nt, Artificial Sequence
  Description of Artificial Sequence: Synthetic oligonucleotide
aaauuuaacguaacggaga

SEQ ID NO: 1425731 - RNA, 19 nt, Artificial Sequence
  Description of Artificial Sequence: Synthetic oligonucleotide
uuagcuauuucaaauccau

SEQ ID NO: 1425732 - RNA, 19 nt, Artificial Sequence
  Description of Artificial Sequence: Synthetic oligonucleotide
acuguacucacauacaaau

SEQ ID NO: 1425733 - RNA, 19 nt, Artificial Sequence
  Description of Artificial Sequence: Synthetic oligonucleotide
aagaggacuacuucaacau

SEQ ID NO: 1425734 - RNA, 19 nt, Artificial Sequence
  Description of Artificial Sequence: Synthetic oligonucleotide
acaaucagauuccaagaag

SEQ ID NO: 1425735 - RNA, 19 nt, Artificial Sequence
  Description of Artificial Sequence: Synthetic oligonucleotide
aauuucagaagaggacuac

SEQ ID NO: 1425736 - RNA, 19 nt, Artificial Sequence
  Description of Artificial Sequence: Synthetic oligonucleotide
uuauuacucauagagcuga

SEQ ID NO: 1425737 - RNA, 19 nt, Artificial Sequence
  Description of Artificial Sequence: Synthetic oligonucleotide
cuagcuuuuagccaaugug

SEQ ID NO: 1425738 - RNA, 19 nt, Artificial Sequence
  Description of Artificial Sequence: Synthetic oligonucleotide
cuuacucaaacaugguuag

SEQ ID NO: 1425739 - RNA, 19 nt, Artificial Sequence
  Description of Artificial Sequence: Synthetic oligonucleotide
ucgauucucacuuuguuuc

SEQ ID NO: 1425740 - RNA, 19 nt, Artificial Sequence
  Description of Artificial Sequence: Synthetic oligonucleotide
ugaaauuucauggaauaaa

SEQ ID NO: 1425741 - RNA, 19 nt, Artificial Sequence
  Description of Artificial Sequence: Synthetic oligonucleotide
uuuucguaaacaguuguca

SEQ ID NO: 1425742 - RNA, 19 nt, Artificial Sequence
  Description of Artificial Sequence: Synthetic oligonucleotide
gagcaauccucaaacaugg

SEQ ID NO: 1425743 - RNA, 19 nt, Artificial Sequence
  Description of Artificial Sequence: Synthetic oligonucleotide
uugauuagacugaacaaau

SEQ ID NO: 1425744 - RNA, 19 nt, Artificial Sequence
  Description of Artificial Sequence: Synthetic oligonucleotide
uuuuguacccuaauggcuu

SEQ ID NO: 1425745 - RNA, 19 nt, Artificial Sequence
  Description of Artificial Sequence: Synthetic oligonucleotide
ucuaacauucuguuccucu

SEQ ID NO: 1425746 - RNA, 19 nt, Artificial Sequence
  Description of Artificial Sequence: Synthetic oligonucleotide
uuagccaaugugauuccag

SEQ ID NO: 1425747 - RNA, 19 nt, Artificial Sequence
  Description of Artificial Sequence: Synthetic oligonucleotide
aaauucucguugucucuuc

SEQ ID NO: 1425748 - RNA, 19 nt, Artificial Sequence
  Description of Artificial Sequence: Synthetic oligonucleotide
aauuuaagcuuggcaaaag

SEQ ID NO: 1425749 - RNA, 19 nt, Artificial Sequence
  Description of Artificial Sequence: Synthetic oligonucleotide
aauccauagagcgggguag

SEQ ID NO: 1425750 - RNA, 19 nt, Artificial Sequence
  Description of Artificial Sequence: Synthetic oligonucleotide
gcauuaaauccauauagcc

SEQ ID NO: 1425751 - RNA, 19 nt, Artificial Sequence
  Description of Artificial Sequence: Synthetic oligonucleotide
aauuccucuaacauucugu

SEQ ID NO: 1425752 - RNA, 19 nt, Artificial Sequence
  Description of Artificial Sequence: Synthetic oligonucleotide
ggauacuuauuacucauag

SEQ ID NO: 1425753 - RNA, 19 nt, Artificial Sequence
  Description of Artificial Sequence: Synthetic oligonucleotide
cauagagcgggguagguug

SEQ ID NO: 1425754 - RNA, 19 nt, Artificial Sequence
  Description of Artificial Sequence: Synthetic oligonucleotide
auauauuguugguggcagc

SEQ ID NO: 1425755 - RNA, 19 nt, Artificial Sequence
  Description of Artificial Sequence: Synthetic oligonucleotide
aacauuacuuaaugacaca

SEQ ID NO: 1425756 - RNA, 19 nt, Artificial Sequence
  Description of Artificial Sequence: Synthetic oligonucleotide
uguuccucuaaaagacuag

SEQ ID NO: 1425757 - RNA, 19 nt, Artificial Sequence
  Description of Artificial Sequence: Synthetic oligonucleotide
aauccucaaacauggucca

SEQ ID NO: 1425758 - RNA, 19 nt, Artificial Sequence
  Description of Artificial Sequence: Synthetic oligonucleotide
uacacuuauauagaaugac

SEQ ID NO: 1425759 - RNA, 19 nt, Artificial Sequence
  Description of Artificial Sequence: Synthetic oligonucleotide
ucaagcaauuauccaggag

SEQ ID NO: 1425760 - RNA, 19 nt, Artificial Sequence
  Description of Artificial Sequence: Synthetic oligonucleotide
uacugaucgauucucacuu

SEQ ID NO: 1425761 - RNA, 19 nt, Artificial Sequence
  Description of Artificial Sequence: Synthetic oligonucleotide
aaacacaagugaugccauc

SEQ ID NO: 1425762 - RNA, 19 nt, Artificial Sequence
  Description of Artificial Sequence: Synthetic oligonucleotide
ucucacuuuguuucgaaaa

SEQ ID NO: 1425763 - RNA, 19 nt, Artificial Sequence
  Description of Artificial Sequence: Synthetic oligonucleotide
aaaacacucuaugugugca

SEQ ID NO: 1425764 - RNA, 19 nt, Artificial Sequence
  Description of Artificial Sequence: Synthetic oligonucleotide
uacccuaauggcuuucucc

SEQ ID NO: 1425765 - RNA, 19 nt, Artificial Sequence
  Description of Artificial Sequence: Synthetic oligonucleotide
caucugaacaaaagcaaug

SEQ ID NO: 1425766 - RNA, 19 nt, Artificial Sequence
  Description of Artificial Sequence: Synthetic oligonucleotide
cacaaauuucagaagagga

SEQ ID NO: 1425767 - RNA, 19 nt, Artificial Sequence
  Description of Artificial Sequence: Synthetic oligonucleotide
caaaagcaaugauuuauug

SEQ ID NO: 1425768 - RNA, 19 nt, Artificial Sequence
  Description of Artificial Sequence: Synthetic oligonucleotide
augguuagcuauuucaaau

SEQ ID NO: 1425769 - RNA, 19 nt, Artificial Sequence
  Description of Artificial Sequence: Synthetic oligonucleotide
auuuaagcuuggcaaaagu

SEQ ID NO: 1425770 - RNA, 19 nt, Artificial Sequence
  Description of Artificial Sequence: Synthetic oligonucleotide
uuacuuaaugacacaaauu

SEQ ID NO: 1425771 - RNA, 19 nt, Artificial Sequence
  Description of Artificial Sequence: Synthetic oligonucleotide
uaacggagaggaacaaugc

SEQ ID NO: 1425772 - RNA, 19 nt, Artificial Sequence
  Description of Artificial Sequence: Synthetic oligonucleotide
cuaaaucaacaaaacugug

SEQ ID NO: 1425773 - RNA, 19 nt, Artificial Sequence
  Description of Artificial Sequence: Synthetic oligonucleotide
aacugcauguaucaagauu

SEQ ID NO: 1425774 - RNA, 19 nt, Artificial Sequence
  Description of Artificial Sequence: Synthetic oligonucleotide
uuccaagaaggacaugucu

SEQ ID NO: 1425775 - RNA, 19 nt, Artificial Sequence
  Description of Artificial Sequence: Synthetic oligonucleotide
acucuaugugugcaaacag

SEQ ID NO: 1425776 - RNA, 19 nt, Artificial Sequence
  Description of Artificial Sequence: Synthetic oligonucleotide
auccauauagcccuucgga

SEQ ID NO: 1425777 - RNA, 19 nt, Artificial Sequence
  Description of Artificial Sequence: Synthetic oligonucleotide
uacucacauacaaaugaac

SEQ ID NO: 1425778 - RNA, 19 nt, Artificial Sequence
  Description of Artificial Sequence: Synthetic oligonucleotide
cuuauuacucauagagcug

SEQ ID NO: 1425779 - RNA, 19 nt, Artificial Sequence
  Description of Artificial Sequence: Synthetic oligonucleotide
acuuauauagaaugacaaa

SEQ ID NO: 1425780 - RNA, 19 nt, Artificial Sequence
  Description of Artificial Sequence: Synthetic oligonucleotide
uguguagauagguuucaga

SEQ ID NO: 1425781 - RNA, 19 nt, Artificial Sequence
  Description of Artificial Sequence: Synthetic oligonucleotide
uguagauagguuucagauc

SEQ ID NO: 1425782 - RNA, 19 nt, Artificial Sequence
  Description of Artificial Sequence: Synthetic oligonucleotide
acucuuaauuccucuaaca

SEQ ID NO: 1425783 - RNA, 19 nt, Artificial Sequence
  Description of Artificial Sequence: Synthetic oligonucleotide
uaacguaacggagaggaac

SEQ ID NO: 1425784 - RNA, 19 nt, Artificial Sequence
  Description of Artificial Sequence: Synthetic oligonucleotide
guaacggagaggaacaaug

SEQ ID NO: 1425785 - RNA, 19 nt, Artificial Sequence
  Description of Artificial Sequence: Synthetic oligonucleotide
aacaguacucuuaauuccu

SEQ ID NO: 1425786 - RNA, 19 nt, Artificial Sequence
  Description of Artificial Sequence: Synthetic oligonucleotide
auauagaaugacaaaauuu

SEQ ID NO: 1425787 - RNA, 19 nt, Artificial Sequence
  Description of Artificial Sequence: Synthetic oligonucleotide
acuuaaugacacaaauuuc

SEQ ID NO: 1425788 - RNA, 19 nt, Artificial Sequence
  Description of Artificial Sequence: Synthetic oligonucleotide
uccucuaaaagacuagcuu

SEQ ID NO: 1425789 - RNA, 19 nt, Artificial Sequence
  Description of Artificial Sequence: Synthetic oligonucleotide
cauggaauaaagcuugaca

SEQ ID NO: 1425790 - RNA, 19 nt, Artificial Sequence
  Description of Artificial Sequence: Synthetic oligonucleotide
aaggcauuaaauccauaua

SEQ ID NO: 1425791 - RNA, 19 nt, Artificial Sequence
  Description of Artificial Sequence: Synthetic oligonucleotide
uuucguaaacaguugucaa

SEQ ID NO: 1425792 - RNA, 19 nt, Artificial Sequence
  Description of Artificial Sequence: Synthetic oligonucleotide
uccaagaaggacaugucuu

SEQ ID NO: 1425793 - RNA, 19 nt, Artificial Sequence
  Description of Artificial Sequence: Synthetic oligonucleotide
aagucuagacacccagaug

SEQ ID NO: 1425794 - RNA, 19 nt, Artificial Sequence
  Description of Artificial Sequence: Synthetic oligonucleotide
uacucuuaauuccucuaac

SEQ ID NO: 1425795 - RNA, 19 nt, Artificial Sequence
  Description of Artificial Sequence: Synthetic oligonucleotide
cauauagcccuucggaaug

SEQ ID NO: 1425796 - RNA, 19 nt, Artificial Sequence
  Description of Artificial Sequence: Synthetic oligonucleotide
gguuagcuauuucaaaucc

SEQ ID NO: 1425797 - RNA, 19 nt, Artificial Sequence
  Description of Artificial Sequence: Synthetic oligonucleotide
uucuuacucaaacaugguu

SEQ ID NO: 1425798 - RNA, 19 nt, Artificial Sequence
  Description of Artificial Sequence: Synthetic oligonucleotide
aaauccauagagcggggua

SEQ ID NO: 1425799 - RNA, 19 nt, Artificial Sequence
  Description of Artificial Sequence: Synthetic oligonucleotide
ugauugaaugccacaguaa

SEQ ID NO: 1425800 - RNA, 19 nt, Artificial Sequence
  Description of Artificial Sequence: Synthetic oligonucleotide
cacuuauauagaaugacaa

SEQ ID NO: 1425801 - RNA, 19 nt, Artificial Sequence
  Description of Artificial Sequence: Synthetic oligonucleotide
gauacuuauuacucauaga

SEQ ID NO: 1425802 - RNA, 19 nt, Artificial Sequence
  Description of Artificial Sequence: Synthetic oligonucleotide
uucguaaacaguugucaaa

SEQ ID NO: 1425803 - RNA, 19 nt, Artificial Sequence
  Description of Artificial Sequence: Synthetic oligonucleotide
uaaagucuagacacccaga

SEQ ID NO: 1425804 - RNA, 19 nt, Artificial Sequence
  Description of Artificial Sequence: Synthetic oligonucleotide
ugauacugaucgauucuca

SEQ ID NO: 1425805 - RNA, 19 nt, Artificial Sequence
  Description of Artificial Sequence: Synthetic oligonucleotide
ugaaaggcauuaaauccau

SEQ ID NO: 1425806 - RNA, 19 nt, Artificial Sequence
  Description of Artificial Sequence: Synthetic oligonucleotide
aagcaauuauccaggagcu

SEQ ID NO: 1425807 - RNA, 19 nt, Artificial Sequence
  Description of Artificial Sequence: Synthetic oligonucleotide
augaacugaacauuacuua

SEQ ID NO: 1425808 - RNA, 19 nt, Artificial Sequence
  Description of Artificial Sequence: Synthetic oligonucleotide
auacugaucgauucucacu

SEQ ID NO: 1425809 - RNA, 19 nt, Artificial Sequence
  Description of Artificial Sequence: Synthetic oligonucleotide
ugguuagcuauuucaaauc

SEQ ID NO: 1425810 - RNA, 19 nt, Artificial Sequence
  Description of Artificial Sequence: Synthetic oligonucleotide
aacguaacggagaggaaca

SEQ ID NO: 1425811 - RNA, 19 nt, Artificial Sequence
  Description of Artificial Sequence: Synthetic oligonucleotide
acccuaauggcuuucuccu

SEQ ID NO: 1425812 - RNA, 19 nt, Artificial Sequence
  Description of Artificial Sequence: Synthetic oligonucleotide
uccauauagcccuucggaa

SEQ ID NO: 1425813 - RNA, 19 nt, Artificial Sequence
  Description of Artificial Sequence: Synthetic oligonucleotide
augaaaggcauuaaaucca

SEQ ID NO: 1425814 - RNA, 19 nt, Artificial Sequence
  Description of Artificial Sequence: Synthetic oligonucleotide
uacaaaugaacugaacauu

SEQ ID NO: 1425815 - RNA, 19 nt, Artificial Sequence
  Description of Artificial Sequence: Synthetic oligonucleotide
uuuuagccaaugugauucc

SEQ ID NO: 1425816 - RNA, 19 nt, Artificial Sequence
  Description of Artificial Sequence: Synthetic oligonucleotide
cuuuucguaaacaguuguc

SEQ ID NO: 1425817 - RNA, 19 nt, Artificial Sequence
  Description of Artificial Sequence: Synthetic oligonucleotide
gauugaaugccacaguaau

SEQ ID NO: 1425818 - RNA, 19 nt, Artificial Sequence
  Description of Artificial Sequence: Synthetic oligonucleotide
uucggaaugucuguguccu

SEQ ID NO: 1425819 - RNA, 19 nt, Artificial Sequence
  Description of Artificial Sequence: Synthetic oligonucleotide
ugaucgauucucacuuugu

SEQ ID NO: 1425820 - RNA, 19 nt, Artificial Sequence
  Description of Artificial Sequence: Synthetic oligonucleotide
ugauuagacugaacaaaua

SEQ ID NO: 1425821 - RNA, 19 nt, Artificial Sequence
  Description of Artificial Sequence: Synthetic oligonucleotide
auuagacugaacaaauaaa

SEQ ID NO: 1425822 - RNA, 19 nt, Artificial Sequence
  Description of Artificial Sequence: Synthetic oligonucleotide
cuugauuagacugaacaaa

SEQ ID NO: 1425823 - RNA, 19 nt, Artificial Sequence
  Description of Artificial Sequence: Synthetic oligonucleotide
acauuacuuaaugacacaa

SEQ ID NO: 1425824 - RNA, 19 nt, Artificial Sequence
  Description of Artificial Sequence: Synthetic oligonucleotide
uauuuacaacugcauguau

SEQ ID NO: 1425825 - RNA, 19 nt, Artificial Sequence
  Description of Artificial Sequence: Synthetic oligonucleotide
gguugauugaaugccacag

SEQ ID NO: 1425826 - RNA, 19 nt, Artificial Sequence
  Description of Artificial Sequence: Synthetic oligonucleotide
auacgaaauucucguuguc

SEQ ID NO: 1425827 - RNA, 19 nt, Artificial Sequence
  Description of Artificial Sequence: Synthetic oligonucleotide
caguaagucuuccaguguc

SEQ ID NO: 1425828 - RNA, 19 nt, Artificial Sequence
  Description of Artificial Sequence: Synthetic oligonucleotide
acuagcuuuuagccaaugu

SEQ ID NO: 1425829 - RNA, 19 nt, Artificial Sequence
  Description of Artificial Sequence: Synthetic oligonucleotide
cuucggaaugucugugucc

SEQ ID NO: 1425830 - RNA, 19 nt, Artificial Sequence
  Description of Artificial Sequence: Synthetic oligonucleotide
cuggacuggaguaccaaug

SEQ ID NO: 1425831 - RNA, 19 nt, Artificial Sequence
  Description of Artificial Sequence: Synthetic oligonucleotide
agguuucagauccauguau

SEQ ID NO: 1425832 - RNA, 19 nt, Artificial Sequence
  Description of Artificial Sequence: Synthetic oligonucleotide
uucccuggcacugauguac

SEQ ID NO: 1425833 - RNA, 19 nt, Artificial Sequence
  Description of Artificial Sequence: Synthetic oligonucleotide
acacuuauauagaaugaca

SEQ ID NO: 1425834 - RNA, 19 nt, Artificial Sequence
  Description of Artificial Sequence: Synthetic oligonucleotide
uacucguuugaagucauuc

SEQ ID NO: 1425835 - RNA, 19 nt, Artificial Sequence
  Description of Artificial Sequence: Synthetic oligonucleotide
uugauacugaucgauucuc

SEQ ID NO: 1425836 - RNA, 19 nt, Artificial Sequence
  Description of Artificial Sequence: Synthetic oligonucleotide
aaacacucuaugugugcaa

SEQ ID NO: 1425837 - RNA, 19 nt, Artificial Sequence
  Description of Artificial Sequence: Synthetic oligonucleotide
acugugaaauacauaaaau

SEQ ID NO: 1425838 - RNA, 19 nt, Artificial Sequence
  Description of Artificial Sequence: Synthetic oligonucleotide
cuguacucacauacaaaug

SEQ ID NO: 1425839 - RNA, 19 nt, Artificial Sequence
  Description of Artificial Sequence: Synthetic oligonucleotide
uccucaaacaugguccaca

SEQ ID NO: 1425840 - RNA, 19 nt, Artificial Sequence
  Description of Artificial Sequence: Synthetic oligonucleotide
aaaauccauagagcggggu

SEQ ID NO: 1425841 - RNA, 19 nt, Artificial Sequence
  Description of Artificial Sequence: Synthetic oligonucleotide
ucguuugaagucauucaua

SEQ ID NO: 1425842 - RNA, 19 nt, Artificial Sequence
  Description of Artificial Sequence: Synthetic oligonucleotide
aaaugcaagucaauucuua

SEQ ID NO: 1425843 - RNA, 19 nt, Artificial Sequence
  Description of Artificial Sequence: Synthetic oligonucleotide
gacaugucuuuucguaaac

SEQ ID NO: 1425844 - RNA, 19 nt, Artificial Sequence
  Description of Artificial Sequence: Synthetic oligonucleotide
aggacccugaccauuaucu

SEQ ID NO: 1425845 - RNA, 19 nt, Artificial Sequence
  Description of Artificial Sequence: Synthetic oligonucleotide
cucauugcuuccaggauca

SEQ ID NO: 1425846 - RNA, 19 nt, Artificial Sequence
  Description of Artificial Sequence: Synthetic oligonucleotide
uucauggaauaaagcuuga

SEQ ID NO: 1425847 - RNA, 19 nt, Artificial Sequence
  Description of Artificial Sequence: Synthetic oligonucleotide
gauagguuucagauccaug

SEQ ID NO: 1425848 - RNA, 19 nt, Artificial Sequence
  Description of Artificial Sequence: Synthetic oligonucleotide
aguacucuuaauuccucua

SEQ ID NO: 1425849 - RNA, 19 nt, Artificial Sequence
  Description of Artificial Sequence: Synthetic oligonucleotide
aaauaaaguuacacuguua

SEQ ID NO: 1425850 - RNA, 19 nt, Artificial Sequence
  Description of Artificial Sequence: Synthetic oligonucleotide
ucguugucucuucuucacc

SEQ ID NO: 1425851 - RNA, 19 nt, Artificial Sequence
  Description of Artificial Sequence: Synthetic oligonucleotide
cugaucgauucucacuuug

SEQ ID NO: 1425852 - RNA, 19 nt, Artificial Sequence
  Description of Artificial Sequence: Synthetic oligonucleotide
caaaacauuccacaugugu

SEQ ID NO: 1425853 - RNA, 19 nt, Artificial Sequence
  Description of Artificial Sequence: Synthetic oligonucleotide
auacacuuauauagaauga

SEQ ID NO: 1425854 - RNA, 19 nt, Artificial Sequence
  Description of Artificial Sequence: Synthetic oligonucleotide
ucuucuagucccacagcau

SEQ ID NO: 1425855 - RNA, 19 nt, Artificial Sequence
  Description of Artificial Sequence: Synthetic oligonucleotide
ucuagacacccagaugucu

SEQ ID NO: 1425856 - RNA, 19 nt, Artificial Sequence
  Description of Artificial Sequence: Synthetic oligonucleotide
aaaacugccuguggauacu

SEQ ID NO: 1425857 - RNA, 19 nt, Artificial Sequence
  Description of Artificial Sequence: Synthetic oligonucleotide
cucguugucucuucuucac

SEQ ID NO: 1425858 - RNA, 19 nt, Artificial Sequence
  Description of Artificial Sequence: Synthetic oligonucleotide
aaaaugcaagucaauucuu

SEQ ID NO: 1425859 - RNA, 19 nt, Artificial Sequence
  Description of Artificial Sequence: Synthetic oligonucleotide
cucuucuagucccacagca

SEQ ID NO: 1425860 - RNA, 19 nt, Artificial Sequence
  Description of Artificial Sequence: Synthetic oligonucleotide
ccaaugugauuccagacac

SEQ ID NO: 1425861 - RNA, 19 nt, Artificial Sequence
  Description of Artificial Sequence: Synthetic oligonucleotide
uuuacauacuuaggacccu

SEQ ID NO: 1425862 - RNA, 19 nt, Artificial Sequence
  Description of Artificial Sequence: Synthetic oligonucleotide
aaaccaugcucaucacuuu

SEQ ID NO: 1425863 - RNA, 19 nt, Artificial Sequence
  Description of Artificial Sequence: Synthetic oligonucleotide
uguuaaugaaaggcauuaa

SEQ ID NO: 1425864 - RNA, 19 nt, Artificial Sequence
  Description of Artificial Sequence: Synthetic oligonucleotide
gaccaguuacuguacucac

SEQ ID NO: 1425865 - RNA, 19 nt, Artificial Sequence
  Description of Artificial Sequence: Synthetic oligonucleotide
aggacaugucuuuucguaa

SEQ ID NO: 1425866 - RNA, 19 nt, Artificial Sequence
  Description of Artificial Sequence: Synthetic oligonucleotide
auuuaacguaacggagagg

SEQ ID NO: 1425867 - RNA, 19 nt, Artificial Sequence
  Description of Artificial Sequence: Synthetic oligonucleotide
uaaagcuugacagguugau

SEQ ID NO: 1425868 - RNA, 19 nt, Artificial Sequence
  Description of Artificial Sequence: Synthetic oligonucleotide
aucaagcaauuauccagga

SEQ ID NO: 1425869 - RNA, 19 nt, Artificial Sequence
  Description of Artificial Sequence: Synthetic oligonucleotide
gguccacacccucucaugg

SEQ ID NO: 1425870 - RNA, 19 nt, Artificial Sequence
  Description of Artificial Sequence: Synthetic oligonucleotide
cagguugauugaaugccac

SEQ ID NO: 1425871 - RNA, 19 nt, Artificial Sequence
  Description of Artificial Sequence: Synthetic oligonucleotide
uuaacguaacggagaggaa

SEQ ID NO: 1425872 - RNA, 19 nt, Artificial Sequence
  Description of Artificial Sequence: Synthetic oligonucleotide
uuuagccaaugugauucca

SEQ ID NO: 1425873 - RNA, 19 nt, Artificial Sequence
  Description of Artificial Sequence: Synthetic oligonucleotide
uguugccuggacuggagua

SEQ ID NO: 1425874 - RNA, 19 nt, Artificial Sequence
  Description of Artificial Sequence: Synthetic oligonucleotide
uggauacuuauuacucaua

SEQ ID NO: 1425875 - RNA, 19 nt, Artificial Sequence
  Description of Artificial Sequence: Synthetic oligonucleotide
cuuuuguacccuaauggcu

SEQ ID NO: 1425876 - RNA, 19 nt, Artificial Sequence
  Description of Artificial Sequence: Synthetic oligonucleotide
ugcauguaucaagauuaca

SEQ ID NO: 1425877 - RNA, 19 nt, Artificial Sequence
  Description of Artificial Sequence: Synthetic oligonucleotide
aaacugugaaauacauaaa

SEQ ID NO: 1425878 - RNA, 19 nt, Artificial Sequence
  Description of Artificial Sequence: Synthetic oligonucleotide
uauuacucauagagcugaa

SEQ ID NO: 1425879 - RNA, 19 nt, Artificial Sequence
  Description of Artificial Sequence: Synthetic oligonucleotide
guacucuuaauuccucuaa

SEQ ID NO: 1425880 - RNA, 19 nt, Artificial Sequence
  Description of Artificial Sequence: Synthetic oligonucleotide
agguugauugaaugccaca

SEQ ID NO: 1425881 - RNA, 19 nt, Artificial Sequence
  Description of Artificial Sequence: Synthetic oligonucleotide
acagaccaguuacuguacu

SEQ ID NO: 1425882 - RNA, 19 nt, Artificial Sequence
  Description of Artificial Sequence: Synthetic oligonucleotide
cuugaguuggcucacuccu

SEQ ID NO: 1425883 - RNA, 19 nt, Artificial Sequence
  Description of Artificial Sequence: Synthetic oligonucleotide
gaacaaaagcaaugauuua

SEQ ID NO: 1425884 - RNA, 19 nt, Artificial Sequence
  Description of Artificial Sequence: Synthetic oligonucleotide
acuugaccacagcaagucu

SEQ ID NO: 1425885 - RNA, 19 nt, Artificial Sequence
  Description of Artificial Sequence: Synthetic oligonucleotide
cugcauguaucaagauuac

SEQ ID NO: 1425886 - RNA, 19 nt, Artificial Sequence
  Description of Artificial Sequence: Synthetic oligonucleotide
ggcacugauguacaucuac

SEQ ID NO: 1425887 - RNA, 19 nt, Artificial Sequence
  Description of Artificial Sequence: Synthetic oligonucleotide
uugucaaaaccaugcucau

SEQ ID NO: 1425888 - RNA, 19 nt, Artificial Sequence
  Description of Artificial Sequence: Synthetic oligonucleotide
uuacucaaacaugguuagc

SEQ ID NO: 1425889 - RNA, 19 nt, Artificial Sequence
  Description of Artificial Sequence: Synthetic oligonucleotide
cacaaucagauuccaagaa

SEQ ID NO: 1425890 - RNA, 19 nt, Artificial Sequence
  Description of Artificial Sequence: Synthetic oligonucleotide
aagucaauucuuacucaaa

SEQ ID NO: 1425891 - RNA, 19 nt, Artificial Sequence
  Description of Artificial Sequence: Synthetic oligonucleotide
guagguguugcugauauau

SEQ ID NO: 1425892 - RNA, 19 nt, Artificial Sequence
  Description of Artificial Sequence: Synthetic oligonucleotide
gucuuuucguaaacaguug

SEQ ID NO: 1425893 - RNA, 19 nt, Artificial Sequence
  Description of Artificial Sequence: Synthetic oligonucleotide
acaugguuagcuauuucaa

SEQ ID NO: 1425894 - RNA, 19 nt, Artificial Sequence
  Description of Artificial Sequence: Synthetic oligonucleotide
gugcaaacaguacucuuaa

SEQ ID NO: 1425895 - RNA, 19 nt, Artificial Sequence
  Description of Artificial Sequence: Synthetic oligonucleotide
cauauuuguugccuggacu

SEQ ID NO: 1425896 - RNA, 19 nt, Artificial Sequence
  Description of Artificial Sequence: Synthetic oligonucleotide
cuaacauucuguuccucua

SEQ ID NO: 1425897 - RNA, 19 nt, Artificial Sequence
  Description of Artificial Sequence: Synthetic oligonucleotide
auccauagagcgggguagg

SEQ ID NO: 1425898 - RNA, 19 nt, Artificial Sequence
  Description of Artificial Sequence: Synthetic oligonucleotide
cucaaacaugguccacacc

SEQ ID NO: 1425899 - RNA, 19 nt, Artificial Sequence
  Description of Artificial Sequence: Synthetic oligonucleotide
agcuuuuagccaaugugau

SEQ ID NO: 1425900 - RNA, 19 nt, Artificial Sequence
  Description of Artificial Sequence: Synthetic oligonucleotide
ucaccuugauuagacugaa

SEQ ID NO: 1425901 - RNA, 19 nt, Artificial Sequence
  Description of Artificial Sequence: Synthetic oligonucleotide
agaggacuacuucaacauu

SEQ ID NO: 1425902 - RNA, 19 nt, Artificial Sequence
  Description of Artificial Sequence: Synthetic oligonucleotide
uaggacccugaccauuauc

SEQ ID NO: 1425903 - RNA, 19 nt, Artificial Sequence
  Description of Artificial Sequence: Synthetic oligonucleotide
cuuaggacccugaccauua

SEQ ID NO: 1425904 - RNA, 19 nt, Artificial Sequence
  Description of Artificial Sequence: Synthetic oligonucleotide
cuugauacugaucgauucu

SEQ ID NO: 1425905 - RNA, 19 nt, Artificial Sequence
  Description of Artificial Sequence: Synthetic oligonucleotide
cacucuaugugugcaaaca

SEQ ID NO: 1425906 - RNA, 19 nt, Artificial Sequence
  Description of Artificial Sequence: Synthetic oligonucleotide
uaaauccauauagcccuuc

SEQ ID NO: 1425907 - RNA, 19 nt, Artificial Sequence
  Description of Artificial Sequence: Synthetic oligonucleotide
guugccuggacuggaguac

SEQ ID NO: 1425908 - RNA, 19 nt, Artificial Sequence
  Description of Artificial Sequence: Synthetic oligonucleotide
guaauaaguagcugcucau

SEQ ID NO: 1425909 - RNA, 19 nt, Artificial Sequence
  Description of Artificial Sequence: Synthetic oligonucleotide
guggauacuuauuacucau

SEQ ID NO: 1425910 - RNA, 19 nt, Artificial Sequence
  Description of Artificial Sequence: Synthetic oligonucleotide
cacauguguagauagguuu

SEQ ID NO: 1425911 - RNA, 19 nt, Artificial Sequence
  Description of Artificial Sequence: Synthetic oligonucleotide
agauagguuucagauccau

SEQ ID NO: 1425912 - RNA, 19 nt, Artificial Sequence
  Description of Artificial Sequence: Synthetic oligonucleotide
agcccuucggaaugucugu

SEQ ID NO: 1425913 - RNA, 19 nt, Artificial Sequence
  Description of Artificial Sequence: Synthetic oligonucleotide
ugcaaacaguacucuuaau

SEQ ID NO: 1425914 - RNA, 19 nt, Artificial Sequence
  Description of Artificial Sequence: Synthetic oligonucleotide
guugauugaaugccacagu

SEQ ID NO: 1425915 - RNA, 19 nt, Artificial Sequence
  Description of Artificial Sequence: Synthetic oligonucleotide
caccacagaccaguuacug

SEQ ID NO: 1425916 - RNA, 19 nt, Artificial Sequence
  Description of Artificial Sequence: Synthetic oligonucleotide
uuaggacccugaccauuau

SEQ ID NO: 1425917 - RNA, 19 nt, Artificial Sequence
  Description of Artificial Sequence: Synthetic oligonucleotide
gcuuggcaaaaguaaugac

SEQ ID NO: 1425918 - RNA, 19 nt, Artificial Sequence
  Description of Artificial Sequence: Synthetic oligonucleotide
cucguuugaagucauucau

SEQ ID NO: 1425919 - RNA, 19 nt, Artificial Sequence
  Description of Artificial Sequence: Synthetic oligonucleotide
ggacaugucuuuucguaaa

SEQ ID NO: 1425920 - RNA, 19 nt, Artificial Sequence
  Description of Artificial Sequence: Synthetic oligonucleotide
gacuagcuuuuagccaaug

SEQ ID NO: 1425921 - RNA, 19 nt, Artificial Sequence
  Description of Artificial Sequence: Synthetic oligonucleotide
auauagcccuucggaaugu

SEQ ID NO: 1425922 - RNA, 19 nt, Artificial Sequence
  Description of Artificial Sequence: Synthetic oligonucleotide
caaugugauuccagacaca

SEQ ID NO: 1425923 - RNA, 19 nt, Artificial Sequence
  Description of Artificial Sequence: Synthetic oligonucleotide
aguuuccgaagagaaucaa

SEQ ID NO: 1425924 - RNA, 19 nt, Artificial Sequence
  Description of Artificial Sequence: Synthetic oligonucleotide
acugaucgauucucacuuu

SEQ ID NO: 1425925 - RNA, 19 nt, Artificial Sequence
  Description of Artificial Sequence: Synthetic oligonucleotide
accaguuacuguacucaca

SEQ ID NO: 1425926 - RNA, 19 nt, Artificial Sequence
  Description of Artificial Sequence: Synthetic oligonucleotide
acuuaggacccugaccauu

SEQ ID NO: 1425927 - RNA, 19 nt, Artificial Sequence
  Description of Artificial Sequence: Synthetic oligonucleotide
gaguaccaaugaaaguaaa

SEQ ID NO: 1425928 - RNA, 19 nt, Artificial Sequence
  Description of Artificial Sequence: Synthetic oligonucleotide
auagcccuucggaaugucu

SEQ ID NO: 1425929 - RNA, 19 nt, Artificial Sequence
  Description of Artificial Sequence: Synthetic oligonucleotide
uccauagagcgggguaggu

SEQ ID NO: 1425930 - RNA, 19 nt, Artificial Sequence
  Description of Artificial Sequence: Synthetic oligonucleotide
ccauguaucaaaacacucu

SEQ ID NO: 1425931 - RNA, 19 nt, Artificial Sequence
  Description of Artificial Sequence: Synthetic oligonucleotide
ggacccugaccauuaucug

SEQ ID NO: 1425932 - RNA, 19 nt, Artificial Sequence
  Description of Artificial Sequence: Synthetic oligonucleotide
agcgggguagguugauaaa

SEQ ID NO: 1425933 - RNA, 19 nt, Artificial Sequence
  Description of Artificial Sequence: Synthetic oligonucleotide
cgauucucacuuuguuucg

SEQ ID NO: 1425934 - RNA, 19 nt, Artificial Sequence
  Description of Artificial Sequence: Synthetic oligonucleotide
gccuguggauacuuauuac

SEQ ID NO: 1425935 - RNA, 19 nt, Artificial Sequence
  Description of Artificial Sequence: Synthetic oligonucleotide
uauagcccuucggaauguc

SEQ ID NO: 1425936 - RNA, 19 nt, Artificial Sequence
  Description of Artificial Sequence: Synthetic oligonucleotide
agacacccagaugucuuga

SEQ ID NO: 1425937 - RNA, 19 nt, Artificial Sequence
  Description of Artificial Sequence: Synthetic oligonucleotide
uccagggcuugaguuggcu

SEQ ID NO: 1425938 - RNA, 19 nt, Artificial Sequence
  Description of Artificial Sequence: Synthetic oligonucleotide
gcaaaucugacugcaguaa

SEQ ID NO: 1425939 - RNA, 19 nt, Artificial Sequence
  Description of Artificial Sequence: Synthetic oligonucleotide
cauuccacauguguagaua

SEQ ID NO: 1425940 - RNA, 19 nt, Artificial Sequence
  Description of Artificial Sequence: Synthetic oligonucleotide
ugaccauuaucugguccuu

SEQ ID NO: 1425941 - RNA, 19 nt, Artificial Sequence
  Description of Artificial Sequence: Synthetic oligonucleotide
auagagcgggguagguuga

SEQ ID NO: 1425942 - RNA, 19 nt, Artificial Sequence
  Description of Artificial Sequence: Synthetic oligonucleotide
gguguugcugauauauugu

SEQ ID NO: 1425943 - RNA, 19 nt, Artificial Sequence
  Description of Artificial Sequence: Synthetic oligonucleotide
uuguacccuaauggcuuuc

SEQ ID NO: 1425944 - RNA, 19 nt, Artificial Sequence
  Description of Artificial Sequence: Synthetic oligonucleotide
gucuagacacccagauguc

SEQ ID NO: 1425945 - RNA, 19 nt, Artificial Sequence
  Description of Artificial Sequence: Synthetic oligonucleotide
ccucuaaaagacuagcuuu

SEQ ID NO: 1425946 - RNA, 19 nt, Artificial Sequence
  Description of Artificial Sequence: Synthetic oligonucleotide
cuagaugcugcuugauuuu

SEQ ID NO: 1425947 - RNA, 19 nt, Artificial Sequence
  Description of Artificial Sequence: Synthetic oligonucleotide
gaauaaagcuugacagguu

SEQ ID NO: 1425948 - RNA, 19 nt, Artificial Sequence
  Description of Artificial Sequence: Synthetic oligonucleotide
ccgaagagaaucaagcaau

SEQ ID NO: 1425949 - RNA, 19 nt, Artificial Sequence
  Description of Artificial Sequence: Synthetic oligonucleotide
ucggaaugucuguguccuc

SEQ ID NO: 1425950 - RNA, 19 nt, Artificial Sequence
  Description of Artificial Sequence: Synthetic oligonucleotide
gugucuuuuguacccuaau

SEQ ID NO: 1425951 - RNA, 19 nt, Artificial Sequence
  Description of Artificial Sequence: Synthetic oligonucleotide
agcaauccucaaacauggu

SEQ ID NO: 1425952 - RNA, 19 nt, Artificial Sequence
  Description of Artificial Sequence: Synthetic oligonucleotide
ccuugaaauuucauggaau

SEQ ID NO: 1425953 - RNA, 19 nt, Artificial Sequence
  Description of Artificial Sequence: Synthetic oligonucleotide
cacacccucucauggugaa

SEQ ID NO: 1425954 - RNA, 19 nt, Artificial Sequence
  Description of Artificial Sequence: Synthetic oligonucleotide
acguaacggagaggaacaa

SEQ ID NO: 1425955 - RNA, 19 nt, Artificial Sequence
  Description of Artificial Sequence: Synthetic oligonucleotide
cguuugaagucauucauau

SEQ ID NO: 1425956 - RNA, 19 nt, Artificial Sequence
  Description of Artificial Sequence: Synthetic oligonucleotide
cuccuugauacugaucgau

SEQ ID NO: 1425957 - RNA, 19 nt, Artificial Sequence
  Description of Artificial Sequence: Synthetic oligonucleotide
caaacaugguuagcuauuu

SEQ ID NO: 1425958 - RNA, 19 nt, Artificial Sequence
  Description of Artificial Sequence: Synthetic oligonucleotide
gcgggguagguugauaaaa

SEQ ID NO: 1425959 - RNA, 19 nt, Artificial Sequence
  Description of Artificial Sequence: Synthetic oligonucleotide
ccaucugaacaaaagcaau

SEQ ID NO: 1425960 - RNA, 19 nt, Artificial Sequence
  Description of Artificial Sequence: Synthetic oligonucleotide
uagagcgggguagguugau

SEQ ID NO: 1425961 - RNA, 19 nt, Artificial Sequence
  Description of Artificial Sequence: Synthetic oligonucleotide
ccauauagcccuucggaau

SEQ ID NO: 1425962 - RNA, 19 nt, Artificial Sequence
  Description of Artificial Sequence: Synthetic oligonucleotide
agacuagcuuuuagccaau

SEQ ID NO: 1425963 - RNA, 19 nt, Artificial Sequence
  Description of Artificial Sequence: Synthetic oligonucleotide
ggaucauuuucuagaugcu

SEQ ID NO: 1425964 - RNA, 19 nt, Artificial Sequence
  Description of Artificial Sequence: Synthetic oligonucleotide
gcuuuuagccaaugugauu

SEQ ID NO: 1425965 - RNA, 19 nt, Artificial Sequence
  Description of Artificial Sequence: Synthetic oligonucleotide
cugccuguggauacuuauu

SEQ ID NO: 1425966 - RNA, 19 nt, Artificial Sequence
  Description of Artificial Sequence: Synthetic oligonucleotide
gcccuucggaaugucugug

SEQ ID NO: 1425967 - RNA, 19 nt, Artificial Sequence
  Description of Artificial Sequence: Synthetic oligonucleotide
cgaaauucucguugucucu

SEQ ID NO: 1425968 - RNA, 19 nt, Artificial Sequence
  Description of Artificial Sequence: Synthetic oligonucleotide
ccuggacuggaguaccaau

SEQ ID NO: 1425969 - RNA, 19 nt, Artificial Sequence
  Description of Artificial Sequence: Synthetic oligonucleotide
gccuggacuggaguaccaa

SEQ ID NO: 1425970 - RNA, 19 nt, Artificial Sequence
  Description of Artificial Sequence: Synthetic oligonucleotide
cccuucggaaugucugugu

SEQ ID NO: 1425971 - RNA, 19 nt, Artificial Sequence
  Description of Artificial Sequence: Synthetic oligonucleotide
ccauagagcgggguagguu

SEQ ID NO: 1425972 - RNA, 19 nt, Artificial Sequence
  Description of Artificial Sequence: Synthetic oligonucleotide
auaaacaguaaguugguuc

SEQ ID NO: 1425973 - RNA, 19 nt, Artificial Sequence
  Description of Artificial Sequence: Synthetic oligonucleotide
uuuuaaaacacagauggcc

SEQ ID NO: 1425974 - RNA, 19 nt, Artificial Sequence
  Description of Artificial Sequence: Synthetic oligonucleotide
ucuucuagaaucuuuccgg

SEQ ID NO: 1425975 - RNA, 19 nt, Artificial Sequence
  Description of Artificial Sequence: Synthetic oligonucleotide
aguaaguugguucauuggg

SEQ ID NO: 1425976 - RNA, 19 nt, Artificial Sequence
  Description of Artificial Sequence: Synthetic oligonucleotide
ugugacauaagucacggcu

SEQ ID NO: 1425977 - RNA, 19 nt, Artificial Sequence
  Description of Artificial Sequence: Synthetic oligonucleotide
aauugcauagucuuaugca

SEQ ID NO: 1425978 - RNA, 19 nt, Artificial Sequence
  Description of Artificial Sequence: Synthetic oligonucleotide
acaugcaacagccacggcc

SEQ ID NO: 1425979 - RNA, 19 nt, Artificial Sequence
  Description of Artificial Sequence: Synthetic oligonucleotide
ugcacuuugggcaauacca

SEQ ID NO: 1425980 - RNA, 19 nt, Artificial Sequence
  Description of Artificial Sequence: Synthetic oligonucleotide
uuugucaugugacauaagu

SEQ ID NO: 1425981 - RNA, 19 nt, Artificial Sequence
  Description of Artificial Sequence: Synthetic oligonucleotide
uaaacaguaaguugguuca

SEQ ID NO: 1425982 - RNA, 19 nt, Artificial Sequence
  Description of Artificial Sequence: Synthetic oligonucleotide
aauucuuggcuauugauua

SEQ ID NO: 1425983 - RNA, 19 nt, Artificial Sequence
  Description of Artificial Sequence: Synthetic oligonucleotide
uaagucacggcucucacug

SEQ ID NO: 1425984 - RNA, 19 nt, Artificial Sequence
  Description of Artificial Sequence: Synthetic oligonucleotide
uugauuaacgcucucugca

SEQ ID NO: 1425985 - RNA, 19 nt, Artificial Sequence
  Description of Artificial Sequence: Synthetic oligonucleotide
aauaccacuuccccuuugg

SEQ ID NO: 1425986 - RNA, 19 nt, Artificial Sequence
  Description of Artificial Sequence: Synthetic oligonucleotide
auugauuaacgcucucugc

SEQ ID NO: 1425987 - RNA, 19 nt, Artificial Sequence
  Description of Artificial Sequence: Synthetic oligonucleotide
uaaaugucccagcaguggg

SEQ ID NO: 1425988 - RNA, 19 nt, Artificial Sequence
  Description of Artificial Sequence: Synthetic oligonucleotide
uauugauuaacgcucucug

SEQ ID NO: 1425989 - RNA, 19 nt, Artificial Sequence
  Description of Artificial Sequence: Synthetic oligonucleotide
uaaaagacaaacaacccuu

SEQ ID NO: 1425990 - RNA, 19 nt, Artificial Sequence
  Description of Artificial Sequence: Synthetic oligonucleotide
uagucuuaugcauuuaccc

SEQ ID NO: 1425991 - RNA, 19 nt, Artificial Sequence
  Description of Artificial Sequence: Synthetic oligonucleotide
acaagaacuuuuaauacac

SEQ ID NO: 1425992 - RNA, 19 nt, Artificial Sequence
  Description of Artificial Sequence: Synthetic oligonucleotide
uaauugcauagucuuaugc

SEQ ID NO: 1425993 - RNA, 19 nt, Artificial Sequence
  Description of Artificial Sequence: Synthetic oligonucleotide
aauucgagcauuugcguga

SEQ ID NO: 1425994 - RNA, 19 nt, Artificial Sequence
  Description of Artificial Sequence: Synthetic oligonucleotide
uucauugggaucuauugca

SEQ ID NO: 1425995 - RNA, 19 nt, Artificial Sequence
  Description of Artificial Sequence: Synthetic oligonucleotide
cacuugguuacauaaacag

SEQ ID NO: 1425996 - RNA, 19 nt, Artificial Sequence
  Description of Artificial Sequence: Synthetic oligonucleotide
uacaagaacuuuuaauaca

SEQ ID NO: 1425997 - RNA, 19 nt, Artificial Sequence
  Description of Artificial Sequence: Synthetic oligonucleotide
ugcauuuacccuaaaacau

SEQ ID NO: 1425998 - RNA, 19 nt, Artificial Sequence
  Description of Artificial Sequence: Synthetic oligonucleotide
uuggcuauugauuaacgcu

SEQ ID NO: 1425999 - RNA, 19 nt, Artificial Sequence
  Description of Artificial Sequence: Synthetic oligonucleotide
uacccuaaaacauuuucug

SEQ ID NO: 1426000 - RNA, 19 nt, Artificial Sequence
  Description of Artificial Sequence: Synthetic oligonucleotide
augcauuuacccuaaaaca

SEQ ID NO: 1426001 - RNA, 19 nt, Artificial Sequence
  Description of Artificial Sequence: Synthetic oligonucleotide
uucaauuccauuugucaug

SEQ ID NO: 1426002 - RNA, 19 nt, Artificial Sequence
  Description of Artificial Sequence: Synthetic oligonucleotide
aagaaacccucacucccgc

SEQ ID NO: 1426003 - RNA, 19 nt, Artificial Sequence
  Description of Artificial Sequence: Synthetic oligonucleotide
uuuccgguugacuagaauc

SEQ ID NO: 1426004 - RNA, 19 nt, Artificial Sequence
  Description of Artificial Sequence: Synthetic oligonucleotide
caugcaacagccacggccg

SEQ ID NO: 1426005 - RNA, 19 nt, Artificial Sequence
  Description of Artificial Sequence: Synthetic oligonucleotide
uucgaggucuucuagaauc

SEQ ID NO: 1426006 - RNA, 19 nt, Artificial Sequence
  Description of Artificial Sequence: Synthetic oligonucleotide
ugcccuaacauccugccgc

SEQ ID NO: 1426007 - RNA, 19 nt, Artificial Sequence
  Description of Artificial Sequence: Synthetic oligonucleotide
acuagaauccaucuuugcu

SEQ ID NO: 1426008 - RNA, 19 nt, Artificial Sequence
  Description of Artificial Sequence: Synthetic oligonucleotide
uucuuuugguggcugauca

SEQ ID NO: 1426009 - RNA, 19 nt, Artificial Sequence
  Description of Artificial Sequence: Synthetic oligonucleotide
ucauuuccccguaagacac

SEQ ID NO: 1426010 - RNA, 19 nt, Artificial Sequence
  Description of Artificial Sequence: Synthetic oligonucleotide
uuccgguugacuagaaucc

SEQ ID NO: 1426011 - RNA, 19 nt, Artificial Sequence
  Description of Artificial Sequence: Synthetic oligonucleotide
aucuuggaaacacugugag

SEQ ID NO: 1426012 - RNA, 19 nt, Artificial Sequence
  Description of Artificial Sequence: Synthetic oligonucleotide
ucuuggcuauugauuaacg

SEQ ID NO: 1426013 - RNA, 19 nt, Artificial Sequence
  Description of Artificial Sequence: Synthetic oligonucleotide
agcuccauuugucuugccc

SEQ ID NO: 1426014 - RNA, 19 nt, Artificial Sequence
  Description of Artificial Sequence: Synthetic oligonucleotide
auuuuccaccaauucgagc

SEQ ID NO: 1426015 - RNA, 19 nt, Artificial Sequence
  Description of Artificial Sequence: Synthetic oligonucleotide
ugguuacauaaacaguaag

SEQ ID NO: 1426016 - RNA, 19 nt, Artificial Sequence
  Description of Artificial Sequence: Synthetic oligonucleotide
ugcaaacucaacaggugag

SEQ ID NO: 1426017 - RNA, 19 nt, Artificial Sequence
  Description of Artificial Sequence: Synthetic oligonucleotide
ugggucacaaggaaaauau

SEQ ID NO: 1426018 - RNA, 19 nt, Artificial Sequence
  Description of Artificial Sequence: Synthetic oligonucleotide
ucgccagacacuaccaggg

SEQ ID NO: 1426019 - RNA, 19 nt, Artificial Sequence
  Description of Artificial Sequence: Synthetic oligonucleotide
auagucuuaugcauuuacc

SEQ ID NO: 1426020 - RNA, 19 nt, Artificial Sequence
  Description of Artificial Sequence: Synthetic oligonucleotide
uuccccuuugguuuguagg

SEQ ID NO: 1426021 - RNA, 19 nt, Artificial Sequence
  Description of Artificial Sequence: Synthetic oligonucleotide
aaacccucacucccgcccc

SEQ ID NO: 1426022 - RNA, 19 nt, Artificial Sequence
  Description of Artificial Sequence: Synthetic oligonucleotide
uucacuaccucgaucuucu

SEQ ID NO: 1426023 - RNA, 19 nt, Artificial Sequence
  Description of Artificial Sequence: Synthetic oligonucleotide
accaauucgagcauuugcg

SEQ ID NO: 1426024 - RNA, 19 nt, Artificial Sequence
  Description of Artificial Sequence: Synthetic oligonucleotide
uggcuauugauuaacgcuc

SEQ ID NO: 1426025 - RNA, 19 nt, Artificial Sequence
  Description of Artificial Sequence: Synthetic oligonucleotide
agucuuaugcauuuacccu

SEQ ID NO: 1426026 - RNA, 19 nt, Artificial Sequence
  Description of Artificial Sequence: Synthetic oligonucleotide
uuguaggugagugaaacac

SEQ ID NO: 1426027 - RNA, 19 nt, Artificial Sequence
  Description of Artificial Sequence: Synthetic oligonucleotide
ugaagcuccauuugucuug

SEQ ID NO: 1426028 - RNA, 19 nt, Artificial Sequence
  Description of Artificial Sequence: Synthetic oligonucleotide
ugagugaagcuccauuugu

SEQ ID NO: 1426029 - RNA, 19 nt, Artificial Sequence
  Description of Artificial Sequence: Synthetic oligonucleotide
ugauuaacgcucucugcag

SEQ ID NO: 1426030 - RNA, 19 nt, Artificial Sequence
  Description of Artificial Sequence: Synthetic oligonucleotide
aaguugguucauugggauc

SEQ ID NO: 1426031 - RNA, 19 nt, Artificial Sequence
  Description of Artificial Sequence: Synthetic oligonucleotide
aguacuuuuguccauuguu

SEQ ID NO: 1426032 - RNA, 19 nt, Artificial Sequence
  Description of Artificial Sequence: Synthetic oligonucleotide
acaguaaguugguucauug

SEQ ID NO: 1426033 - RNA, 19 nt, Artificial Sequence
  Description of Artificial Sequence: Synthetic oligonucleotide
cuuggcuauugauuaacgc

SEQ ID NO: 1426034 - RNA, 19 nt, Artificial Sequence
  Description of Artificial Sequence: Synthetic oligonucleotide
agacacaucuuuaaaaugu

SEQ ID NO: 1426035 - RNA, 19 nt, Artificial Sequence
  Description of Artificial Sequence: Synthetic oligonucleotide
uuaugcauuuacccuaaaa

SEQ ID NO: 1426036 - RNA, 19 nt, Artificial Sequence
  Description of Artificial Sequence: Synthetic oligonucleotide
augaaaagugaaaccauuc

SEQ ID NO: 1426037 - RNA, 19 nt, Artificial Sequence
  Description of Artificial Sequence: Synthetic oligonucleotide
uugucaugugacauaaguc

SEQ ID NO: 1426038 - RNA, 19 nt, Artificial Sequence
  Description of Artificial Sequence: Synthetic oligonucleotide
auuaauugcauagucuuau

SEQ ID NO: 1426039 - RNA, 19 nt, Artificial Sequence
  Description of Artificial Sequence: Synthetic oligonucleotide
uguaggugagugaaacaca

SEQ ID NO: 1426040 - RNA, 19 nt, Artificial Sequence
  Description of Artificial Sequence: Synthetic oligonucleotide
uaucaagacacaucuuuaa

SEQ ID NO: 1426041 - RNA, 19 nt, Artificial Sequence
  Description of Artificial Sequence: Synthetic oligonucleotide
gauggccuucacuaccucg

SEQ ID NO: 1426042 - RNA, 19 nt, Artificial Sequence
  Description of Artificial Sequence: Synthetic oligonucleotide
uuaauugcauagucuuaug

SEQ ID NO: 1426043 - RNA, 19 nt, Artificial Sequence
  Description of Artificial Sequence: Synthetic oligonucleotide
uuuaaaguuucuugguauu

SEQ ID NO: 1426044 - RNA, 19 nt, Artificial Sequence
  Description of Artificial Sequence: Synthetic oligonucleotide
agauccccgugacaagucc

SEQ ID NO: 1426045 - RNA, 19 nt, Artificial Sequence
  Description of Artificial Sequence: Synthetic oligonucleotide
ugacauaagucacggcucu

SEQ ID NO: 1426046 - RNA, 19 nt, Artificial Sequence
  Description of Artificial Sequence: Synthetic oligonucleotide
agugaagcuccauuugucu

SEQ ID NO: 1426047 - RNA, 19 nt, Artificial Sequence
  Description of Artificial Sequence: Synthetic oligonucleotide
uucucauugucuccccugc

SEQ ID NO: 1426048 - RNA, 19 nt, Artificial Sequence
  Description of Artificial Sequence: Synthetic oligonucleotide
uucuuagcagauuuggauu

SEQ ID NO: 1426049 - RNA, 19 nt, Artificial Sequence
  Description of Artificial Sequence: Synthetic oligonucleotide
uggcugaucaucacagucu

SEQ ID NO: 1426050 - RNA, 19 nt, Artificial Sequence
  Description of Artificial Sequence: Synthetic oligonucleotide
uaacgcucucugcagaugu

SEQ ID NO: 1426051 - RNA, 19 nt, Artificial Sequence
  Description of Artificial Sequence: Synthetic oligonucleotide
ugaaucgucuucuuucuua

SEQ ID NO: 1426052 - RNA, 19 nt, Artificial Sequence
  Description of Artificial Sequence: Synthetic oligonucleotide
uugguuacauaaacaguaa

SEQ ID NO: 1426053 - RNA, 19 nt, Artificial Sequence
  Description of Artificial Sequence: Synthetic oligonucleotide
cacacaugcaacagccacg

SEQ ID NO: 1426054 - RNA, 19 nt, Artificial Sequence
  Description of Artificial Sequence: Synthetic oligonucleotide
acacaugcaacagccacgg

SEQ ID NO: 1426055 - RNA, 19 nt, Artificial Sequence
  Description of Artificial Sequence: Synthetic oligonucleotide
uuuguaggugagugaaaca

SEQ ID NO: 1426056 - RNA, 19 nt, Artificial Sequence
  Description of Artificial Sequence: Synthetic oligonucleotide
ucuugcccgauuuuccacc

SEQ ID NO: 1426057 - RNA, 19 nt, Artificial Sequence
  Description of Artificial Sequence: Synthetic oligonucleotide
accauuaauacuaaugauu

SEQ ID NO: 1426058 - RNA, 19 nt, Artificial Sequence
  Description of Artificial Sequence: Synthetic oligonucleotide
aaacacugugagugaagcu

SEQ ID NO: 1426059 - RNA, 19 nt, Artificial Sequence
  Description of Artificial Sequence: Synthetic oligonucleotide
guuuguaggugagugaaac

SEQ ID NO: 1426060 - RNA, 19 nt, Artificial Sequence
  Description of Artificial Sequence: Synthetic oligonucleotide
aaagacaaacaacccuuuu

SEQ ID NO: 1426061 - RNA, 19 nt, Artificial Sequence
  Description of Artificial Sequence: Synthetic oligonucleotide
ucuuaugcauuuacccuaa

SEQ ID NO: 1426062 - RNA, 19 nt, Artificial Sequence
  Description of Artificial Sequence: Synthetic oligonucleotide
caccaauucgagcauuugc

SEQ ID NO: 1426063 - RNA, 19 nt, Artificial Sequence
  Description of Artificial Sequence: Synthetic oligonucleotide
caauucgagcauuugcgug

SEQ ID NO: 1426064 - RNA, 19 nt, Artificial Sequence
  Description of Artificial Sequence: Synthetic oligonucleotide
aggucuguggcuaaauguc

SEQ ID NO: 1426065 - RNA, 19 nt, Artificial Sequence
  Description of Artificial Sequence: Synthetic oligonucleotide
gacuagaauccaucuuugc

SEQ ID NO: 1426066 - RNA, 19 nt, Artificial Sequence
  Description of Artificial Sequence: Synthetic oligonucleotide
agcgacuccacacacucca

SEQ ID NO: 1426067 - RNA, 19 nt, Artificial Sequence
  Description of Artificial Sequence: Synthetic oligonucleotide
uccugcacguagcagguga

SEQ ID NO: 1426068 - RNA, 19 nt, Artificial Sequence
  Description of Artificial Sequence: Synthetic oligonucleotide
ugcgugacaaucugaauuu

SEQ ID NO: 1426069 - RNA, 19 nt, Artificial Sequence
  Description of Artificial Sequence: Synthetic oligonucleotide
agagcagcgggguuccccg

SEQ ID NO: 1426070 - RNA, 19 nt, Artificial Sequence
  Description of Artificial Sequence: Synthetic oligonucleotide
aggucuucuagaaucuuuc

SEQ ID NO: 1426071 - RNA, 19 nt, Artificial Sequence
  Description of Artificial Sequence: Synthetic oligonucleotide
agcaccgacacguuccucu

SEQ ID NO: 1426072 - RNA, 19 nt, Artificial Sequence
  Description of Artificial Sequence: Synthetic oligonucleotide
caaacucaacaggugaggc

SEQ ID NO: 1426073 - RNA, 19 nt, Artificial Sequence
  Description of Artificial Sequence: Synthetic oligonucleotide
ugguuuguaggugagugaa

SEQ ID NO: 1426074 - RNA, 19 nt, Artificial Sequence
  Description of Artificial Sequence: Synthetic oligonucleotide
cagucuucaauuccauuug

SEQ ID NO: 1426075 - RNA, 19 nt, Artificial Sequence
  Description of Artificial Sequence: Synthetic oligonucleotide
cugaaaguaaaccaguuau

SEQ ID NO: 1426076 - RNA, 19 nt, Artificial Sequence
  Description of Artificial Sequence: Synthetic oligonucleotide
ugcauagucuuaugcauuu

SEQ ID NO: 1426077 - RNA, 19 nt, Artificial Sequence
  Description of Artificial Sequence: Synthetic oligonucleotide
uggugcgcugucuucgagg

SEQ ID NO: 1426078 - RNA, 19 nt, Artificial Sequence
  Description of Artificial Sequence: Synthetic oligonucleotide
aauuaauugcauagucuua

SEQ ID NO: 1426079 - RNA, 19 nt, Artificial Sequence
  Description of Artificial Sequence: Synthetic oligonucleotide
augugacauaagucacggc

SEQ ID NO: 1426080 - RNA, 19 nt, Artificial Sequence
  Description of Artificial Sequence: Synthetic oligonucleotide
uccauuugucaugugacau

SEQ ID NO: 1426081 - RNA, 19 nt, Artificial Sequence
  Description of Artificial Sequence: Synthetic oligonucleotide
gauuaacgcucucugcaga

SEQ ID NO: 1426082 - RNA, 19 nt, Artificial Sequence
  Description of Artificial Sequence: Synthetic oligonucleotide
uuguuguccagcucccgca

SEQ ID NO: 1426083 - RNA, 19 nt, Artificial Sequence
  Description of Artificial Sequence: Synthetic oligonucleotide
ucgaggucuucuagaaucu

SEQ ID NO: 1426084 - RNA, 19 nt, Artificial Sequence
  Description of Artificial Sequence: Synthetic oligonucleotide
gacacuaccagggcugccc

SEQ ID NO: 1426085 - RNA, 19 nt, Artificial Sequence
  Description of Artificial Sequence: Synthetic oligonucleotide
ggucacaaggaaaauauca

SEQ ID NO: 1426086 - RNA, 19 nt, Artificial Sequence
  Description of Artificial Sequence: Synthetic oligonucleotide
uuaaaguuucuugguauuu

SEQ ID NO: 1426087 - RNA, 19 nt, Artificial Sequence
  Description of Artificial Sequence: Synthetic oligonucleotide
uugguuuguaggugaguga

SEQ ID NO: 1426088 - RNA, 19 nt, Artificial Sequence
  Description of Artificial Sequence: Synthetic oligonucleotide
gagcauuugcgugacaauc

SEQ ID NO: 1426089 - RNA, 19 nt, Artificial Sequence
  Description of Artificial Sequence: Synthetic oligonucleotide
ucuuggaaacacugugagu

SEQ ID NO: 1426090 - RNA, 19 nt, Artificial Sequence
  Description of Artificial Sequence: Synthetic oligonucleotide
aagucacggcucucacugg

SEQ ID NO: 1426091 - RNA, 19 nt, Artificial Sequence
  Description of Artificial Sequence: Synthetic oligonucleotide
auuaacgcucucugcagau

SEQ ID NO: 1426092 - RNA, 19 nt, Artificial Sequence
  Description of Artificial Sequence: Synthetic oligonucleotide
ucgagcauuugcgugacaa

SEQ ID NO: 1426093 - RNA, 19 nt, Artificial Sequence
  Description of Artificial Sequence: Synthetic oligonucleotide
caugucguggggcagcgac

SEQ ID NO: 1426094 - RNA, 19 nt, Artificial Sequence
  Description of Artificial Sequence: Synthetic oligonucleotide
gguaacaagcccaggggcg

SEQ ID NO: 1426095 - RNA, 19 nt, Artificial Sequence
  Description of Artificial Sequence: Synthetic oligonucleotide
guuacauaaacaguaaguu

SEQ ID NO: 1426096 - RNA, 19 nt, Artificial Sequence
  Description of Artificial Sequence: Synthetic oligonucleotide
gucuuaugcauuuacccua

SEQ ID NO: 1426097 - RNA, 19 nt, Artificial Sequence
  Description of Artificial Sequence: Synthetic oligonucleotide
auaagucacggcucucacu

SEQ ID NO: 1426098 - RNA, 19 nt, Artificial Sequence
  Description of Artificial Sequence: Synthetic oligonucleotide
cuuuaaaguuucuugguau

SEQ ID NO: 1426099 - RNA, 19 nt, Artificial Sequence
  Description of Artificial Sequence: Synthetic oligonucleotide
gagggcaccgccgaguccc

SEQ ID NO: 1426100 - RNA, 19 nt, Artificial Sequence
  Description of Artificial Sequence: Synthetic oligonucleotide
ccagaagaaacccucacuc

SEQ ID NO: 1426101 - RNA, 19 nt, Artificial Sequence
  Description of Artificial Sequence: Synthetic oligonucleotide
uccgcauccagcagccaca

SEQ ID NO: 1426102 - RNA, 19 nt, Artificial Sequence
  Description of Artificial Sequence: Synthetic oligonucleotide
ccauuaauacuaaugauua

SEQ ID NO: 1426103 - RNA, 19 nt, Artificial Sequence
  Description of Artificial Sequence: Synthetic oligonucleotide
ggagucgccagacacuacc

SEQ ID NO: 1426104 - RNA, 19 nt, Artificial Sequence
  Description of Artificial Sequence: Synthetic oligonucleotide
gaagcuccauuugucuugc

SEQ ID NO: 1426105 - RNA, 19 nt, Artificial Sequence
  Description of Artificial Sequence: Synthetic oligonucleotide
ccugcuuggccuuggagcg

SEQ ID NO: 1426106 - RNA, 19 nt, Artificial Sequence
  Description of Artificial Sequence: Synthetic oligonucleotide
acuugguuacauaaacagu

SEQ ID NO: 1426107 - RNA, 19 nt, Artificial Sequence
  Description of Artificial Sequence: Synthetic oligonucleotide
cacguagcaggugagcagc

SEQ ID NO: 1426108 - RNA, 19 nt, Artificial Sequence
  Description of Artificial Sequence: Synthetic oligonucleotide
guaaguugguucauuggga

SEQ ID NO: 1426109 - RNA, 19 nt, Artificial Sequence
  Description of Artificial Sequence: Synthetic oligonucleotide
agcagccacacaugcaaca

SEQ ID NO: 1426110 - RNA, 19 nt, Artificial Sequence
  Description of Artificial Sequence: Synthetic oligonucleotide
cuaucauuuccccguaaga

SEQ ID NO: 1426111 - RNA, 19 nt, Artificial Sequence
  Description of Artificial Sequence: Synthetic oligonucleotide
guuuucucauugucucccc

SEQ ID NO: 1426112 - RNA, 19 nt, Artificial Sequence
  Description of Artificial Sequence: Synthetic oligonucleotide
gucacaaggaaaauaucaa

SEQ ID NO: 1426113 - RNA, 19 nt, Artificial Sequence
  Description of Artificial Sequence: Synthetic oligonucleotide
ucuccccugcacuuugggc

SEQ ID NO: 1426114 - RNA, 19 nt, Artificial Sequence
  Description of Artificial Sequence: Synthetic oligonucleotide
auucgagcauuugcgugac

SEQ ID NO: 1426115 - RNA, 19 nt, Artificial Sequence
  Description of Artificial Sequence: Synthetic oligonucleotide
gagaccggggcucccuccg

SEQ ID NO: 1426116 - RNA, 19 nt, Artificial Sequence
  Description of Artificial Sequence: Synthetic oligonucleotide
aaaugucccagcagugggu

SEQ ID NO: 1426117 - RNA, 19 nt, Artificial Sequence
  Description of Artificial Sequence: Synthetic oligonucleotide
agcauuugcgugacaaucu

SEQ ID NO: 1426118 - RNA, 19 nt, Artificial Sequence
  Description of Artificial Sequence: Synthetic oligonucleotide
aacaguaaguugguucauu

SEQ ID NO: 1426119 - RNA, 19 nt, Artificial Sequence
  Description of Artificial Sequence: Synthetic oligonucleotide
cugcacuuugggcaauacc

SEQ ID NO: 1426120 - RNA, 19 nt, Artificial Sequence
  Description of Artificial Sequence: Synthetic oligonucleotide
ucaggagcgcggccgacga

SEQ ID NO: 1426121 - RNA, 19 nt, Artificial Sequence
  Description of Artificial Sequence: Synthetic oligonucleotide
acauaaacaguaaguuggu

SEQ ID NO: 1426122 - RNA, 19 nt, Artificial Sequence
  Description of Artificial Sequence: Synthetic oligonucleotide
agcagugggucacaaggaa

SEQ ID NO: 1426123 - RNA, 19 nt, Artificial Sequence
  Description of Artificial Sequence: Synthetic oligonucleotide
accgacacguuccucugca

SEQ ID NO: 1426124 - RNA, 19 nt, Artificial Sequence
  Description of Artificial Sequence: Synthetic oligonucleotide
ucccaauucuuggcuauug

SEQ ID NO: 1426125 - RNA, 19 nt, Artificial Sequence
  Description of Artificial Sequence: Synthetic oligonucleotide
uuugcgugacaaucugaau

SEQ ID NO: 1426126 - RNA, 19 nt, Artificial Sequence
  Description of Artificial Sequence: Synthetic oligonucleotide
agucacggcucucacuggu

SEQ ID NO: 1426127 - RNA, 19 nt, Artificial Sequence
  Description of Artificial Sequence: Synthetic oligonucleotide
cauuaauacuaaugauuaa

SEQ ID NO: 1426128 - RNA, 19 nt, Artificial Sequence
  Description of Artificial Sequence: Synthetic oligonucleotide
cauuugucaugugacauaa

SEQ ID NO: 1426129 - RNA, 19 nt, Artificial Sequence
  Description of Artificial Sequence: Synthetic oligonucleotide
gcgguaacaagcccagggg

SEQ ID NO: 1426130 - RNA, 19 nt, Artificial Sequence
  Description of Artificial Sequence: Synthetic oligonucleotide
uuaacgcucucugcagaug

SEQ ID NO: 1426131 - RNA, 19 nt, Artificial Sequence
  Description of Artificial Sequence: Synthetic oligonucleotide
ugucuccccugcacuuugg

SEQ ID NO: 1426132 - RNA, 19 nt, Artificial Sequence
  Description of Artificial Sequence: Synthetic oligonucleotide
cacagauggccuucacuac

SEQ ID NO: 1426133 - RNA, 19 nt, Artificial Sequence
  Description of Artificial Sequence: Synthetic oligonucleotide
aaccauucaaugggacacu

SEQ ID NO: 1426134 - RNA, 19 nt, Artificial Sequence
  Description of Artificial Sequence: Synthetic oligonucleotide
gcaaacucaacaggugagg

SEQ ID NO: 1426135 - RNA, 19 nt, Artificial Sequence
  Description of Artificial Sequence: Synthetic oligonucleotide
gcccgguacgcccagaucc

SEQ ID NO: 1426136 - RNA, 19 nt, Artificial Sequence
  Description of Artificial Sequence: Synthetic oligonucleotide
uccaccaauucgagcauuu

SEQ ID NO: 1426137 - RNA, 19 nt, Artificial Sequence
  Description of Artificial Sequence: Synthetic oligonucleotide
uucuagaaucuuuccgguu

SEQ ID NO: 1426138 - RNA, 19 nt, Artificial Sequence
  Description of Artificial Sequence: Synthetic oligonucleotide
ugguucauugggaucuauu

SEQ ID NO: 1426139 - RNA, 19 nt, Artificial Sequence
  Description of Artificial Sequence: Synthetic oligonucleotide
ugaucaucacagucuucaa

SEQ ID NO: 1426140 - RNA, 19 nt, Artificial Sequence
  Description of Artificial Sequence: Synthetic oligonucleotide
acgaguacagcugcugcug

SEQ ID NO: 1426141 - RNA, 19 nt, Artificial Sequence
  Description of Artificial Sequence: Synthetic oligonucleotide
uacgcccagauccccguga

SEQ ID NO: 1426142 - RNA, 19 nt, Artificial Sequence
  Description of Artificial Sequence: Synthetic oligonucleotide
gagugaagcuccauuuguc

SEQ ID NO: 1426143 - RNA, 19 nt, Artificial Sequence
  Description of Artificial Sequence: Synthetic oligonucleotide
gguuacauaaacaguaagu

SEQ ID NO: 1426144 - RNA, 19 nt, Artificial Sequence
  Description of Artificial Sequence: Synthetic oligonucleotide
gucuuuucaguacuuuugu

SEQ ID NO: 1426145 - RNA, 19 nt, Artificial Sequence
  Description of Artificial Sequence: Synthetic oligonucleotide
ugcaugucguggggcagcg

SEQ ID NO: 1426146 - RNA, 19 nt, Artificial Sequence
  Description of Artificial Sequence: Synthetic oligonucleotide
cuagaaucuuuccgguuga

SEQ ID NO: 1426147 - RNA, 19 nt, Artificial Sequence
  Description of Artificial Sequence: Synthetic oligonucleotide
gaaucgucuucuuucuuau

SEQ ID NO: 1426148 - RNA, 19 nt, Artificial Sequence
  Description of Artificial Sequence: Synthetic oligonucleotide
gauccccgugacaaguccc

SEQ ID NO: 1426149 - RNA, 19 nt, Artificial Sequence
  Description of Artificial Sequence: Synthetic oligonucleotide
cuucacuaccucgaucuuc

SEQ ID NO: 1426150 - RNA, 19 nt, Artificial Sequence
  Description of Artificial Sequence: Synthetic oligonucleotide
ucccgagcggugacacugg

SEQ ID NO: 1426151 - RNA, 19 nt, Artificial Sequence
  Description of Artificial Sequence: Synthetic oligonucleotide
augcaacagccacggccgc

SEQ ID NO: 1426152 - RNA, 19 nt, Artificial Sequence
  Description of Artificial Sequence: Synthetic oligonucleotide
aaacaguaaguugguucau

SEQ ID NO: 1426153 - RNA, 19 nt, Artificial Sequence
  Description of Artificial Sequence: Synthetic oligonucleotide
accauucaaugggacacug

SEQ ID NO: 1426154 - RNA, 19 nt, Artificial Sequence
  Description of Artificial Sequence: Synthetic oligonucleotide
ccguaagacacuugguuac

SEQ ID NO: 1426155 - RNA, 19 nt, Artificial Sequence
  Description of Artificial Sequence: Synthetic oligonucleotide
uccgguugacuagaaucca

SEQ ID NO: 1426156 - RNA, 19 nt, Artificial Sequence
  Description of Artificial Sequence: Synthetic oligonucleotide
uaacaagcccaggggcggg

SEQ ID NO: 1426157 - RNA, 19 nt, Artificial Sequence
  Description of Artificial Sequence: Synthetic oligonucleotide
ccagacacuaccagggcug

SEQ ID NO: 1426158 - RNA, 19 nt, Artificial Sequence
  Description of Artificial Sequence: Synthetic oligonucleotide
gcauuugcgugacaaucug

SEQ ID NO: 1426159 - RNA, 19 nt, Artificial Sequence
  Description of Artificial Sequence: Synthetic oligonucleotide
ggcuaaaugucccagcagu

SEQ ID NO: 1426160 - RNA, 19 nt, Artificial Sequence
  Description of Artificial Sequence: Synthetic oligonucleotide
cucccgagcggugacacug

SEQ ID NO: 1426161 - RNA, 19 nt, Artificial Sequence
  Description of Artificial Sequence: Synthetic oligonucleotide
cacggcucucacuggugcg

SEQ ID NO: 1426162 - RNA, 19 nt, Artificial Sequence
  Description of Artificial Sequence: Synthetic oligonucleotide
cauuugcgugacaaucuga

SEQ ID NO: 1426163 - RNA, 19 nt, Artificial Sequence
  Description of Artificial Sequence: Synthetic oligonucleotide
uccccguaagacacuuggu

SEQ ID NO: 1426164 - RNA, 19 nt, Artificial Sequence
  Description of Artificial Sequence: Synthetic oligonucleotide
auuugucuugcccgauuuu

SEQ ID NO: 1426165 - RNA, 19 nt, Artificial Sequence
  Description of Artificial Sequence: Synthetic oligonucleotide
acuuugggcaauaccacuu

SEQ ID NO: 1426166 - RNA, 19 nt, Artificial Sequence
  Description of Artificial Sequence: Synthetic oligonucleotide
ucaaugggacacuguucau

SEQ ID NO: 1426167 - RNA, 19 nt, Artificial Sequence
  Description of Artificial Sequence: Synthetic oligonucleotide
cugcccuaacauccugccg

SEQ ID NO: 1426168 - RNA, 19 nt, Artificial Sequence
  Description of Artificial Sequence: Synthetic oligonucleotide
ucaacaggugaggcuuccc

SEQ ID NO: 1426169 - RNA, 19 nt, Artificial Sequence
  Description of Artificial Sequence: Synthetic oligonucleotide
gucuugcccgauuuuccac

SEQ ID NO: 1426170 - RNA, 19 nt, Artificial Sequence
  Description of Artificial Sequence: Synthetic oligonucleotide
ucuuuccgguugacuagaa

SEQ ID NO: 1426171 - RNA, 19 nt, Artificial Sequence
  Description of Artificial Sequence: Synthetic oligonucleotide
gagagcagcgggguucccc

SEQ ID NO: 1426172 - RNA, 19 nt, Artificial Sequence
  Description of Artificial Sequence: Synthetic oligonucleotide
gacgaguacagcugcugcu

SEQ ID NO: 1426173 - RNA, 19 nt, Artificial Sequence
  Description of Artificial Sequence: Synthetic oligonucleotide
aucucccaauucuuggcua

SEQ ID NO: 1426174 - RNA, 19 nt, Artificial Sequence
  Description of Artificial Sequence: Synthetic oligonucleotide
cagauguugcuguaggcgu

SEQ ID NO: 1426175 - RNA, 19 nt, Artificial Sequence
  Description of Artificial Sequence: Synthetic oligonucleotide
ccuaacauccugccgccgc

SEQ ID NO: 1426176 - RNA, 19 nt, Artificial Sequence
  Description of Artificial Sequence: Synthetic oligonucleotide
ggucuguggcuaaaugucc

SEQ ID NO: 1426177 - RNA, 19 nt, Artificial Sequence
  Description of Artificial Sequence: Synthetic oligonucleotide
cuucuagaaucuuuccggu

SEQ ID NO: 1426178 - RNA, 19 nt, Artificial Sequence
  Description of Artificial Sequence: Synthetic oligonucleotide
agacacuaccagggcugcc

SEQ ID NO: 1426179 - RNA, 19 nt, Artificial Sequence
  Description of Artificial Sequence: Synthetic oligonucleotide
cuauugauuaacgcucucu

SEQ ID NO: 1426180 - RNA, 19 nt, Artificial Sequence
  Description of Artificial Sequence: Synthetic oligonucleotide
auuugucaugugacauaag

SEQ ID NO: 1426181 - RNA, 19 nt, Artificial Sequence
  Description of Artificial Sequence: Synthetic oligonucleotide
acuggugcgcugucuucga

SEQ ID NO: 1426182 - RNA, 19 nt, Artificial Sequence
  Description of Artificial Sequence: Synthetic oligonucleotide
cgcgguaacaagcccaggg

SEQ ID NO: 1426183 - RNA, 19 nt, Artificial Sequence
  Description of Artificial Sequence: Synthetic oligonucleotide
accucgaucuucucuccuu

SEQ ID NO: 1426184 - RNA, 19 nt, Artificial Sequence
  Description of Artificial Sequence: Synthetic oligonucleotide
gacacggccgccgcucgag

SEQ ID NO: 1426185 - RNA, 19 nt, Artificial Sequence
  Description of Artificial Sequence: Synthetic oligonucleotide
uagaaucuuuccgguugac

SEQ ID NO: 1426186 - RNA, 19 nt, Artificial Sequence
  Description of Artificial Sequence: Synthetic oligonucleotide
guaggugagugaaacacau

SEQ ID NO: 1426187 - RNA, 19 nt, Artificial Sequence
  Description of Artificial Sequence: Synthetic oligonucleotide
gcacguagcaggugagcag

SEQ ID NO: 1426188 - RNA, 19 nt, Artificial Sequence
  Description of Artificial Sequence: Synthetic oligonucleotide
cuugcccgauuuuccacca

SEQ ID NO: 1426189 - RNA, 19 nt, Artificial Sequence
  Description of Artificial Sequence: Synthetic oligonucleotide
gguugacuagaauccaucu

SEQ ID NO: 1426190 - RNA, 19 nt, Artificial Sequence
  Description of Artificial Sequence: Synthetic oligonucleotide
gucaggagcgcggccgacg

SEQ ID NO: 1426191 - RNA, 19 nt, Artificial Sequence
  Description of Artificial Sequence: Synthetic oligonucleotide
auuuccccguaagacacuu

SEQ ID NO: 1426192 - RNA, 19 nt, Artificial Sequence
  Description of Artificial Sequence: Synthetic oligonucleotide
cagauccccgugacaaguc

SEQ ID NO: 1426193 - RNA, 19 nt, Artificial Sequence
  Description of Artificial Sequence: Synthetic oligonucleotide
guugacuagaauccaucuu

SEQ ID NO: 1426194 - RNA, 19 nt, Artificial Sequence
  Description of Artificial Sequence: Synthetic oligonucleotide
caccauuaauacuaaugau

SEQ ID NO: 1426195 - RNA, 19 nt, Artificial Sequence
  Description of Artificial Sequence: Synthetic oligonucleotide
cccgauuuuccaccaauuc

SEQ ID NO: 1426196 - RNA, 19 nt, Artificial Sequence
  Description of Artificial Sequence: Synthetic oligonucleotide
cagcagugggucacaagga

SEQ ID NO: 1426197 - RNA, 19 nt, Artificial Sequence
  Description of Artificial Sequence: Synthetic oligonucleotide
cucuccggucaggagcgcg

SEQ ID NO: 1426198 - RNA, 19 nt, Artificial Sequence
  Description of Artificial Sequence: Synthetic oligonucleotide
cagcagccacacaugcaac

SEQ ID NO: 1426199 - RNA, 19 nt, Artificial Sequence
  Description of Artificial Sequence: Synthetic oligonucleotide
cagcgacuccacacacucc

SEQ ID NO: 1426200 - RNA, 19 nt, Artificial Sequence
  Description of Artificial Sequence: Synthetic oligonucleotide
cucccucgcugggagagag

SEQ ID NO: 1426201 - RNA, 19 nt, Artificial Sequence
  Description of Artificial Sequence: Synthetic oligonucleotide
gacauaagucacggcucuc

SEQ ID NO: 1426202 - RNA, 19 nt, Artificial Sequence
  Description of Artificial Sequence: Synthetic oligonucleotide
cucgagagggcaccgccga

SEQ ID NO: 1426203 - RNA, 19 nt, Artificial Sequence
  Description of Artificial Sequence: Synthetic oligonucleotide
cugcacguagcaggugagc

SEQ ID NO: 1426204 - RNA, 19 nt, Artificial Sequence
  Description of Artificial Sequence: Synthetic oligonucleotide
gaccggggcucccuccggc

SEQ ID NO: 1426205 - RNA, 19 nt, Artificial Sequence
  Description of Artificial Sequence: Synthetic oligonucleotide
ggcgccgggcucccgagcg

SEQ ID NO: 1426206 - RNA, 19 nt, Artificial Sequence
  Description of Artificial Sequence: Synthetic oligonucleotide
gagucgccagacacuacca

SEQ ID NO: 1426207 - RNA, 19 nt, Artificial Sequence
  Description of Artificial Sequence: Synthetic oligonucleotide
uucgagcauuugcgugaca

SEQ ID NO: 1426208 - RNA, 19 nt, Artificial Sequence
  Description of Artificial Sequence: Synthetic oligonucleotide
cacggccgccgcucgagag

SEQ ID NO: 1426209 - RNA, 19 nt, Artificial Sequence
  Description of Artificial Sequence: Synthetic oligonucleotide
cgguaacaagcccaggggc

SEQ ID NO: 1426210 - RNA, 19 nt, Artificial Sequence
  Description of Artificial Sequence: Synthetic oligonucleotide
caccgacacguuccucugc

SEQ ID NO: 1426211 - RNA, 19 nt, Artificial Sequence
  Description of Artificial Sequence: Synthetic oligonucleotide
cuggugcgcugucuucgag

SEQ ID NO: 1426212 - RNA, 19 nt, Artificial Sequence
  Description of Artificial Sequence: Synthetic oligonucleotide
gcacuuugggcaauaccac

SEQ ID NO: 1426213 - RNA, 19 nt, Artificial Sequence
  Description of Artificial Sequence: Synthetic oligonucleotide
ggccgacgaguacagcugc

SEQ ID NO: 1426214 - RNA, 19 nt, Artificial Sequence
  Description of Artificial Sequence: Synthetic oligonucleotide
uugguucauugggaucuau

SEQ ID NO: 1426215 - RNA, 19 nt, Artificial Sequence
  Description of Artificial Sequence: Synthetic oligonucleotide
ucccucgcugggagagagc

SEQ ID NO: 1426216 - RNA, 19 nt, Artificial Sequence
  Description of Artificial Sequence: Synthetic oligonucleotide
ccccgugacaagucccucg

SEQ ID NO: 1426217 - RNA, 19 nt, Artificial Sequence
  Description of Artificial Sequence: Synthetic oligonucleotide
uugcccgauuuuccaccaa

SEQ ID NO: 1426218 - RNA, 19 nt, Artificial Sequence
  Description of Artificial Sequence: Synthetic oligonucleotide
gcuauugauuaacgcucuc

SEQ ID NO: 1426219 - RNA, 19 nt, Artificial Sequence
  Description of Artificial Sequence: Synthetic oligonucleotide
auccccgugacaagucccu

SEQ ID NO: 1426220 - RNA, 19 nt, Artificial Sequence
  Description of Artificial Sequence: Synthetic oligonucleotide
caucaucaauuuccuuuaa

SEQ ID NO: 1426221 - RNA, 19 nt, Artificial Sequence
  Description of Artificial Sequence: Synthetic oligonucleotide
agccuaucauuuccccgua

SEQ ID NO: 1426222 - RNA, 19 nt, Artificial Sequence
  Description of Artificial Sequence: Synthetic oligonucleotide
gugaagcuccauuugucuu

SEQ ID NO: 1426223 - RNA, 19 nt, Artificial Sequence
  Description of Artificial Sequence: Synthetic oligonucleotide
cauuugucuugcccgauuu

SEQ ID NO: 1426224 - RNA, 19 nt, Artificial Sequence
  Description of Artificial Sequence: Synthetic oligonucleotide
acugugagugaagcuccau

SEQ ID NO: 1426225 - RNA, 19 nt, Artificial Sequence
  Description of Artificial Sequence: Synthetic oligonucleotide
uuccaccaauucgagcauu

SEQ ID NO: 1426226 - RNA, 19 nt, Artificial Sequence
  Description of Artificial Sequence: Synthetic oligonucleotide
cacuaccucgaucuucucu

SEQ ID NO: 1426227 - RNA, 19 nt, Artificial Sequence
  Description of Artificial Sequence: Synthetic oligonucleotide
cccgggagucgccagacac

SEQ ID NO: 1426228 - RNA, 19 nt, Artificial Sequence
  Description of Artificial Sequence: Synthetic oligonucleotide
gcccuaacauccugccgcc

SEQ ID NO: 1426229 - RNA, 19 nt, Artificial Sequence
  Description of Artificial Sequence: Synthetic oligonucleotide
cucgccgccgccgccgccg

SEQ ID NO: 1426230 - RNA, 19 nt, Artificial Sequence
  Description of Artificial Sequence: Synthetic oligonucleotide
ucacuaccucgaucuucuc

SEQ ID NO: 1426231 - RNA, 19 nt, Artificial Sequence
  Description of Artificial Sequence: Synthetic oligonucleotide
ggcggggcgagaccggggc

SEQ ID NO: 1426232 - RNA, 19 nt, Artificial Sequence
  Description of Artificial Sequence: Synthetic oligonucleotide
ggugcgcugucuucgaggu

SEQ ID NO: 1426233 - RNA, 19 nt, Artificial Sequence
  Description of Artificial Sequence: Synthetic oligonucleotide
cuaacauccugccgccgcu

SEQ ID NO: 1426234 - RNA, 19 nt, Artificial Sequence
  Description of Artificial Sequence: Synthetic oligonucleotide
cacugugagugaagcucca

SEQ ID NO: 1426235 - RNA, 19 nt, Artificial Sequence
  Description of Artificial Sequence: Synthetic oligonucleotide
guacgcccagauccccgug

SEQ ID NO: 1426236 - RNA, 19 nt, Artificial Sequence
  Description of Artificial Sequence: Synthetic oligonucleotide
cccguaagacacuugguua

SEQ ID NO: 1426237 - RNA, 19 nt, Artificial Sequence
  Description of Artificial Sequence: Synthetic oligonucleotide
cccgcgguaacaagcccag

SEQ ID NO: 1426238 - RNA, 19 nt, Artificial Sequence
  Description of Artificial Sequence: Synthetic oligonucleotide
aacgcucucugcagauguu

SEQ ID NO: 1426239 - RNA, 19 nt, Artificial Sequence
  Description of Artificial Sequence: Synthetic oligonucleotide
cgguugacuagaauccauc

SEQ ID NO: 1426240 - RNA, 19 nt, Artificial Sequence
  Description of Artificial Sequence: Synthetic oligonucleotide
cgacgaguacagcugcugc

SEQ ID NO: 1426241 - RNA, 19 nt, Artificial Sequence
  Description of Artificial Sequence: Synthetic oligonucleotide
gcaccgacacguuccucug

SEQ ID NO: 1426242 - RNA, 19 nt, Artificial Sequence
  Description of Artificial Sequence: Synthetic oligonucleotide
cuuaugcauuuacccuaaa

SEQ ID NO: 1426243 - RNA, 19 nt, Artificial Sequence
  Description of Artificial Sequence: Synthetic oligonucleotide
cccgguacgcccagauccc

SEQ ID NO: 1426244 - RNA, 19 nt, Artificial Sequence
  Description of Artificial Sequence: Synthetic oligonucleotide
augucguggggcagcgacu

SEQ ID NO: 1426245 - RNA, 19 nt, Artificial Sequence
  Description of Artificial Sequence: Synthetic oligonucleotide
acggcgccgggcucccgag

SEQ ID NO: 1426246 - RNA, 19 nt, Artificial Sequence
  Description of Artificial Sequence: Synthetic oligonucleotide
agcagccggcuccgcucuc

SEQ ID NO: 1426247 - RNA, 19 nt, Artificial Sequence
  Description of Artificial Sequence: Synthetic oligonucleotide
gggucacaaggaaaauauc

SEQ ID NO: 1426248 - RNA, 19 nt, Artificial Sequence
  Description of Artificial Sequence: Synthetic oligonucleotide
ccauuugucaugugacaua

SEQ ID NO: 1426249 - RNA, 19 nt, Artificial Sequence
  Description of Artificial Sequence: Synthetic oligonucleotide
cauugucuccccugcacuu

SEQ ID NO: 1426250 - RNA, 19 nt, Artificial Sequence
  Description of Artificial Sequence: Synthetic oligonucleotide
cugugagugaagcuccauu

SEQ ID NO: 1426251 - RNA, 19 nt, Artificial Sequence
  Description of Artificial Sequence: Synthetic oligonucleotide
cgacacguuccucugcaug

SEQ ID NO: 1426252 - RNA, 19 nt, Artificial Sequence
  Description of Artificial Sequence: Synthetic oligonucleotide
cccaauucuuggcuauuga

SEQ ID NO: 1426253 - RNA, 19 nt, Artificial Sequence
  Description of Artificial Sequence: Synthetic oligonucleotide
cgaguacagcugcugcugc

SEQ ID NO: 1426254 - RNA, 19 nt, Artificial Sequence
  Description of Artificial Sequence: Synthetic oligonucleotide
gcggccgacgaguacagcu

SEQ ID NO: 1426255 - RNA, 19 nt, Artificial Sequence
  Description of Artificial Sequence: Synthetic oligonucleotide
ccaauucuuggcuauugau

SEQ ID NO: 1426256 - RNA, 19 nt, Artificial Sequence
  Description of Artificial Sequence: Synthetic oligonucleotide
acacggccgccgcucgaga

SEQ ID NO: 1426257 - RNA, 19 nt, Artificial Sequence
  Description of Artificial Sequence: Synthetic oligonucleotide
cauaaacaguaaguugguu

SEQ ID NO: 1426258 - RNA, 19 nt, Artificial Sequence
  Description of Artificial Sequence: Synthetic oligonucleotide
ggcugaucaucacagucuu

SEQ ID NO: 1426259 - RNA, 19 nt, Artificial Sequence
  Description of Artificial Sequence: Synthetic oligonucleotide
ccaauucgagcauuugcgu

SEQ ID NO: 1426260 - RNA, 19 nt, Artificial Sequence
  Description of Artificial Sequence: Synthetic oligonucleotide
gccagacacuaccagggcu

SEQ ID NO: 1426261 - RNA, 19 nt, Artificial Sequence
  Description of Artificial Sequence: Synthetic oligonucleotide
agggcaccgccgagucccc

SEQ ID NO: 1426262 - RNA, 19 nt, Artificial Sequence
  Description of Artificial Sequence: Synthetic oligonucleotide
ggcuauugauuaacgcucu

SEQ ID NO: 1426263 - RNA, 19 nt, Artificial Sequence
  Description of Artificial Sequence: Synthetic oligonucleotide
gagcgcggccgacgaguac

SEQ ID NO: 1426264 - RNA, 19 nt, Artificial Sequence
  Description of Artificial Sequence: Synthetic oligonucleotide
cucggcagcccggcgccgc

SEQ ID NO: 1426265 - RNA, 19 nt, Artificial Sequence
  Description of Artificial Sequence: Synthetic oligonucleotide
gacaggucuguggcuaaau

SEQ ID NO: 1426266 - RNA, 19 nt, Artificial Sequence
  Description of Artificial Sequence: Synthetic oligonucleotide
uccccgugacaagucccuc

SEQ ID NO: 1426267 - RNA, 19 nt, Artificial Sequence
  Description of Artificial Sequence: Synthetic oligonucleotide
gcgggguuccccgcggccg

SEQ ID NO: 1426268 - RNA, 19 nt, Artificial Sequence
  Description of Artificial Sequence: Synthetic oligonucleotide
cuuuccgguugacuagaau

SEQ ID NO: 1426269 - RNA, 19 nt, Artificial Sequence
  Description of Artificial Sequence: Synthetic oligonucleotide
gguuuguaggugagugaaa

SEQ ID NO: 1426270 - RNA, 19 nt, Artificial Sequence
  Description of Artificial Sequence: Synthetic oligonucleotide
gagcagccggcuccgcucu

SEQ ID NO: 1426271 - RNA, 19 nt, Artificial Sequence
  Description of Artificial Sequence: Synthetic oligonucleotide
cauuuccccguaagacacu

SEQ ID NO: 1426272 - RNA, 19 nt, Artificial Sequence
  Description of Artificial Sequence: Synthetic oligonucleotide
cuucgaggucuucuagaau

SEQ ID NO: 1426273 - RNA, 19 nt, Artificial Sequence
  Description of Artificial Sequence: Synthetic oligonucleotide
caggagcgcggccgacgag

SEQ ID NO: 1426274 - RNA, 19 nt, Artificial Sequence
  Description of Artificial Sequence: Synthetic oligonucleotide
ccgacgaguacagcugcug

SEQ ID NO: 1426275 - RNA, 19 nt, Artificial Sequence
  Description of Artificial Sequence: Synthetic oligonucleotide
cgcucgagagggcaccgcc

SEQ ID NO: 1426276 - RNA, 19 nt, Artificial Sequence
  Description of Artificial Sequence: Synthetic oligonucleotide
cccucccucgcugggagag

SEQ ID NO: 1426277 - RNA, 19 nt, Artificial Sequence
  Description of Artificial Sequence: Synthetic oligonucleotide
gguacgcccagauccccgu

SEQ ID NO: 1426278 - RNA, 19 nt, Artificial Sequence
  Description of Artificial Sequence: Synthetic oligonucleotide
ggcucccgagcggugacac

SEQ ID NO: 1426279 - RNA, 19 nt, Artificial Sequence
  Description of Artificial Sequence: Synthetic oligonucleotide
cgguacgcccagauccccg

SEQ ID NO: 1426280 - RNA, 19 nt, Artificial Sequence
  Description of Artificial Sequence: Synthetic oligonucleotide
cggccgacgaguacagcug

SEQ ID NO: 1426281 - RNA, 19 nt, Artificial Sequence
  Description of Artificial Sequence: Synthetic oligonucleotide
ccccgcgguaacaagccca

SEQ ID NO: 1426282 - RNA, 19 nt, Artificial Sequence
  Description of Artificial Sequence: Synthetic oligonucleotide
cccucgcugggagagagca

SEQ ID NO: 1426283 - RNA, 19 nt, Artificial Sequence
  Description of Artificial Sequence: Synthetic oligonucleotide
gcgacuccacacacuccag

SEQ ID NO: 1426284 - RNA, 19 nt, Artificial Sequence
  Description of Artificial Sequence: Synthetic oligonucleotide
ccucgcugggagagagcag

SEQ ID NO: 1426285 - RNA, 19 nt, Artificial Sequence
  Description of Artificial Sequence: Synthetic oligonucleotide
ccugcacuuugggcaauac

SEQ ID NO: 1426286 - RNA, 19 nt, Artificial Sequence
  Description of Artificial Sequence: Synthetic oligonucleotide
gcggugacacuggcugucc

SEQ ID NO: 1426287 - RNA, 19 nt, Artificial Sequence
  Description of Artificial Sequence: Synthetic oligonucleotide
gugcgcugucuucgagguc

SEQ ID NO: 1426288 - RNA, 19 nt, Artificial Sequence
  Description of Artificial Sequence: Synthetic oligonucleotide
ucgccgccgccgccgccgc

SEQ ID NO: 1426289 - RNA, 19 nt, Artificial Sequence
  Description of Artificial Sequence: Synthetic oligonucleotide
ggggacacggccgccgcuc

SEQ ID NO: 1426290 - RNA, 19 nt, Artificial Sequence
  Description of Artificial Sequence: Synthetic oligonucleotide
gccgcucgagagggcaccg

SEQ ID NO: 1426291 - RNA, 19 nt, Artificial Sequence
  Description of Artificial Sequence: Synthetic oligonucleotide
cgccagacacuaccagggc

SEQ ID NO: 1426292 - RNA, 19 nt, Artificial Sequence
  Description of Artificial Sequence: Synthetic oligonucleotide
gccuaucauuuccccguaa

SEQ ID NO: 1426293 - RNA, 19 nt, Artificial Sequence
  Description of Artificial Sequence: Synthetic oligonucleotide
cccgagcggugacacuggc

SEQ ID NO: 1426294 - RNA, 19 nt, Artificial Sequence
  Description of Artificial Sequence: Synthetic oligonucleotide
gccgacggcgccgggcucc

SEQ ID NO: 1426295 - RNA, 19 nt, Artificial Sequence
  Description of Artificial Sequence: Synthetic oligonucleotide
cccuaacauccugccgccg

SEQ ID NO: 1426296 - RNA, 19 nt, Artificial Sequence
  Description of Artificial Sequence: Synthetic oligonucleotide
cguaagacacuugguuaca

SEQ ID NO: 1426297 - RNA, 19 nt, Artificial Sequence
  Description of Artificial Sequence: Synthetic oligonucleotide
gcauagucuuaugcauuua

SEQ ID NO: 1426298 - RNA, 19 nt, Artificial Sequence
  Description of Artificial Sequence: Synthetic oligonucleotide
gccgccgccgccgccgccg

SEQ ID NO: 1426299 - RNA, 19 nt, Artificial Sequence
  Description of Artificial Sequence: Synthetic oligonucleotide
ccccguaagacacuugguu

SEQ ID NO: 1426300 - RNA, 19 nt, Artificial Sequence
  Description of Artificial Sequence: Synthetic oligonucleotide
cuaccagggcugcccggua

SEQ ID NO: 1426301 - RNA, 19 nt, Artificial Sequence
  Description of Artificial Sequence: Synthetic oligonucleotide
gcgccgcggggacacggcc

SEQ ID NO: 1426302 - RNA, 19 nt, Artificial Sequence
  Description of Artificial Sequence: Synthetic oligonucleotide
cagcaccgacacguuccuc

SEQ ID NO: 1426303 - RNA, 19 nt, Artificial Sequence
  Description of Artificial Sequence: Synthetic oligonucleotide
ccgguacgcccagaucccc

SEQ ID NO: 1426304 - RNA, 19 nt, Artificial Sequence
  Description of Artificial Sequence: Synthetic oligonucleotide
gcgccgggcucccgagcgg

SEQ ID NO: 1426305 - RNA, 19 nt, Artificial Sequence
  Description of Artificial Sequence: Synthetic oligonucleotide
ccgcauccagcagccacac

SEQ ID NO: 1426306 - RNA, 19 nt, Artificial Sequence
  Description of Artificial Sequence: Synthetic oligonucleotide
gcucucacuggugcgcugu

SEQ ID NO: 1426307 - RNA, 19 nt, Artificial Sequence
  Description of Artificial Sequence: Synthetic oligonucleotide
gcgagaccggggcucccuc

SEQ ID NO: 1426308 - RNA, 19 nt, Artificial Sequence
  Description of Artificial Sequence: Synthetic oligonucleotide
cccaggggcggggcgagac

SEQ ID NO: 1426309 - RNA, 19 nt, Artificial Sequence
  Description of Artificial Sequence: Synthetic oligonucleotide
gggagucgccagacacuac

SEQ ID NO: 1426310 - RNA, 19 nt, Artificial Sequence
  Description of Artificial Sequence: Synthetic oligonucleotide
cugcccgguacgcccagau

SEQ ID NO: 1426311 - RNA, 19 nt, Artificial Sequence
  Description of Artificial Sequence: Synthetic oligonucleotide
gcgcggccgacgaguacag

SEQ ID NO: 1426312 - RNA, 19 nt, Artificial Sequence
  Description of Artificial Sequence: Synthetic oligonucleotide
cggccgccgcucgagaggg

SEQ ID NO: 1426313 - RNA, 19 nt, Artificial Sequence
  Description of Artificial Sequence: Synthetic oligonucleotide
ggcgccgcggggacacggc

SEQ ID NO: 1426314 - RNA, 19 nt, Artificial Sequence
  Description of Artificial Sequence: Synthetic oligonucleotide
ggacacggccgccgcucga

SEQ ID NO: 1426315 - RNA, 19 nt, Artificial Sequence
  Description of Artificial Sequence: Synthetic oligonucleotide
ggucaggagcgcggccgac

SEQ ID NO: 1426316 - RNA, 19 nt, Artificial Sequence
  Description of Artificial Sequence: Synthetic oligonucleotide
ccgguugacuagaauccau

SEQ ID NO: 1426317 - RNA, 19 nt, Artificial Sequence
  Description of Artificial Sequence: Synthetic oligonucleotide
ccgccgcucgagagggcac

SEQ ID NO: 1426318 - RNA, 19 nt, Artificial Sequence
  Description of Artificial Sequence: Synthetic oligonucleotide
gccgccgccgccgccgcug

SEQ ID NO: 1426319 - RNA, 19 nt, Artificial Sequence
  Description of Artificial Sequence: Synthetic oligonucleotide
ccgcgguaacaagcccagg

SEQ ID NO: 1426320 - RNA, 19 nt, Artificial Sequence
  Description of Artificial Sequence: Synthetic oligonucleotide
cucccaauucuuggcuauu

SEQ ID NO: 1426321 - RNA, 19 nt, Artificial Sequence
  Description of Artificial Sequence: Synthetic oligonucleotide
ggagcgcggccgacgagua

SEQ ID NO: 1426322 - RNA, 19 nt, Artificial Sequence
  Description of Artificial Sequence: Synthetic oligonucleotide
ccgggagucgccagacacu

SEQ ID NO: 1426323 - RNA, 19 nt, Artificial Sequence
  Description of Artificial Sequence: Synthetic oligonucleotide
cgccgcucgagagggcacc

SEQ ID NO: 1426324 - RNA, 19 nt, Artificial Sequence
  Description of Artificial Sequence: Synthetic oligonucleotide
ccgcucgagagggcaccgc

SEQ ID NO: 1426325 - RNA, 19 nt, Artificial Sequence
  Description of Artificial Sequence: Synthetic oligonucleotide
cgggagucgccagacacua

SEQ ID NO: 1426326 - RNA, 19 nt, Artificial Sequence
  Description of Artificial Sequence: Synthetic oligonucleotide
cgagcauuugcgugacaau

SEQ ID NO: 1426327 - RNA, 19 nt, Artificial Sequence
  Description of Artificial Sequence: Synthetic oligonucleotide
cacuuccccuuugguuugu

SEQ ID NO: 1426328 - RNA, 19 nt, Artificial Sequence
  Description of Artificial Sequence: Synthetic oligonucleotide
gcgugacaaucugaauuuu

SEQ ID NO: 1426329 - RNA, 19 nt, Artificial Sequence
  Description of Artificial Sequence: Synthetic oligonucleotide
cggggcgagaccggggcuc

SEQ ID NO: 1426330 - RNA, 19 nt, Artificial Sequence
  Description of Artificial Sequence: Synthetic oligonucleotide
cgggcucccgagcggugac

SEQ ID NO: 1426331 - RNA, 19 nt, Artificial Sequence
  Description of Artificial Sequence: Synthetic oligonucleotide
ggcgagaccggggcucccu

SEQ ID NO: 1426332 - RNA, 19 nt, Artificial Sequence
  Description of Artificial Sequence: Synthetic oligonucleotide
gggcucccgagcggugaca

SEQ ID NO: 1426333 - RNA, 19 nt, Artificial Sequence
  Description of Artificial Sequence: Synthetic oligonucleotide
ccgagcggugacacuggcu

SEQ ID NO: 1426334 - RNA, 19 nt, Artificial Sequence
  Description of Artificial Sequence: Synthetic oligonucleotide
gcaugucguggggcagcga

SEQ ID NO: 1426335 - RNA, 19 nt, Artificial Sequence
  Description of Artificial Sequence: Synthetic oligonucleotide
gggguuccccgcggccgac

SEQ ID NO: 1426336 - RNA, 19 nt, Artificial Sequence
  Description of Artificial Sequence: Synthetic oligonucleotide
gcucccgagcggugacacu

SEQ ID NO: 1426337 - RNA, 19 nt, Artificial Sequence
  Description of Artificial Sequence: Synthetic oligonucleotide
ggccgacggcgccgggcuc

SEQ ID NO: 1426338 - RNA, 19 nt, Artificial Sequence
  Description of Artificial Sequence: Synthetic oligonucleotide
gcugcccgguacgcccaga

SEQ ID NO: 1426339 - RNA, 19 nt, Artificial Sequence
  Description of Artificial Sequence: Synthetic oligonucleotide
ccuucacuaccucgaucuu

SEQ ID NO: 1426340 - RNA, 19 nt, Artificial Sequence
  Description of Artificial Sequence: Synthetic oligonucleotide
cgagagggcaccgccgagu

SEQ ID NO: 1426341 - RNA, 19 nt, Artificial Sequence
  Description of Artificial Sequence: Synthetic oligonucleotide
gcggggcgagaccggggcu

SEQ ID NO: 1426342 - RNA, 19 nt, Artificial Sequence
  Description of Artificial Sequence: Synthetic oligonucleotide
cgggguuccccgcggccga

SEQ ID NO: 1426343 - RNA, 19 nt, Artificial Sequence
  Description of Artificial Sequence: Synthetic oligonucleotide
ggccgccgcucgagagggc

SEQ ID NO: 1426344 - RNA, 19 nt, Artificial Sequence
  Description of Artificial Sequence: Synthetic oligonucleotide
ccccgggagucgccagaca

SEQ ID NO: 1426345 - RNA, 19 nt, Artificial Sequence
  Description of Artificial Sequence: Synthetic oligonucleotide
cccugcacuuugggcaaua

SEQ ID NO: 1426346 - RNA, 19 nt, Artificial Sequence
  Description of Artificial Sequence: Synthetic oligonucleotide
ccucccucgcugggagaga

SEQ ID NO: 1426347 - RNA, 19 nt, Artificial Sequence
  Description of Artificial Sequence: Synthetic oligonucleotide
ccccucccucgcugggaga

SEQ ID NO: 1426348 - RNA, 19 nt, Artificial Sequence
  Description of Artificial Sequence: Synthetic oligonucleotide
ccgccgcgccuccgcucgg

SEQ ID NO: 1426349 - RNA, 19 nt, Artificial Sequence
  Description of Artificial Sequence: Synthetic oligonucleotide
cgcggccgacgaguacagc

SEQ ID NO: 1426350 - RNA, 19 nt, Artificial Sequence
  Description of Artificial Sequence: Synthetic oligonucleotide
cggcuccgcucuccgguca

SEQ ID NO: 1426351 - RNA, 19 nt, Artificial Sequence
  Description of Artificial Sequence: Synthetic oligonucleotide
gccgccgccgccgccgccu

SEQ ID NO: 1426352 - RNA, 19 nt, Artificial Sequence
  Description of Artificial Sequence: Synthetic oligonucleotide
ccgccgccgccgccgccgc

SEQ ID NO: 1426353 - RNA, 19 nt, Artificial Sequence
  Description of Artificial Sequence: Synthetic oligonucleotide
cgccgcgccuccgcucggc

SEQ ID NO: 1426354 - RNA, 19 nt, Artificial Sequence
  Description of Artificial Sequence: Synthetic oligonucleotide
ccgccgccgccgccgccuc

SEQ ID NO: 1426355 - RNA, 19 nt, Artificial Sequence
  Description of Artificial Sequence: Synthetic oligonucleotide
cgacggcgccgggcucccg

SEQ ID NO: 1426356 - RNA, 19 nt, Artificial Sequence
  Description of Artificial Sequence: Synthetic oligonucleotide
cgccgccgccgccgccgcc

SEQ ID NO: 1426357 - RNA, 19 nt, Artificial Sequence
  Description of Artificial Sequence: Synthetic oligonucleotide
cggucacuuucagcaggau

SEQ ID NO: 1426358 - RNA, 19 nt, Artificial Sequence
  Description of Artificial Sequence: Synthetic oligonucleotide
cgccgccgccgccgccgcu

SEQ ID NO: 1426359 - RNA, 19 nt, Artificial Sequence
  Description of Artificial Sequence: Synthetic oligonucleotide
auaguugucaaucagaagg

SEQ ID NO: 1426360 - RNA, 19 nt, Artificial Sequence
  Description of Artificial Sequence: Synthetic oligonucleotide
aagagaaauagucugcaag

SEQ ID NO: 1426361 - RNA, 19 nt, Artificial Sequence
  Description of Artificial Sequence: Synthetic oligonucleotide
uuuccaaagagaaauaguc

SEQ ID NO: 1426362 - RNA, 19 nt, Artificial Sequence
  Description of Artificial Sequence: Synthetic oligonucleotide
gugaaauacauccuggacg

SEQ ID NO: 1426363 - RNA, 19 nt, Artificial Sequence
  Description of Artificial Sequence: Synthetic oligonucleotide
caugcuucaacuuggacgg

SEQ ID NO: 1426364 - RNA, 19 nt, Artificial Sequence
  Description of Artificial Sequence: Synthetic oligonucleotide
uguggauuuaaccaccucc

SEQ ID NO: 1426365 - RNA, 19 nt, Artificial Sequence
  Description of Artificial Sequence: Synthetic oligonucleotide
ugugaaaugcuucggaggc

SEQ ID NO: 1426366 - RNA, 19 nt, Artificial Sequence
  Description of Artificial Sequence: Synthetic oligonucleotide
aacucaacaauguacucug

SEQ ID NO: 1426367 - RNA, 19 nt, Artificial Sequence
  Description of Artificial Sequence: Synthetic oligonucleotide
uaugacuggacuuaacacc

SEQ ID NO: 1426368 - RNA, 19 nt, Artificial Sequence
  Description of Artificial Sequence: Synthetic oligonucleotide
aaaauuggcaaaaucauaa

SEQ ID NO: 1426369 - RNA, 19 nt, Artificial Sequence
  Description of Artificial Sequence: Synthetic oligonucleotide
aacugugagcacuggaaac

SEQ ID NO: 1426370 - RNA, 19 nt, Artificial Sequence
  Description of Artificial Sequence: Synthetic oligonucleotide
gacuuaacaccucucaaag

SEQ ID NO: 1426371 - RNA, 19 nt, Artificial Sequence
  Description of Artificial Sequence: Synthetic oligonucleotide
gaugaagagaggcaguccc

SEQ ID NO: 1426372 - RNA, 19 nt, Artificial Sequence
  Description of Artificial Sequence: Synthetic oligonucleotide
ucuaaggccagcauggcga

SEQ ID NO: 1426373 - RNA, 19 nt, Artificial Sequence
  Description of Artificial Sequence: Synthetic oligonucleotide
ucaagcaugcuucaacuug

SEQ ID NO: 1426374 - RNA, 19 nt, Artificial Sequence
  Description of Artificial Sequence: Synthetic oligonucleotide
uaguugucaaucagaaggg

SEQ ID NO: 1426375 - RNA, 19 nt, Artificial Sequence
  Description of Artificial Sequence: Synthetic oligonucleotide
aacaguucuucacuaagcu

SEQ ID NO: 1426376 - RNA, 19 nt, Artificial Sequence
  Description of Artificial Sequence: Synthetic oligonucleotide
aaccccuuguaccguaucc

SEQ ID NO: 1426377 - RNA, 19 nt, Artificial Sequence
  Description of Artificial Sequence: Synthetic oligonucleotide
ugagcggaaggcuuuauag

SEQ ID NO: 1426378 - RNA, 19 nt, Artificial Sequence
  Description of Artificial Sequence: Synthetic oligonucleotide
ucaacuuggacggugagug

SEQ ID NO: 1426379 - RNA, 19 nt, Artificial Sequence
  Description of Artificial Sequence: Synthetic oligonucleotide
ucccaauucaccucugugg

SEQ ID NO: 1426380 - RNA, 19 nt, Artificial Sequence
  Description of Artificial Sequence: Synthetic oligonucleotide
acggccacuauccaguggc

SEQ ID NO: 1426381 - RNA, 19 nt, Artificial Sequence
  Description of Artificial Sequence: Synthetic oligonucleotide
uaagcguagaccuugucac

SEQ ID NO: 1426382 - RNA, 19 nt, Artificial Sequence
  Description of Artificial Sequence: Synthetic oligonucleotide
aaagaaugguuccggagca

SEQ ID NO: 1426383 - RNA, 19 nt, Artificial Sequence
  Description of Artificial Sequence: Synthetic oligonucleotide
uuccgauaaccucagaaca

SEQ ID NO: 1426384 - RNA, 19 nt, Artificial Sequence
  Description of Artificial Sequence: Synthetic oligonucleotide
uaucugguagaacaguucu

SEQ ID NO: 1426385 - RNA, 19 nt, Artificial Sequence
  Description of Artificial Sequence: Synthetic oligonucleotide
ucucaaagacuuuguauag

SEQ ID NO: 1426386 - RNA, 19 nt, Artificial Sequence
  Description of Artificial Sequence: Synthetic oligonucleotide
acuaagguggcuaugacug

SEQ ID NO: 1426387 - RNA, 19 nt, Artificial Sequence
  Description of Artificial Sequence: Synthetic oligonucleotide
cugucuaaggccagcaugg

SEQ ID NO: 1426388 - RNA, 19 nt, Artificial Sequence
  Description of Artificial Sequence: Synthetic oligonucleotide
cuuuguauagguccggcag

SEQ ID NO: 1426389 - RNA, 19 nt, Artificial Sequence
  Description of Artificial Sequence: Synthetic oligonucleotide
uaaaugaguaucugguaga

SEQ ID NO: 1426390 - RNA, 19 nt, Artificial Sequence
  Description of Artificial Sequence: Synthetic oligonucleotide
aagacuuuguauagguccg

SEQ ID NO: 1426391 - RNA, 19 nt, Artificial Sequence
  Description of Artificial Sequence: Synthetic oligonucleotide
uuauagauaaugugcucca

SEQ ID NO: 1426392 - RNA, 19 nt, Artificial Sequence
  Description of Artificial Sequence: Synthetic oligonucleotide
agaacaguucuucacuaag

SEQ ID NO: 1426393 - RNA, 19 nt, Artificial Sequence
  Description of Artificial Sequence: Synthetic oligonucleotide
ugggugaaauacauccugg

SEQ ID NO: 1426394 - RNA, 19 nt, Artificial Sequence
  Description of Artificial Sequence: Synthetic oligonucleotide
gcaugcuucaacuuggacg

SEQ ID NO: 1426395 - RNA, 19 nt, Artificial Sequence
  Description of Artificial Sequence: Synthetic oligonucleotide
ugagugcacaaucacuaag

SEQ ID NO: 1426396 - RNA, 19 nt, Artificial Sequence
  Description of Artificial Sequence: Synthetic oligonucleotide
cucucggagagucucaugg

SEQ ID NO: 1426397 - RNA, 19 nt, Artificial Sequence
  Description of Artificial Sequence: Synthetic oligonucleotide
aaucagguuuccuuccuca

SEQ ID NO: 1426398 - RNA, 19 nt, Artificial Sequence
  Description of Artificial Sequence: Synthetic oligonucleotide
uuccgaaccgaguaaaaca

SEQ ID NO: 1426399 - RNA, 19 nt, Artificial Sequence
  Description of Artificial Sequence: Synthetic oligonucleotide
acgaauuggagcccaacag

SEQ ID NO: 1426400 - RNA, 19 nt, Artificial Sequence
  Description of Artificial Sequence: Synthetic oligonucleotide
uccgaaccgaguaaaacac

SEQ ID NO: 1426401 - RNA, 19 nt, Artificial Sequence
  Description of Artificial Sequence: Synthetic oligonucleotide
uccaguauauacugcuucc

SEQ ID NO: 1426402 - RNA, 19 nt, Artificial Sequence
  Description of Artificial Sequence: Synthetic oligonucleotide
cugugaaaugcuucggagg

SEQ ID NO: 1426403 - RNA, 19 nt, Artificial Sequence
  Description of Artificial Sequence: Synthetic oligonucleotide
auauacugcuuccgaaccg

SEQ ID NO: 1426404 - RNA, 19 nt, Artificial Sequence
  Description of Artificial Sequence: Synthetic oligonucleotide
uggagacucaacacacugg

SEQ ID NO: 1426405 - RNA, 19 nt, Artificial Sequence
  Description of Artificial Sequence: Synthetic oligonucleotide
cuaugacuggacuuaacac

SEQ ID NO: 1426406 - RNA, 19 nt, Artificial Sequence
  Description of Artificial Sequence: Synthetic oligonucleotide
aaauuggcaaaaucauaaa

SEQ ID NO: 1426407 - RNA, 19 nt, Artificial Sequence
  Description of Artificial Sequence: Synthetic oligonucleotide
auagauaaugugcuccaca

SEQ ID NO: 1426408 - RNA, 19 nt, Artificial Sequence
  Description of Artificial Sequence: Synthetic oligonucleotide
acugucuaaggccagcaug

SEQ ID NO: 1426409 - RNA, 19 nt, Artificial Sequence
  Description of Artificial Sequence: Synthetic oligonucleotide
aaugaguaucugguagaac

SEQ ID NO: 1426410 - RNA, 19 nt, Artificial Sequence
  Description of Artificial Sequence: Synthetic oligonucleotide
uguaccguauccuccaagu

SEQ ID NO: 1426411 - RNA, 19 nt, Artificial Sequence
  Description of Artificial Sequence: Synthetic oligonucleotide
ucgaaggaugaagagaggc

SEQ ID NO: 1426412 - RNA, 19 nt, Artificial Sequence
  Description of Artificial Sequence: Synthetic oligonucleotide
guauauacugcuuccgaac

SEQ ID NO: 1426413 - RNA, 19 nt, Artificial Sequence
  Description of Artificial Sequence: Synthetic oligonucleotide
gaggcagucccuccaaagg

SEQ ID NO: 1426414 - RNA, 19 nt, Artificial Sequence
  Description of Artificial Sequence: Synthetic oligonucleotide
ggcuuuauagauaaugugc

SEQ ID NO: 1426415 - RNA, 19 nt, Artificial Sequence
  Description of Artificial Sequence: Synthetic oligonucleotide
ucagaacaccaaaauuggc

SEQ ID NO: 1426416 - RNA, 19 nt, Artificial Sequence
  Description of Artificial Sequence: Synthetic oligonucleotide
uguccgucaagcaugcuuc

SEQ ID NO: 1426417 - RNA, 19 nt, Artificial Sequence
  Description of Artificial Sequence: Synthetic oligonucleotide
aggcuuuauagauaaugug

SEQ ID NO: 1426418 - RNA, 19 nt, Artificial Sequence
  Description of Artificial Sequence: Synthetic oligonucleotide
uuaacaccucucaaagacu

SEQ ID NO: 1426419 - RNA, 19 nt, Artificial Sequence
  Description of Artificial Sequence: Synthetic oligonucleotide
uaccguauccuccaaguuc

SEQ ID NO: 1426420 - RNA, 19 nt, Artificial Sequence
  Description of Artificial Sequence: Synthetic oligonucleotide
guuccgauaaccucagaac

SEQ ID NO: 1426421 - RNA, 19 nt, Artificial Sequence
  Description of Artificial Sequence: Synthetic oligonucleotide
aguauauacugcuuccgaa

SEQ ID NO: 1426422 - RNA, 19 nt, Artificial Sequence
  Description of Artificial Sequence: Synthetic oligonucleotide
guacauaguugucaaucag

SEQ ID NO: 1426423 - RNA, 19 nt, Artificial Sequence
  Description of Artificial Sequence: Synthetic oligonucleotide
uuccacuagcagaugagga

SEQ ID NO: 1426424 - RNA, 19 nt, Artificial Sequence
  Description of Artificial Sequence: Synthetic oligonucleotide
uccuccaguauauacugcu

SEQ ID NO: 1426425 - RNA, 19 nt, Artificial Sequence
  Description of Artificial Sequence: Synthetic oligonucleotide
cuggaaacccuugagcacg

SEQ ID NO: 1426426 - RNA, 19 nt, Artificial Sequence
  Description of Artificial Sequence: Synthetic oligonucleotide
aagggguaauccaaucagg

SEQ ID NO: 1426427 - RNA, 19 nt, Artificial Sequence
  Description of Artificial Sequence: Synthetic oligonucleotide
agcuuggugguguugagga

SEQ ID NO: 1426428 - RNA, 19 nt, Artificial Sequence
  Description of Artificial Sequence: Synthetic oligonucleotide
uaauccuccuccgagggug

SEQ ID NO: 1426429 - RNA, 19 nt, Artificial Sequence
  Description of Artificial Sequence: Synthetic oligonucleotide
cacaaaagaaugguuccgg

SEQ ID NO: 1426430 - RNA, 19 nt, Artificial Sequence
  Description of Artificial Sequence: Synthetic oligonucleotide
aagucccggaagcaagguc

SEQ ID NO: 1426431 - RNA, 19 nt, Artificial Sequence
  Description of Artificial Sequence: Synthetic oligonucleotide
guauagguccggcagguug

SEQ ID NO: 1426432 - RNA, 19 nt, Artificial Sequence
  Description of Artificial Sequence: Synthetic oligonucleotide
aacgugcugcugcacccgc

SEQ ID NO: 1426433 - RNA, 19 nt, Artificial Sequence
  Description of Artificial Sequence: Synthetic oligonucleotide
guaagcguagaccuuguca

SEQ ID NO: 1426434 - RNA, 19 nt, Artificial Sequence
  Description of Artificial Sequence: Synthetic oligonucleotide
gaacaguucuucacuaagc

SEQ ID NO: 1426435 - RNA, 19 nt, Artificial Sequence
  Description of Artificial Sequence: Synthetic oligonucleotide
cuuuauagauaaugugcuc

SEQ ID NO: 1426436 - RNA, 19 nt, Artificial Sequence
  Description of Artificial Sequence: Synthetic oligonucleotide
auggcgaggucaaagagag

SEQ ID NO: 1426437 - RNA, 19 nt, Artificial Sequence
  Description of Artificial Sequence: Synthetic oligonucleotide
agaaauagucugcaagcau

SEQ ID NO: 1426438 - RNA, 19 nt, Artificial Sequence
  Description of Artificial Sequence: Synthetic oligonucleotide
uuacugaggcuuucaaaac

SEQ ID NO: 1426439 - RNA, 19 nt, Artificial Sequence
  Description of Artificial Sequence: Synthetic oligonucleotide
uaaccucagaacaccaaaa

SEQ ID NO: 1426440 - RNA, 19 nt, Artificial Sequence
  Description of Artificial Sequence: Synthetic oligonucleotide
uggauuuaaccaccucccc

SEQ ID NO: 1426441 - RNA, 19 nt, Artificial Sequence
  Description of Artificial Sequence: Synthetic oligonucleotide
acggugagugcacaaucac

SEQ ID NO: 1426442 - RNA, 19 nt, Artificial Sequence
  Description of Artificial Sequence: Synthetic oligonucleotide
aaugcuucggaggcagaag

SEQ ID NO: 1426443 - RNA, 19 nt, Artificial Sequence
  Description of Artificial Sequence: Synthetic oligonucleotide
gguuaauaauccuccuccg

SEQ ID NO: 1426444 - RNA, 19 nt, Artificial Sequence
  Description of Artificial Sequence: Synthetic oligonucleotide
caacagcuugcccucaacg

SEQ ID NO: 1426445 - RNA, 19 nt, Artificial Sequence
  Description of Artificial Sequence: Synthetic oligonucleotide
caaagagaggcgcugguuc

SEQ ID NO: 1426446 - RNA, 19 nt, Artificial Sequence
  Description of Artificial Sequence: Synthetic oligonucleotide
ucaacgugcugcugcaccc

SEQ ID NO: 1426447 - RNA, 19 nt, Artificial Sequence
  Description of Artificial Sequence: Synthetic oligonucleotide
uauacugcuuccgaaccga

SEQ ID NO: 1426448 - RNA, 19 nt, Artificial Sequence
  Description of Artificial Sequence: Synthetic oligonucleotide
agugcacaaucacuaaggu

SEQ ID NO: 1426449 - RNA, 19 nt, Artificial Sequence
  Description of Artificial Sequence: Synthetic oligonucleotide
cauaguugucaaucagaag

SEQ ID NO: 1426450 - RNA, 19 nt, Artificial Sequence
  Description of Artificial Sequence: Synthetic oligonucleotide
cuauccaguggcuuccuug

SEQ ID NO: 1426451 - RNA, 19 nt, Artificial Sequence
  Description of Artificial Sequence: Synthetic oligonucleotide
uccgagggugacaagcagc

SEQ ID NO: 1426452 - RNA, 19 nt, Artificial Sequence
  Description of Artificial Sequence: Synthetic oligonucleotide
acaaaagaaugguuccgga

SEQ ID NO: 1426453 - RNA, 19 nt, Artificial Sequence
  Description of Artificial Sequence: Synthetic oligonucleotide
acugcuuccgaaccgagua

SEQ ID NO: 1426454 - RNA, 19 nt, Artificial Sequence
  Description of Artificial Sequence: Synthetic oligonucleotide
cagcacauucuuuacugag

SEQ ID NO: 1426455 - RNA, 19 nt, Artificial Sequence
  Description of Artificial Sequence: Synthetic oligonucleotide
ucuuuacugaggcuuucaa

SEQ ID NO: 1426456 - RNA, 19 nt, Artificial Sequence
  Description of Artificial Sequence: Synthetic oligonucleotide
uccggagcaucucucggag

SEQ ID NO: 1426457 - RNA, 19 nt, Artificial Sequence
  Description of Artificial Sequence: Synthetic oligonucleotide
uggacuuaacaccucucaa

SEQ ID NO: 1426458 - RNA, 19 nt, Artificial Sequence
  Description of Artificial Sequence: Synthetic oligonucleotide
agcacauucuuuacugagg

SEQ ID NO: 1426459 - RNA, 19 nt, Artificial Sequence
  Description of Artificial Sequence: Synthetic oligonucleotide
gacgaauuggagcccaaca

SEQ ID NO: 1426460 - RNA, 19 nt, Artificial Sequence
  Description of Artificial Sequence: Synthetic oligonucleotide
cuuggucuggugcugugcc

SEQ ID NO: 1426461 - RNA, 19 nt, Artificial Sequence
  Description of Artificial Sequence: Synthetic oligonucleotide
cuuccgggagucauuuucc

SEQ ID NO: 1426462 - RNA, 19 nt, Artificial Sequence
  Description of Artificial Sequence: Synthetic oligonucleotide
ugagguuaauaauccuccu

SEQ ID NO: 1426463 - RNA, 19 nt, Artificial Sequence
  Description of Artificial Sequence: Synthetic oligonucleotide
caucugguaagcguagacc

SEQ ID NO: 1426464 - RNA, 19 nt, Artificial Sequence
  Description of Artificial Sequence: Synthetic oligonucleotide
ucagaagggguaauccaau

SEQ ID NO: 1426465 - RNA, 19 nt, Artificial Sequence
  Description of Artificial Sequence: Synthetic oligonucleotide
cuguccagccacuuucagg

SEQ ID NO: 1426466 - RNA, 19 nt, Artificial Sequence
  Description of Artificial Sequence: Synthetic oligonucleotide
ugagcacuggaaacccuug

SEQ ID NO: 1426467 - RNA, 19 nt, Artificial Sequence
  Description of Artificial Sequence: Synthetic oligonucleotide
agaaugguuccggagcauc

SEQ ID NO: 1426468 - RNA, 19 nt, Artificial Sequence
  Description of Artificial Sequence: Synthetic oligonucleotide
uggaaacccuugagcacgg

SEQ ID NO: 1426469 - RNA, 19 nt, Artificial Sequence
  Description of Artificial Sequence: Synthetic oligonucleotide
uuguccgucaagcaugcuu

SEQ ID NO: 1426470 - RNA, 19 nt, Artificial Sequence
  Description of Artificial Sequence: Synthetic oligonucleotide
cuuccacuagcagaugagg

SEQ ID NO: 1426471 - RNA, 19 nt, Artificial Sequence
  Description of Artificial Sequence: Synthetic oligonucleotide
cacaucagaaucuucccga

SEQ ID NO: 1426472 - RNA, 19 nt, Artificial Sequence
  Description of Artificial Sequence: Synthetic oligonucleotide
gagaaauagucugcaagca

SEQ ID NO: 1426473 - RNA, 19 nt, Artificial Sequence
  Description of Artificial Sequence: Synthetic oligonucleotide
cucaacgugcugcugcacc

SEQ ID NO: 1426474 - RNA, 19 nt, Artificial Sequence
  Description of Artificial Sequence: Synthetic oligonucleotide
acauaguugucaaucagaa

SEQ ID NO: 1426475 - RNA, 19 nt, Artificial Sequence
  Description of Artificial Sequence: Synthetic oligonucleotide
accgaguaaaacacagcac

SEQ ID NO: 1426476 - RNA, 19 nt, Artificial Sequence
  Description of Artificial Sequence: Synthetic oligonucleotide
acuuuguauagguccggca

SEQ ID NO: 1426477 - RNA, 19 nt, Artificial Sequence
  Description of Artificial Sequence: Synthetic oligonucleotide
gugcacaaucacuaaggug

SEQ ID NO: 1426478 - RNA, 19 nt, Artificial Sequence
  Description of Artificial Sequence: Synthetic oligonucleotide
ggugaaauacauccuggac

SEQ ID NO: 1426479 - RNA, 19 nt, Artificial Sequence
  Description of Artificial Sequence: Synthetic oligonucleotide
agauaaugugcuccacagu

SEQ ID NO: 1426480 - RNA, 19 nt, Artificial Sequence
  Description of Artificial Sequence: Synthetic oligonucleotide
agcauggcgaggucaaaga

SEQ ID NO: 1426481 - RNA, 19 nt, Artificial Sequence
  Description of Artificial Sequence: Synthetic oligonucleotide
aagagaggcgcugguuccg

SEQ ID NO: 1426482 - RNA, 19 nt, Artificial Sequence
  Description of Artificial Sequence: Synthetic oligonucleotide
gcucuccucaugcagaaag

SEQ ID NO: 1426483 - RNA, 19 nt, Artificial Sequence
  Description of Artificial Sequence: Synthetic oligonucleotide
cauccuggacgaauuggag

SEQ ID NO: 1426484 - RNA, 19 nt, Artificial Sequence
  Description of Artificial Sequence: Synthetic oligonucleotide
uagaacaguucuucacuaa

SEQ ID NO: 1426485 - RNA, 19 nt, Artificial Sequence
  Description of Artificial Sequence: Synthetic oligonucleotide
gcuaugacuggacuuaaca

SEQ ID NO: 1426486 - RNA, 19 nt, Artificial Sequence
  Description of Artificial Sequence: Synthetic oligonucleotide
uauagauaaugugcuccac

SEQ ID NO: 1426487 - RNA, 19 nt, Artificial Sequence
  Description of Artificial Sequence: Synthetic oligonucleotide
auacauccuggacgaauug

SEQ ID NO: 1426488 - RNA, 19 nt, Artificial Sequence
  Description of Artificial Sequence: Synthetic oligonucleotide
ucucggagagucucauggc

SEQ ID NO: 1426489 - RNA, 19 nt, Artificial Sequence
  Description of Artificial Sequence: Synthetic oligonucleotide
ggcaaaaucauaaaugagu

SEQ ID NO: 1426490 - RNA, 19 nt, Artificial Sequence
  Description of Artificial Sequence: Synthetic oligonucleotide
agucccggaagcaaggucu

SEQ ID NO: 1426491 - RNA, 19 nt, Artificial Sequence
  Description of Artificial Sequence: Synthetic oligonucleotide
uagaccuugucaccacuuc

SEQ ID NO: 1426492 - RNA, 19 nt, Artificial Sequence
  Description of Artificial Sequence: Synthetic oligonucleotide
caagcugcaggacguuucc

SEQ ID NO: 1426493 - RNA, 19 nt, Artificial Sequence
  Description of Artificial Sequence: Synthetic oligonucleotide
accguauccuccaaguucu

SEQ ID NO: 1426494 - RNA, 19 nt, Artificial Sequence
  Description of Artificial Sequence: Synthetic oligonucleotide
aaucacuaagguggcuaug

SEQ ID NO: 1426495 - RNA, 19 nt, Artificial Sequence
  Description of Artificial Sequence: Synthetic oligonucleotide
guuccggagcaucucucgg

SEQ ID NO: 1426496 - RNA, 19 nt, Artificial Sequence
  Description of Artificial Sequence: Synthetic oligonucleotide
gagcggaaggcuuuauaga

SEQ ID NO: 1426497 - RNA, 19 nt, Artificial Sequence
  Description of Artificial Sequence: Synthetic oligonucleotide
cuuccgaaccgaguaaaac

SEQ ID NO: 1426498 - RNA, 19 nt, Artificial Sequence
  Description of Artificial Sequence: Synthetic oligonucleotide
gugcggaccaucugguaag

SEQ ID NO: 1426499 - RNA, 19 nt, Artificial Sequence
  Description of Artificial Sequence: Synthetic oligonucleotide
gaaccgaguaaaacacagc

SEQ ID NO: 1426500 - RNA, 19 nt, Artificial Sequence
  Description of Artificial Sequence: Synthetic oligonucleotide
acaaucacuaagguggcua

SEQ ID NO: 1426501 - RNA, 19 nt, Artificial Sequence
  Description of Artificial Sequence: Synthetic oligonucleotide
cugguaagcguagaccuug

SEQ ID NO: 1426502 - RNA, 19 nt, Artificial Sequence
  Description of Artificial Sequence: Synthetic oligonucleotide
gacuuuguauagguccggc

SEQ ID NO: 1426503 - RNA, 19 nt, Artificial Sequence
  Description of Artificial Sequence: Synthetic oligonucleotide
uucaacuuggacggugagu

SEQ ID NO: 1426504 - RNA, 19 nt, Artificial Sequence
  Description of Artificial Sequence: Synthetic oligonucleotide
aggacugucuaaggccagc

SEQ ID NO: 1426505 - RNA, 19 nt, Artificial Sequence
  Description of Artificial Sequence: Synthetic oligonucleotide
ucugugccgcuucugcaac

SEQ ID NO: 1426506 - RNA, 19 nt, Artificial Sequence
  Description of Artificial Sequence: Synthetic oligonucleotide
gaauuggagcccaacagcu

SEQ ID NO: 1426507 - RNA, 19 nt, Artificial Sequence
  Description of Artificial Sequence: Synthetic oligonucleotide
aucuccacguccucaggcu

SEQ ID NO: 1426508 - RNA, 19 nt, Artificial Sequence
  Description of Artificial Sequence: Synthetic oligonucleotide
agggguaauccaaucaggu

SEQ ID NO: 1426509 - RNA, 19 nt, Artificial Sequence
  Description of Artificial Sequence: Synthetic oligonucleotide
uuccggagcaucucucgga

SEQ ID NO: 1426510 - RNA, 19 nt, Artificial Sequence
  Description of Artificial Sequence: Synthetic oligonucleotide
uggugagguuaauaauccu

SEQ ID NO: 1426511 - RNA, 19 nt, Artificial Sequence
  Description of Artificial Sequence: Synthetic oligonucleotide
ugcaggacguuuccauccu

SEQ ID NO: 1426512 - RNA, 19 nt, Artificial Sequence
  Description of Artificial Sequence: Synthetic oligonucleotide
cccaauucaccucuguggc

SEQ ID NO: 1426513 - RNA, 19 nt, Artificial Sequence
  Description of Artificial Sequence: Synthetic oligonucleotide
cuggacuuaacaccucuca

SEQ ID NO: 1426514 - RNA, 19 nt, Artificial Sequence
  Description of Artificial Sequence: Synthetic oligonucleotide
ggaagcaaggucuggguga

SEQ ID NO: 1426515 - RNA, 19 nt, Artificial Sequence
  Description of Artificial Sequence: Synthetic oligonucleotide
uugcuuggacuggaagggg

SEQ ID NO: 1426516 - RNA, 19 nt, Artificial Sequence
  Description of Artificial Sequence: Synthetic oligonucleotide
gagcccaacagcuugcccu

SEQ ID NO: 1426517 - RNA, 19 nt, Artificial Sequence
  Description of Artificial Sequence: Synthetic oligonucleotide
caauucaccucuguggcca

SEQ ID NO: 1426518 - RNA, 19 nt, Artificial Sequence
  Description of Artificial Sequence: Synthetic oligonucleotide
agacuuuguauagguccgg

SEQ ID NO: 1426519 - RNA, 19 nt, Artificial Sequence
  Description of Artificial Sequence: Synthetic oligonucleotide
agcaagucccggaagcaag

SEQ ID NO: 1426520 - RNA, 19 nt, Artificial Sequence
  Description of Artificial Sequence: Synthetic oligonucleotide
gguuccggagcaucucucg

SEQ ID NO: 1426521 - RNA, 19 nt, Artificial Sequence
  Description of Artificial Sequence: Synthetic oligonucleotide
gguuccgauaaccucagaa

SEQ ID NO: 1426522 - RNA, 19 nt, Artificial Sequence
  Description of Artificial Sequence: Synthetic oligonucleotide
agucucauggccgcgcuca

SEQ ID NO: 1426523 - RNA, 19 nt, Artificial Sequence
  Description of Artificial Sequence: Synthetic oligonucleotide
acaucagaaucuucccgau

SEQ ID NO: 1426524 - RNA, 19 nt, Artificial Sequence
  Description of Artificial Sequence: Synthetic oligonucleotide
gcaaaaucauaaaugagua

SEQ ID NO: 1426525 - RNA, 19 nt, Artificial Sequence
  Description of Artificial Sequence: Synthetic oligonucleotide
aguaucugguagaacaguu

SEQ ID NO: 1426526 - RNA, 19 nt, Artificial Sequence
  Description of Artificial Sequence: Synthetic oligonucleotide
ucugguaagcguagaccuu

SEQ ID NO: 1426527 - RNA, 19 nt, Artificial Sequence
  Description of Artificial Sequence: Synthetic oligonucleotide
aggacguuuccauccucug

SEQ ID NO: 1426528 - RNA, 19 nt, Artificial Sequence
  Description of Artificial Sequence: Synthetic oligonucleotide
agcguagaccuugucacca

SEQ ID NO: 1426529 - RNA, 19 nt, Artificial Sequence
  Description of Artificial Sequence: Synthetic oligonucleotide
caguauauacugcuuccga

SEQ ID NO: 1426530 - RNA, 19 nt, Artificial Sequence
  Description of Artificial Sequence: Synthetic oligonucleotide
cgaaccgaguaaaacacag

SEQ ID NO: 1426531 - RNA, 19 nt, Artificial Sequence
  Description of Artificial Sequence: Synthetic oligonucleotide
cuugagcacggccacuauc

SEQ ID NO: 1426532 - RNA, 19 nt, Artificial Sequence
  Description of Artificial Sequence: Synthetic oligonucleotide
cagaagggguaauccaauc

SEQ ID NO: 1426533 - RNA, 19 nt, Artificial Sequence
  Description of Artificial Sequence: Synthetic oligonucleotide
caucagaaucuucccgaug

SEQ ID NO: 1426534 - RNA, 19 nt, Artificial Sequence
  Description of Artificial Sequence: Synthetic oligonucleotide
uuccgggagucauuuucca

SEQ ID NO: 1426535 - RNA, 19 nt, Artificial Sequence
  Description of Artificial Sequence: Synthetic oligonucleotide
ggacuuaacaccucucaaa

SEQ ID NO: 1426536 - RNA, 19 nt, Artificial Sequence
  Description of Artificial Sequence: Synthetic oligonucleotide
acuggacuuaacaccucuc

SEQ ID NO: 1426537 - RNA, 19 nt, Artificial Sequence
  Description of Artificial Sequence: Synthetic oligonucleotide
agcaaggucugggugaaau

SEQ ID NO: 1426538 - RNA, 19 nt, Artificial Sequence
  Description of Artificial Sequence: Synthetic oligonucleotide
gaugaggaagccacaccca

SEQ ID NO: 1426539 - RNA, 19 nt, Artificial Sequence
  Description of Artificial Sequence: Synthetic oligonucleotide
auagguccggcagguuggc

SEQ ID NO: 1426540 - RNA, 19 nt, Artificial Sequence
  Description of Artificial Sequence: Synthetic oligonucleotide
cuucaugcuugguggggug

SEQ ID NO: 1426541 - RNA, 19 nt, Artificial Sequence
  Description of Artificial Sequence: Synthetic oligonucleotide
acuuggacggugagugcac

SEQ ID NO: 1426542 - RNA, 19 nt, Artificial Sequence
  Description of Artificial Sequence: Synthetic oligonucleotide
ccacaucagaaucuucccg

SEQ ID NO: 1426543 - RNA, 19 nt, Artificial Sequence
  Description of Artificial Sequence: Synthetic oligonucleotide
guggggugcacauugacau

SEQ ID NO: 1426544 - RNA, 19 nt, Artificial Sequence
  Description of Artificial Sequence: Synthetic oligonucleotide
gaccaucugguaagcguag

SEQ ID NO: 1426545 - RNA, 19 nt, Artificial Sequence
  Description of Artificial Sequence: Synthetic oligonucleotide
ugguaagcguagaccuugu

SEQ ID NO: 1426546 - RNA, 19 nt, Artificial Sequence
  Description of Artificial Sequence: Synthetic oligonucleotide
gaggcgcugguuccgauaa

SEQ ID NO: 1426547 - RNA, 19 nt, Artificial Sequence
  Description of Artificial Sequence: Synthetic oligonucleotide
ugucuaaggccagcauggc

SEQ ID NO: 1426548 - RNA, 19 nt, Artificial Sequence
  Description of Artificial Sequence: Synthetic oligonucleotide
gguaauccaaucagguuuc

SEQ ID NO: 1426549 - RNA, 19 nt, Artificial Sequence
  Description of Artificial Sequence: Synthetic oligonucleotide
ggguaauccaaucagguuu

SEQ ID NO: 1426550 - RNA, 19 nt, Artificial Sequence
  Description of Artificial Sequence: Synthetic oligonucleotide
caaucagguuuccuuccuc

SEQ ID NO: 1426551 - RNA, 19 nt, Artificial Sequence
  Description of Artificial Sequence: Synthetic oligonucleotide
caacuuggacggugagugc

SEQ ID NO: 1426552 - RNA, 19 nt, Artificial Sequence
  Description of Artificial Sequence: Synthetic oligonucleotide
accucucaaagacuuugua

SEQ ID NO: 1426553 - RNA, 19 nt, Artificial Sequence
  Description of Artificial Sequence: Synthetic oligonucleotide
gcuuuauagauaaugugcu

SEQ ID NO: 1426554 - RNA, 19 nt, Artificial Sequence
  Description of Artificial Sequence: Synthetic oligonucleotide
aacacacuggugagguuaa

SEQ ID NO: 1426555 - RNA, 19 nt, Artificial Sequence
  Description of Artificial Sequence: Synthetic oligonucleotide
cacuuccacuagcagauga

SEQ ID NO: 1426556 - RNA, 19 nt, Artificial Sequence
  Description of Artificial Sequence: Synthetic oligonucleotide
gacuggacuuaacaccucu

SEQ ID NO: 1426557 - RNA, 19 nt, Artificial Sequence
  Description of Artificial Sequence: Synthetic oligonucleotide
gcugguuccgauaaccuca

SEQ ID NO: 1426558 - RNA, 19 nt, Artificial Sequence
  Description of Artificial Sequence: Synthetic oligonucleotide
ucucucggagagucucaug

SEQ ID NO: 1426559 - RNA, 19 nt, Artificial Sequence
  Description of Artificial Sequence: Synthetic oligonucleotide
uuggucuggugcugugcca

SEQ ID NO: 1426560 - RNA, 19 nt, Artificial Sequence
  Description of Artificial Sequence: Synthetic oligonucleotide
uucuggucccgggagucug

SEQ ID NO: 1426561 - RNA, 19 nt, Artificial Sequence
  Description of Artificial Sequence: Synthetic oligonucleotide
acuaagcuuggugguguug

SEQ ID NO: 1426562 - RNA, 19 nt, Artificial Sequence
  Description of Artificial Sequence: Synthetic oligonucleotide
guugucaaucagaaggggu

SEQ ID NO: 1426563 - RNA, 19 nt, Artificial Sequence
  Description of Artificial Sequence: Synthetic oligonucleotide
gcucacaggcuggagaaag

SEQ ID NO: 1426564 - RNA, 19 nt, Artificial Sequence
  Description of Artificial Sequence: Synthetic oligonucleotide
gucgaaggaugaagagagg

SEQ ID NO: 1426565 - RNA, 19 nt, Artificial Sequence
  Description of Artificial Sequence: Synthetic oligonucleotide
uggcgaggucaaagagagg

SEQ ID NO: 1426566 - RNA, 19 nt, Artificial Sequence
  Description of Artificial Sequence: Synthetic oligonucleotide
caaaaucauaaaugaguau

SEQ ID NO: 1426567 - RNA, 19 nt, Artificial Sequence
  Description of Artificial Sequence: Synthetic oligonucleotide
uccgggagucauuuuccau

SEQ ID NO: 1426568 - RNA, 19 nt, Artificial Sequence
  Description of Artificial Sequence: Synthetic oligonucleotide
aggucugggugaaauacau

SEQ ID NO: 1426569 - RNA, 19 nt, Artificial Sequence
  Description of Artificial Sequence: Synthetic oligonucleotide
ugacuggacuuaacaccuc

SEQ ID NO: 1426570 - RNA, 19 nt, Artificial Sequence
  Description of Artificial Sequence: Synthetic oligonucleotide
cacaguccacuuccagggc

SEQ ID NO: 1426571 - RNA, 19 nt, Artificial Sequence
  Description of Artificial Sequence: Synthetic oligonucleotide
acuguggauuuaaccaccu

SEQ ID NO: 1426572 - RNA, 19 nt, Artificial Sequence
  Description of Artificial Sequence: Synthetic oligonucleotide
cuccgagggugacaagcag

SEQ ID NO: 1426573 - RNA, 19 nt, Artificial Sequence
  Description of Artificial Sequence: Synthetic oligonucleotide
ggcuuuggaguggagccgg

SEQ ID NO: 1426574 - RNA, 19 nt, Artificial Sequence
  Description of Artificial Sequence: Synthetic oligonucleotide
ccgauaaccucagaacacc

SEQ ID NO: 1426575 - RNA, 19 nt, Artificial Sequence
  Description of Artificial Sequence: Synthetic oligonucleotide
cuucacuaagcuugguggu

SEQ ID NO: 1426576 - RNA, 19 nt, Artificial Sequence
  Description of Artificial Sequence: Synthetic oligonucleotide
guggcuaugacuggacuua

SEQ ID NO: 1426577 - RNA, 19 nt, Artificial Sequence
  Description of Artificial Sequence: Synthetic oligonucleotide
uggacggugagugcacaau

SEQ ID NO: 1426578 - RNA, 19 nt, Artificial Sequence
  Description of Artificial Sequence: Synthetic oligonucleotide
accccuuguaccguauccu

SEQ ID NO: 1426579 - RNA, 19 nt, Artificial Sequence
  Description of Artificial Sequence: Synthetic oligonucleotide
caacgugcugcugcacccg

SEQ ID NO: 1426580 - RNA, 19 nt, Artificial Sequence
  Description of Artificial Sequence: Synthetic oligonucleotide
caggacugucuaaggccag

SEQ ID NO: 1426581 - RNA, 19 nt, Artificial Sequence
  Description of Artificial Sequence: Synthetic oligonucleotide
ggcgcugguuccgauaacc

SEQ ID NO: 1426582 - RNA, 19 nt, Artificial Sequence
  Description of Artificial Sequence: Synthetic oligonucleotide
ugggguugcuuggacugga

SEQ ID NO: 1426583 - RNA, 19 nt, Artificial Sequence
  Description of Artificial Sequence: Synthetic oligonucleotide
ugcaaccccuuguaccgua

SEQ ID NO: 1426584 - RNA, 19 nt, Artificial Sequence
  Description of Artificial Sequence: Synthetic oligonucleotide
gugagugcacaaucacuaa

SEQ ID NO: 1426585 - RNA, 19 nt, Artificial Sequence
  Description of Artificial Sequence: Synthetic oligonucleotide
cacuaagguggcuaugacu

SEQ ID NO: 1426586 - RNA, 19 nt, Artificial Sequence
  Description of Artificial Sequence: Synthetic oligonucleotide
cccuuguaccguauccucc

SEQ ID NO: 1426587 - RNA, 19 nt, Artificial Sequence
  Description of Artificial Sequence: Synthetic oligonucleotide
ccaaaauuggcaaaaucau

SEQ ID NO: 1426588 - RNA, 19 nt, Artificial Sequence
  Description of Artificial Sequence: Synthetic oligonucleotide
ggugcacauugacaucuac

SEQ ID NO: 1426589 - RNA, 19 nt, Artificial Sequence
  Description of Artificial Sequence: Synthetic oligonucleotide
uggggugcacauugacauc

SEQ ID NO: 1426590 - RNA, 19 nt, Artificial Sequence
  Description of Artificial Sequence: Synthetic oligonucleotide
cuguggauuuaaccaccuc

SEQ ID NO: 1426591 - RNA, 19 nt, Artificial Sequence
  Description of Artificial Sequence: Synthetic oligonucleotide
cugugccgcuucugcaacc

SEQ ID NO: 1426592 - RNA, 19 nt, Artificial Sequence
  Description of Artificial Sequence: Synthetic oligonucleotide
ccaauucaccucuguggcc

SEQ ID NO: 1426593 - RNA, 19 nt, Artificial Sequence
  Description of Artificial Sequence: Synthetic oligonucleotide
cacggccacuauccagugg

SEQ ID NO: 1426594 - RNA, 19 nt, Artificial Sequence
  Description of Artificial Sequence: Synthetic oligonucleotide
ggacggugagugcacaauc

SEQ ID NO: 1426595 - RNA, 19 nt, Artificial Sequence
  Description of Artificial Sequence: Synthetic oligonucleotide
cggagcaucucucggagag

SEQ ID NO: 1426596 - RNA, 19 nt, Artificial Sequence
  Description of Artificial Sequence: Synthetic oligonucleotide
uggacgaauuggagcccaa

SEQ ID NO: 1426597 - RNA, 19 nt, Artificial Sequence
  Description of Artificial Sequence: Synthetic oligonucleotide
gguccggcagguuggcaag

SEQ ID NO: 1426598 - RNA, 19 nt, Artificial Sequence
  Description of Artificial Sequence: Synthetic oligonucleotide
cugggguugcuuggacugg

SEQ ID NO: 1426599 - RNA, 19 nt, Artificial Sequence
  Description of Artificial Sequence: Synthetic oligonucleotide
auacugcuuccgaaccgag

SEQ ID NO: 1426600 - RNA, 19 nt, Artificial Sequence
  Description of Artificial Sequence: Synthetic oligonucleotide
acacccacuguggauuuaa

SEQ ID NO: 1426601 - RNA, 19 nt, Artificial Sequence
  Description of Artificial Sequence: Synthetic oligonucleotide
gcgucaagcuucugguccc

SEQ ID NO: 1426602 - RNA, 19 nt, Artificial Sequence
  Description of Artificial Sequence: Synthetic oligonucleotide
ugcaagcaucucagcuuuc

SEQ ID NO: 1426603 - RNA, 19 nt, Artificial Sequence
  Description of Artificial Sequence: Synthetic oligonucleotide
ucaacacacuggugagguu

SEQ ID NO: 1426604 - RNA, 19 nt, Artificial Sequence
  Description of Artificial Sequence: Synthetic oligonucleotide
ccaucugguaagcguagac

SEQ ID NO: 1426605 - RNA, 19 nt, Artificial Sequence
  Description of Artificial Sequence: Synthetic oligonucleotide
ccgaugucucuuucugggg

SEQ ID NO: 1426606 - RNA, 19 nt, Artificial Sequence
  Description of Artificial Sequence: Synthetic oligonucleotide
aggcgcugguuccgauaac

SEQ ID NO: 1426607 - RNA, 19 nt, Artificial Sequence
  Description of Artificial Sequence: Synthetic oligonucleotide
gaggguugacuccuccagu

SEQ ID NO: 1426608 - RNA, 19 nt, Artificial Sequence
  Description of Artificial Sequence: Synthetic oligonucleotide
ggggauugggagcuccaac

SEQ ID NO: 1426609 - RNA, 19 nt, Artificial Sequence
  Description of Artificial Sequence: Synthetic oligonucleotide
uggccgcgcucauuaauuu

SEQ ID NO: 1426610 - RNA, 19 nt, Artificial Sequence
  Description of Artificial Sequence: Synthetic oligonucleotide
cacccacuguggauuuaac

SEQ ID NO: 1426611 - RNA, 19 nt, Artificial Sequence
  Description of Artificial Sequence: Synthetic oligonucleotide
uccgucaagcaugcuucaa

SEQ ID NO: 1426612 - RNA, 19 nt, Artificial Sequence
  Description of Artificial Sequence: Synthetic oligonucleotide
uggcuaugacuggacuuaa

SEQ ID NO: 1426613 - RNA, 19 nt, Artificial Sequence
  Description of Artificial Sequence: Synthetic oligonucleotide
ccuuguaccguauccucca

SEQ ID NO: 1426614 - RNA, 19 nt, Artificial Sequence
  Description of Artificial Sequence: Synthetic oligonucleotide
uugacuccuccaguauaua

SEQ ID NO: 1426615 - RNA, 19 nt, Artificial Sequence
  Description of Artificial Sequence: Synthetic oligonucleotide
gccugagaggguugacucc

SEQ ID NO: 1426616 - RNA, 19 nt, Artificial Sequence
  Description of Artificial Sequence: Synthetic oligonucleotide
auggccgcgcucauuaauu

SEQ ID NO: 1426617 - RNA, 19 nt, Artificial Sequence
  Description of Artificial Sequence: Synthetic oligonucleotide
caaccccuuguaccguauc

SEQ ID NO: 1426618 - RNA, 19 nt, Artificial Sequence
  Description of Artificial Sequence: Synthetic oligonucleotide
ugguuccgauaaccucaga

SEQ ID NO: 1426619 - RNA, 19 nt, Artificial Sequence
  Description of Artificial Sequence: Synthetic oligonucleotide
uccccggaggguccagcaa

SEQ ID NO: 1426620 - RNA, 19 nt, Artificial Sequence
  Description of Artificial Sequence: Synthetic oligonucleotide
caaucacuaagguggcuau

SEQ ID NO: 1426621 - RNA, 19 nt, Artificial Sequence
  Description of Artificial Sequence: Synthetic oligonucleotide
caggacguuuccauccucu

SEQ ID NO: 1426622 - RNA, 19 nt, Artificial Sequence
  Description of Artificial Sequence: Synthetic oligonucleotide
gcacaaucacuaagguggc

SEQ ID NO: 1426623 - RNA, 19 nt, Artificial Sequence
  Description of Artificial Sequence: Synthetic oligonucleotide
gugagcggaaggcuuuaua

SEQ ID NO: 1426624 - RNA, 19 nt, Artificial Sequence
  Description of Artificial Sequence: Synthetic oligonucleotide
uccuccuccgagggugaca

SEQ ID NO: 1426625 - RNA, 19 nt, Artificial Sequence
  Description of Artificial Sequence: Synthetic oligonucleotide
ccacuauccaguggcuucc

SEQ ID NO: 1426626 - RNA, 19 nt, Artificial Sequence
  Description of Artificial Sequence: Synthetic oligonucleotide
gagucucauggccgcgcuc

SEQ ID NO: 1426627 - RNA, 19 nt, Artificial Sequence
  Description of Artificial Sequence: Synthetic oligonucleotide
cccggaagcaaggucuggg

SEQ ID NO: 1426628 - RNA, 19 nt, Artificial Sequence
  Description of Artificial Sequence: Synthetic oligonucleotide
ugugagcggaaggcuuuau

SEQ ID NO: 1426629 - RNA, 19 nt, Artificial Sequence
  Description of Artificial Sequence: Synthetic oligonucleotide
cuggacgaauuggagccca

SEQ ID NO: 1426630 - RNA, 19 nt, Artificial Sequence
  Description of Artificial Sequence: Synthetic oligonucleotide
ggagagucucauggccgcg

SEQ ID NO: 1426631 - RNA, 19 nt, Artificial Sequence
  Description of Artificial Sequence: Synthetic oligonucleotide
guccgucaagcaugcuuca

SEQ ID NO: 1426632 - RNA, 19 nt, Artificial Sequence
  Description of Artificial Sequence: Synthetic oligonucleotide
caugcuugguggggugcac

SEQ ID NO: 1426633 - RNA, 19 nt, Artificial Sequence
  Description of Artificial Sequence: Synthetic oligonucleotide
gaggggauugggagcucca

SEQ ID NO: 1426634 - RNA, 19 nt, Artificial Sequence
  Description of Artificial Sequence: Synthetic oligonucleotide
ccccggaggguccagcaag

SEQ ID NO: 1426635 - RNA, 19 nt, Artificial Sequence
  Description of Artificial Sequence: Synthetic oligonucleotide
aggggauugggagcuccaa

SEQ ID NO: 1426636 - RNA, 19 nt, Artificial Sequence
  Description of Artificial Sequence: Synthetic oligonucleotide
ccccuuguaccguauccuc

SEQ ID NO: 1426637 - RNA, 19 nt, Artificial Sequence
  Description of Artificial Sequence: Synthetic oligonucleotide
ggacgaauuggagcccaac

SEQ ID NO: 1426638 - RNA, 19 nt, Artificial Sequence
  Description of Artificial Sequence: Synthetic oligonucleotide
cugcuuccgaaccgaguaa

SEQ ID NO: 1426639 - RNA, 19 nt, Artificial Sequence
  Description of Artificial Sequence: Synthetic oligonucleotide
ggccgcgcucauuaauuuc

SEQ ID NO: 1426640 - RNA, 19 nt, Artificial Sequence
  Description of Artificial Sequence: Synthetic oligonucleotide
gagccgggcaugucacucu

SEQ ID NO: 1426641 - RNA, 19 nt, Artificial Sequence
  Description of Artificial Sequence: Synthetic oligonucleotide
guaccguauccuccaaguu

SEQ ID NO: 1426642 - RNA, 19 nt, Artificial Sequence
  Description of Artificial Sequence: Synthetic oligonucleotide
uccuuccgggagucauuuu

SEQ ID NO: 1426643 - RNA, 19 nt, Artificial Sequence
  Description of Artificial Sequence: Synthetic oligonucleotide
ggcuaugacuggacuuaac

SEQ ID NO: 1426644 - RNA, 19 nt, Artificial Sequence
  Description of Artificial Sequence: Synthetic oligonucleotide
gcggaccaucugguaagcg

SEQ ID NO: 1426645 - RNA, 19 nt, Artificial Sequence
  Description of Artificial Sequence: Synthetic oligonucleotide
gggguaauccaaucagguu

SEQ ID NO: 1426646 - RNA, 19 nt, Artificial Sequence
  Description of Artificial Sequence: Synthetic oligonucleotide
gcuuuggaguggagccggg

SEQ ID NO: 1426647 - RNA, 19 nt, Artificial Sequence
  Description of Artificial Sequence: Synthetic oligonucleotide
ccgaaccgaguaaaacaca

SEQ ID NO: 1426648 - RNA, 19 nt, Artificial Sequence
  Description of Artificial Sequence: Synthetic oligonucleotide
gcacggccacuauccagug

SEQ ID NO: 1426649 - RNA, 19 nt, Artificial Sequence
  Description of Artificial Sequence: Synthetic oligonucleotide
ccuggacgaauuggagccc

SEQ ID NO: 1426650 - RNA, 19 nt, Artificial Sequence
  Description of Artificial Sequence: Synthetic oligonucleotide
guagaccuugucaccacuu

SEQ ID NO: 1426651 - RNA, 19 nt, Artificial Sequence
  Description of Artificial Sequence: Synthetic oligonucleotide
gccgcgcucauuaauuucu

SEQ ID NO: 1426652 - RNA, 19 nt, Artificial Sequence
  Description of Artificial Sequence: Synthetic oligonucleotide
gguuggcaagcugcaggac

SEQ ID NO: 1426653 - RNA, 19 nt, Artificial Sequence
  Description of Artificial Sequence: Synthetic oligonucleotide
gucaaucagaagggguaau

SEQ ID NO: 1426654 - RNA, 19 nt, Artificial Sequence
  Description of Artificial Sequence: Synthetic oligonucleotide
cauggccgcgcucauuaau

SEQ ID NO: 1426655 - RNA, 19 nt, Artificial Sequence
  Description of Artificial Sequence: Synthetic oligonucleotide
ccgagggugacaagcagcu

SEQ ID NO: 1426656 - RNA, 19 nt, Artificial Sequence
  Description of Artificial Sequence: Synthetic oligonucleotide
ccgggagucugugcggacc

SEQ ID NO: 1426657 - RNA, 19 nt, Artificial Sequence
  Description of Artificial Sequence: Synthetic oligonucleotide
augcuucaacuuggacggu

SEQ ID NO: 1426658 - RNA, 19 nt, Artificial Sequence
  Description of Artificial Sequence: Synthetic oligonucleotide
cugugcggaccaucuggua

SEQ ID NO: 1426659 - RNA, 19 nt, Artificial Sequence
  Description of Artificial Sequence: Synthetic oligonucleotide
ggaaacccuugagcacggc

SEQ ID NO: 1426660 - RNA, 19 nt, Artificial Sequence
  Description of Artificial Sequence: Synthetic oligonucleotide
acacacuggugagguuaau

SEQ ID NO: 1426661 - RNA, 19 nt, Artificial Sequence
  Description of Artificial Sequence: Synthetic oligonucleotide
ccaccuccccggagggucc

SEQ ID NO: 1426662 - RNA, 19 nt, Artificial Sequence
  Description of Artificial Sequence: Synthetic oligonucleotide
cccucaacgugcugcugca

SEQ ID NO: 1426663 - RNA, 19 nt, Artificial Sequence
  Description of Artificial Sequence: Synthetic oligonucleotide
gcuuccgaaccgaguaaaa

SEQ ID NO: 1426664 - RNA, 19 nt, Artificial Sequence
  Description of Artificial Sequence: Synthetic oligonucleotide
gcggaaggcuuuauagaua

SEQ ID NO: 1426665 - RNA, 19 nt, Artificial Sequence
  Description of Artificial Sequence: Synthetic oligonucleotide
gugugagcggaaggcuuua

SEQ ID NO: 1426666 - RNA, 19 nt, Artificial Sequence
  Description of Artificial Sequence: Synthetic oligonucleotide
cacaaucacuaagguggcu

SEQ ID NO: 1426667 - RNA, 19 nt, Artificial Sequence
  Description of Artificial Sequence: Synthetic oligonucleotide
ccaaucagguuuccuuccu

SEQ ID NO: 1426668 - RNA, 19 nt, Artificial Sequence
  Description of Artificial Sequence: Synthetic oligonucleotide
cggaccaucugguaagcgu

SEQ ID NO: 1426669 - RNA, 19 nt, Artificial Sequence
  Description of Artificial Sequence: Synthetic oligonucleotide
cgaugucucuuucuggggu

SEQ ID NO: 1426670 - RNA, 19 nt, Artificial Sequence
  Description of Artificial Sequence: Synthetic oligonucleotide
ccguauccuccaaguucug

SEQ ID NO: 1426671 - RNA, 19 nt, Artificial Sequence
  Description of Artificial Sequence: Synthetic oligonucleotide
accuccccggaggguccag

SEQ ID NO: 1426672 - RNA, 19 nt, Artificial Sequence
  Description of Artificial Sequence: Synthetic oligonucleotide
gcagaaggugugagcggaa

SEQ ID NO: 1426673 - RNA, 19 nt, Artificial Sequence
  Description of Artificial Sequence: Synthetic oligonucleotide
ccggaagcaaggucugggu

SEQ ID NO: 1426674 - RNA, 19 nt, Artificial Sequence
  Description of Artificial Sequence: Synthetic oligonucleotide
gcuccacaguccacuucca

SEQ ID NO: 1426675 - RNA, 19 nt, Artificial Sequence
  Description of Artificial Sequence: Synthetic oligonucleotide
ggagcaucucucggagagu

SEQ ID NO: 1426676 - RNA, 19 nt, Artificial Sequence
  Description of Artificial Sequence: Synthetic oligonucleotide
gccgggcaugucacucugc

SEQ ID NO: 1426677 - RNA, 19 nt, Artificial Sequence
  Description of Artificial Sequence: Synthetic oligonucleotide
cccgggagucugugcggac

SEQ ID NO: 1426678 - RNA, 19 nt, Artificial Sequence
  Description of Artificial Sequence: Synthetic oligonucleotide
cgggagucugugcggacca

SEQ ID NO: 1426679 - RNA, 19 nt, Artificial Sequence
  Description of Artificial Sequence: Synthetic oligonucleotide
cacuauccaguggcuuccu

SEQ ID NO: 1426680 - RNA, 19 nt, Artificial Sequence
  Description of Artificial Sequence: Synthetic oligonucleotide
gcgcugguuccgauaaccu

SEQ ID NO: 1426681 - RNA, 19 nt, Artificial Sequence
  Description of Artificial Sequence: Synthetic oligonucleotide
ggaaggcuuuauagauaau

SEQ ID NO: 1426682 - RNA, 19 nt, Artificial Sequence
  Description of Artificial Sequence: Synthetic oligonucleotide
ggcaagcugcaggacguuu

SEQ ID NO: 1426683 - RNA, 19 nt, Artificial Sequence
  Description of Artificial Sequence: Synthetic oligonucleotide
caccuccccggagggucca

SEQ ID NO: 1426684 - RNA, 19 nt, Artificial Sequence
  Description of Artificial Sequence: Synthetic oligonucleotide
cuuguccgucaagcaugcu

SEQ ID NO: 1426685 - RNA, 19 nt, Artificial Sequence
  Description of Artificial Sequence: Synthetic oligonucleotide
gcaaccccuuguaccguau

SEQ ID NO: 1426686 - RNA, 19 nt, Artificial Sequence
  Description of Artificial Sequence: Synthetic oligonucleotide
ccuugagcacggccacuau

SEQ ID NO: 1426687 - RNA, 19 nt, Artificial Sequence
  Description of Artificial Sequence: Synthetic oligonucleotide
aauaaggaaaguuugcagg

SEQ ID NO: 1426688 - RNA, 19 nt, Artificial Sequence
  Description of Artificial Sequence: Synthetic oligonucleotide
aaguacauaaagcccagcc

SEQ ID NO: 1426689 - RNA, 19 nt, Artificial Sequence
  Description of Artificial Sequence: Synthetic oligonucleotide
uuaaaguacauaaagccca

SEQ ID NO: 1426690 - RNA, 19 nt, Artificial Sequence
  Description of Artificial Sequence: Synthetic oligonucleotide
uuuuaauaaggaaaguuug

SEQ ID NO: 1426691 - RNA, 19 nt, Artificial Sequence
  Description of Artificial Sequence: Synthetic oligonucleotide
guucuaaacauccagagcc

SEQ ID NO: 1426692 - RNA, 19 nt, Artificial Sequence
  Description of Artificial Sequence: Synthetic oligonucleotide
aagucguggauuuugguac

SEQ ID NO: 1426693 - RNA, 19 nt, Artificial Sequence
  Description of Artificial Sequence: Synthetic oligonucleotide
aagauuuuaauaaggaaag

SEQ ID NO: 1426694 - RNA, 19 nt, Artificial Sequence
  Description of Artificial Sequence: Synthetic oligonucleotide
uuuaccaaguuaaaguaca

SEQ ID NO: 1426695 - RNA, 19 nt, Artificial Sequence
  Description of Artificial Sequence: Synthetic oligonucleotide
uugaguucaagcaaccuag

SEQ ID NO: 1426696 - RNA, 19 nt, Artificial Sequence
  Description of Artificial Sequence: Synthetic oligonucleotide
ucuccuaaauccaugcgcg

SEQ ID NO: 1426697 - RNA, 19 nt, Artificial Sequence
  Description of Artificial Sequence: Synthetic oligonucleotide
uacaagagagguaaguaag

SEQ ID NO: 1426698 - RNA, 19 nt, Artificial Sequence
  Description of Artificial Sequence: Synthetic oligonucleotide
uucauaaucugcucggagg

SEQ ID NO: 1426699 - RNA, 19 nt, Artificial Sequence
  Description of Artificial Sequence: Synthetic oligonucleotide
aaaacuuucgccgcucucg

SEQ ID NO: 1426700 - RNA, 19 nt, Artificial Sequence
  Description of Artificial Sequence: Synthetic oligonucleotide
uaucucgagaccuggaacg

SEQ ID NO: 1426701 - RNA, 19 nt, Artificial Sequence
  Description of Artificial Sequence: Synthetic oligonucleotide
gggagguagaucuagaucg

SEQ ID NO: 1426702 - RNA, 19 nt, Artificial Sequence
  Description of Artificial Sequence: Synthetic oligonucleotide
aacucauguaccuuuucag

SEQ ID NO: 1426703 - RNA, 19 nt, Artificial Sequence
  Description of Artificial Sequence: Synthetic oligonucleotide
ucugaaugaaccccaagug

SEQ ID NO: 1426704 - RNA, 19 nt, Artificial Sequence
  Description of Artificial Sequence: Synthetic oligonucleotide
acucauguaccuuuucagc

SEQ ID NO: 1426705 - RNA, 19 nt, Artificial Sequence
  Description of Artificial Sequence: Synthetic oligonucleotide
uaauaaggaaaguuugcag

SEQ ID NO: 1426706 - RNA, 19 nt, Artificial Sequence
  Description of Artificial Sequence: Synthetic oligonucleotide
agaaaagauuuuaauaagg

SEQ ID NO: 1426707 - RNA, 19 nt, Artificial Sequence
  Description of Artificial Sequence: Synthetic oligonucleotide
uagguuacaagugagggcc

SEQ ID NO: 1426708 - RNA, 19 nt, Artificial Sequence
  Description of Artificial Sequence: Synthetic oligonucleotide
uuuagcaagaaguuuuccu

SEQ ID NO: 1426709 - RNA, 19 nt, Artificial Sequence
  Description of Artificial Sequence: Synthetic oligonucleotide
accaaguuaaaguacauaa

SEQ ID NO: 1426710 - RNA, 19 nt, Artificial Sequence
  Description of Artificial Sequence: Synthetic oligonucleotide
uucuccuaaauccaugcgc

SEQ ID NO: 1426711 - RNA, 19 nt, Artificial Sequence
  Description of Artificial Sequence: Synthetic oligonucleotide
aucuagaucgccuccgucg

SEQ ID NO: 1426712 - RNA, 19 nt, Artificial Sequence
  Description of Artificial Sequence: Synthetic oligonucleotide
aaccaaaguuacaagagag

SEQ ID NO: 1426713 - RNA, 19 nt, Artificial Sequence
  Description of Artificial Sequence: Synthetic oligonucleotide
acuuguauuuugcacuccg

SEQ ID NO: 1426714 - RNA, 19 nt, Artificial Sequence
  Description of Artificial Sequence: Synthetic oligonucleotide
gagguaaguaagcaggacc

SEQ ID NO: 1426715 - RNA, 19 nt, Artificial Sequence
  Description of Artificial Sequence: Synthetic oligonucleotide
aguaguuacuuguauuuug

SEQ ID NO: 1426716 - RNA, 19 nt, Artificial Sequence
  Description of Artificial Sequence: Synthetic oligonucleotide
gaaacuucugcacugaucu

SEQ ID NO: 1426717 - RNA, 19 nt, Artificial Sequence
  Description of Artificial Sequence: Synthetic oligonucleotide
uucaucuccgucccgagcc

SEQ ID NO: 1426718 - RNA, 19 nt, Artificial Sequence
  Description of Artificial Sequence: Synthetic oligonucleotide
cucauguaccuuuucagcc

SEQ ID NO: 1426719 - RNA, 19 nt, Artificial Sequence
  Description of Artificial Sequence: Synthetic oligonucleotide
aagguaagcugaacaaacc

SEQ ID NO: 1426720 - RNA, 19 nt, Artificial Sequence
  Description of Artificial Sequence: Synthetic oligonucleotide
aacacaggguucuaaacau

SEQ ID NO: 1426721 - RNA, 19 nt, Artificial Sequence
  Description of Artificial Sequence: Synthetic oligonucleotide
acaacucaacgguagcagc

SEQ ID NO: 1426722 - RNA, 19 nt, Artificial Sequence
  Description of Artificial Sequence: Synthetic oligonucleotide
gauccauugcaucuaauuc

SEQ ID NO: 1426723 - RNA, 19 nt, Artificial Sequence
  Description of Artificial Sequence: Synthetic oligonucleotide
aauccaugcgcgucccagc

SEQ ID NO: 1426724 - RNA, 19 nt, Artificial Sequence
  Description of Artificial Sequence: Synthetic oligonucleotide
auaaucugcucggagggcc

SEQ ID NO: 1426725 - RNA, 19 nt, Artificial Sequence
  Description of Artificial Sequence: Synthetic oligonucleotide
aaacuuucgccgcucucgg

SEQ ID NO: 1426726 - RNA, 19 nt, Artificial Sequence
  Description of Artificial Sequence: Synthetic oligonucleotide
uuaaccagggcaccaacac

SEQ ID NO: 1426727 - RNA, 19 nt, Artificial Sequence
  Description of Artificial Sequence: Synthetic oligonucleotide
caagguaagcugaacaaac

SEQ ID NO: 1426728 - RNA, 19 nt, Artificial Sequence
  Description of Artificial Sequence: Synthetic oligonucleotide
uggauuuugguacauucuc

SEQ ID NO: 1426729 - RNA, 19 nt, Artificial Sequence
  Description of Artificial Sequence: Synthetic oligonucleotide
uauuccaagcacugggugc

SEQ ID NO: 1426730 - RNA, 19 nt, Artificial Sequence
  Description of Artificial Sequence: Synthetic oligonucleotide
aaccccaaguguaacuugc

SEQ ID NO: 1426731 - RNA, 19 nt, Artificial Sequence
  Description of Artificial Sequence: Synthetic oligonucleotide
ugcaagacgacggucauug

SEQ ID NO: 1426732 - RNA, 19 nt, Artificial Sequence
  Description of Artificial Sequence: Synthetic oligonucleotide
uggaacgggaaaacuuucg

SEQ ID NO: 1426733 - RNA, 19 nt, Artificial Sequence
  Description of Artificial Sequence: Synthetic oligonucleotide
ucggucaucuguaaacuug

SEQ ID NO: 1426734 - RNA, 19 nt, Artificial Sequence
  Description of Artificial Sequence: Synthetic oligonucleotide
uuacacuauuccaagcacu

SEQ ID NO: 1426735 - RNA, 19 nt, Artificial Sequence
  Description of Artificial Sequence: Synthetic oligonucleotide
cacaggguucuaaacaucc

SEQ ID NO: 1426736 - RNA, 19 nt, Artificial Sequence
  Description of Artificial Sequence: Synthetic oligonucleotide
aaugaaccccaaguguaac

SEQ ID NO: 1426737 - RNA, 19 nt, Artificial Sequence
  Description of Artificial Sequence: Synthetic oligonucleotide
auaaggaucuucugggacu

SEQ ID NO: 1426738 - RNA, 19 nt, Artificial Sequence
  Description of Artificial Sequence: Synthetic oligonucleotide
uaaagcccagccaagugca

SEQ ID NO: 1426739 - RNA, 19 nt, Artificial Sequence
  Description of Artificial Sequence: Synthetic oligonucleotide
aaaccucgcagacucggag

SEQ ID NO: 1426740 - RNA, 19 nt, Artificial Sequence
  Description of Artificial Sequence: Synthetic oligonucleotide
gcuguugaaaacuggaugc

SEQ ID NO: 1426741 - RNA, 19 nt, Artificial Sequence
  Description of Artificial Sequence: Synthetic oligonucleotide
ugcucggagggccaagucg

SEQ ID NO: 1426742 - RNA, 19 nt, Artificial Sequence
  Description of Artificial Sequence: Synthetic oligonucleotide
gaacgggaaaacuuucgcc

SEQ ID NO: 1426743 - RNA, 19 nt, Artificial Sequence
  Description of Artificial Sequence: Synthetic oligonucleotide
gaaggacucuaagugaucc

SEQ ID NO: 1426744 - RNA, 19 nt, Artificial Sequence
  Description of Artificial Sequence: Synthetic oligonucleotide
agucugaguaguuacuugu

SEQ ID NO: 1426745 - RNA, 19 nt, Artificial Sequence
  Description of Artificial Sequence: Synthetic oligonucleotide
agcaaccuagguuacaagu

SEQ ID NO: 1426746 - RNA, 19 nt, Artificial Sequence
  Description of Artificial Sequence: Synthetic oligonucleotide
caacucaacgguagcagcg

SEQ ID NO: 1426747 - RNA, 19 nt, Artificial Sequence
  Description of Artificial Sequence: Synthetic oligonucleotide
acucuuuauuaaccagggc

SEQ ID NO: 1426748 - RNA, 19 nt, Artificial Sequence
  Description of Artificial Sequence: Synthetic oligonucleotide
uacauaaagcccagccaag

SEQ ID NO: 1426749 - RNA, 19 nt, Artificial Sequence
  Description of Artificial Sequence: Synthetic oligonucleotide
uuccacuuccauaaggauc

SEQ ID NO: 1426750 - RNA, 19 nt, Artificial Sequence
  Description of Artificial Sequence: Synthetic oligonucleotide
aguucaagcaaccuagguu

SEQ ID NO: 1426751 - RNA, 19 nt, Artificial Sequence
  Description of Artificial Sequence: Synthetic oligonucleotide
cuagguuacaagugagggc

SEQ ID NO: 1426752 - RNA, 19 nt, Artificial Sequence
  Description of Artificial Sequence: Synthetic oligonucleotide
ugguacauucuccuaaauc

SEQ ID NO: 1426753 - RNA, 19 nt, Artificial Sequence
  Description of Artificial Sequence: Synthetic oligonucleotide
uauuuugcacuccgguccc

SEQ ID NO: 1426754 - RNA, 19 nt, Artificial Sequence
  Description of Artificial Sequence: Synthetic oligonucleotide
ucuagaucgccuccgucgc

SEQ ID NO: 1426755 - RNA, 19 nt, Artificial Sequence
  Description of Artificial Sequence: Synthetic oligonucleotide
ugaguucaagcaaccuagg

SEQ ID NO: 1426756 - RNA, 19 nt, Artificial Sequence
  Description of Artificial Sequence: Synthetic oligonucleotide
acaagugagggccuagucu

SEQ ID NO: 1426757 - RNA, 19 nt, Artificial Sequence
  Description of Artificial Sequence: Synthetic oligonucleotide
uuuauuaaccagggcacca

SEQ ID NO: 1426758 - RNA, 19 nt, Artificial Sequence
  Description of Artificial Sequence: Synthetic oligonucleotide
uacuagauguaguagccaa

SEQ ID NO: 1426759 - RNA, 19 nt, Artificial Sequence
  Description of Artificial Sequence: Synthetic oligonucleotide
gacucggucaucuguaaac

SEQ ID NO: 1426760 - RNA, 19 nt, Artificial Sequence
  Description of Artificial Sequence: Synthetic oligonucleotide
aacgacugcgaugucgccg

SEQ ID NO: 1426761 - RNA, 19 nt, Artificial Sequence
  Description of Artificial Sequence: Synthetic oligonucleotide
agggccuagucuuaaaaca

SEQ ID NO: 1426762 - RNA, 19 nt, Artificial Sequence
  Description of Artificial Sequence: Synthetic oligonucleotide
auucuccuaaauccaugcg

SEQ ID NO: 1426763 - RNA, 19 nt, Artificial Sequence
  Description of Artificial Sequence: Synthetic oligonucleotide
cuuacacuauuccaagcac

SEQ ID NO: 1426764 - RNA, 19 nt, Artificial Sequence
  Description of Artificial Sequence: Synthetic oligonucleotide
uuuccucaacugaucaagc

SEQ ID NO: 1426765 - RNA, 19 nt, Artificial Sequence
  Description of Artificial Sequence: Synthetic oligonucleotide
aacucaacgguagcagcgg

SEQ ID NO: 1426766 - RNA, 19 nt, Artificial Sequence
  Description of Artificial Sequence: Synthetic oligonucleotide
ucuaucucgagaccuggaa

SEQ ID NO: 1426767 - RNA, 19 nt, Artificial Sequence
  Description of Artificial Sequence: Synthetic oligonucleotide
ugauccauugcaucuaauu

SEQ ID NO: 1426768 - RNA, 19 nt, Artificial Sequence
  Description of Artificial Sequence: Synthetic oligonucleotide
uucuaaacauccagagccu

SEQ ID NO: 1426769 - RNA, 19 nt, Artificial Sequence
  Description of Artificial Sequence: Synthetic oligonucleotide
cugaucaagcuucucucgg

SEQ ID NO: 1426770 - RNA, 19 nt, Artificial Sequence
  Description of Artificial Sequence: Synthetic oligonucleotide
cauugcaucuaauucaaaa

SEQ ID NO: 1426771 - RNA, 19 nt, Artificial Sequence
  Description of Artificial Sequence: Synthetic oligonucleotide
uauggcuccgggaacgacu

SEQ ID NO: 1426772 - RNA, 19 nt, Artificial Sequence
  Description of Artificial Sequence: Synthetic oligonucleotide
uuugguacauucuccuaaa

SEQ ID NO: 1426773 - RNA, 19 nt, Artificial Sequence
  Description of Artificial Sequence: Synthetic oligonucleotide
agugaucugcaagacgacg

SEQ ID NO: 1426774 - RNA, 19 nt, Artificial Sequence
  Description of Artificial Sequence: Synthetic oligonucleotide
agcaugacagaccccagca

SEQ ID NO: 1426775 - RNA, 19 nt, Artificial Sequence
  Description of Artificial Sequence: Synthetic oligonucleotide
agccuuacacuauuccaag

SEQ ID NO: 1426776 - RNA, 19 nt, Artificial Sequence
  Description of Artificial Sequence: Synthetic oligonucleotide
aagcgauccugauuucucu

SEQ ID NO: 1426777 - RNA, 19 nt, Artificial Sequence
  Description of Artificial Sequence: Synthetic oligonucleotide
ucggaucugaaugaacccc

SEQ ID NO: 1426778 - RNA, 19 nt, Artificial Sequence
  Description of Artificial Sequence: Synthetic oligonucleotide
ugcagacucggucaucugu

SEQ ID NO: 1426779 - RNA, 19 nt, Artificial Sequence
  Description of Artificial Sequence: Synthetic oligonucleotide
aagcaaccuagguuacaag

SEQ ID NO: 1426780 - RNA, 19 nt, Artificial Sequence
  Description of Artificial Sequence: Synthetic oligonucleotide
uauuaaccagggcaccaac

SEQ ID NO: 1426781 - RNA, 19 nt, Artificial Sequence
  Description of Artificial Sequence: Synthetic oligonucleotide
uacauucuccuaaauccau

SEQ ID NO: 1426782 - RNA, 19 nt, Artificial Sequence
  Description of Artificial Sequence: Synthetic oligonucleotide
ugaucaagcuucucucgga

SEQ ID NO: 1426783 - RNA, 19 nt, Artificial Sequence
  Description of Artificial Sequence: Synthetic oligonucleotide
acaaaccucgcagacucgg

SEQ ID NO: 1426784 - RNA, 19 nt, Artificial Sequence
  Description of Artificial Sequence: Synthetic oligonucleotide
ugucuaucucgagaccugg

SEQ ID NO: 1426785 - RNA, 19 nt, Artificial Sequence
  Description of Artificial Sequence: Synthetic oligonucleotide
gaucugaaugaaccccaag

SEQ ID NO: 1426786 - RNA, 19 nt, Artificial Sequence
  Description of Artificial Sequence: Synthetic oligonucleotide
ugaucugcaagacgacggu

SEQ ID NO: 1426787 - RNA, 19 nt, Artificial Sequence
  Description of Artificial Sequence: Synthetic oligonucleotide
acucaacgguagcagcggc

SEQ ID NO: 1426788 - RNA, 19 nt, Artificial Sequence
  Description of Artificial Sequence: Synthetic oligonucleotide
cucggaucugaaugaaccc

SEQ ID NO: 1426789 - RNA, 19 nt, Artificial Sequence
  Description of Artificial Sequence: Synthetic oligonucleotide
uguguuucugccagccgcu

SEQ ID NO: 1426790 - RNA, 19 nt, Artificial Sequence
  Description of Artificial Sequence: Synthetic oligonucleotide
gagggccuagucuuaaaac

SEQ ID NO: 1426791 - RNA, 19 nt, Artificial Sequence
  Description of Artificial Sequence: Synthetic oligonucleotide
ucuaaacauccagagccug

SEQ ID NO: 1426792 - RNA, 19 nt, Artificial Sequence
  Description of Artificial Sequence: Synthetic oligonucleotide
ugccacucuuuauuaacca

SEQ ID NO: 1426793 - RNA, 19 nt, Artificial Sequence
  Description of Artificial Sequence: Synthetic oligonucleotide
aagugcaguggucuccgca

SEQ ID NO: 1426794 - RNA, 19 nt, Artificial Sequence
  Description of Artificial Sequence: Synthetic oligonucleotide
ugagggccuagucuuaaaa

SEQ ID NO: 1426795 - RNA, 19 nt, Artificial Sequence
  Description of Artificial Sequence: Synthetic oligonucleotide
cuaucucgagaccuggaac

SEQ ID NO: 1426796 - RNA, 19 nt, Artificial Sequence
  Description of Artificial Sequence: Synthetic oligonucleotide
uucuccucaagcgauccug

SEQ ID NO: 1426797 - RNA, 19 nt, Artificial Sequence
  Description of Artificial Sequence: Synthetic oligonucleotide
aaccuagguuacaagugag

SEQ ID NO: 1426798 - RNA, 19 nt, Artificial Sequence
  Description of Artificial Sequence: Synthetic oligonucleotide
aaggacucuaagugaucca

SEQ ID NO: 1426799 - RNA, 19 nt, Artificial Sequence
  Description of Artificial Sequence: Synthetic oligonucleotide
guagaucuagaucgccucc

SEQ ID NO: 1426800 - RNA, 19 nt, Artificial Sequence
  Description of Artificial Sequence: Synthetic oligonucleotide
uuccucaacugaucaagcu

SEQ ID NO: 1426801 - RNA, 19 nt, Artificial Sequence
  Description of Artificial Sequence: Synthetic oligonucleotide
gucgccggugucuaucucg

SEQ ID NO: 1426802 - RNA, 19 nt, Artificial Sequence
  Description of Artificial Sequence: Synthetic oligonucleotide
cuauuccaagcacugggug

SEQ ID NO: 1426803 - RNA, 19 nt, Artificial Sequence
  Description of Artificial Sequence: Synthetic oligonucleotide
acuuucgccgcucucggga

SEQ ID NO: 1426804 - RNA, 19 nt, Artificial Sequence
  Description of Artificial Sequence: Synthetic oligonucleotide
ugcgccugggcggacaugg

SEQ ID NO: 1426805 - RNA, 19 nt, Artificial Sequence
  Description of Artificial Sequence: Synthetic oligonucleotide
ccuacuagauguaguagcc

SEQ ID NO: 1426806 - RNA, 19 nt, Artificial Sequence
  Description of Artificial Sequence: Synthetic oligonucleotide
uggcaaguucaguucuccg

SEQ ID NO: 1426807 - RNA, 19 nt, Artificial Sequence
  Description of Artificial Sequence: Synthetic oligonucleotide
agggacugccgcuaagcuc

SEQ ID NO: 1426808 - RNA, 19 nt, Artificial Sequence
  Description of Artificial Sequence: Synthetic oligonucleotide
uuaccaaguuaaaguacau

SEQ ID NO: 1426809 - RNA, 19 nt, Artificial Sequence
  Description of Artificial Sequence: Synthetic oligonucleotide
caguggucuccgcagaggg

SEQ ID NO: 1426810 - RNA, 19 nt, Artificial Sequence
  Description of Artificial Sequence: Synthetic oligonucleotide
aucgugaccuccugcgauc

SEQ ID NO: 1426811 - RNA, 19 nt, Artificial Sequence
  Description of Artificial Sequence: Synthetic oligonucleotide
uaaguaagcaggaccuguu

SEQ ID NO: 1426812 - RNA, 19 nt, Artificial Sequence
  Description of Artificial Sequence: Synthetic oligonucleotide
aacuuucgccgcucucggg

SEQ ID NO: 1426813 - RNA, 19 nt, Artificial Sequence
  Description of Artificial Sequence: Synthetic oligonucleotide
ugaaaacuggaugcaggca

SEQ ID NO: 1426814 - RNA, 19 nt, Artificial Sequence
  Description of Artificial Sequence: Synthetic oligonucleotide
uaagcaggaccuguucaag

SEQ ID NO: 1426815 - RNA, 19 nt, Artificial Sequence
  Description of Artificial Sequence: Synthetic oligonucleotide
uagaucgccuccgucgccg

SEQ ID NO: 1426816 - RNA, 19 nt, Artificial Sequence
  Description of Artificial Sequence: Synthetic oligonucleotide
aagugaucugcaagacgac

SEQ ID NO: 1426817 - RNA, 19 nt, Artificial Sequence
  Description of Artificial Sequence: Synthetic oligonucleotide
gguucuaaacauccagagc

SEQ ID NO: 1426818 - RNA, 19 nt, Artificial Sequence
  Description of Artificial Sequence: Synthetic oligonucleotide
uugcuguugaaaacuggau

SEQ ID NO: 1426819 - RNA, 19 nt, Artificial Sequence
  Description of Artificial Sequence: Synthetic oligonucleotide
uccggucacacucugcaau

SEQ ID NO: 1426820 - RNA, 19 nt, Artificial Sequence
  Description of Artificial Sequence: Synthetic oligonucleotide
acugcgaugucgccggugu

SEQ ID NO: 1426821 - RNA, 19 nt, Artificial Sequence
  Description of Artificial Sequence: Synthetic oligonucleotide
cuuuagcaagaaguuuucc

SEQ ID NO: 1426822 - RNA, 19 nt, Artificial Sequence
  Description of Artificial Sequence: Synthetic oligonucleotide
ccuagguuacaagugaggg

SEQ ID NO: 1426823 - RNA, 19 nt, Artificial Sequence
  Description of Artificial Sequence: Synthetic oligonucleotide
cucacaacucaacgguagc

SEQ ID NO: 1426824 - RNA, 19 nt, Artificial Sequence
  Description of Artificial Sequence: Synthetic oligonucleotide
cuaagcuccucacaacuca

SEQ ID NO: 1426825 - RNA, 19 nt, Artificial Sequence
  Description of Artificial Sequence: Synthetic oligonucleotide
ugaccuccugcgaucucgg

SEQ ID NO: 1426826 - RNA, 19 nt, Artificial Sequence
  Description of Artificial Sequence: Synthetic oligonucleotide
augaaccccaaguguaacu

SEQ ID NO: 1426827 - RNA, 19 nt, Artificial Sequence
  Description of Artificial Sequence: Synthetic oligonucleotide
ggaacgggaaaacuuucgc

SEQ ID NO: 1426828 - RNA, 19 nt, Artificial Sequence
  Description of Artificial Sequence: Synthetic oligonucleotide
caagcgauccugauuucuc

SEQ ID NO: 1426829 - RNA, 19 nt, Artificial Sequence
  Description of Artificial Sequence: Synthetic oligonucleotide
gaaccccaaguguaacuug

SEQ ID NO: 1426830 - RNA, 19 nt, Artificial Sequence
  Description of Artificial Sequence: Synthetic oligonucleotide
agaccuggaacgggaaaac

SEQ ID NO: 1426831 - RNA, 19 nt, Artificial Sequence
  Description of Artificial Sequence: Synthetic oligonucleotide
cuaguugcucugcuuuagc

SEQ ID NO: 1426832 - RNA, 19 nt, Artificial Sequence
  Description of Artificial Sequence: Synthetic oligonucleotide
acaggucucuuucuuuacu

SEQ ID NO: 1426833 - RNA, 19 nt, Artificial Sequence
  Description of Artificial Sequence: Synthetic oligonucleotide
ucaagcgauccugauuucu

SEQ ID NO: 1426834 - RNA, 19 nt, Artificial Sequence
  Description of Artificial Sequence: Synthetic oligonucleotide
ugcuuuucggccacaguuu

SEQ ID NO: 1426835 - RNA, 19 nt, Artificial Sequence
  Description of Artificial Sequence: Synthetic oligonucleotide
aacacaagagaaagggcuu

SEQ ID NO: 1426836 - RNA, 19 nt, Artificial Sequence
  Description of Artificial Sequence: Synthetic oligonucleotide
cccuacuagauguaguagc

SEQ ID NO: 1426837 - RNA, 19 nt, Artificial Sequence
  Description of Artificial Sequence: Synthetic oligonucleotide
uggccaguagggacugccg

SEQ ID NO: 1426838 - RNA, 19 nt, Artificial Sequence
  Description of Artificial Sequence: Synthetic oligonucleotide
cuugaguucaagcaaccua

SEQ ID NO: 1426839 - RNA, 19 nt, Artificial Sequence
  Description of Artificial Sequence: Synthetic oligonucleotide
caaccuagguuacaaguga

SEQ ID NO: 1426840 - RNA, 19 nt, Artificial Sequence
  Description of Artificial Sequence: Synthetic oligonucleotide
ccaugugagagcucaacag

SEQ ID NO: 1426841 - RNA, 19 nt, Artificial Sequence
  Description of Artificial Sequence: Synthetic oligonucleotide
ucccuacuagauguaguag

SEQ ID NO: 1426842 - RNA, 19 nt, Artificial Sequence
  Description of Artificial Sequence: Synthetic oligonucleotide
gugacucuugcagacucgg

SEQ ID NO: 1426843 - RNA, 19 nt, Artificial Sequence
  Description of Artificial Sequence: Synthetic oligonucleotide
accaacacaggguucuaaa

SEQ ID NO: 1426844 - RNA, 19 nt, Artificial Sequence
  Description of Artificial Sequence: Synthetic oligonucleotide
acugccgcuaagcuccuca

SEQ ID NO: 1426845 - RNA, 19 nt, Artificial Sequence
  Description of Artificial Sequence: Synthetic oligonucleotide
aaccuugucccuacuagau

SEQ ID NO: 1426846 - RNA, 19 nt, Artificial Sequence
  Description of Artificial Sequence: Synthetic oligonucleotide
uugucccuacuagauguag

SEQ ID NO: 1426847 - RNA, 19 nt, Artificial Sequence
  Description of Artificial Sequence: Synthetic oligonucleotide
uagggacugccgcuaagcu

SEQ ID NO: 1426848 - RNA, 19 nt, Artificial Sequence
  Description of Artificial Sequence: Synthetic oligonucleotide
accuagguuacaagugagg

SEQ ID NO: 1426849 - RNA, 19 nt, Artificial Sequence
  Description of Artificial Sequence: Synthetic oligonucleotide
ugaaccccaaguguaacuu

SEQ ID NO: 1426850 - RNA, 19 nt, Artificial Sequence
  Description of Artificial Sequence: Synthetic oligonucleotide
acauaaagcccagccaagu

SEQ ID NO: 1426851 - RNA, 19 nt, Artificial Sequence
  Description of Artificial Sequence: Synthetic oligonucleotide
ugagagcucaacagccuua

SEQ ID NO: 1426852 - RNA, 19 nt, Artificial Sequence
  Description of Artificial Sequence: Synthetic oligonucleotide
ggugccacucuuuauuaac

SEQ ID NO: 1426853 - RNA, 19 nt, Artificial Sequence
  Description of Artificial Sequence: Synthetic oligonucleotide
uccgggaacgacugcgaug

SEQ ID NO: 1426854 - RNA, 19 nt, Artificial Sequence
  Description of Artificial Sequence: Synthetic oligonucleotide
ccuaaauccaugcgcgucc

SEQ ID NO: 1426855 - RNA, 19 nt, Artificial Sequence
  Description of Artificial Sequence: Synthetic oligonucleotide
ucggguucuugauccagac

SEQ ID NO: 1426856 - RNA, 19 nt, Artificial Sequence
  Description of Artificial Sequence: Synthetic oligonucleotide
uccuaaauccaugcgcguc

SEQ ID NO: 1426857 - RNA, 19 nt, Artificial Sequence
  Description of Artificial Sequence: Synthetic oligonucleotide
gaaaacuuucgccgcucuc

SEQ ID NO: 1426858 - RNA, 19 nt, Artificial Sequence
  Description of Artificial Sequence: Synthetic oligonucleotide
acacaagagaaagggcuug

SEQ ID NO: 1426859 - RNA, 19 nt, Artificial Sequence
  Description of Artificial Sequence: Synthetic oligonucleotide
aucugcaagacgacgguca

SEQ ID NO: 1426860 - RNA, 19 nt, Artificial Sequence
  Description of Artificial Sequence: Synthetic oligonucleotide
agugauccauugcaucuaa

SEQ ID NO: 1426861 - RNA, 19 nt, Artificial Sequence
  Description of Artificial Sequence: Synthetic oligonucleotide
aacaaaccucgcagacucg

SEQ ID NO: 1426862 - RNA, 19 nt, Artificial Sequence
  Description of Artificial Sequence: Synthetic oligonucleotide
ccucaacugaucaagcuuc

SEQ ID NO: 1426863 - RNA, 19 nt, Artificial Sequence
  Description of Artificial Sequence: Synthetic oligonucleotide
gagccgugcccauaagcug

SEQ ID NO: 1426864 - RNA, 19 nt, Artificial Sequence
  Description of Artificial Sequence: Synthetic oligonucleotide
agucguggauuuugguaca

SEQ ID NO: 1426865 - RNA, 19 nt, Artificial Sequence
  Description of Artificial Sequence: Synthetic oligonucleotide
gugccacucuuuauuaacc

SEQ ID NO: 1426866 - RNA, 19 nt, Artificial Sequence
  Description of Artificial Sequence: Synthetic oligonucleotide
ggaucuugaguucaagcaa

SEQ ID NO: 1426867 - RNA, 19 nt, Artificial Sequence
  Description of Artificial Sequence: Synthetic oligonucleotide
agccaaaaggccagcauga

SEQ ID NO: 1426868 - RNA, 19 nt, Artificial Sequence
  Description of Artificial Sequence: Synthetic oligonucleotide
agcaagaaguuuuccuauu

SEQ ID NO: 1426869 - RNA, 19 nt, Artificial Sequence
  Description of Artificial Sequence: Synthetic oligonucleotide
cuuagcugcucuuuaccaa

SEQ ID NO: 1426870 - RNA, 19 nt, Artificial Sequence
  Description of Artificial Sequence: Synthetic oligonucleotide
ucgggagguagaucuagau

SEQ ID NO: 1426871 - RNA, 19 nt, Artificial Sequence
  Description of Artificial Sequence: Synthetic oligonucleotide
cagccuuacacuauuccaa

SEQ ID NO: 1426872 - RNA, 19 nt, Artificial Sequence
  Description of Artificial Sequence: Synthetic oligonucleotide
cauggagaccaagguaagc

SEQ ID NO: 1426873 - RNA, 19 nt, Artificial Sequence
  Description of Artificial Sequence: Synthetic oligonucleotide
uaccaaguuaaaguacaua

SEQ ID NO: 1426874 - RNA, 19 nt, Artificial Sequence
  Description of Artificial Sequence: Synthetic oligonucleotide
uucggccacaguuuuccuc

SEQ ID NO: 1426875 - RNA, 19 nt, Artificial Sequence
  Description of Artificial Sequence: Synthetic oligonucleotide
gaauuucuauauucuuccu

SEQ ID NO: 1426876 - RNA, 19 nt, Artificial Sequence
  Description of Artificial Sequence: Synthetic oligonucleotide
uuuucagccuuugcagaaa

SEQ ID NO: 1426877 - RNA, 19 nt, Artificial Sequence
  Description of Artificial Sequence: Synthetic oligonucleotide
ccaaccuugucccuacuag

SEQ ID NO: 1426878 - RNA, 19 nt, Artificial Sequence
  Description of Artificial Sequence: Synthetic oligonucleotide
cagagggccaugugagagc

SEQ ID NO: 1426879 - RNA, 19 nt, Artificial Sequence
  Description of Artificial Sequence: Synthetic oligonucleotide
cacaagagaaagggcuugc

SEQ ID NO: 1426880 - RNA, 19 nt, Artificial Sequence
  Description of Artificial Sequence: Synthetic oligonucleotide
cauaaucugcucggagggc

SEQ ID NO: 1426881 - RNA, 19 nt, Artificial Sequence
  Description of Artificial Sequence: Synthetic oligonucleotide
ggaacgacugcgaugucgc

SEQ ID NO: 1426882 - RNA, 19 nt, Artificial Sequence
  Description of Artificial Sequence: Synthetic oligonucleotide
aggacucuaagugauccau

SEQ ID NO: 1426883 - RNA, 19 nt, Artificial Sequence
  Description of Artificial Sequence: Synthetic oligonucleotide
gaucuagaucgccuccguc

SEQ ID NO: 1426884 - RNA, 19 nt, Artificial Sequence
  Description of Artificial Sequence: Synthetic oligonucleotide
auccaugcgcgucccagca

SEQ ID NO: 1426885 - RNA, 19 nt, Artificial Sequence
  Description of Artificial Sequence: Synthetic oligonucleotide
ucaagcaaccuagguuaca

SEQ ID NO: 1426886 - RNA, 19 nt, Artificial Sequence
  Description of Artificial Sequence: Synthetic oligonucleotide
aggguucuaaacauccaga

SEQ ID NO: 1426887 - RNA, 19 nt, Artificial Sequence
  Description of Artificial Sequence: Synthetic oligonucleotide
uuuugcacuccggucccug

SEQ ID NO: 1426888 - RNA, 19 nt, Artificial Sequence
  Description of Artificial Sequence: Synthetic oligonucleotide
ucggagggccaagucgugg

SEQ ID NO: 1426889 - RNA, 19 nt, Artificial Sequence
  Description of Artificial Sequence: Synthetic oligonucleotide
gaaugaaccccaaguguaa

SEQ ID NO: 1426890 - RNA, 19 nt, Artificial Sequence
  Description of Artificial Sequence: Synthetic oligonucleotide
gcaaccuagguuacaagug

SEQ ID NO: 1426891 - RNA, 19 nt, Artificial Sequence
  Description of Artificial Sequence: Synthetic oligonucleotide
cuuucgccgcucucgggag

SEQ ID NO: 1426892 - RNA, 19 nt, Artificial Sequence
  Description of Artificial Sequence: Synthetic oligonucleotide
uccucacaacucaacggua

SEQ ID NO: 1426893 - RNA, 19 nt, Artificial Sequence
  Description of Artificial Sequence: Synthetic oligonucleotide
ugggcggacaugguggcca

SEQ ID NO: 1426894 - RNA, 19 nt, Artificial Sequence
  Description of Artificial Sequence: Synthetic oligonucleotide
aguggucuccgcagagggc

SEQ ID NO: 1426895 - RNA, 19 nt, Artificial Sequence
  Description of Artificial Sequence: Synthetic oligonucleotide
accccaaguguaacuugcc

SEQ ID NO: 1426896 - RNA, 19 nt, Artificial Sequence
  Description of Artificial Sequence: Synthetic oligonucleotide
caaccuugucccuacuaga

SEQ ID NO: 1426897 - RNA, 19 nt, Artificial Sequence
  Description of Artificial Sequence: Synthetic oligonucleotide
ugggugccacucuuuauua

SEQ ID NO: 1426898 - RNA, 19 nt, Artificial Sequence
  Description of Artificial Sequence: Synthetic oligonucleotide
gaugucgccggugucuauc

SEQ ID NO: 1426899 - RNA, 19 nt, Artificial Sequence
  Description of Artificial Sequence: Synthetic oligonucleotide
ugacucuugcagacucggu

SEQ ID NO: 1426900 - RNA, 19 nt, Artificial Sequence
  Description of Artificial Sequence: Synthetic oligonucleotide
ccuuacacuauuccaagca

SEQ ID NO: 1426901 - RNA, 19 nt, Artificial Sequence
  Description of Artificial Sequence: Synthetic oligonucleotide
ugccgcuaagcuccucaca

SEQ ID NO: 1426902 - RNA, 19 nt, Artificial Sequence
  Description of Artificial Sequence: Synthetic oligonucleotide
caggcauggaauuucuaua

SEQ ID NO: 1426903 - RNA, 19 nt, Artificial Sequence
  Description of Artificial Sequence: Synthetic oligonucleotide
uccuaguugcucugcuuua

SEQ ID NO: 1426904 - RNA, 19 nt, Artificial Sequence
  Description of Artificial Sequence: Synthetic oligonucleotide
cuuuucggccacaguuuuc

SEQ ID NO: 1426905 - RNA, 19 nt, Artificial Sequence
  Description of Artificial Sequence: Synthetic oligonucleotide
ugcacuccggucccuggaa

SEQ ID NO: 1426906 - RNA, 19 nt, Artificial Sequence
  Description of Artificial Sequence: Synthetic oligonucleotide
gucgccgaucccgggaucg

SEQ ID NO: 1426907 - RNA, 19 nt, Artificial Sequence
  Description of Artificial Sequence: Synthetic oligonucleotide
caugcgcgucccagcaagg

SEQ ID NO: 1426908 - RNA, 19 nt, Artificial Sequence
  Description of Artificial Sequence: Synthetic oligonucleotide
ugcgcgucccagcaaggau

SEQ ID NO: 1426909 - RNA, 19 nt, Artificial Sequence
  Description of Artificial Sequence: Synthetic oligonucleotide
caagcaaccuagguuacaa

SEQ ID NO: 1426910 - RNA, 19 nt, Artificial Sequence
  Description of Artificial Sequence: Synthetic oligonucleotide
ccggugucuaucucgagac

SEQ ID NO: 1426911 - RNA, 19 nt, Artificial Sequence
  Description of Artificial Sequence: Synthetic oligonucleotide
augucgccggugucuaucu

SEQ ID NO: 1426912 - RNA, 19 nt, Artificial Sequence
  Description of Artificial Sequence: Synthetic oligonucleotide
gaacgacugcgaugucgcc

SEQ ID NO: 1426913 - RNA, 19 nt, Artificial Sequence
  Description of Artificial Sequence: Synthetic oligonucleotide
guaaguaagcaggaccugu

SEQ ID NO: 1426914 - RNA, 19 nt, Artificial Sequence
  Description of Artificial Sequence: Synthetic oligonucleotide
gaucugcaagacgacgguc

SEQ ID NO: 1426915 - RNA, 19 nt, Artificial Sequence
  Description of Artificial Sequence: Synthetic oligonucleotide
gaucaagcuucucucggau

SEQ ID NO: 1426916 - RNA, 19 nt, Artificial Sequence
  Description of Artificial Sequence: Synthetic oligonucleotide
caagugagggccuagucuu

SEQ ID NO: 1426917 - RNA, 19 nt, Artificial Sequence
  Description of Artificial Sequence: Synthetic oligonucleotide
agcgauccugauuucucuu

SEQ ID NO: 1426918 - RNA, 19 nt, Artificial Sequence
  Description of Artificial Sequence: Synthetic oligonucleotide
gugucuaucucgagaccug

SEQ ID NO: 1426919 - RNA, 19 nt, Artificial Sequence
  Description of Artificial Sequence: Synthetic oligonucleotide
ucccgagccgugcccauaa

SEQ ID NO: 1426920 - RNA, 19 nt, Artificial Sequence
  Description of Artificial Sequence: Synthetic oligonucleotide
cuagaucgccuccgucgcc

SEQ ID NO: 1426921 - RNA, 19 nt, Artificial Sequence
  Description of Artificial Sequence: Synthetic oligonucleotide
gacgacggucauugucaug

SEQ ID NO: 1426922 - RNA, 19 nt, Artificial Sequence
  Description of Artificial Sequence: Synthetic oligonucleotide
ucugcucggagggccaagu

SEQ ID NO: 1426923 - RNA, 19 nt, Artificial Sequence
  Description of Artificial Sequence: Synthetic oligonucleotide
cuguugaaaacuggaugca

SEQ ID NO: 1426924 - RNA, 19 nt, Artificial Sequence
  Description of Artificial Sequence: Synthetic oligonucleotide
acugggugccacucuuuau

SEQ ID NO: 1426925 - RNA, 19 nt, Artificial Sequence
  Description of Artificial Sequence: Synthetic oligonucleotide
uccgucccgagccgugccc

SEQ ID NO: 1426926 - RNA, 19 nt, Artificial Sequence
  Description of Artificial Sequence: Synthetic oligonucleotide
gaccuccugcgaucucggg

SEQ ID NO: 1426927 - RNA, 19 nt, Artificial Sequence
  Description of Artificial Sequence: Synthetic oligonucleotide
gaucgugaccuccugcgau

SEQ ID NO: 1426928 - RNA, 19 nt, Artificial Sequence
  Description of Artificial Sequence: Synthetic oligonucleotide
cgaagugaucugcaagacg

SEQ ID NO: 1426929 - RNA, 19 nt, Artificial Sequence
  Description of Artificial Sequence: Synthetic oligonucleotide
accuggaacgggaaaacuu

SEQ ID NO: 1426930 - RNA, 19 nt, Artificial Sequence
  Description of Artificial Sequence: Synthetic oligonucleotide
cucaacgguagcagcggca

SEQ ID NO: 1426931 - RNA, 19 nt, Artificial Sequence
  Description of Artificial Sequence: Synthetic oligonucleotide
cuacuagauguaguagcca

SEQ ID NO: 1426932 - RNA, 19 nt, Artificial Sequence
  Description of Artificial Sequence: Synthetic oligonucleotide
ccaaguuaaaguacauaaa

SEQ ID NO: 1426933 - RNA, 19 nt, Artificial Sequence
  Description of Artificial Sequence: Synthetic oligonucleotide
cucucucuccucucuucuc

SEQ ID NO: 1426934 - RNA, 19 nt, Artificial Sequence
  Description of Artificial Sequence: Synthetic oligonucleotide
gcucucgggagguagaucu

SEQ ID NO: 1426935 - RNA, 19 nt, Artificial Sequence
  Description of Artificial Sequence: Synthetic oligonucleotide
ugcagcuacugaggaaguc

SEQ ID NO: 1426936 - RNA, 19 nt, Artificial Sequence
  Description of Artificial Sequence: Synthetic oligonucleotide
ggugacucuugcagacucg

SEQ ID NO: 1426937 - RNA, 19 nt, Artificial Sequence
  Description of Artificial Sequence: Synthetic oligonucleotide
gguuucaucuccgucccga

SEQ ID NO: 1426938 - RNA, 19 nt, Artificial Sequence
  Description of Artificial Sequence: Synthetic oligonucleotide
guagcagcggcaacagcga

SEQ ID NO: 1426939 - RNA, 19 nt, Artificial Sequence
  Description of Artificial Sequence: Synthetic oligonucleotide
ggccaguagggacugccgc

SEQ ID NO: 1426940 - RNA, 19 nt, Artificial Sequence
  Description of Artificial Sequence: Synthetic oligonucleotide
cucggguucuugauccaga

SEQ ID NO: 1426941 - RNA, 19 nt, Artificial Sequence
  Description of Artificial Sequence: Synthetic oligonucleotide
cugaguaguuacuuguauu

SEQ ID NO: 1426942 - RNA, 19 nt, Artificial Sequence
  Description of Artificial Sequence: Synthetic oligonucleotide
gccgcuaagcuccucacaa

SEQ ID NO: 1426943 - RNA, 19 nt, Artificial Sequence
  Description of Artificial Sequence: Synthetic oligonucleotide
cucaagcgauccugauuuc

SEQ ID NO: 1426944 - RNA, 19 nt, Artificial Sequence
  Description of Artificial Sequence: Synthetic oligonucleotide
caaaccucgcagacucgga

SEQ ID NO: 1426945 - RNA, 19 nt, Artificial Sequence
  Description of Artificial Sequence: Synthetic oligonucleotide
ccaugcgcgucccagcaag

SEQ ID NO: 1426946 - RNA, 19 nt, Artificial Sequence
  Description of Artificial Sequence: Synthetic oligonucleotide
ccuuagcugcucuuuacca

SEQ ID NO: 1426947 - RNA, 19 nt, Artificial Sequence
  Description of Artificial Sequence: Synthetic oligonucleotide
agugagggccuagucuuaa

SEQ ID NO: 1426948 - RNA, 19 nt, Artificial Sequence
  Description of Artificial Sequence: Synthetic oligonucleotide
acagaccccagcagacuug

SEQ ID NO: 1426949 - RNA, 19 nt, Artificial Sequence
  Description of Artificial Sequence: Synthetic oligonucleotide
cugccgcuaagcuccucac

SEQ ID NO: 1426950 - RNA, 19 nt, Artificial Sequence
  Description of Artificial Sequence: Synthetic oligonucleotide
uucgccgcucucgggaggu

SEQ ID NO: 1426951 - RNA, 19 nt, Artificial Sequence
  Description of Artificial Sequence: Synthetic oligonucleotide
uccaugcgcgucccagcaa

SEQ ID NO: 1426952 - RNA, 19 nt, Artificial Sequence
  Description of Artificial Sequence: Synthetic oligonucleotide
ccccaaguguaacuugccc

SEQ ID NO: 1426953 - RNA, 19 nt, Artificial Sequence
  Description of Artificial Sequence: Synthetic oligonucleotide
ggugucuaucucgagaccu

SEQ ID NO: 1426954 - RNA, 19 nt, Artificial Sequence
  Description of Artificial Sequence: Synthetic oligonucleotide
ggccaagucguggauuuug

SEQ ID NO: 1426955 - RNA, 19 nt, Artificial Sequence
  Description of Artificial Sequence: Synthetic oligonucleotide
cagacucggagcuuuugcu

SEQ ID NO: 1426956 - RNA, 19 nt, Artificial Sequence
  Description of Artificial Sequence: Synthetic oligonucleotide
caagugcaguggucuccgc

SEQ ID NO: 1426957 - RNA, 19 nt, Artificial Sequence
  Description of Artificial Sequence: Synthetic oligonucleotide
gcucaacagccuuacacua

SEQ ID NO: 1426958 - RNA, 19 nt, Artificial Sequence
  Description of Artificial Sequence: Synthetic oligonucleotide
gcaggcauggaauuucuau

SEQ ID NO: 1426959 - RNA, 19 nt, Artificial Sequence
  Description of Artificial Sequence: Synthetic oligonucleotide
gacugcgaugucgccggug

SEQ ID NO: 1426960 - RNA, 19 nt, Artificial Sequence
  Description of Artificial Sequence: Synthetic oligonucleotide
gccggugucuaucucgaga

SEQ ID NO: 1426961 - RNA, 19 nt, Artificial Sequence
  Description of Artificial Sequence: Synthetic oligonucleotide
ccccgaagugaucugcaag

SEQ ID NO: 1426962 - RNA, 19 nt, Artificial Sequence
  Description of Artificial Sequence: Synthetic oligonucleotide
acucggagcuuuugcuguu

SEQ ID NO: 1426963 - RNA, 19 nt, Artificial Sequence
  Description of Artificial Sequence: Synthetic oligonucleotide
ugucgccggugucuaucuc

SEQ ID NO: 1426964 - RNA, 19 nt, Artificial Sequence
  Description of Artificial Sequence: Synthetic oligonucleotide
cucggagggccaagucgug

SEQ ID NO: 1426965 - RNA, 19 nt, Artificial Sequence
  Description of Artificial Sequence: Synthetic oligonucleotide
gucugaguaguuacuugua

SEQ ID NO: 1426966 - RNA, 19 nt, Artificial Sequence
  Description of Artificial Sequence: Synthetic oligonucleotide
ucgcucucucuccucucuu

SEQ ID NO: 1426967 - RNA, 19 nt, Artificial Sequence
  Description of Artificial Sequence: Synthetic oligonucleotide
cuucugcacugaucuccuc

SEQ ID NO: 1426968 - RNA, 19 nt, Artificial Sequence
  Description of Artificial Sequence: Synthetic oligonucleotide
aagugagggccuagucuua

SEQ ID NO: 1426969 - RNA, 19 nt, Artificial Sequence
  Description of Artificial Sequence: Synthetic oligonucleotide
cuccgucccgagccgugcc

SEQ ID NO: 1426970 - RNA, 19 nt, Artificial Sequence
  Description of Artificial Sequence: Synthetic oligonucleotide
gcuaagcuccucacaacuc

SEQ ID NO: 1426971 - RNA, 19 nt, Artificial Sequence
  Description of Artificial Sequence: Synthetic oligonucleotide
ccgagccgugcccauaagc

SEQ ID NO: 1426972 - RNA, 19 nt, Artificial Sequence
  Description of Artificial Sequence: Synthetic oligonucleotide
cugggugccacucuuuauu

SEQ ID NO: 1426973 - RNA, 19 nt, Artificial Sequence
  Description of Artificial Sequence: Synthetic oligonucleotide
cuccuaguugcucugcuuu

SEQ ID NO: 1426974 - RNA, 19 nt, Artificial Sequence
  Description of Artificial Sequence: Synthetic oligonucleotide
agaucgccuccgucgccga

SEQ ID NO: 1426975 - RNA, 19 nt, Artificial Sequence
  Description of Artificial Sequence: Synthetic oligonucleotide
augcgcgucccagcaagga

SEQ ID NO: 1426976 - RNA, 19 nt, Artificial Sequence
  Description of Artificial Sequence: Synthetic oligonucleotide
ggugaccccggcuauggcu

SEQ ID NO: 1426977 - RNA, 19 nt, Artificial Sequence
  Description of Artificial Sequence: Synthetic oligonucleotide
uccugcgaucucggguucu

SEQ ID NO: 1426978 - RNA, 19 nt, Artificial Sequence
  Description of Artificial Sequence: Synthetic oligonucleotide
gcacuccggucccuggaag

SEQ ID NO: 1426979 - RNA, 19 nt, Artificial Sequence
  Description of Artificial Sequence: Synthetic oligonucleotide
ggaucgugaccuccugcga

SEQ ID NO: 1426980 - RNA, 19 nt, Artificial Sequence
  Description of Artificial Sequence: Synthetic oligonucleotide
ccagccgcuucuuggcaag

SEQ ID NO: 1426981 - RNA, 19 nt, Artificial Sequence
  Description of Artificial Sequence: Synthetic oligonucleotide
gcagcuacugaggaagucu

SEQ ID NO: 1426982 - RNA, 19 nt, Artificial Sequence
  Description of Artificial Sequence: Synthetic oligonucleotide
cugcucggagggccaaguc

SEQ ID NO: 1426983 - RNA, 19 nt, Artificial Sequence
  Description of Artificial Sequence: Synthetic oligonucleotide
cacugggugccacucuuua

SEQ ID NO: 1426984 - RNA, 19 nt, Artificial Sequence
  Description of Artificial Sequence: Synthetic oligonucleotide
ccuccgucgccgaucccgg

SEQ ID NO: 1426985 - RNA, 19 nt, Artificial Sequence
  Description of Artificial Sequence: Synthetic oligonucleotide
gggaaaacuuucgccgcuc

SEQ ID NO: 1426986 - RNA, 19 nt, Artificial Sequence
  Description of Artificial Sequence: Synthetic oligonucleotide
ggaaaacuuucgccgcucu

SEQ ID NO: 1426987 - RNA, 19 nt, Artificial Sequence
  Description of Artificial Sequence: Synthetic oligonucleotide
cuccgcagagggccaugug

SEQ ID NO: 1426988 - RNA, 19 nt, Artificial Sequence
  Description of Artificial Sequence: Synthetic oligonucleotide
ggccuagucuuaaaacaaa

SEQ ID NO: 1426989 - RNA, 19 nt, Artificial Sequence
  Description of Artificial Sequence: Synthetic oligonucleotide
gugagggccuagucuuaaa

SEQ ID NO: 1426990 - RNA, 19 nt, Artificial Sequence
  Description of Artificial Sequence: Synthetic oligonucleotide
cuccuaaauccaugcgcgu

SEQ ID NO: 1426991 - RNA, 19 nt, Artificial Sequence
  Description of Artificial Sequence: Synthetic oligonucleotide
aucuccgucccgagccgug

SEQ ID NO: 1426992 - RNA, 19 nt, Artificial Sequence
  Description of Artificial Sequence: Synthetic oligonucleotide
cggaucugaaugaacccca

SEQ ID NO: 1426993 - RNA, 19 nt, Artificial Sequence
  Description of Artificial Sequence: Synthetic oligonucleotide
cugcgaucucggguucuug

SEQ ID NO: 1426994 - RNA, 19 nt, Artificial Sequence
  Description of Artificial Sequence: Synthetic oligonucleotide
gcccauaagcugguccagc

SEQ ID NO: 1426995 - RNA, 19 nt, Artificial Sequence
  Description of Artificial Sequence: Synthetic oligonucleotide
ucgcagacucggagcuuuu

SEQ ID NO: 1426996 - RNA, 19 nt, Artificial Sequence
  Description of Artificial Sequence: Synthetic oligonucleotide
ccuggaacgggaaaacuuu

SEQ ID NO: 1426997 - RNA, 19 nt, Artificial Sequence
  Description of Artificial Sequence: Synthetic oligonucleotide
gggugccacucuuuauuaa

SEQ ID NO: 1426998 - RNA, 19 nt, Artificial Sequence
  Description of Artificial Sequence: Synthetic oligonucleotide
cugcgaugucgccgguguc

SEQ ID NO: 1426999 - RNA, 19 nt, Artificial Sequence
  Description of Artificial Sequence: Synthetic oligonucleotide
cucgcucucucuccucucu

SEQ ID NO: 1427000 - RNA, 19 nt, Artificial Sequence
  Description of Artificial Sequence: Synthetic oligonucleotide
cgaucucggguucuugauc

SEQ ID NO: 1427001 - RNA, 19 nt, Artificial Sequence
  Description of Artificial Sequence: Synthetic oligonucleotide
cucggucaucuguaaacuu

SEQ ID NO: 1427002 - RNA, 19 nt, Artificial Sequence
  Description of Artificial Sequence: Synthetic oligonucleotide
gggcggacaugguggccag

SEQ ID NO: 1427003 - RNA, 19 nt, Artificial Sequence
  Description of Artificial Sequence: Synthetic oligonucleotide
cggguucuugauccagacc

SEQ ID NO: 1427004 - RNA, 19 nt, Artificial Sequence
  Description of Artificial Sequence: Synthetic oligonucleotide
caccaacacaggguucuaa

SEQ ID NO: 1427005 - RNA, 19 nt, Artificial Sequence
  Description of Artificial Sequence: Synthetic oligonucleotide
gcucucucuccucucuucu

SEQ ID NO: 1427006 - RNA, 19 nt, Artificial Sequence
  Description of Artificial Sequence: Synthetic oligonucleotide
ccgggaacgacugcgaugu

SEQ ID NO: 1427007 - RNA, 19 nt, Artificial Sequence
  Description of Artificial Sequence: Synthetic oligonucleotide
gucuccgcagagggccaug

SEQ ID NO: 1427008 - RNA, 19 nt, Artificial Sequence
  Description of Artificial Sequence: Synthetic oligonucleotide
gcucggagggccaagucgu

SEQ ID NO: 1427009 - RNA, 19 nt, Artificial Sequence
  Description of Artificial Sequence: Synthetic oligonucleotide
caguagggacugccgcuaa

SEQ ID NO: 1427010 - RNA, 19 nt, Artificial Sequence
  Description of Artificial Sequence: Synthetic oligonucleotide
cgagccgugcccauaagcu

SEQ ID NO: 1427011 - RNA, 19 nt, Artificial Sequence
  Description of Artificial Sequence: Synthetic oligonucleotide
cggugucuaucucgagacc

SEQ ID NO: 1427012 - RNA, 19 nt, Artificial Sequence
  Description of Artificial Sequence: Synthetic oligonucleotide
cucgcagacucggagcuuu

SEQ ID NO: 1427013 - RNA, 19 nt, Artificial Sequence
  Description of Artificial Sequence: Synthetic oligonucleotide
gagggccaagucguggauu

SEQ ID NO: 1427014 - RNA, 19 nt, Artificial Sequence
  Description of Artificial Sequence: Synthetic oligonucleotide
gcuauggcuccgggaacga

SEQ ID NO: 1427015 - RNA, 19 nt, Artificial Sequence
  Description of Artificial Sequence: Synthetic oligonucleotide
cgcucucucuccucucuuc

SEQ ID NO: 1427016 - RNA, 19 nt, Artificial Sequence
  Description of Artificial Sequence: Synthetic oligonucleotide
gcggacaugguggccagua

SEQ ID NO: 1427017 - RNA, 19 nt, Artificial Sequence
  Description of Artificial Sequence: Synthetic oligonucleotide
ggcggugaccccggcuaug

SEQ ID NO: 1427018 - RNA, 19 nt, Artificial Sequence
  Description of Artificial Sequence: Synthetic oligonucleotide
ccaagucguggauuuuggu

SEQ ID NO: 1427019 - RNA, 19 nt, Artificial Sequence
  Description of Artificial Sequence: Synthetic oligonucleotide
ccauugcaucuaauucaaa

SEQ ID NO: 1427020 - RNA, 19 nt, Artificial Sequence
  Description of Artificial Sequence: Synthetic oligonucleotide
gugauccauugcaucuaau

SEQ ID NO: 1427021 - RNA, 19 nt, Artificial Sequence
  Description of Artificial Sequence: Synthetic oligonucleotide
gacugccgcuaagcuccuc

SEQ ID NO: 1427022 - RNA, 19 nt, Artificial Sequence
  Description of Artificial Sequence: Synthetic oligonucleotide
cuccgggaacgacugcgau

SEQ ID NO: 1427023 - RNA, 19 nt, Artificial Sequence
  Description of Artificial Sequence: Synthetic oligonucleotide
gaucgccuccgucgccgau

SEQ ID NO: 1427024 - RNA, 19 nt, Artificial Sequence
  Description of Artificial Sequence: Synthetic oligonucleotide
cccaaccuugucccuacua

SEQ ID NO: 1427025 - RNA, 19 nt, Artificial Sequence
  Description of Artificial Sequence: Synthetic oligonucleotide
ggagggccaagucguggau

SEQ ID NO: 1427026 - RNA, 19 nt, Artificial Sequence
  Description of Artificial Sequence: Synthetic oligonucleotide
gcgaugucgccggugucua

SEQ ID NO: 1427027 - RNA, 19 nt, Artificial Sequence
  Description of Artificial Sequence: Synthetic oligonucleotide
caucuccgucccgagccgu

SEQ ID NO: 1427028 - RNA, 19 nt, Artificial Sequence
  Description of Artificial Sequence: Synthetic oligonucleotide
gccgcucucgggagguaga

SEQ ID NO: 1427029 - RNA, 19 nt, Artificial Sequence
  Description of Artificial Sequence: Synthetic oligonucleotide
gcaagacgacggucauugu

SEQ ID NO: 1427030 - RNA, 19 nt, Artificial Sequence
  Description of Artificial Sequence: Synthetic oligonucleotide
cccgagccgugcccauaag

SEQ ID NO: 1427031 - RNA, 19 nt, Artificial Sequence
  Description of Artificial Sequence: Synthetic oligonucleotide
cccuggaagcccggcggug

SEQ ID NO: 1427032 - RNA, 19 nt, Artificial Sequence
  Description of Artificial Sequence: Synthetic oligonucleotide
ucgccgcucucgggaggua

SEQ ID NO: 1427033 - RNA, 19 nt, Artificial Sequence
  Description of Artificial Sequence: Synthetic oligonucleotide
cggugaccccggcuauggc

SEQ ID NO: 1427034 - RNA, 19 nt, Artificial Sequence
  Description of Artificial Sequence: Synthetic oligonucleotide
cgccggugucuaucucgag

SEQ ID NO: 1427035 - RNA, 19 nt, Artificial Sequence
  Description of Artificial Sequence: Synthetic oligonucleotide
cgggaaaacuuucgccgcu

SEQ ID NO: 1427036 - RNA, 19 nt, Artificial Sequence
  Description of Artificial Sequence: Synthetic oligonucleotide
cgccgaucccgggaucgug

SEQ ID NO: 1427037 - RNA, 19 nt, Artificial Sequence
  Description of Artificial Sequence: Synthetic oligonucleotide
ccgucccgagccgugccca

SEQ ID NO: 1427038 - RNA, 19 nt, Artificial Sequence
  Description of Artificial Sequence: Synthetic oligonucleotide
ccgugcccauaagcugguc

SEQ ID NO: 1427039 - RNA, 19 nt, Artificial Sequence
  Description of Artificial Sequence: Synthetic oligonucleotide
ccgucgccgaucccgggau

SEQ ID NO: 1427040 - RNA, 19 nt, Artificial Sequence
  Description of Artificial Sequence: Synthetic oligonucleotide
ggacugccgcuaagcuccu

SEQ ID NO: 1427041 - RNA, 19 nt, Artificial Sequence
  Description of Artificial Sequence: Synthetic oligonucleotide
ggcggacaugguggccagu

SEQ ID NO: 1427042 - RNA, 19 nt, Artificial Sequence
  Description of Artificial Sequence: Synthetic oligonucleotide
gggccaagucguggauuuu

SEQ ID NO: 1427043 - RNA, 19 nt, Artificial Sequence
  Description of Artificial Sequence: Synthetic oligonucleotide
ccugcgaucucggguucuu

SEQ ID NO: 1427044 - RNA, 19 nt, Artificial Sequence
  Description of Artificial Sequence: Synthetic oligonucleotide
cccggcggugaccccggcu

SEQ ID NO: 1427045 - RNA, 19 nt, Artificial Sequence
  Description of Artificial Sequence: Synthetic oligonucleotide
ccgcucucgggagguagau

SEQ ID NO: 1427046 - RNA, 19 nt, Artificial Sequence
  Description of Artificial Sequence: Synthetic oligonucleotide
gcgccugggcggacauggu

SEQ ID NO: 1427047 - RNA, 19 nt, Artificial Sequence
  Description of Artificial Sequence: Synthetic oligonucleotide
cgaugucgccggugucuau

SEQ ID NO: 1427048 - RNA, 19 nt, Artificial Sequence
  Description of Artificial Sequence: Synthetic oligonucleotide
ccucgcagacucggagcuu

SEQ ID NO: 1427049 - RNA, 19 nt, Artificial Sequence
  Description of Artificial Sequence: Synthetic oligonucleotide
cgacugcgaugucgccggu

SEQ ID NO: 1427050 - RNA, 19 nt, Artificial Sequence
  Description of Artificial Sequence: Synthetic oligonucleotide
ucugacacaaaugugaugg

SEQ ID NO: 1427051 - RNA, 19 nt, Artificial Sequence
  Description of Artificial Sequence: Synthetic oligonucleotide
aacacugccaccuugacau

SEQ ID NO: 1427052 - RNA, 19 nt, Artificial Sequence
  Description of Artificial Sequence: Synthetic oligonucleotide
ugauguugaccucaaagcg

SEQ ID NO: 1427053 - RNA, 19 nt, Artificial Sequence
  Description of Artificial Sequence: Synthetic oligonucleotide
ucaucugacacaaauguga

SEQ ID NO: 1427054 - RNA, 19 nt, Artificial Sequence
  Description of Artificial Sequence: Synthetic oligonucleotide
gaugcauucaugcuggacc

SEQ ID NO: 1427055 - RNA, 19 nt, Artificial Sequence
  Description of Artificial Sequence: Synthetic oligonucleotide
aaaguguuuaaugugcuug

SEQ ID NO: 1427056 - RNA, 19 nt, Artificial Sequence
  Description of Artificial Sequence: Synthetic oligonucleotide
ucacauucguccaagauaa

SEQ ID NO: 1427057 - RNA, 19 nt, Artificial Sequence
  Description of Artificial Sequence: Synthetic oligonucleotide
ggagaugucgaucucaucg

SEQ ID NO: 1427058 - RNA, 19 nt, Artificial Sequence
  Description of Artificial Sequence: Synthetic oligonucleotide
ugaaaagccaacucccuag

SEQ ID NO: 1427059 - RNA, 19 nt, Artificial Sequence
  Description of Artificial Sequence: Synthetic oligonucleotide
agugugacacaucaccagc

SEQ ID NO: 1427060 - RNA, 19 nt, Artificial Sequence
  Description of Artificial Sequence: Synthetic oligonucleotide
aaugugauggccaagcccu

SEQ ID NO: 1427061 - RNA, 19 nt, Artificial Sequence
  Description of Artificial Sequence: Synthetic oligonucleotide
acugcugauaccgagagag

SEQ ID NO: 1427062 - RNA, 19 nt, Artificial Sequence
  Description of Artificial Sequence: Synthetic oligonucleotide
aaagccaacucccuagugu

SEQ ID NO: 1427063 - RNA, 19 nt, Artificial Sequence
  Description of Artificial Sequence: Synthetic oligonucleotide
ugaguggucccagagaagg

SEQ ID NO: 1427064 - RNA, 19 nt, Artificial Sequence
  Description of Artificial Sequence: Synthetic oligonucleotide
acaaacacugcugucuucc

SEQ ID NO: 1427065 - RNA, 19 nt, Artificial Sequence
  Description of Artificial Sequence: Synthetic oligonucleotide
agaagagcuaagcacugcg

SEQ ID NO: 1427066 - RNA, 19 nt, Artificial Sequence
  Description of Artificial Sequence: Synthetic oligonucleotide
gagaaggugagaaagcaag

SEQ ID NO: 1427067 - RNA, 19 nt, Artificial Sequence
  Description of Artificial Sequence: Synthetic oligonucleotide
auucguccaagauaaagug

SEQ ID NO: 1427068 - RNA, 19 nt, Artificial Sequence
  Description of Artificial Sequence: Synthetic oligonucleotide
cuugcugaucugaaaagcc

SEQ ID NO: 1427069 - RNA, 19 nt, Artificial Sequence
  Description of Artificial Sequence: Synthetic oligonucleotide
acggacuucacaaagauca

SEQ ID NO: 1427070 - RNA, 19 nt, Artificial Sequence
  Description of Artificial Sequence: Synthetic oligonucleotide
uagaauucggccaggaguc

SEQ ID NO: 1427071 - RNA, 19 nt, Artificial Sequence
  Description of Artificial Sequence: Synthetic oligonucleotide
gaaggugagaaagcaaggg

SEQ ID NO: 1427072 - RNA, 19 nt, Artificial Sequence
  Description of Artificial Sequence: Synthetic oligonucleotide
acacgcucaauguccaugc

SEQ ID NO: 1427073 - RNA, 19 nt, Artificial Sequence
  Description of Artificial Sequence: Synthetic oligonucleotide
cauucucugccauaauugg

SEQ ID NO: 1427074 - RNA, 19 nt, Artificial Sequence
  Description of Artificial Sequence: Synthetic oligonucleotide
aauccuccgcuggaaaucc

SEQ ID NO: 1427075 - RNA, 19 nt, Artificial Sequence
  Description of Artificial Sequence: Synthetic oligonucleotide
ucuugauagacagaccacc

SEQ ID NO: 1427076 - RNA, 19 nt, Artificial Sequence
  Description of Artificial Sequence: Synthetic oligonucleotide
augaacuugcggcagacug

SEQ ID NO: 1427077 - RNA, 19 nt, Artificial Sequence
  Description of Artificial Sequence: Synthetic oligonucleotide
cuuagcaucauucucaucu

SEQ ID NO: 1427078 - RNA, 19 nt, Artificial Sequence
  Description of Artificial Sequence: Synthetic oligonucleotide
acugcgagcgcguauggcg

SEQ ID NO: 1427079 - RNA, 19 nt, Artificial Sequence
  Description of Artificial Sequence: Synthetic oligonucleotide
ucugccauaauugggccgg

SEQ ID NO: 1427080 - RNA, 19 nt, Artificial Sequence
  Description of Artificial Sequence: Synthetic oligonucleotide
gaaggcgauguucacacgc

SEQ ID NO: 1427081 - RNA, 19 nt, Artificial Sequence
  Description of Artificial Sequence: Synthetic oligonucleotide
uugaaggcgauguucacac

SEQ ID NO: 1427082 - RNA, 19 nt, Artificial Sequence
  Description of Artificial Sequence: Synthetic oligonucleotide
auuuccuggacaucccgac

SEQ ID NO: 1427083 - RNA, 19 nt, Artificial Sequence
  Description of Artificial Sequence: Synthetic oligonucleotide
gagaugucgaucucaucgg

SEQ ID NO: 1427084 - RNA, 19 nt, Artificial Sequence
  Description of Artificial Sequence: Synthetic oligonucleotide
gagcuaagcacugcgagcg

SEQ ID NO: 1427085 - RNA, 19 nt, Artificial Sequence
  Description of Artificial Sequence: Synthetic oligonucleotide
aaauccuugaacugcugau

SEQ ID NO: 1427086 - RNA, 19 nt, Artificial Sequence
  Description of Artificial Sequence: Synthetic oligonucleotide
aaguguuuaaugugcuuga

SEQ ID NO: 1427087 - RNA, 19 nt, Artificial Sequence
  Description of Artificial Sequence: Synthetic oligonucleotide
uucacgucuuucuuggcag

SEQ ID NO: 1427088 - RNA, 19 nt, Artificial Sequence
  Description of Artificial Sequence: Synthetic oligonucleotide
agagacaccaguuucccga

SEQ ID NO: 1427089 - RNA, 19 nt, Artificial Sequence
  Description of Artificial Sequence: Synthetic oligonucleotide
cucaaagcgguccugcacg

SEQ ID NO: 1427090 - RNA, 19 nt, Artificial Sequence
  Description of Artificial Sequence: Synthetic oligonucleotide
cuccauaggaucuugcaug

SEQ ID NO: 1427091 - RNA, 19 nt, Artificial Sequence
  Description of Artificial Sequence: Synthetic oligonucleotide
guaguauugcugcaacccg

SEQ ID NO: 1427092 - RNA, 19 nt, Artificial Sequence
  Description of Artificial Sequence: Synthetic oligonucleotide
gacaucccgacgcaugucg

SEQ ID NO: 1427093 - RNA, 19 nt, Artificial Sequence
  Description of Artificial Sequence: Synthetic oligonucleotide
acuugcggcagacuggccg

SEQ ID NO: 1427094 - RNA, 19 nt, Artificial Sequence
  Description of Artificial Sequence: Synthetic oligonucleotide
caggcucuuauuucgagcc

SEQ ID NO: 1427095 - RNA, 19 nt, Artificial Sequence
  Description of Artificial Sequence: Synthetic oligonucleotide
aaaccggccugcucuggcc

SEQ ID NO: 1427096 - RNA, 19 nt, Artificial Sequence
  Description of Artificial Sequence: Synthetic oligonucleotide
ugaacucgaggacaucgag

SEQ ID NO: 1427097 - RNA, 19 nt, Artificial Sequence
  Description of Artificial Sequence: Synthetic oligonucleotide
ggucucaucauccacgaag

SEQ ID NO: 1427098 - RNA, 19 nt, Artificial Sequence
  Description of Artificial Sequence: Synthetic oligonucleotide
uauugcugcaacccgugca

SEQ ID NO: 1427099 - RNA, 19 nt, Artificial Sequence
  Description of Artificial Sequence: Synthetic oligonucleotide
ucguccaagauaaaguguu

SEQ ID NO: 1427100 - RNA, 19 nt, Artificial Sequence
  Description of Artificial Sequence: Synthetic oligonucleotide
cauaggaucuugcaugaac

SEQ ID NO: 1427101 - RNA, 19 nt, Artificial Sequence
  Description of Artificial Sequence: Synthetic oligonucleotide
cuuauuucgagccagggcu

SEQ ID NO: 1427102 - RNA, 19 nt, Artificial Sequence
  Description of Artificial Sequence: Synthetic oligonucleotide
aguuucccgacagaagagc

SEQ ID NO: 1427103 - RNA, 19 nt, Artificial Sequence
  Description of Artificial Sequence: Synthetic oligonucleotide
gguucaggcucuuauuucg

SEQ ID NO: 1427104 - RNA, 19 nt, Artificial Sequence
  Description of Artificial Sequence: Synthetic oligonucleotide
gacaucgagaaggucaaag

SEQ ID NO: 1427105 - RNA, 19 nt, Artificial Sequence
  Description of Artificial Sequence: Synthetic oligonucleotide
caggaagucucgaaagccg

SEQ ID NO: 1427106 - RNA, 19 nt, Artificial Sequence
  Description of Artificial Sequence: Synthetic oligonucleotide
uucggcauguacuuugaga

SEQ ID NO: 1427107 - RNA, 19 nt, Artificial Sequence
  Description of Artificial Sequence: Synthetic oligonucleotide
cauaauugggccggcaggg

SEQ ID NO: 1427108 - RNA, 19 nt, Artificial Sequence
  Description of Artificial Sequence: Synthetic oligonucleotide
acauucggcauguacuuug

SEQ ID NO: 1427109 - RNA, 19 nt, Artificial Sequence
  Description of Artificial Sequence: Synthetic oligonucleotide
aaaagccaacucccuagug

SEQ ID NO: 1427110 - RNA, 19 nt, Artificial Sequence
  Description of Artificial Sequence: Synthetic oligonucleotide
acguaguauugcugcaacc

SEQ ID NO: 1427111 - RNA, 19 nt, Artificial Sequence
  Description of Artificial Sequence: Synthetic oligonucleotide
ugcugucuccaccucgucg

SEQ ID NO: 1427112 - RNA, 19 nt, Artificial Sequence
  Description of Artificial Sequence: Synthetic oligonucleotide
aguuucacguaguauugcu

SEQ ID NO: 1427113 - RNA, 19 nt, Artificial Sequence
  Description of Artificial Sequence: Synthetic oligonucleotide
caccucgucgucuucauag

SEQ ID NO: 1427114 - RNA, 19 nt, Artificial Sequence
  Description of Artificial Sequence: Synthetic oligonucleotide
uuuccuggacaucccgacg

SEQ ID NO: 1427115 - RNA, 19 nt, Artificial Sequence
  Description of Artificial Sequence: Synthetic oligonucleotide
acauucguccaagauaaag

SEQ ID NO: 1427116 - RNA, 19 nt, Artificial Sequence
  Description of Artificial Sequence: Synthetic oligonucleotide
ugccaaaccggccugcucu

SEQ ID NO: 1427117 - RNA, 19 nt, Artificial Sequence
  Description of Artificial Sequence: Synthetic oligonucleotide
agacguaggagcccuucac

SEQ ID NO: 1427118 - RNA, 19 nt, Artificial Sequence
  Description of Artificial Sequence: Synthetic oligonucleotide
ucggggagcucacugaugu

SEQ ID NO: 1427119 - RNA, 19 nt, Artificial Sequence
  Description of Artificial Sequence: Synthetic oligonucleotide
aauucggccaggagucccc

SEQ ID NO: 1427120 - RNA, 19 nt, Artificial Sequence
  Description of Artificial Sequence: Synthetic oligonucleotide
agaagggaggucuuugggu

SEQ ID NO: 1427121 - RNA, 19 nt, Artificial Sequence
  Description of Artificial Sequence: Synthetic oligonucleotide
agaugucgaucucaucggg

SEQ ID NO: 1427122 - RNA, 19 nt, Artificial Sequence
  Description of Artificial Sequence: Synthetic oligonucleotide
uuccccaugccugacuugg

SEQ ID NO: 1427123 - RNA, 19 nt, Artificial Sequence
  Description of Artificial Sequence: Synthetic oligonucleotide
ucaggcucuuauuucgagc

SEQ ID NO: 1427124 - RNA, 19 nt, Artificial Sequence
  Description of Artificial Sequence: Synthetic oligonucleotide
auaccgagagagccucucc

SEQ ID NO: 1427125 - RNA, 19 nt, Artificial Sequence
  Description of Artificial Sequence: Synthetic oligonucleotide
uaguauugcugcaacccgu

SEQ ID NO: 1427126 - RNA, 19 nt, Artificial Sequence
  Description of Artificial Sequence: Synthetic oligonucleotide
cacaagaauccuccgcugg

SEQ ID NO: 1427127 - RNA, 19 nt, Artificial Sequence
  Description of Artificial Sequence: Synthetic oligonucleotide
gugggaugcauucaugcug

SEQ ID NO: 1427128 - RNA, 19 nt, Artificial Sequence
  Description of Artificial Sequence: Synthetic oligonucleotide
uucuugauagacagaccac

SEQ ID NO: 1427129 - RNA, 19 nt, Artificial Sequence
  Description of Artificial Sequence: Synthetic oligonucleotide
ucuccauaggaucuugcau

SEQ ID NO: 1427130 - RNA, 19 nt, Artificial Sequence
  Description of Artificial Sequence: Synthetic oligonucleotide
ugcugaucugaaaagccaa

SEQ ID NO: 1427131 - RNA, 19 nt, Artificial Sequence
  Description of Artificial Sequence: Synthetic oligonucleotide
uucucguuguccuucaguu

SEQ ID NO: 1427132 - RNA, 19 nt, Artificial Sequence
  Description of Artificial Sequence: Synthetic oligonucleotide
gaugucgaucucaucgggg

SEQ ID NO: 1427133 - RNA, 19 nt, Artificial Sequence
  Description of Artificial Sequence: Synthetic oligonucleotide
aggaucuuagcaucauucu

SEQ ID NO: 1427134 - RNA, 19 nt, Artificial Sequence
  Description of Artificial Sequence: Synthetic oligonucleotide
agucucgaaagccggagcu

SEQ ID NO: 1427135 - RNA, 19 nt, Artificial Sequence
  Description of Artificial Sequence: Synthetic oligonucleotide
auaggaucuugcaugaacu

SEQ ID NO: 1427136 - RNA, 19 nt, Artificial Sequence
  Description of Artificial Sequence: Synthetic oligonucleotide
aucauucucugccauaauu

SEQ ID NO: 1427137 - RNA, 19 nt, Artificial Sequence
  Description of Artificial Sequence: Synthetic oligonucleotide
ugcacgucauugaggaucu

SEQ ID NO: 1427138 - RNA, 19 nt, Artificial Sequence
  Description of Artificial Sequence: Synthetic oligonucleotide
augucgaucucaucgggga

SEQ ID NO: 1427139 - RNA, 19 nt, Artificial Sequence
  Description of Artificial Sequence: Synthetic oligonucleotide
ugugggaugcauucaugcu

SEQ ID NO: 1427140 - RNA, 19 nt, Artificial Sequence
  Description of Artificial Sequence: Synthetic oligonucleotide
ugucacauucguccaagau

SEQ ID NO: 1427141 - RNA, 19 nt, Artificial Sequence
  Description of Artificial Sequence: Synthetic oligonucleotide
uaauugggccggcagggga

SEQ ID NO: 1427142 - RNA, 19 nt, Artificial Sequence
  Description of Artificial Sequence: Synthetic oligonucleotide
cucaucugacacaaaugug

SEQ ID NO: 1427143 - RNA, 19 nt, Artificial Sequence
  Description of Artificial Sequence: Synthetic oligonucleotide
ugcacggacuucacaaaga

SEQ ID NO: 1427144 - RNA, 19 nt, Artificial Sequence
  Description of Artificial Sequence: Synthetic oligonucleotide
ucgucgucuucauagucca

SEQ ID NO: 1427145 - RNA, 19 nt, Artificial Sequence
  Description of Artificial Sequence: Synthetic oligonucleotide
uaccgugucuguucaaugu

SEQ ID NO: 1427146 - RNA, 19 nt, Artificial Sequence
  Description of Artificial Sequence: Synthetic oligonucleotide
gaagucucgaaagccggag

SEQ ID NO: 1427147 - RNA, 19 nt, Artificial Sequence
  Description of Artificial Sequence: Synthetic oligonucleotide
aucuccauaggaucuugca

SEQ ID NO: 1427148 - RNA, 19 nt, Artificial Sequence
  Description of Artificial Sequence: Synthetic oligonucleotide
cuagaauucggccaggagu

SEQ ID NO: 1427149 - RNA, 19 nt, Artificial Sequence
  Description of Artificial Sequence: Synthetic oligonucleotide
ucucugccauaauugggcc

SEQ ID NO: 1427150 - RNA, 19 nt, Artificial Sequence
  Description of Artificial Sequence: Synthetic oligonucleotide
ucacaaagaucaccaccug

SEQ ID NO: 1427151 - RNA, 19 nt, Artificial Sequence
  Description of Artificial Sequence: Synthetic oligonucleotide
gccucgaccaaacagguug

SEQ ID NO: 1427152 - RNA, 19 nt, Artificial Sequence
  Description of Artificial Sequence: Synthetic oligonucleotide
ugucgaucucaucggggag

SEQ ID NO: 1427153 - RNA, 19 nt, Artificial Sequence
  Description of Artificial Sequence: Synthetic oligonucleotide
cuugcaugaacuugcggca

SEQ ID NO: 1427154 - RNA, 19 nt, Artificial Sequence
  Description of Artificial Sequence: Synthetic oligonucleotide
cuugcggcagacuggccgg

SEQ ID NO: 1427155 - RNA, 19 nt, Artificial Sequence
  Description of Artificial Sequence: Synthetic oligonucleotide
gaacuugcggcagacuggc

SEQ ID NO: 1427156 - RNA, 19 nt, Artificial Sequence
  Description of Artificial Sequence: Synthetic oligonucleotide
cuugauagacagaccacca

SEQ ID NO: 1427157 - RNA, 19 nt, Artificial Sequence
  Description of Artificial Sequence: Synthetic oligonucleotide
acaagaauccuccgcugga

SEQ ID NO: 1427158 - RNA, 19 nt, Artificial Sequence
  Description of Artificial Sequence: Synthetic oligonucleotide
auaaaguguuuaaugugcu

SEQ ID NO: 1427159 - RNA, 19 nt, Artificial Sequence
  Description of Artificial Sequence: Synthetic oligonucleotide
ugacauucggcauguacuu

SEQ ID NO: 1427160 - RNA, 19 nt, Artificial Sequence
  Description of Artificial Sequence: Synthetic oligonucleotide
ucgucuucauaguccaaga

SEQ ID NO: 1427161 - RNA, 19 nt, Artificial Sequence
  Description of Artificial Sequence: Synthetic oligonucleotide
ucgaaagccggagcugugg

SEQ ID NO: 1427162 - RNA, 19 nt, Artificial Sequence
  Description of Artificial Sequence: Synthetic oligonucleotide
acgucauugaggaucuuag

SEQ ID NO: 1427163 - RNA, 19 nt, Artificial Sequence
  Description of Artificial Sequence: Synthetic oligonucleotide
aagaauccuccgcuggaaa

SEQ ID NO: 1427164 - RNA, 19 nt, Artificial Sequence
  Description of Artificial Sequence: Synthetic oligonucleotide
aacccgugcagcgucaacu

SEQ ID NO: 1427165 - RNA, 19 nt, Artificial Sequence
  Description of Artificial Sequence: Synthetic oligonucleotide
aggucuuugggugaguggu

SEQ ID NO: 1427166 - RNA, 19 nt, Artificial Sequence
  Description of Artificial Sequence: Synthetic oligonucleotide
uggacaucccgacgcaugu

SEQ ID NO: 1427167 - RNA, 19 nt, Artificial Sequence
  Description of Artificial Sequence: Synthetic oligonucleotide
ggaucuugcaugaacuugc

SEQ ID NO: 1427168 - RNA, 19 nt, Artificial Sequence
  Description of Artificial Sequence: Synthetic oligonucleotide
ucacgucuuucuuggcagg

SEQ ID NO: 1427169 - RNA, 19 nt, Artificial Sequence
  Description of Artificial Sequence: Synthetic oligonucleotide
aauugggccggcaggggag

SEQ ID NO: 1427170 - RNA, 19 nt, Artificial Sequence
  Description of Artificial Sequence: Synthetic oligonucleotide
uucacguaguauugcugca

SEQ ID NO: 1427171 - RNA, 19 nt, Artificial Sequence
  Description of Artificial Sequence: Synthetic oligonucleotide
gauagacagaccaccaaaa

SEQ ID NO: 1427172 - RNA, 19 nt, Artificial Sequence
  Description of Artificial Sequence: Synthetic oligonucleotide
cuugucacauucguccaag

SEQ ID NO: 1427173 - RNA, 19 nt, Artificial Sequence
  Description of Artificial Sequence: Synthetic oligonucleotide
ucaucggggagcucacuga

SEQ ID NO: 1427174 - RNA, 19 nt, Artificial Sequence
  Description of Artificial Sequence: Synthetic oligonucleotide
uccucuaccgugucuguuc

SEQ ID NO: 1427175 - RNA, 19 nt, Artificial Sequence
  Description of Artificial Sequence: Synthetic oligonucleotide
cugcacgucauugaggauc

SEQ ID NO: 1427176 - RNA, 19 nt, Artificial Sequence
  Description of Artificial Sequence: Synthetic oligonucleotide
ugguugaacucgaggacau

SEQ ID NO: 1427177 - RNA, 19 nt, Artificial Sequence
  Description of Artificial Sequence: Synthetic oligonucleotide
aucugacacaaaugugaug

SEQ ID NO: 1427178 - RNA, 19 nt, Artificial Sequence
  Description of Artificial Sequence: Synthetic oligonucleotide
gugcuugagguucaggcuc

SEQ ID NO: 1427179 - RNA, 19 nt, Artificial Sequence
  Description of Artificial Sequence: Synthetic oligonucleotide
uuauuucgagccagggcua

SEQ ID NO: 1427180 - RNA, 19 nt, Artificial Sequence
  Description of Artificial Sequence: Synthetic oligonucleotide
uauuucgagccagggcuag

SEQ ID NO: 1427181 - RNA, 19 nt, Artificial Sequence
  Description of Artificial Sequence: Synthetic oligonucleotide
ucucgaaagccggagcugu

SEQ ID NO: 1427182 - RNA, 19 nt, Artificial Sequence
  Description of Artificial Sequence: Synthetic oligonucleotide
gaaccugccuucacuuccg

SEQ ID NO: 1427183 - RNA, 19 nt, Artificial Sequence
  Description of Artificial Sequence: Synthetic oligonucleotide
ucgagccagggcuagaauu

SEQ ID NO: 1427184 - RNA, 19 nt, Artificial Sequence
  Description of Artificial Sequence: Synthetic oligonucleotide
cugcacggacuucacaaag

SEQ ID NO: 1427185 - RNA, 19 nt, Artificial Sequence
  Description of Artificial Sequence: Synthetic oligonucleotide
agcuaagcacugcgagcgc

SEQ ID NO: 1427186 - RNA, 19 nt, Artificial Sequence
  Description of Artificial Sequence: Synthetic oligonucleotide
uuccgucccaucuccaccu

SEQ ID NO: 1427187 - RNA, 19 nt, Artificial Sequence
  Description of Artificial Sequence: Synthetic oligonucleotide
uucccgacagaagagcuaa

SEQ ID NO: 1427188 - RNA, 19 nt, Artificial Sequence
  Description of Artificial Sequence: Synthetic oligonucleotide
ugcuugagguucaggcucu

SEQ ID NO: 1427189 - RNA, 19 nt, Artificial Sequence
  Description of Artificial Sequence: Synthetic oligonucleotide
agagagccucuccuccugg

SEQ ID NO: 1427190 - RNA, 19 nt, Artificial Sequence
  Description of Artificial Sequence: Synthetic oligonucleotide
agaauucggccaggagucc

SEQ ID NO: 1427191 - RNA, 19 nt, Artificial Sequence
  Description of Artificial Sequence: Synthetic oligonucleotide
cacguaguauugcugcaac

SEQ ID NO: 1427192 - RNA, 19 nt, Artificial Sequence
  Description of Artificial Sequence: Synthetic oligonucleotide
gguggauagcaauggcggg

SEQ ID NO: 1427193 - RNA, 19 nt, Artificial Sequence
  Description of Artificial Sequence: Synthetic oligonucleotide
guuucacguaguauugcug

SEQ ID NO: 1427194 - RNA, 19 nt, Artificial Sequence
  Description of Artificial Sequence: Synthetic oligonucleotide
cugcgagcgcguauggcgg

SEQ ID NO: 1427195 - RNA, 19 nt, Artificial Sequence
  Description of Artificial Sequence: Synthetic oligonucleotide
ucuuugggugagugguccc

SEQ ID NO: 1427196 - RNA, 19 nt, Artificial Sequence
  Description of Artificial Sequence: Synthetic oligonucleotide
gaauucggccaggaguccc

SEQ ID NO: 1427197 - RNA, 19 nt, Artificial Sequence
  Description of Artificial Sequence: Synthetic oligonucleotide
ggaucuuagcaucauucuc

SEQ ID NO: 1427198 - RNA, 19 nt, Artificial Sequence
  Description of Artificial Sequence: Synthetic oligonucleotide
auaauugggccggcagggg

SEQ ID NO: 1427199 - RNA, 19 nt, Artificial Sequence
  Description of Artificial Sequence: Synthetic oligonucleotide
acgaagaucuccauaggau

SEQ ID NO: 1427200 - RNA, 19 nt, Artificial Sequence
  Description of Artificial Sequence: Synthetic oligonucleotide
cuucacgucuuucuuggca

SEQ ID NO: 1427201 - RNA, 19 nt, Artificial Sequence
  Description of Artificial Sequence: Synthetic oligonucleotide
cuaccgugucuguucaaug

SEQ ID NO: 1427202 - RNA, 19 nt, Artificial Sequence
  Description of Artificial Sequence: Synthetic oligonucleotide
gaugugugggcaguucuuc

SEQ ID NO: 1427203 - RNA, 19 nt, Artificial Sequence
  Description of Artificial Sequence: Synthetic oligonucleotide
ucgaccaaacagguuggug

SEQ ID NO: 1427204 - RNA, 19 nt, Artificial Sequence
  Description of Artificial Sequence: Synthetic oligonucleotide
aacugcugauaccgagaga

SEQ ID NO: 1427205 - RNA, 19 nt, Artificial Sequence
  Description of Artificial Sequence: Synthetic oligonucleotide
ucaaagcgguccugcacgu

SEQ ID NO: 1427206 - RNA, 19 nt, Artificial Sequence
  Description of Artificial Sequence: Synthetic oligonucleotide
auucggcauguacuuugag

SEQ ID NO: 1427207 - RNA, 19 nt, Artificial Sequence
  Description of Artificial Sequence: Synthetic oligonucleotide
gggaagagacaccaguuuc

SEQ ID NO: 1427208 - RNA, 19 nt, Artificial Sequence
  Description of Artificial Sequence: Synthetic oligonucleotide
agguaggugucugaguccu

SEQ ID NO: 1427209 - RNA, 19 nt, Artificial Sequence
  Description of Artificial Sequence: Synthetic oligonucleotide
acugccaccuugacauucg

SEQ ID NO: 1427210 - RNA, 19 nt, Artificial Sequence
  Description of Artificial Sequence: Synthetic oligonucleotide
gaugcaccgcugcacggac

SEQ ID NO: 1427211 - RNA, 19 nt, Artificial Sequence
  Description of Artificial Sequence: Synthetic oligonucleotide
agcacugcgagcgcguaug

SEQ ID NO: 1427212 - RNA, 19 nt, Artificial Sequence
  Description of Artificial Sequence: Synthetic oligonucleotide
caacucccuagugugacac

SEQ ID NO: 1427213 - RNA, 19 nt, Artificial Sequence
  Description of Artificial Sequence: Synthetic oligonucleotide
aaccggccugcucuggcca

SEQ ID NO: 1427214 - RNA, 19 nt, Artificial Sequence
  Description of Artificial Sequence: Synthetic oligonucleotide
gaacucgaggacaucgaga

SEQ ID NO: 1427215 - RNA, 19 nt, Artificial Sequence
  Description of Artificial Sequence: Synthetic oligonucleotide
gucgaucucaucggggagc

SEQ ID NO: 1427216 - RNA, 19 nt, Artificial Sequence
  Description of Artificial Sequence: Synthetic oligonucleotide
gaccucaaagcgguccugc

SEQ ID NO: 1427217 - RNA, 19 nt, Artificial Sequence
  Description of Artificial Sequence: Synthetic oligonucleotide
uggcccggagcaacucugg

SEQ ID NO: 1427218 - RNA, 19 nt, Artificial Sequence
  Description of Artificial Sequence: Synthetic oligonucleotide
cguaguauugcugcaaccc

SEQ ID NO: 1427219 - RNA, 19 nt, Artificial Sequence
  Description of Artificial Sequence: Synthetic oligonucleotide
aacucccuagugugacaca

SEQ ID NO: 1427220 - RNA, 19 nt, Artificial Sequence
  Description of Artificial Sequence: Synthetic oligonucleotide
ggcgaugcaccgcugcacg

SEQ ID NO: 1427221 - RNA, 19 nt, Artificial Sequence
  Description of Artificial Sequence: Synthetic oligonucleotide
uuucgagccagggcuagaa

SEQ ID NO: 1427222 - RNA, 19 nt, Artificial Sequence
  Description of Artificial Sequence: Synthetic oligonucleotide
uugucacauucguccaaga

SEQ ID NO: 1427223 - RNA, 19 nt, Artificial Sequence
  Description of Artificial Sequence: Synthetic oligonucleotide
caguuucacguaguauugc

SEQ ID NO: 1427224 - RNA, 19 nt, Artificial Sequence
  Description of Artificial Sequence: Synthetic oligonucleotide
gauaccgagagagccucuc

SEQ ID NO: 1427225 - RNA, 19 nt, Artificial Sequence
  Description of Artificial Sequence: Synthetic oligonucleotide
gacgcaggcgggaaccugc

SEQ ID NO: 1427226 - RNA, 19 nt, Artificial Sequence
  Description of Artificial Sequence: Synthetic oligonucleotide
gccauaauugggccggcag

SEQ ID NO: 1427227 - RNA, 19 nt, Artificial Sequence
  Description of Artificial Sequence: Synthetic oligonucleotide
ggagcuguggauggagacg

SEQ ID NO: 1427228 - RNA, 19 nt, Artificial Sequence
  Description of Artificial Sequence: Synthetic oligonucleotide
caaaccggccugcucuggc

SEQ ID NO: 1427229 - RNA, 19 nt, Artificial Sequence
  Description of Artificial Sequence: Synthetic oligonucleotide
gaaaagccaacucccuagu

SEQ ID NO: 1427230 - RNA, 19 nt, Artificial Sequence
  Description of Artificial Sequence: Synthetic oligonucleotide
ugcaccgcugcacggacuu

SEQ ID NO: 1427231 - RNA, 19 nt, Artificial Sequence
  Description of Artificial Sequence: Synthetic oligonucleotide
cugcugauaccgagagagc

SEQ ID NO: 1427232 - RNA, 19 nt, Artificial Sequence
  Description of Artificial Sequence: Synthetic oligonucleotide
aaacagguugguggccaca

SEQ ID NO: 1427233 - RNA, 19 nt, Artificial Sequence
  Description of Artificial Sequence: Synthetic oligonucleotide
uaaugugcuugagguucag

SEQ ID NO: 1427234 - RNA, 19 nt, Artificial Sequence
  Description of Artificial Sequence: Synthetic oligonucleotide
uaggugucugaguccucug

SEQ ID NO: 1427235 - RNA, 19 nt, Artificial Sequence
  Description of Artificial Sequence: Synthetic oligonucleotide
cacggacuucacaaagauc

SEQ ID NO: 1427236 - RNA, 19 nt, Artificial Sequence
  Description of Artificial Sequence: Synthetic oligonucleotide
ccgugcagcgucaacuugg

SEQ ID NO: 1427237 - RNA, 19 nt, Artificial Sequence
  Description of Artificial Sequence: Synthetic oligonucleotide
accgugucuguucaaugua

SEQ ID NO: 1427238 - RNA, 19 nt, Artificial Sequence
  Description of Artificial Sequence: Synthetic oligonucleotide
ggacuucacaaagaucacc

SEQ ID NO: 1427239 - RNA, 19 nt, Artificial Sequence
  Description of Artificial Sequence: Synthetic oligonucleotide
gcuagaauucggccaggag

SEQ ID NO: 1427240 - RNA, 19 nt, Artificial Sequence
  Description of Artificial Sequence: Synthetic oligonucleotide
gccaggaguccccacgacg

SEQ ID NO: 1427241 - RNA, 19 nt, Artificial Sequence
  Description of Artificial Sequence: Synthetic oligonucleotide
cacgacgaugugugggcag

SEQ ID NO: 1427242 - RNA, 19 nt, Artificial Sequence
  Description of Artificial Sequence: Synthetic oligonucleotide
gcgguggauagcaauggcg

SEQ ID NO: 1427243 - RNA, 19 nt, Artificial Sequence
  Description of Artificial Sequence: Synthetic oligonucleotide
caaacagguugguggccac

SEQ ID NO: 1427244 - RNA, 19 nt, Artificial Sequence
  Description of Artificial Sequence: Synthetic oligonucleotide
cuuggugccaaaccggccu

SEQ ID NO: 1427245 - RNA, 19 nt, Artificial Sequence
  Description of Artificial Sequence: Synthetic oligonucleotide
agagaaggugagaaagcaa

SEQ ID NO: 1427246 - RNA, 19 nt, Artificial Sequence
  Description of Artificial Sequence: Synthetic oligonucleotide
aacuugcggcagacuggcc

SEQ ID NO: 1427247 - RNA, 19 nt, Artificial Sequence
  Description of Artificial Sequence: Synthetic oligonucleotide
gcuaagcacugcgagcgcg

SEQ ID NO: 1427248 - RNA, 19 nt, Artificial Sequence
  Description of Artificial Sequence: Synthetic oligonucleotide
accucgucgucuucauagu

SEQ ID NO: 1427249 - RNA, 19 nt, Artificial Sequence
  Description of Artificial Sequence: Synthetic oligonucleotide
ugcaacccgugcagcguca

SEQ ID NO: 1427250 - RNA, 19 nt, Artificial Sequence
  Description of Artificial Sequence: Synthetic oligonucleotide
ucuuagcaucauucucauc

SEQ ID NO: 1427251 - RNA, 19 nt, Artificial Sequence
  Description of Artificial Sequence: Synthetic oligonucleotide
ggccacaagaauccuccgc

SEQ ID NO: 1427252 - RNA, 19 nt, Artificial Sequence
  Description of Artificial Sequence: Synthetic oligonucleotide
ucuuucuuggcaggagcuu

SEQ ID NO: 1427253 - RNA, 19 nt, Artificial Sequence
  Description of Artificial Sequence: Synthetic oligonucleotide
ugauaccgagagagccucu

SEQ ID NO: 1427254 - RNA, 19 nt, Artificial Sequence
  Description of Artificial Sequence: Synthetic oligonucleotide
caugccgcgguggauagca

SEQ ID NO: 1427255 - RNA, 19 nt, Artificial Sequence
  Description of Artificial Sequence: Synthetic oligonucleotide
aggacaucgagaaggucaa

SEQ ID NO: 1427256 - RNA, 19 nt, Artificial Sequence
  Description of Artificial Sequence: Synthetic oligonucleotide
uccuccgcuggaaauccuu

SEQ ID NO: 1427257 - RNA, 19 nt, Artificial Sequence
  Description of Artificial Sequence: Synthetic oligonucleotide
acgucuuucuuggcaggag

SEQ ID NO: 1427258 - RNA, 19 nt, Artificial Sequence
  Description of Artificial Sequence: Synthetic oligonucleotide
guccugcacgucauugagg

SEQ ID NO: 1427259 - RNA, 19 nt, Artificial Sequence
  Description of Artificial Sequence: Synthetic oligonucleotide
gcagcgucaacuuggucuc

SEQ ID NO: 1427260 - RNA, 19 nt, Artificial Sequence
  Description of Artificial Sequence: Synthetic oligonucleotide
aggcucuuauuucgagcca

SEQ ID NO: 1427261 - RNA, 19 nt, Artificial Sequence
  Description of Artificial Sequence: Synthetic oligonucleotide
cauucggcauguacuuuga

SEQ ID NO: 1427262 - RNA, 19 nt, Artificial Sequence
  Description of Artificial Sequence: Synthetic oligonucleotide
cgugucuguucaauguagg

SEQ ID NO: 1427263 - RNA, 19 nt, Artificial Sequence
  Description of Artificial Sequence: Synthetic oligonucleotide
ucccgacagaagagcuaag

SEQ ID NO: 1427264 - RNA, 19 nt, Artificial Sequence
  Description of Artificial Sequence: Synthetic oligonucleotide
aucucaucggggagcucac

SEQ ID NO: 1427265 - RNA, 19 nt, Artificial Sequence
  Description of Artificial Sequence: Synthetic oligonucleotide
aagcacugcgagcgcguau

SEQ ID NO: 1427266 - RNA, 19 nt, Artificial Sequence
  Description of Artificial Sequence: Synthetic oligonucleotide
gugugacacaucaccagca

SEQ ID NO: 1427267 - RNA, 19 nt, Artificial Sequence
  Description of Artificial Sequence: Synthetic oligonucleotide
uucgagccagggcuagaau

SEQ ID NO: 1427268 - RNA, 19 nt, Artificial Sequence
  Description of Artificial Sequence: Synthetic oligonucleotide
cagggcgaugcaccgcugc

SEQ ID NO: 1427269 - RNA, 19 nt, Artificial Sequence
  Description of Artificial Sequence: Synthetic oligonucleotide
ccuucuugauagacagacc

SEQ ID NO: 1427270 - RNA, 19 nt, Artificial Sequence
  Description of Artificial Sequence: Synthetic oligonucleotide
ccgugucuguucaauguag

SEQ ID NO: 1427271 - RNA, 19 nt, Artificial Sequence
  Description of Artificial Sequence: Synthetic oligonucleotide
ccagggcuagaauucggcc

SEQ ID NO: 1427272 - RNA, 19 nt, Artificial Sequence
  Description of Artificial Sequence: Synthetic oligonucleotide
agggcgaugcaccgcugca

SEQ ID NO: 1427273 - RNA, 19 nt, Artificial Sequence
  Description of Artificial Sequence: Synthetic oligonucleotide
ccucgaccaaacagguugg

SEQ ID NO: 1427274 - RNA, 19 nt, Artificial Sequence
  Description of Artificial Sequence: Synthetic oligonucleotide
cucgaaagccggagcugug

SEQ ID NO: 1427275 - RNA, 19 nt, Artificial Sequence
  Description of Artificial Sequence: Synthetic oligonucleotide
ugcgagcgcguauggcggc

SEQ ID NO: 1427276 - RNA, 19 nt, Artificial Sequence
  Description of Artificial Sequence: Synthetic oligonucleotide
cugccaccuugacauucgg

SEQ ID NO: 1427277 - RNA, 19 nt, Artificial Sequence
  Description of Artificial Sequence: Synthetic oligonucleotide
gucucgaaagccggagcug

SEQ ID NO: 1427278 - RNA, 19 nt, Artificial Sequence
  Description of Artificial Sequence: Synthetic oligonucleotide
uccccaugccugacuuggc

SEQ ID NO: 1427279 - RNA, 19 nt, Artificial Sequence
  Description of Artificial Sequence: Synthetic oligonucleotide
caucugacacaaaugugau

SEQ ID NO: 1427280 - RNA, 19 nt, Artificial Sequence
  Description of Artificial Sequence: Synthetic oligonucleotide
cccacgacgaugugugggc

SEQ ID NO: 1427281 - RNA, 19 nt, Artificial Sequence
  Description of Artificial Sequence: Synthetic oligonucleotide
guuuaaugugcuugagguu

SEQ ID NO: 1427282 - RNA, 19 nt, Artificial Sequence
  Description of Artificial Sequence: Synthetic oligonucleotide
augccucgaccaaacaggu

SEQ ID NO: 1427283 - RNA, 19 nt, Artificial Sequence
  Description of Artificial Sequence: Synthetic oligonucleotide
cacugccaccuugacauuc

SEQ ID NO: 1427284 - RNA, 19 nt, Artificial Sequence
  Description of Artificial Sequence: Synthetic oligonucleotide
cccuuggugccaaaccggc

SEQ ID NO: 1427285 - RNA, 19 nt, Artificial Sequence
  Description of Artificial Sequence: Synthetic oligonucleotide
cugcaacccgugcagcguc

SEQ ID NO: 1427286 - RNA, 19 nt, Artificial Sequence
  Description of Artificial Sequence: Synthetic oligonucleotide
gccacaagaauccuccgcu

SEQ ID NO: 1427287 - RNA, 19 nt, Artificial Sequence
  Description of Artificial Sequence: Synthetic oligonucleotide
cucccuagugugacacauc

SEQ ID NO: 1427288 - RNA, 19 nt, Artificial Sequence
  Description of Artificial Sequence: Synthetic oligonucleotide
gugaguggucccagagaag

SEQ ID NO: 1427289 - RNA, 19 nt, Artificial Sequence
  Description of Artificial Sequence: Synthetic oligonucleotide
ugccauaauugggccggca

SEQ ID NO: 1427290 - RNA, 19 nt, Artificial Sequence
  Description of Artificial Sequence: Synthetic oligonucleotide
guccaugccucgaccaaac

SEQ ID NO: 1427291 - RNA, 19 nt, Artificial Sequence
  Description of Artificial Sequence: Synthetic oligonucleotide
cuuugggugagugguccca

SEQ ID NO: 1427292 - RNA, 19 nt, Artificial Sequence
  Description of Artificial Sequence: Synthetic oligonucleotide
auggcccggagcaacucug

SEQ ID NO: 1427293 - RNA, 19 nt, Artificial Sequence
  Description of Artificial Sequence: Synthetic oligonucleotide
agcgcguauggcggcggcg

SEQ ID NO: 1427294 - RNA, 19 nt, Artificial Sequence
  Description of Artificial Sequence: Synthetic oligonucleotide
cgucuuucuuggcaggagc

SEQ ID NO: 1427295 - RNA, 19 nt, Artificial Sequence
  Description of Artificial Sequence: Synthetic oligonucleotide
gggccggcaggggagaagg

SEQ ID NO: 1427296 - RNA, 19 nt, Artificial Sequence
  Description of Artificial Sequence: Synthetic oligonucleotide
guuucccgacagaagagcu

SEQ ID NO: 1427297 - RNA, 19 nt, Artificial Sequence
  Description of Artificial Sequence: Synthetic oligonucleotide
ggcaugccgcgguggauag

SEQ ID NO: 1427298 - RNA, 19 nt, Artificial Sequence
  Description of Artificial Sequence: Synthetic oligonucleotide
cacaucauucucugccaua

SEQ ID NO: 1427299 - RNA, 19 nt, Artificial Sequence
  Description of Artificial Sequence: Synthetic oligonucleotide
cgagccagggcuagaauuc

SEQ ID NO: 1427300 - RNA, 19 nt, Artificial Sequence
  Description of Artificial Sequence: Synthetic oligonucleotide
ggccacccggugcagguag

SEQ ID NO: 1427301 - RNA, 19 nt, Artificial Sequence
  Description of Artificial Sequence: Synthetic oligonucleotide
gcugucuccaccucgucgu

SEQ ID NO: 1427302 - RNA, 19 nt, Artificial Sequence
  Description of Artificial Sequence: Synthetic oligonucleotide
ccaugccugacuuggccug

SEQ ID NO: 1427303 - RNA, 19 nt, Artificial Sequence
  Description of Artificial Sequence: Synthetic oligonucleotide
caagaauccuccgcuggaa

SEQ ID NO: 1427304 - RNA, 19 nt, Artificial Sequence
  Description of Artificial Sequence: Synthetic oligonucleotide
auccccagaauggccugug

SEQ ID NO: 1427305 - RNA, 19 nt, Artificial Sequence
  Description of Artificial Sequence: Synthetic oligonucleotide
gcccuuggugccaaaccgg

SEQ ID NO: 1427306 - RNA, 19 nt, Artificial Sequence
  Description of Artificial Sequence: Synthetic oligonucleotide
uaagcacugcgagcgcgua

SEQ ID NO: 1427307 - RNA, 19 nt, Artificial Sequence
  Description of Artificial Sequence: Synthetic oligonucleotide
aguccacgauggcccggag

SEQ ID NO: 1427308 - RNA, 19 nt, Artificial Sequence
  Description of Artificial Sequence: Synthetic oligonucleotide
accgcugcacggacuucac

SEQ ID NO: 1427309 - RNA, 19 nt, Artificial Sequence
  Description of Artificial Sequence: Synthetic oligonucleotide
gagcgcguauggcggcggc

SEQ ID NO: 1427310 - RNA, 19 nt, Artificial Sequence
  Description of Artificial Sequence: Synthetic oligonucleotide
gaaagccggagcuguggau

SEQ ID NO: 1427311 - RNA, 19 nt, Artificial Sequence
  Description of Artificial Sequence: Synthetic oligonucleotide
gccagggcuagaauucggc

SEQ ID NO: 1427312 - RNA, 19 nt, Artificial Sequence
  Description of Artificial Sequence: Synthetic oligonucleotide
auuucgagccagggcuaga

SEQ ID NO: 1427313 - RNA, 19 nt, Artificial Sequence
  Description of Artificial Sequence: Synthetic oligonucleotide
ugccucgaccaaacagguu

SEQ ID NO: 1427314 - RNA, 19 nt, Artificial Sequence
  Description of Artificial Sequence: Synthetic oligonucleotide
agcgucaacuuggucucau

SEQ ID NO: 1427315 - RNA, 19 nt, Artificial Sequence
  Description of Artificial Sequence: Synthetic oligonucleotide
gcgaugcaccgcugcacgg

SEQ ID NO: 1427316 - RNA, 19 nt, Artificial Sequence
  Description of Artificial Sequence: Synthetic oligonucleotide
cuaagcacugcgagcgcgu

SEQ ID NO: 1427317 - RNA, 19 nt, Artificial Sequence
  Description of Artificial Sequence: Synthetic oligonucleotide
ggcgauguucacacgcuca

SEQ ID NO: 1427318 - RNA, 19 nt, Artificial Sequence
  Description of Artificial Sequence: Synthetic oligonucleotide
gacgcaugucgagcuguuc

SEQ ID NO: 1427319 - RNA, 19 nt, Artificial Sequence
  Description of Artificial Sequence: Synthetic oligonucleotide
aucggggagcucacugaug

SEQ ID NO: 1427320 - RNA, 19 nt, Artificial Sequence
  Description of Artificial Sequence: Synthetic oligonucleotide
gggugaguggucccagaga

SEQ ID NO: 1427321 - RNA, 19 nt, Artificial Sequence
  Description of Artificial Sequence: Synthetic oligonucleotide
acaucccgacgcaugucga

SEQ ID NO: 1427322 - RNA, 19 nt, Artificial Sequence
  Description of Artificial Sequence: Synthetic oligonucleotide
uucggccaggaguccccac

SEQ ID NO: 1427323 - RNA, 19 nt, Artificial Sequence
  Description of Artificial Sequence: Synthetic oligonucleotide
cacgucuuucuuggcagga

SEQ ID NO: 1427324 - RNA, 19 nt, Artificial Sequence
  Description of Artificial Sequence: Synthetic oligonucleotide
ccuccgcuggaaauccuug

SEQ ID NO: 1427325 - RNA, 19 nt, Artificial Sequence
  Description of Artificial Sequence: Synthetic oligonucleotide
ggagcaacucuggcuugag

SEQ ID NO: 1427326 - RNA, 19 nt, Artificial Sequence
  Description of Artificial Sequence: Synthetic oligonucleotide
gccgcgguggauagcaaug

SEQ ID NO: 1427327 - RNA, 19 nt, Artificial Sequence
  Description of Artificial Sequence: Synthetic oligonucleotide
caacccgugcagcgucaac

SEQ ID NO: 1427328 - RNA, 19 nt, Artificial Sequence
  Description of Artificial Sequence: Synthetic oligonucleotide
gcacugcgagcgcguaugg

SEQ ID NO: 1427329 - RNA, 19 nt, Artificial Sequence
  Description of Artificial Sequence: Synthetic oligonucleotide
gcgcguauggcggcggcgg

SEQ ID NO: 1427330 - RNA, 19 nt, Artificial Sequence
  Description of Artificial Sequence: Synthetic oligonucleotide
agccaacucccuaguguga

SEQ ID NO: 1427331 - RNA, 19 nt, Artificial Sequence
  Description of Artificial Sequence: Synthetic oligonucleotide
gaguccccacgacgaugug

SEQ ID NO: 1427332 - RNA, 19 nt, Artificial Sequence
  Description of Artificial Sequence: Synthetic oligonucleotide
ggaagucucgaaagccgga

SEQ ID NO: 1427333 - RNA, 19 nt, Artificial Sequence
  Description of Artificial Sequence: Synthetic oligonucleotide
caccgcugcacggacuuca

SEQ ID NO: 1427334 - RNA, 19 nt, Artificial Sequence
  Description of Artificial Sequence: Synthetic oligonucleotide
auucggccaggagucccca

SEQ ID NO: 1427335 - RNA, 19 nt, Artificial Sequence
  Description of Artificial Sequence: Synthetic oligonucleotide
ggagacguaggagcccuuc

SEQ ID NO: 1427336 - RNA, 19 nt, Artificial Sequence
  Description of Artificial Sequence: Synthetic oligonucleotide
cugccauaauugggccggc

SEQ ID NO: 1427337 - RNA, 19 nt, Artificial Sequence
  Description of Artificial Sequence: Synthetic oligonucleotide
caaagcgguccugcacguc

SEQ ID NO: 1427338 - RNA, 19 nt, Artificial Sequence
  Description of Artificial Sequence: Synthetic oligonucleotide
gcacggacuucacaaagau

SEQ ID NO: 1427339 - RNA, 19 nt, Artificial Sequence
  Description of Artificial Sequence: Synthetic oligonucleotide
ccgcgguggauagcaaugg

SEQ ID NO: 1427340 - RNA, 19 nt, Artificial Sequence
  Description of Artificial Sequence: Synthetic oligonucleotide
ggcccggagcaacucuggc

SEQ ID NO: 1427341 - RNA, 19 nt, Artificial Sequence
  Description of Artificial Sequence: Synthetic oligonucleotide
cacccggugcagguaggug

SEQ ID NO: 1427342 - RNA, 19 nt, Artificial Sequence
  Description of Artificial Sequence: Synthetic oligonucleotide
gcgguccugcacgucauug

SEQ ID NO: 1427343 - RNA, 19 nt, Artificial Sequence
  Description of Artificial Sequence: Synthetic oligonucleotide
ggaguccccacgacgaugu

SEQ ID NO: 1427344 - RNA, 19 nt, Artificial Sequence
  Description of Artificial Sequence: Synthetic oligonucleotide
ggcuagaauucggccagga

SEQ ID NO: 1427345 - RNA, 19 nt, Artificial Sequence
  Description of Artificial Sequence: Synthetic oligonucleotide
caucggggagcucacugau

SEQ ID NO: 1427346 - RNA, 19 nt, Artificial Sequence
  Description of Artificial Sequence: Synthetic oligonucleotide
ggucuuugggugagugguc

SEQ ID NO: 1427347 - RNA, 19 nt, Artificial Sequence
  Description of Artificial Sequence: Synthetic oligonucleotide
gcguauggcggcggcggcg

SEQ ID NO: 1427348 - RNA, 19 nt, Artificial Sequence
  Description of Artificial Sequence: Synthetic oligonucleotide
cccggugcagguagguguc

SEQ ID NO: 1427349 - RNA, 19 nt, Artificial Sequence
  Description of Artificial Sequence: Synthetic oligonucleotide
gaguggucccagagaaggu

SEQ ID NO: 1427350 - RNA, 19 nt, Artificial Sequence
  Description of Artificial Sequence: Synthetic oligonucleotide
cacauucguccaagauaaa

SEQ ID NO: 1427351 - RNA, 19 nt, Artificial Sequence
  Description of Artificial Sequence: Synthetic oligonucleotide
gugcagcgucaacuugguc

SEQ ID NO: 1427352 - RNA, 19 nt, Artificial Sequence
  Description of Artificial Sequence: Synthetic oligonucleotide
cgcucguauuccuugcuga

SEQ ID NO: 1427353 - RNA, 19 nt, Artificial Sequence
  Description of Artificial Sequence: Synthetic oligonucleotide
ccucuaccgugucuguuca

SEQ ID NO: 1427354 - RNA, 19 nt, Artificial Sequence
  Description of Artificial Sequence: Synthetic oligonucleotide
gggcuagaauucggccagg

SEQ ID NO: 1427355 - RNA, 19 nt, Artificial Sequence
  Description of Artificial Sequence: Synthetic oligonucleotide
cacugauguugaccucaaa

SEQ ID NO: 1427356 - RNA, 19 nt, Artificial Sequence
  Description of Artificial Sequence: Synthetic oligonucleotide
gcgucaacuuggucucauc

SEQ ID NO: 1427357 - RNA, 19 nt, Artificial Sequence
  Description of Artificial Sequence: Synthetic oligonucleotide
cgcgguggauagcaauggc

SEQ ID NO: 1427358 - RNA, 19 nt, Artificial Sequence
  Description of Artificial Sequence: Synthetic oligonucleotide
ugcggcagacuggccggau

SEQ ID NO: 1427359 - RNA, 19 nt, Artificial Sequence
  Description of Artificial Sequence: Synthetic oligonucleotide
gggcgaugcaccgcugcac

SEQ ID NO: 1427360 - RNA, 19 nt, Artificial Sequence
  Description of Artificial Sequence: Synthetic oligonucleotide
ggagcccuucacgucuuuc

SEQ ID NO: 1427361 - RNA, 19 nt, Artificial Sequence
  Description of Artificial Sequence: Synthetic oligonucleotide
gccagggcgaugcaccgcu

SEQ ID NO: 1427362 - RNA, 19 nt, Artificial Sequence
  Description of Artificial Sequence: Synthetic oligonucleotide
gcgagcgcguauggcggcg

SEQ ID NO: 1427363 - RNA, 19 nt, Artificial Sequence
  Description of Artificial Sequence: Synthetic oligonucleotide
aggagcccuucacgucuuu

SEQ ID NO: 1427364 - RNA, 19 nt, Artificial Sequence
  Description of Artificial Sequence: Synthetic oligonucleotide
augcaccgcugcacggacu

SEQ ID NO: 1427365 - RNA, 19 nt, Artificial Sequence
  Description of Artificial Sequence: Synthetic oligonucleotide
auccuccgcuggaaauccu

SEQ ID NO: 1427366 - RNA, 19 nt, Artificial Sequence
  Description of Artificial Sequence: Synthetic oligonucleotide
gcgggaaccugccuucacu

SEQ ID NO: 1427367 - RNA, 19 nt, Artificial Sequence
  Description of Artificial Sequence: Synthetic oligonucleotide
ccaacucccuagugugaca

SEQ ID NO: 1427368 - RNA, 19 nt, Artificial Sequence
  Description of Artificial Sequence: Synthetic oligonucleotide
uugggccggcaggggagaa

SEQ ID NO: 1427369 - RNA, 19 nt, Artificial Sequence
  Description of Artificial Sequence: Synthetic oligonucleotide
ccggagcaacucuggcuug

SEQ ID NO: 1427370 - RNA, 19 nt, Artificial Sequence
  Description of Artificial Sequence: Synthetic oligonucleotide
ggacaucccgacgcauguc

SEQ ID NO: 1427371 - RNA, 19 nt, Artificial Sequence
  Description of Artificial Sequence: Synthetic oligonucleotide
gcccggagcaacucuggcu

SEQ ID NO: 1427372 - RNA, 19 nt, Artificial Sequence
  Description of Artificial Sequence: Synthetic oligonucleotide
gcggcagacuggccggauc

SEQ ID NO: 1427373 - RNA, 19 nt, Artificial Sequence
  Description of Artificial Sequence: Synthetic oligonucleotide
cgaaagccggagcugugga

SEQ ID NO: 1427374 - RNA, 19 nt, Artificial Sequence
  Description of Artificial Sequence: Synthetic oligonucleotide
cccggagcaacucuggcuu

SEQ ID NO: 1427375 - RNA, 19 nt, Artificial Sequence
  Description of Artificial Sequence: Synthetic oligonucleotide
gguaggugucugaguccuc

SEQ ID NO: 1427376 - RNA, 19 nt, Artificial Sequence
  Description of Artificial Sequence: Synthetic oligonucleotide
ggccugugggaugcauuca

SEQ ID NO: 1427377 - RNA, 19 nt, Artificial Sequence
  Description of Artificial Sequence: Synthetic oligonucleotide
cucgaccaaacagguuggu

SEQ ID NO: 1427378 - RNA, 19 nt, Artificial Sequence
  Description of Artificial Sequence: Synthetic oligonucleotide
gcugcaacccgugcagcgu

SEQ ID NO: 1427379 - RNA, 19 nt, Artificial Sequence
  Description of Artificial Sequence: Synthetic oligonucleotide
ccaccuugacauucggcau

SEQ ID NO: 1427380 - RNA, 19 nt, Artificial Sequence
  Description of Artificial Sequence: Synthetic oligonucleotide
cagcgucaacuuggucuca

SEQ ID NO: 1427381 - RNA, 19 nt, Artificial Sequence
  Description of Artificial Sequence: Synthetic oligonucleotide
ggugccaaaccggccugcu

SEQ ID NO: 1427382 - RNA, 19 nt, Artificial Sequence
  Description of Artificial Sequence: Synthetic oligonucleotide
ccagggcgaugcaccgcug

SEQ ID NO: 1427383 - RNA, 19 nt, Artificial Sequence
  Description of Artificial Sequence: Synthetic oligonucleotide
ggacaucgagaaggucaaa

SEQ ID NO: 1427384 - RNA, 19 nt, Artificial Sequence
  Description of Artificial Sequence: Synthetic oligonucleotide
gcaugccgcgguggauagc

SEQ ID NO: 1427385 - RNA, 19 nt, Artificial Sequence
  Description of Artificial Sequence: Synthetic oligonucleotide
augccgcgguggauagcaa

SEQ ID NO: 1427386 - RNA, 19 nt, Artificial Sequence
  Description of Artificial Sequence: Synthetic oligonucleotide
cgagcgcguauggcggcgg

SEQ ID NO: 1427387 - RNA, 19 nt, Artificial Sequence
  Description of Artificial Sequence: Synthetic oligonucleotide
cgcguauggcggcggcggc

SEQ ID NO: 1427388 - RNA, 19 nt, Artificial Sequence
  Description of Artificial Sequence: Synthetic oligonucleotide
ccacgacgaugugugggca

SEQ ID NO: 1427389 - RNA, 19 nt, Artificial Sequence
  Description of Artificial Sequence: Synthetic oligonucleotide
gcaacccgugcagcgucaa

SEQ ID NO: 1427390 - RNA, 19 nt, Artificial Sequence
  Description of Artificial Sequence: Synthetic oligonucleotide
cgagagagccucuccuccu

SEQ ID NO: 1427391 - RNA, 19 nt, Artificial Sequence
  Description of Artificial Sequence: Synthetic oligonucleotide
ccauaggaucuugcaugaa

SEQ ID NO: 1427392 - RNA, 19 nt, Artificial Sequence
  Description of Artificial Sequence: Synthetic oligonucleotide
cggagcaacucuggcuuga

SEQ ID NO: 1427393 - RNA, 19 nt, Artificial Sequence
  Description of Artificial Sequence: Synthetic oligonucleotide
gcaccgcugcacggacuuc

SEQ ID NO: 1427394 - RNA, 19 nt, Artificial Sequence
  Description of Artificial Sequence: Synthetic oligonucleotide
gcggggacgcaggcgggaa

SEQ ID NO: 1427395 - RNA, 19 nt, Artificial Sequence
  Description of Artificial Sequence: Synthetic oligonucleotide
gggaggucuuugggugagu

SEQ ID NO: 1427396 - RNA, 19 nt, Artificial Sequence
  Description of Artificial Sequence: Synthetic oligonucleotide
ccaagcccuuggugccaaa

SEQ ID NO: 1427397 - RNA, 19 nt, Artificial Sequence
  Description of Artificial Sequence: Synthetic oligonucleotide
ccacccggugcagguaggu

SEQ ID NO: 1427398 - RNA, 19 nt, Artificial Sequence
  Description of Artificial Sequence: Synthetic oligonucleotide
cgagcuguucaagcaucuu

SEQ ID NO: 1427399 - RNA, 19 nt, Artificial Sequence
  Description of Artificial Sequence: Synthetic oligonucleotide
ccggugcagguaggugucu

SEQ ID NO: 1427400 - RNA, 19 nt, Artificial Sequence
  Description of Artificial Sequence: Synthetic oligonucleotide
cggggagcucacugauguu

SEQ ID NO: 1427401 - RNA, 19 nt, Artificial Sequence
  Description of Artificial Sequence: Synthetic oligonucleotide
cgacgaugugugggcaguu

SEQ ID NO: 1427402 - RNA, 19 nt, Artificial Sequence
  Description of Artificial Sequence: Synthetic oligonucleotide
acaauggagacacagacgc

SEQ ID NO: 1427403 - RNA, 19 nt, Artificial Sequence
  Description of Artificial Sequence: Synthetic oligonucleotide
aguagaugaacaucaaugc

SEQ ID NO: 1427404 - RNA, 19 nt, Artificial Sequence
  Description of Artificial Sequence: Synthetic oligonucleotide
uaguagaugaacaucaaug

SEQ ID NO: 1427405 - RNA, 19 nt, Artificial Sequence
  Description of Artificial Sequence: Synthetic oligonucleotide
acaaacaugguguacagug

SEQ ID NO: 1427406 - RNA, 19 nt, Artificial Sequence
  Description of Artificial Sequence: Synthetic oligonucleotide
uagaugaacaucaaugcca

SEQ ID NO: 1427407 - RNA, 19 nt, Artificial Sequence
  Description of Artificial Sequence: Synthetic oligonucleotide
aaccaggugacaaacaugg

SEQ ID NO: 1427408 - RNA, 19 nt, Artificial Sequence
  Description of Artificial Sequence: Synthetic oligonucleotide
acaaggguuacuucugucc

SEQ ID NO: 1427409 - RNA, 19 nt, Artificial Sequence
  Description of Artificial Sequence: Synthetic oligonucleotide
cagaucuucacccacacgg

SEQ ID NO: 1427410 - RNA, 19 nt, Artificial Sequence
  Description of Artificial Sequence: Synthetic oligonucleotide
uacagugugacgauggaug

SEQ ID NO: 1427411 - RNA, 19 nt, Artificial Sequence
  Description of Artificial Sequence: Synthetic oligonucleotide
aaugaacaggaucagcugu

SEQ ID NO: 1427412 - RNA, 19 nt, Artificial Sequence
  Description of Artificial Sequence: Synthetic oligonucleotide
cacaaugucccacagaccc

SEQ ID NO: 1427413 - RNA, 19 nt, Artificial Sequence
  Description of Artificial Sequence: Synthetic oligonucleotide
acgacgccaaaguagaacc

SEQ ID NO: 1427414 - RNA, 19 nt, Artificial Sequence
  Description of Artificial Sequence: Synthetic oligonucleotide
aggcuaaugaagaaggugc

SEQ ID NO: 1427415 - RNA, 19 nt, Artificial Sequence
  Description of Artificial Sequence: Synthetic oligonucleotide
guuacuucugucccaaggg

SEQ ID NO: 1427416 - RNA, 19 nt, Artificial Sequence
  Description of Artificial Sequence: Synthetic oligonucleotide
gaagaccuugcccucaugg

SEQ ID NO: 1427417 - RNA, 19 nt, Artificial Sequence
  Description of Artificial Sequence: Synthetic oligonucleotide
agcaauggacagcagauag

SEQ ID NO: 1427418 - RNA, 19 nt, Artificial Sequence
  Description of Artificial Sequence: Synthetic oligonucleotide
ucagcugaagucucugucg

SEQ ID NO: 1427419 - RNA, 19 nt, Artificial Sequence
  Description of Artificial Sequence: Synthetic oligonucleotide
uaaugaagaaggugcacag

SEQ ID NO: 1427420 - RNA, 19 nt, Artificial Sequence
  Description of Artificial Sequence: Synthetic oligonucleotide
ggugacaccauccugcucg

SEQ ID NO: 1427421 - RNA, 19 nt, Artificial Sequence
  Description of Artificial Sequence: Synthetic oligonucleotide
agugauacccacgaggauc

SEQ ID NO: 1427422 - RNA, 19 nt, Artificial Sequence
  Description of Artificial Sequence: Synthetic oligonucleotide
acagugugacgauggaugc

SEQ ID NO: 1427423 - RNA, 19 nt, Artificial Sequence
  Description of Artificial Sequence: Synthetic oligonucleotide
gagugugaagaagaaaagg

SEQ ID NO: 1427424 - RNA, 19 nt, Artificial Sequence
  Description of Artificial Sequence: Synthetic oligonucleotide
gaagaaaaggccugcguac

SEQ ID NO: 1427425 - RNA, 19 nt, Artificial Sequence
  Description of Artificial Sequence: Synthetic oligonucleotide
cacagugauacccacgagg

SEQ ID NO: 1427426 - RNA, 19 nt, Artificial Sequence
  Description of Artificial Sequence: Synthetic oligonucleotide
gaaggaauagcuguaggug

SEQ ID NO: 1427427 - RNA, 19 nt, Artificial Sequence
  Description of Artificial Sequence: Synthetic oligonucleotide
aacaaggguuacuucuguc

SEQ ID NO: 1427428 - RNA, 19 nt, Artificial Sequence
  Description of Artificial Sequence: Synthetic oligonucleotide
guagaugaacaucaaugcc

SEQ ID NO: 1427429 - RNA, 19 nt, Artificial Sequence
  Description of Artificial Sequence: Synthetic oligonucleotide
gaggaaggagcccacgacg

SEQ ID NO: 1427430 - RNA, 19 nt, Artificial Sequence
  Description of Artificial Sequence: Synthetic oligonucleotide
agaaggaauagcuguaggu

SEQ ID NO: 1427431 - RNA, 19 nt, Artificial Sequence
  Description of Artificial Sequence: Synthetic oligonucleotide
aacaauggagacacagacg

SEQ ID NO: 1427432 - RNA, 19 nt, Artificial Sequence
  Description of Artificial Sequence: Synthetic oligonucleotide
uuuuggucggggacguugg

SEQ ID NO: 1427433 - RNA, 19 nt, Artificial Sequence
  Description of Artificial Sequence: Synthetic oligonucleotide
ucuucacacacccagggua

SEQ ID NO: 1427434 - RNA, 19 nt, Artificial Sequence
  Description of Artificial Sequence: Synthetic oligonucleotide
auagcuguaggugacacca

SEQ ID NO: 1427435 - RNA, 19 nt, Artificial Sequence
  Description of Artificial Sequence: Synthetic oligonucleotide
gacgacaaggcccacgaug

SEQ ID NO: 1427436 - RNA, 19 nt, Artificial Sequence
  Description of Artificial Sequence: Synthetic oligonucleotide
acaugcgguagacagcgcg

SEQ ID NO: 1427437 - RNA, 19 nt, Artificial Sequence
  Description of Artificial Sequence: Synthetic oligonucleotide
ugacucuccacuccggggc

SEQ ID NO: 1427438 - RNA, 19 nt, Artificial Sequence
  Description of Artificial Sequence: Synthetic oligonucleotide
aaguagaaccagaucuugg

SEQ ID NO: 1427439 - RNA, 19 nt, Artificial Sequence
  Description of Artificial Sequence: Synthetic oligonucleotide
uccguguaguagaugaaca

SEQ ID NO: 1427440 - RNA, 19 nt, Artificial Sequence
  Description of Artificial Sequence: Synthetic oligonucleotide
ucuucacccacacggaggu

SEQ ID NO: 1427441 - RNA, 19 nt, Artificial Sequence
  Description of Artificial Sequence: Synthetic oligonucleotide
guuggauagggccaaccag

SEQ ID NO: 1427442 - RNA, 19 nt, Artificial Sequence
  Description of Artificial Sequence: Synthetic oligonucleotide
uuuuaguaggcaggugagg

SEQ ID NO: 1427443 - RNA, 19 nt, Artificial Sequence
  Description of Artificial Sequence: Synthetic oligonucleotide
aacccauucuggauggccg

SEQ ID NO: 1427444 - RNA, 19 nt, Artificial Sequence
  Description of Artificial Sequence: Synthetic oligonucleotide
caaggguuacuucuguccc

SEQ ID NO: 1427445 - RNA, 19 nt, Artificial Sequence
  Description of Artificial Sequence: Synthetic oligonucleotide
gaagaagaaaaggccugcg

SEQ ID NO: 1427446 - RNA, 19 nt, Artificial Sequence
  Description of Artificial Sequence: Synthetic oligonucleotide
agggauguagaaggcaccc

SEQ ID NO: 1427447 - RNA, 19 nt, Artificial Sequence
  Description of Artificial Sequence: Synthetic oligonucleotide
gagaacaaggguuacuucu

SEQ ID NO: 1427448 - RNA, 19 nt, Artificial Sequence
  Description of Artificial Sequence: Synthetic oligonucleotide
ugucaucaugacaugcaga

SEQ ID NO: 1427449 - RNA, 19 nt, Artificial Sequence
  Description of Artificial Sequence: Synthetic oligonucleotide
gguuacuucugucccaagg

SEQ ID NO: 1427450 - RNA, 19 nt, Artificial Sequence
  Description of Artificial Sequence: Synthetic oligonucleotide
ucuggauggccgcucgcgg

SEQ ID NO: 1427451 - RNA, 19 nt, Artificial Sequence
  Description of Artificial Sequence: Synthetic oligonucleotide
guagacagcgcggaaaccc

SEQ ID NO: 1427452 - RNA, 19 nt, Artificial Sequence
  Description of Artificial Sequence: Synthetic oligonucleotide
uucacccacacggaggucc

SEQ ID NO: 1427453 - RNA, 19 nt, Artificial Sequence
  Description of Artificial Sequence: Synthetic oligonucleotide
uggucagaggaucgcaggc

SEQ ID NO: 1427454 - RNA, 19 nt, Artificial Sequence
  Description of Artificial Sequence: Synthetic oligonucleotide
cacgugcugaucaucuucc

SEQ ID NO: 1427455 - RNA, 19 nt, Artificial Sequence
  Description of Artificial Sequence: Synthetic oligonucleotide
agagcaacagccccgccca

SEQ ID NO: 1427456 - RNA, 19 nt, Artificial Sequence
  Description of Artificial Sequence: Synthetic oligonucleotide
cacacggagguccacgugc

SEQ ID NO: 1427457 - RNA, 19 nt, Artificial Sequence
  Description of Artificial Sequence: Synthetic oligonucleotide
aggaaggagcccacgacgc

SEQ ID NO: 1427458 - RNA, 19 nt, Artificial Sequence
  Description of Artificial Sequence: Synthetic oligonucleotide
gaaggugcacaggaggaag

SEQ ID NO: 1427459 - RNA, 19 nt, Artificial Sequence
  Description of Artificial Sequence: Synthetic oligonucleotide
aaggccgcgguggcgaagc

SEQ ID NO: 1427460 - RNA, 19 nt, Artificial Sequence
  Description of Artificial Sequence: Synthetic oligonucleotide
caugacaugcagagaggcc

SEQ ID NO: 1427461 - RNA, 19 nt, Artificial Sequence
  Description of Artificial Sequence: Synthetic oligonucleotide
gucgugucuucacacaccc

SEQ ID NO: 1427462 - RNA, 19 nt, Artificial Sequence
  Description of Artificial Sequence: Synthetic oligonucleotide
gacgccaaaguagaaccag

SEQ ID NO: 1427463 - RNA, 19 nt, Artificial Sequence
  Description of Artificial Sequence: Synthetic oligonucleotide
cuaaugaagaaggugcaca

SEQ ID NO: 1427464 - RNA, 19 nt, Artificial Sequence
  Description of Artificial Sequence: Synthetic oligonucleotide
agugugacgauggaugccu

SEQ ID NO: 1427465 - RNA, 19 nt, Artificial Sequence
  Description of Artificial Sequence: Synthetic oligonucleotide
aaggguuacuucuguccca

SEQ ID NO: 1427466 - RNA, 19 nt, Artificial Sequence
  Description of Artificial Sequence: Synthetic oligonucleotide
gauacccacgaggaucagg

SEQ ID NO: 1427467 - RNA, 19 nt, Artificial Sequence
  Description of Artificial Sequence: Synthetic oligonucleotide
aggaucagcuguaugagga

SEQ ID NO: 1427468 - RNA, 19 nt, Artificial Sequence
  Description of Artificial Sequence: Synthetic oligonucleotide
ucggggacguuggauaggg

SEQ ID NO: 1427469 - RNA, 19 nt, Artificial Sequence
  Description of Artificial Sequence: Synthetic oligonucleotide
uuaguaggcaggugagggu

SEQ ID NO: 1427470 - RNA, 19 nt, Artificial Sequence
  Description of Artificial Sequence: Synthetic oligonucleotide
aggcccacgaugcucgggg

SEQ ID NO: 1427471 - RNA, 19 nt, Artificial Sequence
  Description of Artificial Sequence: Synthetic oligonucleotide
guggucagaggaucgcagg

SEQ ID NO: 1427472 - RNA, 19 nt, Artificial Sequence
  Description of Artificial Sequence: Synthetic oligonucleotide
ucccacagacccuggaggc

SEQ ID NO: 1427473 - RNA, 19 nt, Artificial Sequence
  Description of Artificial Sequence: Synthetic oligonucleotide
gaggaucgcaggcuaauga

SEQ ID NO: 1427474 - RNA, 19 nt, Artificial Sequence
  Description of Artificial Sequence: Synthetic oligonucleotide
gguggcgaagcacaugcgg

SEQ ID NO: 1427475 - RNA, 19 nt, Artificial Sequence
  Description of Artificial Sequence: Synthetic oligonucleotide
acagaucuucacccacacg

SEQ ID NO: 1427476 - RNA, 19 nt, Artificial Sequence
  Description of Artificial Sequence: Synthetic oligonucleotide
gaucgcaggcuaaugaaga

SEQ ID NO: 1427477 - RNA, 19 nt, Artificial Sequence
  Description of Artificial Sequence: Synthetic oligonucleotide
auacccacgaggaucagga

SEQ ID NO: 1427478 - RNA, 19 nt, Artificial Sequence
  Description of Artificial Sequence: Synthetic oligonucleotide
uggauagggccaaccaggu

SEQ ID NO: 1427479 - RNA, 19 nt, Artificial Sequence
  Description of Artificial Sequence: Synthetic oligonucleotide
caggaucagcuguaugagg

SEQ ID NO: 1427480 - RNA, 19 nt, Artificial Sequence
  Description of Artificial Sequence: Synthetic oligonucleotide
ugugacgauggaugccugc

SEQ ID NO: 1427481 - RNA, 19 nt, Artificial Sequence
  Description of Artificial Sequence: Synthetic oligonucleotide
agaacaaggguuacuucug

SEQ ID NO: 1427482 - RNA, 19 nt, Artificial Sequence
  Description of Artificial Sequence: Synthetic oligonucleotide
ucgcaggcuaaugaagaag

SEQ ID NO: 1427483 - RNA, 19 nt, Artificial Sequence
  Description of Artificial Sequence: Synthetic oligonucleotide
ugagaacaaggguuacuuc

SEQ ID NO: 1427484 - RNA, 19 nt, Artificial Sequence
  Description of Artificial Sequence: Synthetic oligonucleotide
caggcuaaugaagaaggug

SEQ ID NO: 1427485 - RNA, 19 nt, Artificial Sequence
  Description of Artificial Sequence: Synthetic oligonucleotide
auucuggauggccgcucgc

SEQ ID NO: 1427486 - RNA, 19 nt, Artificial Sequence
  Description of Artificial Sequence: Synthetic oligonucleotide
aucuucacccacacggagg

SEQ ID NO: 1427487 - RNA, 19 nt, Artificial Sequence
  Description of Artificial Sequence: Synthetic oligonucleotide
acgcccaagaagagaaagc

SEQ ID NO: 1427488 - RNA, 19 nt, Artificial Sequence
  Description of Artificial Sequence: Synthetic oligonucleotide
agucccaaggcaccaggug

SEQ ID NO: 1427489 - RNA, 19 nt, Artificial Sequence
  Description of Artificial Sequence: Synthetic oligonucleotide
caaccaggugacaaacaug

SEQ ID NO: 1427490 - RNA, 19 nt, Artificial Sequence
  Description of Artificial Sequence: Synthetic oligonucleotide
caggugacaaacauggugu

SEQ ID NO: 1427491 - RNA, 19 nt, Artificial Sequence
  Description of Artificial Sequence: Synthetic oligonucleotide
guagaaccagaucuuggga

SEQ ID NO: 1427492 - RNA, 19 nt, Artificial Sequence
  Description of Artificial Sequence: Synthetic oligonucleotide
gcacaugcgguagacagcg

SEQ ID NO: 1427493 - RNA, 19 nt, Artificial Sequence
  Description of Artificial Sequence: Synthetic oligonucleotide
cagauagaagaggagugug

SEQ ID NO: 1427494 - RNA, 19 nt, Artificial Sequence
  Description of Artificial Sequence: Synthetic oligonucleotide
aggaucgcaggcuaaugaa

SEQ ID NO: 1427495 - RNA, 19 nt, Artificial Sequence
  Description of Artificial Sequence: Synthetic oligonucleotide
caucagggauguagaaggc

SEQ ID NO: 1427496 - RNA, 19 nt, Artificial Sequence
  Description of Artificial Sequence: Synthetic oligonucleotide
ggggacguuggauagggcc

SEQ ID NO: 1427497 - RNA, 19 nt, Artificial Sequence
  Description of Artificial Sequence: Synthetic oligonucleotide
uccgggucucaccagggcu

SEQ ID NO: 1427498 - RNA, 19 nt, Artificial Sequence
  Description of Artificial Sequence: Synthetic oligonucleotide
cucagcugaagucucuguc

SEQ ID NO: 1427499 - RNA, 19 nt, Artificial Sequence
  Description of Artificial Sequence: Synthetic oligonucleotide
cucguugucauaggcucgg

SEQ ID NO: 1427500 - RNA, 19 nt, Artificial Sequence
  Description of Artificial Sequence: Synthetic oligonucleotide
cuggaggcacugagaaugg

SEQ ID NO: 1427501 - RNA, 19 nt, Artificial Sequence
  Description of Artificial Sequence: Synthetic oligonucleotide
gugggcaaagucaaugaac

SEQ ID NO: 1427502 - RNA, 19 nt, Artificial Sequence
  Description of Artificial Sequence: Synthetic oligonucleotide
cuccacgggacacuccucc

SEQ ID NO: 1427503 - RNA, 19 nt, Artificial Sequence
  Description of Artificial Sequence: Synthetic oligonucleotide
cagggauguagaaggcacc

SEQ ID NO: 1427504 - RNA, 19 nt, Artificial Sequence
  Description of Artificial Sequence: Synthetic oligonucleotide
gcggacacagaucaugacc

SEQ ID NO: 1427505 - RNA, 19 nt, Artificial Sequence
  Description of Artificial Sequence: Synthetic oligonucleotide
agucaaugaacaggaucag

SEQ ID NO: 1427506 - RNA, 19 nt, Artificial Sequence
  Description of Artificial Sequence: Synthetic oligonucleotide
acguuggauagggccaacc

SEQ ID NO: 1427507 - RNA, 19 nt, Artificial Sequence
  Description of Artificial Sequence: Synthetic oligonucleotide
agauagaagaggaguguga

SEQ ID NO: 1427508 - RNA, 19 nt, Artificial Sequence
  Description of Artificial Sequence: Synthetic oligonucleotide
ccaggugacaaacauggug

SEQ ID NO: 1427509 - RNA, 19 nt, Artificial Sequence
  Description of Artificial Sequence: Synthetic oligonucleotide
ggagucacacuccucggcc

SEQ ID NO: 1427510 - RNA, 19 nt, Artificial Sequence
  Description of Artificial Sequence: Synthetic oligonucleotide
ucaaugccacagcagcaau

SEQ ID NO: 1427511 - RNA, 19 nt, Artificial Sequence
  Description of Artificial Sequence: Synthetic oligonucleotide
uccacgggacacuccuccg

SEQ ID NO: 1427512 - RNA, 19 nt, Artificial Sequence
  Description of Artificial Sequence: Synthetic oligonucleotide
caggaccacggguugcugg

SEQ ID NO: 1427513 - RNA, 19 nt, Artificial Sequence
  Description of Artificial Sequence: Synthetic oligonucleotide
augcucggggcaucccacc

SEQ ID NO: 1427514 - RNA, 19 nt, Artificial Sequence
  Description of Artificial Sequence: Synthetic oligonucleotide
cuggauggccgcucgcggg

SEQ ID NO: 1427515 - RNA, 19 nt, Artificial Sequence
  Description of Artificial Sequence: Synthetic oligonucleotide
ugcguaccaggcuggggag

SEQ ID NO: 1427516 - RNA, 19 nt, Artificial Sequence
  Description of Artificial Sequence: Synthetic oligonucleotide
uugcccucauggcaggcac

SEQ ID NO: 1427517 - RNA, 19 nt, Artificial Sequence
  Description of Artificial Sequence: Synthetic oligonucleotide
aggugcacaggaggaagac

SEQ ID NO: 1427518 - RNA, 19 nt, Artificial Sequence
  Description of Artificial Sequence: Synthetic oligonucleotide
cuugagcacaaugucccac

SEQ ID NO: 1427519 - RNA, 19 nt, Artificial Sequence
  Description of Artificial Sequence: Synthetic oligonucleotide
cuuccgggucucaccaggg

SEQ ID NO: 1427520 - RNA, 19 nt, Artificial Sequence
  Description of Artificial Sequence: Synthetic oligonucleotide
cugggucgugucuucacac

SEQ ID NO: 1427521 - RNA, 19 nt, Artificial Sequence
  Description of Artificial Sequence: Synthetic oligonucleotide
aucaaugccacagcagcaa

SEQ ID NO: 1427522 - RNA, 19 nt, Artificial Sequence
  Description of Artificial Sequence: Synthetic oligonucleotide
ucucaccagggcuguacca

SEQ ID NO: 1427523 - RNA, 19 nt, Artificial Sequence
  Description of Artificial Sequence: Synthetic oligonucleotide
cuccguguaguagaugaac

SEQ ID NO: 1427524 - RNA, 19 nt, Artificial Sequence
  Description of Artificial Sequence: Synthetic oligonucleotide
uggucggggacguuggaua

SEQ ID NO: 1427525 - RNA, 19 nt, Artificial Sequence
  Description of Artificial Sequence: Synthetic oligonucleotide
agaauggaggggccugacu

SEQ ID NO: 1427526 - RNA, 19 nt, Artificial Sequence
  Description of Artificial Sequence: Synthetic oligonucleotide
ugggucgugucuucacaca

SEQ ID NO: 1427527 - RNA, 19 nt, Artificial Sequence
  Description of Artificial Sequence: Synthetic oligonucleotide
cacuccggggcucagcaug

SEQ ID NO: 1427528 - RNA, 19 nt, Artificial Sequence
  Description of Artificial Sequence: Synthetic oligonucleotide
agcaacagccccgcccagc

SEQ ID NO: 1427529 - RNA, 19 nt, Artificial Sequence
  Description of Artificial Sequence: Synthetic oligonucleotide
uucaccugccgguggucag

SEQ ID NO: 1427530 - RNA, 19 nt, Artificial Sequence
  Description of Artificial Sequence: Synthetic oligonucleotide
gcggaaacccagcagggag

SEQ ID NO: 1427531 - RNA, 19 nt, Artificial Sequence
  Description of Artificial Sequence: Synthetic oligonucleotide
uccugcucguugucauagg

SEQ ID NO: 1427532 - RNA, 19 nt, Artificial Sequence
  Description of Artificial Sequence: Synthetic oligonucleotide
cacgacgccaaaguagaac

SEQ ID NO: 1427533 - RNA, 19 nt, Artificial Sequence
  Description of Artificial Sequence: Synthetic oligonucleotide
agcacgcccaagaagagaa

SEQ ID NO: 1427534 - RNA, 19 nt, Artificial Sequence
  Description of Artificial Sequence: Synthetic oligonucleotide
caucaaugccacagcagca

SEQ ID NO: 1427535 - RNA, 19 nt, Artificial Sequence
  Description of Artificial Sequence: Synthetic oligonucleotide
gugauacccacgaggauca

SEQ ID NO: 1427536 - RNA, 19 nt, Artificial Sequence
  Description of Artificial Sequence: Synthetic oligonucleotide
acagacgcagaaggugagg

SEQ ID NO: 1427537 - RNA, 19 nt, Artificial Sequence
  Description of Artificial Sequence: Synthetic oligonucleotide
acagcgcggaaacccagca

SEQ ID NO: 1427538 - RNA, 19 nt, Artificial Sequence
  Description of Artificial Sequence: Synthetic oligonucleotide
cuugggaaaggagccauca

SEQ ID NO: 1427539 - RNA, 19 nt, Artificial Sequence
  Description of Artificial Sequence: Synthetic oligonucleotide
gcgguggcgaagcacaugc

SEQ ID NO: 1427540 - RNA, 19 nt, Artificial Sequence
  Description of Artificial Sequence: Synthetic oligonucleotide
gaugaagaccuugcccuca

SEQ ID NO: 1427541 - RNA, 19 nt, Artificial Sequence
  Description of Artificial Sequence: Synthetic oligonucleotide
aggggccugacucgggcag

SEQ ID NO: 1427542 - RNA, 19 nt, Artificial Sequence
  Description of Artificial Sequence: Synthetic oligonucleotide
acuugagcacaauguccca

SEQ ID NO: 1427543 - RNA, 19 nt, Artificial Sequence
  Description of Artificial Sequence: Synthetic oligonucleotide
cugcguaccaggcugggga

SEQ ID NO: 1427544 - RNA, 19 nt, Artificial Sequence
  Description of Artificial Sequence: Synthetic oligonucleotide
uuccgggucucaccagggc

SEQ ID NO: 1427545 - RNA, 19 nt, Artificial Sequence
  Description of Artificial Sequence: Synthetic oligonucleotide
cagaccugaguugggcugg

SEQ ID NO: 1427546 - RNA, 19 nt, Artificial Sequence
  Description of Artificial Sequence: Synthetic oligonucleotide
caucuuccgggucucacca

SEQ ID NO: 1427547 - RNA, 19 nt, Artificial Sequence
  Description of Artificial Sequence: Synthetic oligonucleotide
ggcacccacagugauaccc

SEQ ID NO: 1427548 - RNA, 19 nt, Artificial Sequence
  Description of Artificial Sequence: Synthetic oligonucleotide
uggcacagaucuucaccca

SEQ ID NO: 1427549 - RNA, 19 nt, Artificial Sequence
  Description of Artificial Sequence: Synthetic oligonucleotide
ugcggacacagaucaugac

SEQ ID NO: 1427550 - RNA, 19 nt, Artificial Sequence
  Description of Artificial Sequence: Synthetic oligonucleotide
uuuggucggggacguugga

SEQ ID NO: 1427551 - RNA, 19 nt, Artificial Sequence
  Description of Artificial Sequence: Synthetic oligonucleotide
acugagaauggaggggccu

SEQ ID NO: 1427552 - RNA, 19 nt, Artificial Sequence
  Description of Artificial Sequence: Synthetic oligonucleotide
ugaacaggaucagcuguau

SEQ ID NO: 1427553 - RNA, 19 nt, Artificial Sequence
  Description of Artificial Sequence: Synthetic oligonucleotide
ccuggaagagggugggugg

SEQ ID NO: 1427554 - RNA, 19 nt, Artificial Sequence
  Description of Artificial Sequence: Synthetic oligonucleotide
gucucaccagggcuguacc

SEQ ID NO: 1427555 - RNA, 19 nt, Artificial Sequence
  Description of Artificial Sequence: Synthetic oligonucleotide
acccaggguagcuuguaaa

SEQ ID NO: 1427556 - RNA, 19 nt, Artificial Sequence
  Description of Artificial Sequence: Synthetic oligonucleotide
caggagugggcaaagucaa

SEQ ID NO: 1427557 - RNA, 19 nt, Artificial Sequence
  Description of Artificial Sequence: Synthetic oligonucleotide
caggguagcuuguaaagcu

SEQ ID NO: 1427558 - RNA, 19 nt, Artificial Sequence
  Description of Artificial Sequence: Synthetic oligonucleotide
ggaucgcaggcuaaugaag

SEQ ID NO: 1427559 - RNA, 19 nt, Artificial Sequence
  Description of Artificial Sequence: Synthetic oligonucleotide
cccaggguagcuuguaaag

SEQ ID NO: 1427560 - RNA, 19 nt, Artificial Sequence
  Description of Artificial Sequence: Synthetic oligonucleotide
aggguagcuuguaaagcug

SEQ ID NO: 1427561 - RNA, 19 nt, Artificial Sequence
  Description of Artificial Sequence: Synthetic oligonucleotide
auuccaggagugggcaaag

SEQ ID NO: 1427562 - RNA, 19 nt, Artificial Sequence
  Description of Artificial Sequence: Synthetic oligonucleotide
uggcgaagcacaugcggua

SEQ ID NO: 1427563 - RNA, 19 nt, Artificial Sequence
  Description of Artificial Sequence: Synthetic oligonucleotide
uccggggcucagcaugaug

SEQ ID NO: 1427564 - RNA, 19 nt, Artificial Sequence
  Description of Artificial Sequence: Synthetic oligonucleotide
cugagaauggaggggccug

SEQ ID NO: 1427565 - RNA, 19 nt, Artificial Sequence
  Description of Artificial Sequence: Synthetic oligonucleotide
gaugcucggggcaucccac

SEQ ID NO: 1427566 - RNA, 19 nt, Artificial Sequence
  Description of Artificial Sequence: Synthetic oligonucleotide
cucggccuugcacagccac

SEQ ID NO: 1427567 - RNA, 19 nt, Artificial Sequence
  Description of Artificial Sequence: Synthetic oligonucleotide
accuugcccucauggcagg

SEQ ID NO: 1427568 - RNA, 19 nt, Artificial Sequence
  Description of Artificial Sequence: Synthetic oligonucleotide
agaggaucgcaggcuaaug

SEQ ID NO: 1427569 - RNA, 19 nt, Artificial Sequence
  Description of Artificial Sequence: Synthetic oligonucleotide
cccacugacggccaccugc

SEQ ID NO: 1427570 - RNA, 19 nt, Artificial Sequence
  Description of Artificial Sequence: Synthetic oligonucleotide
agaucuucacccacacgga

SEQ ID NO: 1427571 - RNA, 19 nt, Artificial Sequence
  Description of Artificial Sequence: Synthetic oligonucleotide
cugcggacacagaucauga

SEQ ID NO: 1427572 - RNA, 19 nt, Artificial Sequence
  Description of Artificial Sequence: Synthetic oligonucleotide
ugauuccaggagugggcaa

SEQ ID NO: 1427573 - RNA, 19 nt, Artificial Sequence
  Description of Artificial Sequence: Synthetic oligonucleotide
gcuguaggugacaccaucc

SEQ ID NO: 1427574 - RNA, 19 nt, Artificial Sequence
  Description of Artificial Sequence: Synthetic oligonucleotide
aggugacaccauccugcuc

SEQ ID NO: 1427575 - RNA, 19 nt, Artificial Sequence
  Description of Artificial Sequence: Synthetic oligonucleotide
cugcagcagaccugaguug

SEQ ID NO: 1427576 - RNA, 19 nt, Artificial Sequence
  Description of Artificial Sequence: Synthetic oligonucleotide
augaagaccuugcccucau

SEQ ID NO: 1427577 - RNA, 19 nt, Artificial Sequence
  Description of Artificial Sequence: Synthetic oligonucleotide
ggucggggacguuggauag

SEQ ID NO: 1427578 - RNA, 19 nt, Artificial Sequence
  Description of Artificial Sequence: Synthetic oligonucleotide
ucacacacccaggguagcu

SEQ ID NO: 1427579 - RNA, 19 nt, Artificial Sequence
  Description of Artificial Sequence: Synthetic oligonucleotide
gacagcgcggaaacccagc

SEQ ID NO: 1427580 - RNA, 19 nt, Artificial Sequence
  Description of Artificial Sequence: Synthetic oligonucleotide
caucccaccacauggugcu

SEQ ID NO: 1427581 - RNA, 19 nt, Artificial Sequence
  Description of Artificial Sequence: Synthetic oligonucleotide
gguagagcaacagccccgc

SEQ ID NO: 1427582 - RNA, 19 nt, Artificial Sequence
  Description of Artificial Sequence: Synthetic oligonucleotide
gcugcggacacagaucaug

SEQ ID NO: 1427583 - RNA, 19 nt, Artificial Sequence
  Description of Artificial Sequence: Synthetic oligonucleotide
ccaagggugagugugcaug

SEQ ID NO: 1427584 - RNA, 19 nt, Artificial Sequence
  Description of Artificial Sequence: Synthetic oligonucleotide
aaaaggccgcgguggcgaa

SEQ ID NO: 1427585 - RNA, 19 nt, Artificial Sequence
  Description of Artificial Sequence: Synthetic oligonucleotide
aucuuccgggucucaccag

SEQ ID NO: 1427586 - RNA, 19 nt, Artificial Sequence
  Description of Artificial Sequence: Synthetic oligonucleotide
cacagucuccacgggacac

SEQ ID NO: 1427587 - RNA, 19 nt, Artificial Sequence
  Description of Artificial Sequence: Synthetic oligonucleotide
ugcccucauggcaggcacc

SEQ ID NO: 1427588 - RNA, 19 nt, Artificial Sequence
  Description of Artificial Sequence: Synthetic oligonucleotide
ccugcucguugucauaggc

SEQ ID NO: 1427589 - RNA, 19 nt, Artificial Sequence
  Description of Artificial Sequence: Synthetic oligonucleotide
cagugugacgauggaugcc

SEQ ID NO: 1427590 - RNA, 19 nt, Artificial Sequence
  Description of Artificial Sequence: Synthetic oligonucleotide
gccacucucuccuuccaug

SEQ ID NO: 1427591 - RNA, 19 nt, Artificial Sequence
  Description of Artificial Sequence: Synthetic oligonucleotide
gggucgugucuucacacac

SEQ ID NO: 1427592 - RNA, 19 nt, Artificial Sequence
  Description of Artificial Sequence: Synthetic oligonucleotide
aggguuacuucugucccaa

SEQ ID NO: 1427593 - RNA, 19 nt, Artificial Sequence
  Description of Artificial Sequence: Synthetic oligonucleotide
augaacaggaucagcugua

SEQ ID NO: 1427594 - RNA, 19 nt, Artificial Sequence
  Description of Artificial Sequence: Synthetic oligonucleotide
gauggccgcucgcgggucc

SEQ ID NO: 1427595 - RNA, 19 nt, Artificial Sequence
  Description of Artificial Sequence: Synthetic oligonucleotide
gagcccacgacgccaaagu

SEQ ID NO: 1427596 - RNA, 19 nt, Artificial Sequence
  Description of Artificial Sequence: Synthetic oligonucleotide
cacgggacacuccuccguc

SEQ ID NO: 1427597 - RNA, 19 nt, Artificial Sequence
  Description of Artificial Sequence: Synthetic oligonucleotide
ccacagguagagcaacagc

SEQ ID NO: 1427598 - RNA, 19 nt, Artificial Sequence
  Description of Artificial Sequence: Synthetic oligonucleotide
gcuaaugaagaaggugcac

SEQ ID NO: 1427599 - RNA, 19 nt, Artificial Sequence
  Description of Artificial Sequence: Synthetic oligonucleotide
caauggagacacagacgca

SEQ ID NO: 1427600 - RNA, 19 nt, Artificial Sequence
  Description of Artificial Sequence: Synthetic oligonucleotide
gggcauucuggaccuuggg

SEQ ID NO: 1427601 - RNA, 19 nt, Artificial Sequence
  Description of Artificial Sequence: Synthetic oligonucleotide
ccaggguagcuuguaaagc

SEQ ID NO: 1427602 - RNA, 19 nt, Artificial Sequence
  Description of Artificial Sequence: Synthetic oligonucleotide
uuggucggggacguuggau

SEQ ID NO: 1427603 - RNA, 19 nt, Artificial Sequence
  Description of Artificial Sequence: Synthetic oligonucleotide
gagaauggaggggccugac

SEQ ID NO: 1427604 - RNA, 19 nt, Artificial Sequence
  Description of Artificial Sequence: Synthetic oligonucleotide
acagucuccacgggacacu

SEQ ID NO: 1427605 - RNA, 19 nt, Artificial Sequence
  Description of Artificial Sequence: Synthetic oligonucleotide
ggaaggagcccacgacgcc

SEQ ID NO: 1427606 - RNA, 19 nt, Artificial Sequence
  Description of Artificial Sequence: Synthetic oligonucleotide
ggggacccugagaacaagg

SEQ ID NO: 1427607 - RNA, 19 nt, Artificial Sequence
  Description of Artificial Sequence: Synthetic oligonucleotide
gcccacgacgccaaaguag

SEQ ID NO: 1427608 - RNA, 19 nt, Artificial Sequence
  Description of Artificial Sequence: Synthetic oligonucleotide
cggacacagaucaugacca

SEQ ID NO: 1427609 - RNA, 19 nt, Artificial Sequence
  Description of Artificial Sequence: Synthetic oligonucleotide
ggcaccaggcuccguguag

SEQ ID NO: 1427610 - RNA, 19 nt, Artificial Sequence
  Description of Artificial Sequence: Synthetic oligonucleotide
acgggacacuccuccgucu

SEQ ID NO: 1427611 - RNA, 19 nt, Artificial Sequence
  Description of Artificial Sequence: Synthetic oligonucleotide
ucaccugccgguggucaga

SEQ ID NO: 1427612 - RNA, 19 nt, Artificial Sequence
  Description of Artificial Sequence: Synthetic oligonucleotide
acgccaaaguagaaccaga

SEQ ID NO: 1427613 - RNA, 19 nt, Artificial Sequence
  Description of Artificial Sequence: Synthetic oligonucleotide
uagcuguaggugacaccau

SEQ ID NO: 1427614 - RNA, 19 nt, Artificial Sequence
  Description of Artificial Sequence: Synthetic oligonucleotide
ggcgaagcacaugcgguag

SEQ ID NO: 1427615 - RNA, 19 nt, Artificial Sequence
  Description of Artificial Sequence: Synthetic oligonucleotide
guagcuuguaaagcugacu

SEQ ID NO: 1427616 - RNA, 19 nt, Artificial Sequence
  Description of Artificial Sequence: Synthetic oligonucleotide
gugagugugcauggccaug

SEQ ID NO: 1427617 - RNA, 19 nt, Artificial Sequence
  Description of Artificial Sequence: Synthetic oligonucleotide
agcugacucuccacuccgg

SEQ ID NO: 1427618 - RNA, 19 nt, Artificial Sequence
  Description of Artificial Sequence: Synthetic oligonucleotide
ggcuaaugaagaaggugca

SEQ ID NO: 1427619 - RNA, 19 nt, Artificial Sequence
  Description of Artificial Sequence: Synthetic oligonucleotide
agacagcgcggaaacccag

SEQ ID NO: 1427620 - RNA, 19 nt, Artificial Sequence
  Description of Artificial Sequence: Synthetic oligonucleotide
cagcgcggaaacccagcag

SEQ ID NO: 1427621 - RNA, 19 nt, Artificial Sequence
  Description of Artificial Sequence: Synthetic oligonucleotide
gguagcuuguaaagcugac

SEQ ID NO: 1427622 - RNA, 19 nt, Artificial Sequence
  Description of Artificial Sequence: Synthetic oligonucleotide
uccaccuggcuuguuccau

SEQ ID NO: 1427623 - RNA, 19 nt, Artificial Sequence
  Description of Artificial Sequence: Synthetic oligonucleotide
gucggggacguuggauagg

SEQ ID NO: 1427624 - RNA, 19 nt, Artificial Sequence
  Description of Artificial Sequence: Synthetic oligonucleotide
cccacgacgccaaaguaga

SEQ ID NO: 1427625 - RNA, 19 nt, Artificial Sequence
  Description of Artificial Sequence: Synthetic oligonucleotide
aaggagcccacgacgccaa

SEQ ID NO: 1427626 - RNA, 19 nt, Artificial Sequence
  Description of Artificial Sequence: Synthetic oligonucleotide
gcucguugucauaggcucg

SEQ ID NO: 1427627 - RNA, 19 nt, Artificial Sequence
  Description of Artificial Sequence: Synthetic oligonucleotide
uggaugccugcagcagacc

SEQ ID NO: 1427628 - RNA, 19 nt, Artificial Sequence
  Description of Artificial Sequence: Synthetic oligonucleotide
gccugacucgggcaggccc

SEQ ID NO: 1427629 - RNA, 19 nt, Artificial Sequence
  Description of Artificial Sequence: Synthetic oligonucleotide
ggauagggccaaccaggug

SEQ ID NO: 1427630 - RNA, 19 nt, Artificial Sequence
  Description of Artificial Sequence: Synthetic oligonucleotide
ugauacccacgaggaucag

SEQ ID NO: 1427631 - RNA, 19 nt, Artificial Sequence
  Description of Artificial Sequence: Synthetic oligonucleotide
gaggggccugacucgggca

SEQ ID NO: 1427632 - RNA, 19 nt, Artificial Sequence
  Description of Artificial Sequence: Synthetic oligonucleotide
ccggggcucagcaugauga

SEQ ID NO: 1427633 - RNA, 19 nt, Artificial Sequence
  Description of Artificial Sequence: Synthetic oligonucleotide
gggacguuggauagggcca

SEQ ID NO: 1427634 - RNA, 19 nt, Artificial Sequence
  Description of Artificial Sequence: Synthetic oligonucleotide
cucggggcaucccaccaca

SEQ ID NO: 1427635 - RNA, 19 nt, Artificial Sequence
  Description of Artificial Sequence: Synthetic oligonucleotide
cacaugcgguagacagcgc

SEQ ID NO: 1427636 - RNA, 19 nt, Artificial Sequence
  Description of Artificial Sequence: Synthetic oligonucleotide
uacccacgaggaucaggaa

SEQ ID NO: 1427637 - RNA, 19 nt, Artificial Sequence
  Description of Artificial Sequence: Synthetic oligonucleotide
gagcaacagccccgcccag

SEQ ID NO: 1427638 - RNA, 19 nt, Artificial Sequence
  Description of Artificial Sequence: Synthetic oligonucleotide
gccaccgcugauuccagga

SEQ ID NO: 1427639 - RNA, 19 nt, Artificial Sequence
  Description of Artificial Sequence: Synthetic oligonucleotide
ugcccucuucuggggaccc

SEQ ID NO: 1427640 - RNA, 19 nt, Artificial Sequence
  Description of Artificial Sequence: Synthetic oligonucleotide
gggugagugugcauggcca

SEQ ID NO: 1427641 - RNA, 19 nt, Artificial Sequence
  Description of Artificial Sequence: Synthetic oligonucleotide
ccaggcuccguguaguaga

SEQ ID NO: 1427642 - RNA, 19 nt, Artificial Sequence
  Description of Artificial Sequence: Synthetic oligonucleotide
ugacucgggcaggcccugg

SEQ ID NO: 1427643 - RNA, 19 nt, Artificial Sequence
  Description of Artificial Sequence: Synthetic oligonucleotide
cugcucguugucauaggcu

SEQ ID NO: 1427644 - RNA, 19 nt, Artificial Sequence
  Description of Artificial Sequence: Synthetic oligonucleotide
gguagacagcgcggaaacc

SEQ ID NO: 1427645 - RNA, 19 nt, Artificial Sequence
  Description of Artificial Sequence: Synthetic oligonucleotide
acgcagaaggugagguuga

SEQ ID NO: 1427646 - RNA, 19 nt, Artificial Sequence
  Description of Artificial Sequence: Synthetic oligonucleotide
ggucucaccagggcuguac

SEQ ID NO: 1427647 - RNA, 19 nt, Artificial Sequence
  Description of Artificial Sequence: Synthetic oligonucleotide
cggaaacccagcagggagc

SEQ ID NO: 1427648 - RNA, 19 nt, Artificial Sequence
  Description of Artificial Sequence: Synthetic oligonucleotide
aggcaggugaggguugcau

SEQ ID NO: 1427649 - RNA, 19 nt, Artificial Sequence
  Description of Artificial Sequence: Synthetic oligonucleotide
gcaauggacagcagauaga

SEQ ID NO: 1427650 - RNA, 19 nt, Artificial Sequence
  Description of Artificial Sequence: Synthetic oligonucleotide
guggcgaagcacaugcggu

SEQ ID NO: 1427651 - RNA, 19 nt, Artificial Sequence
  Description of Artificial Sequence: Synthetic oligonucleotide
ggagcccacgacgccaaag

SEQ ID NO: 1427652 - RNA, 19 nt, Artificial Sequence
  Description of Artificial Sequence: Synthetic oligonucleotide
gcugggucgugucuucaca

SEQ ID NO: 1427653 - RNA, 19 nt, Artificial Sequence
  Description of Artificial Sequence: Synthetic oligonucleotide
acggguugcugggucgugu

SEQ ID NO: 1427654 - RNA, 19 nt, Artificial Sequence
  Description of Artificial Sequence: Synthetic oligonucleotide
ucggggcaucccaccacau

SEQ ID NO: 1427655 - RNA, 19 nt, Artificial Sequence
  Description of Artificial Sequence: Synthetic oligonucleotide
ggugagguugaggcugaug

SEQ ID NO: 1427656 - RNA, 19 nt, Artificial Sequence
  Description of Artificial Sequence: Synthetic oligonucleotide
cagccaccgcugauuccag

SEQ ID NO: 1427657 - RNA, 19 nt, Artificial Sequence
  Description of Artificial Sequence: Synthetic oligonucleotide
guccacgugcugaucaucu

SEQ ID NO: 1427658 - RNA, 19 nt, Artificial Sequence
  Description of Artificial Sequence: Synthetic oligonucleotide
cuugcccucauggcaggca

SEQ ID NO: 1427659 - RNA, 19 nt, Artificial Sequence
  Description of Artificial Sequence: Synthetic oligonucleotide
ggccgugcaggaccacggg

SEQ ID NO: 1427660 - RNA, 19 nt, Artificial Sequence
  Description of Artificial Sequence: Synthetic oligonucleotide
ggaugccugcagcagaccu

SEQ ID NO: 1427661 - RNA, 19 nt, Artificial Sequence
  Description of Artificial Sequence: Synthetic oligonucleotide
ugcugcggacacagaucau

SEQ ID NO: 1427662 - RNA, 19 nt, Artificial Sequence
  Description of Artificial Sequence: Synthetic oligonucleotide
gcacagccaccgcugauuc

SEQ ID NO: 1427663 - RNA, 19 nt, Artificial Sequence
  Description of Artificial Sequence: Synthetic oligonucleotide
cuggggacccugagaacaa

SEQ ID NO: 1427664 - RNA, 19 nt, Artificial Sequence
  Description of Artificial Sequence: Synthetic oligonucleotide
cagacgcagaaggugaggu

SEQ ID NO: 1427665 - RNA, 19 nt, Artificial Sequence
  Description of Artificial Sequence: Synthetic oligonucleotide
gacucuccacuccggggcu

SEQ ID NO: 1427666 - RNA, 19 nt, Artificial Sequence
  Description of Artificial Sequence: Synthetic oligonucleotide
gcagcaauggacagcagau

SEQ ID NO: 1427667 - RNA, 19 nt, Artificial Sequence
  Description of Artificial Sequence: Synthetic oligonucleotide
ccaccgcugauuccaggag

SEQ ID NO: 1427668 - RNA, 19 nt, Artificial Sequence
  Description of Artificial Sequence: Synthetic oligonucleotide
cgguagacagcgcggaaac

SEQ ID NO: 1427669 - RNA, 19 nt, Artificial Sequence
  Description of Artificial Sequence: Synthetic oligonucleotide
gugugacgauggaugccug

SEQ ID NO: 1427670 - RNA, 19 nt, Artificial Sequence
  Description of Artificial Sequence: Synthetic oligonucleotide
gacguuggauagggccaac

SEQ ID NO: 1427671 - RNA, 19 nt, Artificial Sequence
  Description of Artificial Sequence: Synthetic oligonucleotide
gcugcugcggacacagauc

SEQ ID NO: 1427672 - RNA, 19 nt, Artificial Sequence
  Description of Artificial Sequence: Synthetic oligonucleotide
gcgcggaaacccagcaggg

SEQ ID NO: 1427673 - RNA, 19 nt, Artificial Sequence
  Description of Artificial Sequence: Synthetic oligonucleotide
cacggagguccacgugcug

SEQ ID NO: 1427674 - RNA, 19 nt, Artificial Sequence
  Description of Artificial Sequence: Synthetic oligonucleotide
gaccugaguugggcugggc

SEQ ID NO: 1427675 - RNA, 19 nt, Artificial Sequence
  Description of Artificial Sequence: Synthetic oligonucleotide
ggguuacuucugucccaag

SEQ ID NO: 1427676 - RNA, 19 nt, Artificial Sequence
  Description of Artificial Sequence: Synthetic oligonucleotide
ggcuguucaccugccggug

SEQ ID NO: 1427677 - RNA, 19 nt, Artificial Sequence
  Description of Artificial Sequence: Synthetic oligonucleotide
cucugucgggcaggagcag

SEQ ID NO: 1427678 - RNA, 19 nt, Artificial Sequence
  Description of Artificial Sequence: Synthetic oligonucleotide
ccaaccaggugacaaacau

SEQ ID NO: 1427679 - RNA, 19 nt, Artificial Sequence
  Description of Artificial Sequence: Synthetic oligonucleotide
caccgcugauuccaggagu

SEQ ID NO: 1427680 - RNA, 19 nt, Artificial Sequence
  Description of Artificial Sequence: Synthetic oligonucleotide
cguuggauagggccaacca

SEQ ID NO: 1427681 - RNA, 19 nt, Artificial Sequence
  Description of Artificial Sequence: Synthetic oligonucleotide
ggcucagcaugaugaugga

SEQ ID NO: 1427682 - RNA, 19 nt, Artificial Sequence
  Description of Artificial Sequence: Synthetic oligonucleotide
cagcacgcccaagaagaga

SEQ ID NO: 1427683 - RNA, 19 nt, Artificial Sequence
  Description of Artificial Sequence: Synthetic oligonucleotide
cggccuugcacagccaccg

SEQ ID NO: 1427684 - RNA, 19 nt, Artificial Sequence
  Description of Artificial Sequence: Synthetic oligonucleotide
gccgcgguggcgaagcaca

SEQ ID NO: 1427685 - RNA, 19 nt, Artificial Sequence
  Description of Artificial Sequence: Synthetic oligonucleotide
cacccaggguagcuuguaa

SEQ ID NO: 1427686 - RNA, 19 nt, Artificial Sequence
  Description of Artificial Sequence: Synthetic oligonucleotide
cugacucgggcaggcccug

SEQ ID NO: 1427687 - RNA, 19 nt, Artificial Sequence
  Description of Artificial Sequence: Synthetic oligonucleotide
cagcaauggacagcagaua

SEQ ID NO: 1427688 - RNA, 19 nt, Artificial Sequence
  Description of Artificial Sequence: Synthetic oligonucleotide
aggagugggcaaagucaau

SEQ ID NO: 1427689 - RNA, 19 nt, Artificial Sequence
  Description of Artificial Sequence: Synthetic oligonucleotide
aggcuccguguaguagaug

SEQ ID NO: 1427690 - RNA, 19 nt, Artificial Sequence
  Description of Artificial Sequence: Synthetic oligonucleotide
gcucggggcaucccaccac

SEQ ID NO: 1427691 - RNA, 19 nt, Artificial Sequence
  Description of Artificial Sequence: Synthetic oligonucleotide
gugacaccauccugcucgu

SEQ ID NO: 1427692 - RNA, 19 nt, Artificial Sequence
  Description of Artificial Sequence: Synthetic oligonucleotide
ggugagugugcauggccau

SEQ ID NO: 1427693 - RNA, 19 nt, Artificial Sequence
  Description of Artificial Sequence: Synthetic oligonucleotide
ggacguuggauagggccaa

SEQ ID NO: 1427694 - RNA, 19 nt, Artificial Sequence
  Description of Artificial Sequence: Synthetic oligonucleotide
cccacgaggaucaggaauu

SEQ ID NO: 1427695 - RNA, 19 nt, Artificial Sequence
  Description of Artificial Sequence: Synthetic oligonucleotide
gcccucauggcaggcacca

SEQ ID NO: 1427696 - RNA, 19 nt, Artificial Sequence
  Description of Artificial Sequence: Synthetic oligonucleotide
cuucacccacacggagguc

SEQ ID NO: 1427697 - RNA, 19 nt, Artificial Sequence
  Description of Artificial Sequence: Synthetic oligonucleotide
ggccuugcacagccaccgc

SEQ ID NO: 1427698 - RNA, 19 nt, Artificial Sequence
  Description of Artificial Sequence: Synthetic oligonucleotide
ucgcgggucccggcugcug

SEQ ID NO: 1427699 - RNA, 19 nt, Artificial Sequence
  Description of Artificial Sequence: Synthetic oligonucleotide
ccgcugauuccaggagugg

SEQ ID NO: 1427700 - RNA, 19 nt, Artificial Sequence
  Description of Artificial Sequence: Synthetic oligonucleotide
cacggguugcugggucgug

SEQ ID NO: 1427701 - RNA, 19 nt, Artificial Sequence
  Description of Artificial Sequence: Synthetic oligonucleotide
guaccaggcuggggaguca

SEQ ID NO: 1427702 - RNA, 19 nt, Artificial Sequence
  Description of Artificial Sequence: Synthetic oligonucleotide
cacgaggaucaggaauuua

SEQ ID NO: 1427703 - RNA, 19 nt, Artificial Sequence
  Description of Artificial Sequence: Synthetic oligonucleotide
gcccacgaugcucggggca

SEQ ID NO: 1427704 - RNA, 19 nt, Artificial Sequence
  Description of Artificial Sequence: Synthetic oligonucleotide
ggguccacagguagagcaa

SEQ ID NO: 1427705 - RNA, 19 nt, Artificial Sequence
  Description of Artificial Sequence: Synthetic oligonucleotide
ccgguggucagaggaucgc

SEQ ID NO: 1427706 - RNA, 19 nt, Artificial Sequence
  Description of Artificial Sequence: Synthetic oligonucleotide
gccuugcacagccaccgcu

SEQ ID NO: 1427707 - RNA, 19 nt, Artificial Sequence
  Description of Artificial Sequence: Synthetic oligonucleotide
ccacacggagguccacgug

SEQ ID NO: 1427708 - RNA, 19 nt, Artificial Sequence
  Description of Artificial Sequence: Synthetic oligonucleotide
ccguguaguagaugaacau

SEQ ID NO: 1427709 - RNA, 19 nt, Artificial Sequence
  Description of Artificial Sequence: Synthetic oligonucleotide
aggagcccacgacgccaaa

SEQ ID NO: 1427710 - RNA, 19 nt, Artificial Sequence
  Description of Artificial Sequence: Synthetic oligonucleotide
caggcuccguguaguagau

SEQ ID NO: 1427711 - RNA, 19 nt, Artificial Sequence
  Description of Artificial Sequence: Synthetic oligonucleotide
cagugauacccacgaggau

SEQ ID NO: 1427712 - RNA, 19 nt, Artificial Sequence
  Description of Artificial Sequence: Synthetic oligonucleotide
cguaccaggcuggggaguc

SEQ ID NO: 1427713 - RNA, 19 nt, Artificial Sequence
  Description of Artificial Sequence: Synthetic oligonucleotide
cgggacacuccuccgucug

SEQ ID NO: 1427714 - RNA, 19 nt, Artificial Sequence
  Description of Artificial Sequence: Synthetic oligonucleotide
cccugagaacaaggguuac

SEQ ID NO: 1427715 - RNA, 19 nt, Artificial Sequence
  Description of Artificial Sequence: Synthetic oligonucleotide
cagaggaucgcaggcuaau

SEQ ID NO: 1427716 - RNA, 19 nt, Artificial Sequence
  Description of Artificial Sequence: Synthetic oligonucleotide
cccaaggcaccaggugggc

SEQ ID NO: 1427717 - RNA, 19 nt, Artificial Sequence
  Description of Artificial Sequence: Synthetic oligonucleotide
cgguggcgaagcacaugcg

SEQ ID NO: 1427718 - RNA, 19 nt, Artificial Sequence
  Description of Artificial Sequence: Synthetic oligonucleotide
cugaguugggcugggcauu

SEQ ID NO: 1427719 - RNA, 19 nt, Artificial Sequence
  Description of Artificial Sequence: Synthetic oligonucleotide
cgacgccaaaguagaacca

SEQ ID NO: 1427720 - RNA, 19 nt, Artificial Sequence
  Description of Artificial Sequence: Synthetic oligonucleotide
cacccacacggagguccac

SEQ ID NO: 1427721 - RNA, 19 nt, Artificial Sequence
  Description of Artificial Sequence: Synthetic oligonucleotide
gcaggaccacggguugcug

SEQ ID NO: 1427722 - RNA, 19 nt, Artificial Sequence
  Description of Artificial Sequence: Synthetic oligonucleotide
ccuugcccucauggcaggc

SEQ ID NO: 1427723 - RNA, 19 nt, Artificial Sequence
  Description of Artificial Sequence: Synthetic oligonucleotide
gccgugcaggaccacgggu

SEQ ID NO: 1427724 - RNA, 19 nt, Artificial Sequence
  Description of Artificial Sequence: Synthetic oligonucleotide
ggguugcugggucgugucu

SEQ ID NO: 1427725 - RNA, 19 nt, Artificial Sequence
  Description of Artificial Sequence: Synthetic oligonucleotide
cagggccuucucagcugaa

SEQ ID NO: 1427726 - RNA, 19 nt, Artificial Sequence
  Description of Artificial Sequence: Synthetic oligonucleotide
ggccugacucgggcaggcc

SEQ ID NO: 1427727 - RNA, 19 nt, Artificial Sequence
  Description of Artificial Sequence: Synthetic oligonucleotide
ccaaggcaccaggugggca

SEQ ID NO: 1427728 - RNA, 19 nt, Artificial Sequence
  Description of Artificial Sequence: Synthetic oligonucleotide
ggauggccgcucgcggguc

SEQ ID NO: 1427729 - RNA, 19 nt, Artificial Sequence
  Description of Artificial Sequence: Synthetic oligonucleotide
ccgugcaggaccacggguu

SEQ ID NO: 1427730 - RNA, 19 nt, Artificial Sequence
  Description of Artificial Sequence: Synthetic oligonucleotide
ggccacucucuccuuccau

SEQ ID NO: 1427731 - RNA, 19 nt, Artificial Sequence
  Description of Artificial Sequence: Synthetic oligonucleotide
cccacacggagguccacgu

SEQ ID NO: 1427732 - RNA, 19 nt, Artificial Sequence
  Description of Artificial Sequence: Synthetic oligonucleotide
cggggacguuggauagggc

SEQ ID NO: 1427733 - RNA, 19 nt, Artificial Sequence
  Description of Artificial Sequence: Synthetic oligonucleotide
cccucauggcaggcaccag

SEQ ID NO: 1427734 - RNA, 19 nt, Artificial Sequence
  Description of Artificial Sequence: Synthetic oligonucleotide
ccacgacgccaaaguagaa

SEQ ID NO: 1427735 - RNA, 19 nt, Artificial Sequence
  Description of Artificial Sequence: Synthetic oligonucleotide
gcacgcccaagaagagaaa

SEQ ID NO: 1427736 - RNA, 19 nt, Artificial Sequence
  Description of Artificial Sequence: Synthetic oligonucleotide
ccacgggacacuccuccgu

SEQ ID NO: 1427737 - RNA, 19 nt, Artificial Sequence
  Description of Artificial Sequence: Synthetic oligonucleotide
ccacgaugcucggggcauc

SEQ ID NO: 1427738 - RNA, 19 nt, Artificial Sequence
  Description of Artificial Sequence: Synthetic oligonucleotide
cgguggucagaggaucgca

SEQ ID NO: 1427739 - RNA, 19 nt, Artificial Sequence
  Description of Artificial Sequence: Synthetic oligonucleotide
cgcggaaacccagcaggga

SEQ ID NO: 1427740 - RNA, 19 nt, Artificial Sequence
  Description of Artificial Sequence: Synthetic oligonucleotide
gcguaccaggcuggggagu

SEQ ID NO: 1427741 - RNA, 19 nt, Artificial Sequence
  Description of Artificial Sequence: Synthetic oligonucleotide
ccaccuggcuuguuccauu

SEQ ID NO: 1427742 - RNA, 19 nt, Artificial Sequence
  Description of Artificial Sequence: Synthetic oligonucleotide
ccucggccuugcacagcca

SEQ ID NO: 1427743 - RNA, 19 nt, Artificial Sequence
  Description of Artificial Sequence: Synthetic oligonucleotide
ccaccacauggugcuguaa

SEQ ID NO: 1427744 - RNA, 19 nt, Artificial Sequence
  Description of Artificial Sequence: Synthetic oligonucleotide
cccauucuggauggccgcu

SEQ ID NO: 1427745 - RNA, 19 nt, Artificial Sequence
  Description of Artificial Sequence: Synthetic oligonucleotide
cagccccgcccagcuggca

SEQ ID NO: 1427746 - RNA, 19 nt, Artificial Sequence
  Description of Artificial Sequence: Synthetic oligonucleotide
cccaagggugagugugcau

SEQ ID NO: 1427747 - RNA, 19 nt, Artificial Sequence
  Description of Artificial Sequence: Synthetic oligonucleotide
ccacggguugcugggucgu

SEQ ID NO: 1427748 - RNA, 19 nt, Artificial Sequence
  Description of Artificial Sequence: Synthetic oligonucleotide
gggucucaccagggcugua

SEQ ID NO: 1427749 - RNA, 19 nt, Artificial Sequence
  Description of Artificial Sequence: Synthetic oligonucleotide
gcccuggaagagggugggu

SEQ ID NO: 1427750 - RNA, 19 nt, Artificial Sequence
  Description of Artificial Sequence: Synthetic oligonucleotide
ccacuccggggcucagcau

SEQ ID NO: 1427751 - RNA, 19 nt, Artificial Sequence
  Description of Artificial Sequence: Synthetic oligonucleotide
cagguccaccuggcuuguu

SEQ ID NO: 1427752 - RNA, 19 nt, Artificial Sequence
  Description of Artificial Sequence: Synthetic oligonucleotide
uauucuaugaguaauaggu

SEQ ID NO: 1427753 - RNA, 19 nt, Artificial Sequence
  Description of Artificial Sequence: Synthetic oligonucleotide
aacaauuuggguuugguug

SEQ ID NO: 1427754 - RNA, 19 nt, Artificial Sequence
  Description of Artificial Sequence: Synthetic oligonucleotide
aauagguaguccuucaaag

SEQ ID NO: 1427755 - RNA, 19 nt, Artificial Sequence
  Description of Artificial Sequence: Synthetic oligonucleotide
accauauuccaacaggacc

SEQ ID NO: 1427756 - RNA, 19 nt, Artificial Sequence
  Description of Artificial Sequence: Synthetic oligonucleotide
ucugaugagauccucuacg

SEQ ID NO: 1427757 - RNA, 19 nt, Artificial Sequence
  Description of Artificial Sequence: Synthetic oligonucleotide
uuuucuauagcucaauaaa

SEQ ID NO: 1427758 - RNA, 19 nt, Artificial Sequence
  Description of Artificial Sequence: Synthetic oligonucleotide
ugcauaauguaccacauac

SEQ ID NO: 1427759 - RNA, 19 nt, Artificial Sequence
  Description of Artificial Sequence: Synthetic oligonucleotide
guuguaaccauccagagca

SEQ ID NO: 1427760 - RNA, 19 nt, Artificial Sequence
  Description of Artificial Sequence: Synthetic oligonucleotide
uaauguaccacauacugga

SEQ ID NO: 1427761 - RNA, 19 nt, Artificial Sequence
  Description of Artificial Sequence: Synthetic oligonucleotide
ucaagaaggaugcugacac

SEQ ID NO: 1427762 - RNA, 19 nt, Artificial Sequence
  Description of Artificial Sequence: Synthetic oligonucleotide
aguuuaagaacaugaaaag

SEQ ID NO: 1427763 - RNA, 19 nt, Artificial Sequence
  Description of Artificial Sequence: Synthetic oligonucleotide
aacucaucaaggcucagag

SEQ ID NO: 1427764 - RNA, 19 nt, Artificial Sequence
  Description of Artificial Sequence: Synthetic oligonucleotide
uucuaugaguaauagguag

SEQ ID NO: 1427765 - RNA, 19 nt, Artificial Sequence
  Description of Artificial Sequence: Synthetic oligonucleotide
uucaaaugggcaaaccccg

SEQ ID NO: 1427766 - RNA, 19 nt, Artificial Sequence
  Description of Artificial Sequence: Synthetic oligonucleotide
gaugagauccucuacguug

SEQ ID NO: 1427767 - RNA, 19 nt, Artificial Sequence
  Description of Artificial Sequence: Synthetic oligonucleotide
aaagaagcccauuuuauau

SEQ ID NO: 1427768 - RNA, 19 nt, Artificial Sequence
  Description of Artificial Sequence: Synthetic oligonucleotide
aguggaagaccuuucaccg

SEQ ID NO: 1427769 - RNA, 19 nt, Artificial Sequence
  Description of Artificial Sequence: Synthetic oligonucleotide
uauucaagaaggaugcuga

SEQ ID NO: 1427770 - RNA, 19 nt, Artificial Sequence
  Description of Artificial Sequence: Synthetic oligonucleotide
uccucuaacuagcagagcc

SEQ ID NO: 1427771 - RNA, 19 nt, Artificial Sequence
  Description of Artificial Sequence: Synthetic oligonucleotide
cauaauguaccacauacug

SEQ ID NO: 1427772 - RNA, 19 nt, Artificial Sequence
  Description of Artificial Sequence: Synthetic oligonucleotide
uaggcuauggcguacagca

SEQ ID NO: 1427773 - RNA, 19 nt, Artificial Sequence
  Description of Artificial Sequence: Synthetic oligonucleotide
agugcguacacauucauga

SEQ ID NO: 1427774 - RNA, 19 nt, Artificial Sequence
  Description of Artificial Sequence: Synthetic oligonucleotide
ugcaccauauuccaacagg

SEQ ID NO: 1427775 - RNA, 19 nt, Artificial Sequence
  Description of Artificial Sequence: Synthetic oligonucleotide
uguaucguuguuguaaucc

SEQ ID NO: 1427776 - RNA, 19 nt, Artificial Sequence
  Description of Artificial Sequence: Synthetic oligonucleotide
ucuauggaggagcucaaag

SEQ ID NO: 1427777 - RNA, 19 nt, Artificial Sequence
  Description of Artificial Sequence: Synthetic oligonucleotide
ugugggaaggagcggaugg

SEQ ID NO: 1427778 - RNA, 19 nt, Artificial Sequence
  Description of Artificial Sequence: Synthetic oligonucleotide
augaguaauagguaguccu

SEQ ID NO: 1427779 - RNA, 19 nt, Artificial Sequence
  Description of Artificial Sequence: Synthetic oligonucleotide
agaagcccauuuuauauuc

SEQ ID NO: 1427780 - RNA, 19 nt, Artificial Sequence
  Description of Artificial Sequence: Synthetic oligonucleotide
ucuaguuuaagaacaugaa

SEQ ID NO: 1427781 - RNA, 19 nt, Artificial Sequence
  Description of Artificial Sequence: Synthetic oligonucleotide
gaguauuugcucugaaugc

SEQ ID NO: 1427782 - RNA, 19 nt, Artificial Sequence
  Description of Artificial Sequence: Synthetic oligonucleotide
aggccaauuccaaagaagc

SEQ ID NO: 1427783 - RNA, 19 nt, Artificial Sequence
  Description of Artificial Sequence: Synthetic oligonucleotide
aacuagcagagccaccagg

SEQ ID NO: 1427784 - RNA, 19 nt, Artificial Sequence
  Description of Artificial Sequence: Synthetic oligonucleotide
uucgguuguaaccauccag

SEQ ID NO: 1427785 - RNA, 19 nt, Artificial Sequence
  Description of Artificial Sequence: Synthetic oligonucleotide
uguucgguuguaaccaucc

SEQ ID NO: 1427786 - RNA, 19 nt, Artificial Sequence
  Description of Artificial Sequence: Synthetic oligonucleotide
uaauucaaaguguccaaca

SEQ ID NO: 1427787 - RNA, 19 nt, Artificial Sequence
  Description of Artificial Sequence: Synthetic oligonucleotide
uucaaguuagcugugccag

SEQ ID NO: 1427788 - RNA, 19 nt, Artificial Sequence
  Description of Artificial Sequence: Synthetic oligonucleotide
uugcauacagauaacuuaa

SEQ ID NO: 1427789 - RNA, 19 nt, Artificial Sequence
  Description of Artificial Sequence: Synthetic oligonucleotide
ucuaugaguaauagguagu

SEQ ID NO: 1427790 - RNA, 19 nt, Artificial Sequence
  Description of Artificial Sequence: Synthetic oligonucleotide
agaggcuccacucucuagg

SEQ ID NO: 1427791 - RNA, 19 nt, Artificial Sequence
  Description of Artificial Sequence: Synthetic oligonucleotide
ucuaggaguaacuccacac

SEQ ID NO: 1427792 - RNA, 19 nt, Artificial Sequence
  Description of Artificial Sequence: Synthetic oligonucleotide
uuucuuuguuccaaguccu

SEQ ID NO: 1427793 - RNA, 19 nt, Artificial Sequence
  Description of Artificial Sequence: Synthetic oligonucleotide
ugaaugcucugcauaaugu

SEQ ID NO: 1427794 - RNA, 19 nt, Artificial Sequence
  Description of Artificial Sequence: Synthetic oligonucleotide
cuucaucuaguuuaagaac

SEQ ID NO: 1427795 - RNA, 19 nt, Artificial Sequence
  Description of Artificial Sequence: Synthetic oligonucleotide
ugggguuugcaccauauuc

SEQ ID NO: 1427796 - RNA, 19 nt, Artificial Sequence
  Description of Artificial Sequence: Synthetic oligonucleotide
agguagagaggaccuaggc

SEQ ID NO: 1427797 - RNA, 19 nt, Artificial Sequence
  Description of Artificial Sequence: Synthetic oligonucleotide
ucguuguuguaauccaggg

SEQ ID NO: 1427798 - RNA, 19 nt, Artificial Sequence
  Description of Artificial Sequence: Synthetic oligonucleotide
ggaagaauauuguucacug

SEQ ID NO: 1427799 - RNA, 19 nt, Artificial Sequence
  Description of Artificial Sequence: Synthetic oligonucleotide
aagcccauuuuauauucug

SEQ ID NO: 1427800 - RNA, 19 nt, Artificial Sequence
  Description of Artificial Sequence: Synthetic oligonucleotide
cucuacguugucauguggg

SEQ ID NO: 1427801 - RNA, 19 nt, Artificial Sequence
  Description of Artificial Sequence: Synthetic oligonucleotide
cuuaaggucaguaucaacu

SEQ ID NO: 1427802 - RNA, 19 nt, Artificial Sequence
  Description of Artificial Sequence: Synthetic oligonucleotide
aguuagcugugccagacug

SEQ ID NO: 1427803 - RNA, 19 nt, Artificial Sequence
  Description of Artificial Sequence: Synthetic oligonucleotide
cauaguggagggcuguucg

SEQ ID NO: 1427804 - RNA, 19 nt, Artificial Sequence
  Description of Artificial Sequence: Synthetic oligonucleotide
uuccuuaauucaaaguguc

SEQ ID NO: 1427805 - RNA, 19 nt, Artificial Sequence
  Description of Artificial Sequence: Synthetic oligonucleotide
auaauguaccacauacugg

SEQ ID NO: 1427806 - RNA, 19 nt, Artificial Sequence
  Description of Artificial Sequence: Synthetic oligonucleotide
acuagcagagccaccaggc

SEQ ID NO: 1427807 - RNA, 19 nt, Artificial Sequence
  Description of Artificial Sequence: Synthetic oligonucleotide
gaggaccuaggcuauggcg

SEQ ID NO: 1427808 - RNA, 19 nt, Artificial Sequence
  Description of Artificial Sequence: Synthetic oligonucleotide
agcggggugucucuguugc

SEQ ID NO: 1427809 - RNA, 19 nt, Artificial Sequence
  Description of Artificial Sequence: Synthetic oligonucleotide
ccauauucaagaaggaugc

SEQ ID NO: 1427810 - RNA, 19 nt, Artificial Sequence
  Description of Artificial Sequence: Synthetic oligonucleotide
ucaaaugggcaaaccccgg

SEQ ID NO: 1427811 - RNA, 19 nt, Artificial Sequence
  Description of Artificial Sequence: Synthetic oligonucleotide
ugcaugauggcggacaugu

SEQ ID NO: 1427812 - RNA, 19 nt, Artificial Sequence
  Description of Artificial Sequence: Synthetic oligonucleotide
agugguguaucguuguugu

SEQ ID NO: 1427813 - RNA, 19 nt, Artificial Sequence
  Description of Artificial Sequence: Synthetic oligonucleotide
uugucaugugggaaggagc

SEQ ID NO: 1427814 - RNA, 19 nt, Artificial Sequence
  Description of Artificial Sequence: Synthetic oligonucleotide
aaacaauuuggguuugguu

SEQ ID NO: 1427815 - RNA, 19 nt, Artificial Sequence
  Description of Artificial Sequence: Synthetic oligonucleotide
auauucaagaaggaugcug

SEQ ID NO: 1427816 - RNA, 19 nt, Artificial Sequence
  Description of Artificial Sequence: Synthetic oligonucleotide
uccuuaauucaaagugucc

SEQ ID NO: 1427817 - RNA, 19 nt, Artificial Sequence
  Description of Artificial Sequence: Synthetic oligonucleotide
ucuuaaaggcugcccagug

SEQ ID NO: 1427818 - RNA, 19 nt, Artificial Sequence
  Description of Artificial Sequence: Synthetic oligonucleotide
uacuggaacucaucaaggc

SEQ ID NO: 1427819 - RNA, 19 nt, Artificial Sequence
  Description of Artificial Sequence: Synthetic oligonucleotide
auagguaguccuucaaaga

SEQ ID NO: 1427820 - RNA, 19 nt, Artificial Sequence
  Description of Artificial Sequence: Synthetic oligonucleotide
guagagaggaccuaggcua

SEQ ID NO: 1427821 - RNA, 19 nt, Artificial Sequence
  Description of Artificial Sequence: Synthetic oligonucleotide
aaaacccauaaaccacaug

SEQ ID NO: 1427822 - RNA, 19 nt, Artificial Sequence
  Description of Artificial Sequence: Synthetic oligonucleotide
uccgcaucugacaccaugc

SEQ ID NO: 1427823 - RNA, 19 nt, Artificial Sequence
  Description of Artificial Sequence: Synthetic oligonucleotide
uucccuaccauuuucuaua

SEQ ID NO: 1427824 - RNA, 19 nt, Artificial Sequence
  Description of Artificial Sequence: Synthetic oligonucleotide
gauuguucggaucaggcgu

SEQ ID NO: 1427825 - RNA, 19 nt, Artificial Sequence
  Description of Artificial Sequence: Synthetic oligonucleotide
augcucugcauaauguacc

SEQ ID NO: 1427826 - RNA, 19 nt, Artificial Sequence
  Description of Artificial Sequence: Synthetic oligonucleotide
ugguugcuugguaugagga

SEQ ID NO: 1427827 - RNA, 19 nt, Artificial Sequence
  Description of Artificial Sequence: Synthetic oligonucleotide
aagaagcccauuuuauauu

SEQ ID NO: 1427828 - RNA, 19 nt, Artificial Sequence
  Description of Artificial Sequence: Synthetic oligonucleotide
ucugcauaauguaccacau

SEQ ID NO: 1427829 - RNA, 19 nt, Artificial Sequence
  Description of Artificial Sequence: Synthetic oligonucleotide
guaugaggaggggagacgg

SEQ ID NO: 1427830 - RNA, 19 nt, Artificial Sequence
  Description of Artificial Sequence: Synthetic oligonucleotide
uuaaggucaguaucaacuu

SEQ ID NO: 1427831 - RNA, 19 nt, Artificial Sequence
  Description of Artificial Sequence: Synthetic oligonucleotide
aguauuugcucugaaugcu

SEQ ID NO: 1427832 - RNA, 19 nt, Artificial Sequence
  Description of Artificial Sequence: Synthetic oligonucleotide
aggacaaaagcaggcauag

SEQ ID NO: 1427833 - RNA, 19 nt, Artificial Sequence
  Description of Artificial Sequence: Synthetic oligonucleotide
gaccuuucaccgcauuggg

SEQ ID NO: 1427834 - RNA, 19 nt, Artificial Sequence
  Description of Artificial Sequence: Synthetic oligonucleotide
uucuagaauuauuuauuua

SEQ ID NO: 1427835 - RNA, 19 nt, Artificial Sequence
  Description of Artificial Sequence: Synthetic oligonucleotide
aacugagugguguaucguu

SEQ ID NO: 1427836 - RNA, 19 nt, Artificial Sequence
  Description of Artificial Sequence: Synthetic oligonucleotide
ucuaggagagugcguacac

SEQ ID NO: 1427837 - RNA, 19 nt, Artificial Sequence
  Description of Artificial Sequence: Synthetic oligonucleotide
agggcuguucgguuguaac

SEQ ID NO: 1427838 - RNA, 19 nt, Artificial Sequence
  Description of Artificial Sequence: Synthetic oligonucleotide
ugguguaucguuguuguaa

SEQ ID NO: 1427839 - RNA, 19 nt, Artificial Sequence
  Description of Artificial Sequence: Synthetic oligonucleotide
aguugucugcaugauggcg

SEQ ID NO: 1427840 - RNA, 19 nt, Artificial Sequence
  Description of Artificial Sequence: Synthetic oligonucleotide
auacuggaacucaucaagg

SEQ ID NO: 1427841 - RNA, 19 nt, Artificial Sequence
  Description of Artificial Sequence: Synthetic oligonucleotide
agugucuuaagaguuccug

SEQ ID NO: 1427842 - RNA, 19 nt, Artificial Sequence
  Description of Artificial Sequence: Synthetic oligonucleotide
gaaggagcggauggcagcg

SEQ ID NO: 1427843 - RNA, 19 nt, Artificial Sequence
  Description of Artificial Sequence: Synthetic oligonucleotide
uaggagagugcguacacau

SEQ ID NO: 1427844 - RNA, 19 nt, Artificial Sequence
  Description of Artificial Sequence: Synthetic oligonucleotide
aucguuguuguaauccagg

SEQ ID NO: 1427845 - RNA, 19 nt, Artificial Sequence
  Description of Artificial Sequence: Synthetic oligonucleotide
ugaguaauagguaguccuu

SEQ ID NO: 1427846 - RNA, 19 nt, Artificial Sequence
  Description of Artificial Sequence: Synthetic oligonucleotide
acacucucaagauuucccu

SEQ ID NO: 1427847 - RNA, 19 nt, Artificial Sequence
  Description of Artificial Sequence: Synthetic oligonucleotide
agcucuauggaggagcuca

SEQ ID NO: 1427848 - RNA, 19 nt, Artificial Sequence
  Description of Artificial Sequence: Synthetic oligonucleotide
aaugggcaaaccccggcaa

SEQ ID NO: 1427849 - RNA, 19 nt, Artificial Sequence
  Description of Artificial Sequence: Synthetic oligonucleotide
auaguggagggcuguucgg

SEQ ID NO: 1427850 - RNA, 19 nt, Artificial Sequence
  Description of Artificial Sequence: Synthetic oligonucleotide
uugcaccauauuccaacag

SEQ ID NO: 1427851 - RNA, 19 nt, Artificial Sequence
  Description of Artificial Sequence: Synthetic oligonucleotide
ucuaacuagcagagccacc

SEQ ID NO: 1427852 - RNA, 19 nt, Artificial Sequence
  Description of Artificial Sequence: Synthetic oligonucleotide
aggaagaauauuguucacu

SEQ ID NO: 1427853 - RNA, 19 nt, Artificial Sequence
  Description of Artificial Sequence: Synthetic oligonucleotide
uuucccuaccauuuucuau

SEQ ID NO: 1427854 - RNA, 19 nt, Artificial Sequence
  Description of Artificial Sequence: Synthetic oligonucleotide
uucuaggaguaacuccaca

SEQ ID NO: 1427855 - RNA, 19 nt, Artificial Sequence
  Description of Artificial Sequence: Synthetic oligonucleotide
ugcuuuccaaacuugcaua

SEQ ID NO: 1427856 - RNA, 19 nt, Artificial Sequence
  Description of Artificial Sequence: Synthetic oligonucleotide
cuaugaguaauagguaguc

SEQ ID NO: 1427857 - RNA, 19 nt, Artificial Sequence
  Description of Artificial Sequence: Synthetic oligonucleotide
agacggugcacacauuacu

SEQ ID NO: 1427858 - RNA, 19 nt, Artificial Sequence
  Description of Artificial Sequence: Synthetic oligonucleotide
aguccucuaacuagcagag

SEQ ID NO: 1427859 - RNA, 19 nt, Artificial Sequence
  Description of Artificial Sequence: Synthetic oligonucleotide
cuaacuagcagagccacca

SEQ ID NO: 1427860 - RNA, 19 nt, Artificial Sequence
  Description of Artificial Sequence: Synthetic oligonucleotide
gacggugcacacauuacug

SEQ ID NO: 1427861 - RNA, 19 nt, Artificial Sequence
  Description of Artificial Sequence: Synthetic oligonucleotide
caugcaggcgcagugcacg

SEQ ID NO: 1427862 - RNA, 19 nt, Artificial Sequence
  Description of Artificial Sequence: Synthetic oligonucleotide
uuugguugcuugguaugag

SEQ ID NO: 1427863 - RNA, 19 nt, Artificial Sequence
  Description of Artificial Sequence: Synthetic oligonucleotide
gagaggaccuaggcuaugg

SEQ ID NO: 1427864 - RNA, 19 nt, Artificial Sequence
  Description of Artificial Sequence: Synthetic oligonucleotide
caaaugggcaaaccccggc

SEQ ID NO: 1427865 - RNA, 19 nt, Artificial Sequence
  Description of Artificial Sequence: Synthetic oligonucleotide
guaucguuguuguaaucca

SEQ ID NO: 1427866 - RNA, 19 nt, Artificial Sequence
  Description of Artificial Sequence: Synthetic oligonucleotide
caguaucaacuucaucuag

SEQ ID NO: 1427867 - RNA, 19 nt, Artificial Sequence
  Description of Artificial Sequence: Synthetic oligonucleotide
cccauaaaccacauggcag

SEQ ID NO: 1427868 - RNA, 19 nt, Artificial Sequence
  Description of Artificial Sequence: Synthetic oligonucleotide
ggagagugcguacacauuc

SEQ ID NO: 1427869 - RNA, 19 nt, Artificial Sequence
  Description of Artificial Sequence: Synthetic oligonucleotide
ucccuaccauuuucuauag

SEQ ID NO: 1427870 - RNA, 19 nt, Artificial Sequence
  Description of Artificial Sequence: Synthetic oligonucleotide
cacaguccgcaucugacac

SEQ ID NO: 1427871 - RNA, 19 nt, Artificial Sequence
  Description of Artificial Sequence: Synthetic oligonucleotide
uggcaaggaccucacccag

SEQ ID NO: 1427872 - RNA, 19 nt, Artificial Sequence
  Description of Artificial Sequence: Synthetic oligonucleotide
gaaugcucugcauaaugua

SEQ ID NO: 1427873 - RNA, 19 nt, Artificial Sequence
  Description of Artificial Sequence: Synthetic oligonucleotide
uccaggcuauucuaugagu

SEQ ID NO: 1427874 - RNA, 19 nt, Artificial Sequence
  Description of Artificial Sequence: Synthetic oligonucleotide
aucaggcguucugagaggg

SEQ ID NO: 1427875 - RNA, 19 nt, Artificial Sequence
  Description of Artificial Sequence: Synthetic oligonucleotide
uuccaaagaagcccauuuu

SEQ ID NO: 1427876 - RNA, 19 nt, Artificial Sequence
  Description of Artificial Sequence: Synthetic oligonucleotide
cuaggaguaacuccacaca

SEQ ID NO: 1427877 - RNA, 19 nt, Artificial Sequence
  Description of Artificial Sequence: Synthetic oligonucleotide
aaguuagcugugccagacu

SEQ ID NO: 1427878 - RNA, 19 nt, Artificial Sequence
  Description of Artificial Sequence: Synthetic oligonucleotide
gcuauucuaugaguaauag

SEQ ID NO: 1427879 - RNA, 19 nt, Artificial Sequence
  Description of Artificial Sequence: Synthetic oligonucleotide
agaagcuggcaguggaaga

SEQ ID NO: 1427880 - RNA, 19 nt, Artificial Sequence
  Description of Artificial Sequence: Synthetic oligonucleotide
caccauauuccaacaggac

SEQ ID NO: 1427881 - RNA, 19 nt, Artificial Sequence
  Description of Artificial Sequence: Synthetic oligonucleotide
aacuuaaggucaguaucaa

SEQ ID NO: 1427882 - RNA, 19 nt, Artificial Sequence
  Description of Artificial Sequence: Synthetic oligonucleotide
gguuguaaccauccagagc

SEQ ID NO: 1427883 - RNA, 19 nt, Artificial Sequence
  Description of Artificial Sequence: Synthetic oligonucleotide
uucugagagggaguauuug

SEQ ID NO: 1427884 - RNA, 19 nt, Artificial Sequence
  Description of Artificial Sequence: Synthetic oligonucleotide
gaguaauagguaguccuuc

SEQ ID NO: 1427885 - RNA, 19 nt, Artificial Sequence
  Description of Artificial Sequence: Synthetic oligonucleotide
uccucuacguugucaugug

SEQ ID NO: 1427886 - RNA, 19 nt, Artificial Sequence
  Description of Artificial Sequence: Synthetic oligonucleotide
cuccaggcuauucuaugag

SEQ ID NO: 1427887 - RNA, 19 nt, Artificial Sequence
  Description of Artificial Sequence: Synthetic oligonucleotide
uggcggacaugucuccucc

SEQ ID NO: 1427888 - RNA, 19 nt, Artificial Sequence
  Description of Artificial Sequence: Synthetic oligonucleotide
auccucuacguugucaugu

SEQ ID NO: 1427889 - RNA, 19 nt, Artificial Sequence
  Description of Artificial Sequence: Synthetic oligonucleotide
gagugguguaucguuguug

SEQ ID NO: 1427890 - RNA, 19 nt, Artificial Sequence
  Description of Artificial Sequence: Synthetic oligonucleotide
aaggacaaaagcaggcaua

SEQ ID NO: 1427891 - RNA, 19 nt, Artificial Sequence
  Description of Artificial Sequence: Synthetic oligonucleotide
cucuaacuagcagagccac

SEQ ID NO: 1427892 - RNA, 19 nt, Artificial Sequence
  Description of Artificial Sequence: Synthetic oligonucleotide
aggaccuaggcuauggcgu

SEQ ID NO: 1427893 - RNA, 19 nt, Artificial Sequence
  Description of Artificial Sequence: Synthetic oligonucleotide
uugucugcaugauggcgga

SEQ ID NO: 1427894 - RNA, 19 nt, Artificial Sequence
  Description of Artificial Sequence: Synthetic oligonucleotide
ucccuuuucuaggaguaac

SEQ ID NO: 1427895 - RNA, 19 nt, Artificial Sequence
  Description of Artificial Sequence: Synthetic oligonucleotide
uuucaccgcauugggcagg

SEQ ID NO: 1427896 - RNA, 19 nt, Artificial Sequence
  Description of Artificial Sequence: Synthetic oligonucleotide
ccaacugagugguguaucg

SEQ ID NO: 1427897 - RNA, 19 nt, Artificial Sequence
  Description of Artificial Sequence: Synthetic oligonucleotide
gguugcuugguaugaggag

SEQ ID NO: 1427898 - RNA, 19 nt, Artificial Sequence
  Description of Artificial Sequence: Synthetic oligonucleotide
gcaaaccccggcaacaggg

SEQ ID NO: 1427899 - RNA, 19 nt, Artificial Sequence
  Description of Artificial Sequence: Synthetic oligonucleotide
accuuucaccgcauugggc

SEQ ID NO: 1427900 - RNA, 19 nt, Artificial Sequence
  Description of Artificial Sequence: Synthetic oligonucleotide
aggcucagaguauguccac

SEQ ID NO: 1427901 - RNA, 19 nt, Artificial Sequence
  Description of Artificial Sequence: Synthetic oligonucleotide
aaaccccggcaacagggaa

SEQ ID NO: 1427902 - RNA, 19 nt, Artificial Sequence
  Description of Artificial Sequence: Synthetic oligonucleotide
gguuugguugcuugguaug

SEQ ID NO: 1427903 - RNA, 19 nt, Artificial Sequence
  Description of Artificial Sequence: Synthetic oligonucleotide
caggcguucugagagggag

SEQ ID NO: 1427904 - RNA, 19 nt, Artificial Sequence
  Description of Artificial Sequence: Synthetic oligonucleotide
uagagaggaccuaggcuau

SEQ ID NO: 1427905 - RNA, 19 nt, Artificial Sequence
  Description of Artificial Sequence: Synthetic oligonucleotide
aaccccggcaacagggaag

SEQ ID NO: 1427906 - RNA, 19 nt, Artificial Sequence
  Description of Artificial Sequence: Synthetic oligonucleotide
agcgauuguucggaucagg

SEQ ID NO: 1427907 - RNA, 19 nt, Artificial Sequence
  Description of Artificial Sequence: Synthetic oligonucleotide
caucuaguuuaagaacaug

SEQ ID NO: 1427908 - RNA, 19 nt, Artificial Sequence
  Description of Artificial Sequence: Synthetic oligonucleotide
aaagaagcuggcaguggaa

SEQ ID NO: 1427909 - RNA, 19 nt, Artificial Sequence
  Description of Artificial Sequence: Synthetic oligonucleotide
acugcccuauucaucuggg

SEQ ID NO: 1427910 - RNA, 19 nt, Artificial Sequence
  Description of Artificial Sequence: Synthetic oligonucleotide
guggaagaccuuucaccgc

SEQ ID NO: 1427911 - RNA, 19 nt, Artificial Sequence
  Description of Artificial Sequence: Synthetic oligonucleotide
cagacugcccuauucaucu

SEQ ID NO: 1427912 - RNA, 19 nt, Artificial Sequence
  Description of Artificial Sequence: Synthetic oligonucleotide
cucagaguauguccacaug

SEQ ID NO: 1427913 - RNA, 19 nt, Artificial Sequence
  Description of Artificial Sequence: Synthetic oligonucleotide
ugggcaaaccccggcaaca

SEQ ID NO: 1427914 - RNA, 19 nt, Artificial Sequence
  Description of Artificial Sequence: Synthetic oligonucleotide
guccgcaucugacaccaug

SEQ ID NO: 1427915 - RNA, 19 nt, Artificial Sequence
  Description of Artificial Sequence: Synthetic oligonucleotide
gagugcguacacauucaug

SEQ ID NO: 1427916 - RNA, 19 nt, Artificial Sequence
  Description of Artificial Sequence: Synthetic oligonucleotide
uugaccucugcucccuuuu

SEQ ID NO: 1427917 - RNA, 19 nt, Artificial Sequence
  Description of Artificial Sequence: Synthetic oligonucleotide
cuaggcuauggcguacagc

SEQ ID NO: 1427918 - RNA, 19 nt, Artificial Sequence
  Description of Artificial Sequence: Synthetic oligonucleotide
agagugcguacacauucau

SEQ ID NO: 1427919 - RNA, 19 nt, Artificial Sequence
  Description of Artificial Sequence: Synthetic oligonucleotide
ccuuaauucaaagugucca

SEQ ID NO: 1427920 - RNA, 19 nt, Artificial Sequence
  Description of Artificial Sequence: Synthetic oligonucleotide
aggcuauucuaugaguaau

SEQ ID NO: 1427921 - RNA, 19 nt, Artificial Sequence
  Description of Artificial Sequence: Synthetic oligonucleotide
agugcacggggcuuccagu

SEQ ID NO: 1427922 - RNA, 19 nt, Artificial Sequence
  Description of Artificial Sequence: Synthetic oligonucleotide
auucuaugaguaauaggua

SEQ ID NO: 1427923 - RNA, 19 nt, Artificial Sequence
  Description of Artificial Sequence: Synthetic oligonucleotide
gugaugugcugccucaaaa

SEQ ID NO: 1427924 - RNA, 19 nt, Artificial Sequence
  Description of Artificial Sequence: Synthetic oligonucleotide
ugagcacaauacagucagu

SEQ ID NO: 1427925 - RNA, 19 nt, Artificial Sequence
  Description of Artificial Sequence: Synthetic oligonucleotide
aauguaccacauacuggaa

SEQ ID NO: 1427926 - RNA, 19 nt, Artificial Sequence
  Description of Artificial Sequence: Synthetic oligonucleotide
uugguaugaggaggggaga

SEQ ID NO: 1427927 - RNA, 19 nt, Artificial Sequence
  Description of Artificial Sequence: Synthetic oligonucleotide
guuagcugugccagacugc

SEQ ID NO: 1427928 - RNA, 19 nt, Artificial Sequence
  Description of Artificial Sequence: Synthetic oligonucleotide
gguaugaggaggggagacg

SEQ ID NO: 1427929 - RNA, 19 nt, Artificial Sequence
  Description of Artificial Sequence: Synthetic oligonucleotide
ugcuugguaugaggagggg

SEQ ID NO: 1427930 - RNA, 19 nt, Artificial Sequence
  Description of Artificial Sequence: Synthetic oligonucleotide
cauuuucuauagcucaaua

SEQ ID NO: 1427931 - RNA, 19 nt, Artificial Sequence
  Description of Artificial Sequence: Synthetic oligonucleotide
ucucaagauuucccuucau

SEQ ID NO: 1427932 - RNA, 19 nt, Artificial Sequence
  Description of Artificial Sequence: Synthetic oligonucleotide
ggcauaguguuucaaguua

SEQ ID NO: 1427933 - RNA, 19 nt, Artificial Sequence
  Description of Artificial Sequence: Synthetic oligonucleotide
gggcuguucgguuguaacc

SEQ ID NO: 1427934 - RNA, 19 nt, Artificial Sequence
  Description of Artificial Sequence: Synthetic oligonucleotide
ugagugguguaucguuguu

SEQ ID NO: 1427935 - RNA, 19 nt, Artificial Sequence
  Description of Artificial Sequence: Synthetic oligonucleotide
gagacggugcacacauuac

SEQ ID NO: 1427936 - RNA, 19 nt, Artificial Sequence
  Description of Artificial Sequence: Synthetic oligonucleotide
gugggugcaguucacgucu

SEQ ID NO: 1427937 - RNA, 19 nt, Artificial Sequence
  Description of Artificial Sequence: Synthetic oligonucleotide
caggcauaguguuucaagu

SEQ ID NO: 1427938 - RNA, 19 nt, Artificial Sequence
  Description of Artificial Sequence: Synthetic oligonucleotide
ugugccgugggugcaguuc

SEQ ID NO: 1427939 - RNA, 19 nt, Artificial Sequence
  Description of Artificial Sequence: Synthetic oligonucleotide
uguaaccauccagagcauu

SEQ ID NO: 1427940 - RNA, 19 nt, Artificial Sequence
  Description of Artificial Sequence: Synthetic oligonucleotide
cacuucucuuggcauggug

SEQ ID NO: 1427941 - RNA, 19 nt, Artificial Sequence
  Description of Artificial Sequence: Synthetic oligonucleotide
cgauuguucggaucaggcg

SEQ ID NO: 1427942 - RNA, 19 nt, Artificial Sequence
  Description of Artificial Sequence: Synthetic oligonucleotide
gagagugcguacacauuca

SEQ ID NO: 1427943 - RNA, 19 nt, Artificial Sequence
  Description of Artificial Sequence: Synthetic oligonucleotide
ucaggcguucugagaggga

SEQ ID NO: 1427944 - RNA, 19 nt, Artificial Sequence
  Description of Artificial Sequence: Synthetic oligonucleotide
cgggcaagugucuuaagag

SEQ ID NO: 1427945 - RNA, 19 nt, Artificial Sequence
  Description of Artificial Sequence: Synthetic oligonucleotide
gcuauggcguacagcauag

SEQ ID NO: 1427946 - RNA, 19 nt, Artificial Sequence
  Description of Artificial Sequence: Synthetic oligonucleotide
cuguucgguuguaaccauc

SEQ ID NO: 1427947 - RNA, 19 nt, Artificial Sequence
  Description of Artificial Sequence: Synthetic oligonucleotide
cagugcacggggcuuccag

SEQ ID NO: 1427948 - RNA, 19 nt, Artificial Sequence
  Description of Artificial Sequence: Synthetic oligonucleotide
caggcuauucuaugaguaa

SEQ ID NO: 1427949 - RNA, 19 nt, Artificial Sequence
  Description of Artificial Sequence: Synthetic oligonucleotide
auagcgggcaagugucuua

SEQ ID NO: 1427950 - RNA, 19 nt, Artificial Sequence
  Description of Artificial Sequence: Synthetic oligonucleotide
auugggguuugcaccauau

SEQ ID NO: 1427951 - RNA, 19 nt, Artificial Sequence
  Description of Artificial Sequence: Synthetic oligonucleotide
ggagacggugcacacauua

SEQ ID NO: 1427952 - RNA, 19 nt, Artificial Sequence
  Description of Artificial Sequence: Synthetic oligonucleotide
cugaugagauccucuacgu

SEQ ID NO: 1427953 - RNA, 19 nt, Artificial Sequence
  Description of Artificial Sequence: Synthetic oligonucleotide
auugaccucugcucccuuu

SEQ ID NO: 1427954 - RNA, 19 nt, Artificial Sequence
  Description of Artificial Sequence: Synthetic oligonucleotide
gguagagaggaccuaggcu

SEQ ID NO: 1427955 - RNA, 19 nt, Artificial Sequence
  Description of Artificial Sequence: Synthetic oligonucleotide
cagaguauguccacaugcu

SEQ ID NO: 1427956 - RNA, 19 nt, Artificial Sequence
  Description of Artificial Sequence: Synthetic oligonucleotide
acggggcuuccagugugcc

SEQ ID NO: 1427957 - RNA, 19 nt, Artificial Sequence
  Description of Artificial Sequence: Synthetic oligonucleotide
ggccaauuccaaagaagcc

SEQ ID NO: 1427958 - RNA, 19 nt, Artificial Sequence
  Description of Artificial Sequence: Synthetic oligonucleotide
gcgauuguucggaucaggc

SEQ ID NO: 1427959 - RNA, 19 nt, Artificial Sequence
  Description of Artificial Sequence: Synthetic oligonucleotide
ggcuguucgguuguaacca

SEQ ID NO: 1427960 - RNA, 19 nt, Artificial Sequence
  Description of Artificial Sequence: Synthetic oligonucleotide
gagcacaauacagucaguu

SEQ ID NO: 1427961 - RNA, 19 nt, Artificial Sequence
  Description of Artificial Sequence: Synthetic oligonucleotide
uagcgggcaagugucuuaa

SEQ ID NO: 1427962 - RNA, 19 nt, Artificial Sequence
  Description of Artificial Sequence: Synthetic oligonucleotide
ggcaaaccccggcaacagg

SEQ ID NO: 1427963 - RNA, 19 nt, Artificial Sequence
  Description of Artificial Sequence: Synthetic oligonucleotide
guguaucguuguuguaauc

SEQ ID NO: 1427964 - RNA, 19 nt, Artificial Sequence
  Description of Artificial Sequence: Synthetic oligonucleotide
agacugcccuauucaucug

SEQ ID NO: 1427965 - RNA, 19 nt, Artificial Sequence
  Description of Artificial Sequence: Synthetic oligonucleotide
gugccgugggugcaguuca

SEQ ID NO: 1427966 - RNA, 19 nt, Artificial Sequence
  Description of Artificial Sequence: Synthetic oligonucleotide
uguucggaucaggcguucu

SEQ ID NO: 1427967 - RNA, 19 nt, Artificial Sequence
  Description of Artificial Sequence: Synthetic oligonucleotide
caacuucaucuaguuuaag

SEQ ID NO: 1427968 - RNA, 19 nt, Artificial Sequence
  Description of Artificial Sequence: Synthetic oligonucleotide
agggaguauuugcucugaa

SEQ ID NO: 1427969 - RNA, 19 nt, Artificial Sequence
  Description of Artificial Sequence: Synthetic oligonucleotide
uucaccgcauugggcaggu

SEQ ID NO: 1427970 - RNA, 19 nt, Artificial Sequence
  Description of Artificial Sequence: Synthetic oligonucleotide
caguccgcaucugacacca

SEQ ID NO: 1427971 - RNA, 19 nt, Artificial Sequence
  Description of Artificial Sequence: Synthetic oligonucleotide
uuuggguaggcaggccaau

SEQ ID NO: 1427972 - RNA, 19 nt, Artificial Sequence
  Description of Artificial Sequence: Synthetic oligonucleotide
cacggggcuuccagugugc

SEQ ID NO: 1427973 - RNA, 19 nt, Artificial Sequence
  Description of Artificial Sequence: Synthetic oligonucleotide
cuuucccuaccauuuucua

SEQ ID NO: 1427974 - RNA, 19 nt, Artificial Sequence
  Description of Artificial Sequence: Synthetic oligonucleotide
guaccacauacuggaacuc

SEQ ID NO: 1427975 - RNA, 19 nt, Artificial Sequence
  Description of Artificial Sequence: Synthetic oligonucleotide
auuguucggaucaggcguu

SEQ ID NO: 1427976 - RNA, 19 nt, Artificial Sequence
  Description of Artificial Sequence: Synthetic oligonucleotide
caaaccccggcaacaggga

SEQ ID NO: 1427977 - RNA, 19 nt, Artificial Sequence
  Description of Artificial Sequence: Synthetic oligonucleotide
ggcuauggcguacagcaua

SEQ ID NO: 1427978 - RNA, 19 nt, Artificial Sequence
  Description of Artificial Sequence: Synthetic oligonucleotide
caugagaaagagacaggau

SEQ ID NO: 1427979 - RNA, 19 nt, Artificial Sequence
  Description of Artificial Sequence: Synthetic oligonucleotide
agcgggcaagugucuuaag

SEQ ID NO: 1427980 - RNA, 19 nt, Artificial Sequence
  Description of Artificial Sequence: Synthetic oligonucleotide
cuaggagagugcguacaca

SEQ ID NO: 1427981 - RNA, 19 nt, Artificial Sequence
  Description of Artificial Sequence: Synthetic oligonucleotide
ggagaugggugucuggccu

SEQ ID NO: 1427982 - RNA, 19 nt, Artificial Sequence
  Description of Artificial Sequence: Synthetic oligonucleotide
cacacauuacugcugugau

SEQ ID NO: 1427983 - RNA, 19 nt, Artificial Sequence
  Description of Artificial Sequence: Synthetic oligonucleotide
cuauggcguacagcauagc

SEQ ID NO: 1427984 - RNA, 19 nt, Artificial Sequence
  Description of Artificial Sequence: Synthetic oligonucleotide
guacagcauagcgggcaag

SEQ ID NO: 1427985 - RNA, 19 nt, Artificial Sequence
  Description of Artificial Sequence: Synthetic oligonucleotide
ccggcaacagggaaggaca

SEQ ID NO: 1427986 - RNA, 19 nt, Artificial Sequence
  Description of Artificial Sequence: Synthetic oligonucleotide
ccucuacguugucaugugg

SEQ ID NO: 1427987 - RNA, 19 nt, Artificial Sequence
  Description of Artificial Sequence: Synthetic oligonucleotide
agcccaacugaguggugua

SEQ ID NO: 1427988 - RNA, 19 nt, Artificial Sequence
  Description of Artificial Sequence: Synthetic oligonucleotide
agagaggaccuaggcuaug

SEQ ID NO: 1427989 - RNA, 19 nt, Artificial Sequence
  Description of Artificial Sequence: Synthetic oligonucleotide
gguguaucguuguuguaau

SEQ ID NO: 1427990 - RNA, 19 nt, Artificial Sequence
  Description of Artificial Sequence: Synthetic oligonucleotide
gaagcccauuuuauauucu

SEQ ID NO: 1427991 - RNA, 19 nt, Artificial Sequence
  Description of Artificial Sequence: Synthetic oligonucleotide
cuacguugucaugugggaa

SEQ ID NO: 1427992 - RNA, 19 nt, Artificial Sequence
  Description of Artificial Sequence: Synthetic oligonucleotide
aaggagcggauggcagcga

SEQ ID NO: 1427993 - RNA, 19 nt, Artificial Sequence
  Description of Artificial Sequence: Synthetic oligonucleotide
gcugagcacaauacaguca

SEQ ID NO: 1427994 - RNA, 19 nt, Artificial Sequence
  Description of Artificial Sequence: Synthetic oligonucleotide
gaccuaggcuauggcguac

SEQ ID NO: 1427995 - RNA, 19 nt, Artificial Sequence
  Description of Artificial Sequence: Synthetic oligonucleotide
agcggauggcagcgauugu

SEQ ID NO: 1427996 - RNA, 19 nt, Artificial Sequence
  Description of Artificial Sequence: Synthetic oligonucleotide
gcacggggcuuccagugug

SEQ ID NO: 1427997 - RNA, 19 nt, Artificial Sequence
  Description of Artificial Sequence: Synthetic oligonucleotide
guccucuaacuagcagagc

SEQ ID NO: 1427998 - RNA, 19 nt, Artificial Sequence
  Description of Artificial Sequence: Synthetic oligonucleotide
caugucuccuccaggcuau

SEQ ID NO: 1427999 - RNA, 19 nt, Artificial Sequence
  Description of Artificial Sequence: Synthetic oligonucleotide
uuguucggaucaggcguuc

SEQ ID NO: 1428000 - RNA, 19 nt, Artificial Sequence
  Description of Artificial Sequence: Synthetic oligonucleotide
gcuugguaugaggagggga

SEQ ID NO: 1428001 - RNA, 19 nt, Artificial Sequence
  Description of Artificial Sequence: Synthetic oligonucleotide
gcaggccaauuccaaagaa

SEQ ID NO: 1428002 - RNA, 19 nt, Artificial Sequence
  Description of Artificial Sequence: Synthetic oligonucleotide
ggcagcgauuguucggauc

SEQ ID NO: 1428003 - RNA, 19 nt, Artificial Sequence
  Description of Artificial Sequence: Synthetic oligonucleotide
ggcuauucuaugaguaaua

SEQ ID NO: 1428004 - RNA, 19 nt, Artificial Sequence
  Description of Artificial Sequence: Synthetic oligonucleotide
uguugccauccagugcauu

SEQ ID NO: 1428005 - RNA, 19 nt, Artificial Sequence
  Description of Artificial Sequence: Synthetic oligonucleotide
cauugacagaggcuccacu

SEQ ID NO: 1428006 - RNA, 19 nt, Artificial Sequence
  Description of Artificial Sequence: Synthetic oligonucleotide
cagcgauuguucggaucag

SEQ ID NO: 1428007 - RNA, 19 nt, Artificial Sequence
  Description of Artificial Sequence: Synthetic oligonucleotide
cauggcagcccaacugagu

SEQ ID NO: 1428008 - RNA, 19 nt, Artificial Sequence
  Description of Artificial Sequence: Synthetic oligonucleotide
gggcaaaccccggcaacag

SEQ ID NO: 1428009 - RNA, 19 nt, Artificial Sequence
  Description of Artificial Sequence: Synthetic oligonucleotide
aggggagacggugcacaca

SEQ ID NO: 1428010 - RNA, 19 nt, Artificial Sequence
  Description of Artificial Sequence: Synthetic oligonucleotide
ccaaacuugcauacagaua

SEQ ID NO: 1428011 - RNA, 19 nt, Artificial Sequence
  Description of Artificial Sequence: Synthetic oligonucleotide
caagaaggaugcugacacu

SEQ ID NO: 1428012 - RNA, 19 nt, Artificial Sequence
  Description of Artificial Sequence: Synthetic oligonucleotide
ggggagacggugcacacau

SEQ ID NO: 1428013 - RNA, 19 nt, Artificial Sequence
  Description of Artificial Sequence: Synthetic oligonucleotide
gcguacagcauagcgggca

SEQ ID NO: 1428014 - RNA, 19 nt, Artificial Sequence
  Description of Artificial Sequence: Synthetic oligonucleotide
gauggcggacaugucuccu

SEQ ID NO: 1428015 - RNA, 19 nt, Artificial Sequence
  Description of Artificial Sequence: Synthetic oligonucleotide
aggagagugcguacacauu

SEQ ID NO: 1428016 - RNA, 19 nt, Artificial Sequence
  Description of Artificial Sequence: Synthetic oligonucleotide
ggguuugguugcuugguau

SEQ ID NO: 1428017 - RNA, 19 nt, Artificial Sequence
  Description of Artificial Sequence: Synthetic oligonucleotide
aggcguucugagagggagu

SEQ ID NO: 1428018 - RNA, 19 nt, Artificial Sequence
  Description of Artificial Sequence: Synthetic oligonucleotide
ccaaguccucuaacuagca

SEQ ID NO: 1428019 - RNA, 19 nt, Artificial Sequence
  Description of Artificial Sequence: Synthetic oligonucleotide
ccuaggcuauggcguacag

SEQ ID NO: 1428020 - RNA, 19 nt, Artificial Sequence
  Description of Artificial Sequence: Synthetic oligonucleotide
ggggcuuccagugugccgu

SEQ ID NO: 1428021 - RNA, 19 nt, Artificial Sequence
  Description of Artificial Sequence: Synthetic oligonucleotide
gaccucacccagaguuguc

SEQ ID NO: 1428022 - RNA, 19 nt, Artificial Sequence
  Description of Artificial Sequence: Synthetic oligonucleotide
ggaccuaggcuauggcgua

SEQ ID NO: 1428023 - RNA, 19 nt, Artificial Sequence
  Description of Artificial Sequence: Synthetic oligonucleotide
gccgugggugcaguucacg

SEQ ID NO: 1428024 - RNA, 19 nt, Artificial Sequence
  Description of Artificial Sequence: Synthetic oligonucleotide
gagggcuguucgguuguaa

SEQ ID NO: 1428025 - RNA, 19 nt, Artificial Sequence
  Description of Artificial Sequence: Synthetic oligonucleotide
gcucagaguauguccacau

SEQ ID NO: 1428026 - RNA, 19 nt, Artificial Sequence
  Description of Artificial Sequence: Synthetic oligonucleotide
cgugggugcaguucacguc

SEQ ID NO: 1428027 - RNA, 19 nt, Artificial Sequence
  Description of Artificial Sequence: Synthetic oligonucleotide
cauugggguuugcaccaua

SEQ ID NO: 1428028 - RNA, 19 nt, Artificial Sequence
  Description of Artificial Sequence: Synthetic oligonucleotide
cucuauggaggagcucaaa

SEQ ID NO: 1428029 - RNA, 19 nt, Artificial Sequence
  Description of Artificial Sequence: Synthetic oligonucleotide
cccaacugagugguguauc

SEQ ID NO: 1428030 - RNA, 19 nt, Artificial Sequence
  Description of Artificial Sequence: Synthetic oligonucleotide
cagcccaacugaguggugu

SEQ ID NO: 1428031 - RNA, 19 nt, Artificial Sequence
  Description of Artificial Sequence: Synthetic oligonucleotide
caacugagugguguaucgu

SEQ ID NO: 1428032 - RNA, 19 nt, Artificial Sequence
  Description of Artificial Sequence: Synthetic oligonucleotide
ggcguacagcauagcgggc

SEQ ID NO: 1428033 - RNA, 19 nt, Artificial Sequence
  Description of Artificial Sequence: Synthetic oligonucleotide
guaguuccagccagcuuuu

SEQ ID NO: 1428034 - RNA, 19 nt, Artificial Sequence
  Description of Artificial Sequence: Synthetic oligonucleotide
ggcggacaugucuccucca

SEQ ID NO: 1428035 - RNA, 19 nt, Artificial Sequence
  Description of Artificial Sequence: Synthetic oligonucleotide
ggcaacagggaaggacaaa

SEQ ID NO: 1428036 - RNA, 19 nt, Artificial Sequence
  Description of Artificial Sequence: Synthetic oligonucleotide
ccgcaucugacaccaugca

SEQ ID NO: 1428037 - RNA, 19 nt, Artificial Sequence
  Description of Artificial Sequence: Synthetic oligonucleotide
gggguaguuccagccagcu

SEQ ID NO: 1428038 - RNA, 19 nt, Artificial Sequence
  Description of Artificial Sequence: Synthetic oligonucleotide
gcuguucgguuguaaccau

SEQ ID NO: 1428039 - RNA, 19 nt, Artificial Sequence
  Description of Artificial Sequence: Synthetic oligonucleotide
cggaucaggcguucugaga

SEQ ID NO: 1428040 - RNA, 19 nt, Artificial Sequence
  Description of Artificial Sequence: Synthetic oligonucleotide
gcggauggcagcgauuguu

SEQ ID NO: 1428041 - RNA, 19 nt, Artificial Sequence
  Description of Artificial Sequence: Synthetic oligonucleotide
cguacagcauagcgggcaa

SEQ ID NO: 1428042 - RNA, 19 nt, Artificial Sequence
  Description of Artificial Sequence: Synthetic oligonucleotide
ccgugggugcaguucacgu

SEQ ID NO: 1428043 - RNA, 19 nt, Artificial Sequence
  Description of Artificial Sequence: Synthetic oligonucleotide
cuguugccauccagugcau

SEQ ID NO: 1428044 - RNA, 19 nt, Artificial Sequence
  Description of Artificial Sequence: Synthetic oligonucleotide
cuguucccaguuccacuuu

SEQ ID NO: 1428045 - RNA, 19 nt, Artificial Sequence
  Description of Artificial Sequence: Synthetic oligonucleotide
gcgcagugcacggggcuuc

SEQ ID NO: 1428046 - RNA, 19 nt, Artificial Sequence
  Description of Artificial Sequence: Synthetic oligonucleotide
cguucugagagggaguauu

SEQ ID NO: 1428047 - RNA, 19 nt, Artificial Sequence
  Description of Artificial Sequence: Synthetic oligonucleotide
cauugaccucugcucccuu

SEQ ID NO: 1428048 - RNA, 19 nt, Artificial Sequence
  Description of Artificial Sequence: Synthetic oligonucleotide
ggguaguuccagccagcuu

SEQ ID NO: 1428049 - RNA, 19 nt, Artificial Sequence
  Description of Artificial Sequence: Synthetic oligonucleotide
aguccgcaucugacaccau

SEQ ID NO: 1428050 - RNA, 19 nt, Artificial Sequence
  Description of Artificial Sequence: Synthetic oligonucleotide
cguacacauucaugauugu

SEQ ID NO: 1428051 - RNA, 19 nt, Artificial Sequence
  Description of Artificial Sequence: Synthetic oligonucleotide
cgcagugcacggggcuucc

SEQ ID NO: 1428052 - RNA, 19 nt, Artificial Sequence
  Description of Artificial Sequence: Synthetic oligonucleotide
ccagugcauugggguuugc

SEQ ID NO: 1428053 - RNA, 19 nt, Artificial Sequence
  Description of Artificial Sequence: Synthetic oligonucleotide
gugugccgugggugcaguu

SEQ ID NO: 1428054 - RNA, 19 nt, Artificial Sequence
  Description of Artificial Sequence: Synthetic oligonucleotide
gcccaacugagugguguau

SEQ ID NO: 1428055 - RNA, 19 nt, Artificial Sequence
  Description of Artificial Sequence: Synthetic oligonucleotide
gggagacggugcacacauu

SEQ ID NO: 1428056 - RNA, 19 nt, Artificial Sequence
  Description of Artificial Sequence: Synthetic oligonucleotide
ccccggcaacagggaagga

SEQ ID NO: 1428057 - RNA, 19 nt, Artificial Sequence
  Description of Artificial Sequence: Synthetic oligonucleotide
aauaaaucuacccacaauc

SEQ ID NO: 1428058 - RNA, 19 nt, Artificial Sequence
  Description of Artificial Sequence: Synthetic oligonucleotide
acuaaugaaaagcugaacc

SEQ ID NO: 1428059 - RNA, 19 nt, Artificial Sequence
  Description of Artificial Sequence: Synthetic oligonucleotide
auaauaguagcacagaaag

SEQ ID NO: 1428060 - RNA, 19 nt, Artificial Sequence
  Description of Artificial Sequence: Synthetic oligonucleotide
aguguuuugcaucauaggc

SEQ ID NO: 1428061 - RNA, 19 nt, Artificial Sequence
  Description of Artificial Sequence: Synthetic oligonucleotide
aauaguagcacagaaagug

SEQ ID NO: 1428062 - RNA, 19 nt, Artificial Sequence
  Description of Artificial Sequence: Synthetic oligonucleotide
uuuucugaaagcaauagga

SEQ ID NO: 1428063 - RNA, 19 nt, Artificial Sequence
  Description of Artificial Sequence: Synthetic oligonucleotide
ucuuauagagagaugacag

SEQ ID NO: 1428064 - RNA, 19 nt, Artificial Sequence
  Description of Artificial Sequence: Synthetic oligonucleotide
uuaucauggaaacugacca

SEQ ID NO: 1428065 - RNA, 19 nt, Artificial Sequence
  Description of Artificial Sequence: Synthetic oligonucleotide
uaggauuccaacaugaugu

SEQ ID NO: 1428066 - RNA, 19 nt, Artificial Sequence
  Description of Artificial Sequence: Synthetic oligonucleotide
acauguacuaaugaaaagc

SEQ ID NO: 1428067 - RNA, 19 nt, Artificial Sequence
  Description of Artificial Sequence: Synthetic oligonucleotide
caaguaauaucaaagacac

SEQ ID NO: 1428068 - RNA, 19 nt, Artificial Sequence
  Description of Artificial Sequence: Synthetic oligonucleotide
uucaagaguaacuggaggg

SEQ ID NO: 1428069 - RNA, 19 nt, Artificial Sequence
  Description of Artificial Sequence: Synthetic oligonucleotide
ugcucauaaaaguagagug

SEQ ID NO: 1428070 - RNA, 19 nt, Artificial Sequence
  Description of Artificial Sequence: Synthetic oligonucleotide
uccuccauaauaauaguag

SEQ ID NO: 1428071 - RNA, 19 nt, Artificial Sequence
  Description of Artificial Sequence: Synthetic oligonucleotide
ucugagauguguauuuagg

SEQ ID NO: 1428072 - RNA, 19 nt, Artificial Sequence
  Description of Artificial Sequence: Synthetic oligonucleotide
uucgcuaguaaacaaagcu

SEQ ID NO: 1428073 - RNA, 19 nt, Artificial Sequence
  Description of Artificial Sequence: Synthetic oligonucleotide
aggcuuaauaaaucuaccc

SEQ ID NO: 1428074 - RNA, 19 nt, Artificial Sequence
  Description of Artificial Sequence: Synthetic oligonucleotide
ugcauuuguuagcugaugg

SEQ ID NO: 1428075 - RNA, 19 nt, Artificial Sequence
  Description of Artificial Sequence: Synthetic oligonucleotide
aacuugugcuaacucaugg

SEQ ID NO: 1428076 - RNA, 19 nt, Artificial Sequence
  Description of Artificial Sequence: Synthetic oligonucleotide
aguaauaucaaagacacua

SEQ ID NO: 1428077 - RNA, 19 nt, Artificial Sequence
  Description of Artificial Sequence: Synthetic oligonucleotide
uugccaaguaauaucaaag

SEQ ID NO: 1428078 - RNA, 19 nt, Artificial Sequence
  Description of Artificial Sequence: Synthetic oligonucleotide
ugcauaucgaaugugcucg

SEQ ID NO: 1428079 - RNA, 19 nt, Artificial Sequence
  Description of Artificial Sequence: Synthetic oligonucleotide
uucuguuaacucaggaugg

SEQ ID NO: 1428080 - RNA, 19 nt, Artificial Sequence
  Description of Artificial Sequence: Synthetic oligonucleotide
uuauaggauuccaacauga

SEQ ID NO: 1428081 - RNA, 19 nt, Artificial Sequence
  Description of Artificial Sequence: Synthetic oligonucleotide
uguguauuuaggcagcugu

SEQ ID NO: 1428082 - RNA, 19 nt, Artificial Sequence
  Description of Artificial Sequence: Synthetic oligonucleotide
ucgagugaaaguuucacug

SEQ ID NO: 1428083 - RNA, 19 nt, Artificial Sequence
  Description of Artificial Sequence: Synthetic oligonucleotide
auuaucauggaaacugacc

SEQ ID NO: 1428084 - RNA, 19 nt, Artificial Sequence
  Description of Artificial Sequence: Synthetic oligonucleotide
guaagcauugcugagaggc

SEQ ID NO: 1428085 - RNA, 19 nt, Artificial Sequence
  Description of Artificial Sequence: Synthetic oligonucleotide
uuacagauauccaucauau

SEQ ID NO: 1428086 - RNA, 19 nt, Artificial Sequence
  Description of Artificial Sequence: Synthetic oligonucleotide
uguaaugacaguguuaaaa

SEQ ID NO: 1428087 - RNA, 19 nt, Artificial Sequence
  Description of Artificial Sequence: Synthetic oligonucleotide
uguuaaaacugaauuucug

SEQ ID NO: 1428088 - RNA, 19 nt, Artificial Sequence
  Description of Artificial Sequence: Synthetic oligonucleotide
aagugggacaaguucuucg

SEQ ID NO: 1428089 - RNA, 19 nt, Artificial Sequence
  Description of Artificial Sequence: Synthetic oligonucleotide
aaguguuuugcaucauagg

SEQ ID NO: 1428090 - RNA, 19 nt, Artificial Sequence
  Description of Artificial Sequence: Synthetic oligonucleotide
aacuggagggcuuguuucc

SEQ ID NO: 1428091 - RNA, 19 nt, Artificial Sequence
  Description of Artificial Sequence: Synthetic oligonucleotide
uuuguuagccucuggaugu

SEQ ID NO: 1428092 - RNA, 19 nt, Artificial Sequence
  Description of Artificial Sequence: Synthetic oligonucleotide
uuagcugauggcaaagccc

SEQ ID NO: 1428093 - RNA, 19 nt, Artificial Sequence
  Description of Artificial Sequence: Synthetic oligonucleotide
ucauguguagaacauauuu

SEQ ID NO: 1428094 - RNA, 19 nt, Artificial Sequence
  Description of Artificial Sequence: Synthetic oligonucleotide
aggauuaucauggaaacug

SEQ ID NO: 1428095 - RNA, 19 nt, Artificial Sequence
  Description of Artificial Sequence: Synthetic oligonucleotide
aagugcauuuguuagcuga

SEQ ID NO: 1428096 - RNA, 19 nt, Artificial Sequence
  Description of Artificial Sequence: Synthetic oligonucleotide
uuuauaggauuccaacaug

SEQ ID NO: 1428097 - RNA, 19 nt, Artificial Sequence
  Description of Artificial Sequence: Synthetic oligonucleotide
ugagauguguauuuaggca

SEQ ID NO: 1428098 - RNA, 19 nt, Artificial Sequence
  Description of Artificial Sequence: Synthetic oligonucleotide
ugguccauggccuucagcc

SEQ ID NO: 1428099 - RNA, 19 nt, Artificial Sequence
  Description of Artificial Sequence: Synthetic oligonucleotide
ugguugaauaaacuugugc

SEQ ID NO: 1428100 - RNA, 19 nt, Artificial Sequence
  Description of Artificial Sequence: Synthetic oligonucleotide
agaggcuuaauaaaucuac

SEQ ID NO: 1428101 - RNA, 19 nt, Artificial Sequence
  Description of Artificial Sequence: Synthetic oligonucleotide
auaacugcacacgacuugc

SEQ ID NO: 1428102 - RNA, 19 nt, Artificial Sequence
  Description of Artificial Sequence: Synthetic oligonucleotide
aaacguaucuguugcauau

SEQ ID NO: 1428103 - RNA, 19 nt, Artificial Sequence
  Description of Artificial Sequence: Synthetic oligonucleotide
uaucauguguagaacauau

SEQ ID NO: 1428104 - RNA, 19 nt, Artificial Sequence
  Description of Artificial Sequence: Synthetic oligonucleotide
gauuccaacaugauguggc

SEQ ID NO: 1428105 - RNA, 19 nt, Artificial Sequence
  Description of Artificial Sequence: Synthetic oligonucleotide
agcaaggacacccaaggag

SEQ ID NO: 1428106 - RNA, 19 nt, Artificial Sequence
  Description of Artificial Sequence: Synthetic oligonucleotide
auguacugaggucagcugg

SEQ ID NO: 1428107 - RNA, 19 nt, Artificial Sequence
  Description of Artificial Sequence: Synthetic oligonucleotide
aaaucuacccacaaucuga

SEQ ID NO: 1428108 - RNA, 19 nt, Artificial Sequence
  Description of Artificial Sequence: Synthetic oligonucleotide
aaagacacuaaaauauacu

SEQ ID NO: 1428109 - RNA, 19 nt, Artificial Sequence
  Description of Artificial Sequence: Synthetic oligonucleotide
uucugauuaauacuugcaa

SEQ ID NO: 1428110 - RNA, 19 nt, Artificial Sequence
  Description of Artificial Sequence: Synthetic oligonucleotide
uccauaauaauaguagcac

SEQ ID NO: 1428111 - RNA, 19 nt, Artificial Sequence
  Description of Artificial Sequence: Synthetic oligonucleotide
agacucuaaaguuugauuu

SEQ ID NO: 1428112 - RNA, 19 nt, Artificial Sequence
  Description of Artificial Sequence: Synthetic oligonucleotide
aauaucaaagacacuaaaa

SEQ ID NO: 1428113 - RNA, 19 nt, Artificial Sequence
  Description of Artificial Sequence: Synthetic oligonucleotide
ucgcuaguaaacaaagcug

SEQ ID NO: 1428114 - RNA, 19 nt, Artificial Sequence
  Description of Artificial Sequence: Synthetic oligonucleotide
uuuugaacgaacuggggau

SEQ ID NO: 1428115 - RNA, 19 nt, Artificial Sequence
  Description of Artificial Sequence: Synthetic oligonucleotide
auaggauuccaacaugaug

SEQ ID NO: 1428116 - RNA, 19 nt, Artificial Sequence
  Description of Artificial Sequence: Synthetic oligonucleotide
gaaacugaccauaccaucc

SEQ ID NO: 1428117 - RNA, 19 nt, Artificial Sequence
  Description of Artificial Sequence: Synthetic oligonucleotide
ugguaagcauugcugagag

SEQ ID NO: 1428118 - RNA, 19 nt, Artificial Sequence
  Description of Artificial Sequence: Synthetic oligonucleotide
aguaauagccugcucauaa

SEQ ID NO: 1428119 - RNA, 19 nt, Artificial Sequence
  Description of Artificial Sequence: Synthetic oligonucleotide
uccaagugggacaaguucu

SEQ ID NO: 1428120 - RNA, 19 nt, Artificial Sequence
  Description of Artificial Sequence: Synthetic oligonucleotide
agcaauaggacugaagaug

SEQ ID NO: 1428121 - RNA, 19 nt, Artificial Sequence
  Description of Artificial Sequence: Synthetic oligonucleotide
uauagagagaugacaggca

SEQ ID NO: 1428122 - RNA, 19 nt, Artificial Sequence
  Description of Artificial Sequence: Synthetic oligonucleotide
uggaagggcagguuuaaag

SEQ ID NO: 1428123 - RNA, 19 nt, Artificial Sequence
  Description of Artificial Sequence: Synthetic oligonucleotide
cugagauguguauuuaggc

SEQ ID NO: 1428124 - RNA, 19 nt, Artificial Sequence
  Description of Artificial Sequence: Synthetic oligonucleotide
acguaucuguugcauaucg

SEQ ID NO: 1428125 - RNA, 19 nt, Artificial Sequence
  Description of Artificial Sequence: Synthetic oligonucleotide
aauagccugcucauaaaag

SEQ ID NO: 1428126 - RNA, 19 nt, Artificial Sequence
  Description of Artificial Sequence: Synthetic oligonucleotide
auagccugcucauaaaagu

SEQ ID NO: 1428127 - RNA, 19 nt, Artificial Sequence
  Description of Artificial Sequence: Synthetic oligonucleotide
agucauuugcccuugcgcu

SEQ ID NO: 1428128 - RNA, 19 nt, Artificial Sequence
  Description of Artificial Sequence: Synthetic oligonucleotide
gauaacugcacacgacuug

SEQ ID NO: 1428129 - RNA, 19 nt, Artificial Sequence
  Description of Artificial Sequence: Synthetic oligonucleotide
uuguacuuugccaaguaau

SEQ ID NO: 1428130 - RNA, 19 nt, Artificial Sequence
  Description of Artificial Sequence: Synthetic oligonucleotide
uguacuuugccaaguaaua

SEQ ID NO: 1428131 - RNA, 19 nt, Artificial Sequence
  Description of Artificial Sequence: Synthetic oligonucleotide
ugccaaguaauaucaaaga

SEQ ID NO: 1428132 - RNA, 19 nt, Artificial Sequence
  Description of Artificial Sequence: Synthetic oligonucleotide
ugcaucauaggcuccauuc

SEQ ID NO: 1428133 - RNA, 19 nt, Artificial Sequence
  Description of Artificial Sequence: Synthetic oligonucleotide
ugggcguuaguuucaagag

SEQ ID NO: 1428134 - RNA, 19 nt, Artificial Sequence
  Description of Artificial Sequence: Synthetic oligonucleotide
gcagguuuaaagcacuucg

SEQ ID NO: 1428135 - RNA, 19 nt, Artificial Sequence
  Description of Artificial Sequence: Synthetic oligonucleotide
aaacugaccauaccauccu

SEQ ID NO: 1428136 - RNA, 19 nt, Artificial Sequence
  Description of Artificial Sequence: Synthetic oligonucleotide
aagcacuucgcuaguaaac

SEQ ID NO: 1428137 - RNA, 19 nt, Artificial Sequence
  Description of Artificial Sequence: Synthetic oligonucleotide
cuuuguuagccucuggaug

SEQ ID NO: 1428138 - RNA, 19 nt, Artificial Sequence
  Description of Artificial Sequence: Synthetic oligonucleotide
uucuugugagcccauacuc

SEQ ID NO: 1428139 - RNA, 19 nt, Artificial Sequence
  Description of Artificial Sequence: Synthetic oligonucleotide
ucuagagccccaagcacag

SEQ ID NO: 1428140 - RNA, 19 nt, Artificial Sequence
  Description of Artificial Sequence: Synthetic oligonucleotide
ucuguugcauaucgaaugu

SEQ ID NO: 1428141 - RNA, 19 nt, Artificial Sequence
  Description of Artificial Sequence: Synthetic oligonucleotide
uccagauaacugcacacga

SEQ ID NO: 1428142 - RNA, 19 nt, Artificial Sequence
  Description of Artificial Sequence: Synthetic oligonucleotide
agcccauacucuuuugaac

SEQ ID NO: 1428143 - RNA, 19 nt, Artificial Sequence
  Description of Artificial Sequence: Synthetic oligonucleotide
gagucauuugcccuugcgc

SEQ ID NO: 1428144 - RNA, 19 nt, Artificial Sequence
  Description of Artificial Sequence: Synthetic oligonucleotide
uggguuauugguugaauaa

SEQ ID NO: 1428145 - RNA, 19 nt, Artificial Sequence
  Description of Artificial Sequence: Synthetic oligonucleotide
uggcugacagccauggcag

SEQ ID NO: 1428146 - RNA, 19 nt, Artificial Sequence
  Description of Artificial Sequence: Synthetic oligonucleotide
ugugcucgccauuacaugu

SEQ ID NO: 1428147 - RNA, 19 nt, Artificial Sequence
  Description of Artificial Sequence: Synthetic oligonucleotide
gaccauaccauccuucuga

SEQ ID NO: 1428148 - RNA, 19 nt, Artificial Sequence
  Description of Artificial Sequence: Synthetic oligonucleotide
cauaccauccuucugauua

SEQ ID NO: 1428149 - RNA, 19 nt, Artificial Sequence
  Description of Artificial Sequence: Synthetic oligonucleotide
aagcccagcaaacguaucu

SEQ ID NO: 1428150 - RNA, 19 nt, Artificial Sequence
  Description of Artificial Sequence: Synthetic oligonucleotide
uccgauggguuauugguug

SEQ ID NO: 1428151 - RNA, 19 nt, Artificial Sequence
  Description of Artificial Sequence: Synthetic oligonucleotide
caagauauggaagggcagg

SEQ ID NO: 1428152 - RNA, 19 nt, Artificial Sequence
  Description of Artificial Sequence: Synthetic oligonucleotide
augggcguuaguuucaaga

SEQ ID NO: 1428153 - RNA, 19 nt, Artificial Sequence
  Description of Artificial Sequence: Synthetic oligonucleotide
ucaagaguaacuggagggc

SEQ ID NO: 1428154 - RNA, 19 nt, Artificial Sequence
  Description of Artificial Sequence: Synthetic oligonucleotide
agguuuaaagcacuucgcu

SEQ ID NO: 1428155 - RNA, 19 nt, Artificial Sequence
  Description of Artificial Sequence: Synthetic oligonucleotide
auugcugagaggcuuaaua

SEQ ID NO: 1428156 - RNA, 19 nt, Artificial Sequence
  Description of Artificial Sequence: Synthetic oligonucleotide
caaagucaggaacacuggg

SEQ ID NO: 1428157 - RNA, 19 nt, Artificial Sequence
  Description of Artificial Sequence: Synthetic oligonucleotide
guuagcugauggcaaagcc

SEQ ID NO: 1428158 - RNA, 19 nt, Artificial Sequence
  Description of Artificial Sequence: Synthetic oligonucleotide
uuguuaucucgagugaaag

SEQ ID NO: 1428159 - RNA, 19 nt, Artificial Sequence
  Description of Artificial Sequence: Synthetic oligonucleotide
gaacacugggcauugaaaa

SEQ ID NO: 1428160 - RNA, 19 nt, Artificial Sequence
  Description of Artificial Sequence: Synthetic oligonucleotide
aaucuacccacaaucugag

SEQ ID NO: 1428161 - RNA, 19 nt, Artificial Sequence
  Description of Artificial Sequence: Synthetic oligonucleotide
cugauuaauacuugcaaaa

SEQ ID NO: 1428162 - RNA, 19 nt, Artificial Sequence
  Description of Artificial Sequence: Synthetic oligonucleotide
ugccauaucuuguaaugac

SEQ ID NO: 1428163 - RNA, 19 nt, Artificial Sequence
  Description of Artificial Sequence: Synthetic oligonucleotide
aaaguuucacugugcuugu

SEQ ID NO: 1428164 - RNA, 19 nt, Artificial Sequence
  Description of Artificial Sequence: Synthetic oligonucleotide
augccaauuccucgaaggg

SEQ ID NO: 1428165 - RNA, 19 nt, Artificial Sequence
  Description of Artificial Sequence: Synthetic oligonucleotide
ugagguccagauaacugca

SEQ ID NO: 1428166 - RNA, 19 nt, Artificial Sequence
  Description of Artificial Sequence: Synthetic oligonucleotide
ugaagauguuaaaacugaa

SEQ ID NO: 1428167 - RNA, 19 nt, Artificial Sequence
  Description of Artificial Sequence: Synthetic oligonucleotide
gucuauggcuugcuuaagg

SEQ ID NO: 1428168 - RNA, 19 nt, Artificial Sequence
  Description of Artificial Sequence: Synthetic oligonucleotide
uauagaucauuccuccaua

SEQ ID NO: 1428169 - RNA, 19 nt, Artificial Sequence
  Description of Artificial Sequence: Synthetic oligonucleotide
cuuuugaacgaacugggga

SEQ ID NO: 1428170 - RNA, 19 nt, Artificial Sequence
  Description of Artificial Sequence: Synthetic oligonucleotide
agauguguauuuaggcagc

SEQ ID NO: 1428171 - RNA, 19 nt, Artificial Sequence
  Description of Artificial Sequence: Synthetic oligonucleotide
ucuucagccccguauagau

SEQ ID NO: 1428172 - RNA, 19 nt, Artificial Sequence
  Description of Artificial Sequence: Synthetic oligonucleotide
acgaacuggggauucacug

SEQ ID NO: 1428173 - RNA, 19 nt, Artificial Sequence
  Description of Artificial Sequence: Synthetic oligonucleotide
ucuguuaacucaggauggg

SEQ ID NO: 1428174 - RNA, 19 nt, Artificial Sequence
  Description of Artificial Sequence: Synthetic oligonucleotide
agagagaugacaggcacug

SEQ ID NO: 1428175 - RNA, 19 nt, Artificial Sequence
  Description of Artificial Sequence: Synthetic oligonucleotide
cucuaugcacuuuagcauc

SEQ ID NO: 1428176 - RNA, 19 nt, Artificial Sequence
  Description of Artificial Sequence: Synthetic oligonucleotide
aggaguaguaauagccugc

SEQ ID NO: 1428177 - RNA, 19 nt, Artificial Sequence
  Description of Artificial Sequence: Synthetic oligonucleotide
uaucucgagugaaaguuuc

SEQ ID NO: 1428178 - RNA, 19 nt, Artificial Sequence
  Description of Artificial Sequence: Synthetic oligonucleotide
uguuaucucgagugaaagu

SEQ ID NO: 1428179 - RNA, 19 nt, Artificial Sequence
  Description of Artificial Sequence: Synthetic oligonucleotide
gguugaauaaacuugugcu

SEQ ID NO: 1428180 - RNA, 19 nt, Artificial Sequence
  Description of Artificial Sequence: Synthetic oligonucleotide
ucuuguaaugacaguguua

SEQ ID NO: 1428181 - RNA, 19 nt, Artificial Sequence
  Description of Artificial Sequence: Synthetic oligonucleotide
uugugcuaacucaugguaa

SEQ ID NO: 1428182 - RNA, 19 nt, Artificial Sequence
  Description of Artificial Sequence: Synthetic oligonucleotide
uaucuguugcauaucgaau

SEQ ID NO: 1428183 - RNA, 19 nt, Artificial Sequence
  Description of Artificial Sequence: Synthetic oligonucleotide
ucuuuguuagccucuggau

SEQ ID NO: 1428184 - RNA, 19 nt, Artificial Sequence
  Description of Artificial Sequence: Synthetic oligonucleotide
auaaaucuacccacaaucu

SEQ ID NO: 1428185 - RNA, 19 nt, Artificial Sequence
  Description of Artificial Sequence: Synthetic oligonucleotide
auguuaugaagcauggcug

SEQ ID NO: 1428186 - RNA, 19 nt, Artificial Sequence
  Description of Artificial Sequence: Synthetic oligonucleotide
aaugugcucgccauuacau

SEQ ID NO: 1428187 - RNA, 19 nt, Artificial Sequence
  Description of Artificial Sequence: Synthetic oligonucleotide
acuucgcuaguaaacaaag

SEQ ID NO: 1428188 - RNA, 19 nt, Artificial Sequence
  Description of Artificial Sequence: Synthetic oligonucleotide
cauacucuuuugaacgaac

SEQ ID NO: 1428189 - RNA, 19 nt, Artificial Sequence
  Description of Artificial Sequence: Synthetic oligonucleotide
aguagagugcucuuucaaa

SEQ ID NO: 1428190 - RNA, 19 nt, Artificial Sequence
  Description of Artificial Sequence: Synthetic oligonucleotide
cacgacuugccauaucuug

SEQ ID NO: 1428191 - RNA, 19 nt, Artificial Sequence
  Description of Artificial Sequence: Synthetic oligonucleotide
acaagugcauuuguuagcu

SEQ ID NO: 1428192 - RNA, 19 nt, Artificial Sequence
  Description of Artificial Sequence: Synthetic oligonucleotide
guaucuguugcauaucgaa

SEQ ID NO: 1428193 - RNA, 19 nt, Artificial Sequence
  Description of Artificial Sequence: Synthetic oligonucleotide
cacgaacugcuccagggcg

SEQ ID NO: 1428194 - RNA, 19 nt, Artificial Sequence
  Description of Artificial Sequence: Synthetic oligonucleotide
auaucgaaugugcucgcca

SEQ ID NO: 1428195 - RNA, 19 nt, Artificial Sequence
  Description of Artificial Sequence: Synthetic oligonucleotide
ugcuaacucaugguaagca

SEQ ID NO: 1428196 - RNA, 19 nt, Artificial Sequence
  Description of Artificial Sequence: Synthetic oligonucleotide
uugcauaucgaaugugcuc

SEQ ID NO: 1428197 - RNA, 19 nt, Artificial Sequence
  Description of Artificial Sequence: Synthetic oligonucleotide
gaggcuuaauaaaucuacc

SEQ ID NO: 1428198 - RNA, 19 nt, Artificial Sequence
  Description of Artificial Sequence: Synthetic oligonucleotide
ugcugagaggcuuaauaaa

SEQ ID NO: 1428199 - RNA, 19 nt, Artificial Sequence
  Description of Artificial Sequence: Synthetic oligonucleotide
aagauauggaagggcaggu

SEQ ID NO: 1428200 - RNA, 19 nt, Artificial Sequence
  Description of Artificial Sequence: Synthetic oligonucleotide
uucacacucaccaggccaa

SEQ ID NO: 1428201 - RNA, 19 nt, Artificial Sequence
  Description of Artificial Sequence: Synthetic oligonucleotide
cuucgcuaguaaacaaagc

SEQ ID NO: 1428202 - RNA, 19 nt, Artificial Sequence
  Description of Artificial Sequence: Synthetic oligonucleotide
uugguugaauaaacuugug

SEQ ID NO: 1428203 - RNA, 19 nt, Artificial Sequence
  Description of Artificial Sequence: Synthetic oligonucleotide
gguuccggagcuccgaugg

SEQ ID NO: 1428204 - RNA, 19 nt, Artificial Sequence
  Description of Artificial Sequence: Synthetic oligonucleotide
uagagugcucuuucaaagu

SEQ ID NO: 1428205 - RNA, 19 nt, Artificial Sequence
  Description of Artificial Sequence: Synthetic oligonucleotide
ccaaguaauaucaaagaca

SEQ ID NO: 1428206 - RNA, 19 nt, Artificial Sequence
  Description of Artificial Sequence: Synthetic oligonucleotide
aaccugugagaacaggguu

SEQ ID NO: 1428207 - RNA, 19 nt, Artificial Sequence
  Description of Artificial Sequence: Synthetic oligonucleotide
aucggcauguacugagguc

SEQ ID NO: 1428208 - RNA, 19 nt, Artificial Sequence
  Description of Artificial Sequence: Synthetic oligonucleotide
uuuucaggauuaucaugga

SEQ ID NO: 1428209 - RNA, 19 nt, Artificial Sequence
  Description of Artificial Sequence: Synthetic oligonucleotide
aauguccagguggaaccgg

SEQ ID NO: 1428210 - RNA, 19 nt, Artificial Sequence
  Description of Artificial Sequence: Synthetic oligonucleotide
aacguaucuguugcauauc

SEQ ID NO: 1428211 - RNA, 19 nt, Artificial Sequence
  Description of Artificial Sequence: Synthetic oligonucleotide
auggcaggaguaguaauag

SEQ ID NO: 1428212 - RNA, 19 nt, Artificial Sequence
  Description of Artificial Sequence: Synthetic oligonucleotide
cauguacuaaugaaaagcu

SEQ ID NO: 1428213 - RNA, 19 nt, Artificial Sequence
  Description of Artificial Sequence: Synthetic oligonucleotide
cagaaaguguuuugcauca

SEQ ID NO: 1428214 - RNA, 19 nt, Artificial Sequence
  Description of Artificial Sequence: Synthetic oligonucleotide
uucgcaaggagcucuccac

SEQ ID NO: 1428215 - RNA, 19 nt, Artificial Sequence
  Description of Artificial Sequence: Synthetic oligonucleotide
cagagaucggcauguacug

SEQ ID NO: 1428216 - RNA, 19 nt, Artificial Sequence
  Description of Artificial Sequence: Synthetic oligonucleotide
uguuguuaucucgagugaa

SEQ ID NO: 1428217 - RNA, 19 nt, Artificial Sequence
  Description of Artificial Sequence: Synthetic oligonucleotide
cgcuaguaaacaaagcugg

SEQ ID NO: 1428218 - RNA, 19 nt, Artificial Sequence
  Description of Artificial Sequence: Synthetic oligonucleotide
auagaucauuccuccauaa

SEQ ID NO: 1428219 - RNA, 19 nt, Artificial Sequence
  Description of Artificial Sequence: Synthetic oligonucleotide
aauuccucgaaggggcugu

SEQ ID NO: 1428220 - RNA, 19 nt, Artificial Sequence
  Description of Artificial Sequence: Synthetic oligonucleotide
uuaucucgagugaaaguuu

SEQ ID NO: 1428221 - RNA, 19 nt, Artificial Sequence
  Description of Artificial Sequence: Synthetic oligonucleotide
uaguagcacagaaaguguu

SEQ ID NO: 1428222 - RNA, 19 nt, Artificial Sequence
  Description of Artificial Sequence: Synthetic oligonucleotide
cauuuguuagcugauggca

SEQ ID NO: 1428223 - RNA, 19 nt, Artificial Sequence
  Description of Artificial Sequence: Synthetic oligonucleotide
ugauguggcugacagccau

SEQ ID NO: 1428224 - RNA, 19 nt, Artificial Sequence
  Description of Artificial Sequence: Synthetic oligonucleotide
uguuagcugauggcaaagc

SEQ ID NO: 1428225 - RNA, 19 nt, Artificial Sequence
  Description of Artificial Sequence: Synthetic oligonucleotide
uauuuaggcagcuguugua

SEQ ID NO: 1428226 - RNA, 19 nt, Artificial Sequence
  Description of Artificial Sequence: Synthetic oligonucleotide
caucauaggcuccauucuc

SEQ ID NO: 1428227 - RNA, 19 nt, Artificial Sequence
  Description of Artificial Sequence: Synthetic oligonucleotide
gccaaguaauaucaaagac

SEQ ID NO: 1428228 - RNA, 19 nt, Artificial Sequence
  Description of Artificial Sequence: Synthetic oligonucleotide
uuuaggcagcuguuguacu

SEQ ID NO: 1428229 - RNA, 19 nt, Artificial Sequence
  Description of Artificial Sequence: Synthetic oligonucleotide
agcuccgauggguuauugg

SEQ ID NO: 1428230 - RNA, 19 nt, Artificial Sequence
  Description of Artificial Sequence: Synthetic oligonucleotide
agagugcucuuucaaaguu

SEQ ID NO: 1428231 - RNA, 19 nt, Artificial Sequence
  Description of Artificial Sequence: Synthetic oligonucleotide
agcacuucgcuaguaaaca

SEQ ID NO: 1428232 - RNA, 19 nt, Artificial Sequence
  Description of Artificial Sequence: Synthetic oligonucleotide
gaaugugcucgccauuaca

SEQ ID NO: 1428233 - RNA, 19 nt, Artificial Sequence
  Description of Artificial Sequence: Synthetic oligonucleotide
uuguuagcugauggcaaag

SEQ ID NO: 1428234 - RNA, 19 nt, Artificial Sequence
  Description of Artificial Sequence: Synthetic oligonucleotide
uaaaaguagagugcucuuu

SEQ ID NO: 1428235 - RNA, 19 nt, Artificial Sequence
  Description of Artificial Sequence: Synthetic oligonucleotide
caucuagagccccaagcac

SEQ ID NO: 1428236 - RNA, 19 nt, Artificial Sequence
  Description of Artificial Sequence: Synthetic oligonucleotide
aaacuugugcuaacucaug

SEQ ID NO: 1428237 - RNA, 19 nt, Artificial Sequence
  Description of Artificial Sequence: Synthetic oligonucleotide
acugaccauaccauccuuc

SEQ ID NO: 1428238 - RNA, 19 nt, Artificial Sequence
  Description of Artificial Sequence: Synthetic oligonucleotide
auggguuauugguugaaua

SEQ ID NO: 1428239 - RNA, 19 nt, Artificial Sequence
  Description of Artificial Sequence: Synthetic oligonucleotide
gguuauugguugaauaaac

SEQ ID NO: 1428240 - RNA, 19 nt, Artificial Sequence
  Description of Artificial Sequence: Synthetic oligonucleotide
ucagacucuaaaguuugau

SEQ ID NO: 1428241 - RNA, 19 nt, Artificial Sequence
  Description of Artificial Sequence: Synthetic oligonucleotide
cuucaccaggcccauguug

SEQ ID NO: 1428242 - RNA, 19 nt, Artificial Sequence
  Description of Artificial Sequence: Synthetic oligonucleotide
auaguagcacagaaagugu

SEQ ID NO: 1428243 - RNA, 19 nt, Artificial Sequence
  Description of Artificial Sequence: Synthetic oligonucleotide
acaauucuguuaacucagg

SEQ ID NO: 1428244 - RNA, 19 nt, Artificial Sequence
  Description of Artificial Sequence: Synthetic oligonucleotide
uaacugcacacgacuugcc

SEQ ID NO: 1428245 - RNA, 19 nt, Artificial Sequence
  Description of Artificial Sequence: Synthetic oligonucleotide
gcucauaaaaguagagugc

SEQ ID NO: 1428246 - RNA, 19 nt, Artificial Sequence
  Description of Artificial Sequence: Synthetic oligonucleotide
gaacaucuagagccccaag

SEQ ID NO: 1428247 - RNA, 19 nt, Artificial Sequence
  Description of Artificial Sequence: Synthetic oligonucleotide
acacuguucacgaacugcu

SEQ ID NO: 1428248 - RNA, 19 nt, Artificial Sequence
  Description of Artificial Sequence: Synthetic oligonucleotide
gauauggaagggcagguuu

SEQ ID NO: 1428249 - RNA, 19 nt, Artificial Sequence
  Description of Artificial Sequence: Synthetic oligonucleotide
uggcauggcacuuccugcu

SEQ ID NO: 1428250 - RNA, 19 nt, Artificial Sequence
  Description of Artificial Sequence: Synthetic oligonucleotide
augugcucgccauuacaug

SEQ ID NO: 1428251 - RNA, 19 nt, Artificial Sequence
  Description of Artificial Sequence: Synthetic oligonucleotide
cuugugcuaacucauggua

SEQ ID NO: 1428252 - RNA, 19 nt, Artificial Sequence
  Description of Artificial Sequence: Synthetic oligonucleotide
gcauuuguuagcugauggc

SEQ ID NO: 1428253 - RNA, 19 nt, Artificial Sequence
  Description of Artificial Sequence: Synthetic oligonucleotide
uacagauauccaucauauc

SEQ ID NO: 1428254 - RNA, 19 nt, Artificial Sequence
  Description of Artificial Sequence: Synthetic oligonucleotide
caaggacacccaaggagug

SEQ ID NO: 1428255 - RNA, 19 nt, Artificial Sequence
  Description of Artificial Sequence: Synthetic oligonucleotide
auacucuuuugaacgaacu

SEQ ID NO: 1428256 - RNA, 19 nt, Artificial Sequence
  Description of Artificial Sequence: Synthetic oligonucleotide
guuaucucgagugaaaguu

SEQ ID NO: 1428257 - RNA, 19 nt, Artificial Sequence
  Description of Artificial Sequence: Synthetic oligonucleotide
auuuguuagcugauggcaa

SEQ ID NO: 1428258 - RNA, 19 nt, Artificial Sequence
  Description of Artificial Sequence: Synthetic oligonucleotide
ccguauagaucauuccucc

SEQ ID NO: 1428259 - RNA, 19 nt, Artificial Sequence
  Description of Artificial Sequence: Synthetic oligonucleotide
aggaacacugggcauugaa

SEQ ID NO: 1428260 - RNA, 19 nt, Artificial Sequence
  Description of Artificial Sequence: Synthetic oligonucleotide
cuguuaacucaggaugggc

SEQ ID NO: 1428261 - RNA, 19 nt, Artificial Sequence
  Description of Artificial Sequence: Synthetic oligonucleotide
aggccaaggugacaauucu

SEQ ID NO: 1428262 - RNA, 19 nt, Artificial Sequence
  Description of Artificial Sequence: Synthetic oligonucleotide
cucauaaaaguagagugcu

SEQ ID NO: 1428263 - RNA, 19 nt, Artificial Sequence
  Description of Artificial Sequence: Synthetic oligonucleotide
ugcucgccauuacauguac

SEQ ID NO: 1428264 - RNA, 19 nt, Artificial Sequence
  Description of Artificial Sequence: Synthetic oligonucleotide
ucgaaugugcucgccauua

SEQ ID NO: 1428265 - RNA, 19 nt, Artificial Sequence
  Description of Artificial Sequence: Synthetic oligonucleotide
ggaaacugaccauaccauc

SEQ ID NO: 1428266 - RNA, 19 nt, Artificial Sequence
  Description of Artificial Sequence: Synthetic oligonucleotide
guuguacuuugccaaguaa

SEQ ID NO: 1428267 - RNA, 19 nt, Artificial Sequence
  Description of Artificial Sequence: Synthetic oligonucleotide
cucgccauuacauguacua

SEQ ID NO: 1428268 - RNA, 19 nt, Artificial Sequence
  Description of Artificial Sequence: Synthetic oligonucleotide
ccacaucaagauauggaag

SEQ ID NO: 1428269 - RNA, 19 nt, Artificial Sequence
  Description of Artificial Sequence: Synthetic oligonucleotide
aguucuucgcaaggagcuc

SEQ ID NO: 1428270 - RNA, 19 nt, Artificial Sequence
  Description of Artificial Sequence: Synthetic oligonucleotide
acaaucugagauguguauu

SEQ ID NO: 1428271 - RNA, 19 nt, Artificial Sequence
  Description of Artificial Sequence: Synthetic oligonucleotide
gguccagauaacugcacac

SEQ ID NO: 1428272 - RNA, 19 nt, Artificial Sequence
  Description of Artificial Sequence: Synthetic oligonucleotide
gagcccauacucuuuugaa

SEQ ID NO: 1428273 - RNA, 19 nt, Artificial Sequence
  Description of Artificial Sequence: Synthetic oligonucleotide
ggcccauguuguuaucucg

SEQ ID NO: 1428274 - RNA, 19 nt, Artificial Sequence
  Description of Artificial Sequence: Synthetic oligonucleotide
ccagcaaacguaucuguug

SEQ ID NO: 1428275 - RNA, 19 nt, Artificial Sequence
  Description of Artificial Sequence: Synthetic oligonucleotide
aacugaccauaccauccuu

SEQ ID NO: 1428276 - RNA, 19 nt, Artificial Sequence
  Description of Artificial Sequence: Synthetic oligonucleotide
agcaaacguaucuguugca

SEQ ID NO: 1428277 - RNA, 19 nt, Artificial Sequence
  Description of Artificial Sequence: Synthetic oligonucleotide
gccaauuccucgaaggggc

SEQ ID NO: 1428278 - RNA, 19 nt, Artificial Sequence
  Description of Artificial Sequence: Synthetic oligonucleotide
agccccguauagaucauuc

SEQ ID NO: 1428279 - RNA, 19 nt, Artificial Sequence
  Description of Artificial Sequence: Synthetic oligonucleotide
cagcucuaugcacuuuagc

SEQ ID NO: 1428280 - RNA, 19 nt, Artificial Sequence
  Description of Artificial Sequence: Synthetic oligonucleotide
cauaucgaaugugcucgcc

SEQ ID NO: 1428281 - RNA, 19 nt, Artificial Sequence
  Description of Artificial Sequence: Synthetic oligonucleotide
aaggacacccaaggagugu

SEQ ID NO: 1428282 - RNA, 19 nt, Artificial Sequence
  Description of Artificial Sequence: Synthetic oligonucleotide
uuugaacgaacuggggauu

SEQ ID NO: 1428283 - RNA, 19 nt, Artificial Sequence
  Description of Artificial Sequence: Synthetic oligonucleotide
aggugacaauucuguuaac

SEQ ID NO: 1428284 - RNA, 19 nt, Artificial Sequence
  Description of Artificial Sequence: Synthetic oligonucleotide
gccauuacauguacuaaug

SEQ ID NO: 1428285 - RNA, 19 nt, Artificial Sequence
  Description of Artificial Sequence: Synthetic oligonucleotide
gaacgaacuggggauucac

SEQ ID NO: 1428286 - RNA, 19 nt, Artificial Sequence
  Description of Artificial Sequence: Synthetic oligonucleotide
gagugcucuuucaaaguuc

SEQ ID NO: 1428287 - RNA, 19 nt, Artificial Sequence
  Description of Artificial Sequence: Synthetic oligonucleotide
guaauagccugcucauaaa

SEQ ID NO: 1428288 - RNA, 19 nt, Artificial Sequence
  Description of Artificial Sequence: Synthetic oligonucleotide
ugucuauggcuugcuuaag

SEQ ID NO: 1428289 - RNA, 19 nt, Artificial Sequence
  Description of Artificial Sequence: Synthetic oligonucleotide
acgacuugccauaucuugu

SEQ ID NO: 1428290 - RNA, 19 nt, Artificial Sequence
  Description of Artificial Sequence: Synthetic oligonucleotide
ugaacgaacuggggauuca

SEQ ID NO: 1428291 - RNA, 19 nt, Artificial Sequence
  Description of Artificial Sequence: Synthetic oligonucleotide
uuaaagcacuucgcuagua

SEQ ID NO: 1428292 - RNA, 19 nt, Artificial Sequence
  Description of Artificial Sequence: Synthetic oligonucleotide
gaugggcguuaguuucaag

SEQ ID NO: 1428293 - RNA, 19 nt, Artificial Sequence
  Description of Artificial Sequence: Synthetic oligonucleotide
agguggaaccggcauggga

SEQ ID NO: 1428294 - RNA, 19 nt, Artificial Sequence
  Description of Artificial Sequence: Synthetic oligonucleotide
accauaccauccuucugau

SEQ ID NO: 1428295 - RNA, 19 nt, Artificial Sequence
  Description of Artificial Sequence: Synthetic oligonucleotide
guguuuugcaucauaggcu

SEQ ID NO: 1428296 - RNA, 19 nt, Artificial Sequence
  Description of Artificial Sequence: Synthetic oligonucleotide
uugcccuugcgcugagagc

SEQ ID NO: 1428297 - RNA, 19 nt, Artificial Sequence
  Description of Artificial Sequence: Synthetic oligonucleotide
cacuucgcuaguaaacaaa

SEQ ID NO: 1428298 - RNA, 19 nt, Artificial Sequence
  Description of Artificial Sequence: Synthetic oligonucleotide
guuguuaucucgagugaaa

SEQ ID NO: 1428299 - RNA, 19 nt, Artificial Sequence
  Description of Artificial Sequence: Synthetic oligonucleotide
ucgccauuacauguacuaa

SEQ ID NO: 1428300 - RNA, 19 nt, Artificial Sequence
  Description of Artificial Sequence: Synthetic oligonucleotide
uacugaggucagcugguuu

SEQ ID NO: 1428301 - RNA, 19 nt, Artificial Sequence
  Description of Artificial Sequence: Synthetic oligonucleotide
aguagcacagaaaguguuu

SEQ ID NO: 1428302 - RNA, 19 nt, Artificial Sequence
  Description of Artificial Sequence: Synthetic oligonucleotide
caagugcauuuguuagcug

SEQ ID NO: 1428303 - RNA, 19 nt, Artificial Sequence
  Description of Artificial Sequence: Synthetic oligonucleotide
ugaaagcaauaggacugaa

SEQ ID NO: 1428304 - RNA, 19 nt, Artificial Sequence
  Description of Artificial Sequence: Synthetic oligonucleotide
gguaagcauugcugagagg

SEQ ID NO: 1428305 - RNA, 19 nt, Artificial Sequence
  Description of Artificial Sequence: Synthetic oligonucleotide
uuaacucaggaugggcguu

SEQ ID NO: 1428306 - RNA, 19 nt, Artificial Sequence
  Description of Artificial Sequence: Synthetic oligonucleotide
gaucggcauguacugaggu

SEQ ID NO: 1428307 - RNA, 19 nt, Artificial Sequence
  Description of Artificial Sequence: Synthetic oligonucleotide
gaaccugugagaacagggu

SEQ ID NO: 1428308 - RNA, 19 nt, Artificial Sequence
  Description of Artificial Sequence: Synthetic oligonucleotide
uugugagcccauacucuuu

SEQ ID NO: 1428309 - RNA, 19 nt, Artificial Sequence
  Description of Artificial Sequence: Synthetic oligonucleotide
gaguaguaauagccugcuc

SEQ ID NO: 1428310 - RNA, 19 nt, Artificial Sequence
  Description of Artificial Sequence: Synthetic oligonucleotide
cccguauagaucauuccuc

SEQ ID NO: 1428311 - RNA, 19 nt, Artificial Sequence
  Description of Artificial Sequence: Synthetic oligonucleotide
caaacguaucuguugcaua

SEQ ID NO: 1428312 - RNA, 19 nt, Artificial Sequence
  Description of Artificial Sequence: Synthetic oligonucleotide
ccagauaacugcacacgac

SEQ ID NO: 1428313 - RNA, 19 nt, Artificial Sequence
  Description of Artificial Sequence: Synthetic oligonucleotide
cuucagccccguauagauc

SEQ ID NO: 1428314 - RNA, 19 nt, Artificial Sequence
  Description of Artificial Sequence: Synthetic oligonucleotide
auguguauuuaggcagcug

SEQ ID NO: 1428315 - RNA, 19 nt, Artificial Sequence
  Description of Artificial Sequence: Synthetic oligonucleotide
caaucugagauguguauuu

SEQ ID NO: 1428316 - RNA, 19 nt, Artificial Sequence
  Description of Artificial Sequence: Synthetic oligonucleotide
cuguugcauaucgaaugug

SEQ ID NO: 1428317 - RNA, 19 nt, Artificial Sequence
  Description of Artificial Sequence: Synthetic oligonucleotide
auauggaagggcagguuua

SEQ ID NO: 1428318 - RNA, 19 nt, Artificial Sequence
  Description of Artificial Sequence: Synthetic oligonucleotide
gugcuaacucaugguaagc

SEQ ID NO: 1428319 - RNA, 19 nt, Artificial Sequence
  Description of Artificial Sequence: Synthetic oligonucleotide
ggcguuaguuucaagagua

SEQ ID NO: 1428320 - RNA, 19 nt, Artificial Sequence
  Description of Artificial Sequence: Synthetic oligonucleotide
guugcauaucgaaugugcu

SEQ ID NO: 1428321 - RNA, 19 nt, Artificial Sequence
  Description of Artificial Sequence: Synthetic oligonucleotide
ucuucgcaaggagcucucc

SEQ ID NO: 1428322 - RNA, 19 nt, Artificial Sequence
  Description of Artificial Sequence: Synthetic oligonucleotide
cauaucuuguaaugacagu

SEQ ID NO: 1428323 - RNA, 19 nt, Artificial Sequence
  Description of Artificial Sequence: Synthetic oligonucleotide
agagaucggcauguacuga

SEQ ID NO: 1428324 - RNA, 19 nt, Artificial Sequence
  Description of Artificial Sequence: Synthetic oligonucleotide
ggauuaucauggaaacuga

SEQ ID NO: 1428325 - RNA, 19 nt, Artificial Sequence
  Description of Artificial Sequence: Synthetic oligonucleotide
aucuacccacaaucugaga

SEQ ID NO: 1428326 - RNA, 19 nt, Artificial Sequence
  Description of Artificial Sequence: Synthetic oligonucleotide
cuucuugugagcccauacu

SEQ ID NO: 1428327 - RNA, 19 nt, Artificial Sequence
  Description of Artificial Sequence: Synthetic oligonucleotide
agggcagguuuaaagcacu

SEQ ID NO: 1428328 - RNA, 19 nt, Artificial Sequence
  Description of Artificial Sequence: Synthetic oligonucleotide
agguuccggagcuccgaug

SEQ ID NO: 1428329 - RNA, 19 nt, Artificial Sequence
  Description of Artificial Sequence: Synthetic oligonucleotide
uuugcaucauaggcuccau

SEQ ID NO: 1428330 - RNA, 19 nt, Artificial Sequence
  Description of Artificial Sequence: Synthetic oligonucleotide
cucgagugaaaguuucacu

SEQ ID NO: 1428331 - RNA, 19 nt, Artificial Sequence
  Description of Artificial Sequence: Synthetic oligonucleotide
gugggacaaguucuucgca

SEQ ID NO: 1428332 - RNA, 19 nt, Artificial Sequence
  Description of Artificial Sequence: Synthetic oligonucleotide
gaaccggcaugggacuggc

SEQ ID NO: 1428333 - RNA, 19 nt, Artificial Sequence
  Description of Artificial Sequence: Synthetic oligonucleotide
caauuccucgaaggggcug

SEQ ID NO: 1428334 - RNA, 19 nt, Artificial Sequence
  Description of Artificial Sequence: Synthetic oligonucleotide
uggaaccggcaugggacug

SEQ ID NO: 1428335 - RNA, 19 nt, Artificial Sequence
  Description of Artificial Sequence: Synthetic oligonucleotide
uguuagccucuggauguuc

SEQ ID NO: 1428336 - RNA, 19 nt, Artificial Sequence
  Description of Artificial Sequence: Synthetic oligonucleotide
augcacuuuagcaucucuu

SEQ ID NO: 1428337 - RNA, 19 nt, Artificial Sequence
  Description of Artificial Sequence: Synthetic oligonucleotide
caagugggacaaguucuuc

SEQ ID NO: 1428338 - RNA, 19 nt, Artificial Sequence
  Description of Artificial Sequence: Synthetic oligonucleotide
cacaaucugagauguguau

SEQ ID NO: 1428339 - RNA, 19 nt, Artificial Sequence
  Description of Artificial Sequence: Synthetic oligonucleotide
gccauaucuuguaaugaca

SEQ ID NO: 1428340 - RNA, 19 nt, Artificial Sequence
  Description of Artificial Sequence: Synthetic oligonucleotide
ggguuauugguugaauaaa

SEQ ID NO: 1428341 - RNA, 19 nt, Artificial Sequence
  Description of Artificial Sequence: Synthetic oligonucleotide
ucgaaggggcuguuuucuu

SEQ ID NO: 1428342 - RNA, 19 nt, Artificial Sequence
  Description of Artificial Sequence: Synthetic oligonucleotide
guacuuugccaaguaauau

SEQ ID NO: 1428343 - RNA, 19 nt, Artificial Sequence
  Description of Artificial Sequence: Synthetic oligonucleotide
gcuccgauggguuauuggu

SEQ ID NO: 1428344 - RNA, 19 nt, Artificial Sequence
  Description of Artificial Sequence: Synthetic oligonucleotide
ccauuacauguacuaauga

SEQ ID NO: 1428345 - RNA, 19 nt, Artificial Sequence
  Description of Artificial Sequence: Synthetic oligonucleotide
gcauaucgaaugugcucgc

SEQ ID NO: 1428346 - RNA, 19 nt, Artificial Sequence
  Description of Artificial Sequence: Synthetic oligonucleotide
cuugugagcccauacucuu

SEQ ID NO: 1428347 - RNA, 19 nt, Artificial Sequence
  Description of Artificial Sequence: Synthetic oligonucleotide
cagacucuaaaguuugauu

SEQ ID NO: 1428348 - RNA, 19 nt, Artificial Sequence
  Description of Artificial Sequence: Synthetic oligonucleotide
gcauggcacuuccugcugc

SEQ ID NO: 1428349 - RNA, 19 nt, Artificial Sequence
  Description of Artificial Sequence: Synthetic oligonucleotide
ggaaccggcaugggacugg

SEQ ID NO: 1428350 - RNA, 19 nt, Artificial Sequence
  Description of Artificial Sequence: Synthetic oligonucleotide
ugcacacgacuugccauau

SEQ ID NO: 1428351 - RNA, 19 nt, Artificial Sequence
  Description of Artificial Sequence: Synthetic oligonucleotide
gcuugcuuaaggaugccaa

SEQ ID NO: 1428352 - RNA, 19 nt, Artificial Sequence
  Description of Artificial Sequence: Synthetic oligonucleotide
cuugcuuaaggaugccaau

SEQ ID NO: 1428353 - RNA, 19 nt, Artificial Sequence
  Description of Artificial Sequence: Synthetic oligonucleotide
cuaugcacuuuagcaucuc

SEQ ID NO: 1428354 - RNA, 19 nt, Artificial Sequence
  Description of Artificial Sequence: Synthetic oligonucleotide
guucuucgcaaggagcucu

SEQ ID NO: 1428355 - RNA, 19 nt, Artificial Sequence
  Description of Artificial Sequence: Synthetic oligonucleotide
cugcacacgacuugccaua

SEQ ID NO: 1428356 - RNA, 19 nt, Artificial Sequence
  Description of Artificial Sequence: Synthetic oligonucleotide
gccccguauagaucauucc

SEQ ID NO: 1428357 - RNA, 19 nt, Artificial Sequence
  Description of Artificial Sequence: Synthetic oligonucleotide
aucauguguagaacauauu

SEQ ID NO: 1428358 - RNA, 19 nt, Artificial Sequence
  Description of Artificial Sequence: Synthetic oligonucleotide
cguuaguuucaagaguaac

SEQ ID NO: 1428359 - RNA, 19 nt, Artificial Sequence
  Description of Artificial Sequence: Synthetic oligonucleotide
gcaaggacacccaaggagu

SEQ ID NO: 1428360 - RNA, 19 nt, Artificial Sequence
  Description of Artificial Sequence: Synthetic oligonucleotide
gauggguuauugguugaau

SEQ ID NO: 1428361 - RNA, 19 nt, Artificial Sequence
  Description of Artificial Sequence: Synthetic oligonucleotide
ucagccccguauagaucau

SEQ ID NO: 1428362 - RNA, 19 nt, Artificial Sequence
  Description of Artificial Sequence: Synthetic oligonucleotide
guagcacagaaaguguuuu

SEQ ID NO: 1428363 - RNA, 19 nt, Artificial Sequence
  Description of Artificial Sequence: Synthetic oligonucleotide
ggccaaggugacaauucug

SEQ ID NO: 1428364 - RNA, 19 nt, Artificial Sequence
  Description of Artificial Sequence: Synthetic oligonucleotide
cauuugcccuugcgcugag

SEQ ID NO: 1428365 - RNA, 19 nt, Artificial Sequence
  Description of Artificial Sequence: Synthetic oligonucleotide
uuguuagccucuggauguu

SEQ ID NO: 1428366 - RNA, 19 nt, Artificial Sequence
  Description of Artificial Sequence: Synthetic oligonucleotide
caucugcaucuugucuaug

SEQ ID NO: 1428367 - RNA, 19 nt, Artificial Sequence
  Description of Artificial Sequence: Synthetic oligonucleotide
gcacuucgcuaguaaacaa

SEQ ID NO: 1428368 - RNA, 19 nt, Artificial Sequence
  Description of Artificial Sequence: Synthetic oligonucleotide
gcaggaguaguaauagccu

SEQ ID NO: 1428369 - RNA, 19 nt, Artificial Sequence
  Description of Artificial Sequence: Synthetic oligonucleotide
cucgaaggggcuguuuucu

SEQ ID NO: 1428370 - RNA, 19 nt, Artificial Sequence
  Description of Artificial Sequence: Synthetic oligonucleotide
agccauggcaggaguagua

SEQ ID NO: 1428371 - RNA, 19 nt, Artificial Sequence
  Description of Artificial Sequence: Synthetic oligonucleotide
ugggacuggcauggcacuu

SEQ ID NO: 1428372 - RNA, 19 nt, Artificial Sequence
  Description of Artificial Sequence: Synthetic oligonucleotide
gcccauguuguuaucucga

SEQ ID NO: 1428373 - RNA, 19 nt, Artificial Sequence
  Description of Artificial Sequence: Synthetic oligonucleotide
acacgacuugccauaucuu

SEQ ID NO: 1428374 - RNA, 19 nt, Artificial Sequence
  Description of Artificial Sequence: Synthetic oligonucleotide
gggcguuaguuucaagagu

SEQ ID NO: 1428375 - RNA, 19 nt, Artificial Sequence
  Description of Artificial Sequence: Synthetic oligonucleotide
guguauuuaggcagcuguu

SEQ ID NO: 1428376 - RNA, 19 nt, Artificial Sequence
  Description of Artificial Sequence: Synthetic oligonucleotide
cuccgauggguuauugguu

SEQ ID NO: 1428377 - RNA, 19 nt, Artificial Sequence
  Description of Artificial Sequence: Synthetic oligonucleotide
ccacaaucugagaugugua

SEQ ID NO: 1428378 - RNA, 19 nt, Artificial Sequence
  Description of Artificial Sequence: Synthetic oligonucleotide
ccccguauagaucauuccu

SEQ ID NO: 1428379 - RNA, 19 nt, Artificial Sequence
  Description of Artificial Sequence: Synthetic oligonucleotide
gcaaggagcucuccacucu

SEQ ID NO: 1428380 - RNA, 19 nt, Artificial Sequence
  Description of Artificial Sequence: Synthetic oligonucleotide
gggacuggcauggcacuuc

SEQ ID NO: 1428381 - RNA, 19 nt, Artificial Sequence
  Description of Artificial Sequence: Synthetic oligonucleotide
cguaucuguugcauaucga

SEQ ID NO: 1428382 - RNA, 19 nt, Artificial Sequence
  Description of Artificial Sequence: Synthetic oligonucleotide
gugcucgccauuacaugua

SEQ ID NO: 1428383 - RNA, 19 nt, Artificial Sequence
  Description of Artificial Sequence: Synthetic oligonucleotide
caaaguucuucagccccgu

SEQ ID NO: 1428384 - RNA, 19 nt, Artificial Sequence
  Description of Artificial Sequence: Synthetic oligonucleotide
aaccggcaugggacuggca

SEQ ID NO: 1428385 - RNA, 19 nt, Artificial Sequence
  Description of Artificial Sequence: Synthetic oligonucleotide
cgaaugugcucgccauuac

SEQ ID NO: 1428386 - RNA, 19 nt, Artificial Sequence
  Description of Artificial Sequence: Synthetic oligonucleotide
cugaggucagcugguuugu

SEQ ID NO: 1428387 - RNA, 19 nt, Artificial Sequence
  Description of Artificial Sequence: Synthetic oligonucleotide
cgagugaaaguuucacugu

SEQ ID NO: 1428388 - RNA, 19 nt, Artificial Sequence
  Description of Artificial Sequence: Synthetic oligonucleotide
ccauguuguuaucucgagu

SEQ ID NO: 1428389 - RNA, 19 nt, Artificial Sequence
  Description of Artificial Sequence: Synthetic oligonucleotide
auuccucgaaggggcuguu

SEQ ID NO: 1428390 - RNA, 19 nt, Artificial Sequence
  Description of Artificial Sequence: Synthetic oligonucleotide
ccgauggguuauugguuga

SEQ ID NO: 1428391 - RNA, 19 nt, Artificial Sequence
  Description of Artificial Sequence: Synthetic oligonucleotide
ggaugggcguuaguuucaa

SEQ ID NO: 1428392 - RNA, 19 nt, Artificial Sequence
  Description of Artificial Sequence: Synthetic oligonucleotide
gcguuaguuucaagaguaa

SEQ ID NO: 1428393 - RNA, 19 nt, Artificial Sequence
  Description of Artificial Sequence: Synthetic oligonucleotide
cgaacuggggauucacugu

SEQ ID NO: 1428394 - RNA, 19 nt, Artificial Sequence
  Description of Artificial Sequence: Synthetic oligonucleotide
cgccauuacauguacuaau

SEQ ID NO: 1428395 - RNA, 19 nt, Artificial Sequence
  Description of Artificial Sequence: Synthetic oligonucleotide
cugagagcugucggacacu

SEQ ID NO: 1428396 - RNA, 19 nt, Artificial Sequence
  Description of Artificial Sequence: Synthetic oligonucleotide
cagguuccggagcuccgau

SEQ ID NO: 1428397 - RNA, 19 nt, Artificial Sequence
  Description of Artificial Sequence: Synthetic oligonucleotide
ccaauuccucgaaggggcu

SEQ ID NO: 1428398 - RNA, 19 nt, Artificial Sequence
  Description of Artificial Sequence: Synthetic oligonucleotide
cccagcaaacguaucuguu

SEQ ID NO: 1428399 - RNA, 19 nt, Artificial Sequence
  Description of Artificial Sequence: Synthetic oligonucleotide
cauugcugagaggcuuaau

SEQ ID NO: 1428400 - RNA, 19 nt, Artificial Sequence
  Description of Artificial Sequence: Synthetic oligonucleotide
gcucgccauuacauguacu

SEQ ID NO: 1428401 - RNA, 19 nt, Artificial Sequence
  Description of Artificial Sequence: Synthetic oligonucleotide
cgauggguuauugguugaa

SEQ ID NO: 1428402 - RNA, 19 nt, Artificial Sequence
  Description of Artificial Sequence: Synthetic oligonucleotide
ccggagcuccgauggguua

SEQ ID NO: 1428403 - RNA, 19 nt, Artificial Sequence
  Description of Artificial Sequence: Synthetic oligonucleotide
ccauaccauccuucugauu

SEQ ID NO: 1428404 - RNA, 19 nt, Artificial Sequence
  Description of Artificial Sequence: Synthetic oligonucleotide
ggagcuccgauggguuauu

SEQ ID NO: 1428405 - RNA, 19 nt, Artificial Sequence
  Description of Artificial Sequence: Synthetic oligonucleotide
cagccccguauagaucauu

SEQ ID NO: 1428406 - RNA, 19 nt, Artificial Sequence
  Description of Artificial Sequence: Synthetic oligonucleotide
cccuugcgcugagagcugu

SEQ ID NO: 1428407 - RNA, 19 nt, Artificial Sequence
  Description of Artificial Sequence: Synthetic oligonucleotide
cggagcuccgauggguuau

SEQ ID NO: 1428408 - RNA, 19 nt, Artificial Sequence
  Description of Artificial Sequence: Synthetic oligonucleotide
uguaucucuaacaauaccg

SEQ ID NO: 1428409 - RNA, 19 nt, Artificial Sequence
  Description of Artificial Sequence: Synthetic oligonucleotide
aaugaagguggucauaagc

SEQ ID NO: 1428410 - RNA, 19 nt, Artificial Sequence
  Description of Artificial Sequence: Synthetic oligonucleotide
aaucauuugggauuugacg

SEQ ID NO: 1428411 - RNA, 19 nt, Artificial Sequence
  Description of Artificial Sequence: Synthetic oligonucleotide
uugagaauuaucaauaauc

SEQ ID NO: 1428412 - RNA, 19 nt, Artificial Sequence
  Description of Artificial Sequence: Synthetic oligonucleotide
aucauauugaguuccaccg

SEQ ID NO: 1428413 - RNA, 19 nt, Artificial Sequence
  Description of Artificial Sequence: Synthetic oligonucleotide
aaguuaaccacuugcuugg

SEQ ID NO: 1428414 - RNA, 19 nt, Artificial Sequence
  Description of Artificial Sequence: Synthetic oligonucleotide
cauuauacagagaagcacg

SEQ ID NO: 1428415 - RNA, 19 nt, Artificial Sequence
  Description of Artificial Sequence: Synthetic oligonucleotide
uuaaccacuugcuuggugg

SEQ ID NO: 1428416 - RNA, 19 nt, Artificial Sequence
  Description of Artificial Sequence: Synthetic oligonucleotide
uuuaggguggacaauauuc

SEQ ID NO: 1428417 - RNA, 19 nt, Artificial Sequence
  Description of Artificial Sequence: Synthetic oligonucleotide
augacguagaugcugaaac

SEQ ID NO: 1428418 - RNA, 19 nt, Artificial Sequence
  Description of Artificial Sequence: Synthetic oligonucleotide
ucucuaacaauaccgagug

SEQ ID NO: 1428419 - RNA, 19 nt, Artificial Sequence
  Description of Artificial Sequence: Synthetic oligonucleotide
aagcuuugaaacugcuucc

SEQ ID NO: 1428420 - RNA, 19 nt, Artificial Sequence
  Description of Artificial Sequence: Synthetic oligonucleotide
acucauuucaagcacacug

SEQ ID NO: 1428421 - RNA, 19 nt, Artificial Sequence
  Description of Artificial Sequence: Synthetic oligonucleotide
aaugcgaaauggaauauuc

SEQ ID NO: 1428422 - RNA, 19 nt, Artificial Sequence
  Description of Artificial Sequence: Synthetic oligonucleotide
ugggauuugacgaagcuga

SEQ ID NO: 1428423 - RNA, 19 nt, Artificial Sequence
  Description of Artificial Sequence: Synthetic oligonucleotide
ucuaacaauaccgagugug

SEQ ID NO: 1428424 - RNA, 19 nt, Artificial Sequence
  Description of Artificial Sequence: Synthetic oligonucleotide
aaagcuucgucuccuuugg

SEQ ID NO: 1428425 - RNA, 19 nt, Artificial Sequence
  Description of Artificial Sequence: Synthetic oligonucleotide
ucuguguuguuaauaaucu

SEQ ID NO: 1428426 - RNA, 19 nt, Artificial Sequence
  Description of Artificial Sequence: Synthetic oligonucleotide
agccaaucagauuuaaggg

SEQ ID NO: 1428427 - RNA, 19 nt, Artificial Sequence
  Description of Artificial Sequence: Synthetic oligonucleotide
ucuuggcaaaaucugauga

SEQ ID NO: 1428428 - RNA, 19 nt, Artificial Sequence
  Description of Artificial Sequence: Synthetic oligonucleotide
aguuauucugaacucugcg

SEQ ID NO: 1428429 - RNA, 19 nt, Artificial Sequence
  Description of Artificial Sequence: Synthetic oligonucleotide
cuggacacacauaaaaucc

SEQ ID NO: 1428430 - RNA, 19 nt, Artificial Sequence
  Description of Artificial Sequence: Synthetic oligonucleotide
aaucugaugaccugugacu

SEQ ID NO: 1428431 - RNA, 19 nt, Artificial Sequence
  Description of Artificial Sequence: Synthetic oligonucleotide
agcauagcuagucauguuc

SEQ ID NO: 1428432 - RNA, 19 nt, Artificial Sequence
  Description of Artificial Sequence: Synthetic oligonucleotide
acgaucaccaccgucaccc

SEQ ID NO: 1428433 - RNA, 19 nt, Artificial Sequence
  Description of Artificial Sequence: Synthetic oligonucleotide
cacugaauuggccagaccc

SEQ ID NO: 1428434 - RNA, 19 nt, Artificial Sequence
  Description of Artificial Sequence: Synthetic oligonucleotide
uucaaggagaucauauuga

SEQ ID NO: 1428435 - RNA, 19 nt, Artificial Sequence
  Description of Artificial Sequence: Synthetic oligonucleotide
ucauaaaucauuugggauu

SEQ ID NO: 1428436 - RNA, 19 nt, Artificial Sequence
  Description of Artificial Sequence: Synthetic oligonucleotide
aacaucuagcaauucccuc

SEQ ID NO: 1428437 - RNA, 19 nt, Artificial Sequence
  Description of Artificial Sequence: Synthetic oligonucleotide
ucguuagaaaagcaacagg

SEQ ID NO: 1428438 - RNA, 19 nt, Artificial Sequence
  Description of Artificial Sequence: Synthetic oligonucleotide
aucacggacgaucaccacc

SEQ ID NO: 1428439 - RNA, 19 nt, Artificial Sequence
  Description of Artificial Sequence: Synthetic oligonucleotide
ggucaagucaaaaugaagg

SEQ ID NO: 1428440 - RNA, 19 nt, Artificial Sequence
  Description of Artificial Sequence: Synthetic oligonucleotide
ucucauaaaucauuuggga

SEQ ID NO: 1428441 - RNA, 19 nt, Artificial Sequence
  Description of Artificial Sequence: Synthetic oligonucleotide
aaguuugaggacaugucac

SEQ ID NO: 1428442 - RNA, 19 nt, Artificial Sequence
  Description of Artificial Sequence: Synthetic oligonucleotide
ucacggacgaucaccaccg

SEQ ID NO: 1428443 - RNA, 19 nt, Artificial Sequence
  Description of Artificial Sequence: Synthetic oligonucleotide
uauacagagaagcacggau

SEQ ID NO: 1428444 - RNA, 19 nt, Artificial Sequence
  Description of Artificial Sequence: Synthetic oligonucleotide
uagcaauucccucacaaga

SEQ ID NO: 1428445 - RNA, 19 nt, Artificial Sequence
  Description of Artificial Sequence: Synthetic oligonucleotide
uacagagaagcacggaugc

SEQ ID NO: 1428446 - RNA, 19 nt, Artificial Sequence
  Description of Artificial Sequence: Synthetic oligonucleotide
uuaaccaauagcugcagaa

SEQ ID NO: 1428447 - RNA, 19 nt, Artificial Sequence
  Description of Artificial Sequence: Synthetic oligonucleotide
cuuugaaacugcuuccagg

SEQ ID NO: 1428448 - RNA, 19 nt, Artificial Sequence
  Description of Artificial Sequence: Synthetic oligonucleotide
uuaggguggacaauauuca

SEQ ID NO: 1428449 - RNA, 19 nt, Artificial Sequence
  Description of Artificial Sequence: Synthetic oligonucleotide
uguguaacuuccaaguuua

SEQ ID NO: 1428450 - RNA, 19 nt, Artificial Sequence
  Description of Artificial Sequence: Synthetic oligonucleotide
aaaaugaagguggucauaa

SEQ ID NO: 1428451 - RNA, 19 nt, Artificial Sequence
  Description of Artificial Sequence: Synthetic oligonucleotide
aguuguugggaacaucuag

SEQ ID NO: 1428452 - RNA, 19 nt, Artificial Sequence
  Description of Artificial Sequence: Synthetic oligonucleotide
uguaacuuccaaguuuagg

SEQ ID NO: 1428453 - RNA, 19 nt, Artificial Sequence
  Description of Artificial Sequence: Synthetic oligonucleotide
uucguuagaaaagcaacag

SEQ ID NO: 1428454 - RNA, 19 nt, Artificial Sequence
  Description of Artificial Sequence: Synthetic oligonucleotide
cauauugaguuccaccgcc

SEQ ID NO: 1428455 - RNA, 19 nt, Artificial Sequence
  Description of Artificial Sequence: Synthetic oligonucleotide
ucuagcaauucccucacaa

SEQ ID NO: 1428456 - RNA, 19 nt, Artificial Sequence
  Description of Artificial Sequence: Synthetic oligonucleotide
uccuugagaauuaucaaua

SEQ ID NO: 1428457 - RNA, 19 nt, Artificial Sequence
  Description of Artificial Sequence: Synthetic oligonucleotide
cucuguguuguuaauaauc

SEQ ID NO: 1428458 - RNA, 19 nt, Artificial Sequence
  Description of Artificial Sequence: Synthetic oligonucleotide
uaucucuaacaauaccgag

SEQ ID NO: 1428459 - RNA, 19 nt, Artificial Sequence
  Description of Artificial Sequence: Synthetic oligonucleotide
ugcgaaauggaauauucau

SEQ ID NO: 1428460 - RNA, 19 nt, Artificial Sequence
  Description of Artificial Sequence: Synthetic oligonucleotide
ucuugauccauuccaggac

SEQ ID NO: 1428461 - RNA, 19 nt, Artificial Sequence
  Description of Artificial Sequence: Synthetic oligonucleotide
ucauccgcccugcagagcc

SEQ ID NO: 1428462 - RNA, 19 nt, Artificial Sequence
  Description of Artificial Sequence: Synthetic oligonucleotide
aaagaguuguucccagccu

SEQ ID NO: 1428463 - RNA, 19 nt, Artificial Sequence
  Description of Artificial Sequence: Synthetic oligonucleotide
ucuguaucucuaacaauac

SEQ ID NO: 1428464 - RNA, 19 nt, Artificial Sequence
  Description of Artificial Sequence: Synthetic oligonucleotide
ggagguguguuauacaaag

SEQ ID NO: 1428465 - RNA, 19 nt, Artificial Sequence
  Description of Artificial Sequence: Synthetic oligonucleotide
ucauauugaguuccaccgc

SEQ ID NO: 1428466 - RNA, 19 nt, Artificial Sequence
  Description of Artificial Sequence: Synthetic oligonucleotide
uuggcaaaaucugaugacc

SEQ ID NO: 1428467 - RNA, 19 nt, Artificial Sequence
  Description of Artificial Sequence: Synthetic oligonucleotide
acacacauaaaauccuuga

SEQ ID NO: 1428468 - RNA, 19 nt, Artificial Sequence
  Description of Artificial Sequence: Synthetic oligonucleotide
uguuguuaauaaucuuggc

SEQ ID NO: 1428469 - RNA, 19 nt, Artificial Sequence
  Description of Artificial Sequence: Synthetic oligonucleotide
auuauacagagaagcacgg

SEQ ID NO: 1428470 - RNA, 19 nt, Artificial Sequence
  Description of Artificial Sequence: Synthetic oligonucleotide
uuggaaacguccacuggcc

SEQ ID NO: 1428471 - RNA, 19 nt, Artificial Sequence
  Description of Artificial Sequence: Synthetic oligonucleotide
ugaccugugucccuucaag

SEQ ID NO: 1428472 - RNA, 19 nt, Artificial Sequence
  Description of Artificial Sequence: Synthetic oligonucleotide
aagcugguagucucauccg

SEQ ID NO: 1428473 - RNA, 19 nt, Artificial Sequence
  Description of Artificial Sequence: Synthetic oligonucleotide
ugcacuuuguagucaagga

SEQ ID NO: 1428474 - RNA, 19 nt, Artificial Sequence
  Description of Artificial Sequence: Synthetic oligonucleotide
ucaucacggacgaucacca

SEQ ID NO: 1428475 - RNA, 19 nt, Artificial Sequence
  Description of Artificial Sequence: Synthetic oligonucleotide
uggacacacauaaaauccu

SEQ ID NO: 1428476 - RNA, 19 nt, Artificial Sequence
  Description of Artificial Sequence: Synthetic oligonucleotide
ucuacuagcuguuucugua

SEQ ID NO: 1428477 - RNA, 19 nt, Artificial Sequence
  Description of Artificial Sequence: Synthetic oligonucleotide
uuguugggaacaucuagca

SEQ ID NO: 1428478 - RNA, 19 nt, Artificial Sequence
  Description of Artificial Sequence: Synthetic oligonucleotide
uuugacgaagcugagcuuc

SEQ ID NO: 1428479 - RNA, 19 nt, Artificial Sequence
  Description of Artificial Sequence: Synthetic oligonucleotide
aucagguaugaagucaaac

SEQ ID NO: 1428480 - RNA, 19 nt, Artificial Sequence
  Description of Artificial Sequence: Synthetic oligonucleotide
uuugggauuugacgaagcu

SEQ ID NO: 1428481 - RNA, 19 nt, Artificial Sequence
  Description of Artificial Sequence: Synthetic oligonucleotide
acgucuucaguugugacag

SEQ ID NO: 1428482 - RNA, 19 nt, Artificial Sequence
  Description of Artificial Sequence: Synthetic oligonucleotide
uggauguuuagucauuauu

SEQ ID NO: 1428483 - RNA, 19 nt, Artificial Sequence
  Description of Artificial Sequence: Synthetic oligonucleotide
accagaaguuauucugaac

SEQ ID NO: 1428484 - RNA, 19 nt, Artificial Sequence
  Description of Artificial Sequence: Synthetic oligonucleotide
uccggguugagguuccagg

SEQ ID NO: 1428485 - RNA, 19 nt, Artificial Sequence
  Description of Artificial Sequence: Synthetic oligonucleotide
acaagauucucuguguugu

SEQ ID NO: 1428486 - RNA, 19 nt, Artificial Sequence
  Description of Artificial Sequence: Synthetic oligonucleotide
uuggcauugccaaugcgaa

SEQ ID NO: 1428487 - RNA, 19 nt, Artificial Sequence
  Description of Artificial Sequence: Synthetic oligonucleotide
uccugcuucuauucuggcg

SEQ ID NO: 1428488 - RNA, 19 nt, Artificial Sequence
  Description of Artificial Sequence: Synthetic oligonucleotide
cuagcaauucccucacaag

SEQ ID NO: 1428489 - RNA, 19 nt, Artificial Sequence
  Description of Artificial Sequence: Synthetic oligonucleotide
uagucuacuagcuguuucu

SEQ ID NO: 1428490 - RNA, 19 nt, Artificial Sequence
  Description of Artificial Sequence: Synthetic oligonucleotide
ggguggacaauauucacag

SEQ ID NO: 1428491 - RNA, 19 nt, Artificial Sequence
  Description of Artificial Sequence: Synthetic oligonucleotide
cuggauucguuagaaaagc

SEQ ID NO: 1428492 - RNA, 19 nt, Artificial Sequence
  Description of Artificial Sequence: Synthetic oligonucleotide
acggaugccucccacugac

SEQ ID NO: 1428493 - RNA, 19 nt, Artificial Sequence
  Description of Artificial Sequence: Synthetic oligonucleotide
guuguugggaacaucuagc

SEQ ID NO: 1428494 - RNA, 19 nt, Artificial Sequence
  Description of Artificial Sequence: Synthetic oligonucleotide
gaccugugucccuucaagg

SEQ ID NO: 1428495 - RNA, 19 nt, Artificial Sequence
  Description of Artificial Sequence: Synthetic oligonucleotide
uuugaggacaugucacaga

SEQ ID NO: 1428496 - RNA, 19 nt, Artificial Sequence
  Description of Artificial Sequence: Synthetic oligonucleotide
aucugaugaccugugacuc

SEQ ID NO: 1428497 - RNA, 19 nt, Artificial Sequence
  Description of Artificial Sequence: Synthetic oligonucleotide
caccgccuuaucaagaaag

SEQ ID NO: 1428498 - RNA, 19 nt, Artificial Sequence
  Description of Artificial Sequence: Synthetic oligonucleotide
uugccaaugcgaaauggaa

SEQ ID NO: 1428499 - RNA, 19 nt, Artificial Sequence
  Description of Artificial Sequence: Synthetic oligonucleotide
agaaguuugaggacauguc

SEQ ID NO: 1428500 - RNA, 19 nt, Artificial Sequence
  Description of Artificial Sequence: Synthetic oligonucleotide
uccaaguuuaggguggaca

SEQ ID NO: 1428501 - RNA, 19 nt, Artificial Sequence
  Description of Artificial Sequence: Synthetic oligonucleotide
agaaagcgcuuuucuaaag

SEQ ID NO: 1428502 - RNA, 19 nt, Artificial Sequence
  Description of Artificial Sequence: Synthetic oligonucleotide
uuccagucaccacauaguc

SEQ ID NO: 1428503 - RNA, 19 nt, Artificial Sequence
  Description of Artificial Sequence: Synthetic oligonucleotide
cucguuugcacagaaguac

SEQ ID NO: 1428504 - RNA, 19 nt, Artificial Sequence
  Description of Artificial Sequence: Synthetic oligonucleotide
ucauuucaagcacacugau

SEQ ID NO: 1428505 - RNA, 19 nt, Artificial Sequence
  Description of Artificial Sequence: Synthetic oligonucleotide
gacguagaugcugaaacac

SEQ ID NO: 1428506 - RNA, 19 nt, Artificial Sequence
  Description of Artificial Sequence: Synthetic oligonucleotide
aguuccaccgccuuaucaa

SEQ ID NO: 1428507 - RNA, 19 nt, Artificial Sequence
  Description of Artificial Sequence: Synthetic oligonucleotide
acuuccaaguuuagggugg

SEQ ID NO: 1428508 - RNA, 19 nt, Artificial Sequence
  Description of Artificial Sequence: Synthetic oligonucleotide
cucucuaagggcgaagccc

SEQ ID NO: 1428509 - RNA, 19 nt, Artificial Sequence
  Description of Artificial Sequence: Synthetic oligonucleotide
ucauaagcugguagucuca

SEQ ID NO: 1428510 - RNA, 19 nt, Artificial Sequence
  Description of Artificial Sequence: Synthetic oligonucleotide
ggauguuuagucauuauuc

SEQ ID NO: 1428511 - RNA, 19 nt, Artificial Sequence
  Description of Artificial Sequence: Synthetic oligonucleotide
caacauucuuuugagcacc

SEQ ID NO: 1428512 - RNA, 19 nt, Artificial Sequence
  Description of Artificial Sequence: Synthetic oligonucleotide
auuugggauuugacgaagc

SEQ ID NO: 1428513 - RNA, 19 nt, Artificial Sequence
  Description of Artificial Sequence: Synthetic oligonucleotide
ugacguagaugcugaaaca

SEQ ID NO: 1428514 - RNA, 19 nt, Artificial Sequence
  Description of Artificial Sequence: Synthetic oligonucleotide
agauuuaaggggacagcac

SEQ ID NO: 1428515 - RNA, 19 nt, Artificial Sequence
  Description of Artificial Sequence: Synthetic oligonucleotide
aaguuuaggguggacaaua

SEQ ID NO: 1428516 - RNA, 19 nt, Artificial Sequence
  Description of Artificial Sequence: Synthetic oligonucleotide
uucaguugugacagcauua

SEQ ID NO: 1428517 - RNA, 19 nt, Artificial Sequence
  Description of Artificial Sequence: Synthetic oligonucleotide
uugggauuugacgaagcug

SEQ ID NO: 1428518 - RNA, 19 nt, Artificial Sequence
  Description of Artificial Sequence: Synthetic oligonucleotide
uaaccaauagcugcagaac

SEQ ID NO: 1428519 - RNA, 19 nt, Artificial Sequence
  Description of Artificial Sequence: Synthetic oligonucleotide
aggaccaugcccaugacgu

SEQ ID NO: 1428520 - RNA, 19 nt, Artificial Sequence
  Description of Artificial Sequence: Synthetic oligonucleotide
ucagauuuaaggggacagc

SEQ ID NO: 1428521 - RNA, 19 nt, Artificial Sequence
  Description of Artificial Sequence: Synthetic oligonucleotide
uuaucaagaaagcgcuuuu

SEQ ID NO: 1428522 - RNA, 19 nt, Artificial Sequence
  Description of Artificial Sequence: Synthetic oligonucleotide
caaacuuggaaacguccac

SEQ ID NO: 1428523 - RNA, 19 nt, Artificial Sequence
  Description of Artificial Sequence: Synthetic oligonucleotide
cacagucucguuugcacag

SEQ ID NO: 1428524 - RNA, 19 nt, Artificial Sequence
  Description of Artificial Sequence: Synthetic oligonucleotide
guugggaacaucuagcaau

SEQ ID NO: 1428525 - RNA, 19 nt, Artificial Sequence
  Description of Artificial Sequence: Synthetic oligonucleotide
gacacacauaaaauccuug

SEQ ID NO: 1428526 - RNA, 19 nt, Artificial Sequence
  Description of Artificial Sequence: Synthetic oligonucleotide
aucucuaacaauaccgagu

SEQ ID NO: 1428527 - RNA, 19 nt, Artificial Sequence
  Description of Artificial Sequence: Synthetic oligonucleotide
ugccaaugcgaaauggaau

SEQ ID NO: 1428528 - RNA, 19 nt, Artificial Sequence
  Description of Artificial Sequence: Synthetic oligonucleotide
aauaccgaguguggcagcu

SEQ ID NO: 1428529 - RNA, 19 nt, Artificial Sequence
  Description of Artificial Sequence: Synthetic oligonucleotide
cucauuucaagcacacuga

SEQ ID NO: 1428530 - RNA, 19 nt, Artificial Sequence
  Description of Artificial Sequence: Synthetic oligonucleotide
acuuuaaccaauagcugca

SEQ ID NO: 1428531 - RNA, 19 nt, Artificial Sequence
  Description of Artificial Sequence: Synthetic oligonucleotide
agagcauagcuagucaugu

SEQ ID NO: 1428532 - RNA, 19 nt, Artificial Sequence
  Description of Artificial Sequence: Synthetic oligonucleotide
cauaaaauccuugagaauu

SEQ ID NO: 1428533 - RNA, 19 nt, Artificial Sequence
  Description of Artificial Sequence: Synthetic oligonucleotide
ccaaccagaaguuauucug

SEQ ID NO: 1428534 - RNA, 19 nt, Artificial Sequence
  Description of Artificial Sequence: Synthetic oligonucleotide
accugugucccuucaagga

SEQ ID NO: 1428535 - RNA, 19 nt, Artificial Sequence
  Description of Artificial Sequence: Synthetic oligonucleotide
aaguacacauaggaggcau

SEQ ID NO: 1428536 - RNA, 19 nt, Artificial Sequence
  Description of Artificial Sequence: Synthetic oligonucleotide
cauugccaaugcgaaaugg

SEQ ID NO: 1428537 - RNA, 19 nt, Artificial Sequence
  Description of Artificial Sequence: Synthetic oligonucleotide
guagucaaggaccgaagga

SEQ ID NO: 1428538 - RNA, 19 nt, Artificial Sequence
  Description of Artificial Sequence: Synthetic oligonucleotide
ucucguuugcacagaagua

SEQ ID NO: 1428539 - RNA, 19 nt, Artificial Sequence
  Description of Artificial Sequence: Synthetic oligonucleotide
accgccuuaucaagaaagc

SEQ ID NO: 1428540 - RNA, 19 nt, Artificial Sequence
  Description of Artificial Sequence: Synthetic oligonucleotide
gucaucacggacgaucacc

SEQ ID NO: 1428541 - RNA, 19 nt, Artificial Sequence
  Description of Artificial Sequence: Synthetic oligonucleotide
uugauccauuccaggacca

SEQ ID NO: 1428542 - RNA, 19 nt, Artificial Sequence
  Description of Artificial Sequence: Synthetic oligonucleotide
ucaguugugacagcauuau

SEQ ID NO: 1428543 - RNA, 19 nt, Artificial Sequence
  Description of Artificial Sequence: Synthetic oligonucleotide
auguuuagucauuauucuu

SEQ ID NO: 1428544 - RNA, 19 nt, Artificial Sequence
  Description of Artificial Sequence: Synthetic oligonucleotide
auaagcugguagucucauc

SEQ ID NO: 1428545 - RNA, 19 nt, Artificial Sequence
  Description of Artificial Sequence: Synthetic oligonucleotide
cauagucagcacaccuucc

SEQ ID NO: 1428546 - RNA, 19 nt, Artificial Sequence
  Description of Artificial Sequence: Synthetic oligonucleotide
acguagaugcugaaacacg

SEQ ID NO: 1428547 - RNA, 19 nt, Artificial Sequence
  Description of Artificial Sequence: Synthetic oligonucleotide
gaccaugcccaugacguag

SEQ ID NO: 1428548 - RNA, 19 nt, Artificial Sequence
  Description of Artificial Sequence: Synthetic oligonucleotide
cagagcauagcuagucaug

SEQ ID NO: 1428549 - RNA, 19 nt, Artificial Sequence
  Description of Artificial Sequence: Synthetic oligonucleotide
ucucauccgcccugcagag

SEQ ID NO: 1428550 - RNA, 19 nt, Artificial Sequence
  Description of Artificial Sequence: Synthetic oligonucleotide
aaguccuuuguagucuacu

SEQ ID NO: 1428551 - RNA, 19 nt, Artificial Sequence
  Description of Artificial Sequence: Synthetic oligonucleotide
caaucagauuuaaggggac

SEQ ID NO: 1428552 - RNA, 19 nt, Artificial Sequence
  Description of Artificial Sequence: Synthetic oligonucleotide
gguggucauaagcugguag

SEQ ID NO: 1428553 - RNA, 19 nt, Artificial Sequence
  Description of Artificial Sequence: Synthetic oligonucleotide
uacuagcuguuucuguauc

SEQ ID NO: 1428554 - RNA, 19 nt, Artificial Sequence
  Description of Artificial Sequence: Synthetic oligonucleotide
agucaaaaugaaggugguc

SEQ ID NO: 1428555 - RNA, 19 nt, Artificial Sequence
  Description of Artificial Sequence: Synthetic oligonucleotide
gucucguuugcacagaagu

SEQ ID NO: 1428556 - RNA, 19 nt, Artificial Sequence
  Description of Artificial Sequence: Synthetic oligonucleotide
uuauacagagaagcacgga

SEQ ID NO: 1428557 - RNA, 19 nt, Artificial Sequence
  Description of Artificial Sequence: Synthetic oligonucleotide
guaucucuaacaauaccga

SEQ ID NO: 1428558 - RNA, 19 nt, Artificial Sequence
  Description of Artificial Sequence: Synthetic oligonucleotide
aaccacuugcuugguggcg

SEQ ID NO: 1428559 - RNA, 19 nt, Artificial Sequence
  Description of Artificial Sequence: Synthetic oligonucleotide
cguagaugcugaaacacgg

SEQ ID NO: 1428560 - RNA, 19 nt, Artificial Sequence
  Description of Artificial Sequence: Synthetic oligonucleotide
aagucaaaaugaagguggu

SEQ ID NO: 1428561 - RNA, 19 nt, Artificial Sequence
  Description of Artificial Sequence: Synthetic oligonucleotide
accacauagucagcacacc

SEQ ID NO: 1428562 - RNA, 19 nt, Artificial Sequence
  Description of Artificial Sequence: Synthetic oligonucleotide
cugugacucauuucaagca

SEQ ID NO: 1428563 - RNA, 19 nt, Artificial Sequence
  Description of Artificial Sequence: Synthetic oligonucleotide
ugaaacacggagguguguu

SEQ ID NO: 1428564 - RNA, 19 nt, Artificial Sequence
  Description of Artificial Sequence: Synthetic oligonucleotide
cagaaccccacgcaaacuc

SEQ ID NO: 1428565 - RNA, 19 nt, Artificial Sequence
  Description of Artificial Sequence: Synthetic oligonucleotide
gucaagucaaaaugaaggu

SEQ ID NO: 1428566 - RNA, 19 nt, Artificial Sequence
  Description of Artificial Sequence: Synthetic oligonucleotide
caaccagaaguuauucuga

SEQ ID NO: 1428567 - RNA, 19 nt, Artificial Sequence
  Description of Artificial Sequence: Synthetic oligonucleotide
cauagcuagucauguucac

SEQ ID NO: 1428568 - RNA, 19 nt, Artificial Sequence
  Description of Artificial Sequence: Synthetic oligonucleotide
cugaauuggccagacccgc

SEQ ID NO: 1428569 - RNA, 19 nt, Artificial Sequence
  Description of Artificial Sequence: Synthetic oligonucleotide
aggucaagucaaaaugaag

SEQ ID NO: 1428570 - RNA, 19 nt, Artificial Sequence
  Description of Artificial Sequence: Synthetic oligonucleotide
guuaaccacuugcuuggug

SEQ ID NO: 1428571 - RNA, 19 nt, Artificial Sequence
  Description of Artificial Sequence: Synthetic oligonucleotide
cuuuggcauugccaaugcg

SEQ ID NO: 1428572 - RNA, 19 nt, Artificial Sequence
  Description of Artificial Sequence: Synthetic oligonucleotide
auagcuagucauguucaca

SEQ ID NO: 1428573 - RNA, 19 nt, Artificial Sequence
  Description of Artificial Sequence: Synthetic oligonucleotide
uaagggcgaagcccagcag

SEQ ID NO: 1428574 - RNA, 19 nt, Artificial Sequence
  Description of Artificial Sequence: Synthetic oligonucleotide
agacccgccuccuuguaca

SEQ ID NO: 1428575 - RNA, 19 nt, Artificial Sequence
  Description of Artificial Sequence: Synthetic oligonucleotide
agccaaccagaaguuauuc

SEQ ID NO: 1428576 - RNA, 19 nt, Artificial Sequence
  Description of Artificial Sequence: Synthetic oligonucleotide
aguccuuuguagucuacua

SEQ ID NO: 1428577 - RNA, 19 nt, Artificial Sequence
  Description of Artificial Sequence: Synthetic oligonucleotide
acagaccagcacugcuccc

SEQ ID NO: 1428578 - RNA, 19 nt, Artificial Sequence
  Description of Artificial Sequence: Synthetic oligonucleotide
uugacgaagcugagcuucu

SEQ ID NO: 1428579 - RNA, 19 nt, Artificial Sequence
  Description of Artificial Sequence: Synthetic oligonucleotide
aaucuguaacaagcaugug

SEQ ID NO: 1428580 - RNA, 19 nt, Artificial Sequence
  Description of Artificial Sequence: Synthetic oligonucleotide
acggacgaucaccaccguc

SEQ ID NO: 1428581 - RNA, 19 nt, Artificial Sequence
  Description of Artificial Sequence: Synthetic oligonucleotide
cacucucuaagggcgaagc

SEQ ID NO: 1428582 - RNA, 19 nt, Artificial Sequence
  Description of Artificial Sequence: Synthetic oligonucleotide
agcccuggauguuuaguca

SEQ ID NO: 1428583 - RNA, 19 nt, Artificial Sequence
  Description of Artificial Sequence: Synthetic oligonucleotide
gcauuauacagagaagcac

SEQ ID NO: 1428584 - RNA, 19 nt, Artificial Sequence
  Description of Artificial Sequence: Synthetic oligonucleotide
accccacgcaaacucacug

SEQ ID NO: 1428585 - RNA, 19 nt, Artificial Sequence
  Description of Artificial Sequence: Synthetic oligonucleotide
ggcuggauucguuagaaaa

SEQ ID NO: 1428586 - RNA, 19 nt, Artificial Sequence
  Description of Artificial Sequence: Synthetic oligonucleotide
caggcaauccaccuagaga

SEQ ID NO: 1428587 - RNA, 19 nt, Artificial Sequence
  Description of Artificial Sequence: Synthetic oligonucleotide
gaguuccaccgccuuauca

SEQ ID NO: 1428588 - RNA, 19 nt, Artificial Sequence
  Description of Artificial Sequence: Synthetic oligonucleotide
cuaagggcgaagcccagca

SEQ ID NO: 1428589 - RNA, 19 nt, Artificial Sequence
  Description of Artificial Sequence: Synthetic oligonucleotide
cauggugcugaggcgacag

SEQ ID NO: 1428590 - RNA, 19 nt, Artificial Sequence
  Description of Artificial Sequence: Synthetic oligonucleotide
agcuuugaaacugcuucca

SEQ ID NO: 1428591 - RNA, 19 nt, Artificial Sequence
  Description of Artificial Sequence: Synthetic oligonucleotide
auucugaacucugcgugcu

SEQ ID NO: 1428592 - RNA, 19 nt, Artificial Sequence
  Description of Artificial Sequence: Synthetic oligonucleotide
agcaauucccucacaagau

SEQ ID NO: 1428593 - RNA, 19 nt, Artificial Sequence
  Description of Artificial Sequence: Synthetic oligonucleotide
ucuaagggcgaagcccagc

SEQ ID NO: 1428594 - RNA, 19 nt, Artificial Sequence
  Description of Artificial Sequence: Synthetic oligonucleotide
acaucagguaugaagucaa

SEQ ID NO: 1428595 - RNA, 19 nt, Artificial Sequence
  Description of Artificial Sequence: Synthetic oligonucleotide
ggaaacguccacuggccug

SEQ ID NO: 1428596 - RNA, 19 nt, Artificial Sequence
  Description of Artificial Sequence: Synthetic oligonucleotide
auugaguuccaccgccuua

SEQ ID NO: 1428597 - RNA, 19 nt, Artificial Sequence
  Description of Artificial Sequence: Synthetic oligonucleotide
uagccaaccagaaguuauu

SEQ ID NO: 1428598 - RNA, 19 nt, Artificial Sequence
  Description of Artificial Sequence: Synthetic oligonucleotide
ccaacauucuuuugagcac

SEQ ID NO: 1428599 - RNA, 19 nt, Artificial Sequence
  Description of Artificial Sequence: Synthetic oligonucleotide
cgaaggacacucucuaagg

SEQ ID NO: 1428600 - RNA, 19 nt, Artificial Sequence
  Description of Artificial Sequence: Synthetic oligonucleotide
caaggaccgaaggacacuc

SEQ ID NO: 1428601 - RNA, 19 nt, Artificial Sequence
  Description of Artificial Sequence: Synthetic oligonucleotide
caugcacagucucguuugc

SEQ ID NO: 1428602 - RNA, 19 nt, Artificial Sequence
  Description of Artificial Sequence: Synthetic oligonucleotide
guggucauaagcugguagu

SEQ ID NO: 1428603 - RNA, 19 nt, Artificial Sequence
  Description of Artificial Sequence: Synthetic oligonucleotide
caggucaagucaaaaugaa

SEQ ID NO: 1428604 - RNA, 19 nt, Artificial Sequence
  Description of Artificial Sequence: Synthetic oligonucleotide
ccgaaggacacucucuaag

SEQ ID NO: 1428605 - RNA, 19 nt, Artificial Sequence
  Description of Artificial Sequence: Synthetic oligonucleotide
gccaaugcgaaauggaaua

SEQ ID NO: 1428606 - RNA, 19 nt, Artificial Sequence
  Description of Artificial Sequence: Synthetic oligonucleotide
augcgaaauggaauauuca

SEQ ID NO: 1428607 - RNA, 19 nt, Artificial Sequence
  Description of Artificial Sequence: Synthetic oligonucleotide
gaccgaaggacacucucua

SEQ ID NO: 1428608 - RNA, 19 nt, Artificial Sequence
  Description of Artificial Sequence: Synthetic oligonucleotide
gcagccuuagcugaccaag

SEQ ID NO: 1428609 - RNA, 19 nt, Artificial Sequence
  Description of Artificial Sequence: Synthetic oligonucleotide
cugugucccuucaaggaga

SEQ ID NO: 1428610 - RNA, 19 nt, Artificial Sequence
  Description of Artificial Sequence: Synthetic oligonucleotide
agcuuucaagccaaucaga

SEQ ID NO: 1428611 - RNA, 19 nt, Artificial Sequence
  Description of Artificial Sequence: Synthetic oligonucleotide
caagcauguguuuggggaa

SEQ ID NO: 1428612 - RNA, 19 nt, Artificial Sequence
  Description of Artificial Sequence: Synthetic oligonucleotide
gucaaggaccgaaggacac

SEQ ID NO: 1428613 - RNA, 19 nt, Artificial Sequence
  Description of Artificial Sequence: Synthetic oligonucleotide
uguagccaaccagaaguua

SEQ ID NO: 1428614 - RNA, 19 nt, Artificial Sequence
  Description of Artificial Sequence: Synthetic oligonucleotide
uggcagcuuggcaggcccg

SEQ ID NO: 1428615 - RNA, 19 nt, Artificial Sequence
  Description of Artificial Sequence: Synthetic oligonucleotide
caauaccgaguguggcagc

SEQ ID NO: 1428616 - RNA, 19 nt, Artificial Sequence
  Description of Artificial Sequence: Synthetic oligonucleotide
agcacggaugccucccacu

SEQ ID NO: 1428617 - RNA, 19 nt, Artificial Sequence
  Description of Artificial Sequence: Synthetic oligonucleotide
gacgaucaccaccgucacc

SEQ ID NO: 1428618 - RNA, 19 nt, Artificial Sequence
  Description of Artificial Sequence: Synthetic oligonucleotide
aagcgcuuuucuaaagcuu

SEQ ID NO: 1428619 - RNA, 19 nt, Artificial Sequence
  Description of Artificial Sequence: Synthetic oligonucleotide
auuugacgaagcugagcuu

SEQ ID NO: 1428620 - RNA, 19 nt, Artificial Sequence
  Description of Artificial Sequence: Synthetic oligonucleotide
gaauuggccagacccgccu

SEQ ID NO: 1428621 - RNA, 19 nt, Artificial Sequence
  Description of Artificial Sequence: Synthetic oligonucleotide
gaaccccacgcaaacucac

SEQ ID NO: 1428622 - RNA, 19 nt, Artificial Sequence
  Description of Artificial Sequence: Synthetic oligonucleotide
auauugaguuccaccgccu

SEQ ID NO: 1428623 - RNA, 19 nt, Artificial Sequence
  Description of Artificial Sequence: Synthetic oligonucleotide
ggauucguuagaaaagcaa

SEQ ID NO: 1428624 - RNA, 19 nt, Artificial Sequence
  Description of Artificial Sequence: Synthetic oligonucleotide
gcgaaauggaauauucauc

SEQ ID NO: 1428625 - RNA, 19 nt, Artificial Sequence
  Description of Artificial Sequence: Synthetic oligonucleotide
agccuuagcugaccaaguu

SEQ ID NO: 1428626 - RNA, 19 nt, Artificial Sequence
  Description of Artificial Sequence: Synthetic oligonucleotide
cacgcaaacucacugcugu

SEQ ID NO: 1428627 - RNA, 19 nt, Artificial Sequence
  Description of Artificial Sequence: Synthetic oligonucleotide
ccaauagcugcagaacccc

SEQ ID NO: 1428628 - RNA, 19 nt, Artificial Sequence
  Description of Artificial Sequence: Synthetic oligonucleotide
agaaccccacgcaaacuca

SEQ ID NO: 1428629 - RNA, 19 nt, Artificial Sequence
  Description of Artificial Sequence: Synthetic oligonucleotide
ugcgugcugcucacaggca

SEQ ID NO: 1428630 - RNA, 19 nt, Artificial Sequence
  Description of Artificial Sequence: Synthetic oligonucleotide
agagacaugccaggcugga

SEQ ID NO: 1428631 - RNA, 19 nt, Artificial Sequence
  Description of Artificial Sequence: Synthetic oligonucleotide
uggcguuccacuggacaca

SEQ ID NO: 1428632 - RNA, 19 nt, Artificial Sequence
  Description of Artificial Sequence: Synthetic oligonucleotide
gcuagucauguucacagcu

SEQ ID NO: 1428633 - RNA, 19 nt, Artificial Sequence
  Description of Artificial Sequence: Synthetic oligonucleotide
cauaaaucauuugggauuu

SEQ ID NO: 1428634 - RNA, 19 nt, Artificial Sequence
  Description of Artificial Sequence: Synthetic oligonucleotide
uccaggcaauccaccuaga

SEQ ID NO: 1428635 - RNA, 19 nt, Artificial Sequence
  Description of Artificial Sequence: Synthetic oligonucleotide
ucacagucccaaacuucuu

SEQ ID NO: 1428636 - RNA, 19 nt, Artificial Sequence
  Description of Artificial Sequence: Synthetic oligonucleotide
ccaaguuuaggguggacaa

SEQ ID NO: 1428637 - RNA, 19 nt, Artificial Sequence
  Description of Artificial Sequence: Synthetic oligonucleotide
caaagaucaccuuguaguu

SEQ ID NO: 1428638 - RNA, 19 nt, Artificial Sequence
  Description of Artificial Sequence: Synthetic oligonucleotide
agucucguuugcacagaag

SEQ ID NO: 1428639 - RNA, 19 nt, Artificial Sequence
  Description of Artificial Sequence: Synthetic oligonucleotide
cucuaagggcgaagcccag

SEQ ID NO: 1428640 - RNA, 19 nt, Artificial Sequence
  Description of Artificial Sequence: Synthetic oligonucleotide
aguuuaggguggacaauau

SEQ ID NO: 1428641 - RNA, 19 nt, Artificial Sequence
  Description of Artificial Sequence: Synthetic oligonucleotide
accgaaggacacucucuaa

SEQ ID NO: 1428642 - RNA, 19 nt, Artificial Sequence
  Description of Artificial Sequence: Synthetic oligonucleotide
gccuuagcugaccaaguuc

SEQ ID NO: 1428643 - RNA, 19 nt, Artificial Sequence
  Description of Artificial Sequence: Synthetic oligonucleotide
caaggagaucauauugagu

SEQ ID NO: 1428644 - RNA, 19 nt, Artificial Sequence
  Description of Artificial Sequence: Synthetic oligonucleotide
ggccuggauaagaaguuug

SEQ ID NO: 1428645 - RNA, 19 nt, Artificial Sequence
  Description of Artificial Sequence: Synthetic oligonucleotide
guagccaaccagaaguuau

SEQ ID NO: 1428646 - RNA, 19 nt, Artificial Sequence
  Description of Artificial Sequence: Synthetic oligonucleotide
aaccccacgcaaacucacu

SEQ ID NO: 1428647 - RNA, 19 nt, Artificial Sequence
  Description of Artificial Sequence: Synthetic oligonucleotide
guguaacuuccaaguuuag

SEQ ID NO: 1428648 - RNA, 19 nt, Artificial Sequence
  Description of Artificial Sequence: Synthetic oligonucleotide
caccgucaccccagcagag

SEQ ID NO: 1428649 - RNA, 19 nt, Artificial Sequence
  Description of Artificial Sequence: Synthetic oligonucleotide
acacucucuaagggcgaag

SEQ ID NO: 1428650 - RNA, 19 nt, Artificial Sequence
  Description of Artificial Sequence: Synthetic oligonucleotide
ccgccuuaucaagaaagcg

SEQ ID NO: 1428651 - RNA, 19 nt, Artificial Sequence
  Description of Artificial Sequence: Synthetic oligonucleotide
ccaggcaauccaccuagag

SEQ ID NO: 1428652 - RNA, 19 nt, Artificial Sequence
  Description of Artificial Sequence: Synthetic oligonucleotide
caucacggacgaucaccac

SEQ ID NO: 1428653 - RNA, 19 nt, Artificial Sequence
  Description of Artificial Sequence: Synthetic oligonucleotide
cagacccgccuccuuguac

SEQ ID NO: 1428654 - RNA, 19 nt, Artificial Sequence
  Description of Artificial Sequence: Synthetic oligonucleotide
aaggaccgaaggacacucu

SEQ ID NO: 1428655 - RNA, 19 nt, Artificial Sequence
  Description of Artificial Sequence: Synthetic oligonucleotide
uagucucauccgcccugca

SEQ ID NO: 1428656 - RNA, 19 nt, Artificial Sequence
  Description of Artificial Sequence: Synthetic oligonucleotide
cuucuauucuggcguucca

SEQ ID NO: 1428657 - RNA, 19 nt, Artificial Sequence
  Description of Artificial Sequence: Synthetic oligonucleotide
gcauugccaaugcgaaaug

SEQ ID NO: 1428658 - RNA, 19 nt, Artificial Sequence
  Description of Artificial Sequence: Synthetic oligonucleotide
gcaaaaucugaugaccugu

SEQ ID NO: 1428659 - RNA, 19 nt, Artificial Sequence
  Description of Artificial Sequence: Synthetic oligonucleotide
gcgcuuuucuaaagcuucg

SEQ ID NO: 1428660 - RNA, 19 nt, Artificial Sequence
  Description of Artificial Sequence: Synthetic oligonucleotide
gccuuaucaagaaagcgcu

SEQ ID NO: 1428661 - RNA, 19 nt, Artificial Sequence
  Description of Artificial Sequence: Synthetic oligonucleotide
cagagcccuggauguuuag

SEQ ID NO: 1428662 - RNA, 19 nt, Artificial Sequence
  Description of Artificial Sequence: Synthetic oligonucleotide
ugggaacaucuagcaauuc

SEQ ID NO: 1428663 - RNA, 19 nt, Artificial Sequence
  Description of Artificial Sequence: Synthetic oligonucleotide
acagucucguuugcacaga

SEQ ID NO: 1428664 - RNA, 19 nt, Artificial Sequence
  Description of Artificial Sequence: Synthetic oligonucleotide
cucccuugacaucagguau

SEQ ID NO: 1428665 - RNA, 19 nt, Artificial Sequence
  Description of Artificial Sequence: Synthetic oligonucleotide
ccuugagaauuaucaauaa

SEQ ID NO: 1428666 - RNA, 19 nt, Artificial Sequence
  Description of Artificial Sequence: Synthetic oligonucleotide
cacauagucagcacaccuu

SEQ ID NO: 1428667 - RNA, 19 nt, Artificial Sequence
  Description of Artificial Sequence: Synthetic oligonucleotide
ccgucaccccagcagagcc

SEQ ID NO: 1428668 - RNA, 19 nt, Artificial Sequence
  Description of Artificial Sequence: Synthetic oligonucleotide
cggacgaucaccaccguca

SEQ ID NO: 1428669 - RNA, 19 nt, Artificial Sequence
  Description of Artificial Sequence: Synthetic oligonucleotide
ggacgaucaccaccgucac

SEQ ID NO: 1428670 - RNA, 19 nt, Artificial Sequence
  Description of Artificial Sequence: Synthetic oligonucleotide
ccccacgcaaacucacugc

SEQ ID NO: 1428671 - RNA, 19 nt, Artificial Sequence
  Description of Artificial Sequence: Synthetic oligonucleotide
auccggguugagguuccag

SEQ ID NO: 1428672 - RNA, 19 nt, Artificial Sequence
  Description of Artificial Sequence: Synthetic oligonucleotide
cugucagauccaggcaauc

SEQ ID NO: 1428673 - RNA, 19 nt, Artificial Sequence
  Description of Artificial Sequence: Synthetic oligonucleotide
gcccaugacguagaugcug

SEQ ID NO: 1428674 - RNA, 19 nt, Artificial Sequence
  Description of Artificial Sequence: Synthetic oligonucleotide
guuuaggguggacaauauu

SEQ ID NO: 1428675 - RNA, 19 nt, Artificial Sequence
  Description of Artificial Sequence: Synthetic oligonucleotide
cuacuagcuguuucuguau

SEQ ID NO: 1428676 - RNA, 19 nt, Artificial Sequence
  Description of Artificial Sequence: Synthetic oligonucleotide
cauccgcccugcagagccc

SEQ ID NO: 1428677 - RNA, 19 nt, Artificial Sequence
  Description of Artificial Sequence: Synthetic oligonucleotide
caucagguaugaagucaaa

SEQ ID NO: 1428678 - RNA, 19 nt, Artificial Sequence
  Description of Artificial Sequence: Synthetic oligonucleotide
gggauuugacgaagcugag

SEQ ID NO: 1428679 - RNA, 19 nt, Artificial Sequence
  Description of Artificial Sequence: Synthetic oligonucleotide
cguuugcacagaaguacac

SEQ ID NO: 1428680 - RNA, 19 nt, Artificial Sequence
  Description of Artificial Sequence: Synthetic oligonucleotide
agcauguguuuggggaaaa

SEQ ID NO: 1428681 - RNA, 19 nt, Artificial Sequence
  Description of Artificial Sequence: Synthetic oligonucleotide
ccagccugcacuuuguagu

SEQ ID NO: 1428682 - RNA, 19 nt, Artificial Sequence
  Description of Artificial Sequence: Synthetic oligonucleotide
ccaccuagagacaggggca

SEQ ID NO: 1428683 - RNA, 19 nt, Artificial Sequence
  Description of Artificial Sequence: Synthetic oligonucleotide
cagucucguuugcacagaa

SEQ ID NO: 1428684 - RNA, 19 nt, Artificial Sequence
  Description of Artificial Sequence: Synthetic oligonucleotide
ggucauaagcugguagucu

SEQ ID NO: 1428685 - RNA, 19 nt, Artificial Sequence
  Description of Artificial Sequence: Synthetic oligonucleotide
cucauccgcccugcagagc

SEQ ID NO: 1428686 - RNA, 19 nt, Artificial Sequence
  Description of Artificial Sequence: Synthetic oligonucleotide
gcacugaauuggccagacc

SEQ ID NO: 1428687 - RNA, 19 nt, Artificial Sequence
  Description of Artificial Sequence: Synthetic oligonucleotide
ccacgcaaacucacugcug

SEQ ID NO: 1428688 - RNA, 19 nt, Artificial Sequence
  Description of Artificial Sequence: Synthetic oligonucleotide
cacugaccugugucccuuc

SEQ ID NO: 1428689 - RNA, 19 nt, Artificial Sequence
  Description of Artificial Sequence: Synthetic oligonucleotide
cauaggaggcauccggguu

SEQ ID NO: 1428690 - RNA, 19 nt, Artificial Sequence
  Description of Artificial Sequence: Synthetic oligonucleotide
ggucaucacggacgaucac

SEQ ID NO: 1428691 - RNA, 19 nt, Artificial Sequence
  Description of Artificial Sequence: Synthetic oligonucleotide
gccaaccagaaguuauucu

SEQ ID NO: 1428692 - RNA, 19 nt, Artificial Sequence
  Description of Artificial Sequence: Synthetic oligonucleotide
cugaccugugucccuucaa

SEQ ID NO: 1428693 - RNA, 19 nt, Artificial Sequence
  Description of Artificial Sequence: Synthetic oligonucleotide
cugaugccaaguccuuugu

SEQ ID NO: 1428694 - RNA, 19 nt, Artificial Sequence
  Description of Artificial Sequence: Synthetic oligonucleotide
gagcauagcuagucauguu

SEQ ID NO: 1428695 - RNA, 19 nt, Artificial Sequence
  Description of Artificial Sequence: Synthetic oligonucleotide
ugguggcguccauggugcu

SEQ ID NO: 1428696 - RNA, 19 nt, Artificial Sequence
  Description of Artificial Sequence: Synthetic oligonucleotide
ccgaguguggcagcuuggc

SEQ ID NO: 1428697 - RNA, 19 nt, Artificial Sequence
  Description of Artificial Sequence: Synthetic oligonucleotide
ugccucccacugaccugug

SEQ ID NO: 1428698 - RNA, 19 nt, Artificial Sequence
  Description of Artificial Sequence: Synthetic oligonucleotide
cagaccagcacugcucccu

SEQ ID NO: 1428699 - RNA, 19 nt, Artificial Sequence
  Description of Artificial Sequence: Synthetic oligonucleotide
caaugcgaaauggaauauu

SEQ ID NO: 1428700 - RNA, 19 nt, Artificial Sequence
  Description of Artificial Sequence: Synthetic oligonucleotide
cucuaacaauaccgagugu

SEQ ID NO: 1428701 - RNA, 19 nt, Artificial Sequence
  Description of Artificial Sequence: Synthetic oligonucleotide
gggcccaaaguuaaccacu

SEQ ID NO: 1428702 - RNA, 19 nt, Artificial Sequence
  Description of Artificial Sequence: Synthetic oligonucleotide
ccgggcccaaaguuaacca

SEQ ID NO: 1428703 - RNA, 19 nt, Artificial Sequence
  Description of Artificial Sequence: Synthetic oligonucleotide
caaguuuaggguggacaau

SEQ ID NO: 1428704 - RNA, 19 nt, Artificial Sequence
  Description of Artificial Sequence: Synthetic oligonucleotide
caugccaggcuggauucgu

SEQ ID NO: 1428705 - RNA, 19 nt, Artificial Sequence
  Description of Artificial Sequence: Synthetic oligonucleotide
ggacacucucuaagggcga

SEQ ID NO: 1428706 - RNA, 19 nt, Artificial Sequence
  Description of Artificial Sequence: Synthetic oligonucleotide
aggcccgggcccaaaguua

SEQ ID NO: 1428707 - RNA, 19 nt, Artificial Sequence
  Description of Artificial Sequence: Synthetic oligonucleotide
ggaccgaaggacacucucu

SEQ ID NO: 1428708 - RNA, 19 nt, Artificial Sequence
  Description of Artificial Sequence: Synthetic oligonucleotide
gcccuggauguuuagucau

SEQ ID NO: 1428709 - RNA, 19 nt, Artificial Sequence
  Description of Artificial Sequence: Synthetic oligonucleotide
cugaaacacggaggugugu

SEQ ID NO: 1428710 - RNA, 19 nt, Artificial Sequence
  Description of Artificial Sequence: Synthetic oligonucleotide
ggcccgggcccaaaguuaa

SEQ ID NO: 1428711 - RNA, 19 nt, Artificial Sequence
  Description of Artificial Sequence: Synthetic oligonucleotide
caggcccgggcccaaaguu

SEQ ID NO: 1428712 - RNA, 19 nt, Artificial Sequence
  Description of Artificial Sequence: Synthetic oligonucleotide
ccggguugagguuccaggu

SEQ ID NO: 1428713 - RNA, 19 nt, Artificial Sequence
  Description of Artificial Sequence: Synthetic oligonucleotide
acccgccuccuuguacaaa

SEQ ID NO: 1428714 - RNA, 19 nt, Artificial Sequence
  Description of Artificial Sequence: Synthetic oligonucleotide
cugcuucuauucuggcguu

SEQ ID NO: 1428715 - RNA, 19 nt, Artificial Sequence
  Description of Artificial Sequence: Synthetic oligonucleotide
guugagguuccaggugcuu

SEQ ID NO: 1428716 - RNA, 19 nt, Artificial Sequence
  Description of Artificial Sequence: Synthetic oligonucleotide
cggagguguguuauacaaa

SEQ ID NO: 1428717 - RNA, 19 nt, Artificial Sequence
  Description of Artificial Sequence: Synthetic oligonucleotide
gcagaaccccacgcaaacu

SEQ ID NO: 1428718 - RNA, 19 nt, Artificial Sequence
  Description of Artificial Sequence: Synthetic oligonucleotide
gcagagcccuggauguuua

SEQ ID NO: 1428719 - RNA, 19 nt, Artificial Sequence
  Description of Artificial Sequence: Synthetic oligonucleotide
ccaaugcgaaauggaauau

SEQ ID NO: 1428720 - RNA, 19 nt, Artificial Sequence
  Description of Artificial Sequence: Synthetic oligonucleotide
ccuuaucaagaaagcgcuu

SEQ ID NO: 1428721 - RNA, 19 nt, Artificial Sequence
  Description of Artificial Sequence: Synthetic oligonucleotide
ccaccgccuuaucaagaaa

SEQ ID NO: 1428722 - RNA, 19 nt, Artificial Sequence
  Description of Artificial Sequence: Synthetic oligonucleotide
cuccaccauuguucuugau

SEQ ID NO: 1428723 - RNA, 19 nt, Artificial Sequence
  Description of Artificial Sequence: Synthetic oligonucleotide
cacggacgaucaccaccgu

SEQ ID NO: 1428724 - RNA, 19 nt, Artificial Sequence
  Description of Artificial Sequence: Synthetic oligonucleotide
ccauggugcugaggcgaca

SEQ ID NO: 1428725 - RNA, 19 nt, Artificial Sequence
  Description of Artificial Sequence: Synthetic oligonucleotide
ccagacccgccuccuugua

SEQ ID NO: 1428726 - RNA, 19 nt, Artificial Sequence
  Description of Artificial Sequence: Synthetic oligonucleotide
aagaggagcacucauuugc

SEQ ID NO: 1428727 - RNA, 19 nt, Artificial Sequence
  Description of Artificial Sequence: Synthetic oligonucleotide
uuuucaauaggucaguagc

SEQ ID NO: 1428728 - RNA, 19 nt, Artificial Sequence
  Description of Artificial Sequence: Synthetic oligonucleotide
aacaguuuggucuggaggg

SEQ ID NO: 1428729 - RNA, 19 nt, Artificial Sequence
  Description of Artificial Sequence: Synthetic oligonucleotide
aauaucaugucccaaggca

SEQ ID NO: 1428730 - RNA, 19 nt, Artificial Sequence
  Description of Artificial Sequence: Synthetic oligonucleotide
aguauuaugacgcugucug

SEQ ID NO: 1428731 - RNA, 19 nt, Artificial Sequence
  Description of Artificial Sequence: Synthetic oligonucleotide
aacaggauuuucuugucac

SEQ ID NO: 1428732 - RNA, 19 nt, Artificial Sequence
  Description of Artificial Sequence: Synthetic oligonucleotide
uuaauaucaugucccaagg

SEQ ID NO: 1428733 - RNA, 19 nt, Artificial Sequence
  Description of Artificial Sequence: Synthetic oligonucleotide
aaaccaaagaacucaaggu

SEQ ID NO: 1428734 - RNA, 19 nt, Artificial Sequence
  Description of Artificial Sequence: Synthetic oligonucleotide
aucuaaguuguccuuaucg

SEQ ID NO: 1428735 - RNA, 19 nt, Artificial Sequence
  Description of Artificial Sequence: Synthetic oligonucleotide
ugaacugagaugacgaacc

SEQ ID NO: 1428736 - RNA, 19 nt, Artificial Sequence
  Description of Artificial Sequence: Synthetic oligonucleotide
guuagcaucacuccaaaag

SEQ ID NO: 1428737 - RNA, 19 nt, Artificial Sequence
  Description of Artificial Sequence: Synthetic oligonucleotide
aacucaagguauccgagag

SEQ ID NO: 1428738 - RNA, 19 nt, Artificial Sequence
  Description of Artificial Sequence: Synthetic oligonucleotide
uguuucauagccugugagg

SEQ ID NO: 1428739 - RNA, 19 nt, Artificial Sequence
  Description of Artificial Sequence: Synthetic oligonucleotide
agaaccuucacucggucgg

SEQ ID NO: 1428740 - RNA, 19 nt, Artificial Sequence
  Description of Artificial Sequence: Synthetic oligonucleotide
ucuggaucccagaagcucg

SEQ ID NO: 1428741 - RNA, 19 nt, Artificial Sequence
  Description of Artificial Sequence: Synthetic oligonucleotide
aguugugcccgucagcacc

SEQ ID NO: 1428742 - RNA, 19 nt, Artificial Sequence
  Description of Artificial Sequence: Synthetic oligonucleotide
acgaaaauuaauaucaugu

SEQ ID NO: 1428743 - RNA, 19 nt, Artificial Sequence
  Description of Artificial Sequence: Synthetic oligonucleotide
aagggagacaacauagcgc

SEQ ID NO: 1428744 - RNA, 19 nt, Artificial Sequence
  Description of Artificial Sequence: Synthetic oligonucleotide
ucgaacauuaucaaggcuu

SEQ ID NO: 1428745 - RNA, 19 nt, Artificial Sequence
  Description of Artificial Sequence: Synthetic oligonucleotide
ugagaaggguugcagaacc

SEQ ID NO: 1428746 - RNA, 19 nt, Artificial Sequence
  Description of Artificial Sequence: Synthetic oligonucleotide
aguggaguggcauugguug

SEQ ID NO: 1428747 - RNA, 19 nt, Artificial Sequence
  Description of Artificial Sequence: Synthetic oligonucleotide
aucaccuaggguaauaugg

SEQ ID NO: 1428748 - RNA, 19 nt, Artificial Sequence
  Description of Artificial Sequence: Synthetic oligonucleotide
cucugauaaaugcagagug

SEQ ID NO: 1428749 - RNA, 19 nt, Artificial Sequence
  Description of Artificial Sequence: Synthetic oligonucleotide
uaaguuguccuuaucgaac

SEQ ID NO: 1428750 - RNA, 19 nt, Artificial Sequence
  Description of Artificial Sequence: Synthetic oligonucleotide
caagcuggaaauauccccg

SEQ ID NO: 1428751 - RNA, 19 nt, Artificial Sequence
  Description of Artificial Sequence: Synthetic oligonucleotide
gaagagcaguauuaugacg

SEQ ID NO: 1428752 - RNA, 19 nt, Artificial Sequence
  Description of Artificial Sequence: Synthetic oligonucleotide
ucuaaguuguccuuaucga

SEQ ID NO: 1428753 - RNA, 19 nt, Artificial Sequence
  Description of Artificial Sequence: Synthetic oligonucleotide
cucaagguauccgagagcg

SEQ ID NO: 1428754 - RNA, 19 nt, Artificial Sequence
  Description of Artificial Sequence: Synthetic oligonucleotide
uuaucuguucuuugagagg

SEQ ID NO: 1428755 - RNA, 19 nt, Artificial Sequence
  Description of Artificial Sequence: Synthetic oligonucleotide
agggagacaacauagcgca

SEQ ID NO: 1428756 - RNA, 19 nt, Artificial Sequence
  Description of Artificial Sequence: Synthetic oligonucleotide
gagcaauaggcccagcggg

SEQ ID NO: 1428757 - RNA, 19 nt, Artificial Sequence
  Description of Artificial Sequence: Synthetic oligonucleotide
guagagaaccuucacucgg

SEQ ID NO: 1428758 - RNA, 19 nt, Artificial Sequence
  Description of Artificial Sequence: Synthetic oligonucleotide
uuugcucccguagagaacc

SEQ ID NO: 1428759 - RNA, 19 nt, Artificial Sequence
  Description of Artificial Sequence: Synthetic oligonucleotide
agagcaauaggcccagcgg

SEQ ID NO: 1428760 - RNA, 19 nt, Artificial Sequence
  Description of Artificial Sequence: Synthetic oligonucleotide
ugagaugacgaaccaagcu

SEQ ID NO: 1428761 - RNA, 19 nt, Artificial Sequence
  Description of Artificial Sequence: Synthetic oligonucleotide
cuuggugagagcaugcaug

SEQ ID NO: 1428762 - RNA, 19 nt, Artificial Sequence
  Description of Artificial Sequence: Synthetic oligonucleotide
aauggagcugacucuguug

SEQ ID NO: 1428763 - RNA, 19 nt, Artificial Sequence
  Description of Artificial Sequence: Synthetic oligonucleotide
aaguuguccuuaucgaaca

SEQ ID NO: 1428764 - RNA, 19 nt, Artificial Sequence
  Description of Artificial Sequence: Synthetic oligonucleotide
ugugguuagcaucacucca

SEQ ID NO: 1428765 - RNA, 19 nt, Artificial Sequence
  Description of Artificial Sequence: Synthetic oligonucleotide
uuaguggccugcaagcccc

SEQ ID NO: 1428766 - RNA, 19 nt, Artificial Sequence
  Description of Artificial Sequence: Synthetic oligonucleotide
cuuuucaauaggucaguag

SEQ ID NO: 1428767 - RNA, 19 nt, Artificial Sequence
  Description of Artificial Sequence: Synthetic oligonucleotide
uucaauaggucaguagcag

SEQ ID NO: 1428768 - RNA, 19 nt, Artificial Sequence
  Description of Artificial Sequence: Synthetic oligonucleotide
ugcguuaguggccugcaag

SEQ ID NO: 1428769 - RNA, 19 nt, Artificial Sequence
  Description of Artificial Sequence: Synthetic oligonucleotide
acugagaugacgaaccaag

SEQ ID NO: 1428770 - RNA, 19 nt, Artificial Sequence
  Description of Artificial Sequence: Synthetic oligonucleotide
cugauaaaugcagaguggc

SEQ ID NO: 1428771 - RNA, 19 nt, Artificial Sequence
  Description of Artificial Sequence: Synthetic oligonucleotide
uccacuauguagcccaugu

SEQ ID NO: 1428772 - RNA, 19 nt, Artificial Sequence
  Description of Artificial Sequence: Synthetic oligonucleotide
uggucauagggccagcuga

SEQ ID NO: 1428773 - RNA, 19 nt, Artificial Sequence
  Description of Artificial Sequence: Synthetic oligonucleotide
auaucaugucccaaggcac

SEQ ID NO: 1428774 - RNA, 19 nt, Artificial Sequence
  Description of Artificial Sequence: Synthetic oligonucleotide
ugacgaaccaagcuggaaa

SEQ ID NO: 1428775 - RNA, 19 nt, Artificial Sequence
  Description of Artificial Sequence: Synthetic oligonucleotide
gcauugguugaauagagcc

SEQ ID NO: 1428776 - RNA, 19 nt, Artificial Sequence
  Description of Artificial Sequence: Synthetic oligonucleotide
uuuuggaccugcuuccagc

SEQ ID NO: 1428777 - RNA, 19 nt, Artificial Sequence
  Description of Artificial Sequence: Synthetic oligonucleotide
augugauguggaccaaacc

SEQ ID NO: 1428778 - RNA, 19 nt, Artificial Sequence
  Description of Artificial Sequence: Synthetic oligonucleotide
guauucagcagcauguccc

SEQ ID NO: 1428779 - RNA, 19 nt, Artificial Sequence
  Description of Artificial Sequence: Synthetic oligonucleotide
aaccaggggaaauggagcu

SEQ ID NO: 1428780 - RNA, 19 nt, Artificial Sequence
  Description of Artificial Sequence: Synthetic oligonucleotide
cuugucacgaaaauuaaua

SEQ ID NO: 1428781 - RNA, 19 nt, Artificial Sequence
  Description of Artificial Sequence: Synthetic oligonucleotide
ucaccuaggguaauaugga

SEQ ID NO: 1428782 - RNA, 19 nt, Artificial Sequence
  Description of Artificial Sequence: Synthetic oligonucleotide
cuuacuccugaguugugcc

SEQ ID NO: 1428783 - RNA, 19 nt, Artificial Sequence
  Description of Artificial Sequence: Synthetic oligonucleotide
agaugacgaaccaagcugg

SEQ ID NO: 1428784 - RNA, 19 nt, Artificial Sequence
  Description of Artificial Sequence: Synthetic oligonucleotide
acucaagguauccgagagc

SEQ ID NO: 1428785 - RNA, 19 nt, Artificial Sequence
  Description of Artificial Sequence: Synthetic oligonucleotide
uugucacgaaaauuaauau

SEQ ID NO: 1428786 - RNA, 19 nt, Artificial Sequence
  Description of Artificial Sequence: Synthetic oligonucleotide
augucaucuaaguuguccu

SEQ ID NO: 1428787 - RNA, 19 nt, Artificial Sequence
  Description of Artificial Sequence: Synthetic oligonucleotide
ggaaauauccccgaagccc

SEQ ID NO: 1428788 - RNA, 19 nt, Artificial Sequence
  Description of Artificial Sequence: Synthetic oligonucleotide
gacgucauuuuccacuaug

SEQ ID NO: 1428789 - RNA, 19 nt, Artificial Sequence
  Description of Artificial Sequence: Synthetic oligonucleotide
gagaaccuucacucggucg

SEQ ID NO: 1428790 - RNA, 19 nt, Artificial Sequence
  Description of Artificial Sequence: Synthetic oligonucleotide
acgccggaaagcuuuguac

SEQ ID NO: 1428791 - RNA, 19 nt, Artificial Sequence
  Description of Artificial Sequence: Synthetic oligonucleotide
agcggggagaaaucucugc

SEQ ID NO: 1428792 - RNA, 19 nt, Artificial Sequence
  Description of Artificial Sequence: Synthetic oligonucleotide
agcuuuguaccgcauguug

SEQ ID NO: 1428793 - RNA, 19 nt, Artificial Sequence
  Description of Artificial Sequence: Synthetic oligonucleotide
ucaacgaagucuguguggu

SEQ ID NO: 1428794 - RNA, 19 nt, Artificial Sequence
  Description of Artificial Sequence: Synthetic oligonucleotide
agaaccaggggaaauggag

SEQ ID NO: 1428795 - RNA, 19 nt, Artificial Sequence
  Description of Artificial Sequence: Synthetic oligonucleotide
ucccaugcaccaaaacugc

SEQ ID NO: 1428796 - RNA, 19 nt, Artificial Sequence
  Description of Artificial Sequence: Synthetic oligonucleotide
uauuaugacgcugucuguc

SEQ ID NO: 1428797 - RNA, 19 nt, Artificial Sequence
  Description of Artificial Sequence: Synthetic oligonucleotide
agaggaaagagggcucugc

SEQ ID NO: 1428798 - RNA, 19 nt, Artificial Sequence
  Description of Artificial Sequence: Synthetic oligonucleotide
ugacgagcugagaacuuag

SEQ ID NO: 1428799 - RNA, 19 nt, Artificial Sequence
  Description of Artificial Sequence: Synthetic oligonucleotide
auggaaccuaaguccuucc

SEQ ID NO: 1428800 - RNA, 19 nt, Artificial Sequence
  Description of Artificial Sequence: Synthetic oligonucleotide
uagagccuuuucaauaggu

SEQ ID NO: 1428801 - RNA, 19 nt, Artificial Sequence
  Description of Artificial Sequence: Synthetic oligonucleotide
acgagcugagaacuuagug

SEQ ID NO: 1428802 - RNA, 19 nt, Artificial Sequence
  Description of Artificial Sequence: Synthetic oligonucleotide
ugagagccacccgaggucg

SEQ ID NO: 1428803 - RNA, 19 nt, Artificial Sequence
  Description of Artificial Sequence: Synthetic oligonucleotide
uuuggaccugcuuccagca

SEQ ID NO: 1428804 - RNA, 19 nt, Artificial Sequence
  Description of Artificial Sequence: Synthetic oligonucleotide
caucgagccaaugugggcc

SEQ ID NO: 1428805 - RNA, 19 nt, Artificial Sequence
  Description of Artificial Sequence: Synthetic oligonucleotide
ccgacaggcaaccagaggg

SEQ ID NO: 1428806 - RNA, 19 nt, Artificial Sequence
  Description of Artificial Sequence: Synthetic oligonucleotide
uacuccugaguugugcccg

SEQ ID NO: 1428807 - RNA, 19 nt, Artificial Sequence
  Description of Artificial Sequence: Synthetic oligonucleotide
aauauggacccaagggcug

SEQ ID NO: 1428808 - RNA, 19 nt, Artificial Sequence
  Description of Artificial Sequence: Synthetic oligonucleotide
ucuugucacgaaaauuaau

SEQ ID NO: 1428809 - RNA, 19 nt, Artificial Sequence
  Description of Artificial Sequence: Synthetic oligonucleotide
uaccgcauguugcagacau

SEQ ID NO: 1428810 - RNA, 19 nt, Artificial Sequence
  Description of Artificial Sequence: Synthetic oligonucleotide
auagggccagcugacauuc

SEQ ID NO: 1428811 - RNA, 19 nt, Artificial Sequence
  Description of Artificial Sequence: Synthetic oligonucleotide
gucccaugcaccaaaacug

SEQ ID NO: 1428812 - RNA, 19 nt, Artificial Sequence
  Description of Artificial Sequence: Synthetic oligonucleotide
uguaccgcauguugcagac

SEQ ID NO: 1428813 - RNA, 19 nt, Artificial Sequence
  Description of Artificial Sequence: Synthetic oligonucleotide
accaaucaacaguuugguc

SEQ ID NO: 1428814 - RNA, 19 nt, Artificial Sequence
  Description of Artificial Sequence: Synthetic oligonucleotide
acggugucggccgaggagc

SEQ ID NO: 1428815 - RNA, 19 nt, Artificial Sequence
  Description of Artificial Sequence: Synthetic oligonucleotide
aggucggacguauucagca

SEQ ID NO: 1428816 - RNA, 19 nt, Artificial Sequence
  Description of Artificial Sequence: Synthetic oligonucleotide
uggaaccuaaguccuuccc

SEQ ID NO: 1428817 - RNA, 19 nt, Artificial Sequence
  Description of Artificial Sequence: Synthetic oligonucleotide
guuaguggccugcaagccc

SEQ ID NO: 1428818 - RNA, 19 nt, Artificial Sequence
  Description of Artificial Sequence: Synthetic oligonucleotide
uuaugacgcugucugucug

SEQ ID NO: 1428819 - RNA, 19 nt, Artificial Sequence
  Description of Artificial Sequence: Synthetic oligonucleotide
ucacgaaaauuaauaucau

SEQ ID NO: 1428820 - RNA, 19 nt, Artificial Sequence
  Description of Artificial Sequence: Synthetic oligonucleotide
ugauguggaccaaaccaaa

SEQ ID NO: 1428821 - RNA, 19 nt, Artificial Sequence
  Description of Artificial Sequence: Synthetic oligonucleotide
aaggccauuaucuguucuu

SEQ ID NO: 1428822 - RNA, 19 nt, Artificial Sequence
  Description of Artificial Sequence: Synthetic oligonucleotide
auaggucaguagcagccag

SEQ ID NO: 1428823 - RNA, 19 nt, Artificial Sequence
  Description of Artificial Sequence: Synthetic oligonucleotide
aacgaagucugugugguua

SEQ ID NO: 1428824 - RNA, 19 nt, Artificial Sequence
  Description of Artificial Sequence: Synthetic oligonucleotide
ucaagguauccgagagcgg

SEQ ID NO: 1428825 - RNA, 19 nt, Artificial Sequence
  Description of Artificial Sequence: Synthetic oligonucleotide
gagacaacauagcgcauca

SEQ ID NO: 1428826 - RNA, 19 nt, Artificial Sequence
  Description of Artificial Sequence: Synthetic oligonucleotide
uuacuccugaguugugccc

SEQ ID NO: 1428827 - RNA, 19 nt, Artificial Sequence
  Description of Artificial Sequence: Synthetic oligonucleotide
ugcauggucaugugaugug

SEQ ID NO: 1428828 - RNA, 19 nt, Artificial Sequence
  Description of Artificial Sequence: Synthetic oligonucleotide
cuuugagaggagacacugc

SEQ ID NO: 1428829 - RNA, 19 nt, Artificial Sequence
  Description of Artificial Sequence: Synthetic oligonucleotide
cugagaugacgaaccaagc

SEQ ID NO: 1428830 - RNA, 19 nt, Artificial Sequence
  Description of Artificial Sequence: Synthetic oligonucleotide
ugcagacauggucccaugc

SEQ ID NO: 1428831 - RNA, 19 nt, Artificial Sequence
  Description of Artificial Sequence: Synthetic oligonucleotide
ucggacguauucagcagca

SEQ ID NO: 1428832 - RNA, 19 nt, Artificial Sequence
  Description of Artificial Sequence: Synthetic oligonucleotide
aaauggagcugacucuguu

SEQ ID NO: 1428833 - RNA, 19 nt, Artificial Sequence
  Description of Artificial Sequence: Synthetic oligonucleotide
uucugagcaggaaucccac

SEQ ID NO: 1428834 - RNA, 19 nt, Artificial Sequence
  Description of Artificial Sequence: Synthetic oligonucleotide
agcgcuaaauguucuuugu

SEQ ID NO: 1428835 - RNA, 19 nt, Artificial Sequence
  Description of Artificial Sequence: Synthetic oligonucleotide
aguuuggucuggagggugc

SEQ ID NO: 1428836 - RNA, 19 nt, Artificial Sequence
  Description of Artificial Sequence: Synthetic oligonucleotide
aucgccgacaggcaaccag

SEQ ID NO: 1428837 - RNA, 19 nt, Artificial Sequence
  Description of Artificial Sequence: Synthetic oligonucleotide
auccccgaagcccauguug

SEQ ID NO: 1428838 - RNA, 19 nt, Artificial Sequence
  Description of Artificial Sequence: Synthetic oligonucleotide
agcaguauuaugacgcugu

SEQ ID NO: 1428839 - RNA, 19 nt, Artificial Sequence
  Description of Artificial Sequence: Synthetic oligonucleotide
aagcuggaaauauccccga

SEQ ID NO: 1428840 - RNA, 19 nt, Artificial Sequence
  Description of Artificial Sequence: Synthetic oligonucleotide
ugucugucuguuucauagc

SEQ ID NO: 1428841 - RNA, 19 nt, Artificial Sequence
  Description of Artificial Sequence: Synthetic oligonucleotide
aaacugcugagaaggguug

SEQ ID NO: 1428842 - RNA, 19 nt, Artificial Sequence
  Description of Artificial Sequence: Synthetic oligonucleotide
gaacucaagguauccgaga

SEQ ID NO: 1428843 - RNA, 19 nt, Artificial Sequence
  Description of Artificial Sequence: Synthetic oligonucleotide
aucguacacggugucggcc

SEQ ID NO: 1428844 - RNA, 19 nt, Artificial Sequence
  Description of Artificial Sequence: Synthetic oligonucleotide
cuuuguaccgcauguugca

SEQ ID NO: 1428845 - RNA, 19 nt, Artificial Sequence
  Description of Artificial Sequence: Synthetic oligonucleotide
uuuguaccgcauguugcag

SEQ ID NO: 1428846 - RNA, 19 nt, Artificial Sequence
  Description of Artificial Sequence: Synthetic oligonucleotide
aucgagccaaugugggccg

SEQ ID NO: 1428847 - RNA, 19 nt, Artificial Sequence
  Description of Artificial Sequence: Synthetic oligonucleotide
uugcuguaaguuucugaca

SEQ ID NO: 1428848 - RNA, 19 nt, Artificial Sequence
  Description of Artificial Sequence: Synthetic oligonucleotide
cuaaguuguccuuaucgaa

SEQ ID NO: 1428849 - RNA, 19 nt, Artificial Sequence
  Description of Artificial Sequence: Synthetic oligonucleotide
ugcccgucagcaccaauca

SEQ ID NO: 1428850 - RNA, 19 nt, Artificial Sequence
  Description of Artificial Sequence: Synthetic oligonucleotide
aucgaacauuaucaaggcu

SEQ ID NO: 1428851 - RNA, 19 nt, Artificial Sequence
  Description of Artificial Sequence: Synthetic oligonucleotide
uuguaccgcauguugcaga

SEQ ID NO: 1428852 - RNA, 19 nt, Artificial Sequence
  Description of Artificial Sequence: Synthetic oligonucleotide
agcgacccgguacuccacc

SEQ ID NO: 1428853 - RNA, 19 nt, Artificial Sequence
  Description of Artificial Sequence: Synthetic oligonucleotide
agagcaguauuaugacgcu

SEQ ID NO: 1428854 - RNA, 19 nt, Artificial Sequence
  Description of Artificial Sequence: Synthetic oligonucleotide
ggguaauauggacccaagg

SEQ ID NO: 1428855 - RNA, 19 nt, Artificial Sequence
  Description of Artificial Sequence: Synthetic oligonucleotide
auauggacccaagggcugg

SEQ ID NO: 1428856 - RNA, 19 nt, Artificial Sequence
  Description of Artificial Sequence: Synthetic oligonucleotide
ucgccgacaggcaaccaga

SEQ ID NO: 1428857 - RNA, 19 nt, Artificial Sequence
  Description of Artificial Sequence: Synthetic oligonucleotide
auauccccgaagcccaugu

SEQ ID NO: 1428858 - RNA, 19 nt, Artificial Sequence
  Description of Artificial Sequence: Synthetic oligonucleotide
gucggacguauucagcagc

SEQ ID NO: 1428859 - RNA, 19 nt, Artificial Sequence
  Description of Artificial Sequence: Synthetic oligonucleotide
uggccugcaagccccacgu

SEQ ID NO: 1428860 - RNA, 19 nt, Artificial Sequence
  Description of Artificial Sequence: Synthetic oligonucleotide
gucgcaagcgacccgguac

SEQ ID NO: 1428861 - RNA, 19 nt, Artificial Sequence
  Description of Artificial Sequence: Synthetic oligonucleotide
gacguauucagcagcaugu

SEQ ID NO: 1428862 - RNA, 19 nt, Artificial Sequence
  Description of Artificial Sequence: Synthetic oligonucleotide
cacucauuugcuggcaaag

SEQ ID NO: 1428863 - RNA, 19 nt, Artificial Sequence
  Description of Artificial Sequence: Synthetic oligonucleotide
caccaaaacugcugagaag

SEQ ID NO: 1428864 - RNA, 19 nt, Artificial Sequence
  Description of Artificial Sequence: Synthetic oligonucleotide
agcaauaggcccagcgggg

SEQ ID NO: 1428865 - RNA, 19 nt, Artificial Sequence
  Description of Artificial Sequence: Synthetic oligonucleotide
auggcagcgcccaccaggc

SEQ ID NO: 1428866 - RNA, 19 nt, Artificial Sequence
  Description of Artificial Sequence: Synthetic oligonucleotide
auagccugugagguggcuc

SEQ ID NO: 1428867 - RNA, 19 nt, Artificial Sequence
  Description of Artificial Sequence: Synthetic oligonucleotide
aagcucgccuuacuccuga

SEQ ID NO: 1428868 - RNA, 19 nt, Artificial Sequence
  Description of Artificial Sequence: Synthetic oligonucleotide
ugguuagcaucacuccaaa

SEQ ID NO: 1428869 - RNA, 19 nt, Artificial Sequence
  Description of Artificial Sequence: Synthetic oligonucleotide
gaggagcacucauuugcug

SEQ ID NO: 1428870 - RNA, 19 nt, Artificial Sequence
  Description of Artificial Sequence: Synthetic oligonucleotide
ucgcaagcgacccgguacu

SEQ ID NO: 1428871 - RNA, 19 nt, Artificial Sequence
  Description of Artificial Sequence: Synthetic oligonucleotide
ucgccuuacuccugaguug

SEQ ID NO: 1428872 - RNA, 19 nt, Artificial Sequence
  Description of Artificial Sequence: Synthetic oligonucleotide
auguugacaccuuguccug

SEQ ID NO: 1428873 - RNA, 19 nt, Artificial Sequence
  Description of Artificial Sequence: Synthetic oligonucleotide
augacgucauuuuccacua

SEQ ID NO: 1428874 - RNA, 19 nt, Artificial Sequence
  Description of Artificial Sequence: Synthetic oligonucleotide
cugcugaacugagaugacg

SEQ ID NO: 1428875 - RNA, 19 nt, Artificial Sequence
  Description of Artificial Sequence: Synthetic oligonucleotide
gccucugauaaaugcagag

SEQ ID NO: 1428876 - RNA, 19 nt, Artificial Sequence
  Description of Artificial Sequence: Synthetic oligonucleotide
caagguauccgagagcgga

SEQ ID NO: 1428877 - RNA, 19 nt, Artificial Sequence
  Description of Artificial Sequence: Synthetic oligonucleotide
cagcgcuaaauguucuuug

SEQ ID NO: 1428878 - RNA, 19 nt, Artificial Sequence
  Description of Artificial Sequence: Synthetic oligonucleotide
caucaccuaggguaauaug

SEQ ID NO: 1428879 - RNA, 19 nt, Artificial Sequence
  Description of Artificial Sequence: Synthetic oligonucleotide
caccagcggacgcacagcg

SEQ ID NO: 1428880 - RNA, 19 nt, Artificial Sequence
  Description of Artificial Sequence: Synthetic oligonucleotide
ccguagagaaccuucacuc

SEQ ID NO: 1428881 - RNA, 19 nt, Artificial Sequence
  Description of Artificial Sequence: Synthetic oligonucleotide
ggacguauucagcagcaug

SEQ ID NO: 1428882 - RNA, 19 nt, Artificial Sequence
  Description of Artificial Sequence: Synthetic oligonucleotide
gccggaaagcuuuguaccg

SEQ ID NO: 1428883 - RNA, 19 nt, Artificial Sequence
  Description of Artificial Sequence: Synthetic oligonucleotide
caccuaggguaauauggac

SEQ ID NO: 1428884 - RNA, 19 nt, Artificial Sequence
  Description of Artificial Sequence: Synthetic oligonucleotide
aacugagaugacgaaccaa

SEQ ID NO: 1428885 - RNA, 19 nt, Artificial Sequence
  Description of Artificial Sequence: Synthetic oligonucleotide
gacccgguacuccaccagc

SEQ ID NO: 1428886 - RNA, 19 nt, Artificial Sequence
  Description of Artificial Sequence: Synthetic oligonucleotide
gaacugagaugacgaacca

SEQ ID NO: 1428887 - RNA, 19 nt, Artificial Sequence
  Description of Artificial Sequence: Synthetic oligonucleotide
gaggagcccgcccaucgcc

SEQ ID NO: 1428888 - RNA, 19 nt, Artificial Sequence
  Description of Artificial Sequence: Synthetic oligonucleotide
aauauccccgaagcccaug

SEQ ID NO: 1428889 - RNA, 19 nt, Artificial Sequence
  Description of Artificial Sequence: Synthetic oligonucleotide
caucacuccaaaaggcaga

SEQ ID NO: 1428890 - RNA, 19 nt, Artificial Sequence
  Description of Artificial Sequence: Synthetic oligonucleotide
uguugacaccuuguccugc

SEQ ID NO: 1428891 - RNA, 19 nt, Artificial Sequence
  Description of Artificial Sequence: Synthetic oligonucleotide
acguauucagcagcauguc

SEQ ID NO: 1428892 - RNA, 19 nt, Artificial Sequence
  Description of Artificial Sequence: Synthetic oligonucleotide
ugucaucuaaguuguccuu

SEQ ID NO: 1428893 - RNA, 19 nt, Artificial Sequence
  Description of Artificial Sequence: Synthetic oligonucleotide
caaguggauggacucugug

SEQ ID NO: 1428894 - RNA, 19 nt, Artificial Sequence
  Description of Artificial Sequence: Synthetic oligonucleotide
cuuugcucccguagagaac

SEQ ID NO: 1428895 - RNA, 19 nt, Artificial Sequence
  Description of Artificial Sequence: Synthetic oligonucleotide
acgucauuuuccacuaugu

SEQ ID NO: 1428896 - RNA, 19 nt, Artificial Sequence
  Description of Artificial Sequence: Synthetic oligonucleotide
uccagaagaggagcacuca

SEQ ID NO: 1428897 - RNA, 19 nt, Artificial Sequence
  Description of Artificial Sequence: Synthetic oligonucleotide
caggauuuucuugucacga

SEQ ID NO: 1428898 - RNA, 19 nt, Artificial Sequence
  Description of Artificial Sequence: Synthetic oligonucleotide
uggacccaagggcuggagu

SEQ ID NO: 1428899 - RNA, 19 nt, Artificial Sequence
  Description of Artificial Sequence: Synthetic oligonucleotide
cuggaucccagaagcucgc

SEQ ID NO: 1428900 - RNA, 19 nt, Artificial Sequence
  Description of Artificial Sequence: Synthetic oligonucleotide
cacaucguacacggugucg

SEQ ID NO: 1428901 - RNA, 19 nt, Artificial Sequence
  Description of Artificial Sequence: Synthetic oligonucleotide
ucccguagagaaccuucac

SEQ ID NO: 1428902 - RNA, 19 nt, Artificial Sequence
  Description of Artificial Sequence: Synthetic oligonucleotide
ucauagccugugagguggc

SEQ ID NO: 1428903 - RNA, 19 nt, Artificial Sequence
  Description of Artificial Sequence: Synthetic oligonucleotide
gguugaauagagccuuuuc

SEQ ID NO: 1428904 - RNA, 19 nt, Artificial Sequence
  Description of Artificial Sequence: Synthetic oligonucleotide
agaacuuagugggcuucag

SEQ ID NO: 1428905 - RNA, 19 nt, Artificial Sequence
  Description of Artificial Sequence: Synthetic oligonucleotide
guugacaccuuguccugca

SEQ ID NO: 1428906 - RNA, 19 nt, Artificial Sequence
  Description of Artificial Sequence: Synthetic oligonucleotide
cagccccagaggaaagagg

SEQ ID NO: 1428907 - RNA, 19 nt, Artificial Sequence
  Description of Artificial Sequence: Synthetic oligonucleotide
gagcaguauuaugacgcug

SEQ ID NO: 1428908 - RNA, 19 nt, Artificial Sequence
  Description of Artificial Sequence: Synthetic oligonucleotide
uacgccggaaagcuuugua

SEQ ID NO: 1428909 - RNA, 19 nt, Artificial Sequence
  Description of Artificial Sequence: Synthetic oligonucleotide
aaccuaaguccuucccguu

SEQ ID NO: 1428910 - RNA, 19 nt, Artificial Sequence
  Description of Artificial Sequence: Synthetic oligonucleotide
caucguacacggugucggc

SEQ ID NO: 1428911 - RNA, 19 nt, Artificial Sequence
  Description of Artificial Sequence: Synthetic oligonucleotide
uacacggugucggccgagg

SEQ ID NO: 1428912 - RNA, 19 nt, Artificial Sequence
  Description of Artificial Sequence: Synthetic oligonucleotide
cacaagccauggcagcgcc

SEQ ID NO: 1428913 - RNA, 19 nt, Artificial Sequence
  Description of Artificial Sequence: Synthetic oligonucleotide
agcccauguugacaccuug

SEQ ID NO: 1428914 - RNA, 19 nt, Artificial Sequence
  Description of Artificial Sequence: Synthetic oligonucleotide
gugauguggaccaaaccaa

SEQ ID NO: 1428915 - RNA, 19 nt, Artificial Sequence
  Description of Artificial Sequence: Synthetic oligonucleotide
cuuguccugcaaguggaug

SEQ ID NO: 1428916 - RNA, 19 nt, Artificial Sequence
  Description of Artificial Sequence: Synthetic oligonucleotide
gcguuaguggccugcaagc

SEQ ID NO: 1428917 - RNA, 19 nt, Artificial Sequence
  Description of Artificial Sequence: Synthetic oligonucleotide
cauugguugaauagagccu

SEQ ID NO: 1428918 - RNA, 19 nt, Artificial Sequence
  Description of Artificial Sequence: Synthetic oligonucleotide
gauggacucugugggcugc

SEQ ID NO: 1428919 - RNA, 19 nt, Artificial Sequence
  Description of Artificial Sequence: Synthetic oligonucleotide
ucguccggucgcaagcgac

SEQ ID NO: 1428920 - RNA, 19 nt, Artificial Sequence
  Description of Artificial Sequence: Synthetic oligonucleotide
gcggaagcagagcaauagg

SEQ ID NO: 1428921 - RNA, 19 nt, Artificial Sequence
  Description of Artificial Sequence: Synthetic oligonucleotide
accacaucguacacggugu

SEQ ID NO: 1428922 - RNA, 19 nt, Artificial Sequence
  Description of Artificial Sequence: Synthetic oligonucleotide
uacuccaccagcggacgca

SEQ ID NO: 1428923 - RNA, 19 nt, Artificial Sequence
  Description of Artificial Sequence: Synthetic oligonucleotide
gcaucacuccaaaaggcag

SEQ ID NO: 1428924 - RNA, 19 nt, Artificial Sequence
  Description of Artificial Sequence: Synthetic oligonucleotide
gcuuuguaccgcauguugc

SEQ ID NO: 1428925 - RNA, 19 nt, Artificial Sequence
  Description of Artificial Sequence: Synthetic oligonucleotide
cggaagcagagcaauaggc

SEQ ID NO: 1428926 - RNA, 19 nt, Artificial Sequence
  Description of Artificial Sequence: Synthetic oligonucleotide
ggauuuucuugucacgaaa

SEQ ID NO: 1428927 - RNA, 19 nt, Artificial Sequence
  Description of Artificial Sequence: Synthetic oligonucleotide
uggucccaugcaccaaaac

SEQ ID NO: 1428928 - RNA, 19 nt, Artificial Sequence
  Description of Artificial Sequence: Synthetic oligonucleotide
gacaauuucuccaguacuu

SEQ ID NO: 1428929 - RNA, 19 nt, Artificial Sequence
  Description of Artificial Sequence: Synthetic oligonucleotide
uccggucgcaagcgacccg

SEQ ID NO: 1428930 - RNA, 19 nt, Artificial Sequence
  Description of Artificial Sequence: Synthetic oligonucleotide
cacuccaaaaggcagaguu

SEQ ID NO: 1428931 - RNA, 19 nt, Artificial Sequence
  Description of Artificial Sequence: Synthetic oligonucleotide
guauccgagagcggaagca

SEQ ID NO: 1428932 - RNA, 19 nt, Artificial Sequence
  Description of Artificial Sequence: Synthetic oligonucleotide
cacggugucggccgaggag

SEQ ID NO: 1428933 - RNA, 19 nt, Artificial Sequence
  Description of Artificial Sequence: Synthetic oligonucleotide
caauaggcccagcggggag

SEQ ID NO: 1428934 - RNA, 19 nt, Artificial Sequence
  Description of Artificial Sequence: Synthetic oligonucleotide
agaggagcacucauuugcu

SEQ ID NO: 1428935 - RNA, 19 nt, Artificial Sequence
  Description of Artificial Sequence: Synthetic oligonucleotide
gugucggccgaggagcccg

SEQ ID NO: 1428936 - RNA, 19 nt, Artificial Sequence
  Description of Artificial Sequence: Synthetic oligonucleotide
cguagagaaccuucacucg

SEQ ID NO: 1428937 - RNA, 19 nt, Artificial Sequence
  Description of Artificial Sequence: Synthetic oligonucleotide
ggucccaugcaccaaaacu

SEQ ID NO: 1428938 - RNA, 19 nt, Artificial Sequence
  Description of Artificial Sequence: Synthetic oligonucleotide
aguuguccuuaucgaacau

SEQ ID NO: 1428939 - RNA, 19 nt, Artificial Sequence
  Description of Artificial Sequence: Synthetic oligonucleotide
gcggggagaaaucucugcc

SEQ ID NO: 1428940 - RNA, 19 nt, Artificial Sequence
  Description of Artificial Sequence: Synthetic oligonucleotide
uucccguugaaggcugcug

SEQ ID NO: 1428941 - RNA, 19 nt, Artificial Sequence
  Description of Artificial Sequence: Synthetic oligonucleotide
agccccacguccugagcag

SEQ ID NO: 1428942 - RNA, 19 nt, Artificial Sequence
  Description of Artificial Sequence: Synthetic oligonucleotide
agcccaugucaucuaaguu

SEQ ID NO: 1428943 - RNA, 19 nt, Artificial Sequence
  Description of Artificial Sequence: Synthetic oligonucleotide
aggguaauauggacccaag

SEQ ID NO: 1428944 - RNA, 19 nt, Artificial Sequence
  Description of Artificial Sequence: Synthetic oligonucleotide
caucuaaguuguccuuauc

SEQ ID NO: 1428945 - RNA, 19 nt, Artificial Sequence
  Description of Artificial Sequence: Synthetic oligonucleotide
ggucggacguauucagcag

SEQ ID NO: 1428946 - RNA, 19 nt, Artificial Sequence
  Description of Artificial Sequence: Synthetic oligonucleotide
agcacucauuugcuggcaa

SEQ ID NO: 1428947 - RNA, 19 nt, Artificial Sequence
  Description of Artificial Sequence: Synthetic oligonucleotide
gagaacuuagugggcuuca

SEQ ID NO: 1428948 - RNA, 19 nt, Artificial Sequence
  Description of Artificial Sequence: Synthetic oligonucleotide
gaggucggacguauucagc

SEQ ID NO: 1428949 - RNA, 19 nt, Artificial Sequence
  Description of Artificial Sequence: Synthetic oligonucleotide
ggagacaacauagcgcauc

SEQ ID NO: 1428950 - RNA, 19 nt, Artificial Sequence
  Description of Artificial Sequence: Synthetic oligonucleotide
gucggccacagccucuagc

SEQ ID NO: 1428951 - RNA, 19 nt, Artificial Sequence
  Description of Artificial Sequence: Synthetic oligonucleotide
cagcgagccggccaucgag

SEQ ID NO: 1428952 - RNA, 19 nt, Artificial Sequence
  Description of Artificial Sequence: Synthetic oligonucleotide
aaagagggcucugcuuuua

SEQ ID NO: 1428953 - RNA, 19 nt, Artificial Sequence
  Description of Artificial Sequence: Synthetic oligonucleotide
cccacaccugcauacgccg

SEQ ID NO: 1428954 - RNA, 19 nt, Artificial Sequence
  Description of Artificial Sequence: Synthetic oligonucleotide
ggccaucgagccaaugugg

SEQ ID NO: 1428955 - RNA, 19 nt, Artificial Sequence
  Description of Artificial Sequence: Synthetic oligonucleotide
gguacuccaccagcggacg

SEQ ID NO: 1428956 - RNA, 19 nt, Artificial Sequence
  Description of Artificial Sequence: Synthetic oligonucleotide
gccaucgagccaauguggg

SEQ ID NO: 1428957 - RNA, 19 nt, Artificial Sequence
  Description of Artificial Sequence: Synthetic oligonucleotide
gacacugcguuaguggccu

SEQ ID NO: 1428958 - RNA, 19 nt, Artificial Sequence
  Description of Artificial Sequence: Synthetic oligonucleotide
acccgguacuccaccagcg

SEQ ID NO: 1428959 - RNA, 19 nt, Artificial Sequence
  Description of Artificial Sequence: Synthetic oligonucleotide
aagguauccgagagcggaa

SEQ ID NO: 1428960 - RNA, 19 nt, Artificial Sequence
  Description of Artificial Sequence: Synthetic oligonucleotide
aucaacaguuuggucugga

SEQ ID NO: 1428961 - RNA, 19 nt, Artificial Sequence
  Description of Artificial Sequence: Synthetic oligonucleotide
gaugacgaaccaagcugga

SEQ ID NO: 1428962 - RNA, 19 nt, Artificial Sequence
  Description of Artificial Sequence: Synthetic oligonucleotide
gcuuugcucccguagagaa

SEQ ID NO: 1428963 - RNA, 19 nt, Artificial Sequence
  Description of Artificial Sequence: Synthetic oligonucleotide
cgaacauuaucaaggcuuc

SEQ ID NO: 1428964 - RNA, 19 nt, Artificial Sequence
  Description of Artificial Sequence: Synthetic oligonucleotide
uuggaccugcuuccagcaa

SEQ ID NO: 1428965 - RNA, 19 nt, Artificial Sequence
  Description of Artificial Sequence: Synthetic oligonucleotide
gaguugugcccgucagcac

SEQ ID NO: 1428966 - RNA, 19 nt, Artificial Sequence
  Description of Artificial Sequence: Synthetic oligonucleotide
ggguugcagaaccagggga

SEQ ID NO: 1428967 - RNA, 19 nt, Artificial Sequence
  Description of Artificial Sequence: Synthetic oligonucleotide
ggaaagagggcucugcuuu

SEQ ID NO: 1428968 - RNA, 19 nt, Artificial Sequence
  Description of Artificial Sequence: Synthetic oligonucleotide
uggcugagucaacgaaguc

SEQ ID NO: 1428969 - RNA, 19 nt, Artificial Sequence
  Description of Artificial Sequence: Synthetic oligonucleotide
caacauagcgcaucauggu

SEQ ID NO: 1428970 - RNA, 19 nt, Artificial Sequence
  Description of Artificial Sequence: Synthetic oligonucleotide
gaucccagaagcucgccuu

SEQ ID NO: 1428971 - RNA, 19 nt, Artificial Sequence
  Description of Artificial Sequence: Synthetic oligonucleotide
cucccguagagaaccuuca

SEQ ID NO: 1428972 - RNA, 19 nt, Artificial Sequence
  Description of Artificial Sequence: Synthetic oligonucleotide
cguauucagcagcaugucc

SEQ ID NO: 1428973 - RNA, 19 nt, Artificial Sequence
  Description of Artificial Sequence: Synthetic oligonucleotide
ugcauacgccggaaagcuu

SEQ ID NO: 1428974 - RNA, 19 nt, Artificial Sequence
  Description of Artificial Sequence: Synthetic oligonucleotide
ugguugaauagagccuuuu

SEQ ID NO: 1428975 - RNA, 19 nt, Artificial Sequence
  Description of Artificial Sequence: Synthetic oligonucleotide
uugcagaaccaggggaaau

SEQ ID NO: 1428976 - RNA, 19 nt, Artificial Sequence
  Description of Artificial Sequence: Synthetic oligonucleotide
ucggccgaggagcccgccc

SEQ ID NO: 1428977 - RNA, 19 nt, Artificial Sequence
  Description of Artificial Sequence: Synthetic oligonucleotide
gaagcucgccuuacuccug

SEQ ID NO: 1428978 - RNA, 19 nt, Artificial Sequence
  Description of Artificial Sequence: Synthetic oligonucleotide
ccugcauacgccggaaagc

SEQ ID NO: 1428979 - RNA, 19 nt, Artificial Sequence
  Description of Artificial Sequence: Synthetic oligonucleotide
gagaaggguugcagaacca

SEQ ID NO: 1428980 - RNA, 19 nt, Artificial Sequence
  Description of Artificial Sequence: Synthetic oligonucleotide
cacugcguuaguggccugc

SEQ ID NO: 1428981 - RNA, 19 nt, Artificial Sequence
  Description of Artificial Sequence: Synthetic oligonucleotide
cgccggaaagcuuuguacc

SEQ ID NO: 1428982 - RNA, 19 nt, Artificial Sequence
  Description of Artificial Sequence: Synthetic oligonucleotide
ccuuacuccugaguugugc

SEQ ID NO: 1428983 - RNA, 19 nt, Artificial Sequence
  Description of Artificial Sequence: Synthetic oligonucleotide
ugacgucauuuuccacuau

SEQ ID NO: 1428984 - RNA, 19 nt, Artificial Sequence
  Description of Artificial Sequence: Synthetic oligonucleotide
guacuccaccagcggacgc

SEQ ID NO: 1428985 - RNA, 19 nt, Artificial Sequence
  Description of Artificial Sequence: Synthetic oligonucleotide
acugcguuaguggccugca

SEQ ID NO: 1428986 - RNA, 19 nt, Artificial Sequence
  Description of Artificial Sequence: Synthetic oligonucleotide
gugcccgucagcaccaauc

SEQ ID NO: 1428987 - RNA, 19 nt, Artificial Sequence
  Description of Artificial Sequence: Synthetic oligonucleotide
gagcugacucuguugcugu

SEQ ID NO: 1428988 - RNA, 19 nt, Artificial Sequence
  Description of Artificial Sequence: Synthetic oligonucleotide
augacgaaccaagcuggaa

SEQ ID NO: 1428989 - RNA, 19 nt, Artificial Sequence
  Description of Artificial Sequence: Synthetic oligonucleotide
aggccauuaucuguucuuu

SEQ ID NO: 1428990 - RNA, 19 nt, Artificial Sequence
  Description of Artificial Sequence: Synthetic oligonucleotide
cagcggggagaaaucucug

SEQ ID NO: 1428991 - RNA, 19 nt, Artificial Sequence
  Description of Artificial Sequence: Synthetic oligonucleotide
ccgcccaucgccgacaggc

SEQ ID NO: 1428992 - RNA, 19 nt, Artificial Sequence
  Description of Artificial Sequence: Synthetic oligonucleotide
cucgccuuacuccugaguu

SEQ ID NO: 1428993 - RNA, 19 nt, Artificial Sequence
  Description of Artificial Sequence: Synthetic oligonucleotide
gguugcagaaccaggggaa

SEQ ID NO: 1428994 - RNA, 19 nt, Artificial Sequence
  Description of Artificial Sequence: Synthetic oligonucleotide
aucccagaagcucgccuua

SEQ ID NO: 1428995 - RNA, 19 nt, Artificial Sequence
  Description of Artificial Sequence: Synthetic oligonucleotide
agcaggaaucccacaccug

SEQ ID NO: 1428996 - RNA, 19 nt, Artificial Sequence
  Description of Artificial Sequence: Synthetic oligonucleotide
gcgcuaaauguucuuuguc

SEQ ID NO: 1428997 - RNA, 19 nt, Artificial Sequence
  Description of Artificial Sequence: Synthetic oligonucleotide
uggaucccagaagcucgcc

SEQ ID NO: 1428998 - RNA, 19 nt, Artificial Sequence
  Description of Artificial Sequence: Synthetic oligonucleotide
aggagcccgcccaucgccg

SEQ ID NO: 1428999 - RNA, 19 nt, Artificial Sequence
  Description of Artificial Sequence: Synthetic oligonucleotide
ucggucggccacagccucu

SEQ ID NO: 1429000 - RNA, 19 nt, Artificial Sequence
  Description of Artificial Sequence: Synthetic oligonucleotide
uauccccgaagcccauguu

SEQ ID NO: 1429001 - RNA, 19 nt, Artificial Sequence
  Description of Artificial Sequence: Synthetic oligonucleotide
cacaccugcauacgccgga

SEQ ID NO: 1429002 - RNA, 19 nt, Artificial Sequence
  Description of Artificial Sequence: Synthetic oligonucleotide
cauagcgcaucauggugcu

SEQ ID NO: 1429003 - RNA, 19 nt, Artificial Sequence
  Description of Artificial Sequence: Synthetic oligonucleotide
ccaucgagccaaugugggc

SEQ ID NO: 1429004 - RNA, 19 nt, Artificial Sequence
  Description of Artificial Sequence: Synthetic oligonucleotide
agcucgccuuacuccugag

SEQ ID NO: 1429005 - RNA, 19 nt, Artificial Sequence
  Description of Artificial Sequence: Synthetic oligonucleotide
gagagccacccgaggucgg

SEQ ID NO: 1429006 - RNA, 19 nt, Artificial Sequence
  Description of Artificial Sequence: Synthetic oligonucleotide
guuuucuguggccucugau

SEQ ID NO: 1429007 - RNA, 19 nt, Artificial Sequence
  Description of Artificial Sequence: Synthetic oligonucleotide
guccggucgcaagcgaccc

SEQ ID NO: 1429008 - RNA, 19 nt, Artificial Sequence
  Description of Artificial Sequence: Synthetic oligonucleotide
cugcauacgccggaaagcu

SEQ ID NO: 1429009 - RNA, 19 nt, Artificial Sequence
  Description of Artificial Sequence: Synthetic oligonucleotide
gagagcggaagcagagcaa

SEQ ID NO: 1429010 - RNA, 19 nt, Artificial Sequence
  Description of Artificial Sequence: Synthetic oligonucleotide
uaguggccugcaagcccca

SEQ ID NO: 1429011 - RNA, 19 nt, Artificial Sequence
  Description of Artificial Sequence: Synthetic oligonucleotide
gagcacucauuugcuggca

SEQ ID NO: 1429012 - RNA, 19 nt, Artificial Sequence
  Description of Artificial Sequence: Synthetic oligonucleotide
ccgucagcaccaaucaaca

SEQ ID NO: 1429013 - RNA, 19 nt, Artificial Sequence
  Description of Artificial Sequence: Synthetic oligonucleotide
acguccugagcagcaccag

SEQ ID NO: 1429014 - RNA, 19 nt, Artificial Sequence
  Description of Artificial Sequence: Synthetic oligonucleotide
caccaaucaacaguuuggu

SEQ ID NO: 1429015 - RNA, 19 nt, Artificial Sequence
  Description of Artificial Sequence: Synthetic oligonucleotide
guggcucauggaaccuaag

SEQ ID NO: 1429016 - RNA, 19 nt, Artificial Sequence
  Description of Artificial Sequence: Synthetic oligonucleotide
ccgaggagcccgcccaucg

SEQ ID NO: 1429017 - RNA, 19 nt, Artificial Sequence
  Description of Artificial Sequence: Synthetic oligonucleotide
acucggucggccacagccu

SEQ ID NO: 1429018 - RNA, 19 nt, Artificial Sequence
  Description of Artificial Sequence: Synthetic oligonucleotide
cuggagggugcugccauca

SEQ ID NO: 1429019 - RNA, 19 nt, Artificial Sequence
  Description of Artificial Sequence: Synthetic oligonucleotide
cugcauggucaugugaugu

SEQ ID NO: 1429020 - RNA, 19 nt, Artificial Sequence
  Description of Artificial Sequence: Synthetic oligonucleotide
ccggaaagcuuuguaccgc

SEQ ID NO: 1429021 - RNA, 19 nt, Artificial Sequence
  Description of Artificial Sequence: Synthetic oligonucleotide
gucauagggccagcugaca

SEQ ID NO: 1429022 - RNA, 19 nt, Artificial Sequence
  Description of Artificial Sequence: Synthetic oligonucleotide
uggcagcgcccaccaggcc

SEQ ID NO: 1429023 - RNA, 19 nt, Artificial Sequence
  Description of Artificial Sequence: Synthetic oligonucleotide
uggugagagcaugcaugau

SEQ ID NO: 1429024 - RNA, 19 nt, Artificial Sequence
  Description of Artificial Sequence: Synthetic oligonucleotide
caguauuaugacgcugucu

SEQ ID NO: 1429025 - RNA, 19 nt, Artificial Sequence
  Description of Artificial Sequence: Synthetic oligonucleotide
agacaacauagcgcaucau

SEQ ID NO: 1429026 - RNA, 19 nt, Artificial Sequence
  Description of Artificial Sequence: Synthetic oligonucleotide
cccgguacuccaccagcgg

SEQ ID NO: 1429027 - RNA, 19 nt, Artificial Sequence
  Description of Artificial Sequence: Synthetic oligonucleotide
ugacgcugucugucuguuu

SEQ ID NO: 1429028 - RNA, 19 nt, Artificial Sequence
  Description of Artificial Sequence: Synthetic oligonucleotide
cuaggguaauauggaccca

SEQ ID NO: 1429029 - RNA, 19 nt, Artificial Sequence
  Description of Artificial Sequence: Synthetic oligonucleotide
gcaagcgacccgguacucc

SEQ ID NO: 1429030 - RNA, 19 nt, Artificial Sequence
  Description of Artificial Sequence: Synthetic oligonucleotide
ucgagccaaugugggccgc

SEQ ID NO: 1429031 - RNA, 19 nt, Artificial Sequence
  Description of Artificial Sequence: Synthetic oligonucleotide
auacgccggaaagcuuugu

SEQ ID NO: 1429032 - RNA, 19 nt, Artificial Sequence
  Description of Artificial Sequence: Synthetic oligonucleotide
guuguccuuaucgaacauu

SEQ ID NO: 1429033 - RNA, 19 nt, Artificial Sequence
  Description of Artificial Sequence: Synthetic oligonucleotide
ccacguccugagcagcacc

SEQ ID NO: 1429034 - RNA, 19 nt, Artificial Sequence
  Description of Artificial Sequence: Synthetic oligonucleotide
cccgaggucggacguauuc

SEQ ID NO: 1429035 - RNA, 19 nt, Artificial Sequence
  Description of Artificial Sequence: Synthetic oligonucleotide
guacacggugucggccgag

SEQ ID NO: 1429036 - RNA, 19 nt, Artificial Sequence
  Description of Artificial Sequence: Synthetic oligonucleotide
ccggucgcaagcgacccgg

SEQ ID NO: 1429037 - RNA, 19 nt, Artificial Sequence
  Description of Artificial Sequence: Synthetic oligonucleotide
cgagagcggaagcagagca

SEQ ID NO: 1429038 - RNA, 19 nt, Artificial Sequence
  Description of Artificial Sequence: Synthetic oligonucleotide
gcgagccggccaucgagcc

SEQ ID NO: 1429039 - RNA, 19 nt, Artificial Sequence
  Description of Artificial Sequence: Synthetic oligonucleotide
cguuaguggccugcaagcc

SEQ ID NO: 1429040 - RNA, 19 nt, Artificial Sequence
  Description of Artificial Sequence: Synthetic oligonucleotide
cggccaucgagccaaugug

SEQ ID NO: 1429041 - RNA, 19 nt, Artificial Sequence
  Description of Artificial Sequence: Synthetic oligonucleotide
cgguacuccaccagcggac

SEQ ID NO: 1429042 - RNA, 19 nt, Artificial Sequence
  Description of Artificial Sequence: Synthetic oligonucleotide
gcaaccagagggccucguc

SEQ ID NO: 1429043 - RNA, 19 nt, Artificial Sequence
  Description of Artificial Sequence: Synthetic oligonucleotide
gcacucauuugcuggcaaa

SEQ ID NO: 1429044 - RNA, 19 nt, Artificial Sequence
  Description of Artificial Sequence: Synthetic oligonucleotide
cuucacucggucggccaca

SEQ ID NO: 1429045 - RNA, 19 nt, Artificial Sequence
  Description of Artificial Sequence: Synthetic oligonucleotide
gagcccgcccaucgccgac

SEQ ID NO: 1429046 - RNA, 19 nt, Artificial Sequence
  Description of Artificial Sequence: Synthetic oligonucleotide
acacugcguuaguggccug

SEQ ID NO: 1429047 - RNA, 19 nt, Artificial Sequence
  Description of Artificial Sequence: Synthetic oligonucleotide
ccaucgccgacaggcaacc

SEQ ID NO: 1429048 - RNA, 19 nt, Artificial Sequence
  Description of Artificial Sequence: Synthetic oligonucleotide
ugcucccguagagaaccuu

SEQ ID NO: 1429049 - RNA, 19 nt, Artificial Sequence
  Description of Artificial Sequence: Synthetic oligonucleotide
accgcauguugcagacaug

SEQ ID NO: 1429050 - RNA, 19 nt, Artificial Sequence
  Description of Artificial Sequence: Synthetic oligonucleotide
cguccggucgcaagcgacc

SEQ ID NO: 1429051 - RNA, 19 nt, Artificial Sequence
  Description of Artificial Sequence: Synthetic oligonucleotide
gcaauaggcccagcgggga

SEQ ID NO: 1429052 - RNA, 19 nt, Artificial Sequence
  Description of Artificial Sequence: Synthetic oligonucleotide
ccucguccggucgcaagcg

SEQ ID NO: 1429053 - RNA, 19 nt, Artificial Sequence
  Description of Artificial Sequence: Synthetic oligonucleotide
ggaucccagaagcucgccu

SEQ ID NO: 1429054 - RNA, 19 nt, Artificial Sequence
  Description of Artificial Sequence: Synthetic oligonucleotide
ggccucugauaaaugcaga

SEQ ID NO: 1429055 - RNA, 19 nt, Artificial Sequence
  Description of Artificial Sequence: Synthetic oligonucleotide
ccguugaaggcugcugaac

SEQ ID NO: 1429056 - RNA, 19 nt, Artificial Sequence
  Description of Artificial Sequence: Synthetic oligonucleotide
gagcggaagcagagcaaua

SEQ ID NO: 1429057 - RNA, 19 nt, Artificial Sequence
  Description of Artificial Sequence: Synthetic oligonucleotide
cucguccggucgcaagcga

SEQ ID NO: 1429058 - RNA, 19 nt, Artificial Sequence
  Description of Artificial Sequence: Synthetic oligonucleotide
ccacaucguacacgguguc

SEQ ID NO: 1429059 - RNA, 19 nt, Artificial Sequence
  Description of Artificial Sequence: Synthetic oligonucleotide
guaccgcauguugcagaca

SEQ ID NO: 1429060 - RNA, 19 nt, Artificial Sequence
  Description of Artificial Sequence: Synthetic oligonucleotide
ccgagagcggaagcagagc

SEQ ID NO: 1429061 - RNA, 19 nt, Artificial Sequence
  Description of Artificial Sequence: Synthetic oligonucleotide
cccguagagaaccuucacu

SEQ ID NO: 1429062 - RNA, 19 nt, Artificial Sequence
  Description of Artificial Sequence: Synthetic oligonucleotide
ccuucccguugaaggcugc

SEQ ID NO: 1429063 - RNA, 19 nt, Artificial Sequence
  Description of Artificial Sequence: Synthetic oligonucleotide
gucaugugauguggaccaa

SEQ ID NO: 1429064 - RNA, 19 nt, Artificial Sequence
  Description of Artificial Sequence: Synthetic oligonucleotide
ccgguacuccaccagcgga

SEQ ID NO: 1429065 - RNA, 19 nt, Artificial Sequence
  Description of Artificial Sequence: Synthetic oligonucleotide
agcccgcccaucgccgaca

SEQ ID NO: 1429066 - RNA, 19 nt, Artificial Sequence
  Description of Artificial Sequence: Synthetic oligonucleotide
caggcauagccaacagcuu

SEQ ID NO: 1429067 - RNA, 19 nt, Artificial Sequence
  Description of Artificial Sequence: Synthetic oligonucleotide
cugcguuaguggccugcaa

SEQ ID NO: 1429068 - RNA, 19 nt, Artificial Sequence
  Description of Artificial Sequence: Synthetic oligonucleotide
caccugcauacgccggaaa

SEQ ID NO: 1429069 - RNA, 19 nt, Artificial Sequence
  Description of Artificial Sequence: Synthetic oligonucleotide
ccgaggucggacguauuca

SEQ ID NO: 1429070 - RNA, 19 nt, Artificial Sequence
  Description of Artificial Sequence: Synthetic oligonucleotide
cgccgacaggcaaccagag

SEQ ID NO: 1429071 - RNA, 19 nt, Artificial Sequence
  Description of Artificial Sequence: Synthetic oligonucleotide
ccaccagcggacgcacagc

SEQ ID NO: 1429072 - RNA, 19 nt, Artificial Sequence
  Description of Artificial Sequence: Synthetic oligonucleotide
ggucgcaagcgacccggua

SEQ ID NO: 1429073 - RNA, 19 nt, Artificial Sequence
  Description of Artificial Sequence: Synthetic oligonucleotide
cgacccgguacuccaccag

SEQ ID NO: 1429074 - RNA, 19 nt, Artificial Sequence
  Description of Artificial Sequence: Synthetic oligonucleotide
gcccaucgccgacaggcaa

SEQ ID NO: 1429075 - RNA, 19 nt, Artificial Sequence
  Description of Artificial Sequence: Synthetic oligonucleotide
ccggccaucgagccaaugu

SEQ ID NO: 1429076 - RNA, 19 nt, Artificial Sequence
  Description of Artificial Sequence: Synthetic oligonucleotide
cgaggagcccgcccaucgc

SEQ ID NO: 1429077 - RNA, 19 nt, Artificial Sequence
  Description of Artificial Sequence: Synthetic oligonucleotide
cauccaccuuggcuauacu

SEQ ID NO: 1429078 - RNA, 19 nt, Artificial Sequence
  Description of Artificial Sequence: Synthetic oligonucleotide
gccaucaccuaggguaaua

SEQ ID NO: 1429079 - RNA, 19 nt, Artificial Sequence
  Description of Artificial Sequence: Synthetic oligonucleotide
gcucgccuuacuccugagu

SEQ ID NO: 1429080 - RNA, 19 nt, Artificial Sequence
  Description of Artificial Sequence: Synthetic oligonucleotide
cggugucggccgaggagcc

SEQ ID NO: 1429081 - RNA, 19 nt, Artificial Sequence
  Description of Artificial Sequence: Synthetic oligonucleotide
gcagcaugucccagcccca

SEQ ID NO: 1429082 - RNA, 19 nt, Artificial Sequence
  Description of Artificial Sequence: Synthetic oligonucleotide
gucggccgaggagcccgcc

SEQ ID NO: 1429083 - RNA, 19 nt, Artificial Sequence
  Description of Artificial Sequence: Synthetic oligonucleotide
gccuuacuccugaguugug

SEQ ID NO: 1429084 - RNA, 19 nt, Artificial Sequence
  Description of Artificial Sequence: Synthetic oligonucleotide
caacgaagucugugugguu

SEQ ID NO: 1429085 - RNA, 19 nt, Artificial Sequence
  Description of Artificial Sequence: Synthetic oligonucleotide
gcccauguugacaccuugu

SEQ ID NO: 1429086 - RNA, 19 nt, Artificial Sequence
  Description of Artificial Sequence: Synthetic oligonucleotide
gcccgucagcaccaaucaa

SEQ ID NO: 1429087 - RNA, 19 nt, Artificial Sequence
  Description of Artificial Sequence: Synthetic oligonucleotide
cccaugcaccaaaacugcu

SEQ ID NO: 1429088 - RNA, 19 nt, Artificial Sequence
  Description of Artificial Sequence: Synthetic oligonucleotide
cgagccaaugugggccgcc

SEQ ID NO: 1429089 - RNA, 19 nt, Artificial Sequence
  Description of Artificial Sequence: Synthetic oligonucleotide
ggccugcaagccccacguc

SEQ ID NO: 1429090 - RNA, 19 nt, Artificial Sequence
  Description of Artificial Sequence: Synthetic oligonucleotide
caucgccgacaggcaacca

SEQ ID NO: 1429091 - RNA, 19 nt, Artificial Sequence
  Description of Artificial Sequence: Synthetic oligonucleotide
cagcgcccaccaggccucc

SEQ ID NO: 1429092 - RNA, 19 nt, Artificial Sequence
  Description of Artificial Sequence: Synthetic oligonucleotide
cacccgaggucggacguau

SEQ ID NO: 1429093 - RNA, 19 nt, Artificial Sequence
  Description of Artificial Sequence: Synthetic oligonucleotide
ccaucaccuaggguaauau

SEQ ID NO: 1429094 - RNA, 19 nt, Artificial Sequence
  Description of Artificial Sequence: Synthetic oligonucleotide
agcgcccaccaggccuccu

SEQ ID NO: 1429095 - RNA, 19 nt, Artificial Sequence
  Description of Artificial Sequence: Synthetic oligonucleotide
cgccuuacuccugaguugu

SEQ ID NO: 1429096 - RNA, 19 nt, Artificial Sequence
  Description of Artificial Sequence: Synthetic oligonucleotide
gcccagcggggagaaaucu

SEQ ID NO: 1429097 - RNA, 19 nt, Artificial Sequence
  Description of Artificial Sequence: Synthetic oligonucleotide
cguacacggugucggccga

SEQ ID NO: 1429098 - RNA, 19 nt, Artificial Sequence
  Description of Artificial Sequence: Synthetic oligonucleotide
gccggccaucgagccaaug

SEQ ID NO: 1429099 - RNA, 19 nt, Artificial Sequence
  Description of Artificial Sequence: Synthetic oligonucleotide
acccgaggucggacguauu

SEQ ID NO: 1429100 - RNA, 19 nt, Artificial Sequence
  Description of Artificial Sequence: Synthetic oligonucleotide
cccgcccaucgccgacagg

SEQ ID NO: 1429101 - RNA, 19 nt, Artificial Sequence
  Description of Artificial Sequence: Synthetic oligonucleotide
gccgaggagcccgcccauc

SEQ ID NO: 1429102 - RNA, 19 nt, Artificial Sequence
  Description of Artificial Sequence: Synthetic oligonucleotide
cgcccaucgccgacaggca

SEQ ID NO: 1429103 - RNA, 19 nt, Artificial Sequence
  Description of Artificial Sequence: Synthetic oligonucleotide
cgcaagcgacccgguacuc

SEQ ID NO: 1429104 - RNA, 19 nt, Artificial Sequence
  Description of Artificial Sequence: Synthetic oligonucleotide
agccggccaucgagccaau

SEQ ID NO: 1429105 - RNA, 19 nt, Artificial Sequence
  Description of Artificial Sequence: Synthetic oligonucleotide
ggccgaggagcccgcccau

SEQ ID NO: 1429106 - RNA, 19 nt, Artificial Sequence
  Description of Artificial Sequence: Synthetic oligonucleotide
gcgcaucauggugcuggcu

SEQ ID NO: 1429107 - RNA, 19 nt, Artificial Sequence
  Description of Artificial Sequence: Synthetic oligonucleotide
gggccucguccggucgcaa

SEQ ID NO: 1429108 - RNA, 19 nt, Artificial Sequence
  Description of Artificial Sequence: Synthetic oligonucleotide
ccacccgaggucggacgua

SEQ ID NO: 1429109 - RNA, 19 nt, Artificial Sequence
  Description of Artificial Sequence: Synthetic oligonucleotide
cggacguauucagcagcau

SEQ ID NO: 1429110 - RNA, 19 nt, Artificial Sequence
  Description of Artificial Sequence: Synthetic oligonucleotide
cggucgcaagcgacccggu

SEQ ID NO: 1429111 - RNA, 19 nt, Artificial Sequence
  Description of Artificial Sequence: Synthetic oligonucleotide
aauguauccacagaaaugc

SEQ ID NO: 1429112 - RNA, 19 nt, Artificial Sequence
  Description of Artificial Sequence: Synthetic oligonucleotide
uugaauuacagccagcggg

SEQ ID NO: 1429113 - RNA, 19 nt, Artificial Sequence
  Description of Artificial Sequence: Synthetic oligonucleotide
uuuugaauuacagccagcg

SEQ ID NO: 1429114 - RNA, 19 nt, Artificial Sequence
  Description of Artificial Sequence: Synthetic oligonucleotide
ucucaauaccucuagagac

SEQ ID NO: 1429115 - RNA, 19 nt, Artificial Sequence
  Description of Artificial Sequence: Synthetic oligonucleotide
cauacacacacacacaccc

SEQ ID NO: 1429116 - RNA, 19 nt, Artificial Sequence
  Description of Artificial Sequence: Synthetic oligonucleotide
gaaauaugcaaaccgugcc

SEQ ID NO: 1429117 - RNA, 19 nt, Artificial Sequence
  Description of Artificial Sequence: Synthetic oligonucleotide
cugaccaucagucaccugg

SEQ ID NO: 1429118 - RNA, 19 nt, Artificial Sequence
  Description of Artificial Sequence: Synthetic oligonucleotide
gucaucaugacauagaacu

SEQ ID NO: 1429119 - RNA, 19 nt, Artificial Sequence
  Description of Artificial Sequence: Synthetic oligonucleotide
aaauaugcaaaccgugccu

SEQ ID NO: 1429120 - RNA, 19 nt, Artificial Sequence
  Description of Artificial Sequence: Synthetic oligonucleotide
auagucacaggccuuggac

SEQ ID NO: 1429121 - RNA, 19 nt, Artificial Sequence
  Description of Artificial Sequence: Synthetic oligonucleotide
cugggaaauaugcaaaccg

SEQ ID NO: 1429122 - RNA, 19 nt, Artificial Sequence
  Description of Artificial Sequence: Synthetic oligonucleotide
aauaugcaaaccgugccuc

SEQ ID NO: 1429123 - RNA, 19 nt, Artificial Sequence
  Description of Artificial Sequence: Synthetic oligonucleotide
aauaccucuagagaccaag

SEQ ID NO: 1429124 - RNA, 19 nt, Artificial Sequence
  Description of Artificial Sequence: Synthetic oligonucleotide
uuugaauuacagccagcgg

SEQ ID NO: 1429125 - RNA, 19 nt, Artificial Sequence
  Description of Artificial Sequence: Synthetic oligonucleotide
guggacacgacgcugacgg

SEQ ID NO: 1429126 - RNA, 19 nt, Artificial Sequence
  Description of Artificial Sequence: Synthetic oligonucleotide
uggggugucaucaugacau

SEQ ID NO: 1429127 - RNA, 19 nt, Artificial Sequence
  Description of Artificial Sequence: Synthetic oligonucleotide
ugaauuacagccagcggga

SEQ ID NO: 1429128 - RNA, 19 nt, Artificial Sequence
  Description of Artificial Sequence: Synthetic oligonucleotide
auagaacuggccuccggcc

SEQ ID NO: 1429129 - RNA, 19 nt, Artificial Sequence
  Description of Artificial Sequence: Synthetic oligonucleotide
accucuagagaccaagggg

SEQ ID NO: 1429130 - RNA, 19 nt, Artificial Sequence
  Description of Artificial Sequence: Synthetic oligonucleotide
gagaauagggguguguccg

SEQ ID NO: 1429131 - RNA, 19 nt, Artificial Sequence
  Description of Artificial Sequence: Synthetic oligonucleotide
ugcgugacaaucuggaaug

SEQ ID NO: 1429132 - RNA, 19 nt, Artificial Sequence
  Description of Artificial Sequence: Synthetic oligonucleotide
ugaaguacauccuggggug

SEQ ID NO: 1429133 - RNA, 19 nt, Artificial Sequence
  Description of Artificial Sequence: Synthetic oligonucleotide
uggaugcugggaaauaugc

SEQ ID NO: 1429134 - RNA, 19 nt, Artificial Sequence
  Description of Artificial Sequence: Synthetic oligonucleotide
aguucccggauauagucac

SEQ ID NO: 1429135 - RNA, 19 nt, Artificial Sequence
  Description of Artificial Sequence: Synthetic oligonucleotide
uccauuauucucugugcgg

SEQ ID NO: 1429136 - RNA, 19 nt, Artificial Sequence
  Description of Artificial Sequence: Synthetic oligonucleotide
aacgccgccugcuggacgc

SEQ ID NO: 1429137 - RNA, 19 nt, Artificial Sequence
  Description of Artificial Sequence: Synthetic oligonucleotide
uaccucuagagaccaaggg

SEQ ID NO: 1429138 - RNA, 19 nt, Artificial Sequence
  Description of Artificial Sequence: Synthetic oligonucleotide
aauuacagccagcgggaag

SEQ ID NO: 1429139 - RNA, 19 nt, Artificial Sequence
  Description of Artificial Sequence: Synthetic oligonucleotide
cucaauaccucuagagacc

SEQ ID NO: 1429140 - RNA, 19 nt, Artificial Sequence
  Description of Artificial Sequence: Synthetic oligonucleotide
ugggaaauaugcaaaccgu

SEQ ID NO: 1429141 - RNA, 19 nt, Artificial Sequence
  Description of Artificial Sequence: Synthetic oligonucleotide
uguuaaucuugucccuccg

SEQ ID NO: 1429142 - RNA, 19 nt, Artificial Sequence
  Description of Artificial Sequence: Synthetic oligonucleotide
agcuggacaauccaguugu

SEQ ID NO: 1429143 - RNA, 19 nt, Artificial Sequence
  Description of Artificial Sequence: Synthetic oligonucleotide
uucuucucucaucucgagg

SEQ ID NO: 1429144 - RNA, 19 nt, Artificial Sequence
  Description of Artificial Sequence: Synthetic oligonucleotide
aaacgagagggguggggac

SEQ ID NO: 1429145 - RNA, 19 nt, Artificial Sequence
  Description of Artificial Sequence: Synthetic oligonucleotide
auaugcaaaccgugccucc

SEQ ID NO: 1429146 - RNA, 19 nt, Artificial Sequence
  Description of Artificial Sequence: Synthetic oligonucleotide
guuggucuggcguaguucc

SEQ ID NO: 1429147 - RNA, 19 nt, Artificial Sequence
  Description of Artificial Sequence: Synthetic oligonucleotide
uggacuacgcgguauguca

SEQ ID NO: 1429148 - RNA, 19 nt, Artificial Sequence
  Description of Artificial Sequence: Synthetic oligonucleotide
agcacccugucucaauacc

SEQ ID NO: 1429149 - RNA, 19 nt, Artificial Sequence
  Description of Artificial Sequence: Synthetic oligonucleotide
uguauccacagaaaugcau

SEQ ID NO: 1429150 - RNA, 19 nt, Artificial Sequence
  Description of Artificial Sequence: Synthetic oligonucleotide
acaagugaggagcugguga

SEQ ID NO: 1429151 - RNA, 19 nt, Artificial Sequence
  Description of Artificial Sequence: Synthetic oligonucleotide
ugugagcccaguacaagug

SEQ ID NO: 1429152 - RNA, 19 nt, Artificial Sequence
  Description of Artificial Sequence: Synthetic oligonucleotide
cauagaacuggccuccggc

SEQ ID NO: 1429153 - RNA, 19 nt, Artificial Sequence
  Description of Artificial Sequence: Synthetic oligonucleotide
agucaccuggacuacgcgg

SEQ ID NO: 1429154 - RNA, 19 nt, Artificial Sequence
  Description of Artificial Sequence: Synthetic oligonucleotide
uuguuaaucuugucccucc

SEQ ID NO: 1429155 - RNA, 19 nt, Artificial Sequence
  Description of Artificial Sequence: Synthetic oligonucleotide
uacacacacacacacccac

SEQ ID NO: 1429156 - RNA, 19 nt, Artificial Sequence
  Description of Artificial Sequence: Synthetic oligonucleotide
guuuucugcauggagcagg

SEQ ID NO: 1429157 - RNA, 19 nt, Artificial Sequence
  Description of Artificial Sequence: Synthetic oligonucleotide
cacacacacacccacacac

SEQ ID NO: 1429158 - RNA, 19 nt, Artificial Sequence
  Description of Artificial Sequence: Synthetic oligonucleotide
aagcacccugucucaauac

SEQ ID NO: 1429159 - RNA, 19 nt, Artificial Sequence
  Description of Artificial Sequence: Synthetic oligonucleotide
uuauucucugugcggaacu

SEQ ID NO: 1429160 - RNA, 19 nt, Artificial Sequence
  Description of Artificial Sequence: Synthetic oligonucleotide
acuucauugugcugagcuc

SEQ ID NO: 1429161 - RNA, 19 nt, Artificial Sequence
  Description of Artificial Sequence: Synthetic oligonucleotide
ugcauuaugucuccuuguc

SEQ ID NO: 1429162 - RNA, 19 nt, Artificial Sequence
  Description of Artificial Sequence: Synthetic oligonucleotide
aagcuggacaauccaguug

SEQ ID NO: 1429163 - RNA, 19 nt, Artificial Sequence
  Description of Artificial Sequence: Synthetic oligonucleotide
uccagaaacgagaggggug

SEQ ID NO: 1429164 - RNA, 19 nt, Artificial Sequence
  Description of Artificial Sequence: Synthetic oligonucleotide
caggccuuggacaggaugc

SEQ ID NO: 1429165 - RNA, 19 nt, Artificial Sequence
  Description of Artificial Sequence: Synthetic oligonucleotide
ugcaauuguccucuguguc

SEQ ID NO: 1429166 - RNA, 19 nt, Artificial Sequence
  Description of Artificial Sequence: Synthetic oligonucleotide
guaguucccggauauaguc

SEQ ID NO: 1429167 - RNA, 19 nt, Artificial Sequence
  Description of Artificial Sequence: Synthetic oligonucleotide
ucaauaccucuagagacca

SEQ ID NO: 1429168 - RNA, 19 nt, Artificial Sequence
  Description of Artificial Sequence: Synthetic oligonucleotide
aaagcuggacaauccaguu

SEQ ID NO: 1429169 - RNA, 19 nt, Artificial Sequence
  Description of Artificial Sequence: Synthetic oligonucleotide
ugacauagaacuggccucc

SEQ ID NO: 1429170 - RNA, 19 nt, Artificial Sequence
  Description of Artificial Sequence: Synthetic oligonucleotide
uuguggucgccgaacgccg

SEQ ID NO: 1429171 - RNA, 19 nt, Artificial Sequence
  Description of Artificial Sequence: Synthetic oligonucleotide
aggaguccugguuccaucg

SEQ ID NO: 1429172 - RNA, 19 nt, Artificial Sequence
  Description of Artificial Sequence: Synthetic oligonucleotide
ugucugcgugacaaucugg

SEQ ID NO: 1429173 - RNA, 19 nt, Artificial Sequence
  Description of Artificial Sequence: Synthetic oligonucleotide
uugucugcgugacaaucug

SEQ ID NO: 1429174 - RNA, 19 nt, Artificial Sequence
  Description of Artificial Sequence: Synthetic oligonucleotide
ugucaucaugacauagaac

SEQ ID NO: 1429175 - RNA, 19 nt, Artificial Sequence
  Description of Artificial Sequence: Synthetic oligonucleotide
acaauccaguuguuaaucu

SEQ ID NO: 1429176 - RNA, 19 nt, Artificial Sequence
  Description of Artificial Sequence: Synthetic oligonucleotide
aacgagagggguggggacg

SEQ ID NO: 1429177 - RNA, 19 nt, Artificial Sequence
  Description of Artificial Sequence: Synthetic oligonucleotide
auuuugaauuacagccagc

SEQ ID NO: 1429178 - RNA, 19 nt, Artificial Sequence
  Description of Artificial Sequence: Synthetic oligonucleotide
uaaucuugucccuccgucu

SEQ ID NO: 1429179 - RNA, 19 nt, Artificial Sequence
  Description of Artificial Sequence: Synthetic oligonucleotide
auguuguggucgccgaacg

SEQ ID NO: 1429180 - RNA, 19 nt, Artificial Sequence
  Description of Artificial Sequence: Synthetic oligonucleotide
augcaaaccgugccucccc

SEQ ID NO: 1429181 - RNA, 19 nt, Artificial Sequence
  Description of Artificial Sequence: Synthetic oligonucleotide
gauccagaaacgagagggg

SEQ ID NO: 1429182 - RNA, 19 nt, Artificial Sequence
  Description of Artificial Sequence: Synthetic oligonucleotide
cacacacacccacacaccc

SEQ ID NO: 1429183 - RNA, 19 nt, Artificial Sequence
  Description of Artificial Sequence: Synthetic oligonucleotide
ggaaauaugcaaaccgugc

SEQ ID NO: 1429184 - RNA, 19 nt, Artificial Sequence
  Description of Artificial Sequence: Synthetic oligonucleotide
ugaauggauuuugaauuac

SEQ ID NO: 1429185 - RNA, 19 nt, Artificial Sequence
  Description of Artificial Sequence: Synthetic oligonucleotide
aucuugucccuccgucucc

SEQ ID NO: 1429186 - RNA, 19 nt, Artificial Sequence
  Description of Artificial Sequence: Synthetic oligonucleotide
agaauagggguguguccgg

SEQ ID NO: 1429187 - RNA, 19 nt, Artificial Sequence
  Description of Artificial Sequence: Synthetic oligonucleotide
ugcaaaccgugccuccccg

SEQ ID NO: 1429188 - RNA, 19 nt, Artificial Sequence
  Description of Artificial Sequence: Synthetic oligonucleotide
ucgcccaccauuuccaggu

SEQ ID NO: 1429189 - RNA, 19 nt, Artificial Sequence
  Description of Artificial Sequence: Synthetic oligonucleotide
ugcugggaaauaugcaaac

SEQ ID NO: 1429190 - RNA, 19 nt, Artificial Sequence
  Description of Artificial Sequence: Synthetic oligonucleotide
uaguucccggauauaguca

SEQ ID NO: 1429191 - RNA, 19 nt, Artificial Sequence
  Description of Artificial Sequence: Synthetic oligonucleotide
uccuggggugucaucauga

SEQ ID NO: 1429192 - RNA, 19 nt, Artificial Sequence
  Description of Artificial Sequence: Synthetic oligonucleotide
uucccggauauagucacag

SEQ ID NO: 1429193 - RNA, 19 nt, Artificial Sequence
  Description of Artificial Sequence: Synthetic oligonucleotide
aaaacgcagcuuggggagg

SEQ ID NO: 1429194 - RNA, 19 nt, Artificial Sequence
  Description of Artificial Sequence: Synthetic oligonucleotide
accauugcugaauggauuu

SEQ ID NO: 1429195 - RNA, 19 nt, Artificial Sequence
  Description of Artificial Sequence: Synthetic oligonucleotide
uauccacagaaaugcauua

SEQ ID NO: 1429196 - RNA, 19 nt, Artificial Sequence
  Description of Artificial Sequence: Synthetic oligonucleotide
cugucugaaguacauccug

SEQ ID NO: 1429197 - RNA, 19 nt, Artificial Sequence
  Description of Artificial Sequence: Synthetic oligonucleotide
uuaugucuccuugucuuug

SEQ ID NO: 1429198 - RNA, 19 nt, Artificial Sequence
  Description of Artificial Sequence: Synthetic oligonucleotide
aaguacauccugggguguc

SEQ ID NO: 1429199 - RNA, 19 nt, Artificial Sequence
  Description of Artificial Sequence: Synthetic oligonucleotide
uaagcacccugucucaaua

SEQ ID NO: 1429200 - RNA, 19 nt, Artificial Sequence
  Description of Artificial Sequence: Synthetic oligonucleotide
acauagaacuggccuccgg

SEQ ID NO: 1429201 - RNA, 19 nt, Artificial Sequence
  Description of Artificial Sequence: Synthetic oligonucleotide
agccgcgucgcccuggccg

SEQ ID NO: 1429202 - RNA, 19 nt, Artificial Sequence
  Description of Artificial Sequence: Synthetic oligonucleotide
ugaccaucagucaccugga

SEQ ID NO: 1429203 - RNA, 19 nt, Artificial Sequence
  Description of Artificial Sequence: Synthetic oligonucleotide
ccugcauagguccaggccc

SEQ ID NO: 1429204 - RNA, 19 nt, Artificial Sequence
  Description of Artificial Sequence: Synthetic oligonucleotide
gguagugggcaauguaucc

SEQ ID NO: 1429205 - RNA, 19 nt, Artificial Sequence
  Description of Artificial Sequence: Synthetic oligonucleotide
uguuguggucgccgaacgc

SEQ ID NO: 1429206 - RNA, 19 nt, Artificial Sequence
  Description of Artificial Sequence: Synthetic oligonucleotide
cccaguacaagugaggagc

SEQ ID NO: 1429207 - RNA, 19 nt, Artificial Sequence
  Description of Artificial Sequence: Synthetic oligonucleotide
uggagaauagggguguguc

SEQ ID NO: 1429208 - RNA, 19 nt, Artificial Sequence
  Description of Artificial Sequence: Synthetic oligonucleotide
cacacacacacacccacac

SEQ ID NO: 1429209 - RNA, 19 nt, Artificial Sequence
  Description of Artificial Sequence: Synthetic oligonucleotide
uggacgcuggcgauggcca

SEQ ID NO: 1429210 - RNA, 19 nt, Artificial Sequence
  Description of Artificial Sequence: Synthetic oligonucleotide
gaauagggguguguccggg

SEQ ID NO: 1429211 - RNA, 19 nt, Artificial Sequence
  Description of Artificial Sequence: Synthetic oligonucleotide
cagggauccagaaacgaga

SEQ ID NO: 1429212 - RNA, 19 nt, Artificial Sequence
  Description of Artificial Sequence: Synthetic oligonucleotide
gaaacgagaggggugggga

SEQ ID NO: 1429213 - RNA, 19 nt, Artificial Sequence
  Description of Artificial Sequence: Synthetic oligonucleotide
uggucuggcguaguucccg

SEQ ID NO: 1429214 - RNA, 19 nt, Artificial Sequence
  Description of Artificial Sequence: Synthetic oligonucleotide
auaccucuagagaccaagg

SEQ ID NO: 1429215 - RNA, 19 nt, Artificial Sequence
  Description of Artificial Sequence: Synthetic oligonucleotide
agaaacgagaggggugggg

SEQ ID NO: 1429216 - RNA, 19 nt, Artificial Sequence
  Description of Artificial Sequence: Synthetic oligonucleotide
cucgaggaguccugguucc

SEQ ID NO: 1429217 - RNA, 19 nt, Artificial Sequence
  Description of Artificial Sequence: Synthetic oligonucleotide
cccggauauagucacaggc

SEQ ID NO: 1429218 - RNA, 19 nt, Artificial Sequence
  Description of Artificial Sequence: Synthetic oligonucleotide
ugugcggaacugguacugg

SEQ ID NO: 1429219 - RNA, 19 nt, Artificial Sequence
  Description of Artificial Sequence: Synthetic oligonucleotide
ugcuggacgcuggcgaugg

SEQ ID NO: 1429220 - RNA, 19 nt, Artificial Sequence
  Description of Artificial Sequence: Synthetic oligonucleotide
acacacacacccacacacc

SEQ ID NO: 1429221 - RNA, 19 nt, Artificial Sequence
  Description of Artificial Sequence: Synthetic oligonucleotide
cuggauguuguggucgccg

SEQ ID NO: 1429222 - RNA, 19 nt, Artificial Sequence
  Description of Artificial Sequence: Synthetic oligonucleotide
gacuacgcgguaugucacc

SEQ ID NO: 1429223 - RNA, 19 nt, Artificial Sequence
  Description of Artificial Sequence: Synthetic oligonucleotide
cagcugaccaucagucacc

SEQ ID NO: 1429224 - RNA, 19 nt, Artificial Sequence
  Description of Artificial Sequence: Synthetic oligonucleotide
cgugguaucucccacacug

SEQ ID NO: 1429225 - RNA, 19 nt, Artificial Sequence
  Description of Artificial Sequence: Synthetic oligonucleotide
uccggggugcaauuguccu

SEQ ID NO: 1429226 - RNA, 19 nt, Artificial Sequence
  Description of Artificial Sequence: Synthetic oligonucleotide
cugcauagguccaggcccc

SEQ ID NO: 1429227 - RNA, 19 nt, Artificial Sequence
  Description of Artificial Sequence: Synthetic oligonucleotide
ucccggauauagucacagg

SEQ ID NO: 1429228 - RNA, 19 nt, Artificial Sequence
  Description of Artificial Sequence: Synthetic oligonucleotide
aaccgugccuccccgcuga

SEQ ID NO: 1429229 - RNA, 19 nt, Artificial Sequence
  Description of Artificial Sequence: Synthetic oligonucleotide
cuugucguggcuggcggcg

SEQ ID NO: 1429230 - RNA, 19 nt, Artificial Sequence
  Description of Artificial Sequence: Synthetic oligonucleotide
cuuccugcagcucgacgcc

SEQ ID NO: 1429231 - RNA, 19 nt, Artificial Sequence
  Description of Artificial Sequence: Synthetic oligonucleotide
ccggauauagucacaggcc

SEQ ID NO: 1429232 - RNA, 19 nt, Artificial Sequence
  Description of Artificial Sequence: Synthetic oligonucleotide
agcucgacgcccuccucgg

SEQ ID NO: 1429233 - RNA, 19 nt, Artificial Sequence
  Description of Artificial Sequence: Synthetic oligonucleotide
ucgcugguuggucuggcgu

SEQ ID NO: 1429234 - RNA, 19 nt, Artificial Sequence
  Description of Artificial Sequence: Synthetic oligonucleotide
ugucaccuggccuccauua

SEQ ID NO: 1429235 - RNA, 19 nt, Artificial Sequence
  Description of Artificial Sequence: Synthetic oligonucleotide
ucugugcggaacugguacu

SEQ ID NO: 1429236 - RNA, 19 nt, Artificial Sequence
  Description of Artificial Sequence: Synthetic oligonucleotide
aaaccgugccuccccgcug

SEQ ID NO: 1429237 - RNA, 19 nt, Artificial Sequence
  Description of Artificial Sequence: Synthetic oligonucleotide
gguacagaggcagcggccg

SEQ ID NO: 1429238 - RNA, 19 nt, Artificial Sequence
  Description of Artificial Sequence: Synthetic oligonucleotide
agggauccagaaacgagag

SEQ ID NO: 1429239 - RNA, 19 nt, Artificial Sequence
  Description of Artificial Sequence: Synthetic oligonucleotide
guuguuaaucuugucccuc

SEQ ID NO: 1429240 - RNA, 19 nt, Artificial Sequence
  Description of Artificial Sequence: Synthetic oligonucleotide
ucugcggccgggcugccac

SEQ ID NO: 1429241 - RNA, 19 nt, Artificial Sequence
  Description of Artificial Sequence: Synthetic oligonucleotide
ggagaauaggggugugucc

SEQ ID NO: 1429242 - RNA, 19 nt, Artificial Sequence
  Description of Artificial Sequence: Synthetic oligonucleotide
caccuggccuccauuauuc

SEQ ID NO: 1429243 - RNA, 19 nt, Artificial Sequence
  Description of Artificial Sequence: Synthetic oligonucleotide
ugcagucgcugguuggucu

SEQ ID NO: 1429244 - RNA, 19 nt, Artificial Sequence
  Description of Artificial Sequence: Synthetic oligonucleotide
gacgcugacggcgccagcc

SEQ ID NO: 1429245 - RNA, 19 nt, Artificial Sequence
  Description of Artificial Sequence: Synthetic oligonucleotide
uggcguaguucccggauau

SEQ ID NO: 1429246 - RNA, 19 nt, Artificial Sequence
  Description of Artificial Sequence: Synthetic oligonucleotide
cuucucucaucucgaggag

SEQ ID NO: 1429247 - RNA, 19 nt, Artificial Sequence
  Description of Artificial Sequence: Synthetic oligonucleotide
caccauuuccagguugugc

SEQ ID NO: 1429248 - RNA, 19 nt, Artificial Sequence
  Description of Artificial Sequence: Synthetic oligonucleotide
ugcggaacugguacuggau

SEQ ID NO: 1429249 - RNA, 19 nt, Artificial Sequence
  Description of Artificial Sequence: Synthetic oligonucleotide
ccagaaacgagaggggugg

SEQ ID NO: 1429250 - RNA, 19 nt, Artificial Sequence
  Description of Artificial Sequence: Synthetic oligonucleotide
cagcucgacgcccuccucg

SEQ ID NO: 1429251 - RNA, 19 nt, Artificial Sequence
  Description of Artificial Sequence: Synthetic oligonucleotide
auccagaaacgagaggggu

SEQ ID NO: 1429252 - RNA, 19 nt, Artificial Sequence
  Description of Artificial Sequence: Synthetic oligonucleotide
uuacucgcuccugucuugc

SEQ ID NO: 1429253 - RNA, 19 nt, Artificial Sequence
  Description of Artificial Sequence: Synthetic oligonucleotide
uacaagugaggagcuggug

SEQ ID NO: 1429254 - RNA, 19 nt, Artificial Sequence
  Description of Artificial Sequence: Synthetic oligonucleotide
ucucccacacuggaugcug

SEQ ID NO: 1429255 - RNA, 19 nt, Artificial Sequence
  Description of Artificial Sequence: Synthetic oligonucleotide
gacauagaacuggccuccg

SEQ ID NO: 1429256 - RNA, 19 nt, Artificial Sequence
  Description of Artificial Sequence: Synthetic oligonucleotide
ucugcgugacaaucuggaa

SEQ ID NO: 1429257 - RNA, 19 nt, Artificial Sequence
  Description of Artificial Sequence: Synthetic oligonucleotide
aggguagugggcaauguau

SEQ ID NO: 1429258 - RNA, 19 nt, Artificial Sequence
  Description of Artificial Sequence: Synthetic oligonucleotide
cacuucauugugcugagcu

SEQ ID NO: 1429259 - RNA, 19 nt, Artificial Sequence
  Description of Artificial Sequence: Synthetic oligonucleotide
cucgacgcccuccucggcc

SEQ ID NO: 1429260 - RNA, 19 nt, Artificial Sequence
  Description of Artificial Sequence: Synthetic oligonucleotide
cucgcccaccauuuccagg

SEQ ID NO: 1429261 - RNA, 19 nt, Artificial Sequence
  Description of Artificial Sequence: Synthetic oligonucleotide
ggacacgacgcugacggcg

SEQ ID NO: 1429262 - RNA, 19 nt, Artificial Sequence
  Description of Artificial Sequence: Synthetic oligonucleotide
agcggggccucuguccucc

SEQ ID NO: 1429263 - RNA, 19 nt, Artificial Sequence
  Description of Artificial Sequence: Synthetic oligonucleotide
accuggacuacgcgguaug

SEQ ID NO: 1429264 - RNA, 19 nt, Artificial Sequence
  Description of Artificial Sequence: Synthetic oligonucleotide
acuggaugcugggaaauau

SEQ ID NO: 1429265 - RNA, 19 nt, Artificial Sequence
  Description of Artificial Sequence: Synthetic oligonucleotide
ucccuugucguggcuggcg

SEQ ID NO: 1429266 - RNA, 19 nt, Artificial Sequence
  Description of Artificial Sequence: Synthetic oligonucleotide
ggauuuugaauuacagcca

SEQ ID NO: 1429267 - RNA, 19 nt, Artificial Sequence
  Description of Artificial Sequence: Synthetic oligonucleotide
gacacgacgcugacggcgc

SEQ ID NO: 1429268 - RNA, 19 nt, Artificial Sequence
  Description of Artificial Sequence: Synthetic oligonucleotide
uguccggggugcaauuguc

SEQ ID NO: 1429269 - RNA, 19 nt, Artificial Sequence
  Description of Artificial Sequence: Synthetic oligonucleotide
uuggucuggcguaguuccc

SEQ ID NO: 1429270 - RNA, 19 nt, Artificial Sequence
  Description of Artificial Sequence: Synthetic oligonucleotide
uggucugcacagacacagc

SEQ ID NO: 1429271 - RNA, 19 nt, Artificial Sequence
  Description of Artificial Sequence: Synthetic oligonucleotide
acccugucucaauaccucu

SEQ ID NO: 1429272 - RNA, 19 nt, Artificial Sequence
  Description of Artificial Sequence: Synthetic oligonucleotide
cgcgcauacacacacacac

SEQ ID NO: 1429273 - RNA, 19 nt, Artificial Sequence
  Description of Artificial Sequence: Synthetic oligonucleotide
uuggagaauaggggugugu

SEQ ID NO: 1429274 - RNA, 19 nt, Artificial Sequence
  Description of Artificial Sequence: Synthetic oligonucleotide
acacacacacacccacaca

SEQ ID NO: 1429275 - RNA, 19 nt, Artificial Sequence
  Description of Artificial Sequence: Synthetic oligonucleotide
cucgggucccuugucgugg

SEQ ID NO: 1429276 - RNA, 19 nt, Artificial Sequence
  Description of Artificial Sequence: Synthetic oligonucleotide
uguguccggggugcaauug

SEQ ID NO: 1429277 - RNA, 19 nt, Artificial Sequence
  Description of Artificial Sequence: Synthetic oligonucleotide
ggucccuugucguggcugg

SEQ ID NO: 1429278 - RNA, 19 nt, Artificial Sequence
  Description of Artificial Sequence: Synthetic oligonucleotide
gcauggagcaggguagugg

SEQ ID NO: 1429279 - RNA, 19 nt, Artificial Sequence
  Description of Artificial Sequence: Synthetic oligonucleotide
gucugcgugacaaucugga

SEQ ID NO: 1429280 - RNA, 19 nt, Artificial Sequence
  Description of Artificial Sequence: Synthetic oligonucleotide
ugggcaggugggcagguuu

SEQ ID NO: 1429281 - RNA, 19 nt, Artificial Sequence
  Description of Artificial Sequence: Synthetic oligonucleotide
guacagaggcagcggccgg

SEQ ID NO: 1429282 - RNA, 19 nt, Artificial Sequence
  Description of Artificial Sequence: Synthetic oligonucleotide
ugugucccugucugaagua

SEQ ID NO: 1429283 - RNA, 19 nt, Artificial Sequence
  Description of Artificial Sequence: Synthetic oligonucleotide
gcguaguucccggauauag

SEQ ID NO: 1429284 - RNA, 19 nt, Artificial Sequence
  Description of Artificial Sequence: Synthetic oligonucleotide
acgcugacggcgccagccg

SEQ ID NO: 1429285 - RNA, 19 nt, Artificial Sequence
  Description of Artificial Sequence: Synthetic oligonucleotide
cuccugugagcccaguaca

SEQ ID NO: 1429286 - RNA, 19 nt, Artificial Sequence
  Description of Artificial Sequence: Synthetic oligonucleotide
acuacgcgguaugucaccu

SEQ ID NO: 1429287 - RNA, 19 nt, Artificial Sequence
  Description of Artificial Sequence: Synthetic oligonucleotide
cgcauacacacacacacac

SEQ ID NO: 1429288 - RNA, 19 nt, Artificial Sequence
  Description of Artificial Sequence: Synthetic oligonucleotide
gucgcugguuggucuggcg

SEQ ID NO: 1429289 - RNA, 19 nt, Artificial Sequence
  Description of Artificial Sequence: Synthetic oligonucleotide
aguacauccugggguguca

SEQ ID NO: 1429290 - RNA, 19 nt, Artificial Sequence
  Description of Artificial Sequence: Synthetic oligonucleotide
ucgaagcagggcguucuca

SEQ ID NO: 1429291 - RNA, 19 nt, Artificial Sequence
  Description of Artificial Sequence: Synthetic oligonucleotide
cacagccgugguaucuccc

SEQ ID NO: 1429292 - RNA, 19 nt, Artificial Sequence
  Description of Artificial Sequence: Synthetic oligonucleotide
acgcagcuuggggaggggc

SEQ ID NO: 1429293 - RNA, 19 nt, Artificial Sequence
  Description of Artificial Sequence: Synthetic oligonucleotide
cucucgcccaccauuucca

SEQ ID NO: 1429294 - RNA, 19 nt, Artificial Sequence
  Description of Artificial Sequence: Synthetic oligonucleotide
gcggaacugguacuggaug

SEQ ID NO: 1429295 - RNA, 19 nt, Artificial Sequence
  Description of Artificial Sequence: Synthetic oligonucleotide
agccgugguaucucccaca

SEQ ID NO: 1429296 - RNA, 19 nt, Artificial Sequence
  Description of Artificial Sequence: Synthetic oligonucleotide
auacacacacacacaccca

SEQ ID NO: 1429297 - RNA, 19 nt, Artificial Sequence
  Description of Artificial Sequence: Synthetic oligonucleotide
cugugcggaacugguacug

SEQ ID NO: 1429298 - RNA, 19 nt, Artificial Sequence
  Description of Artificial Sequence: Synthetic oligonucleotide
ugucguggcuggcggcggc

SEQ ID NO: 1429299 - RNA, 19 nt, Artificial Sequence
  Description of Artificial Sequence: Synthetic oligonucleotide
uccugguuccaucgauuuu

SEQ ID NO: 1429300 - RNA, 19 nt, Artificial Sequence
  Description of Artificial Sequence: Synthetic oligonucleotide
uugucguggcuggcggcgg

SEQ ID NO: 1429301 - RNA, 19 nt, Artificial Sequence
  Description of Artificial Sequence: Synthetic oligonucleotide
gcucucgcccaccauuucc

SEQ ID NO: 1429302 - RNA, 19 nt, Artificial Sequence
  Description of Artificial Sequence: Synthetic oligonucleotide
ggccucccugcauaggucc

SEQ ID NO: 1429303 - RNA, 19 nt, Artificial Sequence
  Description of Artificial Sequence: Synthetic oligonucleotide
gggugucaucaugacauag

SEQ ID NO: 1429304 - RNA, 19 nt, Artificial Sequence
  Description of Artificial Sequence: Synthetic oligonucleotide
gacguggccucccugcaua

SEQ ID NO: 1429305 - RNA, 19 nt, Artificial Sequence
  Description of Artificial Sequence: Synthetic oligonucleotide
guauccacagaaaugcauu

SEQ ID NO: 1429306 - RNA, 19 nt, Artificial Sequence
  Description of Artificial Sequence: Synthetic oligonucleotide
cccucucugugcuaagggc

SEQ ID NO: 1429307 - RNA, 19 nt, Artificial Sequence
  Description of Artificial Sequence: Synthetic oligonucleotide
ggugccgcgggaccugggg

SEQ ID NO: 1429308 - RNA, 19 nt, Artificial Sequence
  Description of Artificial Sequence: Synthetic oligonucleotide
aggggcgccucccucucug

SEQ ID NO: 1429309 - RNA, 19 nt, Artificial Sequence
  Description of Artificial Sequence: Synthetic oligonucleotide
ucacugccgggugcucucg

SEQ ID NO: 1429310 - RNA, 19 nt, Artificial Sequence
  Description of Artificial Sequence: Synthetic oligonucleotide
agcgguggacacgacgcug

SEQ ID NO: 1429311 - RNA, 19 nt, Artificial Sequence
  Description of Artificial Sequence: Synthetic oligonucleotide
acccacacacccagagggg

SEQ ID NO: 1429312 - RNA, 19 nt, Artificial Sequence
  Description of Artificial Sequence: Synthetic oligonucleotide
ugguuggucuggcguaguu

SEQ ID NO: 1429313 - RNA, 19 nt, Artificial Sequence
  Description of Artificial Sequence: Synthetic oligonucleotide
ucgggucccuugucguggc

SEQ ID NO: 1429314 - RNA, 19 nt, Artificial Sequence
  Description of Artificial Sequence: Synthetic oligonucleotide
ggggacguggccucccugc

SEQ ID NO: 1429315 - RNA, 19 nt, Artificial Sequence
  Description of Artificial Sequence: Synthetic oligonucleotide
ugccgggugcucucgccca

SEQ ID NO: 1429316 - RNA, 19 nt, Artificial Sequence
  Description of Artificial Sequence: Synthetic oligonucleotide
cugugagcccaguacaagu

SEQ ID NO: 1429317 - RNA, 19 nt, Artificial Sequence
  Description of Artificial Sequence: Synthetic oligonucleotide
cuacgcgguaugucaccug

SEQ ID NO: 1429318 - RNA, 19 nt, Artificial Sequence
  Description of Artificial Sequence: Synthetic oligonucleotide
acacuggaugcugggaaau

SEQ ID NO: 1429319 - RNA, 19 nt, Artificial Sequence
  Description of Artificial Sequence: Synthetic oligonucleotide
ggaagggugccgcgggacc

SEQ ID NO: 1429320 - RNA, 19 nt, Artificial Sequence
  Description of Artificial Sequence: Synthetic oligonucleotide
ggccucgggucccuugucg

SEQ ID NO: 1429321 - RNA, 19 nt, Artificial Sequence
  Description of Artificial Sequence: Synthetic oligonucleotide
cuggacuacgcgguauguc

SEQ ID NO: 1429322 - RNA, 19 nt, Artificial Sequence
  Description of Artificial Sequence: Synthetic oligonucleotide
cugcgugacaaucuggaau

SEQ ID NO: 1429323 - RNA, 19 nt, Artificial Sequence
  Description of Artificial Sequence: Synthetic oligonucleotide
gcauacacacacacacacc

SEQ ID NO: 1429324 - RNA, 19 nt, Artificial Sequence
  Description of Artificial Sequence: Synthetic oligonucleotide
uggacacgacgcugacggc

SEQ ID NO: 1429325 - RNA, 19 nt, Artificial Sequence
  Description of Artificial Sequence: Synthetic oligonucleotide
guugucugcgugacaaucu

SEQ ID NO: 1429326 - RNA, 19 nt, Artificial Sequence
  Description of Artificial Sequence: Synthetic oligonucleotide
gugcggaacugguacugga

SEQ ID NO: 1429327 - RNA, 19 nt, Artificial Sequence
  Description of Artificial Sequence: Synthetic oligonucleotide
cucuguccuccucccuugc

SEQ ID NO: 1429328 - RNA, 19 nt, Artificial Sequence
  Description of Artificial Sequence: Synthetic oligonucleotide
ggcagcggggccucugucc

SEQ ID NO: 1429329 - RNA, 19 nt, Artificial Sequence
  Description of Artificial Sequence: Synthetic oligonucleotide
acgcgguaugucaccuggc

SEQ ID NO: 1429330 - RNA, 19 nt, Artificial Sequence
  Description of Artificial Sequence: Synthetic oligonucleotide
cugucucaauaccucuaga

SEQ ID NO: 1429331 - RNA, 19 nt, Artificial Sequence
  Description of Artificial Sequence: Synthetic oligonucleotide
gaauuacagccagcgggaa

SEQ ID NO: 1429332 - RNA, 19 nt, Artificial Sequence
  Description of Artificial Sequence: Synthetic oligonucleotide
guccggggugcaauugucc

SEQ ID NO: 1429333 - RNA, 19 nt, Artificial Sequence
  Description of Artificial Sequence: Synthetic oligonucleotide
acacacacacacacccaca

SEQ ID NO: 1429334 - RNA, 19 nt, Artificial Sequence
  Description of Artificial Sequence: Synthetic oligonucleotide
gugacaaucuggaaugauu

SEQ ID NO: 1429335 - RNA, 19 nt, Artificial Sequence
  Description of Artificial Sequence: Synthetic oligonucleotide
gcccaguacaagugaggag

SEQ ID NO: 1429336 - RNA, 19 nt, Artificial Sequence
  Description of Artificial Sequence: Synthetic oligonucleotide
ugcucucgcccaccauuuc

SEQ ID NO: 1429337 - RNA, 19 nt, Artificial Sequence
  Description of Artificial Sequence: Synthetic oligonucleotide
gccucaggagcucauuguc

SEQ ID NO: 1429338 - RNA, 19 nt, Artificial Sequence
  Description of Artificial Sequence: Synthetic oligonucleotide
uggccguccagcugaccau

SEQ ID NO: 1429339 - RNA, 19 nt, Artificial Sequence
  Description of Artificial Sequence: Synthetic oligonucleotide
gaacuggccuccggccugc

SEQ ID NO: 1429340 - RNA, 19 nt, Artificial Sequence
  Description of Artificial Sequence: Synthetic oligonucleotide
acgacgcugacggcgccag

SEQ ID NO: 1429341 - RNA, 19 nt, Artificial Sequence
  Description of Artificial Sequence: Synthetic oligonucleotide
gguggacacgacgcugacg

SEQ ID NO: 1429342 - RNA, 19 nt, Artificial Sequence
  Description of Artificial Sequence: Synthetic oligonucleotide
cgugccuccccgcugacag

SEQ ID NO: 1429343 - RNA, 19 nt, Artificial Sequence
  Description of Artificial Sequence: Synthetic oligonucleotide
agugggcaauguauccaca

SEQ ID NO: 1429344 - RNA, 19 nt, Artificial Sequence
  Description of Artificial Sequence: Synthetic oligonucleotide
cgguaugucaccuggccuc

SEQ ID NO: 1429345 - RNA, 19 nt, Artificial Sequence
  Description of Artificial Sequence: Synthetic oligonucleotide
gucaccuggacuacgcggu

SEQ ID NO: 1429346 - RNA, 19 nt, Artificial Sequence
  Description of Artificial Sequence: Synthetic oligonucleotide
cugugucccugucugaagu

SEQ ID NO: 1429347 - RNA, 19 nt, Artificial Sequence
  Description of Artificial Sequence: Synthetic oligonucleotide
ggaugcugggaaauaugca

SEQ ID NO: 1429348 - RNA, 19 nt, Artificial Sequence
  Description of Artificial Sequence: Synthetic oligonucleotide
cuuuacucgcuccugucuu

SEQ ID NO: 1429349 - RNA, 19 nt, Artificial Sequence
  Description of Artificial Sequence: Synthetic oligonucleotide
ggcaauguauccacagaaa

SEQ ID NO: 1429350 - RNA, 19 nt, Artificial Sequence
  Description of Artificial Sequence: Synthetic oligonucleotide
gccgugguaucucccacac

SEQ ID NO: 1429351 - RNA, 19 nt, Artificial Sequence
  Description of Artificial Sequence: Synthetic oligonucleotide
cagccgugguaucucccac

SEQ ID NO: 1429352 - RNA, 19 nt, Artificial Sequence
  Description of Artificial Sequence: Synthetic oligonucleotide
gccgaacgccgccugcugg

SEQ ID NO: 1429353 - RNA, 19 nt, Artificial Sequence
  Description of Artificial Sequence: Synthetic oligonucleotide
ccacagaaaugcauuaugu

SEQ ID NO: 1429354 - RNA, 19 nt, Artificial Sequence
  Description of Artificial Sequence: Synthetic oligonucleotide
gcagucgcugguuggucug

SEQ ID NO: 1429355 - RNA, 19 nt, Artificial Sequence
  Description of Artificial Sequence: Synthetic oligonucleotide
acgagagggguggggacgu

SEQ ID NO: 1429356 - RNA, 19 nt, Artificial Sequence
  Description of Artificial Sequence: Synthetic oligonucleotide
aucucccacacuggaugcu

SEQ ID NO: 1429357 - RNA, 19 nt, Artificial Sequence
  Description of Artificial Sequence: Synthetic oligonucleotide
gaguccugguuccaucgau

SEQ ID NO: 1429358 - RNA, 19 nt, Artificial Sequence
  Description of Artificial Sequence: Synthetic oligonucleotide
gacgcccuccucggccucg

SEQ ID NO: 1429359 - RNA, 19 nt, Artificial Sequence
  Description of Artificial Sequence: Synthetic oligonucleotide
acggcgccagccgcgucgc

SEQ ID NO: 1429360 - RNA, 19 nt, Artificial Sequence
  Description of Artificial Sequence: Synthetic oligonucleotide
augucaccuggccuccauu

SEQ ID NO: 1429361 - RNA, 19 nt, Artificial Sequence
  Description of Artificial Sequence: Synthetic oligonucleotide
cucgaagcagggcguucuc

SEQ ID NO: 1429362 - RNA, 19 nt, Artificial Sequence
  Description of Artificial Sequence: Synthetic oligonucleotide
gguuggucuggcguaguuc

SEQ ID NO: 1429363 - RNA, 19 nt, Artificial Sequence
  Description of Artificial Sequence: Synthetic oligonucleotide
aguccugguuccaucgauu

SEQ ID NO: 1429364 - RNA, 19 nt, Artificial Sequence
  Description of Artificial Sequence: Synthetic oligonucleotide
gcgggaagggugccgcggg

SEQ ID NO: 1429365 - RNA, 19 nt, Artificial Sequence
  Description of Artificial Sequence: Synthetic oligonucleotide
ucgccgaacgccgccugcu

SEQ ID NO: 1429366 - RNA, 19 nt, Artificial Sequence
  Description of Artificial Sequence: Synthetic oligonucleotide
ugcauagguccaggcccca

SEQ ID NO: 1429367 - RNA, 19 nt, Artificial Sequence
  Description of Artificial Sequence: Synthetic oligonucleotide
gucgccgaacgccgccugc

SEQ ID NO: 1429368 - RNA, 19 nt, Artificial Sequence
  Description of Artificial Sequence: Synthetic oligonucleotide
gccuuccugcagcucgacg

SEQ ID NO: 1429369 - RNA, 19 nt, Artificial Sequence
  Description of Artificial Sequence: Synthetic oligonucleotide
cauaagcacccugucucaa

SEQ ID NO: 1429370 - RNA, 19 nt, Artificial Sequence
  Description of Artificial Sequence: Synthetic oligonucleotide
cccgcgaaggcagcggugg

SEQ ID NO: 1429371 - RNA, 19 nt, Artificial Sequence
  Description of Artificial Sequence: Synthetic oligonucleotide
cgcgguaugucaccuggcc

SEQ ID NO: 1429372 - RNA, 19 nt, Artificial Sequence
  Description of Artificial Sequence: Synthetic oligonucleotide
cagcgggaagggugccgcg

SEQ ID NO: 1429373 - RNA, 19 nt, Artificial Sequence
  Description of Artificial Sequence: Synthetic oligonucleotide
ccugugagcccaguacaag

SEQ ID NO: 1429374 - RNA, 19 nt, Artificial Sequence
  Description of Artificial Sequence: Synthetic oligonucleotide
ccuggggugucaucaugac

SEQ ID NO: 1429375 - RNA, 19 nt, Artificial Sequence
  Description of Artificial Sequence: Synthetic oligonucleotide
caggguagugggcaaugua

SEQ ID NO: 1429376 - RNA, 19 nt, Artificial Sequence
  Description of Artificial Sequence: Synthetic oligonucleotide
ggacuacgcgguaugucac

SEQ ID NO: 1429377 - RNA, 19 nt, Artificial Sequence
  Description of Artificial Sequence: Synthetic oligonucleotide
gaaguacauccuggggugu

SEQ ID NO: 1429378 - RNA, 19 nt, Artificial Sequence
  Description of Artificial Sequence: Synthetic oligonucleotide
aggccccagggaaggcacc

SEQ ID NO: 1429379 - RNA, 19 nt, Artificial Sequence
  Description of Artificial Sequence: Synthetic oligonucleotide
guccugguuccaucgauuu

SEQ ID NO: 1429380 - RNA, 19 nt, Artificial Sequence
  Description of Artificial Sequence: Synthetic oligonucleotide
caaaccgugccuccccgcu

SEQ ID NO: 1429381 - RNA, 19 nt, Artificial Sequence
  Description of Artificial Sequence: Synthetic oligonucleotide
caccauugcugaauggauu

SEQ ID NO: 1429382 - RNA, 19 nt, Artificial Sequence
  Description of Artificial Sequence: Synthetic oligonucleotide
gcaaaccgugccuccccgc

SEQ ID NO: 1429383 - RNA, 19 nt, Artificial Sequence
  Description of Artificial Sequence: Synthetic oligonucleotide
agcagcgguggccgaggaa

SEQ ID NO: 1429384 - RNA, 19 nt, Artificial Sequence
  Description of Artificial Sequence: Synthetic oligonucleotide
gaagcagggcguucucauu

SEQ ID NO: 1429385 - RNA, 19 nt, Artificial Sequence
  Description of Artificial Sequence: Synthetic oligonucleotide
guguccggggugcaauugu

SEQ ID NO: 1429386 - RNA, 19 nt, Artificial Sequence
  Description of Artificial Sequence: Synthetic oligonucleotide
agggugccgcgggaccugg

SEQ ID NO: 1429387 - RNA, 19 nt, Artificial Sequence
  Description of Artificial Sequence: Synthetic oligonucleotide
cacagacacagccguggua

SEQ ID NO: 1429388 - RNA, 19 nt, Artificial Sequence
  Description of Artificial Sequence: Synthetic oligonucleotide
ccucucugugcuaagggcu

SEQ ID NO: 1429389 - RNA, 19 nt, Artificial Sequence
  Description of Artificial Sequence: Synthetic oligonucleotide
caauaccucuagagaccaa

SEQ ID NO: 1429390 - RNA, 19 nt, Artificial Sequence
  Description of Artificial Sequence: Synthetic oligonucleotide
cugcuggacgcuggcgaug

SEQ ID NO: 1429391 - RNA, 19 nt, Artificial Sequence
  Description of Artificial Sequence: Synthetic oligonucleotide
gucuggcguaguucccgga

SEQ ID NO: 1429392 - RNA, 19 nt, Artificial Sequence
  Description of Artificial Sequence: Synthetic oligonucleotide
guucccggauauagucaca

SEQ ID NO: 1429393 - RNA, 19 nt, Artificial Sequence
  Description of Artificial Sequence: Synthetic oligonucleotide
cugcagucgcugguugguc

SEQ ID NO: 1429394 - RNA, 19 nt, Artificial Sequence
  Description of Artificial Sequence: Synthetic oligonucleotide
gggucccuugucguggcug

SEQ ID NO: 1429395 - RNA, 19 nt, Artificial Sequence
  Description of Artificial Sequence: Synthetic oligonucleotide
acccagaggggagcaggga

SEQ ID NO: 1429396 - RNA, 19 nt, Artificial Sequence
  Description of Artificial Sequence: Synthetic oligonucleotide
ggugcucucgcccaccauu

SEQ ID NO: 1429397 - RNA, 19 nt, Artificial Sequence
  Description of Artificial Sequence: Synthetic oligonucleotide
gucaccuggccuccauuau

SEQ ID NO: 1429398 - RNA, 19 nt, Artificial Sequence
  Description of Artificial Sequence: Synthetic oligonucleotide
ggcgccagccgcgucgccc

SEQ ID NO: 1429399 - RNA, 19 nt, Artificial Sequence
  Description of Artificial Sequence: Synthetic oligonucleotide
gggaagggugccgcgggac

SEQ ID NO: 1429400 - RNA, 19 nt, Artificial Sequence
  Description of Artificial Sequence: Synthetic oligonucleotide
caucucgaggaguccuggu

SEQ ID NO: 1429401 - RNA, 19 nt, Artificial Sequence
  Description of Artificial Sequence: Synthetic oligonucleotide
caccgccgucugcuccucg

SEQ ID NO: 1429402 - RNA, 19 nt, Artificial Sequence
  Description of Artificial Sequence: Synthetic oligonucleotide
ggggagcagggauccagaa

SEQ ID NO: 1429403 - RNA, 19 nt, Artificial Sequence
  Description of Artificial Sequence: Synthetic oligonucleotide
gucccuugucguggcuggc

SEQ ID NO: 1429404 - RNA, 19 nt, Artificial Sequence
  Description of Artificial Sequence: Synthetic oligonucleotide
cugccccguccacacccac

SEQ ID NO: 1429405 - RNA, 19 nt, Artificial Sequence
  Description of Artificial Sequence: Synthetic oligonucleotide
gccagcgggaagggugccg

SEQ ID NO: 1429406 - RNA, 19 nt, Artificial Sequence
  Description of Artificial Sequence: Synthetic oligonucleotide
gcgguaugucaccuggccu

SEQ ID NO: 1429407 - RNA, 19 nt, Artificial Sequence
  Description of Artificial Sequence: Synthetic oligonucleotide
gcgcauacacacacacaca

SEQ ID NO: 1429408 - RNA, 19 nt, Artificial Sequence
  Description of Artificial Sequence: Synthetic oligonucleotide
gcgguggacacgacgcuga

SEQ ID NO: 1429409 - RNA, 19 nt, Artificial Sequence
  Description of Artificial Sequence: Synthetic oligonucleotide
ugacggcgccagccgcguc

SEQ ID NO: 1429410 - RNA, 19 nt, Artificial Sequence
  Description of Artificial Sequence: Synthetic oligonucleotide
ccuuuacucgcuccugucu

SEQ ID NO: 1429411 - RNA, 19 nt, Artificial Sequence
  Description of Artificial Sequence: Synthetic oligonucleotide
gguggggacguggccuccc

SEQ ID NO: 1429412 - RNA, 19 nt, Artificial Sequence
  Description of Artificial Sequence: Synthetic oligonucleotide
gcugaccaucagucaccug

SEQ ID NO: 1429413 - RNA, 19 nt, Artificial Sequence
  Description of Artificial Sequence: Synthetic oligonucleotide
gguaucucccacacuggau

SEQ ID NO: 1429414 - RNA, 19 nt, Artificial Sequence
  Description of Artificial Sequence: Synthetic oligonucleotide
gcugccaccauugcugaau

SEQ ID NO: 1429415 - RNA, 19 nt, Artificial Sequence
  Description of Artificial Sequence: Synthetic oligonucleotide
cauccuggggugucaucau

SEQ ID NO: 1429416 - RNA, 19 nt, Artificial Sequence
  Description of Artificial Sequence: Synthetic oligonucleotide
ggggugucaucaugacaua

SEQ ID NO: 1429417 - RNA, 19 nt, Artificial Sequence
  Description of Artificial Sequence: Synthetic oligonucleotide
ggcaggugggcagguuuuc

SEQ ID NO: 1429418 - RNA, 19 nt, Artificial Sequence
  Description of Artificial Sequence: Synthetic oligonucleotide
ccgaacgccgccugcugga

SEQ ID NO: 1429419 - RNA, 19 nt, Artificial Sequence
  Description of Artificial Sequence: Synthetic oligonucleotide
ggccguccagcugaccauc

SEQ ID NO: 1429420 - RNA, 19 nt, Artificial Sequence
  Description of Artificial Sequence: Synthetic oligonucleotide
cccugucucaauaccucua

SEQ ID NO: 1429421 - RNA, 19 nt, Artificial Sequence
  Description of Artificial Sequence: Synthetic oligonucleotide
gggugcaauuguccucugu

SEQ ID NO: 1429422 - RNA, 19 nt, Artificial Sequence
  Description of Artificial Sequence: Synthetic oligonucleotide
gcucgaagcagggcguucu

SEQ ID NO: 1429423 - RNA, 19 nt, Artificial Sequence
  Description of Artificial Sequence: Synthetic oligonucleotide
gcgugacaaucuggaauga

SEQ ID NO: 1429424 - RNA, 19 nt, Artificial Sequence
  Description of Artificial Sequence: Synthetic oligonucleotide
ccgucuccgcuccacuuca

SEQ ID NO: 1429425 - RNA, 19 nt, Artificial Sequence
  Description of Artificial Sequence: Synthetic oligonucleotide
gcucgacgcccuccucggc

SEQ ID NO: 1429426 - RNA, 19 nt, Artificial Sequence
  Description of Artificial Sequence: Synthetic oligonucleotide
gguguguccggggugcaau

SEQ ID NO: 1429427 - RNA, 19 nt, Artificial Sequence
  Description of Artificial Sequence: Synthetic oligonucleotide
ccacuucauugugcugagc

SEQ ID NO: 1429428 - RNA, 19 nt, Artificial Sequence
  Description of Artificial Sequence: Synthetic oligonucleotide
gccucccucucugugcuaa

SEQ ID NO: 1429429 - RNA, 19 nt, Artificial Sequence
  Description of Artificial Sequence: Synthetic oligonucleotide
gugcucucgcccaccauuu

SEQ ID NO: 1429430 - RNA, 19 nt, Artificial Sequence
  Description of Artificial Sequence: Synthetic oligonucleotide
guguguccggggugcaauu

SEQ ID NO: 1429431 - RNA, 19 nt, Artificial Sequence
  Description of Artificial Sequence: Synthetic oligonucleotide
cagccgcgucgcccuggcc

SEQ ID NO: 1429432 - RNA, 19 nt, Artificial Sequence
  Description of Artificial Sequence: Synthetic oligonucleotide
ggcucgaagcagggcguuc

SEQ ID NO: 1429433 - RNA, 19 nt, Artificial Sequence
  Description of Artificial Sequence: Synthetic oligonucleotide
guggggacguggccucccu

SEQ ID NO: 1429434 - RNA, 19 nt, Artificial Sequence
  Description of Artificial Sequence: Synthetic oligonucleotide
cagcgguggacacgacgcu

SEQ ID NO: 1429435 - RNA, 19 nt, Artificial Sequence
  Description of Artificial Sequence: Synthetic oligonucleotide
gccgggugcucucgcccac

SEQ ID NO: 1429436 - RNA, 19 nt, Artificial Sequence
  Description of Artificial Sequence: Synthetic oligonucleotide
gcgccucccucucugugcu

SEQ ID NO: 1429437 - RNA, 19 nt, Artificial Sequence
  Description of Artificial Sequence: Synthetic oligonucleotide
gccccagggaaggcacccc

SEQ ID NO: 1429438 - RNA, 19 nt, Artificial Sequence
  Description of Artificial Sequence: Synthetic oligonucleotide
cccagaggggagcagggau

SEQ ID NO: 1429439 - RNA, 19 nt, Artificial Sequence
  Description of Artificial Sequence: Synthetic oligonucleotide
gcaggugggcagguuuucu

SEQ ID NO: 1429440 - RNA, 19 nt, Artificial Sequence
  Description of Artificial Sequence: Synthetic oligonucleotide
gcggcagggugggccgggg

SEQ ID NO: 1429441 - RNA, 19 nt, Artificial Sequence
  Description of Artificial Sequence: Synthetic oligonucleotide
caccuggacuacgcgguau

SEQ ID NO: 1429442 - RNA, 19 nt, Artificial Sequence
  Description of Artificial Sequence: Synthetic oligonucleotide
ggcguaguucccggauaua

SEQ ID NO: 1429443 - RNA, 19 nt, Artificial Sequence
  Description of Artificial Sequence: Synthetic oligonucleotide
gggugccgcgggaccuggg

SEQ ID NO: 1429444 - RNA, 19 nt, Artificial Sequence
  Description of Artificial Sequence: Synthetic oligonucleotide
ccugcagucgcugguuggu

SEQ ID NO: 1429445 - RNA, 19 nt, Artificial Sequence
  Description of Artificial Sequence: Synthetic oligonucleotide
cugguuggucuggcguagu

SEQ ID NO: 1429446 - RNA, 19 nt, Artificial Sequence
  Description of Artificial Sequence: Synthetic oligonucleotide
acgccgccugcuggacgcu

SEQ ID NO: 1429447 - RNA, 19 nt, Artificial Sequence
  Description of Artificial Sequence: Synthetic oligonucleotide
ccgggugcucucgcccacc

SEQ ID NO: 1429448 - RNA, 19 nt, Artificial Sequence
  Description of Artificial Sequence: Synthetic oligonucleotide
cgguggacacgacgcugac

SEQ ID NO: 1429449 - RNA, 19 nt, Artificial Sequence
  Description of Artificial Sequence: Synthetic oligonucleotide
ccgccuuccugcagcucga

SEQ ID NO: 1429450 - RNA, 19 nt, Artificial Sequence
  Description of Artificial Sequence: Synthetic oligonucleotide
gccgcgucgcccuggccgu

SEQ ID NO: 1429451 - RNA, 19 nt, Artificial Sequence
  Description of Artificial Sequence: Synthetic oligonucleotide
cgggccguccccgccuucc

SEQ ID NO: 1429452 - RNA, 19 nt, Artificial Sequence
  Description of Artificial Sequence: Synthetic oligonucleotide
gcgccagccgcgucgcccu

SEQ ID NO: 1429453 - RNA, 19 nt, Artificial Sequence
  Description of Artificial Sequence: Synthetic oligonucleotide
ccuggccguccagcugacc

SEQ ID NO: 1429454 - RNA, 19 nt, Artificial Sequence
  Description of Artificial Sequence: Synthetic oligonucleotide
cgaacgccgccugcuggac

SEQ ID NO: 1429455 - RNA, 19 nt, Artificial Sequence
  Description of Artificial Sequence: Synthetic oligonucleotide
cgccgaacgccgccugcug

SEQ ID NO: 1429456 - RNA, 19 nt, Artificial Sequence
  Description of Artificial Sequence: Synthetic oligonucleotide
agcgggcagcggggccucu

SEQ ID NO: 1429457 - RNA, 19 nt, Artificial Sequence
  Description of Artificial Sequence: Synthetic oligonucleotide
ccuggacuacgcgguaugu

SEQ ID NO: 1429458 - RNA, 19 nt, Artificial Sequence
  Description of Artificial Sequence: Synthetic oligonucleotide
cacaggccuuggacaggau

SEQ ID NO: 1429459 - RNA, 19 nt, Artificial Sequence
  Description of Artificial Sequence: Synthetic oligonucleotide
ggggcgccucccucucugu

SEQ ID NO: 1429460 - RNA, 19 nt, Artificial Sequence
  Description of Artificial Sequence: Synthetic oligonucleotide
ccauugcugaauggauuuu

SEQ ID NO: 1429461 - RNA, 19 nt, Artificial Sequence
  Description of Artificial Sequence: Synthetic oligonucleotide
cgggugcucucgcccacca

SEQ ID NO: 1429462 - RNA, 19 nt, Artificial Sequence
  Description of Artificial Sequence: Synthetic oligonucleotide
gggugcucucgcccaccau

SEQ ID NO: 1429463 - RNA, 19 nt, Artificial Sequence
  Description of Artificial Sequence: Synthetic oligonucleotide
cgccuuccugcagcucgac

SEQ ID NO: 1429464 - RNA, 19 nt, Artificial Sequence
  Description of Artificial Sequence: Synthetic oligonucleotide
ccgugccuccccgcugaca

SEQ ID NO: 1429465 - RNA, 19 nt, Artificial Sequence
  Description of Artificial Sequence: Synthetic oligonucleotide
cgacgcccuccucggccuc

SEQ ID NO: 1429466 - RNA, 19 nt, Artificial Sequence
  Description of Artificial Sequence: Synthetic oligonucleotide
cgaggaguccugguuccau

SEQ ID NO: 1429467 - RNA, 19 nt, Artificial Sequence
  Description of Artificial Sequence: Synthetic oligonucleotide
ccccgccuuccugcagcuc

SEQ ID NO: 1429468 - RNA, 19 nt, Artificial Sequence
  Description of Artificial Sequence: Synthetic oligonucleotide
ccgggccguccccgccuuc

SEQ ID NO: 1429469 - RNA, 19 nt, Artificial Sequence
  Description of Artificial Sequence: Synthetic oligonucleotide
gcggggccucuguccuccu

SEQ ID NO: 1429470 - RNA, 19 nt, Artificial Sequence
  Description of Artificial Sequence: Synthetic oligonucleotide
ccgcgucgcccuggccguc

SEQ ID NO: 1429471 - RNA, 19 nt, Artificial Sequence
  Description of Artificial Sequence: Synthetic oligonucleotide
cgccucccucucugugcua

SEQ ID NO: 1429472 - RNA, 19 nt, Artificial Sequence
  Description of Artificial Sequence: Synthetic oligonucleotide
aauuagguugaccacauuc

SEQ ID NO: 1429473 - RNA, 19 nt, Artificial Sequence
  Description of Artificial Sequence: Synthetic oligonucleotide
uuuacuaagacguugcuca

SEQ ID NO: 1429474 - RNA, 19 nt, Artificial Sequence
  Description of Artificial Sequence: Synthetic oligonucleotide
acaaaucucaauuagguug

SEQ ID NO: 1429475 - RNA, 19 nt, Artificial Sequence
  Description of Artificial Sequence: Synthetic oligonucleotide
aacaagaguucuuaucagc

SEQ ID NO: 1429476 - RNA, 19 nt, Artificial Sequence
  Description of Artificial Sequence: Synthetic oligonucleotide
aagaguucuuaucagcccc

SEQ ID NO: 1429477 - RNA, 19 nt, Artificial Sequence
  Description of Artificial Sequence: Synthetic oligonucleotide
aaacauagacgucaagugg

SEQ ID NO: 1429478 - RNA, 19 nt, Artificial Sequence
  Description of Artificial Sequence: Synthetic oligonucleotide
aaucaaacugcauucagga

SEQ ID NO: 1429479 - RNA, 19 nt, Artificial Sequence
  Description of Artificial Sequence: Synthetic oligonucleotide
uuugguucgacaaaucuca

SEQ ID NO: 1429480 - RNA, 19 nt, Artificial Sequence
  Description of Artificial Sequence: Synthetic oligonucleotide
aaccaaucaaacugcauuc

SEQ ID NO: 1429481 - RNA, 19 nt, Artificial Sequence
  Description of Artificial Sequence: Synthetic oligonucleotide
auaggggucacguacauag

SEQ ID NO: 1429482 - RNA, 19 nt, Artificial Sequence
  Description of Artificial Sequence: Synthetic oligonucleotide
uuuuaaccaaucaaacugc

SEQ ID NO: 1429483 - RNA, 19 nt, Artificial Sequence
  Description of Artificial Sequence: Synthetic oligonucleotide
ucuaccaccaaccuaagaa

SEQ ID NO: 1429484 - RNA, 19 nt, Artificial Sequence
  Description of Artificial Sequence: Synthetic oligonucleotide
cuuagaaagucacaguggg

SEQ ID NO: 1429485 - RNA, 19 nt, Artificial Sequence
  Description of Artificial Sequence: Synthetic oligonucleotide
gaagucaugguugagggcg

SEQ ID NO: 1429486 - RNA, 19 nt, Artificial Sequence
  Description of Artificial Sequence: Synthetic oligonucleotide
aaaaguagcccauuucuga

SEQ ID NO: 1429487 - RNA, 19 nt, Artificial Sequence
  Description of Artificial Sequence: Synthetic oligonucleotide
aacauagacgucaaguggg

SEQ ID NO: 1429488 - RNA, 19 nt, Artificial Sequence
  Description of Artificial Sequence: Synthetic oligonucleotide
cuugcaacgguuauagggg

SEQ ID NO: 1429489 - RNA, 19 nt, Artificial Sequence
  Description of Artificial Sequence: Synthetic oligonucleotide
aaacacgauaaaauucucc

SEQ ID NO: 1429490 - RNA, 19 nt, Artificial Sequence
  Description of Artificial Sequence: Synthetic oligonucleotide
ucaaacugcauucaggaau

SEQ ID NO: 1429491 - RNA, 19 nt, Artificial Sequence
  Description of Artificial Sequence: Synthetic oligonucleotide
uucgacaaaucucaauuag

SEQ ID NO: 1429492 - RNA, 19 nt, Artificial Sequence
  Description of Artificial Sequence: Synthetic oligonucleotide
aaaguagcccauuucugag

SEQ ID NO: 1429493 - RNA, 19 nt, Artificial Sequence
  Description of Artificial Sequence: Synthetic oligonucleotide
uaagacguugcucagcagc

SEQ ID NO: 1429494 - RNA, 19 nt, Artificial Sequence
  Description of Artificial Sequence: Synthetic oligonucleotide
ucuacguuuggccacaccu

SEQ ID NO: 1429495 - RNA, 19 nt, Artificial Sequence
  Description of Artificial Sequence: Synthetic oligonucleotide
guauuuggugaccucaucg

SEQ ID NO: 1429496 - RNA, 19 nt, Artificial Sequence
  Description of Artificial Sequence: Synthetic oligonucleotide
ucgacaaaucucaauuagg

SEQ ID NO: 1429497 - RNA, 19 nt, Artificial Sequence
  Description of Artificial Sequence: Synthetic oligonucleotide
aagcaaucuaccaccaacc

SEQ ID NO: 1429498 - RNA, 19 nt, Artificial Sequence
  Description of Artificial Sequence: Synthetic oligonucleotide
uguaauagggaaccccucc

SEQ ID NO: 1429499 - RNA, 19 nt, Artificial Sequence
  Description of Artificial Sequence: Synthetic oligonucleotide
aauucguugugcagggucc

SEQ ID NO: 1429500 - RNA, 19 nt, Artificial Sequence
  Description of Artificial Sequence: Synthetic oligonucleotide
aaacaagaguucuuaucag

SEQ ID NO: 1429501 - RNA, 19 nt, Artificial Sequence
  Description of Artificial Sequence: Synthetic oligonucleotide
ucaaacauagacgucaagu

SEQ ID NO: 1429502 - RNA, 19 nt, Artificial Sequence
  Description of Artificial Sequence: Synthetic oligonucleotide
cuaagaagagcccuagugc

SEQ ID NO: 1429503 - RNA, 19 nt, Artificial Sequence
  Description of Artificial Sequence: Synthetic oligonucleotide
acaagaguucuuaucagcc

SEQ ID NO: 1429504 - RNA, 19 nt, Artificial Sequence
  Description of Artificial Sequence: Synthetic oligonucleotide
ugucaauucguugugcagg

SEQ ID NO: 1429505 - RNA, 19 nt, Artificial Sequence
  Description of Artificial Sequence: Synthetic oligonucleotide
aaugggugggccguagucc

SEQ ID NO: 1429506 - RNA, 19 nt, Artificial Sequence
  Description of Artificial Sequence: Synthetic oligonucleotide
ucuggcuacccuuucgucg

SEQ ID NO: 1429507 - RNA, 19 nt, Artificial Sequence
  Description of Artificial Sequence: Synthetic oligonucleotide
uaaccaaucaaacugcauu

SEQ ID NO: 1429508 - RNA, 19 nt, Artificial Sequence
  Description of Artificial Sequence: Synthetic oligonucleotide
auagacgucaaguggguag

SEQ ID NO: 1429509 - RNA, 19 nt, Artificial Sequence
  Description of Artificial Sequence: Synthetic oligonucleotide
ugcaugauagggcugcgag

SEQ ID NO: 1429510 - RNA, 19 nt, Artificial Sequence
  Description of Artificial Sequence: Synthetic oligonucleotide
uauuuggugaccucaucgc

SEQ ID NO: 1429511 - RNA, 19 nt, Artificial Sequence
  Description of Artificial Sequence: Synthetic oligonucleotide
aaucucaauuagguugacc

SEQ ID NO: 1429512 - RNA, 19 nt, Artificial Sequence
  Description of Artificial Sequence: Synthetic oligonucleotide
aggggucacguacauaggc

SEQ ID NO: 1429513 - RNA, 19 nt, Artificial Sequence
  Description of Artificial Sequence: Synthetic oligonucleotide
uuuaaccaaucaaacugca

SEQ ID NO: 1429514 - RNA, 19 nt, Artificial Sequence
  Description of Artificial Sequence: Synthetic oligonucleotide
aguucuagcuuuucaaaca

SEQ ID NO: 1429515 - RNA, 19 nt, Artificial Sequence
  Description of Artificial Sequence: Synthetic oligonucleotide
aaguagcccauuucugagg

SEQ ID NO: 1429516 - RNA, 19 nt, Artificial Sequence
  Description of Artificial Sequence: Synthetic oligonucleotide
agauagauacugcccuugc

SEQ ID NO: 1429517 - RNA, 19 nt, Artificial Sequence
  Description of Artificial Sequence: Synthetic oligonucleotide
ugaccagaagaagucaugg

SEQ ID NO: 1429518 - RNA, 19 nt, Artificial Sequence
  Description of Artificial Sequence: Synthetic oligonucleotide
aacaccagauagauacugc

SEQ ID NO: 1429519 - RNA, 19 nt, Artificial Sequence
  Description of Artificial Sequence: Synthetic oligonucleotide
aaaacgggcauuccacuga

SEQ ID NO: 1429520 - RNA, 19 nt, Artificial Sequence
  Description of Artificial Sequence: Synthetic oligonucleotide
acgucaaguggguagacag

SEQ ID NO: 1429521 - RNA, 19 nt, Artificial Sequence
  Description of Artificial Sequence: Synthetic oligonucleotide
agauacugcccuugcaacg

SEQ ID NO: 1429522 - RNA, 19 nt, Artificial Sequence
  Description of Artificial Sequence: Synthetic oligonucleotide
aguuuucguauuuggugac

SEQ ID NO: 1429523 - RNA, 19 nt, Artificial Sequence
  Description of Artificial Sequence: Synthetic oligonucleotide
uuccuguccaagcugagac

SEQ ID NO: 1429524 - RNA, 19 nt, Artificial Sequence
  Description of Artificial Sequence: Synthetic oligonucleotide
ugaccucaucgcaaaacgg

SEQ ID NO: 1429525 - RNA, 19 nt, Artificial Sequence
  Description of Artificial Sequence: Synthetic oligonucleotide
gugaccucaucgcaaaacg

SEQ ID NO: 1429526 - RNA, 19 nt, Artificial Sequence
  Description of Artificial Sequence: Synthetic oligonucleotide
gauacugcccuugcaacgg

SEQ ID NO: 1429527 - RNA, 19 nt, Artificial Sequence
  Description of Artificial Sequence: Synthetic oligonucleotide
auagauacugcccuugcaa

SEQ ID NO: 1429528 - RNA, 19 nt, Artificial Sequence
  Description of Artificial Sequence: Synthetic oligonucleotide
agugggugaggccuuuacc

SEQ ID NO: 1429529 - RNA, 19 nt, Artificial Sequence
  Description of Artificial Sequence: Synthetic oligonucleotide
uguuucaggagcuguagaa

SEQ ID NO: 1429530 - RNA, 19 nt, Artificial Sequence
  Description of Artificial Sequence: Synthetic oligonucleotide
accagauagauacugcccu

SEQ ID NO: 1429531 - RNA, 19 nt, Artificial Sequence
  Description of Artificial Sequence: Synthetic oligonucleotide
auacuugucuacguuuggc

SEQ ID NO: 1429532 - RNA, 19 nt, Artificial Sequence
  Description of Artificial Sequence: Synthetic oligonucleotide
ccuugcaacgguuauaggg

SEQ ID NO: 1429533 - RNA, 19 nt, Artificial Sequence
  Description of Artificial Sequence: Synthetic oligonucleotide
gaccucaucgcaaaacggg

SEQ ID NO: 1429534 - RNA, 19 nt, Artificial Sequence
  Description of Artificial Sequence: Synthetic oligonucleotide
aggucaugcucacagaagu

SEQ ID NO: 1429535 - RNA, 19 nt, Artificial Sequence
  Description of Artificial Sequence: Synthetic oligonucleotide
gacagcgugaacuuuacua

SEQ ID NO: 1429536 - RNA, 19 nt, Artificial Sequence
  Description of Artificial Sequence: Synthetic oligonucleotide
caugaugcacccagcaccc

SEQ ID NO: 1429537 - RNA, 19 nt, Artificial Sequence
  Description of Artificial Sequence: Synthetic oligonucleotide
ucaauuagguugaccacau

SEQ ID NO: 1429538 - RNA, 19 nt, Artificial Sequence
  Description of Artificial Sequence: Synthetic oligonucleotide
ucuggcuaaguuuucguau

SEQ ID NO: 1429539 - RNA, 19 nt, Artificial Sequence
  Description of Artificial Sequence: Synthetic oligonucleotide
uuggcuaggcugaaggcac

SEQ ID NO: 1429540 - RNA, 19 nt, Artificial Sequence
  Description of Artificial Sequence: Synthetic oligonucleotide
ugguauagcgguugggcug

SEQ ID NO: 1429541 - RNA, 19 nt, Artificial Sequence
  Description of Artificial Sequence: Synthetic oligonucleotide
uucguauuuggugaccuca

SEQ ID NO: 1429542 - RNA, 19 nt, Artificial Sequence
  Description of Artificial Sequence: Synthetic oligonucleotide
acucgguugguauagcggu

SEQ ID NO: 1429543 - RNA, 19 nt, Artificial Sequence
  Description of Artificial Sequence: Synthetic oligonucleotide
acagcgugaacuuuacuaa

SEQ ID NO: 1429544 - RNA, 19 nt, Artificial Sequence
  Description of Artificial Sequence: Synthetic oligonucleotide
aguagcccauuucugaggu

SEQ ID NO: 1429545 - RNA, 19 nt, Artificial Sequence
  Description of Artificial Sequence: Synthetic oligonucleotide
ugcuagauacucaaacaua

SEQ ID NO: 1429546 - RNA, 19 nt, Artificial Sequence
  Description of Artificial Sequence: Synthetic oligonucleotide
ugagacccuccagagaggg

SEQ ID NO: 1429547 - RNA, 19 nt, Artificial Sequence
  Description of Artificial Sequence: Synthetic oligonucleotide
uacguuuggccacaccucu

SEQ ID NO: 1429548 - RNA, 19 nt, Artificial Sequence
  Description of Artificial Sequence: Synthetic oligonucleotide
ucgaggucugccaaaagua

SEQ ID NO: 1429549 - RNA, 19 nt, Artificial Sequence
  Description of Artificial Sequence: Synthetic oligonucleotide
auuagguugaccacauucu

SEQ ID NO: 1429550 - RNA, 19 nt, Artificial Sequence
  Description of Artificial Sequence: Synthetic oligonucleotide
uuagaaagucacagugggu

SEQ ID NO: 1429551 - RNA, 19 nt, Artificial Sequence
  Description of Artificial Sequence: Synthetic oligonucleotide
acuugucuacguuuggcca

SEQ ID NO: 1429552 - RNA, 19 nt, Artificial Sequence
  Description of Artificial Sequence: Synthetic oligonucleotide
uccgcuuuuggccuuugac

SEQ ID NO: 1429553 - RNA, 19 nt, Artificial Sequence
  Description of Artificial Sequence: Synthetic oligonucleotide
ucccgcaaggcuguaauag

SEQ ID NO: 1429554 - RNA, 19 nt, Artificial Sequence
  Description of Artificial Sequence: Synthetic oligonucleotide
uugguauagcgguugggcu

SEQ ID NO: 1429555 - RNA, 19 nt, Artificial Sequence
  Description of Artificial Sequence: Synthetic oligonucleotide
gccaggaguucuuagaaag

SEQ ID NO: 1429556 - RNA, 19 nt, Artificial Sequence
  Description of Artificial Sequence: Synthetic oligonucleotide
uuacuaagacguugcucag

SEQ ID NO: 1429557 - RNA, 19 nt, Artificial Sequence
  Description of Artificial Sequence: Synthetic oligonucleotide
cacucgguugguauagcgg

SEQ ID NO: 1429558 - RNA, 19 nt, Artificial Sequence
  Description of Artificial Sequence: Synthetic oligonucleotide
ucgcaaaacgggcauucca

SEQ ID NO: 1429559 - RNA, 19 nt, Artificial Sequence
  Description of Artificial Sequence: Synthetic oligonucleotide
aaccuaagaagagcccuag

SEQ ID NO: 1429560 - RNA, 19 nt, Artificial Sequence
  Description of Artificial Sequence: Synthetic oligonucleotide
cuaggcugaaggcacgggc

SEQ ID NO: 1429561 - RNA, 19 nt, Artificial Sequence
  Description of Artificial Sequence: Synthetic oligonucleotide
uuggccgccuucauguccc

SEQ ID NO: 1429562 - RNA, 19 nt, Artificial Sequence
  Description of Artificial Sequence: Synthetic oligonucleotide
uccuguggauguaguagag

SEQ ID NO: 1429563 - RNA, 19 nt, Artificial Sequence
  Description of Artificial Sequence: Synthetic oligonucleotide
agaaaacaagaguucuuau

SEQ ID NO: 1429564 - RNA, 19 nt, Artificial Sequence
  Description of Artificial Sequence: Synthetic oligonucleotide
caaaacgggcauuccacug

SEQ ID NO: 1429565 - RNA, 19 nt, Artificial Sequence
  Description of Artificial Sequence: Synthetic oligonucleotide
ugaacuuuacuaagacguu

SEQ ID NO: 1429566 - RNA, 19 nt, Artificial Sequence
  Description of Artificial Sequence: Synthetic oligonucleotide
caauucguugugcaggguc

SEQ ID NO: 1429567 - RNA, 19 nt, Artificial Sequence
  Description of Artificial Sequence: Synthetic oligonucleotide
ucuggugugccuuggccga

SEQ ID NO: 1429568 - RNA, 19 nt, Artificial Sequence
  Description of Artificial Sequence: Synthetic oligonucleotide
ugugcaggguccagcacca

SEQ ID NO: 1429569 - RNA, 19 nt, Artificial Sequence
  Description of Artificial Sequence: Synthetic oligonucleotide
ugaugcacccagcacccca

SEQ ID NO: 1429570 - RNA, 19 nt, Artificial Sequence
  Description of Artificial Sequence: Synthetic oligonucleotide
ugauuucccgcaaggcugu

SEQ ID NO: 1429571 - RNA, 19 nt, Artificial Sequence
  Description of Artificial Sequence: Synthetic oligonucleotide
agcaaucuaccaccaaccu

SEQ ID NO: 1429572 - RNA, 19 nt, Artificial Sequence
  Description of Artificial Sequence: Synthetic oligonucleotide
uuucccgcaaggcuguaau

SEQ ID NO: 1429573 - RNA, 19 nt, Artificial Sequence
  Description of Artificial Sequence: Synthetic oligonucleotide
cugcauucaggaaugucuc

SEQ ID NO: 1429574 - RNA, 19 nt, Artificial Sequence
  Description of Artificial Sequence: Synthetic oligonucleotide
ccuaagaagagcccuagug

SEQ ID NO: 1429575 - RNA, 19 nt, Artificial Sequence
  Description of Artificial Sequence: Synthetic oligonucleotide
uucgucgugguggugcuag

SEQ ID NO: 1429576 - RNA, 19 nt, Artificial Sequence
  Description of Artificial Sequence: Synthetic oligonucleotide
acuuuacuaagacguugcu

SEQ ID NO: 1429577 - RNA, 19 nt, Artificial Sequence
  Description of Artificial Sequence: Synthetic oligonucleotide
guaguggcuggauuucggc

SEQ ID NO: 1429578 - RNA, 19 nt, Artificial Sequence
  Description of Artificial Sequence: Synthetic oligonucleotide
accaaccuaagaagagccc

SEQ ID NO: 1429579 - RNA, 19 nt, Artificial Sequence
  Description of Artificial Sequence: Synthetic oligonucleotide
ccuuuugaagaaaacaaga

SEQ ID NO: 1429580 - RNA, 19 nt, Artificial Sequence
  Description of Artificial Sequence: Synthetic oligonucleotide
agacagcaugcccuuuagg

SEQ ID NO: 1429581 - RNA, 19 nt, Artificial Sequence
  Description of Artificial Sequence: Synthetic oligonucleotide
cucaauuagguugaccaca

SEQ ID NO: 1429582 - RNA, 19 nt, Artificial Sequence
  Description of Artificial Sequence: Synthetic oligonucleotide
cagcgugaacuuuacuaag

SEQ ID NO: 1429583 - RNA, 19 nt, Artificial Sequence
  Description of Artificial Sequence: Synthetic oligonucleotide
ggugcuagauacucaaaca

SEQ ID NO: 1429584 - RNA, 19 nt, Artificial Sequence
  Description of Artificial Sequence: Synthetic oligonucleotide
uuaucagccccaugcucga

SEQ ID NO: 1429585 - RNA, 19 nt, Artificial Sequence
  Description of Artificial Sequence: Synthetic oligonucleotide
guaguagaggccguucagc

SEQ ID NO: 1429586 - RNA, 19 nt, Artificial Sequence
  Description of Artificial Sequence: Synthetic oligonucleotide
aucgcaaaacgggcauucc

SEQ ID NO: 1429587 - RNA, 19 nt, Artificial Sequence
  Description of Artificial Sequence: Synthetic oligonucleotide
acgauaaaauucuccuuuu

SEQ ID NO: 1429588 - RNA, 19 nt, Artificial Sequence
  Description of Artificial Sequence: Synthetic oligonucleotide
aagacacgcucaaauucug

SEQ ID NO: 1429589 - RNA, 19 nt, Artificial Sequence
  Description of Artificial Sequence: Synthetic oligonucleotide
gucaaguggguagacagca

SEQ ID NO: 1429590 - RNA, 19 nt, Artificial Sequence
  Description of Artificial Sequence: Synthetic oligonucleotide
acaaugucaccacucgguu

SEQ ID NO: 1429591 - RNA, 19 nt, Artificial Sequence
  Description of Artificial Sequence: Synthetic oligonucleotide
uagacgucaaguggguaga

SEQ ID NO: 1429592 - RNA, 19 nt, Artificial Sequence
  Description of Artificial Sequence: Synthetic oligonucleotide
uccaagcugagacccucca

SEQ ID NO: 1429593 - RNA, 19 nt, Artificial Sequence
  Description of Artificial Sequence: Synthetic oligonucleotide
gaagacacgcucaaauucu

SEQ ID NO: 1429594 - RNA, 19 nt, Artificial Sequence
  Description of Artificial Sequence: Synthetic oligonucleotide
uacuaagacguugcucagc

SEQ ID NO: 1429595 - RNA, 19 nt, Artificial Sequence
  Description of Artificial Sequence: Synthetic oligonucleotide
cuacguuuggccacaccuc

SEQ ID NO: 1429596 - RNA, 19 nt, Artificial Sequence
  Description of Artificial Sequence: Synthetic oligonucleotide
ucgguugguauagcgguug

SEQ ID NO: 1429597 - RNA, 19 nt, Artificial Sequence
  Description of Artificial Sequence: Synthetic oligonucleotide
aggcaggcauagcagagga

SEQ ID NO: 1429598 - RNA, 19 nt, Artificial Sequence
  Description of Artificial Sequence: Synthetic oligonucleotide
agaagagcccuagugccug

SEQ ID NO: 1429599 - RNA, 19 nt, Artificial Sequence
  Description of Artificial Sequence: Synthetic oligonucleotide
ucucagacagcgugaacuu

SEQ ID NO: 1429600 - RNA, 19 nt, Artificial Sequence
  Description of Artificial Sequence: Synthetic oligonucleotide
ggaguucuuagaaagucac

SEQ ID NO: 1429601 - RNA, 19 nt, Artificial Sequence
  Description of Artificial Sequence: Synthetic oligonucleotide
gguauagcgguugggcugg

SEQ ID NO: 1429602 - RNA, 19 nt, Artificial Sequence
  Description of Artificial Sequence: Synthetic oligonucleotide
cuccguguugcccugcaug

SEQ ID NO: 1429603 - RNA, 19 nt, Artificial Sequence
  Description of Artificial Sequence: Synthetic oligonucleotide
ggaagcuuugguucgacaa

SEQ ID NO: 1429604 - RNA, 19 nt, Artificial Sequence
  Description of Artificial Sequence: Synthetic oligonucleotide
aguucuuaucagccccaug

SEQ ID NO: 1429605 - RNA, 19 nt, Artificial Sequence
  Description of Artificial Sequence: Synthetic oligonucleotide
gauguaguagaggccguuc

SEQ ID NO: 1429606 - RNA, 19 nt, Artificial Sequence
  Description of Artificial Sequence: Synthetic oligonucleotide
cacagaagucaaacaccag

SEQ ID NO: 1429607 - RNA, 19 nt, Artificial Sequence
  Description of Artificial Sequence: Synthetic oligonucleotide
uggcuaggcugaaggcacg

SEQ ID NO: 1429608 - RNA, 19 nt, Artificial Sequence
  Description of Artificial Sequence: Synthetic oligonucleotide
auacucaaacauagacguc

SEQ ID NO: 1429609 - RNA, 19 nt, Artificial Sequence
  Description of Artificial Sequence: Synthetic oligonucleotide
cucaaacauagacgucaag

SEQ ID NO: 1429610 - RNA, 19 nt, Artificial Sequence
  Description of Artificial Sequence: Synthetic oligonucleotide
ugguucgacaaaucucaau

SEQ ID NO: 1429611 - RNA, 19 nt, Artificial Sequence
  Description of Artificial Sequence: Synthetic oligonucleotide
uuguuccuguggauguagu

SEQ ID NO: 1429612 - RNA, 19 nt, Artificial Sequence
  Description of Artificial Sequence: Synthetic oligonucleotide
caaggucaugcucacagaa

SEQ ID NO: 1429613 - RNA, 19 nt, Artificial Sequence
  Description of Artificial Sequence: Synthetic oligonucleotide
aggaguucuuagaaaguca

SEQ ID NO: 1429614 - RNA, 19 nt, Artificial Sequence
  Description of Artificial Sequence: Synthetic oligonucleotide
uucggcucugguugguaga

SEQ ID NO: 1429615 - RNA, 19 nt, Artificial Sequence
  Description of Artificial Sequence: Synthetic oligonucleotide
ugaucucagacagcgugaa

SEQ ID NO: 1429616 - RNA, 19 nt, Artificial Sequence
  Description of Artificial Sequence: Synthetic oligonucleotide
ugguggugcuagauacuca

SEQ ID NO: 1429617 - RNA, 19 nt, Artificial Sequence
  Description of Artificial Sequence: Synthetic oligonucleotide
uccgagcaacagcucuggg

SEQ ID NO: 1429618 - RNA, 19 nt, Artificial Sequence
  Description of Artificial Sequence: Synthetic oligonucleotide
uuaccaccucacuuccugu

SEQ ID NO: 1429619 - RNA, 19 nt, Artificial Sequence
  Description of Artificial Sequence: Synthetic oligonucleotide
guucgacaaaucucaauua

SEQ ID NO: 1429620 - RNA, 19 nt, Artificial Sequence
  Description of Artificial Sequence: Synthetic oligonucleotide
ucguguuucaggagcugua

SEQ ID NO: 1429621 - RNA, 19 nt, Artificial Sequence
  Description of Artificial Sequence: Synthetic oligonucleotide
ccgcuuuuggccuuugacc

SEQ ID NO: 1429622 - RNA, 19 nt, Artificial Sequence
  Description of Artificial Sequence: Synthetic oligonucleotide
cuguaauagggaaccccuc

SEQ ID NO: 1429623 - RNA, 19 nt, Artificial Sequence
  Description of Artificial Sequence: Synthetic oligonucleotide
cgugaacuuuacuaagacg

SEQ ID NO: 1429624 - RNA, 19 nt, Artificial Sequence
  Description of Artificial Sequence: Synthetic oligonucleotide
aucuggcuaaguuuucgua

SEQ ID NO: 1429625 - RNA, 19 nt, Artificial Sequence
  Description of Artificial Sequence: Synthetic oligonucleotide
cuucagccgguccuucacc

SEQ ID NO: 1429626 - RNA, 19 nt, Artificial Sequence
  Description of Artificial Sequence: Synthetic oligonucleotide
caaugggugggccguaguc

SEQ ID NO: 1429627 - RNA, 19 nt, Artificial Sequence
  Description of Artificial Sequence: Synthetic oligonucleotide
agcgugaacuuuacuaaga

SEQ ID NO: 1429628 - RNA, 19 nt, Artificial Sequence
  Description of Artificial Sequence: Synthetic oligonucleotide
gguucgacaaaucucaauu

SEQ ID NO: 1429629 - RNA, 19 nt, Artificial Sequence
  Description of Artificial Sequence: Synthetic oligonucleotide
cuagugccugccucagaag

SEQ ID NO: 1429630 - RNA, 19 nt, Artificial Sequence
  Description of Artificial Sequence: Synthetic oligonucleotide
uggccgaucuggcuaaguu

SEQ ID NO: 1429631 - RNA, 19 nt, Artificial Sequence
  Description of Artificial Sequence: Synthetic oligonucleotide
gugcuagauacucaaacau

SEQ ID NO: 1429632 - RNA, 19 nt, Artificial Sequence
  Description of Artificial Sequence: Synthetic oligonucleotide
cagacagcgugaacuuuac

SEQ ID NO: 1429633 - RNA, 19 nt, Artificial Sequence
  Description of Artificial Sequence: Synthetic oligonucleotide
ucgugccaggaguucuuag

SEQ ID NO: 1429634 - RNA, 19 nt, Artificial Sequence
  Description of Artificial Sequence: Synthetic oligonucleotide
gacaaaucucaauuagguu

SEQ ID NO: 1429635 - RNA, 19 nt, Artificial Sequence
  Description of Artificial Sequence: Synthetic oligonucleotide
uugucuacguuuggccaca

SEQ ID NO: 1429636 - RNA, 19 nt, Artificial Sequence
  Description of Artificial Sequence: Synthetic oligonucleotide
uggcuaaguuuucguauuu

SEQ ID NO: 1429637 - RNA, 19 nt, Artificial Sequence
  Description of Artificial Sequence: Synthetic oligonucleotide
uugguucgacaaaucucaa

SEQ ID NO: 1429638 - RNA, 19 nt, Artificial Sequence
  Description of Artificial Sequence: Synthetic oligonucleotide
cuaagacguugcucagcag

SEQ ID NO: 1429639 - RNA, 19 nt, Artificial Sequence
  Description of Artificial Sequence: Synthetic oligonucleotide
gguggugcuagauacucaa

SEQ ID NO: 1429640 - RNA, 19 nt, Artificial Sequence
  Description of Artificial Sequence: Synthetic oligonucleotide
ccgcaaggcuguaauaggg

SEQ ID NO: 1429641 - RNA, 19 nt, Artificial Sequence
  Description of Artificial Sequence: Synthetic oligonucleotide
guaauagggaaccccuccu

SEQ ID NO: 1429642 - RNA, 19 nt, Artificial Sequence
  Description of Artificial Sequence: Synthetic oligonucleotide
ccuguccaagcugagaccc

SEQ ID NO: 1429643 - RNA, 19 nt, Artificial Sequence
  Description of Artificial Sequence: Synthetic oligonucleotide
uguccaagcugagacccuc

SEQ ID NO: 1429644 - RNA, 19 nt, Artificial Sequence
  Description of Artificial Sequence: Synthetic oligonucleotide
gaggccguucagcagcauc

SEQ ID NO: 1429645 - RNA, 19 nt, Artificial Sequence
  Description of Artificial Sequence: Synthetic oligonucleotide
gaguucuuagaaagucaca

SEQ ID NO: 1429646 - RNA, 19 nt, Artificial Sequence
  Description of Artificial Sequence: Synthetic oligonucleotide
gaucuggcuaaguuuucgu

SEQ ID NO: 1429647 - RNA, 19 nt, Artificial Sequence
  Description of Artificial Sequence: Synthetic oligonucleotide
gcgugaacuuuacuaagac

SEQ ID NO: 1429648 - RNA, 19 nt, Artificial Sequence
  Description of Artificial Sequence: Synthetic oligonucleotide
aggcuguaauagggaaccc

SEQ ID NO: 1429649 - RNA, 19 nt, Artificial Sequence
  Description of Artificial Sequence: Synthetic oligonucleotide
aggagcuguagaaucuuga

SEQ ID NO: 1429650 - RNA, 19 nt, Artificial Sequence
  Description of Artificial Sequence: Synthetic oligonucleotide
gucaugguugagggcgucg

SEQ ID NO: 1429651 - RNA, 19 nt, Artificial Sequence
  Description of Artificial Sequence: Synthetic oligonucleotide
ucguugugcaggguccagc

SEQ ID NO: 1429652 - RNA, 19 nt, Artificial Sequence
  Description of Artificial Sequence: Synthetic oligonucleotide
agcccuagugccugccuca

SEQ ID NO: 1429653 - RNA, 19 nt, Artificial Sequence
  Description of Artificial Sequence: Synthetic oligonucleotide
gugccaggaguucuuagaa

SEQ ID NO: 1429654 - RNA, 19 nt, Artificial Sequence
  Description of Artificial Sequence: Synthetic oligonucleotide
accuaagaagagcccuagu

SEQ ID NO: 1429655 - RNA, 19 nt, Artificial Sequence
  Description of Artificial Sequence: Synthetic oligonucleotide
aggccuuuaccaccucacu

SEQ ID NO: 1429656 - RNA, 19 nt, Artificial Sequence
  Description of Artificial Sequence: Synthetic oligonucleotide
caccacucgguugguauag

SEQ ID NO: 1429657 - RNA, 19 nt, Artificial Sequence
  Description of Artificial Sequence: Synthetic oligonucleotide
ugggugggccguagucccg

SEQ ID NO: 1429658 - RNA, 19 nt, Artificial Sequence
  Description of Artificial Sequence: Synthetic oligonucleotide
agacgucaaguggguagac

SEQ ID NO: 1429659 - RNA, 19 nt, Artificial Sequence
  Description of Artificial Sequence: Synthetic oligonucleotide
ucgucacugucaauucguu

SEQ ID NO: 1429660 - RNA, 19 nt, Artificial Sequence
  Description of Artificial Sequence: Synthetic oligonucleotide
agggcgucgucacugucaa

SEQ ID NO: 1429661 - RNA, 19 nt, Artificial Sequence
  Description of Artificial Sequence: Synthetic oligonucleotide
agcauaggggucacguaca

SEQ ID NO: 1429662 - RNA, 19 nt, Artificial Sequence
  Description of Artificial Sequence: Synthetic oligonucleotide
ucggcucugguugguagac

SEQ ID NO: 1429663 - RNA, 19 nt, Artificial Sequence
  Description of Artificial Sequence: Synthetic oligonucleotide
gccaaaaguagcccauuuc

SEQ ID NO: 1429664 - RNA, 19 nt, Artificial Sequence
  Description of Artificial Sequence: Synthetic oligonucleotide
uucguugugcaggguccag

SEQ ID NO: 1429665 - RNA, 19 nt, Artificial Sequence
  Description of Artificial Sequence: Synthetic oligonucleotide
ugugcccuccucccaucgu

SEQ ID NO: 1429666 - RNA, 19 nt, Artificial Sequence
  Description of Artificial Sequence: Synthetic oligonucleotide
augaugcacccagcacccc

SEQ ID NO: 1429667 - RNA, 19 nt, Artificial Sequence
  Description of Artificial Sequence: Synthetic oligonucleotide
ugcucgaggucugccaaaa

SEQ ID NO: 1429668 - RNA, 19 nt, Artificial Sequence
  Description of Artificial Sequence: Synthetic oligonucleotide
ggucugaccagaagaaguc

SEQ ID NO: 1429669 - RNA, 19 nt, Artificial Sequence
  Description of Artificial Sequence: Synthetic oligonucleotide
agacagcgugaacuuuacu

SEQ ID NO: 1429670 - RNA, 19 nt, Artificial Sequence
  Description of Artificial Sequence: Synthetic oligonucleotide
gagcuguagaaucuugauu

SEQ ID NO: 1429671 - RNA, 19 nt, Artificial Sequence
  Description of Artificial Sequence: Synthetic oligonucleotide
cccgcaaggcuguaauagg

SEQ ID NO: 1429672 - RNA, 19 nt, Artificial Sequence
  Description of Artificial Sequence: Synthetic oligonucleotide
gacgucaaguggguagaca

SEQ ID NO: 1429673 - RNA, 19 nt, Artificial Sequence
  Description of Artificial Sequence: Synthetic oligonucleotide
cagugggugaggccuuuac

SEQ ID NO: 1429674 - RNA, 19 nt, Artificial Sequence
  Description of Artificial Sequence: Synthetic oligonucleotide
cuacccuuucgucguggug

SEQ ID NO: 1429675 - RNA, 19 nt, Artificial Sequence
  Description of Artificial Sequence: Synthetic oligonucleotide
ccacucgguugguauagcg

SEQ ID NO: 1429676 - RNA, 19 nt, Artificial Sequence
  Description of Artificial Sequence: Synthetic oligonucleotide
gagggcgucgucacuguca

SEQ ID NO: 1429677 - RNA, 19 nt, Artificial Sequence
  Description of Artificial Sequence: Synthetic oligonucleotide
cgcaaaacgggcauuccac

SEQ ID NO: 1429678 - RNA, 19 nt, Artificial Sequence
  Description of Artificial Sequence: Synthetic oligonucleotide
ggcuaaguuuucguauuug

SEQ ID NO: 1429679 - RNA, 19 nt, Artificial Sequence
  Description of Artificial Sequence: Synthetic oligonucleotide
gguugguauagcgguuggg

SEQ ID NO: 1429680 - RNA, 19 nt, Artificial Sequence
  Description of Artificial Sequence: Synthetic oligonucleotide
cugagucguacugcuuggc

SEQ ID NO: 1429681 - RNA, 19 nt, Artificial Sequence
  Description of Artificial Sequence: Synthetic oligonucleotide
auacugcccuugcaacggu

SEQ ID NO: 1429682 - RNA, 19 nt, Artificial Sequence
  Description of Artificial Sequence: Synthetic oligonucleotide
acccuuucgucgugguggu

SEQ ID NO: 1429683 - RNA, 19 nt, Artificial Sequence
  Description of Artificial Sequence: Synthetic oligonucleotide
gucacguacauaggccuuc

SEQ ID NO: 1429684 - RNA, 19 nt, Artificial Sequence
  Description of Artificial Sequence: Synthetic oligonucleotide
agucaugguugagggcguc

SEQ ID NO: 1429685 - RNA, 19 nt, Artificial Sequence
  Description of Artificial Sequence: Synthetic oligonucleotide
aggaagcaaucuaccacca

SEQ ID NO: 1429686 - RNA, 19 nt, Artificial Sequence
  Description of Artificial Sequence: Synthetic oligonucleotide
auucguugugcagggucca

SEQ ID NO: 1429687 - RNA, 19 nt, Artificial Sequence
  Description of Artificial Sequence: Synthetic oligonucleotide
gagacccuccagagagggg

SEQ ID NO: 1429688 - RNA, 19 nt, Artificial Sequence
  Description of Artificial Sequence: Synthetic oligonucleotide
ccaccaaccuaagaagagc

SEQ ID NO: 1429689 - RNA, 19 nt, Artificial Sequence
  Description of Artificial Sequence: Synthetic oligonucleotide
ugccuuggccgaucuggcu

SEQ ID NO: 1429690 - RNA, 19 nt, Artificial Sequence
  Description of Artificial Sequence: Synthetic oligonucleotide
caaccuaagaagagcccua

SEQ ID NO: 1429691 - RNA, 19 nt, Artificial Sequence
  Description of Artificial Sequence: Synthetic oligonucleotide
auggccgccuccagcgcgc

SEQ ID NO: 1429692 - RNA, 19 nt, Artificial Sequence
  Description of Artificial Sequence: Synthetic oligonucleotide
caugcucgaggucugccaa

SEQ ID NO: 1429693 - RNA, 19 nt, Artificial Sequence
  Description of Artificial Sequence: Synthetic oligonucleotide
gucuacguuuggccacacc

SEQ ID NO: 1429694 - RNA, 19 nt, Artificial Sequence
  Description of Artificial Sequence: Synthetic oligonucleotide
cgauaaaauucuccuuuug

SEQ ID NO: 1429695 - RNA, 19 nt, Artificial Sequence
  Description of Artificial Sequence: Synthetic oligonucleotide
cacguacauaggccuucag

SEQ ID NO: 1429696 - RNA, 19 nt, Artificial Sequence
  Description of Artificial Sequence: Synthetic oligonucleotide
ugagggcgucgucacuguc

SEQ ID NO: 1429697 - RNA, 19 nt, Artificial Sequence
  Description of Artificial Sequence: Synthetic oligonucleotide
cuggcuacccuuucgucgu

SEQ ID NO: 1429698 - RNA, 19 nt, Artificial Sequence
  Description of Artificial Sequence: Synthetic oligonucleotide
uacugcccuugcaacgguu

SEQ ID NO: 1429699 - RNA, 19 nt, Artificial Sequence
  Description of Artificial Sequence: Synthetic oligonucleotide
ggucugccaaaaguagccc

SEQ ID NO: 1429700 - RNA, 19 nt, Artificial Sequence
  Description of Artificial Sequence: Synthetic oligonucleotide
uucccgcaaggcuguaaua

SEQ ID NO: 1429701 - RNA, 19 nt, Artificial Sequence
  Description of Artificial Sequence: Synthetic oligonucleotide
agcaccccacaggucaaug

SEQ ID NO: 1429702 - RNA, 19 nt, Artificial Sequence
  Description of Artificial Sequence: Synthetic oligonucleotide
gucgucacugucaauucgu

SEQ ID NO: 1429703 - RNA, 19 nt, Artificial Sequence
  Description of Artificial Sequence: Synthetic oligonucleotide
ucaucgcaaaacgggcauu

SEQ ID NO: 1429704 - RNA, 19 nt, Artificial Sequence
  Description of Artificial Sequence: Synthetic oligonucleotide
cgacaaaucucaauuaggu

SEQ ID NO: 1429705 - RNA, 19 nt, Artificial Sequence
  Description of Artificial Sequence: Synthetic oligonucleotide
uggcuacccuuucgucgug

SEQ ID NO: 1429706 - RNA, 19 nt, Artificial Sequence
  Description of Artificial Sequence: Synthetic oligonucleotide
caugcccuuuaggucugag

SEQ ID NO: 1429707 - RNA, 19 nt, Artificial Sequence
  Description of Artificial Sequence: Synthetic oligonucleotide
cuggcuaaguuuucguauu

SEQ ID NO: 1429708 - RNA, 19 nt, Artificial Sequence
  Description of Artificial Sequence: Synthetic oligonucleotide
cagaagacacgcucaaauu

SEQ ID NO: 1429709 - RNA, 19 nt, Artificial Sequence
  Description of Artificial Sequence: Synthetic oligonucleotide
ucucauccccaggcagggc

SEQ ID NO: 1429710 - RNA, 19 nt, Artificial Sequence
  Description of Artificial Sequence: Synthetic oligonucleotide
gggcauuccacugagucgu

SEQ ID NO: 1429711 - RNA, 19 nt, Artificial Sequence
  Description of Artificial Sequence: Synthetic oligonucleotide
guccaagcugagacccucc

SEQ ID NO: 1429712 - RNA, 19 nt, Artificial Sequence
  Description of Artificial Sequence: Synthetic oligonucleotide
ggcuaggcugaaggcacgg

SEQ ID NO: 1429713 - RNA, 19 nt, Artificial Sequence
  Description of Artificial Sequence: Synthetic oligonucleotide
gggucacguacauaggccu

SEQ ID NO: 1429714 - RNA, 19 nt, Artificial Sequence
  Description of Artificial Sequence: Synthetic oligonucleotide
cgucgucacugucaauucg

SEQ ID NO: 1429715 - RNA, 19 nt, Artificial Sequence
  Description of Artificial Sequence: Synthetic oligonucleotide
ugcccuugcaacgguuaua

SEQ ID NO: 1429716 - RNA, 19 nt, Artificial Sequence
  Description of Artificial Sequence: Synthetic oligonucleotide
cgucaaguggguagacagc

SEQ ID NO: 1429717 - RNA, 19 nt, Artificial Sequence
  Description of Artificial Sequence: Synthetic oligonucleotide
gaccccaucccgggugaug

SEQ ID NO: 1429718 - RNA, 19 nt, Artificial Sequence
  Description of Artificial Sequence: Synthetic oligonucleotide
auuucccgcaaggcuguaa

SEQ ID NO: 1429719 - RNA, 19 nt, Artificial Sequence
  Description of Artificial Sequence: Synthetic oligonucleotide
cucaucgcaaaacgggcau

SEQ ID NO: 1429720 - RNA, 19 nt, Artificial Sequence
  Description of Artificial Sequence: Synthetic oligonucleotide
acugcccuugcaacgguua

SEQ ID NO: 1429721 - RNA, 19 nt, Artificial Sequence
  Description of Artificial Sequence: Synthetic oligonucleotide
ucaugucccugugcaggau

SEQ ID NO: 1429722 - RNA, 19 nt, Artificial Sequence
  Description of Artificial Sequence: Synthetic oligonucleotide
gcuaggcugaaggcacggg

SEQ ID NO: 1429723 - RNA, 19 nt, Artificial Sequence
  Description of Artificial Sequence: Synthetic oligonucleotide
gggcauggggucugaccag

SEQ ID NO: 1429724 - RNA, 19 nt, Artificial Sequence
  Description of Artificial Sequence: Synthetic oligonucleotide
acguuuggccacaccucug

SEQ ID NO: 1429725 - RNA, 19 nt, Artificial Sequence
  Description of Artificial Sequence: Synthetic oligonucleotide
cguguuucaggagcuguag

SEQ ID NO: 1429726 - RNA, 19 nt, Artificial Sequence
  Description of Artificial Sequence: Synthetic oligonucleotide
ggcugggaauggugagggg

SEQ ID NO: 1429727 - RNA, 19 nt, Artificial Sequence
  Description of Artificial Sequence: Synthetic oligonucleotide
gcaaaacgggcauuccacu

SEQ ID NO: 1429728 - RNA, 19 nt, Artificial Sequence
  Description of Artificial Sequence: Synthetic oligonucleotide
ggaagcaaucuaccaccaa

SEQ ID NO: 1429729 - RNA, 19 nt, Artificial Sequence
  Description of Artificial Sequence: Synthetic oligonucleotide
caaugagguccagagcaua

SEQ ID NO: 1429730 - RNA, 19 nt, Artificial Sequence
  Description of Artificial Sequence: Synthetic oligonucleotide
ugucuacguuuggccacac

SEQ ID NO: 1429731 - RNA, 19 nt, Artificial Sequence
  Description of Artificial Sequence: Synthetic oligonucleotide
ggcuacccuuucgucgugg

SEQ ID NO: 1429732 - RNA, 19 nt, Artificial Sequence
  Description of Artificial Sequence: Synthetic oligonucleotide
gucccgcucuccgagcaac

SEQ ID NO: 1429733 - RNA, 19 nt, Artificial Sequence
  Description of Artificial Sequence: Synthetic oligonucleotide
cuuucgucgugguggugcu

SEQ ID NO: 1429734 - RNA, 19 nt, Artificial Sequence
  Description of Artificial Sequence: Synthetic oligonucleotide
uccucccaucgugccagga

SEQ ID NO: 1429735 - RNA, 19 nt, Artificial Sequence
  Description of Artificial Sequence: Synthetic oligonucleotide
gcgucgucacugucaauuc

SEQ ID NO: 1429736 - RNA, 19 nt, Artificial Sequence
  Description of Artificial Sequence: Synthetic oligonucleotide
caccuuccgcuuuuggccu

SEQ ID NO: 1429737 - RNA, 19 nt, Artificial Sequence
  Description of Artificial Sequence: Synthetic oligonucleotide
gcugcgaguccacaucucu

SEQ ID NO: 1429738 - RNA, 19 nt, Artificial Sequence
  Description of Artificial Sequence: Synthetic oligonucleotide
agucccgcucuccgagcaa

SEQ ID NO: 1429739 - RNA, 19 nt, Artificial Sequence
  Description of Artificial Sequence: Synthetic oligonucleotide
ccaucccgggugaugagca

SEQ ID NO: 1429740 - RNA, 19 nt, Artificial Sequence
  Description of Artificial Sequence: Synthetic oligonucleotide
cauagacgucaagugggua

SEQ ID NO: 1429741 - RNA, 19 nt, Artificial Sequence
  Description of Artificial Sequence: Synthetic oligonucleotide
gugugccuuggccgaucug

SEQ ID NO: 1429742 - RNA, 19 nt, Artificial Sequence
  Description of Artificial Sequence: Synthetic oligonucleotide
ccuccagagaggggcaggc

SEQ ID NO: 1429743 - RNA, 19 nt, Artificial Sequence
  Description of Artificial Sequence: Synthetic oligonucleotide
ggcgucgucacugucaauu

SEQ ID NO: 1429744 - RNA, 19 nt, Artificial Sequence
  Description of Artificial Sequence: Synthetic oligonucleotide
cugguugguaguggcugga

SEQ ID NO: 1429745 - RNA, 19 nt, Artificial Sequence
  Description of Artificial Sequence: Synthetic oligonucleotide
gauuucggcucugguuggu

SEQ ID NO: 1429746 - RNA, 19 nt, Artificial Sequence
  Description of Artificial Sequence: Synthetic oligonucleotide
gguugguagacugcugggu

SEQ ID NO: 1429747 - RNA, 19 nt, Artificial Sequence
  Description of Artificial Sequence: Synthetic oligonucleotide
cccuugcaacgguuauagg

SEQ ID NO: 1429748 - RNA, 19 nt, Artificial Sequence
  Description of Artificial Sequence: Synthetic oligonucleotide
aucgugccaggaguucuua

SEQ ID NO: 1429749 - RNA, 19 nt, Artificial Sequence
  Description of Artificial Sequence: Synthetic oligonucleotide
ccaaccuaagaagagcccu

SEQ ID NO: 1429750 - RNA, 19 nt, Artificial Sequence
  Description of Artificial Sequence: Synthetic oligonucleotide
cccaucccgggugaugagc

SEQ ID NO: 1429751 - RNA, 19 nt, Artificial Sequence
  Description of Artificial Sequence: Synthetic oligonucleotide
guggugcuagauacucaaa

SEQ ID NO: 1429752 - RNA, 19 nt, Artificial Sequence
  Description of Artificial Sequence: Synthetic oligonucleotide
uuucgucgugguggugcua

SEQ ID NO: 1429753 - RNA, 19 nt, Artificial Sequence
  Description of Artificial Sequence: Synthetic oligonucleotide
cgcaaggcuguaauaggga

SEQ ID NO: 1429754 - RNA, 19 nt, Artificial Sequence
  Description of Artificial Sequence: Synthetic oligonucleotide
gaguucuuaucagccccau

SEQ ID NO: 1429755 - RNA, 19 nt, Artificial Sequence
  Description of Artificial Sequence: Synthetic oligonucleotide
uggcuggauuucggcucug

SEQ ID NO: 1429756 - RNA, 19 nt, Artificial Sequence
  Description of Artificial Sequence: Synthetic oligonucleotide
gccgguccuucaccuuccg

SEQ ID NO: 1429757 - RNA, 19 nt, Artificial Sequence
  Description of Artificial Sequence: Synthetic oligonucleotide
cauaggggucacguacaua

SEQ ID NO: 1429758 - RNA, 19 nt, Artificial Sequence
  Description of Artificial Sequence: Synthetic oligonucleotide
gccgaucuggcuaaguuuu

SEQ ID NO: 1429759 - RNA, 19 nt, Artificial Sequence
  Description of Artificial Sequence: Synthetic oligonucleotide
ccgaucuggcuaaguuuuc

SEQ ID NO: 1429760 - RNA, 19 nt, Artificial Sequence
  Description of Artificial Sequence: Synthetic oligonucleotide
gggugggccguagucccgc

SEQ ID NO: 1429761 - RNA, 19 nt, Artificial Sequence
  Description of Artificial Sequence: Synthetic oligonucleotide
gugggccguagucccgcuc

SEQ ID NO: 1429762 - RNA, 19 nt, Artificial Sequence
  Description of Artificial Sequence: Synthetic oligonucleotide
ggccgaucuggcuaaguuu

SEQ ID NO: 1429763 - RNA, 19 nt, Artificial Sequence
  Description of Artificial Sequence: Synthetic oligonucleotide
ggggaagcuuugguucgac

SEQ ID NO: 1429764 - RNA, 19 nt, Artificial Sequence
  Description of Artificial Sequence: Synthetic oligonucleotide
gggcugcgaguccacaucu

SEQ ID NO: 1429765 - RNA, 19 nt, Artificial Sequence
  Description of Artificial Sequence: Synthetic oligonucleotide
ccuuggccgaucuggcuaa

SEQ ID NO: 1429766 - RNA, 19 nt, Artificial Sequence
  Description of Artificial Sequence: Synthetic oligonucleotide
ccgguccuucaccuuccgc

SEQ ID NO: 1429767 - RNA, 19 nt, Artificial Sequence
  Description of Artificial Sequence: Synthetic oligonucleotide
gcccuagugccugccucag

SEQ ID NO: 1429768 - RNA, 19 nt, Artificial Sequence
  Description of Artificial Sequence: Synthetic oligonucleotide
caucgugccaggaguucuu

SEQ ID NO: 1429769 - RNA, 19 nt, Artificial Sequence
  Description of Artificial Sequence: Synthetic oligonucleotide
ggugugccuuggccgaucu

SEQ ID NO: 1429770 - RNA, 19 nt, Artificial Sequence
  Description of Artificial Sequence: Synthetic oligonucleotide
gcuacccuuucgucguggu

SEQ ID NO: 1429771 - RNA, 19 nt, Artificial Sequence
  Description of Artificial Sequence: Synthetic oligonucleotide
gcauaggggucacguacau

SEQ ID NO: 1429772 - RNA, 19 nt, Artificial Sequence
  Description of Artificial Sequence: Synthetic oligonucleotide
caauuagguugaccacauu

SEQ ID NO: 1429773 - RNA, 19 nt, Artificial Sequence
  Description of Artificial Sequence: Synthetic oligonucleotide
cucagacagcgugaacuuu

SEQ ID NO: 1429774 - RNA, 19 nt, Artificial Sequence
  Description of Artificial Sequence: Synthetic oligonucleotide
ggcugcgaguccacaucuc

SEQ ID NO: 1429775 - RNA, 19 nt, Artificial Sequence
  Description of Artificial Sequence: Synthetic oligonucleotide
agaccccaucccgggugau

SEQ ID NO: 1429776 - RNA, 19 nt, Artificial Sequence
  Description of Artificial Sequence: Synthetic oligonucleotide
ccccaucccgggugaugag

SEQ ID NO: 1429777 - RNA, 19 nt, Artificial Sequence
  Description of Artificial Sequence: Synthetic oligonucleotide
ggauguaguagaggccguu

SEQ ID NO: 1429778 - RNA, 19 nt, Artificial Sequence
  Description of Artificial Sequence: Synthetic oligonucleotide
gggccguagucccgcucuc

SEQ ID NO: 1429779 - RNA, 19 nt, Artificial Sequence
  Description of Artificial Sequence: Synthetic oligonucleotide
ccguagucccgcucuccga

SEQ ID NO: 1429780 - RNA, 19 nt, Artificial Sequence
  Description of Artificial Sequence: Synthetic oligonucleotide
cugccaaaaguagcccauu

SEQ ID NO: 1429781 - RNA, 19 nt, Artificial Sequence
  Description of Artificial Sequence: Synthetic oligonucleotide
gccgccgccgccgccgccc

SEQ ID NO: 1429782 - RNA, 19 nt, Artificial Sequence
  Description of Artificial Sequence: Synthetic oligonucleotide
ccccaugcucgaggucugc

SEQ ID NO: 1429783 - RNA, 19 nt, Artificial Sequence
  Description of Artificial Sequence: Synthetic oligonucleotide
cgugguggugcuagauacu

SEQ ID NO: 1429784 - RNA, 19 nt, Artificial Sequence
  Description of Artificial Sequence: Synthetic oligonucleotide
ggcauuccacugagucgua

SEQ ID NO: 1429785 - RNA, 19 nt, Artificial Sequence
  Description of Artificial Sequence: Synthetic oligonucleotide
cgcgccgccgccgccgccg

SEQ ID NO: 1429786 - RNA, 19 nt, Artificial Sequence
  Description of Artificial Sequence: Synthetic oligonucleotide
ccuuuaggucugagggcau

SEQ ID NO: 1429787 - RNA, 19 nt, Artificial Sequence
  Description of Artificial Sequence: Synthetic oligonucleotide
ggugggccguagucccgcu

SEQ ID NO: 1429788 - RNA, 19 nt, Artificial Sequence
  Description of Artificial Sequence: Synthetic oligonucleotide
cccuuucgucgugguggug

SEQ ID NO: 1429789 - RNA, 19 nt, Artificial Sequence
  Description of Artificial Sequence: Synthetic oligonucleotide
gcuccguguugcccugcau

SEQ ID NO: 1429790 - RNA, 19 nt, Artificial Sequence
  Description of Artificial Sequence: Synthetic oligonucleotide
cagcaccccacaggucaau

SEQ ID NO: 1429791 - RNA, 19 nt, Artificial Sequence
  Description of Artificial Sequence: Synthetic oligonucleotide
ccgccgccgccgccgcccg

SEQ ID NO: 1429792 - RNA, 19 nt, Artificial Sequence
  Description of Artificial Sequence: Synthetic oligonucleotide
gcgccgccgccgccgccgc

SEQ ID NO: 1429793 - RNA, 19 nt, Artificial Sequence
  Description of Artificial Sequence: Synthetic oligonucleotide
cgucgugguggugcuagau

SEQ ID NO: 1429794 - RNA, 19 nt, Artificial Sequence
  Description of Artificial Sequence: Synthetic oligonucleotide
gcgcgccgccgccgccgcc

SEQ ID NO: 1429795 - RNA, 19 nt, Artificial Sequence
  Description of Artificial Sequence: Synthetic oligonucleotide
cgccgccgccgccgccgcc

SEQ ID NO: 1429796 - RNA, 19 nt, Artificial Sequence
  Description of Artificial Sequence: Synthetic oligonucleotide
cgccgccgccgccgcccgc

SEQ ID NO: 1429797 - RNA, 19 nt, Artificial Sequence
  Description of Artificial Sequence: Synthetic oligonucleotide
aaagcuauuaauucuaacg

SEQ ID NO: 1429798 - RNA, 19 nt, Artificial Sequence
  Description of Artificial Sequence: Synthetic oligonucleotide
aagcuauuaauucuaacgc

SEQ ID NO: 1429799 - RNA, 19 nt, Artificial Sequence
  Description of Artificial Sequence: Synthetic oligonucleotide
auaaaauggagcuagcgcc

SEQ ID NO: 1429800 - RNA, 19 nt, Artificial Sequence
  Description of Artificial Sequence: Synthetic oligonucleotide
aaacaaaucaucucagaac

SEQ ID NO: 1429801 - RNA, 19 nt, Artificial Sequence
  Description of Artificial Sequence: Synthetic oligonucleotide
aaauuauuaaggcucuugg

SEQ ID NO: 1429802 - RNA, 19 nt, Artificial Sequence
  Description of Artificial Sequence: Synthetic oligonucleotide
caagguaaaauuauuaagg

SEQ ID NO: 1429803 - RNA, 19 nt, Artificial Sequence
  Description of Artificial Sequence: Synthetic oligonucleotide
uguacuauacuuaaaauuc

SEQ ID NO: 1429804 - RNA, 19 nt, Artificial Sequence
  Description of Artificial Sequence: Synthetic oligonucleotide
auagauagagaguaugacc

SEQ ID NO: 1429805 - RNA, 19 nt, Artificial Sequence
  Description of Artificial Sequence: Synthetic oligonucleotide
auugcaagacuucagaaac

SEQ ID NO: 1429806 - RNA, 19 nt, Artificial Sequence
  Description of Artificial Sequence: Synthetic oligonucleotide
uuagaugcccuuaaggugg

SEQ ID NO: 1429807 - RNA, 19 nt, Artificial Sequence
  Description of Artificial Sequence: Synthetic oligonucleotide
aaaauagacccgcaaugcc

SEQ ID NO: 1429808 - RNA, 19 nt, Artificial Sequence
  Description of Artificial Sequence: Synthetic oligonucleotide
uuuaaagcaaugaugugag

SEQ ID NO: 1429809 - RNA, 19 nt, Artificial Sequence
  Description of Artificial Sequence: Synthetic oligonucleotide
uuaauucuaacgcaugucc

SEQ ID NO: 1429810 - RNA, 19 nt, Artificial Sequence
  Description of Artificial Sequence: Synthetic oligonucleotide
gguauauguacauaaaugg

SEQ ID NO: 1429811 - RNA, 19 nt, Artificial Sequence
  Description of Artificial Sequence: Synthetic oligonucleotide
uguauuauauguacuauac

SEQ ID NO: 1429812 - RNA, 19 nt, Artificial Sequence
  Description of Artificial Sequence: Synthetic oligonucleotide
auaauauagaucuguauug

SEQ ID NO: 1429813 - RNA, 19 nt, Artificial Sequence
  Description of Artificial Sequence: Synthetic oligonucleotide
auuauuaaggcucuuggug

SEQ ID NO: 1429814 - RNA, 19 nt, Artificial Sequence
  Description of Artificial Sequence: Synthetic oligonucleotide
ucaagguaaaauuauuaag

SEQ ID NO: 1429815 - RNA, 19 nt, Artificial Sequence
  Description of Artificial Sequence: Synthetic oligonucleotide
uauuauauguacuauacuu

SEQ ID NO: 1429816 - RNA, 19 nt, Artificial Sequence
  Description of Artificial Sequence: Synthetic oligonucleotide
acuaauuauguuccagugc

SEQ ID NO: 1429817 - RNA, 19 nt, Artificial Sequence
  Description of Artificial Sequence: Synthetic oligonucleotide
ugguauauguacauaaaug

SEQ ID NO: 1429818 - RNA, 19 nt, Artificial Sequence
  Description of Artificial Sequence: Synthetic oligonucleotide
aguaugaccuaguuaauuc

SEQ ID NO: 1429819 - RNA, 19 nt, Artificial Sequence
  Description of Artificial Sequence: Synthetic oligonucleotide
ucuaucuucaauuauuguc

SEQ ID NO: 1429820 - RNA, 19 nt, Artificial Sequence
  Description of Artificial Sequence: Synthetic oligonucleotide
uuaucaguuucauaaaucu

SEQ ID NO: 1429821 - RNA, 19 nt, Artificial Sequence
  Description of Artificial Sequence: Synthetic oligonucleotide
uuugauaauaaaguuauaa

SEQ ID NO: 1429822 - RNA, 19 nt, Artificial Sequence
  Description of Artificial Sequence: Synthetic oligonucleotide
gagaguaugaccuaguuaa

SEQ ID NO: 1429823 - RNA, 19 nt, Artificial Sequence
  Description of Artificial Sequence: Synthetic oligonucleotide
aaauagacccgcaaugccc

SEQ ID NO: 1429824 - RNA, 19 nt, Artificial Sequence
  Description of Artificial Sequence: Synthetic oligonucleotide
guuuccuaaaauuuuacug

SEQ ID NO: 1429825 - RNA, 19 nt, Artificial Sequence
  Description of Artificial Sequence: Synthetic oligonucleotide
aauuccccgaaacaaauca

SEQ ID NO: 1429826 - RNA, 19 nt, Artificial Sequence
  Description of Artificial Sequence: Synthetic oligonucleotide
gagaccaugguauaaagac

SEQ ID NO: 1429827 - RNA, 19 nt, Artificial Sequence
  Description of Artificial Sequence: Synthetic oligonucleotide
aaugauaguacaaaacugu

SEQ ID NO: 1429828 - RNA, 19 nt, Artificial Sequence
  Description of Artificial Sequence: Synthetic oligonucleotide
ucuguauugguauauguac

SEQ ID NO: 1429829 - RNA, 19 nt, Artificial Sequence
  Description of Artificial Sequence: Synthetic oligonucleotide
aguuucauaaaucuaggga

SEQ ID NO: 1429830 - RNA, 19 nt, Artificial Sequence
  Description of Artificial Sequence: Synthetic oligonucleotide
acuacuacagaguuuagga

SEQ ID NO: 1429831 - RNA, 19 nt, Artificial Sequence
  Description of Artificial Sequence: Synthetic oligonucleotide
aaaccuuuaaauggacagc

SEQ ID NO: 1429832 - RNA, 19 nt, Artificial Sequence
  Description of Artificial Sequence: Synthetic oligonucleotide
agagauuugguccuggucu

SEQ ID NO: 1429833 - RNA, 19 nt, Artificial Sequence
  Description of Artificial Sequence: Synthetic oligonucleotide
uaauauagaucuguauugg

SEQ ID NO: 1429834 - RNA, 19 nt, Artificial Sequence
  Description of Artificial Sequence: Synthetic oligonucleotide
ucaguuucauaaaucuagg

SEQ ID NO: 1429835 - RNA, 19 nt, Artificial Sequence
  Description of Artificial Sequence: Synthetic oligonucleotide
uacaauaaagggcuggcca

SEQ ID NO: 1429836 - RNA, 19 nt, Artificial Sequence
  Description of Artificial Sequence: Synthetic oligonucleotide
aauuauuaaggcucuuggu

SEQ ID NO: 1429837 - RNA, 19 nt, Artificial Sequence
  Description of Artificial Sequence: Synthetic oligonucleotide
aaaugauaguacaaaacug

SEQ ID NO: 1429838 - RNA, 19 nt, Artificial Sequence
  Description of Artificial Sequence: Synthetic oligonucleotide
guaaauaaagcugucagac

SEQ ID NO: 1429839 - RNA, 19 nt, Artificial Sequence
  Description of Artificial Sequence: Synthetic oligonucleotide
uaugguaaugacccucugg

SEQ ID NO: 1429840 - RNA, 19 nt, Artificial Sequence
  Description of Artificial Sequence: Synthetic oligonucleotide
uguguauauauaauauaga

SEQ ID NO: 1429841 - RNA, 19 nt, Artificial Sequence
  Description of Artificial Sequence: Synthetic oligonucleotide
auauguacuauacuuaaaa

SEQ ID NO: 1429842 - RNA, 19 nt, Artificial Sequence
  Description of Artificial Sequence: Synthetic oligonucleotide
ucaucucagaacaaaauau

SEQ ID NO: 1429843 - RNA, 19 nt, Artificial Sequence
  Description of Artificial Sequence: Synthetic oligonucleotide
uauuaauucuaacgcaugu

SEQ ID NO: 1429844 - RNA, 19 nt, Artificial Sequence
  Description of Artificial Sequence: Synthetic oligonucleotide
uguuaaguaaagugacagg

SEQ ID NO: 1429845 - RNA, 19 nt, Artificial Sequence
  Description of Artificial Sequence: Synthetic oligonucleotide
caagacuucagaaaccaag

SEQ ID NO: 1429846 - RNA, 19 nt, Artificial Sequence
  Description of Artificial Sequence: Synthetic oligonucleotide
uuauauguacuauacuuaa

SEQ ID NO: 1429847 - RNA, 19 nt, Artificial Sequence
  Description of Artificial Sequence: Synthetic oligonucleotide
gauaguacaaaacugugua

SEQ ID NO: 1429848 - RNA, 19 nt, Artificial Sequence
  Description of Artificial Sequence: Synthetic oligonucleotide
ucuugcauaguuacaauaa

SEQ ID NO: 1429849 - RNA, 19 nt, Artificial Sequence
  Description of Artificial Sequence: Synthetic oligonucleotide
ugagguuuggauguuaccc

SEQ ID NO: 1429850 - RNA, 19 nt, Artificial Sequence
  Description of Artificial Sequence: Synthetic oligonucleotide
uaugaccuaguuaauuccc

SEQ ID NO: 1429851 - RNA, 19 nt, Artificial Sequence
  Description of Artificial Sequence: Synthetic oligonucleotide
ucacaauggaacuauuuac

SEQ ID NO: 1429852 - RNA, 19 nt, Artificial Sequence
  Description of Artificial Sequence: Synthetic oligonucleotide
aagacgagagccgugggac

SEQ ID NO: 1429853 - RNA, 19 nt, Artificial Sequence
  Description of Artificial Sequence: Synthetic oligonucleotide
aggaaauagaguaugaacu

SEQ ID NO: 1429854 - RNA, 19 nt, Artificial Sequence
  Description of Artificial Sequence: Synthetic oligonucleotide
uaaguguuuccuaaaauuu

SEQ ID NO: 1429855 - RNA, 19 nt, Artificial Sequence
  Description of Artificial Sequence: Synthetic oligonucleotide
ugguguauauguauuauau

SEQ ID NO: 1429856 - RNA, 19 nt, Artificial Sequence
  Description of Artificial Sequence: Synthetic oligonucleotide
uauaaagacagcugugagu

SEQ ID NO: 1429857 - RNA, 19 nt, Artificial Sequence
  Description of Artificial Sequence: Synthetic oligonucleotide
uacccuaaauaaaagaaua

SEQ ID NO: 1429858 - RNA, 19 nt, Artificial Sequence
  Description of Artificial Sequence: Synthetic oligonucleotide
gacuaauuauguuccagug

SEQ ID NO: 1429859 - RNA, 19 nt, Artificial Sequence
  Description of Artificial Sequence: Synthetic oligonucleotide
uaugaacucugaaaggggu

SEQ ID NO: 1429860 - RNA, 19 nt, Artificial Sequence
  Description of Artificial Sequence: Synthetic oligonucleotide
ugauaguacaaaacugugu

SEQ ID NO: 1429861 - RNA, 19 nt, Artificial Sequence
  Description of Artificial Sequence: Synthetic oligonucleotide
uccuguuaaguaaagugac

SEQ ID NO: 1429862 - RNA, 19 nt, Artificial Sequence
  Description of Artificial Sequence: Synthetic oligonucleotide
auuacuacuacagaguuua

SEQ ID NO: 1429863 - RNA, 19 nt, Artificial Sequence
  Description of Artificial Sequence: Synthetic oligonucleotide
ucacuuagaaaaucucaag

SEQ ID NO: 1429864 - RNA, 19 nt, Artificial Sequence
  Description of Artificial Sequence: Synthetic oligonucleotide
acaguugacauugcaagac

SEQ ID NO: 1429865 - RNA, 19 nt, Artificial Sequence
  Description of Artificial Sequence: Synthetic oligonucleotide
auguacuauacuuaaaauu

SEQ ID NO: 1429866 - RNA, 19 nt, Artificial Sequence
  Description of Artificial Sequence: Synthetic oligonucleotide
cuuagaugcccuuaaggug

SEQ ID NO: 1429867 - RNA, 19 nt, Artificial Sequence
  Description of Artificial Sequence: Synthetic oligonucleotide
ucagaaaccaagugggaac

SEQ ID NO: 1429868 - RNA, 19 nt, Artificial Sequence
  Description of Artificial Sequence: Synthetic oligonucleotide
uaaaucuagggacuaaauu

SEQ ID NO: 1429869 - RNA, 19 nt, Artificial Sequence
  Description of Artificial Sequence: Synthetic oligonucleotide
uuuaaguguuuccuaaaau

SEQ ID NO: 1429870 - RNA, 19 nt, Artificial Sequence
  Description of Artificial Sequence: Synthetic oligonucleotide
ugacucaugucuguaaucc

SEQ ID NO: 1429871 - RNA, 19 nt, Artificial Sequence
  Description of Artificial Sequence: Synthetic oligonucleotide
ggaggcaccacauaaaaug

SEQ ID NO: 1429872 - RNA, 19 nt, Artificial Sequence
  Description of Artificial Sequence: Synthetic oligonucleotide
auaaagggcuggccaaugc

SEQ ID NO: 1429873 - RNA, 19 nt, Artificial Sequence
  Description of Artificial Sequence: Synthetic oligonucleotide
uguaacaguugacauugca

SEQ ID NO: 1429874 - RNA, 19 nt, Artificial Sequence
  Description of Artificial Sequence: Synthetic oligonucleotide
guaguagugggguaggggc

SEQ ID NO: 1429875 - RNA, 19 nt, Artificial Sequence
  Description of Artificial Sequence: Synthetic oligonucleotide
cuaguuaauuccccgaaac

SEQ ID NO: 1429876 - RNA, 19 nt, Artificial Sequence
  Description of Artificial Sequence: Synthetic oligonucleotide
uugguauauguacauaaau

SEQ ID NO: 1429877 - RNA, 19 nt, Artificial Sequence
  Description of Artificial Sequence: Synthetic oligonucleotide
auuaauucuaacgcauguc

SEQ ID NO: 1429878 - RNA, 19 nt, Artificial Sequence
  Description of Artificial Sequence: Synthetic oligonucleotide
uacuacagaguuuaggaau

SEQ ID NO: 1429879 - RNA, 19 nt, Artificial Sequence
  Description of Artificial Sequence: Synthetic oligonucleotide
aaauagaguaugaacucug

SEQ ID NO: 1429880 - RNA, 19 nt, Artificial Sequence
  Description of Artificial Sequence: Synthetic oligonucleotide
uagggacuaaauuucaggu

SEQ ID NO: 1429881 - RNA, 19 nt, Artificial Sequence
  Description of Artificial Sequence: Synthetic oligonucleotide
ucucaagguaaaauuauua

SEQ ID NO: 1429882 - RNA, 19 nt, Artificial Sequence
  Description of Artificial Sequence: Synthetic oligonucleotide
uaaaauggagcuagcgcca

SEQ ID NO: 1429883 - RNA, 19 nt, Artificial Sequence
  Description of Artificial Sequence: Synthetic oligonucleotide
guuuaaagcaaugauguga

SEQ ID NO: 1429884 - RNA, 19 nt, Artificial Sequence
  Description of Artificial Sequence: Synthetic oligonucleotide
uuaaaaccuuuaaauggac

SEQ ID NO: 1429885 - RNA, 19 nt, Artificial Sequence
  Description of Artificial Sequence: Synthetic oligonucleotide
uuugguccuggucuuuugg

SEQ ID NO: 1429886 - RNA, 19 nt, Artificial Sequence
  Description of Artificial Sequence: Synthetic oligonucleotide
acaguuagagaugaccgac

SEQ ID NO: 1429887 - RNA, 19 nt, Artificial Sequence
  Description of Artificial Sequence: Synthetic oligonucleotide
uuaauuccccgaaacaaau

SEQ ID NO: 1429888 - RNA, 19 nt, Artificial Sequence
  Description of Artificial Sequence: Synthetic oligonucleotide
cuuuaaauggacagcacca

SEQ ID NO: 1429889 - RNA, 19 nt, Artificial Sequence
  Description of Artificial Sequence: Synthetic oligonucleotide
cuguuaaguaaagugacag

SEQ ID NO: 1429890 - RNA, 19 nt, Artificial Sequence
  Description of Artificial Sequence: Synthetic oligonucleotide
uuagagaugaccgacuaau

SEQ ID NO: 1429891 - RNA, 19 nt, Artificial Sequence
  Description of Artificial Sequence: Synthetic oligonucleotide
caucucagaacaaaauaug

SEQ ID NO: 1429892 - RNA, 19 nt, Artificial Sequence
  Description of Artificial Sequence: Synthetic oligonucleotide
uaauucuaacgcauguccu

SEQ ID NO: 1429893 - RNA, 19 nt, Artificial Sequence
  Description of Artificial Sequence: Synthetic oligonucleotide
ucuagggacuaaauuucag

SEQ ID NO: 1429894 - RNA, 19 nt, Artificial Sequence
  Description of Artificial Sequence: Synthetic oligonucleotide
ugaccuaguuaauuccccg

SEQ ID NO: 1429895 - RNA, 19 nt, Artificial Sequence
  Description of Artificial Sequence: Synthetic oligonucleotide
uauguacuauacuuaaaau

SEQ ID NO: 1429896 - RNA, 19 nt, Artificial Sequence
  Description of Artificial Sequence: Synthetic oligonucleotide
aagccaaauuacuacuaca

SEQ ID NO: 1429897 - RNA, 19 nt, Artificial Sequence
  Description of Artificial Sequence: Synthetic oligonucleotide
aauucuaacgcauguccuu

SEQ ID NO: 1429898 - RNA, 19 nt, Artificial Sequence
  Description of Artificial Sequence: Synthetic oligonucleotide
gauagagaguaugaccuag

SEQ ID NO: 1429899 - RNA, 19 nt, Artificial Sequence
  Description of Artificial Sequence: Synthetic oligonucleotide
agggauugagguuuggaug

SEQ ID NO: 1429900 - RNA, 19 nt, Artificial Sequence
  Description of Artificial Sequence: Synthetic oligonucleotide
uacuacuacagaguuuagg

SEQ ID NO: 1429901 - RNA, 19 nt, Artificial Sequence
  Description of Artificial Sequence: Synthetic oligonucleotide
guacacacaagcuugcuca

SEQ ID NO: 1429902 - RNA, 19 nt, Artificial Sequence
  Description of Artificial Sequence: Synthetic oligonucleotide
agggacuaaauuucagguc

SEQ ID NO: 1429903 - RNA, 19 nt, Artificial Sequence
  Description of Artificial Sequence: Synthetic oligonucleotide
uaguuaauuccccgaaaca

SEQ ID NO: 1429904 - RNA, 19 nt, Artificial Sequence
  Description of Artificial Sequence: Synthetic oligonucleotide
guauaaagacagcugugag

SEQ ID NO: 1429905 - RNA, 19 nt, Artificial Sequence
  Description of Artificial Sequence: Synthetic oligonucleotide
aaaacuguguauauauaau

SEQ ID NO: 1429906 - RNA, 19 nt, Artificial Sequence
  Description of Artificial Sequence: Synthetic oligonucleotide
agcuauuaauucuaacgca

SEQ ID NO: 1429907 - RNA, 19 nt, Artificial Sequence
  Description of Artificial Sequence: Synthetic oligonucleotide
guaugaccuaguuaauucc

SEQ ID NO: 1429908 - RNA, 19 nt, Artificial Sequence
  Description of Artificial Sequence: Synthetic oligonucleotide
gauguuacccagagggacg

SEQ ID NO: 1429909 - RNA, 19 nt, Artificial Sequence
  Description of Artificial Sequence: Synthetic oligonucleotide
cuauuaauucuaacgcaug

SEQ ID NO: 1429910 - RNA, 19 nt, Artificial Sequence
  Description of Artificial Sequence: Synthetic oligonucleotide
auuuaaguguuuccuaaaa

SEQ ID NO: 1429911 - RNA, 19 nt, Artificial Sequence
  Description of Artificial Sequence: Synthetic oligonucleotide
uuuggauguuacccagagg

SEQ ID NO: 1429912 - RNA, 19 nt, Artificial Sequence
  Description of Artificial Sequence: Synthetic oligonucleotide
gacacauugggcaaggcca

SEQ ID NO: 1429913 - RNA, 19 nt, Artificial Sequence
  Description of Artificial Sequence: Synthetic oligonucleotide
caguuucauaaaucuaggg

SEQ ID NO: 1429914 - RNA, 19 nt, Artificial Sequence
  Description of Artificial Sequence: Synthetic oligonucleotide
uuauguuccagugcuggcc

SEQ ID NO: 1429915 - RNA, 19 nt, Artificial Sequence
  Description of Artificial Sequence: Synthetic oligonucleotide
auuauugucuccucugcaa

SEQ ID NO: 1429916 - RNA, 19 nt, Artificial Sequence
  Description of Artificial Sequence: Synthetic oligonucleotide
aucaucucagaacaaaaua

SEQ ID NO: 1429917 - RNA, 19 nt, Artificial Sequence
  Description of Artificial Sequence: Synthetic oligonucleotide
agccaaauuacuacuacag

SEQ ID NO: 1429918 - RNA, 19 nt, Artificial Sequence
  Description of Artificial Sequence: Synthetic oligonucleotide
agggaagacacggagauca

SEQ ID NO: 1429919 - RNA, 19 nt, Artificial Sequence
  Description of Artificial Sequence: Synthetic oligonucleotide
gaggcaccacauaaaaugg

SEQ ID NO: 1429920 - RNA, 19 nt, Artificial Sequence
  Description of Artificial Sequence: Synthetic oligonucleotide
aguuaauuccccgaaacaa

SEQ ID NO: 1429921 - RNA, 19 nt, Artificial Sequence
  Description of Artificial Sequence: Synthetic oligonucleotide
caauuauugucuccucugc

SEQ ID NO: 1429922 - RNA, 19 nt, Artificial Sequence
  Description of Artificial Sequence: Synthetic oligonucleotide
gacauugcaagacuucaga

SEQ ID NO: 1429923 - RNA, 19 nt, Artificial Sequence
  Description of Artificial Sequence: Synthetic oligonucleotide
uauauguacuauacuuaaa

SEQ ID NO: 1429924 - RNA, 19 nt, Artificial Sequence
  Description of Artificial Sequence: Synthetic oligonucleotide
aguuagaacuugcugucca

SEQ ID NO: 1429925 - RNA, 19 nt, Artificial Sequence
  Description of Artificial Sequence: Synthetic oligonucleotide
uguacacacaagcuugcuc

SEQ ID NO: 1429926 - RNA, 19 nt, Artificial Sequence
  Description of Artificial Sequence: Synthetic oligonucleotide
uacuauacuuaaaauucuu

SEQ ID NO: 1429927 - RNA, 19 nt, Artificial Sequence
  Description of Artificial Sequence: Synthetic oligonucleotide
guacaguuagaacuugcug

SEQ ID NO: 1429928 - RNA, 19 nt, Artificial Sequence
  Description of Artificial Sequence: Synthetic oligonucleotide
aauagacccgcaaugccca

SEQ ID NO: 1429929 - RNA, 19 nt, Artificial Sequence
  Description of Artificial Sequence: Synthetic oligonucleotide
gggacuaaauuucagguca

SEQ ID NO: 1429930 - RNA, 19 nt, Artificial Sequence
  Description of Artificial Sequence: Synthetic oligonucleotide
aggcucuugguguauaugu

SEQ ID NO: 1429931 - RNA, 19 nt, Artificial Sequence
  Description of Artificial Sequence: Synthetic oligonucleotide
agagaugaccgacuaauua

SEQ ID NO: 1429932 - RNA, 19 nt, Artificial Sequence
  Description of Artificial Sequence: Synthetic oligonucleotide
uugcaagacuucagaaacc

SEQ ID NO: 1429933 - RNA, 19 nt, Artificial Sequence
  Description of Artificial Sequence: Synthetic oligonucleotide
cucaagguaaaauuauuaa

SEQ ID NO: 1429934 - RNA, 19 nt, Artificial Sequence
  Description of Artificial Sequence: Synthetic oligonucleotide
cuuccgaagacgagagccg

SEQ ID NO: 1429935 - RNA, 19 nt, Artificial Sequence
  Description of Artificial Sequence: Synthetic oligonucleotide
accaagugggaacauagau

SEQ ID NO: 1429936 - RNA, 19 nt, Artificial Sequence
  Description of Artificial Sequence: Synthetic oligonucleotide
acacggagaucacaauuuc

SEQ ID NO: 1429937 - RNA, 19 nt, Artificial Sequence
  Description of Artificial Sequence: Synthetic oligonucleotide
uuccuaaaauuuuacugua

SEQ ID NO: 1429938 - RNA, 19 nt, Artificial Sequence
  Description of Artificial Sequence: Synthetic oligonucleotide
uaucaguuucauaaaucua

SEQ ID NO: 1429939 - RNA, 19 nt, Artificial Sequence
  Description of Artificial Sequence: Synthetic oligonucleotide
aauagaguaugaacucuga

SEQ ID NO: 1429940 - RNA, 19 nt, Artificial Sequence
  Description of Artificial Sequence: Synthetic oligonucleotide
acaauaaagggcuggccaa

SEQ ID NO: 1429941 - RNA, 19 nt, Artificial Sequence
  Description of Artificial Sequence: Synthetic oligonucleotide
auuauauguacuauacuua

SEQ ID NO: 1429942 - RNA, 19 nt, Artificial Sequence
  Description of Artificial Sequence: Synthetic oligonucleotide
agaaagacacauugggcaa

SEQ ID NO: 1429943 - RNA, 19 nt, Artificial Sequence
  Description of Artificial Sequence: Synthetic oligonucleotide
augaccuaguuaauucccc

SEQ ID NO: 1429944 - RNA, 19 nt, Artificial Sequence
  Description of Artificial Sequence: Synthetic oligonucleotide
ugcucaucacaauggaacu

SEQ ID NO: 1429945 - RNA, 19 nt, Artificial Sequence
  Description of Artificial Sequence: Synthetic oligonucleotide
uaacgcauguccuugcuuu

SEQ ID NO: 1429946 - RNA, 19 nt, Artificial Sequence
  Description of Artificial Sequence: Synthetic oligonucleotide
guuaucaguuucauaaauc

SEQ ID NO: 1429947 - RNA, 19 nt, Artificial Sequence
  Description of Artificial Sequence: Synthetic oligonucleotide
aaguaaagugacaggaaau

SEQ ID NO: 1429948 - RNA, 19 nt, Artificial Sequence
  Description of Artificial Sequence: Synthetic oligonucleotide
caagccaaauuacuacuac

SEQ ID NO: 1429949 - RNA, 19 nt, Artificial Sequence
  Description of Artificial Sequence: Synthetic oligonucleotide
uuuuggucccuuagaugcc

SEQ ID NO: 1429950 - RNA, 19 nt, Artificial Sequence
  Description of Artificial Sequence: Synthetic oligonucleotide
ggcacaaagcuauuaauuc

SEQ ID NO: 1429951 - RNA, 19 nt, Artificial Sequence
  Description of Artificial Sequence: Synthetic oligonucleotide
aucacaauuuccugcuacu

SEQ ID NO: 1429952 - RNA, 19 nt, Artificial Sequence
  Description of Artificial Sequence: Synthetic oligonucleotide
agguuuggauguuacccag

SEQ ID NO: 1429953 - RNA, 19 nt, Artificial Sequence
  Description of Artificial Sequence: Synthetic oligonucleotide
aaaauggagcuagcgccag

SEQ ID NO: 1429954 - RNA, 19 nt, Artificial Sequence
  Description of Artificial Sequence: Synthetic oligonucleotide
uuacaauaaagggcuggcc

SEQ ID NO: 1429955 - RNA, 19 nt, Artificial Sequence
  Description of Artificial Sequence: Synthetic oligonucleotide
augauaguacaaaacugug

SEQ ID NO: 1429956 - RNA, 19 nt, Artificial Sequence
  Description of Artificial Sequence: Synthetic oligonucleotide
cccuagagagguuaaaacc

SEQ ID NO: 1429957 - RNA, 19 nt, Artificial Sequence
  Description of Artificial Sequence: Synthetic oligonucleotide
guugcuacuguaacaguug

SEQ ID NO: 1429958 - RNA, 19 nt, Artificial Sequence
  Description of Artificial Sequence: Synthetic oligonucleotide
uuaaagcaaugaugugagc

SEQ ID NO: 1429959 - RNA, 19 nt, Artificial Sequence
  Description of Artificial Sequence: Synthetic oligonucleotide
cacggagaucacaauuucc

SEQ ID NO: 1429960 - RNA, 19 nt, Artificial Sequence
  Description of Artificial Sequence: Synthetic oligonucleotide
auagaguaugaacucugaa

SEQ ID NO: 1429961 - RNA, 19 nt, Artificial Sequence
  Description of Artificial Sequence: Synthetic oligonucleotide
accucuacauggccuuggc

SEQ ID NO: 1429962 - RNA, 19 nt, Artificial Sequence
  Description of Artificial Sequence: Synthetic oligonucleotide
acauugcaagacuucagaa

SEQ ID NO: 1429963 - RNA, 19 nt, Artificial Sequence
  Description of Artificial Sequence: Synthetic oligonucleotide
agcuugcucaucacaaugg

SEQ ID NO: 1429964 - RNA, 19 nt, Artificial Sequence
  Description of Artificial Sequence: Synthetic oligonucleotide
gacucaugucuguaauccc

SEQ ID NO: 1429965 - RNA, 19 nt, Artificial Sequence
  Description of Artificial Sequence: Synthetic oligonucleotide
uugagguuuggauguuacc

SEQ ID NO: 1429966 - RNA, 19 nt, Artificial Sequence
  Description of Artificial Sequence: Synthetic oligonucleotide
ucuaacgcauguccuugcu

SEQ ID NO: 1429967 - RNA, 19 nt, Artificial Sequence
  Description of Artificial Sequence: Synthetic oligonucleotide
uccaucuugcauaguuaca

SEQ ID NO: 1429968 - RNA, 19 nt, Artificial Sequence
  Description of Artificial Sequence: Synthetic oligonucleotide
gaagacacggagaucacaa

SEQ ID NO: 1429969 - RNA, 19 nt, Artificial Sequence
  Description of Artificial Sequence: Synthetic oligonucleotide
cuguauugguauauguaca

SEQ ID NO: 1429970 - RNA, 19 nt, Artificial Sequence
  Description of Artificial Sequence: Synthetic oligonucleotide
uaauuccccgaaacaaauc

SEQ ID NO: 1429971 - RNA, 19 nt, Artificial Sequence
  Description of Artificial Sequence: Synthetic oligonucleotide
uggccaagccuuccgaaga

SEQ ID NO: 1429972 - RNA, 19 nt, Artificial Sequence
  Description of Artificial Sequence: Synthetic oligonucleotide
uggauguuacccagaggga

SEQ ID NO: 1429973 - RNA, 19 nt, Artificial Sequence
  Description of Artificial Sequence: Synthetic oligonucleotide
gagaugaccgacuaauuau

SEQ ID NO: 1429974 - RNA, 19 nt, Artificial Sequence
  Description of Artificial Sequence: Synthetic oligonucleotide
auucuaacgcauguccuug

SEQ ID NO: 1429975 - RNA, 19 nt, Artificial Sequence
  Description of Artificial Sequence: Synthetic oligonucleotide
cagggaguggaguugcuac

SEQ ID NO: 1429976 - RNA, 19 nt, Artificial Sequence
  Description of Artificial Sequence: Synthetic oligonucleotide
aguuagagaugaccgacua

SEQ ID NO: 1429977 - RNA, 19 nt, Artificial Sequence
  Description of Artificial Sequence: Synthetic oligonucleotide
aagguggcugaguuuucca

SEQ ID NO: 1429978 - RNA, 19 nt, Artificial Sequence
  Description of Artificial Sequence: Synthetic oligonucleotide
acggcagagacaguaguag

SEQ ID NO: 1429979 - RNA, 19 nt, Artificial Sequence
  Description of Artificial Sequence: Synthetic oligonucleotide
uuuggucccuuagaugccc

SEQ ID NO: 1429980 - RNA, 19 nt, Artificial Sequence
  Description of Artificial Sequence: Synthetic oligonucleotide
ggcucauucacacacaugu

SEQ ID NO: 1429981 - RNA, 19 nt, Artificial Sequence
  Description of Artificial Sequence: Synthetic oligonucleotide
cauugcaagacuucagaaa

SEQ ID NO: 1429982 - RNA, 19 nt, Artificial Sequence
  Description of Artificial Sequence: Synthetic oligonucleotide
agaugaccgacuaauuaug

SEQ ID NO: 1429983 - RNA, 19 nt, Artificial Sequence
  Description of Artificial Sequence: Synthetic oligonucleotide
ggcacccaccucuacaugg

SEQ ID NO: 1429984 - RNA, 19 nt, Artificial Sequence
  Description of Artificial Sequence: Synthetic oligonucleotide
aucccaagacaugggagac

SEQ ID NO: 1429985 - RNA, 19 nt, Artificial Sequence
  Description of Artificial Sequence: Synthetic oligonucleotide
agacacggagaucacaauu

SEQ ID NO: 1429986 - RNA, 19 nt, Artificial Sequence
  Description of Artificial Sequence: Synthetic oligonucleotide
gacaagccaaauuacuacu

SEQ ID NO: 1429987 - RNA, 19 nt, Artificial Sequence
  Description of Artificial Sequence: Synthetic oligonucleotide
uagagaguaugaccuaguu

SEQ ID NO: 1429988 - RNA, 19 nt, Artificial Sequence
  Description of Artificial Sequence: Synthetic oligonucleotide
uucuaacgcauguccuugc

SEQ ID NO: 1429989 - RNA, 19 nt, Artificial Sequence
  Description of Artificial Sequence: Synthetic oligonucleotide
gagagauuugguccugguc

SEQ ID NO: 1429990 - RNA, 19 nt, Artificial Sequence
  Description of Artificial Sequence: Synthetic oligonucleotide
cacacaagcuugcucauca

SEQ ID NO: 1429991 - RNA, 19 nt, Artificial Sequence
  Description of Artificial Sequence: Synthetic oligonucleotide
uuacuacuacagaguuuag

SEQ ID NO: 1429992 - RNA, 19 nt, Artificial Sequence
  Description of Artificial Sequence: Synthetic oligonucleotide
gguauaaagacagcuguga

SEQ ID NO: 1429993 - RNA, 19 nt, Artificial Sequence
  Description of Artificial Sequence: Synthetic oligonucleotide
ugcuacuguaacaguugac

SEQ ID NO: 1429994 - RNA, 19 nt, Artificial Sequence
  Description of Artificial Sequence: Synthetic oligonucleotide
guaaugacccucuggccuc

SEQ ID NO: 1429995 - RNA, 19 nt, Artificial Sequence
  Description of Artificial Sequence: Synthetic oligonucleotide
acuaaauuucaggucacuu

SEQ ID NO: 1429996 - RNA, 19 nt, Artificial Sequence
  Description of Artificial Sequence: Synthetic oligonucleotide
gaagacgagagccguggga

SEQ ID NO: 1429997 - RNA, 19 nt, Artificial Sequence
  Description of Artificial Sequence: Synthetic oligonucleotide
ucccuuagaugcccuuaag

SEQ ID NO: 1429998 - RNA, 19 nt, Artificial Sequence
  Description of Artificial Sequence: Synthetic oligonucleotide
acaguaguagugggguagg

SEQ ID NO: 1429999 - RNA, 19 nt, Artificial Sequence
  Description of Artificial Sequence: Synthetic oligonucleotide
aguacucuguuuaaagcaa

SEQ ID NO: 1430000 - RNA, 19 nt, Artificial Sequence
  Description of Artificial Sequence: Synthetic oligonucleotide
accuaguuaauuccccgaa

SEQ ID NO: 1430001 - RNA, 19 nt, Artificial Sequence
  Description of Artificial Sequence: Synthetic oligonucleotide
uagaucuguauugguauau

SEQ ID NO: 1430002 - RNA, 19 nt, Artificial Sequence
  Description of Artificial Sequence: Synthetic oligonucleotide
cuugcuggacugaggaguc

SEQ ID NO: 1430003 - RNA, 19 nt, Artificial Sequence
  Description of Artificial Sequence: Synthetic oligonucleotide
ugagagauuugguccuggu

SEQ ID NO: 1430004 - RNA, 19 nt, Artificial Sequence
  Description of Artificial Sequence: Synthetic oligonucleotide
aagacacggagaucacaau

SEQ ID NO: 1430005 - RNA, 19 nt, Artificial Sequence
  Description of Artificial Sequence: Synthetic oligonucleotide
cugacaagccaaauuacua

SEQ ID NO: 1430006 - RNA, 19 nt, Artificial Sequence
  Description of Artificial Sequence: Synthetic oligonucleotide
gaccuaguuaauuccccga

SEQ ID NO: 1430007 - RNA, 19 nt, Artificial Sequence
  Description of Artificial Sequence: Synthetic oligonucleotide
agacgagagccgugggacg

SEQ ID NO: 1430008 - RNA, 19 nt, Artificial Sequence
  Description of Artificial Sequence: Synthetic oligonucleotide
cuucaauuauugucuccuc

SEQ ID NO: 1430009 - RNA, 19 nt, Artificial Sequence
  Description of Artificial Sequence: Synthetic oligonucleotide
acuauacuuaaaauucuuu

SEQ ID NO: 1430010 - RNA, 19 nt, Artificial Sequence
  Description of Artificial Sequence: Synthetic oligonucleotide
agaucuguauugguauaug

SEQ ID NO: 1430011 - RNA, 19 nt, Artificial Sequence
  Description of Artificial Sequence: Synthetic oligonucleotide
auagaucuguauugguaua

SEQ ID NO: 1430012 - RNA, 19 nt, Artificial Sequence
  Description of Artificial Sequence: Synthetic oligonucleotide
auaaaucuagggacuaaau

SEQ ID NO: 1430013 - RNA, 19 nt, Artificial Sequence
  Description of Artificial Sequence: Synthetic oligonucleotide
caagugaguuuccuucuuc

SEQ ID NO: 1430014 - RNA, 19 nt, Artificial Sequence
  Description of Artificial Sequence: Synthetic oligonucleotide
guauuauauguacuauacu

SEQ ID NO: 1430015 - RNA, 19 nt, Artificial Sequence
  Description of Artificial Sequence: Synthetic oligonucleotide
ggcaccacauaaaauggag

SEQ ID NO: 1430016 - RNA, 19 nt, Artificial Sequence
  Description of Artificial Sequence: Synthetic oligonucleotide
accaugguauaaagacagc

SEQ ID NO: 1430017 - RNA, 19 nt, Artificial Sequence
  Description of Artificial Sequence: Synthetic oligonucleotide
ccuuccgaagacgagagcc

SEQ ID NO: 1430018 - RNA, 19 nt, Artificial Sequence
  Description of Artificial Sequence: Synthetic oligonucleotide
auugguauauguacauaaa

SEQ ID NO: 1430019 - RNA, 19 nt, Artificial Sequence
  Description of Artificial Sequence: Synthetic oligonucleotide
ucauaaaucuagggacuaa

SEQ ID NO: 1430020 - RNA, 19 nt, Artificial Sequence
  Description of Artificial Sequence: Synthetic oligonucleotide
aguugcuacuguaacaguu

SEQ ID NO: 1430021 - RNA, 19 nt, Artificial Sequence
  Description of Artificial Sequence: Synthetic oligonucleotide
aguagugggguaggggcag

SEQ ID NO: 1430022 - RNA, 19 nt, Artificial Sequence
  Description of Artificial Sequence: Synthetic oligonucleotide
accuuuaaauggacagcac

SEQ ID NO: 1430023 - RNA, 19 nt, Artificial Sequence
  Description of Artificial Sequence: Synthetic oligonucleotide
cccuuagaugcccuuaagg

SEQ ID NO: 1430024 - RNA, 19 nt, Artificial Sequence
  Description of Artificial Sequence: Synthetic oligonucleotide
cagucuggcauggugacuc

SEQ ID NO: 1430025 - RNA, 19 nt, Artificial Sequence
  Description of Artificial Sequence: Synthetic oligonucleotide
augcccuuaagguggcuga

SEQ ID NO: 1430026 - RNA, 19 nt, Artificial Sequence
  Description of Artificial Sequence: Synthetic oligonucleotide
uggaggcaccacauaaaau

SEQ ID NO: 1430027 - RNA, 19 nt, Artificial Sequence
  Description of Artificial Sequence: Synthetic oligonucleotide
cccaguacucuguuuaaag

SEQ ID NO: 1430028 - RNA, 19 nt, Artificial Sequence
  Description of Artificial Sequence: Synthetic oligonucleotide
acuacagaguuuaggaaua

SEQ ID NO: 1430029 - RNA, 19 nt, Artificial Sequence
  Description of Artificial Sequence: Synthetic oligonucleotide
cauaaaucuagggacuaaa

SEQ ID NO: 1430030 - RNA, 19 nt, Artificial Sequence
  Description of Artificial Sequence: Synthetic oligonucleotide
uagagaugaccgacuaauu

SEQ ID NO: 1430031 - RNA, 19 nt, Artificial Sequence
  Description of Artificial Sequence: Synthetic oligonucleotide
cuacuacagaguuuaggaa

SEQ ID NO: 1430032 - RNA, 19 nt, Artificial Sequence
  Description of Artificial Sequence: Synthetic oligonucleotide
uagaugcccuuaagguggc

SEQ ID NO: 1430033 - RNA, 19 nt, Artificial Sequence
  Description of Artificial Sequence: Synthetic oligonucleotide
ggccuuggcagaaagacac

SEQ ID NO: 1430034 - RNA, 19 nt, Artificial Sequence
  Description of Artificial Sequence: Synthetic oligonucleotide
aucuguauugguauaugua

SEQ ID NO: 1430035 - RNA, 19 nt, Artificial Sequence
  Description of Artificial Sequence: Synthetic oligonucleotide
uguuccagugcuggccaag

SEQ ID NO: 1430036 - RNA, 19 nt, Artificial Sequence
  Description of Artificial Sequence: Synthetic oligonucleotide
cacaguuagagaugaccga

SEQ ID NO: 1430037 - RNA, 19 nt, Artificial Sequence
  Description of Artificial Sequence: Synthetic oligonucleotide
ggauguuacccagagggac

SEQ ID NO: 1430038 - RNA, 19 nt, Artificial Sequence
  Description of Artificial Sequence: Synthetic oligonucleotide
cccgaaacaaaucaucuca

SEQ ID NO: 1430039 - RNA, 19 nt, Artificial Sequence
  Description of Artificial Sequence: Synthetic oligonucleotide
ugggagaccaugguauaaa

SEQ ID NO: 1430040 - RNA, 19 nt, Artificial Sequence
  Description of Artificial Sequence: Synthetic oligonucleotide
uccgaagacgagagccgug

SEQ ID NO: 1430041 - RNA, 19 nt, Artificial Sequence
  Description of Artificial Sequence: Synthetic oligonucleotide
ggucacuuagaaaaucuca

SEQ ID NO: 1430042 - RNA, 19 nt, Artificial Sequence
  Description of Artificial Sequence: Synthetic oligonucleotide
gcagaaagacacauugggc

SEQ ID NO: 1430043 - RNA, 19 nt, Artificial Sequence
  Description of Artificial Sequence: Synthetic oligonucleotide
uuaagguggcugaguuuuc

SEQ ID NO: 1430044 - RNA, 19 nt, Artificial Sequence
  Description of Artificial Sequence: Synthetic oligonucleotide
uggaacuauuuacccuaaa

SEQ ID NO: 1430045 - RNA, 19 nt, Artificial Sequence
  Description of Artificial Sequence: Synthetic oligonucleotide
cagucacuaugguaaugac

SEQ ID NO: 1430046 - RNA, 19 nt, Artificial Sequence
  Description of Artificial Sequence: Synthetic oligonucleotide
gggagaccaugguauaaag

SEQ ID NO: 1430047 - RNA, 19 nt, Artificial Sequence
  Description of Artificial Sequence: Synthetic oligonucleotide
gugacucaugucuguaauc

SEQ ID NO: 1430048 - RNA, 19 nt, Artificial Sequence
  Description of Artificial Sequence: Synthetic oligonucleotide
guggaggcaccacauaaaa

SEQ ID NO: 1430049 - RNA, 19 nt, Artificial Sequence
  Description of Artificial Sequence: Synthetic oligonucleotide
ccgaaacaaaucaucucag

SEQ ID NO: 1430050 - RNA, 19 nt, Artificial Sequence
  Description of Artificial Sequence: Synthetic oligonucleotide
aggagucaagugaguuucc

SEQ ID NO: 1430051 - RNA, 19 nt, Artificial Sequence
  Description of Artificial Sequence: Synthetic oligonucleotide
uuacccagagggacgccau

SEQ ID NO: 1430052 - RNA, 19 nt, Artificial Sequence
  Description of Artificial Sequence: Synthetic oligonucleotide
auagagaguaugaccuagu

SEQ ID NO: 1430053 - RNA, 19 nt, Artificial Sequence
  Description of Artificial Sequence: Synthetic oligonucleotide
cuugcucaucacaauggaa

SEQ ID NO: 1430054 - RNA, 19 nt, Artificial Sequence
  Description of Artificial Sequence: Synthetic oligonucleotide
guccuggucuuuugguccc

SEQ ID NO: 1430055 - RNA, 19 nt, Artificial Sequence
  Description of Artificial Sequence: Synthetic oligonucleotide
gggauugagguuuggaugu

SEQ ID NO: 1430056 - RNA, 19 nt, Artificial Sequence
  Description of Artificial Sequence: Synthetic oligonucleotide
uuccgaagacgagagccgu

SEQ ID NO: 1430057 - RNA, 19 nt, Artificial Sequence
  Description of Artificial Sequence: Synthetic oligonucleotide
accgacuaauuauguucca

SEQ ID NO: 1430058 - RNA, 19 nt, Artificial Sequence
  Description of Artificial Sequence: Synthetic oligonucleotide
guacuauacuuaaaauucu

SEQ ID NO: 1430059 - RNA, 19 nt, Artificial Sequence
  Description of Artificial Sequence: Synthetic oligonucleotide
aguugacauugcaagacuu

SEQ ID NO: 1430060 - RNA, 19 nt, Artificial Sequence
  Description of Artificial Sequence: Synthetic oligonucleotide
ggaacuauuuacccuaaau

SEQ ID NO: 1430061 - RNA, 19 nt, Artificial Sequence
  Description of Artificial Sequence: Synthetic oligonucleotide
gcccuagagagguuaaaac

SEQ ID NO: 1430062 - RNA, 19 nt, Artificial Sequence
  Description of Artificial Sequence: Synthetic oligonucleotide
gccaaauuacuacuacaga

SEQ ID NO: 1430063 - RNA, 19 nt, Artificial Sequence
  Description of Artificial Sequence: Synthetic oligonucleotide
ccuagagagguuaaaaccu

SEQ ID NO: 1430064 - RNA, 19 nt, Artificial Sequence
  Description of Artificial Sequence: Synthetic oligonucleotide
auagacccgcaaugcccag

SEQ ID NO: 1430065 - RNA, 19 nt, Artificial Sequence
  Description of Artificial Sequence: Synthetic oligonucleotide
aucucaagguaaaauuauu

SEQ ID NO: 1430066 - RNA, 19 nt, Artificial Sequence
  Description of Artificial Sequence: Synthetic oligonucleotide
cuagcgccagucuggcaug

SEQ ID NO: 1430067 - RNA, 19 nt, Artificial Sequence
  Description of Artificial Sequence: Synthetic oligonucleotide
agagagguuaaaaccuuua

SEQ ID NO: 1430068 - RNA, 19 nt, Artificial Sequence
  Description of Artificial Sequence: Synthetic oligonucleotide
agcccuagagagguuaaaa

SEQ ID NO: 1430069 - RNA, 19 nt, Artificial Sequence
  Description of Artificial Sequence: Synthetic oligonucleotide
acaagccaaauuacuacua

SEQ ID NO: 1430070 - RNA, 19 nt, Artificial Sequence
  Description of Artificial Sequence: Synthetic oligonucleotide
gaugaccgacuaauuaugu

SEQ ID NO: 1430071 - RNA, 19 nt, Artificial Sequence
  Description of Artificial Sequence: Synthetic oligonucleotide
ugcccuuaagguggcugag

SEQ ID NO: 1430072 - RNA, 19 nt, Artificial Sequence
  Description of Artificial Sequence: Synthetic oligonucleotide
agcaagacaaggaguccca

SEQ ID NO: 1430073 - RNA, 19 nt, Artificial Sequence
  Description of Artificial Sequence: Synthetic oligonucleotide
agacccgcaaugcccagua

SEQ ID NO: 1430074 - RNA, 19 nt, Artificial Sequence
  Description of Artificial Sequence: Synthetic oligonucleotide
gcacaaagcuauuaauucu

SEQ ID NO: 1430075 - RNA, 19 nt, Artificial Sequence
  Description of Artificial Sequence: Synthetic oligonucleotide
ccuuagaugcccuuaaggu

SEQ ID NO: 1430076 - RNA, 19 nt, Artificial Sequence
  Description of Artificial Sequence: Synthetic oligonucleotide
cuacuguaacaguugacau

SEQ ID NO: 1430077 - RNA, 19 nt, Artificial Sequence
  Description of Artificial Sequence: Synthetic oligonucleotide
aaggagucccacaguuaga

SEQ ID NO: 1430078 - RNA, 19 nt, Artificial Sequence
  Description of Artificial Sequence: Synthetic oligonucleotide
gacacggagaucacaauuu

SEQ ID NO: 1430079 - RNA, 19 nt, Artificial Sequence
  Description of Artificial Sequence: Synthetic oligonucleotide
cuuugauaauaaaguuaua

SEQ ID NO: 1430080 - RNA, 19 nt, Artificial Sequence
  Description of Artificial Sequence: Synthetic oligonucleotide
gcaccacauaaaauggagc

SEQ ID NO: 1430081 - RNA, 19 nt, Artificial Sequence
  Description of Artificial Sequence: Synthetic oligonucleotide
gucccacaguuagagauga

SEQ ID NO: 1430082 - RNA, 19 nt, Artificial Sequence
  Description of Artificial Sequence: Synthetic oligonucleotide
acaaaucaucucagaacaa

SEQ ID NO: 1430083 - RNA, 19 nt, Artificial Sequence
  Description of Artificial Sequence: Synthetic oligonucleotide
gcuauuaauucuaacgcau

SEQ ID NO: 1430084 - RNA, 19 nt, Artificial Sequence
  Description of Artificial Sequence: Synthetic oligonucleotide
cacccaccucuacauggcc

SEQ ID NO: 1430085 - RNA, 19 nt, Artificial Sequence
  Description of Artificial Sequence: Synthetic oligonucleotide
acgagagccgugggacggc

SEQ ID NO: 1430086 - RNA, 19 nt, Artificial Sequence
  Description of Artificial Sequence: Synthetic oligonucleotide
auuccccgaaacaaaucau

SEQ ID NO: 1430087 - RNA, 19 nt, Artificial Sequence
  Description of Artificial Sequence: Synthetic oligonucleotide
gauugagguuuggauguua

SEQ ID NO: 1430088 - RNA, 19 nt, Artificial Sequence
  Description of Artificial Sequence: Synthetic oligonucleotide
aggcaccacauaaaaugga

SEQ ID NO: 1430089 - RNA, 19 nt, Artificial Sequence
  Description of Artificial Sequence: Synthetic oligonucleotide
ugcuacugacaagccaaau

SEQ ID NO: 1430090 - RNA, 19 nt, Artificial Sequence
  Description of Artificial Sequence: Synthetic oligonucleotide
cagguacaguuagaacuug

SEQ ID NO: 1430091 - RNA, 19 nt, Artificial Sequence
  Description of Artificial Sequence: Synthetic oligonucleotide
gaguaugaccuaguuaauu

SEQ ID NO: 1430092 - RNA, 19 nt, Artificial Sequence
  Description of Artificial Sequence: Synthetic oligonucleotide
ccgaagacgagagccgugg

SEQ ID NO: 1430093 - RNA, 19 nt, Artificial Sequence
  Description of Artificial Sequence: Synthetic oligonucleotide
uagcgccagucuggcaugg

SEQ ID NO: 1430094 - RNA, 19 nt, Artificial Sequence
  Description of Artificial Sequence: Synthetic oligonucleotide
cuagagagguuaaaaccuu

SEQ ID NO: 1430095 - RNA, 19 nt, Artificial Sequence
  Description of Artificial Sequence: Synthetic oligonucleotide
augggagaccaugguauaa

SEQ ID NO: 1430096 - RNA, 19 nt, Artificial Sequence
  Description of Artificial Sequence: Synthetic oligonucleotide
ccgacuaauuauguuccag

SEQ ID NO: 1430097 - RNA, 19 nt, Artificial Sequence
  Description of Artificial Sequence: Synthetic oligonucleotide
ccaagugggaacauagaua

SEQ ID NO: 1430098 - RNA, 19 nt, Artificial Sequence
  Description of Artificial Sequence: Synthetic oligonucleotide
gacggcagagacaguagua

SEQ ID NO: 1430099 - RNA, 19 nt, Artificial Sequence
  Description of Artificial Sequence: Synthetic oligonucleotide
ggagaccaugguauaaaga

SEQ ID NO: 1430100 - RNA, 19 nt, Artificial Sequence
  Description of Artificial Sequence: Synthetic oligonucleotide
agaguaugaccuaguuaau

SEQ ID NO: 1430101 - RNA, 19 nt, Artificial Sequence
  Description of Artificial Sequence: Synthetic oligonucleotide
gacuaaauuucaggucacu

SEQ ID NO: 1430102 - RNA, 19 nt, Artificial Sequence
  Description of Artificial Sequence: Synthetic oligonucleotide
ggaggaggcuuccuacuuc

SEQ ID NO: 1430103 - RNA, 19 nt, Artificial Sequence
  Description of Artificial Sequence: Synthetic oligonucleotide
agcagggauugagguuugg

SEQ ID NO: 1430104 - RNA, 19 nt, Artificial Sequence
  Description of Artificial Sequence: Synthetic oligonucleotide
ucccacaguuagagaugac

SEQ ID NO: 1430105 - RNA, 19 nt, Artificial Sequence
  Description of Artificial Sequence: Synthetic oligonucleotide
agaaaccaagugggaacau

SEQ ID NO: 1430106 - RNA, 19 nt, Artificial Sequence
  Description of Artificial Sequence: Synthetic oligonucleotide
cuugguguauauguauuau

SEQ ID NO: 1430107 - RNA, 19 nt, Artificial Sequence
  Description of Artificial Sequence: Synthetic oligonucleotide
ggacuaaauuucaggucac

SEQ ID NO: 1430108 - RNA, 19 nt, Artificial Sequence
  Description of Artificial Sequence: Synthetic oligonucleotide
caugggagaccaugguaua

SEQ ID NO: 1430109 - RNA, 19 nt, Artificial Sequence
  Description of Artificial Sequence: Synthetic oligonucleotide
cuagcccuagagagguuaa

SEQ ID NO: 1430110 - RNA, 19 nt, Artificial Sequence
  Description of Artificial Sequence: Synthetic oligonucleotide
uagacccgcaaugcccagu

SEQ ID NO: 1430111 - RNA, 19 nt, Artificial Sequence
  Description of Artificial Sequence: Synthetic oligonucleotide
caguuagagaugaccgacu

SEQ ID NO: 1430112 - RNA, 19 nt, Artificial Sequence
  Description of Artificial Sequence: Synthetic oligonucleotide
gcuacugacaagccaaauu

SEQ ID NO: 1430113 - RNA, 19 nt, Artificial Sequence
  Description of Artificial Sequence: Synthetic oligonucleotide
acccaccucuacauggccu

SEQ ID NO: 1430114 - RNA, 19 nt, Artificial Sequence
  Description of Artificial Sequence: Synthetic oligonucleotide
auggaacuauuuacccuaa

SEQ ID NO: 1430115 - RNA, 19 nt, Artificial Sequence
  Description of Artificial Sequence: Synthetic oligonucleotide
acaaggagucccacaguua

SEQ ID NO: 1430116 - RNA, 19 nt, Artificial Sequence
  Description of Artificial Sequence: Synthetic oligonucleotide
gcuagcgccagucuggcau

SEQ ID NO: 1430117 - RNA, 19 nt, Artificial Sequence
  Description of Artificial Sequence: Synthetic oligonucleotide
ggugacucaugucuguaau

SEQ ID NO: 1430118 - RNA, 19 nt, Artificial Sequence
  Description of Artificial Sequence: Synthetic oligonucleotide
uagcccuagagagguuaaa

SEQ ID NO: 1430119 - RNA, 19 nt, Artificial Sequence
  Description of Artificial Sequence: Synthetic oligonucleotide
gccaagccuuccgaagacg

SEQ ID NO: 1430120 - RNA, 19 nt, Artificial Sequence
  Description of Artificial Sequence: Synthetic oligonucleotide
ggccaagccuuccgaagac

SEQ ID NO: 1430121 - RNA, 19 nt, Artificial Sequence
  Description of Artificial Sequence: Synthetic oligonucleotide
cccaagacaugggagacca

SEQ ID NO: 1430122 - RNA, 19 nt, Artificial Sequence
  Description of Artificial Sequence: Synthetic oligonucleotide
cagugcuggccaagccuuc

SEQ ID NO: 1430123 - RNA, 19 nt, Artificial Sequence
  Description of Artificial Sequence: Synthetic oligonucleotide
gcgccagucuggcauggug

SEQ ID NO: 1430124 - RNA, 19 nt, Artificial Sequence
  Description of Artificial Sequence: Synthetic oligonucleotide
cuggacugaggagucaagu

SEQ ID NO: 1430125 - RNA, 19 nt, Artificial Sequence
  Description of Artificial Sequence: Synthetic oligonucleotide
gucuccuguuaaguaaagu

SEQ ID NO: 1430126 - RNA, 19 nt, Artificial Sequence
  Description of Artificial Sequence: Synthetic oligonucleotide
guacucuguuuaaagcaau

SEQ ID NO: 1430127 - RNA, 19 nt, Artificial Sequence
  Description of Artificial Sequence: Synthetic oligonucleotide
ccuaguuaauuccccgaaa

SEQ ID NO: 1430128 - RNA, 19 nt, Artificial Sequence
  Description of Artificial Sequence: Synthetic oligonucleotide
gguggaggcaccacauaaa

SEQ ID NO: 1430129 - RNA, 19 nt, Artificial Sequence
  Description of Artificial Sequence: Synthetic oligonucleotide
ccaugguauaaagacagcu

SEQ ID NO: 1430130 - RNA, 19 nt, Artificial Sequence
  Description of Artificial Sequence: Synthetic oligonucleotide
gguuuggauguuacccaga

SEQ ID NO: 1430131 - RNA, 19 nt, Artificial Sequence
  Description of Artificial Sequence: Synthetic oligonucleotide
gcacccaccucuacauggc

SEQ ID NO: 1430132 - RNA, 19 nt, Artificial Sequence
  Description of Artificial Sequence: Synthetic oligonucleotide
cagggaagacacggagauc

SEQ ID NO: 1430133 - RNA, 19 nt, Artificial Sequence
  Description of Artificial Sequence: Synthetic oligonucleotide
uccuggucuuuuggucccu

SEQ ID NO: 1430134 - RNA, 19 nt, Artificial Sequence
  Description of Artificial Sequence: Synthetic oligonucleotide
gugagcugagagauuuggu

SEQ ID NO: 1430135 - RNA, 19 nt, Artificial Sequence
  Description of Artificial Sequence: Synthetic oligonucleotide
cuaacgcauguccuugcuu

SEQ ID NO: 1430136 - RNA, 19 nt, Artificial Sequence
  Description of Artificial Sequence: Synthetic oligonucleotide
cccuaaauaaaagaauauu

SEQ ID NO: 1430137 - RNA, 19 nt, Artificial Sequence
  Description of Artificial Sequence: Synthetic oligonucleotide
gcuggccaagccuuccgaa

SEQ ID NO: 1430138 - RNA, 19 nt, Artificial Sequence
  Description of Artificial Sequence: Synthetic oligonucleotide
cgaagacgagagccguggg

SEQ ID NO: 1430139 - RNA, 19 nt, Artificial Sequence
  Description of Artificial Sequence: Synthetic oligonucleotide
gccuuccgaagacgagagc

SEQ ID NO: 1430140 - RNA, 19 nt, Artificial Sequence
  Description of Artificial Sequence: Synthetic oligonucleotide
cuacagaguuuaggaauau

SEQ ID NO: 1430141 - RNA, 19 nt, Artificial Sequence
  Description of Artificial Sequence: Synthetic oligonucleotide
ggucccuuagaugcccuua

SEQ ID NO: 1430142 - RNA, 19 nt, Artificial Sequence
  Description of Artificial Sequence: Synthetic oligonucleotide
ccuagcccuagagagguua

SEQ ID NO: 1430143 - RNA, 19 nt, Artificial Sequence
  Description of Artificial Sequence: Synthetic oligonucleotide
agcgccagucuggcauggu

SEQ ID NO: 1430144 - RNA, 19 nt, Artificial Sequence
  Description of Artificial Sequence: Synthetic oligonucleotide
gguuggcccucaggaggag

SEQ ID NO: 1430145 - RNA, 19 nt, Artificial Sequence
  Description of Artificial Sequence: Synthetic oligonucleotide
gcccaguacucuguuuaaa

SEQ ID NO: 1430146 - RNA, 19 nt, Artificial Sequence
  Description of Artificial Sequence: Synthetic oligonucleotide
gggacgccaucagucacua

SEQ ID NO: 1430147 - RNA, 19 nt, Artificial Sequence
  Description of Artificial Sequence: Synthetic oligonucleotide
cccuuaagguggcugaguu

SEQ ID NO: 1430148 - RNA, 19 nt, Artificial Sequence
  Description of Artificial Sequence: Synthetic oligonucleotide
ccagagggacgccaucagu

SEQ ID NO: 1430149 - RNA, 19 nt, Artificial Sequence
  Description of Artificial Sequence: Synthetic oligonucleotide
ccuuaagguggcugaguuu

SEQ ID NO: 1430150 - RNA, 19 nt, Artificial Sequence
  Description of Artificial Sequence: Synthetic oligonucleotide
ggauugagguuuggauguu

SEQ ID NO: 1430151 - RNA, 19 nt, Artificial Sequence
  Description of Artificial Sequence: Synthetic oligonucleotide
ccgcaaugcccaguacucu

SEQ ID NO: 1430152 - RNA, 19 nt, Artificial Sequence
  Description of Artificial Sequence: Synthetic oligonucleotide
ccagaggcacaaagcuauu

SEQ ID NO: 1430153 - RNA, 19 nt, Artificial Sequence
  Description of Artificial Sequence: Synthetic oligonucleotide
ccccaccacuugcuggacu

SEQ ID NO: 1430154 - RNA, 19 nt, Artificial Sequence
  Description of Artificial Sequence: Synthetic oligonucleotide
ggacgccaucagucacuau

SEQ ID NO: 1430155 - RNA, 19 nt, Artificial Sequence
  Description of Artificial Sequence: Synthetic oligonucleotide
gugggacggcagagacagu

SEQ ID NO: 1430156 - RNA, 19 nt, Artificial Sequence
  Description of Artificial Sequence: Synthetic oligonucleotide
ccaagacaugggagaccau

SEQ ID NO: 1430157 - RNA, 19 nt, Artificial Sequence
  Description of Artificial Sequence: Synthetic oligonucleotide
cccuagcccuagagagguu

SEQ ID NO: 1430158 - RNA, 19 nt, Artificial Sequence
  Description of Artificial Sequence: Synthetic oligonucleotide
aauauuauguguuaaggca

SEQ ID NO: 1430159 - RNA, 19 nt, Artificial Sequence
  Description of Artificial Sequence: Synthetic oligonucleotide
uguguuuuaaccaagaauc

SEQ ID NO: 1430160 - RNA, 19 nt, Artificial Sequence
  Description of Artificial Sequence: Synthetic oligonucleotide
aagaccuugaaauuaggac

SEQ ID NO: 1430161 - RNA, 19 nt, Artificial Sequence
  Description of Artificial Sequence: Synthetic oligonucleotide
uuuggcuuuuauaacaggg

SEQ ID NO: 1430162 - RNA, 19 nt, Artificial Sequence
  Description of Artificial Sequence: Synthetic oligonucleotide
aguucuaaagaacugaugu

SEQ ID NO: 1430163 - RNA, 19 nt, Artificial Sequence
  Description of Artificial Sequence: Synthetic oligonucleotide
acaauuguugaccugacag

SEQ ID NO: 1430164 - RNA, 19 nt, Artificial Sequence
  Description of Artificial Sequence: Synthetic oligonucleotide
ucuauaaacacucuguuuu

SEQ ID NO: 1430165 - RNA, 19 nt, Artificial Sequence
  Description of Artificial Sequence: Synthetic oligonucleotide
uuauaaggagucuaaaaug

SEQ ID NO: 1430166 - RNA, 19 nt, Artificial Sequence
  Description of Artificial Sequence: Synthetic oligonucleotide
aaucauuugugauagacua

SEQ ID NO: 1430167 - RNA, 19 nt, Artificial Sequence
  Description of Artificial Sequence: Synthetic oligonucleotide
auuguuaucaugcucugag

SEQ ID NO: 1430168 - RNA, 19 nt, Artificial Sequence
  Description of Artificial Sequence: Synthetic oligonucleotide
uaauauuauguguuaaggc

SEQ ID NO: 1430169 - RNA, 19 nt, Artificial Sequence
  Description of Artificial Sequence: Synthetic oligonucleotide
aaauaugaguuuucaccac

SEQ ID NO: 1430170 - RNA, 19 nt, Artificial Sequence
  Description of Artificial Sequence: Synthetic oligonucleotide
uuuaauaaucacuggagaa

SEQ ID NO: 1430171 - RNA, 19 nt, Artificial Sequence
  Description of Artificial Sequence: Synthetic oligonucleotide
ugcauuguuaucaugcucu

SEQ ID NO: 1430172 - RNA, 19 nt, Artificial Sequence
  Description of Artificial Sequence: Synthetic oligonucleotide
uaucuaaagaugcugauuu

SEQ ID NO: 1430173 - RNA, 19 nt, Artificial Sequence
  Description of Artificial Sequence: Synthetic oligonucleotide
ugauagacuacuuuucagc

SEQ ID NO: 1430174 - RNA, 19 nt, Artificial Sequence
  Description of Artificial Sequence: Synthetic oligonucleotide
uugaugaccaguagaacag

SEQ ID NO: 1430175 - RNA, 19 nt, Artificial Sequence
  Description of Artificial Sequence: Synthetic oligonucleotide
aaagaaagcauugcuguag

SEQ ID NO: 1430176 - RNA, 19 nt, Artificial Sequence
  Description of Artificial Sequence: Synthetic oligonucleotide
uaagucagcaucuagccac

SEQ ID NO: 1430177 - RNA, 19 nt, Artificial Sequence
  Description of Artificial Sequence: Synthetic oligonucleotide
gagaaaucauuugugauag

SEQ ID NO: 1430178 - RNA, 19 nt, Artificial Sequence
  Description of Artificial Sequence: Synthetic oligonucleotide
aacagauauguaaacacag

SEQ ID NO: 1430179 - RNA, 19 nt, Artificial Sequence
  Description of Artificial Sequence: Synthetic oligonucleotide
cuuuaaguuguccacgucc

SEQ ID NO: 1430180 - RNA, 19 nt, Artificial Sequence
  Description of Artificial Sequence: Synthetic oligonucleotide
aauaugaguuuucaccacu

SEQ ID NO: 1430181 - RNA, 19 nt, Artificial Sequence
  Description of Artificial Sequence: Synthetic oligonucleotide
uauguaaacacagugugcu

SEQ ID NO: 1430182 - RNA, 19 nt, Artificial Sequence
  Description of Artificial Sequence: Synthetic oligonucleotide
acuacuuuucagcuuuggc

SEQ ID NO: 1430183 - RNA, 19 nt, Artificial Sequence
  Description of Artificial Sequence: Synthetic oligonucleotide
agaccuugaaauuaggacu

SEQ ID NO: 1430184 - RNA, 19 nt, Artificial Sequence
  Description of Artificial Sequence: Synthetic oligonucleotide
ugaaauuaggacugaaggu

SEQ ID NO: 1430185 - RNA, 19 nt, Artificial Sequence
  Description of Artificial Sequence: Synthetic oligonucleotide
uacauuugguaaauuaugu

SEQ ID NO: 1430186 - RNA, 19 nt, Artificial Sequence
  Description of Artificial Sequence: Synthetic oligonucleotide
aggauaucauuauuaaaag

SEQ ID NO: 1430187 - RNA, 19 nt, Artificial Sequence
  Description of Artificial Sequence: Synthetic oligonucleotide
ucagguauucccuuuaagu

SEQ ID NO: 1430188 - RNA, 19 nt, Artificial Sequence
  Description of Artificial Sequence: Synthetic oligonucleotide
uuaucaugcucugagauga

SEQ ID NO: 1430189 - RNA, 19 nt, Artificial Sequence
  Description of Artificial Sequence: Synthetic oligonucleotide
ucucaaugggagaaucucg

SEQ ID NO: 1430190 - RNA, 19 nt, Artificial Sequence
  Description of Artificial Sequence: Synthetic oligonucleotide
uaaacuagcauggaauggc

SEQ ID NO: 1430191 - RNA, 19 nt, Artificial Sequence
  Description of Artificial Sequence: Synthetic oligonucleotide
gaggauaucauuauuaaaa

SEQ ID NO: 1430192 - RNA, 19 nt, Artificial Sequence
  Description of Artificial Sequence: Synthetic oligonucleotide
ugaguauaacaauuguuga

SEQ ID NO: 1430193 - RNA, 19 nt, Artificial Sequence
  Description of Artificial Sequence: Synthetic oligonucleotide
uaaaagugcugcaagaguu

SEQ ID NO: 1430194 - RNA, 19 nt, Artificial Sequence
  Description of Artificial Sequence: Synthetic oligonucleotide
uuugugauagacuacuuuu

SEQ ID NO: 1430195 - RNA, 19 nt, Artificial Sequence
  Description of Artificial Sequence: Synthetic oligonucleotide
ugugauagacuacuuuuca

SEQ ID NO: 1430196 - RNA, 19 nt, Artificial Sequence
  Description of Artificial Sequence: Synthetic oligonucleotide
uuaaaagugcugcaagagu

SEQ ID NO: 1430197 - RNA, 19 nt, Artificial Sequence
  Description of Artificial Sequence: Synthetic oligonucleotide
ucuaaagaugcugauuucc

SEQ ID NO: 1430198 - RNA, 19 nt, Artificial Sequence
  Description of Artificial Sequence: Synthetic oligonucleotide
uauuccugggaucucacca

SEQ ID NO: 1430199 - RNA, 19 nt, Artificial Sequence
  Description of Artificial Sequence: Synthetic oligonucleotide
gaagugaacauaaucacca

SEQ ID NO: 1430200 - RNA, 19 nt, Artificial Sequence
  Description of Artificial Sequence: Synthetic oligonucleotide
uuaaacuagcauggaaugg

SEQ ID NO: 1430201 - RNA, 19 nt, Artificial Sequence
  Description of Artificial Sequence: Synthetic oligonucleotide
uuuaaguuguccacguccu

SEQ ID NO: 1430202 - RNA, 19 nt, Artificial Sequence
  Description of Artificial Sequence: Synthetic oligonucleotide
uauuauguguuaaggcagc

SEQ ID NO: 1430203 - RNA, 19 nt, Artificial Sequence
  Description of Artificial Sequence: Synthetic oligonucleotide
cuugaaauuaggacugaag

SEQ ID NO: 1430204 - RNA, 19 nt, Artificial Sequence
  Description of Artificial Sequence: Synthetic oligonucleotide
aagugaacauaaucaccac

SEQ ID NO: 1430205 - RNA, 19 nt, Artificial Sequence
  Description of Artificial Sequence: Synthetic oligonucleotide
aaaggucucgccugugccg

SEQ ID NO: 1430206 - RNA, 19 nt, Artificial Sequence
  Description of Artificial Sequence: Synthetic oligonucleotide
ucuuauaaggagucuaaaa

SEQ ID NO: 1430207 - RNA, 19 nt, Artificial Sequence
  Description of Artificial Sequence: Synthetic oligonucleotide
ugaccaguagaacaggacu

SEQ ID NO: 1430208 - RNA, 19 nt, Artificial Sequence
  Description of Artificial Sequence: Synthetic oligonucleotide
uguuaucaugcucugagau

SEQ ID NO: 1430209 - RNA, 19 nt, Artificial Sequence
  Description of Artificial Sequence: Synthetic oligonucleotide
uuaauaaucacuggagaaa

SEQ ID NO: 1430210 - RNA, 19 nt, Artificial Sequence
  Description of Artificial Sequence: Synthetic oligonucleotide
uuggcuuuuauaacagggc

SEQ ID NO: 1430211 - RNA, 19 nt, Artificial Sequence
  Description of Artificial Sequence: Synthetic oligonucleotide
gaguauaacaauuguugac

SEQ ID NO: 1430212 - RNA, 19 nt, Artificial Sequence
  Description of Artificial Sequence: Synthetic oligonucleotide
caggacuaucuaaagaugc

SEQ ID NO: 1430213 - RNA, 19 nt, Artificial Sequence
  Description of Artificial Sequence: Synthetic oligonucleotide
aagguguagagaaaggucu

SEQ ID NO: 1430214 - RNA, 19 nt, Artificial Sequence
  Description of Artificial Sequence: Synthetic oligonucleotide
auaacaauuguugaccuga

SEQ ID NO: 1430215 - RNA, 19 nt, Artificial Sequence
  Description of Artificial Sequence: Synthetic oligonucleotide
caccacuccacuuaaagac

SEQ ID NO: 1430216 - RNA, 19 nt, Artificial Sequence
  Description of Artificial Sequence: Synthetic oligonucleotide
acaauuuguuucuuauaag

SEQ ID NO: 1430217 - RNA, 19 nt, Artificial Sequence
  Description of Artificial Sequence: Synthetic oligonucleotide
agguauucccuuuaaguug

SEQ ID NO: 1430218 - RNA, 19 nt, Artificial Sequence
  Description of Artificial Sequence: Synthetic oligonucleotide
uauguguguuuuaaccaag

SEQ ID NO: 1430219 - RNA, 19 nt, Artificial Sequence
  Description of Artificial Sequence: Synthetic oligonucleotide
agggcaacauauuucugac

SEQ ID NO: 1430220 - RNA, 19 nt, Artificial Sequence
  Description of Artificial Sequence: Synthetic oligonucleotide
auauuauguguuaaggcag

SEQ ID NO: 1430221 - RNA, 19 nt, Artificial Sequence
  Description of Artificial Sequence: Synthetic oligonucleotide
uuauguugauaaauacaca

SEQ ID NO: 1430222 - RNA, 19 nt, Artificial Sequence
  Description of Artificial Sequence: Synthetic oligonucleotide
agaaaggucucgccugugc

SEQ ID NO: 1430223 - RNA, 19 nt, Artificial Sequence
  Description of Artificial Sequence: Synthetic oligonucleotide
ucaagcuuguuccauguuc

SEQ ID NO: 1430224 - RNA, 19 nt, Artificial Sequence
  Description of Artificial Sequence: Synthetic oligonucleotide
ugaacauaaucaccacaag

SEQ ID NO: 1430225 - RNA, 19 nt, Artificial Sequence
  Description of Artificial Sequence: Synthetic oligonucleotide
aacuaugaagucuucuuuu

SEQ ID NO: 1430226 - RNA, 19 nt, Artificial Sequence
  Description of Artificial Sequence: Synthetic oligonucleotide
ugugccguaauagugguca

SEQ ID NO: 1430227 - RNA, 19 nt, Artificial Sequence
  Description of Artificial Sequence: Synthetic oligonucleotide
uuauguguguuuuaaccaa

SEQ ID NO: 1430228 - RNA, 19 nt, Artificial Sequence
  Description of Artificial Sequence: Synthetic oligonucleotide
uaaacacucuguuuucuca

SEQ ID NO: 1430229 - RNA, 19 nt, Artificial Sequence
  Description of Artificial Sequence: Synthetic oligonucleotide
uguagagaguuuucaagcu

SEQ ID NO: 1430230 - RNA, 19 nt, Artificial Sequence
  Description of Artificial Sequence: Synthetic oligonucleotide
ucaacucauacaucuauaa

SEQ ID NO: 1430231 - RNA, 19 nt, Artificial Sequence
  Description of Artificial Sequence: Synthetic oligonucleotide
auauguaaacacagugugc

SEQ ID NO: 1430232 - RNA, 19 nt, Artificial Sequence
  Description of Artificial Sequence: Synthetic oligonucleotide
uccuuuuaauaaucacugg

SEQ ID NO: 1430233 - RNA, 19 nt, Artificial Sequence
  Description of Artificial Sequence: Synthetic oligonucleotide
aacuugaagggaugaguug

SEQ ID NO: 1430234 - RNA, 19 nt, Artificial Sequence
  Description of Artificial Sequence: Synthetic oligonucleotide
cuaaagaacugaugucucc

SEQ ID NO: 1430235 - RNA, 19 nt, Artificial Sequence
  Description of Artificial Sequence: Synthetic oligonucleotide
ucuaaagaacugaugucuc

SEQ ID NO: 1430236 - RNA, 19 nt, Artificial Sequence
  Description of Artificial Sequence: Synthetic oligonucleotide
uaccucuagguccugaacu

SEQ ID NO: 1430237 - RNA, 19 nt, Artificial Sequence
  Description of Artificial Sequence: Synthetic oligonucleotide
uuuuauaacagggcaacau

SEQ ID NO: 1430238 - RNA, 19 nt, Artificial Sequence
  Description of Artificial Sequence: Synthetic oligonucleotide
ugauaaaauaugaguuuuc

SEQ ID NO: 1430239 - RNA, 19 nt, Artificial Sequence
  Description of Artificial Sequence: Synthetic oligonucleotide
uccacguccuuucaguucu

SEQ ID NO: 1430240 - RNA, 19 nt, Artificial Sequence
  Description of Artificial Sequence: Synthetic oligonucleotide
ugcucaacgugcauguucu

SEQ ID NO: 1430241 - RNA, 19 nt, Artificial Sequence
  Description of Artificial Sequence: Synthetic oligonucleotide
uuuggcuauuauuuaauuu

SEQ ID NO: 1430242 - RNA, 19 nt, Artificial Sequence
  Description of Artificial Sequence: Synthetic oligonucleotide
uauaacaauuguugaccug

SEQ ID NO: 1430243 - RNA, 19 nt, Artificial Sequence
  Description of Artificial Sequence: Synthetic oligonucleotide
guucuauugugcuguaugc

SEQ ID NO: 1430244 - RNA, 19 nt, Artificial Sequence
  Description of Artificial Sequence: Synthetic oligonucleotide
cacagugugcuaauuuucc

SEQ ID NO: 1430245 - RNA, 19 nt, Artificial Sequence
  Description of Artificial Sequence: Synthetic oligonucleotide
auacauuugguaaauuaug

SEQ ID NO: 1430246 - RNA, 19 nt, Artificial Sequence
  Description of Artificial Sequence: Synthetic oligonucleotide
ucaacgugcauguucucca

SEQ ID NO: 1430247 - RNA, 19 nt, Artificial Sequence
  Description of Artificial Sequence: Synthetic oligonucleotide
cauggauagccuuguaccc

SEQ ID NO: 1430248 - RNA, 19 nt, Artificial Sequence
  Description of Artificial Sequence: Synthetic oligonucleotide
caacucauguguaugagca

SEQ ID NO: 1430249 - RNA, 19 nt, Artificial Sequence
  Description of Artificial Sequence: Synthetic oligonucleotide
acucauacaucuauaaaca

SEQ ID NO: 1430250 - RNA, 19 nt, Artificial Sequence
  Description of Artificial Sequence: Synthetic oligonucleotide
uguguaugagcagaccaag

SEQ ID NO: 1430251 - RNA, 19 nt, Artificial Sequence
  Description of Artificial Sequence: Synthetic oligonucleotide
auucaacucauacaucuau

SEQ ID NO: 1430252 - RNA, 19 nt, Artificial Sequence
  Description of Artificial Sequence: Synthetic oligonucleotide
guuaucaugcucugagaug

SEQ ID NO: 1430253 - RNA, 19 nt, Artificial Sequence
  Description of Artificial Sequence: Synthetic oligonucleotide
ucuaaaucagauucagcuu

SEQ ID NO: 1430254 - RNA, 19 nt, Artificial Sequence
  Description of Artificial Sequence: Synthetic oligonucleotide
uggacuucagauuucuguc

SEQ ID NO: 1430255 - RNA, 19 nt, Artificial Sequence
  Description of Artificial Sequence: Synthetic oligonucleotide
uugugauagacuacuuuuc

SEQ ID NO: 1430256 - RNA, 19 nt, Artificial Sequence
  Description of Artificial Sequence: Synthetic oligonucleotide
uuagagcauucauuuaaac

SEQ ID NO: 1430257 - RNA, 19 nt, Artificial Sequence
  Description of Artificial Sequence: Synthetic oligonucleotide
uggacaauuuguuucuuau

SEQ ID NO: 1430258 - RNA, 19 nt, Artificial Sequence
  Description of Artificial Sequence: Synthetic oligonucleotide
acuagcauggaauggcagu

SEQ ID NO: 1430259 - RNA, 19 nt, Artificial Sequence
  Description of Artificial Sequence: Synthetic oligonucleotide
aucucaccaacucaugugu

SEQ ID NO: 1430260 - RNA, 19 nt, Artificial Sequence
  Description of Artificial Sequence: Synthetic oligonucleotide
uaacagggcaacauauuuc

SEQ ID NO: 1430261 - RNA, 19 nt, Artificial Sequence
  Description of Artificial Sequence: Synthetic oligonucleotide
gaaaggucucgccugugcc

SEQ ID NO: 1430262 - RNA, 19 nt, Artificial Sequence
  Description of Artificial Sequence: Synthetic oligonucleotide
gugauagacuacuuuucag

SEQ ID NO: 1430263 - RNA, 19 nt, Artificial Sequence
  Description of Artificial Sequence: Synthetic oligonucleotide
aagugugccuggucuacag

SEQ ID NO: 1430264 - RNA, 19 nt, Artificial Sequence
  Description of Artificial Sequence: Synthetic oligonucleotide
aucuaaagaugcugauuuc

SEQ ID NO: 1430265 - RNA, 19 nt, Artificial Sequence
  Description of Artificial Sequence: Synthetic oligonucleotide
aacaauuguugaccugaca

SEQ ID NO: 1430266 - RNA, 19 nt, Artificial Sequence
  Description of Artificial Sequence: Synthetic oligonucleotide
ucaagauguggauuugaaa

SEQ ID NO: 1430267 - RNA, 19 nt, Artificial Sequence
  Description of Artificial Sequence: Synthetic oligonucleotide
gauagacuacuuuucagcu

SEQ ID NO: 1430268 - RNA, 19 nt, Artificial Sequence
  Description of Artificial Sequence: Synthetic oligonucleotide
uguuuuaaccaagaaucuc

SEQ ID NO: 1430269 - RNA, 19 nt, Artificial Sequence
  Description of Artificial Sequence: Synthetic oligonucleotide
cuuauaaggagucuaaaau

SEQ ID NO: 1430270 - RNA, 19 nt, Artificial Sequence
  Description of Artificial Sequence: Synthetic oligonucleotide
uguguguuuuaaccaagaa

SEQ ID NO: 1430271 - RNA, 19 nt, Artificial Sequence
  Description of Artificial Sequence: Synthetic oligonucleotide
ugggaucucaccaacucau

SEQ ID NO: 1430272 - RNA, 19 nt, Artificial Sequence
  Description of Artificial Sequence: Synthetic oligonucleotide
gagaggauaucauuauuaa

SEQ ID NO: 1430273 - RNA, 19 nt, Artificial Sequence
  Description of Artificial Sequence: Synthetic oligonucleotide
uucuauugugcuguaugcc

SEQ ID NO: 1430274 - RNA, 19 nt, Artificial Sequence
  Description of Artificial Sequence: Synthetic oligonucleotide
cuauaaacacucuguuuuc

SEQ ID NO: 1430275 - RNA, 19 nt, Artificial Sequence
  Description of Artificial Sequence: Synthetic oligonucleotide
ucgggcuagcugcucaacg

SEQ ID NO: 1430276 - RNA, 19 nt, Artificial Sequence
  Description of Artificial Sequence: Synthetic oligonucleotide
guaugagcagaccaaguuc

SEQ ID NO: 1430277 - RNA, 19 nt, Artificial Sequence
  Description of Artificial Sequence: Synthetic oligonucleotide
cagauucagcuuuccaucc

SEQ ID NO: 1430278 - RNA, 19 nt, Artificial Sequence
  Description of Artificial Sequence: Synthetic oligonucleotide
uauaacagggcaacauauu

SEQ ID NO: 1430279 - RNA, 19 nt, Artificial Sequence
  Description of Artificial Sequence: Synthetic oligonucleotide
auaccucuagguccugaac

SEQ ID NO: 1430280 - RNA, 19 nt, Artificial Sequence
  Description of Artificial Sequence: Synthetic oligonucleotide
agguccugaacuaugaagu

SEQ ID NO: 1430281 - RNA, 19 nt, Artificial Sequence
  Description of Artificial Sequence: Synthetic oligonucleotide
gaagggaugaguugcauau

SEQ ID NO: 1430282 - RNA, 19 nt, Artificial Sequence
  Description of Artificial Sequence: Synthetic oligonucleotide
aguaagagggcuugucuaa

SEQ ID NO: 1430283 - RNA, 19 nt, Artificial Sequence
  Description of Artificial Sequence: Synthetic oligonucleotide
ugguuauccaugucuuuga

SEQ ID NO: 1430284 - RNA, 19 nt, Artificial Sequence
  Description of Artificial Sequence: Synthetic oligonucleotide
uucaacucauacaucuaua

SEQ ID NO: 1430285 - RNA, 19 nt, Artificial Sequence
  Description of Artificial Sequence: Synthetic oligonucleotide
ugaguugcauaugcucugg

SEQ ID NO: 1430286 - RNA, 19 nt, Artificial Sequence
  Description of Artificial Sequence: Synthetic oligonucleotide
agguauauauuuccacagu

SEQ ID NO: 1430287 - RNA, 19 nt, Artificial Sequence
  Description of Artificial Sequence: Synthetic oligonucleotide
acauaaucaccacaagaua

SEQ ID NO: 1430288 - RNA, 19 nt, Artificial Sequence
  Description of Artificial Sequence: Synthetic oligonucleotide
ugugcuaauuuuccuuuua

SEQ ID NO: 1430289 - RNA, 19 nt, Artificial Sequence
  Description of Artificial Sequence: Synthetic oligonucleotide
gucacucaaauguccauac

SEQ ID NO: 1430290 - RNA, 19 nt, Artificial Sequence
  Description of Artificial Sequence: Synthetic oligonucleotide
guugcauaugcucugguua

SEQ ID NO: 1430291 - RNA, 19 nt, Artificial Sequence
  Description of Artificial Sequence: Synthetic oligonucleotide
auaugaguuuucaccacuc

SEQ ID NO: 1430292 - RNA, 19 nt, Artificial Sequence
  Description of Artificial Sequence: Synthetic oligonucleotide
acuaucuaaagaugcugau

SEQ ID NO: 1430293 - RNA, 19 nt, Artificial Sequence
  Description of Artificial Sequence: Synthetic oligonucleotide
aggagucuaaaauggaaua

SEQ ID NO: 1430294 - RNA, 19 nt, Artificial Sequence
  Description of Artificial Sequence: Synthetic oligonucleotide
ucccauuaguagucuuugg

SEQ ID NO: 1430295 - RNA, 19 nt, Artificial Sequence
  Description of Artificial Sequence: Synthetic oligonucleotide
uuaaggcagccuaaauguc

SEQ ID NO: 1430296 - RNA, 19 nt, Artificial Sequence
  Description of Artificial Sequence: Synthetic oligonucleotide
agugugcuaauuuuccuuu

SEQ ID NO: 1430297 - RNA, 19 nt, Artificial Sequence
  Description of Artificial Sequence: Synthetic oligonucleotide
uggaauggcagugaguaua

SEQ ID NO: 1430298 - RNA, 19 nt, Artificial Sequence
  Description of Artificial Sequence: Synthetic oligonucleotide
ugcaagaguuacugcgucc

SEQ ID NO: 1430299 - RNA, 19 nt, Artificial Sequence
  Description of Artificial Sequence: Synthetic oligonucleotide
ugaugaccaguagaacagg

SEQ ID NO: 1430300 - RNA, 19 nt, Artificial Sequence
  Description of Artificial Sequence: Synthetic oligonucleotide
ggcaacauauuucugacaa

SEQ ID NO: 1430301 - RNA, 19 nt, Artificial Sequence
  Description of Artificial Sequence: Synthetic oligonucleotide
ucaaauuauguguguuuua

SEQ ID NO: 1430302 - RNA, 19 nt, Artificial Sequence
  Description of Artificial Sequence: Synthetic oligonucleotide
gugaacauaaucaccacaa

SEQ ID NO: 1430303 - RNA, 19 nt, Artificial Sequence
  Description of Artificial Sequence: Synthetic oligonucleotide
ugccagucuccauggauag

SEQ ID NO: 1430304 - RNA, 19 nt, Artificial Sequence
  Description of Artificial Sequence: Synthetic oligonucleotide
uugcauaugcucugguuau

SEQ ID NO: 1430305 - RNA, 19 nt, Artificial Sequence
  Description of Artificial Sequence: Synthetic oligonucleotide
uucccauuaguagucuuug

SEQ ID NO: 1430306 - RNA, 19 nt, Artificial Sequence
  Description of Artificial Sequence: Synthetic oligonucleotide
uaacaauuguugaccugac

SEQ ID NO: 1430307 - RNA, 19 nt, Artificial Sequence
  Description of Artificial Sequence: Synthetic oligonucleotide
gauguggauuugaaagcag

SEQ ID NO: 1430308 - RNA, 19 nt, Artificial Sequence
  Description of Artificial Sequence: Synthetic oligonucleotide
guaaauuauguugauaaau

SEQ ID NO: 1430309 - RNA, 19 nt, Artificial Sequence
  Description of Artificial Sequence: Synthetic oligonucleotide
auggcagugaguauaacaa

SEQ ID NO: 1430310 - RNA, 19 nt, Artificial Sequence
  Description of Artificial Sequence: Synthetic oligonucleotide
auaugcucugguuauccau

SEQ ID NO: 1430311 - RNA, 19 nt, Artificial Sequence
  Description of Artificial Sequence: Synthetic oligonucleotide
uuguuaucaugcucugaga

SEQ ID NO: 1430312 - RNA, 19 nt, Artificial Sequence
  Description of Artificial Sequence: Synthetic oligonucleotide
augaccaguagaacaggac

SEQ ID NO: 1430313 - RNA, 19 nt, Artificial Sequence
  Description of Artificial Sequence: Synthetic oligonucleotide
acucauguguaugagcaga

SEQ ID NO: 1430314 - RNA, 19 nt, Artificial Sequence
  Description of Artificial Sequence: Synthetic oligonucleotide
auuaggacugaagguguag

SEQ ID NO: 1430315 - RNA, 19 nt, Artificial Sequence
  Description of Artificial Sequence: Synthetic oligonucleotide
agaugcugauuuccuguag

SEQ ID NO: 1430316 - RNA, 19 nt, Artificial Sequence
  Description of Artificial Sequence: Synthetic oligonucleotide
aagauauuccugggaucuc

SEQ ID NO: 1430317 - RNA, 19 nt, Artificial Sequence
  Description of Artificial Sequence: Synthetic oligonucleotide
cuagcauggaauggcagug

SEQ ID NO: 1430318 - RNA, 19 nt, Artificial Sequence
  Description of Artificial Sequence: Synthetic oligonucleotide
aacuagcauggaauggcag

SEQ ID NO: 1430319 - RNA, 19 nt, Artificial Sequence
  Description of Artificial Sequence: Synthetic oligonucleotide
aaacuagcauggaauggca

SEQ ID NO: 1430320 - RNA, 19 nt, Artificial Sequence
  Description of Artificial Sequence: Synthetic oligonucleotide
acacagugugcuaauuuuc

SEQ ID NO: 1430321 - RNA, 19 nt, Artificial Sequence
  Description of Artificial Sequence: Synthetic oligonucleotide
gagggcuugucuaacccag

SEQ ID NO: 1430322 - RNA, 19 nt, Artificial Sequence
  Description of Artificial Sequence: Synthetic oligonucleotide
uuuucucaagauguggauu

SEQ ID NO: 1430323 - RNA, 19 nt, Artificial Sequence
  Description of Artificial Sequence: Synthetic oligonucleotide
cucaacgugcauguucucc

SEQ ID NO: 1430324 - RNA, 19 nt, Artificial Sequence
  Description of Artificial Sequence: Synthetic oligonucleotide
aguuuucaagcuuguucca

SEQ ID NO: 1430325 - RNA, 19 nt, Artificial Sequence
  Description of Artificial Sequence: Synthetic oligonucleotide
gaaucucaaugggagaauc

SEQ ID NO: 1430326 - RNA, 19 nt, Artificial Sequence
  Description of Artificial Sequence: Synthetic oligonucleotide
cagggcaacauauuucuga

SEQ ID NO: 1430327 - RNA, 19 nt, Artificial Sequence
  Description of Artificial Sequence: Synthetic oligonucleotide
uccaccaccgaguucuaaa

SEQ ID NO: 1430328 - RNA, 19 nt, Artificial Sequence
  Description of Artificial Sequence: Synthetic oligonucleotide
caauuguugaccugacaga

SEQ ID NO: 1430329 - RNA, 19 nt, Artificial Sequence
  Description of Artificial Sequence: Synthetic oligonucleotide
guugaccugacagaggcca

SEQ ID NO: 1430330 - RNA, 19 nt, Artificial Sequence
  Description of Artificial Sequence: Synthetic oligonucleotide
guagaacaggacuaucuaa

SEQ ID NO: 1430331 - RNA, 19 nt, Artificial Sequence
  Description of Artificial Sequence: Synthetic oligonucleotide
uguacccuggcuggaaggc

SEQ ID NO: 1430332 - RNA, 19 nt, Artificial Sequence
  Description of Artificial Sequence: Synthetic oligonucleotide
ugaagggaugaguugcaua

SEQ ID NO: 1430333 - RNA, 19 nt, Artificial Sequence
  Description of Artificial Sequence: Synthetic oligonucleotide
agugaguauaacaauuguu

SEQ ID NO: 1430334 - RNA, 19 nt, Artificial Sequence
  Description of Artificial Sequence: Synthetic oligonucleotide
ucucaagauguggauuuga

SEQ ID NO: 1430335 - RNA, 19 nt, Artificial Sequence
  Description of Artificial Sequence: Synthetic oligonucleotide
acugcguccaugguauaag

SEQ ID NO: 1430336 - RNA, 19 nt, Artificial Sequence
  Description of Artificial Sequence: Synthetic oligonucleotide
cccauuaguagucuuuggc

SEQ ID NO: 1430337 - RNA, 19 nt, Artificial Sequence
  Description of Artificial Sequence: Synthetic oligonucleotide
cucaguggguaccuuucag

SEQ ID NO: 1430338 - RNA, 19 nt, Artificial Sequence
  Description of Artificial Sequence: Synthetic oligonucleotide
uaaguuguccacguccuuu

SEQ ID NO: 1430339 - RNA, 19 nt, Artificial Sequence
  Description of Artificial Sequence: Synthetic oligonucleotide
ugucacucaaauguccaua

SEQ ID NO: 1430340 - RNA, 19 nt, Artificial Sequence
  Description of Artificial Sequence: Synthetic oligonucleotide
uugguaaauuauguugaua

SEQ ID NO: 1430341 - RNA, 19 nt, Artificial Sequence
  Description of Artificial Sequence: Synthetic oligonucleotide
gagcagaccaaguucaaau

SEQ ID NO: 1430342 - RNA, 19 nt, Artificial Sequence
  Description of Artificial Sequence: Synthetic oligonucleotide
auaaucaccacaagauauu

SEQ ID NO: 1430343 - RNA, 19 nt, Artificial Sequence
  Description of Artificial Sequence: Synthetic oligonucleotide
cucgccugugccguaauag

SEQ ID NO: 1430344 - RNA, 19 nt, Artificial Sequence
  Description of Artificial Sequence: Synthetic oligonucleotide
agcagaccaaguucaaauu

SEQ ID NO: 1430345 - RNA, 19 nt, Artificial Sequence
  Description of Artificial Sequence: Synthetic oligonucleotide
agaccaaguucaaauuaug

SEQ ID NO: 1430346 - RNA, 19 nt, Artificial Sequence
  Description of Artificial Sequence: Synthetic oligonucleotide
uugugcuguaugccagucu

SEQ ID NO: 1430347 - RNA, 19 nt, Artificial Sequence
  Description of Artificial Sequence: Synthetic oligonucleotide
aaggucucgccugugccgu

SEQ ID NO: 1430348 - RNA, 19 nt, Artificial Sequence
  Description of Artificial Sequence: Synthetic oligonucleotide
cugcucaacgugcauguuc

SEQ ID NO: 1430349 - RNA, 19 nt, Artificial Sequence
  Description of Artificial Sequence: Synthetic oligonucleotide
auacacaaggcagguauau

SEQ ID NO: 1430350 - RNA, 19 nt, Artificial Sequence
  Description of Artificial Sequence: Synthetic oligonucleotide
auguggauuugaaagcagu

SEQ ID NO: 1430351 - RNA, 19 nt, Artificial Sequence
  Description of Artificial Sequence: Synthetic oligonucleotide
ugucuccauugauaaaaua

SEQ ID NO: 1430352 - RNA, 19 nt, Artificial Sequence
  Description of Artificial Sequence: Synthetic oligonucleotide
uugucuaacccagucuuuu

SEQ ID NO: 1430353 - RNA, 19 nt, Artificial Sequence
  Description of Artificial Sequence: Synthetic oligonucleotide
caagaaucucaaugggaga

SEQ ID NO: 1430354 - RNA, 19 nt, Artificial Sequence
  Description of Artificial Sequence: Synthetic oligonucleotide
ccuaaaugucacucaaaug

SEQ ID NO: 1430355 - RNA, 19 nt, Artificial Sequence
  Description of Artificial Sequence: Synthetic oligonucleotide
cugaacuugaagggaugag

SEQ ID NO: 1430356 - RNA, 19 nt, Artificial Sequence
  Description of Artificial Sequence: Synthetic oligonucleotide
ucgccugugccguaauagu

SEQ ID NO: 1430357 - RNA, 19 nt, Artificial Sequence
  Description of Artificial Sequence: Synthetic oligonucleotide
caagauauuccugggaucu

SEQ ID NO: 1430358 - RNA, 19 nt, Artificial Sequence
  Description of Artificial Sequence: Synthetic oligonucleotide
gaacuaugaagucuucuuu

SEQ ID NO: 1430359 - RNA, 19 nt, Artificial Sequence
  Description of Artificial Sequence: Synthetic oligonucleotide
uucucaagauguggauuug

SEQ ID NO: 1430360 - RNA, 19 nt, Artificial Sequence
  Description of Artificial Sequence: Synthetic oligonucleotide
acguccuuucaguucuucu

SEQ ID NO: 1430361 - RNA, 19 nt, Artificial Sequence
  Description of Artificial Sequence: Synthetic oligonucleotide
cuugaagggaugaguugca

SEQ ID NO: 1430362 - RNA, 19 nt, Artificial Sequence
  Description of Artificial Sequence: Synthetic oligonucleotide
caacgugcauguucuccag

SEQ ID NO: 1430363 - RNA, 19 nt, Artificial Sequence
  Description of Artificial Sequence: Synthetic oligonucleotide
uuaaguuguccacguccuu

SEQ ID NO: 1430364 - RNA, 19 nt, Artificial Sequence
  Description of Artificial Sequence: Synthetic oligonucleotide
ucugguuauccaugucuuu

SEQ ID NO: 1430365 - RNA, 19 nt, Artificial Sequence
  Description of Artificial Sequence: Synthetic oligonucleotide
guuacugcguccaugguau

SEQ ID NO: 1430366 - RNA, 19 nt, Artificial Sequence
  Description of Artificial Sequence: Synthetic oligonucleotide
ggauaucauuauuaaaagu

SEQ ID NO: 1430367 - RNA, 19 nt, Artificial Sequence
  Description of Artificial Sequence: Synthetic oligonucleotide
cuggaaggcaucgggcuag

SEQ ID NO: 1430368 - RNA, 19 nt, Artificial Sequence
  Description of Artificial Sequence: Synthetic oligonucleotide
uaaauacacaaggcaggua

SEQ ID NO: 1430369 - RNA, 19 nt, Artificial Sequence
  Description of Artificial Sequence: Synthetic oligonucleotide
aauuaggacugaaggugua

SEQ ID NO: 1430370 - RNA, 19 nt, Artificial Sequence
  Description of Artificial Sequence: Synthetic oligonucleotide
augucacucaaauguccau

SEQ ID NO: 1430371 - RNA, 19 nt, Artificial Sequence
  Description of Artificial Sequence: Synthetic oligonucleotide
cacaagauauuccugggau

SEQ ID NO: 1430372 - RNA, 19 nt, Artificial Sequence
  Description of Artificial Sequence: Synthetic oligonucleotide
accgaguucuaaagaacug

SEQ ID NO: 1430373 - RNA, 19 nt, Artificial Sequence
  Description of Artificial Sequence: Synthetic oligonucleotide
agucagguauucccuuuaa

SEQ ID NO: 1430374 - RNA, 19 nt, Artificial Sequence
  Description of Artificial Sequence: Synthetic oligonucleotide
gaccaguagaacaggacua

SEQ ID NO: 1430375 - RNA, 19 nt, Artificial Sequence
  Description of Artificial Sequence: Synthetic oligonucleotide
auguguaugagcagaccaa

SEQ ID NO: 1430376 - RNA, 19 nt, Artificial Sequence
  Description of Artificial Sequence: Synthetic oligonucleotide
auguguguuuuaaccaaga

SEQ ID NO: 1430377 - RNA, 19 nt, Artificial Sequence
  Description of Artificial Sequence: Synthetic oligonucleotide
gccguaauaguggucacug

SEQ ID NO: 1430378 - RNA, 19 nt, Artificial Sequence
  Description of Artificial Sequence: Synthetic oligonucleotide
gccugugccguaauagugg

SEQ ID NO: 1430379 - RNA, 19 nt, Artificial Sequence
  Description of Artificial Sequence: Synthetic oligonucleotide
uucaagcuuguuccauguu

SEQ ID NO: 1430380 - RNA, 19 nt, Artificial Sequence
  Description of Artificial Sequence: Synthetic oligonucleotide
cauaugcucugguuaucca

SEQ ID NO: 1430381 - RNA, 19 nt, Artificial Sequence
  Description of Artificial Sequence: Synthetic oligonucleotide
uuucaccacuccacuuaaa

SEQ ID NO: 1430382 - RNA, 19 nt, Artificial Sequence
  Description of Artificial Sequence: Synthetic oligonucleotide
guaagagggcuugucuaac

SEQ ID NO: 1430383 - RNA, 19 nt, Artificial Sequence
  Description of Artificial Sequence: Synthetic oligonucleotide
gcauaugcucugguuaucc

SEQ ID NO: 1430384 - RNA, 19 nt, Artificial Sequence
  Description of Artificial Sequence: Synthetic oligonucleotide
caguaagagggcuugucua

SEQ ID NO: 1430385 - RNA, 19 nt, Artificial Sequence
  Description of Artificial Sequence: Synthetic oligonucleotide
cagguauucccuuuaaguu

SEQ ID NO: 1430386 - RNA, 19 nt, Artificial Sequence
  Description of Artificial Sequence: Synthetic oligonucleotide
accaguagaacaggacuau

SEQ ID NO: 1430387 - RNA, 19 nt, Artificial Sequence
  Description of Artificial Sequence: Synthetic oligonucleotide
agaaucucaaugggagaau

SEQ ID NO: 1430388 - RNA, 19 nt, Artificial Sequence
  Description of Artificial Sequence: Synthetic oligonucleotide
caccgaguucuaaagaacu

SEQ ID NO: 1430389 - RNA, 19 nt, Artificial Sequence
  Description of Artificial Sequence: Synthetic oligonucleotide
uacugcguccaugguauaa

SEQ ID NO: 1430390 - RNA, 19 nt, Artificial Sequence
  Description of Artificial Sequence: Synthetic oligonucleotide
caauaacuauacauuuggu

SEQ ID NO: 1430391 - RNA, 19 nt, Artificial Sequence
  Description of Artificial Sequence: Synthetic oligonucleotide
cuuuuauaacagggcaaca

SEQ ID NO: 1430392 - RNA, 19 nt, Artificial Sequence
  Description of Artificial Sequence: Synthetic oligonucleotide
agagaguuuucaagcuugu

SEQ ID NO: 1430393 - RNA, 19 nt, Artificial Sequence
  Description of Artificial Sequence: Synthetic oligonucleotide
uaucaugcucugagaugau

SEQ ID NO: 1430394 - RNA, 19 nt, Artificial Sequence
  Description of Artificial Sequence: Synthetic oligonucleotide
ugccguaauaguggucacu

SEQ ID NO: 1430395 - RNA, 19 nt, Artificial Sequence
  Description of Artificial Sequence: Synthetic oligonucleotide
cugggaucucaccaacuca

SEQ ID NO: 1430396 - RNA, 19 nt, Artificial Sequence
  Description of Artificial Sequence: Synthetic oligonucleotide
gggagaaucucggugaaaa

SEQ ID NO: 1430397 - RNA, 19 nt, Artificial Sequence
  Description of Artificial Sequence: Synthetic oligonucleotide
ggagucuaaaauggaauaa

SEQ ID NO: 1430398 - RNA, 19 nt, Artificial Sequence
  Description of Artificial Sequence: Synthetic oligonucleotide
cauaccucuagguccugaa

SEQ ID NO: 1430399 - RNA, 19 nt, Artificial Sequence
  Description of Artificial Sequence: Synthetic oligonucleotide
ugcucugguuauccauguc

SEQ ID NO: 1430400 - RNA, 19 nt, Artificial Sequence
  Description of Artificial Sequence: Synthetic oligonucleotide
cagaccaaguucaaauuau

SEQ ID NO: 1430401 - RNA, 19 nt, Artificial Sequence
  Description of Artificial Sequence: Synthetic oligonucleotide
gcauuguuaucaugcucug

SEQ ID NO: 1430402 - RNA, 19 nt, Artificial Sequence
  Description of Artificial Sequence: Synthetic oligonucleotide
gcauucauuuaaacuagca

SEQ ID NO: 1430403 - RNA, 19 nt, Artificial Sequence
  Description of Artificial Sequence: Synthetic oligonucleotide
gguccugaacuaugaaguc

SEQ ID NO: 1430404 - RNA, 19 nt, Artificial Sequence
  Description of Artificial Sequence: Synthetic oligonucleotide
ccaccaccgaguucuaaag

SEQ ID NO: 1430405 - RNA, 19 nt, Artificial Sequence
  Description of Artificial Sequence: Synthetic oligonucleotide
guagagaguuuucaagcuu

SEQ ID NO: 1430406 - RNA, 19 nt, Artificial Sequence
  Description of Artificial Sequence: Synthetic oligonucleotide
ugcauaugcucugguuauc

SEQ ID NO: 1430407 - RNA, 19 nt, Artificial Sequence
  Description of Artificial Sequence: Synthetic oligonucleotide
gguauucccuuuaaguugu

SEQ ID NO: 1430408 - RNA, 19 nt, Artificial Sequence
  Description of Artificial Sequence: Synthetic oligonucleotide
aucgggcuagcugcucaac

SEQ ID NO: 1430409 - RNA, 19 nt, Artificial Sequence
  Description of Artificial Sequence: Synthetic oligonucleotide
cagugaguauaacaauugu

SEQ ID NO: 1430410 - RNA, 19 nt, Artificial Sequence
  Description of Artificial Sequence: Synthetic oligonucleotide
gagaaaggucucgccugug

SEQ ID NO: 1430411 - RNA, 19 nt, Artificial Sequence
  Description of Artificial Sequence: Synthetic oligonucleotide
ccugggaucucaccaacuc

SEQ ID NO: 1430412 - RNA, 19 nt, Artificial Sequence
  Description of Artificial Sequence: Synthetic oligonucleotide
cauuguuaucaugcucuga

SEQ ID NO: 1430413 - RNA, 19 nt, Artificial Sequence
  Description of Artificial Sequence: Synthetic oligonucleotide
ggacaauuuguuucuuaua

SEQ ID NO: 1430414 - RNA, 19 nt, Artificial Sequence
  Description of Artificial Sequence: Synthetic oligonucleotide
ccauuaguagucuuuggcu

SEQ ID NO: 1430415 - RNA, 19 nt, Artificial Sequence
  Description of Artificial Sequence: Synthetic oligonucleotide
ggaucucaccaacucaugu

SEQ ID NO: 1430416 - RNA, 19 nt, Artificial Sequence
  Description of Artificial Sequence: Synthetic oligonucleotide
accuugaaauuaggacuga

SEQ ID NO: 1430417 - RNA, 19 nt, Artificial Sequence
  Description of Artificial Sequence: Synthetic oligonucleotide
cuagguccugaacuaugaa

SEQ ID NO: 1430418 - RNA, 19 nt, Artificial Sequence
  Description of Artificial Sequence: Synthetic oligonucleotide
ggcuagcugcucaacgugc

SEQ ID NO: 1430419 - RNA, 19 nt, Artificial Sequence
  Description of Artificial Sequence: Synthetic oligonucleotide
ucucgccugugccguaaua

SEQ ID NO: 1430420 - RNA, 19 nt, Artificial Sequence
  Description of Artificial Sequence: Synthetic oligonucleotide
caccaccgaguucuaaaga

SEQ ID NO: 1430421 - RNA, 19 nt, Artificial Sequence
  Description of Artificial Sequence: Synthetic oligonucleotide
gggcuugucuaacccaguc

SEQ ID NO: 1430422 - RNA, 19 nt, Artificial Sequence
  Description of Artificial Sequence: Synthetic oligonucleotide
gcuugucuaacccagucuu

SEQ ID NO: 1430423 - RNA, 19 nt, Artificial Sequence
  Description of Artificial Sequence: Synthetic oligonucleotide
cucaccaacucauguguau

SEQ ID NO: 1430424 - RNA, 19 nt, Artificial Sequence
  Description of Artificial Sequence: Synthetic oligonucleotide
cugaacuaugaagucuucu

SEQ ID NO: 1430425 - RNA, 19 nt, Artificial Sequence
  Description of Artificial Sequence: Synthetic oligonucleotide
ugggagaaucucggugaaa

SEQ ID NO: 1430426 - RNA, 19 nt, Artificial Sequence
  Description of Artificial Sequence: Synthetic oligonucleotide
cugugccguaauagugguc

SEQ ID NO: 1430427 - RNA, 19 nt, Artificial Sequence
  Description of Artificial Sequence: Synthetic oligonucleotide
gugccguaauaguggucac

SEQ ID NO: 1430428 - RNA, 19 nt, Artificial Sequence
  Description of Artificial Sequence: Synthetic oligonucleotide
agccuaaaugucacucaaa

SEQ ID NO: 1430429 - RNA, 19 nt, Artificial Sequence
  Description of Artificial Sequence: Synthetic oligonucleotide
gaguugcauaugcucuggu

SEQ ID NO: 1430430 - RNA, 19 nt, Artificial Sequence
  Description of Artificial Sequence: Synthetic oligonucleotide
ccaggagcgcgcugguggg

SEQ ID NO: 1430431 - RNA, 19 nt, Artificial Sequence
  Description of Artificial Sequence: Synthetic oligonucleotide
ccgaguucuaaagaacuga

SEQ ID NO: 1430432 - RNA, 19 nt, Artificial Sequence
  Description of Artificial Sequence: Synthetic oligonucleotide
gggcaacauauuucugaca

SEQ ID NO: 1430433 - RNA, 19 nt, Artificial Sequence
  Description of Artificial Sequence: Synthetic oligonucleotide
cacaaggcagguauauauu

SEQ ID NO: 1430434 - RNA, 19 nt, Artificial Sequence
  Description of Artificial Sequence: Synthetic oligonucleotide
guccauaccucuagguccu

SEQ ID NO: 1430435 - RNA, 19 nt, Artificial Sequence
  Description of Artificial Sequence: Synthetic oligonucleotide
guguuaaggcagccuaaau

SEQ ID NO: 1430436 - RNA, 19 nt, Artificial Sequence
  Description of Artificial Sequence: Synthetic oligonucleotide
uuacugcguccaugguaua

SEQ ID NO: 1430437 - RNA, 19 nt, Artificial Sequence
  Description of Artificial Sequence: Synthetic oligonucleotide
ggcagugaguauaacaauu

SEQ ID NO: 1430438 - RNA, 19 nt, Artificial Sequence
  Description of Artificial Sequence: Synthetic oligonucleotide
ccuuuaaguuguccacguc

SEQ ID NO: 1430439 - RNA, 19 nt, Artificial Sequence
  Description of Artificial Sequence: Synthetic oligonucleotide
cuuccuccuccuccuccuc

SEQ ID NO: 1430440 - RNA, 19 nt, Artificial Sequence
  Description of Artificial Sequence: Synthetic oligonucleotide
guacccuggcuggaaggca

SEQ ID NO: 1430441 - RNA, 19 nt, Artificial Sequence
  Description of Artificial Sequence: Synthetic oligonucleotide
augagcagaccaaguucaa

SEQ ID NO: 1430442 - RNA, 19 nt, Artificial Sequence
  Description of Artificial Sequence: Synthetic oligonucleotide
ccugaacuaugaagucuuc

SEQ ID NO: 1430443 - RNA, 19 nt, Artificial Sequence
  Description of Artificial Sequence: Synthetic oligonucleotide
uccauaccucuagguccug

SEQ ID NO: 1430444 - RNA, 19 nt, Artificial Sequence
  Description of Artificial Sequence: Synthetic oligonucleotide
ggcuugucuaacccagucu

SEQ ID NO: 1430445 - RNA, 19 nt, Artificial Sequence
  Description of Artificial Sequence: Synthetic oligonucleotide
cauuugugauagacuacuu

SEQ ID NO: 1430446 - RNA, 19 nt, Artificial Sequence
  Description of Artificial Sequence: Synthetic oligonucleotide
uaguagucuuuggcuuuua

SEQ ID NO: 1430447 - RNA, 19 nt, Artificial Sequence
  Description of Artificial Sequence: Synthetic oligonucleotide
gaguuacugcguccauggu

SEQ ID NO: 1430448 - RNA, 19 nt, Artificial Sequence
  Description of Artificial Sequence: Synthetic oligonucleotide
cgccugugccguaauagug

SEQ ID NO: 1430449 - RNA, 19 nt, Artificial Sequence
  Description of Artificial Sequence: Synthetic oligonucleotide
caggagcgcgcuggugggg

SEQ ID NO: 1430450 - RNA, 19 nt, Artificial Sequence
  Description of Artificial Sequence: Synthetic oligonucleotide
cugcguccaugguauaagu

SEQ ID NO: 1430451 - RNA, 19 nt, Artificial Sequence
  Description of Artificial Sequence: Synthetic oligonucleotide
agggcuugucuaacccagu

SEQ ID NO: 1430452 - RNA, 19 nt, Artificial Sequence
  Description of Artificial Sequence: Synthetic oligonucleotide
ccaguagaacaggacuauc

SEQ ID NO: 1430453 - RNA, 19 nt, Artificial Sequence
  Description of Artificial Sequence: Synthetic oligonucleotide
cccuuuaaguuguccacgu

SEQ ID NO: 1430454 - RNA, 19 nt, Artificial Sequence
  Description of Artificial Sequence: Synthetic oligonucleotide
cuagcugcucaacgugcau

SEQ ID NO: 1430455 - RNA, 19 nt, Artificial Sequence
  Description of Artificial Sequence: Synthetic oligonucleotide
ccuugaaauuaggacugaa

SEQ ID NO: 1430456 - RNA, 19 nt, Artificial Sequence
  Description of Artificial Sequence: Synthetic oligonucleotide
gcaucuagccacagaccaa

SEQ ID NO: 1430457 - RNA, 19 nt, Artificial Sequence
  Description of Artificial Sequence: Synthetic oligonucleotide
ccguaauaguggucacuga

SEQ ID NO: 1430458 - RNA, 19 nt, Artificial Sequence
  Description of Artificial Sequence: Synthetic oligonucleotide
caagaguuacugcguccau

SEQ ID NO: 1430459 - RNA, 19 nt, Artificial Sequence
  Description of Artificial Sequence: Synthetic oligonucleotide
gccagucuccauggauagc

SEQ ID NO: 1430460 - RNA, 19 nt, Artificial Sequence
  Description of Artificial Sequence: Synthetic oligonucleotide
ccucaguggguaccuuuca

SEQ ID NO: 1430461 - RNA, 19 nt, Artificial Sequence
  Description of Artificial Sequence: Synthetic oligonucleotide
cgaguucuaaagaacugau

SEQ ID NO: 1430462 - RNA, 19 nt, Artificial Sequence
  Description of Artificial Sequence: Synthetic oligonucleotide
ccugugccguaauaguggu

SEQ ID NO: 1430463 - RNA, 19 nt, Artificial Sequence
  Description of Artificial Sequence: Synthetic oligonucleotide
gcauggaauggcagugagu

SEQ ID NO: 1430464 - RNA, 19 nt, Artificial Sequence
  Description of Artificial Sequence: Synthetic oligonucleotide
ggucucgccugugccguaa

SEQ ID NO: 1430465 - RNA, 19 nt, Artificial Sequence
  Description of Artificial Sequence: Synthetic oligonucleotide
ggcaucgggcuagcugcuc

SEQ ID NO: 1430466 - RNA, 19 nt, Artificial Sequence
  Description of Artificial Sequence: Synthetic oligonucleotide
ccauaccucuagguccuga

SEQ ID NO: 1430467 - RNA, 19 nt, Artificial Sequence
  Description of Artificial Sequence: Synthetic oligonucleotide
gucucgccugugccguaau

SEQ ID NO: 1430468 - RNA, 19 nt, Artificial Sequence
  Description of Artificial Sequence: Synthetic oligonucleotide
cagaggccacuggacaauu

SEQ ID NO: 1430469 - RNA, 19 nt, Artificial Sequence
  Description of Artificial Sequence: Synthetic oligonucleotide
ggguaccuuucagaaucuu

SEQ ID NO: 1430470 - RNA, 19 nt, Artificial Sequence
  Description of Artificial Sequence: Synthetic oligonucleotide
ccucuagguccugaacuau

SEQ ID NO: 1430471 - RNA, 19 nt, Artificial Sequence
  Description of Artificial Sequence: Synthetic oligonucleotide
gcugcucaacgugcauguu

SEQ ID NO: 1430472 - RNA, 19 nt, Artificial Sequence
  Description of Artificial Sequence: Synthetic oligonucleotide
gcgcgcugguggggcugca

SEQ ID NO: 1430473 - RNA, 19 nt, Artificial Sequence
  Description of Artificial Sequence: Synthetic oligonucleotide
uuuaugaggaucaaaaggg

SEQ ID NO: 1430474 - RNA, 19 nt, Artificial Sequence
  Description of Artificial Sequence: Synthetic oligonucleotide
uuuucuaacgauauuuugg

SEQ ID NO: 1430475 - RNA, 19 nt, Artificial Sequence
  Description of Artificial Sequence: Synthetic oligonucleotide
uuucuaacgauauuuuggg

SEQ ID NO: 1430476 - RNA, 19 nt, Artificial Sequence
  Description of Artificial Sequence: Synthetic oligonucleotide
aaagcggucacuucgaacu

SEQ ID NO: 1430477 - RNA, 19 nt, Artificial Sequence
  Description of Artificial Sequence: Synthetic oligonucleotide
aaagucagccaucugggcg

SEQ ID NO: 1430478 - RNA, 19 nt, Artificial Sequence
  Description of Artificial Sequence: Synthetic oligonucleotide
auguuguccaaauuggggc

SEQ ID NO: 1430479 - RNA, 19 nt, Artificial Sequence
  Description of Artificial Sequence: Synthetic oligonucleotide
ucagcuaagccuccgagcg

SEQ ID NO: 1430480 - RNA, 19 nt, Artificial Sequence
  Description of Artificial Sequence: Synthetic oligonucleotide
auagaaagcggucacuucg

SEQ ID NO: 1430481 - RNA, 19 nt, Artificial Sequence
  Description of Artificial Sequence: Synthetic oligonucleotide
agaucugcuacaaagggcc

SEQ ID NO: 1430482 - RNA, 19 nt, Artificial Sequence
  Description of Artificial Sequence: Synthetic oligonucleotide
ucuaacagcuccuuaagac

SEQ ID NO: 1430483 - RNA, 19 nt, Artificial Sequence
  Description of Artificial Sequence: Synthetic oligonucleotide
agcuccuuaagacaugugg

SEQ ID NO: 1430484 - RNA, 19 nt, Artificial Sequence
  Description of Artificial Sequence: Synthetic oligonucleotide
ucuaacgauauuuugggau

SEQ ID NO: 1430485 - RNA, 19 nt, Artificial Sequence
  Description of Artificial Sequence: Synthetic oligonucleotide
agaaccacagaguguagcg

SEQ ID NO: 1430486 - RNA, 19 nt, Artificial Sequence
  Description of Artificial Sequence: Synthetic oligonucleotide
ugcgacaccagccagggca

SEQ ID NO: 1430487 - RNA, 19 nt, Artificial Sequence
  Description of Artificial Sequence: Synthetic oligonucleotide
cuuguauuggucagaagug

SEQ ID NO: 1430488 - RNA, 19 nt, Artificial Sequence
  Description of Artificial Sequence: Synthetic oligonucleotide
uggagucacaaacucauac

SEQ ID NO: 1430489 - RNA, 19 nt, Artificial Sequence
  Description of Artificial Sequence: Synthetic oligonucleotide
aggcaaucagaucugcuac

SEQ ID NO: 1430490 - RNA, 19 nt, Artificial Sequence
  Description of Artificial Sequence: Synthetic oligonucleotide
acaugccucacguacuccc

SEQ ID NO: 1430491 - RNA, 19 nt, Artificial Sequence
  Description of Artificial Sequence: Synthetic oligonucleotide
gugaucaggagcaauagcc

SEQ ID NO: 1430492 - RNA, 19 nt, Artificial Sequence
  Description of Artificial Sequence: Synthetic oligonucleotide
cuaacgauauuuugggaug

SEQ ID NO: 1430493 - RNA, 19 nt, Artificial Sequence
  Description of Artificial Sequence: Synthetic oligonucleotide
auguuuaggauguugucca

SEQ ID NO: 1430494 - RNA, 19 nt, Artificial Sequence
  Description of Artificial Sequence: Synthetic oligonucleotide
uugaccaucacaagccucu

SEQ ID NO: 1430495 - RNA, 19 nt, Artificial Sequence
  Description of Artificial Sequence: Synthetic oligonucleotide
aaugggaguggcccagacg

SEQ ID NO: 1430496 - RNA, 19 nt, Artificial Sequence
  Description of Artificial Sequence: Synthetic oligonucleotide
ucaucagcuaaucgcaaca

SEQ ID NO: 1430497 - RNA, 19 nt, Artificial Sequence
  Description of Artificial Sequence: Synthetic oligonucleotide
gaguacaugccucacguac

SEQ ID NO: 1430498 - RNA, 19 nt, Artificial Sequence
  Description of Artificial Sequence: Synthetic oligonucleotide
cauguuuaggauguugucc

SEQ ID NO: 1430499 - RNA, 19 nt, Artificial Sequence
  Description of Artificial Sequence: Synthetic oligonucleotide
aucgcaacacuucuuuccg

SEQ ID NO: 1430500 - RNA, 19 nt, Artificial Sequence
  Description of Artificial Sequence: Synthetic oligonucleotide
uucgaacucccauuguucc

SEQ ID NO: 1430501 - RNA, 19 nt, Artificial Sequence
  Description of Artificial Sequence: Synthetic oligonucleotide
uuaugaggaucaaaagggu

SEQ ID NO: 1430502 - RNA, 19 nt, Artificial Sequence
  Description of Artificial Sequence: Synthetic oligonucleotide
uucgggguucccaugcucg

SEQ ID NO: 1430503 - RNA, 19 nt, Artificial Sequence
  Description of Artificial Sequence: Synthetic oligonucleotide
aagauccgcgguuucgggg

SEQ ID NO: 1430504 - RNA, 19 nt, Artificial Sequence
  Description of Artificial Sequence: Synthetic oligonucleotide
ucagcuaaucgcaacacuu

SEQ ID NO: 1430505 - RNA, 19 nt, Artificial Sequence
  Description of Artificial Sequence: Synthetic oligonucleotide
uaugaggaucaaaaggguc

SEQ ID NO: 1430506 - RNA, 19 nt, Artificial Sequence
  Description of Artificial Sequence: Synthetic oligonucleotide
guggggacaaccuugacca

SEQ ID NO: 1430507 - RNA, 19 nt, Artificial Sequence
  Description of Artificial Sequence: Synthetic oligonucleotide
uucuuuccgguucagggcu

SEQ ID NO: 1430508 - RNA, 19 nt, Artificial Sequence
  Description of Artificial Sequence: Synthetic oligonucleotide
ugaucaggagcaauagccu

SEQ ID NO: 1430509 - RNA, 19 nt, Artificial Sequence
  Description of Artificial Sequence: Synthetic oligonucleotide
acucccauuguuccucagc

SEQ ID NO: 1430510 - RNA, 19 nt, Artificial Sequence
  Description of Artificial Sequence: Synthetic oligonucleotide
ucacuucgaacucccauug

SEQ ID NO: 1430511 - RNA, 19 nt, Artificial Sequence
  Description of Artificial Sequence: Synthetic oligonucleotide
gggacugucuuuucuaacg

SEQ ID NO: 1430512 - RNA, 19 nt, Artificial Sequence
  Description of Artificial Sequence: Synthetic oligonucleotide
caaagucucuugcugcugg

SEQ ID NO: 1430513 - RNA, 19 nt, Artificial Sequence
  Description of Artificial Sequence: Synthetic oligonucleotide
ugucagcuaagccuccgag

SEQ ID NO: 1430514 - RNA, 19 nt, Artificial Sequence
  Description of Artificial Sequence: Synthetic oligonucleotide
aaucgcgcgcucguggggc

SEQ ID NO: 1430515 - RNA, 19 nt, Artificial Sequence
  Description of Artificial Sequence: Synthetic oligonucleotide
uugguaucaggagaggugu

SEQ ID NO: 1430516 - RNA, 19 nt, Artificial Sequence
  Description of Artificial Sequence: Synthetic oligonucleotide
cagaucugcuacaaagggc

SEQ ID NO: 1430517 - RNA, 19 nt, Artificial Sequence
  Description of Artificial Sequence: Synthetic oligonucleotide
cuguuaucggcuguggugc

SEQ ID NO: 1430518 - RNA, 19 nt, Artificial Sequence
  Description of Artificial Sequence: Synthetic oligonucleotide
cuaacagcuccuuaagaca

SEQ ID NO: 1430519 - RNA, 19 nt, Artificial Sequence
  Description of Artificial Sequence: Synthetic oligonucleotide
uucugagucucgcagccac

SEQ ID NO: 1430520 - RNA, 19 nt, Artificial Sequence
  Description of Artificial Sequence: Synthetic oligonucleotide
caguaguugagagugauca

SEQ ID NO: 1430521 - RNA, 19 nt, Artificial Sequence
  Description of Artificial Sequence: Synthetic oligonucleotide
uagaaagcggucacuucga

SEQ ID NO: 1430522 - RNA, 19 nt, Artificial Sequence
  Description of Artificial Sequence: Synthetic oligonucleotide
aaagggcccaaggucgaac

SEQ ID NO: 1430523 - RNA, 19 nt, Artificial Sequence
  Description of Artificial Sequence: Synthetic oligonucleotide
gaucaugccauccaguaau

SEQ ID NO: 1430524 - RNA, 19 nt, Artificial Sequence
  Description of Artificial Sequence: Synthetic oligonucleotide
gauagaaagcggucacuuc

SEQ ID NO: 1430525 - RNA, 19 nt, Artificial Sequence
  Description of Artificial Sequence: Synthetic oligonucleotide
cuucgaacucccauuguuc

SEQ ID NO: 1430526 - RNA, 19 nt, Artificial Sequence
  Description of Artificial Sequence: Synthetic oligonucleotide
uucuaacgauauuuuggga

SEQ ID NO: 1430527 - RNA, 19 nt, Artificial Sequence
  Description of Artificial Sequence: Synthetic oligonucleotide
aagcggucacuucgaacuc

SEQ ID NO: 1430528 - RNA, 19 nt, Artificial Sequence
  Description of Artificial Sequence: Synthetic oligonucleotide
aggaaucgcgcgcucgugg

SEQ ID NO: 1430529 - RNA, 19 nt, Artificial Sequence
  Description of Artificial Sequence: Synthetic oligonucleotide
agggcugaccggaaguucc

SEQ ID NO: 1430530 - RNA, 19 nt, Artificial Sequence
  Description of Artificial Sequence: Synthetic oligonucleotide
cagaguguagcguggggag

SEQ ID NO: 1430531 - RNA, 19 nt, Artificial Sequence
  Description of Artificial Sequence: Synthetic oligonucleotide
ugcaaguccacgguucuca

SEQ ID NO: 1430532 - RNA, 19 nt, Artificial Sequence
  Description of Artificial Sequence: Synthetic oligonucleotide
uaagccuccgagcgcuggg

SEQ ID NO: 1430533 - RNA, 19 nt, Artificial Sequence
  Description of Artificial Sequence: Synthetic oligonucleotide
ucugagucucgcagccacg

SEQ ID NO: 1430534 - RNA, 19 nt, Artificial Sequence
  Description of Artificial Sequence: Synthetic oligonucleotide
uccacgguucucagugagg

SEQ ID NO: 1430535 - RNA, 19 nt, Artificial Sequence
  Description of Artificial Sequence: Synthetic oligonucleotide
aagggcccaaggucgaaca

SEQ ID NO: 1430536 - RNA, 19 nt, Artificial Sequence
  Description of Artificial Sequence: Synthetic oligonucleotide
aguggguuuuccuggggug

SEQ ID NO: 1430537 - RNA, 19 nt, Artificial Sequence
  Description of Artificial Sequence: Synthetic oligonucleotide
uguccuuggggaccucucc

SEQ ID NO: 1430538 - RNA, 19 nt, Artificial Sequence
  Description of Artificial Sequence: Synthetic oligonucleotide
gaaagcggucacuucgaac

SEQ ID NO: 1430539 - RNA, 19 nt, Artificial Sequence
  Description of Artificial Sequence: Synthetic oligonucleotide
uaacgauauuuugggauga

SEQ ID NO: 1430540 - RNA, 19 nt, Artificial Sequence
  Description of Artificial Sequence: Synthetic oligonucleotide
cucgauagaaagcggucac

SEQ ID NO: 1430541 - RNA, 19 nt, Artificial Sequence
  Description of Artificial Sequence: Synthetic oligonucleotide
uccccuacacagaaccaca

SEQ ID NO: 1430542 - RNA, 19 nt, Artificial Sequence
  Description of Artificial Sequence: Synthetic oligonucleotide
ugccucacguacucccucg

SEQ ID NO: 1430543 - RNA, 19 nt, Artificial Sequence
  Description of Artificial Sequence: Synthetic oligonucleotide
gaccggaaguuccucuucc

SEQ ID NO: 1430544 - RNA, 19 nt, Artificial Sequence
  Description of Artificial Sequence: Synthetic oligonucleotide
aucagcuaaucgcaacacu

SEQ ID NO: 1430545 - RNA, 19 nt, Artificial Sequence
  Description of Artificial Sequence: Synthetic oligonucleotide
ggauccggaaccgagugcg

SEQ ID NO: 1430546 - RNA, 19 nt, Artificial Sequence
  Description of Artificial Sequence: Synthetic oligonucleotide
agauccgcgguuucggggu

SEQ ID NO: 1430547 - RNA, 19 nt, Artificial Sequence
  Description of Artificial Sequence: Synthetic oligonucleotide
gucagcuaagccuccgagc

SEQ ID NO: 1430548 - RNA, 19 nt, Artificial Sequence
  Description of Artificial Sequence: Synthetic oligonucleotide
caacacuucuuuccgguuc

SEQ ID NO: 1430549 - RNA, 19 nt, Artificial Sequence
  Description of Artificial Sequence: Synthetic oligonucleotide
guaggccuuguauugguca

SEQ ID NO: 1430550 - RNA, 19 nt, Artificial Sequence
  Description of Artificial Sequence: Synthetic oligonucleotide
ucgcaacacuucuuuccgg

SEQ ID NO: 1430551 - RNA, 19 nt, Artificial Sequence
  Description of Artificial Sequence: Synthetic oligonucleotide
uuauccuuuccuggggugu

SEQ ID NO: 1430552 - RNA, 19 nt, Artificial Sequence
  Description of Artificial Sequence: Synthetic oligonucleotide
acguacucccucgcaagcc

SEQ ID NO: 1430553 - RNA, 19 nt, Artificial Sequence
  Description of Artificial Sequence: Synthetic oligonucleotide
ucgaacacgccuccauccu

SEQ ID NO: 1430554 - RNA, 19 nt, Artificial Sequence
  Description of Artificial Sequence: Synthetic oligonucleotide
ugaaggcaaucagaucugc

SEQ ID NO: 1430555 - RNA, 19 nt, Artificial Sequence
  Description of Artificial Sequence: Synthetic oligonucleotide
caagccucuugacccacgg

SEQ ID NO: 1430556 - RNA, 19 nt, Artificial Sequence
  Description of Artificial Sequence: Synthetic oligonucleotide
guggggaguguccacuucc

SEQ ID NO: 1430557 - RNA, 19 nt, Artificial Sequence
  Description of Artificial Sequence: Synthetic oligonucleotide
gucaucagcuaaucgcaac

SEQ ID NO: 1430558 - RNA, 19 nt, Artificial Sequence
  Description of Artificial Sequence: Synthetic oligonucleotide
ucauacacuuuaugaggau

SEQ ID NO: 1430559 - RNA, 19 nt, Artificial Sequence
  Description of Artificial Sequence: Synthetic oligonucleotide
auuggucagaagugaggga

SEQ ID NO: 1430560 - RNA, 19 nt, Artificial Sequence
  Description of Artificial Sequence: Synthetic oligonucleotide
uaaucgcaacacuucuuuc

SEQ ID NO: 1430561 - RNA, 19 nt, Artificial Sequence
  Description of Artificial Sequence: Synthetic oligonucleotide
caagauccgcgguuucggg

SEQ ID NO: 1430562 - RNA, 19 nt, Artificial Sequence
  Description of Artificial Sequence: Synthetic oligonucleotide
gagguguccagauguacaa

SEQ ID NO: 1430563 - RNA, 19 nt, Artificial Sequence
  Description of Artificial Sequence: Synthetic oligonucleotide
acagaguguagcgugggga

SEQ ID NO: 1430564 - RNA, 19 nt, Artificial Sequence
  Description of Artificial Sequence: Synthetic oligonucleotide
ggaucaaaaggguccuugc

SEQ ID NO: 1430565 - RNA, 19 nt, Artificial Sequence
  Description of Artificial Sequence: Synthetic oligonucleotide
cugggcaaaagagugucug

SEQ ID NO: 1430566 - RNA, 19 nt, Artificial Sequence
  Description of Artificial Sequence: Synthetic oligonucleotide
ggcaguguccuguuaucgg

SEQ ID NO: 1430567 - RNA, 19 nt, Artificial Sequence
  Description of Artificial Sequence: Synthetic oligonucleotide
cuugaccaucacaagccuc

SEQ ID NO: 1430568 - RNA, 19 nt, Artificial Sequence
  Description of Artificial Sequence: Synthetic oligonucleotide
gcuuaggugucuccagugg

SEQ ID NO: 1430569 - RNA, 19 nt, Artificial Sequence
  Description of Artificial Sequence: Synthetic oligonucleotide
uccuguuaucggcuguggu

SEQ ID NO: 1430570 - RNA, 19 nt, Artificial Sequence
  Description of Artificial Sequence: Synthetic oligonucleotide
cuugacccacggcuggucc

SEQ ID NO: 1430571 - RNA, 19 nt, Artificial Sequence
  Description of Artificial Sequence: Synthetic oligonucleotide
gaguguagcguggggagug

SEQ ID NO: 1430572 - RNA, 19 nt, Artificial Sequence
  Description of Artificial Sequence: Synthetic oligonucleotide
auccggaaccgagugcggc

SEQ ID NO: 1430573 - RNA, 19 nt, Artificial Sequence
  Description of Artificial Sequence: Synthetic oligonucleotide
aggagggguuccaagauca

SEQ ID NO: 1430574 - RNA, 19 nt, Artificial Sequence
  Description of Artificial Sequence: Synthetic oligonucleotide
gaaucgcgcgcucgugggg

SEQ ID NO: 1430575 - RNA, 19 nt, Artificial Sequence
  Description of Artificial Sequence: Synthetic oligonucleotide
caaccuugaccaucacaag

SEQ ID NO: 1430576 - RNA, 19 nt, Artificial Sequence
  Description of Artificial Sequence: Synthetic oligonucleotide
gcggccucgauagaaagcg

SEQ ID NO: 1430577 - RNA, 19 nt, Artificial Sequence
  Description of Artificial Sequence: Synthetic oligonucleotide
caucugggcguccugccgc

SEQ ID NO: 1430578 - RNA, 19 nt, Artificial Sequence
  Description of Artificial Sequence: Synthetic oligonucleotide
uguuaucggcuguggugcc

SEQ ID NO: 1430579 - RNA, 19 nt, Artificial Sequence
  Description of Artificial Sequence: Synthetic oligonucleotide
ucgaacucccauuguuccu

SEQ ID NO: 1430580 - RNA, 19 nt, Artificial Sequence
  Description of Artificial Sequence: Synthetic oligonucleotide
ucgggguucccaugcucgg

SEQ ID NO: 1430581 - RNA, 19 nt, Artificial Sequence
  Description of Artificial Sequence: Synthetic oligonucleotide
auuggggcuuggcaguagu

SEQ ID NO: 1430582 - RNA, 19 nt, Artificial Sequence
  Description of Artificial Sequence: Synthetic oligonucleotide
agagguguccagauguaca

SEQ ID NO: 1430583 - RNA, 19 nt, Artificial Sequence
  Description of Artificial Sequence: Synthetic oligonucleotide
caccaaguccuggagguag

SEQ ID NO: 1430584 - RNA, 19 nt, Artificial Sequence
  Description of Artificial Sequence: Synthetic oligonucleotide
aguacaugccucacguacu

SEQ ID NO: 1430585 - RNA, 19 nt, Artificial Sequence
  Description of Artificial Sequence: Synthetic oligonucleotide
guccacgguucucagugag

SEQ ID NO: 1430586 - RNA, 19 nt, Artificial Sequence
  Description of Artificial Sequence: Synthetic oligonucleotide
ccuguuaucggcuguggug

SEQ ID NO: 1430587 - RNA, 19 nt, Artificial Sequence
  Description of Artificial Sequence: Synthetic oligonucleotide
caaggucgaacacgccucc

SEQ ID NO: 1430588 - RNA, 19 nt, Artificial Sequence
  Description of Artificial Sequence: Synthetic oligonucleotide
uuucgggguucccaugcuc

SEQ ID NO: 1430589 - RNA, 19 nt, Artificial Sequence
  Description of Artificial Sequence: Synthetic oligonucleotide
uuaucggcuguggugccca

SEQ ID NO: 1430590 - RNA, 19 nt, Artificial Sequence
  Description of Artificial Sequence: Synthetic oligonucleotide
caaaagagugucugcugga

SEQ ID NO: 1430591 - RNA, 19 nt, Artificial Sequence
  Description of Artificial Sequence: Synthetic oligonucleotide
agcuaagccuccgagcgcu

SEQ ID NO: 1430592 - RNA, 19 nt, Artificial Sequence
  Description of Artificial Sequence: Synthetic oligonucleotide
ggaaucgcgcgcucguggg

SEQ ID NO: 1430593 - RNA, 19 nt, Artificial Sequence
  Description of Artificial Sequence: Synthetic oligonucleotide
ccuuaagacauguggggac

SEQ ID NO: 1430594 - RNA, 19 nt, Artificial Sequence
  Description of Artificial Sequence: Synthetic oligonucleotide
gcaguguccuguuaucggc

SEQ ID NO: 1430595 - RNA, 19 nt, Artificial Sequence
  Description of Artificial Sequence: Synthetic oligonucleotide
guacaugccucacguacuc

SEQ ID NO: 1430596 - RNA, 19 nt, Artificial Sequence
  Description of Artificial Sequence: Synthetic oligonucleotide
caucagcuaaucgcaacac

SEQ ID NO: 1430597 - RNA, 19 nt, Artificial Sequence
  Description of Artificial Sequence: Synthetic oligonucleotide
gguaucaggagaggugucc

SEQ ID NO: 1430598 - RNA, 19 nt, Artificial Sequence
  Description of Artificial Sequence: Synthetic oligonucleotide
cacagaguguagcgugggg

SEQ ID NO: 1430599 - RNA, 19 nt, Artificial Sequence
  Description of Artificial Sequence: Synthetic oligonucleotide
agagugaucaggagcaaua

SEQ ID NO: 1430600 - RNA, 19 nt, Artificial Sequence
  Description of Artificial Sequence: Synthetic oligonucleotide
acugucuuuucuaacgaua

SEQ ID NO: 1430601 - RNA, 19 nt, Artificial Sequence
  Description of Artificial Sequence: Synthetic oligonucleotide
ucgauagaaagcggucacu

SEQ ID NO: 1430602 - RNA, 19 nt, Artificial Sequence
  Description of Artificial Sequence: Synthetic oligonucleotide
ccuuguauuggucagaagu

SEQ ID NO: 1430603 - RNA, 19 nt, Artificial Sequence
  Description of Artificial Sequence: Synthetic oligonucleotide
ucuuuccgguucagggcug

SEQ ID NO: 1430604 - RNA, 19 nt, Artificial Sequence
  Description of Artificial Sequence: Synthetic oligonucleotide
uggggaguguccacuuccu

SEQ ID NO: 1430605 - RNA, 19 nt, Artificial Sequence
  Description of Artificial Sequence: Synthetic oligonucleotide
cacguacucccucgcaagc

SEQ ID NO: 1430606 - RNA, 19 nt, Artificial Sequence
  Description of Artificial Sequence: Synthetic oligonucleotide
cugagucucgcagccacgc

SEQ ID NO: 1430607 - RNA, 19 nt, Artificial Sequence
  Description of Artificial Sequence: Synthetic oligonucleotide
cacgccuuucagcugcccc

SEQ ID NO: 1430608 - RNA, 19 nt, Artificial Sequence
  Description of Artificial Sequence: Synthetic oligonucleotide
agacauguggggacaaccu

SEQ ID NO: 1430609 - RNA, 19 nt, Artificial Sequence
  Description of Artificial Sequence: Synthetic oligonucleotide
aacacgccuccauccuugu

SEQ ID NO: 1430610 - RNA, 19 nt, Artificial Sequence
  Description of Artificial Sequence: Synthetic oligonucleotide
aacgauauuuugggaugaa

SEQ ID NO: 1430611 - RNA, 19 nt, Artificial Sequence
  Description of Artificial Sequence: Synthetic oligonucleotide
aacagcuccuuaagacaug

SEQ ID NO: 1430612 - RNA, 19 nt, Artificial Sequence
  Description of Artificial Sequence: Synthetic oligonucleotide
uccggaaccgagugcggcu

SEQ ID NO: 1430613 - RNA, 19 nt, Artificial Sequence
  Description of Artificial Sequence: Synthetic oligonucleotide
gagagguguccagauguac

SEQ ID NO: 1430614 - RNA, 19 nt, Artificial Sequence
  Description of Artificial Sequence: Synthetic oligonucleotide
cuccccuacacagaaccac

SEQ ID NO: 1430615 - RNA, 19 nt, Artificial Sequence
  Description of Artificial Sequence: Synthetic oligonucleotide
ugagucucgcagccacgca

SEQ ID NO: 1430616 - RNA, 19 nt, Artificial Sequence
  Description of Artificial Sequence: Synthetic oligonucleotide
ugguggcauaaacugcuuu

SEQ ID NO: 1430617 - RNA, 19 nt, Artificial Sequence
  Description of Artificial Sequence: Synthetic oligonucleotide
guucagggcugaccggaag

SEQ ID NO: 1430618 - RNA, 19 nt, Artificial Sequence
  Description of Artificial Sequence: Synthetic oligonucleotide
cucuaacagcuccuuaaga

SEQ ID NO: 1430619 - RNA, 19 nt, Artificial Sequence
  Description of Artificial Sequence: Synthetic oligonucleotide
cauuguuccucagcuagca

SEQ ID NO: 1430620 - RNA, 19 nt, Artificial Sequence
  Description of Artificial Sequence: Synthetic oligonucleotide
gaucugcuacaaagggccc

SEQ ID NO: 1430621 - RNA, 19 nt, Artificial Sequence
  Description of Artificial Sequence: Synthetic oligonucleotide
cucgcccacugucuggaag

SEQ ID NO: 1430622 - RNA, 19 nt, Artificial Sequence
  Description of Artificial Sequence: Synthetic oligonucleotide
gggaguguccacuuccuuc

SEQ ID NO: 1430623 - RNA, 19 nt, Artificial Sequence
  Description of Artificial Sequence: Synthetic oligonucleotide
agccuccgagcgcugggac

SEQ ID NO: 1430624 - RNA, 19 nt, Artificial Sequence
  Description of Artificial Sequence: Synthetic oligonucleotide
ccacgucuccccuacacag

SEQ ID NO: 1430625 - RNA, 19 nt, Artificial Sequence
  Description of Artificial Sequence: Synthetic oligonucleotide
gcaagauccgcgguuucgg

SEQ ID NO: 1430626 - RNA, 19 nt, Artificial Sequence
  Description of Artificial Sequence: Synthetic oligonucleotide
agaaagcggucacuucgaa

SEQ ID NO: 1430627 - RNA, 19 nt, Artificial Sequence
  Description of Artificial Sequence: Synthetic oligonucleotide
uuccugggguguaggcacc

SEQ ID NO: 1430628 - RNA, 19 nt, Artificial Sequence
  Description of Artificial Sequence: Synthetic oligonucleotide
cuaagccuccgagcgcugg

SEQ ID NO: 1430629 - RNA, 19 nt, Artificial Sequence
  Description of Artificial Sequence: Synthetic oligonucleotide
cuaaucgcaacacuucuuu

SEQ ID NO: 1430630 - RNA, 19 nt, Artificial Sequence
  Description of Artificial Sequence: Synthetic oligonucleotide
caaauuggggcuuggcagu

SEQ ID NO: 1430631 - RNA, 19 nt, Artificial Sequence
  Description of Artificial Sequence: Synthetic oligonucleotide
ucaugccauccaguaauuc

SEQ ID NO: 1430632 - RNA, 19 nt, Artificial Sequence
  Description of Artificial Sequence: Synthetic oligonucleotide
ugaguacaugccucacgua

SEQ ID NO: 1430633 - RNA, 19 nt, Artificial Sequence
  Description of Artificial Sequence: Synthetic oligonucleotide
ggcuuaggugucuccagug

SEQ ID NO: 1430634 - RNA, 19 nt, Artificial Sequence
  Description of Artificial Sequence: Synthetic oligonucleotide
ugguaucaggagagguguc

SEQ ID NO: 1430635 - RNA, 19 nt, Artificial Sequence
  Description of Artificial Sequence: Synthetic oligonucleotide
cacggcugguccuggggcc

SEQ ID NO: 1430636 - RNA, 19 nt, Artificial Sequence
  Description of Artificial Sequence: Synthetic oligonucleotide
aaccgagugcggcucucau

SEQ ID NO: 1430637 - RNA, 19 nt, Artificial Sequence
  Description of Artificial Sequence: Synthetic oligonucleotide
uacaugccucacguacucc

SEQ ID NO: 1430638 - RNA, 19 nt, Artificial Sequence
  Description of Artificial Sequence: Synthetic oligonucleotide
aucugcuacaaagggccca

SEQ ID NO: 1430639 - RNA, 19 nt, Artificial Sequence
  Description of Artificial Sequence: Synthetic oligonucleotide
aaauuggggcuuggcagua

SEQ ID NO: 1430640 - RNA, 19 nt, Artificial Sequence
  Description of Artificial Sequence: Synthetic oligonucleotide
accggaaguuccucuucca

SEQ ID NO: 1430641 - RNA, 19 nt, Artificial Sequence
  Description of Artificial Sequence: Synthetic oligonucleotide
aggucgaacacgccuccau

SEQ ID NO: 1430642 - RNA, 19 nt, Artificial Sequence
  Description of Artificial Sequence: Synthetic oligonucleotide
uggcaguaguugagaguga

SEQ ID NO: 1430643 - RNA, 19 nt, Artificial Sequence
  Description of Artificial Sequence: Synthetic oligonucleotide
ggcaagauccgcgguuucg

SEQ ID NO: 1430644 - RNA, 19 nt, Artificial Sequence
  Description of Artificial Sequence: Synthetic oligonucleotide
gauccggaaccgagugcgg

SEQ ID NO: 1430645 - RNA, 19 nt, Artificial Sequence
  Description of Artificial Sequence: Synthetic oligonucleotide
agaccuggcggccucgaua

SEQ ID NO: 1430646 - RNA, 19 nt, Artificial Sequence
  Description of Artificial Sequence: Synthetic oligonucleotide
gacagacugcuuuugccau

SEQ ID NO: 1430647 - RNA, 19 nt, Artificial Sequence
  Description of Artificial Sequence: Synthetic oligonucleotide
cuuggggaccucuccguca

SEQ ID NO: 1430648 - RNA, 19 nt, Artificial Sequence
  Description of Artificial Sequence: Synthetic oligonucleotide
ucccagugguucugagucu

SEQ ID NO: 1430649 - RNA, 19 nt, Artificial Sequence
  Description of Artificial Sequence: Synthetic oligonucleotide
ggggauccggaaccgagug

SEQ ID NO: 1430650 - RNA, 19 nt, Artificial Sequence
  Description of Artificial Sequence: Synthetic oligonucleotide
cuguggugcccaccagccg

SEQ ID NO: 1430651 - RNA, 19 nt, Artificial Sequence
  Description of Artificial Sequence: Synthetic oligonucleotide
cucacguacucccucgcaa

SEQ ID NO: 1430652 - RNA, 19 nt, Artificial Sequence
  Description of Artificial Sequence: Synthetic oligonucleotide
cagugguucugagucucgc

SEQ ID NO: 1430653 - RNA, 19 nt, Artificial Sequence
  Description of Artificial Sequence: Synthetic oligonucleotide
ccaaggucgaacacgccuc

SEQ ID NO: 1430654 - RNA, 19 nt, Artificial Sequence
  Description of Artificial Sequence: Synthetic oligonucleotide
aucggcuguggugcccacc

SEQ ID NO: 1430655 - RNA, 19 nt, Artificial Sequence
  Description of Artificial Sequence: Synthetic oligonucleotide
ugacccacggcugguccug

SEQ ID NO: 1430656 - RNA, 19 nt, Artificial Sequence
  Description of Artificial Sequence: Synthetic oligonucleotide
guccuguuaucggcugugg

SEQ ID NO: 1430657 - RNA, 19 nt, Artificial Sequence
  Description of Artificial Sequence: Synthetic oligonucleotide
acacgccuccauccuuguc

SEQ ID NO: 1430658 - RNA, 19 nt, Artificial Sequence
  Description of Artificial Sequence: Synthetic oligonucleotide
gggguuccaagaucaugcc

SEQ ID NO: 1430659 - RNA, 19 nt, Artificial Sequence
  Description of Artificial Sequence: Synthetic oligonucleotide
ggugccauguuuaggaugu

SEQ ID NO: 1430660 - RNA, 19 nt, Artificial Sequence
  Description of Artificial Sequence: Synthetic oligonucleotide
uauccuuuccuggggugua

SEQ ID NO: 1430661 - RNA, 19 nt, Artificial Sequence
  Description of Artificial Sequence: Synthetic oligonucleotide
gggcccaaggucgaacacg

SEQ ID NO: 1430662 - RNA, 19 nt, Artificial Sequence
  Description of Artificial Sequence: Synthetic oligonucleotide
cuuggcaguaguugagagu

SEQ ID NO: 1430663 - RNA, 19 nt, Artificial Sequence
  Description of Artificial Sequence: Synthetic oligonucleotide
cagcuaagccuccgagcgc

SEQ ID NO: 1430664 - RNA, 19 nt, Artificial Sequence
  Description of Artificial Sequence: Synthetic oligonucleotide
gucacuucgaacucccauu

SEQ ID NO: 1430665 - RNA, 19 nt, Artificial Sequence
  Description of Artificial Sequence: Synthetic oligonucleotide
gugcggcucucauccagcc

SEQ ID NO: 1430666 - RNA, 19 nt, Artificial Sequence
  Description of Artificial Sequence: Synthetic oligonucleotide
ggcccaaggucgaacacgc

SEQ ID NO: 1430667 - RNA, 19 nt, Artificial Sequence
  Description of Artificial Sequence: Synthetic oligonucleotide
ggaucagacagacugcuuu

SEQ ID NO: 1430668 - RNA, 19 nt, Artificial Sequence
  Description of Artificial Sequence: Synthetic oligonucleotide
aaggucgaacacgccucca

SEQ ID NO: 1430669 - RNA, 19 nt, Artificial Sequence
  Description of Artificial Sequence: Synthetic oligonucleotide
aagaccuggcggccucgau

SEQ ID NO: 1430670 - RNA, 19 nt, Artificial Sequence
  Description of Artificial Sequence: Synthetic oligonucleotide
ccauuguuccucagcuagc

SEQ ID NO: 1430671 - RNA, 19 nt, Artificial Sequence
  Description of Artificial Sequence: Synthetic oligonucleotide
guccaaauuggggcuuggc

SEQ ID NO: 1430672 - RNA, 19 nt, Artificial Sequence
  Description of Artificial Sequence: Synthetic oligonucleotide
gggacaaccuugaccauca

SEQ ID NO: 1430673 - RNA, 19 nt, Artificial Sequence
  Description of Artificial Sequence: Synthetic oligonucleotide
caggcccucgcccacuguc

SEQ ID NO: 1430674 - RNA, 19 nt, Artificial Sequence
  Description of Artificial Sequence: Synthetic oligonucleotide
gaggaaucgcgcgcucgug

SEQ ID NO: 1430675 - RNA, 19 nt, Artificial Sequence
  Description of Artificial Sequence: Synthetic oligonucleotide
agcguggggaguguccacu

SEQ ID NO: 1430676 - RNA, 19 nt, Artificial Sequence
  Description of Artificial Sequence: Synthetic oligonucleotide
uggggaccucuccgucagg

SEQ ID NO: 1430677 - RNA, 19 nt, Artificial Sequence
  Description of Artificial Sequence: Synthetic oligonucleotide
gcaaguccacgguucucag

SEQ ID NO: 1430678 - RNA, 19 nt, Artificial Sequence
  Description of Artificial Sequence: Synthetic oligonucleotide
ggucgaacacgccuccauc

SEQ ID NO: 1430679 - RNA, 19 nt, Artificial Sequence
  Description of Artificial Sequence: Synthetic oligonucleotide
gacaccagccagggcaaga

SEQ ID NO: 1430680 - RNA, 19 nt, Artificial Sequence
  Description of Artificial Sequence: Synthetic oligonucleotide
ggcgccggggccaacacug

SEQ ID NO: 1430681 - RNA, 19 nt, Artificial Sequence
  Description of Artificial Sequence: Synthetic oligonucleotide
ggguuccaagaucaugcca

SEQ ID NO: 1430682 - RNA, 19 nt, Artificial Sequence
  Description of Artificial Sequence: Synthetic oligonucleotide
ucgggccggggaggaaucg

SEQ ID NO: 1430683 - RNA, 19 nt, Artificial Sequence
  Description of Artificial Sequence: Synthetic oligonucleotide
uccgcgguuucgggguucc

SEQ ID NO: 1430684 - RNA, 19 nt, Artificial Sequence
  Description of Artificial Sequence: Synthetic oligonucleotide
gggaggaaucgcgcgcucg

SEQ ID NO: 1430685 - RNA, 19 nt, Artificial Sequence
  Description of Artificial Sequence: Synthetic oligonucleotide
acucccucgcaagccuguc

SEQ ID NO: 1430686 - RNA, 19 nt, Artificial Sequence
  Description of Artificial Sequence: Synthetic oligonucleotide
cagcuccuuaagacaugug

SEQ ID NO: 1430687 - RNA, 19 nt, Artificial Sequence
  Description of Artificial Sequence: Synthetic oligonucleotide
gggauccggaaccgagugc

SEQ ID NO: 1430688 - RNA, 19 nt, Artificial Sequence
  Description of Artificial Sequence: Synthetic oligonucleotide
uggcuucggcccaggccug

SEQ ID NO: 1430689 - RNA, 19 nt, Artificial Sequence
  Description of Artificial Sequence: Synthetic oligonucleotide
ggccacgucuccccuacac

SEQ ID NO: 1430690 - RNA, 19 nt, Artificial Sequence
  Description of Artificial Sequence: Synthetic oligonucleotide
ccccuacacagaaccacag

SEQ ID NO: 1430691 - RNA, 19 nt, Artificial Sequence
  Description of Artificial Sequence: Synthetic oligonucleotide
uagcguggggaguguccac

SEQ ID NO: 1430692 - RNA, 19 nt, Artificial Sequence
  Description of Artificial Sequence: Synthetic oligonucleotide
ccaucacaagccucuugac

SEQ ID NO: 1430693 - RNA, 19 nt, Artificial Sequence
  Description of Artificial Sequence: Synthetic oligonucleotide
aggggauccggaaccgagu

SEQ ID NO: 1430694 - RNA, 19 nt, Artificial Sequence
  Description of Artificial Sequence: Synthetic oligonucleotide
ccagugguucugagucucg

SEQ ID NO: 1430695 - RNA, 19 nt, Artificial Sequence
  Description of Artificial Sequence: Synthetic oligonucleotide
cugucagcuaagccuccga

SEQ ID NO: 1430696 - RNA, 19 nt, Artificial Sequence
  Description of Artificial Sequence: Synthetic oligonucleotide
guggcauaaacugcuuuau

SEQ ID NO: 1430697 - RNA, 19 nt, Artificial Sequence
  Description of Artificial Sequence: Synthetic oligonucleotide
gaaccgagugcggcucuca

SEQ ID NO: 1430698 - RNA, 19 nt, Artificial Sequence
  Description of Artificial Sequence: Synthetic oligonucleotide
ggggacaaccuugaccauc

SEQ ID NO: 1430699 - RNA, 19 nt, Artificial Sequence
  Description of Artificial Sequence: Synthetic oligonucleotide
gggaguggcccagacgcug

SEQ ID NO: 1430700 - RNA, 19 nt, Artificial Sequence
  Description of Artificial Sequence: Synthetic oligonucleotide
ucucgcagccacgcacccu

SEQ ID NO: 1430701 - RNA, 19 nt, Artificial Sequence
  Description of Artificial Sequence: Synthetic oligonucleotide
gcagcuaagcagggcuuag

SEQ ID NO: 1430702 - RNA, 19 nt, Artificial Sequence
  Description of Artificial Sequence: Synthetic oligonucleotide
uccuuccaugaaggcaauc

SEQ ID NO: 1430703 - RNA, 19 nt, Artificial Sequence
  Description of Artificial Sequence: Synthetic oligonucleotide
cucgggccggggaggaauc

SEQ ID NO: 1430704 - RNA, 19 nt, Artificial Sequence
  Description of Artificial Sequence: Synthetic oligonucleotide
gccuuguauuggucagaag

SEQ ID NO: 1430705 - RNA, 19 nt, Artificial Sequence
  Description of Artificial Sequence: Synthetic oligonucleotide
cacuggcuucggcccaggc

SEQ ID NO: 1430706 - RNA, 19 nt, Artificial Sequence
  Description of Artificial Sequence: Synthetic oligonucleotide
cuggcggccucgauagaaa

SEQ ID NO: 1430707 - RNA, 19 nt, Artificial Sequence
  Description of Artificial Sequence: Synthetic oligonucleotide
gggccggggaggaaucgcg

SEQ ID NO: 1430708 - RNA, 19 nt, Artificial Sequence
  Description of Artificial Sequence: Synthetic oligonucleotide
ccaugcucgggccggggag

SEQ ID NO: 1430709 - RNA, 19 nt, Artificial Sequence
  Description of Artificial Sequence: Synthetic oligonucleotide
gaagaccuggcggccucga

SEQ ID NO: 1430710 - RNA, 19 nt, Artificial Sequence
  Description of Artificial Sequence: Synthetic oligonucleotide
uaucggcuguggugcccac

SEQ ID NO: 1430711 - RNA, 19 nt, Artificial Sequence
  Description of Artificial Sequence: Synthetic oligonucleotide
gcuuauccuuuccuggggu

SEQ ID NO: 1430712 - RNA, 19 nt, Artificial Sequence
  Description of Artificial Sequence: Synthetic oligonucleotide
ggcggccucgauagaaagc

SEQ ID NO: 1430713 - RNA, 19 nt, Artificial Sequence
  Description of Artificial Sequence: Synthetic oligonucleotide
ucguggggcgccggggcca

SEQ ID NO: 1430714 - RNA, 19 nt, Artificial Sequence
  Description of Artificial Sequence: Synthetic oligonucleotide
ggggccacgucuccccuac

SEQ ID NO: 1430715 - RNA, 19 nt, Artificial Sequence
  Description of Artificial Sequence: Synthetic oligonucleotide
auccgcgguuucgggguuc

SEQ ID NO: 1430716 - RNA, 19 nt, Artificial Sequence
  Description of Artificial Sequence: Synthetic oligonucleotide
caguggguuuuccuggggu

SEQ ID NO: 1430717 - RNA, 19 nt, Artificial Sequence
  Description of Artificial Sequence: Synthetic oligonucleotide
ccucgauagaaagcgguca

SEQ ID NO: 1430718 - RNA, 19 nt, Artificial Sequence
  Description of Artificial Sequence: Synthetic oligonucleotide
ccugucagcuaagccuccg

SEQ ID NO: 1430719 - RNA, 19 nt, Artificial Sequence
  Description of Artificial Sequence: Synthetic oligonucleotide
caagccugucugucagaaa

SEQ ID NO: 1430720 - RNA, 19 nt, Artificial Sequence
  Description of Artificial Sequence: Synthetic oligonucleotide
gccacgucuccccuacaca

SEQ ID NO: 1430721 - RNA, 19 nt, Artificial Sequence
  Description of Artificial Sequence: Synthetic oligonucleotide
cugcuacaaagggcccaag

SEQ ID NO: 1430722 - RNA, 19 nt, Artificial Sequence
  Description of Artificial Sequence: Synthetic oligonucleotide
guuucgggguucccaugcu

SEQ ID NO: 1430723 - RNA, 19 nt, Artificial Sequence
  Description of Artificial Sequence: Synthetic oligonucleotide
gccuggaagaugccaaagu

SEQ ID NO: 1430724 - RNA, 19 nt, Artificial Sequence
  Description of Artificial Sequence: Synthetic oligonucleotide
ggcuuggcaguaguugaga

SEQ ID NO: 1430725 - RNA, 19 nt, Artificial Sequence
  Description of Artificial Sequence: Synthetic oligonucleotide
cuuuccgguucagggcuga

SEQ ID NO: 1430726 - RNA, 19 nt, Artificial Sequence
  Description of Artificial Sequence: Synthetic oligonucleotide
gccucgauagaaagcgguc

SEQ ID NO: 1430727 - RNA, 19 nt, Artificial Sequence
  Description of Artificial Sequence: Synthetic oligonucleotide
cgaacucccauuguuccuc

SEQ ID NO: 1430728 - RNA, 19 nt, Artificial Sequence
  Description of Artificial Sequence: Synthetic oligonucleotide
ggccuuguauuggucagaa

SEQ ID NO: 1430729 - RNA, 19 nt, Artificial Sequence
  Description of Artificial Sequence: Synthetic oligonucleotide
ggaggagggguuccaagau

SEQ ID NO: 1430730 - RNA, 19 nt, Artificial Sequence
  Description of Artificial Sequence: Synthetic oligonucleotide
ggcguccugccgcaggcca

SEQ ID NO: 1430731 - RNA, 19 nt, Artificial Sequence
  Description of Artificial Sequence: Synthetic oligonucleotide
ggaggaaucgcgcgcucgu

SEQ ID NO: 1430732 - RNA, 19 nt, Artificial Sequence
  Description of Artificial Sequence: Synthetic oligonucleotide
caaguccacgguucucagu

SEQ ID NO: 1430733 - RNA, 19 nt, Artificial Sequence
  Description of Artificial Sequence: Synthetic oligonucleotide
ucgcagccacgcacccuuc

SEQ ID NO: 1430734 - RNA, 19 nt, Artificial Sequence
  Description of Artificial Sequence: Synthetic oligonucleotide
guugacaggucuggcuuau

SEQ ID NO: 1430735 - RNA, 19 nt, Artificial Sequence
  Description of Artificial Sequence: Synthetic oligonucleotide
gccccuugaguacaugccu

SEQ ID NO: 1430736 - RNA, 19 nt, Artificial Sequence
  Description of Artificial Sequence: Synthetic oligonucleotide
cccaaggucgaacacgccu

SEQ ID NO: 1430737 - RNA, 19 nt, Artificial Sequence
  Description of Artificial Sequence: Synthetic oligonucleotide
gcugaccggaaguuccucu

SEQ ID NO: 1430738 - RNA, 19 nt, Artificial Sequence
  Description of Artificial Sequence: Synthetic oligonucleotide
gugcaaguccacgguucuc

SEQ ID NO: 1430739 - RNA, 19 nt, Artificial Sequence
  Description of Artificial Sequence: Synthetic oligonucleotide
cugaccggaaguuccucuu

SEQ ID NO: 1430740 - RNA, 19 nt, Artificial Sequence
  Description of Artificial Sequence: Synthetic oligonucleotide
ccuuggggaccucuccguc

SEQ ID NO: 1430741 - RNA, 19 nt, Artificial Sequence
  Description of Artificial Sequence: Synthetic oligonucleotide
guuguccaaauuggggcuu

SEQ ID NO: 1430742 - RNA, 19 nt, Artificial Sequence
  Description of Artificial Sequence: Synthetic oligonucleotide
ggcaguaguugagagugau

SEQ ID NO: 1430743 - RNA, 19 nt, Artificial Sequence
  Description of Artificial Sequence: Synthetic oligonucleotide
cacuucgaacucccauugu

SEQ ID NO: 1430744 - RNA, 19 nt, Artificial Sequence
  Description of Artificial Sequence: Synthetic oligonucleotide
gggcuuaggugucuccagu

SEQ ID NO: 1430745 - RNA, 19 nt, Artificial Sequence
  Description of Artificial Sequence: Synthetic oligonucleotide
acgcacccuuccccuccug

SEQ ID NO: 1430746 - RNA, 19 nt, Artificial Sequence
  Description of Artificial Sequence: Synthetic oligonucleotide
ggacaaccuugaccaucac

SEQ ID NO: 1430747 - RNA, 19 nt, Artificial Sequence
  Description of Artificial Sequence: Synthetic oligonucleotide
uccgagcgcugggacuguc

SEQ ID NO: 1430748 - RNA, 19 nt, Artificial Sequence
  Description of Artificial Sequence: Synthetic oligonucleotide
gcucuugucaucagcuaau

SEQ ID NO: 1430749 - RNA, 19 nt, Artificial Sequence
  Description of Artificial Sequence: Synthetic oligonucleotide
ggagagguguccagaugua

SEQ ID NO: 1430750 - RNA, 19 nt, Artificial Sequence
  Description of Artificial Sequence: Synthetic oligonucleotide
cggccucgauagaaagcgg

SEQ ID NO: 1430751 - RNA, 19 nt, Artificial Sequence
  Description of Artificial Sequence: Synthetic oligonucleotide
cucccucgcaagccugucu

SEQ ID NO: 1430752 - RNA, 19 nt, Artificial Sequence
  Description of Artificial Sequence: Synthetic oligonucleotide
ggaaccgagugcggcucuc

SEQ ID NO: 1430753 - RNA, 19 nt, Artificial Sequence
  Description of Artificial Sequence: Synthetic oligonucleotide
ccucacguacucccucgca

SEQ ID NO: 1430754 - RNA, 19 nt, Artificial Sequence
  Description of Artificial Sequence: Synthetic oligonucleotide
ggcugaccggaaguuccuc

SEQ ID NO: 1430755 - RNA, 19 nt, Artificial Sequence
  Description of Artificial Sequence: Synthetic oligonucleotide
ggggaggaaucgcgcgcuc

SEQ ID NO: 1430756 - RNA, 19 nt, Artificial Sequence
  Description of Artificial Sequence: Synthetic oligonucleotide
gcgcucguggggcgccggg

SEQ ID NO: 1430757 - RNA, 19 nt, Artificial Sequence
  Description of Artificial Sequence: Synthetic oligonucleotide
ccuggcggccucgauagaa

SEQ ID NO: 1430758 - RNA, 19 nt, Artificial Sequence
  Description of Artificial Sequence: Synthetic oligonucleotide
gcgguuucgggguucccau

SEQ ID NO: 1430759 - RNA, 19 nt, Artificial Sequence
  Description of Artificial Sequence: Synthetic oligonucleotide
gguucagggcugaccggaa

SEQ ID NO: 1430760 - RNA, 19 nt, Artificial Sequence
  Description of Artificial Sequence: Synthetic oligonucleotide
ccggaaccgagugcggcuc

SEQ ID NO: 1430761 - RNA, 19 nt, Artificial Sequence
  Description of Artificial Sequence: Synthetic oligonucleotide
gcuaagccuccgagcgcug

SEQ ID NO: 1430762 - RNA, 19 nt, Artificial Sequence
  Description of Artificial Sequence: Synthetic oligonucleotide
ugcucgggccggggaggaa

SEQ ID NO: 1430763 - RNA, 19 nt, Artificial Sequence
  Description of Artificial Sequence: Synthetic oligonucleotide
ccccuccugucagcuaagc

SEQ ID NO: 1430764 - RNA, 19 nt, Artificial Sequence
  Description of Artificial Sequence: Synthetic oligonucleotide
cgguuucgggguucccaug

SEQ ID NO: 1430765 - RNA, 19 nt, Artificial Sequence
  Description of Artificial Sequence: Synthetic oligonucleotide
cguacucccucgcaagccu

SEQ ID NO: 1430766 - RNA, 19 nt, Artificial Sequence
  Description of Artificial Sequence: Synthetic oligonucleotide
cgauagaaagcggucacuu

SEQ ID NO: 1430767 - RNA, 19 nt, Artificial Sequence
  Description of Artificial Sequence: Synthetic oligonucleotide
cccaugcucgggccgggga

SEQ ID NO: 1430768 - RNA, 19 nt, Artificial Sequence
  Description of Artificial Sequence: Synthetic oligonucleotide
gggcguccugccgcaggcc

SEQ ID NO: 1430769 - RNA, 19 nt, Artificial Sequence
  Description of Artificial Sequence: Synthetic oligonucleotide
cacgcacccuuccccuccu

SEQ ID NO: 1430770 - RNA, 19 nt, Artificial Sequence
  Description of Artificial Sequence: Synthetic oligonucleotide
gcgcugggacugucuuuuc

SEQ ID NO: 1430771 - RNA, 19 nt, Artificial Sequence
  Description of Artificial Sequence: Synthetic oligonucleotide
cgcgguuucgggguuccca

SEQ ID NO: 1430772 - RNA, 19 nt, Artificial Sequence
  Description of Artificial Sequence: Synthetic oligonucleotide
cgggccggggaggaaucgc

SEQ ID NO: 1430773 - RNA, 19 nt, Artificial Sequence
  Description of Artificial Sequence: Synthetic oligonucleotide
gggcugaccggaaguuccu

SEQ ID NO: 1430774 - RNA, 19 nt, Artificial Sequence
  Description of Artificial Sequence: Synthetic oligonucleotide
gcuucggcccaggccugga

SEQ ID NO: 1430775 - RNA, 19 nt, Artificial Sequence
  Description of Artificial Sequence: Synthetic oligonucleotide
ggagggguuccaagaucau

SEQ ID NO: 1430776 - RNA, 19 nt, Artificial Sequence
  Description of Artificial Sequence: Synthetic oligonucleotide
cgcaagccugucugucaga

SEQ ID NO: 1430777 - RNA, 19 nt, Artificial Sequence
  Description of Artificial Sequence: Synthetic oligonucleotide
gggccacgucuccccuaca

SEQ ID NO: 1430778 - RNA, 19 nt, Artificial Sequence
  Description of Artificial Sequence: Synthetic oligonucleotide
gcguggggaguguccacuu

SEQ ID NO: 1430779 - RNA, 19 nt, Artificial Sequence
  Description of Artificial Sequence: Synthetic oligonucleotide
ccgagcgcugggacugucu

SEQ ID NO: 1430780 - RNA, 19 nt, Artificial Sequence
  Description of Artificial Sequence: Synthetic oligonucleotide
cgaacacgccuccauccuu

SEQ ID NO: 1430781 - RNA, 19 nt, Artificial Sequence
  Description of Artificial Sequence: Synthetic oligonucleotide
ccgcgguuucgggguuccc

SEQ ID NO: 1430782 - RNA, 19 nt, Artificial Sequence
  Description of Artificial Sequence: Synthetic oligonucleotide
cuccgagcgcugggacugu

SEQ ID NO: 1430783 - RNA, 19 nt, Artificial Sequence
  Description of Artificial Sequence: Synthetic oligonucleotide
cgagcgcugggacugucuu

SEQ ID NO: 1430784 - RNA, 19 nt, Artificial Sequence
  Description of Artificial Sequence: Synthetic oligonucleotide
cggggaggaaucgcgcgcu

SEQ ID NO: 1430785 - RNA, 19 nt, Artificial Sequence
  Description of Artificial Sequence: Synthetic oligonucleotide
cggaaccgagugcggcucu

SEQ ID NO: 1430786 - RNA, 19 nt, Artificial Sequence
  Description of Artificial Sequence: Synthetic oligonucleotide
cguggggcgccggggccaa

SEQ ID NO: 1430787 - RNA, 19 nt, Artificial Sequence
  Description of Artificial Sequence: Synthetic oligonucleotide
aauuuguuaauauucugcc

SEQ ID NO: 1430788 - RNA, 19 nt, Artificial Sequence
  Description of Artificial Sequence: Synthetic oligonucleotide
aaaagugaaagaucuaggg

SEQ ID NO: 1430789 - RNA, 19 nt, Artificial Sequence
  Description of Artificial Sequence: Synthetic oligonucleotide
uaaaaggucaauuagcucc

SEQ ID NO: 1430790 - RNA, 19 nt, Artificial Sequence
  Description of Artificial Sequence: Synthetic oligonucleotide
aagugaaagaucuagggag

SEQ ID NO: 1430791 - RNA, 19 nt, Artificial Sequence
  Description of Artificial Sequence: Synthetic oligonucleotide
aaugcuuguacguuagggc

SEQ ID NO: 1430792 - RNA, 19 nt, Artificial Sequence
  Description of Artificial Sequence: Synthetic oligonucleotide
uacauuguuaaccaaaaga

SEQ ID NO: 1430793 - RNA, 19 nt, Artificial Sequence
  Description of Artificial Sequence: Synthetic oligonucleotide
aaagcaacagugaaaaggg

SEQ ID NO: 1430794 - RNA, 19 nt, Artificial Sequence
  Description of Artificial Sequence: Synthetic oligonucleotide
uuuguuaauauucugccgu

SEQ ID NO: 1430795 - RNA, 19 nt, Artificial Sequence
  Description of Artificial Sequence: Synthetic oligonucleotide
ugcuggaccaaccaggugg

SEQ ID NO: 1430796 - RNA, 19 nt, Artificial Sequence
  Description of Artificial Sequence: Synthetic oligonucleotide
acggauggcagacauagcc

SEQ ID NO: 1430797 - RNA, 19 nt, Artificial Sequence
  Description of Artificial Sequence: Synthetic oligonucleotide
uauucauggggacaagagg

SEQ ID NO: 1430798 - RNA, 19 nt, Artificial Sequence
  Description of Artificial Sequence: Synthetic oligonucleotide
aaagugaaagaucuaggga

SEQ ID NO: 1430799 - RNA, 19 nt, Artificial Sequence
  Description of Artificial Sequence: Synthetic oligonucleotide
aaacggaaacgaaagaggg

SEQ ID NO: 1430800 - RNA, 19 nt, Artificial Sequence
  Description of Artificial Sequence: Synthetic oligonucleotide
gaaacaggggucuuugggg

SEQ ID NO: 1430801 - RNA, 19 nt, Artificial Sequence
  Description of Artificial Sequence: Synthetic oligonucleotide
acuucggccaaccagggac

SEQ ID NO: 1430802 - RNA, 19 nt, Artificial Sequence
  Description of Artificial Sequence: Synthetic oligonucleotide
ucuagguacauuguuaacc

SEQ ID NO: 1430803 - RNA, 19 nt, Artificial Sequence
  Description of Artificial Sequence: Synthetic oligonucleotide
cuaacaagaguuuccgugg

SEQ ID NO: 1430804 - RNA, 19 nt, Artificial Sequence
  Description of Artificial Sequence: Synthetic oligonucleotide
aaaaggucaauuagcuccc

SEQ ID NO: 1430805 - RNA, 19 nt, Artificial Sequence
  Description of Artificial Sequence: Synthetic oligonucleotide
agauccacguuccuuauuc

SEQ ID NO: 1430806 - RNA, 19 nt, Artificial Sequence
  Description of Artificial Sequence: Synthetic oligonucleotide
auuuguuaauauucugccg

SEQ ID NO: 1430807 - RNA, 19 nt, Artificial Sequence
  Description of Artificial Sequence: Synthetic oligonucleotide
ugaccagugauguuugggg

SEQ ID NO: 1430808 - RNA, 19 nt, Artificial Sequence
  Description of Artificial Sequence: Synthetic oligonucleotide
augcuuguacguuagggcg

SEQ ID NO: 1430809 - RNA, 19 nt, Artificial Sequence
  Description of Artificial Sequence: Synthetic oligonucleotide
aaacgaaagagggaauggg

SEQ ID NO: 1430810 - RNA, 19 nt, Artificial Sequence
  Description of Artificial Sequence: Synthetic oligonucleotide
agguuaaaaggucaauuag

SEQ ID NO: 1430811 - RNA, 19 nt, Artificial Sequence
  Description of Artificial Sequence: Synthetic oligonucleotide
guuuccguggcauuguggg

SEQ ID NO: 1430812 - RNA, 19 nt, Artificial Sequence
  Description of Artificial Sequence: Synthetic oligonucleotide
aagguuaaaaggucaauua

SEQ ID NO: 1430813 - RNA, 19 nt, Artificial Sequence
  Description of Artificial Sequence: Synthetic oligonucleotide
ugagcucuuuccaagcuag

SEQ ID NO: 1430814 - RNA, 19 nt, Artificial Sequence
  Description of Artificial Sequence: Synthetic oligonucleotide
ugugccgcuguaaaugccg

SEQ ID NO: 1430815 - RNA, 19 nt, Artificial Sequence
  Description of Artificial Sequence: Synthetic oligonucleotide
ugggugcagauauucaugg

SEQ ID NO: 1430816 - RNA, 19 nt, Artificial Sequence
  Description of Artificial Sequence: Synthetic oligonucleotide
ucuagcuagcccaggauug

SEQ ID NO: 1430817 - RNA, 19 nt, Artificial Sequence
  Description of Artificial Sequence: Synthetic oligonucleotide
gaaugcuuguacguuaggg

SEQ ID NO: 1430818 - RNA, 19 nt, Artificial Sequence
  Description of Artificial Sequence: Synthetic oligonucleotide
uagaacagaucccaagucu

SEQ ID NO: 1430819 - RNA, 19 nt, Artificial Sequence
  Description of Artificial Sequence: Synthetic oligonucleotide
aacgaaagagggaaugggg

SEQ ID NO: 1430820 - RNA, 19 nt, Artificial Sequence
  Description of Artificial Sequence: Synthetic oligonucleotide
acaagagggaucuggaaug

SEQ ID NO: 1430821 - RNA, 19 nt, Artificial Sequence
  Description of Artificial Sequence: Synthetic oligonucleotide
ucugcguucaaauuuguua

SEQ ID NO: 1430822 - RNA, 19 nt, Artificial Sequence
  Description of Artificial Sequence: Synthetic oligonucleotide
uuguuaaccaaaagauggc

SEQ ID NO: 1430823 - RNA, 19 nt, Artificial Sequence
  Description of Artificial Sequence: Synthetic oligonucleotide
gggagcuauacauagaaag

SEQ ID NO: 1430824 - RNA, 19 nt, Artificial Sequence
  Description of Artificial Sequence: Synthetic oligonucleotide
uuugcaaauggccacggau

SEQ ID NO: 1430825 - RNA, 19 nt, Artificial Sequence
  Description of Artificial Sequence: Synthetic oligonucleotide
gaucuggaaugcuuguacg

SEQ ID NO: 1430826 - RNA, 19 nt, Artificial Sequence
  Description of Artificial Sequence: Synthetic oligonucleotide
auuuaaucuaauuuacaua

SEQ ID NO: 1430827 - RNA, 19 nt, Artificial Sequence
  Description of Artificial Sequence: Synthetic oligonucleotide
uugcaaauggccacggaug

SEQ ID NO: 1430828 - RNA, 19 nt, Artificial Sequence
  Description of Artificial Sequence: Synthetic oligonucleotide
gaaacgaaagagggaaugg

SEQ ID NO: 1430829 - RNA, 19 nt, Artificial Sequence
  Description of Artificial Sequence: Synthetic oligonucleotide
uuucuagguacauuguuaa

SEQ ID NO: 1430830 - RNA, 19 nt, Artificial Sequence
  Description of Artificial Sequence: Synthetic oligonucleotide
aaaggccuggcuacaaccc

SEQ ID NO: 1430831 - RNA, 19 nt, Artificial Sequence
  Description of Artificial Sequence: Synthetic oligonucleotide
aaauuuaaucuaauuuaca

SEQ ID NO: 1430832 - RNA, 19 nt, Artificial Sequence
  Description of Artificial Sequence: Synthetic oligonucleotide
uuccagaagagaaauuuaa

SEQ ID NO: 1430833 - RNA, 19 nt, Artificial Sequence
  Description of Artificial Sequence: Synthetic oligonucleotide
aagggcgccgguuugaggu

SEQ ID NO: 1430834 - RNA, 19 nt, Artificial Sequence
  Description of Artificial Sequence: Synthetic oligonucleotide
agugaaagaucuagggagc

SEQ ID NO: 1430835 - RNA, 19 nt, Artificial Sequence
  Description of Artificial Sequence: Synthetic oligonucleotide
uggguuagcagagggagcg

SEQ ID NO: 1430836 - RNA, 19 nt, Artificial Sequence
  Description of Artificial Sequence: Synthetic oligonucleotide
uuccaagcuaggaaggccc

SEQ ID NO: 1430837 - RNA, 19 nt, Artificial Sequence
  Description of Artificial Sequence: Synthetic oligonucleotide
uguuaaccaaaagauggcc

SEQ ID NO: 1430838 - RNA, 19 nt, Artificial Sequence
  Description of Artificial Sequence: Synthetic oligonucleotide
uugaggguauagauguucc

SEQ ID NO: 1430839 - RNA, 19 nt, Artificial Sequence
  Description of Artificial Sequence: Synthetic oligonucleotide
aaacaggggucuuuggggu

SEQ ID NO: 1430840 - RNA, 19 nt, Artificial Sequence
  Description of Artificial Sequence: Synthetic oligonucleotide
uguacguuagggcgccucg

SEQ ID NO: 1430841 - RNA, 19 nt, Artificial Sequence
  Description of Artificial Sequence: Synthetic oligonucleotide
auuagcucccgguaucuag

SEQ ID NO: 1430842 - RNA, 19 nt, Artificial Sequence
  Description of Artificial Sequence: Synthetic oligonucleotide
aaugccgcacccaaucuuc

SEQ ID NO: 1430843 - RNA, 19 nt, Artificial Sequence
  Description of Artificial Sequence: Synthetic oligonucleotide
uucucuacacaaaacgcau

SEQ ID NO: 1430844 - RNA, 19 nt, Artificial Sequence
  Description of Artificial Sequence: Synthetic oligonucleotide
aaggucaauuagcucccgg

SEQ ID NO: 1430845 - RNA, 19 nt, Artificial Sequence
  Description of Artificial Sequence: Synthetic oligonucleotide
aguggguuagcagagggag

SEQ ID NO: 1430846 - RNA, 19 nt, Artificial Sequence
  Description of Artificial Sequence: Synthetic oligonucleotide
auucauggggacaagagga

SEQ ID NO: 1430847 - RNA, 19 nt, Artificial Sequence
  Description of Artificial Sequence: Synthetic oligonucleotide
cuggucgcuagacacaggg

SEQ ID NO: 1430848 - RNA, 19 nt, Artificial Sequence
  Description of Artificial Sequence: Synthetic oligonucleotide
uguugcaggucauuggccu

SEQ ID NO: 1430849 - RNA, 19 nt, Artificial Sequence
  Description of Artificial Sequence: Synthetic oligonucleotide
agggaagugcuguucuccc

SEQ ID NO: 1430850 - RNA, 19 nt, Artificial Sequence
  Description of Artificial Sequence: Synthetic oligonucleotide
gcuaacaagaguuuccgug

SEQ ID NO: 1430851 - RNA, 19 nt, Artificial Sequence
  Description of Artificial Sequence: Synthetic oligonucleotide
uuaaaaggucaauuagcuc

SEQ ID NO: 1430852 - RNA, 19 nt, Artificial Sequence
  Description of Artificial Sequence: Synthetic oligonucleotide
uccacguuccuuauucucu

SEQ ID NO: 1430853 - RNA, 19 nt, Artificial Sequence
  Description of Artificial Sequence: Synthetic oligonucleotide
uuagcucccgguaucuagc

SEQ ID NO: 1430854 - RNA, 19 nt, Artificial Sequence
  Description of Artificial Sequence: Synthetic oligonucleotide
gaugugccgcuguaaaugc

SEQ ID NO: 1430855 - RNA, 19 nt, Artificial Sequence
  Description of Artificial Sequence: Synthetic oligonucleotide
ucaauuagcucccgguauc

SEQ ID NO: 1430856 - RNA, 19 nt, Artificial Sequence
  Description of Artificial Sequence: Synthetic oligonucleotide
agaacagaucccaagucuc

SEQ ID NO: 1430857 - RNA, 19 nt, Artificial Sequence
  Description of Artificial Sequence: Synthetic oligonucleotide
cuagguacauuguuaacca

SEQ ID NO: 1430858 - RNA, 19 nt, Artificial Sequence
  Description of Artificial Sequence: Synthetic oligonucleotide
aaccaaaagauggccacug

SEQ ID NO: 1430859 - RNA, 19 nt, Artificial Sequence
  Description of Artificial Sequence: Synthetic oligonucleotide
gaggguauagauguucccc

SEQ ID NO: 1430860 - RNA, 19 nt, Artificial Sequence
  Description of Artificial Sequence: Synthetic oligonucleotide
agaaccugcacuugagggu

SEQ ID NO: 1430861 - RNA, 19 nt, Artificial Sequence
  Description of Artificial Sequence: Synthetic oligonucleotide
aggguggcuagcuggcucc

SEQ ID NO: 1430862 - RNA, 19 nt, Artificial Sequence
  Description of Artificial Sequence: Synthetic oligonucleotide
agaucuagggagcuauaca

SEQ ID NO: 1430863 - RNA, 19 nt, Artificial Sequence
  Description of Artificial Sequence: Synthetic oligonucleotide
ucacucuacccucccagcc

SEQ ID NO: 1430864 - RNA, 19 nt, Artificial Sequence
  Description of Artificial Sequence: Synthetic oligonucleotide
ugcuuguacguuagggcgc

SEQ ID NO: 1430865 - RNA, 19 nt, Artificial Sequence
  Description of Artificial Sequence: Synthetic oligonucleotide
auccacguuccuuauucuc

SEQ ID NO: 1430866 - RNA, 19 nt, Artificial Sequence
  Description of Artificial Sequence: Synthetic oligonucleotide
uggucguuugacuugggaa

SEQ ID NO: 1430867 - RNA, 19 nt, Artificial Sequence
  Description of Artificial Sequence: Synthetic oligonucleotide
gacaggcgguacaagaggg

SEQ ID NO: 1430868 - RNA, 19 nt, Artificial Sequence
  Description of Artificial Sequence: Synthetic oligonucleotide
cauagaaagcaacagugaa

SEQ ID NO: 1430869 - RNA, 19 nt, Artificial Sequence
  Description of Artificial Sequence: Synthetic oligonucleotide
uggaaacggaaacgaaaga

SEQ ID NO: 1430870 - RNA, 19 nt, Artificial Sequence
  Description of Artificial Sequence: Synthetic oligonucleotide
acaagaggaaacagggguc

SEQ ID NO: 1430871 - RNA, 19 nt, Artificial Sequence
  Description of Artificial Sequence: Synthetic oligonucleotide
agauuggccaccaccaaag

SEQ ID NO: 1430872 - RNA, 19 nt, Artificial Sequence
  Description of Artificial Sequence: Synthetic oligonucleotide
uguuaauauucugccguug

SEQ ID NO: 1430873 - RNA, 19 nt, Artificial Sequence
  Description of Artificial Sequence: Synthetic oligonucleotide
uaaaugccgcacccaaucu

SEQ ID NO: 1430874 - RNA, 19 nt, Artificial Sequence
  Description of Artificial Sequence: Synthetic oligonucleotide
cuagaacagaucccaaguc

SEQ ID NO: 1430875 - RNA, 19 nt, Artificial Sequence
  Description of Artificial Sequence: Synthetic oligonucleotide
ugcuccuuuggaaacggaa

SEQ ID NO: 1430876 - RNA, 19 nt, Artificial Sequence
  Description of Artificial Sequence: Synthetic oligonucleotide
gaucuagggagcuauacau

SEQ ID NO: 1430877 - RNA, 19 nt, Artificial Sequence
  Description of Artificial Sequence: Synthetic oligonucleotide
agugggugcagauauucau

SEQ ID NO: 1430878 - RNA, 19 nt, Artificial Sequence
  Description of Artificial Sequence: Synthetic oligonucleotide
guuguagugugcccggccc

SEQ ID NO: 1430879 - RNA, 19 nt, Artificial Sequence
  Description of Artificial Sequence: Synthetic oligonucleotide
uguucuccccuguaaccag

SEQ ID NO: 1430880 - RNA, 19 nt, Artificial Sequence
  Description of Artificial Sequence: Synthetic oligonucleotide
aucuggaaugcuuguacgu

SEQ ID NO: 1430881 - RNA, 19 nt, Artificial Sequence
  Description of Artificial Sequence: Synthetic oligonucleotide
cacccaaucuuccuggaug

SEQ ID NO: 1430882 - RNA, 19 nt, Artificial Sequence
  Description of Artificial Sequence: Synthetic oligonucleotide
gaggguacccuuguggccc

SEQ ID NO: 1430883 - RNA, 19 nt, Artificial Sequence
  Description of Artificial Sequence: Synthetic oligonucleotide
ucuuugcaaauggccacgg

SEQ ID NO: 1430884 - RNA, 19 nt, Artificial Sequence
  Description of Artificial Sequence: Synthetic oligonucleotide
aaagggcgccgguuugagg

SEQ ID NO: 1430885 - RNA, 19 nt, Artificial Sequence
  Description of Artificial Sequence: Synthetic oligonucleotide
ggucguuugacuugggaac

SEQ ID NO: 1430886 - RNA, 19 nt, Artificial Sequence
  Description of Artificial Sequence: Synthetic oligonucleotide
cagcuaacaagaguuuccg

SEQ ID NO: 1430887 - RNA, 19 nt, Artificial Sequence
  Description of Artificial Sequence: Synthetic oligonucleotide
aaaugccgcacccaaucuu

SEQ ID NO: 1430888 - RNA, 19 nt, Artificial Sequence
  Description of Artificial Sequence: Synthetic oligonucleotide
guggauuccccugagcaag

SEQ ID NO: 1430889 - RNA, 19 nt, Artificial Sequence
  Description of Artificial Sequence: Synthetic oligonucleotide
ggagcuauacauagaaagc

SEQ ID NO: 1430890 - RNA, 19 nt, Artificial Sequence
  Description of Artificial Sequence: Synthetic oligonucleotide
ugcagauauucauggggac

SEQ ID NO: 1430891 - RNA, 19 nt, Artificial Sequence
  Description of Artificial Sequence: Synthetic oligonucleotide
uccuuauucucuacacaaa

SEQ ID NO: 1430892 - RNA, 19 nt, Artificial Sequence
  Description of Artificial Sequence: Synthetic oligonucleotide
cagacauagcccugccugg

SEQ ID NO: 1430893 - RNA, 19 nt, Artificial Sequence
  Description of Artificial Sequence: Synthetic oligonucleotide
augugguuggucguuugac

SEQ ID NO: 1430894 - RNA, 19 nt, Artificial Sequence
  Description of Artificial Sequence: Synthetic oligonucleotide
guuaaccaaaagauggcca

SEQ ID NO: 1430895 - RNA, 19 nt, Artificial Sequence
  Description of Artificial Sequence: Synthetic oligonucleotide
gacuucacggucccaggug

SEQ ID NO: 1430896 - RNA, 19 nt, Artificial Sequence
  Description of Artificial Sequence: Synthetic oligonucleotide
uucauggggacaagaggaa

SEQ ID NO: 1430897 - RNA, 19 nt, Artificial Sequence
  Description of Artificial Sequence: Synthetic oligonucleotide
uauagauguuccccacaaa

SEQ ID NO: 1430898 - RNA, 19 nt, Artificial Sequence
  Description of Artificial Sequence: Synthetic oligonucleotide
ugguuggucguuugacuug

SEQ ID NO: 1430899 - RNA, 19 nt, Artificial Sequence
  Description of Artificial Sequence: Synthetic oligonucleotide
uaucuagcuagcccaggau

SEQ ID NO: 1430900 - RNA, 19 nt, Artificial Sequence
  Description of Artificial Sequence: Synthetic oligonucleotide
gcaacagugaaaaggggag

SEQ ID NO: 1430901 - RNA, 19 nt, Artificial Sequence
  Description of Artificial Sequence: Synthetic oligonucleotide
auuucuagguacauuguua

SEQ ID NO: 1430902 - RNA, 19 nt, Artificial Sequence
  Description of Artificial Sequence: Synthetic oligonucleotide
aacggaaacgaaagaggga

SEQ ID NO: 1430903 - RNA, 19 nt, Artificial Sequence
  Description of Artificial Sequence: Synthetic oligonucleotide
ugacuucacggucccaggu

SEQ ID NO: 1430904 - RNA, 19 nt, Artificial Sequence
  Description of Artificial Sequence: Synthetic oligonucleotide
cugccuggucgcuagacac

SEQ ID NO: 1430905 - RNA, 19 nt, Artificial Sequence
  Description of Artificial Sequence: Synthetic oligonucleotide
auggccacggauggcagac

SEQ ID NO: 1430906 - RNA, 19 nt, Artificial Sequence
  Description of Artificial Sequence: Synthetic oligonucleotide
uccaagcuaggaaggcccc

SEQ ID NO: 1430907 - RNA, 19 nt, Artificial Sequence
  Description of Artificial Sequence: Synthetic oligonucleotide
uucuagguacauuguuaac

SEQ ID NO: 1430908 - RNA, 19 nt, Artificial Sequence
  Description of Artificial Sequence: Synthetic oligonucleotide
caaccaggugggcucaagg

SEQ ID NO: 1430909 - RNA, 19 nt, Artificial Sequence
  Description of Artificial Sequence: Synthetic oligonucleotide
aucuagcuagcccaggauu

SEQ ID NO: 1430910 - RNA, 19 nt, Artificial Sequence
  Description of Artificial Sequence: Synthetic oligonucleotide
uaguggguuagcagaggga

SEQ ID NO: 1430911 - RNA, 19 nt, Artificial Sequence
  Description of Artificial Sequence: Synthetic oligonucleotide
ggaaacgaaagagggaaug

SEQ ID NO: 1430912 - RNA, 19 nt, Artificial Sequence
  Description of Artificial Sequence: Synthetic oligonucleotide
ggaucuggaaugcuuguac

SEQ ID NO: 1430913 - RNA, 19 nt, Artificial Sequence
  Description of Artificial Sequence: Synthetic oligonucleotide
uuguuaauauucugccguu

SEQ ID NO: 1430914 - RNA, 19 nt, Artificial Sequence
  Description of Artificial Sequence: Synthetic oligonucleotide
agcguggauuccccugagc

SEQ ID NO: 1430915 - RNA, 19 nt, Artificial Sequence
  Description of Artificial Sequence: Synthetic oligonucleotide
cucacgaggugcgugugcg

SEQ ID NO: 1430916 - RNA, 19 nt, Artificial Sequence
  Description of Artificial Sequence: Synthetic oligonucleotide
ugccagaggccguucacca

SEQ ID NO: 1430917 - RNA, 19 nt, Artificial Sequence
  Description of Artificial Sequence: Synthetic oligonucleotide
ugcguuugccugugcauga

SEQ ID NO: 1430918 - RNA, 19 nt, Artificial Sequence
  Description of Artificial Sequence: Synthetic oligonucleotide
guaucuagcuagcccagga

SEQ ID NO: 1430919 - RNA, 19 nt, Artificial Sequence
  Description of Artificial Sequence: Synthetic oligonucleotide
agucucacgaggugcgugu

SEQ ID NO: 1430920 - RNA, 19 nt, Artificial Sequence
  Description of Artificial Sequence: Synthetic oligonucleotide
uguaaccagauuggccacc

SEQ ID NO: 1430921 - RNA, 19 nt, Artificial Sequence
  Description of Artificial Sequence: Synthetic oligonucleotide
ggacaggcgguacaagagg

SEQ ID NO: 1430922 - RNA, 19 nt, Artificial Sequence
  Description of Artificial Sequence: Synthetic oligonucleotide
cuucuguugcaggucauug

SEQ ID NO: 1430923 - RNA, 19 nt, Artificial Sequence
  Description of Artificial Sequence: Synthetic oligonucleotide
uacguuagggcgccucgac

SEQ ID NO: 1430924 - RNA, 19 nt, Artificial Sequence
  Description of Artificial Sequence: Synthetic oligonucleotide
cagcacuucggccaaccag

SEQ ID NO: 1430925 - RNA, 19 nt, Artificial Sequence
  Description of Artificial Sequence: Synthetic oligonucleotide
accaccccgagcugcagag

SEQ ID NO: 1430926 - RNA, 19 nt, Artificial Sequence
  Description of Artificial Sequence: Synthetic oligonucleotide
cacucuacccucccagccc

SEQ ID NO: 1430927 - RNA, 19 nt, Artificial Sequence
  Description of Artificial Sequence: Synthetic oligonucleotide
gcucccgguaucuagcuag

SEQ ID NO: 1430928 - RNA, 19 nt, Artificial Sequence
  Description of Artificial Sequence: Synthetic oligonucleotide
ggaugugccgcuguaaaug

SEQ ID NO: 1430929 - RNA, 19 nt, Artificial Sequence
  Description of Artificial Sequence: Synthetic oligonucleotide
uuagcagagggagcgugga

SEQ ID NO: 1430930 - RNA, 19 nt, Artificial Sequence
  Description of Artificial Sequence: Synthetic oligonucleotide
ucgacagcggcugucugug

SEQ ID NO: 1430931 - RNA, 19 nt, Artificial Sequence
  Description of Artificial Sequence: Synthetic oligonucleotide
gaugugguuggucguuuga

SEQ ID NO: 1430932 - RNA, 19 nt, Artificial Sequence
  Description of Artificial Sequence: Synthetic oligonucleotide
cuagacacagggaagugcu

SEQ ID NO: 1430933 - RNA, 19 nt, Artificial Sequence
  Description of Artificial Sequence: Synthetic oligonucleotide
uaaccaaaagauggccacu

SEQ ID NO: 1430934 - RNA, 19 nt, Artificial Sequence
  Description of Artificial Sequence: Synthetic oligonucleotide
aagucucacgaggugcgug

SEQ ID NO: 1430935 - RNA, 19 nt, Artificial Sequence
  Description of Artificial Sequence: Synthetic oligonucleotide
ucucuacacaaaacgcauu

SEQ ID NO: 1430936 - RNA, 19 nt, Artificial Sequence
  Description of Artificial Sequence: Synthetic oligonucleotide
ucucacgaggugcgugugc

SEQ ID NO: 1430937 - RNA, 19 nt, Artificial Sequence
  Description of Artificial Sequence: Synthetic oligonucleotide
ucgcuagacacagggaagu

SEQ ID NO: 1430938 - RNA, 19 nt, Artificial Sequence
  Description of Artificial Sequence: Synthetic oligonucleotide
acguuccuuauucucuaca

SEQ ID NO: 1430939 - RNA, 19 nt, Artificial Sequence
  Description of Artificial Sequence: Synthetic oligonucleotide
ugugcgggugcguuugccu

SEQ ID NO: 1430940 - RNA, 19 nt, Artificial Sequence
  Description of Artificial Sequence: Synthetic oligonucleotide
agguacauuguuaaccaaa

SEQ ID NO: 1430941 - RNA, 19 nt, Artificial Sequence
  Description of Artificial Sequence: Synthetic oligonucleotide
gaaagaucuagggagcuau

SEQ ID NO: 1430942 - RNA, 19 nt, Artificial Sequence
  Description of Artificial Sequence: Synthetic oligonucleotide
cuacaaccccugcuggacc

SEQ ID NO: 1430943 - RNA, 19 nt, Artificial Sequence
  Description of Artificial Sequence: Synthetic oligonucleotide
acucuacccucccagcccu

SEQ ID NO: 1430944 - RNA, 19 nt, Artificial Sequence
  Description of Artificial Sequence: Synthetic oligonucleotide
cuuccuggauggagagugg

SEQ ID NO: 1430945 - RNA, 19 nt, Artificial Sequence
  Description of Artificial Sequence: Synthetic oligonucleotide
caagagggaucuggaaugc

SEQ ID NO: 1430946 - RNA, 19 nt, Artificial Sequence
  Description of Artificial Sequence: Synthetic oligonucleotide
agcuauacauagaaagcaa

SEQ ID NO: 1430947 - RNA, 19 nt, Artificial Sequence
  Description of Artificial Sequence: Synthetic oligonucleotide
ggaauuccacuucacagaa

SEQ ID NO: 1430948 - RNA, 19 nt, Artificial Sequence
  Description of Artificial Sequence: Synthetic oligonucleotide
gguuggucguuugacuugg

SEQ ID NO: 1430949 - RNA, 19 nt, Artificial Sequence
  Description of Artificial Sequence: Synthetic oligonucleotide
gccgguuugagguuuuggc

SEQ ID NO: 1430950 - RNA, 19 nt, Artificial Sequence
  Description of Artificial Sequence: Synthetic oligonucleotide
ucuacccucccagcccugg

SEQ ID NO: 1430951 - RNA, 19 nt, Artificial Sequence
  Description of Artificial Sequence: Synthetic oligonucleotide
agcucuuuccaagcuagga

SEQ ID NO: 1430952 - RNA, 19 nt, Artificial Sequence
  Description of Artificial Sequence: Synthetic oligonucleotide
ccaagucucacgaggugcg

SEQ ID NO: 1430953 - RNA, 19 nt, Artificial Sequence
  Description of Artificial Sequence: Synthetic oligonucleotide
agcuaacaagaguuuccgu

SEQ ID NO: 1430954 - RNA, 19 nt, Artificial Sequence
  Description of Artificial Sequence: Synthetic oligonucleotide
gucgcuagacacagggaag

SEQ ID NO: 1430955 - RNA, 19 nt, Artificial Sequence
  Description of Artificial Sequence: Synthetic oligonucleotide
cagaucccaagucucacga

SEQ ID NO: 1430956 - RNA, 19 nt, Artificial Sequence
  Description of Artificial Sequence: Synthetic oligonucleotide
uagguacauuguuaaccaa

SEQ ID NO: 1430957 - RNA, 19 nt, Artificial Sequence
  Description of Artificial Sequence: Synthetic oligonucleotide
agagugggcccuggaauuc

SEQ ID NO: 1430958 - RNA, 19 nt, Artificial Sequence
  Description of Artificial Sequence: Synthetic oligonucleotide
gugggugcagauauucaug

SEQ ID NO: 1430959 - RNA, 19 nt, Artificial Sequence
  Description of Artificial Sequence: Synthetic oligonucleotide
uugccagaggccguucacc

SEQ ID NO: 1430960 - RNA, 19 nt, Artificial Sequence
  Description of Artificial Sequence: Synthetic oligonucleotide
gcagcuaacaagaguuucc

SEQ ID NO: 1430961 - RNA, 19 nt, Artificial Sequence
  Description of Artificial Sequence: Synthetic oligonucleotide
gagguuuuggcuugcuccu

SEQ ID NO: 1430962 - RNA, 19 nt, Artificial Sequence
  Description of Artificial Sequence: Synthetic oligonucleotide
ggagggucugcuuuggaga

SEQ ID NO: 1430963 - RNA, 19 nt, Artificial Sequence
  Description of Artificial Sequence: Synthetic oligonucleotide
cguggcaugaugugguugg

SEQ ID NO: 1430964 - RNA, 19 nt, Artificial Sequence
  Description of Artificial Sequence: Synthetic oligonucleotide
cuugucugcguucaaauuu

SEQ ID NO: 1430965 - RNA, 19 nt, Artificial Sequence
  Description of Artificial Sequence: Synthetic oligonucleotide
ugcaugagugggugcagau

SEQ ID NO: 1430966 - RNA, 19 nt, Artificial Sequence
  Description of Artificial Sequence: Synthetic oligonucleotide
cagauauucauggggacaa

SEQ ID NO: 1430967 - RNA, 19 nt, Artificial Sequence
  Description of Artificial Sequence: Synthetic oligonucleotide
agggcgccucgacagcggc

SEQ ID NO: 1430968 - RNA, 19 nt, Artificial Sequence
  Description of Artificial Sequence: Synthetic oligonucleotide
ggucgcuagacacagggaa

SEQ ID NO: 1430969 - RNA, 19 nt, Artificial Sequence
  Description of Artificial Sequence: Synthetic oligonucleotide
gcuguucuccccuguaacc

SEQ ID NO: 1430970 - RNA, 19 nt, Artificial Sequence
  Description of Artificial Sequence: Synthetic oligonucleotide
caugagugggugcagauau

SEQ ID NO: 1430971 - RNA, 19 nt, Artificial Sequence
  Description of Artificial Sequence: Synthetic oligonucleotide
ugccuggucgcuagacaca

SEQ ID NO: 1430972 - RNA, 19 nt, Artificial Sequence
  Description of Artificial Sequence: Synthetic oligonucleotide
ccacggauggcagacauag

SEQ ID NO: 1430973 - RNA, 19 nt, Artificial Sequence
  Description of Artificial Sequence: Synthetic oligonucleotide
aagauccacguuccuuauu

SEQ ID NO: 1430974 - RNA, 19 nt, Artificial Sequence
  Description of Artificial Sequence: Synthetic oligonucleotide
uagggcgccucgacagcgg

SEQ ID NO: 1430975 - RNA, 19 nt, Artificial Sequence
  Description of Artificial Sequence: Synthetic oligonucleotide
uggucgcuagacacaggga

SEQ ID NO: 1430976 - RNA, 19 nt, Artificial Sequence
  Description of Artificial Sequence: Synthetic oligonucleotide
aagggacuggucggacccg

SEQ ID NO: 1430977 - RNA, 19 nt, Artificial Sequence
  Description of Artificial Sequence: Synthetic oligonucleotide
gauggagagugggcccugg

SEQ ID NO: 1430978 - RNA, 19 nt, Artificial Sequence
  Description of Artificial Sequence: Synthetic oligonucleotide
augugccgcuguaaaugcc

SEQ ID NO: 1430979 - RNA, 19 nt, Artificial Sequence
  Description of Artificial Sequence: Synthetic oligonucleotide
gguacauuguuaaccaaaa

SEQ ID NO: 1430980 - RNA, 19 nt, Artificial Sequence
  Description of Artificial Sequence: Synthetic oligonucleotide
gaaccugcacuugagggua

SEQ ID NO: 1430981 - RNA, 19 nt, Artificial Sequence
  Description of Artificial Sequence: Synthetic oligonucleotide
ggggaggagagucccaccc

SEQ ID NO: 1430982 - RNA, 19 nt, Artificial Sequence
  Description of Artificial Sequence: Synthetic oligonucleotide
ggcugguugccagaggccg

SEQ ID NO: 1430983 - RNA, 19 nt, Artificial Sequence
  Description of Artificial Sequence: Synthetic oligonucleotide
acccuuguggccccagagu

SEQ ID NO: 1430984 - RNA, 19 nt, Artificial Sequence
  Description of Artificial Sequence: Synthetic oligonucleotide
guuagggcgccucgacagc

SEQ ID NO: 1430985 - RNA, 19 nt, Artificial Sequence
  Description of Artificial Sequence: Synthetic oligonucleotide
aggaugugccgcuguaaau

SEQ ID NO: 1430986 - RNA, 19 nt, Artificial Sequence
  Description of Artificial Sequence: Synthetic oligonucleotide
gugcguuugccugugcaug

SEQ ID NO: 1430987 - RNA, 19 nt, Artificial Sequence
  Description of Artificial Sequence: Synthetic oligonucleotide
ugugccuguggcgccuggg

SEQ ID NO: 1430988 - RNA, 19 nt, Artificial Sequence
  Description of Artificial Sequence: Synthetic oligonucleotide
ggaaugcuuguacguuagg

SEQ ID NO: 1430989 - RNA, 19 nt, Artificial Sequence
  Description of Artificial Sequence: Synthetic oligonucleotide
ucguuugacuugggaacug

SEQ ID NO: 1430990 - RNA, 19 nt, Artificial Sequence
  Description of Artificial Sequence: Synthetic oligonucleotide
gcuagaacagaucccaagu

SEQ ID NO: 1430991 - RNA, 19 nt, Artificial Sequence
  Description of Artificial Sequence: Synthetic oligonucleotide
ccuggauggagagugggcc

SEQ ID NO: 1430992 - RNA, 19 nt, Artificial Sequence
  Description of Artificial Sequence: Synthetic oligonucleotide
aggagggacaggcgguaca

SEQ ID NO: 1430993 - RNA, 19 nt, Artificial Sequence
  Description of Artificial Sequence: Synthetic oligonucleotide
cuagggagcuauacauaga

SEQ ID NO: 1430994 - RNA, 19 nt, Artificial Sequence
  Description of Artificial Sequence: Synthetic oligonucleotide
guuggugcuccucugacuu

SEQ ID NO: 1430995 - RNA, 19 nt, Artificial Sequence
  Description of Artificial Sequence: Synthetic oligonucleotide
uagcucccgguaucuagcu

SEQ ID NO: 1430996 - RNA, 19 nt, Artificial Sequence
  Description of Artificial Sequence: Synthetic oligonucleotide
gucaauuagcucccgguau

SEQ ID NO: 1430997 - RNA, 19 nt, Artificial Sequence
  Description of Artificial Sequence: Synthetic oligonucleotide
gacauagcccugccugguc

SEQ ID NO: 1430998 - RNA, 19 nt, Artificial Sequence
  Description of Artificial Sequence: Synthetic oligonucleotide
agcccugccuggucgcuag

SEQ ID NO: 1430999 - RNA, 19 nt, Artificial Sequence
  Description of Artificial Sequence: Synthetic oligonucleotide
gcuagacacagggaagugc

SEQ ID NO: 1431000 - RNA, 19 nt, Artificial Sequence
  Description of Artificial Sequence: Synthetic oligonucleotide
acguuagggcgccucgaca

SEQ ID NO: 1431001 - RNA, 19 nt, Artificial Sequence
  Description of Artificial Sequence: Synthetic oligonucleotide
gcguggauuccccugagca

SEQ ID NO: 1431002 - RNA, 19 nt, Artificial Sequence
  Description of Artificial Sequence: Synthetic oligonucleotide
cuggaaugcuuguacguua

SEQ ID NO: 1431003 - RNA, 19 nt, Artificial Sequence
  Description of Artificial Sequence: Synthetic oligonucleotide
cucccgguaucuagcuagc

SEQ ID NO: 1431004 - RNA, 19 nt, Artificial Sequence
  Description of Artificial Sequence: Synthetic oligonucleotide
gaauuccacuucacagaac

SEQ ID NO: 1431005 - RNA, 19 nt, Artificial Sequence
  Description of Artificial Sequence: Synthetic oligonucleotide
gugcgggugcguuugccug

SEQ ID NO: 1431006 - RNA, 19 nt, Artificial Sequence
  Description of Artificial Sequence: Synthetic oligonucleotide
guugcaggucauuggccuc

SEQ ID NO: 1431007 - RNA, 19 nt, Artificial Sequence
  Description of Artificial Sequence: Synthetic oligonucleotide
ggaagggacuggucggacc

SEQ ID NO: 1431008 - RNA, 19 nt, Artificial Sequence
  Description of Artificial Sequence: Synthetic oligonucleotide
cuccucaccaccccgagcu

SEQ ID NO: 1431009 - RNA, 19 nt, Artificial Sequence
  Description of Artificial Sequence: Synthetic oligonucleotide
gggacaggcgguacaagag

SEQ ID NO: 1431010 - RNA, 19 nt, Artificial Sequence
  Description of Artificial Sequence: Synthetic oligonucleotide
ccuuauucucuacacaaaa

SEQ ID NO: 1431011 - RNA, 19 nt, Artificial Sequence
  Description of Artificial Sequence: Synthetic oligonucleotide
cacguuccuuauucucuac

SEQ ID NO: 1431012 - RNA, 19 nt, Artificial Sequence
  Description of Artificial Sequence: Synthetic oligonucleotide
cguuccuuauucucuacac

SEQ ID NO: 1431013 - RNA, 19 nt, Artificial Sequence
  Description of Artificial Sequence: Synthetic oligonucleotide
uugcuccuuuggaaacgga

SEQ ID NO: 1431014 - RNA, 19 nt, Artificial Sequence
  Description of Artificial Sequence: Synthetic oligonucleotide
ugcgggugcguuugccugu

SEQ ID NO: 1431015 - RNA, 19 nt, Artificial Sequence
  Description of Artificial Sequence: Synthetic oligonucleotide
cguuagggcgccucgacag

SEQ ID NO: 1431016 - RNA, 19 nt, Artificial Sequence
  Description of Artificial Sequence: Synthetic oligonucleotide
agagggaucuggaaugcuu

SEQ ID NO: 1431017 - RNA, 19 nt, Artificial Sequence
  Description of Artificial Sequence: Synthetic oligonucleotide
gguaucuagcuagcccagg

SEQ ID NO: 1431018 - RNA, 19 nt, Artificial Sequence
  Description of Artificial Sequence: Synthetic oligonucleotide
gcucccggcgcccagguug

SEQ ID NO: 1431019 - RNA, 19 nt, Artificial Sequence
  Description of Artificial Sequence: Synthetic oligonucleotide
gagcguggauuccccugag

SEQ ID NO: 1431020 - RNA, 19 nt, Artificial Sequence
  Description of Artificial Sequence: Synthetic oligonucleotide
cccgguaucuagcuagccc

SEQ ID NO: 1431021 - RNA, 19 nt, Artificial Sequence
  Description of Artificial Sequence: Synthetic oligonucleotide
aaagaucuagggagcuaua

SEQ ID NO: 1431022 - RNA, 19 nt, Artificial Sequence
  Description of Artificial Sequence: Synthetic oligonucleotide
ggacuggucggacccgggg

SEQ ID NO: 1431023 - RNA, 19 nt, Artificial Sequence
  Description of Artificial Sequence: Synthetic oligonucleotide
ggcccuaguggguuagcag

SEQ ID NO: 1431024 - RNA, 19 nt, Artificial Sequence
  Description of Artificial Sequence: Synthetic oligonucleotide
gcucuuuccaagcuaggaa

SEQ ID NO: 1431025 - RNA, 19 nt, Artificial Sequence
  Description of Artificial Sequence: Synthetic oligonucleotide
gcccuaguggguuagcaga

SEQ ID NO: 1431026 - RNA, 19 nt, Artificial Sequence
  Description of Artificial Sequence: Synthetic oligonucleotide
uucggccaaccagggacag

SEQ ID NO: 1431027 - RNA, 19 nt, Artificial Sequence
  Description of Artificial Sequence: Synthetic oligonucleotide
agacauagcccugccuggu

SEQ ID NO: 1431028 - RNA, 19 nt, Artificial Sequence
  Description of Artificial Sequence: Synthetic oligonucleotide
uuguacguuagggcgccuc

SEQ ID NO: 1431029 - RNA, 19 nt, Artificial Sequence
  Description of Artificial Sequence: Synthetic oligonucleotide
caaggaggguacccuugug

SEQ ID NO: 1431030 - RNA, 19 nt, Artificial Sequence
  Description of Artificial Sequence: Synthetic oligonucleotide
cacgaggugcgugugcgug

SEQ ID NO: 1431031 - RNA, 19 nt, Artificial Sequence
  Description of Artificial Sequence: Synthetic oligonucleotide
ugccgcuguaaaugccgca

SEQ ID NO: 1431032 - RNA, 19 nt, Artificial Sequence
  Description of Artificial Sequence: Synthetic oligonucleotide
cucuacacaaaacgcauuu

SEQ ID NO: 1431033 - RNA, 19 nt, Artificial Sequence
  Description of Artificial Sequence: Synthetic oligonucleotide
caaagggcgccgguuugag

SEQ ID NO: 1431034 - RNA, 19 nt, Artificial Sequence
  Description of Artificial Sequence: Synthetic oligonucleotide
ccgguaucuagcuagccca

SEQ ID NO: 1431035 - RNA, 19 nt, Artificial Sequence
  Description of Artificial Sequence: Synthetic oligonucleotide
gagggugguaggggugggg

SEQ ID NO: 1431036 - RNA, 19 nt, Artificial Sequence
  Description of Artificial Sequence: Synthetic oligonucleotide
aggcgguacaagagggauc

SEQ ID NO: 1431037 - RNA, 19 nt, Artificial Sequence
  Description of Artificial Sequence: Synthetic oligonucleotide
agggacuggucggacccgg

SEQ ID NO: 1431038 - RNA, 19 nt, Artificial Sequence
  Description of Artificial Sequence: Synthetic oligonucleotide
gagugggugcagauauuca

SEQ ID NO: 1431039 - RNA, 19 nt, Artificial Sequence
  Description of Artificial Sequence: Synthetic oligonucleotide
caggaugugccgcuguaaa

SEQ ID NO: 1431040 - RNA, 19 nt, Artificial Sequence
  Description of Artificial Sequence: Synthetic oligonucleotide
cacggauggcagacauagc

SEQ ID NO: 1431041 - RNA, 19 nt, Artificial Sequence
  Description of Artificial Sequence: Synthetic oligonucleotide
gguuagcagagggagcgug

SEQ ID NO: 1431042 - RNA, 19 nt, Artificial Sequence
  Description of Artificial Sequence: Synthetic oligonucleotide
cagauuggccaccaccaaa

SEQ ID NO: 1431043 - RNA, 19 nt, Artificial Sequence
  Description of Artificial Sequence: Synthetic oligonucleotide
ugccguuggugcuccucug

SEQ ID NO: 1431044 - RNA, 19 nt, Artificial Sequence
  Description of Artificial Sequence: Synthetic oligonucleotide
aggcggagggucugcuuug

SEQ ID NO: 1431045 - RNA, 19 nt, Artificial Sequence
  Description of Artificial Sequence: Synthetic oligonucleotide
acgaggugcgugugcgugu

SEQ ID NO: 1431046 - RNA, 19 nt, Artificial Sequence
  Description of Artificial Sequence: Synthetic oligonucleotide
cuucggccaaccagggaca

SEQ ID NO: 1431047 - RNA, 19 nt, Artificial Sequence
  Description of Artificial Sequence: Synthetic oligonucleotide
gcuggaccaaccagguggg

SEQ ID NO: 1431048 - RNA, 19 nt, Artificial Sequence
  Description of Artificial Sequence: Synthetic oligonucleotide
ggucaauuagcucccggua

SEQ ID NO: 1431049 - RNA, 19 nt, Artificial Sequence
  Description of Artificial Sequence: Synthetic oligonucleotide
cacggucccaggugggcug

SEQ ID NO: 1431050 - RNA, 19 nt, Artificial Sequence
  Description of Artificial Sequence: Synthetic oligonucleotide
gauccacguuccuuauucu

SEQ ID NO: 1431051 - RNA, 19 nt, Artificial Sequence
  Description of Artificial Sequence: Synthetic oligonucleotide
guggguuagcagagggagc

SEQ ID NO: 1431052 - RNA, 19 nt, Artificial Sequence
  Description of Artificial Sequence: Synthetic oligonucleotide
ugcgugugcgugugcgggu

SEQ ID NO: 1431053 - RNA, 19 nt, Artificial Sequence
  Description of Artificial Sequence: Synthetic oligonucleotide
cccuaguggguuagcagag

SEQ ID NO: 1431054 - RNA, 19 nt, Artificial Sequence
  Description of Artificial Sequence: Synthetic oligonucleotide
gugggcucaaggaggguac

SEQ ID NO: 1431055 - RNA, 19 nt, Artificial Sequence
  Description of Artificial Sequence: Synthetic oligonucleotide
ucccgguaucuagcuagcc

SEQ ID NO: 1431056 - RNA, 19 nt, Artificial Sequence
  Description of Artificial Sequence: Synthetic oligonucleotide
uggcaugaugugguugguc

SEQ ID NO: 1431057 - RNA, 19 nt, Artificial Sequence
  Description of Artificial Sequence: Synthetic oligonucleotide
ggcagcuaacaagaguuuc

SEQ ID NO: 1431058 - RNA, 19 nt, Artificial Sequence
  Description of Artificial Sequence: Synthetic oligonucleotide
uagcagagggagcguggau

SEQ ID NO: 1431059 - RNA, 19 nt, Artificial Sequence
  Description of Artificial Sequence: Synthetic oligonucleotide
ccuuuggaaacggaaacga

SEQ ID NO: 1431060 - RNA, 19 nt, Artificial Sequence
  Description of Artificial Sequence: Synthetic oligonucleotide
ucacgaggugcgugugcgu

SEQ ID NO: 1431061 - RNA, 19 nt, Artificial Sequence
  Description of Artificial Sequence: Synthetic oligonucleotide
caagaggaaacaggggucu

SEQ ID NO: 1431062 - RNA, 19 nt, Artificial Sequence
  Description of Artificial Sequence: Synthetic oligonucleotide
gcuuguacguuagggcgcc

SEQ ID NO: 1431063 - RNA, 19 nt, Artificial Sequence
  Description of Artificial Sequence: Synthetic oligonucleotide
gggaggagagucccacccc

SEQ ID NO: 1431064 - RNA, 19 nt, Artificial Sequence
  Description of Artificial Sequence: Synthetic oligonucleotide
gacuggucggacccggggu

SEQ ID NO: 1431065 - RNA, 19 nt, Artificial Sequence
  Description of Artificial Sequence: Synthetic oligonucleotide
ggaagugcuguucuccccu

SEQ ID NO: 1431066 - RNA, 19 nt, Artificial Sequence
  Description of Artificial Sequence: Synthetic oligonucleotide
cgguacaagagggaucugg

SEQ ID NO: 1431067 - RNA, 19 nt, Artificial Sequence
  Description of Artificial Sequence: Synthetic oligonucleotide
ccgcacccaaucuuccugg

SEQ ID NO: 1431068 - RNA, 19 nt, Artificial Sequence
  Description of Artificial Sequence: Synthetic oligonucleotide
ggcgaggcaccagggaagg

SEQ ID NO: 1431069 - RNA, 19 nt, Artificial Sequence
  Description of Artificial Sequence: Synthetic oligonucleotide
cccaggauugcaaaauaaa

SEQ ID NO: 1431070 - RNA, 19 nt, Artificial Sequence
  Description of Artificial Sequence: Synthetic oligonucleotide
guuggucguuugacuuggg

SEQ ID NO: 1431071 - RNA, 19 nt, Artificial Sequence
  Description of Artificial Sequence: Synthetic oligonucleotide
cagcccuggagccccugag

SEQ ID NO: 1431072 - RNA, 19 nt, Artificial Sequence
  Description of Artificial Sequence: Synthetic oligonucleotide
cagaguccucaggcuaggg

SEQ ID NO: 1431073 - RNA, 19 nt, Artificial Sequence
  Description of Artificial Sequence: Synthetic oligonucleotide
uggucggacccgggguggg

SEQ ID NO: 1431074 - RNA, 19 nt, Artificial Sequence
  Description of Artificial Sequence: Synthetic oligonucleotide
agggagcguggauuccccu

SEQ ID NO: 1431075 - RNA, 19 nt, Artificial Sequence
  Description of Artificial Sequence: Synthetic oligonucleotide
ggcgguacaagagggaucu

SEQ ID NO: 1431076 - RNA, 19 nt, Artificial Sequence
  Description of Artificial Sequence: Synthetic oligonucleotide
gggguauuuccagaagaga

SEQ ID NO: 1431077 - RNA, 19 nt, Artificial Sequence
  Description of Artificial Sequence: Synthetic oligonucleotide
ccaaaagauggccacugaa

SEQ ID NO: 1431078 - RNA, 19 nt, Artificial Sequence
  Description of Artificial Sequence: Synthetic oligonucleotide
cugcacuugaggguauaga

SEQ ID NO: 1431079 - RNA, 19 nt, Artificial Sequence
  Description of Artificial Sequence: Synthetic oligonucleotide
gugaaagaucuagggagcu

SEQ ID NO: 1431080 - RNA, 19 nt, Artificial Sequence
  Description of Artificial Sequence: Synthetic oligonucleotide
gccuggucgcuagacacag

SEQ ID NO: 1431081 - RNA, 19 nt, Artificial Sequence
  Description of Artificial Sequence: Synthetic oligonucleotide
gucguuugacuugggaacu

SEQ ID NO: 1431082 - RNA, 19 nt, Artificial Sequence
  Description of Artificial Sequence: Synthetic oligonucleotide
ggguugccgcacuucuucc

SEQ ID NO: 1431083 - RNA, 19 nt, Artificial Sequence
  Description of Artificial Sequence: Synthetic oligonucleotide
agcaagcaccguggcauga

SEQ ID NO: 1431084 - RNA, 19 nt, Artificial Sequence
  Description of Artificial Sequence: Synthetic oligonucleotide
aggcccuaguggguuagca

SEQ ID NO: 1431085 - RNA, 19 nt, Artificial Sequence
  Description of Artificial Sequence: Synthetic oligonucleotide
augaugugguuggucguuu

SEQ ID NO: 1431086 - RNA, 19 nt, Artificial Sequence
  Description of Artificial Sequence: Synthetic oligonucleotide
agggagcuauacauagaaa

SEQ ID NO: 1431087 - RNA, 19 nt, Artificial Sequence
  Description of Artificial Sequence: Synthetic oligonucleotide
gugccgcuguaaaugccgc

SEQ ID NO: 1431088 - RNA, 19 nt, Artificial Sequence
  Description of Artificial Sequence: Synthetic oligonucleotide
ggggcagcuaacaagaguu

SEQ ID NO: 1431089 - RNA, 19 nt, Artificial Sequence
  Description of Artificial Sequence: Synthetic oligonucleotide
cugcuggaccaaccaggug

SEQ ID NO: 1431090 - RNA, 19 nt, Artificial Sequence
  Description of Artificial Sequence: Synthetic oligonucleotide
ggcuacaaccccugcugga

SEQ ID NO: 1431091 - RNA, 19 nt, Artificial Sequence
  Description of Artificial Sequence: Synthetic oligonucleotide
caccguggcaugauguggu

SEQ ID NO: 1431092 - RNA, 19 nt, Artificial Sequence
  Description of Artificial Sequence: Synthetic oligonucleotide
ccuaguggguuagcagagg

SEQ ID NO: 1431093 - RNA, 19 nt, Artificial Sequence
  Description of Artificial Sequence: Synthetic oligonucleotide
acggucccaggugggcugg

SEQ ID NO: 1431094 - RNA, 19 nt, Artificial Sequence
  Description of Artificial Sequence: Synthetic oligonucleotide
gcuagcccaggauugcaaa

SEQ ID NO: 1431095 - RNA, 19 nt, Artificial Sequence
  Description of Artificial Sequence: Synthetic oligonucleotide
ugcgugugcgggugcguuu

SEQ ID NO: 1431096 - RNA, 19 nt, Artificial Sequence
  Description of Artificial Sequence: Synthetic oligonucleotide
ggggcgaggcaccagggaa

SEQ ID NO: 1431097 - RNA, 19 nt, Artificial Sequence
  Description of Artificial Sequence: Synthetic oligonucleotide
ugcaggucauuggccuccu

SEQ ID NO: 1431098 - RNA, 19 nt, Artificial Sequence
  Description of Artificial Sequence: Synthetic oligonucleotide
guacguuagggcgccucga

SEQ ID NO: 1431099 - RNA, 19 nt, Artificial Sequence
  Description of Artificial Sequence: Synthetic oligonucleotide
ggcgccucgacagcggcug

SEQ ID NO: 1431100 - RNA, 19 nt, Artificial Sequence
  Description of Artificial Sequence: Synthetic oligonucleotide
cggccaaccagggacaggc

SEQ ID NO: 1431101 - RNA, 19 nt, Artificial Sequence
  Description of Artificial Sequence: Synthetic oligonucleotide
gggugcguuugccugugca

SEQ ID NO: 1431102 - RNA, 19 nt, Artificial Sequence
  Description of Artificial Sequence: Synthetic oligonucleotide
cacugucagcugcccugcc

SEQ ID NO: 1431103 - RNA, 19 nt, Artificial Sequence
  Description of Artificial Sequence: Synthetic oligonucleotide
gcaaauggccacggauggc

SEQ ID NO: 1431104 - RNA, 19 nt, Artificial Sequence
  Description of Artificial Sequence: Synthetic oligonucleotide
gucucacgaggugcgugug

SEQ ID NO: 1431105 - RNA, 19 nt, Artificial Sequence
  Description of Artificial Sequence: Synthetic oligonucleotide
gcguucaaauuuguuaaua

SEQ ID NO: 1431106 - RNA, 19 nt, Artificial Sequence
  Description of Artificial Sequence: Synthetic oligonucleotide
gcccagguuguagugugcc

SEQ ID NO: 1431107 - RNA, 19 nt, Artificial Sequence
  Description of Artificial Sequence: Synthetic oligonucleotide
caauuagcucccgguaucu

SEQ ID NO: 1431108 - RNA, 19 nt, Artificial Sequence
  Description of Artificial Sequence: Synthetic oligonucleotide
ccgcuguaaaugccgcacc

SEQ ID NO: 1431109 - RNA, 19 nt, Artificial Sequence
  Description of Artificial Sequence: Synthetic oligonucleotide
accguggcaugaugugguu

SEQ ID NO: 1431110 - RNA, 19 nt, Artificial Sequence
  Description of Artificial Sequence: Synthetic oligonucleotide
cucgacagcggcugucugu

SEQ ID NO: 1431111 - RNA, 19 nt, Artificial Sequence
  Description of Artificial Sequence: Synthetic oligonucleotide
agcucccgguaucuagcua

SEQ ID NO: 1431112 - RNA, 19 nt, Artificial Sequence
  Description of Artificial Sequence: Synthetic oligonucleotide
agugggcccuggaauucca

SEQ ID NO: 1431113 - RNA, 19 nt, Artificial Sequence
  Description of Artificial Sequence: Synthetic oligonucleotide
ggcuugucugcguucaaau

SEQ ID NO: 1431114 - RNA, 19 nt, Artificial Sequence
  Description of Artificial Sequence: Synthetic oligonucleotide
gcccuggaauuccacuuca

SEQ ID NO: 1431115 - RNA, 19 nt, Artificial Sequence
  Description of Artificial Sequence: Synthetic oligonucleotide
aaccugcacuugaggguau

SEQ ID NO: 1431116 - RNA, 19 nt, Artificial Sequence
  Description of Artificial Sequence: Synthetic oligonucleotide
caggagggacaggcgguac

SEQ ID NO: 1431117 - RNA, 19 nt, Artificial Sequence
  Description of Artificial Sequence: Synthetic oligonucleotide
uccccugagcaagcaccgu

SEQ ID NO: 1431118 - RNA, 19 nt, Artificial Sequence
  Description of Artificial Sequence: Synthetic oligonucleotide
ccugcacuugaggguauag

SEQ ID NO: 1431119 - RNA, 19 nt, Artificial Sequence
  Description of Artificial Sequence: Synthetic oligonucleotide
gggcucaaggaggguaccc

SEQ ID NO: 1431120 - RNA, 19 nt, Artificial Sequence
  Description of Artificial Sequence: Synthetic oligonucleotide
gguggcuagcuggcucccg

SEQ ID NO: 1431121 - RNA, 19 nt, Artificial Sequence
  Description of Artificial Sequence: Synthetic oligonucleotide
ccguuggugcuccucugac

SEQ ID NO: 1431122 - RNA, 19 nt, Artificial Sequence
  Description of Artificial Sequence: Synthetic oligonucleotide
ccguucaccacugucagcu

SEQ ID NO: 1431123 - RNA, 19 nt, Artificial Sequence
  Description of Artificial Sequence: Synthetic oligonucleotide
cgguaucuagcuagcccag

SEQ ID NO: 1431124 - RNA, 19 nt, Artificial Sequence
  Description of Artificial Sequence: Synthetic oligonucleotide
uggccacggauggcagaca

SEQ ID NO: 1431125 - RNA, 19 nt, Artificial Sequence
  Description of Artificial Sequence: Synthetic oligonucleotide
ugucagcucugagcucuuu

SEQ ID NO: 1431126 - RNA, 19 nt, Artificial Sequence
  Description of Artificial Sequence: Synthetic oligonucleotide
cugccguuggugcuccucu

SEQ ID NO: 1431127 - RNA, 19 nt, Artificial Sequence
  Description of Artificial Sequence: Synthetic oligonucleotide
gccguucaccacugucagc

SEQ ID NO: 1431128 - RNA, 19 nt, Artificial Sequence
  Description of Artificial Sequence: Synthetic oligonucleotide
agggcgccgguuugagguu

SEQ ID NO: 1431129 - RNA, 19 nt, Artificial Sequence
  Description of Artificial Sequence: Synthetic oligonucleotide
gcccaggauugcaaaauaa

SEQ ID NO: 1431130 - RNA, 19 nt, Artificial Sequence
  Description of Artificial Sequence: Synthetic oligonucleotide
ccgguuugagguuuuggcu

SEQ ID NO: 1431131 - RNA, 19 nt, Artificial Sequence
  Description of Artificial Sequence: Synthetic oligonucleotide
ccccuguaaccagauuggc

SEQ ID NO: 1431132 - RNA, 19 nt, Artificial Sequence
  Description of Artificial Sequence: Synthetic oligonucleotide
ccuggucgcuagacacagg

SEQ ID NO: 1431133 - RNA, 19 nt, Artificial Sequence
  Description of Artificial Sequence: Synthetic oligonucleotide
gccguuggugcuccucuga

SEQ ID NO: 1431134 - RNA, 19 nt, Artificial Sequence
  Description of Artificial Sequence: Synthetic oligonucleotide
gcguuugccugugcaugag

SEQ ID NO: 1431135 - RNA, 19 nt, Artificial Sequence
  Description of Artificial Sequence: Synthetic oligonucleotide
augagugggugcagauauu

SEQ ID NO: 1431136 - RNA, 19 nt, Artificial Sequence
  Description of Artificial Sequence: Synthetic oligonucleotide
caugaugugguuggucguu

SEQ ID NO: 1431137 - RNA, 19 nt, Artificial Sequence
  Description of Artificial Sequence: Synthetic oligonucleotide
caccaccccgagcugcaga

SEQ ID NO: 1431138 - RNA, 19 nt, Artificial Sequence
  Description of Artificial Sequence: Synthetic oligonucleotide
gcaugaugugguuggucgu

SEQ ID NO: 1431139 - RNA, 19 nt, Artificial Sequence
  Description of Artificial Sequence: Synthetic oligonucleotide
cuggggcuccucaggcgga

SEQ ID NO: 1431140 - RNA, 19 nt, Artificial Sequence
  Description of Artificial Sequence: Synthetic oligonucleotide
caccaaaggccuggcuaca

SEQ ID NO: 1431141 - RNA, 19 nt, Artificial Sequence
  Description of Artificial Sequence: Synthetic oligonucleotide
gggcucccaggcccuagug

SEQ ID NO: 1431142 - RNA, 19 nt, Artificial Sequence
  Description of Artificial Sequence: Synthetic oligonucleotide
caggcgguacaagagggau

SEQ ID NO: 1431143 - RNA, 19 nt, Artificial Sequence
  Description of Artificial Sequence: Synthetic oligonucleotide
caggcggagggucugcuuu

SEQ ID NO: 1431144 - RNA, 19 nt, Artificial Sequence
  Description of Artificial Sequence: Synthetic oligonucleotide
ccuccucaccaccccgagc

SEQ ID NO: 1431145 - RNA, 19 nt, Artificial Sequence
  Description of Artificial Sequence: Synthetic oligonucleotide
ccacguuccuuauucucua

SEQ ID NO: 1431146 - RNA, 19 nt, Artificial Sequence
  Description of Artificial Sequence: Synthetic oligonucleotide
gggaucuggaaugcuugua

SEQ ID NO: 1431147 - RNA, 19 nt, Artificial Sequence
  Description of Artificial Sequence: Synthetic oligonucleotide
ggucggacccggggugggg

SEQ ID NO: 1431148 - RNA, 19 nt, Artificial Sequence
  Description of Artificial Sequence: Synthetic oligonucleotide
accugcacuugaggguaua

SEQ ID NO: 1431149 - RNA, 19 nt, Artificial Sequence
  Description of Artificial Sequence: Synthetic oligonucleotide
ccguggcaugaugugguug

SEQ ID NO: 1431150 - RNA, 19 nt, Artificial Sequence
  Description of Artificial Sequence: Synthetic oligonucleotide
cguggauuccccugagcaa

SEQ ID NO: 1431151 - RNA, 19 nt, Artificial Sequence
  Description of Artificial Sequence: Synthetic oligonucleotide
gucugcguucaaauuuguu

SEQ ID NO: 1431152 - RNA, 19 nt, Artificial Sequence
  Description of Artificial Sequence: Synthetic oligonucleotide
ccucgacagcggcugucug

SEQ ID NO: 1431153 - RNA, 19 nt, Artificial Sequence
  Description of Artificial Sequence: Synthetic oligonucleotide
cgccgguuugagguuuugg

SEQ ID NO: 1431154 - RNA, 19 nt, Artificial Sequence
  Description of Artificial Sequence: Synthetic oligonucleotide
ggguggcuagcuggcuccc

SEQ ID NO: 1431155 - RNA, 19 nt, Artificial Sequence
  Description of Artificial Sequence: Synthetic oligonucleotide
cucccggcgcccagguugu

SEQ ID NO: 1431156 - RNA, 19 nt, Artificial Sequence
  Description of Artificial Sequence: Synthetic oligonucleotide
caagucucacgaggugcgu

SEQ ID NO: 1431157 - RNA, 19 nt, Artificial Sequence
  Description of Artificial Sequence: Synthetic oligonucleotide
ccaaagggcgccgguuuga

SEQ ID NO: 1431158 - RNA, 19 nt, Artificial Sequence
  Description of Artificial Sequence: Synthetic oligonucleotide
guggcaugaugugguuggu

SEQ ID NO: 1431159 - RNA, 19 nt, Artificial Sequence
  Description of Artificial Sequence: Synthetic oligonucleotide
gcgggugcguuugccugug

SEQ ID NO: 1431160 - RNA, 19 nt, Artificial Sequence
  Description of Artificial Sequence: Synthetic oligonucleotide
cgaggugcgugugcgugug

SEQ ID NO: 1431161 - RNA, 19 nt, Artificial Sequence
  Description of Artificial Sequence: Synthetic oligonucleotide
cccggcgcccagguuguag

SEQ ID NO: 1431162 - RNA, 19 nt, Artificial Sequence
  Description of Artificial Sequence: Synthetic oligonucleotide
ggcgcccagguuguagugu

SEQ ID NO: 1431163 - RNA, 19 nt, Artificial Sequence
  Description of Artificial Sequence: Synthetic oligonucleotide
gcgguacaagagggaucug

SEQ ID NO: 1431164 - RNA, 19 nt, Artificial Sequence
  Description of Artificial Sequence: Synthetic oligonucleotide
gcaagcaccguggcaugau

SEQ ID NO: 1431165 - RNA, 19 nt, Artificial Sequence
  Description of Artificial Sequence: Synthetic oligonucleotide
gugcgugugcgggugcguu

SEQ ID NO: 1431166 - RNA, 19 nt, Artificial Sequence
  Description of Artificial Sequence: Synthetic oligonucleotide
cggcgcccagguuguagug

SEQ ID NO: 1431167 - RNA, 19 nt, Artificial Sequence
  Description of Artificial Sequence: Synthetic oligonucleotide
cguuggugcuccucugacu

SEQ ID NO: 1431168 - RNA, 19 nt, Artificial Sequence
  Description of Artificial Sequence: Synthetic oligonucleotide
gcgccgguuugagguuuug

SEQ ID NO: 1431169 - RNA, 19 nt, Artificial Sequence
  Description of Artificial Sequence: Synthetic oligonucleotide
cuuguacguuagggcgccu

SEQ ID NO: 1431170 - RNA, 19 nt, Artificial Sequence
  Description of Artificial Sequence: Synthetic oligonucleotide
ggguuagcagagggagcgu

SEQ ID NO: 1431171 - RNA, 19 nt, Artificial Sequence
  Description of Artificial Sequence: Synthetic oligonucleotide
gggcagcuaacaagaguuu

SEQ ID NO: 1431172 - RNA, 19 nt, Artificial Sequence
  Description of Artificial Sequence: Synthetic oligonucleotide
ccggcgcccagguuguagu

SEQ ID NO: 1431173 - RNA, 19 nt, Artificial Sequence
  Description of Artificial Sequence: Synthetic oligonucleotide
gccacggauggcagacaua

SEQ ID NO: 1431174 - RNA, 19 nt, Artificial Sequence
  Description of Artificial Sequence: Synthetic oligonucleotide
cggaaacgaaagagggaau

SEQ ID NO: 1431175 - RNA, 19 nt, Artificial Sequence
  Description of Artificial Sequence: Synthetic oligonucleotide
cccaggcccuaguggguua

SEQ ID NO: 1431176 - RNA, 19 nt, Artificial Sequence
  Description of Artificial Sequence: Synthetic oligonucleotide
gcccugccuggucgcuaga

SEQ ID NO: 1431177 - RNA, 19 nt, Artificial Sequence
  Description of Artificial Sequence: Synthetic oligonucleotide
cgggugcguuugccugugc

SEQ ID NO: 1431178 - RNA, 19 nt, Artificial Sequence
  Description of Artificial Sequence: Synthetic oligonucleotide
gccgcacuucuuccagcuu

SEQ ID NO: 1431179 - RNA, 19 nt, Artificial Sequence
  Description of Artificial Sequence: Synthetic oligonucleotide
gggcgccucgacagcggcu

SEQ ID NO: 1431180 - RNA, 19 nt, Artificial Sequence
  Description of Artificial Sequence: Synthetic oligonucleotide
gggcgccgguuugagguuu

SEQ ID NO: 1431181 - RNA, 19 nt, Artificial Sequence
  Description of Artificial Sequence: Synthetic oligonucleotide
ggucccaggugggcugguu

SEQ ID NO: 1431182 - RNA, 19 nt, Artificial Sequence
  Description of Artificial Sequence: Synthetic oligonucleotide
ggcgccgguuugagguuuu

SEQ ID NO: 1431183 - RNA, 19 nt, Artificial Sequence
  Description of Artificial Sequence: Synthetic oligonucleotide
uuuaauaacguccauaugg

SEQ ID NO: 1431184 - RNA, 19 nt, Artificial Sequence
  Description of Artificial Sequence: Synthetic oligonucleotide
aaaauugaacuuuggauac

SEQ ID NO: 1431185 - RNA, 19 nt, Artificial Sequence
  Description of Artificial Sequence: Synthetic oligonucleotide
uucauaagaaucuugaacc

SEQ ID NO: 1431186 - RNA, 19 nt, Artificial Sequence
  Description of Artificial Sequence: Synthetic oligonucleotide
aauucgauauccuaaaucu

SEQ ID NO: 1431187 - RNA, 19 nt, Artificial Sequence
  Description of Artificial Sequence: Synthetic oligonucleotide
uauuauaaaagguacacug

SEQ ID NO: 1431188 - RNA, 19 nt, Artificial Sequence
  Description of Artificial Sequence: Synthetic oligonucleotide
aaugaagacguggagaucc

SEQ ID NO: 1431189 - RNA, 19 nt, Artificial Sequence
  Description of Artificial Sequence: Synthetic oligonucleotide
agucauaauauucugacuc

SEQ ID NO: 1431190 - RNA, 19 nt, Artificial Sequence
  Description of Artificial Sequence: Synthetic oligonucleotide
aaagacuucaaugaagacg

SEQ ID NO: 1431191 - RNA, 19 nt, Artificial Sequence
  Description of Artificial Sequence: Synthetic oligonucleotide
aauuucuacggacaacagc

SEQ ID NO: 1431192 - RNA, 19 nt, Artificial Sequence
  Description of Artificial Sequence: Synthetic oligonucleotide
uaaaugggcauauuuaggg

SEQ ID NO: 1431193 - RNA, 19 nt, Artificial Sequence
  Description of Artificial Sequence: Synthetic oligonucleotide
uuaauaacguccauauggg

SEQ ID NO: 1431194 - RNA, 19 nt, Artificial Sequence
  Description of Artificial Sequence: Synthetic oligonucleotide
ucaguaacaacuuugcuca

SEQ ID NO: 1431195 - RNA, 19 nt, Artificial Sequence
  Description of Artificial Sequence: Synthetic oligonucleotide
auaacguccauaugggugc

SEQ ID NO: 1431196 - RNA, 19 nt, Artificial Sequence
  Description of Artificial Sequence: Synthetic oligonucleotide
uguaucgucauauccauag

SEQ ID NO: 1431197 - RNA, 19 nt, Artificial Sequence
  Description of Artificial Sequence: Synthetic oligonucleotide
aaaucaguaacaacuuugc

SEQ ID NO: 1431198 - RNA, 19 nt, Artificial Sequence
  Description of Artificial Sequence: Synthetic oligonucleotide
aaugggcauauuuaggguc

SEQ ID NO: 1431199 - RNA, 19 nt, Artificial Sequence
  Description of Artificial Sequence: Synthetic oligonucleotide
gagauccauauuuaaaugg

SEQ ID NO: 1431200 - RNA, 19 nt, Artificial Sequence
  Description of Artificial Sequence: Synthetic oligonucleotide
uuuggauacugcuugacag

SEQ ID NO: 1431201 - RNA, 19 nt, Artificial Sequence
  Description of Artificial Sequence: Synthetic oligonucleotide
uuaaaugggcauauuuagg

SEQ ID NO: 1431202 - RNA, 19 nt, Artificial Sequence
  Description of Artificial Sequence: Synthetic oligonucleotide
caauucuagaaauugcucc

SEQ ID NO: 1431203 - RNA, 19 nt, Artificial Sequence
  Description of Artificial Sequence: Synthetic oligonucleotide
uccuaaaucuauuuuaacu

SEQ ID NO: 1431204 - RNA, 19 nt, Artificial Sequence
  Description of Artificial Sequence: Synthetic oligonucleotide
uguaugaucccuucacugg

SEQ ID NO: 1431205 - RNA, 19 nt, Artificial Sequence
  Description of Artificial Sequence: Synthetic oligonucleotide
uagaaauugcuccuggcag

SEQ ID NO: 1431206 - RNA, 19 nt, Artificial Sequence
  Description of Artificial Sequence: Synthetic oligonucleotide
aaagguacacuguuuauau

SEQ ID NO: 1431207 - RNA, 19 nt, Artificial Sequence
  Description of Artificial Sequence: Synthetic oligonucleotide
aauaacguccauaugggug

SEQ ID NO: 1431208 - RNA, 19 nt, Artificial Sequence
  Description of Artificial Sequence: Synthetic oligonucleotide
auaacugauauuuuccccu

SEQ ID NO: 1431209 - RNA, 19 nt, Artificial Sequence
  Description of Artificial Sequence: Synthetic oligonucleotide
uaaagguauucucuggaug

SEQ ID NO: 1431210 - RNA, 19 nt, Artificial Sequence
  Description of Artificial Sequence: Synthetic oligonucleotide
aacugauauuuuccccucc

SEQ ID NO: 1431211 - RNA, 19 nt, Artificial Sequence
  Description of Artificial Sequence: Synthetic oligonucleotide
aaauuaauucgauauccua

SEQ ID NO: 1431212 - RNA, 19 nt, Artificial Sequence
  Description of Artificial Sequence: Synthetic oligonucleotide
aauugcuccuggcagauau

SEQ ID NO: 1431213 - RNA, 19 nt, Artificial Sequence
  Description of Artificial Sequence: Synthetic oligonucleotide
uucgauauccuaaaucuau

SEQ ID NO: 1431214 - RNA, 19 nt, Artificial Sequence
  Description of Artificial Sequence: Synthetic oligonucleotide
acccuuucgaaguucuucc

SEQ ID NO: 1431215 - RNA, 19 nt, Artificial Sequence
  Description of Artificial Sequence: Synthetic oligonucleotide
acggacaacagcugcaugg

SEQ ID NO: 1431216 - RNA, 19 nt, Artificial Sequence
  Description of Artificial Sequence: Synthetic oligonucleotide
uauccuaaaucuauuuuaa

SEQ ID NO: 1431217 - RNA, 19 nt, Artificial Sequence
  Description of Artificial Sequence: Synthetic oligonucleotide
ucuuacugggguuccacgg

SEQ ID NO: 1431218 - RNA, 19 nt, Artificial Sequence
  Description of Artificial Sequence: Synthetic oligonucleotide
uguuggagcaccucucacg

SEQ ID NO: 1431219 - RNA, 19 nt, Artificial Sequence
  Description of Artificial Sequence: Synthetic oligonucleotide
cuugacagguaucaguacc

SEQ ID NO: 1431220 - RNA, 19 nt, Artificial Sequence
  Description of Artificial Sequence: Synthetic oligonucleotide
uccauaagcuucauaagaa

SEQ ID NO: 1431221 - RNA, 19 nt, Artificial Sequence
  Description of Artificial Sequence: Synthetic oligonucleotide
uggcgugagugaaagacgg

SEQ ID NO: 1431222 - RNA, 19 nt, Artificial Sequence
  Description of Artificial Sequence: Synthetic oligonucleotide
auuaauucgauauccuaaa

SEQ ID NO: 1431223 - RNA, 19 nt, Artificial Sequence
  Description of Artificial Sequence: Synthetic oligonucleotide
cuuucgaaguucuuccucc

SEQ ID NO: 1431224 - RNA, 19 nt, Artificial Sequence
  Description of Artificial Sequence: Synthetic oligonucleotide
uucucaauuucuacggaca

SEQ ID NO: 1431225 - RNA, 19 nt, Artificial Sequence
  Description of Artificial Sequence: Synthetic oligonucleotide
aagaaucuuccccacaaaa

SEQ ID NO: 1431226 - RNA, 19 nt, Artificial Sequence
  Description of Artificial Sequence: Synthetic oligonucleotide
ugguacuagaaauuucuug

SEQ ID NO: 1431227 - RNA, 19 nt, Artificial Sequence
  Description of Artificial Sequence: Synthetic oligonucleotide
aguaggacaauucuagaaa

SEQ ID NO: 1431228 - RNA, 19 nt, Artificial Sequence
  Description of Artificial Sequence: Synthetic oligonucleotide
agauccauauuuaaauggg

SEQ ID NO: 1431229 - RNA, 19 nt, Artificial Sequence
  Description of Artificial Sequence: Synthetic oligonucleotide
auauccuaaaucuauuuua

SEQ ID NO: 1431230 - RNA, 19 nt, Artificial Sequence
  Description of Artificial Sequence: Synthetic oligonucleotide
uuggauacugcuugacagg

SEQ ID NO: 1431231 - RNA, 19 nt, Artificial Sequence
  Description of Artificial Sequence: Synthetic oligonucleotide
aaaauuaauucgauauccu

SEQ ID NO: 1431232 - RNA, 19 nt, Artificial Sequence
  Description of Artificial Sequence: Synthetic oligonucleotide
  modified_base (18)..(18): a, c, u, g, unknown or other
aguaauucuccucgucanc

SEQ ID NO: 1431233 - RNA, 19 nt, Artificial Sequence
  Description of Artificial Sequence: Synthetic oligonucleotide
aaaugggcauauuuagggu

SEQ ID NO: 1431234 - RNA, 19 nt, Artificial Sequence
  Description of Artificial Sequence: Synthetic oligonucleotide
uugacagguaucaguaccc

SEQ ID NO: 1431235 - RNA, 19 nt, Artificial Sequence
  Description of Artificial Sequence: Synthetic oligonucleotide
uuuuaauaacguccauaug

SEQ ID NO: 1431236 - RNA, 19 nt, Artificial Sequence
  Description of Artificial Sequence: Synthetic oligonucleotide
gguacuagaaauuucuuga

SEQ ID NO: 1431237 - RNA, 19 nt, Artificial Sequence
  Description of Artificial Sequence: Synthetic oligonucleotide
gugaaagacgggucgaggg

SEQ ID NO: 1431238 - RNA, 19 nt, Artificial Sequence
  Description of Artificial Sequence: Synthetic oligonucleotide
  modified_base (19)..(19): a, c, u, g, unknown or other
aaguaauucuccucgucan

SEQ ID NO: 1431239 - RNA, 19 nt, Artificial Sequence
  Description of Artificial Sequence: Synthetic oligonucleotide
cauaauauucugacucccc

SEQ ID NO: 1431240 - RNA, 19 nt, Artificial Sequence
  Description of Artificial Sequence: Synthetic oligonucleotide
gugagugaaagacgggucg

SEQ ID NO: 1431241 - RNA, 19 nt, Artificial Sequence
  Description of Artificial Sequence: Synthetic oligonucleotide
cauagcaugggccauaaga

SEQ ID NO: 1431242 - RNA, 19 nt, Artificial Sequence
  Description of Artificial Sequence: Synthetic oligonucleotide
ucauaagaaucuugaaccu

SEQ ID NO: 1431243 - RNA, 19 nt, Artificial Sequence
  Description of Artificial Sequence: Synthetic oligonucleotide
ugacucacccuucugaauc

SEQ ID NO: 1431244 - RNA, 19 nt, Artificial Sequence
  Description of Artificial Sequence: Synthetic oligonucleotide
aggacaauucuagaaauug

SEQ ID NO: 1431245 - RNA, 19 nt, Artificial Sequence
  Description of Artificial Sequence: Synthetic oligonucleotide
auaagcuucauaagaaucu

SEQ ID NO: 1431246 - RNA, 19 nt, Artificial Sequence
  Description of Artificial Sequence: Synthetic oligonucleotide
auagcaugggccauaagag

SEQ ID NO: 1431247 - RNA, 19 nt, Artificial Sequence
  Description of Artificial Sequence: Synthetic oligonucleotide
ccuaaaucuauuuuaacuc

SEQ ID NO: 1431248 - RNA, 19 nt, Artificial Sequence
  Description of Artificial Sequence: Synthetic oligonucleotide
uugcucauaacugauauuu

SEQ ID NO: 1431249 - RNA, 19 nt, Artificial Sequence
  Description of Artificial Sequence: Synthetic oligonucleotide
gauuguauuuccuuguggu

SEQ ID NO: 1431250 - RNA, 19 nt, Artificial Sequence
  Description of Artificial Sequence: Synthetic oligonucleotide
ucuggaugccugcuguccg

SEQ ID NO: 1431251 - RNA, 19 nt, Artificial Sequence
  Description of Artificial Sequence: Synthetic oligonucleotide
agguacacuguuuauauuu

SEQ ID NO: 1431252 - RNA, 19 nt, Artificial Sequence
  Description of Artificial Sequence: Synthetic oligonucleotide
uauguaucgucauauccau

SEQ ID NO: 1431253 - RNA, 19 nt, Artificial Sequence
  Description of Artificial Sequence: Synthetic oligonucleotide
uucuacggacaacagcugc

SEQ ID NO: 1431254 - RNA, 19 nt, Artificial Sequence
  Description of Artificial Sequence: Synthetic oligonucleotide
agguaaagguauucucugg

SEQ ID NO: 1431255 - RNA, 19 nt, Artificial Sequence
  Description of Artificial Sequence: Synthetic oligonucleotide
ucuagaaauugcuccuggc

SEQ ID NO: 1431256 - RNA, 19 nt, Artificial Sequence
  Description of Artificial Sequence: Synthetic oligonucleotide
uggagcaccucucacggug

SEQ ID NO: 1431257 - RNA, 19 nt, Artificial Sequence
  Description of Artificial Sequence: Synthetic oligonucleotide
acuuagacaauuacuuguc

SEQ ID NO: 1431258 - RNA, 19 nt, Artificial Sequence
  Description of Artificial Sequence: Synthetic oligonucleotide
ucuacggacaacagcugca

SEQ ID NO: 1431259 - RNA, 19 nt, Artificial Sequence
  Description of Artificial Sequence: Synthetic oligonucleotide
ugcuugacagguaucagua

SEQ ID NO: 1431260 - RNA, 19 nt, Artificial Sequence
  Description of Artificial Sequence: Synthetic oligonucleotide
acaauucuagaaauugcuc

SEQ ID NO: 1431261 - RNA, 19 nt, Artificial Sequence
  Description of Artificial Sequence: Synthetic oligonucleotide
cauggcgugagugaaagac

SEQ ID NO: 1431262 - RNA, 19 nt, Artificial Sequence
  Description of Artificial Sequence: Synthetic oligonucleotide
cacuccucgagucacagug

SEQ ID NO: 1431263 - RNA, 19 nt, Artificial Sequence
  Description of Artificial Sequence: Synthetic oligonucleotide
cauccaucauaucugguac

SEQ ID NO: 1431264 - RNA, 19 nt, Artificial Sequence
  Description of Artificial Sequence: Synthetic oligonucleotide
ucgaggugguccaacacca

SEQ ID NO: 1431265 - RNA, 19 nt, Artificial Sequence
  Description of Artificial Sequence: Synthetic oligonucleotide
uggcagauaucauccauca

SEQ ID NO: 1431266 - RNA, 19 nt, Artificial Sequence
  Description of Artificial Sequence: Synthetic oligonucleotide
gauccauauuuaaaugggc

SEQ ID NO: 1431267 - RNA, 19 nt, Artificial Sequence
  Description of Artificial Sequence: Synthetic oligonucleotide
cuguaugaucccuucacug

SEQ ID NO: 1431268 - RNA, 19 nt, Artificial Sequence
  Description of Artificial Sequence: Synthetic oligonucleotide
ugcauauguaucgucauau

SEQ ID NO: 1431269 - RNA, 19 nt, Artificial Sequence
  Description of Artificial Sequence: Synthetic oligonucleotide
gaggugguccaacaccacg

SEQ ID NO: 1431270 - RNA, 19 nt, Artificial Sequence
  Description of Artificial Sequence: Synthetic oligonucleotide
agaaauugcuccuggcaga

SEQ ID NO: 1431271 - RNA, 19 nt, Artificial Sequence
  Description of Artificial Sequence: Synthetic oligonucleotide
ucucaauuucuacggacaa

SEQ ID NO: 1431272 - RNA, 19 nt, Artificial Sequence
  Description of Artificial Sequence: Synthetic oligonucleotide
agcauaagcuucacaaggg

SEQ ID NO: 1431273 - RNA, 19 nt, Artificial Sequence
  Description of Artificial Sequence: Synthetic oligonucleotide
uuaauucgauauccuaaau

SEQ ID NO: 1431274 - RNA, 19 nt, Artificial Sequence
  Description of Artificial Sequence: Synthetic oligonucleotide
guaacaacuuugcucauaa

SEQ ID NO: 1431275 - RNA, 19 nt, Artificial Sequence
  Description of Artificial Sequence: Synthetic oligonucleotide
aaccuccccauguccauag

SEQ ID NO: 1431276 - RNA, 19 nt, Artificial Sequence
  Description of Artificial Sequence: Synthetic oligonucleotide
cacgagaggguucaggaac

SEQ ID NO: 1431277 - RNA, 19 nt, Artificial Sequence
  Description of Artificial Sequence: Synthetic oligonucleotide
cucuguaugaucccuucac

SEQ ID NO: 1431278 - RNA, 19 nt, Artificial Sequence
  Description of Artificial Sequence: Synthetic oligonucleotide
gguaaagcaacaggaaucc

SEQ ID NO: 1431279 - RNA, 19 nt, Artificial Sequence
  Description of Artificial Sequence: Synthetic oligonucleotide
auauucugacuccccuugg

SEQ ID NO: 1431280 - RNA, 19 nt, Artificial Sequence
  Description of Artificial Sequence: Synthetic oligonucleotide
cauagucauaauauucuga

SEQ ID NO: 1431281 - RNA, 19 nt, Artificial Sequence
  Description of Artificial Sequence: Synthetic oligonucleotide
cauaagagcauaagcuuca

SEQ ID NO: 1431282 - RNA, 19 nt, Artificial Sequence
  Description of Artificial Sequence: Synthetic oligonucleotide
cuugaaccuccccaugucc

SEQ ID NO: 1431283 - RNA, 19 nt, Artificial Sequence
  Description of Artificial Sequence: Synthetic oligonucleotide
uacccguucuuucagcuuc

SEQ ID NO: 1431284 - RNA, 19 nt, Artificial Sequence
  Description of Artificial Sequence: Synthetic oligonucleotide
gaaagacgggucgagggag

SEQ ID NO: 1431285 - RNA, 19 nt, Artificial Sequence
  Description of Artificial Sequence: Synthetic oligonucleotide
uacugcuugacagguauca

SEQ ID NO: 1431286 - RNA, 19 nt, Artificial Sequence
  Description of Artificial Sequence: Synthetic oligonucleotide
auguccauagucauaauau

SEQ ID NO: 1431287 - RNA, 19 nt, Artificial Sequence
  Description of Artificial Sequence: Synthetic oligonucleotide
aucaguacccguucuuuca

SEQ ID NO: 1431288 - RNA, 19 nt, Artificial Sequence
  Description of Artificial Sequence: Synthetic oligonucleotide
ucuggucugcauauguauc

SEQ ID NO: 1431289 - RNA, 19 nt, Artificial Sequence
  Description of Artificial Sequence: Synthetic oligonucleotide
ugcauggcgugagugaaag

SEQ ID NO: 1431290 - RNA, 19 nt, Artificial Sequence
  Description of Artificial Sequence: Synthetic oligonucleotide
cuagaaauugcuccuggca

SEQ ID NO: 1431291 - RNA, 19 nt, Artificial Sequence
  Description of Artificial Sequence: Synthetic oligonucleotide
aagaaaucaguaacaacuu

SEQ ID NO: 1431292 - RNA, 19 nt, Artificial Sequence
  Description of Artificial Sequence: Synthetic oligonucleotide
uaauaacguccauaugggu

SEQ ID NO: 1431293 - RNA, 19 nt, Artificial Sequence
  Description of Artificial Sequence: Synthetic oligonucleotide
ucauaugucucuggugcag

SEQ ID NO: 1431294 - RNA, 19 nt, Artificial Sequence
  Description of Artificial Sequence: Synthetic oligonucleotide
cucgaggugguccaacacc

SEQ ID NO: 1431295 - RNA, 19 nt, Artificial Sequence
  Description of Artificial Sequence: Synthetic oligonucleotide
aacuuuggauacugcuuga

SEQ ID NO: 1431296 - RNA, 19 nt, Artificial Sequence
  Description of Artificial Sequence: Synthetic oligonucleotide
acugguaccccacgaccac

SEQ ID NO: 1431297 - RNA, 19 nt, Artificial Sequence
  Description of Artificial Sequence: Synthetic oligonucleotide
cuguuguggguaaagcaac

SEQ ID NO: 1431298 - RNA, 19 nt, Artificial Sequence
  Description of Artificial Sequence: Synthetic oligonucleotide
uccauaugggugcucucug

SEQ ID NO: 1431299 - RNA, 19 nt, Artificial Sequence
  Description of Artificial Sequence: Synthetic oligonucleotide
caucauaucugguacuaga

SEQ ID NO: 1431300 - RNA, 19 nt, Artificial Sequence
  Description of Artificial Sequence: Synthetic oligonucleotide
ggagauccauauuuaaaug

SEQ ID NO: 1431301 - RNA, 19 nt, Artificial Sequence
  Description of Artificial Sequence: Synthetic oligonucleotide
augagaaaacaaauccaag

SEQ ID NO: 1431302 - RNA, 19 nt, Artificial Sequence
  Description of Artificial Sequence: Synthetic oligonucleotide
ucggacgccgauccgacca

SEQ ID NO: 1431303 - RNA, 19 nt, Artificial Sequence
  Description of Artificial Sequence: Synthetic oligonucleotide
cauauccuucauaacucug

SEQ ID NO: 1431304 - RNA, 19 nt, Artificial Sequence
  Description of Artificial Sequence: Synthetic oligonucleotide
uuucuacggacaacagcug

SEQ ID NO: 1431305 - RNA, 19 nt, Artificial Sequence
  Description of Artificial Sequence: Synthetic oligonucleotide
uuacuugucuguugugggu

SEQ ID NO: 1431306 - RNA, 19 nt, Artificial Sequence
  Description of Artificial Sequence: Synthetic oligonucleotide
aguacccguucuuucagcu

SEQ ID NO: 1431307 - RNA, 19 nt, Artificial Sequence
  Description of Artificial Sequence: Synthetic oligonucleotide
ugacagguaucaguacccg

SEQ ID NO: 1431308 - RNA, 19 nt, Artificial Sequence
  Description of Artificial Sequence: Synthetic oligonucleotide
uucauaugucucuggugca

SEQ ID NO: 1431309 - RNA, 19 nt, Artificial Sequence
  Description of Artificial Sequence: Synthetic oligonucleotide
acuuuggauacugcuugac

SEQ ID NO: 1431310 - RNA, 19 nt, Artificial Sequence
  Description of Artificial Sequence: Synthetic oligonucleotide
agugaaagacgggucgagg

SEQ ID NO: 1431311 - RNA, 19 nt, Artificial Sequence
  Description of Artificial Sequence: Synthetic oligonucleotide
uguccauagucauaauauu

SEQ ID NO: 1431312 - RNA, 19 nt, Artificial Sequence
  Description of Artificial Sequence: Synthetic oligonucleotide
agauaucauccaucauauc

SEQ ID NO: 1431313 - RNA, 19 nt, Artificial Sequence
  Description of Artificial Sequence: Synthetic oligonucleotide
uauuuagggucuccacccu

SEQ ID NO: 1431314 - RNA, 19 nt, Artificial Sequence
  Description of Artificial Sequence: Synthetic oligonucleotide
ucucuguaugaucccuuca

SEQ ID NO: 1431315 - RNA, 19 nt, Artificial Sequence
  Description of Artificial Sequence: Synthetic oligonucleotide
uaacugauauuuuccccuc

SEQ ID NO: 1431316 - RNA, 19 nt, Artificial Sequence
  Description of Artificial Sequence: Synthetic oligonucleotide
cagaaugcagaguuaagaa

SEQ ID NO: 1431317 - RNA, 19 nt, Artificial Sequence
  Description of Artificial Sequence: Synthetic oligonucleotide
gcagauaucauccaucaua

SEQ ID NO: 1431318 - RNA, 19 nt, Artificial Sequence
  Description of Artificial Sequence: Synthetic oligonucleotide
cauaagaaucuugaaccuc

SEQ ID NO: 1431319 - RNA, 19 nt, Artificial Sequence
  Description of Artificial Sequence: Synthetic oligonucleotide
aaaucuauuuuaacucauu

SEQ ID NO: 1431320 - RNA, 19 nt, Artificial Sequence
  Description of Artificial Sequence: Synthetic oligonucleotide
ucgauauccuaaaucuauu

SEQ ID NO: 1431321 - RNA, 19 nt, Artificial Sequence
  Description of Artificial Sequence: Synthetic oligonucleotide
uuacugggguuccacggac

SEQ ID NO: 1431322 - RNA, 19 nt, Artificial Sequence
  Description of Artificial Sequence: Synthetic oligonucleotide
cagguacuuauucuccggc

SEQ ID NO: 1431323 - RNA, 19 nt, Artificial Sequence
  Description of Artificial Sequence: Synthetic oligonucleotide
cuucauaacucuggucugc

SEQ ID NO: 1431324 - RNA, 19 nt, Artificial Sequence
  Description of Artificial Sequence: Synthetic oligonucleotide
agaguuaagaauggaggaa

SEQ ID NO: 1431325 - RNA, 19 nt, Artificial Sequence
  Description of Artificial Sequence: Synthetic oligonucleotide
cucuuacugggguuccacg

SEQ ID NO: 1431326 - RNA, 19 nt, Artificial Sequence
  Description of Artificial Sequence: Synthetic oligonucleotide
gucuguuguggguaaagca

SEQ ID NO: 1431327 - RNA, 19 nt, Artificial Sequence
  Description of Artificial Sequence: Synthetic oligonucleotide
cauugaacccuuccccaag

SEQ ID NO: 1431328 - RNA, 19 nt, Artificial Sequence
  Description of Artificial Sequence: Synthetic oligonucleotide
uuuagggucuccacccuuu

SEQ ID NO: 1431329 - RNA, 19 nt, Artificial Sequence
  Description of Artificial Sequence: Synthetic oligonucleotide
uucgggcagguacuuauuc

SEQ ID NO: 1431330 - RNA, 19 nt, Artificial Sequence
  Description of Artificial Sequence: Synthetic oligonucleotide
cauaugucucuggugcagg

SEQ ID NO: 1431331 - RNA, 19 nt, Artificial Sequence
  Description of Artificial Sequence: Synthetic oligonucleotide
cacuuagacaauuacuugu

SEQ ID NO: 1431332 - RNA, 19 nt, Artificial Sequence
  Description of Artificial Sequence: Synthetic oligonucleotide
ucgucauauccauagucuu

SEQ ID NO: 1431333 - RNA, 19 nt, Artificial Sequence
  Description of Artificial Sequence: Synthetic oligonucleotide
gacagagaucuuugcacca

SEQ ID NO: 1431334 - RNA, 19 nt, Artificial Sequence
  Description of Artificial Sequence: Synthetic oligonucleotide
uccugggauacaagaaauc

SEQ ID NO: 1431335 - RNA, 19 nt, Artificial Sequence
  Description of Artificial Sequence: Synthetic oligonucleotide
gacguggagauccauauuu

SEQ ID NO: 1431336 - RNA, 19 nt, Artificial Sequence
  Description of Artificial Sequence: Synthetic oligonucleotide
ugagugaaagacgggucga

SEQ ID NO: 1431337 - RNA, 19 nt, Artificial Sequence
  Description of Artificial Sequence: Synthetic oligonucleotide
agagaucuuugcaccaguc

SEQ ID NO: 1431338 - RNA, 19 nt, Artificial Sequence
  Description of Artificial Sequence: Synthetic oligonucleotide
acagagaucuuugcaccag

SEQ ID NO: 1431339 - RNA, 19 nt, Artificial Sequence
  Description of Artificial Sequence: Synthetic oligonucleotide
auacuacauacagaagcca

SEQ ID NO: 1431340 - RNA, 19 nt, Artificial Sequence
  Description of Artificial Sequence: Synthetic oligonucleotide
cuccucgagucacaguggc

SEQ ID NO: 1431341 - RNA, 19 nt, Artificial Sequence
  Description of Artificial Sequence: Synthetic oligonucleotide
uugaacccuuccccaagac

SEQ ID NO: 1431342 - RNA, 19 nt, Artificial Sequence
  Description of Artificial Sequence: Synthetic oligonucleotide
aagacgggucgagggaguc

SEQ ID NO: 1431343 - RNA, 19 nt, Artificial Sequence
  Description of Artificial Sequence: Synthetic oligonucleotide
auaugggugcucucuguau

SEQ ID NO: 1431344 - RNA, 19 nt, Artificial Sequence
  Description of Artificial Sequence: Synthetic oligonucleotide
uuugcucauaacugauauu

SEQ ID NO: 1431345 - RNA, 19 nt, Artificial Sequence
  Description of Artificial Sequence: Synthetic oligonucleotide
ugcucauaacugauauuuu

SEQ ID NO: 1431346 - RNA, 19 nt, Artificial Sequence
  Description of Artificial Sequence: Synthetic oligonucleotide
cucacugguaccccacgac

SEQ ID NO: 1431347 - RNA, 19 nt, Artificial Sequence
  Description of Artificial Sequence: Synthetic oligonucleotide
uauucucuggaugccugcu

SEQ ID NO: 1431348 - RNA, 19 nt, Artificial Sequence
  Description of Artificial Sequence: Synthetic oligonucleotide
cagauaucauccaucauau

SEQ ID NO: 1431349 - RNA, 19 nt, Artificial Sequence
  Description of Artificial Sequence: Synthetic oligonucleotide
cauaacucuggucugcaua

SEQ ID NO: 1431350 - RNA, 19 nt, Artificial Sequence
  Description of Artificial Sequence: Synthetic oligonucleotide
cucaauuucuacggacaac

SEQ ID NO: 1431351 - RNA, 19 nt, Artificial Sequence
  Description of Artificial Sequence: Synthetic oligonucleotide
augggcauauuuagggucu

SEQ ID NO: 1431352 - RNA, 19 nt, Artificial Sequence
  Description of Artificial Sequence: Synthetic oligonucleotide
gagaucuuugcaccagucu

SEQ ID NO: 1431353 - RNA, 19 nt, Artificial Sequence
  Description of Artificial Sequence: Synthetic oligonucleotide
uugacucacccuucugaau

SEQ ID NO: 1431354 - RNA, 19 nt, Artificial Sequence
  Description of Artificial Sequence: Synthetic oligonucleotide
uaauagccuucauauccuu

SEQ ID NO: 1431355 - RNA, 19 nt, Artificial Sequence
  Description of Artificial Sequence: Synthetic oligonucleotide
uuagggucuccacccuuuc

SEQ ID NO: 1431356 - RNA, 19 nt, Artificial Sequence
  Description of Artificial Sequence: Synthetic oligonucleotide
agguaucaguacccguucu

SEQ ID NO: 1431357 - RNA, 19 nt, Artificial Sequence
  Description of Artificial Sequence: Synthetic oligonucleotide
cucgagucacaguggcacc

SEQ ID NO: 1431358 - RNA, 19 nt, Artificial Sequence
  Description of Artificial Sequence: Synthetic oligonucleotide
gucgcgucgggacccgugg

SEQ ID NO: 1431359 - RNA, 19 nt, Artificial Sequence
  Description of Artificial Sequence: Synthetic oligonucleotide
cucagccaugaguucgggc

SEQ ID NO: 1431360 - RNA, 19 nt, Artificial Sequence
  Description of Artificial Sequence: Synthetic oligonucleotide
cuuacugggguuccacgga

SEQ ID NO: 1431361 - RNA, 19 nt, Artificial Sequence
  Description of Artificial Sequence: Synthetic oligonucleotide
cagguaucaguacccguuc

SEQ ID NO: 1431362 - RNA, 19 nt, Artificial Sequence
  Description of Artificial Sequence: Synthetic oligonucleotide
ucgagucacaguggcaccu

SEQ ID NO: 1431363 - RNA, 19 nt, Artificial Sequence
  Description of Artificial Sequence: Synthetic oligonucleotide
accacgaccccugggaaca

SEQ ID NO: 1431364 - RNA, 19 nt, Artificial Sequence
  Description of Artificial Sequence: Synthetic oligonucleotide
agccagaaugcagaguuaa

SEQ ID NO: 1431365 - RNA, 19 nt, Artificial Sequence
  Description of Artificial Sequence: Synthetic oligonucleotide
auuuagggucuccacccuu

SEQ ID NO: 1431366 - RNA, 19 nt, Artificial Sequence
  Description of Artificial Sequence: Synthetic oligonucleotide
acgaccacgagaggguuca

SEQ ID NO: 1431367 - RNA, 19 nt, Artificial Sequence
  Description of Artificial Sequence: Synthetic oligonucleotide
agacgggucgagggagucc

SEQ ID NO: 1431368 - RNA, 19 nt, Artificial Sequence
  Description of Artificial Sequence: Synthetic oligonucleotide
uccucgagucacaguggca

SEQ ID NO: 1431369 - RNA, 19 nt, Artificial Sequence
  Description of Artificial Sequence: Synthetic oligonucleotide
gugguccaacaccacgacc

SEQ ID NO: 1431370 - RNA, 19 nt, Artificial Sequence
  Description of Artificial Sequence: Synthetic oligonucleotide
aaagacgggucgagggagu

SEQ ID NO: 1431371 - RNA, 19 nt, Artificial Sequence
  Description of Artificial Sequence: Synthetic oligonucleotide
aguaacaacuuugcucaua

SEQ ID NO: 1431372 - RNA, 19 nt, Artificial Sequence
  Description of Artificial Sequence: Synthetic oligonucleotide
agacaauuacuugucuguu

SEQ ID NO: 1431373 - RNA, 19 nt, Artificial Sequence
  Description of Artificial Sequence: Synthetic oligonucleotide
gauccgaccacagucgcgu

SEQ ID NO: 1431374 - RNA, 19 nt, Artificial Sequence
  Description of Artificial Sequence: Synthetic oligonucleotide
aggugguccaacaccacga

SEQ ID NO: 1431375 - RNA, 19 nt, Artificial Sequence
  Description of Artificial Sequence: Synthetic oligonucleotide
ggccauaagagcauaagcu

SEQ ID NO: 1431376 - RNA, 19 nt, Artificial Sequence
  Description of Artificial Sequence: Synthetic oligonucleotide
guaauagccuucauauccu

SEQ ID NO: 1431377 - RNA, 19 nt, Artificial Sequence
  Description of Artificial Sequence: Synthetic oligonucleotide
ggaagguugggaaaagaaa

SEQ ID NO: 1431378 - RNA, 19 nt, Artificial Sequence
  Description of Artificial Sequence: Synthetic oligonucleotide
agguauucucuggaugccu

SEQ ID NO: 1431379 - RNA, 19 nt, Artificial Sequence
  Description of Artificial Sequence: Synthetic oligonucleotide
ggacccguggccgagggag

SEQ ID NO: 1431380 - RNA, 19 nt, Artificial Sequence
  Description of Artificial Sequence: Synthetic oligonucleotide
caccucucacggugggugg

SEQ ID NO: 1431381 - RNA, 19 nt, Artificial Sequence
  Description of Artificial Sequence: Synthetic oligonucleotide
gaagacguggagauccaua

SEQ ID NO: 1431382 - RNA, 19 nt, Artificial Sequence
  Description of Artificial Sequence: Synthetic oligonucleotide
aacguccauaugggugcuc

SEQ ID NO: 1431383 - RNA, 19 nt, Artificial Sequence
  Description of Artificial Sequence: Synthetic oligonucleotide
gaggaagguugggaaaaga

SEQ ID NO: 1431384 - RNA, 19 nt, Artificial Sequence
  Description of Artificial Sequence: Synthetic oligonucleotide
cuuagacaauuacuugucu

SEQ ID NO: 1431385 - RNA, 19 nt, Artificial Sequence
  Description of Artificial Sequence: Synthetic oligonucleotide
auucgauauccuaaaucua

SEQ ID NO: 1431386 - RNA, 19 nt, Artificial Sequence
  Description of Artificial Sequence: Synthetic oligonucleotide
uaacucuggucugcauaug

SEQ ID NO: 1431387 - RNA, 19 nt, Artificial Sequence
  Description of Artificial Sequence: Synthetic oligonucleotide
cacagucgcgucgggaccc

SEQ ID NO: 1431388 - RNA, 19 nt, Artificial Sequence
  Description of Artificial Sequence: Synthetic oligonucleotide
auugcuccuggcagauauc

SEQ ID NO: 1431389 - RNA, 19 nt, Artificial Sequence
  Description of Artificial Sequence: Synthetic oligonucleotide
ggucuccacccuuucgaag

SEQ ID NO: 1431390 - RNA, 19 nt, Artificial Sequence
  Description of Artificial Sequence: Synthetic oligonucleotide
ggagguaaagguauucucu

SEQ ID NO: 1431391 - RNA, 19 nt, Artificial Sequence
  Description of Artificial Sequence: Synthetic oligonucleotide
ccuucauaacucuggucug

SEQ ID NO: 1431392 - RNA, 19 nt, Artificial Sequence
  Description of Artificial Sequence: Synthetic oligonucleotide
guaccccacgaccacgaga

SEQ ID NO: 1431393 - RNA, 19 nt, Artificial Sequence
  Description of Artificial Sequence: Synthetic oligonucleotide
ccucgagucacaguggcac

SEQ ID NO: 1431394 - RNA, 19 nt, Artificial Sequence
  Description of Artificial Sequence: Synthetic oligonucleotide
cauaugggugcucucugua

SEQ ID NO: 1431395 - RNA, 19 nt, Artificial Sequence
  Description of Artificial Sequence: Synthetic oligonucleotide
acccguggccgagggaggc

SEQ ID NO: 1431396 - RNA, 19 nt, Artificial Sequence
  Description of Artificial Sequence: Synthetic oligonucleotide
aacccuuccccaagacaga

SEQ ID NO: 1431397 - RNA, 19 nt, Artificial Sequence
  Description of Artificial Sequence: Synthetic oligonucleotide
cuccggcuccaucuuggcc

SEQ ID NO: 1431398 - RNA, 19 nt, Artificial Sequence
  Description of Artificial Sequence: Synthetic oligonucleotide
gacgccgauccgaccacag

SEQ ID NO: 1431399 - RNA, 19 nt, Artificial Sequence
  Description of Artificial Sequence: Synthetic oligonucleotide
cuuggcucuggcuguaaua

SEQ ID NO: 1431400 - RNA, 19 nt, Artificial Sequence
  Description of Artificial Sequence: Synthetic oligonucleotide
gacagguaucaguacccgu

SEQ ID NO: 1431401 - RNA, 19 nt, Artificial Sequence
  Description of Artificial Sequence: Synthetic oligonucleotide
gccgauccgaccacagucg

SEQ ID NO: 1431402 - RNA, 19 nt, Artificial Sequence
  Description of Artificial Sequence: Synthetic oligonucleotide
ugaagacguggagauccau

SEQ ID NO: 1431403 - RNA, 19 nt, Artificial Sequence
  Description of Artificial Sequence: Synthetic oligonucleotide
cugcuugacagguaucagu

SEQ ID NO: 1431404 - RNA, 19 nt, Artificial Sequence
  Description of Artificial Sequence: Synthetic oligonucleotide
gguccaacaccacgacccc

SEQ ID NO: 1431405 - RNA, 19 nt, Artificial Sequence
  Description of Artificial Sequence: Synthetic oligonucleotide
agacguggagauccauauu

SEQ ID NO: 1431406 - RNA, 19 nt, Artificial Sequence
  Description of Artificial Sequence: Synthetic oligonucleotide
acuuugcucauaacugaua

SEQ ID NO: 1431407 - RNA, 19 nt, Artificial Sequence
  Description of Artificial Sequence: Synthetic oligonucleotide
guggcacuccucgagucac

SEQ ID NO: 1431408 - RNA, 19 nt, Artificial Sequence
  Description of Artificial Sequence: Synthetic oligonucleotide
auccgaccacagucgcguc

SEQ ID NO: 1431409 - RNA, 19 nt, Artificial Sequence
  Description of Artificial Sequence: Synthetic oligonucleotide
cucuggucugcauauguau

SEQ ID NO: 1431410 - RNA, 19 nt, Artificial Sequence
  Description of Artificial Sequence: Synthetic oligonucleotide
uggcacuccucgagucaca

SEQ ID NO: 1431411 - RNA, 19 nt, Artificial Sequence
  Description of Artificial Sequence: Synthetic oligonucleotide
gcuugacagguaucaguac

SEQ ID NO: 1431412 - RNA, 19 nt, Artificial Sequence
  Description of Artificial Sequence: Synthetic oligonucleotide
gggcagguacuuauucucc

SEQ ID NO: 1431413 - RNA, 19 nt, Artificial Sequence
  Description of Artificial Sequence: Synthetic oligonucleotide
ucgcgucgggacccguggc

SEQ ID NO: 1431414 - RNA, 19 nt, Artificial Sequence
  Description of Artificial Sequence: Synthetic oligonucleotide
cacgaccacgagaggguuc

SEQ ID NO: 1431415 - RNA, 19 nt, Artificial Sequence
  Description of Artificial Sequence: Synthetic oligonucleotide
guaucgucauauccauagu

SEQ ID NO: 1431416 - RNA, 19 nt, Artificial Sequence
  Description of Artificial Sequence: Synthetic oligonucleotide
gcaccucucacggugggug

SEQ ID NO: 1431417 - RNA, 19 nt, Artificial Sequence
  Description of Artificial Sequence: Synthetic oligonucleotide
gacccguggccgagggagg

SEQ ID NO: 1431418 - RNA, 19 nt, Artificial Sequence
  Description of Artificial Sequence: Synthetic oligonucleotide
ggugauggagccucuuacu

SEQ ID NO: 1431419 - RNA, 19 nt, Artificial Sequence
  Description of Artificial Sequence: Synthetic oligonucleotide
ugggcauauuuagggucuc

SEQ ID NO: 1431420 - RNA, 19 nt, Artificial Sequence
  Description of Artificial Sequence: Synthetic oligonucleotide
gacgggucgagggaguccu

SEQ ID NO: 1431421 - RNA, 19 nt, Artificial Sequence
  Description of Artificial Sequence: Synthetic oligonucleotide
acgccgauccgaccacagu

SEQ ID NO: 1431422 - RNA, 19 nt, Artificial Sequence
  Description of Artificial Sequence: Synthetic oligonucleotide
uccauucaaguaggacaau

SEQ ID NO: 1431423 - RNA, 19 nt, Artificial Sequence
  Description of Artificial Sequence: Synthetic oligonucleotide
aaauugcuccuggcagaua

SEQ ID NO: 1431424 - RNA, 19 nt, Artificial Sequence
  Description of Artificial Sequence: Synthetic oligonucleotide
cgugagugaaagacggguc

SEQ ID NO: 1431425 - RNA, 19 nt, Artificial Sequence
  Description of Artificial Sequence: Synthetic oligonucleotide
guccauaugggugcucucu

SEQ ID NO: 1431426 - RNA, 19 nt, Artificial Sequence
  Description of Artificial Sequence: Synthetic oligonucleotide
ggcacuccucgagucacag

SEQ ID NO: 1431427 - RNA, 19 nt, Artificial Sequence
  Description of Artificial Sequence: Synthetic oligonucleotide
acuuauucuccggcuccau

SEQ ID NO: 1431428 - RNA, 19 nt, Artificial Sequence
  Description of Artificial Sequence: Synthetic oligonucleotide
acguggagauccauauuua

SEQ ID NO: 1431429 - RNA, 19 nt, Artificial Sequence
  Description of Artificial Sequence: Synthetic oligonucleotide
acagucgcgucgggacccg

SEQ ID NO: 1431430 - RNA, 19 nt, Artificial Sequence
  Description of Artificial Sequence: Synthetic oligonucleotide
accccacgaccacgagagg

SEQ ID NO: 1431431 - RNA, 19 nt, Artificial Sequence
  Description of Artificial Sequence: Synthetic oligonucleotide
ggcgugagugaaagacggg

SEQ ID NO: 1431432 - RNA, 19 nt, Artificial Sequence
  Description of Artificial Sequence: Synthetic oligonucleotide
ccauauuuaaaugggcaua

SEQ ID NO: 1431433 - RNA, 19 nt, Artificial Sequence
  Description of Artificial Sequence: Synthetic oligonucleotide
guaucaguacccguucuuu

SEQ ID NO: 1431434 - RNA, 19 nt, Artificial Sequence
  Description of Artificial Sequence: Synthetic oligonucleotide
gucggacgccgauccgacc

SEQ ID NO: 1431435 - RNA, 19 nt, Artificial Sequence
  Description of Artificial Sequence: Synthetic oligonucleotide
ggcuccaucuuggccgcgg

SEQ ID NO: 1431436 - RNA, 19 nt, Artificial Sequence
  Description of Artificial Sequence: Synthetic oligonucleotide
gguaccccacgaccacgag

SEQ ID NO: 1431437 - RNA, 19 nt, Artificial Sequence
  Description of Artificial Sequence: Synthetic oligonucleotide
gccgagggaggcagcagcg

SEQ ID NO: 1431438 - RNA, 19 nt, Artificial Sequence
  Description of Artificial Sequence: Synthetic oligonucleotide
ccuccccauguccauaguc

SEQ ID NO: 1431439 - RNA, 19 nt, Artificial Sequence
  Description of Artificial Sequence: Synthetic oligonucleotide
gccuggucccauuccaguc

SEQ ID NO: 1431440 - RNA, 19 nt, Artificial Sequence
  Description of Artificial Sequence: Synthetic oligonucleotide
gggcauauuuagggucucc

SEQ ID NO: 1431441 - RNA, 19 nt, Artificial Sequence
  Description of Artificial Sequence: Synthetic oligonucleotide
cagagaucuuugcaccagu

SEQ ID NO: 1431442 - RNA, 19 nt, Artificial Sequence
  Description of Artificial Sequence: Synthetic oligonucleotide
cugcguggcgggcgaggcc

SEQ ID NO: 1431443 - RNA, 19 nt, Artificial Sequence
  Description of Artificial Sequence: Synthetic oligonucleotide
agcaccucucacggugggu

SEQ ID NO: 1431444 - RNA, 19 nt, Artificial Sequence
  Description of Artificial Sequence: Synthetic oligonucleotide
cugguacuagaaauuucuu

SEQ ID NO: 1431445 - RNA, 19 nt, Artificial Sequence
  Description of Artificial Sequence: Synthetic oligonucleotide
agcggggucggacgccgau

SEQ ID NO: 1431446 - RNA, 19 nt, Artificial Sequence
  Description of Artificial Sequence: Synthetic oligonucleotide
ccacagucgcgucgggacc

SEQ ID NO: 1431447 - RNA, 19 nt, Artificial Sequence
  Description of Artificial Sequence: Synthetic oligonucleotide
ccgauccgaccacagucgc

SEQ ID NO: 1431448 - RNA, 19 nt, Artificial Sequence
  Description of Artificial Sequence: Synthetic oligonucleotide
cgccgauccgaccacaguc

SEQ ID NO: 1431449 - RNA, 19 nt, Artificial Sequence
  Description of Artificial Sequence: Synthetic oligonucleotide
accuccccauguccauagu

SEQ ID NO: 1431450 - RNA, 19 nt, Artificial Sequence
  Description of Artificial Sequence: Synthetic oligonucleotide
agucgcgucgggacccgug

SEQ ID NO: 1431451 - RNA, 19 nt, Artificial Sequence
  Description of Artificial Sequence: Synthetic oligonucleotide
gguaucaguacccguucuu

SEQ ID NO: 1431452 - RNA, 19 nt, Artificial Sequence
  Description of Artificial Sequence: Synthetic oligonucleotide
auguaucgucauauccaua

SEQ ID NO: 1431453 - RNA, 19 nt, Artificial Sequence
  Description of Artificial Sequence: Synthetic oligonucleotide
cgauccgaccacagucgcg

SEQ ID NO: 1431454 - RNA, 19 nt, Artificial Sequence
  Description of Artificial Sequence: Synthetic oligonucleotide
ccucuuacugggguuccac

SEQ ID NO: 1431455 - RNA, 19 nt, Artificial Sequence
  Description of Artificial Sequence: Synthetic oligonucleotide
gcgugagugaaagacgggu

SEQ ID NO: 1431456 - RNA, 19 nt, Artificial Sequence
  Description of Artificial Sequence: Synthetic oligonucleotide
cuugucuguuguggguaaa

SEQ ID NO: 1431457 - RNA, 19 nt, Artificial Sequence
  Description of Artificial Sequence: Synthetic oligonucleotide
ggucggacgccgauccgac

SEQ ID NO: 1431458 - RNA, 19 nt, Artificial Sequence
  Description of Artificial Sequence: Synthetic oligonucleotide
cggggucggacgccgaucc

SEQ ID NO: 1431459 - RNA, 19 nt, Artificial Sequence
  Description of Artificial Sequence: Synthetic oligonucleotide
cucuggcuguaauagccuu

SEQ ID NO: 1431460 - RNA, 19 nt, Artificial Sequence
  Description of Artificial Sequence: Synthetic oligonucleotide
ggggucggacgccgauccg

SEQ ID NO: 1431461 - RNA, 19 nt, Artificial Sequence
  Description of Artificial Sequence: Synthetic oligonucleotide
ccggcuccaucuuggccgc

SEQ ID NO: 1431462 - RNA, 19 nt, Artificial Sequence
  Description of Artificial Sequence: Synthetic oligonucleotide
cuacggacaacagcugcau

SEQ ID NO: 1431463 - RNA, 19 nt, Artificial Sequence
  Description of Artificial Sequence: Synthetic oligonucleotide
cccugggaacagguggagg

SEQ ID NO: 1431464 - RNA, 19 nt, Artificial Sequence
  Description of Artificial Sequence: Synthetic oligonucleotide
gggucggacgccgauccga

SEQ ID NO: 1431465 - RNA, 19 nt, Artificial Sequence
  Description of Artificial Sequence: Synthetic oligonucleotide
gcugcguggcgggcgaggc

SEQ ID NO: 1431466 - RNA, 19 nt, Artificial Sequence
  Description of Artificial Sequence: Synthetic oligonucleotide
ccgcggcuguggcugacgg

SEQ ID NO: 1431467 - RNA, 19 nt, Artificial Sequence
  Description of Artificial Sequence: Synthetic oligonucleotide
ccauagcaugggccauaag

SEQ ID NO: 1431468 - RNA, 19 nt, Artificial Sequence
  Description of Artificial Sequence: Synthetic oligonucleotide
gcauggcgugagugaaaga

SEQ ID NO: 1431469 - RNA, 19 nt, Artificial Sequence
  Description of Artificial Sequence: Synthetic oligonucleotide
cgauauccuaaaucuauuu

SEQ ID NO: 1431470 - RNA, 19 nt, Artificial Sequence
  Description of Artificial Sequence: Synthetic oligonucleotide
ggcagauaucauccaucau

SEQ ID NO: 1431471 - RNA, 19 nt, Artificial Sequence
  Description of Artificial Sequence: Synthetic oligonucleotide
ggagccucuuacugggguu

SEQ ID NO: 1431472 - RNA, 19 nt, Artificial Sequence
  Description of Artificial Sequence: Synthetic oligonucleotide
ggauacugcuugacaggua

SEQ ID NO: 1431473 - RNA, 19 nt, Artificial Sequence
  Description of Artificial Sequence: Synthetic oligonucleotide
cuuggccgcggcuguggcu

SEQ ID NO: 1431474 - RNA, 19 nt, Artificial Sequence
  Description of Artificial Sequence: Synthetic oligonucleotide
cccacgaccacgagagggu

SEQ ID NO: 1431475 - RNA, 19 nt, Artificial Sequence
  Description of Artificial Sequence: Synthetic oligonucleotide
gccgcggcuguggcugacg

SEQ ID NO: 1431476 - RNA, 19 nt, Artificial Sequence
  Description of Artificial Sequence: Synthetic oligonucleotide
cguccauaugggugcucuc

SEQ ID NO: 1431477 - RNA, 19 nt, Artificial Sequence
  Description of Artificial Sequence: Synthetic oligonucleotide
cgcggcuguggcugacggg

SEQ ID NO: 1431478 - RNA, 19 nt, Artificial Sequence
  Description of Artificial Sequence: Synthetic oligonucleotide
guucgggcagguacuuauu

SEQ ID NO: 1431479 - RNA, 19 nt, Artificial Sequence
  Description of Artificial Sequence: Synthetic oligonucleotide
ggacgccgauccgaccaca

SEQ ID NO: 1431480 - RNA, 19 nt, Artificial Sequence
  Description of Artificial Sequence: Synthetic oligonucleotide
gccucuuacugggguucca

SEQ ID NO: 1431481 - RNA, 19 nt, Artificial Sequence
  Description of Artificial Sequence: Synthetic oligonucleotide
gggacccguggccgaggga

SEQ ID NO: 1431482 - RNA, 19 nt, Artificial Sequence
  Description of Artificial Sequence: Synthetic oligonucleotide
cgagaggguucaggaacuc

SEQ ID NO: 1431483 - RNA, 19 nt, Artificial Sequence
  Description of Artificial Sequence: Synthetic oligonucleotide
ccgagcucuggguguugga

SEQ ID NO: 1431484 - RNA, 19 nt, Artificial Sequence
  Description of Artificial Sequence: Synthetic oligonucleotide
cggacgccgauccgaccac

SEQ ID NO: 1431485 - RNA, 19 nt, Artificial Sequence
  Description of Artificial Sequence: Synthetic oligonucleotide
gcacuccucgagucacagu

SEQ ID NO: 1431486 - RNA, 19 nt, Artificial Sequence
  Description of Artificial Sequence: Synthetic oligonucleotide
gcggggucggacgccgauc

SEQ ID NO: 1431487 - RNA, 19 nt, Artificial Sequence
  Description of Artificial Sequence: Synthetic oligonucleotide
gcucucuguaugaucccuu

SEQ ID NO: 1431488 - RNA, 19 nt, Artificial Sequence
  Description of Artificial Sequence: Synthetic oligonucleotide
gccaugaguucgggcaggu

SEQ ID NO: 1431489 - RNA, 19 nt, Artificial Sequence
  Description of Artificial Sequence: Synthetic oligonucleotide
ccacgaccccugggaacag

SEQ ID NO: 1431490 - RNA, 19 nt, Artificial Sequence
  Description of Artificial Sequence: Synthetic oligonucleotide
acgggucgagggaguccuu

SEQ ID NO: 1431491 - RNA, 19 nt, Artificial Sequence
  Description of Artificial Sequence: Synthetic oligonucleotide
ccaugaguucgggcaggua

SEQ ID NO: 1431492 - RNA, 19 nt, Artificial Sequence
  Description of Artificial Sequence: Synthetic oligonucleotide
cgaccacgagaggguucag

SEQ ID NO: 1431493 - RNA, 19 nt, Artificial Sequence
  Description of Artificial Sequence: Synthetic oligonucleotide
ccacccuuucgaaguucuu

SEQ ID NO: 1431494 - RNA, 19 nt, Artificial Sequence
  Description of Artificial Sequence: Synthetic oligonucleotide
cagucgcgucgggacccgu

SEQ ID NO: 1431495 - RNA, 19 nt, Artificial Sequence
  Description of Artificial Sequence: Synthetic oligonucleotide
aauacuuaaacaucccagg

SEQ ID NO: 1431496 - RNA, 19 nt, Artificial Sequence
  Description of Artificial Sequence: Synthetic oligonucleotide
uguagauacucaaagaucc

SEQ ID NO: 1431497 - RNA, 19 nt, Artificial Sequence
  Description of Artificial Sequence: Synthetic oligonucleotide
aauauucggaauuccuucc

SEQ ID NO: 1431498 - RNA, 19 nt, Artificial Sequence
  Description of Artificial Sequence: Synthetic oligonucleotide
aaucaaguagcacagcauc

SEQ ID NO: 1431499 - RNA, 19 nt, Artificial Sequence
  Description of Artificial Sequence: Synthetic oligonucleotide
acuuaaacaucccagggcg

SEQ ID NO: 1431500 - RNA, 19 nt, Artificial Sequence
  Description of Artificial Sequence: Synthetic oligonucleotide
gauugugaaguuuggacgg

SEQ ID NO: 1431501 - RNA, 19 nt, Artificial Sequence
  Description of Artificial Sequence: Synthetic oligonucleotide
ucauaguaaauacuuaaac

SEQ ID NO: 1431502 - RNA, 19 nt, Artificial Sequence
  Description of Artificial Sequence: Synthetic oligonucleotide
uuugcuucggaaguaaugg

SEQ ID NO: 1431503 - RNA, 19 nt, Artificial Sequence
  Description of Artificial Sequence: Synthetic oligonucleotide
uaaugguaagccauguagg

SEQ ID NO: 1431504 - RNA, 19 nt, Artificial Sequence
  Description of Artificial Sequence: Synthetic oligonucleotide
ucuacuagcucaacgauga

SEQ ID NO: 1431505 - RNA, 19 nt, Artificial Sequence
  Description of Artificial Sequence: Synthetic oligonucleotide
agcuagauggacuagccac

SEQ ID NO: 1431506 - RNA, 19 nt, Artificial Sequence
  Description of Artificial Sequence: Synthetic oligonucleotide
guaaugguaagccauguag

SEQ ID NO: 1431507 - RNA, 19 nt, Artificial Sequence
  Description of Artificial Sequence: Synthetic oligonucleotide
aagaaugccuuuuccaaag

SEQ ID NO: 1431508 - RNA, 19 nt, Artificial Sequence
  Description of Artificial Sequence: Synthetic oligonucleotide
uacucaaagauccuguaug

SEQ ID NO: 1431509 - RNA, 19 nt, Artificial Sequence
  Description of Artificial Sequence: Synthetic oligonucleotide
cugacuaccacguuguugc

SEQ ID NO: 1431510 - RNA, 19 nt, Artificial Sequence
  Description of Artificial Sequence: Synthetic oligonucleotide
gacagaauagcuugcgugg

SEQ ID NO: 1431511 - RNA, 19 nt, Artificial Sequence
  Description of Artificial Sequence: Synthetic oligonucleotide
ugagacucugcucaaggcg

SEQ ID NO: 1431512 - RNA, 19 nt, Artificial Sequence
  Description of Artificial Sequence: Synthetic oligonucleotide
gaacugaggagucugaggc

SEQ ID NO: 1431513 - RNA, 19 nt, Artificial Sequence
  Description of Artificial Sequence: Synthetic oligonucleotide
agagaguucguccuuuccc

SEQ ID NO: 1431514 - RNA, 19 nt, Artificial Sequence
  Description of Artificial Sequence: Synthetic oligonucleotide
uacgaguacauacucauga

SEQ ID NO: 1431515 - RNA, 19 nt, Artificial Sequence
  Description of Artificial Sequence: Synthetic oligonucleotide
ugguaagccauguagguag

SEQ ID NO: 1431516 - RNA, 19 nt, Artificial Sequence
  Description of Artificial Sequence: Synthetic oligonucleotide
acggcugagaaucaccucc

SEQ ID NO: 1431517 - RNA, 19 nt, Artificial Sequence
  Description of Artificial Sequence: Synthetic oligonucleotide
acgcaugaaauccauggcc

SEQ ID NO: 1431518 - RNA, 19 nt, Artificial Sequence
  Description of Artificial Sequence: Synthetic oligonucleotide
ucugucaagaucuuuugca

SEQ ID NO: 1431519 - RNA, 19 nt, Artificial Sequence
  Description of Artificial Sequence: Synthetic oligonucleotide
ugcgugguaaaauggaggg

SEQ ID NO: 1431520 - RNA, 19 nt, Artificial Sequence
  Description of Artificial Sequence: Synthetic oligonucleotide
aaagcuagauggacuagcc

SEQ ID NO: 1431521 - RNA, 19 nt, Artificial Sequence
  Description of Artificial Sequence: Synthetic oligonucleotide
ucgugaagaaacccaacgg

SEQ ID NO: 1431522 - RNA, 19 nt, Artificial Sequence
  Description of Artificial Sequence: Synthetic oligonucleotide
ugauuauaggcauaucugu

SEQ ID NO: 1431523 - RNA, 19 nt, Artificial Sequence
  Description of Artificial Sequence: Synthetic oligonucleotide
caaaguaacccuuccauac

SEQ ID NO: 1431524 - RNA, 19 nt, Artificial Sequence
  Description of Artificial Sequence: Synthetic oligonucleotide
ugaaagaaugccuuuucca

SEQ ID NO: 1431525 - RNA, 19 nt, Artificial Sequence
  Description of Artificial Sequence: Synthetic oligonucleotide
ugacucauaacgcucauau

SEQ ID NO: 1431526 - RNA, 19 nt, Artificial Sequence
  Description of Artificial Sequence: Synthetic oligonucleotide
accuccugaaccuguaucc

SEQ ID NO: 1431527 - RNA, 19 nt, Artificial Sequence
  Description of Artificial Sequence: Synthetic oligonucleotide
aaguaacccuuccauacag

SEQ ID NO: 1431528 - RNA, 19 nt, Artificial Sequence
  Description of Artificial Sequence: Synthetic oligonucleotide
ucuucgcuagucaugguag

SEQ ID NO: 1431529 - RNA, 19 nt, Artificial Sequence
  Description of Artificial Sequence: Synthetic oligonucleotide
acucaaagauccuguaugg

SEQ ID NO: 1431530 - RNA, 19 nt, Artificial Sequence
  Description of Artificial Sequence: Synthetic oligonucleotide
auuauaggcauaucugucu

SEQ ID NO: 1431531 - RNA, 19 nt, Artificial Sequence
  Description of Artificial Sequence: Synthetic oligonucleotide
ugacagaauagcuugcgug

SEQ ID NO: 1431532 - RNA, 19 nt, Artificial Sequence
  Description of Artificial Sequence: Synthetic oligonucleotide
ugagcaauacggcagggga

SEQ ID NO: 1431533 - RNA, 19 nt, Artificial Sequence
  Description of Artificial Sequence: Synthetic oligonucleotide
gaauauucggaauuccuuc

SEQ ID NO: 1431534 - RNA, 19 nt, Artificial Sequence
  Description of Artificial Sequence: Synthetic oligonucleotide
uugcgugguaaaauggagg

SEQ ID NO: 1431535 - RNA, 19 nt, Artificial Sequence
  Description of Artificial Sequence: Synthetic oligonucleotide
gagaaucaccuccugaacc

SEQ ID NO: 1431536 - RNA, 19 nt, Artificial Sequence
  Description of Artificial Sequence: Synthetic oligonucleotide
uguuaaaggcuccuucuca

SEQ ID NO: 1431537 - RNA, 19 nt, Artificial Sequence
  Description of Artificial Sequence: Synthetic oligonucleotide
uuauaggcauaucugucug

SEQ ID NO: 1431538 - RNA, 19 nt, Artificial Sequence
  Description of Artificial Sequence: Synthetic oligonucleotide
acuagcucaacgaugacag

SEQ ID NO: 1431539 - RNA, 19 nt, Artificial Sequence
  Description of Artificial Sequence: Synthetic oligonucleotide
uauuguuaaaggcuccuuc

SEQ ID NO: 1431540 - RNA, 19 nt, Artificial Sequence
  Description of Artificial Sequence: Synthetic oligonucleotide
auuguuaaaggcuccuucu

SEQ ID NO: 1431541 - RNA, 19 nt, Artificial Sequence
  Description of Artificial Sequence: Synthetic oligonucleotide
aacuguggugucuucuauc

SEQ ID NO: 1431542 - RNA, 19 nt, Artificial Sequence
  Description of Artificial Sequence: Synthetic oligonucleotide
cucgugaagaaacccaacg

SEQ ID NO: 1431543 - RNA, 19 nt, Artificial Sequence
  Description of Artificial Sequence: Synthetic oligonucleotide
gucaagaucuuuugcacag

SEQ ID NO: 1431544 - RNA, 19 nt, Artificial Sequence
  Description of Artificial Sequence: Synthetic oligonucleotide
aaaguaacccuuccauaca

SEQ ID NO: 1431545 - RNA, 19 nt, Artificial Sequence
  Description of Artificial Sequence: Synthetic oligonucleotide
ucuacgaguacauacucau

SEQ ID NO: 1431546 - RNA, 19 nt, Artificial Sequence
  Description of Artificial Sequence: Synthetic oligonucleotide
ucaaagauccuguauggau

SEQ ID NO: 1431547 - RNA, 19 nt, Artificial Sequence
  Description of Artificial Sequence: Synthetic oligonucleotide
ucuuuccagaccacgcgcg

SEQ ID NO: 1431548 - RNA, 19 nt, Artificial Sequence
  Description of Artificial Sequence: Synthetic oligonucleotide
gagggcuuaaucaaguagc

SEQ ID NO: 1431549 - RNA, 19 nt, Artificial Sequence
  Description of Artificial Sequence: Synthetic oligonucleotide
uccauuaaagcuagaugga

SEQ ID NO: 1431550 - RNA, 19 nt, Artificial Sequence
  Description of Artificial Sequence: Synthetic oligonucleotide
ucugaguguguguugagac

SEQ ID NO: 1431551 - RNA, 19 nt, Artificial Sequence
  Description of Artificial Sequence: Synthetic oligonucleotide
agcaauacggcaggggacc

SEQ ID NO: 1431552 - RNA, 19 nt, Artificial Sequence
  Description of Artificial Sequence: Synthetic oligonucleotide
gaugacagaauagcuugcg

SEQ ID NO: 1431553 - RNA, 19 nt, Artificial Sequence
  Description of Artificial Sequence: Synthetic oligonucleotide
ucgucuacuagcucaacga

SEQ ID NO: 1431554 - RNA, 19 nt, Artificial Sequence
  Description of Artificial Sequence: Synthetic oligonucleotide
gaguacauacucaugagca

SEQ ID NO: 1431555 - RNA, 19 nt, Artificial Sequence
  Description of Artificial Sequence: Synthetic oligonucleotide
agauggacuagccacggug

SEQ ID NO: 1431556 - RNA, 19 nt, Artificial Sequence
  Description of Artificial Sequence: Synthetic oligonucleotide
uugccuacgcaugaaaucc

SEQ ID NO: 1431557 - RNA, 19 nt, Artificial Sequence
  Description of Artificial Sequence: Synthetic oligonucleotide
uucggaauuccuuccuggg

SEQ ID NO: 1431558 - RNA, 19 nt, Artificial Sequence
  Description of Artificial Sequence: Synthetic oligonucleotide
uccuuagagacguugccug

SEQ ID NO: 1431559 - RNA, 19 nt, Artificial Sequence
  Description of Artificial Sequence: Synthetic oligonucleotide
aggguaacaggccucuuuc

SEQ ID NO: 1431560 - RNA, 19 nt, Artificial Sequence
  Description of Artificial Sequence: Synthetic oligonucleotide
agaaucaccuccugaaccu

SEQ ID NO: 1431561 - RNA, 19 nt, Artificial Sequence
  Description of Artificial Sequence: Synthetic oligonucleotide
ucuaggguggaguuggccu

SEQ ID NO: 1431562 - RNA, 19 nt, Artificial Sequence
  Description of Artificial Sequence: Synthetic oligonucleotide
uaaagcuagauggacuagc

SEQ ID NO: 1431563 - RNA, 19 nt, Artificial Sequence
  Description of Artificial Sequence: Synthetic oligonucleotide
ucucucgugaagaaaccca

SEQ ID NO: 1431564 - RNA, 19 nt, Artificial Sequence
  Description of Artificial Sequence: Synthetic oligonucleotide
gaugcugauacuucucuga

SEQ ID NO: 1431565 - RNA, 19 nt, Artificial Sequence
  Description of Artificial Sequence: Synthetic oligonucleotide
uguauccucuucaugcacu

SEQ ID NO: 1431566 - RNA, 19 nt, Artificial Sequence
  Description of Artificial Sequence: Synthetic oligonucleotide
agaguugagcgggucaugc

SEQ ID NO: 1431567 - RNA, 19 nt, Artificial Sequence
  Description of Artificial Sequence: Synthetic oligonucleotide
ugucaagaucuuuugcaca

SEQ ID NO: 1431568 - RNA, 19 nt, Artificial Sequence
  Description of Artificial Sequence: Synthetic oligonucleotide
uggaguuggccucagaguu

SEQ ID NO: 1431569 - RNA, 19 nt, Artificial Sequence
  Description of Artificial Sequence: Synthetic oligonucleotide
aacagaucgguuccauacu

SEQ ID NO: 1431570 - RNA, 19 nt, Artificial Sequence
  Description of Artificial Sequence: Synthetic oligonucleotide
uguauggauuucuucugca

SEQ ID NO: 1431571 - RNA, 19 nt, Artificial Sequence
  Description of Artificial Sequence: Synthetic oligonucleotide
uccugagcaauacggcagg

SEQ ID NO: 1431572 - RNA, 19 nt, Artificial Sequence
  Description of Artificial Sequence: Synthetic oligonucleotide
uacgcaugaaauccauggc

SEQ ID NO: 1431573 - RNA, 19 nt, Artificial Sequence
  Description of Artificial Sequence: Synthetic oligonucleotide
aguggugacucauaacgcu

SEQ ID NO: 1431574 - RNA, 19 nt, Artificial Sequence
  Description of Artificial Sequence: Synthetic oligonucleotide
aucauuucagcucggaaua

SEQ ID NO: 1431575 - RNA, 19 nt, Artificial Sequence
  Description of Artificial Sequence: Synthetic oligonucleotide
gguaacagagaguucgucc

SEQ ID NO: 1431576 - RNA, 19 nt, Artificial Sequence
  Description of Artificial Sequence: Synthetic oligonucleotide
cuugcgugguaaaauggag

SEQ ID NO: 1431577 - RNA, 19 nt, Artificial Sequence
  Description of Artificial Sequence: Synthetic oligonucleotide
uaaucaaguagcacagcau

SEQ ID NO: 1431578 - RNA, 19 nt, Artificial Sequence
  Description of Artificial Sequence: Synthetic oligonucleotide
uauucggaauuccuuccug

SEQ ID NO: 1431579 - RNA, 19 nt, Artificial Sequence
  Description of Artificial Sequence: Synthetic oligonucleotide
aggcugaaaggucaaagcu

SEQ ID NO: 1431580 - RNA, 19 nt, Artificial Sequence
  Description of Artificial Sequence: Synthetic oligonucleotide
ucagcucggaauauucgga

SEQ ID NO: 1431581 - RNA, 19 nt, Artificial Sequence
  Description of Artificial Sequence: Synthetic oligonucleotide
cucaacgaugacagaauag

SEQ ID NO: 1431582 - RNA, 19 nt, Artificial Sequence
  Description of Artificial Sequence: Synthetic oligonucleotide
cuuugcuucggaaguaaug

SEQ ID NO: 1431583 - RNA, 19 nt, Artificial Sequence
  Description of Artificial Sequence: Synthetic oligonucleotide
uaagccauguagguagucc

SEQ ID NO: 1431584 - RNA, 19 nt, Artificial Sequence
  Description of Artificial Sequence: Synthetic oligonucleotide
ugggguuuccaugucuucg

SEQ ID NO: 1431585 - RNA, 19 nt, Artificial Sequence
  Description of Artificial Sequence: Synthetic oligonucleotide
uaaucauuucagcucggaa

SEQ ID NO: 1431586 - RNA, 19 nt, Artificial Sequence
  Description of Artificial Sequence: Synthetic oligonucleotide
gucgucuacuagcucaacg

SEQ ID NO: 1431587 - RNA, 19 nt, Artificial Sequence
  Description of Artificial Sequence: Synthetic oligonucleotide
ucuaucacauguccauuaa

SEQ ID NO: 1431588 - RNA, 19 nt, Artificial Sequence
  Description of Artificial Sequence: Synthetic oligonucleotide
auaacgcucauauacucuu

SEQ ID NO: 1431589 - RNA, 19 nt, Artificial Sequence
  Description of Artificial Sequence: Synthetic oligonucleotide
gaaguaaugguaagccaug

SEQ ID NO: 1431590 - RNA, 19 nt, Artificial Sequence
  Description of Artificial Sequence: Synthetic oligonucleotide
gagacguugccugagacuc

SEQ ID NO: 1431591 - RNA, 19 nt, Artificial Sequence
  Description of Artificial Sequence: Synthetic oligonucleotide
caugguagagggcuuaauc

SEQ ID NO: 1431592 - RNA, 19 nt, Artificial Sequence
  Description of Artificial Sequence: Synthetic oligonucleotide
aauggagggccuuuccgau

SEQ ID NO: 1431593 - RNA, 19 nt, Artificial Sequence
  Description of Artificial Sequence: Synthetic oligonucleotide
acgaguacauacucaugag

SEQ ID NO: 1431594 - RNA, 19 nt, Artificial Sequence
  Description of Artificial Sequence: Synthetic oligonucleotide
acuaccacguuguugcuaa

SEQ ID NO: 1431595 - RNA, 19 nt, Artificial Sequence
  Description of Artificial Sequence: Synthetic oligonucleotide
uccgauacagcaacagauc

SEQ ID NO: 1431596 - RNA, 19 nt, Artificial Sequence
  Description of Artificial Sequence: Synthetic oligonucleotide
guaugucaggaagaaagcc

SEQ ID NO: 1431597 - RNA, 19 nt, Artificial Sequence
  Description of Artificial Sequence: Synthetic oligonucleotide
auugugaaguuuggacggc

SEQ ID NO: 1431598 - RNA, 19 nt, Artificial Sequence
  Description of Artificial Sequence: Synthetic oligonucleotide
gaaaggucuucggagggag

SEQ ID NO: 1431599 - RNA, 19 nt, Artificial Sequence
  Description of Artificial Sequence: Synthetic oligonucleotide
uucggggcacggaagacug

SEQ ID NO: 1431600 - RNA, 19 nt, Artificial Sequence
  Description of Artificial Sequence: Synthetic oligonucleotide
ugacuucucagugaacuga

SEQ ID NO: 1431601 - RNA, 19 nt, Artificial Sequence
  Description of Artificial Sequence: Synthetic oligonucleotide
uucucauaguaaauacuua

SEQ ID NO: 1431602 - RNA, 19 nt, Artificial Sequence
  Description of Artificial Sequence: Synthetic oligonucleotide
cuguauggauuucuucugc

SEQ ID NO: 1431603 - RNA, 19 nt, Artificial Sequence
  Description of Artificial Sequence: Synthetic oligonucleotide
cuagccacggugagugugg

SEQ ID NO: 1431604 - RNA, 19 nt, Artificial Sequence
  Description of Artificial Sequence: Synthetic oligonucleotide
ucucucucgugaagaaacc

SEQ ID NO: 1431605 - RNA, 19 nt, Artificial Sequence
  Description of Artificial Sequence: Synthetic oligonucleotide
uccucugcgucccugacua

SEQ ID NO: 1431606 - RNA, 19 nt, Artificial Sequence
  Description of Artificial Sequence: Synthetic oligonucleotide
uacuagcucaacgaugaca

SEQ ID NO: 1431607 - RNA, 19 nt, Artificial Sequence
  Description of Artificial Sequence: Synthetic oligonucleotide
aagcuagauggacuagcca

SEQ ID NO: 1431608 - RNA, 19 nt, Artificial Sequence
  Description of Artificial Sequence: Synthetic oligonucleotide
ucgcuagucaugguagagg

SEQ ID NO: 1431609 - RNA, 19 nt, Artificial Sequence
  Description of Artificial Sequence: Synthetic oligonucleotide
gagaguucguccuuuccca

SEQ ID NO: 1431610 - RNA, 19 nt, Artificial Sequence
  Description of Artificial Sequence: Synthetic oligonucleotide
ugcuucggaaguaauggua

SEQ ID NO: 1431611 - RNA, 19 nt, Artificial Sequence
  Description of Artificial Sequence: Synthetic oligonucleotide
aggucaaagcucaucuugg

SEQ ID NO: 1431612 - RNA, 19 nt, Artificial Sequence
  Description of Artificial Sequence: Synthetic oligonucleotide
ucggaauuccuuccuggga

SEQ ID NO: 1431613 - RNA, 19 nt, Artificial Sequence
  Description of Artificial Sequence: Synthetic oligonucleotide
caugucuucgcuagucaug

SEQ ID NO: 1431614 - RNA, 19 nt, Artificial Sequence
  Description of Artificial Sequence: Synthetic oligonucleotide
ucuuccucuacgaguacau

SEQ ID NO: 1431615 - RNA, 19 nt, Artificial Sequence
  Description of Artificial Sequence: Synthetic oligonucleotide
aauagcuugcgugguaaaa

SEQ ID NO: 1431616 - RNA, 19 nt, Artificial Sequence
  Description of Artificial Sequence: Synthetic oligonucleotide
uagcucaacgaugacagaa

SEQ ID NO: 1431617 - RNA, 19 nt, Artificial Sequence
  Description of Artificial Sequence: Synthetic oligonucleotide
auauucggaauuccuuccu

SEQ ID NO: 1431618 - RNA, 19 nt, Artificial Sequence
  Description of Artificial Sequence: Synthetic oligonucleotide
aaguaaugguaagccaugu

SEQ ID NO: 1431619 - RNA, 19 nt, Artificial Sequence
  Description of Artificial Sequence: Synthetic oligonucleotide
ugaaguuuggacggcuucu

SEQ ID NO: 1431620 - RNA, 19 nt, Artificial Sequence
  Description of Artificial Sequence: Synthetic oligonucleotide
ggugauuauaggcauaucu

SEQ ID NO: 1431621 - RNA, 19 nt, Artificial Sequence
  Description of Artificial Sequence: Synthetic oligonucleotide
ugacuuccagcugaaaggu

SEQ ID NO: 1431622 - RNA, 19 nt, Artificial Sequence
  Description of Artificial Sequence: Synthetic oligonucleotide
auacucaaagauccuguau

SEQ ID NO: 1431623 - RNA, 19 nt, Artificial Sequence
  Description of Artificial Sequence: Synthetic oligonucleotide
cuuuccgauacagcaacag

SEQ ID NO: 1431624 - RNA, 19 nt, Artificial Sequence
  Description of Artificial Sequence: Synthetic oligonucleotide
agcuccuuagagacguugc

SEQ ID NO: 1431625 - RNA, 19 nt, Artificial Sequence
  Description of Artificial Sequence: Synthetic oligonucleotide
uagagacguugccugagac

SEQ ID NO: 1431626 - RNA, 19 nt, Artificial Sequence
  Description of Artificial Sequence: Synthetic oligonucleotide
aguaacccuuccauacagc

SEQ ID NO: 1431627 - RNA, 19 nt, Artificial Sequence
  Description of Artificial Sequence: Synthetic oligonucleotide
caguggugacucauaacgc

SEQ ID NO: 1431628 - RNA, 19 nt, Artificial Sequence
  Description of Artificial Sequence: Synthetic oligonucleotide
gcuuaaucaaguagcacag

SEQ ID NO: 1431629 - RNA, 19 nt, Artificial Sequence
  Description of Artificial Sequence: Synthetic oligonucleotide
acucgaugcugauacuucu

SEQ ID NO: 1431630 - RNA, 19 nt, Artificial Sequence
  Description of Artificial Sequence: Synthetic oligonucleotide
auaggcauaucugucugca

SEQ ID NO: 1431631 - RNA, 19 nt, Artificial Sequence
  Description of Artificial Sequence: Synthetic oligonucleotide
cugagacucugcucaaggc

SEQ ID NO: 1431632 - RNA, 19 nt, Artificial Sequence
  Description of Artificial Sequence: Synthetic oligonucleotide
ugaaaggucaaagcucauc

SEQ ID NO: 1431633 - RNA, 19 nt, Artificial Sequence
  Description of Artificial Sequence: Synthetic oligonucleotide
ugcgucccugacuaccacg

SEQ ID NO: 1431634 - RNA, 19 nt, Artificial Sequence
  Description of Artificial Sequence: Synthetic oligonucleotide
cuucggaaguaaugguaag

SEQ ID NO: 1431635 - RNA, 19 nt, Artificial Sequence
  Description of Artificial Sequence: Synthetic oligonucleotide
uucgcuagucaugguagag

SEQ ID NO: 1431636 - RNA, 19 nt, Artificial Sequence
  Description of Artificial Sequence: Synthetic oligonucleotide
guaacagagaguucguccu

SEQ ID NO: 1431637 - RNA, 19 nt, Artificial Sequence
  Description of Artificial Sequence: Synthetic oligonucleotide
ucuugaaagaaugccuuuu

SEQ ID NO: 1431638 - RNA, 19 nt, Artificial Sequence
  Description of Artificial Sequence: Synthetic oligonucleotide
acauguccauuaaagcuag

SEQ ID NO: 1431639 - RNA, 19 nt, Artificial Sequence
  Description of Artificial Sequence: Synthetic oligonucleotide
agagacguugccugagacu

SEQ ID NO: 1431640 - RNA, 19 nt, Artificial Sequence
  Description of Artificial Sequence: Synthetic oligonucleotide
gguuccauacuugagcccc

SEQ ID NO: 1431641 - RNA, 19 nt, Artificial Sequence
  Description of Artificial Sequence: Synthetic oligonucleotide
guagguaguccugaaggug

SEQ ID NO: 1431642 - RNA, 19 nt, Artificial Sequence
  Description of Artificial Sequence: Synthetic oligonucleotide
augacagaauagcuugcgu

SEQ ID NO: 1431643 - RNA, 19 nt, Artificial Sequence
  Description of Artificial Sequence: Synthetic oligonucleotide
cugcaagggagcucaagug

SEQ ID NO: 1431644 - RNA, 19 nt, Artificial Sequence
  Description of Artificial Sequence: Synthetic oligonucleotide
gauacucaaagauccugua

SEQ ID NO: 1431645 - RNA, 19 nt, Artificial Sequence
  Description of Artificial Sequence: Synthetic oligonucleotide
uccucuucggggcacggaa

SEQ ID NO: 1431646 - RNA, 19 nt, Artificial Sequence
  Description of Artificial Sequence: Synthetic oligonucleotide
ucucgugaagaaacccaac

SEQ ID NO: 1431647 - RNA, 19 nt, Artificial Sequence
  Description of Artificial Sequence: Synthetic oligonucleotide
cugaccaaaggggaugggc

SEQ ID NO: 1431648 - RNA, 19 nt, Artificial Sequence
  Description of Artificial Sequence: Synthetic oligonucleotide
gccauccugagcaauacgg

SEQ ID NO: 1431649 - RNA, 19 nt, Artificial Sequence
  Description of Artificial Sequence: Synthetic oligonucleotide
ucaaggguaacaggccucu

SEQ ID NO: 1431650 - RNA, 19 nt, Artificial Sequence
  Description of Artificial Sequence: Synthetic oligonucleotide
ccgauacagcaacagaucg

SEQ ID NO: 1431651 - RNA, 19 nt, Artificial Sequence
  Description of Artificial Sequence: Synthetic oligonucleotide
aacaucccagggcguaugu

SEQ ID NO: 1431652 - RNA, 19 nt, Artificial Sequence
  Description of Artificial Sequence: Synthetic oligonucleotide
aguugucgucuacuagcuc

SEQ ID NO: 1431653 - RNA, 19 nt, Artificial Sequence
  Description of Artificial Sequence: Synthetic oligonucleotide
cucagugaacugaggaguc

SEQ ID NO: 1431654 - RNA, 19 nt, Artificial Sequence
  Description of Artificial Sequence: Synthetic oligonucleotide
cuuagagacguugccugag

SEQ ID NO: 1431655 - RNA, 19 nt, Artificial Sequence
  Description of Artificial Sequence: Synthetic oligonucleotide
cauccugagcaauacggca

SEQ ID NO: 1431656 - RNA, 19 nt, Artificial Sequence
  Description of Artificial Sequence: Synthetic oligonucleotide
caucuggcagccagcuugg

SEQ ID NO: 1431657 - RNA, 19 nt, Artificial Sequence
  Description of Artificial Sequence: Synthetic oligonucleotide
ucguccuuucccacucugc

SEQ ID NO: 1431658 - RNA, 19 nt, Artificial Sequence
  Description of Artificial Sequence: Synthetic oligonucleotide
agcucaaguggcucugugu

SEQ ID NO: 1431659 - RNA, 19 nt, Artificial Sequence
  Description of Artificial Sequence: Synthetic oligonucleotide
acagaucgguuccauacuu

SEQ ID NO: 1431660 - RNA, 19 nt, Artificial Sequence
  Description of Artificial Sequence: Synthetic oligonucleotide
uuuggacggcuucuugaaa

SEQ ID NO: 1431661 - RNA, 19 nt, Artificial Sequence
  Description of Artificial Sequence: Synthetic oligonucleotide
uucuugaaagaaugccuuu

SEQ ID NO: 1431662 - RNA, 19 nt, Artificial Sequence
  Description of Artificial Sequence: Synthetic oligonucleotide
uugcuucggaaguaauggu

SEQ ID NO: 1431663 - RNA, 19 nt, Artificial Sequence
  Description of Artificial Sequence: Synthetic oligonucleotide
auggacuagccacggugag

SEQ ID NO: 1431664 - RNA, 19 nt, Artificial Sequence
  Description of Artificial Sequence: Synthetic oligonucleotide
uuaaaggcuccuucucaua

SEQ ID NO: 1431665 - RNA, 19 nt, Artificial Sequence
  Description of Artificial Sequence: Synthetic oligonucleotide
ugccauucuucaaggguaa

SEQ ID NO: 1431666 - RNA, 19 nt, Artificial Sequence
  Description of Artificial Sequence: Synthetic oligonucleotide
aguaaugguaagccaugua

SEQ ID NO: 1431667 - RNA, 19 nt, Artificial Sequence
  Description of Artificial Sequence: Synthetic oligonucleotide
agaauagcuugcgugguaa

SEQ ID NO: 1431668 - RNA, 19 nt, Artificial Sequence
  Description of Artificial Sequence: Synthetic oligonucleotide
gucuacuagcucaacgaug

SEQ ID NO: 1431669 - RNA, 19 nt, Artificial Sequence
  Description of Artificial Sequence: Synthetic oligonucleotide
caucccagggcguauguca

SEQ ID NO: 1431670 - RNA, 19 nt, Artificial Sequence
  Description of Artificial Sequence: Synthetic oligonucleotide
aaacaucccagggcguaug

SEQ ID NO: 1431671 - RNA, 19 nt, Artificial Sequence
  Description of Artificial Sequence: Synthetic oligonucleotide
ggagcccucaaaguugucg

SEQ ID NO: 1431672 - RNA, 19 nt, Artificial Sequence
  Description of Artificial Sequence: Synthetic oligonucleotide
aucaaguagcacagcauca

SEQ ID NO: 1431673 - RNA, 19 nt, Artificial Sequence
  Description of Artificial Sequence: Synthetic oligonucleotide
ugugaaguuuggacggcuu

SEQ ID NO: 1431674 - RNA, 19 nt, Artificial Sequence
  Description of Artificial Sequence: Synthetic oligonucleotide
ugaaaggucuucggaggga

SEQ ID NO: 1431675 - RNA, 19 nt, Artificial Sequence
  Description of Artificial Sequence: Synthetic oligonucleotide
cucucucgugaagaaaccc

SEQ ID NO: 1431676 - RNA, 19 nt, Artificial Sequence
  Description of Artificial Sequence: Synthetic oligonucleotide
ugccuacgcaugaaaucca

SEQ ID NO: 1431677 - RNA, 19 nt, Artificial Sequence
  Description of Artificial Sequence: Synthetic oligonucleotide
cuacgaguacauacucaug

SEQ ID NO: 1431678 - RNA, 19 nt, Artificial Sequence
  Description of Artificial Sequence: Synthetic oligonucleotide
agaaugccuuuuccaaagu

SEQ ID NO: 1431679 - RNA, 19 nt, Artificial Sequence
  Description of Artificial Sequence: Synthetic oligonucleotide
cacucgaugcugauacuuc

SEQ ID NO: 1431680 - RNA, 19 nt, Artificial Sequence
  Description of Artificial Sequence: Synthetic oligonucleotide
uaacgcucauauacucuuc

SEQ ID NO: 1431681 - RNA, 19 nt, Artificial Sequence
  Description of Artificial Sequence: Synthetic oligonucleotide
uguugagacccugcaaguc

SEQ ID NO: 1431682 - RNA, 19 nt, Artificial Sequence
  Description of Artificial Sequence: Synthetic oligonucleotide
cgugguaaaauggagggcc

SEQ ID NO: 1431683 - RNA, 19 nt, Artificial Sequence
  Description of Artificial Sequence: Synthetic oligonucleotide
cugagcaauacggcagggg

SEQ ID NO: 1431684 - RNA, 19 nt, Artificial Sequence
  Description of Artificial Sequence: Synthetic oligonucleotide
ggacuagccacggugagug

SEQ ID NO: 1431685 - RNA, 19 nt, Artificial Sequence
  Description of Artificial Sequence: Synthetic oligonucleotide
acuagccacggugagugug

SEQ ID NO: 1431686 - RNA, 19 nt, Artificial Sequence
  Description of Artificial Sequence: Synthetic oligonucleotide
gcuagauggacuagccacg

SEQ ID NO: 1431687 - RNA, 19 nt, Artificial Sequence
  Description of Artificial Sequence: Synthetic oligonucleotide
cagaucgguuccauacuug

SEQ ID NO: 1431688 - RNA, 19 nt, Artificial Sequence
  Description of Artificial Sequence: Synthetic oligonucleotide
agcccucaaaguugucguc

SEQ ID NO: 1431689 - RNA, 19 nt, Artificial Sequence
  Description of Artificial Sequence: Synthetic oligonucleotide
gggauuggagauugugaag

SEQ ID NO: 1431690 - RNA, 19 nt, Artificial Sequence
  Description of Artificial Sequence: Synthetic oligonucleotide
aacagagaguucguccuuu

SEQ ID NO: 1431691 - RNA, 19 nt, Artificial Sequence
  Description of Artificial Sequence: Synthetic oligonucleotide
uucuaggguggaguuggcc

SEQ ID NO: 1431692 - RNA, 19 nt, Artificial Sequence
  Description of Artificial Sequence: Synthetic oligonucleotide
gugaaguuuggacggcuuc

SEQ ID NO: 1431693 - RNA, 19 nt, Artificial Sequence
  Description of Artificial Sequence: Synthetic oligonucleotide
gacguugccugagacucug

SEQ ID NO: 1431694 - RNA, 19 nt, Artificial Sequence
  Description of Artificial Sequence: Synthetic oligonucleotide
gcuguagauacucaaagau

SEQ ID NO: 1431695 - RNA, 19 nt, Artificial Sequence
  Description of Artificial Sequence: Synthetic oligonucleotide
ucagugaacugaggagucu

SEQ ID NO: 1431696 - RNA, 19 nt, Artificial Sequence
  Description of Artificial Sequence: Synthetic oligonucleotide
aggccauccugagcaauac

SEQ ID NO: 1431697 - RNA, 19 nt, Artificial Sequence
  Description of Artificial Sequence: Synthetic oligonucleotide
uuuccaugucuucgcuagu

SEQ ID NO: 1431698 - RNA, 19 nt, Artificial Sequence
  Description of Artificial Sequence: Synthetic oligonucleotide
acagaauagcuugcguggu

SEQ ID NO: 1431699 - RNA, 19 nt, Artificial Sequence
  Description of Artificial Sequence: Synthetic oligonucleotide
cucauaacgcucauauacu

SEQ ID NO: 1431700 - RNA, 19 nt, Artificial Sequence
  Description of Artificial Sequence: Synthetic oligonucleotide
uugugaaguuuggacggcu

SEQ ID NO: 1431701 - RNA, 19 nt, Artificial Sequence
  Description of Artificial Sequence: Synthetic oligonucleotide
agacucugcucaaggcggc

SEQ ID NO: 1431702 - RNA, 19 nt, Artificial Sequence
  Description of Artificial Sequence: Synthetic oligonucleotide
uugagcgggucaugcugag

SEQ ID NO: 1431703 - RNA, 19 nt, Artificial Sequence
  Description of Artificial Sequence: Synthetic oligonucleotide
ggaauuccuuccugggacc

SEQ ID NO: 1431704 - RNA, 19 nt, Artificial Sequence
  Description of Artificial Sequence: Synthetic oligonucleotide
cgcuagucaugguagaggg

SEQ ID NO: 1431705 - RNA, 19 nt, Artificial Sequence
  Description of Artificial Sequence: Synthetic oligonucleotide
uaacagagaguucguccuu

SEQ ID NO: 1431706 - RNA, 19 nt, Artificial Sequence
  Description of Artificial Sequence: Synthetic oligonucleotide
agggagcucaaguggcucu

SEQ ID NO: 1431707 - RNA, 19 nt, Artificial Sequence
  Description of Artificial Sequence: Synthetic oligonucleotide
gagcaauacggcaggggac

SEQ ID NO: 1431708 - RNA, 19 nt, Artificial Sequence
  Description of Artificial Sequence: Synthetic oligonucleotide
caugagcagcccuuuucuc

SEQ ID NO: 1431709 - RNA, 19 nt, Artificial Sequence
  Description of Artificial Sequence: Synthetic oligonucleotide
auuggagauugugaaguuu

SEQ ID NO: 1431710 - RNA, 19 nt, Artificial Sequence
  Description of Artificial Sequence: Synthetic oligonucleotide
ucuucuaggcugagcugua

SEQ ID NO: 1431711 - RNA, 19 nt, Artificial Sequence
  Description of Artificial Sequence: Synthetic oligonucleotide
cuuugcagcaacuucucau

SEQ ID NO: 1431712 - RNA, 19 nt, Artificial Sequence
  Description of Artificial Sequence: Synthetic oligonucleotide
gagcucaaguggcucugug

SEQ ID NO: 1431713 - RNA, 19 nt, Artificial Sequence
  Description of Artificial Sequence: Synthetic oligonucleotide
cucucgugaagaaacccaa

SEQ ID NO: 1431714 - RNA, 19 nt, Artificial Sequence
  Description of Artificial Sequence: Synthetic oligonucleotide
uaggcauaucugucugcac

SEQ ID NO: 1431715 - RNA, 19 nt, Artificial Sequence
  Description of Artificial Sequence: Synthetic oligonucleotide
cugauacuucucugaggug

SEQ ID NO: 1431716 - RNA, 19 nt, Artificial Sequence
  Description of Artificial Sequence: Synthetic oligonucleotide
caccagucucuuucuuugc

SEQ ID NO: 1431717 - RNA, 19 nt, Artificial Sequence
  Description of Artificial Sequence: Synthetic oligonucleotide
gucuucgcuagucauggua

SEQ ID NO: 1431718 - RNA, 19 nt, Artificial Sequence
  Description of Artificial Sequence: Synthetic oligonucleotide
caaagauccuguauggauu

SEQ ID NO: 1431719 - RNA, 19 nt, Artificial Sequence
  Description of Artificial Sequence: Synthetic oligonucleotide
uccauacuugagccccacu

SEQ ID NO: 1431720 - RNA, 19 nt, Artificial Sequence
  Description of Artificial Sequence: Synthetic oligonucleotide
gagggaccucuucuuuccc

SEQ ID NO: 1431721 - RNA, 19 nt, Artificial Sequence
  Description of Artificial Sequence: Synthetic oligonucleotide
acguuguugcuaaucauuu

SEQ ID NO: 1431722 - RNA, 19 nt, Artificial Sequence
  Description of Artificial Sequence: Synthetic oligonucleotide
cgauacagcaacagaucgg

SEQ ID NO: 1431723 - RNA, 19 nt, Artificial Sequence
  Description of Artificial Sequence: Synthetic oligonucleotide
gccuuuccgauacagcaac

SEQ ID NO: 1431724 - RNA, 19 nt, Artificial Sequence
  Description of Artificial Sequence: Synthetic oligonucleotide
uaccacguuguugcuaauc

SEQ ID NO: 1431725 - RNA, 19 nt, Artificial Sequence
  Description of Artificial Sequence: Synthetic oligonucleotide
gaauagcuugcgugguaaa

SEQ ID NO: 1431726 - RNA, 19 nt, Artificial Sequence
  Description of Artificial Sequence: Synthetic oligonucleotide
ucauuucagcucggaauau

SEQ ID NO: 1431727 - RNA, 19 nt, Artificial Sequence
  Description of Artificial Sequence: Synthetic oligonucleotide
cuaaucauuucagcucgga

SEQ ID NO: 1431728 - RNA, 19 nt, Artificial Sequence
  Description of Artificial Sequence: Synthetic oligonucleotide
cacaccuuuccaucuggca

SEQ ID NO: 1431729 - RNA, 19 nt, Artificial Sequence
  Description of Artificial Sequence: Synthetic oligonucleotide
ccaacggcugagaaucacc

SEQ ID NO: 1431730 - RNA, 19 nt, Artificial Sequence
  Description of Artificial Sequence: Synthetic oligonucleotide
cucagaguugagcggguca

SEQ ID NO: 1431731 - RNA, 19 nt, Artificial Sequence
  Description of Artificial Sequence: Synthetic oligonucleotide
gcaagggagcucaaguggc

SEQ ID NO: 1431732 - RNA, 19 nt, Artificial Sequence
  Description of Artificial Sequence: Synthetic oligonucleotide
guggugacucauaacgcuc

SEQ ID NO: 1431733 - RNA, 19 nt, Artificial Sequence
  Description of Artificial Sequence: Synthetic oligonucleotide
uggacuagccacggugagu

SEQ ID NO: 1431734 - RNA, 19 nt, Artificial Sequence
  Description of Artificial Sequence: Synthetic oligonucleotide
agccucuucuaggcugagc

SEQ ID NO: 1431735 - RNA, 19 nt, Artificial Sequence
  Description of Artificial Sequence: Synthetic oligonucleotide
cauaucugucugcacaccu

SEQ ID NO: 1431736 - RNA, 19 nt, Artificial Sequence
  Description of Artificial Sequence: Synthetic oligonucleotide
gaggugauuauaggcauau

SEQ ID NO: 1431737 - RNA, 19 nt, Artificial Sequence
  Description of Artificial Sequence: Synthetic oligonucleotide
cuucaaggguaacaggccu

SEQ ID NO: 1431738 - RNA, 19 nt, Artificial Sequence
  Description of Artificial Sequence: Synthetic oligonucleotide
acaucccagggcguauguc

SEQ ID NO: 1431739 - RNA, 19 nt, Artificial Sequence
  Description of Artificial Sequence: Synthetic oligonucleotide
ggaaguaaugguaagccau

SEQ ID NO: 1431740 - RNA, 19 nt, Artificial Sequence
  Description of Artificial Sequence: Synthetic oligonucleotide
gacucauaacgcucauaua

SEQ ID NO: 1431741 - RNA, 19 nt, Artificial Sequence
  Description of Artificial Sequence: Synthetic oligonucleotide
guugagcgggucaugcuga

SEQ ID NO: 1431742 - RNA, 19 nt, Artificial Sequence
  Description of Artificial Sequence: Synthetic oligonucleotide
agggcguaugucaggaaga

SEQ ID NO: 1431743 - RNA, 19 nt, Artificial Sequence
  Description of Artificial Sequence: Synthetic oligonucleotide
augguaagccauguaggua

SEQ ID NO: 1431744 - RNA, 19 nt, Artificial Sequence
  Description of Artificial Sequence: Synthetic oligonucleotide
cacggaagacugccucugc

SEQ ID NO: 1431745 - RNA, 19 nt, Artificial Sequence
  Description of Artificial Sequence: Synthetic oligonucleotide
aucccagggcguaugucag

SEQ ID NO: 1431746 - RNA, 19 nt, Artificial Sequence
  Description of Artificial Sequence: Synthetic oligonucleotide
cuuuucugcaagggagcuc

SEQ ID NO: 1431747 - RNA, 19 nt, Artificial Sequence
  Description of Artificial Sequence: Synthetic oligonucleotide
cuucgcuagucaugguaga

SEQ ID NO: 1431748 - RNA, 19 nt, Artificial Sequence
  Description of Artificial Sequence: Synthetic oligonucleotide
cggaauuccuuccugggac

SEQ ID NO: 1431749 - RNA, 19 nt, Artificial Sequence
  Description of Artificial Sequence: Synthetic oligonucleotide
ucuucggggcacggaagac

SEQ ID NO: 1431750 - RNA, 19 nt, Artificial Sequence
  Description of Artificial Sequence: Synthetic oligonucleotide
ugagacccugcaagucauc

SEQ ID NO: 1431751 - RNA, 19 nt, Artificial Sequence
  Description of Artificial Sequence: Synthetic oligonucleotide
ugacuaccacguuguugcu

SEQ ID NO: 1431752 - RNA, 19 nt, Artificial Sequence
  Description of Artificial Sequence: Synthetic oligonucleotide
uccacucgaugcugauacu

SEQ ID NO: 1431753 - RNA, 19 nt, Artificial Sequence
  Description of Artificial Sequence: Synthetic oligonucleotide
gagcuuugcuauuguuaaa

SEQ ID NO: 1431754 - RNA, 19 nt, Artificial Sequence
  Description of Artificial Sequence: Synthetic oligonucleotide
acggugaguguggcuuggc

SEQ ID NO: 1431755 - RNA, 19 nt, Artificial Sequence
  Description of Artificial Sequence: Synthetic oligonucleotide
cucuucggggcacggaaga

SEQ ID NO: 1431756 - RNA, 19 nt, Artificial Sequence
  Description of Artificial Sequence: Synthetic oligonucleotide
caacggcugagaaucaccu

SEQ ID NO: 1431757 - RNA, 19 nt, Artificial Sequence
  Description of Artificial Sequence: Synthetic oligonucleotide
cuacuagcucaacgaugac

SEQ ID NO: 1431758 - RNA, 19 nt, Artificial Sequence
  Description of Artificial Sequence: Synthetic oligonucleotide
gauuggagauugugaaguu

SEQ ID NO: 1431759 - RNA, 19 nt, Artificial Sequence
  Description of Artificial Sequence: Synthetic oligonucleotide
uuccauacuugagccccac

SEQ ID NO: 1431760 - RNA, 19 nt, Artificial Sequence
  Description of Artificial Sequence: Synthetic oligonucleotide
agccauguagguaguccug

SEQ ID NO: 1431761 - RNA, 19 nt, Artificial Sequence
  Description of Artificial Sequence: Synthetic oligonucleotide
acgcucauauacucuucuu

SEQ ID NO: 1431762 - RNA, 19 nt, Artificial Sequence
  Description of Artificial Sequence: Synthetic oligonucleotide
cugcaagucaucugacugu

SEQ ID NO: 1431763 - RNA, 19 nt, Artificial Sequence
  Description of Artificial Sequence: Synthetic oligonucleotide
gcaugaaauccauggccca

SEQ ID NO: 1431764 - RNA, 19 nt, Artificial Sequence
  Description of Artificial Sequence: Synthetic oligonucleotide
agcgggucaugcugaggga

SEQ ID NO: 1431765 - RNA, 19 nt, Artificial Sequence
  Description of Artificial Sequence: Synthetic oligonucleotide
cacggugaguguggcuugg

SEQ ID NO: 1431766 - RNA, 19 nt, Artificial Sequence
  Description of Artificial Sequence: Synthetic oligonucleotide
gcuaaucauuucagcucgg

SEQ ID NO: 1431767 - RNA, 19 nt, Artificial Sequence
  Description of Artificial Sequence: Synthetic oligonucleotide
gcuugcgugguaaaaugga

SEQ ID NO: 1431768 - RNA, 19 nt, Artificial Sequence
  Description of Artificial Sequence: Synthetic oligonucleotide
gcucauauacucuucuuuu

SEQ ID NO: 1431769 - RNA, 19 nt, Artificial Sequence
  Description of Artificial Sequence: Synthetic oligonucleotide
guguugagacccugcaagu

SEQ ID NO: 1431770 - RNA, 19 nt, Artificial Sequence
  Description of Artificial Sequence: Synthetic oligonucleotide
gcagucugaguguguguug

SEQ ID NO: 1431771 - RNA, 19 nt, Artificial Sequence
  Description of Artificial Sequence: Synthetic oligonucleotide
agucaugguagagggcuua

SEQ ID NO: 1431772 - RNA, 19 nt, Artificial Sequence
  Description of Artificial Sequence: Synthetic oligonucleotide
ccugacuaccacguuguug

SEQ ID NO: 1431773 - RNA, 19 nt, Artificial Sequence
  Description of Artificial Sequence: Synthetic oligonucleotide
ccuacgcaugaaauccaug

SEQ ID NO: 1431774 - RNA, 19 nt, Artificial Sequence
  Description of Artificial Sequence: Synthetic oligonucleotide
cuagcucaacgaugacaga

SEQ ID NO: 1431775 - RNA, 19 nt, Artificial Sequence
  Description of Artificial Sequence: Synthetic oligonucleotide
guaagccauguagguaguc

SEQ ID NO: 1431776 - RNA, 19 nt, Artificial Sequence
  Description of Artificial Sequence: Synthetic oligonucleotide
ugucgucuacuagcucaac

SEQ ID NO: 1431777 - RNA, 19 nt, Artificial Sequence
  Description of Artificial Sequence: Synthetic oligonucleotide
gaguugagcgggucaugcu

SEQ ID NO: 1431778 - RNA, 19 nt, Artificial Sequence
  Description of Artificial Sequence: Synthetic oligonucleotide
uugccagagcuuugcuauu

SEQ ID NO: 1431779 - RNA, 19 nt, Artificial Sequence
  Description of Artificial Sequence: Synthetic oligonucleotide
cagccuuugcuucggaagu

SEQ ID NO: 1431780 - RNA, 19 nt, Artificial Sequence
  Description of Artificial Sequence: Synthetic oligonucleotide
ggaauauucggaauuccuu

SEQ ID NO: 1431781 - RNA, 19 nt, Artificial Sequence
  Description of Artificial Sequence: Synthetic oligonucleotide
acguugccugagacucugc

SEQ ID NO: 1431782 - RNA, 19 nt, Artificial Sequence
  Description of Artificial Sequence: Synthetic oligonucleotide
caauacggcaggggaccug

SEQ ID NO: 1431783 - RNA, 19 nt, Artificial Sequence
  Description of Artificial Sequence: Synthetic oligonucleotide
gacuaccacguuguugcua

SEQ ID NO: 1431784 - RNA, 19 nt, Artificial Sequence
  Description of Artificial Sequence: Synthetic oligonucleotide
cuucucucucgugaagaaa

SEQ ID NO: 1431785 - RNA, 19 nt, Artificial Sequence
  Description of Artificial Sequence: Synthetic oligonucleotide
gcucaacgaugacagaaua

SEQ ID NO: 1431786 - RNA, 19 nt, Artificial Sequence
  Description of Artificial Sequence: Synthetic oligonucleotide
cagaguugagcgggucaug

SEQ ID NO: 1431787 - RNA, 19 nt, Artificial Sequence
  Description of Artificial Sequence: Synthetic oligonucleotide
uccugaaggugggcuggac

SEQ ID NO: 1431788 - RNA, 19 nt, Artificial Sequence
  Description of Artificial Sequence: Synthetic oligonucleotide
cagaauagcuugcguggua

SEQ ID NO: 1431789 - RNA, 19 nt, Artificial Sequence
  Description of Artificial Sequence: Synthetic oligonucleotide
cucaaggcggccagugacu

SEQ ID NO: 1431790 - RNA, 19 nt, Artificial Sequence
  Description of Artificial Sequence: Synthetic oligonucleotide
gggcuuaaucaaguagcac

SEQ ID NO: 1431791 - RNA, 19 nt, Artificial Sequence
  Description of Artificial Sequence: Synthetic oligonucleotide
gcuagucaugguagagggc

SEQ ID NO: 1431792 - RNA, 19 nt, Artificial Sequence
  Description of Artificial Sequence: Synthetic oligonucleotide
gaccuugguccugaccaaa

SEQ ID NO: 1431793 - RNA, 19 nt, Artificial Sequence
  Description of Artificial Sequence: Synthetic oligonucleotide
gaaguuuggacggcuucuu

SEQ ID NO: 1431794 - RNA, 19 nt, Artificial Sequence
  Description of Artificial Sequence: Synthetic oligonucleotide
guuccauacuugagcccca

SEQ ID NO: 1431795 - RNA, 19 nt, Artificial Sequence
  Description of Artificial Sequence: Synthetic oligonucleotide
cugcgucccugacuaccac

SEQ ID NO: 1431796 - RNA, 19 nt, Artificial Sequence
  Description of Artificial Sequence: Synthetic oligonucleotide
cguuguugcuaaucauuuc

SEQ ID NO: 1431797 - RNA, 19 nt, Artificial Sequence
  Description of Artificial Sequence: Synthetic oligonucleotide
caagggagcucaaguggcu

SEQ ID NO: 1431798 - RNA, 19 nt, Artificial Sequence
  Description of Artificial Sequence: Synthetic oligonucleotide
gcgugguaaaauggagggc

SEQ ID NO: 1431799 - RNA, 19 nt, Artificial Sequence
  Description of Artificial Sequence: Synthetic oligonucleotide
cgaugcugauacuucucug

SEQ ID NO: 1431800 - RNA, 19 nt, Artificial Sequence
  Description of Artificial Sequence: Synthetic oligonucleotide
gccauguagguaguccuga

SEQ ID NO: 1431801 - RNA, 19 nt, Artificial Sequence
  Description of Artificial Sequence: Synthetic oligonucleotide
ccagugguaacagagaguu

SEQ ID NO: 1431802 - RNA, 19 nt, Artificial Sequence
  Description of Artificial Sequence: Synthetic oligonucleotide
ccucuucggggcacggaag

SEQ ID NO: 1431803 - RNA, 19 nt, Artificial Sequence
  Description of Artificial Sequence: Synthetic oligonucleotide
gaagacugccucugccauu

SEQ ID NO: 1431804 - RNA, 19 nt, Artificial Sequence
  Description of Artificial Sequence: Synthetic oligonucleotide
gugguaaaauggagggccu

SEQ ID NO: 1431805 - RNA, 19 nt, Artificial Sequence
  Description of Artificial Sequence: Synthetic oligonucleotide
agacguugccugagacucu

SEQ ID NO: 1431806 - RNA, 19 nt, Artificial Sequence
  Description of Artificial Sequence: Synthetic oligonucleotide
gcucggaauauucggaauu

SEQ ID NO: 1431807 - RNA, 19 nt, Artificial Sequence
  Description of Artificial Sequence: Synthetic oligonucleotide
gggagcucaaguggcucug

SEQ ID NO: 1431808 - RNA, 19 nt, Artificial Sequence
  Description of Artificial Sequence: Synthetic oligonucleotide
caugaaauccauggcccau

SEQ ID NO: 1431809 - RNA, 19 nt, Artificial Sequence
  Description of Artificial Sequence: Synthetic oligonucleotide
auacggcaggggaccuggg

SEQ ID NO: 1431810 - RNA, 19 nt, Artificial Sequence
  Description of Artificial Sequence: Synthetic oligonucleotide
gucaugguagagggcuuaa

SEQ ID NO: 1431811 - RNA, 19 nt, Artificial Sequence
  Description of Artificial Sequence: Synthetic oligonucleotide
ccuuagagacguugccuga

SEQ ID NO: 1431812 - RNA, 19 nt, Artificial Sequence
  Description of Artificial Sequence: Synthetic oligonucleotide
gcgggucaugcugagggac

SEQ ID NO: 1431813 - RNA, 19 nt, Artificial Sequence
  Description of Artificial Sequence: Synthetic oligonucleotide
ccccacuuugggcacccag

SEQ ID NO: 1431814 - RNA, 19 nt, Artificial Sequence
  Description of Artificial Sequence: Synthetic oligonucleotide
cggaaguaaugguaagcca

SEQ ID NO: 1431815 - RNA, 19 nt, Artificial Sequence
  Description of Artificial Sequence: Synthetic oligonucleotide
gugacucauaacgcucaua

SEQ ID NO: 1431816 - RNA, 19 nt, Artificial Sequence
  Description of Artificial Sequence: Synthetic oligonucleotide
cauuccacucgaugcugau

SEQ ID NO: 1431817 - RNA, 19 nt, Artificial Sequence
  Description of Artificial Sequence: Synthetic oligonucleotide
cuucggagggagcccucaa

SEQ ID NO: 1431818 - RNA, 19 nt, Artificial Sequence
  Description of Artificial Sequence: Synthetic oligonucleotide
cggugaguguggcuuggcc

SEQ ID NO: 1431819 - RNA, 19 nt, Artificial Sequence
  Description of Artificial Sequence: Synthetic oligonucleotide
ccacggugaguguggcuug

SEQ ID NO: 1431820 - RNA, 19 nt, Artificial Sequence
  Description of Artificial Sequence: Synthetic oligonucleotide
ccauacuugagccccacuu

SEQ ID NO: 1431821 - RNA, 19 nt, Artificial Sequence
  Description of Artificial Sequence: Synthetic oligonucleotide
cggaauauucggaauuccu

SEQ ID NO: 1431822 - RNA, 19 nt, Artificial Sequence
  Description of Artificial Sequence: Synthetic oligonucleotide
gacuagccacggugagugu

SEQ ID NO: 1431823 - RNA, 19 nt, Artificial Sequence
  Description of Artificial Sequence: Synthetic oligonucleotide
guucguccuuucccacucu

SEQ ID NO: 1431824 - RNA, 19 nt, Artificial Sequence
  Description of Artificial Sequence: Synthetic oligonucleotide
gcccucaaaguugucgucu

SEQ ID NO: 1431825 - RNA, 19 nt, Artificial Sequence
  Description of Artificial Sequence: Synthetic oligonucleotide
ccauguagguaguccugaa

SEQ ID NO: 1431826 - RNA, 19 nt, Artificial Sequence
  Description of Artificial Sequence: Synthetic oligonucleotide
gccauucuucaaggguaac

SEQ ID NO: 1431827 - RNA, 19 nt, Artificial Sequence
  Description of Artificial Sequence: Synthetic oligonucleotide
ggugacucauaacgcucau

SEQ ID NO: 1431828 - RNA, 19 nt, Artificial Sequence
  Description of Artificial Sequence: Synthetic oligonucleotide
cccagggcguaugucagga

SEQ ID NO: 1431829 - RNA, 19 nt, Artificial Sequence
  Description of Artificial Sequence: Synthetic oligonucleotide
ggcagaacuguggugucuu

SEQ ID NO: 1431830 - RNA, 19 nt, Artificial Sequence
  Description of Artificial Sequence: Synthetic oligonucleotide
gcgucccugacuaccacgu

SEQ ID NO: 1431831 - RNA, 19 nt, Artificial Sequence
  Description of Artificial Sequence: Synthetic oligonucleotide
ggagggccuuuccgauaca

SEQ ID NO: 1431832 - RNA, 19 nt, Artificial Sequence
  Description of Artificial Sequence: Synthetic oligonucleotide
cccagccuuugcuucggaa

SEQ ID NO: 1431833 - RNA, 19 nt, Artificial Sequence
  Description of Artificial Sequence: Synthetic oligonucleotide
ggguggaguuggccucaga

SEQ ID NO: 1431834 - RNA, 19 nt, Artificial Sequence
  Description of Artificial Sequence: Synthetic oligonucleotide
ccacguuguugcuaaucau

SEQ ID NO: 1431835 - RNA, 19 nt, Artificial Sequence
  Description of Artificial Sequence: Synthetic oligonucleotide
ccucugcgucccugacuac

SEQ ID NO: 1431836 - RNA, 19 nt, Artificial Sequence
  Description of Artificial Sequence: Synthetic oligonucleotide
cgucuacuagcucaacgau

SEQ ID NO: 1431837 - RNA, 19 nt, Artificial Sequence
  Description of Artificial Sequence: Synthetic oligonucleotide
gggcagaacuguggugucu

SEQ ID NO: 1431838 - RNA, 19 nt, Artificial Sequence
  Description of Artificial Sequence: Synthetic oligonucleotide
gccuacgcaugaaauccau

SEQ ID NO: 1431839 - RNA, 19 nt, Artificial Sequence
  Description of Artificial Sequence: Synthetic oligonucleotide
gcaauacggcaggggaccu

SEQ ID NO: 1431840 - RNA, 19 nt, Artificial Sequence
  Description of Artificial Sequence: Synthetic oligonucleotide
ggagcucaaguggcucugu

SEQ ID NO: 1431841 - RNA, 19 nt, Artificial Sequence
  Description of Artificial Sequence: Synthetic oligonucleotide
ccacucgaugcugauacuu

SEQ ID NO: 1431842 - RNA, 19 nt, Artificial Sequence
  Description of Artificial Sequence: Synthetic oligonucleotide
ccagggcguaugucaggaa

SEQ ID NO: 1431843 - RNA, 19 nt, Artificial Sequence
  Description of Artificial Sequence: Synthetic oligonucleotide
gcuugggauuggagauugu

SEQ ID NO: 1431844 - RNA, 19 nt, Artificial Sequence
  Description of Artificial Sequence: Synthetic oligonucleotide
gccucagaguugagcgggu

SEQ ID NO: 1431845 - RNA, 19 nt, Artificial Sequence
  Description of Artificial Sequence: Synthetic oligonucleotide
gccccacuuugggcaccca

SEQ ID NO: 1431846 - RNA, 19 nt, Artificial Sequence
  Description of Artificial Sequence: Synthetic oligonucleotide
cccugacuaccacguuguu

SEQ ID NO: 1431847 - RNA, 19 nt, Artificial Sequence
  Description of Artificial Sequence: Synthetic oligonucleotide
cgucccugacuaccacguu

SEQ ID NO: 1431848 - RNA, 19 nt, Artificial Sequence
  Description of Artificial Sequence: Synthetic oligonucleotide
uaaacgaugaugaugauga

SEQ ID NO: 1431849 - RNA, 19 nt, Artificial Sequence
  Description of Artificial Sequence: Synthetic oligonucleotide
uccucaaagaaucagauug

SEQ ID NO: 1431850 - RNA, 19 nt, Artificial Sequence
  Description of Artificial Sequence: Synthetic oligonucleotide
agugaugacacacacacac

SEQ ID NO: 1431851 - RNA, 19 nt, Artificial Sequence
  Description of Artificial Sequence: Synthetic oligonucleotide
aagacacuuacacaccggc

SEQ ID NO: 1431852 - RNA, 19 nt, Artificial Sequence
  Description of Artificial Sequence: Synthetic oligonucleotide
uauugguccaucaugacac

SEQ ID NO: 1431853 - RNA, 19 nt, Artificial Sequence
  Description of Artificial Sequence: Synthetic oligonucleotide
agaguggcuauuuacaggg

SEQ ID NO: 1431854 - RNA, 19 nt, Artificial Sequence
  Description of Artificial Sequence: Synthetic oligonucleotide
aagggaauagcuugcacuc

SEQ ID NO: 1431855 - RNA, 19 nt, Artificial Sequence
  Description of Artificial Sequence: Synthetic oligonucleotide
aaggagguaaacuagacua

SEQ ID NO: 1431856 - RNA, 19 nt, Artificial Sequence
  Description of Artificial Sequence: Synthetic oligonucleotide
aaaucaggcagaugggagg

SEQ ID NO: 1431857 - RNA, 19 nt, Artificial Sequence
  Description of Artificial Sequence: Synthetic oligonucleotide
aagauuaucaucaucuuga

SEQ ID NO: 1431858 - RNA, 19 nt, Artificial Sequence
  Description of Artificial Sequence: Synthetic oligonucleotide
aaagggaauagcuugcacu

SEQ ID NO: 1431859 - RNA, 19 nt, Artificial Sequence
  Description of Artificial Sequence: Synthetic oligonucleotide
aauuguuuagggaagcuag

SEQ ID NO: 1431860 - RNA, 19 nt, Artificial Sequence
  Description of Artificial Sequence: Synthetic oligonucleotide
aaguaaacgaugaugauga

SEQ ID NO: 1431861 - RNA, 19 nt, Artificial Sequence
  Description of Artificial Sequence: Synthetic oligonucleotide
auuggcagugacuaauacc

SEQ ID NO: 1431862 - RNA, 19 nt, Artificial Sequence
  Description of Artificial Sequence: Synthetic oligonucleotide
caaaugaagggacuuaggg

SEQ ID NO: 1431863 - RNA, 19 nt, Artificial Sequence
  Description of Artificial Sequence: Synthetic oligonucleotide
gauuagaggaccaauggag

SEQ ID NO: 1431864 - RNA, 19 nt, Artificial Sequence
  Description of Artificial Sequence: Synthetic oligonucleotide
aucagauuguggucaaucc

SEQ ID NO: 1431865 - RNA, 19 nt, Artificial Sequence
  Description of Artificial Sequence: Synthetic oligonucleotide
ucaggaauuguuuagggaa

SEQ ID NO: 1431866 - RNA, 19 nt, Artificial Sequence
  Description of Artificial Sequence: Synthetic oligonucleotide
gaauuauugguccaucaug

SEQ ID NO: 1431867 - RNA, 19 nt, Artificial Sequence
  Description of Artificial Sequence: Synthetic oligonucleotide
ggaagggucaguuaaaucc

SEQ ID NO: 1431868 - RNA, 19 nt, Artificial Sequence
  Description of Artificial Sequence: Synthetic oligonucleotide
ugugauuagaggaccaaug

SEQ ID NO: 1431869 - RNA, 19 nt, Artificial Sequence
  Description of Artificial Sequence: Synthetic oligonucleotide
auagcuugcacucucucuc

SEQ ID NO: 1431870 - RNA, 19 nt, Artificial Sequence
  Description of Artificial Sequence: Synthetic oligonucleotide
accucuagcaagaugaggc

SEQ ID NO: 1431871 - RNA, 19 nt, Artificial Sequence
  Description of Artificial Sequence: Synthetic oligonucleotide
aauuauugguccaucauga

SEQ ID NO: 1431872 - RNA, 19 nt, Artificial Sequence
  Description of Artificial Sequence: Synthetic oligonucleotide
agguuaaggagcuguauac

SEQ ID NO: 1431873 - RNA, 19 nt, Artificial Sequence
  Description of Artificial Sequence: Synthetic oligonucleotide
acguuuauuguacauuuuc

SEQ ID NO: 1431874 - RNA, 19 nt, Artificial Sequence
  Description of Artificial Sequence: Synthetic oligonucleotide
agagagaguggcuauuuac

SEQ ID NO: 1431875 - RNA, 19 nt, Artificial Sequence
  Description of Artificial Sequence: Synthetic oligonucleotide
ugaugacacacacacacug

SEQ ID NO: 1431876 - RNA, 19 nt, Artificial Sequence
  Description of Artificial Sequence: Synthetic oligonucleotide
uucacaaucuggaugcgcc

SEQ ID NO: 1431877 - RNA, 19 nt, Artificial Sequence
  Description of Artificial Sequence: Synthetic oligonucleotide
agagaggcccuucuuaggc

SEQ ID NO: 1431878 - RNA, 19 nt, Artificial Sequence
  Description of Artificial Sequence: Synthetic oligonucleotide
aauguagggagagacuccg

SEQ ID NO: 1431879 - RNA, 19 nt, Artificial Sequence
  Description of Artificial Sequence: Synthetic oligonucleotide
uaaacuagacuagaggggc

SEQ ID NO: 1431880 - RNA, 19 nt, Artificial Sequence
  Description of Artificial Sequence: Synthetic oligonucleotide
acacacacacacuggagcc

SEQ ID NO: 1431881 - RNA, 19 nt, Artificial Sequence
  Description of Artificial Sequence: Synthetic oligonucleotide
aagucccauacacauauug

SEQ ID NO: 1431882 - RNA, 19 nt, Artificial Sequence
  Description of Artificial Sequence: Synthetic oligonucleotide
guuuagaucuccuugguuc

SEQ ID NO: 1431883 - RNA, 19 nt, Artificial Sequence
  Description of Artificial Sequence: Synthetic oligonucleotide
agcuguauacccucagacc

SEQ ID NO: 1431884 - RNA, 19 nt, Artificial Sequence
  Description of Artificial Sequence: Synthetic oligonucleotide
gaaguaaacgaugaugaug

SEQ ID NO: 1431885 - RNA, 19 nt, Artificial Sequence
  Description of Artificial Sequence: Synthetic oligonucleotide
aaugucaguugagugcccc

SEQ ID NO: 1431886 - RNA, 19 nt, Artificial Sequence
  Description of Artificial Sequence: Synthetic oligonucleotide
ugaagugugauuagaggac

SEQ ID NO: 1431887 - RNA, 19 nt, Artificial Sequence
  Description of Artificial Sequence: Synthetic oligonucleotide
gugauuagaggaccaaugg

SEQ ID NO: 1431888 - RNA, 19 nt, Artificial Sequence
  Description of Artificial Sequence: Synthetic oligonucleotide
aaaggagguaaacuagacu

SEQ ID NO: 1431889 - RNA, 19 nt, Artificial Sequence
  Description of Artificial Sequence: Synthetic oligonucleotide
uccucagggauuuuaagug

SEQ ID NO: 1431890 - RNA, 19 nt, Artificial Sequence
  Description of Artificial Sequence: Synthetic oligonucleotide
guuaaggagcuguauaccc

SEQ ID NO: 1431891 - RNA, 19 nt, Artificial Sequence
  Description of Artificial Sequence: Synthetic oligonucleotide
uuuagaucuccuugguucc

SEQ ID NO: 1431892 - RNA, 19 nt, Artificial Sequence
  Description of Artificial Sequence: Synthetic oligonucleotide
ugaacuccaagacacuuac

SEQ ID NO: 1431893 - RNA, 19 nt, Artificial Sequence
  Description of Artificial Sequence: Synthetic oligonucleotide
aaugucgugcaaaugaagu

SEQ ID NO: 1431894 - RNA, 19 nt, Artificial Sequence
  Description of Artificial Sequence: Synthetic oligonucleotide
ucuagcaagaugaggccag

SEQ ID NO: 1431895 - RNA, 19 nt, Artificial Sequence
  Description of Artificial Sequence: Synthetic oligonucleotide
acacugaacuccaagacac

SEQ ID NO: 1431896 - RNA, 19 nt, Artificial Sequence
  Description of Artificial Sequence: Synthetic oligonucleotide
aauggagacuaacucuuca

SEQ ID NO: 1431897 - RNA, 19 nt, Artificial Sequence
  Description of Artificial Sequence: Synthetic oligonucleotide
ugauuagaggaccaaugga

SEQ ID NO: 1431898 - RNA, 19 nt, Artificial Sequence
  Description of Artificial Sequence: Synthetic oligonucleotide
uguagggagagacuccgag

SEQ ID NO: 1431899 - RNA, 19 nt, Artificial Sequence
  Description of Artificial Sequence: Synthetic oligonucleotide
aguugagugccccacauga

SEQ ID NO: 1431900 - RNA, 19 nt, Artificial Sequence
  Description of Artificial Sequence: Synthetic oligonucleotide
cauuacacguuuauuguac

SEQ ID NO: 1431901 - RNA, 19 nt, Artificial Sequence
  Description of Artificial Sequence: Synthetic oligonucleotide
gacacacacacacuggagc

SEQ ID NO: 1431902 - RNA, 19 nt, Artificial Sequence
  Description of Artificial Sequence: Synthetic oligonucleotide
ugcaaaugaagugugauua

SEQ ID NO: 1431903 - RNA, 19 nt, Artificial Sequence
  Description of Artificial Sequence: Synthetic oligonucleotide
auucuauuuuguccuacuc

SEQ ID NO: 1431904 - RNA, 19 nt, Artificial Sequence
  Description of Artificial Sequence: Synthetic oligonucleotide
uauugcauuagcagaugca

SEQ ID NO: 1431905 - RNA, 19 nt, Artificial Sequence
  Description of Artificial Sequence: Synthetic oligonucleotide
agagaguggcuauuuacag

SEQ ID NO: 1431906 - RNA, 19 nt, Artificial Sequence
  Description of Artificial Sequence: Synthetic oligonucleotide
agaaaagaaagcagguagg

SEQ ID NO: 1431907 - RNA, 19 nt, Artificial Sequence
  Description of Artificial Sequence: Synthetic oligonucleotide
auuauugguccaucaugac

SEQ ID NO: 1431908 - RNA, 19 nt, Artificial Sequence
  Description of Artificial Sequence: Synthetic oligonucleotide
acacacacggauccaaggg

SEQ ID NO: 1431909 - RNA, 19 nt, Artificial Sequence
  Description of Artificial Sequence: Synthetic oligonucleotide
agcaagaugaggccagagg

SEQ ID NO: 1431910 - RNA, 19 nt, Artificial Sequence
  Description of Artificial Sequence: Synthetic oligonucleotide
aaugggguaaaggagguaa

SEQ ID NO: 1431911 - RNA, 19 nt, Artificial Sequence
  Description of Artificial Sequence: Synthetic oligonucleotide
uaaugucgugcaaaugaag

SEQ ID NO: 1431912 - RNA, 19 nt, Artificial Sequence
  Description of Artificial Sequence: Synthetic oligonucleotide
uuuaagugcugaaguaaac

SEQ ID NO: 1431913 - RNA, 19 nt, Artificial Sequence
  Description of Artificial Sequence: Synthetic oligonucleotide
gguaaugucgugcaaauga

SEQ ID NO: 1431914 - RNA, 19 nt, Artificial Sequence
  Description of Artificial Sequence: Synthetic oligonucleotide
ucuuaggcagggcagacuc

SEQ ID NO: 1431915 - RNA, 19 nt, Artificial Sequence
  Description of Artificial Sequence: Synthetic oligonucleotide
guuuagggaagcuagggga

SEQ ID NO: 1431916 - RNA, 19 nt, Artificial Sequence
  Description of Artificial Sequence: Synthetic oligonucleotide
uuucaguccgaccucuagc

SEQ ID NO: 1431917 - RNA, 19 nt, Artificial Sequence
  Description of Artificial Sequence: Synthetic oligonucleotide
accaauggagacuaacucu

SEQ ID NO: 1431918 - RNA, 19 nt, Artificial Sequence
  Description of Artificial Sequence: Synthetic oligonucleotide
gaaaguuuucaguccgacc

SEQ ID NO: 1431919 - RNA, 19 nt, Artificial Sequence
  Description of Artificial Sequence: Synthetic oligonucleotide
cacacggacacacacacac

SEQ ID NO: 1431920 - RNA, 19 nt, Artificial Sequence
  Description of Artificial Sequence: Synthetic oligonucleotide
gcuguauacccucagaccc

SEQ ID NO: 1431921 - RNA, 19 nt, Artificial Sequence
  Description of Artificial Sequence: Synthetic oligonucleotide
caaagaaucagauuguggu

SEQ ID NO: 1431922 - RNA, 19 nt, Artificial Sequence
  Description of Artificial Sequence: Synthetic oligonucleotide
aguggcagaauuauugguc

SEQ ID NO: 1431923 - RNA, 19 nt, Artificial Sequence
  Description of Artificial Sequence: Synthetic oligonucleotide
ugcaaaugaagggacuuag

SEQ ID NO: 1431924 - RNA, 19 nt, Artificial Sequence
  Description of Artificial Sequence: Synthetic oligonucleotide
uucaguccgaccucuagca

SEQ ID NO: 1431925 - RNA, 19 nt, Artificial Sequence
  Description of Artificial Sequence: Synthetic oligonucleotide
acucccaagauuaucauca

SEQ ID NO: 1431926 - RNA, 19 nt, Artificial Sequence
  Description of Artificial Sequence: Synthetic oligonucleotide
gaggaugagagagaguggc

SEQ ID NO: 1431927 - RNA, 19 nt, Artificial Sequence
  Description of Artificial Sequence: Synthetic oligonucleotide
uuagaggaccaauggagac

SEQ ID NO: 1431928 - RNA, 19 nt, Artificial Sequence
  Description of Artificial Sequence: Synthetic oligonucleotide
uggagacuaacucuucaga

SEQ ID NO: 1431929 - RNA, 19 nt, Artificial Sequence
  Description of Artificial Sequence: Synthetic oligonucleotide
uuucacaccacaguuuaga

SEQ ID NO: 1431930 - RNA, 19 nt, Artificial Sequence
  Description of Artificial Sequence: Synthetic oligonucleotide
aaggggcuauugcauuagc

SEQ ID NO: 1431931 - RNA, 19 nt, Artificial Sequence
  Description of Artificial Sequence: Synthetic oligonucleotide
cacacacacacacggaucc

SEQ ID NO: 1431932 - RNA, 19 nt, Artificial Sequence
  Description of Artificial Sequence: Synthetic oligonucleotide
aucagauccuuccucuguc

SEQ ID NO: 1431933 - RNA, 19 nt, Artificial Sequence
  Description of Artificial Sequence: Synthetic oligonucleotide
uggucaauccccaauucuc

SEQ ID NO: 1431934 - RNA, 19 nt, Artificial Sequence
  Description of Artificial Sequence: Synthetic oligonucleotide
gaugacacacacacacugg

SEQ ID NO: 1431935 - RNA, 19 nt, Artificial Sequence
  Description of Artificial Sequence: Synthetic oligonucleotide
gacuagaggggcugggagg

SEQ ID NO: 1431936 - RNA, 19 nt, Artificial Sequence
  Description of Artificial Sequence: Synthetic oligonucleotide
ucaugacacacugaacucc

SEQ ID NO: 1431937 - RNA, 19 nt, Artificial Sequence
  Description of Artificial Sequence: Synthetic oligonucleotide
aguuaaauccaagggaaga

SEQ ID NO: 1431938 - RNA, 19 nt, Artificial Sequence
  Description of Artificial Sequence: Synthetic oligonucleotide
acacuuacacaccggcugg

SEQ ID NO: 1431939 - RNA, 19 nt, Artificial Sequence
  Description of Artificial Sequence: Synthetic oligonucleotide
ugucgugcaaaugaagugu

SEQ ID NO: 1431940 - RNA, 19 nt, Artificial Sequence
  Description of Artificial Sequence: Synthetic oligonucleotide
agaauuauugguccaucau

SEQ ID NO: 1431941 - RNA, 19 nt, Artificial Sequence
  Description of Artificial Sequence: Synthetic oligonucleotide
gagcuguauacccucagac

SEQ ID NO: 1431942 - RNA, 19 nt, Artificial Sequence
  Description of Artificial Sequence: Synthetic oligonucleotide
gaccaauggagacuaacuc

SEQ ID NO: 1431943 - RNA, 19 nt, Artificial Sequence
  Description of Artificial Sequence: Synthetic oligonucleotide
acacguuuauuguacauuu

SEQ ID NO: 1431944 - RNA, 19 nt, Artificial Sequence
  Description of Artificial Sequence: Synthetic oligonucleotide
ugacacacacacacuggag

SEQ ID NO: 1431945 - RNA, 19 nt, Artificial Sequence
  Description of Artificial Sequence: Synthetic oligonucleotide
augucgugcaaaugaagug

SEQ ID NO: 1431946 - RNA, 19 nt, Artificial Sequence
  Description of Artificial Sequence: Synthetic oligonucleotide
agucuguggguaucuuccc

SEQ ID NO: 1431947 - RNA, 19 nt, Artificial Sequence
  Description of Artificial Sequence: Synthetic oligonucleotide
ugcacucucucucucuccc

SEQ ID NO: 1431948 - RNA, 19 nt, Artificial Sequence
  Description of Artificial Sequence: Synthetic oligonucleotide
cucuccuacccuuucacac

SEQ ID NO: 1431949 - RNA, 19 nt, Artificial Sequence
  Description of Artificial Sequence: Synthetic oligonucleotide
gucuagaacacaagcaccc

SEQ ID NO: 1431950 - RNA, 19 nt, Artificial Sequence
  Description of Artificial Sequence: Synthetic oligonucleotide
agucccauacacauauugg

SEQ ID NO: 1431951 - RNA, 19 nt, Artificial Sequence
  Description of Artificial Sequence: Synthetic oligonucleotide
acuaacucuucagaaaaga

SEQ ID NO: 1431952 - RNA, 19 nt, Artificial Sequence
  Description of Artificial Sequence: Synthetic oligonucleotide
caauccccaauucuccugg

SEQ ID NO: 1431953 - RNA, 19 nt, Artificial Sequence
  Description of Artificial Sequence: Synthetic oligonucleotide
gguacaacagguuuggaaa

SEQ ID NO: 1431954 - RNA, 19 nt, Artificial Sequence
  Description of Artificial Sequence: Synthetic oligonucleotide
cuggaugcgccacagaauc

SEQ ID NO: 1431955 - RNA, 19 nt, Artificial Sequence
  Description of Artificial Sequence: Synthetic oligonucleotide
ucuccuacccuuucacacc

SEQ ID NO: 1431956 - RNA, 19 nt, Artificial Sequence
  Description of Artificial Sequence: Synthetic oligonucleotide
augacacacacacacugga

SEQ ID NO: 1431957 - RNA, 19 nt, Artificial Sequence
  Description of Artificial Sequence: Synthetic oligonucleotide
uugagugccccacaugaaa

SEQ ID NO: 1431958 - RNA, 19 nt, Artificial Sequence
  Description of Artificial Sequence: Synthetic oligonucleotide
agggucaggaauuguuuag

SEQ ID NO: 1431959 - RNA, 19 nt, Artificial Sequence
  Description of Artificial Sequence: Synthetic oligonucleotide
uacuucauuacacguuuau

SEQ ID NO: 1431960 - RNA, 19 nt, Artificial Sequence
  Description of Artificial Sequence: Synthetic oligonucleotide
acuagaggggcugggaggg

SEQ ID NO: 1431961 - RNA, 19 nt, Artificial Sequence
  Description of Artificial Sequence: Synthetic oligonucleotide
caucaugacacacugaacu

SEQ ID NO: 1431962 - RNA, 19 nt, Artificial Sequence
  Description of Artificial Sequence: Synthetic oligonucleotide
auuacacguuuauuguaca

SEQ ID NO: 1431963 - RNA, 19 nt, Artificial Sequence
  Description of Artificial Sequence: Synthetic oligonucleotide
guaaacgaugaugaugaug

SEQ ID NO: 1431964 - RNA, 19 nt, Artificial Sequence
  Description of Artificial Sequence: Synthetic oligonucleotide
cacacacggacacacacac

SEQ ID NO: 1431965 - RNA, 19 nt, Artificial Sequence
  Description of Artificial Sequence: Synthetic oligonucleotide
agguaggaguguuuguuug

SEQ ID NO: 1431966 - RNA, 19 nt, Artificial Sequence
  Description of Artificial Sequence: Synthetic oligonucleotide
agacuagaggggcugggag

SEQ ID NO: 1431967 - RNA, 19 nt, Artificial Sequence
  Description of Artificial Sequence: Synthetic oligonucleotide
ucauuacacguuuauugua

SEQ ID NO: 1431968 - RNA, 19 nt, Artificial Sequence
  Description of Artificial Sequence: Synthetic oligonucleotide
ucaauccccaauucuccug

SEQ ID NO: 1431969 - RNA, 19 nt, Artificial Sequence
  Description of Artificial Sequence: Synthetic oligonucleotide
uuuugucuugggaggguca

SEQ ID NO: 1431970 - RNA, 19 nt, Artificial Sequence
  Description of Artificial Sequence: Synthetic oligonucleotide
ugagugccccacaugaaaa

SEQ ID NO: 1431971 - RNA, 19 nt, Artificial Sequence
  Description of Artificial Sequence: Synthetic oligonucleotide
auuguuuagggaagcuagg

SEQ ID NO: 1431972 - RNA, 19 nt, Artificial Sequence
  Description of Artificial Sequence: Synthetic oligonucleotide
uguccuacuccuccccaag

SEQ ID NO: 1431973 - RNA, 19 nt, Artificial Sequence
  Description of Artificial Sequence: Synthetic oligonucleotide
acuggagccaccccuccuc

SEQ ID NO: 1431974 - RNA, 19 nt, Artificial Sequence
  Description of Artificial Sequence: Synthetic oligonucleotide
caagacacuuacacaccgg

SEQ ID NO: 1431975 - RNA, 19 nt, Artificial Sequence
  Description of Artificial Sequence: Synthetic oligonucleotide
cacacacacggauccaagg

SEQ ID NO: 1431976 - RNA, 19 nt, Artificial Sequence
  Description of Artificial Sequence: Synthetic oligonucleotide
ucagggauuuuaagugcug

SEQ ID NO: 1431977 - RNA, 19 nt, Artificial Sequence
  Description of Artificial Sequence: Synthetic oligonucleotide
uauacccucagaccccuaa

SEQ ID NO: 1431978 - RNA, 19 nt, Artificial Sequence
  Description of Artificial Sequence: Synthetic oligonucleotide
aagcagguaggaguguuug

SEQ ID NO: 1431979 - RNA, 19 nt, Artificial Sequence
  Description of Artificial Sequence: Synthetic oligonucleotide
cacggacacacacacacac

SEQ ID NO: 1431980 - RNA, 19 nt, Artificial Sequence
  Description of Artificial Sequence: Synthetic oligonucleotide
caguuaaauccaagggaag

SEQ ID NO: 1431981 - RNA, 19 nt, Artificial Sequence
  Description of Artificial Sequence: Synthetic oligonucleotide
ggucaggaauuguuuaggg

SEQ ID NO: 1431982 - RNA, 19 nt, Artificial Sequence
  Description of Artificial Sequence: Synthetic oligonucleotide
cuacuccuccccaaggcag

SEQ ID NO: 1431983 - RNA, 19 nt, Artificial Sequence
  Description of Artificial Sequence: Synthetic oligonucleotide
agaggcccuucuuaggcag

SEQ ID NO: 1431984 - RNA, 19 nt, Artificial Sequence
  Description of Artificial Sequence: Synthetic oligonucleotide
ggaaugucaguugagugcc

SEQ ID NO: 1431985 - RNA, 19 nt, Artificial Sequence
  Description of Artificial Sequence: Synthetic oligonucleotide
gggucuagaacacaagcac

SEQ ID NO: 1431986 - RNA, 19 nt, Artificial Sequence
  Description of Artificial Sequence: Synthetic oligonucleotide
uggaugcgccacagaaucg

SEQ ID NO: 1431987 - RNA, 19 nt, Artificial Sequence
  Description of Artificial Sequence: Synthetic oligonucleotide
gagagaguggcuauuuaca

SEQ ID NO: 1431988 - RNA, 19 nt, Artificial Sequence
  Description of Artificial Sequence: Synthetic oligonucleotide
auuagaggaccaauggaga

SEQ ID NO: 1431989 - RNA, 19 nt, Artificial Sequence
  Description of Artificial Sequence: Synthetic oligonucleotide
uguggucaauccccaauuc

SEQ ID NO: 1431990 - RNA, 19 nt, Artificial Sequence
  Description of Artificial Sequence: Synthetic oligonucleotide
cacacacacggacacacac

SEQ ID NO: 1431991 - RNA, 19 nt, Artificial Sequence
  Description of Artificial Sequence: Synthetic oligonucleotide
cuguauacccucagacccc

SEQ ID NO: 1431992 - RNA, 19 nt, Artificial Sequence
  Description of Artificial Sequence: Synthetic oligonucleotide
ucuagaacacaagcacccc

SEQ ID NO: 1431993 - RNA, 19 nt, Artificial Sequence
  Description of Artificial Sequence: Synthetic oligonucleotide
cuuagggcuaucaggagaa

SEQ ID NO: 1431994 - RNA, 19 nt, Artificial Sequence
  Description of Artificial Sequence: Synthetic oligonucleotide
caguccgaccucuagcaag

SEQ ID NO: 1431995 - RNA, 19 nt, Artificial Sequence
  Description of Artificial Sequence: Synthetic oligonucleotide
uuacacguuuauuguacau

SEQ ID NO: 1431996 - RNA, 19 nt, Artificial Sequence
  Description of Artificial Sequence: Synthetic oligonucleotide
aggauccccaucauccagc

SEQ ID NO: 1431997 - RNA, 19 nt, Artificial Sequence
  Description of Artificial Sequence: Synthetic oligonucleotide
uuuucacaaucuggaugcg

SEQ ID NO: 1431998 - RNA, 19 nt, Artificial Sequence
  Description of Artificial Sequence: Synthetic oligonucleotide
uuagggaagcuaggggaag

SEQ ID NO: 1431999 - RNA, 19 nt, Artificial Sequence
  Description of Artificial Sequence: Synthetic oligonucleotide
ucagauccuuccucuguca

SEQ ID NO: 1432000 - RNA, 19 nt, Artificial Sequence
  Description of Artificial Sequence: Synthetic oligonucleotide
guuaaauccaagggaagaa

SEQ ID NO: 1432001 - RNA, 19 nt, Artificial Sequence
  Description of Artificial Sequence: Synthetic oligonucleotide
gguccaucaugacacacug

SEQ ID NO: 1432002 - RNA, 19 nt, Artificial Sequence
  Description of Artificial Sequence: Synthetic oligonucleotide
gaccucuagcaagaugagg

SEQ ID NO: 1432003 - RNA, 19 nt, Artificial Sequence
  Description of Artificial Sequence: Synthetic oligonucleotide
aggaggguacaacagguuu

SEQ ID NO: 1432004 - RNA, 19 nt, Artificial Sequence
  Description of Artificial Sequence: Synthetic oligonucleotide
ggaauguagggagagacuc

SEQ ID NO: 1432005 - RNA, 19 nt, Artificial Sequence
  Description of Artificial Sequence: Synthetic oligonucleotide
gggauuuuaagugcugaag

SEQ ID NO: 1432006 - RNA, 19 nt, Artificial Sequence
  Description of Artificial Sequence: Synthetic oligonucleotide
uacccucagaccccuaaaa

SEQ ID NO: 1432007 - RNA, 19 nt, Artificial Sequence
  Description of Artificial Sequence: Synthetic oligonucleotide
gucaggaauuguuuaggga

SEQ ID NO: 1432008 - RNA, 19 nt, Artificial Sequence
  Description of Artificial Sequence: Synthetic oligonucleotide
gaauagcuugcacucucuc

SEQ ID NO: 1432009 - RNA, 19 nt, Artificial Sequence
  Description of Artificial Sequence: Synthetic oligonucleotide
agggagagacuccgagugg

SEQ ID NO: 1432010 - RNA, 19 nt, Artificial Sequence
  Description of Artificial Sequence: Synthetic oligonucleotide
agaagaggaaaaggggaca

SEQ ID NO: 1432011 - RNA, 19 nt, Artificial Sequence
  Description of Artificial Sequence: Synthetic oligonucleotide
cagaauuauugguccauca

SEQ ID NO: 1432012 - RNA, 19 nt, Artificial Sequence
  Description of Artificial Sequence: Synthetic oligonucleotide
cacauauuggcagugacua

SEQ ID NO: 1432013 - RNA, 19 nt, Artificial Sequence
  Description of Artificial Sequence: Synthetic oligonucleotide
gcaaaugaagugugauuag

SEQ ID NO: 1432014 - RNA, 19 nt, Artificial Sequence
  Description of Artificial Sequence: Synthetic oligonucleotide
aggagguaaacuagacuag

SEQ ID NO: 1432015 - RNA, 19 nt, Artificial Sequence
  Description of Artificial Sequence: Synthetic oligonucleotide
ggauuuuaagugcugaagu

SEQ ID NO: 1432016 - RNA, 19 nt, Artificial Sequence
  Description of Artificial Sequence: Synthetic oligonucleotide
gauucuauuuuguccuacu

SEQ ID NO: 1432017 - RNA, 19 nt, Artificial Sequence
  Description of Artificial Sequence: Synthetic oligonucleotide
gaugauggcgcaaaucacu

SEQ ID NO: 1432018 - RNA, 19 nt, Artificial Sequence
  Description of Artificial Sequence: Synthetic oligonucleotide
ccaagacacuuacacaccg

SEQ ID NO: 1432019 - RNA, 19 nt, Artificial Sequence
  Description of Artificial Sequence: Synthetic oligonucleotide
ucccaagauuaucaucauc

SEQ ID NO: 1432020 - RNA, 19 nt, Artificial Sequence
  Description of Artificial Sequence: Synthetic oligonucleotide
ucucuccuacccuuucaca

SEQ ID NO: 1432021 - RNA, 19 nt, Artificial Sequence
  Description of Artificial Sequence: Synthetic oligonucleotide
ucgugcaaaugaaguguga

SEQ ID NO: 1432022 - RNA, 19 nt, Artificial Sequence
  Description of Artificial Sequence: Synthetic oligonucleotide
uccgaccucuagcaagaug

SEQ ID NO: 1432023 - RNA, 19 nt, Artificial Sequence
  Description of Artificial Sequence: Synthetic oligonucleotide
cuuucacaccacaguuuag

SEQ ID NO: 1432024 - RNA, 19 nt, Artificial Sequence
  Description of Artificial Sequence: Synthetic oligonucleotide
uguauacccucagaccccu

SEQ ID NO: 1432025 - RNA, 19 nt, Artificial Sequence
  Description of Artificial Sequence: Synthetic oligonucleotide
acacacggauccaagggag

SEQ ID NO: 1432026 - RNA, 19 nt, Artificial Sequence
  Description of Artificial Sequence: Synthetic oligonucleotide
cuauuuuguccuacuccuc

SEQ ID NO: 1432027 - RNA, 19 nt, Artificial Sequence
  Description of Artificial Sequence: Synthetic oligonucleotide
agguuuggaaaauggggua

SEQ ID NO: 1432028 - RNA, 19 nt, Artificial Sequence
  Description of Artificial Sequence: Synthetic oligonucleotide
cacacggauccaagggagg

SEQ ID NO: 1432029 - RNA, 19 nt, Artificial Sequence
  Description of Artificial Sequence: Synthetic oligonucleotide
ccugguuccccaaaagccc

SEQ ID NO: 1432030 - RNA, 19 nt, Artificial Sequence
  Description of Artificial Sequence: Synthetic oligonucleotide
agagacuccgaguggcaga

SEQ ID NO: 1432031 - RNA, 19 nt, Artificial Sequence
  Description of Artificial Sequence: Synthetic oligonucleotide
aggggacagaggaugagag

SEQ ID NO: 1432032 - RNA, 19 nt, Artificial Sequence
  Description of Artificial Sequence: Synthetic oligonucleotide
acacacacacacacggauc

SEQ ID NO: 1432033 - RNA, 19 nt, Artificial Sequence
  Description of Artificial Sequence: Synthetic oligonucleotide
gaauuguuuagggaagcua

SEQ ID NO: 1432034 - RNA, 19 nt, Artificial Sequence
  Description of Artificial Sequence: Synthetic oligonucleotide
cuugcacucucucucucuc

SEQ ID NO: 1432035 - RNA, 19 nt, Artificial Sequence
  Description of Artificial Sequence: Synthetic oligonucleotide
ucauccagcaagucccaua

SEQ ID NO: 1432036 - RNA, 19 nt, Artificial Sequence
  Description of Artificial Sequence: Synthetic oligonucleotide
uggcagaauuauuggucca

SEQ ID NO: 1432037 - RNA, 19 nt, Artificial Sequence
  Description of Artificial Sequence: Synthetic oligonucleotide
gagccaccccuccucaaag

SEQ ID NO: 1432038 - RNA, 19 nt, Artificial Sequence
  Description of Artificial Sequence: Synthetic oligonucleotide
ggagacuaacucuucagaa

SEQ ID NO: 1432039 - RNA, 19 nt, Artificial Sequence
  Description of Artificial Sequence: Synthetic oligonucleotide
ggguaaaggagguaaacua

SEQ ID NO: 1432040 - RNA, 19 nt, Artificial Sequence
  Description of Artificial Sequence: Synthetic oligonucleotide
cagguuuggaaaauggggu

SEQ ID NO: 1432041 - RNA, 19 nt, Artificial Sequence
  Description of Artificial Sequence: Synthetic oligonucleotide
aaucuggaugcgccacaga

SEQ ID NO: 1432042 - RNA, 19 nt, Artificial Sequence
  Description of Artificial Sequence: Synthetic oligonucleotide
cuuaggcagggcagacucc

SEQ ID NO: 1432043 - RNA, 19 nt, Artificial Sequence
  Description of Artificial Sequence: Synthetic oligonucleotide
acuuacacaccggcugggg

SEQ ID NO: 1432044 - RNA, 19 nt, Artificial Sequence
  Description of Artificial Sequence: Synthetic oligonucleotide
aguuuucaguccgaccucu

SEQ ID NO: 1432045 - RNA, 19 nt, Artificial Sequence
  Description of Artificial Sequence: Synthetic oligonucleotide
ccgaccucuagcaagauga

SEQ ID NO: 1432046 - RNA, 19 nt, Artificial Sequence
  Description of Artificial Sequence: Synthetic oligonucleotide
ugucaguugagugccccac

SEQ ID NO: 1432047 - RNA, 19 nt, Artificial Sequence
  Description of Artificial Sequence: Synthetic oligonucleotide
ggucuagaacacaagcacc

SEQ ID NO: 1432048 - RNA, 19 nt, Artificial Sequence
  Description of Artificial Sequence: Synthetic oligonucleotide
gguuaaggagcuguauacc

SEQ ID NO: 1432049 - RNA, 19 nt, Artificial Sequence
  Description of Artificial Sequence: Synthetic oligonucleotide
uuacuucauuacacguuua

SEQ ID NO: 1432050 - RNA, 19 nt, Artificial Sequence
  Description of Artificial Sequence: Synthetic oligonucleotide
aauccccaauucuccuggu

SEQ ID NO: 1432051 - RNA, 19 nt, Artificial Sequence
  Description of Artificial Sequence: Synthetic oligonucleotide
acacauauuggcagugacu

SEQ ID NO: 1432052 - RNA, 19 nt, Artificial Sequence
  Description of Artificial Sequence: Synthetic oligonucleotide
gacacacacacacacggau

SEQ ID NO: 1432053 - RNA, 19 nt, Artificial Sequence
  Description of Artificial Sequence: Synthetic oligonucleotide
uagaucuccuugguucccc

SEQ ID NO: 1432054 - RNA, 19 nt, Artificial Sequence
  Description of Artificial Sequence: Synthetic oligonucleotide
uugcacucucucucucucc

SEQ ID NO: 1432055 - RNA, 19 nt, Artificial Sequence
  Description of Artificial Sequence: Synthetic oligonucleotide
cuagacuagaggggcuggg

SEQ ID NO: 1432056 - RNA, 19 nt, Artificial Sequence
  Description of Artificial Sequence: Synthetic oligonucleotide
ucaaaggagcugggcagug

SEQ ID NO: 1432057 - RNA, 19 nt, Artificial Sequence
  Description of Artificial Sequence: Synthetic oligonucleotide
uacuccuccccaaggcagu

SEQ ID NO: 1432058 - RNA, 19 nt, Artificial Sequence
  Description of Artificial Sequence: Synthetic oligonucleotide
gucgugcaaaugaagugug

SEQ ID NO: 1432059 - RNA, 19 nt, Artificial Sequence
  Description of Artificial Sequence: Synthetic oligonucleotide
cuccccaaggcagugauga

SEQ ID NO: 1432060 - RNA, 19 nt, Artificial Sequence
  Description of Artificial Sequence: Synthetic oligonucleotide
ucacucccaagauuaucau

SEQ ID NO: 1432061 - RNA, 19 nt, Artificial Sequence
  Description of Artificial Sequence: Synthetic oligonucleotide
guaaugucgugcaaaugaa

SEQ ID NO: 1432062 - RNA, 19 nt, Artificial Sequence
  Description of Artificial Sequence: Synthetic oligonucleotide
uagacuagaggggcuggga

SEQ ID NO: 1432063 - RNA, 19 nt, Artificial Sequence
  Description of Artificial Sequence: Synthetic oligonucleotide
ggucaauccccaauucucc

SEQ ID NO: 1432064 - RNA, 19 nt, Artificial Sequence
  Description of Artificial Sequence: Synthetic oligonucleotide
gaucagauccuuccucugu

SEQ ID NO: 1432065 - RNA, 19 nt, Artificial Sequence
  Description of Artificial Sequence: Synthetic oligonucleotide
acugaacuccaagacacuu

SEQ ID NO: 1432066 - RNA, 19 nt, Artificial Sequence
  Description of Artificial Sequence: Synthetic oligonucleotide
gggucaggaauuguuuagg

SEQ ID NO: 1432067 - RNA, 19 nt, Artificial Sequence
  Description of Artificial Sequence: Synthetic oligonucleotide
cggacacacacacacacgg

SEQ ID NO: 1432068 - RNA, 19 nt, Artificial Sequence
  Description of Artificial Sequence: Synthetic oligonucleotide
caaucuggaugcgccacag

SEQ ID NO: 1432069 - RNA, 19 nt, Artificial Sequence
  Description of Artificial Sequence: Synthetic oligonucleotide
ccucagggauuuuaagugc

SEQ ID NO: 1432070 - RNA, 19 nt, Artificial Sequence
  Description of Artificial Sequence: Synthetic oligonucleotide
cacacacggauccaaggga

SEQ ID NO: 1432071 - RNA, 19 nt, Artificial Sequence
  Description of Artificial Sequence: Synthetic oligonucleotide
uccuccccaaggcagugau

SEQ ID NO: 1432072 - RNA, 19 nt, Artificial Sequence
  Description of Artificial Sequence: Synthetic oligonucleotide
gcaaaugaagggacuuagg

SEQ ID NO: 1432073 - RNA, 19 nt, Artificial Sequence
  Description of Artificial Sequence: Synthetic oligonucleotide
aaaucacucccaagauuau

SEQ ID NO: 1432074 - RNA, 19 nt, Artificial Sequence
  Description of Artificial Sequence: Synthetic oligonucleotide
ucaguccgaccucuagcaa

SEQ ID NO: 1432075 - RNA, 19 nt, Artificial Sequence
  Description of Artificial Sequence: Synthetic oligonucleotide
gaguggcuauuuacagggg

SEQ ID NO: 1432076 - RNA, 19 nt, Artificial Sequence
  Description of Artificial Sequence: Synthetic oligonucleotide
uguuucuguggagguuugc

SEQ ID NO: 1432077 - RNA, 19 nt, Artificial Sequence
  Description of Artificial Sequence: Synthetic oligonucleotide
ugcagguaaugucgugcaa

SEQ ID NO: 1432078 - RNA, 19 nt, Artificial Sequence
  Description of Artificial Sequence: Synthetic oligonucleotide
agcagguaggaguguuugu

SEQ ID NO: 1432079 - RNA, 19 nt, Artificial Sequence
  Description of Artificial Sequence: Synthetic oligonucleotide
gaguggcagaauuauuggu

SEQ ID NO: 1432080 - RNA, 19 nt, Artificial Sequence
  Description of Artificial Sequence: Synthetic oligonucleotide
gaaaaggggcuauugcauu

SEQ ID NO: 1432081 - RNA, 19 nt, Artificial Sequence
  Description of Artificial Sequence: Synthetic oligonucleotide
gagaggcccuucuuaggca

SEQ ID NO: 1432082 - RNA, 19 nt, Artificial Sequence
  Description of Artificial Sequence: Synthetic oligonucleotide
uuguccuacuccuccccaa

SEQ ID NO: 1432083 - RNA, 19 nt, Artificial Sequence
  Description of Artificial Sequence: Synthetic oligonucleotide
uggcgcaaaucacucccaa

SEQ ID NO: 1432084 - RNA, 19 nt, Artificial Sequence
  Description of Artificial Sequence: Synthetic oligonucleotide
auauggcugagagguggag

SEQ ID NO: 1432085 - RNA, 19 nt, Artificial Sequence
  Description of Artificial Sequence: Synthetic oligonucleotide
acggacacacacacacacg

SEQ ID NO: 1432086 - RNA, 19 nt, Artificial Sequence
  Description of Artificial Sequence: Synthetic oligonucleotide
gggcugaaagauauggcug

SEQ ID NO: 1432087 - RNA, 19 nt, Artificial Sequence
  Description of Artificial Sequence: Synthetic oligonucleotide
ggguacaacagguuuggaa

SEQ ID NO: 1432088 - RNA, 19 nt, Artificial Sequence
  Description of Artificial Sequence: Synthetic oligonucleotide
augucaguugagugcccca

SEQ ID NO: 1432089 - RNA, 19 nt, Artificial Sequence
  Description of Artificial Sequence: Synthetic oligonucleotide
agugugauuagaggaccaa

SEQ ID NO: 1432090 - RNA, 19 nt, Artificial Sequence
  Description of Artificial Sequence: Synthetic oligonucleotide
aguaaacgaugaugaugau

SEQ ID NO: 1432091 - RNA, 19 nt, Artificial Sequence
  Description of Artificial Sequence: Synthetic oligonucleotide
cagguuaaggagcuguaua

SEQ ID NO: 1432092 - RNA, 19 nt, Artificial Sequence
  Description of Artificial Sequence: Synthetic oligonucleotide
gggaauagcuugcacucuc

SEQ ID NO: 1432093 - RNA, 19 nt, Artificial Sequence
  Description of Artificial Sequence: Synthetic oligonucleotide
agauuguggucaaucccca

SEQ ID NO: 1432094 - RNA, 19 nt, Artificial Sequence
  Description of Artificial Sequence: Synthetic oligonucleotide
uuagggcuaucaggagaag

SEQ ID NO: 1432095 - RNA, 19 nt, Artificial Sequence
  Description of Artificial Sequence: Synthetic oligonucleotide
ggaaaguuuucaguccgac

SEQ ID NO: 1432096 - RNA, 19 nt, Artificial Sequence
  Description of Artificial Sequence: Synthetic oligonucleotide
aggaauguagggagagacu

SEQ ID NO: 1432097 - RNA, 19 nt, Artificial Sequence
  Description of Artificial Sequence: Synthetic oligonucleotide
uucuuaggcagggcagacu

SEQ ID NO: 1432098 - RNA, 19 nt, Artificial Sequence
  Description of Artificial Sequence: Synthetic oligonucleotide
auacccucagaccccuaaa

SEQ ID NO: 1432099 - RNA, 19 nt, Artificial Sequence
  Description of Artificial Sequence: Synthetic oligonucleotide
caacagcccuggagaaagg

SEQ ID NO: 1432100 - RNA, 19 nt, Artificial Sequence
  Description of Artificial Sequence: Synthetic oligonucleotide
cacggauccaagggagggg

SEQ ID NO: 1432101 - RNA, 19 nt, Artificial Sequence
  Description of Artificial Sequence: Synthetic oligonucleotide
cuucuuaggcagggcagac

SEQ ID NO: 1432102 - RNA, 19 nt, Artificial Sequence
  Description of Artificial Sequence: Synthetic oligonucleotide
gcaagucccauacacauau

SEQ ID NO: 1432103 - RNA, 19 nt, Artificial Sequence
  Description of Artificial Sequence: Synthetic oligonucleotide
aggcccuucuuaggcaggg

SEQ ID NO: 1432104 - RNA, 19 nt, Artificial Sequence
  Description of Artificial Sequence: Synthetic oligonucleotide
cccacaugaaaacugggga

SEQ ID NO: 1432105 - RNA, 19 nt, Artificial Sequence
  Description of Artificial Sequence: Synthetic oligonucleotide
gggagagacuccgaguggc

SEQ ID NO: 1432106 - RNA, 19 nt, Artificial Sequence
  Description of Artificial Sequence: Synthetic oligonucleotide
agacacuuacacaccggcu

SEQ ID NO: 1432107 - RNA, 19 nt, Artificial Sequence
  Description of Artificial Sequence: Synthetic oligonucleotide
cugaacuccaagacacuua

SEQ ID NO: 1432108 - RNA, 19 nt, Artificial Sequence
  Description of Artificial Sequence: Synthetic oligonucleotide
cacuuacacaccggcuggg

SEQ ID NO: 1432109 - RNA, 19 nt, Artificial Sequence
  Description of Artificial Sequence: Synthetic oligonucleotide
guggucaauccccaauucu

SEQ ID NO: 1432110 - RNA, 19 nt, Artificial Sequence
  Description of Artificial Sequence: Synthetic oligonucleotide
gggcucaacagcccuggag

SEQ ID NO: 1432111 - RNA, 19 nt, Artificial Sequence
  Description of Artificial Sequence: Synthetic oligonucleotide
ccguuggcagguuaaggag

SEQ ID NO: 1432112 - RNA, 19 nt, Artificial Sequence
  Description of Artificial Sequence: Synthetic oligonucleotide
augcgccacagaaucgggg

SEQ ID NO: 1432113 - RNA, 19 nt, Artificial Sequence
  Description of Artificial Sequence: Synthetic oligonucleotide
cacacacuggagccacccc

SEQ ID NO: 1432114 - RNA, 19 nt, Artificial Sequence
  Description of Artificial Sequence: Synthetic oligonucleotide
ggcgcaaaucacucccaag

SEQ ID NO: 1432115 - RNA, 19 nt, Artificial Sequence
  Description of Artificial Sequence: Synthetic oligonucleotide
ugaagggacuuagggcuau

SEQ ID NO: 1432116 - RNA, 19 nt, Artificial Sequence
  Description of Artificial Sequence: Synthetic oligonucleotide
acacacacggacacacaca

SEQ ID NO: 1432117 - RNA, 19 nt, Artificial Sequence
  Description of Artificial Sequence: Synthetic oligonucleotide
cagcaagucccauacacau

SEQ ID NO: 1432118 - RNA, 19 nt, Artificial Sequence
  Description of Artificial Sequence: Synthetic oligonucleotide
gagacuccgaguggcagaa

SEQ ID NO: 1432119 - RNA, 19 nt, Artificial Sequence
  Description of Artificial Sequence: Synthetic oligonucleotide
agggaauagcuugcacucu

SEQ ID NO: 1432120 - RNA, 19 nt, Artificial Sequence
  Description of Artificial Sequence: Synthetic oligonucleotide
ggggucuagaacacaagca

SEQ ID NO: 1432121 - RNA, 19 nt, Artificial Sequence
  Description of Artificial Sequence: Synthetic oligonucleotide
gauuggggaggaaaguuuu

SEQ ID NO: 1432122 - RNA, 19 nt, Artificial Sequence
  Description of Artificial Sequence: Synthetic oligonucleotide
aggaaaguuuucaguccga

SEQ ID NO: 1432123 - RNA, 19 nt, Artificial Sequence
  Description of Artificial Sequence: Synthetic oligonucleotide
cccuucuuaggcagggcag

SEQ ID NO: 1432124 - RNA, 19 nt, Artificial Sequence
  Description of Artificial Sequence: Synthetic oligonucleotide
gacuccgaguggcagaauu

SEQ ID NO: 1432125 - RNA, 19 nt, Artificial Sequence
  Description of Artificial Sequence: Synthetic oligonucleotide
ggagcuguauacccucaga

SEQ ID NO: 1432126 - RNA, 19 nt, Artificial Sequence
  Description of Artificial Sequence: Synthetic oligonucleotide
cugaaagauauggcugaga

SEQ ID NO: 1432127 - RNA, 19 nt, Artificial Sequence
  Description of Artificial Sequence: Synthetic oligonucleotide
gguuuggaaaaugggguaa

SEQ ID NO: 1432128 - RNA, 19 nt, Artificial Sequence
  Description of Artificial Sequence: Synthetic oligonucleotide
gcuauugcauuagcagaug

SEQ ID NO: 1432129 - RNA, 19 nt, Artificial Sequence
  Description of Artificial Sequence: Synthetic oligonucleotide
gggaagggucaguuaaauc

SEQ ID NO: 1432130 - RNA, 19 nt, Artificial Sequence
  Description of Artificial Sequence: Synthetic oligonucleotide
gcugaaagauauggcugag

SEQ ID NO: 1432131 - RNA, 19 nt, Artificial Sequence
  Description of Artificial Sequence: Synthetic oligonucleotide
ccaucaugacacacugaac

SEQ ID NO: 1432132 - RNA, 19 nt, Artificial Sequence
  Description of Artificial Sequence: Synthetic oligonucleotide
auccagcaagucccauaca

SEQ ID NO: 1432133 - RNA, 19 nt, Artificial Sequence
  Description of Artificial Sequence: Synthetic oligonucleotide
cccguuggcagguuaagga

SEQ ID NO: 1432134 - RNA, 19 nt, Artificial Sequence
  Description of Artificial Sequence: Synthetic oligonucleotide
ggaugagagagaguggcua

SEQ ID NO: 1432135 - RNA, 19 nt, Artificial Sequence
  Description of Artificial Sequence: Synthetic oligonucleotide
gugcaaaugaagugugauu

SEQ ID NO: 1432136 - RNA, 19 nt, Artificial Sequence
  Description of Artificial Sequence: Synthetic oligonucleotide
gaacuccaagacacuuaca

SEQ ID NO: 1432137 - RNA, 19 nt, Artificial Sequence
  Description of Artificial Sequence: Synthetic oligonucleotide
ggaguguuuguuuguuucu

SEQ ID NO: 1432138 - RNA, 19 nt, Artificial Sequence
  Description of Artificial Sequence: Synthetic oligonucleotide
cccgcccugaauacagggg

SEQ ID NO: 1432139 - RNA, 19 nt, Artificial Sequence
  Description of Artificial Sequence: Synthetic oligonucleotide
gcagguaaugucgugcaaa

SEQ ID NO: 1432140 - RNA, 19 nt, Artificial Sequence
  Description of Artificial Sequence: Synthetic oligonucleotide
ggggaggaaaguuuucagu

SEQ ID NO: 1432141 - RNA, 19 nt, Artificial Sequence
  Description of Artificial Sequence: Synthetic oligonucleotide
cagugaugacacacacaca

SEQ ID NO: 1432142 - RNA, 19 nt, Artificial Sequence
  Description of Artificial Sequence: Synthetic oligonucleotide
ugggcucaacagcccugga

SEQ ID NO: 1432143 - RNA, 19 nt, Artificial Sequence
  Description of Artificial Sequence: Synthetic oligonucleotide
aggaggcaaaucaggcaga

SEQ ID NO: 1432144 - RNA, 19 nt, Artificial Sequence
  Description of Artificial Sequence: Synthetic oligonucleotide
ggauccccaucauccagca

SEQ ID NO: 1432145 - RNA, 19 nt, Artificial Sequence
  Description of Artificial Sequence: Synthetic oligonucleotide
acacacacacacggaucca

SEQ ID NO: 1432146 - RNA, 19 nt, Artificial Sequence
  Description of Artificial Sequence: Synthetic oligonucleotide
gguaggaguguuuguuugu

SEQ ID NO: 1432147 - RNA, 19 nt, Artificial Sequence
  Description of Artificial Sequence: Synthetic oligonucleotide
ugggagggucaggaauugu

SEQ ID NO: 1432148 - RNA, 19 nt, Artificial Sequence
  Description of Artificial Sequence: Synthetic oligonucleotide
cuagaggggcugggagggg

SEQ ID NO: 1432149 - RNA, 19 nt, Artificial Sequence
  Description of Artificial Sequence: Synthetic oligonucleotide
gcuaucaggagaagaggaa

SEQ ID NO: 1432150 - RNA, 19 nt, Artificial Sequence
  Description of Artificial Sequence: Synthetic oligonucleotide
acuccgaguggcagaauua

SEQ ID NO: 1432151 - RNA, 19 nt, Artificial Sequence
  Description of Artificial Sequence: Synthetic oligonucleotide
gcccuucuuaggcagggca

SEQ ID NO: 1432152 - RNA, 19 nt, Artificial Sequence
  Description of Artificial Sequence: Synthetic oligonucleotide
cugggaaugucaguugagu

SEQ ID NO: 1432153 - RNA, 19 nt, Artificial Sequence
  Description of Artificial Sequence: Synthetic oligonucleotide
ccagcaagucccauacaca

SEQ ID NO: 1432154 - RNA, 19 nt, Artificial Sequence
  Description of Artificial Sequence: Synthetic oligonucleotide
cuaggggaagggucaguua

SEQ ID NO: 1432155 - RNA, 19 nt, Artificial Sequence
  Description of Artificial Sequence: Synthetic oligonucleotide
guugagugccccacaugaa

SEQ ID NO: 1432156 - RNA, 19 nt, Artificial Sequence
  Description of Artificial Sequence: Synthetic oligonucleotide
acacggacacacacacaca

SEQ ID NO: 1432157 - RNA, 19 nt, Artificial Sequence
  Description of Artificial Sequence: Synthetic oligonucleotide
ccccgcccugaauacaggg

SEQ ID NO: 1432158 - RNA, 19 nt, Artificial Sequence
  Description of Artificial Sequence: Synthetic oligonucleotide
auggcgcaaaucacuccca

SEQ ID NO: 1432159 - RNA, 19 nt, Artificial Sequence
  Description of Artificial Sequence: Synthetic oligonucleotide
ggcuauugcauuagcagau

SEQ ID NO: 1432160 - RNA, 19 nt, Artificial Sequence
  Description of Artificial Sequence: Synthetic oligonucleotide
agcaagucccauacacaua

SEQ ID NO: 1432161 - RNA, 19 nt, Artificial Sequence
  Description of Artificial Sequence: Synthetic oligonucleotide
augaagggacuuagggcua

SEQ ID NO: 1432162 - RNA, 19 nt, Artificial Sequence
  Description of Artificial Sequence: Synthetic oligonucleotide
cuagcaagaugaggccaga

SEQ ID NO: 1432163 - RNA, 19 nt, Artificial Sequence
  Description of Artificial Sequence: Synthetic oligonucleotide
caaaggagcugggcaguga

SEQ ID NO: 1432164 - RNA, 19 nt, Artificial Sequence
  Description of Artificial Sequence: Synthetic oligonucleotide
ccaauggagacuaacucuu

SEQ ID NO: 1432165 - RNA, 19 nt, Artificial Sequence
  Description of Artificial Sequence: Synthetic oligonucleotide
gugaugacacacacacacu

SEQ ID NO: 1432166 - RNA, 19 nt, Artificial Sequence
  Description of Artificial Sequence: Synthetic oligonucleotide
aggggaagggucaguuaaa

SEQ ID NO: 1432167 - RNA, 19 nt, Artificial Sequence
  Description of Artificial Sequence: Synthetic oligonucleotide
ccuacuccuccccaaggca

SEQ ID NO: 1432168 - RNA, 19 nt, Artificial Sequence
  Description of Artificial Sequence: Synthetic oligonucleotide
gcaaaucacucccaagauu

SEQ ID NO: 1432169 - RNA, 19 nt, Artificial Sequence
  Description of Artificial Sequence: Synthetic oligonucleotide
gucaaaggagcugggcagu

SEQ ID NO: 1432170 - RNA, 19 nt, Artificial Sequence
  Description of Artificial Sequence: Synthetic oligonucleotide
gcacucucucucucucccc

SEQ ID NO: 1432171 - RNA, 19 nt, Artificial Sequence
  Description of Artificial Sequence: Synthetic oligonucleotide
gugugauuagaggaccaau

SEQ ID NO: 1432172 - RNA, 19 nt, Artificial Sequence
  Description of Artificial Sequence: Synthetic oligonucleotide
agcaucucuccuacccuuu

SEQ ID NO: 1432173 - RNA, 19 nt, Artificial Sequence
  Description of Artificial Sequence: Synthetic oligonucleotide
ccucaaagaaucagauugu

SEQ ID NO: 1432174 - RNA, 19 nt, Artificial Sequence
  Description of Artificial Sequence: Synthetic oligonucleotide
auguagggagagacuccga

SEQ ID NO: 1432175 - RNA, 19 nt, Artificial Sequence
  Description of Artificial Sequence: Synthetic oligonucleotide
aggguacaacagguuugga

SEQ ID NO: 1432176 - RNA, 19 nt, Artificial Sequence
  Description of Artificial Sequence: Synthetic oligonucleotide
cagauuggggaggaaaguu

SEQ ID NO: 1432177 - RNA, 19 nt, Artificial Sequence
  Description of Artificial Sequence: Synthetic oligonucleotide
acacacggacacacacaca

SEQ ID NO: 1432178 - RNA, 19 nt, Artificial Sequence
  Description of Artificial Sequence: Synthetic oligonucleotide
cacugaacuccaagacacu

SEQ ID NO: 1432179 - RNA, 19 nt, Artificial Sequence
  Description of Artificial Sequence: Synthetic oligonucleotide
ggacacacacacacacgga

SEQ ID NO: 1432180 - RNA, 19 nt, Artificial Sequence
  Description of Artificial Sequence: Synthetic oligonucleotide
cacguuuauuguacauuuu

SEQ ID NO: 1432181 - RNA, 19 nt, Artificial Sequence
  Description of Artificial Sequence: Synthetic oligonucleotide
augacacacugaacuccaa

SEQ ID NO: 1432182 - RNA, 19 nt, Artificial Sequence
  Description of Artificial Sequence: Synthetic oligonucleotide
accccuccucaaagaauca

SEQ ID NO: 1432183 - RNA, 19 nt, Artificial Sequence
  Description of Artificial Sequence: Synthetic oligonucleotide
gggauucuauuuuguccua

SEQ ID NO: 1432184 - RNA, 19 nt, Artificial Sequence
  Description of Artificial Sequence: Synthetic oligonucleotide
ccauacacauauuggcagu

SEQ ID NO: 1432185 - RNA, 19 nt, Artificial Sequence
  Description of Artificial Sequence: Synthetic oligonucleotide
cgaccucuagcaagaugag

SEQ ID NO: 1432186 - RNA, 19 nt, Artificial Sequence
  Description of Artificial Sequence: Synthetic oligonucleotide
ccccguuggcagguuaagg

SEQ ID NO: 1432187 - RNA, 19 nt, Artificial Sequence
  Description of Artificial Sequence: Synthetic oligonucleotide
ccccuccucaaagaaucag

SEQ ID NO: 1432188 - RNA, 19 nt, Artificial Sequence
  Description of Artificial Sequence: Synthetic oligonucleotide
guuuucaguccgaccucua

SEQ ID NO: 1432189 - RNA, 19 nt, Artificial Sequence
  Description of Artificial Sequence: Synthetic oligonucleotide
cuccccagauuggggagga

SEQ ID NO: 1432190 - RNA, 19 nt, Artificial Sequence
  Description of Artificial Sequence: Synthetic oligonucleotide
ggagagacuccgaguggca

SEQ ID NO: 1432191 - RNA, 19 nt, Artificial Sequence
  Description of Artificial Sequence: Synthetic oligonucleotide
gggcaacaccccuccccag

SEQ ID NO: 1432192 - RNA, 19 nt, Artificial Sequence
  Description of Artificial Sequence: Synthetic oligonucleotide
cuccgaguggcagaauuau

SEQ ID NO: 1432193 - RNA, 19 nt, Artificial Sequence
  Description of Artificial Sequence: Synthetic oligonucleotide
gcuugcacucucucucucu

SEQ ID NO: 1432194 - RNA, 19 nt, Artificial Sequence
  Description of Artificial Sequence: Synthetic oligonucleotide
ggaauagcuugcacucucu

SEQ ID NO: 1432195 - RNA, 19 nt, Artificial Sequence
  Description of Artificial Sequence: Synthetic oligonucleotide
ccccugggaaugucaguug

SEQ ID NO: 1432196 - RNA, 19 nt, Artificial Sequence
  Description of Artificial Sequence: Synthetic oligonucleotide
ggcagaauuauugguccau

SEQ ID NO: 1432197 - RNA, 19 nt, Artificial Sequence
  Description of Artificial Sequence: Synthetic oligonucleotide
gaggaggguacaacagguu

SEQ ID NO: 1432198 - RNA, 19 nt, Artificial Sequence
  Description of Artificial Sequence: Synthetic oligonucleotide
ggagggucaggaauuguuu

SEQ ID NO: 1432199 - RNA, 19 nt, Artificial Sequence
  Description of Artificial Sequence: Synthetic oligonucleotide
ggcaggggacacugggaua

SEQ ID NO: 1432200 - RNA, 19 nt, Artificial Sequence
  Description of Artificial Sequence: Synthetic oligonucleotide
gggagggucaggaauuguu

SEQ ID NO: 1432201 - RNA, 19 nt, Artificial Sequence
  Description of Artificial Sequence: Synthetic oligonucleotide
ggggaagggucaguuaaau

SEQ ID NO: 1432202 - RNA, 19 nt, Artificial Sequence
  Description of Artificial Sequence: Synthetic oligonucleotide
gaggaccaauggagacuaa

SEQ ID NO: 1432203 - RNA, 19 nt, Artificial Sequence
  Description of Artificial Sequence: Synthetic oligonucleotide
uccccagauuggggaggaa

SEQ ID NO: 1432204 - RNA, 19 nt, Artificial Sequence
  Description of Artificial Sequence: Synthetic oligonucleotide
ggggcaauucuggggccca

SEQ ID NO: 1432205 - RNA, 19 nt, Artificial Sequence
  Description of Artificial Sequence: Synthetic oligonucleotide
gcaacaccccuccccagau

SEQ ID NO: 1432206 - RNA, 19 nt, Artificial Sequence
  Description of Artificial Sequence: Synthetic oligonucleotide
gcagguuaaggagcuguau

SEQ ID NO: 1432207 - RNA, 19 nt, Artificial Sequence
  Description of Artificial Sequence: Synthetic oligonucleotide
gggaagcuaggggaagggu

SEQ ID NO: 1432208 - RNA, 19 nt, Artificial Sequence
  Description of Artificial Sequence: Synthetic oligonucleotide
agacuccgaguggcagaau

SEQ ID NO: 1432209 - RNA, 19 nt, Artificial Sequence
  Description of Artificial Sequence: Synthetic oligonucleotide
caccaccugcagguaaugu

SEQ ID NO: 1432210 - RNA, 19 nt, Artificial Sequence
  Description of Artificial Sequence: Synthetic oligonucleotide
cgugcaaaugaagugugau

SEQ ID NO: 1432211 - RNA, 19 nt, Artificial Sequence
  Description of Artificial Sequence: Synthetic oligonucleotide
guauacccucagaccccua

SEQ ID NO: 1432212 - RNA, 19 nt, Artificial Sequence
  Description of Artificial Sequence: Synthetic oligonucleotide
cccucucucucugggcuca

SEQ ID NO: 1432213 - RNA, 19 nt, Artificial Sequence
  Description of Artificial Sequence: Synthetic oligonucleotide
caacaccccuccccagauu

SEQ ID NO: 1432214 - RNA, 19 nt, Artificial Sequence
  Description of Artificial Sequence: Synthetic oligonucleotide
guccgaccucuagcaagau

SEQ ID NO: 1432215 - RNA, 19 nt, Artificial Sequence
  Description of Artificial Sequence: Synthetic oligonucleotide
aaugguauuugacugagcu

SEQ ID NO: 1432216 - RNA, 19 nt, Artificial Sequence
  Description of Artificial Sequence: Synthetic oligonucleotide
aauaaaagcaaaauguuga

SEQ ID NO: 1432217 - RNA, 19 nt, Artificial Sequence
  Description of Artificial Sequence: Synthetic oligonucleotide
ucucuaaguagcuugauag

SEQ ID NO: 1432218 - RNA, 19 nt, Artificial Sequence
  Description of Artificial Sequence: Synthetic oligonucleotide
uuuacauucaugcuccgug

SEQ ID NO: 1432219 - RNA, 19 nt, Artificial Sequence
  Description of Artificial Sequence: Synthetic oligonucleotide
acaguaaacugguagguac

SEQ ID NO: 1432220 - RNA, 19 nt, Artificial Sequence
  Description of Artificial Sequence: Synthetic oligonucleotide
acaccuaucucuuccagcc

SEQ ID NO: 1432221 - RNA, 19 nt, Artificial Sequence
  Description of Artificial Sequence: Synthetic oligonucleotide
uuaaaccuaaugcuaaagc

SEQ ID NO: 1432222 - RNA, 19 nt, Artificial Sequence
  Description of Artificial Sequence: Synthetic oligonucleotide
ucgacauuccguaaggaag

SEQ ID NO: 1432223 - RNA, 19 nt, Artificial Sequence
  Description of Artificial Sequence: Synthetic oligonucleotide
aauaguggcagccaugaaa

SEQ ID NO: 1432224 - RNA, 19 nt, Artificial Sequence
  Description of Artificial Sequence: Synthetic oligonucleotide
ucuaugauccauuugcccu

SEQ ID NO: 1432225 - RNA, 19 nt, Artificial Sequence
  Description of Artificial Sequence: Synthetic oligonucleotide
aaugcuaaagcauguaaua

SEQ ID NO: 1432226 - RNA, 19 nt, Artificial Sequence
  Description of Artificial Sequence: Synthetic oligonucleotide
uuuaggcuuacuuuggugu

SEQ ID NO: 1432227 - RNA, 19 nt, Artificial Sequence
  Description of Artificial Sequence: Synthetic oligonucleotide
ugcccuacaaugcuggacg

SEQ ID NO: 1432228 - RNA, 19 nt, Artificial Sequence
  Description of Artificial Sequence: Synthetic oligonucleotide
acucaugagaguauguugc

SEQ ID NO: 1432229 - RNA, 19 nt, Artificial Sequence
  Description of Artificial Sequence: Synthetic oligonucleotide
agaaugcagagcaugaggc

SEQ ID NO: 1432230 - RNA, 19 nt, Artificial Sequence
  Description of Artificial Sequence: Synthetic oligonucleotide
cuuaugagcaacuuuucug

SEQ ID NO: 1432231 - RNA, 19 nt, Artificial Sequence
  Description of Artificial Sequence: Synthetic oligonucleotide
aacguagcucaguugagag

SEQ ID NO: 1432232 - RNA, 19 nt, Artificial Sequence
  Description of Artificial Sequence: Synthetic oligonucleotide
aaaguaacuucugcugccc

SEQ ID NO: 1432233 - RNA, 19 nt, Artificial Sequence
  Description of Artificial Sequence: Synthetic oligonucleotide
aggacaguaaacugguagg

SEQ ID NO: 1432234 - RNA, 19 nt, Artificial Sequence
  Description of Artificial Sequence: Synthetic oligonucleotide
gaaggcacaacguagcuca

SEQ ID NO: 1432235 - RNA, 19 nt, Artificial Sequence
  Description of Artificial Sequence: Synthetic oligonucleotide
aaaacucacagaccaguca

SEQ ID NO: 1432236 - RNA, 19 nt, Artificial Sequence
  Description of Artificial Sequence: Synthetic oligonucleotide
guaaaguaacuucugcugc

SEQ ID NO: 1432237 - RNA, 19 nt, Artificial Sequence
  Description of Artificial Sequence: Synthetic oligonucleotide
uuaauuugauccugcacac

SEQ ID NO: 1432238 - RNA, 19 nt, Artificial Sequence
  Description of Artificial Sequence: Synthetic oligonucleotide
auuucgacauuccguaagg

SEQ ID NO: 1432239 - RNA, 19 nt, Artificial Sequence
  Description of Artificial Sequence: Synthetic oligonucleotide
cauugaacacugcaguugg

SEQ ID NO: 1432240 - RNA, 19 nt, Artificial Sequence
  Description of Artificial Sequence: Synthetic oligonucleotide
cuuacuuugguguucacga

SEQ ID NO: 1432241 - RNA, 19 nt, Artificial Sequence
  Description of Artificial Sequence: Synthetic oligonucleotide
uaaaguaacuucugcugcc

SEQ ID NO: 1432242 - RNA, 19 nt, Artificial Sequence
  Description of Artificial Sequence: Synthetic oligonucleotide
aagacuuccccagcaaugg

SEQ ID NO: 1432243 - RNA, 19 nt, Artificial Sequence
  Description of Artificial Sequence: Synthetic oligonucleotide
uaaugcuaaagcauguaau

SEQ ID NO: 1432244 - RNA, 19 nt, Artificial Sequence
  Description of Artificial Sequence: Synthetic oligonucleotide
aaacugguagguacaaacg

SEQ ID NO: 1432245 - RNA, 19 nt, Artificial Sequence
  Description of Artificial Sequence: Synthetic oligonucleotide
auauucuuccaaaaugaac

SEQ ID NO: 1432246 - RNA, 19 nt, Artificial Sequence
  Description of Artificial Sequence: Synthetic oligonucleotide
aagccaguagacaaggguc

SEQ ID NO: 1432247 - RNA, 19 nt, Artificial Sequence
  Description of Artificial Sequence: Synthetic oligonucleotide
uucacgaucuccaauuaaa

SEQ ID NO: 1432248 - RNA, 19 nt, Artificial Sequence
  Description of Artificial Sequence: Synthetic oligonucleotide
agaguuucauccguugacc

SEQ ID NO: 1432249 - RNA, 19 nt, Artificial Sequence
  Description of Artificial Sequence: Synthetic oligonucleotide
ucucuuauggccacuuucu

SEQ ID NO: 1432250 - RNA, 19 nt, Artificial Sequence
  Description of Artificial Sequence: Synthetic oligonucleotide
ugaagagcggaguagcgug

SEQ ID NO: 1432251 - RNA, 19 nt, Artificial Sequence
  Description of Artificial Sequence: Synthetic oligonucleotide
guaaggaagacuuccccag

SEQ ID NO: 1432252 - RNA, 19 nt, Artificial Sequence
  Description of Artificial Sequence: Synthetic oligonucleotide
uuuaauacuccagucugca

SEQ ID NO: 1432253 - RNA, 19 nt, Artificial Sequence
  Description of Artificial Sequence: Synthetic oligonucleotide
aguugagaguuugggaucc

SEQ ID NO: 1432254 - RNA, 19 nt, Artificial Sequence
  Description of Artificial Sequence: Synthetic oligonucleotide
uuuucucuaaguagcuuga

SEQ ID NO: 1432255 - RNA, 19 nt, Artificial Sequence
  Description of Artificial Sequence: Synthetic oligonucleotide
caauucgagggaauagugg

SEQ ID NO: 1432256 - RNA, 19 nt, Artificial Sequence
  Description of Artificial Sequence: Synthetic oligonucleotide
gguaaaguaacuucugcug

SEQ ID NO: 1432257 - RNA, 19 nt, Artificial Sequence
  Description of Artificial Sequence: Synthetic oligonucleotide
agacauugaacacugcagu

SEQ ID NO: 1432258 - RNA, 19 nt, Artificial Sequence
  Description of Artificial Sequence: Synthetic oligonucleotide
agaaagauccccucuguga

SEQ ID NO: 1432259 - RNA, 19 nt, Artificial Sequence
  Description of Artificial Sequence: Synthetic oligonucleotide
uacaacccagcugagaaag

SEQ ID NO: 1432260 - RNA, 19 nt, Artificial Sequence
  Description of Artificial Sequence: Synthetic oligonucleotide
guugaguccuuucaccagg

SEQ ID NO: 1432261 - RNA, 19 nt, Artificial Sequence
  Description of Artificial Sequence: Synthetic oligonucleotide
cagacauugaacacugcag

SEQ ID NO: 1432262 - RNA, 19 nt, Artificial Sequence
  Description of Artificial Sequence: Synthetic oligonucleotide
uaaguagcuugauagaguu

SEQ ID NO: 1432263 - RNA, 19 nt, Artificial Sequence
  Description of Artificial Sequence: Synthetic oligonucleotide
uccuaucagcuccaauucg

SEQ ID NO: 1432264 - RNA, 19 nt, Artificial Sequence
  Description of Artificial Sequence: Synthetic oligonucleotide
aaccuaaugcuaaagcaug

SEQ ID NO: 1432265 - RNA, 19 nt, Artificial Sequence
  Description of Artificial Sequence: Synthetic oligonucleotide
ugcuaaagcauguaauaaa

SEQ ID NO: 1432266 - RNA, 19 nt, Artificial Sequence
  Description of Artificial Sequence: Synthetic oligonucleotide
ucgucaauuuccuuccuug

SEQ ID NO: 1432267 - RNA, 19 nt, Artificial Sequence
  Description of Artificial Sequence: Synthetic oligonucleotide
cugaugagaggugacaagg

SEQ ID NO: 1432268 - RNA, 19 nt, Artificial Sequence
  Description of Artificial Sequence: Synthetic oligonucleotide
ucggguuuuaauacuccag

SEQ ID NO: 1432269 - RNA, 19 nt, Artificial Sequence
  Description of Artificial Sequence: Synthetic oligonucleotide
auagaguucaugucuggcu

SEQ ID NO: 1432270 - RNA, 19 nt, Artificial Sequence
  Description of Artificial Sequence: Synthetic oligonucleotide
aaaccuaaugcuaaagcau

SEQ ID NO: 1432271 - RNA, 19 nt, Artificial Sequence
  Description of Artificial Sequence: Synthetic oligonucleotide
uucucuuagaccucuaguu

SEQ ID NO: 1432272 - RNA, 19 nt, Artificial Sequence
  Description of Artificial Sequence: Synthetic oligonucleotide
augaacuuuuaagagccac

SEQ ID NO: 1432273 - RNA, 19 nt, Artificial Sequence
  Description of Artificial Sequence: Synthetic oligonucleotide
augagaguauguugcagag

SEQ ID NO: 1432274 - RNA, 19 nt, Artificial Sequence
  Description of Artificial Sequence: Synthetic oligonucleotide
guagcguggucacagaaug

SEQ ID NO: 1432275 - RNA, 19 nt, Artificial Sequence
  Description of Artificial Sequence: Synthetic oligonucleotide
agaggugacaaggagucgg

SEQ ID NO: 1432276 - RNA, 19 nt, Artificial Sequence
  Description of Artificial Sequence: Synthetic oligonucleotide
ucugggguaaaguaacuuc

SEQ ID NO: 1432277 - RNA, 19 nt, Artificial Sequence
  Description of Artificial Sequence: Synthetic oligonucleotide
ucacuuccggcuaacccgg

SEQ ID NO: 1432278 - RNA, 19 nt, Artificial Sequence
  Description of Artificial Sequence: Synthetic oligonucleotide
uuacauucaugcuccgugc

SEQ ID NO: 1432279 - RNA, 19 nt, Artificial Sequence
  Description of Artificial Sequence: Synthetic oligonucleotide
uucagaucugaaaaugcau

SEQ ID NO: 1432280 - RNA, 19 nt, Artificial Sequence
  Description of Artificial Sequence: Synthetic oligonucleotide
ugugaucuccaaacuaaac

SEQ ID NO: 1432281 - RNA, 19 nt, Artificial Sequence
  Description of Artificial Sequence: Synthetic oligonucleotide
aguuugggauccuguacac

SEQ ID NO: 1432282 - RNA, 19 nt, Artificial Sequence
  Description of Artificial Sequence: Synthetic oligonucleotide
acuaaacugaucucuguau

SEQ ID NO: 1432283 - RNA, 19 nt, Artificial Sequence
  Description of Artificial Sequence: Synthetic oligonucleotide
ucauccguugaccacggac

SEQ ID NO: 1432284 - RNA, 19 nt, Artificial Sequence
  Description of Artificial Sequence: Synthetic oligonucleotide
cauuucgacauuccguaag

SEQ ID NO: 1432285 - RNA, 19 nt, Artificial Sequence
  Description of Artificial Sequence: Synthetic oligonucleotide
uaaaacucacagaccaguc

SEQ ID NO: 1432286 - RNA, 19 nt, Artificial Sequence
  Description of Artificial Sequence: Synthetic oligonucleotide
ugugaucaccucacuuccg

SEQ ID NO: 1432287 - RNA, 19 nt, Artificial Sequence
  Description of Artificial Sequence: Synthetic oligonucleotide
aagagcgugugucuuuaca

SEQ ID NO: 1432288 - RNA, 19 nt, Artificial Sequence
  Description of Artificial Sequence: Synthetic oligonucleotide
gaguuugggauccuguaca

SEQ ID NO: 1432289 - RNA, 19 nt, Artificial Sequence
  Description of Artificial Sequence: Synthetic oligonucleotide
uuuaagagccacaggcuua

SEQ ID NO: 1432290 - RNA, 19 nt, Artificial Sequence
  Description of Artificial Sequence: Synthetic oligonucleotide
gaaagauccccucugugaa

SEQ ID NO: 1432291 - RNA, 19 nt, Artificial Sequence
  Description of Artificial Sequence: Synthetic oligonucleotide
uuaauacuccagucugcag

SEQ ID NO: 1432292 - RNA, 19 nt, Artificial Sequence
  Description of Artificial Sequence: Synthetic oligonucleotide
cagcaaugguauuugacug

SEQ ID NO: 1432293 - RNA, 19 nt, Artificial Sequence
  Description of Artificial Sequence: Synthetic oligonucleotide
agcaaugugaagguguuga

SEQ ID NO: 1432294 - RNA, 19 nt, Artificial Sequence
  Description of Artificial Sequence: Synthetic oligonucleotide
auuuuaaaccuaaugcuaa

SEQ ID NO: 1432295 - RNA, 19 nt, Artificial Sequence
  Description of Artificial Sequence: Synthetic oligonucleotide
gauagaguucaugucuggc

SEQ ID NO: 1432296 - RNA, 19 nt, Artificial Sequence
  Description of Artificial Sequence: Synthetic oligonucleotide
aaagagcgugugucuuuac

SEQ ID NO: 1432297 - RNA, 19 nt, Artificial Sequence
  Description of Artificial Sequence: Synthetic oligonucleotide
uacacucugggguaaagua

SEQ ID NO: 1432298 - RNA, 19 nt, Artificial Sequence
  Description of Artificial Sequence: Synthetic oligonucleotide
uguagucacucauuucgac

SEQ ID NO: 1432299 - RNA, 19 nt, Artificial Sequence
  Description of Artificial Sequence: Synthetic oligonucleotide
uucgacauuccguaaggaa

SEQ ID NO: 1432300 - RNA, 19 nt, Artificial Sequence
  Description of Artificial Sequence: Synthetic oligonucleotide
acagauucaggucuaugau

SEQ ID NO: 1432301 - RNA, 19 nt, Artificial Sequence
  Description of Artificial Sequence: Synthetic oligonucleotide
gucucuauccaguggcagg

SEQ ID NO: 1432302 - RNA, 19 nt, Artificial Sequence
  Description of Artificial Sequence: Synthetic oligonucleotide
cacaacguagcucaguuga

SEQ ID NO: 1432303 - RNA, 19 nt, Artificial Sequence
  Description of Artificial Sequence: Synthetic oligonucleotide
gaguauguugcagaguuuc

SEQ ID NO: 1432304 - RNA, 19 nt, Artificial Sequence
  Description of Artificial Sequence: Synthetic oligonucleotide
ucauagcuucucuuagacc

SEQ ID NO: 1432305 - RNA, 19 nt, Artificial Sequence
  Description of Artificial Sequence: Synthetic oligonucleotide
ucaugcuccgugcuuucag

SEQ ID NO: 1432306 - RNA, 19 nt, Artificial Sequence
  Description of Artificial Sequence: Synthetic oligonucleotide
uccguaaggaagacuuccc

SEQ ID NO: 1432307 - RNA, 19 nt, Artificial Sequence
  Description of Artificial Sequence: Synthetic oligonucleotide
gucuaugauccauuugccc

SEQ ID NO: 1432308 - RNA, 19 nt, Artificial Sequence
  Description of Artificial Sequence: Synthetic oligonucleotide
cauacaacccagcugagaa

SEQ ID NO: 1432309 - RNA, 19 nt, Artificial Sequence
  Description of Artificial Sequence: Synthetic oligonucleotide
ugggguaaaguaacuucug

SEQ ID NO: 1432310 - RNA, 19 nt, Artificial Sequence
  Description of Artificial Sequence: Synthetic oligonucleotide
cuuuaggcuuacuuuggug

SEQ ID NO: 1432311 - RNA, 19 nt, Artificial Sequence
  Description of Artificial Sequence: Synthetic oligonucleotide
uugaccacggacuugucuu

SEQ ID NO: 1432312 - RNA, 19 nt, Artificial Sequence
  Description of Artificial Sequence: Synthetic oligonucleotide
ucacgaucuccaauuaaaa

SEQ ID NO: 1432313 - RNA, 19 nt, Artificial Sequence
  Description of Artificial Sequence: Synthetic oligonucleotide
cacucaugagaguauguug

SEQ ID NO: 1432314 - RNA, 19 nt, Artificial Sequence
  Description of Artificial Sequence: Synthetic oligonucleotide
uccagccaagaaaagcucu

SEQ ID NO: 1432315 - RNA, 19 nt, Artificial Sequence
  Description of Artificial Sequence: Synthetic oligonucleotide
cacucugggguaaaguaac

SEQ ID NO: 1432316 - RNA, 19 nt, Artificial Sequence
  Description of Artificial Sequence: Synthetic oligonucleotide
uccaauucgagggaauagu

SEQ ID NO: 1432317 - RNA, 19 nt, Artificial Sequence
  Description of Artificial Sequence: Synthetic oligonucleotide
ggggauaaaagagugggag

SEQ ID NO: 1432318 - RNA, 19 nt, Artificial Sequence
  Description of Artificial Sequence: Synthetic oligonucleotide
agcaaugguauuugacuga

SEQ ID NO: 1432319 - RNA, 19 nt, Artificial Sequence
  Description of Artificial Sequence: Synthetic oligonucleotide
caugaugggaccugugauc

SEQ ID NO: 1432320 - RNA, 19 nt, Artificial Sequence
  Description of Artificial Sequence: Synthetic oligonucleotide
uucucuaaguagcuugaua

SEQ ID NO: 1432321 - RNA, 19 nt, Artificial Sequence
  Description of Artificial Sequence: Synthetic oligonucleotide
ucucguacuuuucucuuau

SEQ ID NO: 1432322 - RNA, 19 nt, Artificial Sequence
  Description of Artificial Sequence: Synthetic oligonucleotide
ucacucauuucgacauucc

SEQ ID NO: 1432323 - RNA, 19 nt, Artificial Sequence
  Description of Artificial Sequence: Synthetic oligonucleotide
gagaguauguugcagaguu

SEQ ID NO: 1432324 - RNA, 19 nt, Artificial Sequence
  Description of Artificial Sequence: Synthetic oligonucleotide
augguauuugacugagcug

SEQ ID NO: 1432325 - RNA, 19 nt, Artificial Sequence
  Description of Artificial Sequence: Synthetic oligonucleotide
gaguccuuucaccaggaca

SEQ ID NO: 1432326 - RNA, 19 nt, Artificial Sequence
  Description of Artificial Sequence: Synthetic oligonucleotide
ugcagaguuucauccguug

SEQ ID NO: 1432327 - RNA, 19 nt, Artificial Sequence
  Description of Artificial Sequence: Synthetic oligonucleotide
agagcgugugucuuuacau

SEQ ID NO: 1432328 - RNA, 19 nt, Artificial Sequence
  Description of Artificial Sequence: Synthetic oligonucleotide
ucuuuacauucaugcuccg

SEQ ID NO: 1432329 - RNA, 19 nt, Artificial Sequence
  Description of Artificial Sequence: Synthetic oligonucleotide
guagucacucauuucgaca

SEQ ID NO: 1432330 - RNA, 19 nt, Artificial Sequence
  Description of Artificial Sequence: Synthetic oligonucleotide
agaccucuaguuguaggcg

SEQ ID NO: 1432331 - RNA, 19 nt, Artificial Sequence
  Description of Artificial Sequence: Synthetic oligonucleotide
uggggugcagcccacaguu

SEQ ID NO: 1432332 - RNA, 19 nt, Artificial Sequence
  Description of Artificial Sequence: Synthetic oligonucleotide
aaguaacuucugcugcccu

SEQ ID NO: 1432333 - RNA, 19 nt, Artificial Sequence
  Description of Artificial Sequence: Synthetic oligonucleotide
ugagcaaugugaagguguu

SEQ ID NO: 1432334 - RNA, 19 nt, Artificial Sequence
  Description of Artificial Sequence: Synthetic oligonucleotide
gggcauacaacccagcuga

SEQ ID NO: 1432335 - RNA, 19 nt, Artificial Sequence
  Description of Artificial Sequence: Synthetic oligonucleotide
cucauuucgacauuccgua

SEQ ID NO: 1432336 - RNA, 19 nt, Artificial Sequence
  Description of Artificial Sequence: Synthetic oligonucleotide
agucggguuuuaauacucc

SEQ ID NO: 1432337 - RNA, 19 nt, Artificial Sequence
  Description of Artificial Sequence: Synthetic oligonucleotide
ggaccugugaucuccaaac

SEQ ID NO: 1432338 - RNA, 19 nt, Artificial Sequence
  Description of Artificial Sequence: Synthetic oligonucleotide
guagguacaaacguagaaa

SEQ ID NO: 1432339 - RNA, 19 nt, Artificial Sequence
  Description of Artificial Sequence: Synthetic oligonucleotide
accucggaaggccaccggg

SEQ ID NO: 1432340 - RNA, 19 nt, Artificial Sequence
  Description of Artificial Sequence: Synthetic oligonucleotide
gaucuccaaacuaaacuga

SEQ ID NO: 1432341 - RNA, 19 nt, Artificial Sequence
  Description of Artificial Sequence: Synthetic oligonucleotide
augggcauacaacccagcu

SEQ ID NO: 1432342 - RNA, 19 nt, Artificial Sequence
  Description of Artificial Sequence: Synthetic oligonucleotide
cacaccuaucucuuccagc

SEQ ID NO: 1432343 - RNA, 19 nt, Artificial Sequence
  Description of Artificial Sequence: Synthetic oligonucleotide
gaguuucauccguugacca

SEQ ID NO: 1432344 - RNA, 19 nt, Artificial Sequence
  Description of Artificial Sequence: Synthetic oligonucleotide
ucuuagaccucuaguugua

SEQ ID NO: 1432345 - RNA, 19 nt, Artificial Sequence
  Description of Artificial Sequence: Synthetic oligonucleotide
ugguagguacaaacguaga

SEQ ID NO: 1432346 - RNA, 19 nt, Artificial Sequence
  Description of Artificial Sequence: Synthetic oligonucleotide
uccuuaugagcaacuuuuc

SEQ ID NO: 1432347 - RNA, 19 nt, Artificial Sequence
  Description of Artificial Sequence: Synthetic oligonucleotide
guguugaguccuuucacca

SEQ ID NO: 1432348 - RNA, 19 nt, Artificial Sequence
  Description of Artificial Sequence: Synthetic oligonucleotide
caugcuccgugcuuucagc

SEQ ID NO: 1432349 - RNA, 19 nt, Artificial Sequence
  Description of Artificial Sequence: Synthetic oligonucleotide
ugaucaccucacuuccggc

SEQ ID NO: 1432350 - RNA, 19 nt, Artificial Sequence
  Description of Artificial Sequence: Synthetic oligonucleotide
agcauguaauaaaaguuaa

SEQ ID NO: 1432351 - RNA, 19 nt, Artificial Sequence
  Description of Artificial Sequence: Synthetic oligonucleotide
uucaggucuaugauccauu

SEQ ID NO: 1432352 - RNA, 19 nt, Artificial Sequence
  Description of Artificial Sequence: Synthetic oligonucleotide
uguucacgaucuccaauua

SEQ ID NO: 1432353 - RNA, 19 nt, Artificial Sequence
  Description of Artificial Sequence: Synthetic oligonucleotide
caccggggauaaaagagug

SEQ ID NO: 1432354 - RNA, 19 nt, Artificial Sequence
  Description of Artificial Sequence: Synthetic oligonucleotide
augcuaaagcauguaauaa

SEQ ID NO: 1432355 - RNA, 19 nt, Artificial Sequence
  Description of Artificial Sequence: Synthetic oligonucleotide
uuuuccuaucagcuccaau

SEQ ID NO: 1432356 - RNA, 19 nt, Artificial Sequence
  Description of Artificial Sequence: Synthetic oligonucleotide
cauuccguaaggaagacuu

SEQ ID NO: 1432357 - RNA, 19 nt, Artificial Sequence
  Description of Artificial Sequence: Synthetic oligonucleotide
cucaguugagaguuuggga

SEQ ID NO: 1432358 - RNA, 19 nt, Artificial Sequence
  Description of Artificial Sequence: Synthetic oligonucleotide
uguacacucugggguaaag

SEQ ID NO: 1432359 - RNA, 19 nt, Artificial Sequence
  Description of Artificial Sequence: Synthetic oligonucleotide
gaccucuaguuguaggcga

SEQ ID NO: 1432360 - RNA, 19 nt, Artificial Sequence
  Description of Artificial Sequence: Synthetic oligonucleotide
accuaucucuuccagccaa

SEQ ID NO: 1432361 - RNA, 19 nt, Artificial Sequence
  Description of Artificial Sequence: Synthetic oligonucleotide
cacagaaugcagagcauga

SEQ ID NO: 1432362 - RNA, 19 nt, Artificial Sequence
  Description of Artificial Sequence: Synthetic oligonucleotide
agucacucaugagaguaug

SEQ ID NO: 1432363 - RNA, 19 nt, Artificial Sequence
  Description of Artificial Sequence: Synthetic oligonucleotide
gggguaaaguaacuucugc

SEQ ID NO: 1432364 - RNA, 19 nt, Artificial Sequence
  Description of Artificial Sequence: Synthetic oligonucleotide
caguugagaguuugggauc

SEQ ID NO: 1432365 - RNA, 19 nt, Artificial Sequence
  Description of Artificial Sequence: Synthetic oligonucleotide
aaugaacuuuuaagagcca

SEQ ID NO: 1432366 - RNA, 19 nt, Artificial Sequence
  Description of Artificial Sequence: Synthetic oligonucleotide
uagcguggucacagaaugc

SEQ ID NO: 1432367 - RNA, 19 nt, Artificial Sequence
  Description of Artificial Sequence: Synthetic oligonucleotide
uuucgacauuccguaagga

SEQ ID NO: 1432368 - RNA, 19 nt, Artificial Sequence
  Description of Artificial Sequence: Synthetic oligonucleotide
cuccaauucgagggaauag

SEQ ID NO: 1432369 - RNA, 19 nt, Artificial Sequence
  Description of Artificial Sequence: Synthetic oligonucleotide
gcuuacuuugguguucacg

SEQ ID NO: 1432370 - RNA, 19 nt, Artificial Sequence
  Description of Artificial Sequence: Synthetic oligonucleotide
uccuguacacucuggggua

SEQ ID NO: 1432371 - RNA, 19 nt, Artificial Sequence
  Description of Artificial Sequence: Synthetic oligonucleotide
ucauuucgacauuccguaa

SEQ ID NO: 1432372 - RNA, 19 nt, Artificial Sequence
  Description of Artificial Sequence: Synthetic oligonucleotide
aguaacuucugcugcccua

SEQ ID NO: 1432373 - RNA, 19 nt, Artificial Sequence
  Description of Artificial Sequence: Synthetic oligonucleotide
caaugguauuugacugagc

SEQ ID NO: 1432374 - RNA, 19 nt, Artificial Sequence
  Description of Artificial Sequence: Synthetic oligonucleotide
uguaggcgauaugagugcu

SEQ ID NO: 1432375 - RNA, 19 nt, Artificial Sequence
  Description of Artificial Sequence: Synthetic oligonucleotide
acaguuagcaagguccuua

SEQ ID NO: 1432376 - RNA, 19 nt, Artificial Sequence
  Description of Artificial Sequence: Synthetic oligonucleotide
agaaagagcgugugucuuu

SEQ ID NO: 1432377 - RNA, 19 nt, Artificial Sequence
  Description of Artificial Sequence: Synthetic oligonucleotide
guaaaacucacagaccagu

SEQ ID NO: 1432378 - RNA, 19 nt, Artificial Sequence
  Description of Artificial Sequence: Synthetic oligonucleotide
gcucaguugagaguuuggg

SEQ ID NO: 1432379 - RNA, 19 nt, Artificial Sequence
  Description of Artificial Sequence: Synthetic oligonucleotide
gguagguacaaacguagaa

SEQ ID NO: 1432380 - RNA, 19 nt, Artificial Sequence
  Description of Artificial Sequence: Synthetic oligonucleotide
ugagaguauguugcagagu

SEQ ID NO: 1432381 - RNA, 19 nt, Artificial Sequence
  Description of Artificial Sequence: Synthetic oligonucleotide
caguaaacugguagguaca

SEQ ID NO: 1432382 - RNA, 19 nt, Artificial Sequence
  Description of Artificial Sequence: Synthetic oligonucleotide
ccggggauaaaagaguggg

SEQ ID NO: 1432383 - RNA, 19 nt, Artificial Sequence
  Description of Artificial Sequence: Synthetic oligonucleotide
agcaugaggcaugauggga

SEQ ID NO: 1432384 - RNA, 19 nt, Artificial Sequence
  Description of Artificial Sequence: Synthetic oligonucleotide
aguaaacugguagguacaa

SEQ ID NO: 1432385 - RNA, 19 nt, Artificial Sequence
  Description of Artificial Sequence: Synthetic oligonucleotide
gucggguuuuaauacucca

SEQ ID NO: 1432386 - RNA, 19 nt, Artificial Sequence
  Description of Artificial Sequence: Synthetic oligonucleotide
cuaaguagcuugauagagu

SEQ ID NO: 1432387 - RNA, 19 nt, Artificial Sequence
  Description of Artificial Sequence: Synthetic oligonucleotide
cuuccggcuaacccggcug

SEQ ID NO: 1432388 - RNA, 19 nt, Artificial Sequence
  Description of Artificial Sequence: Synthetic oligonucleotide
ugugcucccgagguggcca

SEQ ID NO: 1432389 - RNA, 19 nt, Artificial Sequence
  Description of Artificial Sequence: Synthetic oligonucleotide
gagucggguuuuaauacuc

SEQ ID NO: 1432390 - RNA, 19 nt, Artificial Sequence
  Description of Artificial Sequence: Synthetic oligonucleotide
ccaauucgagggaauagug

SEQ ID NO: 1432391 - RNA, 19 nt, Artificial Sequence
  Description of Artificial Sequence: Synthetic oligonucleotide
gggugcagcccacaguuag

SEQ ID NO: 1432392 - RNA, 19 nt, Artificial Sequence
  Description of Artificial Sequence: Synthetic oligonucleotide
cucuuagaccucuaguugu

SEQ ID NO: 1432393 - RNA, 19 nt, Artificial Sequence
  Description of Artificial Sequence: Synthetic oligonucleotide
cagaccagucacucaugag

SEQ ID NO: 1432394 - RNA, 19 nt, Artificial Sequence
  Description of Artificial Sequence: Synthetic oligonucleotide
ggaauaguggcagccauga

SEQ ID NO: 1432395 - RNA, 19 nt, Artificial Sequence
  Description of Artificial Sequence: Synthetic oligonucleotide
auuccguaaggaagacuuc

SEQ ID NO: 1432396 - RNA, 19 nt, Artificial Sequence
  Description of Artificial Sequence: Synthetic oligonucleotide
uggccacuaagcucuugca

SEQ ID NO: 1432397 - RNA, 19 nt, Artificial Sequence
  Description of Artificial Sequence: Synthetic oligonucleotide
ggucugcccaggaaaaggg

SEQ ID NO: 1432398 - RNA, 19 nt, Artificial Sequence
  Description of Artificial Sequence: Synthetic oligonucleotide
gaucaccucacuuccggcu

SEQ ID NO: 1432399 - RNA, 19 nt, Artificial Sequence
  Description of Artificial Sequence: Synthetic oligonucleotide
gagaggugacaaggagucg

SEQ ID NO: 1432400 - RNA, 19 nt, Artificial Sequence
  Description of Artificial Sequence: Synthetic oligonucleotide
acguagcucaguugagagu

SEQ ID NO: 1432401 - RNA, 19 nt, Artificial Sequence
  Description of Artificial Sequence: Synthetic oligonucleotide
cuugcaucuucagaucuga

SEQ ID NO: 1432402 - RNA, 19 nt, Artificial Sequence
  Description of Artificial Sequence: Synthetic oligonucleotide
auucaggucuaugauccau

SEQ ID NO: 1432403 - RNA, 19 nt, Artificial Sequence
  Description of Artificial Sequence: Synthetic oligonucleotide
gauucaggucuaugaucca

SEQ ID NO: 1432404 - RNA, 19 nt, Artificial Sequence
  Description of Artificial Sequence: Synthetic oligonucleotide
gccaccggggauaaaagag

SEQ ID NO: 1432405 - RNA, 19 nt, Artificial Sequence
  Description of Artificial Sequence: Synthetic oligonucleotide
cuuucaccaggacaacaga

SEQ ID NO: 1432406 - RNA, 19 nt, Artificial Sequence
  Description of Artificial Sequence: Synthetic oligonucleotide
agggaggccugccugugcu

SEQ ID NO: 1432407 - RNA, 19 nt, Artificial Sequence
  Description of Artificial Sequence: Synthetic oligonucleotide
cauccguugaccacggacu

SEQ ID NO: 1432408 - RNA, 19 nt, Artificial Sequence
  Description of Artificial Sequence: Synthetic oligonucleotide
agagcggaguagcgugguc

SEQ ID NO: 1432409 - RNA, 19 nt, Artificial Sequence
  Description of Artificial Sequence: Synthetic oligonucleotide
agccaguagacaagggucu

SEQ ID NO: 1432410 - RNA, 19 nt, Artificial Sequence
  Description of Artificial Sequence: Synthetic oligonucleotide
aucuccaaacuaaacugau

SEQ ID NO: 1432411 - RNA, 19 nt, Artificial Sequence
  Description of Artificial Sequence: Synthetic oligonucleotide
gcaaugugaagguguugag

SEQ ID NO: 1432412 - RNA, 19 nt, Artificial Sequence
  Description of Artificial Sequence: Synthetic oligonucleotide
aguauguugcagaguuuca

SEQ ID NO: 1432413 - RNA, 19 nt, Artificial Sequence
  Description of Artificial Sequence: Synthetic oligonucleotide
uuucucuuauggccacuuu

SEQ ID NO: 1432414 - RNA, 19 nt, Artificial Sequence
  Description of Artificial Sequence: Synthetic oligonucleotide
caggucuaugauccauuug

SEQ ID NO: 1432415 - RNA, 19 nt, Artificial Sequence
  Description of Artificial Sequence: Synthetic oligonucleotide
acugguagguacaaacgua

SEQ ID NO: 1432416 - RNA, 19 nt, Artificial Sequence
  Description of Artificial Sequence: Synthetic oligonucleotide
augaaaaggcagggugaag

SEQ ID NO: 1432417 - RNA, 19 nt, Artificial Sequence
  Description of Artificial Sequence: Synthetic oligonucleotide
uuccccagcaaugguauuu

SEQ ID NO: 1432418 - RNA, 19 nt, Artificial Sequence
  Description of Artificial Sequence: Synthetic oligonucleotide
acaacguagcucaguugag

SEQ ID NO: 1432419 - RNA, 19 nt, Artificial Sequence
  Description of Artificial Sequence: Synthetic oligonucleotide
aucaccucacuuccggcua

SEQ ID NO: 1432420 - RNA, 19 nt, Artificial Sequence
  Description of Artificial Sequence: Synthetic oligonucleotide
gaguagcguggucacagaa

SEQ ID NO: 1432421 - RNA, 19 nt, Artificial Sequence
  Description of Artificial Sequence: Synthetic oligonucleotide
aagagcggaguagcguggu

SEQ ID NO: 1432422 - RNA, 19 nt, Artificial Sequence
  Description of Artificial Sequence: Synthetic oligonucleotide
accuaaugcuaaagcaugu

SEQ ID NO: 1432423 - RNA, 19 nt, Artificial Sequence
  Description of Artificial Sequence: Synthetic oligonucleotide
accggggauaaaagagugg

SEQ ID NO: 1432424 - RNA, 19 nt, Artificial Sequence
  Description of Artificial Sequence: Synthetic oligonucleotide
gacauugaacacugcaguu

SEQ ID NO: 1432425 - RNA, 19 nt, Artificial Sequence
  Description of Artificial Sequence: Synthetic oligonucleotide
guucacgaucuccaauuaa

SEQ ID NO: 1432426 - RNA, 19 nt, Artificial Sequence
  Description of Artificial Sequence: Synthetic oligonucleotide
uaggcuuacuuugguguuc

SEQ ID NO: 1432427 - RNA, 19 nt, Artificial Sequence
  Description of Artificial Sequence: Synthetic oligonucleotide
gacauuccguaaggaagac

SEQ ID NO: 1432428 - RNA, 19 nt, Artificial Sequence
  Description of Artificial Sequence: Synthetic oligonucleotide
uggacgagaccucgggcuu

SEQ ID NO: 1432429 - RNA, 19 nt, Artificial Sequence
  Description of Artificial Sequence: Synthetic oligonucleotide
cacauuccagggucgcuuc

SEQ ID NO: 1432430 - RNA, 19 nt, Artificial Sequence
  Description of Artificial Sequence: Synthetic oligonucleotide
uaugauccauuugcccuuc

SEQ ID NO: 1432431 - RNA, 19 nt, Artificial Sequence
  Description of Artificial Sequence: Synthetic oligonucleotide
caugaaaaggcagggugaa

SEQ ID NO: 1432432 - RNA, 19 nt, Artificial Sequence
  Description of Artificial Sequence: Synthetic oligonucleotide
ggguaaaguaacuucugcu

SEQ ID NO: 1432433 - RNA, 19 nt, Artificial Sequence
  Description of Artificial Sequence: Synthetic oligonucleotide
cucguacuuuucucuuaug

SEQ ID NO: 1432434 - RNA, 19 nt, Artificial Sequence
  Description of Artificial Sequence: Synthetic oligonucleotide
guguucacgaucuccaauu

SEQ ID NO: 1432435 - RNA, 19 nt, Artificial Sequence
  Description of Artificial Sequence: Synthetic oligonucleotide
ggcaugaugggaccuguga

SEQ ID NO: 1432436 - RNA, 19 nt, Artificial Sequence
  Description of Artificial Sequence: Synthetic oligonucleotide
aggcuuacuuugguguuca

SEQ ID NO: 1432437 - RNA, 19 nt, Artificial Sequence
  Description of Artificial Sequence: Synthetic oligonucleotide
agguaacucagcaccuucu

SEQ ID NO: 1432438 - RNA, 19 nt, Artificial Sequence
  Description of Artificial Sequence: Synthetic oligonucleotide
ugguguucacgaucuccaa

SEQ ID NO: 1432439 - RNA, 19 nt, Artificial Sequence
  Description of Artificial Sequence: Synthetic oligonucleotide
ccugugaucuccaaacuaa

SEQ ID NO: 1432440 - RNA, 19 nt, Artificial Sequence
  Description of Artificial Sequence: Synthetic oligonucleotide
ugcuccgugcuuucagcau

SEQ ID NO: 1432441 - RNA, 19 nt, Artificial Sequence
  Description of Artificial Sequence: Synthetic oligonucleotide
accagucacucaugagagu

SEQ ID NO: 1432442 - RNA, 19 nt, Artificial Sequence
  Description of Artificial Sequence: Synthetic oligonucleotide
ccuucaaauggucugccca

SEQ ID NO: 1432443 - RNA, 19 nt, Artificial Sequence
  Description of Artificial Sequence: Synthetic oligonucleotide
cccgagguggccacuaagc

SEQ ID NO: 1432444 - RNA, 19 nt, Artificial Sequence
  Description of Artificial Sequence: Synthetic oligonucleotide
cuucucuuagaccucuagu

SEQ ID NO: 1432445 - RNA, 19 nt, Artificial Sequence
  Description of Artificial Sequence: Synthetic oligonucleotide
cugugaucuccaaacuaaa

SEQ ID NO: 1432446 - RNA, 19 nt, Artificial Sequence
  Description of Artificial Sequence: Synthetic oligonucleotide
auccguugaccacggacuu

SEQ ID NO: 1432447 - RNA, 19 nt, Artificial Sequence
  Description of Artificial Sequence: Synthetic oligonucleotide
gagcaaugugaagguguug

SEQ ID NO: 1432448 - RNA, 19 nt, Artificial Sequence
  Description of Artificial Sequence: Synthetic oligonucleotide
cuggacgagaccucgggcu

SEQ ID NO: 1432449 - RNA, 19 nt, Artificial Sequence
  Description of Artificial Sequence: Synthetic oligonucleotide
caaauggucugcccaggaa

SEQ ID NO: 1432450 - RNA, 19 nt, Artificial Sequence
  Description of Artificial Sequence: Synthetic oligonucleotide
gaaaagcucuccucuucau

SEQ ID NO: 1432451 - RNA, 19 nt, Artificial Sequence
  Description of Artificial Sequence: Synthetic oligonucleotide
ggucucuauccaguggcag

SEQ ID NO: 1432452 - RNA, 19 nt, Artificial Sequence
  Description of Artificial Sequence: Synthetic oligonucleotide
cugcccuacaaugcuggac

SEQ ID NO: 1432453 - RNA, 19 nt, Artificial Sequence
  Description of Artificial Sequence: Synthetic oligonucleotide
guauuugacugagcugcuc

SEQ ID NO: 1432454 - RNA, 19 nt, Artificial Sequence
  Description of Artificial Sequence: Synthetic oligonucleotide
guaggcgauaugagugcug

SEQ ID NO: 1432455 - RNA, 19 nt, Artificial Sequence
  Description of Artificial Sequence: Synthetic oligonucleotide
gacuuccccagcaauggua

SEQ ID NO: 1432456 - RNA, 19 nt, Artificial Sequence
  Description of Artificial Sequence: Synthetic oligonucleotide
caacguagcucaguugaga

SEQ ID NO: 1432457 - RNA, 19 nt, Artificial Sequence
  Description of Artificial Sequence: Synthetic oligonucleotide
uuccagggucgcuucucgu

SEQ ID NO: 1432458 - RNA, 19 nt, Artificial Sequence
  Description of Artificial Sequence: Synthetic oligonucleotide
gccacuaagcucuugcagu

SEQ ID NO: 1432459 - RNA, 19 nt, Artificial Sequence
  Description of Artificial Sequence: Synthetic oligonucleotide
ggaggcaccucggaaggcc

SEQ ID NO: 1432460 - RNA, 19 nt, Artificial Sequence
  Description of Artificial Sequence: Synthetic oligonucleotide
ggacuugucuuuccagcca

SEQ ID NO: 1432461 - RNA, 19 nt, Artificial Sequence
  Description of Artificial Sequence: Synthetic oligonucleotide
augaggcaugaugggaccu

SEQ ID NO: 1432462 - RNA, 19 nt, Artificial Sequence
  Description of Artificial Sequence: Synthetic oligonucleotide
aggcgauaugagugcugug

SEQ ID NO: 1432463 - RNA, 19 nt, Artificial Sequence
  Description of Artificial Sequence: Synthetic oligonucleotide
ccagccaagaaaagcucuc

SEQ ID NO: 1432464 - RNA, 19 nt, Artificial Sequence
  Description of Artificial Sequence: Synthetic oligonucleotide
ugacaaggagucggguuuu

SEQ ID NO: 1432465 - RNA, 19 nt, Artificial Sequence
  Description of Artificial Sequence: Synthetic oligonucleotide
uucauccguugaccacgga

SEQ ID NO: 1432466 - RNA, 19 nt, Artificial Sequence
  Description of Artificial Sequence: Synthetic oligonucleotide
cggacuugucuuuccagcc

SEQ ID NO: 1432467 - RNA, 19 nt, Artificial Sequence
  Description of Artificial Sequence: Synthetic oligonucleotide
ugaugggaccugugaucuc

SEQ ID NO: 1432468 - RNA, 19 nt, Artificial Sequence
  Description of Artificial Sequence: Synthetic oligonucleotide
cuaugauccauuugcccuu

SEQ ID NO: 1432469 - RNA, 19 nt, Artificial Sequence
  Description of Artificial Sequence: Synthetic oligonucleotide
guauccagaaagagcgugu

SEQ ID NO: 1432470 - RNA, 19 nt, Artificial Sequence
  Description of Artificial Sequence: Synthetic oligonucleotide
uccuugcuaggaagcuuuu

SEQ ID NO: 1432471 - RNA, 19 nt, Artificial Sequence
  Description of Artificial Sequence: Synthetic oligonucleotide
gcuggacgagaccucgggc

SEQ ID NO: 1432472 - RNA, 19 nt, Artificial Sequence
  Description of Artificial Sequence: Synthetic oligonucleotide
caaggagucggguuuuaau

SEQ ID NO: 1432473 - RNA, 19 nt, Artificial Sequence
  Description of Artificial Sequence: Synthetic oligonucleotide
gcugcccggaacaggacag

SEQ ID NO: 1432474 - RNA, 19 nt, Artificial Sequence
  Description of Artificial Sequence: Synthetic oligonucleotide
gagcgugugucuuuacauu

SEQ ID NO: 1432475 - RNA, 19 nt, Artificial Sequence
  Description of Artificial Sequence: Synthetic oligonucleotide
gcacaacguagcucaguug

SEQ ID NO: 1432476 - RNA, 19 nt, Artificial Sequence
  Description of Artificial Sequence: Synthetic oligonucleotide
auuugauccugcacaccua

SEQ ID NO: 1432477 - RNA, 19 nt, Artificial Sequence
  Description of Artificial Sequence: Synthetic oligonucleotide
acucugggguaaaguaacu

SEQ ID NO: 1432478 - RNA, 19 nt, Artificial Sequence
  Description of Artificial Sequence: Synthetic oligonucleotide
acaaggagucggguuuuaa

SEQ ID NO: 1432479 - RNA, 19 nt, Artificial Sequence
  Description of Artificial Sequence: Synthetic oligonucleotide
caccucggaaggccaccgg

SEQ ID NO: 1432480 - RNA, 19 nt, Artificial Sequence
  Description of Artificial Sequence: Synthetic oligonucleotide
ggaaggcacaacguagcuc

SEQ ID NO: 1432481 - RNA, 19 nt, Artificial Sequence
  Description of Artificial Sequence: Synthetic oligonucleotide
ccagggucgcuucucguac

SEQ ID NO: 1432482 - RNA, 19 nt, Artificial Sequence
  Description of Artificial Sequence: Synthetic oligonucleotide
aggcacaacguagcucagu

SEQ ID NO: 1432483 - RNA, 19 nt, Artificial Sequence
  Description of Artificial Sequence: Synthetic oligonucleotide
augcuggacgagaccucgg

SEQ ID NO: 1432484 - RNA, 19 nt, Artificial Sequence
  Description of Artificial Sequence: Synthetic oligonucleotide
aggugacaaggagucgggu

SEQ ID NO: 1432485 - RNA, 19 nt, Artificial Sequence
  Description of Artificial Sequence: Synthetic oligonucleotide
ugcccggaacaggacagua

SEQ ID NO: 1432486 - RNA, 19 nt, Artificial Sequence
  Description of Artificial Sequence: Synthetic oligonucleotide
aggucucuauccaguggca

SEQ ID NO: 1432487 - RNA, 19 nt, Artificial Sequence
  Description of Artificial Sequence: Synthetic oligonucleotide
ggcuaacccggcugcccgg

SEQ ID NO: 1432488 - RNA, 19 nt, Artificial Sequence
  Description of Artificial Sequence: Synthetic oligonucleotide
uccggcuaacccggcugcc

SEQ ID NO: 1432489 - RNA, 19 nt, Artificial Sequence
  Description of Artificial Sequence: Synthetic oligonucleotide
agaguauguugcagaguuu

SEQ ID NO: 1432490 - RNA, 19 nt, Artificial Sequence
  Description of Artificial Sequence: Synthetic oligonucleotide
accucuaguuguaggcgau

SEQ ID NO: 1432491 - RNA, 19 nt, Artificial Sequence
  Description of Artificial Sequence: Synthetic oligonucleotide
acaacccagcugagaaaga

SEQ ID NO: 1432492 - RNA, 19 nt, Artificial Sequence
  Description of Artificial Sequence: Synthetic oligonucleotide
ggugcagcccacaguuagc

SEQ ID NO: 1432493 - RNA, 19 nt, Artificial Sequence
  Description of Artificial Sequence: Synthetic oligonucleotide
guacacucugggguaaagu

SEQ ID NO: 1432494 - RNA, 19 nt, Artificial Sequence
  Description of Artificial Sequence: Synthetic oligonucleotide
ccggaacaggacaguaaac

SEQ ID NO: 1432495 - RNA, 19 nt, Artificial Sequence
  Description of Artificial Sequence: Synthetic oligonucleotide
cggaguagcguggucacag

SEQ ID NO: 1432496 - RNA, 19 nt, Artificial Sequence
  Description of Artificial Sequence: Synthetic oligonucleotide
cacuuccggcuaacccggc

SEQ ID NO: 1432497 - RNA, 19 nt, Artificial Sequence
  Description of Artificial Sequence: Synthetic oligonucleotide
cccggaacaggacaguaaa

SEQ ID NO: 1432498 - RNA, 19 nt, Artificial Sequence
  Description of Artificial Sequence: Synthetic oligonucleotide
guuuuggggugcagcccac

SEQ ID NO: 1432499 - RNA, 19 nt, Artificial Sequence
  Description of Artificial Sequence: Synthetic oligonucleotide
cugugcucccgagguggcc

SEQ ID NO: 1432500 - RNA, 19 nt, Artificial Sequence
  Description of Artificial Sequence: Synthetic oligonucleotide
gcaugaugggaccugugau

SEQ ID NO: 1432501 - RNA, 19 nt, Artificial Sequence
  Description of Artificial Sequence: Synthetic oligonucleotide
gcaccucggaaggccaccg

SEQ ID NO: 1432502 - RNA, 19 nt, Artificial Sequence
  Description of Artificial Sequence: Synthetic oligonucleotide
cgauaugagugcugugauc

SEQ ID NO: 1432503 - RNA, 19 nt, Artificial Sequence
  Description of Artificial Sequence: Synthetic oligonucleotide
gguguucacgaucuccaau

SEQ ID NO: 1432504 - RNA, 19 nt, Artificial Sequence
  Description of Artificial Sequence: Synthetic oligonucleotide
ccuuaugagcaacuuuucu

SEQ ID NO: 1432505 - RNA, 19 nt, Artificial Sequence
  Description of Artificial Sequence: Synthetic oligonucleotide
caguuagcaagguccuuau

SEQ ID NO: 1432506 - RNA, 19 nt, Artificial Sequence
  Description of Artificial Sequence: Synthetic oligonucleotide
ggaguagcguggucacaga

SEQ ID NO: 1432507 - RNA, 19 nt, Artificial Sequence
  Description of Artificial Sequence: Synthetic oligonucleotide
gaggcaugaugggaccugu

SEQ ID NO: 1432508 - RNA, 19 nt, Artificial Sequence
  Description of Artificial Sequence: Synthetic oligonucleotide
gucacucaugagaguaugu

SEQ ID NO: 1432509 - RNA, 19 nt, Artificial Sequence
  Description of Artificial Sequence: Synthetic oligonucleotide
aggcaugaugggaccugug

SEQ ID NO: 1432510 - RNA, 19 nt, Artificial Sequence
  Description of Artificial Sequence: Synthetic oligonucleotide
ccucacauuccagggucgc

SEQ ID NO: 1432511 - RNA, 19 nt, Artificial Sequence
  Description of Artificial Sequence: Synthetic oligonucleotide
gcgugugucuuuacauuca

SEQ ID NO: 1432512 - RNA, 19 nt, Artificial Sequence
  Description of Artificial Sequence: Synthetic oligonucleotide
gacaaggagucggguuuua

SEQ ID NO: 1432513 - RNA, 19 nt, Artificial Sequence
  Description of Artificial Sequence: Synthetic oligonucleotide
ggcaccucggaaggccacc

SEQ ID NO: 1432514 - RNA, 19 nt, Artificial Sequence
  Description of Artificial Sequence: Synthetic oligonucleotide
gcgauaugagugcugugau

SEQ ID NO: 1432515 - RNA, 19 nt, Artificial Sequence
  Description of Artificial Sequence: Synthetic oligonucleotide
cccuacaaugcuggacgag

SEQ ID NO: 1432516 - RNA, 19 nt, Artificial Sequence
  Description of Artificial Sequence: Synthetic oligonucleotide
cggcuaacccggcugcccg

SEQ ID NO: 1432517 - RNA, 19 nt, Artificial Sequence
  Description of Artificial Sequence: Synthetic oligonucleotide
gacgagaccucgggcuucu

SEQ ID NO: 1432518 - RNA, 19 nt, Artificial Sequence
  Description of Artificial Sequence: Synthetic oligonucleotide
ccuugcuaggaagcuuuuc

SEQ ID NO: 1432519 - RNA, 19 nt, Artificial Sequence
  Description of Artificial Sequence: Synthetic oligonucleotide
ccuaaugcuaaagcaugua

SEQ ID NO: 1432520 - RNA, 19 nt, Artificial Sequence
  Description of Artificial Sequence: Synthetic oligonucleotide
cggguuuuaauacuccagu

SEQ ID NO: 1432521 - RNA, 19 nt, Artificial Sequence
  Description of Artificial Sequence: Synthetic oligonucleotide
ccaccggggauaaaagagu

SEQ ID NO: 1432522 - RNA, 19 nt, Artificial Sequence
  Description of Artificial Sequence: Synthetic oligonucleotide
gcugcccuacaaugcugga

SEQ ID NO: 1432523 - RNA, 19 nt, Artificial Sequence
  Description of Artificial Sequence: Synthetic oligonucleotide
guagcuugauagaguucau

SEQ ID NO: 1432524 - RNA, 19 nt, Artificial Sequence
  Description of Artificial Sequence: Synthetic oligonucleotide
cguagcucaguugagaguu

SEQ ID NO: 1432525 - RNA, 19 nt, Artificial Sequence
  Description of Artificial Sequence: Synthetic oligonucleotide
ccggcuaacccggcugccc

SEQ ID NO: 1432526 - RNA, 19 nt, Artificial Sequence
  Description of Artificial Sequence: Synthetic oligonucleotide
cucacauuccagggucgcu

SEQ ID NO: 1432527 - RNA, 19 nt, Artificial Sequence
  Description of Artificial Sequence: Synthetic oligonucleotide
cuguacacucugggguaaa

SEQ ID NO: 1432528 - RNA, 19 nt, Artificial Sequence
  Description of Artificial Sequence: Synthetic oligonucleotide
guugagaguuugggauccu

SEQ ID NO: 1432529 - RNA, 19 nt, Artificial Sequence
  Description of Artificial Sequence: Synthetic oligonucleotide
ggacgagaccucgggcuuc

SEQ ID NO: 1432530 - RNA, 19 nt, Artificial Sequence
  Description of Artificial Sequence: Synthetic oligonucleotide
cauuugcauggaggcaccu

SEQ ID NO: 1432531 - RNA, 19 nt, Artificial Sequence
  Description of Artificial Sequence: Synthetic oligonucleotide
cuaacccggcugcccggaa

SEQ ID NO: 1432532 - RNA, 19 nt, Artificial Sequence
  Description of Artificial Sequence: Synthetic oligonucleotide
gcuaacccggcugcccgga

SEQ ID NO: 1432533 - RNA, 19 nt, Artificial Sequence
  Description of Artificial Sequence: Synthetic oligonucleotide
ccacuaagcucuugcaguu

SEQ ID NO: 1432534 - RNA, 19 nt, Artificial Sequence
  Description of Artificial Sequence: Synthetic oligonucleotide
gcccggaacaggacaguaa

SEQ ID NO: 1432535 - RNA, 19 nt, Artificial Sequence
  Description of Artificial Sequence: Synthetic oligonucleotide
cuuccccagcaaugguauu

SEQ ID NO: 1432536 - RNA, 19 nt, Artificial Sequence
  Description of Artificial Sequence: Synthetic oligonucleotide
caguuggcucaugggcaua

SEQ ID NO: 1432537 - RNA, 19 nt, Artificial Sequence
  Description of Artificial Sequence: Synthetic oligonucleotide
cugcccggaacaggacagu

SEQ ID NO: 1432538 - RNA, 19 nt, Artificial Sequence
  Description of Artificial Sequence: Synthetic oligonucleotide
ccucuaguuguaggcgaua

SEQ ID NO: 1432539 - RNA, 19 nt, Artificial Sequence
  Description of Artificial Sequence: Synthetic oligonucleotide
agguggccacuaagcucuu

SEQ ID NO: 1432540 - RNA, 19 nt, Artificial Sequence
  Description of Artificial Sequence: Synthetic oligonucleotide
acgagaccucgggcuucuu

SEQ ID NO: 1432541 - RNA, 19 nt, Artificial Sequence
  Description of Artificial Sequence: Synthetic oligonucleotide
aacucuauuaccuuccggc

SEQ ID NO: 1432542 - RNA, 19 nt, Artificial Sequence
  Description of Artificial Sequence: Synthetic oligonucleotide
aggaauucgaaucuuaucc

SEQ ID NO: 1432543 - RNA, 19 nt, Artificial Sequence
  Description of Artificial Sequence: Synthetic oligonucleotide
gauacaauggguguggugg

SEQ ID NO: 1432544 - RNA, 19 nt, Artificial Sequence
  Description of Artificial Sequence: Synthetic oligonucleotide
uugucuuuaaacuugucca

SEQ ID NO: 1432545 - RNA, 19 nt, Artificial Sequence
  Description of Artificial Sequence: Synthetic oligonucleotide
uguacucccauucucuugg

SEQ ID NO: 1432546 - RNA, 19 nt, Artificial Sequence
  Description of Artificial Sequence: Synthetic oligonucleotide
aauugagcaggagagacuc

SEQ ID NO: 1432547 - RNA, 19 nt, Artificial Sequence
  Description of Artificial Sequence: Synthetic oligonucleotide
auugccccaacucaugucc

SEQ ID NO: 1432548 - RNA, 19 nt, Artificial Sequence
  Description of Artificial Sequence: Synthetic oligonucleotide
aaaggcugugcgcugggcc

SEQ ID NO: 1432549 - RNA, 19 nt, Artificial Sequence
  Description of Artificial Sequence: Synthetic oligonucleotide
auagcagcaaggcaggcgg

SEQ ID NO: 1432550 - RNA, 19 nt, Artificial Sequence
  Description of Artificial Sequence: Synthetic oligonucleotide
ugagcaaagaguucaggag

SEQ ID NO: 1432551 - RNA, 19 nt, Artificial Sequence
  Description of Artificial Sequence: Synthetic oligonucleotide
uccugcaguacucacagag

SEQ ID NO: 1432552 - RNA, 19 nt, Artificial Sequence
  Description of Artificial Sequence: Synthetic oligonucleotide
cacgaauacauccucagcc

SEQ ID NO: 1432553 - RNA, 19 nt, Artificial Sequence
  Description of Artificial Sequence: Synthetic oligonucleotide
uucuucacgacucuggccu

SEQ ID NO: 1432554 - RNA, 19 nt, Artificial Sequence
  Description of Artificial Sequence: Synthetic oligonucleotide
acgacucuggccuaacucc

SEQ ID NO: 1432555 - RNA, 19 nt, Artificial Sequence
  Description of Artificial Sequence: Synthetic oligonucleotide
cauaaguacaguugggcag

SEQ ID NO: 1432556 - RNA, 19 nt, Artificial Sequence
  Description of Artificial Sequence: Synthetic oligonucleotide
ucuauuaccuuccggccag

SEQ ID NO: 1432557 - RNA, 19 nt, Artificial Sequence
  Description of Artificial Sequence: Synthetic oligonucleotide
gaaucuuauccucagaaaa

SEQ ID NO: 1432558 - RNA, 19 nt, Artificial Sequence
  Description of Artificial Sequence: Synthetic oligonucleotide
guggcauaaguacaguugg

SEQ ID NO: 1432559 - RNA, 19 nt, Artificial Sequence
  Description of Artificial Sequence: Synthetic oligonucleotide
caauaugggaagcacuugg

SEQ ID NO: 1432560 - RNA, 19 nt, Artificial Sequence
  Description of Artificial Sequence: Synthetic oligonucleotide
guuucgaggaauucgaauc

SEQ ID NO: 1432561 - RNA, 19 nt, Artificial Sequence
  Description of Artificial Sequence: Synthetic oligonucleotide
uggacuaggcuggugaugg

SEQ ID NO: 1432562 - RNA, 19 nt, Artificial Sequence
  Description of Artificial Sequence: Synthetic oligonucleotide
cagaucagcaaacuugugc

SEQ ID NO: 1432563 - RNA, 19 nt, Artificial Sequence
  Description of Artificial Sequence: Synthetic oligonucleotide
agugugugcaacuuguccu

SEQ ID NO: 1432564 - RNA, 19 nt, Artificial Sequence
  Description of Artificial Sequence: Synthetic oligonucleotide
acgcagaugucuccuaacc

SEQ ID NO: 1432565 - RNA, 19 nt, Artificial Sequence
  Description of Artificial Sequence: Synthetic oligonucleotide
ugaauugagcaggagagac

SEQ ID NO: 1432566 - RNA, 19 nt, Artificial Sequence
  Description of Artificial Sequence: Synthetic oligonucleotide
auaaguacaguugggcagg

SEQ ID NO: 1432567 - RNA, 19 nt, Artificial Sequence
  Description of Artificial Sequence: Synthetic oligonucleotide
aggguagggacucaacuuc

SEQ ID NO: 1432568 - RNA, 19 nt, Artificial Sequence
  Description of Artificial Sequence: Synthetic oligonucleotide
cucggguucuccaacaccc

SEQ ID NO: 1432569 - RNA, 19 nt, Artificial Sequence
  Description of Artificial Sequence: Synthetic oligonucleotide
aggaagcaggcucuggcgc

SEQ ID NO: 1432570 - RNA, 19 nt, Artificial Sequence
  Description of Artificial Sequence: Synthetic oligonucleotide
gaugggguaggguagggac

SEQ ID NO: 1432571 - RNA, 19 nt, Artificial Sequence
  Description of Artificial Sequence: Synthetic oligonucleotide
ugcacgaauacauccucag

SEQ ID NO: 1432572 - RNA, 19 nt, Artificial Sequence
  Description of Artificial Sequence: Synthetic oligonucleotide
uuaccuuccggccaggaua

SEQ ID NO: 1432573 - RNA, 19 nt, Artificial Sequence
  Description of Artificial Sequence: Synthetic oligonucleotide
uguugguaacagaagucca

SEQ ID NO: 1432574 - RNA, 19 nt, Artificial Sequence
  Description of Artificial Sequence: Synthetic oligonucleotide
aacgcacgcugccagcugg

SEQ ID NO: 1432575 - RNA, 19 nt, Artificial Sequence
  Description of Artificial Sequence: Synthetic oligonucleotide
ugggauuuguugcacuuga

SEQ ID NO: 1432576 - RNA, 19 nt, Artificial Sequence
  Description of Artificial Sequence: Synthetic oligonucleotide
gaauucgaaucuuauccuc

SEQ ID NO: 1432577 - RNA, 19 nt, Artificial Sequence
  Description of Artificial Sequence: Synthetic oligonucleotide
uuauccucagaaaacucua

SEQ ID NO: 1432578 - RNA, 19 nt, Artificial Sequence
  Description of Artificial Sequence: Synthetic oligonucleotide
gauagcagcaaggcaggcg

SEQ ID NO: 1432579 - RNA, 19 nt, Artificial Sequence
  Description of Artificial Sequence: Synthetic oligonucleotide
agugagugcaucucgucca

SEQ ID NO: 1432580 - RNA, 19 nt, Artificial Sequence
  Description of Artificial Sequence: Synthetic oligonucleotide
agaacuggcugacugggcu

SEQ ID NO: 1432581 - RNA, 19 nt, Artificial Sequence
  Description of Artificial Sequence: Synthetic oligonucleotide
uggcauaaguacaguuggg

SEQ ID NO: 1432582 - RNA, 19 nt, Artificial Sequence
  Description of Artificial Sequence: Synthetic oligonucleotide
uaacagaaguccacucuca

SEQ ID NO: 1432583 - RNA, 19 nt, Artificial Sequence
  Description of Artificial Sequence: Synthetic oligonucleotide
ggccuugccaucaauaugg

SEQ ID NO: 1432584 - RNA, 19 nt, Artificial Sequence
  Description of Artificial Sequence: Synthetic oligonucleotide
guaacagaaguccacucuc

SEQ ID NO: 1432585 - RNA, 19 nt, Artificial Sequence
  Description of Artificial Sequence: Synthetic oligonucleotide
ugugcaacuuguccuccag

SEQ ID NO: 1432586 - RNA, 19 nt, Artificial Sequence
  Description of Artificial Sequence: Synthetic oligonucleotide
aggugguguacucccauuc

SEQ ID NO: 1432587 - RNA, 19 nt, Artificial Sequence
  Description of Artificial Sequence: Synthetic oligonucleotide
aguggcauaaguacaguug

SEQ ID NO: 1432588 - RNA, 19 nt, Artificial Sequence
  Description of Artificial Sequence: Synthetic oligonucleotide
gcugaauugagcaggagag

SEQ ID NO: 1432589 - RNA, 19 nt, Artificial Sequence
  Description of Artificial Sequence: Synthetic oligonucleotide
gugcaucucguccaaaggc

SEQ ID NO: 1432590 - RNA, 19 nt, Artificial Sequence
  Description of Artificial Sequence: Synthetic oligonucleotide
guccuugcggugcaggugg

SEQ ID NO: 1432591 - RNA, 19 nt, Artificial Sequence
  Description of Artificial Sequence: Synthetic oligonucleotide
guagcgcucauugagcucc

SEQ ID NO: 1432592 - RNA, 19 nt, Artificial Sequence
  Description of Artificial Sequence: Synthetic oligonucleotide
agggagauggccuggcgag

SEQ ID NO: 1432593 - RNA, 19 nt, Artificial Sequence
  Description of Artificial Sequence: Synthetic oligonucleotide
uguuucgaggaauucgaau

SEQ ID NO: 1432594 - RNA, 19 nt, Artificial Sequence
  Description of Artificial Sequence: Synthetic oligonucleotide
acaaacgcacgcugccagc

SEQ ID NO: 1432595 - RNA, 19 nt, Artificial Sequence
  Description of Artificial Sequence: Synthetic oligonucleotide
cuggccuaacuccaguucc

SEQ ID NO: 1432596 - RNA, 19 nt, Artificial Sequence
  Description of Artificial Sequence: Synthetic oligonucleotide
ucugagcaaagaguucagg

SEQ ID NO: 1432597 - RNA, 19 nt, Artificial Sequence
  Description of Artificial Sequence: Synthetic oligonucleotide
uggcgaguggcauaaguac

SEQ ID NO: 1432598 - RNA, 19 nt, Artificial Sequence
  Description of Artificial Sequence: Synthetic oligonucleotide
gaguagggugcccuguucc

SEQ ID NO: 1432599 - RNA, 19 nt, Artificial Sequence
  Description of Artificial Sequence: Synthetic oligonucleotide
uccccauugccccaacuca

SEQ ID NO: 1432600 - RNA, 19 nt, Artificial Sequence
  Description of Artificial Sequence: Synthetic oligonucleotide
aauaugggaagcacuuggu

SEQ ID NO: 1432601 - RNA, 19 nt, Artificial Sequence
  Description of Artificial Sequence: Synthetic oligonucleotide
uccucugugcccucauuag

SEQ ID NO: 1432602 - RNA, 19 nt, Artificial Sequence
  Description of Artificial Sequence: Synthetic oligonucleotide
gaggaauucgaaucuuauc

SEQ ID NO: 1432603 - RNA, 19 nt, Artificial Sequence
  Description of Artificial Sequence: Synthetic oligonucleotide
auguguagccccgagaggu

SEQ ID NO: 1432604 - RNA, 19 nt, Artificial Sequence
  Description of Artificial Sequence: Synthetic oligonucleotide
ugggaagcuguguagcugu

SEQ ID NO: 1432605 - RNA, 19 nt, Artificial Sequence
  Description of Artificial Sequence: Synthetic oligonucleotide
acucacagagcagcagucc

SEQ ID NO: 1432606 - RNA, 19 nt, Artificial Sequence
  Description of Artificial Sequence: Synthetic oligonucleotide
cagugugugcaacuugucc

SEQ ID NO: 1432607 - RNA, 19 nt, Artificial Sequence
  Description of Artificial Sequence: Synthetic oligonucleotide
agcaaacuugugcuuccgg

SEQ ID NO: 1432608 - RNA, 19 nt, Artificial Sequence
  Description of Artificial Sequence: Synthetic oligonucleotide
ggacucaacuucucaaagg

SEQ ID NO: 1432609 - RNA, 19 nt, Artificial Sequence
  Description of Artificial Sequence: Synthetic oligonucleotide
gaucagugugugcaacuug

SEQ ID NO: 1432610 - RNA, 19 nt, Artificial Sequence
  Description of Artificial Sequence: Synthetic oligonucleotide
acagaaguccacucucaug

SEQ ID NO: 1432611 - RNA, 19 nt, Artificial Sequence
  Description of Artificial Sequence: Synthetic oligonucleotide
ugcggaauuugucuuuaaa

SEQ ID NO: 1432612 - RNA, 19 nt, Artificial Sequence
  Description of Artificial Sequence: Synthetic oligonucleotide
ucuugcccuauuuccagcu

SEQ ID NO: 1432613 - RNA, 19 nt, Artificial Sequence
  Description of Artificial Sequence: Synthetic oligonucleotide
cagugagugcaucucgucc

SEQ ID NO: 1432614 - RNA, 19 nt, Artificial Sequence
  Description of Artificial Sequence: Synthetic oligonucleotide
agcuguaguucagugagug

SEQ ID NO: 1432615 - RNA, 19 nt, Artificial Sequence
  Description of Artificial Sequence: Synthetic oligonucleotide
ucaauaugggaagcacuug

SEQ ID NO: 1432616 - RNA, 19 nt, Artificial Sequence
  Description of Artificial Sequence: Synthetic oligonucleotide
ugagccuugggcugaggca

SEQ ID NO: 1432617 - RNA, 19 nt, Artificial Sequence
  Description of Artificial Sequence: Synthetic oligonucleotide
aagugggauuuguugcacu

SEQ ID NO: 1432618 - RNA, 19 nt, Artificial Sequence
  Description of Artificial Sequence: Synthetic oligonucleotide
ucuggccuaacuccaguuc

SEQ ID NO: 1432619 - RNA, 19 nt, Artificial Sequence
  Description of Artificial Sequence: Synthetic oligonucleotide
gcggaauuugucuuuaaac

SEQ ID NO: 1432620 - RNA, 19 nt, Artificial Sequence
  Description of Artificial Sequence: Synthetic oligonucleotide
uaccuuccggccaggauac

SEQ ID NO: 1432621 - RNA, 19 nt, Artificial Sequence
  Description of Artificial Sequence: Synthetic oligonucleotide
aggcaggguugcuaggcac

SEQ ID NO: 1432622 - RNA, 19 nt, Artificial Sequence
  Description of Artificial Sequence: Synthetic oligonucleotide
uauccucagaaaacucuau

SEQ ID NO: 1432623 - RNA, 19 nt, Artificial Sequence
  Description of Artificial Sequence: Synthetic oligonucleotide
uccaaaggcugugcgcugg

SEQ ID NO: 1432624 - RNA, 19 nt, Artificial Sequence
  Description of Artificial Sequence: Synthetic oligonucleotide
guugguaacagaaguccac

SEQ ID NO: 1432625 - RNA, 19 nt, Artificial Sequence
  Description of Artificial Sequence: Synthetic oligonucleotide
gacugaggugggcaccacg

SEQ ID NO: 1432626 - RNA, 19 nt, Artificial Sequence
  Description of Artificial Sequence: Synthetic oligonucleotide
cacaaacgcacgcugccag

SEQ ID NO: 1432627 - RNA, 19 nt, Artificial Sequence
  Description of Artificial Sequence: Synthetic oligonucleotide
uaggguagggacucaacuu

SEQ ID NO: 1432628 - RNA, 19 nt, Artificial Sequence
  Description of Artificial Sequence: Synthetic oligonucleotide
ucggguucuccaacacccg

SEQ ID NO: 1432629 - RNA, 19 nt, Artificial Sequence
  Description of Artificial Sequence: Synthetic oligonucleotide
aucagugugugcaacuugu

SEQ ID NO: 1432630 - RNA, 19 nt, Artificial Sequence
  Description of Artificial Sequence: Synthetic oligonucleotide
ccucagaaaacucuauuac

SEQ ID NO: 1432631 - RNA, 19 nt, Artificial Sequence
  Description of Artificial Sequence: Synthetic oligonucleotide
aacacccgggcgaugacug

SEQ ID NO: 1432632 - RNA, 19 nt, Artificial Sequence
  Description of Artificial Sequence: Synthetic oligonucleotide
ucguccaaaggcugugcgc

SEQ ID NO: 1432633 - RNA, 19 nt, Artificial Sequence
  Description of Artificial Sequence: Synthetic oligonucleotide
cucguccaaaggcugugcg

SEQ ID NO: 1432634 - RNA, 19 nt, Artificial Sequence
  Description of Artificial Sequence: Synthetic oligonucleotide
cugggaaagccagagucag

SEQ ID NO: 1432635 - RNA, 19 nt, Artificial Sequence
  Description of Artificial Sequence: Synthetic oligonucleotide
uuccggccaggauacaaug

SEQ ID NO: 1432636 - RNA, 19 nt, Artificial Sequence
  Description of Artificial Sequence: Synthetic oligonucleotide
uccuaaccauguccuguag

SEQ ID NO: 1432637 - RNA, 19 nt, Artificial Sequence
  Description of Artificial Sequence: Synthetic oligonucleotide
ucgaggaauucgaaucuua

SEQ ID NO: 1432638 - RNA, 19 nt, Artificial Sequence
  Description of Artificial Sequence: Synthetic oligonucleotide
uguccacaugcacgaauac

SEQ ID NO: 1432639 - RNA, 19 nt, Artificial Sequence
  Description of Artificial Sequence: Synthetic oligonucleotide
caugcacgaauacauccuc

SEQ ID NO: 1432640 - RNA, 19 nt, Artificial Sequence
  Description of Artificial Sequence: Synthetic oligonucleotide
ugguugguccgcugggaag

SEQ ID NO: 1432641 - RNA, 19 nt, Artificial Sequence
  Description of Artificial Sequence: Synthetic oligonucleotide
cuggcgcucuuccucaggg

SEQ ID NO: 1432642 - RNA, 19 nt, Artificial Sequence
  Description of Artificial Sequence: Synthetic oligonucleotide
uggggccucagagugacug

SEQ ID NO: 1432643 - RNA, 19 nt, Artificial Sequence
  Description of Artificial Sequence: Synthetic oligonucleotide
cacgcugccagcuggccag

SEQ ID NO: 1432644 - RNA, 19 nt, Artificial Sequence
  Description of Artificial Sequence: Synthetic oligonucleotide
ggcauaaguacaguugggc

SEQ ID NO: 1432645 - RNA, 19 nt, Artificial Sequence
  Description of Artificial Sequence: Synthetic oligonucleotide
ugcgguccacaaacgcacg

SEQ ID NO: 1432646 - RNA, 19 nt, Artificial Sequence
  Description of Artificial Sequence: Synthetic oligonucleotide
ugcccucauuagcaggaag

SEQ ID NO: 1432647 - RNA, 19 nt, Artificial Sequence
  Description of Artificial Sequence: Synthetic oligonucleotide
auacaauggguguggugga

SEQ ID NO: 1432648 - RNA, 19 nt, Artificial Sequence
  Description of Artificial Sequence: Synthetic oligonucleotide
cuucuugaucagugugugc

SEQ ID NO: 1432649 - RNA, 19 nt, Artificial Sequence
  Description of Artificial Sequence: Synthetic oligonucleotide
ugcguuaggcuguccuugc

SEQ ID NO: 1432650 - RNA, 19 nt, Artificial Sequence
  Description of Artificial Sequence: Synthetic oligonucleotide
cuugguccuuccucugugc

SEQ ID NO: 1432651 - RNA, 19 nt, Artificial Sequence
  Description of Artificial Sequence: Synthetic oligonucleotide
ggcuguuucgaggaauucg

SEQ ID NO: 1432652 - RNA, 19 nt, Artificial Sequence
  Description of Artificial Sequence: Synthetic oligonucleotide
uccgcugggaagcugugua

SEQ ID NO: 1432653 - RNA, 19 nt, Artificial Sequence
  Description of Artificial Sequence: Synthetic oligonucleotide
aaacgcacgcugccagcug

SEQ ID NO: 1432654 - RNA, 19 nt, Artificial Sequence
  Description of Artificial Sequence: Synthetic oligonucleotide
agggacucaacuucucaaa

SEQ ID NO: 1432655 - RNA, 19 nt, Artificial Sequence
  Description of Artificial Sequence: Synthetic oligonucleotide
gggacucaacuucucaaag

SEQ ID NO: 1432656 - RNA, 19 nt, Artificial Sequence
  Description of Artificial Sequence: Synthetic oligonucleotide
uaaguacaguugggcaggg

SEQ ID NO: 1432657 - RNA, 19 nt, Artificial Sequence
  Description of Artificial Sequence: Synthetic oligonucleotide
accaucacgcagaugucuc

SEQ ID NO: 1432658 - RNA, 19 nt, Artificial Sequence
  Description of Artificial Sequence: Synthetic oligonucleotide
ucacgcagaugucuccuaa

SEQ ID NO: 1432659 - RNA, 19 nt, Artificial Sequence
  Description of Artificial Sequence: Synthetic oligonucleotide
cagccucuugaccaucacg

SEQ ID NO: 1432660 - RNA, 19 nt, Artificial Sequence
  Description of Artificial Sequence: Synthetic oligonucleotide
cugugcccucauuagcagg

SEQ ID NO: 1432661 - RNA, 19 nt, Artificial Sequence
  Description of Artificial Sequence: Synthetic oligonucleotide
cuuagcugaguagggugcc

SEQ ID NO: 1432662 - RNA, 19 nt, Artificial Sequence
  Description of Artificial Sequence: Synthetic oligonucleotide
uggccuaacuccaguucca

SEQ ID NO: 1432663 - RNA, 19 nt, Artificial Sequence
  Description of Artificial Sequence: Synthetic oligonucleotide
acucucaugguguggggaa

SEQ ID NO: 1432664 - RNA, 19 nt, Artificial Sequence
  Description of Artificial Sequence: Synthetic oligonucleotide
ugguccgcugggaagcugu

SEQ ID NO: 1432665 - RNA, 19 nt, Artificial Sequence
  Description of Artificial Sequence: Synthetic oligonucleotide
uuaggcuguccuugcggug

SEQ ID NO: 1432666 - RNA, 19 nt, Artificial Sequence
  Description of Artificial Sequence: Synthetic oligonucleotide
cuugaucagugugugcaac

SEQ ID NO: 1432667 - RNA, 19 nt, Artificial Sequence
  Description of Artificial Sequence: Synthetic oligonucleotide
gcauaaguacaguugggca

SEQ ID NO: 1432668 - RNA, 19 nt, Artificial Sequence
  Description of Artificial Sequence: Synthetic oligonucleotide
gugcaggugguguacuccc

SEQ ID NO: 1432669 - RNA, 19 nt, Artificial Sequence
  Description of Artificial Sequence: Synthetic oligonucleotide
gggcagaucagcaaacuug

SEQ ID NO: 1432670 - RNA, 19 nt, Artificial Sequence
  Description of Artificial Sequence: Synthetic oligonucleotide
acaugcacgaauacauccu

SEQ ID NO: 1432671 - RNA, 19 nt, Artificial Sequence
  Description of Artificial Sequence: Synthetic oligonucleotide
cucuauuaccuuccggcca

SEQ ID NO: 1432672 - RNA, 19 nt, Artificial Sequence
  Description of Artificial Sequence: Synthetic oligonucleotide
guagggacucaacuucuca

SEQ ID NO: 1432673 - RNA, 19 nt, Artificial Sequence
  Description of Artificial Sequence: Synthetic oligonucleotide
auuaccuuccggccaggau

SEQ ID NO: 1432674 - RNA, 19 nt, Artificial Sequence
  Description of Artificial Sequence: Synthetic oligonucleotide
ucaggcucuguugguaaca

SEQ ID NO: 1432675 - RNA, 19 nt, Artificial Sequence
  Description of Artificial Sequence: Synthetic oligonucleotide
gccgguagcgcucauugag

SEQ ID NO: 1432676 - RNA, 19 nt, Artificial Sequence
  Description of Artificial Sequence: Synthetic oligonucleotide
ugaguagggugcccuguuc

SEQ ID NO: 1432677 - RNA, 19 nt, Artificial Sequence
  Description of Artificial Sequence: Synthetic oligonucleotide
agccccgagaggugauagc

SEQ ID NO: 1432678 - RNA, 19 nt, Artificial Sequence
  Description of Artificial Sequence: Synthetic oligonucleotide
ugcgccugcguuaggcugu

SEQ ID NO: 1432679 - RNA, 19 nt, Artificial Sequence
  Description of Artificial Sequence: Synthetic oligonucleotide
ugugugcaacuuguccucc

SEQ ID NO: 1432680 - RNA, 19 nt, Artificial Sequence
  Description of Artificial Sequence: Synthetic oligonucleotide
gaagugggauuuguugcac

SEQ ID NO: 1432681 - RNA, 19 nt, Artificial Sequence
  Description of Artificial Sequence: Synthetic oligonucleotide
cagccgguagcgcucauug

SEQ ID NO: 1432682 - RNA, 19 nt, Artificial Sequence
  Description of Artificial Sequence: Synthetic oligonucleotide
aggcgguggggccucagag

SEQ ID NO: 1432683 - RNA, 19 nt, Artificial Sequence
  Description of Artificial Sequence: Synthetic oligonucleotide
agcaggagagacucggguu

SEQ ID NO: 1432684 - RNA, 19 nt, Artificial Sequence
  Description of Artificial Sequence: Synthetic oligonucleotide
ggucugagcaaagaguuca

SEQ ID NO: 1432685 - RNA, 19 nt, Artificial Sequence
  Description of Artificial Sequence: Synthetic oligonucleotide
agagacucggguucuccaa

SEQ ID NO: 1432686 - RNA, 19 nt, Artificial Sequence
  Description of Artificial Sequence: Synthetic oligonucleotide
guaggguagggacucaacu

SEQ ID NO: 1432687 - RNA, 19 nt, Artificial Sequence
  Description of Artificial Sequence: Synthetic oligonucleotide
agacucggguucuccaaca

SEQ ID NO: 1432688 - RNA, 19 nt, Artificial Sequence
  Description of Artificial Sequence: Synthetic oligonucleotide
ucuugaccaucacgcagau

SEQ ID NO: 1432689 - RNA, 19 nt, Artificial Sequence
  Description of Artificial Sequence: Synthetic oligonucleotide
gagagacucggguucucca

SEQ ID NO: 1432690 - RNA, 19 nt, Artificial Sequence
  Description of Artificial Sequence: Synthetic oligonucleotide
gugugugcaacuuguccuc

SEQ ID NO: 1432691 - RNA, 19 nt, Artificial Sequence
  Description of Artificial Sequence: Synthetic oligonucleotide
ggaagugggauuuguugca

SEQ ID NO: 1432692 - RNA, 19 nt, Artificial Sequence
  Description of Artificial Sequence: Synthetic oligonucleotide
uuagcugaguagggugccc

SEQ ID NO: 1432693 - RNA, 19 nt, Artificial Sequence
  Description of Artificial Sequence: Synthetic oligonucleotide
ugccaucaauaugggaagc

SEQ ID NO: 1432694 - RNA, 19 nt, Artificial Sequence
  Description of Artificial Sequence: Synthetic oligonucleotide
gugguguacucccauucuc

SEQ ID NO: 1432695 - RNA, 19 nt, Artificial Sequence
  Description of Artificial Sequence: Synthetic oligonucleotide
uguccuugcggugcaggug

SEQ ID NO: 1432696 - RNA, 19 nt, Artificial Sequence
  Description of Artificial Sequence: Synthetic oligonucleotide
aguucaggagccaugugua

SEQ ID NO: 1432697 - RNA, 19 nt, Artificial Sequence
  Description of Artificial Sequence: Synthetic oligonucleotide
cuaggcuggugauggggug

SEQ ID NO: 1432698 - RNA, 19 nt, Artificial Sequence
  Description of Artificial Sequence: Synthetic oligonucleotide
agaguucaggagccaugug

SEQ ID NO: 1432699 - RNA, 19 nt, Artificial Sequence
  Description of Artificial Sequence: Synthetic oligonucleotide
caucaauaugggaagcacu

SEQ ID NO: 1432700 - RNA, 19 nt, Artificial Sequence
  Description of Artificial Sequence: Synthetic oligonucleotide
gacucggguucuccaacac

SEQ ID NO: 1432701 - RNA, 19 nt, Artificial Sequence
  Description of Artificial Sequence: Synthetic oligonucleotide
ugggguaggguagggacuc

SEQ ID NO: 1432702 - RNA, 19 nt, Artificial Sequence
  Description of Artificial Sequence: Synthetic oligonucleotide
cauugccccaacucauguc

SEQ ID NO: 1432703 - RNA, 19 nt, Artificial Sequence
  Description of Artificial Sequence: Synthetic oligonucleotide
gccgagaacuggcugacug

SEQ ID NO: 1432704 - RNA, 19 nt, Artificial Sequence
  Description of Artificial Sequence: Synthetic oligonucleotide
gcgggcuuagcugaguagg

SEQ ID NO: 1432705 - RNA, 19 nt, Artificial Sequence
  Description of Artificial Sequence: Synthetic oligonucleotide
gccaaguugcaguccagcc

SEQ ID NO: 1432706 - RNA, 19 nt, Artificial Sequence
  Description of Artificial Sequence: Synthetic oligonucleotide
agcuguucugcagccugcg

SEQ ID NO: 1432707 - RNA, 19 nt, Artificial Sequence
  Description of Artificial Sequence: Synthetic oligonucleotide
cacgcagaugucuccuaac

SEQ ID NO: 1432708 - RNA, 19 nt, Artificial Sequence
  Description of Artificial Sequence: Synthetic oligonucleotide
ucacgacucuggccuaacu

SEQ ID NO: 1432709 - RNA, 19 nt, Artificial Sequence
  Description of Artificial Sequence: Synthetic oligonucleotide
ccggccaggauacaauggg

SEQ ID NO: 1432710 - RNA, 19 nt, Artificial Sequence
  Description of Artificial Sequence: Synthetic oligonucleotide
guacucacagagcagcagu

SEQ ID NO: 1432711 - RNA, 19 nt, Artificial Sequence
  Description of Artificial Sequence: Synthetic oligonucleotide
caacuucucaaaggcuggc

SEQ ID NO: 1432712 - RNA, 19 nt, Artificial Sequence
  Description of Artificial Sequence: Synthetic oligonucleotide
ccggaagugggauuuguug

SEQ ID NO: 1432713 - RNA, 19 nt, Artificial Sequence
  Description of Artificial Sequence: Synthetic oligonucleotide
uccucuucccugggaaagc

SEQ ID NO: 1432714 - RNA, 19 nt, Artificial Sequence
  Description of Artificial Sequence: Synthetic oligonucleotide
guacucccauucucuuggg

SEQ ID NO: 1432715 - RNA, 19 nt, Artificial Sequence
  Description of Artificial Sequence: Synthetic oligonucleotide
gguaacagaaguccacucu

SEQ ID NO: 1432716 - RNA, 19 nt, Artificial Sequence
  Description of Artificial Sequence: Synthetic oligonucleotide
gguggacccgcucacuccc

SEQ ID NO: 1432717 - RNA, 19 nt, Artificial Sequence
  Description of Artificial Sequence: Synthetic oligonucleotide
aaggcgguggggccucaga

SEQ ID NO: 1432718 - RNA, 19 nt, Artificial Sequence
  Description of Artificial Sequence: Synthetic oligonucleotide
uagccccgagaggugauag

SEQ ID NO: 1432719 - RNA, 19 nt, Artificial Sequence
  Description of Artificial Sequence: Synthetic oligonucleotide
ggauacaauggguguggug

SEQ ID NO: 1432720 - RNA, 19 nt, Artificial Sequence
  Description of Artificial Sequence: Synthetic oligonucleotide
acaaugggugugguggaga

SEQ ID NO: 1432721 - RNA, 19 nt, Artificial Sequence
  Description of Artificial Sequence: Synthetic oligonucleotide
auugagcaggagagacucg

SEQ ID NO: 1432722 - RNA, 19 nt, Artificial Sequence
  Description of Artificial Sequence: Synthetic oligonucleotide
agggcagaucagcaaacuu

SEQ ID NO: 1432723 - RNA, 19 nt, Artificial Sequence
  Description of Artificial Sequence: Synthetic oligonucleotide
cugcguuaggcuguccuug

SEQ ID NO: 1432724 - RNA, 19 nt, Artificial Sequence
  Description of Artificial Sequence: Synthetic oligonucleotide
cacagggcagaucagcaaa

SEQ ID NO: 1432725 - RNA, 19 nt, Artificial Sequence
  Description of Artificial Sequence: Synthetic oligonucleotide
gguugguccgcugggaagc

SEQ ID NO: 1432726 - RNA, 19 nt, Artificial Sequence
  Description of Artificial Sequence: Synthetic oligonucleotide
uauuaccuuccggccagga

SEQ ID NO: 1432727 - RNA, 19 nt, Artificial Sequence
  Description of Artificial Sequence: Synthetic oligonucleotide
ggaauucgaaucuuauccu

SEQ ID NO: 1432728 - RNA, 19 nt, Artificial Sequence
  Description of Artificial Sequence: Synthetic oligonucleotide
aggucugagcaaagaguuc

SEQ ID NO: 1432729 - RNA, 19 nt, Artificial Sequence
  Description of Artificial Sequence: Synthetic oligonucleotide
ccuaaccauguccuguagc

SEQ ID NO: 1432730 - RNA, 19 nt, Artificial Sequence
  Description of Artificial Sequence: Synthetic oligonucleotide
agccauguguagccccgag

SEQ ID NO: 1432731 - RNA, 19 nt, Artificial Sequence
  Description of Artificial Sequence: Synthetic oligonucleotide
ucucguccaaaggcugugc

SEQ ID NO: 1432732 - RNA, 19 nt, Artificial Sequence
  Description of Artificial Sequence: Synthetic oligonucleotide
cagcuccacaaucucccag

SEQ ID NO: 1432733 - RNA, 19 nt, Artificial Sequence
  Description of Artificial Sequence: Synthetic oligonucleotide
ccucuugaccaucacgcag

SEQ ID NO: 1432734 - RNA, 19 nt, Artificial Sequence
  Description of Artificial Sequence: Synthetic oligonucleotide
cugaggugggcaccacggc

SEQ ID NO: 1432735 - RNA, 19 nt, Artificial Sequence
  Description of Artificial Sequence: Synthetic oligonucleotide
ccugcaguacucacagagc

SEQ ID NO: 1432736 - RNA, 19 nt, Artificial Sequence
  Description of Artificial Sequence: Synthetic oligonucleotide
gcuguuucgaggaauucga

SEQ ID NO: 1432737 - RNA, 19 nt, Artificial Sequence
  Description of Artificial Sequence: Synthetic oligonucleotide
gcccucauuagcaggaagc

SEQ ID NO: 1432738 - RNA, 19 nt, Artificial Sequence
  Description of Artificial Sequence: Synthetic oligonucleotide
caggcucuguugguaacag

SEQ ID NO: 1432739 - RNA, 19 nt, Artificial Sequence
  Description of Artificial Sequence: Synthetic oligonucleotide
cuggcgaguggcauaagua

SEQ ID NO: 1432740 - RNA, 19 nt, Artificial Sequence
  Description of Artificial Sequence: Synthetic oligonucleotide
aucucguccaaaggcugug

SEQ ID NO: 1432741 - RNA, 19 nt, Artificial Sequence
  Description of Artificial Sequence: Synthetic oligonucleotide
gcgaguggcauaaguacag

SEQ ID NO: 1432742 - RNA, 19 nt, Artificial Sequence
  Description of Artificial Sequence: Synthetic oligonucleotide
cugcgccugcguuaggcug

SEQ ID NO: 1432743 - RNA, 19 nt, Artificial Sequence
  Description of Artificial Sequence: Synthetic oligonucleotide
caggucugagcaaagaguu

SEQ ID NO: 1432744 - RNA, 19 nt, Artificial Sequence
  Description of Artificial Sequence: Synthetic oligonucleotide
ggagccauguguagccccg

SEQ ID NO: 1432745 - RNA, 19 nt, Artificial Sequence
  Description of Artificial Sequence: Synthetic oligonucleotide
ggccaggauacaaugggug

SEQ ID NO: 1432746 - RNA, 19 nt, Artificial Sequence
  Description of Artificial Sequence: Synthetic oligonucleotide
uucgaggaauucgaaucuu

SEQ ID NO: 1432747 - RNA, 19 nt, Artificial Sequence
  Description of Artificial Sequence: Synthetic oligonucleotide
gcacgaauacauccucagc

SEQ ID NO: 1432748 - RNA, 19 nt, Artificial Sequence
  Description of Artificial Sequence: Synthetic oligonucleotide
auguccacaugcacgaaua

SEQ ID NO: 1432749 - RNA, 19 nt, Artificial Sequence
  Description of Artificial Sequence: Synthetic oligonucleotide
gcuguaguucagugagugc

SEQ ID NO: 1432750 - RNA, 19 nt, Artificial Sequence
  Description of Artificial Sequence: Synthetic oligonucleotide
gcgguggggccucagagug

SEQ ID NO: 1432751 - RNA, 19 nt, Artificial Sequence
  Description of Artificial Sequence: Synthetic oligonucleotide
agggugcccuguuccugcg

SEQ ID NO: 1432752 - RNA, 19 nt, Artificial Sequence
  Description of Artificial Sequence: Synthetic oligonucleotide
ccgagaacuggcugacugg

SEQ ID NO: 1432753 - RNA, 19 nt, Artificial Sequence
  Description of Artificial Sequence: Synthetic oligonucleotide
gccuaacuccaguuccagg

SEQ ID NO: 1432754 - RNA, 19 nt, Artificial Sequence
  Description of Artificial Sequence: Synthetic oligonucleotide
augcacgaauacauccuca

SEQ ID NO: 1432755 - RNA, 19 nt, Artificial Sequence
  Description of Artificial Sequence: Synthetic oligonucleotide
agccugcggaauuugucuu

SEQ ID NO: 1432756 - RNA, 19 nt, Artificial Sequence
  Description of Artificial Sequence: Synthetic oligonucleotide
ucuucacgacucuggccua

SEQ ID NO: 1432757 - RNA, 19 nt, Artificial Sequence
  Description of Artificial Sequence: Synthetic oligonucleotide
cccuauuuccagcucccgc

SEQ ID NO: 1432758 - RNA, 19 nt, Artificial Sequence
  Description of Artificial Sequence: Synthetic oligonucleotide
gaguggcauaaguacaguu

SEQ ID NO: 1432759 - RNA, 19 nt, Artificial Sequence
  Description of Artificial Sequence: Synthetic oligonucleotide
gggagaaguguagcuguag

SEQ ID NO: 1432760 - RNA, 19 nt, Artificial Sequence
  Description of Artificial Sequence: Synthetic oligonucleotide
ugcccuguuccugcgccug

SEQ ID NO: 1432761 - RNA, 19 nt, Artificial Sequence
  Description of Artificial Sequence: Synthetic oligonucleotide
cuauuaccuuccggccagg

SEQ ID NO: 1432762 - RNA, 19 nt, Artificial Sequence
  Description of Artificial Sequence: Synthetic oligonucleotide
aggauacaauggguguggu

SEQ ID NO: 1432763 - RNA, 19 nt, Artificial Sequence
  Description of Artificial Sequence: Synthetic oligonucleotide
uucacgacucuggccuaac

SEQ ID NO: 1432764 - RNA, 19 nt, Artificial Sequence
  Description of Artificial Sequence: Synthetic oligonucleotide
ccaggauacaaugggugug

SEQ ID NO: 1432765 - RNA, 19 nt, Artificial Sequence
  Description of Artificial Sequence: Synthetic oligonucleotide
gcgcucauugagcuccucc

SEQ ID NO: 1432766 - RNA, 19 nt, Artificial Sequence
  Description of Artificial Sequence: Synthetic oligonucleotide
ccgguagcgcucauugagc

SEQ ID NO: 1432767 - RNA, 19 nt, Artificial Sequence
  Description of Artificial Sequence: Synthetic oligonucleotide
gguguuccuggcauccagc

SEQ ID NO: 1432768 - RNA, 19 nt, Artificial Sequence
  Description of Artificial Sequence: Synthetic oligonucleotide
ccaucacgcagaugucucc

SEQ ID NO: 1432769 - RNA, 19 nt, Artificial Sequence
  Description of Artificial Sequence: Synthetic oligonucleotide
aucacgcagaugucuccua

SEQ ID NO: 1432770 - RNA, 19 nt, Artificial Sequence
  Description of Artificial Sequence: Synthetic oligonucleotide
aggcugugcgcugggccac

SEQ ID NO: 1432771 - RNA, 19 nt, Artificial Sequence
  Description of Artificial Sequence: Synthetic oligonucleotide
ugcuaggcacugggcugcg

SEQ ID NO: 1432772 - RNA, 19 nt, Artificial Sequence
  Description of Artificial Sequence: Synthetic oligonucleotide
gaagcaggcucuggcgcuc

SEQ ID NO: 1432773 - RNA, 19 nt, Artificial Sequence
  Description of Artificial Sequence: Synthetic oligonucleotide
cuguuucgaggaauucgaa

SEQ ID NO: 1432774 - RNA, 19 nt, Artificial Sequence
  Description of Artificial Sequence: Synthetic oligonucleotide
cacagagcagcagucccca

SEQ ID NO: 1432775 - RNA, 19 nt, Artificial Sequence
  Description of Artificial Sequence: Synthetic oligonucleotide
ccucauuagcaggaagcag

SEQ ID NO: 1432776 - RNA, 19 nt, Artificial Sequence
  Description of Artificial Sequence: Synthetic oligonucleotide
uugcggugcagguggugua

SEQ ID NO: 1432777 - RNA, 19 nt, Artificial Sequence
  Description of Artificial Sequence: Synthetic oligonucleotide
ggcagaucagcaaacuugu

SEQ ID NO: 1432778 - RNA, 19 nt, Artificial Sequence
  Description of Artificial Sequence: Synthetic oligonucleotide
cacccgggcgaugacugag

SEQ ID NO: 1432779 - RNA, 19 nt, Artificial Sequence
  Description of Artificial Sequence: Synthetic oligonucleotide
ggcgaguggcauaaguaca

SEQ ID NO: 1432780 - RNA, 19 nt, Artificial Sequence
  Description of Artificial Sequence: Synthetic oligonucleotide
ggcgggcuuagcugaguag

SEQ ID NO: 1432781 - RNA, 19 nt, Artificial Sequence
  Description of Artificial Sequence: Synthetic oligonucleotide
gcugcgguggacccgcuca

SEQ ID NO: 1432782 - RNA, 19 nt, Artificial Sequence
  Description of Artificial Sequence: Synthetic oligonucleotide
aggagagacucggguucuc

SEQ ID NO: 1432783 - RNA, 19 nt, Artificial Sequence
  Description of Artificial Sequence: Synthetic oligonucleotide
ggacuaggcuggugauggg

SEQ ID NO: 1432784 - RNA, 19 nt, Artificial Sequence
  Description of Artificial Sequence: Synthetic oligonucleotide
acgcacgcugccagcuggc

SEQ ID NO: 1432785 - RNA, 19 nt, Artificial Sequence
  Description of Artificial Sequence: Synthetic oligonucleotide
ccuauuuccagcucccgcu

SEQ ID NO: 1432786 - RNA, 19 nt, Artificial Sequence
  Description of Artificial Sequence: Synthetic oligonucleotide
cucuucccugggaaagcca

SEQ ID NO: 1432787 - RNA, 19 nt, Artificial Sequence
  Description of Artificial Sequence: Synthetic oligonucleotide
aggcgggcuuagcugagua

SEQ ID NO: 1432788 - RNA, 19 nt, Artificial Sequence
  Description of Artificial Sequence: Synthetic oligonucleotide
acccgggcgaugacugagg

SEQ ID NO: 1432789 - RNA, 19 nt, Artificial Sequence
  Description of Artificial Sequence: Synthetic oligonucleotide
cuaggcacugggcugcggu

SEQ ID NO: 1432790 - RNA, 19 nt, Artificial Sequence
  Description of Artificial Sequence: Synthetic oligonucleotide
gcacuugagcagcugcaca

SEQ ID NO: 1432791 - RNA, 19 nt, Artificial Sequence
  Description of Artificial Sequence: Synthetic oligonucleotide
guguagccccgagagguga

SEQ ID NO: 1432792 - RNA, 19 nt, Artificial Sequence
  Description of Artificial Sequence: Synthetic oligonucleotide
ggccuaacuccaguuccag

SEQ ID NO: 1432793 - RNA, 19 nt, Artificial Sequence
  Description of Artificial Sequence: Synthetic oligonucleotide
gcgguccacaaacgcacgc

SEQ ID NO: 1432794 - RNA, 19 nt, Artificial Sequence
  Description of Artificial Sequence: Synthetic oligonucleotide
aggcuguccuugcggugca

SEQ ID NO: 1432795 - RNA, 19 nt, Artificial Sequence
  Description of Artificial Sequence: Synthetic oligonucleotide
cugcgguggacccgcucac

SEQ ID NO: 1432796 - RNA, 19 nt, Artificial Sequence
  Description of Artificial Sequence: Synthetic oligonucleotide
gguaggguagggacucaac

SEQ ID NO: 1432797 - RNA, 19 nt, Artificial Sequence
  Description of Artificial Sequence: Synthetic oligonucleotide
cccauugccccaacucaug

SEQ ID NO: 1432798 - RNA, 19 nt, Artificial Sequence
  Description of Artificial Sequence: Synthetic oligonucleotide
gccaggauacaaugggugu

SEQ ID NO: 1432799 - RNA, 19 nt, Artificial Sequence
  Description of Artificial Sequence: Synthetic oligonucleotide
acacccgggcgaugacuga

SEQ ID NO: 1432800 - RNA, 19 nt, Artificial Sequence
  Description of Artificial Sequence: Synthetic oligonucleotide
acggccccugcggccaggc

SEQ ID NO: 1432801 - RNA, 19 nt, Artificial Sequence
  Description of Artificial Sequence: Synthetic oligonucleotide
cgggcuuagcugaguaggg

SEQ ID NO: 1432802 - RNA, 19 nt, Artificial Sequence
  Description of Artificial Sequence: Synthetic oligonucleotide
caguccagccgguagcgcu

SEQ ID NO: 1432803 - RNA, 19 nt, Artificial Sequence
  Description of Artificial Sequence: Synthetic oligonucleotide
ccaaaggcugugcgcuggg

SEQ ID NO: 1432804 - RNA, 19 nt, Artificial Sequence
  Description of Artificial Sequence: Synthetic oligonucleotide
cugggcugcgguggacccg

SEQ ID NO: 1432805 - RNA, 19 nt, Artificial Sequence
  Description of Artificial Sequence: Synthetic oligonucleotide
cuugcggugcagguggugu

SEQ ID NO: 1432806 - RNA, 19 nt, Artificial Sequence
  Description of Artificial Sequence: Synthetic oligonucleotide
agcaaggcaggcgggcuua

SEQ ID NO: 1432807 - RNA, 19 nt, Artificial Sequence
  Description of Artificial Sequence: Synthetic oligonucleotide
gcgaugacugaggugggca

SEQ ID NO: 1432808 - RNA, 19 nt, Artificial Sequence
  Description of Artificial Sequence: Synthetic oligonucleotide
ugcgguggacccgcucacu

SEQ ID NO: 1432809 - RNA, 19 nt, Artificial Sequence
  Description of Artificial Sequence: Synthetic oligonucleotide
gccccgagaggugauagca

SEQ ID NO: 1432810 - RNA, 19 nt, Artificial Sequence
  Description of Artificial Sequence: Synthetic oligonucleotide
cuuccggccaggauacaau

SEQ ID NO: 1432811 - RNA, 19 nt, Artificial Sequence
  Description of Artificial Sequence: Synthetic oligonucleotide
gguagggacucaacuucuc

SEQ ID NO: 1432812 - RNA, 19 nt, Artificial Sequence
  Description of Artificial Sequence: Synthetic oligonucleotide
ccccgagaggugauagcag

SEQ ID NO: 1432813 - RNA, 19 nt, Artificial Sequence
  Description of Artificial Sequence: Synthetic oligonucleotide
cgaaucuuauccucagaaa

SEQ ID NO: 1432814 - RNA, 19 nt, Artificial Sequence
  Description of Artificial Sequence: Synthetic oligonucleotide
ggaagcaggcucuggcgcu

SEQ ID NO: 1432815 - RNA, 19 nt, Artificial Sequence
  Description of Artificial Sequence: Synthetic oligonucleotide
ggggugcgguccacaaacg

SEQ ID NO: 1432816 - RNA, 19 nt, Artificial Sequence
  Description of Artificial Sequence: Synthetic oligonucleotide
agcgcucauugagcuccuc

SEQ ID NO: 1432817 - RNA, 19 nt, Artificial Sequence
  Description of Artificial Sequence: Synthetic oligonucleotide
cgaugacugaggugggcac

SEQ ID NO: 1432818 - RNA, 19 nt, Artificial Sequence
  Description of Artificial Sequence: Synthetic oligonucleotide
cggguucuccaacacccgg

SEQ ID NO: 1432819 - RNA, 19 nt, Artificial Sequence
  Description of Artificial Sequence: Synthetic oligonucleotide
caaacgcacgcugccagcu

SEQ ID NO: 1432820 - RNA, 19 nt, Artificial Sequence
  Description of Artificial Sequence: Synthetic oligonucleotide
ggcgaugacugaggugggc

SEQ ID NO: 1432821 - RNA, 19 nt, Artificial Sequence
  Description of Artificial Sequence: Synthetic oligonucleotide
caucacgcagaugucuccu

SEQ ID NO: 1432822 - RNA, 19 nt, Artificial Sequence
  Description of Artificial Sequence: Synthetic oligonucleotide
cccucauuagcaggaagca

SEQ ID NO: 1432823 - RNA, 19 nt, Artificial Sequence
  Description of Artificial Sequence: Synthetic oligonucleotide
ccgagaggugauagcagca

SEQ ID NO: 1432824 - RNA, 19 nt, Artificial Sequence
  Description of Artificial Sequence: Synthetic oligonucleotide
cugcggaauuugucuuuaa

SEQ ID NO: 1432825 - RNA, 19 nt, Artificial Sequence
  Description of Artificial Sequence: Synthetic oligonucleotide
gcgguggacccgcucacuc

SEQ ID NO: 1432826 - RNA, 19 nt, Artificial Sequence
  Description of Artificial Sequence: Synthetic oligonucleotide
cuucacgacucuggccuaa

SEQ ID NO: 1432827 - RNA, 19 nt, Artificial Sequence
  Description of Artificial Sequence: Synthetic oligonucleotide
caggcagguucagcacuuc

SEQ ID NO: 1432828 - RNA, 19 nt, Artificial Sequence
  Description of Artificial Sequence: Synthetic oligonucleotide
guggacccgcucacucccc

SEQ ID NO: 1432829 - RNA, 19 nt, Artificial Sequence
  Description of Artificial Sequence: Synthetic oligonucleotide
gggcugaauugagcaggag

SEQ ID NO: 1432830 - RNA, 19 nt, Artificial Sequence
  Description of Artificial Sequence: Synthetic oligonucleotide
caggggcggccgagaacug

SEQ ID NO: 1432831 - RNA, 19 nt, Artificial Sequence
  Description of Artificial Sequence: Synthetic oligonucleotide
gcacgcugccagcuggcca

SEQ ID NO: 1432832 - RNA, 19 nt, Artificial Sequence
  Description of Artificial Sequence: Synthetic oligonucleotide
gccugcguuaggcuguccu

SEQ ID NO: 1432833 - RNA, 19 nt, Artificial Sequence
  Description of Artificial Sequence: Synthetic oligonucleotide
ggguagggacucaacuucu

SEQ ID NO: 1432834 - RNA, 19 nt, Artificial Sequence
  Description of Artificial Sequence: Synthetic oligonucleotide
cugaguagggugcccuguu

SEQ ID NO: 1432835 - RNA, 19 nt, Artificial Sequence
  Description of Artificial Sequence: Synthetic oligonucleotide
gggcuguuucgaggaauuc

SEQ ID NO: 1432836 - RNA, 19 nt, Artificial Sequence
  Description of Artificial Sequence: Synthetic oligonucleotide
ccgggcgaugacugaggug

SEQ ID NO: 1432837 - RNA, 19 nt, Artificial Sequence
  Description of Artificial Sequence: Synthetic oligonucleotide
guagccccgagaggugaua

SEQ ID NO: 1432838 - RNA, 19 nt, Artificial Sequence
  Description of Artificial Sequence: Synthetic oligonucleotide
gcuaggcacugggcugcgg

SEQ ID NO: 1432839 - RNA, 19 nt, Artificial Sequence
  Description of Artificial Sequence: Synthetic oligonucleotide
caacacccgggcgaugacu

SEQ ID NO: 1432840 - RNA, 19 nt, Artificial Sequence
  Description of Artificial Sequence: Synthetic oligonucleotide
caggagagacucggguucu

SEQ ID NO: 1432841 - RNA, 19 nt, Artificial Sequence
  Description of Artificial Sequence: Synthetic oligonucleotide
ccaacacccgggcgaugac

SEQ ID NO: 1432842 - RNA, 19 nt, Artificial Sequence
  Description of Artificial Sequence: Synthetic oligonucleotide
ggccuggcgaguggcauaa

SEQ ID NO: 1432843 - RNA, 19 nt, Artificial Sequence
  Description of Artificial Sequence: Synthetic oligonucleotide
gugcuuccggaagugggau

SEQ ID NO: 1432844 - RNA, 19 nt, Artificial Sequence
  Description of Artificial Sequence: Synthetic oligonucleotide
gguccgcugggaagcugug

SEQ ID NO: 1432845 - RNA, 19 nt, Artificial Sequence
  Description of Artificial Sequence: Synthetic oligonucleotide
cgaggaauucgaaucuuau

SEQ ID NO: 1432846 - RNA, 19 nt, Artificial Sequence
  Description of Artificial Sequence: Synthetic oligonucleotide
guugguccgcugggaagcu

SEQ ID NO: 1432847 - RNA, 19 nt, Artificial Sequence
  Description of Artificial Sequence: Synthetic oligonucleotide
gggaagcacuugguccuuc

SEQ ID NO: 1432848 - RNA, 19 nt, Artificial Sequence
  Description of Artificial Sequence: Synthetic oligonucleotide
ggguaggguagggacucaa

SEQ ID NO: 1432849 - RNA, 19 nt, Artificial Sequence
  Description of Artificial Sequence: Synthetic oligonucleotide
ccauugccccaacucaugu

SEQ ID NO: 1432850 - RNA, 19 nt, Artificial Sequence
  Description of Artificial Sequence: Synthetic oligonucleotide
gcaggugguguacucccau

SEQ ID NO: 1432851 - RNA, 19 nt, Artificial Sequence
  Description of Artificial Sequence: Synthetic oligonucleotide
ccacaaacgcacgcugcca

SEQ ID NO: 1432852 - RNA, 19 nt, Artificial Sequence
  Description of Artificial Sequence: Synthetic oligonucleotide
caggugguguacucccauu

SEQ ID NO: 1432853 - RNA, 19 nt, Artificial Sequence
  Description of Artificial Sequence: Synthetic oligonucleotide
gggcuuagcugaguagggu

SEQ ID NO: 1432854 - RNA, 19 nt, Artificial Sequence
  Description of Artificial Sequence: Synthetic oligonucleotide
ggggaguggccaggccuug

SEQ ID NO: 1432855 - RNA, 19 nt, Artificial Sequence
  Description of Artificial Sequence: Synthetic oligonucleotide
ggggagaaguguagcugua

SEQ ID NO: 1432856 - RNA, 19 nt, Artificial Sequence
  Description of Artificial Sequence: Synthetic oligonucleotide
ccuuccggccaggauacaa

SEQ ID NO: 1432857 - RNA, 19 nt, Artificial Sequence
  Description of Artificial Sequence: Synthetic oligonucleotide
cacggccccugcggccagg

SEQ ID NO: 1432858 - RNA, 19 nt, Artificial Sequence
  Description of Artificial Sequence: Synthetic oligonucleotide
accuuccggccaggauaca

SEQ ID NO: 1432859 - RNA, 19 nt, Artificial Sequence
  Description of Artificial Sequence: Synthetic oligonucleotide
gggaaggcgguggggccuc

SEQ ID NO: 1432860 - RNA, 19 nt, Artificial Sequence
  Description of Artificial Sequence: Synthetic oligonucleotide
ggcugcgguggacccgcuc

SEQ ID NO: 1432861 - RNA, 19 nt, Artificial Sequence
  Description of Artificial Sequence: Synthetic oligonucleotide
guccgcugggaagcugugu

SEQ ID NO: 1432862 - RNA, 19 nt, Artificial Sequence
  Description of Artificial Sequence: Synthetic oligonucleotide
ccccauugccccaacucau

SEQ ID NO: 1432863 - RNA, 19 nt, Artificial Sequence
  Description of Artificial Sequence: Synthetic oligonucleotide
gccugcggaauuugucuuu

SEQ ID NO: 1432864 - RNA, 19 nt, Artificial Sequence
  Description of Artificial Sequence: Synthetic oligonucleotide
gcggggugcgguccacaaa

SEQ ID NO: 1432865 - RNA, 19 nt, Artificial Sequence
  Description of Artificial Sequence: Synthetic oligonucleotide
gggguaggguagggacuca

SEQ ID NO: 1432866 - RNA, 19 nt, Artificial Sequence
  Description of Artificial Sequence: Synthetic oligonucleotide
gccuggcgaguggcauaag

SEQ ID NO: 1432867 - RNA, 19 nt, Artificial Sequence
  Description of Artificial Sequence: Synthetic oligonucleotide
gccaggccuugccaucaau

SEQ ID NO: 1432868 - RNA, 19 nt, Artificial Sequence
  Description of Artificial Sequence: Synthetic oligonucleotide
cccgggcgaugacugaggu

SEQ ID NO: 1432869 - RNA, 19 nt, Artificial Sequence
  Description of Artificial Sequence: Synthetic oligonucleotide
gcgccugcguuaggcuguc

SEQ ID NO: 1432870 - RNA, 19 nt, Artificial Sequence
  Description of Artificial Sequence: Synthetic oligonucleotide
ggaaggcgguggggccuca

SEQ ID NO: 1432871 - RNA, 19 nt, Artificial Sequence
  Description of Artificial Sequence: Synthetic oligonucleotide
gcggugcaggugguguacu

SEQ ID NO: 1432872 - RNA, 19 nt, Artificial Sequence
  Description of Artificial Sequence: Synthetic oligonucleotide
gggcggggugcgguccaca

SEQ ID NO: 1432873 - RNA, 19 nt, Artificial Sequence
  Description of Artificial Sequence: Synthetic oligonucleotide
ggggcggggugcgguccac

SEQ ID NO: 1432874 - RNA, 19 nt, Artificial Sequence
  Description of Artificial Sequence: Synthetic oligonucleotide
cgaguggcauaaguacagu

SEQ ID NO: 1432875 - RNA, 19 nt, Artificial Sequence
  Description of Artificial Sequence: Synthetic oligonucleotide
ggccgagaacuggcugacu

SEQ ID NO: 1432876 - RNA, 19 nt, Artificial Sequence
  Description of Artificial Sequence: Synthetic oligonucleotide
ccaggcagucuugcccuau

SEQ ID NO: 1432877 - RNA, 19 nt, Artificial Sequence
  Description of Artificial Sequence: Synthetic oligonucleotide
cccugcggccaggcuggaa

SEQ ID NO: 1432878 - RNA, 19 nt, Artificial Sequence
  Description of Artificial Sequence: Synthetic oligonucleotide
ccccugcggccaggcugga

SEQ ID NO: 1432879 - RNA, 19 nt, Artificial Sequence
  Description of Artificial Sequence: Synthetic oligonucleotide
aacauaucagaucaaauac

SEQ ID NO: 1432880 - RNA, 19 nt, Artificial Sequence
  Description of Artificial Sequence: Synthetic oligonucleotide
uaaaacauggaccagaccc

SEQ ID NO: 1432881 - RNA, 19 nt, Artificial Sequence
  Description of Artificial Sequence: Synthetic oligonucleotide
aaaaccaagauuuaccuau

SEQ ID NO: 1432882 - RNA, 19 nt, Artificial Sequence
  Description of Artificial Sequence: Synthetic oligonucleotide
agugcuuugauucuaaaug

SEQ ID NO: 1432883 - RNA, 19 nt, Artificial Sequence
  Description of Artificial Sequence: Synthetic oligonucleotide
aacuuucacacucccaagc

SEQ ID NO: 1432884 - RNA, 19 nt, Artificial Sequence
  Description of Artificial Sequence: Synthetic oligonucleotide
aauggagccuccuuuuggc

SEQ ID NO: 1432885 - RNA, 19 nt, Artificial Sequence
  Description of Artificial Sequence: Synthetic oligonucleotide
uuugauaugaacuggaauu

SEQ ID NO: 1432886 - RNA, 19 nt, Artificial Sequence
  Description of Artificial Sequence: Synthetic oligonucleotide
uaucagaucaaauacgcca

SEQ ID NO: 1432887 - RNA, 19 nt, Artificial Sequence
  Description of Artificial Sequence: Synthetic oligonucleotide
uaucuugacacucaugaug

SEQ ID NO: 1432888 - RNA, 19 nt, Artificial Sequence
  Description of Artificial Sequence: Synthetic oligonucleotide
cauaucagaucaaauacgc

SEQ ID NO: 1432889 - RNA, 19 nt, Artificial Sequence
  Description of Artificial Sequence: Synthetic oligonucleotide
aauaccuaaggccuggggu

SEQ ID NO: 1432890 - RNA, 19 nt, Artificial Sequence
  Description of Artificial Sequence: Synthetic oligonucleotide
gacagaaugaaacuuccag

SEQ ID NO: 1432891 - RNA, 19 nt, Artificial Sequence
  Description of Artificial Sequence: Synthetic oligonucleotide
uuacaguuguggcauacgg

SEQ ID NO: 1432892 - RNA, 19 nt, Artificial Sequence
  Description of Artificial Sequence: Synthetic oligonucleotide
aaguacucucuaugcaugc

SEQ ID NO: 1432893 - RNA, 19 nt, Artificial Sequence
  Description of Artificial Sequence: Synthetic oligonucleotide
uauagcacccucaaaguac

SEQ ID NO: 1432894 - RNA, 19 nt, Artificial Sequence
  Description of Artificial Sequence: Synthetic oligonucleotide
gaucaaauacgccacuugc

SEQ ID NO: 1432895 - RNA, 19 nt, Artificial Sequence
  Description of Artificial Sequence: Synthetic oligonucleotide
agugucaaaggucauaagu

SEQ ID NO: 1432896 - RNA, 19 nt, Artificial Sequence
  Description of Artificial Sequence: Synthetic oligonucleotide
ucuugcuuaagacacuucu

SEQ ID NO: 1432897 - RNA, 19 nt, Artificial Sequence
  Description of Artificial Sequence: Synthetic oligonucleotide
aaaggucauaaguaucuug

SEQ ID NO: 1432898 - RNA, 19 nt, Artificial Sequence
  Description of Artificial Sequence: Synthetic oligonucleotide
gaguguacaggcuaccagg

SEQ ID NO: 1432899 - RNA, 19 nt, Artificial Sequence
  Description of Artificial Sequence: Synthetic oligonucleotide
uggaauuauugacaaagcu

SEQ ID NO: 1432900 - RNA, 19 nt, Artificial Sequence
  Description of Artificial Sequence: Synthetic oligonucleotide
caugcuuugauaugaacug

SEQ ID NO: 1432901 - RNA, 19 nt, Artificial Sequence
  Description of Artificial Sequence: Synthetic oligonucleotide
uggacccugaccucgaugg

SEQ ID NO: 1432902 - RNA, 19 nt, Artificial Sequence
  Description of Artificial Sequence: Synthetic oligonucleotide
aauccugaggaugagacgu

SEQ ID NO: 1432903 - RNA, 19 nt, Artificial Sequence
  Description of Artificial Sequence: Synthetic oligonucleotide
ugaaugcuaaacagaaccc

SEQ ID NO: 1432904 - RNA, 19 nt, Artificial Sequence
  Description of Artificial Sequence: Synthetic oligonucleotide
agaaugaaacuuccagugg

SEQ ID NO: 1432905 - RNA, 19 nt, Artificial Sequence
  Description of Artificial Sequence: Synthetic oligonucleotide
auauccugaucauaaauga

SEQ ID NO: 1432906 - RNA, 19 nt, Artificial Sequence
  Description of Artificial Sequence: Synthetic oligonucleotide
agugcuccgaguuaaaaca

SEQ ID NO: 1432907 - RNA, 19 nt, Artificial Sequence
  Description of Artificial Sequence: Synthetic oligonucleotide
aggguugacagaaugaaac

SEQ ID NO: 1432908 - RNA, 19 nt, Artificial Sequence
  Description of Artificial Sequence: Synthetic oligonucleotide
caaaguauccucugucugg

SEQ ID NO: 1432909 - RNA, 19 nt, Artificial Sequence
  Description of Artificial Sequence: Synthetic oligonucleotide
agcaaggccaaugaagacc

SEQ ID NO: 1432910 - RNA, 19 nt, Artificial Sequence
  Description of Artificial Sequence: Synthetic oligonucleotide
uaaaucucuaaaucuaaau

SEQ ID NO: 1432911 - RNA, 19 nt, Artificial Sequence
  Description of Artificial Sequence: Synthetic oligonucleotide
acaguuguggcauacggca

SEQ ID NO: 1432912 - RNA, 19 nt, Artificial Sequence
  Description of Artificial Sequence: Synthetic oligonucleotide
augucaacauaauuggucu

SEQ ID NO: 1432913 - RNA, 19 nt, Artificial Sequence
  Description of Artificial Sequence: Synthetic oligonucleotide
uaaaauaccuaaggccugg

SEQ ID NO: 1432914 - RNA, 19 nt, Artificial Sequence
  Description of Artificial Sequence: Synthetic oligonucleotide
aauuccccgagcaaagagg

SEQ ID NO: 1432915 - RNA, 19 nt, Artificial Sequence
  Description of Artificial Sequence: Synthetic oligonucleotide
uccaugauagugccaaggc

SEQ ID NO: 1432916 - RNA, 19 nt, Artificial Sequence
  Description of Artificial Sequence: Synthetic oligonucleotide
agauuguuucacaggaugc

SEQ ID NO: 1432917 - RNA, 19 nt, Artificial Sequence
  Description of Artificial Sequence: Synthetic oligonucleotide
uucuccuaaaauaccuaag

SEQ ID NO: 1432918 - RNA, 19 nt, Artificial Sequence
  Description of Artificial Sequence: Synthetic oligonucleotide
ucaaauacgccacuugcua

SEQ ID NO: 1432919 - RNA, 19 nt, Artificial Sequence
  Description of Artificial Sequence: Synthetic oligonucleotide
ucuaaauggagccuccuuu

SEQ ID NO: 1432920 - RNA, 19 nt, Artificial Sequence
  Description of Artificial Sequence: Synthetic oligonucleotide
acauaucagaucaaauacg

SEQ ID NO: 1432921 - RNA, 19 nt, Artificial Sequence
  Description of Artificial Sequence: Synthetic oligonucleotide
uggagaauccugaggauga

SEQ ID NO: 1432922 - RNA, 19 nt, Artificial Sequence
  Description of Artificial Sequence: Synthetic oligonucleotide
aguauccucugucuggauc

SEQ ID NO: 1432923 - RNA, 19 nt, Artificial Sequence
  Description of Artificial Sequence: Synthetic oligonucleotide
gaugcuccaugauagugcc

SEQ ID NO: 1432924 - RNA, 19 nt, Artificial Sequence
  Description of Artificial Sequence: Synthetic oligonucleotide
cugcuaaacccuaucaaag

SEQ ID NO: 1432925 - RNA, 19 nt, Artificial Sequence
  Description of Artificial Sequence: Synthetic oligonucleotide
gaacccaccaucccacugg

SEQ ID NO: 1432926 - RNA, 19 nt, Artificial Sequence
  Description of Artificial Sequence: Synthetic oligonucleotide
uaaacccuaucaaaguauc

SEQ ID NO: 1432927 - RNA, 19 nt, Artificial Sequence
  Description of Artificial Sequence: Synthetic oligonucleotide
ugggacugaaugcuaaaca

SEQ ID NO: 1432928 - RNA, 19 nt, Artificial Sequence
  Description of Artificial Sequence: Synthetic oligonucleotide
auaauuggucuguagaauu

SEQ ID NO: 1432929 - RNA, 19 nt, Artificial Sequence
  Description of Artificial Sequence: Synthetic oligonucleotide
uuuuaucuggaugggacug

SEQ ID NO: 1432930 - RNA, 19 nt, Artificial Sequence
  Description of Artificial Sequence: Synthetic oligonucleotide
aaauacgccacuugcuaau

SEQ ID NO: 1432931 - RNA, 19 nt, Artificial Sequence
  Description of Artificial Sequence: Synthetic oligonucleotide
aucagaucaaauacgccac

SEQ ID NO: 1432932 - RNA, 19 nt, Artificial Sequence
  Description of Artificial Sequence: Synthetic oligonucleotide
aguuguggcauacggcagg

SEQ ID NO: 1432933 - RNA, 19 nt, Artificial Sequence
  Description of Artificial Sequence: Synthetic oligonucleotide
auccuugugggagagugcc

SEQ ID NO: 1432934 - RNA, 19 nt, Artificial Sequence
  Description of Artificial Sequence: Synthetic oligonucleotide
gaugagacgucaccuucgg

SEQ ID NO: 1432935 - RNA, 19 nt, Artificial Sequence
  Description of Artificial Sequence: Synthetic oligonucleotide
cucuaugcaugccaguugc

SEQ ID NO: 1432936 - RNA, 19 nt, Artificial Sequence
  Description of Artificial Sequence: Synthetic oligonucleotide
auggaauuauugacaaagc

SEQ ID NO: 1432937 - RNA, 19 nt, Artificial Sequence
  Description of Artificial Sequence: Synthetic oligonucleotide
cuugcagugauguggcccc

SEQ ID NO: 1432938 - RNA, 19 nt, Artificial Sequence
  Description of Artificial Sequence: Synthetic oligonucleotide
ugacaaagcugucuuuucu

SEQ ID NO: 1432939 - RNA, 19 nt, Artificial Sequence
  Description of Artificial Sequence: Synthetic oligonucleotide
aguuaaaacauggaccaga

SEQ ID NO: 1432940 - RNA, 19 nt, Artificial Sequence
  Description of Artificial Sequence: Synthetic oligonucleotide
uccacaugcuuugauauga

SEQ ID NO: 1432941 - RNA, 19 nt, Artificial Sequence
  Description of Artificial Sequence: Synthetic oligonucleotide
uacaguuguggcauacggc

SEQ ID NO: 1432942 - RNA, 19 nt, Artificial Sequence
  Description of Artificial Sequence: Synthetic oligonucleotide
acccuaucaaaguauccuc

SEQ ID NO: 1432943 - RNA, 19 nt, Artificial Sequence
  Description of Artificial Sequence: Synthetic oligonucleotide
uuaaaacauggaccagacc

SEQ ID NO: 1432944 - RNA, 19 nt, Artificial Sequence
  Description of Artificial Sequence: Synthetic oligonucleotide
  modified_base (11)..(11): a, c, u, g, unknown or other
uguggccccunucuggagg

SEQ ID NO: 1432945 - RNA, 19 nt, Artificial Sequence
  Description of Artificial Sequence: Synthetic oligonucleotide
auaucagaucaaauacgcc

SEQ ID NO: 1432946 - RNA, 19 nt, Artificial Sequence
  Description of Artificial Sequence: Synthetic oligonucleotide
agaucaaauacgccacuug

SEQ ID NO: 1432947 - RNA, 19 nt, Artificial Sequence
  Description of Artificial Sequence: Synthetic oligonucleotide
auuccccgagcaaagaggc

SEQ ID NO: 1432948 - RNA, 19 nt, Artificial Sequence
  Description of Artificial Sequence: Synthetic oligonucleotide
ugcuaaacccuaucaaagu

SEQ ID NO: 1432949 - RNA, 19 nt, Artificial Sequence
  Description of Artificial Sequence: Synthetic oligonucleotide
acaugcuuugauaugaacu

SEQ ID NO: 1432950 - RNA, 19 nt, Artificial Sequence
  Description of Artificial Sequence: Synthetic oligonucleotide
uguacaggcuaccaggguu

SEQ ID NO: 1432951 - RNA, 19 nt, Artificial Sequence
  Description of Artificial Sequence: Synthetic oligonucleotide
cucaugaugaugcuccaug

SEQ ID NO: 1432952 - RNA, 19 nt, Artificial Sequence
  Description of Artificial Sequence: Synthetic oligonucleotide
aaaguauccucugucugga

SEQ ID NO: 1432953 - RNA, 19 nt, Artificial Sequence
  Description of Artificial Sequence: Synthetic oligonucleotide
uucggugucuucuugcagu

SEQ ID NO: 1432954 - RNA, 19 nt, Artificial Sequence
  Description of Artificial Sequence: Synthetic oligonucleotide
agaguguacaggcuaccag

SEQ ID NO: 1432955 - RNA, 19 nt, Artificial Sequence
  Description of Artificial Sequence: Synthetic oligonucleotide
uccuuuuggccagugauug

SEQ ID NO: 1432956 - RNA, 19 nt, Artificial Sequence
  Description of Artificial Sequence: Synthetic oligonucleotide
ucaugaugaugcuccauga

SEQ ID NO: 1432957 - RNA, 19 nt, Artificial Sequence
  Description of Artificial Sequence: Synthetic oligonucleotide
ccgaguuaaaacauggacc

SEQ ID NO: 1432958 - RNA, 19 nt, Artificial Sequence
  Description of Artificial Sequence: Synthetic oligonucleotide
aaccaagauuuaccuauca

SEQ ID NO: 1432959 - RNA, 19 nt, Artificial Sequence
  Description of Artificial Sequence: Synthetic oligonucleotide
gggacugaaugcuaaacag

SEQ ID NO: 1432960 - RNA, 19 nt, Artificial Sequence
  Description of Artificial Sequence: Synthetic oligonucleotide
auugacagacugcccuggc

SEQ ID NO: 1432961 - RNA, 19 nt, Artificial Sequence
  Description of Artificial Sequence: Synthetic oligonucleotide
accuucggugucuucuugc

SEQ ID NO: 1432962 - RNA, 19 nt, Artificial Sequence
  Description of Artificial Sequence: Synthetic oligonucleotide
ucauaaguaucuugacacu

SEQ ID NO: 1432963 - RNA, 19 nt, Artificial Sequence
  Description of Artificial Sequence: Synthetic oligonucleotide
uacuucgcuagauuguuuc

SEQ ID NO: 1432964 - RNA, 19 nt, Artificial Sequence
  Description of Artificial Sequence: Synthetic oligonucleotide
ucucuaugcaugccaguug

SEQ ID NO: 1432965 - RNA, 19 nt, Artificial Sequence
  Description of Artificial Sequence: Synthetic oligonucleotide
gcuucuagaggccaaguag

SEQ ID NO: 1432966 - RNA, 19 nt, Artificial Sequence
  Description of Artificial Sequence: Synthetic oligonucleotide
uaacuuucacacucccaag

SEQ ID NO: 1432967 - RNA, 19 nt, Artificial Sequence
  Description of Artificial Sequence: Synthetic oligonucleotide
cagugauugacagacugcc

SEQ ID NO: 1432968 - RNA, 19 nt, Artificial Sequence
  Description of Artificial Sequence: Synthetic oligonucleotide
aaaauaccuaaggccuggg

SEQ ID NO: 1432969 - RNA, 19 nt, Artificial Sequence
  Description of Artificial Sequence: Synthetic oligonucleotide
uccuaaguugccacugucu

SEQ ID NO: 1432970 - RNA, 19 nt, Artificial Sequence
  Description of Artificial Sequence: Synthetic oligonucleotide
ucgcuagauuguuucacag

SEQ ID NO: 1432971 - RNA, 19 nt, Artificial Sequence
  Description of Artificial Sequence: Synthetic oligonucleotide
uaugcaugccaguugcccu

SEQ ID NO: 1432972 - RNA, 19 nt, Artificial Sequence
  Description of Artificial Sequence: Synthetic oligonucleotide
accuaucaaaauaaaucuc

SEQ ID NO: 1432973 - RNA, 19 nt, Artificial Sequence
  Description of Artificial Sequence: Synthetic oligonucleotide
aagugucaaaggucauaag

SEQ ID NO: 1432974 - RNA, 19 nt, Artificial Sequence
  Description of Artificial Sequence: Synthetic oligonucleotide
cauaaguaucuugacacuc

SEQ ID NO: 1432975 - RNA, 19 nt, Artificial Sequence
  Description of Artificial Sequence: Synthetic oligonucleotide
aaaccaagauuuaccuauc

SEQ ID NO: 1432976 - RNA, 19 nt, Artificial Sequence
  Description of Artificial Sequence: Synthetic oligonucleotide
uucgcuagauuguuucaca

SEQ ID NO: 1432977 - RNA, 19 nt, Artificial Sequence
  Description of Artificial Sequence: Synthetic oligonucleotide
uaaguugccacugucuaau

SEQ ID NO: 1432978 - RNA, 19 nt, Artificial Sequence
  Description of Artificial Sequence: Synthetic oligonucleotide
gacugaaugcuaaacagaa

SEQ ID NO: 1432979 - RNA, 19 nt, Artificial Sequence
  Description of Artificial Sequence: Synthetic oligonucleotide
ugggguugggauaucacau

SEQ ID NO: 1432980 - RNA, 19 nt, Artificial Sequence
  Description of Artificial Sequence: Synthetic oligonucleotide
gaagaccugaauccuugug

SEQ ID NO: 1432981 - RNA, 19 nt, Artificial Sequence
  Description of Artificial Sequence: Synthetic oligonucleotide
uaaguaucuugacacucau

SEQ ID NO: 1432982 - RNA, 19 nt, Artificial Sequence
  Description of Artificial Sequence: Synthetic oligonucleotide
uccuguagaacuggcagug

SEQ ID NO: 1432983 - RNA, 19 nt, Artificial Sequence
  Description of Artificial Sequence: Synthetic oligonucleotide
uaauuggucuguagaauuu

SEQ ID NO: 1432984 - RNA, 19 nt, Artificial Sequence
  Description of Artificial Sequence: Synthetic oligonucleotide
cuaaaaccaagauuuaccu

SEQ ID NO: 1432985 - RNA, 19 nt, Artificial Sequence
  Description of Artificial Sequence: Synthetic oligonucleotide
ugauugacagacugcccug

SEQ ID NO: 1432986 - RNA, 19 nt, Artificial Sequence
  Description of Artificial Sequence: Synthetic oligonucleotide
aucucuaaaucuaaaugga

SEQ ID NO: 1432987 - RNA, 19 nt, Artificial Sequence
  Description of Artificial Sequence: Synthetic oligonucleotide
aggguuguauagcacccuc

SEQ ID NO: 1432988 - RNA, 19 nt, Artificial Sequence
  Description of Artificial Sequence: Synthetic oligonucleotide
aguuacaguuguggcauac

SEQ ID NO: 1432989 - RNA, 19 nt, Artificial Sequence
  Description of Artificial Sequence: Synthetic oligonucleotide
accugaauccuugugggag

SEQ ID NO: 1432990 - RNA, 19 nt, Artificial Sequence
  Description of Artificial Sequence: Synthetic oligonucleotide
ugaggaugagacgucaccu

SEQ ID NO: 1432991 - RNA, 19 nt, Artificial Sequence
  Description of Artificial Sequence: Synthetic oligonucleotide
gauagugccaaggcuugag

SEQ ID NO: 1432992 - RNA, 19 nt, Artificial Sequence
  Description of Artificial Sequence: Synthetic oligonucleotide
cucuaaaucuaaauggaua

SEQ ID NO: 1432993 - RNA, 19 nt, Artificial Sequence
  Description of Artificial Sequence: Synthetic oligonucleotide
ugggcagcguguagcaagg

SEQ ID NO: 1432994 - RNA, 19 nt, Artificial Sequence
  Description of Artificial Sequence: Synthetic oligonucleotide
gucuaaucuuuacuccuag

SEQ ID NO: 1432995 - RNA, 19 nt, Artificial Sequence
  Description of Artificial Sequence: Synthetic oligonucleotide
gauugacagacugcccugg

SEQ ID NO: 1432996 - RNA, 19 nt, Artificial Sequence
  Description of Artificial Sequence: Synthetic oligonucleotide
uugacagacugcccuggcc

SEQ ID NO: 1432997 - RNA, 19 nt, Artificial Sequence
  Description of Artificial Sequence: Synthetic oligonucleotide
ugggagagugccauuccug

SEQ ID NO: 1432998 - RNA, 19 nt, Artificial Sequence
  Description of Artificial Sequence: Synthetic oligonucleotide
aggaccucacuguauugag

SEQ ID NO: 1432999 - RNA, 19 nt, Artificial Sequence
  Description of Artificial Sequence: Synthetic oligonucleotide
agguagcuggcuucucagc

SEQ ID NO: 1433000 - RNA, 19 nt, Artificial Sequence
  Description of Artificial Sequence: Synthetic oligonucleotide
cugaggaugagacgucacc

SEQ ID NO: 1433001 - RNA, 19 nt, Artificial Sequence
  Description of Artificial Sequence: Synthetic oligonucleotide
ucagaucaaauacgccacu

SEQ ID NO: 1433002 - RNA, 19 nt, Artificial Sequence
  Description of Artificial Sequence: Synthetic oligonucleotide
uacggcaggggccacuuga

SEQ ID NO: 1433003 - RNA, 19 nt, Artificial Sequence
  Description of Artificial Sequence: Synthetic oligonucleotide
guugggauaucacaucuaa

SEQ ID NO: 1433004 - RNA, 19 nt, Artificial Sequence
  Description of Artificial Sequence: Synthetic oligonucleotide
ugucuaaucuuuacuccua

SEQ ID NO: 1433005 - RNA, 19 nt, Artificial Sequence
  Description of Artificial Sequence: Synthetic oligonucleotide
aaguugccacugucuaauc

SEQ ID NO: 1433006 - RNA, 19 nt, Artificial Sequence
  Description of Artificial Sequence: Synthetic oligonucleotide
agugauugacagacugccc

SEQ ID NO: 1433007 - RNA, 19 nt, Artificial Sequence
  Description of Artificial Sequence: Synthetic oligonucleotide
ggcuuguacugcuaaaccc

SEQ ID NO: 1433008 - RNA, 19 nt, Artificial Sequence
  Description of Artificial Sequence: Synthetic oligonucleotide
auaccuaaggccugggguu

SEQ ID NO: 1433009 - RNA, 19 nt, Artificial Sequence
  Description of Artificial Sequence: Synthetic oligonucleotide
ugugggagagugccauucc

SEQ ID NO: 1433010 - RNA, 19 nt, Artificial Sequence
  Description of Artificial Sequence: Synthetic oligonucleotide
auaaguaucuugacacuca

SEQ ID NO: 1433011 - RNA, 19 nt, Artificial Sequence
  Description of Artificial Sequence: Synthetic oligonucleotide
augcaugccaguugcccuc

SEQ ID NO: 1433012 - RNA, 19 nt, Artificial Sequence
  Description of Artificial Sequence: Synthetic oligonucleotide
ugugccaagugcuuugauu

SEQ ID NO: 1433013 - RNA, 19 nt, Artificial Sequence
  Description of Artificial Sequence: Synthetic oligonucleotide
aggccaaguaguugcauga

SEQ ID NO: 1433014 - RNA, 19 nt, Artificial Sequence
  Description of Artificial Sequence: Synthetic oligonucleotide
aaaugaagguugguguaaa

SEQ ID NO: 1433015 - RNA, 19 nt, Artificial Sequence
  Description of Artificial Sequence: Synthetic oligonucleotide
uccccgagcaaagaggcgc

SEQ ID NO: 1433016 - RNA, 19 nt, Artificial Sequence
  Description of Artificial Sequence: Synthetic oligonucleotide
cuaucacugcagaucugcc

SEQ ID NO: 1433017 - RNA, 19 nt, Artificial Sequence
  Description of Artificial Sequence: Synthetic oligonucleotide
ugugcaggaucucuccauc

SEQ ID NO: 1433018 - RNA, 19 nt, Artificial Sequence
  Description of Artificial Sequence: Synthetic oligonucleotide
accaagauuuaccuaucaa

SEQ ID NO: 1433019 - RNA, 19 nt, Artificial Sequence
  Description of Artificial Sequence: Synthetic oligonucleotide
aauuggucuguagaauuuu

SEQ ID NO: 1433020 - RNA, 19 nt, Artificial Sequence
  Description of Artificial Sequence: Synthetic oligonucleotide
agucaggagcacccacagc

SEQ ID NO: 1433021 - RNA, 19 nt, Artificial Sequence
  Description of Artificial Sequence: Synthetic oligonucleotide
guuacaguuguggcauacg

SEQ ID NO: 1433022 - RNA, 19 nt, Artificial Sequence
  Description of Artificial Sequence: Synthetic oligonucleotide
accucgauggcagagcugu

SEQ ID NO: 1433023 - RNA, 19 nt, Artificial Sequence
  Description of Artificial Sequence: Synthetic oligonucleotide
uuuaucuggaugggacuga

SEQ ID NO: 1433024 - RNA, 19 nt, Artificial Sequence
  Description of Artificial Sequence: Synthetic oligonucleotide
ggucauaaguaucuugaca

SEQ ID NO: 1433025 - RNA, 19 nt, Artificial Sequence
  Description of Artificial Sequence: Synthetic oligonucleotide
uagugccaaggcuugagau

SEQ ID NO: 1433026 - RNA, 19 nt, Artificial Sequence
  Description of Artificial Sequence: Synthetic oligonucleotide
acaauauccugaucauaaa

SEQ ID NO: 1433027 - RNA, 19 nt, Artificial Sequence
  Description of Artificial Sequence: Synthetic oligonucleotide
gcaugaagagcuaucacug

SEQ ID NO: 1433028 - RNA, 19 nt, Artificial Sequence
  Description of Artificial Sequence: Synthetic oligonucleotide
gucuuuucuaaaaccaaga

SEQ ID NO: 1433029 - RNA, 19 nt, Artificial Sequence
  Description of Artificial Sequence: Synthetic oligonucleotide
ggacucuugcuuaagacac

SEQ ID NO: 1433030 - RNA, 19 nt, Artificial Sequence
  Description of Artificial Sequence: Synthetic oligonucleotide
cuuucacacucccaagcuc

SEQ ID NO: 1433031 - RNA, 19 nt, Artificial Sequence
  Description of Artificial Sequence: Synthetic oligonucleotide
aucaaauacgccacuugcu

SEQ ID NO: 1433032 - RNA, 19 nt, Artificial Sequence
  Description of Artificial Sequence: Synthetic oligonucleotide
gugauugacagacugcccu

SEQ ID NO: 1433033 - RNA, 19 nt, Artificial Sequence
  Description of Artificial Sequence: Synthetic oligonucleotide
ucggugucuucuugcagug

SEQ ID NO: 1433034 - RNA, 19 nt, Artificial Sequence
  Description of Artificial Sequence: Synthetic oligonucleotide
caggauccuaaguugccac

SEQ ID NO: 1433035 - RNA, 19 nt, Artificial Sequence
  Description of Artificial Sequence: Synthetic oligonucleotide
cacaugcuuugauaugaac

SEQ ID NO: 1433036 - RNA, 19 nt, Artificial Sequence
  Description of Artificial Sequence: Synthetic oligonucleotide
auaaaucucuaaaucuaaa

SEQ ID NO: 1433037 - RNA, 19 nt, Artificial Sequence
  Description of Artificial Sequence: Synthetic oligonucleotide
gugaacuagggcaugggca

SEQ ID NO: 1433038 - RNA, 19 nt, Artificial Sequence
  Description of Artificial Sequence: Synthetic oligonucleotide
auagugccaaggcuugaga

SEQ ID NO: 1433039 - RNA, 19 nt, Artificial Sequence
  Description of Artificial Sequence: Synthetic oligonucleotide
guacucucuaugcaugcca

SEQ ID NO: 1433040 - RNA, 19 nt, Artificial Sequence
  Description of Artificial Sequence: Synthetic oligonucleotide
agaacccaccaucccacug

SEQ ID NO: 1433041 - RNA, 19 nt, Artificial Sequence
  Description of Artificial Sequence: Synthetic oligonucleotide
gaaacuuccaguggguacu

SEQ ID NO: 1433042 - RNA, 19 nt, Artificial Sequence
  Description of Artificial Sequence: Synthetic oligonucleotide
uucuagaggccaaguaguu

SEQ ID NO: 1433043 - RNA, 19 nt, Artificial Sequence
  Description of Artificial Sequence: Synthetic oligonucleotide
cuucgcuagauuguuucac

SEQ ID NO: 1433044 - RNA, 19 nt, Artificial Sequence
  Description of Artificial Sequence: Synthetic oligonucleotide
acuucgcuagauuguuuca

SEQ ID NO: 1433045 - RNA, 19 nt, Artificial Sequence
  Description of Artificial Sequence: Synthetic oligonucleotide
caugauagugccaaggcuu

SEQ ID NO: 1433046 - RNA, 19 nt, Artificial Sequence
  Description of Artificial Sequence: Synthetic oligonucleotide
ugaagaccugaauccuugu

SEQ ID NO: 1433047 - RNA, 19 nt, Artificial Sequence
  Description of Artificial Sequence: Synthetic oligonucleotide
gugucaaaggucauaagua

SEQ ID NO: 1433048 - RNA, 19 nt, Artificial Sequence
  Description of Artificial Sequence: Synthetic oligonucleotide
aaguaucuugacacucaug

SEQ ID NO: 1433049 - RNA, 19 nt, Artificial Sequence
  Description of Artificial Sequence: Synthetic oligonucleotide
uauugacaaagcugucuuu

SEQ ID NO: 1433050 - RNA, 19 nt, Artificial Sequence
  Description of Artificial Sequence: Synthetic oligonucleotide
ggugaacuagggcaugggc

SEQ ID NO: 1433051 - RNA, 19 nt, Artificial Sequence
  Description of Artificial Sequence: Synthetic oligonucleotide
gcuaucacugcagaucugc

SEQ ID NO: 1433052 - RNA, 19 nt, Artificial Sequence
  Description of Artificial Sequence: Synthetic oligonucleotide
cuucuagaggccaaguagu

SEQ ID NO: 1433053 - RNA, 19 nt, Artificial Sequence
  Description of Artificial Sequence: Synthetic oligonucleotide
caagcucaagguagcuggc

SEQ ID NO: 1433054 - RNA, 19 nt, Artificial Sequence
  Description of Artificial Sequence: Synthetic oligonucleotide
augauagugccaaggcuug

SEQ ID NO: 1433055 - RNA, 19 nt, Artificial Sequence
  Description of Artificial Sequence: Synthetic oligonucleotide
ccaaguaguugcaugaaga

SEQ ID NO: 1433056 - RNA, 19 nt, Artificial Sequence
  Description of Artificial Sequence: Synthetic oligonucleotide
caagugucaaaggucauaa

SEQ ID NO: 1433057 - RNA, 19 nt, Artificial Sequence
  Description of Artificial Sequence: Synthetic oligonucleotide
cucgauggcagagcugugc

SEQ ID NO: 1433058 - RNA, 19 nt, Artificial Sequence
  Description of Artificial Sequence: Synthetic oligonucleotide
aguugcccucugcccaccc

SEQ ID NO: 1433059 - RNA, 19 nt, Artificial Sequence
  Description of Artificial Sequence: Synthetic oligonucleotide
guauagcacccucaaagua

SEQ ID NO: 1433060 - RNA, 19 nt, Artificial Sequence
  Description of Artificial Sequence: Synthetic oligonucleotide
auacgccacuugcuaaucu

SEQ ID NO: 1433061 - RNA, 19 nt, Artificial Sequence
  Description of Artificial Sequence: Synthetic oligonucleotide
gagaccauagucugcugcu

SEQ ID NO: 1433062 - RNA, 19 nt, Artificial Sequence
  Description of Artificial Sequence: Synthetic oligonucleotide
caguuguggcauacggcag

SEQ ID NO: 1433063 - RNA, 19 nt, Artificial Sequence
  Description of Artificial Sequence: Synthetic oligonucleotide
uacgccacuugcuaaucuu

SEQ ID NO: 1433064 - RNA, 19 nt, Artificial Sequence
  Description of Artificial Sequence: Synthetic oligonucleotide
cuaaacccuaucaaaguau

SEQ ID NO: 1433065 - RNA, 19 nt, Artificial Sequence
  Description of Artificial Sequence: Synthetic oligonucleotide
ugacaauauccugaucaua

SEQ ID NO: 1433066 - RNA, 19 nt, Artificial Sequence
  Description of Artificial Sequence: Synthetic oligonucleotide
caaauacgccacuugcuaa

SEQ ID NO: 1433067 - RNA, 19 nt, Artificial Sequence
  Description of Artificial Sequence: Synthetic oligonucleotide
ccucaaaguacucucuaug

SEQ ID NO: 1433068 - RNA, 19 nt, Artificial Sequence
  Description of Artificial Sequence: Synthetic oligonucleotide
cuggaggcucagcugugcg

SEQ ID NO: 1433069 - RNA, 19 nt, Artificial Sequence
  Description of Artificial Sequence: Synthetic oligonucleotide
cuucggugucuucuugcag

SEQ ID NO: 1433070 - RNA, 19 nt, Artificial Sequence
  Description of Artificial Sequence: Synthetic oligonucleotide
ccuaucaaaguauccucug

SEQ ID NO: 1433071 - RNA, 19 nt, Artificial Sequence
  Description of Artificial Sequence: Synthetic oligonucleotide
gaugggacugaaugcuaaa

SEQ ID NO: 1433072 - RNA, 19 nt, Artificial Sequence
  Description of Artificial Sequence: Synthetic oligonucleotide
gccacuugacaauauccug

SEQ ID NO: 1433073 - RNA, 19 nt, Artificial Sequence
  Description of Artificial Sequence: Synthetic oligonucleotide
uaccuaaggccugggguug

SEQ ID NO: 1433074 - RNA, 19 nt, Artificial Sequence
  Description of Artificial Sequence: Synthetic oligonucleotide
gagacgucaccuucggugu

SEQ ID NO: 1433075 - RNA, 19 nt, Artificial Sequence
  Description of Artificial Sequence: Synthetic oligonucleotide
uccucaugucagugcuccg

SEQ ID NO: 1433076 - RNA, 19 nt, Artificial Sequence
  Description of Artificial Sequence: Synthetic oligonucleotide
agcuucuagaggccaagua

SEQ ID NO: 1433077 - RNA, 19 nt, Artificial Sequence
  Description of Artificial Sequence: Synthetic oligonucleotide
gccaaguaguugcaugaag

SEQ ID NO: 1433078 - RNA, 19 nt, Artificial Sequence
  Description of Artificial Sequence: Synthetic oligonucleotide
agcucaagguagcuggcuu

SEQ ID NO: 1433079 - RNA, 19 nt, Artificial Sequence
  Description of Artificial Sequence: Synthetic oligonucleotide
cugaauccuugugggagag

SEQ ID NO: 1433080 - RNA, 19 nt, Artificial Sequence
  Description of Artificial Sequence: Synthetic oligonucleotide
uucacacucccaagcucaa

SEQ ID NO: 1433081 - RNA, 19 nt, Artificial Sequence
  Description of Artificial Sequence: Synthetic oligonucleotide
agguauguauauggaauua

SEQ ID NO: 1433082 - RNA, 19 nt, Artificial Sequence
  Description of Artificial Sequence: Synthetic oligonucleotide
auucggccauccucauguc

SEQ ID NO: 1433083 - RNA, 19 nt, Artificial Sequence
  Description of Artificial Sequence: Synthetic oligonucleotide
gcuaaacccuaucaaagua

SEQ ID NO: 1433084 - RNA, 19 nt, Artificial Sequence
  Description of Artificial Sequence: Synthetic oligonucleotide
gcauauucggccauccuca

SEQ ID NO: 1433085 - RNA, 19 nt, Artificial Sequence
  Description of Artificial Sequence: Synthetic oligonucleotide
aaguauccucugucuggau

SEQ ID NO: 1433086 - RNA, 19 nt, Artificial Sequence
  Description of Artificial Sequence: Synthetic oligonucleotide
cauagucugcugcuuggga

SEQ ID NO: 1433087 - RNA, 19 nt, Artificial Sequence
  Description of Artificial Sequence: Synthetic oligonucleotide
acucuugcuuaagacacuu

SEQ ID NO: 1433088 - RNA, 19 nt, Artificial Sequence
  Description of Artificial Sequence: Synthetic oligonucleotide
gggccacuugacaauaucc

SEQ ID NO: 1433089 - RNA, 19 nt, Artificial Sequence
  Description of Artificial Sequence: Synthetic oligonucleotide
ccacuugacaauauccuga

SEQ ID NO: 1433090 - RNA, 19 nt, Artificial Sequence
  Description of Artificial Sequence: Synthetic oligonucleotide
ucuuuacuccuagucuuuu

SEQ ID NO: 1433091 - RNA, 19 nt, Artificial Sequence
  Description of Artificial Sequence: Synthetic oligonucleotide
ggauccuaaguugccacug

SEQ ID NO: 1433092 - RNA, 19 nt, Artificial Sequence
  Description of Artificial Sequence: Synthetic oligonucleotide
gaccugaauccuuguggga

SEQ ID NO: 1433093 - RNA, 19 nt, Artificial Sequence
  Description of Artificial Sequence: Synthetic oligonucleotide
cuaucaaaguauccucugu

SEQ ID NO: 1433094 - RNA, 19 nt, Artificial Sequence
  Description of Artificial Sequence: Synthetic oligonucleotide
ucacacucccaagcucaag

SEQ ID NO: 1433095 - RNA, 19 nt, Artificial Sequence
  Description of Artificial Sequence: Synthetic oligonucleotide
caggcuaccaggguugaca

SEQ ID NO: 1433096 - RNA, 19 nt, Artificial Sequence
  Description of Artificial Sequence: Synthetic oligonucleotide
uaguugcaugaagagcuau

SEQ ID NO: 1433097 - RNA, 19 nt, Artificial Sequence
  Description of Artificial Sequence: Synthetic oligonucleotide
ugauagugccaaggcuuga

SEQ ID NO: 1433098 - RNA, 19 nt, Artificial Sequence
  Description of Artificial Sequence: Synthetic oligonucleotide
acauucaggcugaggguug

SEQ ID NO: 1433099 - RNA, 19 nt, Artificial Sequence
  Description of Artificial Sequence: Synthetic oligonucleotide
gauccuaaguugccacugu

SEQ ID NO: 1433100 - RNA, 19 nt, Artificial Sequence
  Description of Artificial Sequence: Synthetic oligonucleotide
cuccgaguuaaaacaugga

SEQ ID NO: 1433101 - RNA, 19 nt, Artificial Sequence
  Description of Artificial Sequence: Synthetic oligonucleotide
ccucacuguauugaguuac

SEQ ID NO: 1433102 - RNA, 19 nt, Artificial Sequence
  Description of Artificial Sequence: Synthetic oligonucleotide
cucuugcuuaagacacuuc

SEQ ID NO: 1433103 - RNA, 19 nt, Artificial Sequence
  Description of Artificial Sequence: Synthetic oligonucleotide
ggugacauucaggcugagg

SEQ ID NO: 1433104 - RNA, 19 nt, Artificial Sequence
  Description of Artificial Sequence: Synthetic oligonucleotide
cuagggcaugggcagcgug

SEQ ID NO: 1433105 - RNA, 19 nt, Artificial Sequence
  Description of Artificial Sequence: Synthetic oligonucleotide
ggacugaaugcuaaacaga

SEQ ID NO: 1433106 - RNA, 19 nt, Artificial Sequence
  Description of Artificial Sequence: Synthetic oligonucleotide
cgcuagauuguuucacagg

SEQ ID NO: 1433107 - RNA, 19 nt, Artificial Sequence
  Description of Artificial Sequence: Synthetic oligonucleotide
acguggcuuguacugcuaa

SEQ ID NO: 1433108 - RNA, 19 nt, Artificial Sequence
  Description of Artificial Sequence: Synthetic oligonucleotide
cagacugcccuggccagag

SEQ ID NO: 1433109 - RNA, 19 nt, Artificial Sequence
  Description of Artificial Sequence: Synthetic oligonucleotide
augagacgucaccuucggu

SEQ ID NO: 1433110 - RNA, 19 nt, Artificial Sequence
  Description of Artificial Sequence: Synthetic oligonucleotide
auccugaggaugagacguc

SEQ ID NO: 1433111 - RNA, 19 nt, Artificial Sequence
  Description of Artificial Sequence: Synthetic oligonucleotide
cauaauuggucuguagaau

SEQ ID NO: 1433112 - RNA, 19 nt, Artificial Sequence
  Description of Artificial Sequence: Synthetic oligonucleotide
acggcaggggccacuugac

SEQ ID NO: 1433113 - RNA, 19 nt, Artificial Sequence
  Description of Artificial Sequence: Synthetic oligonucleotide
guugcccucugcccacccc

SEQ ID NO: 1433114 - RNA, 19 nt, Artificial Sequence
  Description of Artificial Sequence: Synthetic oligonucleotide
caggguugacagaaugaaa

SEQ ID NO: 1433115 - RNA, 19 nt, Artificial Sequence
  Description of Artificial Sequence: Synthetic oligonucleotide
uacaggcuaccaggguuga

SEQ ID NO: 1433116 - RNA, 19 nt, Artificial Sequence
  Description of Artificial Sequence: Synthetic oligonucleotide
ggagcuucuagaggccaag

SEQ ID NO: 1433117 - RNA, 19 nt, Artificial Sequence
  Description of Artificial Sequence: Synthetic oligonucleotide
cccaccaucccacugguga

SEQ ID NO: 1433118 - RNA, 19 nt, Artificial Sequence
  Description of Artificial Sequence: Synthetic oligonucleotide
gcuaaucuugaagccagca

SEQ ID NO: 1433119 - RNA, 19 nt, Artificial Sequence
  Description of Artificial Sequence: Synthetic oligonucleotide
cuggaugggacugaaugcu

SEQ ID NO: 1433120 - RNA, 19 nt, Artificial Sequence
  Description of Artificial Sequence: Synthetic oligonucleotide
cagguauguauauggaauu

SEQ ID NO: 1433121 - RNA, 19 nt, Artificial Sequence
  Description of Artificial Sequence: Synthetic oligonucleotide
ggggugaacuagggcaugg

SEQ ID NO: 1433122 - RNA, 19 nt, Artificial Sequence
  Description of Artificial Sequence: Synthetic oligonucleotide
gcucaagguagcuggcuuc

SEQ ID NO: 1433123 - RNA, 19 nt, Artificial Sequence
  Description of Artificial Sequence: Synthetic oligonucleotide
ucccaagcucaagguagcu

SEQ ID NO: 1433124 - RNA, 19 nt, Artificial Sequence
  Description of Artificial Sequence: Synthetic oligonucleotide
acucaugaugaugcuccau

SEQ ID NO: 1433125 - RNA, 19 nt, Artificial Sequence
  Description of Artificial Sequence: Synthetic oligonucleotide
ggguugggauaucacaucu

SEQ ID NO: 1433126 - RNA, 19 nt, Artificial Sequence
  Description of Artificial Sequence: Synthetic oligonucleotide
cagaguguacaggcuacca

SEQ ID NO: 1433127 - RNA, 19 nt, Artificial Sequence
  Description of Artificial Sequence: Synthetic oligonucleotide
ggagaauccugaggaugag

SEQ ID NO: 1433128 - RNA, 19 nt, Artificial Sequence
  Description of Artificial Sequence: Synthetic oligonucleotide
gcguguagcaaggccaaug

SEQ ID NO: 1433129 - RNA, 19 nt, Artificial Sequence
  Description of Artificial Sequence: Synthetic oligonucleotide
gauucugaacguggcuugu

SEQ ID NO: 1433130 - RNA, 19 nt, Artificial Sequence
  Description of Artificial Sequence: Synthetic oligonucleotide
cacucaugaugaugcucca

SEQ ID NO: 1433131 - RNA, 19 nt, Artificial Sequence
  Description of Artificial Sequence: Synthetic oligonucleotide
cuccuguagaacuggcagu

SEQ ID NO: 1433132 - RNA, 19 nt, Artificial Sequence
  Description of Artificial Sequence: Synthetic oligonucleotide
aggggugaacuagggcaug

SEQ ID NO: 1433133 - RNA, 19 nt, Artificial Sequence
  Description of Artificial Sequence: Synthetic oligonucleotide
agaggccaaguaguugcau

SEQ ID NO: 1433134 - RNA, 19 nt, Artificial Sequence
  Description of Artificial Sequence: Synthetic oligonucleotide
auucugaacguggcuugua

SEQ ID NO: 1433135 - RNA, 19 nt, Artificial Sequence
  Description of Artificial Sequence: Synthetic oligonucleotide
gaccucgauggcagagcug

SEQ ID NO: 1433136 - RNA, 19 nt, Artificial Sequence
  Description of Artificial Sequence: Synthetic oligonucleotide
  modified_base (4)..(4): a, c, u, g, unknown or other
ccunucuggaggcucagcu

SEQ ID NO: 1433137 - RNA, 19 nt, Artificial Sequence
  Description of Artificial Sequence: Synthetic oligonucleotide
gugggagagugccauuccu

SEQ ID NO: 1433138 - RNA, 19 nt, Artificial Sequence
  Description of Artificial Sequence: Synthetic oligonucleotide
auacggcaggggccacuug

SEQ ID NO: 1433139 - RNA, 19 nt, Artificial Sequence
  Description of Artificial Sequence: Synthetic oligonucleotide
ccugaggaugagacgucac

SEQ ID NO: 1433140 - RNA, 19 nt, Artificial Sequence
  Description of Artificial Sequence: Synthetic oligonucleotide
aacguggcuuguacugcua

SEQ ID NO: 1433141 - RNA, 19 nt, Artificial Sequence
  Description of Artificial Sequence: Synthetic oligonucleotide
guaguugcaugaagagcua

SEQ ID NO: 1433142 - RNA, 19 nt, Artificial Sequence
  Description of Artificial Sequence: Synthetic oligonucleotide
aucacaguuccaggagcuu

SEQ ID NO: 1433143 - RNA, 19 nt, Artificial Sequence
  Description of Artificial Sequence: Synthetic oligonucleotide
gugcggaggaccucacugu

SEQ ID NO: 1433144 - RNA, 19 nt, Artificial Sequence
  Description of Artificial Sequence: Synthetic oligonucleotide
gccagaguguacaggcuac

SEQ ID NO: 1433145 - RNA, 19 nt, Artificial Sequence
  Description of Artificial Sequence: Synthetic oligonucleotide
gcaggauccuaaguugcca

SEQ ID NO: 1433146 - RNA, 19 nt, Artificial Sequence
  Description of Artificial Sequence: Synthetic oligonucleotide
gacucuugcuuaagacacu

SEQ ID NO: 1433147 - RNA, 19 nt, Artificial Sequence
  Description of Artificial Sequence: Synthetic oligonucleotide
  modified_base (19)..(19): a, c, u, g, unknown or other
ugcagugauguggccccun

SEQ ID NO: 1433148 - RNA, 19 nt, Artificial Sequence
  Description of Artificial Sequence: Synthetic oligonucleotide
cucaagguagcuggcuucu

SEQ ID NO: 1433149 - RNA, 19 nt, Artificial Sequence
  Description of Artificial Sequence: Synthetic oligonucleotide
cccaaccccgcaaagccca

SEQ ID NO: 1433150 - RNA, 19 nt, Artificial Sequence
  Description of Artificial Sequence: Synthetic oligonucleotide
guguacaggcuaccagggu

SEQ ID NO: 1433151 - RNA, 19 nt, Artificial Sequence
  Description of Artificial Sequence: Synthetic oligonucleotide
ccagaguguacaggcuacc

SEQ ID NO: 1433152 - RNA, 19 nt, Artificial Sequence
  Description of Artificial Sequence: Synthetic oligonucleotide
ggccauccucaugucagug

SEQ ID NO: 1433153 - RNA, 19 nt, Artificial Sequence
  Description of Artificial Sequence: Synthetic oligonucleotide
cacccucaaaguacucucu

SEQ ID NO: 1433154 - RNA, 19 nt, Artificial Sequence
  Description of Artificial Sequence: Synthetic oligonucleotide
caggggugaacuagggcau

SEQ ID NO: 1433155 - RNA, 19 nt, Artificial Sequence
  Description of Artificial Sequence: Synthetic oligonucleotide
ccccaaccccgcaaagccc

SEQ ID NO: 1433156 - RNA, 19 nt, Artificial Sequence
  Description of Artificial Sequence: Synthetic oligonucleotide
gguacuucgcuagauuguu

SEQ ID NO: 1433157 - RNA, 19 nt, Artificial Sequence
  Description of Artificial Sequence: Synthetic oligonucleotide
caucuuccacaugcuuuga

SEQ ID NO: 1433158 - RNA, 19 nt, Artificial Sequence
  Description of Artificial Sequence: Synthetic oligonucleotide
ccgagcaaagaggcgcacc

SEQ ID NO: 1433159 - RNA, 19 nt, Artificial Sequence
  Description of Artificial Sequence: Synthetic oligonucleotide
caguugcccucugcccacc

SEQ ID NO: 1433160 - RNA, 19 nt, Artificial Sequence
  Description of Artificial Sequence: Synthetic oligonucleotide
  modified_base (9)..(9): a, c, u, g, unknown or other
uggccccunucuggaggcu

SEQ ID NO: 1433161 - RNA, 19 nt, Artificial Sequence
  Description of Artificial Sequence: Synthetic oligonucleotide
cagaucaaauacgccacuu

SEQ ID NO: 1433162 - RNA, 19 nt, Artificial Sequence
  Description of Artificial Sequence: Synthetic oligonucleotide
ggcgcaccagcuggcagug

SEQ ID NO: 1433163 - RNA, 19 nt, Artificial Sequence
  Description of Artificial Sequence: Synthetic oligonucleotide
agguccugacgccccucuu

SEQ ID NO: 1433164 - RNA, 19 nt, Artificial Sequence
  Description of Artificial Sequence: Synthetic oligonucleotide
gguugggauaucacaucua

SEQ ID NO: 1433165 - RNA, 19 nt, Artificial Sequence
  Description of Artificial Sequence: Synthetic oligonucleotide
ggauccccuccuguagaac

SEQ ID NO: 1433166 - RNA, 19 nt, Artificial Sequence
  Description of Artificial Sequence: Synthetic oligonucleotide
cacaagugucaaaggucau

SEQ ID NO: 1433167 - RNA, 19 nt, Artificial Sequence
  Description of Artificial Sequence: Synthetic oligonucleotide
augcuccaugauagugcca

SEQ ID NO: 1433168 - RNA, 19 nt, Artificial Sequence
  Description of Artificial Sequence: Synthetic oligonucleotide
gcaagaucaggaggcauau

SEQ ID NO: 1433169 - RNA, 19 nt, Artificial Sequence
  Description of Artificial Sequence: Synthetic oligonucleotide
  modified_base (7)..(7): a, c, u, g, unknown or other
gccccunucuggaggcuca

SEQ ID NO: 1433170 - RNA, 19 nt, Artificial Sequence
  Description of Artificial Sequence: Synthetic oligonucleotide
ccuuuuggccagugauuga

SEQ ID NO: 1433171 - RNA, 19 nt, Artificial Sequence
  Description of Artificial Sequence: Synthetic oligonucleotide
agcguguagcaaggccaau

SEQ ID NO: 1433172 - RNA, 19 nt, Artificial Sequence
  Description of Artificial Sequence: Synthetic oligonucleotide
cauucaggcugaggguugu

SEQ ID NO: 1433173 - RNA, 19 nt, Artificial Sequence
  Description of Artificial Sequence: Synthetic oligonucleotide
gucagugcuccgaguuaaa

SEQ ID NO: 1433174 - RNA, 19 nt, Artificial Sequence
  Description of Artificial Sequence: Synthetic oligonucleotide
cagaacccaccaucccacu

SEQ ID NO: 1433175 - RNA, 19 nt, Artificial Sequence
  Description of Artificial Sequence: Synthetic oligonucleotide
  modified_base (8)..(8): a, c, u, g, unknown or other
ggccccunucuggaggcuc

SEQ ID NO: 1433176 - RNA, 19 nt, Artificial Sequence
  Description of Artificial Sequence: Synthetic oligonucleotide
  modified_base (5)..(5): a, c, u, g, unknown or other
cccunucuggaggcucagc

SEQ ID NO: 1433177 - RNA, 19 nt, Artificial Sequence
  Description of Artificial Sequence: Synthetic oligonucleotide
gccgagggugccagguaug

SEQ ID NO: 1433178 - RNA, 19 nt, Artificial Sequence
  Description of Artificial Sequence: Synthetic oligonucleotide
acgucaccuucggugucuu

SEQ ID NO: 1433179 - RNA, 19 nt, Artificial Sequence
  Description of Artificial Sequence: Synthetic oligonucleotide
guacuucgcuagauuguuu

SEQ ID NO: 1433180 - RNA, 19 nt, Artificial Sequence
  Description of Artificial Sequence: Synthetic oligonucleotide
ccucgauggcagagcugug

SEQ ID NO: 1433181 - RNA, 19 nt, Artificial Sequence
  Description of Artificial Sequence: Synthetic oligonucleotide
ggccgagggugccagguau

SEQ ID NO: 1433182 - RNA, 19 nt, Artificial Sequence
  Description of Artificial Sequence: Synthetic oligonucleotide
cccuccuauccugugcaca

SEQ ID NO: 1433183 - RNA, 19 nt, Artificial Sequence
  Description of Artificial Sequence: Synthetic oligonucleotide
ccccgagcaaagaggcgca

SEQ ID NO: 1433184 - RNA, 19 nt, Artificial Sequence
  Description of Artificial Sequence: Synthetic oligonucleotide
cccucaaaguacucucuau

SEQ ID NO: 1433185 - RNA, 19 nt, Artificial Sequence
  Description of Artificial Sequence: Synthetic oligonucleotide
gggcagcguguagcaaggc

SEQ ID NO: 1433186 - RNA, 19 nt, Artificial Sequence
  Description of Artificial Sequence: Synthetic oligonucleotide
cugugcggaggaccucacu

SEQ ID NO: 1433187 - RNA, 19 nt, Artificial Sequence
  Description of Artificial Sequence: Synthetic oligonucleotide
cguggcuuguacugcuaaa

SEQ ID NO: 1433188 - RNA, 19 nt, Artificial Sequence
  Description of Artificial Sequence: Synthetic oligonucleotide
  modified_base (6)..(6): a, c, u, g, unknown or other
ccccunucuggaggcucag

SEQ ID NO: 1433189 - RNA, 19 nt, Artificial Sequence
  Description of Artificial Sequence: Synthetic oligonucleotide
cccgagcaaagaggcgcac

SEQ ID NO: 1433190 - RNA, 19 nt, Artificial Sequence
  Description of Artificial Sequence: Synthetic oligonucleotide
caagaucaggaggcauauu

SEQ ID NO: 1433191 - RNA, 19 nt, Artificial Sequence
  Description of Artificial Sequence: Synthetic oligonucleotide
ggcauacggcaggggccac

SEQ ID NO: 1433192 - RNA, 19 nt, Artificial Sequence
  Description of Artificial Sequence: Synthetic oligonucleotide
gcgcaccagcuggcagugg

SEQ ID NO: 1433193 - RNA, 19 nt, Artificial Sequence
  Description of Artificial Sequence: Synthetic oligonucleotide
gcauacggcaggggccacu

SEQ ID NO: 1433194 - RNA, 19 nt, Artificial Sequence
  Description of Artificial Sequence: Synthetic oligonucleotide
ggccagugauugacagacu

SEQ ID NO: 1433195 - RNA, 19 nt, Artificial Sequence
  Description of Artificial Sequence: Synthetic oligonucleotide
ccgagggugccagguaugu

SEQ ID NO: 1433196 - RNA, 19 nt, Artificial Sequence
  Description of Artificial Sequence: Synthetic oligonucleotide
aaauagugcauuuuguugg

SEQ ID NO: 1433197 - RNA, 19 nt, Artificial Sequence
  Description of Artificial Sequence: Synthetic oligonucleotide
uugacauagguaaacagcg

SEQ ID NO: 1433198 - RNA, 19 nt, Artificial Sequence
  Description of Artificial Sequence: Synthetic oligonucleotide
aauauaucauuucuaagcu

SEQ ID NO: 1433199 - RNA, 19 nt, Artificial Sequence
  Description of Artificial Sequence: Synthetic oligonucleotide
uauaauuccuccuuugagg

SEQ ID NO: 1433200 - RNA, 19 nt, Artificial Sequence
  Description of Artificial Sequence: Synthetic oligonucleotide
gucauaaugacuuuggccc

SEQ ID NO: 1433201 - RNA, 19 nt, Artificial Sequence
  Description of Artificial Sequence: Synthetic oligonucleotide
ucuuuuaagagccaugucu

SEQ ID NO: 1433202 - RNA, 19 nt, Artificial Sequence
  Description of Artificial Sequence: Synthetic oligonucleotide
auaacuaauauaucauuuc

SEQ ID NO: 1433203 - RNA, 19 nt, Artificial Sequence
  Description of Artificial Sequence: Synthetic oligonucleotide
uugaauagcaauuucuuca

SEQ ID NO: 1433204 - RNA, 19 nt, Artificial Sequence
  Description of Artificial Sequence: Synthetic oligonucleotide
uuucccaugauuuauuagc

SEQ ID NO: 1433205 - RNA, 19 nt, Artificial Sequence
  Description of Artificial Sequence: Synthetic oligonucleotide
uuuagaggauucuauagcc

SEQ ID NO: 1433206 - RNA, 19 nt, Artificial Sequence
  Description of Artificial Sequence: Synthetic oligonucleotide
uuugccaucgauuaauagc

SEQ ID NO: 1433207 - RNA, 19 nt, Artificial Sequence
  Description of Artificial Sequence: Synthetic oligonucleotide
uagaacguauuucauaaag

SEQ ID NO: 1433208 - RNA, 19 nt, Artificial Sequence
  Description of Artificial Sequence: Synthetic oligonucleotide
acuucaaggagucugauga

SEQ ID NO: 1433209 - RNA, 19 nt, Artificial Sequence
  Description of Artificial Sequence: Synthetic oligonucleotide
ugagcuauaauugugguga

SEQ ID NO: 1433210 - RNA, 19 nt, Artificial Sequence
  Description of Artificial Sequence: Synthetic oligonucleotide
uaagcugacggucauaaug

SEQ ID NO: 1433211 - RNA, 19 nt, Artificial Sequence
  Description of Artificial Sequence: Synthetic oligonucleotide
ucgauuaauagcuguauag

SEQ ID NO: 1433212 - RNA, 19 nt, Artificial Sequence
  Description of Artificial Sequence: Synthetic oligonucleotide
uaaaucuuuacacaagauc

SEQ ID NO: 1433213 - RNA, 19 nt, Artificial Sequence
  Description of Artificial Sequence: Synthetic oligonucleotide
auaguaguuaaaucuuuac

SEQ ID NO: 1433214 - RNA, 19 nt, Artificial Sequence
  Description of Artificial Sequence: Synthetic oligonucleotide
aggaaauccauucugauaa

SEQ ID NO: 1433215 - RNA, 19 nt, Artificial Sequence
  Description of Artificial Sequence: Synthetic oligonucleotide
aaucauuggugcuccaggg

SEQ ID NO: 1433216 - RNA, 19 nt, Artificial Sequence
  Description of Artificial Sequence: Synthetic oligonucleotide
aacucaaaaucuucauagg

SEQ ID NO: 1433217 - RNA, 19 nt, Artificial Sequence
  Description of Artificial Sequence: Synthetic oligonucleotide
uaacuaauauaucauuucu

SEQ ID NO: 1433218 - RNA, 19 nt, Artificial Sequence
  Description of Artificial Sequence: Synthetic oligonucleotide
uucuauagccuuuuccugg

SEQ ID NO: 1433219 - RNA, 19 nt, Artificial Sequence
  Description of Artificial Sequence: Synthetic oligonucleotide
agcauuugauguucuagcc

SEQ ID NO: 1433220 - RNA, 19 nt, Artificial Sequence
  Description of Artificial Sequence: Synthetic oligonucleotide
uguguuaaggccuuuaaua

SEQ ID NO: 1433221 - RNA, 19 nt, Artificial Sequence
  Description of Artificial Sequence: Synthetic oligonucleotide
uuaauagcuguauaguagu

SEQ ID NO: 1433222 - RNA, 19 nt, Artificial Sequence
  Description of Artificial Sequence: Synthetic oligonucleotide
uugccaucgauuaauagcu

SEQ ID NO: 1433223 - RNA, 19 nt, Artificial Sequence
  Description of Artificial Sequence: Synthetic oligonucleotide
uuuuaugaggucagacgcg

SEQ ID NO: 1433224 - RNA, 19 nt, Artificial Sequence
  Description of Artificial Sequence: Synthetic oligonucleotide
aguagaacguauuucauaa

SEQ ID NO: 1433225 - RNA, 19 nt, Artificial Sequence
  Description of Artificial Sequence: Synthetic oligonucleotide
aaucgcgugcaguuguagc

SEQ ID NO: 1433226 - RNA, 19 nt, Artificial Sequence
  Description of Artificial Sequence: Synthetic oligonucleotide
ucugauaauauuguaccag

SEQ ID NO: 1433227 - RNA, 19 nt, Artificial Sequence
  Description of Artificial Sequence: Synthetic oligonucleotide
uuuugacauagguaaacag

SEQ ID NO: 1433228 - RNA, 19 nt, Artificial Sequence
  Description of Artificial Sequence: Synthetic oligonucleotide
auaauauuguaccagguuu

SEQ ID NO: 1433229 - RNA, 19 nt, Artificial Sequence
  Description of Artificial Sequence: Synthetic oligonucleotide
cauucugauaauauuguac

SEQ ID NO: 1433230 - RNA, 19 nt, Artificial Sequence
  Description of Artificial Sequence: Synthetic oligonucleotide
aaaguaggcaagccacuac

SEQ ID NO: 1433231 - RNA, 19 nt, Artificial Sequence
  Description of Artificial Sequence: Synthetic oligonucleotide
uaguaguuaaaucuuuaca

SEQ ID NO: 1433232 - RNA, 19 nt, Artificial Sequence
  Description of Artificial Sequence: Synthetic oligonucleotide
cugauaauauuguaccagg

SEQ ID NO: 1433233 - RNA, 19 nt, Artificial Sequence
  Description of Artificial Sequence: Synthetic oligonucleotide
uuuuaaacaccugugccag

SEQ ID NO: 1433234 - RNA, 19 nt, Artificial Sequence
  Description of Artificial Sequence: Synthetic oligonucleotide
auuaauagcuguauaguag

SEQ ID NO: 1433235 - RNA, 19 nt, Artificial Sequence
  Description of Artificial Sequence: Synthetic oligonucleotide
uucauugaaaguugcaaac

SEQ ID NO: 1433236 - RNA, 19 nt, Artificial Sequence
  Description of Artificial Sequence: Synthetic oligonucleotide
uguauuuagaggauucuau

SEQ ID NO: 1433237 - RNA, 19 nt, Artificial Sequence
  Description of Artificial Sequence: Synthetic oligonucleotide
cuuuuaagagccaugucug

SEQ ID NO: 1433238 - RNA, 19 nt, Artificial Sequence
  Description of Artificial Sequence: Synthetic oligonucleotide
gacauagguaaacagcgcc

SEQ ID NO: 1433239 - RNA, 19 nt, Artificial Sequence
  Description of Artificial Sequence: Synthetic oligonucleotide
uguauaguaguuaaaucuu

SEQ ID NO: 1433240 - RNA, 19 nt, Artificial Sequence
  Description of Artificial Sequence: Synthetic oligonucleotide
uuuaugaggucagacgcgg

SEQ ID NO: 1433241 - RNA, 19 nt, Artificial Sequence
  Description of Artificial Sequence: Synthetic oligonucleotide
aacguauuucauaaagguc

SEQ ID NO: 1433242 - RNA, 19 nt, Artificial Sequence
  Description of Artificial Sequence: Synthetic oligonucleotide
ucguucacuguauuuagag

SEQ ID NO: 1433243 - RNA, 19 nt, Artificial Sequence
  Description of Artificial Sequence: Synthetic oligonucleotide
cuaauauaucauuucuaag

SEQ ID NO: 1433244 - RNA, 19 nt, Artificial Sequence
  Description of Artificial Sequence: Synthetic oligonucleotide
uaacuguuuggugaaauag

SEQ ID NO: 1433245 - RNA, 19 nt, Artificial Sequence
  Description of Artificial Sequence: Synthetic oligonucleotide
guucacuguauuuagagga

SEQ ID NO: 1433246 - RNA, 19 nt, Artificial Sequence
  Description of Artificial Sequence: Synthetic oligonucleotide
uaccaaaggauuuugacuu

SEQ ID NO: 1433247 - RNA, 19 nt, Artificial Sequence
  Description of Artificial Sequence: Synthetic oligonucleotide
uaguuaaaucuuuacacaa

SEQ ID NO: 1433248 - RNA, 19 nt, Artificial Sequence
  Description of Artificial Sequence: Synthetic oligonucleotide
cauugaaaguugcaaacag

SEQ ID NO: 1433249 - RNA, 19 nt, Artificial Sequence
  Description of Artificial Sequence: Synthetic oligonucleotide
cuagccaagaaguuuuccc

SEQ ID NO: 1433250 - RNA, 19 nt, Artificial Sequence
  Description of Artificial Sequence: Synthetic oligonucleotide
ugcaaacaguaucaaaucu

SEQ ID NO: 1433251 - RNA, 19 nt, Artificial Sequence
  Description of Artificial Sequence: Synthetic oligonucleotide
ucugguaaagccacauuca

SEQ ID NO: 1433252 - RNA, 19 nt, Artificial Sequence
  Description of Artificial Sequence: Synthetic oligonucleotide
uuaauaacuguuuggugaa

SEQ ID NO: 1433253 - RNA, 19 nt, Artificial Sequence
  Description of Artificial Sequence: Synthetic oligonucleotide
uuuuggcucauucaguguc

SEQ ID NO: 1433254 - RNA, 19 nt, Artificial Sequence
  Description of Artificial Sequence: Synthetic oligonucleotide
cuugaaaauacccugcaca

SEQ ID NO: 1433255 - RNA, 19 nt, Artificial Sequence
  Description of Artificial Sequence: Synthetic oligonucleotide
guauaauuccuccuuugag

SEQ ID NO: 1433256 - RNA, 19 nt, Artificial Sequence
  Description of Artificial Sequence: Synthetic oligonucleotide
ucagcuaaacaguucuaag

SEQ ID NO: 1433257 - RNA, 19 nt, Artificial Sequence
  Description of Artificial Sequence: Synthetic oligonucleotide
uaaacagcgccaaaauaac

SEQ ID NO: 1433258 - RNA, 19 nt, Artificial Sequence
  Description of Artificial Sequence: Synthetic oligonucleotide
ucauuuacuucaaggaguc

SEQ ID NO: 1433259 - RNA, 19 nt, Artificial Sequence
  Description of Artificial Sequence: Synthetic oligonucleotide
uucccaugauuuauuagcc

SEQ ID NO: 1433260 - RNA, 19 nt, Artificial Sequence
  Description of Artificial Sequence: Synthetic oligonucleotide
uuauucuaaccuuuugccu

SEQ ID NO: 1433261 - RNA, 19 nt, Artificial Sequence
  Description of Artificial Sequence: Synthetic oligonucleotide
uccauucugauaauauugu

SEQ ID NO: 1433262 - RNA, 19 nt, Artificial Sequence
  Description of Artificial Sequence: Synthetic oligonucleotide
gauucuauagccuuuuccu

SEQ ID NO: 1433263 - RNA, 19 nt, Artificial Sequence
  Description of Artificial Sequence: Synthetic oligonucleotide
gguaaagccacauucaauc

SEQ ID NO: 1433264 - RNA, 19 nt, Artificial Sequence
  Description of Artificial Sequence: Synthetic oligonucleotide
aaaggcgccacugaggaca

SEQ ID NO: 1433265 - RNA, 19 nt, Artificial Sequence
  Description of Artificial Sequence: Synthetic oligonucleotide
auuagaaagcuuaagacuu

SEQ ID NO: 1433266 - RNA, 19 nt, Artificial Sequence
  Description of Artificial Sequence: Synthetic oligonucleotide
uugaaaauacccugcacau

SEQ ID NO: 1433267 - RNA, 19 nt, Artificial Sequence
  Description of Artificial Sequence: Synthetic oligonucleotide
auagcuguauaguaguuaa

SEQ ID NO: 1433268 - RNA, 19 nt, Artificial Sequence
  Description of Artificial Sequence: Synthetic oligonucleotide
aauccauucugauaauauu

SEQ ID NO: 1433269 - RNA, 19 nt, Artificial Sequence
  Description of Artificial Sequence: Synthetic oligonucleotide
ugauaauauuguaccaggu

SEQ ID NO: 1433270 - RNA, 19 nt, Artificial Sequence
  Description of Artificial Sequence: Synthetic oligonucleotide
agaacguauuucauaaagg

SEQ ID NO: 1433271 - RNA, 19 nt, Artificial Sequence
  Description of Artificial Sequence: Synthetic oligonucleotide
uuaguguuuuagcauuuga

SEQ ID NO: 1433272 - RNA, 19 nt, Artificial Sequence
  Description of Artificial Sequence: Synthetic oligonucleotide
aucaaaucucugguaaagc

SEQ ID NO: 1433273 - RNA, 19 nt, Artificial Sequence
  Description of Artificial Sequence: Synthetic oligonucleotide
uguuguauaauuccuccuu

SEQ ID NO: 1433274 - RNA, 19 nt, Artificial Sequence
  Description of Artificial Sequence: Synthetic oligonucleotide
gauuaauagcuguauagua

SEQ ID NO: 1433275 - RNA, 19 nt, Artificial Sequence
  Description of Artificial Sequence: Synthetic oligonucleotide
ucuuuaguguuuuagcauu

SEQ ID NO: 1433276 - RNA, 19 nt, Artificial Sequence
  Description of Artificial Sequence: Synthetic oligonucleotide
uuaagagccaugucugugu

SEQ ID NO: 1433277 - RNA, 19 nt, Artificial Sequence
  Description of Artificial Sequence: Synthetic oligonucleotide
auauaucauuucuaagcug

SEQ ID NO: 1433278 - RNA, 19 nt, Artificial Sequence
  Description of Artificial Sequence: Synthetic oligonucleotide
uuugccuuacauuuguaua

SEQ ID NO: 1433279 - RNA, 19 nt, Artificial Sequence
  Description of Artificial Sequence: Synthetic oligonucleotide
gaacguauuucauaaaggu

SEQ ID NO: 1433280 - RNA, 19 nt, Artificial Sequence
  Description of Artificial Sequence: Synthetic oligonucleotide
ugauaacuaauauaucauu

SEQ ID NO: 1433281 - RNA, 19 nt, Artificial Sequence
  Description of Artificial Sequence: Synthetic oligonucleotide
guaaacagcgccaaaauaa

SEQ ID NO: 1433282 - RNA, 19 nt, Artificial Sequence
  Description of Artificial Sequence: Synthetic oligonucleotide
augcgauuaagguccauag

SEQ ID NO: 1433283 - RNA, 19 nt, Artificial Sequence
  Description of Artificial Sequence: Synthetic oligonucleotide
aauaacuuugccaucgauu

SEQ ID NO: 1433284 - RNA, 19 nt, Artificial Sequence
  Description of Artificial Sequence: Synthetic oligonucleotide
aaaauaacuuugccaucga

SEQ ID NO: 1433285 - RNA, 19 nt, Artificial Sequence
  Description of Artificial Sequence: Synthetic oligonucleotide
aaguagaacguauuucaua

SEQ ID NO: 1433286 - RNA, 19 nt, Artificial Sequence
  Description of Artificial Sequence: Synthetic oligonucleotide
agcuaaacaguucuaagua

SEQ ID NO: 1433287 - RNA, 19 nt, Artificial Sequence
  Description of Artificial Sequence: Synthetic oligonucleotide
aggacaagguggcaaucgc

SEQ ID NO: 1433288 - RNA, 19 nt, Artificial Sequence
  Description of Artificial Sequence: Synthetic oligonucleotide
aggcagucuuuuaagagcc

SEQ ID NO: 1433289 - RNA, 19 nt, Artificial Sequence
  Description of Artificial Sequence: Synthetic oligonucleotide
uuuugcacaucuuggcgug

SEQ ID NO: 1433290 - RNA, 19 nt, Artificial Sequence
  Description of Artificial Sequence: Synthetic oligonucleotide
agucauccuuaucauuuac

SEQ ID NO: 1433291 - RNA, 19 nt, Artificial Sequence
  Description of Artificial Sequence: Synthetic oligonucleotide
uugccuuacauuuguauau

SEQ ID NO: 1433292 - RNA, 19 nt, Artificial Sequence
  Description of Artificial Sequence: Synthetic oligonucleotide
agccaugucugugucagcc

SEQ ID NO: 1433293 - RNA, 19 nt, Artificial Sequence
  Description of Artificial Sequence: Synthetic oligonucleotide
agucauuccaaguuacuaa

SEQ ID NO: 1433294 - RNA, 19 nt, Artificial Sequence
  Description of Artificial Sequence: Synthetic oligonucleotide
cuaagcuguuguauaauuc

SEQ ID NO: 1433295 - RNA, 19 nt, Artificial Sequence
  Description of Artificial Sequence: Synthetic oligonucleotide
uuuugccuuacauuuguau

SEQ ID NO: 1433296 - RNA, 19 nt, Artificial Sequence
  Description of Artificial Sequence: Synthetic oligonucleotide
ugcacauccucuugcgggg

SEQ ID NO: 1433297 - RNA, 19 nt, Artificial Sequence
  Description of Artificial Sequence: Synthetic oligonucleotide
ucuaagucauccuuaucau

SEQ ID NO: 1433298 - RNA, 19 nt, Artificial Sequence
  Description of Artificial Sequence: Synthetic oligonucleotide
ucguuuugcacaucuuggc

SEQ ID NO: 1433299 - RNA, 19 nt, Artificial Sequence
  Description of Artificial Sequence: Synthetic oligonucleotide
guaccguuguguuaaggcc

SEQ ID NO: 1433300 - RNA, 19 nt, Artificial Sequence
  Description of Artificial Sequence: Synthetic oligonucleotide
ugaaaguugcaaacaguau

SEQ ID NO: 1433301 - RNA, 19 nt, Artificial Sequence
  Description of Artificial Sequence: Synthetic oligonucleotide
agguuugugacacuauuaa

SEQ ID NO: 1433302 - RNA, 19 nt, Artificial Sequence
  Description of Artificial Sequence: Synthetic oligonucleotide
uaccguuguguuaaggccu

SEQ ID NO: 1433303 - RNA, 19 nt, Artificial Sequence
  Description of Artificial Sequence: Synthetic oligonucleotide
ugacauagguaaacagcgc

SEQ ID NO: 1433304 - RNA, 19 nt, Artificial Sequence
  Description of Artificial Sequence: Synthetic oligonucleotide
gacacuauuaaguuguuuu

SEQ ID NO: 1433305 - RNA, 19 nt, Artificial Sequence
  Description of Artificial Sequence: Synthetic oligonucleotide
cuguuuggugaaauagugc

SEQ ID NO: 1433306 - RNA, 19 nt, Artificial Sequence
  Description of Artificial Sequence: Synthetic oligonucleotide
aacuuugccaucgauuaau

SEQ ID NO: 1433307 - RNA, 19 nt, Artificial Sequence
  Description of Artificial Sequence: Synthetic oligonucleotide
agcgccaaaauaacuuugc

SEQ ID NO: 1433308 - RNA, 19 nt, Artificial Sequence
  Description of Artificial Sequence: Synthetic oligonucleotide
aagcugacggucauaauga

SEQ ID NO: 1433309 - RNA, 19 nt, Artificial Sequence
  Description of Artificial Sequence: Synthetic oligonucleotide
agucuuuuaagagccaugu

SEQ ID NO: 1433310 - RNA, 19 nt, Artificial Sequence
  Description of Artificial Sequence: Synthetic oligonucleotide
gcgauuaagguccauagac

SEQ ID NO: 1433311 - RNA, 19 nt, Artificial Sequence
  Description of Artificial Sequence: Synthetic oligonucleotide
acuguuuggugaaauagug

SEQ ID NO: 1433312 - RNA, 19 nt, Artificial Sequence
  Description of Artificial Sequence: Synthetic oligonucleotide
ucuaagcugacggucauaa

SEQ ID NO: 1433313 - RNA, 19 nt, Artificial Sequence
  Description of Artificial Sequence: Synthetic oligonucleotide
aaucaccgggaucgugcgc

SEQ ID NO: 1433314 - RNA, 19 nt, Artificial Sequence
  Description of Artificial Sequence: Synthetic oligonucleotide
aauagcuguauaguaguua

SEQ ID NO: 1433315 - RNA, 19 nt, Artificial Sequence
  Description of Artificial Sequence: Synthetic oligonucleotide
uuauuagccaguucucuuu

SEQ ID NO: 1433316 - RNA, 19 nt, Artificial Sequence
  Description of Artificial Sequence: Synthetic oligonucleotide
guaaguuccaaaguaggca

SEQ ID NO: 1433317 - RNA, 19 nt, Artificial Sequence
  Description of Artificial Sequence: Synthetic oligonucleotide
aggguucugagcuauaauu

SEQ ID NO: 1433318 - RNA, 19 nt, Artificial Sequence
  Description of Artificial Sequence: Synthetic oligonucleotide
ucugagcuauaauuguggu

SEQ ID NO: 1433319 - RNA, 19 nt, Artificial Sequence
  Description of Artificial Sequence: Synthetic oligonucleotide
gguaccguuguguuaaggc

SEQ ID NO: 1433320 - RNA, 19 nt, Artificial Sequence
  Description of Artificial Sequence: Synthetic oligonucleotide
auuuauuagccaguucucu

SEQ ID NO: 1433321 - RNA, 19 nt, Artificial Sequence
  Description of Artificial Sequence: Synthetic oligonucleotide
uuuuaagagccaugucugu

SEQ ID NO: 1433322 - RNA, 19 nt, Artificial Sequence
  Description of Artificial Sequence: Synthetic oligonucleotide
uaaguagaacguauuucau

SEQ ID NO: 1433323 - RNA, 19 nt, Artificial Sequence
  Description of Artificial Sequence: Synthetic oligonucleotide
uaggaauuagaaagcuuaa

SEQ ID NO: 1433324 - RNA, 19 nt, Artificial Sequence
  Description of Artificial Sequence: Synthetic oligonucleotide
uggagccuaucagauaggg

SEQ ID NO: 1433325 - RNA, 19 nt, Artificial Sequence
  Description of Artificial Sequence: Synthetic oligonucleotide
cauacugcgccgcagacca

SEQ ID NO: 1433326 - RNA, 19 nt, Artificial Sequence
  Description of Artificial Sequence: Synthetic oligonucleotide
gaagguaccguuguguuaa

SEQ ID NO: 1433327 - RNA, 19 nt, Artificial Sequence
  Description of Artificial Sequence: Synthetic oligonucleotide
uaaccuuuugccuuacauu

SEQ ID NO: 1433328 - RNA, 19 nt, Artificial Sequence
  Description of Artificial Sequence: Synthetic oligonucleotide
aacagcgccaaaauaacuu

SEQ ID NO: 1433329 - RNA, 19 nt, Artificial Sequence
  Description of Artificial Sequence: Synthetic oligonucleotide
uuaucugcgcacagacuca

SEQ ID NO: 1433330 - RNA, 19 nt, Artificial Sequence
  Description of Artificial Sequence: Synthetic oligonucleotide
guuugugacacuauuaagu

SEQ ID NO: 1433331 - RNA, 19 nt, Artificial Sequence
  Description of Artificial Sequence: Synthetic oligonucleotide
gcuaaacaguucuaaguag

SEQ ID NO: 1433332 - RNA, 19 nt, Artificial Sequence
  Description of Artificial Sequence: Synthetic oligonucleotide
ugcgauuaagguccauaga

SEQ ID NO: 1433333 - RNA, 19 nt, Artificial Sequence
  Description of Artificial Sequence: Synthetic oligonucleotide
uucacuguauuuagaggau

SEQ ID NO: 1433334 - RNA, 19 nt, Artificial Sequence
  Description of Artificial Sequence: Synthetic oligonucleotide
uagaggauucuauagccuu

SEQ ID NO: 1433335 - RNA, 19 nt, Artificial Sequence
  Description of Artificial Sequence: Synthetic oligonucleotide
uugugcguggccuguaucu

SEQ ID NO: 1433336 - RNA, 19 nt, Artificial Sequence
  Description of Artificial Sequence: Synthetic oligonucleotide
uuaugaggucagacgcggg

SEQ ID NO: 1433337 - RNA, 19 nt, Artificial Sequence
  Description of Artificial Sequence: Synthetic oligonucleotide
ucuugcggggucaccaccc

SEQ ID NO: 1433338 - RNA, 19 nt, Artificial Sequence
  Description of Artificial Sequence: Synthetic oligonucleotide
agcuguauaguaguuaaau

SEQ ID NO: 1433339 - RNA, 19 nt, Artificial Sequence
  Description of Artificial Sequence: Synthetic oligonucleotide
aucaccgggaucgugcgcg

SEQ ID NO: 1433340 - RNA, 19 nt, Artificial Sequence
  Description of Artificial Sequence: Synthetic oligonucleotide
uucagcuaaacaguucuaa

SEQ ID NO: 1433341 - RNA, 19 nt, Artificial Sequence
  Description of Artificial Sequence: Synthetic oligonucleotide
uagguaaacagcgccaaaa

SEQ ID NO: 1433342 - RNA, 19 nt, Artificial Sequence
  Description of Artificial Sequence: Synthetic oligonucleotide
gcuguuguauaauuccucc

SEQ ID NO: 1433343 - RNA, 19 nt, Artificial Sequence
  Description of Artificial Sequence: Synthetic oligonucleotide
uugcucguuuugcacaucu

SEQ ID NO: 1433344 - RNA, 19 nt, Artificial Sequence
  Description of Artificial Sequence: Synthetic oligonucleotide
uuguggugauaacuaauau

SEQ ID NO: 1433345 - RNA, 19 nt, Artificial Sequence
  Description of Artificial Sequence: Synthetic oligonucleotide
uucaaucaucucacuuugc

SEQ ID NO: 1433346 - RNA, 19 nt, Artificial Sequence
  Description of Artificial Sequence: Synthetic oligonucleotide
gacuugaaaauacccugca

SEQ ID NO: 1433347 - RNA, 19 nt, Artificial Sequence
  Description of Artificial Sequence: Synthetic oligonucleotide
caagguggcaaucgcgugc

SEQ ID NO: 1433348 - RNA, 19 nt, Artificial Sequence
  Description of Artificial Sequence: Synthetic oligonucleotide
guagacauggccggggugc

SEQ ID NO: 1433349 - RNA, 19 nt, Artificial Sequence
  Description of Artificial Sequence: Synthetic oligonucleotide
aucgcgugcaguuguagcu

SEQ ID NO: 1433350 - RNA, 19 nt, Artificial Sequence
  Description of Artificial Sequence: Synthetic oligonucleotide
gauuaagguccauagacuu

SEQ ID NO: 1433351 - RNA, 19 nt, Artificial Sequence
  Description of Artificial Sequence: Synthetic oligonucleotide
gauaauauuguaccagguu

SEQ ID NO: 1433352 - RNA, 19 nt, Artificial Sequence
  Description of Artificial Sequence: Synthetic oligonucleotide
acgcggguuccacaaagac

SEQ ID NO: 1433353 - RNA, 19 nt, Artificial Sequence
  Description of Artificial Sequence: Synthetic oligonucleotide
uccucgaacaggcagucuu

SEQ ID NO: 1433354 - RNA, 19 nt, Artificial Sequence
  Description of Artificial Sequence: Synthetic oligonucleotide
caguaaccgaguaggagug

SEQ ID NO: 1433355 - RNA, 19 nt, Artificial Sequence
  Description of Artificial Sequence: Synthetic oligonucleotide
cauuucuaagcugacgguc

SEQ ID NO: 1433356 - RNA, 19 nt, Artificial Sequence
  Description of Artificial Sequence: Synthetic oligonucleotide
cugagcuauaauuguggug

SEQ ID NO: 1433357 - RNA, 19 nt, Artificial Sequence
  Description of Artificial Sequence: Synthetic oligonucleotide
cuauaauuguggugauaac

SEQ ID NO: 1433358 - RNA, 19 nt, Artificial Sequence
  Description of Artificial Sequence: Synthetic oligonucleotide
auuucuaagcugacgguca

SEQ ID NO: 1433359 - RNA, 19 nt, Artificial Sequence
  Description of Artificial Sequence: Synthetic oligonucleotide
agacgcggguuccacaaag

SEQ ID NO: 1433360 - RNA, 19 nt, Artificial Sequence
  Description of Artificial Sequence: Synthetic oligonucleotide
gguuugugacacuauuaag

SEQ ID NO: 1433361 - RNA, 19 nt, Artificial Sequence
  Description of Artificial Sequence: Synthetic oligonucleotide
acggucauaaugacuuugg

SEQ ID NO: 1433362 - RNA, 19 nt, Artificial Sequence
  Description of Artificial Sequence: Synthetic oligonucleotide
caaucaccgggaucgugcg

SEQ ID NO: 1433363 - RNA, 19 nt, Artificial Sequence
  Description of Artificial Sequence: Synthetic oligonucleotide
aagcuguuguauaauuccu

SEQ ID NO: 1433364 - RNA, 19 nt, Artificial Sequence
  Description of Artificial Sequence: Synthetic oligonucleotide
uaucagauaggggcggucu

SEQ ID NO: 1433365 - RNA, 19 nt, Artificial Sequence
  Description of Artificial Sequence: Synthetic oligonucleotide
guaaagccacauucaauca

SEQ ID NO: 1433366 - RNA, 19 nt, Artificial Sequence
  Description of Artificial Sequence: Synthetic oligonucleotide
ucagacgcggguuccacaa

SEQ ID NO: 1433367 - RNA, 19 nt, Artificial Sequence
  Description of Artificial Sequence: Synthetic oligonucleotide
auaacuguuuggugaaaua

SEQ ID NO: 1433368 - RNA, 19 nt, Artificial Sequence
  Description of Artificial Sequence: Synthetic oligonucleotide
agguaaacagcgccaaaau

SEQ ID NO: 1433369 - RNA, 19 nt, Artificial Sequence
  Description of Artificial Sequence: Synthetic oligonucleotide
uauacucuuugcucguuuu

SEQ ID NO: 1433370 - RNA, 19 nt, Artificial Sequence
  Description of Artificial Sequence: Synthetic oligonucleotide
uucauacugcgccgcagac

SEQ ID NO: 1433371 - RNA, 19 nt, Artificial Sequence
  Description of Artificial Sequence: Synthetic oligonucleotide
agaucacaauuauauugaa

SEQ ID NO: 1433372 - RNA, 19 nt, Artificial Sequence
  Description of Artificial Sequence: Synthetic oligonucleotide
auuaagguccauagacuug

SEQ ID NO: 1433373 - RNA, 19 nt, Artificial Sequence
  Description of Artificial Sequence: Synthetic oligonucleotide
gacggucauaaugacuuug

SEQ ID NO: 1433374 - RNA, 19 nt, Artificial Sequence
  Description of Artificial Sequence: Synthetic oligonucleotide
cagagguccucccaguaac

SEQ ID NO: 1433375 - RNA, 19 nt, Artificial Sequence
  Description of Artificial Sequence: Synthetic oligonucleotide
aucgauuaauagcuguaua

SEQ ID NO: 1433376 - RNA, 19 nt, Artificial Sequence
  Description of Artificial Sequence: Synthetic oligonucleotide
uaauagcuguauaguaguu

SEQ ID NO: 1433377 - RNA, 19 nt, Artificial Sequence
  Description of Artificial Sequence: Synthetic oligonucleotide
aucgugcgcggacuguugg

SEQ ID NO: 1433378 - RNA, 19 nt, Artificial Sequence
  Description of Artificial Sequence: Synthetic oligonucleotide
gcuauaauuguggugauaa

SEQ ID NO: 1433379 - RNA, 19 nt, Artificial Sequence
  Description of Artificial Sequence: Synthetic oligonucleotide
auuguggugauaacuaaua

SEQ ID NO: 1433380 - RNA, 19 nt, Artificial Sequence
  Description of Artificial Sequence: Synthetic oligonucleotide
uacuucuuucaaagccagc

SEQ ID NO: 1433381 - RNA, 19 nt, Artificial Sequence
  Description of Artificial Sequence: Synthetic oligonucleotide
gagguccucccaguaaccg

SEQ ID NO: 1433382 - RNA, 19 nt, Artificial Sequence
  Description of Artificial Sequence: Synthetic oligonucleotide
acaguucuaaguagaacgu

SEQ ID NO: 1433383 - RNA, 19 nt, Artificial Sequence
  Description of Artificial Sequence: Synthetic oligonucleotide
aucauuggugcuccagggu

SEQ ID NO: 1433384 - RNA, 19 nt, Artificial Sequence
  Description of Artificial Sequence: Synthetic oligonucleotide
aaguuccaaaguaggcaag

SEQ ID NO: 1433385 - RNA, 19 nt, Artificial Sequence
  Description of Artificial Sequence: Synthetic oligonucleotide
aguaaccgaguaggagugc

SEQ ID NO: 1433386 - RNA, 19 nt, Artificial Sequence
  Description of Artificial Sequence: Synthetic oligonucleotide
acuguauuuagaggauucu

SEQ ID NO: 1433387 - RNA, 19 nt, Artificial Sequence
  Description of Artificial Sequence: Synthetic oligonucleotide
ucuucauacugcgccgcag

SEQ ID NO: 1433388 - RNA, 19 nt, Artificial Sequence
  Description of Artificial Sequence: Synthetic oligonucleotide
uuucuaagcugacggucau

SEQ ID NO: 1433389 - RNA, 19 nt, Artificial Sequence
  Description of Artificial Sequence: Synthetic oligonucleotide
ugaaaauacccugcacauc

SEQ ID NO: 1433390 - RNA, 19 nt, Artificial Sequence
  Description of Artificial Sequence: Synthetic oligonucleotide
ggucguucacuguauuuag

SEQ ID NO: 1433391 - RNA, 19 nt, Artificial Sequence
  Description of Artificial Sequence: Synthetic oligonucleotide
uaacuuugccaucgauuaa

SEQ ID NO: 1433392 - RNA, 19 nt, Artificial Sequence
  Description of Artificial Sequence: Synthetic oligonucleotide
aggguagcaaccaucuuca

SEQ ID NO: 1433393 - RNA, 19 nt, Artificial Sequence
  Description of Artificial Sequence: Synthetic oligonucleotide
agucugaugaugcgauuaa

SEQ ID NO: 1433394 - RNA, 19 nt, Artificial Sequence
  Description of Artificial Sequence: Synthetic oligonucleotide
aagccacauucaaucauug

SEQ ID NO: 1433395 - RNA, 19 nt, Artificial Sequence
  Description of Artificial Sequence: Synthetic oligonucleotide
cagucuuuuaagagccaug

SEQ ID NO: 1433396 - RNA, 19 nt, Artificial Sequence
  Description of Artificial Sequence: Synthetic oligonucleotide
caaggcuccuccucgaaca

SEQ ID NO: 1433397 - RNA, 19 nt, Artificial Sequence
  Description of Artificial Sequence: Synthetic oligonucleotide
uguuggucguucacuguau

SEQ ID NO: 1433398 - RNA, 19 nt, Artificial Sequence
  Description of Artificial Sequence: Synthetic oligonucleotide
ugcgccgcagaccacucga

SEQ ID NO: 1433399 - RNA, 19 nt, Artificial Sequence
  Description of Artificial Sequence: Synthetic oligonucleotide
acagcgccaaaauaacuuu

SEQ ID NO: 1433400 - RNA, 19 nt, Artificial Sequence
  Description of Artificial Sequence: Synthetic oligonucleotide
guuuugcacaucuuggcgu

SEQ ID NO: 1433401 - RNA, 19 nt, Artificial Sequence
  Description of Artificial Sequence: Synthetic oligonucleotide
agccuaucagauaggggcg

SEQ ID NO: 1433402 - RNA, 19 nt, Artificial Sequence
  Description of Artificial Sequence: Synthetic oligonucleotide
ccaaucaccgggaucgugc

SEQ ID NO: 1433403 - RNA, 19 nt, Artificial Sequence
  Description of Artificial Sequence: Synthetic oligonucleotide
cugacggucauaaugacuu

SEQ ID NO: 1433404 - RNA, 19 nt, Artificial Sequence
  Description of Artificial Sequence: Synthetic oligonucleotide
ugaagguaccguuguguua

SEQ ID NO: 1433405 - RNA, 19 nt, Artificial Sequence
  Description of Artificial Sequence: Synthetic oligonucleotide
accgaguaggagugcuuuc

SEQ ID NO: 1433406 - RNA, 19 nt, Artificial Sequence
  Description of Artificial Sequence: Synthetic oligonucleotide
auauacucuuugcucguuu

SEQ ID NO: 1433407 - RNA, 19 nt, Artificial Sequence
  Description of Artificial Sequence: Synthetic oligonucleotide
agccaagaaguuuucccau

SEQ ID NO: 1433408 - RNA, 19 nt, Artificial Sequence
  Description of Artificial Sequence: Synthetic oligonucleotide
ucuaaccuuuugccuuaca

SEQ ID NO: 1433409 - RNA, 19 nt, Artificial Sequence
  Description of Artificial Sequence: Synthetic oligonucleotide
accgggaucgugcgcggac

SEQ ID NO: 1433410 - RNA, 19 nt, Artificial Sequence
  Description of Artificial Sequence: Synthetic oligonucleotide
ugccaucgauuaauagcug

SEQ ID NO: 1433411 - RNA, 19 nt, Artificial Sequence
  Description of Artificial Sequence: Synthetic oligonucleotide
uccuggagcgcuuuugcuu

SEQ ID NO: 1433412 - RNA, 19 nt, Artificial Sequence
  Description of Artificial Sequence: Synthetic oligonucleotide
ggguucugagcuauaauug

SEQ ID NO: 1433413 - RNA, 19 nt, Artificial Sequence
  Description of Artificial Sequence: Synthetic oligonucleotide
cagcgccaaaauaacuuug

SEQ ID NO: 1433414 - RNA, 19 nt, Artificial Sequence
  Description of Artificial Sequence: Synthetic oligonucleotide
cauuggugcuccaggguuc

SEQ ID NO: 1433415 - RNA, 19 nt, Artificial Sequence
  Description of Artificial Sequence: Synthetic oligonucleotide
uuguaccagguuugugaca

SEQ ID NO: 1433416 - RNA, 19 nt, Artificial Sequence
  Description of Artificial Sequence: Synthetic oligonucleotide
aagguaccguuguguuaag

SEQ ID NO: 1433417 - RNA, 19 nt, Artificial Sequence
  Description of Artificial Sequence: Synthetic oligonucleotide
gaaauccauucugauaaua

SEQ ID NO: 1433418 - RNA, 19 nt, Artificial Sequence
  Description of Artificial Sequence: Synthetic oligonucleotide
gaugcgauuaagguccaua

SEQ ID NO: 1433419 - RNA, 19 nt, Artificial Sequence
  Description of Artificial Sequence: Synthetic oligonucleotide
gacauggccggggugcgag

SEQ ID NO: 1433420 - RNA, 19 nt, Artificial Sequence
  Description of Artificial Sequence: Synthetic oligonucleotide
cuuggcuuucaaucaucuc

SEQ ID NO: 1433421 - RNA, 19 nt, Artificial Sequence
  Description of Artificial Sequence: Synthetic oligonucleotide
aaccgaguaggagugcuuu

SEQ ID NO: 1433422 - RNA, 19 nt, Artificial Sequence
  Description of Artificial Sequence: Synthetic oligonucleotide
uuggucguucacuguauuu

SEQ ID NO: 1433423 - RNA, 19 nt, Artificial Sequence
  Description of Artificial Sequence: Synthetic oligonucleotide
ucccaguaaccgaguagga

SEQ ID NO: 1433424 - RNA, 19 nt, Artificial Sequence
  Description of Artificial Sequence: Synthetic oligonucleotide
uagcuguauaguaguuaaa

SEQ ID NO: 1433425 - RNA, 19 nt, Artificial Sequence
  Description of Artificial Sequence: Synthetic oligonucleotide
gccacauucaaucauuggu

SEQ ID NO: 1433426 - RNA, 19 nt, Artificial Sequence
  Description of Artificial Sequence: Synthetic oligonucleotide
ugcggggucaccaccccaa

SEQ ID NO: 1433427 - RNA, 19 nt, Artificial Sequence
  Description of Artificial Sequence: Synthetic oligonucleotide
gucugaugaugcgauuaag

SEQ ID NO: 1433428 - RNA, 19 nt, Artificial Sequence
  Description of Artificial Sequence: Synthetic oligonucleotide
cuggagccuaucagauagg

SEQ ID NO: 1433429 - RNA, 19 nt, Artificial Sequence
  Description of Artificial Sequence: Synthetic oligonucleotide
gagucugaugaugcgauua

SEQ ID NO: 1433430 - RNA, 19 nt, Artificial Sequence
  Description of Artificial Sequence: Synthetic oligonucleotide
auaaugacuuuggcccuug

SEQ ID NO: 1433431 - RNA, 19 nt, Artificial Sequence
  Description of Artificial Sequence: Synthetic oligonucleotide
gugauaacuaauauaucau

SEQ ID NO: 1433432 - RNA, 19 nt, Artificial Sequence
  Description of Artificial Sequence: Synthetic oligonucleotide
cuucauacugcgccgcaga

SEQ ID NO: 1433433 - RNA, 19 nt, Artificial Sequence
  Description of Artificial Sequence: Synthetic oligonucleotide
ggacaagguggcaaucgcg

SEQ ID NO: 1433434 - RNA, 19 nt, Artificial Sequence
  Description of Artificial Sequence: Synthetic oligonucleotide
gacaagguggcaaucgcgu

SEQ ID NO: 1433435 - RNA, 19 nt, Artificial Sequence
  Description of Artificial Sequence: Synthetic oligonucleotide
cuaaccuuuugccuuacau

SEQ ID NO: 1433436 - RNA, 19 nt, Artificial Sequence
  Description of Artificial Sequence: Synthetic oligonucleotide
cguucacuguauuuagagg

SEQ ID NO: 1433437 - RNA, 19 nt, Artificial Sequence
  Description of Artificial Sequence: Synthetic oligonucleotide
gucucggcggcgucugccg

SEQ ID NO: 1433438 - RNA, 19 nt, Artificial Sequence
  Description of Artificial Sequence: Synthetic oligonucleotide
ggcgccacugaggacaagg

SEQ ID NO: 1433439 - RNA, 19 nt, Artificial Sequence
  Description of Artificial Sequence: Synthetic oligonucleotide
auacccugcacauccucuu

SEQ ID NO: 1433440 - RNA, 19 nt, Artificial Sequence
  Description of Artificial Sequence: Synthetic oligonucleotide
gguaaacagcgccaaaaua

SEQ ID NO: 1433441 - RNA, 19 nt, Artificial Sequence
  Description of Artificial Sequence: Synthetic oligonucleotide
agccuuuuccuggagcgcu

SEQ ID NO: 1433442 - RNA, 19 nt, Artificial Sequence
  Description of Artificial Sequence: Synthetic oligonucleotide
uaccagguuugugacacua

SEQ ID NO: 1433443 - RNA, 19 nt, Artificial Sequence
  Description of Artificial Sequence: Synthetic oligonucleotide
uuugcacaucuuggcgugc

SEQ ID NO: 1433444 - RNA, 19 nt, Artificial Sequence
  Description of Artificial Sequence: Synthetic oligonucleotide
uucaaucauuggugcucca

SEQ ID NO: 1433445 - RNA, 19 nt, Artificial Sequence
  Description of Artificial Sequence: Synthetic oligonucleotide
guagaacguauuucauaaa

SEQ ID NO: 1433446 - RNA, 19 nt, Artificial Sequence
  Description of Artificial Sequence: Synthetic oligonucleotide
acauggccggggugcgagc

SEQ ID NO: 1433447 - RNA, 19 nt, Artificial Sequence
  Description of Artificial Sequence: Synthetic oligonucleotide
gguccucccaguaaccgag

SEQ ID NO: 1433448 - RNA, 19 nt, Artificial Sequence
  Description of Artificial Sequence: Synthetic oligonucleotide
cacccgaccugaagguacc

SEQ ID NO: 1433449 - RNA, 19 nt, Artificial Sequence
  Description of Artificial Sequence: Synthetic oligonucleotide
gguucugagcuauaauugu

SEQ ID NO: 1433450 - RNA, 19 nt, Artificial Sequence
  Description of Artificial Sequence: Synthetic oligonucleotide
agguaccguuguguuaagg

SEQ ID NO: 1433451 - RNA, 19 nt, Artificial Sequence
  Description of Artificial Sequence: Synthetic oligonucleotide
cucuugcggggucaccacc

SEQ ID NO: 1433452 - RNA, 19 nt, Artificial Sequence
  Description of Artificial Sequence: Synthetic oligonucleotide
guuguauaauuccuccuuu

SEQ ID NO: 1433453 - RNA, 19 nt, Artificial Sequence
  Description of Artificial Sequence: Synthetic oligonucleotide
cagguuugugacacuauua

SEQ ID NO: 1433454 - RNA, 19 nt, Artificial Sequence
  Description of Artificial Sequence: Synthetic oligonucleotide
ugacacuauuaaguuguuu

SEQ ID NO: 1433455 - RNA, 19 nt, Artificial Sequence
  Description of Artificial Sequence: Synthetic oligonucleotide
ucgaacaggcagucuuuua

SEQ ID NO: 1433456 - RNA, 19 nt, Artificial Sequence
  Description of Artificial Sequence: Synthetic oligonucleotide
cuuugcaggguagcaacca

SEQ ID NO: 1433457 - RNA, 19 nt, Artificial Sequence
  Description of Artificial Sequence: Synthetic oligonucleotide
uuacuucaaggagucugau

SEQ ID NO: 1433458 - RNA, 19 nt, Artificial Sequence
  Description of Artificial Sequence: Synthetic oligonucleotide
ugcgcggacuguuggacuu

SEQ ID NO: 1433459 - RNA, 19 nt, Artificial Sequence
  Description of Artificial Sequence: Synthetic oligonucleotide
ucaccgggaucgugcgcgg

SEQ ID NO: 1433460 - RNA, 19 nt, Artificial Sequence
  Description of Artificial Sequence: Synthetic oligonucleotide
ucagauaggggcggucuuu

SEQ ID NO: 1433461 - RNA, 19 nt, Artificial Sequence
  Description of Artificial Sequence: Synthetic oligonucleotide
uaaccgaguaggagugcuu

SEQ ID NO: 1433462 - RNA, 19 nt, Artificial Sequence
  Description of Artificial Sequence: Synthetic oligonucleotide
ggagccuaucagauagggg

SEQ ID NO: 1433463 - RNA, 19 nt, Artificial Sequence
  Description of Artificial Sequence: Synthetic oligonucleotide
accuuuugccuuacauuug

SEQ ID NO: 1433464 - RNA, 19 nt, Artificial Sequence
  Description of Artificial Sequence: Synthetic oligonucleotide
cuugugcguggccuguauc

SEQ ID NO: 1433465 - RNA, 19 nt, Artificial Sequence
  Description of Artificial Sequence: Synthetic oligonucleotide
gcgccaaaauaacuuugcc

SEQ ID NO: 1433466 - RNA, 19 nt, Artificial Sequence
  Description of Artificial Sequence: Synthetic oligonucleotide
cuugcggggucaccacccc

SEQ ID NO: 1433467 - RNA, 19 nt, Artificial Sequence
  Description of Artificial Sequence: Synthetic oligonucleotide
uccucccaguaaccgagua

SEQ ID NO: 1433468 - RNA, 19 nt, Artificial Sequence
  Description of Artificial Sequence: Synthetic oligonucleotide
aucagauaggggcggucuu

SEQ ID NO: 1433469 - RNA, 19 nt, Artificial Sequence
  Description of Artificial Sequence: Synthetic oligonucleotide
caaucgcgugcaguuguag

SEQ ID NO: 1433470 - RNA, 19 nt, Artificial Sequence
  Description of Artificial Sequence: Synthetic oligonucleotide
cuguauuuagaggauucua

SEQ ID NO: 1433471 - RNA, 19 nt, Artificial Sequence
  Description of Artificial Sequence: Synthetic oligonucleotide
caguaucaaaucucuggua

SEQ ID NO: 1433472 - RNA, 19 nt, Artificial Sequence
  Description of Artificial Sequence: Synthetic oligonucleotide
gaucgugcgcggacuguug

SEQ ID NO: 1433473 - RNA, 19 nt, Artificial Sequence
  Description of Artificial Sequence: Synthetic oligonucleotide
uggcaaucgcgugcaguug

SEQ ID NO: 1433474 - RNA, 19 nt, Artificial Sequence
  Description of Artificial Sequence: Synthetic oligonucleotide
caucucacuuugcagggua

SEQ ID NO: 1433475 - RNA, 19 nt, Artificial Sequence
  Description of Artificial Sequence: Synthetic oligonucleotide
ucgugcgcggacuguugga

SEQ ID NO: 1433476 - RNA, 19 nt, Artificial Sequence
  Description of Artificial Sequence: Synthetic oligonucleotide
uugcggggucaccacccca

SEQ ID NO: 1433477 - RNA, 19 nt, Artificial Sequence
  Description of Artificial Sequence: Synthetic oligonucleotide
cagucauuccaaguuacua

SEQ ID NO: 1433478 - RNA, 19 nt, Artificial Sequence
  Description of Artificial Sequence: Synthetic oligonucleotide
cgugguugcagccuccaag

SEQ ID NO: 1433479 - RNA, 19 nt, Artificial Sequence
  Description of Artificial Sequence: Synthetic oligonucleotide
agaggauucuauagccuuu

SEQ ID NO: 1433480 - RNA, 19 nt, Artificial Sequence
  Description of Artificial Sequence: Synthetic oligonucleotide
ucgcgugcaguuguagcuc

SEQ ID NO: 1433481 - RNA, 19 nt, Artificial Sequence
  Description of Artificial Sequence: Synthetic oligonucleotide
cuguuguauaauuccuccu

SEQ ID NO: 1433482 - RNA, 19 nt, Artificial Sequence
  Description of Artificial Sequence: Synthetic oligonucleotide
ugacggucauaaugacuuu

SEQ ID NO: 1433483 - RNA, 19 nt, Artificial Sequence
  Description of Artificial Sequence: Synthetic oligonucleotide
caaaggcgccacugaggac

SEQ ID NO: 1433484 - RNA, 19 nt, Artificial Sequence
  Description of Artificial Sequence: Synthetic oligonucleotide
uucuaaccuuuugccuuac

SEQ ID NO: 1433485 - RNA, 19 nt, Artificial Sequence
  Description of Artificial Sequence: Synthetic oligonucleotide
caaaguaggcaagccacua

SEQ ID NO: 1433486 - RNA, 19 nt, Artificial Sequence
  Description of Artificial Sequence: Synthetic oligonucleotide
uggcucauucagugucuuc

SEQ ID NO: 1433487 - RNA, 19 nt, Artificial Sequence
  Description of Artificial Sequence: Synthetic oligonucleotide
ccgaguaggagugcuuucc

SEQ ID NO: 1433488 - RNA, 19 nt, Artificial Sequence
  Description of Artificial Sequence: Synthetic oligonucleotide
ugugcguggccuguaucuu

SEQ ID NO: 1433489 - RNA, 19 nt, Artificial Sequence
  Description of Artificial Sequence: Synthetic oligonucleotide
guaaccgaguaggagugcu

SEQ ID NO: 1433490 - RNA, 19 nt, Artificial Sequence
  Description of Artificial Sequence: Synthetic oligonucleotide
guggcaaucgcgugcaguu

SEQ ID NO: 1433491 - RNA, 19 nt, Artificial Sequence
  Description of Artificial Sequence: Synthetic oligonucleotide
gccuaucagauaggggcgg

SEQ ID NO: 1433492 - RNA, 19 nt, Artificial Sequence
  Description of Artificial Sequence: Synthetic oligonucleotide
cccaguaaccgaguaggag

SEQ ID NO: 1433493 - RNA, 19 nt, Artificial Sequence
  Description of Artificial Sequence: Synthetic oligonucleotide
gucguucacuguauuuaga

SEQ ID NO: 1433494 - RNA, 19 nt, Artificial Sequence
  Description of Artificial Sequence: Synthetic oligonucleotide
caugauuuauuagccaguu

SEQ ID NO: 1433495 - RNA, 19 nt, Artificial Sequence
  Description of Artificial Sequence: Synthetic oligonucleotide
ucucggcggcgucugccgu

SEQ ID NO: 1433496 - RNA, 19 nt, Artificial Sequence
  Description of Artificial Sequence: Synthetic oligonucleotide
ccacccgaccugaagguac

SEQ ID NO: 1433497 - RNA, 19 nt, Artificial Sequence
  Description of Artificial Sequence: Synthetic oligonucleotide
agcuauaauuguggugaua

SEQ ID NO: 1433498 - RNA, 19 nt, Artificial Sequence
  Description of Artificial Sequence: Synthetic oligonucleotide
cuuugcucguuuugcacau

SEQ ID NO: 1433499 - RNA, 19 nt, Artificial Sequence
  Description of Artificial Sequence: Synthetic oligonucleotide
cagcagucauuccaaguua

SEQ ID NO: 1433500 - RNA, 19 nt, Artificial Sequence
  Description of Artificial Sequence: Synthetic oligonucleotide
gacgcggguuccacaaaga

SEQ ID NO: 1433501 - RNA, 19 nt, Artificial Sequence
  Description of Artificial Sequence: Synthetic oligonucleotide
gucagacgcggguuccaca

SEQ ID NO: 1433502 - RNA, 19 nt, Artificial Sequence
  Description of Artificial Sequence: Synthetic oligonucleotide
uggagcgcuuuugcuuucu

SEQ ID NO: 1433503 - RNA, 19 nt, Artificial Sequence
  Description of Artificial Sequence: Synthetic oligonucleotide
uuugcucguuuugcacauc

SEQ ID NO: 1433504 - RNA, 19 nt, Artificial Sequence
  Description of Artificial Sequence: Synthetic oligonucleotide
caaagacaggggcuugucu

SEQ ID NO: 1433505 - RNA, 19 nt, Artificial Sequence
  Description of Artificial Sequence: Synthetic oligonucleotide
auucagcuaaacaguucua

SEQ ID NO: 1433506 - RNA, 19 nt, Artificial Sequence
  Description of Artificial Sequence: Synthetic oligonucleotide
gcaaggcuccuccucgaac

SEQ ID NO: 1433507 - RNA, 19 nt, Artificial Sequence
  Description of Artificial Sequence: Synthetic oligonucleotide
uggcgugcuuggcuuucaa

SEQ ID NO: 1433508 - RNA, 19 nt, Artificial Sequence
  Description of Artificial Sequence: Synthetic oligonucleotide
gccaucgauuaauagcugu

SEQ ID NO: 1433509 - RNA, 19 nt, Artificial Sequence
  Description of Artificial Sequence: Synthetic oligonucleotide
caccccaaucaccgggauc

SEQ ID NO: 1433510 - RNA, 19 nt, Artificial Sequence
  Description of Artificial Sequence: Synthetic oligonucleotide
caucgauuaauagcuguau

SEQ ID NO: 1433511 - RNA, 19 nt, Artificial Sequence
  Description of Artificial Sequence: Synthetic oligonucleotide
cugccgugguugcagccuc

SEQ ID NO: 1433512 - RNA, 19 nt, Artificial Sequence
  Description of Artificial Sequence: Synthetic oligonucleotide
gcccuugguaaacagauuu

SEQ ID NO: 1433513 - RNA, 19 nt, Artificial Sequence
  Description of Artificial Sequence: Synthetic oligonucleotide
cugcgccgcagaccacucg

SEQ ID NO: 1433514 - RNA, 19 nt, Artificial Sequence
  Description of Artificial Sequence: Synthetic oligonucleotide
cuuuggcccuugguaaaca

SEQ ID NO: 1433515 - RNA, 19 nt, Artificial Sequence
  Description of Artificial Sequence: Synthetic oligonucleotide
caguucuaaguagaacgua

SEQ ID NO: 1433516 - RNA, 19 nt, Artificial Sequence
  Description of Artificial Sequence: Synthetic oligonucleotide
cucggcggcgucugccgug

SEQ ID NO: 1433517 - RNA, 19 nt, Artificial Sequence
  Description of Artificial Sequence: Synthetic oligonucleotide
acccgaccugaagguaccg

SEQ ID NO: 1433518 - RNA, 19 nt, Artificial Sequence
  Description of Artificial Sequence: Synthetic oligonucleotide
cggucauaaugacuuuggc

SEQ ID NO: 1433519 - RNA, 19 nt, Artificial Sequence
  Description of Artificial Sequence: Synthetic oligonucleotide
ccaucgauuaauagcugua

SEQ ID NO: 1433520 - RNA, 19 nt, Artificial Sequence
  Description of Artificial Sequence: Synthetic oligonucleotide
cuggagcgcuuuugcuuuc

SEQ ID NO: 1433521 - RNA, 19 nt, Artificial Sequence
  Description of Artificial Sequence: Synthetic oligonucleotide
aaggcgccacugaggacaa

SEQ ID NO: 1433522 - RNA, 19 nt, Artificial Sequence
  Description of Artificial Sequence: Synthetic oligonucleotide
cgaccugaagguaccguug

SEQ ID NO: 1433523 - RNA, 19 nt, Artificial Sequence
  Description of Artificial Sequence: Synthetic oligonucleotide
gcauauacucuuugcucgu

SEQ ID NO: 1433524 - RNA, 19 nt, Artificial Sequence
  Description of Artificial Sequence: Synthetic oligonucleotide
accguuguguuaaggccuu

SEQ ID NO: 1433525 - RNA, 19 nt, Artificial Sequence
  Description of Artificial Sequence: Synthetic oligonucleotide
cugcaaggcuccuccucga

SEQ ID NO: 1433526 - RNA, 19 nt, Artificial Sequence
  Description of Artificial Sequence: Synthetic oligonucleotide
cuucaaggagucugaugau

SEQ ID NO: 1433527 - RNA, 19 nt, Artificial Sequence
  Description of Artificial Sequence: Synthetic oligonucleotide
ccauucugauaauauugua

SEQ ID NO: 1433528 - RNA, 19 nt, Artificial Sequence
  Description of Artificial Sequence: Synthetic oligonucleotide
gcgucugccgugguugcag

SEQ ID NO: 1433529 - RNA, 19 nt, Artificial Sequence
  Description of Artificial Sequence: Synthetic oligonucleotide
ugaugcgauuaagguccau

SEQ ID NO: 1433530 - RNA, 19 nt, Artificial Sequence
  Description of Artificial Sequence: Synthetic oligonucleotide
aggucagacgcggguucca

SEQ ID NO: 1433531 - RNA, 19 nt, Artificial Sequence
  Description of Artificial Sequence: Synthetic oligonucleotide
gcagaccacucgaugaucu

SEQ ID NO: 1433532 - RNA, 19 nt, Artificial Sequence
  Description of Artificial Sequence: Synthetic oligonucleotide
gggcuugucuuuucuaauu

SEQ ID NO: 1433533 - RNA, 19 nt, Artificial Sequence
  Description of Artificial Sequence: Synthetic oligonucleotide
ggagugcuuuccacuguca

SEQ ID NO: 1433534 - RNA, 19 nt, Artificial Sequence
  Description of Artificial Sequence: Synthetic oligonucleotide
cgauuaauagcuguauagu

SEQ ID NO: 1433535 - RNA, 19 nt, Artificial Sequence
  Description of Artificial Sequence: Synthetic oligonucleotide
cacaaagacaggggcuugu

SEQ ID NO: 1433536 - RNA, 19 nt, Artificial Sequence
  Description of Artificial Sequence: Synthetic oligonucleotide
ccucuugcggggucaccac

SEQ ID NO: 1433537 - RNA, 19 nt, Artificial Sequence
  Description of Artificial Sequence: Synthetic oligonucleotide
gccagcagucauuccaagu

SEQ ID NO: 1433538 - RNA, 19 nt, Artificial Sequence
  Description of Artificial Sequence: Synthetic oligonucleotide
ggucagacgcggguuccac

SEQ ID NO: 1433539 - RNA, 19 nt, Artificial Sequence
  Description of Artificial Sequence: Synthetic oligonucleotide
cgcggguuccacaaagaca

SEQ ID NO: 1433540 - RNA, 19 nt, Artificial Sequence
  Description of Artificial Sequence: Synthetic oligonucleotide
caggguucugagcuauaau

SEQ ID NO: 1433541 - RNA, 19 nt, Artificial Sequence
  Description of Artificial Sequence: Synthetic oligonucleotide
cuaagcugacggucauaau

SEQ ID NO: 1433542 - RNA, 19 nt, Artificial Sequence
  Description of Artificial Sequence: Synthetic oligonucleotide
gugcgcggacuguuggacu

SEQ ID NO: 1433543 - RNA, 19 nt, Artificial Sequence
  Description of Artificial Sequence: Synthetic oligonucleotide
gguggcaaucgcgugcagu

SEQ ID NO: 1433544 - RNA, 19 nt, Artificial Sequence
  Description of Artificial Sequence: Synthetic oligonucleotide
gcguggccuguaucuuugc

SEQ ID NO: 1433545 - RNA, 19 nt, Artificial Sequence
  Description of Artificial Sequence: Synthetic oligonucleotide
ccacaaagacaggggcuug

SEQ ID NO: 1433546 - RNA, 19 nt, Artificial Sequence
  Description of Artificial Sequence: Synthetic oligonucleotide
ccagagguccucccaguaa

SEQ ID NO: 1433547 - RNA, 19 nt, Artificial Sequence
  Description of Artificial Sequence: Synthetic oligonucleotide
cauauacucuuugcucguu

SEQ ID NO: 1433548 - RNA, 19 nt, Artificial Sequence
  Description of Artificial Sequence: Synthetic oligonucleotide
gugcguggccuguaucuuu

SEQ ID NO: 1433549 - RNA, 19 nt, Artificial Sequence
  Description of Artificial Sequence: Synthetic oligonucleotide
cgugcgcggacuguuggac

SEQ ID NO: 1433550 - RNA, 19 nt, Artificial Sequence
  Description of Artificial Sequence: Synthetic oligonucleotide
cagacgcggguuccacaaa

SEQ ID NO: 1433551 - RNA, 19 nt, Artificial Sequence
  Description of Artificial Sequence: Synthetic oligonucleotide
ccagguuugugacacuauu

SEQ ID NO: 1433552 - RNA, 19 nt, Artificial Sequence
  Description of Artificial Sequence: Synthetic oligonucleotide
ggguagcaaccaucuucaa

SEQ ID NO: 1433553 - RNA, 19 nt, Artificial Sequence
  Description of Artificial Sequence: Synthetic oligonucleotide
cucgaacaggcagucuuuu

SEQ ID NO: 1433554 - RNA, 19 nt, Artificial Sequence
  Description of Artificial Sequence: Synthetic oligonucleotide
cagauaggggcggucuuuu

SEQ ID NO: 1433555 - RNA, 19 nt, Artificial Sequence
  Description of Artificial Sequence: Synthetic oligonucleotide
ccacucgaugaucuugagu

SEQ ID NO: 1433556 - RNA, 19 nt, Artificial Sequence
  Description of Artificial Sequence: Synthetic oligonucleotide
gccggggugcgagccugcg

SEQ ID NO: 1433557 - RNA, 19 nt, Artificial Sequence
  Description of Artificial Sequence: Synthetic oligonucleotide
gugacacuauuaaguuguu

SEQ ID NO: 1433558 - RNA, 19 nt, Artificial Sequence
  Description of Artificial Sequence: Synthetic oligonucleotide
ggcgugcuuggcuuucaau

SEQ ID NO: 1433559 - RNA, 19 nt, Artificial Sequence
  Description of Artificial Sequence: Synthetic oligonucleotide
ggagucugaugaugcgauu

SEQ ID NO: 1433560 - RNA, 19 nt, Artificial Sequence
  Description of Artificial Sequence: Synthetic oligonucleotide
cgccgcagaccacucgaug

SEQ ID NO: 1433561 - RNA, 19 nt, Artificial Sequence
  Description of Artificial Sequence: Synthetic oligonucleotide
gcgcggacuguuggacuug

SEQ ID NO: 1433562 - RNA, 19 nt, Artificial Sequence
  Description of Artificial Sequence: Synthetic oligonucleotide
gccaggucccuuagaggaa

SEQ ID NO: 1433563 - RNA, 19 nt, Artificial Sequence
  Description of Artificial Sequence: Synthetic oligonucleotide
gcaaucgcgugcaguugua

SEQ ID NO: 1433564 - RNA, 19 nt, Artificial Sequence
  Description of Artificial Sequence: Synthetic oligonucleotide
aggcgccacugaggacaag

SEQ ID NO: 1433565 - RNA, 19 nt, Artificial Sequence
  Description of Artificial Sequence: Synthetic oligonucleotide
ccgaccugaagguaccguu

SEQ ID NO: 1433566 - RNA, 19 nt, Artificial Sequence
  Description of Artificial Sequence: Synthetic oligonucleotide
cgggaucgugcgcggacug

SEQ ID NO: 1433567 - RNA, 19 nt, Artificial Sequence
  Description of Artificial Sequence: Synthetic oligonucleotide
cgcagaccacucgaugauc

SEQ ID NO: 1433568 - RNA, 19 nt, Artificial Sequence
  Description of Artificial Sequence: Synthetic oligonucleotide
ggaucgugcgcggacuguu

SEQ ID NO: 1433569 - RNA, 19 nt, Artificial Sequence
  Description of Artificial Sequence: Synthetic oligonucleotide
ggcgucugccgugguugca

SEQ ID NO: 1433570 - RNA, 19 nt, Artificial Sequence
  Description of Artificial Sequence: Synthetic oligonucleotide
caccgggaucgugcgcgga

SEQ ID NO: 1433571 - RNA, 19 nt, Artificial Sequence
  Description of Artificial Sequence: Synthetic oligonucleotide
ccucgaacaggcagucuuu

SEQ ID NO: 1433572 - RNA, 19 nt, Artificial Sequence
  Description of Artificial Sequence: Synthetic oligonucleotide
gcgcacagacucaggauuu

SEQ ID NO: 1433573 - RNA, 19 nt, Artificial Sequence
  Description of Artificial Sequence: Synthetic oligonucleotide
ggagcgcuuuugcuuucuu

SEQ ID NO: 1433574 - RNA, 19 nt, Artificial Sequence
  Description of Artificial Sequence: Synthetic oligonucleotide
gcgccacugaggacaaggu

SEQ ID NO: 1433575 - RNA, 19 nt, Artificial Sequence
  Description of Artificial Sequence: Synthetic oligonucleotide
gggaucgugcgcggacugu

SEQ ID NO: 1433576 - RNA, 19 nt, Artificial Sequence
  Description of Artificial Sequence: Synthetic oligonucleotide
gcacauccucuugcggggu

SEQ ID NO: 1433577 - RNA, 19 nt, Artificial Sequence
  Description of Artificial Sequence: Synthetic oligonucleotide
cgcgugcaguuguagcucu

SEQ ID NO: 1433578 - RNA, 19 nt, Artificial Sequence
  Description of Artificial Sequence: Synthetic oligonucleotide
ccgugguugcagccuccaa

SEQ ID NO: 1433579 - RNA, 19 nt, Artificial Sequence
  Description of Artificial Sequence: Synthetic oligonucleotide
cccgaccugaagguaccgu

SEQ ID NO: 1433580 - RNA, 19 nt, Artificial Sequence
  Description of Artificial Sequence: Synthetic oligonucleotide
ccgggaucgugcgcggacu

SEQ ID NO: 1433581 - RNA, 19 nt, Artificial Sequence
  Description of Artificial Sequence: Synthetic oligonucleotide
ccuuuuccuggagcgcuuu

SEQ ID NO: 1433582 - RNA, 19 nt, Artificial Sequence
  Description of Artificial Sequence: Synthetic oligonucleotide
gcgccgcagaccacucgau

SEQ ID NO: 1433583 - RNA, 19 nt, Artificial Sequence
  Description of Artificial Sequence: Synthetic oligonucleotide
ccccaaucaccgggaucgu

SEQ ID NO: 1433584 - RNA, 19 nt, Artificial Sequence
  Description of Artificial Sequence: Synthetic oligonucleotide
uguacuuaaaccaugaugg

SEQ ID NO: 1433585 - RNA, 19 nt, Artificial Sequence
  Description of Artificial Sequence: Synthetic oligonucleotide
aaccacggcaauuagaucc

SEQ ID NO: 1433586 - RNA, 19 nt, Artificial Sequence
  Description of Artificial Sequence: Synthetic oligonucleotide
aaacauaagauuuacagaa

SEQ ID NO: 1433587 - RNA, 19 nt, Artificial Sequence
  Description of Artificial Sequence: Synthetic oligonucleotide
aacgaauccaagcagaguc

SEQ ID NO: 1433588 - RNA, 19 nt, Artificial Sequence
  Description of Artificial Sequence: Synthetic oligonucleotide
agaaucuacacuuaacagc

SEQ ID NO: 1433589 - RNA, 19 nt, Artificial Sequence
  Description of Artificial Sequence: Synthetic oligonucleotide
aaguuuaaaagucccuccc

SEQ ID NO: 1433590 - RNA, 19 nt, Artificial Sequence
  Description of Artificial Sequence: Synthetic oligonucleotide
aauguuauuagugagggcu

SEQ ID NO: 1433591 - RNA, 19 nt, Artificial Sequence
  Description of Artificial Sequence: Synthetic oligonucleotide
uacaguaucagguagggcc

SEQ ID NO: 1433592 - RNA, 19 nt, Artificial Sequence
  Description of Artificial Sequence: Synthetic oligonucleotide
aaagucacaauguuauuag

SEQ ID NO: 1433593 - RNA, 19 nt, Artificial Sequence
  Description of Artificial Sequence: Synthetic oligonucleotide
uccuuaaugauccugcggg

SEQ ID NO: 1433594 - RNA, 19 nt, Artificial Sequence
  Description of Artificial Sequence: Synthetic oligonucleotide
uauuauucauggcauauag

SEQ ID NO: 1433595 - RNA, 19 nt, Artificial Sequence
  Description of Artificial Sequence: Synthetic oligonucleotide
auaaacuaguacaaaaggc

SEQ ID NO: 1433596 - RNA, 19 nt, Artificial Sequence
  Description of Artificial Sequence: Synthetic oligonucleotide
ugaaacguacuuuaggugc

SEQ ID NO: 1433597 - RNA, 19 nt, Artificial Sequence
  Description of Artificial Sequence: Synthetic oligonucleotide
cauagauuugcuaaugugc

SEQ ID NO: 1433598 - RNA, 19 nt, Artificial Sequence
  Description of Artificial Sequence: Synthetic oligonucleotide
ucuguaauguuucuaagac

SEQ ID NO: 1433599 - RNA, 19 nt, Artificial Sequence
  Description of Artificial Sequence: Synthetic oligonucleotide
agugauguacacuugauga

SEQ ID NO: 1433600 - RNA, 19 nt, Artificial Sequence
  Description of Artificial Sequence: Synthetic oligonucleotide
aaauacgauugucacauug

SEQ ID NO: 1433601 - RNA, 19 nt, Artificial Sequence
  Description of Artificial Sequence: Synthetic oligonucleotide
aauagauaauucugaaugu

SEQ ID NO: 1433602 - RNA, 19 nt, Artificial Sequence
  Description of Artificial Sequence: Synthetic oligonucleotide
uuuguuaacaaaaugcauu

SEQ ID NO: 1433603 - RNA, 19 nt, Artificial Sequence
  Description of Artificial Sequence: Synthetic oligonucleotide
acacuugaugaucugaucg

SEQ ID NO: 1433604 - RNA, 19 nt, Artificial Sequence
  Description of Artificial Sequence: Synthetic oligonucleotide
ucaugaaacguacuuuagg

SEQ ID NO: 1433605 - RNA, 19 nt, Artificial Sequence
  Description of Artificial Sequence: Synthetic oligonucleotide
uuaggagcacuuaacaaag

SEQ ID NO: 1433606 - RNA, 19 nt, Artificial Sequence
  Description of Artificial Sequence: Synthetic oligonucleotide
uugauagcagaacugugcg

SEQ ID NO: 1433607 - RNA, 19 nt, Artificial Sequence
  Description of Artificial Sequence: Synthetic oligonucleotide
aaaauaacgggcguugcuc

SEQ ID NO: 1433608 - RNA, 19 nt, Artificial Sequence
  Description of Artificial Sequence: Synthetic oligonucleotide
uuuaaugccaggaacuggu

SEQ ID NO: 1433609 - RNA, 19 nt, Artificial Sequence
  Description of Artificial Sequence: Synthetic oligonucleotide
aucgacuuaaauauuauuc

SEQ ID NO: 1433610 - RNA, 19 nt, Artificial Sequence
  Description of Artificial Sequence: Synthetic oligonucleotide
gaccacaugaaaauaacgg

SEQ ID NO: 1433611 - RNA, 19 nt, Artificial Sequence
  Description of Artificial Sequence: Synthetic oligonucleotide
guuagacuuggcuagagag

SEQ ID NO: 1433612 - RNA, 19 nt, Artificial Sequence
  Description of Artificial Sequence: Synthetic oligonucleotide
uuaaccacggcaauuagau

SEQ ID NO: 1433613 - RNA, 19 nt, Artificial Sequence
  Description of Artificial Sequence: Synthetic oligonucleotide
aggagcacuuaacaaagcc

SEQ ID NO: 1433614 - RNA, 19 nt, Artificial Sequence
  Description of Artificial Sequence: Synthetic oligonucleotide
uaagauuuacagaaguuuc

SEQ ID NO: 1433615 - RNA, 19 nt, Artificial Sequence
  Description of Artificial Sequence: Synthetic oligonucleotide
ucgacuuaaauauuauuca

SEQ ID NO: 1433616 - RNA, 19 nt, Artificial Sequence
  Description of Artificial Sequence: Synthetic oligonucleotide
uuaggaugauaaauuuugg

SEQ ID NO: 1433617 - RNA, 19 nt, Artificial Sequence
  Description of Artificial Sequence: Synthetic oligonucleotide
uugcuaacggaucaucugg

SEQ ID NO: 1433618 - RNA, 19 nt, Artificial Sequence
  Description of Artificial Sequence: Synthetic oligonucleotide
auuagaucccaaaagagag

SEQ ID NO: 1433619 - RNA, 19 nt, Artificial Sequence
  Description of Artificial Sequence: Synthetic oligonucleotide
aauacgauugucacauugg

SEQ ID NO: 1433620 - RNA, 19 nt, Artificial Sequence
  Description of Artificial Sequence: Synthetic oligonucleotide
uuuacagaaguuuccagac

SEQ ID NO: 1433621 - RNA, 19 nt, Artificial Sequence
  Description of Artificial Sequence: Synthetic oligonucleotide
auuaggaugauaaauuuug

SEQ ID NO: 1433622 - RNA, 19 nt, Artificial Sequence
  Description of Artificial Sequence: Synthetic oligonucleotide
aucugaucgacuuaaauau

SEQ ID NO: 1433623 - RNA, 19 nt, Artificial Sequence
  Description of Artificial Sequence: Synthetic oligonucleotide
uaaucaccaaagaugaaga

SEQ ID NO: 1433624 - RNA, 19 nt, Artificial Sequence
  Description of Artificial Sequence: Synthetic oligonucleotide
caguuuuaauuuuaaauac

SEQ ID NO: 1433625 - RNA, 19 nt, Artificial Sequence
  Description of Artificial Sequence: Synthetic oligonucleotide
agacaagccauacaaaaug

SEQ ID NO: 1433626 - RNA, 19 nt, Artificial Sequence
  Description of Artificial Sequence: Synthetic oligonucleotide
aauuguaacaacugcugaa

SEQ ID NO: 1433627 - RNA, 19 nt, Artificial Sequence
  Description of Artificial Sequence: Synthetic oligonucleotide
ucuacacuuaacagcaaag

SEQ ID NO: 1433628 - RNA, 19 nt, Artificial Sequence
  Description of Artificial Sequence: Synthetic oligonucleotide
agaugauacuucuagccuc

SEQ ID NO: 1433629 - RNA, 19 nt, Artificial Sequence
  Description of Artificial Sequence: Synthetic oligonucleotide
cagacaaucaagcuugucc

SEQ ID NO: 1433630 - RNA, 19 nt, Artificial Sequence
  Description of Artificial Sequence: Synthetic oligonucleotide
ucuuacauguuagaaaaug

SEQ ID NO: 1433631 - RNA, 19 nt, Artificial Sequence
  Description of Artificial Sequence: Synthetic oligonucleotide
uugguucagacaaucaagc

SEQ ID NO: 1433632 - RNA, 19 nt, Artificial Sequence
  Description of Artificial Sequence: Synthetic oligonucleotide
uucuaaauauuuguuaaca

SEQ ID NO: 1433633 - RNA, 19 nt, Artificial Sequence
  Description of Artificial Sequence: Synthetic oligonucleotide
aguucaaguuuaaaagucc

SEQ ID NO: 1433634 - RNA, 19 nt, Artificial Sequence
  Description of Artificial Sequence: Synthetic oligonucleotide
aguuuuaauuuuaaauacg

SEQ ID NO: 1433635 - RNA, 19 nt, Artificial Sequence
  Description of Artificial Sequence: Synthetic oligonucleotide
auuaggagcacuuaacaaa

SEQ ID NO: 1433636 - RNA, 19 nt, Artificial Sequence
  Description of Artificial Sequence: Synthetic oligonucleotide
uuuacaguaucagguaggg

SEQ ID NO: 1433637 - RNA, 19 nt, Artificial Sequence
  Description of Artificial Sequence: Synthetic oligonucleotide
caagaauuguaacaacugc

SEQ ID NO: 1433638 - RNA, 19 nt, Artificial Sequence
  Description of Artificial Sequence: Synthetic oligonucleotide
ugcuuuacaacagugaauc

SEQ ID NO: 1433639 - RNA, 19 nt, Artificial Sequence
  Description of Artificial Sequence: Synthetic oligonucleotide
ugggaaagugaaauaaaca

SEQ ID NO: 1433640 - RNA, 19 nt, Artificial Sequence
  Description of Artificial Sequence: Synthetic oligonucleotide
uacuuaaaccaugaugggg

SEQ ID NO: 1433641 - RNA, 19 nt, Artificial Sequence
  Description of Artificial Sequence: Synthetic oligonucleotide
acgauugucacauugggaa

SEQ ID NO: 1433642 - RNA, 19 nt, Artificial Sequence
  Description of Artificial Sequence: Synthetic oligonucleotide
ucacaauguuauuagugag

SEQ ID NO: 1433643 - RNA, 19 nt, Artificial Sequence
  Description of Artificial Sequence: Synthetic oligonucleotide
aagugauguacacuugaug

SEQ ID NO: 1433644 - RNA, 19 nt, Artificial Sequence
  Description of Artificial Sequence: Synthetic oligonucleotide
uguuaucugcccaagaauu

SEQ ID NO: 1433645 - RNA, 19 nt, Artificial Sequence
  Description of Artificial Sequence: Synthetic oligonucleotide
uuagacuuggcuagagagc

SEQ ID NO: 1433646 - RNA, 19 nt, Artificial Sequence
  Description of Artificial Sequence: Synthetic oligonucleotide
aucaggacaagacauagau

SEQ ID NO: 1433647 - RNA, 19 nt, Artificial Sequence
  Description of Artificial Sequence: Synthetic oligonucleotide
uuggcuagagagcauauuc

SEQ ID NO: 1433648 - RNA, 19 nt, Artificial Sequence
  Description of Artificial Sequence: Synthetic oligonucleotide
agauaauucugaauguuuc

SEQ ID NO: 1433649 - RNA, 19 nt, Artificial Sequence
  Description of Artificial Sequence: Synthetic oligonucleotide
cacuuaacagcaaagucac

SEQ ID NO: 1433650 - RNA, 19 nt, Artificial Sequence
  Description of Artificial Sequence: Synthetic oligonucleotide
aacacccauaccccugggc

SEQ ID NO: 1433651 - RNA, 19 nt, Artificial Sequence
  Description of Artificial Sequence: Synthetic oligonucleotide
aaagauguuaucugcccaa

SEQ ID NO: 1433652 - RNA, 19 nt, Artificial Sequence
  Description of Artificial Sequence: Synthetic oligonucleotide
uuugcuaacggaucaucug

SEQ ID NO: 1433653 - RNA, 19 nt, Artificial Sequence
  Description of Artificial Sequence: Synthetic oligonucleotide
ugguuagcugcauuuaacc

SEQ ID NO: 1433654 - RNA, 19 nt, Artificial Sequence
  Description of Artificial Sequence: Synthetic oligonucleotide
ugauaaauuuuggucauga

SEQ ID NO: 1433655 - RNA, 19 nt, Artificial Sequence
  Description of Artificial Sequence: Synthetic oligonucleotide
gacuuaaauauuauucaug

SEQ ID NO: 1433656 - RNA, 19 nt, Artificial Sequence
  Description of Artificial Sequence: Synthetic oligonucleotide
uccauuaaaugcaaacaaa

SEQ ID NO: 1433657 - RNA, 19 nt, Artificial Sequence
  Description of Artificial Sequence: Synthetic oligonucleotide
guuagcugcauuuaaccac

SEQ ID NO: 1433658 - RNA, 19 nt, Artificial Sequence
  Description of Artificial Sequence: Synthetic oligonucleotide
aaauaacgggcguugcucu

SEQ ID NO: 1433659 - RNA, 19 nt, Artificial Sequence
  Description of Artificial Sequence: Synthetic oligonucleotide
uuuaaccacggcaauuaga

SEQ ID NO: 1433660 - RNA, 19 nt, Artificial Sequence
  Description of Artificial Sequence: Synthetic oligonucleotide
aauuuuggucaugaaacgu

SEQ ID NO: 1433661 - RNA, 19 nt, Artificial Sequence
  Description of Artificial Sequence: Synthetic oligonucleotide
uggauugauagcagaacug

SEQ ID NO: 1433662 - RNA, 19 nt, Artificial Sequence
  Description of Artificial Sequence: Synthetic oligonucleotide
ucuacagcgucuaaaguua

SEQ ID NO: 1433663 - RNA, 19 nt, Artificial Sequence
  Description of Artificial Sequence: Synthetic oligonucleotide
uacaucauuugcuaacgga

SEQ ID NO: 1433664 - RNA, 19 nt, Artificial Sequence
  Description of Artificial Sequence: Synthetic oligonucleotide
acauauucuucccaacuug

SEQ ID NO: 1433665 - RNA, 19 nt, Artificial Sequence
  Description of Artificial Sequence: Synthetic oligonucleotide
aucaagcuuguccaucuac

SEQ ID NO: 1433666 - RNA, 19 nt, Artificial Sequence
  Description of Artificial Sequence: Synthetic oligonucleotide
aaggcaaaaguaguaauaa

SEQ ID NO: 1433667 - RNA, 19 nt, Artificial Sequence
  Description of Artificial Sequence: Synthetic oligonucleotide
aagacauagauuugcuaau

SEQ ID NO: 1433668 - RNA, 19 nt, Artificial Sequence
  Description of Artificial Sequence: Synthetic oligonucleotide
uuaaugauccugcggggca

SEQ ID NO: 1433669 - RNA, 19 nt, Artificial Sequence
  Description of Artificial Sequence: Synthetic oligonucleotide
acagcgucuaaaguuagac

SEQ ID NO: 1433670 - RNA, 19 nt, Artificial Sequence
  Description of Artificial Sequence: Synthetic oligonucleotide
cauauagccuaguccaugc

SEQ ID NO: 1433671 - RNA, 19 nt, Artificial Sequence
  Description of Artificial Sequence: Synthetic oligonucleotide
acccagaugauacuucuag

SEQ ID NO: 1433672 - RNA, 19 nt, Artificial Sequence
  Description of Artificial Sequence: Synthetic oligonucleotide
auuauucauggcauauagc

SEQ ID NO: 1433673 - RNA, 19 nt, Artificial Sequence
  Description of Artificial Sequence: Synthetic oligonucleotide
gccauuagcaauuuuauuc

SEQ ID NO: 1433674 - RNA, 19 nt, Artificial Sequence
  Description of Artificial Sequence: Synthetic oligonucleotide
acuuaaaccaugaugggga

SEQ ID NO: 1433675 - RNA, 19 nt, Artificial Sequence
  Description of Artificial Sequence: Synthetic oligonucleotide
agaagugauguacacuuga

SEQ ID NO: 1433676 - RNA, 19 nt, Artificial Sequence
  Description of Artificial Sequence: Synthetic oligonucleotide
aggcaaaaguaguaauaac

SEQ ID NO: 1433677 - RNA, 19 nt, Artificial Sequence
  Description of Artificial Sequence: Synthetic oligonucleotide
uagacuuggcuagagagca

SEQ ID NO: 1433678 - RNA, 19 nt, Artificial Sequence
  Description of Artificial Sequence: Synthetic oligonucleotide
auguaaucaccaaagauga

SEQ ID NO: 1433679 - RNA, 19 nt, Artificial Sequence
  Description of Artificial Sequence: Synthetic oligonucleotide
ggcaauuagaucccaaaag

SEQ ID NO: 1433680 - RNA, 19 nt, Artificial Sequence
  Description of Artificial Sequence: Synthetic oligonucleotide
uggggaaacgaauccaagc

SEQ ID NO: 1433681 - RNA, 19 nt, Artificial Sequence
  Description of Artificial Sequence: Synthetic oligonucleotide
aauaacgggcguugcucuc

SEQ ID NO: 1433682 - RNA, 19 nt, Artificial Sequence
  Description of Artificial Sequence: Synthetic oligonucleotide
auaagauuuacagaaguuu

SEQ ID NO: 1433683 - RNA, 19 nt, Artificial Sequence
  Description of Artificial Sequence: Synthetic oligonucleotide
gagcacuuaacaaagccug

SEQ ID NO: 1433684 - RNA, 19 nt, Artificial Sequence
  Description of Artificial Sequence: Synthetic oligonucleotide
uagauaauucugaauguuu

SEQ ID NO: 1433685 - RNA, 19 nt, Artificial Sequence
  Description of Artificial Sequence: Synthetic oligonucleotide
auuuacaguaucagguagg

SEQ ID NO: 1433686 - RNA, 19 nt, Artificial Sequence
  Description of Artificial Sequence: Synthetic oligonucleotide
augaaacguacuuuaggug

SEQ ID NO: 1433687 - RNA, 19 nt, Artificial Sequence
  Description of Artificial Sequence: Synthetic oligonucleotide
uggauuaggagcacuuaac

SEQ ID NO: 1433688 - RNA, 19 nt, Artificial Sequence
  Description of Artificial Sequence: Synthetic oligonucleotide
aucuacagcgucuaaaguu

SEQ ID NO: 1433689 - RNA, 19 nt, Artificial Sequence
  Description of Artificial Sequence: Synthetic oligonucleotide
aaacugguuagcugcauuu

SEQ ID NO: 1433690 - RNA, 19 nt, Artificial Sequence
  Description of Artificial Sequence: Synthetic oligonucleotide
auagauuugcuaaugugca

SEQ ID NO: 1433691 - RNA, 19 nt, Artificial Sequence
  Description of Artificial Sequence: Synthetic oligonucleotide
uugucagaucccgaguucg

SEQ ID NO: 1433692 - RNA, 19 nt, Artificial Sequence
  Description of Artificial Sequence: Synthetic oligonucleotide
ugcgaaucugcagugcugg

SEQ ID NO: 1433693 - RNA, 19 nt, Artificial Sequence
  Description of Artificial Sequence: Synthetic oligonucleotide
gaagagucuuggcagaaca

SEQ ID NO: 1433694 - RNA, 19 nt, Artificial Sequence
  Description of Artificial Sequence: Synthetic oligonucleotide
guacuuaaaccaugauggg

SEQ ID NO: 1433695 - RNA, 19 nt, Artificial Sequence
  Description of Artificial Sequence: Synthetic oligonucleotide
ucuaagacuguguccauua

SEQ ID NO: 1433696 - RNA, 19 nt, Artificial Sequence
  Description of Artificial Sequence: Synthetic oligonucleotide
gacaacuaccuucauucac

SEQ ID NO: 1433697 - RNA, 19 nt, Artificial Sequence
  Description of Artificial Sequence: Synthetic oligonucleotide
aaacuaguacaaaaggcaa

SEQ ID NO: 1433698 - RNA, 19 nt, Artificial Sequence
  Description of Artificial Sequence: Synthetic oligonucleotide
ucuacauuaggaugauaaa

SEQ ID NO: 1433699 - RNA, 19 nt, Artificial Sequence
  Description of Artificial Sequence: Synthetic oligonucleotide
gauuaggagcacuuaacaa

SEQ ID NO: 1433700 - RNA, 19 nt, Artificial Sequence
  Description of Artificial Sequence: Synthetic oligonucleotide
agucacaauguuauuagug

SEQ ID NO: 1433701 - RNA, 19 nt, Artificial Sequence
  Description of Artificial Sequence: Synthetic oligonucleotide
aacguacuuuaggugcugc

SEQ ID NO: 1433702 - RNA, 19 nt, Artificial Sequence
  Description of Artificial Sequence: Synthetic oligonucleotide
aguuuaaaagucccucccu

SEQ ID NO: 1433703 - RNA, 19 nt, Artificial Sequence
  Description of Artificial Sequence: Synthetic oligonucleotide
ugcauguaaucaccaaaga

SEQ ID NO: 1433704 - RNA, 19 nt, Artificial Sequence
  Description of Artificial Sequence: Synthetic oligonucleotide
ugugcgaaucugcagugcu

SEQ ID NO: 1433705 - RNA, 19 nt, Artificial Sequence
  Description of Artificial Sequence: Synthetic oligonucleotide
acauuaggaugauaaauuu

SEQ ID NO: 1433706 - RNA, 19 nt, Artificial Sequence
  Description of Artificial Sequence: Synthetic oligonucleotide
uaagacuguguccauuaaa

SEQ ID NO: 1433707 - RNA, 19 nt, Artificial Sequence
  Description of Artificial Sequence: Synthetic oligonucleotide
uuggucaugaaacguacuu

SEQ ID NO: 1433708 - RNA, 19 nt, Artificial Sequence
  Description of Artificial Sequence: Synthetic oligonucleotide
ugaucugaucgacuuaaau

SEQ ID NO: 1433709 - RNA, 19 nt, Artificial Sequence
  Description of Artificial Sequence: Synthetic oligonucleotide
guguccauuaaaugcaaac

SEQ ID NO: 1433710 - RNA, 19 nt, Artificial Sequence
  Description of Artificial Sequence: Synthetic oligonucleotide
gauacuucuagccucugcu

SEQ ID NO: 1433711 - RNA, 19 nt, Artificial Sequence
  Description of Artificial Sequence: Synthetic oligonucleotide
uacgauugucacauuggga

SEQ ID NO: 1433712 - RNA, 19 nt, Artificial Sequence
  Description of Artificial Sequence: Synthetic oligonucleotide
guucaaguuuaaaaguccc

SEQ ID NO: 1433713 - RNA, 19 nt, Artificial Sequence
  Description of Artificial Sequence: Synthetic oligonucleotide
aagucacaauguuauuagu

SEQ ID NO: 1433714 - RNA, 19 nt, Artificial Sequence
  Description of Artificial Sequence: Synthetic oligonucleotide
augaaaauaacgggcguug

SEQ ID NO: 1433715 - RNA, 19 nt, Artificial Sequence
  Description of Artificial Sequence: Synthetic oligonucleotide
ugcuuuguacuuaaaccau

SEQ ID NO: 1433716 - RNA, 19 nt, Artificial Sequence
  Description of Artificial Sequence: Synthetic oligonucleotide
ucuuccacugcucggcuac

SEQ ID NO: 1433717 - RNA, 19 nt, Artificial Sequence
  Description of Artificial Sequence: Synthetic oligonucleotide
ccacaugaaaauaacgggc

SEQ ID NO: 1433718 - RNA, 19 nt, Artificial Sequence
  Description of Artificial Sequence: Synthetic oligonucleotide
agcucuuacauguuagaaa

SEQ ID NO: 1433719 - RNA, 19 nt, Artificial Sequence
  Description of Artificial Sequence: Synthetic oligonucleotide
auuuaaccacggcaauuag

SEQ ID NO: 1433720 - RNA, 19 nt, Artificial Sequence
  Description of Artificial Sequence: Synthetic oligonucleotide
cuuuguacuuaaaccauga

SEQ ID NO: 1433721 - RNA, 19 nt, Artificial Sequence
  Description of Artificial Sequence: Synthetic oligonucleotide
aguuaccagucaucaaaag

SEQ ID NO: 1433722 - RNA, 19 nt, Artificial Sequence
  Description of Artificial Sequence: Synthetic oligonucleotide
aaggaauaguucaaguuua

SEQ ID NO: 1433723 - RNA, 19 nt, Artificial Sequence
  Description of Artificial Sequence: Synthetic oligonucleotide
ugaucgacuuaaauauuau

SEQ ID NO: 1433724 - RNA, 19 nt, Artificial Sequence
  Description of Artificial Sequence: Synthetic oligonucleotide
gucuacauuaggaugauaa

SEQ ID NO: 1433725 - RNA, 19 nt, Artificial Sequence
  Description of Artificial Sequence: Synthetic oligonucleotide
uauuagugagggcugugau

SEQ ID NO: 1433726 - RNA, 19 nt, Artificial Sequence
  Description of Artificial Sequence: Synthetic oligonucleotide
uucauggcauauagccuag

SEQ ID NO: 1433727 - RNA, 19 nt, Artificial Sequence
  Description of Artificial Sequence: Synthetic oligonucleotide
cuuaaugauccugcggggc

SEQ ID NO: 1433728 - RNA, 19 nt, Artificial Sequence
  Description of Artificial Sequence: Synthetic oligonucleotide
caugaaacguacuuuaggu

SEQ ID NO: 1433729 - RNA, 19 nt, Artificial Sequence
  Description of Artificial Sequence: Synthetic oligonucleotide
aagauguuaucugcccaag

SEQ ID NO: 1433730 - RNA, 19 nt, Artificial Sequence
  Description of Artificial Sequence: Synthetic oligonucleotide
caucauuugcuaacggauc

SEQ ID NO: 1433731 - RNA, 19 nt, Artificial Sequence
  Description of Artificial Sequence: Synthetic oligonucleotide
ugguucugccagcaaacgc

SEQ ID NO: 1433732 - RNA, 19 nt, Artificial Sequence
  Description of Artificial Sequence: Synthetic oligonucleotide
cugugauguuuauuuaaug

SEQ ID NO: 1433733 - RNA, 19 nt, Artificial Sequence
  Description of Artificial Sequence: Synthetic oligonucleotide
gauugauagcagaacugug

SEQ ID NO: 1433734 - RNA, 19 nt, Artificial Sequence
  Description of Artificial Sequence: Synthetic oligonucleotide
agcuaacccugacaacuac

SEQ ID NO: 1433735 - RNA, 19 nt, Artificial Sequence
  Description of Artificial Sequence: Synthetic oligonucleotide
agcugcauuuaaccacggc

SEQ ID NO: 1433736 - RNA, 19 nt, Artificial Sequence
  Description of Artificial Sequence: Synthetic oligonucleotide
acaacuaccuucauucaca

SEQ ID NO: 1433737 - RNA, 19 nt, Artificial Sequence
  Description of Artificial Sequence: Synthetic oligonucleotide
uuuguacuuaaaccaugau

SEQ ID NO: 1433738 - RNA, 19 nt, Artificial Sequence
  Description of Artificial Sequence: Synthetic oligonucleotide
ucugcccaagaauuguaac

SEQ ID NO: 1433739 - RNA, 19 nt, Artificial Sequence
  Description of Artificial Sequence: Synthetic oligonucleotide
cuagagagcauauucuaaa

SEQ ID NO: 1433740 - RNA, 19 nt, Artificial Sequence
  Description of Artificial Sequence: Synthetic oligonucleotide
gaauguuuccaucaguuuu

SEQ ID NO: 1433741 - RNA, 19 nt, Artificial Sequence
  Description of Artificial Sequence: Synthetic oligonucleotide
ugaaaauaacgggcguugc

SEQ ID NO: 1433742 - RNA, 19 nt, Artificial Sequence
  Description of Artificial Sequence: Synthetic oligonucleotide
ugccauuggguauucuucu

SEQ ID NO: 1433743 - RNA, 19 nt, Artificial Sequence
  Description of Artificial Sequence: Synthetic oligonucleotide
uucauuggucuuccacugc

SEQ ID NO: 1433744 - RNA, 19 nt, Artificial Sequence
  Description of Artificial Sequence: Synthetic oligonucleotide
caugcuuuacaacagugaa

SEQ ID NO: 1433745 - RNA, 19 nt, Artificial Sequence
  Description of Artificial Sequence: Synthetic oligonucleotide
acaugaaaauaacgggcgu

SEQ ID NO: 1433746 - RNA, 19 nt, Artificial Sequence
  Description of Artificial Sequence: Synthetic oligonucleotide
cagagaaucuacacuuaac

SEQ ID NO: 1433747 - RNA, 19 nt, Artificial Sequence
  Description of Artificial Sequence: Synthetic oligonucleotide
aucuacacuuaacagcaaa

SEQ ID NO: 1433748 - RNA, 19 nt, Artificial Sequence
  Description of Artificial Sequence: Synthetic oligonucleotide
ugcuaacggaucaucugga

SEQ ID NO: 1433749 - RNA, 19 nt, Artificial Sequence
  Description of Artificial Sequence: Synthetic oligonucleotide
ucccauuuugguucagaca

SEQ ID NO: 1433750 - RNA, 19 nt, Artificial Sequence
  Description of Artificial Sequence: Synthetic oligonucleotide
gaacugugcgaaucugcag

SEQ ID NO: 1433751 - RNA, 19 nt, Artificial Sequence
  Description of Artificial Sequence: Synthetic oligonucleotide
cugguuagcugcauuuaac

SEQ ID NO: 1433752 - RNA, 19 nt, Artificial Sequence
  Description of Artificial Sequence: Synthetic oligonucleotide
ucccaacuugucuacauua

SEQ ID NO: 1433753 - RNA, 19 nt, Artificial Sequence
  Description of Artificial Sequence: Synthetic oligonucleotide
agcagaacugugcgaaucu

SEQ ID NO: 1433754 - RNA, 19 nt, Artificial Sequence
  Description of Artificial Sequence: Synthetic oligonucleotide
ucggcuacaucauuugcua

SEQ ID NO: 1433755 - RNA, 19 nt, Artificial Sequence
  Description of Artificial Sequence: Synthetic oligonucleotide
acgggcguugcucucaucu

SEQ ID NO: 1433756 - RNA, 19 nt, Artificial Sequence
  Description of Artificial Sequence: Synthetic oligonucleotide
ccaagaauuguaacaacug

SEQ ID NO: 1433757 - RNA, 19 nt, Artificial Sequence
  Description of Artificial Sequence: Synthetic oligonucleotide
gcugcauuuaaccacggca

SEQ ID NO: 1433758 - RNA, 19 nt, Artificial Sequence
  Description of Artificial Sequence: Synthetic oligonucleotide
aacaacccagaugauacuu

SEQ ID NO: 1433759 - RNA, 19 nt, Artificial Sequence
  Description of Artificial Sequence: Synthetic oligonucleotide
agacauagauuugcuaaug

SEQ ID NO: 1433760 - RNA, 19 nt, Artificial Sequence
  Description of Artificial Sequence: Synthetic oligonucleotide
guuaucugcccaagaauug

SEQ ID NO: 1433761 - RNA, 19 nt, Artificial Sequence
  Description of Artificial Sequence: Synthetic oligonucleotide
aaaguuagacuuggcuaga

SEQ ID NO: 1433762 - RNA, 19 nt, Artificial Sequence
  Description of Artificial Sequence: Synthetic oligonucleotide
ugauagcagaacugugcga

SEQ ID NO: 1433763 - RNA, 19 nt, Artificial Sequence
  Description of Artificial Sequence: Synthetic oligonucleotide
aagcucuuacauguuagaa

SEQ ID NO: 1433764 - RNA, 19 nt, Artificial Sequence
  Description of Artificial Sequence: Synthetic oligonucleotide
aaacgaauccaagcagagu

SEQ ID NO: 1433765 - RNA, 19 nt, Artificial Sequence
  Description of Artificial Sequence: Synthetic oligonucleotide
aacuaguacaaaaggcaaa

SEQ ID NO: 1433766 - RNA, 19 nt, Artificial Sequence
  Description of Artificial Sequence: Synthetic oligonucleotide
cuuuaggugcugccauugg

SEQ ID NO: 1433767 - RNA, 19 nt, Artificial Sequence
  Description of Artificial Sequence: Synthetic oligonucleotide
cauuuugguucagacaauc

SEQ ID NO: 1433768 - RNA, 19 nt, Artificial Sequence
  Description of Artificial Sequence: Synthetic oligonucleotide
ugcauuuaaccacggcaau

SEQ ID NO: 1433769 - RNA, 19 nt, Artificial Sequence
  Description of Artificial Sequence: Synthetic oligonucleotide
ugacaacuaccuucauuca

SEQ ID NO: 1433770 - RNA, 19 nt, Artificial Sequence
  Description of Artificial Sequence: Synthetic oligonucleotide
accacggcaauuagauccc

SEQ ID NO: 1433771 - RNA, 19 nt, Artificial Sequence
  Description of Artificial Sequence: Synthetic oligonucleotide
gucacauugggaaagugaa

SEQ ID NO: 1433772 - RNA, 19 nt, Artificial Sequence
  Description of Artificial Sequence: Synthetic oligonucleotide
acugguuagcugcauuuaa

SEQ ID NO: 1433773 - RNA, 19 nt, Artificial Sequence
  Description of Artificial Sequence: Synthetic oligonucleotide
auuugcuaacggaucaucu

SEQ ID NO: 1433774 - RNA, 19 nt, Artificial Sequence
  Description of Artificial Sequence: Synthetic oligonucleotide
ugcucggcuacaucauuug

SEQ ID NO: 1433775 - RNA, 19 nt, Artificial Sequence
  Description of Artificial Sequence: Synthetic oligonucleotide
ggauuaggagcacuuaaca

SEQ ID NO: 1433776 - RNA, 19 nt, Artificial Sequence
  Description of Artificial Sequence: Synthetic oligonucleotide
uaccuucauucacagugcu

SEQ ID NO: 1433777 - RNA, 19 nt, Artificial Sequence
  Description of Artificial Sequence: Synthetic oligonucleotide
aaacgcuggguuuccuuaa

SEQ ID NO: 1433778 - RNA, 19 nt, Artificial Sequence
  Description of Artificial Sequence: Synthetic oligonucleotide
cugaucgacuuaaauauua

SEQ ID NO: 1433779 - RNA, 19 nt, Artificial Sequence
  Description of Artificial Sequence: Synthetic oligonucleotide
ucugaucgacuuaaauauu

SEQ ID NO: 1433780 - RNA, 19 nt, Artificial Sequence
  Description of Artificial Sequence: Synthetic oligonucleotide
uaaugauccugcggggcag

SEQ ID NO: 1433781 - RNA, 19 nt, Artificial Sequence
  Description of Artificial Sequence: Synthetic oligonucleotide
agaacugugcgaaucugca

SEQ ID NO: 1433782 - RNA, 19 nt, Artificial Sequence
  Description of Artificial Sequence: Synthetic oligonucleotide
agauguuaucugcccaaga

SEQ ID NO: 1433783 - RNA, 19 nt, Artificial Sequence
  Description of Artificial Sequence: Synthetic oligonucleotide
gaaaauaacgggcguugcu

SEQ ID NO: 1433784 - RNA, 19 nt, Artificial Sequence
  Description of Artificial Sequence: Synthetic oligonucleotide
acaacccagaugauacuuc

SEQ ID NO: 1433785 - RNA, 19 nt, Artificial Sequence
  Description of Artificial Sequence: Synthetic oligonucleotide
acuuuaggugcugccauug

SEQ ID NO: 1433786 - RNA, 19 nt, Artificial Sequence
  Description of Artificial Sequence: Synthetic oligonucleotide
gacauagauuugcuaaugu

SEQ ID NO: 1433787 - RNA, 19 nt, Artificial Sequence
  Description of Artificial Sequence: Synthetic oligonucleotide
uccaucuacagcgucuaaa

SEQ ID NO: 1433788 - RNA, 19 nt, Artificial Sequence
  Description of Artificial Sequence: Synthetic oligonucleotide
uguguccauuaaaugcaaa

SEQ ID NO: 1433789 - RNA, 19 nt, Artificial Sequence
  Description of Artificial Sequence: Synthetic oligonucleotide
uacagcgucuaaaguuaga

SEQ ID NO: 1433790 - RNA, 19 nt, Artificial Sequence
  Description of Artificial Sequence: Synthetic oligonucleotide
aaucaggacaagacauaga

SEQ ID NO: 1433791 - RNA, 19 nt, Artificial Sequence
  Description of Artificial Sequence: Synthetic oligonucleotide
uucauucacagugcuuugu

SEQ ID NO: 1433792 - RNA, 19 nt, Artificial Sequence
  Description of Artificial Sequence: Synthetic oligonucleotide
ucaggacaagacauagauu

SEQ ID NO: 1433793 - RNA, 19 nt, Artificial Sequence
  Description of Artificial Sequence: Synthetic oligonucleotide
uucuucccaacuugucuac

SEQ ID NO: 1433794 - RNA, 19 nt, Artificial Sequence
  Description of Artificial Sequence: Synthetic oligonucleotide
uagauuugcuaaugugcau

SEQ ID NO: 1433795 - RNA, 19 nt, Artificial Sequence
  Description of Artificial Sequence: Synthetic oligonucleotide
cuacagcgucuaaaguuag

SEQ ID NO: 1433796 - RNA, 19 nt, Artificial Sequence
  Description of Artificial Sequence: Synthetic oligonucleotide
caaagucacaauguuauua

SEQ ID NO: 1433797 - RNA, 19 nt, Artificial Sequence
  Description of Artificial Sequence: Synthetic oligonucleotide
aaacguacuuuaggugcug

SEQ ID NO: 1433798 - RNA, 19 nt, Artificial Sequence
  Description of Artificial Sequence: Synthetic oligonucleotide
aacuaccuucauucacagu

SEQ ID NO: 1433799 - RNA, 19 nt, Artificial Sequence
  Description of Artificial Sequence: Synthetic oligonucleotide
auuggguauucuucuggaa

SEQ ID NO: 1433800 - RNA, 19 nt, Artificial Sequence
  Description of Artificial Sequence: Synthetic oligonucleotide
uccaugcucucgcuguuuc

SEQ ID NO: 1433801 - RNA, 19 nt, Artificial Sequence
  Description of Artificial Sequence: Synthetic oligonucleotide
gguuagcugcauuuaacca

SEQ ID NO: 1433802 - RNA, 19 nt, Artificial Sequence
  Description of Artificial Sequence: Synthetic oligonucleotide
auguuauuagugagggcug

SEQ ID NO: 1433803 - RNA, 19 nt, Artificial Sequence
  Description of Artificial Sequence: Synthetic oligonucleotide
uuacaguaucagguagggc

SEQ ID NO: 1433804 - RNA, 19 nt, Artificial Sequence
  Description of Artificial Sequence: Synthetic oligonucleotide
auuuugguucagacaauca

SEQ ID NO: 1433805 - RNA, 19 nt, Artificial Sequence
  Description of Artificial Sequence: Synthetic oligonucleotide
aaucaagcuuguccaucua

SEQ ID NO: 1433806 - RNA, 19 nt, Artificial Sequence
  Description of Artificial Sequence: Synthetic oligonucleotide
acaagccauacaaaauggu

SEQ ID NO: 1433807 - RNA, 19 nt, Artificial Sequence
  Description of Artificial Sequence: Synthetic oligonucleotide
aacgcuggguuuccuuaau

SEQ ID NO: 1433808 - RNA, 19 nt, Artificial Sequence
  Description of Artificial Sequence: Synthetic oligonucleotide
ggagaagugauguacacuu

SEQ ID NO: 1433809 - RNA, 19 nt, Artificial Sequence
  Description of Artificial Sequence: Synthetic oligonucleotide
cauauucuucccaacuugu

SEQ ID NO: 1433810 - RNA, 19 nt, Artificial Sequence
  Description of Artificial Sequence: Synthetic oligonucleotide
aacaaagccuggauugaua

SEQ ID NO: 1433811 - RNA, 19 nt, Artificial Sequence
  Description of Artificial Sequence: Synthetic oligonucleotide
gggcuuuuauucuguaaug

SEQ ID NO: 1433812 - RNA, 19 nt, Artificial Sequence
  Description of Artificial Sequence: Synthetic oligonucleotide
gguucugcuuuaaugccag

SEQ ID NO: 1433813 - RNA, 19 nt, Artificial Sequence
  Description of Artificial Sequence: Synthetic oligonucleotide
cuggauugauagcagaacu

SEQ ID NO: 1433814 - RNA, 19 nt, Artificial Sequence
  Description of Artificial Sequence: Synthetic oligonucleotide
cauuugcuaacggaucauc

SEQ ID NO: 1433815 - RNA, 19 nt, Artificial Sequence
  Description of Artificial Sequence: Synthetic oligonucleotide
cuggauuaggagcacuuaa

SEQ ID NO: 1433816 - RNA, 19 nt, Artificial Sequence
  Description of Artificial Sequence: Synthetic oligonucleotide
uuaaaccaugauggggaaa

SEQ ID NO: 1433817 - RNA, 19 nt, Artificial Sequence
  Description of Artificial Sequence: Synthetic oligonucleotide
gaugauacuucuagccucu

SEQ ID NO: 1433818 - RNA, 19 nt, Artificial Sequence
  Description of Artificial Sequence: Synthetic oligonucleotide
cacccauaccccugggcag

SEQ ID NO: 1433819 - RNA, 19 nt, Artificial Sequence
  Description of Artificial Sequence: Synthetic oligonucleotide
cugaauguuuccaucaguu

SEQ ID NO: 1433820 - RNA, 19 nt, Artificial Sequence
  Description of Artificial Sequence: Synthetic oligonucleotide
gggcguugcucucaucugg

SEQ ID NO: 1433821 - RNA, 19 nt, Artificial Sequence
  Description of Artificial Sequence: Synthetic oligonucleotide
aacugguuagcugcauuua

SEQ ID NO: 1433822 - RNA, 19 nt, Artificial Sequence
  Description of Artificial Sequence: Synthetic oligonucleotide
ccuuaaugauccugcgggg

SEQ ID NO: 1433823 - RNA, 19 nt, Artificial Sequence
  Description of Artificial Sequence: Synthetic oligonucleotide
uccaguuaccagucaucaa

SEQ ID NO: 1433824 - RNA, 19 nt, Artificial Sequence
  Description of Artificial Sequence: Synthetic oligonucleotide
ucuggauuaggagcacuua

SEQ ID NO: 1433825 - RNA, 19 nt, Artificial Sequence
  Description of Artificial Sequence: Synthetic oligonucleotide
cauaagauuuacagaaguu

SEQ ID NO: 1433826 - RNA, 19 nt, Artificial Sequence
  Description of Artificial Sequence: Synthetic oligonucleotide
gcauuuauguggaaagauc

SEQ ID NO: 1433827 - RNA, 19 nt, Artificial Sequence
  Description of Artificial Sequence: Synthetic oligonucleotide
ucauuugcuaacggaucau

SEQ ID NO: 1433828 - RNA, 19 nt, Artificial Sequence
  Description of Artificial Sequence: Synthetic oligonucleotide
uaaccacggcaauuagauc

SEQ ID NO: 1433829 - RNA, 19 nt, Artificial Sequence
  Description of Artificial Sequence: Synthetic oligonucleotide
aggacaagacauagauuug

SEQ ID NO: 1433830 - RNA, 19 nt, Artificial Sequence
  Description of Artificial Sequence: Synthetic oligonucleotide
gaucgacuuaaauauuauu

SEQ ID NO: 1433831 - RNA, 19 nt, Artificial Sequence
  Description of Artificial Sequence: Synthetic oligonucleotide
caaucaagcuuguccaucu

SEQ ID NO: 1433832 - RNA, 19 nt, Artificial Sequence
  Description of Artificial Sequence: Synthetic oligonucleotide
cuuaaaccaugauggggaa

SEQ ID NO: 1433833 - RNA, 19 nt, Artificial Sequence
  Description of Artificial Sequence: Synthetic oligonucleotide
caguuaccagucaucaaaa

SEQ ID NO: 1433834 - RNA, 19 nt, Artificial Sequence
  Description of Artificial Sequence: Synthetic oligonucleotide
ggcuucauuggucuuccac

SEQ ID NO: 1433835 - RNA, 19 nt, Artificial Sequence
  Description of Artificial Sequence: Synthetic oligonucleotide
cauuggucuuccacugcuc

SEQ ID NO: 1433836 - RNA, 19 nt, Artificial Sequence
  Description of Artificial Sequence: Synthetic oligonucleotide
ggaaaggagaccauaaaau

SEQ ID NO: 1433837 - RNA, 19 nt, Artificial Sequence
  Description of Artificial Sequence: Synthetic oligonucleotide
ccaguuaccagucaucaaa

SEQ ID NO: 1433838 - RNA, 19 nt, Artificial Sequence
  Description of Artificial Sequence: Synthetic oligonucleotide
auagcagaacugugcgaau

SEQ ID NO: 1433839 - RNA, 19 nt, Artificial Sequence
  Description of Artificial Sequence: Synthetic oligonucleotide
auaacgggcguugcucuca

SEQ ID NO: 1433840 - RNA, 19 nt, Artificial Sequence
  Description of Artificial Sequence: Synthetic oligonucleotide
acgcuggguuuccuuaaug

SEQ ID NO: 1433841 - RNA, 19 nt, Artificial Sequence
  Description of Artificial Sequence: Synthetic oligonucleotide
uccacugcucggcuacauc

SEQ ID NO: 1433842 - RNA, 19 nt, Artificial Sequence
  Description of Artificial Sequence: Synthetic oligonucleotide
uggggaccacuuaucuuuc

SEQ ID NO: 1433843 - RNA, 19 nt, Artificial Sequence
  Description of Artificial Sequence: Synthetic oligonucleotide
cacauugggaaagugaaau

SEQ ID NO: 1433844 - RNA, 19 nt, Artificial Sequence
  Description of Artificial Sequence: Synthetic oligonucleotide
uaacccugacaacuaccuu

SEQ ID NO: 1433845 - RNA, 19 nt, Artificial Sequence
  Description of Artificial Sequence: Synthetic oligonucleotide
uaccccugggcagcuaacc

SEQ ID NO: 1433846 - RNA, 19 nt, Artificial Sequence
  Description of Artificial Sequence: Synthetic oligonucleotide
uacuuuaggugcugccauu

SEQ ID NO: 1433847 - RNA, 19 nt, Artificial Sequence
  Description of Artificial Sequence: Synthetic oligonucleotide
gucagaucccgaguucggc

SEQ ID NO: 1433848 - RNA, 19 nt, Artificial Sequence
  Description of Artificial Sequence: Synthetic oligonucleotide
gcuuuguacuuaaaccaug

SEQ ID NO: 1433849 - RNA, 19 nt, Artificial Sequence
  Description of Artificial Sequence: Synthetic oligonucleotide
augauccugcggggcagcc

SEQ ID NO: 1433850 - RNA, 19 nt, Artificial Sequence
  Description of Artificial Sequence: Synthetic oligonucleotide
ggcugugauguuuauuuaa

SEQ ID NO: 1433851 - RNA, 19 nt, Artificial Sequence
  Description of Artificial Sequence: Synthetic oligonucleotide
ggcagaacaggagaaguga

SEQ ID NO: 1433852 - RNA, 19 nt, Artificial Sequence
  Description of Artificial Sequence: Synthetic oligonucleotide
acgaauccaagcagaguca

SEQ ID NO: 1433853 - RNA, 19 nt, Artificial Sequence
  Description of Artificial Sequence: Synthetic oligonucleotide
caaacgcuggguuuccuua

SEQ ID NO: 1433854 - RNA, 19 nt, Artificial Sequence
  Description of Artificial Sequence: Synthetic oligonucleotide
cucggcuacaucauuugcu

SEQ ID NO: 1433855 - RNA, 19 nt, Artificial Sequence
  Description of Artificial Sequence: Synthetic oligonucleotide
augcuuuacaacagugaau

SEQ ID NO: 1433856 - RNA, 19 nt, Artificial Sequence
  Description of Artificial Sequence: Synthetic oligonucleotide
cuacacuuaacagcaaagu

SEQ ID NO: 1433857 - RNA, 19 nt, Artificial Sequence
  Description of Artificial Sequence: Synthetic oligonucleotide
aacgggcguugcucucauc

SEQ ID NO: 1433858 - RNA, 19 nt, Artificial Sequence
  Description of Artificial Sequence: Synthetic oligonucleotide
cacagugcuuuguacuuaa

SEQ ID NO: 1433859 - RNA, 19 nt, Artificial Sequence
  Description of Artificial Sequence: Synthetic oligonucleotide
gacuuggcuagagagcaua

SEQ ID NO: 1433860 - RNA, 19 nt, Artificial Sequence
  Description of Artificial Sequence: Synthetic oligonucleotide
gugauguacacuugaugau

SEQ ID NO: 1433861 - RNA, 19 nt, Artificial Sequence
  Description of Artificial Sequence: Synthetic oligonucleotide
ggauugauagcagaacugu

SEQ ID NO: 1433862 - RNA, 19 nt, Artificial Sequence
  Description of Artificial Sequence: Synthetic oligonucleotide
gcauauagccuaguccaug

SEQ ID NO: 1433863 - RNA, 19 nt, Artificial Sequence
  Description of Artificial Sequence: Synthetic oligonucleotide
cgucuaaaguuagacuugg

SEQ ID NO: 1433864 - RNA, 19 nt, Artificial Sequence
  Description of Artificial Sequence: Synthetic oligonucleotide
ucacaacaacccagaugau

SEQ ID NO: 1433865 - RNA, 19 nt, Artificial Sequence
  Description of Artificial Sequence: Synthetic oligonucleotide
guacuuuaggugcugccau

SEQ ID NO: 1433866 - RNA, 19 nt, Artificial Sequence
  Description of Artificial Sequence: Synthetic oligonucleotide
ggcuagagagcauauucua

SEQ ID NO: 1433867 - RNA, 19 nt, Artificial Sequence
  Description of Artificial Sequence: Synthetic oligonucleotide
cacaacaacccagaugaua

SEQ ID NO: 1433868 - RNA, 19 nt, Artificial Sequence
  Description of Artificial Sequence: Synthetic oligonucleotide
gggcagcuaacccugacaa

SEQ ID NO: 1433869 - RNA, 19 nt, Artificial Sequence
  Description of Artificial Sequence: Synthetic oligonucleotide
uucuauggcuugggcuuca

SEQ ID NO: 1433870 - RNA, 19 nt, Artificial Sequence
  Description of Artificial Sequence: Synthetic oligonucleotide
aucuggauuaggagcacuu

SEQ ID NO: 1433871 - RNA, 19 nt, Artificial Sequence
  Description of Artificial Sequence: Synthetic oligonucleotide
uaacgggcguugcucucau

SEQ ID NO: 1433872 - RNA, 19 nt, Artificial Sequence
  Description of Artificial Sequence: Synthetic oligonucleotide
gcgucuaaaguuagacuug

SEQ ID NO: 1433873 - RNA, 19 nt, Artificial Sequence
  Description of Artificial Sequence: Synthetic oligonucleotide
ccuggauugauagcagaac

SEQ ID NO: 1433874 - RNA, 19 nt, Artificial Sequence
  Description of Artificial Sequence: Synthetic oligonucleotide
cuaagacuguguccauuaa

SEQ ID NO: 1433875 - RNA, 19 nt, Artificial Sequence
  Description of Artificial Sequence: Synthetic oligonucleotide
aucugcccaagaauuguaa

SEQ ID NO: 1433876 - RNA, 19 nt, Artificial Sequence
  Description of Artificial Sequence: Synthetic oligonucleotide
gugcgaaucugcagugcug

SEQ ID NO: 1433877 - RNA, 19 nt, Artificial Sequence
  Description of Artificial Sequence: Synthetic oligonucleotide
auaccccugggcagcuaac

SEQ ID NO: 1433878 - RNA, 19 nt, Artificial Sequence
  Description of Artificial Sequence: Synthetic oligonucleotide
gccauuggguauucuucug

SEQ ID NO: 1433879 - RNA, 19 nt, Artificial Sequence
  Description of Artificial Sequence: Synthetic oligonucleotide
aggaagagucuuggcagaa

SEQ ID NO: 1433880 - RNA, 19 nt, Artificial Sequence
  Description of Artificial Sequence: Synthetic oligonucleotide
cauaccccugggcagcuaa

SEQ ID NO: 1433881 - RNA, 19 nt, Artificial Sequence
  Description of Artificial Sequence: Synthetic oligonucleotide
gcucggcuacaucauuugc

SEQ ID NO: 1433882 - RNA, 19 nt, Artificial Sequence
  Description of Artificial Sequence: Synthetic oligonucleotide
cccaagaauuguaacaacu

SEQ ID NO: 1433883 - RNA, 19 nt, Artificial Sequence
  Description of Artificial Sequence: Synthetic oligonucleotide
ugagggcugugauguuuau

SEQ ID NO: 1433884 - RNA, 19 nt, Artificial Sequence
  Description of Artificial Sequence: Synthetic oligonucleotide
gaggggaaaggagaccaua

SEQ ID NO: 1433885 - RNA, 19 nt, Artificial Sequence
  Description of Artificial Sequence: Synthetic oligonucleotide
ucccgaguucggccucugc

SEQ ID NO: 1433886 - RNA, 19 nt, Artificial Sequence
  Description of Artificial Sequence: Synthetic oligonucleotide
ggcuuuuauucuguaaugu

SEQ ID NO: 1433887 - RNA, 19 nt, Artificial Sequence
  Description of Artificial Sequence: Synthetic oligonucleotide
ggagcacuuaacaaagccu

SEQ ID NO: 1433888 - RNA, 19 nt, Artificial Sequence
  Description of Artificial Sequence: Synthetic oligonucleotide
guaucagguagggccauua

SEQ ID NO: 1433889 - RNA, 19 nt, Artificial Sequence
  Description of Artificial Sequence: Synthetic oligonucleotide
gcuagagagcauauucuaa

SEQ ID NO: 1433890 - RNA, 19 nt, Artificial Sequence
  Description of Artificial Sequence: Synthetic oligonucleotide
gcacuuaacaaagccugga

SEQ ID NO: 1433891 - RNA, 19 nt, Artificial Sequence
  Description of Artificial Sequence: Synthetic oligonucleotide
augauacuucuagccucug

SEQ ID NO: 1433892 - RNA, 19 nt, Artificial Sequence
  Description of Artificial Sequence: Synthetic oligonucleotide
ugucuacauuaggaugaua

SEQ ID NO: 1433893 - RNA, 19 nt, Artificial Sequence
  Description of Artificial Sequence: Synthetic oligonucleotide
gcgaaucugcagugcuggg

SEQ ID NO: 1433894 - RNA, 19 nt, Artificial Sequence
  Description of Artificial Sequence: Synthetic oligonucleotide
ggggaaaggagaccauaaa

SEQ ID NO: 1433895 - RNA, 19 nt, Artificial Sequence
  Description of Artificial Sequence: Synthetic oligonucleotide
ccagcaaacgcuggguuuc

SEQ ID NO: 1433896 - RNA, 19 nt, Artificial Sequence
  Description of Artificial Sequence: Synthetic oligonucleotide
ugcggggcagcccggccau

SEQ ID NO: 1433897 - RNA, 19 nt, Artificial Sequence
  Description of Artificial Sequence: Synthetic oligonucleotide
acuuggcuagagagcauau

SEQ ID NO: 1433898 - RNA, 19 nt, Artificial Sequence
  Description of Artificial Sequence: Synthetic oligonucleotide
cagcaaacgcuggguuucc

SEQ ID NO: 1433899 - RNA, 19 nt, Artificial Sequence
  Description of Artificial Sequence: Synthetic oligonucleotide
uagggccauuagcaauuuu

SEQ ID NO: 1433900 - RNA, 19 nt, Artificial Sequence
  Description of Artificial Sequence: Synthetic oligonucleotide
cagcgucuaaaguuagacu

SEQ ID NO: 1433901 - RNA, 19 nt, Artificial Sequence
  Description of Artificial Sequence: Synthetic oligonucleotide
ggcagcuaacccugacaac

SEQ ID NO: 1433902 - RNA, 19 nt, Artificial Sequence
  Description of Artificial Sequence: Synthetic oligonucleotide
ucuauggcuugggcuucau

SEQ ID NO: 1433903 - RNA, 19 nt, Artificial Sequence
  Description of Artificial Sequence: Synthetic oligonucleotide
caacaacccagaugauacu

SEQ ID NO: 1433904 - RNA, 19 nt, Artificial Sequence
  Description of Artificial Sequence: Synthetic oligonucleotide
agcaaacgcuggguuuccu

SEQ ID NO: 1433905 - RNA, 19 nt, Artificial Sequence
  Description of Artificial Sequence: Synthetic oligonucleotide
augaucugaucgacuuaaa

SEQ ID NO: 1433906 - RNA, 19 nt, Artificial Sequence
  Description of Artificial Sequence: Synthetic oligonucleotide
gugcuggggaccacuuauc

SEQ ID NO: 1433907 - RNA, 19 nt, Artificial Sequence
  Description of Artificial Sequence: Synthetic oligonucleotide
cguacuuuaggugcugcca

SEQ ID NO: 1433908 - RNA, 19 nt, Artificial Sequence
  Description of Artificial Sequence: Synthetic oligonucleotide
cugcucggcuacaucauuu

SEQ ID NO: 1433909 - RNA, 19 nt, Artificial Sequence
  Description of Artificial Sequence: Synthetic oligonucleotide
ccggccaucuugucagauc

SEQ ID NO: 1433910 - RNA, 19 nt, Artificial Sequence
  Description of Artificial Sequence: Synthetic oligonucleotide
cgcuguuucuauggcuugg

SEQ ID NO: 1433911 - RNA, 19 nt, Artificial Sequence
  Description of Artificial Sequence: Synthetic oligonucleotide
agacuuggcuagagagcau

SEQ ID NO: 1433912 - RNA, 19 nt, Artificial Sequence
  Description of Artificial Sequence: Synthetic oligonucleotide
ggggaccacuuaucuuuca

SEQ ID NO: 1433913 - RNA, 19 nt, Artificial Sequence
  Description of Artificial Sequence: Synthetic oligonucleotide
ggccauuagcaauuuuauu

SEQ ID NO: 1433914 - RNA, 19 nt, Artificial Sequence
  Description of Artificial Sequence: Synthetic oligonucleotide
ccaugauggggaaacgaau

SEQ ID NO: 1433915 - RNA, 19 nt, Artificial Sequence
  Description of Artificial Sequence: Synthetic oligonucleotide
aucccgaguucggccucug

SEQ ID NO: 1433916 - RNA, 19 nt, Artificial Sequence
  Description of Artificial Sequence: Synthetic oligonucleotide
gcauuuaaccacggcaauu

SEQ ID NO: 1433917 - RNA, 19 nt, Artificial Sequence
  Description of Artificial Sequence: Synthetic oligonucleotide
cgauugucacauugggaaa

SEQ ID NO: 1433918 - RNA, 19 nt, Artificial Sequence
  Description of Artificial Sequence: Synthetic oligonucleotide
gaucccgaguucggccucu

SEQ ID NO: 1433919 - RNA, 19 nt, Artificial Sequence
  Description of Artificial Sequence: Synthetic oligonucleotide
gagggcugugauguuuauu

SEQ ID NO: 1433920 - RNA, 19 nt, Artificial Sequence
  Description of Artificial Sequence: Synthetic oligonucleotide
ccugacaacuaccuucauu

SEQ ID NO: 1433921 - RNA, 19 nt, Artificial Sequence
  Description of Artificial Sequence: Synthetic oligonucleotide
gccagcaaacgcuggguuu

SEQ ID NO: 1433922 - RNA, 19 nt, Artificial Sequence
  Description of Artificial Sequence: Synthetic oligonucleotide
cgggcguugcucucaucug

SEQ ID NO: 1433923 - RNA, 19 nt, Artificial Sequence
  Description of Artificial Sequence: Synthetic oligonucleotide
gaguucggccucugcucuu

SEQ ID NO: 1433924 - RNA, 19 nt, Artificial Sequence
  Description of Artificial Sequence: Synthetic oligonucleotide
ggcguugcucucaucuggu

SEQ ID NO: 1433925 - RNA, 19 nt, Artificial Sequence
  Description of Artificial Sequence: Synthetic oligonucleotide
ggcauauagccuaguccau

SEQ ID NO: 1433926 - RNA, 19 nt, Artificial Sequence
  Description of Artificial Sequence: Synthetic oligonucleotide
guagggccauuagcaauuu

SEQ ID NO: 1433927 - RNA, 19 nt, Artificial Sequence
  Description of Artificial Sequence: Synthetic oligonucleotide
ccuaguccaugcucucgcu

SEQ ID NO: 1433928 - RNA, 19 nt, Artificial Sequence
  Description of Artificial Sequence: Synthetic oligonucleotide
caguaucagguagggccau

SEQ ID NO: 1433929 - RNA, 19 nt, Artificial Sequence
  Description of Artificial Sequence: Synthetic oligonucleotide
cgaguucggccucugcucu

SEQ ID NO: 1433930 - RNA, 19 nt, Artificial Sequence
  Description of Artificial Sequence: Synthetic oligonucleotide
gcguugcucucaucugguu

SEQ ID NO: 1433931 - RNA, 19 nt, Artificial Sequence
  Description of Artificial Sequence: Synthetic oligonucleotide
gcccggccaucuugucaga

SEQ ID NO: 1433932 - RNA, 19 nt, Artificial Sequence
  Description of Artificial Sequence: Synthetic oligonucleotide
cccggccaucuugucagau

SEQ ID NO: 1433933 - RNA, 19 nt, Artificial Sequence
  Description of Artificial Sequence: Synthetic oligonucleotide
ccauaccccugggcagcua

SEQ ID NO: 1433934 - RNA, 19 nt, Artificial Sequence
  Description of Artificial Sequence: Synthetic oligonucleotide
aauuuauugaugauguuac

SEQ ID NO: 1433935 - RNA, 19 nt, Artificial Sequence
  Description of Artificial Sequence: Synthetic oligonucleotide
ugagaaaggaacaucaucu

SEQ ID NO: 1433936 - RNA, 19 nt, Artificial Sequence
  Description of Artificial Sequence: Synthetic oligonucleotide
ucaguaauaagcaggauaa

SEQ ID NO: 1433937 - RNA, 19 nt, Artificial Sequence
  Description of Artificial Sequence: Synthetic oligonucleotide
ucuuguaucccacagcuug

SEQ ID NO: 1433938 - RNA, 19 nt, Artificial Sequence
  Description of Artificial Sequence: Synthetic oligonucleotide
agcaucuuaucccaggagc

SEQ ID NO: 1433939 - RNA, 19 nt, Artificial Sequence
  Description of Artificial Sequence: Synthetic oligonucleotide
gaugauguuacuaagguca

SEQ ID NO: 1433940 - RNA, 19 nt, Artificial Sequence
  Description of Artificial Sequence: Synthetic oligonucleotide
acaggauccauucuucugc

SEQ ID NO: 1433941 - RNA, 19 nt, Artificial Sequence
  Description of Artificial Sequence: Synthetic oligonucleotide
uauucuaauugugugaucc

SEQ ID NO: 1433942 - RNA, 19 nt, Artificial Sequence
  Description of Artificial Sequence: Synthetic oligonucleotide
aggaauauaauuuguuguc

SEQ ID NO: 1433943 - RNA, 19 nt, Artificial Sequence
  Description of Artificial Sequence: Synthetic oligonucleotide
acugauguaacccagccug

SEQ ID NO: 1433944 - RNA, 19 nt, Artificial Sequence
  Description of Artificial Sequence: Synthetic oligonucleotide
uucaauugagcuuauccag

SEQ ID NO: 1433945 - RNA, 19 nt, Artificial Sequence
  Description of Artificial Sequence: Synthetic oligonucleotide
ucaucuauugcauauuucu

SEQ ID NO: 1433946 - RNA, 19 nt, Artificial Sequence
  Description of Artificial Sequence: Synthetic oligonucleotide
caauguuaucuaaagagcc

SEQ ID NO: 1433947 - RNA, 19 nt, Artificial Sequence
  Description of Artificial Sequence: Synthetic oligonucleotide
aauugugugaucccaagau

SEQ ID NO: 1433948 - RNA, 19 nt, Artificial Sequence
  Description of Artificial Sequence: Synthetic oligonucleotide
ucauuauugacuuuccuuc

SEQ ID NO: 1433949 - RNA, 19 nt, Artificial Sequence
  Description of Artificial Sequence: Synthetic oligonucleotide
aauagucugauccauugaa

SEQ ID NO: 1433950 - RNA, 19 nt, Artificial Sequence
  Description of Artificial Sequence: Synthetic oligonucleotide
augccaaacguuuacaaag

SEQ ID NO: 1433951 - RNA, 19 nt, Artificial Sequence
  Description of Artificial Sequence: Synthetic oligonucleotide
uugugugaucccaagaugc

SEQ ID NO: 1433952 - RNA, 19 nt, Artificial Sequence
  Description of Artificial Sequence: Synthetic oligonucleotide
uaggaauauaauuuguugu

SEQ ID NO: 1433953 - RNA, 19 nt, Artificial Sequence
  Description of Artificial Sequence: Synthetic oligonucleotide
acagcgacaccaaagaacc

SEQ ID NO: 1433954 - RNA, 19 nt, Artificial Sequence
  Description of Artificial Sequence: Synthetic oligonucleotide
uagaucauagagaggagcc

SEQ ID NO: 1433955 - RNA, 19 nt, Artificial Sequence
  Description of Artificial Sequence: Synthetic oligonucleotide
uaugacacaauaguaagac

SEQ ID NO: 1433956 - RNA, 19 nt, Artificial Sequence
  Description of Artificial Sequence: Synthetic oligonucleotide
uuuagcaucuuaucccagg

SEQ ID NO: 1433957 - RNA, 19 nt, Artificial Sequence
  Description of Artificial Sequence: Synthetic oligonucleotide
ucuaaagagccugaaauca

SEQ ID NO: 1433958 - RNA, 19 nt, Artificial Sequence
  Description of Artificial Sequence: Synthetic oligonucleotide
uuauugaugauguuacuaa

SEQ ID NO: 1433959 - RNA, 19 nt, Artificial Sequence
  Description of Artificial Sequence: Synthetic oligonucleotide
cuggagauaguacucaggg

SEQ ID NO: 1433960 - RNA, 19 nt, Artificial Sequence
  Description of Artificial Sequence: Synthetic oligonucleotide
cuacaugggaaguaguagg

SEQ ID NO: 1433961 - RNA, 19 nt, Artificial Sequence
  Description of Artificial Sequence: Synthetic oligonucleotide
guaggaauauaauuuguug

SEQ ID NO: 1433962 - RNA, 19 nt, Artificial Sequence
  Description of Artificial Sequence: Synthetic oligonucleotide
aucuaaagagccugaaauc

SEQ ID NO: 1433963 - RNA, 19 nt, Artificial Sequence
  Description of Artificial Sequence: Synthetic oligonucleotide
gaagucuuaucauaagaac

SEQ ID NO: 1433964 - RNA, 19 nt, Artificial Sequence
  Description of Artificial Sequence: Synthetic oligonucleotide
ucuaauaugccugucugug

SEQ ID NO: 1433965 - RNA, 19 nt, Artificial Sequence
  Description of Artificial Sequence: Synthetic oligonucleotide
agcuagaucauagagagga

SEQ ID NO: 1433966 - RNA, 19 nt, Artificial Sequence
  Description of Artificial Sequence: Synthetic oligonucleotide
uuuaguucggggaucccag

SEQ ID NO: 1433967 - RNA, 19 nt, Artificial Sequence
  Description of Artificial Sequence: Synthetic oligonucleotide
caaacguuuacaaagggga

SEQ ID NO: 1433968 - RNA, 19 nt, Artificial Sequence
  Description of Artificial Sequence: Synthetic oligonucleotide
auucuaauugugugauccc

SEQ ID NO: 1433969 - RNA, 19 nt, Artificial Sequence
  Description of Artificial Sequence: Synthetic oligonucleotide
gauccgagaagucuuauca

SEQ ID NO: 1433970 - RNA, 19 nt, Artificial Sequence
  Description of Artificial Sequence: Synthetic oligonucleotide
aagagaauagucugaucca

SEQ ID NO: 1433971 - RNA, 19 nt, Artificial Sequence
  Description of Artificial Sequence: Synthetic oligonucleotide
uugacuuuccuuccaagga

SEQ ID NO: 1433972 - RNA, 19 nt, Artificial Sequence
  Description of Artificial Sequence: Synthetic oligonucleotide
guauucuaguuccacaacc

SEQ ID NO: 1433973 - RNA, 19 nt, Artificial Sequence
  Description of Artificial Sequence: Synthetic oligonucleotide
ucauucacacuguuuauga

SEQ ID NO: 1433974 - RNA, 19 nt, Artificial Sequence
  Description of Artificial Sequence: Synthetic oligonucleotide
uaauaugccugucugugcu

SEQ ID NO: 1433975 - RNA, 19 nt, Artificial Sequence
  Description of Artificial Sequence: Synthetic oligonucleotide
caaaguugacuuaagacca

SEQ ID NO: 1433976 - RNA, 19 nt, Artificial Sequence
  Description of Artificial Sequence: Synthetic oligonucleotide
uguuuaugacacaauagua

SEQ ID NO: 1433977 - RNA, 19 nt, Artificial Sequence
  Description of Artificial Sequence: Synthetic oligonucleotide
ugccaaacguuuacaaagg

SEQ ID NO: 1433978 - RNA, 19 nt, Artificial Sequence
  Description of Artificial Sequence: Synthetic oligonucleotide
aacucgacauguuugugga

SEQ ID NO: 1433979 - RNA, 19 nt, Artificial Sequence
  Description of Artificial Sequence: Synthetic oligonucleotide
cagggauugagaaaggaac

SEQ ID NO: 1433980 - RNA, 19 nt, Artificial Sequence
  Description of Artificial Sequence: Synthetic oligonucleotide
uuguucucgguguagaaac

SEQ ID NO: 1433981 - RNA, 19 nt, Artificial Sequence
  Description of Artificial Sequence: Synthetic oligonucleotide
gcagcuagaucauagagag

SEQ ID NO: 1433982 - RNA, 19 nt, Artificial Sequence
  Description of Artificial Sequence: Synthetic oligonucleotide
aaguugacuuaagaccacc

SEQ ID NO: 1433983 - RNA, 19 nt, Artificial Sequence
  Description of Artificial Sequence: Synthetic oligonucleotide
uuaugacacaauaguaaga

SEQ ID NO: 1433984 - RNA, 19 nt, Artificial Sequence
  Description of Artificial Sequence: Synthetic oligonucleotide
uuaucauaagaaccagaca

SEQ ID NO: 1433985 - RNA, 19 nt, Artificial Sequence
  Description of Artificial Sequence: Synthetic oligonucleotide
uuccacguauucuaguucc

SEQ ID NO: 1433986 - RNA, 19 nt, Artificial Sequence
  Description of Artificial Sequence: Synthetic oligonucleotide
aggaaauugcuucugugug

SEQ ID NO: 1433987 - RNA, 19 nt, Artificial Sequence
  Description of Artificial Sequence: Synthetic oligonucleotide
uuuaguuccggagcuauug

SEQ ID NO: 1433988 - RNA, 19 nt, Artificial Sequence
  Description of Artificial Sequence: Synthetic oligonucleotide
guaggugaguaucuguagg

SEQ ID NO: 1433989 - RNA, 19 nt, Artificial Sequence
  Description of Artificial Sequence: Synthetic oligonucleotide
uguaggaauauaauuuguu

SEQ ID NO: 1433990 - RNA, 19 nt, Artificial Sequence
  Description of Artificial Sequence: Synthetic oligonucleotide
ucaauugagcuuauccagu

SEQ ID NO: 1433991 - RNA, 19 nt, Artificial Sequence
  Description of Artificial Sequence: Synthetic oligonucleotide
gaauaggaaauacaauuaa

SEQ ID NO: 1433992 - RNA, 19 nt, Artificial Sequence
  Description of Artificial Sequence: Synthetic oligonucleotide
aaucaaacucgacauguuu

SEQ ID NO: 1433993 - RNA, 19 nt, Artificial Sequence
  Description of Artificial Sequence: Synthetic oligonucleotide
caaaguacugaggaaauug

SEQ ID NO: 1433994 - RNA, 19 nt, Artificial Sequence
  Description of Artificial Sequence: Synthetic oligonucleotide
uccauugaagcacucagua

SEQ ID NO: 1433995 - RNA, 19 nt, Artificial Sequence
  Description of Artificial Sequence: Synthetic oligonucleotide
uauaauuuguugucugcuc

SEQ ID NO: 1433996 - RNA, 19 nt, Artificial Sequence
  Description of Artificial Sequence: Synthetic oligonucleotide
aauguuaucuaaagagccu

SEQ ID NO: 1433997 - RNA, 19 nt, Artificial Sequence
  Description of Artificial Sequence: Synthetic oligonucleotide
gagcuauugacugcuauag

SEQ ID NO: 1433998 - RNA, 19 nt, Artificial Sequence
  Description of Artificial Sequence: Synthetic oligonucleotide
uaagcaggauaaauugucu

SEQ ID NO: 1433999 - RNA, 19 nt, Artificial Sequence
  Description of Artificial Sequence: Synthetic oligonucleotide
caucauggaacaugcauug

SEQ ID NO: 1434000 - RNA, 19 nt, Artificial Sequence
  Description of Artificial Sequence: Synthetic oligonucleotide
uuucaagccccuacauggg

SEQ ID NO: 1434001 - RNA, 19 nt, Artificial Sequence
  Description of Artificial Sequence: Synthetic oligonucleotide
cauuauugacuuuccuucc

SEQ ID NO: 1434002 - RNA, 19 nt, Artificial Sequence
  Description of Artificial Sequence: Synthetic oligonucleotide
aucuguaugucccacaauu

SEQ ID NO: 1434003 - RNA, 19 nt, Artificial Sequence
  Description of Artificial Sequence: Synthetic oligonucleotide
ugcaaaauuuaguuccgga

SEQ ID NO: 1434004 - RNA, 19 nt, Artificial Sequence
  Description of Artificial Sequence: Synthetic oligonucleotide
uguaugucccacaauuguc

SEQ ID NO: 1434005 - RNA, 19 nt, Artificial Sequence
  Description of Artificial Sequence: Synthetic oligonucleotide
cuaaagagccugaaaucag

SEQ ID NO: 1434006 - RNA, 19 nt, Artificial Sequence
  Description of Artificial Sequence: Synthetic oligonucleotide
ugugccauggcggaaagga

SEQ ID NO: 1434007 - RNA, 19 nt, Artificial Sequence
  Description of Artificial Sequence: Synthetic oligonucleotide
agaccagaucuuuagcauc

SEQ ID NO: 1434008 - RNA, 19 nt, Artificial Sequence
  Description of Artificial Sequence: Synthetic oligonucleotide
aaauugcuucuguguggcc

SEQ ID NO: 1434009 - RNA, 19 nt, Artificial Sequence
  Description of Artificial Sequence: Synthetic oligonucleotide
ucucgguguagaaacgugc

SEQ ID NO: 1434010 - RNA, 19 nt, Artificial Sequence
  Description of Artificial Sequence: Synthetic oligonucleotide
uucccauaagagaauaguc

SEQ ID NO: 1434011 - RNA, 19 nt, Artificial Sequence
  Description of Artificial Sequence: Synthetic oligonucleotide
uccgaugaaauguuuucca

SEQ ID NO: 1434012 - RNA, 19 nt, Artificial Sequence
  Description of Artificial Sequence: Synthetic oligonucleotide
aaccaucuuuaguucgggg

SEQ ID NO: 1434013 - RNA, 19 nt, Artificial Sequence
  Description of Artificial Sequence: Synthetic oligonucleotide
auugugugaucccaagaug

SEQ ID NO: 1434014 - RNA, 19 nt, Artificial Sequence
  Description of Artificial Sequence: Synthetic oligonucleotide
uaauugugugaucccaaga

SEQ ID NO: 1434015 - RNA, 19 nt, Artificial Sequence
  Description of Artificial Sequence: Synthetic oligonucleotide
cuguucauggguaggagac

SEQ ID NO: 1434016 - RNA, 19 nt, Artificial Sequence
  Description of Artificial Sequence: Synthetic oligonucleotide
acuguuuaugacacaauag

SEQ ID NO: 1434017 - RNA, 19 nt, Artificial Sequence
  Description of Artificial Sequence: Synthetic oligonucleotide
gcaaaauuuaguuccggag

SEQ ID NO: 1434018 - RNA, 19 nt, Artificial Sequence
  Description of Artificial Sequence: Synthetic oligonucleotide
agcaguguagggcuuucac

SEQ ID NO: 1434019 - RNA, 19 nt, Artificial Sequence
  Description of Artificial Sequence: Synthetic oligonucleotide
cuuaagaccaccagacuca

SEQ ID NO: 1434020 - RNA, 19 nt, Artificial Sequence
  Description of Artificial Sequence: Synthetic oligonucleotide
cuagaucauagagaggagc

SEQ ID NO: 1434021 - RNA, 19 nt, Artificial Sequence
  Description of Artificial Sequence: Synthetic oligonucleotide
cacaguuagaacuuuaucu

SEQ ID NO: 1434022 - RNA, 19 nt, Artificial Sequence
  Description of Artificial Sequence: Synthetic oligonucleotide
uguuaucuaaagagccuga

SEQ ID NO: 1434023 - RNA, 19 nt, Artificial Sequence
  Description of Artificial Sequence: Synthetic oligonucleotide
augcacugcagauuucuuc

SEQ ID NO: 1434024 - RNA, 19 nt, Artificial Sequence
  Description of Artificial Sequence: Synthetic oligonucleotide
ucuaauugugugaucccaa

SEQ ID NO: 1434025 - RNA, 19 nt, Artificial Sequence
  Description of Artificial Sequence: Synthetic oligonucleotide
aaacguuuacaaaggggag

SEQ ID NO: 1434026 - RNA, 19 nt, Artificial Sequence
  Description of Artificial Sequence: Synthetic oligonucleotide
aaaguugacuuaagaccac

SEQ ID NO: 1434027 - RNA, 19 nt, Artificial Sequence
  Description of Artificial Sequence: Synthetic oligonucleotide
aucauaagaaccagacagg

SEQ ID NO: 1434028 - RNA, 19 nt, Artificial Sequence
  Description of Artificial Sequence: Synthetic oligonucleotide
ugagcuauauccccagcuc

SEQ ID NO: 1434029 - RNA, 19 nt, Artificial Sequence
  Description of Artificial Sequence: Synthetic oligonucleotide
guuuaugacacaauaguaa

SEQ ID NO: 1434030 - RNA, 19 nt, Artificial Sequence
  Description of Artificial Sequence: Synthetic oligonucleotide
auugagcuuauccagucau

SEQ ID NO: 1434031 - RNA, 19 nt, Artificial Sequence
  Description of Artificial Sequence: Synthetic oligonucleotide
auauaauuuguugucugcu

SEQ ID NO: 1434032 - RNA, 19 nt, Artificial Sequence
  Description of Artificial Sequence: Synthetic oligonucleotide
uuuuccacguauucuaguu

SEQ ID NO: 1434033 - RNA, 19 nt, Artificial Sequence
  Description of Artificial Sequence: Synthetic oligonucleotide
ugucccacaauugucauua

SEQ ID NO: 1434034 - RNA, 19 nt, Artificial Sequence
  Description of Artificial Sequence: Synthetic oligonucleotide
auuuuaggcaagcccucuc

SEQ ID NO: 1434035 - RNA, 19 nt, Artificial Sequence
  Description of Artificial Sequence: Synthetic oligonucleotide
cuaauaugccugucugugc

SEQ ID NO: 1434036 - RNA, 19 nt, Artificial Sequence
  Description of Artificial Sequence: Synthetic oligonucleotide
uguaacccagccuguaugu

SEQ ID NO: 1434037 - RNA, 19 nt, Artificial Sequence
  Description of Artificial Sequence: Synthetic oligonucleotide
ggaaauugcuucugugugg

SEQ ID NO: 1434038 - RNA, 19 nt, Artificial Sequence
  Description of Artificial Sequence: Synthetic oligonucleotide
gaucccaagaugcacugca

SEQ ID NO: 1434039 - RNA, 19 nt, Artificial Sequence
  Description of Artificial Sequence: Synthetic oligonucleotide
uucuaauugugugauccca

SEQ ID NO: 1434040 - RNA, 19 nt, Artificial Sequence
  Description of Artificial Sequence: Synthetic oligonucleotide
ugucauuauugacuuuccu

SEQ ID NO: 1434041 - RNA, 19 nt, Artificial Sequence
  Description of Artificial Sequence: Synthetic oligonucleotide
auucccauaagagaauagu

SEQ ID NO: 1434042 - RNA, 19 nt, Artificial Sequence
  Description of Artificial Sequence: Synthetic oligonucleotide
uaguaggugaguaucugua

SEQ ID NO: 1434043 - RNA, 19 nt, Artificial Sequence
  Description of Artificial Sequence: Synthetic oligonucleotide
auauucuaauugugugauc

SEQ ID NO: 1434044 - RNA, 19 nt, Artificial Sequence
  Description of Artificial Sequence: Synthetic oligonucleotide
uuccugucaaaguugacuu

SEQ ID NO: 1434045 - RNA, 19 nt, Artificial Sequence
  Description of Artificial Sequence: Synthetic oligonucleotide
cucgguguagaaacgugcc

SEQ ID NO: 1434046 - RNA, 19 nt, Artificial Sequence
  Description of Artificial Sequence: Synthetic oligonucleotide
guuccggagcuauugacug

SEQ ID NO: 1434047 - RNA, 19 nt, Artificial Sequence
  Description of Artificial Sequence: Synthetic oligonucleotide
aacaucuguaugucccaca

SEQ ID NO: 1434048 - RNA, 19 nt, Artificial Sequence
  Description of Artificial Sequence: Synthetic oligonucleotide
cucgacauguuuguggagc

SEQ ID NO: 1434049 - RNA, 19 nt, Artificial Sequence
  Description of Artificial Sequence: Synthetic oligonucleotide
aguaucuguaggaauauaa

SEQ ID NO: 1434050 - RNA, 19 nt, Artificial Sequence
  Description of Artificial Sequence: Synthetic oligonucleotide
uuaguuccggagcuauuga

SEQ ID NO: 1434051 - RNA, 19 nt, Artificial Sequence
  Description of Artificial Sequence: Synthetic oligonucleotide
agauccgagaagucuuauc

SEQ ID NO: 1434052 - RNA, 19 nt, Artificial Sequence
  Description of Artificial Sequence: Synthetic oligonucleotide
aacccaacaagaaagucuu

SEQ ID NO: 1434053 - RNA, 19 nt, Artificial Sequence
  Description of Artificial Sequence: Synthetic oligonucleotide
acguauucuaguuccacaa

SEQ ID NO: 1434054 - RNA, 19 nt, Artificial Sequence
  Description of Artificial Sequence: Synthetic oligonucleotide
uccuccacucagaaguagc

SEQ ID NO: 1434055 - RNA, 19 nt, Artificial Sequence
  Description of Artificial Sequence: Synthetic oligonucleotide
aguuagaacuuuaucuuca

SEQ ID NO: 1434056 - RNA, 19 nt, Artificial Sequence
  Description of Artificial Sequence: Synthetic oligonucleotide
uauauccccagcucucuac

SEQ ID NO: 1434057 - RNA, 19 nt, Artificial Sequence
  Description of Artificial Sequence: Synthetic oligonucleotide
uuccgaugaaauguuuucc

SEQ ID NO: 1434058 - RNA, 19 nt, Artificial Sequence
  Description of Artificial Sequence: Synthetic oligonucleotide
agaaccaucuuuaguucgg

SEQ ID NO: 1434059 - RNA, 19 nt, Artificial Sequence
  Description of Artificial Sequence: Synthetic oligonucleotide
uuugaccaagggcaugcga

SEQ ID NO: 1434060 - RNA, 19 nt, Artificial Sequence
  Description of Artificial Sequence: Synthetic oligonucleotide
uucucgguguagaaacgug

SEQ ID NO: 1434061 - RNA, 19 nt, Artificial Sequence
  Description of Artificial Sequence: Synthetic oligonucleotide
uccacaguuagaacuuuau

SEQ ID NO: 1434062 - RNA, 19 nt, Artificial Sequence
  Description of Artificial Sequence: Synthetic oligonucleotide
cuucacugauguaacccag

SEQ ID NO: 1434063 - RNA, 19 nt, Artificial Sequence
  Description of Artificial Sequence: Synthetic oligonucleotide
aaggaccagauccgagaag

SEQ ID NO: 1434064 - RNA, 19 nt, Artificial Sequence
  Description of Artificial Sequence: Synthetic oligonucleotide
ccaaacguuuacaaagggg

SEQ ID NO: 1434065 - RNA, 19 nt, Artificial Sequence
  Description of Artificial Sequence: Synthetic oligonucleotide
gaugccaaacguuuacaaa

SEQ ID NO: 1434066 - RNA, 19 nt, Artificial Sequence
  Description of Artificial Sequence: Synthetic oligonucleotide
gaacaugcauugcucuggc

SEQ ID NO: 1434067 - RNA, 19 nt, Artificial Sequence
  Description of Artificial Sequence: Synthetic oligonucleotide
caauugagcuuauccaguc

SEQ ID NO: 1434068 - RNA, 19 nt, Artificial Sequence
  Description of Artificial Sequence: Synthetic oligonucleotide
ggaaauacaauuaaacacu

SEQ ID NO: 1434069 - RNA, 19 nt, Artificial Sequence
  Description of Artificial Sequence: Synthetic oligonucleotide
acgugccuggaguugugcc

SEQ ID NO: 1434070 - RNA, 19 nt, Artificial Sequence
  Description of Artificial Sequence: Synthetic oligonucleotide
guuagucccaauugcucug

SEQ ID NO: 1434071 - RNA, 19 nt, Artificial Sequence
  Description of Artificial Sequence: Synthetic oligonucleotide
cucaguaauaagcaggaua

SEQ ID NO: 1434072 - RNA, 19 nt, Artificial Sequence
  Description of Artificial Sequence: Synthetic oligonucleotide
aucuuaucccaggagccac

SEQ ID NO: 1434073 - RNA, 19 nt, Artificial Sequence
  Description of Artificial Sequence: Synthetic oligonucleotide
uccaaggaccagauccgag

SEQ ID NO: 1434074 - RNA, 19 nt, Artificial Sequence
  Description of Artificial Sequence: Synthetic oligonucleotide
aacgugccuggaguugugc

SEQ ID NO: 1434075 - RNA, 19 nt, Artificial Sequence
  Description of Artificial Sequence: Synthetic oligonucleotide
cauucccauaagagaauag

SEQ ID NO: 1434076 - RNA, 19 nt, Artificial Sequence
  Description of Artificial Sequence: Synthetic oligonucleotide
acaucuguaugucccacaa

SEQ ID NO: 1434077 - RNA, 19 nt, Artificial Sequence
  Description of Artificial Sequence: Synthetic oligonucleotide
auagucugauccauugaag

SEQ ID NO: 1434078 - RNA, 19 nt, Artificial Sequence
  Description of Artificial Sequence: Synthetic oligonucleotide
gaauagucugauccauuga

SEQ ID NO: 1434079 - RNA, 19 nt, Artificial Sequence
  Description of Artificial Sequence: Synthetic oligonucleotide
gcuauugacugcuauagaa

SEQ ID NO: 1434080 - RNA, 19 nt, Artificial Sequence
  Description of Artificial Sequence: Synthetic oligonucleotide
cacucaguaauaagcagga

SEQ ID NO: 1434081 - RNA, 19 nt, Artificial Sequence
  Description of Artificial Sequence: Synthetic oligonucleotide
aucaucuauugcauauuuc

SEQ ID NO: 1434082 - RNA, 19 nt, Artificial Sequence
  Description of Artificial Sequence: Synthetic oligonucleotide
aaguaguaggugaguaucu

SEQ ID NO: 1434083 - RNA, 19 nt, Artificial Sequence
  Description of Artificial Sequence: Synthetic oligonucleotide
aucauggaacaugcauugc

SEQ ID NO: 1434084 - RNA, 19 nt, Artificial Sequence
  Description of Artificial Sequence: Synthetic oligonucleotide
ucaagccccuacaugggaa

SEQ ID NO: 1434085 - RNA, 19 nt, Artificial Sequence
  Description of Artificial Sequence: Synthetic oligonucleotide
ggaacaugcauugcucugg

SEQ ID NO: 1434086 - RNA, 19 nt, Artificial Sequence
  Description of Artificial Sequence: Synthetic oligonucleotide
cauugaagcacucaguaau

SEQ ID NO: 1434087 - RNA, 19 nt, Artificial Sequence
  Description of Artificial Sequence: Synthetic oligonucleotide
auaugccugucugugcuuc

SEQ ID NO: 1434088 - RNA, 19 nt, Artificial Sequence
  Description of Artificial Sequence: Synthetic oligonucleotide
ucgacauguuuguggagcu

SEQ ID NO: 1434089 - RNA, 19 nt, Artificial Sequence
  Description of Artificial Sequence: Synthetic oligonucleotide
gagccuuagaacuucuugu

SEQ ID NO: 1434090 - RNA, 19 nt, Artificial Sequence
  Description of Artificial Sequence: Synthetic oligonucleotide
uguuuguggagcucauuuu

SEQ ID NO: 1434091 - RNA, 19 nt, Artificial Sequence
  Description of Artificial Sequence: Synthetic oligonucleotide
guaugucccacaauuguca

SEQ ID NO: 1434092 - RNA, 19 nt, Artificial Sequence
  Description of Artificial Sequence: Synthetic oligonucleotide
uaguuccggagcuauugac

SEQ ID NO: 1434093 - RNA, 19 nt, Artificial Sequence
  Description of Artificial Sequence: Synthetic oligonucleotide
guagaaacgugccuggagu

SEQ ID NO: 1434094 - RNA, 19 nt, Artificial Sequence
  Description of Artificial Sequence: Synthetic oligonucleotide
acauuuuaggcaagcccuc

SEQ ID NO: 1434095 - RNA, 19 nt, Artificial Sequence
  Description of Artificial Sequence: Synthetic oligonucleotide
acccaagccacaucuuuca

SEQ ID NO: 1434096 - RNA, 19 nt, Artificial Sequence
  Description of Artificial Sequence: Synthetic oligonucleotide
guucggggaucccagaguc

SEQ ID NO: 1434097 - RNA, 19 nt, Artificial Sequence
  Description of Artificial Sequence: Synthetic oligonucleotide
agcuauauccccagcucuc

SEQ ID NO: 1434098 - RNA, 19 nt, Artificial Sequence
  Description of Artificial Sequence: Synthetic oligonucleotide
uugaucaaucauucauuuu

SEQ ID NO: 1434099 - RNA, 19 nt, Artificial Sequence
  Description of Artificial Sequence: Synthetic oligonucleotide
ucuuaucccaggagccacu

SEQ ID NO: 1434100 - RNA, 19 nt, Artificial Sequence
  Description of Artificial Sequence: Synthetic oligonucleotide
ccagagucuaauaugccug

SEQ ID NO: 1434101 - RNA, 19 nt, Artificial Sequence
  Description of Artificial Sequence: Synthetic oligonucleotide
agagaauagucugauccau

SEQ ID NO: 1434102 - RNA, 19 nt, Artificial Sequence
  Description of Artificial Sequence: Synthetic oligonucleotide
gagaaaggaacaucaucua

SEQ ID NO: 1434103 - RNA, 19 nt, Artificial Sequence
  Description of Artificial Sequence: Synthetic oligonucleotide
ugaguaucuguaggaauau

SEQ ID NO: 1434104 - RNA, 19 nt, Artificial Sequence
  Description of Artificial Sequence: Synthetic oligonucleotide
uugagcuuauccagucauc

SEQ ID NO: 1434105 - RNA, 19 nt, Artificial Sequence
  Description of Artificial Sequence: Synthetic oligonucleotide
cagacaggauccauucuuc

SEQ ID NO: 1434106 - RNA, 19 nt, Artificial Sequence
  Description of Artificial Sequence: Synthetic oligonucleotide
uuuucacccaagccacauc

SEQ ID NO: 1434107 - RNA, 19 nt, Artificial Sequence
  Description of Artificial Sequence: Synthetic oligonucleotide
ucauggguaggagaccacu

SEQ ID NO: 1434108 - RNA, 19 nt, Artificial Sequence
  Description of Artificial Sequence: Synthetic oligonucleotide
caagccccuacaugggaag

SEQ ID NO: 1434109 - RNA, 19 nt, Artificial Sequence
  Description of Artificial Sequence: Synthetic oligonucleotide
aacaugcauugcucuggcu

SEQ ID NO: 1434110 - RNA, 19 nt, Artificial Sequence
  Description of Artificial Sequence: Synthetic oligonucleotide
guguagggcuuucacuuug

SEQ ID NO: 1434111 - RNA, 19 nt, Artificial Sequence
  Description of Artificial Sequence: Synthetic oligonucleotide
uccacguauucuaguucca

SEQ ID NO: 1434112 - RNA, 19 nt, Artificial Sequence
  Description of Artificial Sequence: Synthetic oligonucleotide
augauguuacuaaggucag

SEQ ID NO: 1434113 - RNA, 19 nt, Artificial Sequence
  Description of Artificial Sequence: Synthetic oligonucleotide
uccggagcuauugacugcu

SEQ ID NO: 1434114 - RNA, 19 nt, Artificial Sequence
  Description of Artificial Sequence: Synthetic oligonucleotide
gccaaacguuuacaaaggg

SEQ ID NO: 1434115 - RNA, 19 nt, Artificial Sequence
  Description of Artificial Sequence: Synthetic oligonucleotide
gagucuaauaugccugucu

SEQ ID NO: 1434116 - RNA, 19 nt, Artificial Sequence
  Description of Artificial Sequence: Synthetic oligonucleotide
agcuauugacugcuauaga

SEQ ID NO: 1434117 - RNA, 19 nt, Artificial Sequence
  Description of Artificial Sequence: Synthetic oligonucleotide
acgcgcgagacuucuccac

SEQ ID NO: 1434118 - RNA, 19 nt, Artificial Sequence
  Description of Artificial Sequence: Synthetic oligonucleotide
agaaacgugccuggaguug

SEQ ID NO: 1434119 - RNA, 19 nt, Artificial Sequence
  Description of Artificial Sequence: Synthetic oligonucleotide
cacaauaguaagacacuaa

SEQ ID NO: 1434120 - RNA, 19 nt, Artificial Sequence
  Description of Artificial Sequence: Synthetic oligonucleotide
agaucauagagaggagccu

SEQ ID NO: 1434121 - RNA, 19 nt, Artificial Sequence
  Description of Artificial Sequence: Synthetic oligonucleotide
acacaauaguaagacacua

SEQ ID NO: 1434122 - RNA, 19 nt, Artificial Sequence
  Description of Artificial Sequence: Synthetic oligonucleotide
ugacugcuauagaauccac

SEQ ID NO: 1434123 - RNA, 19 nt, Artificial Sequence
  Description of Artificial Sequence: Synthetic oligonucleotide
aguuccggagcuauugacu

SEQ ID NO: 1434124 - RNA, 19 nt, Artificial Sequence
  Description of Artificial Sequence: Synthetic oligonucleotide
agagucuaauaugccuguc

SEQ ID NO: 1434125 - RNA, 19 nt, Artificial Sequence
  Description of Artificial Sequence: Synthetic oligonucleotide
gagccacugcaaaauuuag

SEQ ID NO: 1434126 - RNA, 19 nt, Artificial Sequence
  Description of Artificial Sequence: Synthetic oligonucleotide
aaauuuaguuccggagcua

SEQ ID NO: 1434127 - RNA, 19 nt, Artificial Sequence
  Description of Artificial Sequence: Synthetic oligonucleotide
uaugccugucugugcuucc

SEQ ID NO: 1434128 - RNA, 19 nt, Artificial Sequence
  Description of Artificial Sequence: Synthetic oligonucleotide
cacguauucuaguuccaca

SEQ ID NO: 1434129 - RNA, 19 nt, Artificial Sequence
  Description of Artificial Sequence: Synthetic oligonucleotide
aaggacgcgcgagacuucu

SEQ ID NO: 1434130 - RNA, 19 nt, Artificial Sequence
  Description of Artificial Sequence: Synthetic oligonucleotide
cuguaugugaggugaggga

SEQ ID NO: 1434131 - RNA, 19 nt, Artificial Sequence
  Description of Artificial Sequence: Synthetic oligonucleotide
ccgauuuguggauucuucc

SEQ ID NO: 1434132 - RNA, 19 nt, Artificial Sequence
  Description of Artificial Sequence: Synthetic oligonucleotide
uuccggagcuauugacugc

SEQ ID NO: 1434133 - RNA, 19 nt, Artificial Sequence
  Description of Artificial Sequence: Synthetic oligonucleotide
uuggccgauuuguggauuc

SEQ ID NO: 1434134 - RNA, 19 nt, Artificial Sequence
  Description of Artificial Sequence: Synthetic oligonucleotide
ucccacaauugucauuauu

SEQ ID NO: 1434135 - RNA, 19 nt, Artificial Sequence
  Description of Artificial Sequence: Synthetic oligonucleotide
aguugacuuaagaccacca

SEQ ID NO: 1434136 - RNA, 19 nt, Artificial Sequence
  Description of Artificial Sequence: Synthetic oligonucleotide
uuagucccaauugcucugu

SEQ ID NO: 1434137 - RNA, 19 nt, Artificial Sequence
  Description of Artificial Sequence: Synthetic oligonucleotide
ucccaauugcucuguuuuc

SEQ ID NO: 1434138 - RNA, 19 nt, Artificial Sequence
  Description of Artificial Sequence: Synthetic oligonucleotide
cuuugaucaaucauucauu

SEQ ID NO: 1434139 - RNA, 19 nt, Artificial Sequence
  Description of Artificial Sequence: Synthetic oligonucleotide
ccuguaugugaggugaggg

SEQ ID NO: 1434140 - RNA, 19 nt, Artificial Sequence
  Description of Artificial Sequence: Synthetic oligonucleotide
cuauugacugcuauagaau

SEQ ID NO: 1434141 - RNA, 19 nt, Artificial Sequence
  Description of Artificial Sequence: Synthetic oligonucleotide
gagcuauauccccagcucu

SEQ ID NO: 1434142 - RNA, 19 nt, Artificial Sequence
  Description of Artificial Sequence: Synthetic oligonucleotide
cuuuaguucggggauccca

SEQ ID NO: 1434143 - RNA, 19 nt, Artificial Sequence
  Description of Artificial Sequence: Synthetic oligonucleotide
aagaugcacugcagauuuc

SEQ ID NO: 1434144 - RNA, 19 nt, Artificial Sequence
  Description of Artificial Sequence: Synthetic oligonucleotide
cagcuagaucauagagagg

SEQ ID NO: 1434145 - RNA, 19 nt, Artificial Sequence
  Description of Artificial Sequence: Synthetic oligonucleotide
ucuuggccgauuuguggau

SEQ ID NO: 1434146 - RNA, 19 nt, Artificial Sequence
  Description of Artificial Sequence: Synthetic oligonucleotide
gaaaggacgcgcgagacuu

SEQ ID NO: 1434147 - RNA, 19 nt, Artificial Sequence
  Description of Artificial Sequence: Synthetic oligonucleotide
ugccccuucaauugagcuu

SEQ ID NO: 1434148 - RNA, 19 nt, Artificial Sequence
  Description of Artificial Sequence: Synthetic oligonucleotide
agacucagcaucccauauu

SEQ ID NO: 1434149 - RNA, 19 nt, Artificial Sequence
  Description of Artificial Sequence: Synthetic oligonucleotide
aaaggacgcgcgagacuuc

SEQ ID NO: 1434150 - RNA, 19 nt, Artificial Sequence
  Description of Artificial Sequence: Synthetic oligonucleotide
ccuacaugggaaguaguag

SEQ ID NO: 1434151 - RNA, 19 nt, Artificial Sequence
  Description of Artificial Sequence: Synthetic oligonucleotide
gcuauagaauccacacucc

SEQ ID NO: 1434152 - RNA, 19 nt, Artificial Sequence
  Description of Artificial Sequence: Synthetic oligonucleotide
guaguaggugaguaucugu

SEQ ID NO: 1434153 - RNA, 19 nt, Artificial Sequence
  Description of Artificial Sequence: Synthetic oligonucleotide
cagaucuuuagcaucuuau

SEQ ID NO: 1434154 - RNA, 19 nt, Artificial Sequence
  Description of Artificial Sequence: Synthetic oligonucleotide
cuguaugucccacaauugu

SEQ ID NO: 1434155 - RNA, 19 nt, Artificial Sequence
  Description of Artificial Sequence: Synthetic oligonucleotide
uccugucaaaguugacuua

SEQ ID NO: 1434156 - RNA, 19 nt, Artificial Sequence
  Description of Artificial Sequence: Synthetic oligonucleotide
ugguguccagcaauuuauu

SEQ ID NO: 1434157 - RNA, 19 nt, Artificial Sequence
  Description of Artificial Sequence: Synthetic oligonucleotide
ccuccacucagaaguagcc

SEQ ID NO: 1434158 - RNA, 19 nt, Artificial Sequence
  Description of Artificial Sequence: Synthetic oligonucleotide
ucggggaucccagagucua

SEQ ID NO: 1434159 - RNA, 19 nt, Artificial Sequence
  Description of Artificial Sequence: Synthetic oligonucleotide
ugauguaacccagccugua

SEQ ID NO: 1434160 - RNA, 19 nt, Artificial Sequence
  Description of Artificial Sequence: Synthetic oligonucleotide
ggacgcgcgagacuucucc

SEQ ID NO: 1434161 - RNA, 19 nt, Artificial Sequence
  Description of Artificial Sequence: Synthetic oligonucleotide
cauauuucuuguucucggu

SEQ ID NO: 1434162 - RNA, 19 nt, Artificial Sequence
  Description of Artificial Sequence: Synthetic oligonucleotide
caucuuuaguucggggauc

SEQ ID NO: 1434163 - RNA, 19 nt, Artificial Sequence
  Description of Artificial Sequence: Synthetic oligonucleotide
auccauugaagcacucagu

SEQ ID NO: 1434164 - RNA, 19 nt, Artificial Sequence
  Description of Artificial Sequence: Synthetic oligonucleotide
gacuuaagaccaccagacu

SEQ ID NO: 1434165 - RNA, 19 nt, Artificial Sequence
  Description of Artificial Sequence: Synthetic oligonucleotide
gaaacgugccuggaguugu

SEQ ID NO: 1434166 - RNA, 19 nt, Artificial Sequence
  Description of Artificial Sequence: Synthetic oligonucleotide
cugguuagucccaauugcu

SEQ ID NO: 1434167 - RNA, 19 nt, Artificial Sequence
  Description of Artificial Sequence: Synthetic oligonucleotide
accagauccgagaagucuu

SEQ ID NO: 1434168 - RNA, 19 nt, Artificial Sequence
  Description of Artificial Sequence: Synthetic oligonucleotide
cagccuguaugugagguga

SEQ ID NO: 1434169 - RNA, 19 nt, Artificial Sequence
  Description of Artificial Sequence: Synthetic oligonucleotide
uugugccauggcggaaagg

SEQ ID NO: 1434170 - RNA, 19 nt, Artificial Sequence
  Description of Artificial Sequence: Synthetic oligonucleotide
guaucuguaggaauauaau

SEQ ID NO: 1434171 - RNA, 19 nt, Artificial Sequence
  Description of Artificial Sequence: Synthetic oligonucleotide
guuagaacuuuaucuucau

SEQ ID NO: 1434172 - RNA, 19 nt, Artificial Sequence
  Description of Artificial Sequence: Synthetic oligonucleotide
cuuguucucgguguagaaa

SEQ ID NO: 1434173 - RNA, 19 nt, Artificial Sequence
  Description of Artificial Sequence: Synthetic oligonucleotide
ggaguugugccauggcgga

SEQ ID NO: 1434174 - RNA, 19 nt, Artificial Sequence
  Description of Artificial Sequence: Synthetic oligonucleotide
aagccccuacaugggaagu

SEQ ID NO: 1434175 - RNA, 19 nt, Artificial Sequence
  Description of Artificial Sequence: Synthetic oligonucleotide
gucuaauaugccugucugu

SEQ ID NO: 1434176 - RNA, 19 nt, Artificial Sequence
  Description of Artificial Sequence: Synthetic oligonucleotide
gcuguucauggguaggaga

SEQ ID NO: 1434177 - RNA, 19 nt, Artificial Sequence
  Description of Artificial Sequence: Synthetic oligonucleotide
aaacgugccuggaguugug

SEQ ID NO: 1434178 - RNA, 19 nt, Artificial Sequence
  Description of Artificial Sequence: Synthetic oligonucleotide
ggagcuauugacugcuaua

SEQ ID NO: 1434179 - RNA, 19 nt, Artificial Sequence
  Description of Artificial Sequence: Synthetic oligonucleotide
gacgcgcgagacuucucca

SEQ ID NO: 1434180 - RNA, 19 nt, Artificial Sequence
  Description of Artificial Sequence: Synthetic oligonucleotide
ucuggcuggggugccgugu

SEQ ID NO: 1434181 - RNA, 19 nt, Artificial Sequence
  Description of Artificial Sequence: Synthetic oligonucleotide
agauaguacucaggguuuu

SEQ ID NO: 1434182 - RNA, 19 nt, Artificial Sequence
  Description of Artificial Sequence: Synthetic oligonucleotide
cgagaagucuuaucauaag

SEQ ID NO: 1434183 - RNA, 19 nt, Artificial Sequence
  Description of Artificial Sequence: Synthetic oligonucleotide
gcuuccagaugccaaacgu

SEQ ID NO: 1434184 - RNA, 19 nt, Artificial Sequence
  Description of Artificial Sequence: Synthetic oligonucleotide
gcuagaucauagagaggag

SEQ ID NO: 1434185 - RNA, 19 nt, Artificial Sequence
  Description of Artificial Sequence: Synthetic oligonucleotide
guccagcaauuuauugaug

SEQ ID NO: 1434186 - RNA, 19 nt, Artificial Sequence
  Description of Artificial Sequence: Synthetic oligonucleotide
ccgagaagucuuaucauaa

SEQ ID NO: 1434187 - RNA, 19 nt, Artificial Sequence
  Description of Artificial Sequence: Synthetic oligonucleotide
cagagucuaauaugccugu

SEQ ID NO: 1434188 - RNA, 19 nt, Artificial Sequence
  Description of Artificial Sequence: Synthetic oligonucleotide
cauuuucaagccccuacau

SEQ ID NO: 1434189 - RNA, 19 nt, Artificial Sequence
  Description of Artificial Sequence: Synthetic oligonucleotide
gccauggcggaaaggacgc

SEQ ID NO: 1434190 - RNA, 19 nt, Artificial Sequence
  Description of Artificial Sequence: Synthetic oligonucleotide
ggcggaaaggacgcgcgag

SEQ ID NO: 1434191 - RNA, 19 nt, Artificial Sequence
  Description of Artificial Sequence: Synthetic oligonucleotide
gccccugauaaggaaauca

SEQ ID NO: 1434192 - RNA, 19 nt, Artificial Sequence
  Description of Artificial Sequence: Synthetic oligonucleotide
cugcagauuucuucaacau

SEQ ID NO: 1434193 - RNA, 19 nt, Artificial Sequence
  Description of Artificial Sequence: Synthetic oligonucleotide
acacuguuuaugacacaau

SEQ ID NO: 1434194 - RNA, 19 nt, Artificial Sequence
  Description of Artificial Sequence: Synthetic oligonucleotide
ggaaguaguaggugaguau

SEQ ID NO: 1434195 - RNA, 19 nt, Artificial Sequence
  Description of Artificial Sequence: Synthetic oligonucleotide
acucaguaauaagcaggau

SEQ ID NO: 1434196 - RNA, 19 nt, Artificial Sequence
  Description of Artificial Sequence: Synthetic oligonucleotide
gguaggagaccacuucacu

SEQ ID NO: 1434197 - RNA, 19 nt, Artificial Sequence
  Description of Artificial Sequence: Synthetic oligonucleotide
cagaaguagcccugugucu

SEQ ID NO: 1434198 - RNA, 19 nt, Artificial Sequence
  Description of Artificial Sequence: Synthetic oligonucleotide
gacuguagaccagaucuuu

SEQ ID NO: 1434199 - RNA, 19 nt, Artificial Sequence
  Description of Artificial Sequence: Synthetic oligonucleotide
cguauucuaguuccacaac

SEQ ID NO: 1434200 - RNA, 19 nt, Artificial Sequence
  Description of Artificial Sequence: Synthetic oligonucleotide
gcaugcgaagaaacuggcc

SEQ ID NO: 1434201 - RNA, 19 nt, Artificial Sequence
  Description of Artificial Sequence: Synthetic oligonucleotide
guucucgguguagaaacgu

SEQ ID NO: 1434202 - RNA, 19 nt, Artificial Sequence
  Description of Artificial Sequence: Synthetic oligonucleotide
uggccgauuuguggauucu

SEQ ID NO: 1434203 - RNA, 19 nt, Artificial Sequence
  Description of Artificial Sequence: Synthetic oligonucleotide
gccccuacaugggaaguag

SEQ ID NO: 1434204 - RNA, 19 nt, Artificial Sequence
  Description of Artificial Sequence: Synthetic oligonucleotide
gagggacagcgacaccaaa

SEQ ID NO: 1434205 - RNA, 19 nt, Artificial Sequence
  Description of Artificial Sequence: Synthetic oligonucleotide
ccugucaaaguugacuuaa

SEQ ID NO: 1434206 - RNA, 19 nt, Artificial Sequence
  Description of Artificial Sequence: Synthetic oligonucleotide
agccuguaugugaggugag

SEQ ID NO: 1434207 - RNA, 19 nt, Artificial Sequence
  Description of Artificial Sequence: Synthetic oligonucleotide
caccagacucagcauccca

SEQ ID NO: 1434208 - RNA, 19 nt, Artificial Sequence
  Description of Artificial Sequence: Synthetic oligonucleotide
gagaauagucugauccauu

SEQ ID NO: 1434209 - RNA, 19 nt, Artificial Sequence
  Description of Artificial Sequence: Synthetic oligonucleotide
ggguaggagaccacuucac

SEQ ID NO: 1434210 - RNA, 19 nt, Artificial Sequence
  Description of Artificial Sequence: Synthetic oligonucleotide
cgguguagaaacgugccug

SEQ ID NO: 1434211 - RNA, 19 nt, Artificial Sequence
  Description of Artificial Sequence: Synthetic oligonucleotide
cugccccuucaauugagcu

SEQ ID NO: 1434212 - RNA, 19 nt, Artificial Sequence
  Description of Artificial Sequence: Synthetic oligonucleotide
agaccacuucacugaugua

SEQ ID NO: 1434213 - RNA, 19 nt, Artificial Sequence
  Description of Artificial Sequence: Synthetic oligonucleotide
ccauugaagcacucaguaa

SEQ ID NO: 1434214 - RNA, 19 nt, Artificial Sequence
  Description of Artificial Sequence: Synthetic oligonucleotide
ccacguauucuaguuccac

SEQ ID NO: 1434215 - RNA, 19 nt, Artificial Sequence
  Description of Artificial Sequence: Synthetic oligonucleotide
gcggaaaggacgcgcgaga

SEQ ID NO: 1434216 - RNA, 19 nt, Artificial Sequence
  Description of Artificial Sequence: Synthetic oligonucleotide
agccccuacaugggaagua

SEQ ID NO: 1434217 - RNA, 19 nt, Artificial Sequence
  Description of Artificial Sequence: Synthetic oligonucleotide
cauggguaggagaccacuu

SEQ ID NO: 1434218 - RNA, 19 nt, Artificial Sequence
  Description of Artificial Sequence: Synthetic oligonucleotide
cccuacaugggaaguagua

SEQ ID NO: 1434219 - RNA, 19 nt, Artificial Sequence
  Description of Artificial Sequence: Synthetic oligonucleotide
ggaaaggacgcgcgagacu

SEQ ID NO: 1434220 - RNA, 19 nt, Artificial Sequence
  Description of Artificial Sequence: Synthetic oligonucleotide
aggacgcgcgagacuucuc

SEQ ID NO: 1434221 - RNA, 19 nt, Artificial Sequence
  Description of Artificial Sequence: Synthetic oligonucleotide
ccaucuuuaguucggggau

SEQ ID NO: 1434222 - RNA, 19 nt, Artificial Sequence
  Description of Artificial Sequence: Synthetic oligonucleotide
gaggagccuuagaacuucu

SEQ ID NO: 1434223 - RNA, 19 nt, Artificial Sequence
  Description of Artificial Sequence: Synthetic oligonucleotide
ccacaaccucuuccgauga

SEQ ID NO: 1434224 - RNA, 19 nt, Artificial Sequence
  Description of Artificial Sequence: Synthetic oligonucleotide
gcgcgagacuucuccacaa

SEQ ID NO: 1434225 - RNA, 19 nt, Artificial Sequence
  Description of Artificial Sequence: Synthetic oligonucleotide
ccagauccgagaagucuua

SEQ ID NO: 1434226 - RNA, 19 nt, Artificial Sequence
  Description of Artificial Sequence: Synthetic oligonucleotide
ggccagagagggucaccaa

SEQ ID NO: 1434227 - RNA, 19 nt, Artificial Sequence
  Description of Artificial Sequence: Synthetic oligonucleotide
ggccccugauaaggaaauc

SEQ ID NO: 1434228 - RNA, 19 nt, Artificial Sequence
  Description of Artificial Sequence: Synthetic oligonucleotide
cuuggccgauuuguggauu

SEQ ID NO: 1434229 - RNA, 19 nt, Artificial Sequence
  Description of Artificial Sequence: Synthetic oligonucleotide
gucccacaauugucauuau

SEQ ID NO: 1434230 - RNA, 19 nt, Artificial Sequence
  Description of Artificial Sequence: Synthetic oligonucleotide
cagauccgagaagucuuau

SEQ ID NO: 1434231 - RNA, 19 nt, Artificial Sequence
  Description of Artificial Sequence: Synthetic oligonucleotide
ggacuguagaccagaucuu

SEQ ID NO: 1434232 - RNA, 19 nt, Artificial Sequence
  Description of Artificial Sequence: Synthetic oligonucleotide
cgcgcgagacuucuccaca

SEQ ID NO: 1434233 - RNA, 19 nt, Artificial Sequence
  Description of Artificial Sequence: Synthetic oligonucleotide
cccagccuguaugugaggu

SEQ ID NO: 1434234 - RNA, 19 nt, Artificial Sequence
  Description of Artificial Sequence: Synthetic oligonucleotide
ccucucccaacugagcuau

SEQ ID NO: 1434235 - RNA, 19 nt, Artificial Sequence
  Description of Artificial Sequence: Synthetic oligonucleotide
cuggggugccguguauuuu

SEQ ID NO: 1434236 - RNA, 19 nt, Artificial Sequence
  Description of Artificial Sequence: Synthetic oligonucleotide
ccccuacaugggaaguagu

SEQ ID NO: 1434237 - RNA, 19 nt, Artificial Sequence
  Description of Artificial Sequence: Synthetic oligonucleotide
ccggagcuauugacugcua

SEQ ID NO: 1434238 - RNA, 19 nt, Artificial Sequence
  Description of Artificial Sequence: Synthetic oligonucleotide
cggggaucccagagucuaa

SEQ ID NO: 1434239 - RNA, 19 nt, Artificial Sequence
  Description of Artificial Sequence: Synthetic oligonucleotide
uaauuuacaugacagaggg

SEQ ID NO: 1434240 - RNA, 19 nt, Artificial Sequence
  Description of Artificial Sequence: Synthetic oligonucleotide
aguggaugcacuuaaaggc

SEQ ID NO: 1434241 - RNA, 19 nt, Artificial Sequence
  Description of Artificial Sequence: Synthetic oligonucleotide
ucuacaacggagcaaaugg

SEQ ID NO: 1434242 - RNA, 19 nt, Artificial Sequence
  Description of Artificial Sequence: Synthetic oligonucleotide
gguaauggaauccagaugg

SEQ ID NO: 1434243 - RNA, 19 nt, Artificial Sequence
  Description of Artificial Sequence: Synthetic oligonucleotide
ucaaaguucaguucuauug

SEQ ID NO: 1434244 - RNA, 19 nt, Artificial Sequence
  Description of Artificial Sequence: Synthetic oligonucleotide
cucaauaaaaccuggcugg

SEQ ID NO: 1434245 - RNA, 19 nt, Artificial Sequence
  Description of Artificial Sequence: Synthetic oligonucleotide
acuauugauacacuccugg

SEQ ID NO: 1434246 - RNA, 19 nt, Artificial Sequence
  Description of Artificial Sequence: Synthetic oligonucleotide
agguuguuacuauugauac

SEQ ID NO: 1434247 - RNA, 19 nt, Artificial Sequence
  Description of Artificial Sequence: Synthetic oligonucleotide
ucucaauaaaaccuggcug

SEQ ID NO: 1434248 - RNA, 19 nt, Artificial Sequence
  Description of Artificial Sequence: Synthetic oligonucleotide
guuacuguaguccauagac

SEQ ID NO: 1434249 - RNA, 19 nt, Artificial Sequence
  Description of Artificial Sequence: Synthetic oligonucleotide
aauaaucucuaagaaacug

SEQ ID NO: 1434250 - RNA, 19 nt, Artificial Sequence
  Description of Artificial Sequence: Synthetic oligonucleotide
ugcaauggugucuagagug

SEQ ID NO: 1434251 - RNA, 19 nt, Artificial Sequence
  Description of Artificial Sequence: Synthetic oligonucleotide
auuuguagauuccagguug

SEQ ID NO: 1434252 - RNA, 19 nt, Artificial Sequence
  Description of Artificial Sequence: Synthetic oligonucleotide
aguucuauuguuuuaacau

SEQ ID NO: 1434253 - RNA, 19 nt, Artificial Sequence
  Description of Artificial Sequence: Synthetic oligonucleotide
uacuguaguccauagacag

SEQ ID NO: 1434254 - RNA, 19 nt, Artificial Sequence
  Description of Artificial Sequence: Synthetic oligonucleotide
uuacuauugauacacuccu

SEQ ID NO: 1434255 - RNA, 19 nt, Artificial Sequence
  Description of Artificial Sequence: Synthetic oligonucleotide
aaauggacagcaauggcuc

SEQ ID NO: 1434256 - RNA, 19 nt, Artificial Sequence
  Description of Artificial Sequence: Synthetic oligonucleotide
auaggagcggcuuccauac

SEQ ID NO: 1434257 - RNA, 19 nt, Artificial Sequence
  Description of Artificial Sequence: Synthetic oligonucleotide
uuuucugagcaccuggagc

SEQ ID NO: 1434258 - RNA, 19 nt, Artificial Sequence
  Description of Artificial Sequence: Synthetic oligonucleotide
ucaugaaaagugcagggac

SEQ ID NO: 1434259 - RNA, 19 nt, Artificial Sequence
  Description of Artificial Sequence: Synthetic oligonucleotide
guuguuacuauugauacac

SEQ ID NO: 1434260 - RNA, 19 nt, Artificial Sequence
  Description of Artificial Sequence: Synthetic oligonucleotide
aaugaagccacgucaauuu

SEQ ID NO: 1434261 - RNA, 19 nt, Artificial Sequence
  Description of Artificial Sequence: Synthetic oligonucleotide
uccccguuaaccaacaaca

SEQ ID NO: 1434262 - RNA, 19 nt, Artificial Sequence
  Description of Artificial Sequence: Synthetic oligonucleotide
auuacuuccccguuaacca

SEQ ID NO: 1434263 - RNA, 19 nt, Artificial Sequence
  Description of Artificial Sequence: Synthetic oligonucleotide
uuucugagcaccuggagca

SEQ ID NO: 1434264 - RNA, 19 nt, Artificial Sequence
  Description of Artificial Sequence: Synthetic oligonucleotide
agaaauggggcacaugcag

SEQ ID NO: 1434265 - RNA, 19 nt, Artificial Sequence
  Description of Artificial Sequence: Synthetic oligonucleotide
uuuucuacuaggauacggu

SEQ ID NO: 1434266 - RNA, 19 nt, Artificial Sequence
  Description of Artificial Sequence: Synthetic oligonucleotide
uauugauacacuccuggga

SEQ ID NO: 1434267 - RNA, 19 nt, Artificial Sequence
  Description of Artificial Sequence: Synthetic oligonucleotide
cucauugcaaaccuggcag

SEQ ID NO: 1434268 - RNA, 19 nt, Artificial Sequence
  Description of Artificial Sequence: Synthetic oligonucleotide
guagauuccagguuguuac

SEQ ID NO: 1434269 - RNA, 19 nt, Artificial Sequence
  Description of Artificial Sequence: Synthetic oligonucleotide
aacaacaguucacugcucu

SEQ ID NO: 1434270 - RNA, 19 nt, Artificial Sequence
  Description of Artificial Sequence: Synthetic oligonucleotide
acauaucaaaaccuagaag

SEQ ID NO: 1434271 - RNA, 19 nt, Artificial Sequence
  Description of Artificial Sequence: Synthetic oligonucleotide
uuacaagagaggcagcgca

SEQ ID NO: 1434272 - RNA, 19 nt, Artificial Sequence
  Description of Artificial Sequence: Synthetic oligonucleotide
uaugguaauggaauccaga

SEQ ID NO: 1434273 - RNA, 19 nt, Artificial Sequence
  Description of Artificial Sequence: Synthetic oligonucleotide
aaguacagagggcuuauga

SEQ ID NO: 1434274 - RNA, 19 nt, Artificial Sequence
  Description of Artificial Sequence: Synthetic oligonucleotide
uuaguuucagacauaucaa

SEQ ID NO: 1434275 - RNA, 19 nt, Artificial Sequence
  Description of Artificial Sequence: Synthetic oligonucleotide
accagauuuggacucacuc

SEQ ID NO: 1434276 - RNA, 19 nt, Artificial Sequence
  Description of Artificial Sequence: Synthetic oligonucleotide
caucaugaaaagugcaggg

SEQ ID NO: 1434277 - RNA, 19 nt, Artificial Sequence
  Description of Artificial Sequence: Synthetic oligonucleotide
auugauacacuccugggaa

SEQ ID NO: 1434278 - RNA, 19 nt, Artificial Sequence
  Description of Artificial Sequence: Synthetic oligonucleotide
aagauuuaauuuacaugac

SEQ ID NO: 1434279 - RNA, 19 nt, Artificial Sequence
  Description of Artificial Sequence: Synthetic oligonucleotide
agagugaagacaguaguuc

SEQ ID NO: 1434280 - RNA, 19 nt, Artificial Sequence
  Description of Artificial Sequence: Synthetic oligonucleotide
caguggaugcacuuaaagg

SEQ ID NO: 1434281 - RNA, 19 nt, Artificial Sequence
  Description of Artificial Sequence: Synthetic oligonucleotide
ucucuucaaaggcauagca

SEQ ID NO: 1434282 - RNA, 19 nt, Artificial Sequence
  Description of Artificial Sequence: Synthetic oligonucleotide
ucagcccucucucugaacc

SEQ ID NO: 1434283 - RNA, 19 nt, Artificial Sequence
  Description of Artificial Sequence: Synthetic oligonucleotide
guuacuauugauacacucc

SEQ ID NO: 1434284 - RNA, 19 nt, Artificial Sequence
  Description of Artificial Sequence: Synthetic oligonucleotide
acacucaaaguucaguucu

SEQ ID NO: 1434285 - RNA, 19 nt, Artificial Sequence
  Description of Artificial Sequence: Synthetic oligonucleotide
ucuacuaggauacggucuc

SEQ ID NO: 1434286 - RNA, 19 nt, Artificial Sequence
  Description of Artificial Sequence: Synthetic oligonucleotide
uucuauuguuuuaacauuu

SEQ ID NO: 1434287 - RNA, 19 nt, Artificial Sequence
  Description of Artificial Sequence: Synthetic oligonucleotide
aagcucauugcaaaccugg

SEQ ID NO: 1434288 - RNA, 19 nt, Artificial Sequence
  Description of Artificial Sequence: Synthetic oligonucleotide
cuucagauguagcucauag

SEQ ID NO: 1434289 - RNA, 19 nt, Artificial Sequence
  Description of Artificial Sequence: Synthetic oligonucleotide
agccacgucaauuuuccac

SEQ ID NO: 1434290 - RNA, 19 nt, Artificial Sequence
  Description of Artificial Sequence: Synthetic oligonucleotide
uguuacuauugauacacuc

SEQ ID NO: 1434291 - RNA, 19 nt, Artificial Sequence
  Description of Artificial Sequence: Synthetic oligonucleotide
ugcuuucaugcaaauauac

SEQ ID NO: 1434292 - RNA, 19 nt, Artificial Sequence
  Description of Artificial Sequence: Synthetic oligonucleotide
agcacuucuacaacggagc

SEQ ID NO: 1434293 - RNA, 19 nt, Artificial Sequence
  Description of Artificial Sequence: Synthetic oligonucleotide
uucagauguagcucauagg

SEQ ID NO: 1434294 - RNA, 19 nt, Artificial Sequence
  Description of Artificial Sequence: Synthetic oligonucleotide
cauguuuccaguguagacc

SEQ ID NO: 1434295 - RNA, 19 nt, Artificial Sequence
  Description of Artificial Sequence: Synthetic oligonucleotide
uucuacuaggauacggucu

SEQ ID NO: 1434296 - RNA, 19 nt, Artificial Sequence
  Description of Artificial Sequence: Synthetic oligonucleotide
agauguagcucauaggcau

SEQ ID NO: 1434297 - RNA, 19 nt, Artificial Sequence
  Description of Artificial Sequence: Synthetic oligonucleotide
ucucguggcaguaugguaa

SEQ ID NO: 1434298 - RNA, 19 nt, Artificial Sequence
  Description of Artificial Sequence: Synthetic oligonucleotide
cuuaccaggcuuuucugag

SEQ ID NO: 1434299 - RNA, 19 nt, Artificial Sequence
  Description of Artificial Sequence: Synthetic oligonucleotide
uaauggaauccagaugggg

SEQ ID NO: 1434300 - RNA, 19 nt, Artificial Sequence
  Description of Artificial Sequence: Synthetic oligonucleotide
aauggugucuagagugagc

SEQ ID NO: 1434301 - RNA, 19 nt, Artificial Sequence
  Description of Artificial Sequence: Synthetic oligonucleotide
cuguaguccauagacagcc

SEQ ID NO: 1434302 - RNA, 19 nt, Artificial Sequence
  Description of Artificial Sequence: Synthetic oligonucleotide
agcaaaaguggagucaggg

SEQ ID NO: 1434303 - RNA, 19 nt, Artificial Sequence
  Description of Artificial Sequence: Synthetic oligonucleotide
uagaacaauccaaagucau

SEQ ID NO: 1434304 - RNA, 19 nt, Artificial Sequence
  Description of Artificial Sequence: Synthetic oligonucleotide
agaccuagucuucuucuac

SEQ ID NO: 1434305 - RNA, 19 nt, Artificial Sequence
  Description of Artificial Sequence: Synthetic oligonucleotide
uuccuuaccaggcuuuucu

SEQ ID NO: 1434306 - RNA, 19 nt, Artificial Sequence
  Description of Artificial Sequence: Synthetic oligonucleotide
cagauuuggacucacucug

SEQ ID NO: 1434307 - RNA, 19 nt, Artificial Sequence
  Description of Artificial Sequence: Synthetic oligonucleotide
cagacacuuagaacaaucc

SEQ ID NO: 1434308 - RNA, 19 nt, Artificial Sequence
  Description of Artificial Sequence: Synthetic oligonucleotide
uuacuguaguccauagaca

SEQ ID NO: 1434309 - RNA, 19 nt, Artificial Sequence
  Description of Artificial Sequence: Synthetic oligonucleotide
augguaauggaauccagau

SEQ ID NO: 1434310 - RNA, 19 nt, Artificial Sequence
  Description of Artificial Sequence: Synthetic oligonucleotide
caacggagcaaauggacag

SEQ ID NO: 1434311 - RNA, 19 nt, Artificial Sequence
  Description of Artificial Sequence: Synthetic oligonucleotide
agcucauaggcaucucucg

SEQ ID NO: 1434312 - RNA, 19 nt, Artificial Sequence
  Description of Artificial Sequence: Synthetic oligonucleotide
ugguaauggaauccagaug

SEQ ID NO: 1434313 - RNA, 19 nt, Artificial Sequence
  Description of Artificial Sequence: Synthetic oligonucleotide
uuccagguuguuacuauug

SEQ ID NO: 1434314 - RNA, 19 nt, Artificial Sequence
  Description of Artificial Sequence: Synthetic oligonucleotide
ugcauggaauaacaaagau

SEQ ID NO: 1434315 - RNA, 19 nt, Artificial Sequence
  Description of Artificial Sequence: Synthetic oligonucleotide
aauuuuccacacccauaag

SEQ ID NO: 1434316 - RNA, 19 nt, Artificial Sequence
  Description of Artificial Sequence: Synthetic oligonucleotide
aaaccucuguuacuguagu

SEQ ID NO: 1434317 - RNA, 19 nt, Artificial Sequence
  Description of Artificial Sequence: Synthetic oligonucleotide
aaacaggcaccccaagcca

SEQ ID NO: 1434318 - RNA, 19 nt, Artificial Sequence
  Description of Artificial Sequence: Synthetic oligonucleotide
agacacuuagaacaaucca

SEQ ID NO: 1434319 - RNA, 19 nt, Artificial Sequence
  Description of Artificial Sequence: Synthetic oligonucleotide
uaaccaacaacaguucacu

SEQ ID NO: 1434320 - RNA, 19 nt, Artificial Sequence
  Description of Artificial Sequence: Synthetic oligonucleotide
aaggcgugcauggaauaac

SEQ ID NO: 1434321 - RNA, 19 nt, Artificial Sequence
  Description of Artificial Sequence: Synthetic oligonucleotide
uuuguagauuccagguugu

SEQ ID NO: 1434322 - RNA, 19 nt, Artificial Sequence
  Description of Artificial Sequence: Synthetic oligonucleotide
uauuuguagauuccagguu

SEQ ID NO: 1434323 - RNA, 19 nt, Artificial Sequence
  Description of Artificial Sequence: Synthetic oligonucleotide
aaaccaagcugcagggaac

SEQ ID NO: 1434324 - RNA, 19 nt, Artificial Sequence
  Description of Artificial Sequence: Synthetic oligonucleotide
ugugggcaugacauggugc

SEQ ID NO: 1434325 - RNA, 19 nt, Artificial Sequence
  Description of Artificial Sequence: Synthetic oligonucleotide
ucagggauuacuuccccgu

SEQ ID NO: 1434326 - RNA, 19 nt, Artificial Sequence
  Description of Artificial Sequence: Synthetic oligonucleotide
aaacaaggcgugcauggaa

SEQ ID NO: 1434327 - RNA, 19 nt, Artificial Sequence
  Description of Artificial Sequence: Synthetic oligonucleotide
uacagagggcuuaugaguu

SEQ ID NO: 1434328 - RNA, 19 nt, Artificial Sequence
  Description of Artificial Sequence: Synthetic oligonucleotide
auaaucucuaagaaacugu

SEQ ID NO: 1434329 - RNA, 19 nt, Artificial Sequence
  Description of Artificial Sequence: Synthetic oligonucleotide
aaccaacaacaguucacug

SEQ ID NO: 1434330 - RNA, 19 nt, Artificial Sequence
  Description of Artificial Sequence: Synthetic oligonucleotide
uguuacuguaguccauaga

SEQ ID NO: 1434331 - RNA, 19 nt, Artificial Sequence
  Description of Artificial Sequence: Synthetic oligonucleotide
ucagaccuagucuucuucu

SEQ ID NO: 1434332 - RNA, 19 nt, Artificial Sequence
  Description of Artificial Sequence: Synthetic oligonucleotide
aucaaaaccuagaaguaca

SEQ ID NO: 1434333 - RNA, 19 nt, Artificial Sequence
  Description of Artificial Sequence: Synthetic oligonucleotide
uucucucguggcaguaugg

SEQ ID NO: 1434334 - RNA, 19 nt, Artificial Sequence
  Description of Artificial Sequence: Synthetic oligonucleotide
auaggcaucucucgcucuc

SEQ ID NO: 1434335 - RNA, 19 nt, Artificial Sequence
  Description of Artificial Sequence: Synthetic oligonucleotide
uuccccguuaaccaacaac

SEQ ID NO: 1434336 - RNA, 19 nt, Artificial Sequence
  Description of Artificial Sequence: Synthetic oligonucleotide
ugaagccacgucaauuuuc

SEQ ID NO: 1434337 - RNA, 19 nt, Artificial Sequence
  Description of Artificial Sequence: Synthetic oligonucleotide
aacgagcagguucccauca

SEQ ID NO: 1434338 - RNA, 19 nt, Artificial Sequence
  Description of Artificial Sequence: Synthetic oligonucleotide
ucuauuguuuuaacauuuu

SEQ ID NO: 1434339 - RNA, 19 nt, Artificial Sequence
  Description of Artificial Sequence: Synthetic oligonucleotide
agaacaauccaaagucauc

SEQ ID NO: 1434340 - RNA, 19 nt, Artificial Sequence
  Description of Artificial Sequence: Synthetic oligonucleotide
cugagcauuguguggacug

SEQ ID NO: 1434341 - RNA, 19 nt, Artificial Sequence
  Description of Artificial Sequence: Synthetic oligonucleotide
acaacaguucacugcucuc

SEQ ID NO: 1434342 - RNA, 19 nt, Artificial Sequence
  Description of Artificial Sequence: Synthetic oligonucleotide
uucuacaacggagcaaaug

SEQ ID NO: 1434343 - RNA, 19 nt, Artificial Sequence
  Description of Artificial Sequence: Synthetic oligonucleotide
guuaaccaacaacaguuca

SEQ ID NO: 1434344 - RNA, 19 nt, Artificial Sequence
  Description of Artificial Sequence: Synthetic oligonucleotide
acccauaagagugaagaca

SEQ ID NO: 1434345 - RNA, 19 nt, Artificial Sequence
  Description of Artificial Sequence: Synthetic oligonucleotide
aggugcuuaguccugcugu

SEQ ID NO: 1434346 - RNA, 19 nt, Artificial Sequence
  Description of Artificial Sequence: Synthetic oligonucleotide
gagcacuucuacaacggag

SEQ ID NO: 1434347 - RNA, 19 nt, Artificial Sequence
  Description of Artificial Sequence: Synthetic oligonucleotide
agacuucagaccuagucuu

SEQ ID NO: 1434348 - RNA, 19 nt, Artificial Sequence
  Description of Artificial Sequence: Synthetic oligonucleotide
ucauaggcaucucucgcuc

SEQ ID NO: 1434349 - RNA, 19 nt, Artificial Sequence
  Description of Artificial Sequence: Synthetic oligonucleotide
uguagaccccacagcagug

SEQ ID NO: 1434350 - RNA, 19 nt, Artificial Sequence
  Description of Artificial Sequence: Synthetic oligonucleotide
acuaggauacggucucuug

SEQ ID NO: 1434351 - RNA, 19 nt, Artificial Sequence
  Description of Artificial Sequence: Synthetic oligonucleotide
ccggacaucaugaaaagug

SEQ ID NO: 1434352 - RNA, 19 nt, Artificial Sequence
  Description of Artificial Sequence: Synthetic oligonucleotide
uucagaccuagucuucuuc

SEQ ID NO: 1434353 - RNA, 19 nt, Artificial Sequence
  Description of Artificial Sequence: Synthetic oligonucleotide
auggugucuagagugagcu

SEQ ID NO: 1434354 - RNA, 19 nt, Artificial Sequence
  Description of Artificial Sequence: Synthetic oligonucleotide
ccugguagacguuagcagg

SEQ ID NO: 1434355 - RNA, 19 nt, Artificial Sequence
  Description of Artificial Sequence: Synthetic oligonucleotide
acuguaguccauagacagc

SEQ ID NO: 1434356 - RNA, 19 nt, Artificial Sequence
  Description of Artificial Sequence: Synthetic oligonucleotide
uggucuucuguccccaggu

SEQ ID NO: 1434357 - RNA, 19 nt, Artificial Sequence
  Description of Artificial Sequence: Synthetic oligonucleotide
cuugggagcacuucuacaa

SEQ ID NO: 1434358 - RNA, 19 nt, Artificial Sequence
  Description of Artificial Sequence: Synthetic oligonucleotide
agauuuggacucacucugc

SEQ ID NO: 1434359 - RNA, 19 nt, Artificial Sequence
  Description of Artificial Sequence: Synthetic oligonucleotide
caguaugguaauggaaucc

SEQ ID NO: 1434360 - RNA, 19 nt, Artificial Sequence
  Description of Artificial Sequence: Synthetic oligonucleotide
ugggaguccaaugcuaaca

SEQ ID NO: 1434361 - RNA, 19 nt, Artificial Sequence
  Description of Artificial Sequence: Synthetic oligonucleotide
gcacuuacaagagaggcag

SEQ ID NO: 1434362 - RNA, 19 nt, Artificial Sequence
  Description of Artificial Sequence: Synthetic oligonucleotide
acaagagaggcagcgcacg

SEQ ID NO: 1434363 - RNA, 19 nt, Artificial Sequence
  Description of Artificial Sequence: Synthetic oligonucleotide
uccugggaaacaaggcgug

SEQ ID NO: 1434364 - RNA, 19 nt, Artificial Sequence
  Description of Artificial Sequence: Synthetic oligonucleotide
ugagcaaauggugcaucag

SEQ ID NO: 1434365 - RNA, 19 nt, Artificial Sequence
  Description of Artificial Sequence: Synthetic oligonucleotide
caugugaaccugguagacg

SEQ ID NO: 1434366 - RNA, 19 nt, Artificial Sequence
  Description of Artificial Sequence: Synthetic oligonucleotide
ugaacccgggauugcaaug

SEQ ID NO: 1434367 - RNA, 19 nt, Artificial Sequence
  Description of Artificial Sequence: Synthetic oligonucleotide
gucuagagugagcuggggc

SEQ ID NO: 1434368 - RNA, 19 nt, Artificial Sequence
  Description of Artificial Sequence: Synthetic oligonucleotide
gauacggucucuuguggaa

SEQ ID NO: 1434369 - RNA, 19 nt, Artificial Sequence
  Description of Artificial Sequence: Synthetic oligonucleotide
cuaaguccagcuggaaacc

SEQ ID NO: 1434370 - RNA, 19 nt, Artificial Sequence
  Description of Artificial Sequence: Synthetic oligonucleotide
gcacuuaaaggcuggagac

SEQ ID NO: 1434371 - RNA, 19 nt, Artificial Sequence
  Description of Artificial Sequence: Synthetic oligonucleotide
guaauggaauccagauggg

SEQ ID NO: 1434372 - RNA, 19 nt, Artificial Sequence
  Description of Artificial Sequence: Synthetic oligonucleotide
ucuuuucuacuaggauacg

SEQ ID NO: 1434373 - RNA, 19 nt, Artificial Sequence
  Description of Artificial Sequence: Synthetic oligonucleotide
caguguagaccccacagca

SEQ ID NO: 1434374 - RNA, 19 nt, Artificial Sequence
  Description of Artificial Sequence: Synthetic oligonucleotide
aacaaggcgugcauggaau

SEQ ID NO: 1434375 - RNA, 19 nt, Artificial Sequence
  Description of Artificial Sequence: Synthetic oligonucleotide
uugggagcacuucuacaac

SEQ ID NO: 1434376 - RNA, 19 nt, Artificial Sequence
  Description of Artificial Sequence: Synthetic oligonucleotide
cuguuacuguaguccauag

SEQ ID NO: 1434377 - RNA, 19 nt, Artificial Sequence
  Description of Artificial Sequence: Synthetic oligonucleotide
aagagugaagacaguaguu

SEQ ID NO: 1434378 - RNA, 19 nt, Artificial Sequence
  Description of Artificial Sequence: Synthetic oligonucleotide
agcucauugcaaaccuggc

SEQ ID NO: 1434379 - RNA, 19 nt, Artificial Sequence
  Description of Artificial Sequence: Synthetic oligonucleotide
ucuguuacuguaguccaua

SEQ ID NO: 1434380 - RNA, 19 nt, Artificial Sequence
  Description of Artificial Sequence: Synthetic oligonucleotide
ugugaaccacuuccaugug

SEQ ID NO: 1434381 - RNA, 19 nt, Artificial Sequence
  Description of Artificial Sequence: Synthetic oligonucleotide
uccuuaccaggcuuuucug

SEQ ID NO: 1434382 - RNA, 19 nt, Artificial Sequence
  Description of Artificial Sequence: Synthetic oligonucleotide
acacuuagaacaauccaaa

SEQ ID NO: 1434383 - RNA, 19 nt, Artificial Sequence
  Description of Artificial Sequence: Synthetic oligonucleotide
ugagacucacucugcuugu

SEQ ID NO: 1434384 - RNA, 19 nt, Artificial Sequence
  Description of Artificial Sequence: Synthetic oligonucleotide
cuuccauacuuggugggag

SEQ ID NO: 1434385 - RNA, 19 nt, Artificial Sequence
  Description of Artificial Sequence: Synthetic oligonucleotide
caagagaggcagcgcacgg

SEQ ID NO: 1434386 - RNA, 19 nt, Artificial Sequence
  Description of Artificial Sequence: Synthetic oligonucleotide
ucugaacccgggauugcaa

SEQ ID NO: 1434387 - RNA, 19 nt, Artificial Sequence
  Description of Artificial Sequence: Synthetic oligonucleotide
uuacuuccccguuaaccaa

SEQ ID NO: 1434388 - RNA, 19 nt, Artificial Sequence
  Description of Artificial Sequence: Synthetic oligonucleotide
aaaccuggcagagcugaga

SEQ ID NO: 1434389 - RNA, 19 nt, Artificial Sequence
  Description of Artificial Sequence: Synthetic oligonucleotide
gggaguccaaugcuaacag

SEQ ID NO: 1434390 - RNA, 19 nt, Artificial Sequence
  Description of Artificial Sequence: Synthetic oligonucleotide
gauugcaauggugucuaga

SEQ ID NO: 1434391 - RNA, 19 nt, Artificial Sequence
  Description of Artificial Sequence: Synthetic oligonucleotide
acaacggagcaaauggaca

SEQ ID NO: 1434392 - RNA, 19 nt, Artificial Sequence
  Description of Artificial Sequence: Synthetic oligonucleotide
caaaggcauagcacucagc

SEQ ID NO: 1434393 - RNA, 19 nt, Artificial Sequence
  Description of Artificial Sequence: Synthetic oligonucleotide
uguaguccauagacagccu

SEQ ID NO: 1434394 - RNA, 19 nt, Artificial Sequence
  Description of Artificial Sequence: Synthetic oligonucleotide
agaaucgucacuggccccu

SEQ ID NO: 1434395 - RNA, 19 nt, Artificial Sequence
  Description of Artificial Sequence: Synthetic oligonucleotide
uccaagcuucucucguggc

SEQ ID NO: 1434396 - RNA, 19 nt, Artificial Sequence
  Description of Artificial Sequence: Synthetic oligonucleotide
aaggccccggacaucauga

SEQ ID NO: 1434397 - RNA, 19 nt, Artificial Sequence
  Description of Artificial Sequence: Synthetic oligonucleotide
uuccauacuuggugggagu

SEQ ID NO: 1434398 - RNA, 19 nt, Artificial Sequence
  Description of Artificial Sequence: Synthetic oligonucleotide
ugucuagagugagcugggg

SEQ ID NO: 1434399 - RNA, 19 nt, Artificial Sequence
  Description of Artificial Sequence: Synthetic oligonucleotide
cacccauaagagugaagac

SEQ ID NO: 1434400 - RNA, 19 nt, Artificial Sequence
  Description of Artificial Sequence: Synthetic oligonucleotide
gggaacaguccaucugugg

SEQ ID NO: 1434401 - RNA, 19 nt, Artificial Sequence
  Description of Artificial Sequence: Synthetic oligonucleotide
agacucacucugcuuguga

SEQ ID NO: 1434402 - RNA, 19 nt, Artificial Sequence
  Description of Artificial Sequence: Synthetic oligonucleotide
gcuuucaugcaaauauacc

SEQ ID NO: 1434403 - RNA, 19 nt, Artificial Sequence
  Description of Artificial Sequence: Synthetic oligonucleotide
uauugcuuucaugcaaaua

SEQ ID NO: 1434404 - RNA, 19 nt, Artificial Sequence
  Description of Artificial Sequence: Synthetic oligonucleotide
cagauguagcucauaggca

SEQ ID NO: 1434405 - RNA, 19 nt, Artificial Sequence
  Description of Artificial Sequence: Synthetic oligonucleotide
cuacaacggagcaaaugga

SEQ ID NO: 1434406 - RNA, 19 nt, Artificial Sequence
  Description of Artificial Sequence: Synthetic oligonucleotide
cucucugaacccgggauug

SEQ ID NO: 1434407 - RNA, 19 nt, Artificial Sequence
  Description of Artificial Sequence: Synthetic oligonucleotide
cucucaauaaaaccuggcu

SEQ ID NO: 1434408 - RNA, 19 nt, Artificial Sequence
  Description of Artificial Sequence: Synthetic oligonucleotide
acuucagaccuagucuucu

SEQ ID NO: 1434409 - RNA, 19 nt, Artificial Sequence
  Description of Artificial Sequence: Synthetic oligonucleotide
aguguagaccccacagcag

SEQ ID NO: 1434410 - RNA, 19 nt, Artificial Sequence
  Description of Artificial Sequence: Synthetic oligonucleotide
gcggcuuccauacuuggug

SEQ ID NO: 1434411 - RNA, 19 nt, Artificial Sequence
  Description of Artificial Sequence: Synthetic oligonucleotide
gauuuggacucacucugcu

SEQ ID NO: 1434412 - RNA, 19 nt, Artificial Sequence
  Description of Artificial Sequence: Synthetic oligonucleotide
aauggcuccuaaggucaug

SEQ ID NO: 1434413 - RNA, 19 nt, Artificial Sequence
  Description of Artificial Sequence: Synthetic oligonucleotide
uaaguccagcuggaaaccu

SEQ ID NO: 1434414 - RNA, 19 nt, Artificial Sequence
  Description of Artificial Sequence: Synthetic oligonucleotide
ugagcauuguguggacugu

SEQ ID NO: 1434415 - RNA, 19 nt, Artificial Sequence
  Description of Artificial Sequence: Synthetic oligonucleotide
auguagcucauaggcaucu

SEQ ID NO: 1434416 - RNA, 19 nt, Artificial Sequence
  Description of Artificial Sequence: Synthetic oligonucleotide
augcacuuaaaggcuggag

SEQ ID NO: 1434417 - RNA, 19 nt, Artificial Sequence
  Description of Artificial Sequence: Synthetic oligonucleotide
uacggucucuuguggaaau

SEQ ID NO: 1434418 - RNA, 19 nt, Artificial Sequence
  Description of Artificial Sequence: Synthetic oligonucleotide
acuucagaaauggggcaca

SEQ ID NO: 1434419 - RNA, 19 nt, Artificial Sequence
  Description of Artificial Sequence: Synthetic oligonucleotide
aacccgggauugcaauggu

SEQ ID NO: 1434420 - RNA, 19 nt, Artificial Sequence
  Description of Artificial Sequence: Synthetic oligonucleotide
cagacuucagaccuagucu

SEQ ID NO: 1434421 - RNA, 19 nt, Artificial Sequence
  Description of Artificial Sequence: Synthetic oligonucleotide
cagcaaaaguggagucagg

SEQ ID NO: 1434422 - RNA, 19 nt, Artificial Sequence
  Description of Artificial Sequence: Synthetic oligonucleotide
uccauacuuggugggaguc

SEQ ID NO: 1434423 - RNA, 19 nt, Artificial Sequence
  Description of Artificial Sequence: Synthetic oligonucleotide
aggagcggcuuccauacuu

SEQ ID NO: 1434424 - RNA, 19 nt, Artificial Sequence
  Description of Artificial Sequence: Synthetic oligonucleotide
gcuccuaaggucauguuuc

SEQ ID NO: 1434425 - RNA, 19 nt, Artificial Sequence
  Description of Artificial Sequence: Synthetic oligonucleotide
gugucuagagugagcuggg

SEQ ID NO: 1434426 - RNA, 19 nt, Artificial Sequence
  Description of Artificial Sequence: Synthetic oligonucleotide
gauguagcucauaggcauc

SEQ ID NO: 1434427 - RNA, 19 nt, Artificial Sequence
  Description of Artificial Sequence: Synthetic oligonucleotide
cauaggagcggcuuccaua

SEQ ID NO: 1434428 - RNA, 19 nt, Artificial Sequence
  Description of Artificial Sequence: Synthetic oligonucleotide
gggagcacuucuacaacgg

SEQ ID NO: 1434429 - RNA, 19 nt, Artificial Sequence
  Description of Artificial Sequence: Synthetic oligonucleotide
caguucacugcucucaaua

SEQ ID NO: 1434430 - RNA, 19 nt, Artificial Sequence
  Description of Artificial Sequence: Synthetic oligonucleotide
ggugcuuaguccugcugug

SEQ ID NO: 1434431 - RNA, 19 nt, Artificial Sequence
  Description of Artificial Sequence: Synthetic oligonucleotide
cagcaucuaaguccagcug

SEQ ID NO: 1434432 - RNA, 19 nt, Artificial Sequence
  Description of Artificial Sequence: Synthetic oligonucleotide
cacuuacaagagaggcagc

SEQ ID NO: 1434433 - RNA, 19 nt, Artificial Sequence
  Description of Artificial Sequence: Synthetic oligonucleotide
uggugucuagagugagcug

SEQ ID NO: 1434434 - RNA, 19 nt, Artificial Sequence
  Description of Artificial Sequence: Synthetic oligonucleotide
auacacuccugggaaacaa

SEQ ID NO: 1434435 - RNA, 19 nt, Artificial Sequence
  Description of Artificial Sequence: Synthetic oligonucleotide
gauacacuccugggaaaca

SEQ ID NO: 1434436 - RNA, 19 nt, Artificial Sequence
  Description of Artificial Sequence: Synthetic oligonucleotide
gguuguuacuauugauaca

SEQ ID NO: 1434437 - RNA, 19 nt, Artificial Sequence
  Description of Artificial Sequence: Synthetic oligonucleotide
cagaaauggggcacaugca

SEQ ID NO: 1434438 - RNA, 19 nt, Artificial Sequence
  Description of Artificial Sequence: Synthetic oligonucleotide
gagcauuguguggacugug

SEQ ID NO: 1434439 - RNA, 19 nt, Artificial Sequence
  Description of Artificial Sequence: Synthetic oligonucleotide
cuaggauacggucucuugu

SEQ ID NO: 1434440 - RNA, 19 nt, Artificial Sequence
  Description of Artificial Sequence: Synthetic oligonucleotide
gcaaaaguggagucaggga

SEQ ID NO: 1434441 - RNA, 19 nt, Artificial Sequence
  Description of Artificial Sequence: Synthetic oligonucleotide
uccuaaggucauguuucca

SEQ ID NO: 1434442 - RNA, 19 nt, Artificial Sequence
  Description of Artificial Sequence: Synthetic oligonucleotide
gaaguacagagggcuuaug

SEQ ID NO: 1434443 - RNA, 19 nt, Artificial Sequence
  Description of Artificial Sequence: Synthetic oligonucleotide
cacacccauaagagugaag

SEQ ID NO: 1434444 - RNA, 19 nt, Artificial Sequence
  Description of Artificial Sequence: Synthetic oligonucleotide
guagcucauaggcaucucu

SEQ ID NO: 1434445 - RNA, 19 nt, Artificial Sequence
  Description of Artificial Sequence: Synthetic oligonucleotide
caaggccccggacaucaug

SEQ ID NO: 1434446 - RNA, 19 nt, Artificial Sequence
  Description of Artificial Sequence: Synthetic oligonucleotide
ccaucuguggaagugugug

SEQ ID NO: 1434447 - RNA, 19 nt, Artificial Sequence
  Description of Artificial Sequence: Synthetic oligonucleotide
ucucugaacccgggauugc

SEQ ID NO: 1434448 - RNA, 19 nt, Artificial Sequence
  Description of Artificial Sequence: Synthetic oligonucleotide
acugagcauuguguggacu

SEQ ID NO: 1434449 - RNA, 19 nt, Artificial Sequence
  Description of Artificial Sequence: Synthetic oligonucleotide
gacuucagaccuagucuuc

SEQ ID NO: 1434450 - RNA, 19 nt, Artificial Sequence
  Description of Artificial Sequence: Synthetic oligonucleotide
ccaguguagaccccacagc

SEQ ID NO: 1434451 - RNA, 19 nt, Artificial Sequence
  Description of Artificial Sequence: Synthetic oligonucleotide
cguggcaguaugguaaugg

SEQ ID NO: 1434452 - RNA, 19 nt, Artificial Sequence
  Description of Artificial Sequence: Synthetic oligonucleotide
caacaacaguucacugcuc

SEQ ID NO: 1434453 - RNA, 19 nt, Artificial Sequence
  Description of Artificial Sequence: Synthetic oligonucleotide
ggauacggucucuugugga

SEQ ID NO: 1434454 - RNA, 19 nt, Artificial Sequence
  Description of Artificial Sequence: Synthetic oligonucleotide
agccaugcaugagcaaaug

SEQ ID NO: 1434455 - RNA, 19 nt, Artificial Sequence
  Description of Artificial Sequence: Synthetic oligonucleotide
gugggaguccaaugcuaac

SEQ ID NO: 1434456 - RNA, 19 nt, Artificial Sequence
  Description of Artificial Sequence: Synthetic oligonucleotide
gggauuacuuccccguuaa

SEQ ID NO: 1434457 - RNA, 19 nt, Artificial Sequence
  Description of Artificial Sequence: Synthetic oligonucleotide
caccccaagccaugcauga

SEQ ID NO: 1434458 - RNA, 19 nt, Artificial Sequence
  Description of Artificial Sequence: Synthetic oligonucleotide
uacuaggauacggucucuu

SEQ ID NO: 1434459 - RNA, 19 nt, Artificial Sequence
  Description of Artificial Sequence: Synthetic oligonucleotide
auacggucucuuguggaaa

SEQ ID NO: 1434460 - RNA, 19 nt, Artificial Sequence
  Description of Artificial Sequence: Synthetic oligonucleotide
uccagacuucagaccuagu

SEQ ID NO: 1434461 - RNA, 19 nt, Artificial Sequence
  Description of Artificial Sequence: Synthetic oligonucleotide
ccaacaacaguucacugcu

SEQ ID NO: 1434462 - RNA, 19 nt, Artificial Sequence
  Description of Artificial Sequence: Synthetic oligonucleotide
gugcuuaguccugcugugc

SEQ ID NO: 1434463 - RNA, 19 nt, Artificial Sequence
  Description of Artificial Sequence: Synthetic oligonucleotide
ggccucagacacuuagaac

SEQ ID NO: 1434464 - RNA, 19 nt, Artificial Sequence
  Description of Artificial Sequence: Synthetic oligonucleotide
agggaacaguccaucugug

SEQ ID NO: 1434465 - RNA, 19 nt, Artificial Sequence
  Description of Artificial Sequence: Synthetic oligonucleotide
ggcacuuacaagagaggca

SEQ ID NO: 1434466 - RNA, 19 nt, Artificial Sequence
  Description of Artificial Sequence: Synthetic oligonucleotide
ccguuaaccaacaacaguu

SEQ ID NO: 1434467 - RNA, 19 nt, Artificial Sequence
  Description of Artificial Sequence: Synthetic oligonucleotide
gaaucgucacuggccccug

SEQ ID NO: 1434468 - RNA, 19 nt, Artificial Sequence
  Description of Artificial Sequence: Synthetic oligonucleotide
acugugggcaugacauggu

SEQ ID NO: 1434469 - RNA, 19 nt, Artificial Sequence
  Description of Artificial Sequence: Synthetic oligonucleotide
ccucauaggagcggcuucc

SEQ ID NO: 1434470 - RNA, 19 nt, Artificial Sequence
  Description of Artificial Sequence: Synthetic oligonucleotide
ccccguuaaccaacaacag

SEQ ID NO: 1434471 - RNA, 19 nt, Artificial Sequence
  Description of Artificial Sequence: Synthetic oligonucleotide
gcacucagcccucucucug

SEQ ID NO: 1434472 - RNA, 19 nt, Artificial Sequence
  Description of Artificial Sequence: Synthetic oligonucleotide
ggagcacuucuacaacgga

SEQ ID NO: 1434473 - RNA, 19 nt, Artificial Sequence
  Description of Artificial Sequence: Synthetic oligonucleotide
acuuccccguuaaccaaca

SEQ ID NO: 1434474 - RNA, 19 nt, Artificial Sequence
  Description of Artificial Sequence: Synthetic oligonucleotide
uaggagcggcuuccauacu

SEQ ID NO: 1434475 - RNA, 19 nt, Artificial Sequence
  Description of Artificial Sequence: Synthetic oligonucleotide
auggaauaacaaagauuua

SEQ ID NO: 1434476 - RNA, 19 nt, Artificial Sequence
  Description of Artificial Sequence: Synthetic oligonucleotide
ugggcaugacauggugccu

SEQ ID NO: 1434477 - RNA, 19 nt, Artificial Sequence
  Description of Artificial Sequence: Synthetic oligonucleotide
cuguccuugggagcacuuc

SEQ ID NO: 1434478 - RNA, 19 nt, Artificial Sequence
  Description of Artificial Sequence: Synthetic oligonucleotide
gcacuucuacaacggagca

SEQ ID NO: 1434479 - RNA, 19 nt, Artificial Sequence
  Description of Artificial Sequence: Synthetic oligonucleotide
cucagcccucucucugaac

SEQ ID NO: 1434480 - RNA, 19 nt, Artificial Sequence
  Description of Artificial Sequence: Synthetic oligonucleotide
cacucaaaguucaguucua

SEQ ID NO: 1434481 - RNA, 19 nt, Artificial Sequence
  Description of Artificial Sequence: Synthetic oligonucleotide
cucugaacccgggauugca

SEQ ID NO: 1434482 - RNA, 19 nt, Artificial Sequence
  Description of Artificial Sequence: Synthetic oligonucleotide
ggacucacucugcuuguga

SEQ ID NO: 1434483 - RNA, 19 nt, Artificial Sequence
  Description of Artificial Sequence: Synthetic oligonucleotide
ggacugugggcaugacaug

SEQ ID NO: 1434484 - RNA, 19 nt, Artificial Sequence
  Description of Artificial Sequence: Synthetic oligonucleotide
ucguggcaguaugguaaug

SEQ ID NO: 1434485 - RNA, 19 nt, Artificial Sequence
  Description of Artificial Sequence: Synthetic oligonucleotide
ccuuaccaggcuuuucuga

SEQ ID NO: 1434486 - RNA, 19 nt, Artificial Sequence
  Description of Artificial Sequence: Synthetic oligonucleotide
cagaccuagucuucuucua

SEQ ID NO: 1434487 - RNA, 19 nt, Artificial Sequence
  Description of Artificial Sequence: Synthetic oligonucleotide
ccagauuuggacucacucu

SEQ ID NO: 1434488 - RNA, 19 nt, Artificial Sequence
  Description of Artificial Sequence: Synthetic oligonucleotide
ggcacaugcagcaagcuuu

SEQ ID NO: 1434489 - RNA, 19 nt, Artificial Sequence
  Description of Artificial Sequence: Synthetic oligonucleotide
ccauacuuggugggagucc

SEQ ID NO: 1434490 - RNA, 19 nt, Artificial Sequence
  Description of Artificial Sequence: Synthetic oligonucleotide
cucucguggcaguauggua

SEQ ID NO: 1434491 - RNA, 19 nt, Artificial Sequence
  Description of Artificial Sequence: Synthetic oligonucleotide
caaggcgugcauggaauaa

SEQ ID NO: 1434492 - RNA, 19 nt, Artificial Sequence
  Description of Artificial Sequence: Synthetic oligonucleotide
ccacgucaauuuuccacac

SEQ ID NO: 1434493 - RNA, 19 nt, Artificial Sequence
  Description of Artificial Sequence: Synthetic oligonucleotide
gggauugcaauggugucua

SEQ ID NO: 1434494 - RNA, 19 nt, Artificial Sequence
  Description of Artificial Sequence: Synthetic oligonucleotide
ggauugcaauggugucuag

SEQ ID NO: 1434495 - RNA, 19 nt, Artificial Sequence
  Description of Artificial Sequence: Synthetic oligonucleotide
ggauuacuuccccguuaac

SEQ ID NO: 1434496 - RNA, 19 nt, Artificial Sequence
  Description of Artificial Sequence: Synthetic oligonucleotide
ccaugugaaccugguagac

SEQ ID NO: 1434497 - RNA, 19 nt, Artificial Sequence
  Description of Artificial Sequence: Synthetic oligonucleotide
acccgggauugcaauggug

SEQ ID NO: 1434498 - RNA, 19 nt, Artificial Sequence
  Description of Artificial Sequence: Synthetic oligonucleotide
gggacaaaacaggcacccc

SEQ ID NO: 1434499 - RNA, 19 nt, Artificial Sequence
  Description of Artificial Sequence: Synthetic oligonucleotide
cagagcugagacucacucu

SEQ ID NO: 1434500 - RNA, 19 nt, Artificial Sequence
  Description of Artificial Sequence: Synthetic oligonucleotide
gggcaugacauggugccuc

SEQ ID NO: 1434501 - RNA, 19 nt, Artificial Sequence
  Description of Artificial Sequence: Synthetic oligonucleotide
aggcaccccaagccaugca

SEQ ID NO: 1434502 - RNA, 19 nt, Artificial Sequence
  Description of Artificial Sequence: Synthetic oligonucleotide
cacuuaaaggcuggagacu

SEQ ID NO: 1434503 - RNA, 19 nt, Artificial Sequence
  Description of Artificial Sequence: Synthetic oligonucleotide
uggcuccuaaggucauguu

SEQ ID NO: 1434504 - RNA, 19 nt, Artificial Sequence
  Description of Artificial Sequence: Synthetic oligonucleotide
cauaggcaucucucgcucu

SEQ ID NO: 1434505 - RNA, 19 nt, Artificial Sequence
  Description of Artificial Sequence: Synthetic oligonucleotide
cugaacccgggauugcaau

SEQ ID NO: 1434506 - RNA, 19 nt, Artificial Sequence
  Description of Artificial Sequence: Synthetic oligonucleotide
agcaguggaugcacuuaaa

SEQ ID NO: 1434507 - RNA, 19 nt, Artificial Sequence
  Description of Artificial Sequence: Synthetic oligonucleotide
gcuuccauacuugguggga

SEQ ID NO: 1434508 - RNA, 19 nt, Artificial Sequence
  Description of Artificial Sequence: Synthetic oligonucleotide
cccgggauugcaauggugu

SEQ ID NO: 1434509 - RNA, 19 nt, Artificial Sequence
  Description of Artificial Sequence: Synthetic oligonucleotide
ccuugggagcacuucuaca

SEQ ID NO: 1434510 - RNA, 19 nt, Artificial Sequence
  Description of Artificial Sequence: Synthetic oligonucleotide
gcaccccaagccaugcaug

SEQ ID NO: 1434511 - RNA, 19 nt, Artificial Sequence
  Description of Artificial Sequence: Synthetic oligonucleotide
ccgggauugcaaugguguc

SEQ ID NO: 1434512 - RNA, 19 nt, Artificial Sequence
  Description of Artificial Sequence: Synthetic oligonucleotide
aggccccggacaucaugaa

SEQ ID NO: 1434513 - RNA, 19 nt, Artificial Sequence
  Description of Artificial Sequence: Synthetic oligonucleotide
cucguggcaguaugguaau

SEQ ID NO: 1434514 - RNA, 19 nt, Artificial Sequence
  Description of Artificial Sequence: Synthetic oligonucleotide
acggucucuuguggaaaua

SEQ ID NO: 1434515 - RNA, 19 nt, Artificial Sequence
  Description of Artificial Sequence: Synthetic oligonucleotide
cccaggugcuuaguccugc

SEQ ID NO: 1434516 - RNA, 19 nt, Artificial Sequence
  Description of Artificial Sequence: Synthetic oligonucleotide
cccguuaaccaacaacagu

SEQ ID NO: 1434517 - RNA, 19 nt, Artificial Sequence
  Description of Artificial Sequence: Synthetic oligonucleotide
ggcaccccaagccaugcau

SEQ ID NO: 1434518 - RNA, 19 nt, Artificial Sequence
  Description of Artificial Sequence: Synthetic oligonucleotide
agcuggggcuuguccccau

SEQ ID NO: 1434519 - RNA, 19 nt, Artificial Sequence
  Description of Artificial Sequence: Synthetic oligonucleotide
ccuggucuucuguccccag

SEQ ID NO: 1434520 - RNA, 19 nt, Artificial Sequence
  Description of Artificial Sequence: Synthetic oligonucleotide
cuuccccguuaaccaacaa

SEQ ID NO: 1434521 - RNA, 19 nt, Artificial Sequence
  Description of Artificial Sequence: Synthetic oligonucleotide
gugcuuccuuaccaggcuu

SEQ ID NO: 1434522 - RNA, 19 nt, Artificial Sequence
  Description of Artificial Sequence: Synthetic oligonucleotide
ggcaugacauggugccucu

SEQ ID NO: 1434523 - RNA, 19 nt, Artificial Sequence
  Description of Artificial Sequence: Synthetic oligonucleotide
ggcgugcauggaauaacaa

SEQ ID NO: 1434524 - RNA, 19 nt, Artificial Sequence
  Description of Artificial Sequence: Synthetic oligonucleotide
ggccccggacaucaugaaa

SEQ ID NO: 1434525 - RNA, 19 nt, Artificial Sequence
  Description of Artificial Sequence: Synthetic oligonucleotide
ggcauagcacucagcccuc

SEQ ID NO: 1434526 - RNA, 19 nt, Artificial Sequence
  Description of Artificial Sequence: Synthetic oligonucleotide
cuucuacaacggagcaaau

SEQ ID NO: 1434527 - RNA, 19 nt, Artificial Sequence
  Description of Artificial Sequence: Synthetic oligonucleotide
gcaccuugaaggggccuca

SEQ ID NO: 1434528 - RNA, 19 nt, Artificial Sequence
  Description of Artificial Sequence: Synthetic oligonucleotide
cagggauuacuuccccguu

SEQ ID NO: 1434529 - RNA, 19 nt, Artificial Sequence
  Description of Artificial Sequence: Synthetic oligonucleotide
cuacuaggauacggucucu

SEQ ID NO: 1434530 - RNA, 19 nt, Artificial Sequence
  Description of Artificial Sequence: Synthetic oligonucleotide
gcaugagcaaauggugcau

SEQ ID NO: 1434531 - RNA, 19 nt, Artificial Sequence
  Description of Artificial Sequence: Synthetic oligonucleotide
gcccaggugcuuaguccug

SEQ ID NO: 1434532 - RNA, 19 nt, Artificial Sequence
  Description of Artificial Sequence: Synthetic oligonucleotide
ccaagcugcagggaacagu

SEQ ID NO: 1434533 - RNA, 19 nt, Artificial Sequence
  Description of Artificial Sequence: Synthetic oligonucleotide
cugugagaccaggcacuua

SEQ ID NO: 1434534 - RNA, 19 nt, Artificial Sequence
  Description of Artificial Sequence: Synthetic oligonucleotide
ggggcacaugcagcaagcu

SEQ ID NO: 1434535 - RNA, 19 nt, Artificial Sequence
  Description of Artificial Sequence: Synthetic oligonucleotide
cggagcaaauggacagcaa

SEQ ID NO: 1434536 - RNA, 19 nt, Artificial Sequence
  Description of Artificial Sequence: Synthetic oligonucleotide
cgggauugcaauggugucu

SEQ ID NO: 1434537 - RNA, 19 nt, Artificial Sequence
  Description of Artificial Sequence: Synthetic oligonucleotide
cccggacaucaugaaaagu

SEQ ID NO: 1434538 - RNA, 19 nt, Artificial Sequence
  Description of Artificial Sequence: Synthetic oligonucleotide
aaauaauccaagcagcugg

SEQ ID NO: 1434539 - RNA, 19 nt, Artificial Sequence
  Description of Artificial Sequence: Synthetic oligonucleotide
gaugauacagacucgaacg

SEQ ID NO: 1434540 - RNA, 19 nt, Artificial Sequence
  Description of Artificial Sequence: Synthetic oligonucleotide
acagcgaugauacagacuc

SEQ ID NO: 1434541 - RNA, 19 nt, Artificial Sequence
  Description of Artificial Sequence: Synthetic oligonucleotide
uauauagggacauuuauca

SEQ ID NO: 1434542 - RNA, 19 nt, Artificial Sequence
  Description of Artificial Sequence: Synthetic oligonucleotide
aagaucaaggugaagaagc

SEQ ID NO: 1434543 - RNA, 19 nt, Artificial Sequence
  Description of Artificial Sequence: Synthetic oligonucleotide
uuuaucaaaguacucaaca

SEQ ID NO: 1434544 - RNA, 19 nt, Artificial Sequence
  Description of Artificial Sequence: Synthetic oligonucleotide
cauaacacaggccagaagc

SEQ ID NO: 1434545 - RNA, 19 nt, Artificial Sequence
  Description of Artificial Sequence: Synthetic oligonucleotide
aagguuaacucacagggug

SEQ ID NO: 1434546 - RNA, 19 nt, Artificial Sequence
  Description of Artificial Sequence: Synthetic oligonucleotide
aaauuccucacuuggguag

SEQ ID NO: 1434547 - RNA, 19 nt, Artificial Sequence
  Description of Artificial Sequence: Synthetic oligonucleotide
uagacgaagauguagguca

SEQ ID NO: 1434548 - RNA, 19 nt, Artificial Sequence
  Description of Artificial Sequence: Synthetic oligonucleotide
ucgaacgacagguagauga

SEQ ID NO: 1434549 - RNA, 19 nt, Artificial Sequence
  Description of Artificial Sequence: Synthetic oligonucleotide
uggaagauugcuuggagcc

SEQ ID NO: 1434550 - RNA, 19 nt, Artificial Sequence
  Description of Artificial Sequence: Synthetic oligonucleotide
aacgacagguagaugaugg

SEQ ID NO: 1434551 - RNA, 19 nt, Artificial Sequence
  Description of Artificial Sequence: Synthetic oligonucleotide
cugccuaacauguaggagc

SEQ ID NO: 1434552 - RNA, 19 nt, Artificial Sequence
  Description of Artificial Sequence: Synthetic oligonucleotide
aagaaccugagauauacuu

SEQ ID NO: 1434553 - RNA, 19 nt, Artificial Sequence
  Description of Artificial Sequence: Synthetic oligonucleotide
aaacuugccaguugcgcag

SEQ ID NO: 1434554 - RNA, 19 nt, Artificial Sequence
  Description of Artificial Sequence: Synthetic oligonucleotide
gaagauguaggucaccaac

SEQ ID NO: 1434555 - RNA, 19 nt, Artificial Sequence
  Description of Artificial Sequence: Synthetic oligonucleotide
aacgacacagauauauagg

SEQ ID NO: 1434556 - RNA, 19 nt, Artificial Sequence
  Description of Artificial Sequence: Synthetic oligonucleotide
uucucugccuaacauguag

SEQ ID NO: 1434557 - RNA, 19 nt, Artificial Sequence
  Description of Artificial Sequence: Synthetic oligonucleotide
ugaugauggcgccacagag

SEQ ID NO: 1434558 - RNA, 19 nt, Artificial Sequence
  Description of Artificial Sequence: Synthetic oligonucleotide
auuuccgccuaccugcggc

SEQ ID NO: 1434559 - RNA, 19 nt, Artificial Sequence
  Description of Artificial Sequence: Synthetic oligonucleotide
aacgccccagaauauacag

SEQ ID NO: 1434560 - RNA, 19 nt, Artificial Sequence
  Description of Artificial Sequence: Synthetic oligonucleotide
uuaagaaauuccucacuug

SEQ ID NO: 1434561 - RNA, 19 nt, Artificial Sequence
  Description of Artificial Sequence: Synthetic oligonucleotide
uguaaacuugccaguugcg

SEQ ID NO: 1434562 - RNA, 19 nt, Artificial Sequence
  Description of Artificial Sequence: Synthetic oligonucleotide
gauauacuugaacagggga

SEQ ID NO: 1434563 - RNA, 19 nt, Artificial Sequence
  Description of Artificial Sequence: Synthetic oligonucleotide
cugagauauacuugaacag

SEQ ID NO: 1434564 - RNA, 19 nt, Artificial Sequence
  Description of Artificial Sequence: Synthetic oligonucleotide
auauauagggacauuuauc

SEQ ID NO: 1434565 - RNA, 19 nt, Artificial Sequence
  Description of Artificial Sequence: Synthetic oligonucleotide
aauaauccaagcagcuggg

SEQ ID NO: 1434566 - RNA, 19 nt, Artificial Sequence
  Description of Artificial Sequence: Synthetic oligonucleotide
aguagcaguaggugaggcc

SEQ ID NO: 1434567 - RNA, 19 nt, Artificial Sequence
  Description of Artificial Sequence: Synthetic oligonucleotide
agaugggguucucauagac

SEQ ID NO: 1434568 - RNA, 19 nt, Artificial Sequence
  Description of Artificial Sequence: Synthetic oligonucleotide
accugagauauacuugaac

SEQ ID NO: 1434569 - RNA, 19 nt, Artificial Sequence
  Description of Artificial Sequence: Synthetic oligonucleotide
guaggagccagguggaggg

SEQ ID NO: 1434570 - RNA, 19 nt, Artificial Sequence
  Description of Artificial Sequence: Synthetic oligonucleotide
aaguugccagcaaagcgcc

SEQ ID NO: 1434571 - RNA, 19 nt, Artificial Sequence
  Description of Artificial Sequence: Synthetic oligonucleotide
uacucgcucagagaggucg

SEQ ID NO: 1434572 - RNA, 19 nt, Artificial Sequence
  Description of Artificial Sequence: Synthetic oligonucleotide
gaaggggaacuucugauca

SEQ ID NO: 1434573 - RNA, 19 nt, Artificial Sequence
  Description of Artificial Sequence: Synthetic oligonucleotide
ugccuaacauguaggagcc

SEQ ID NO: 1434574 - RNA, 19 nt, Artificial Sequence
  Description of Artificial Sequence: Synthetic oligonucleotide
ucuucuuuccgcagaagaa

SEQ ID NO: 1434575 - RNA, 19 nt, Artificial Sequence
  Description of Artificial Sequence: Synthetic oligonucleotide
agcaccagaagcgacucgc

SEQ ID NO: 1434576 - RNA, 19 nt, Artificial Sequence
  Description of Artificial Sequence: Synthetic oligonucleotide
aaagcgccaaaugaugaug

SEQ ID NO: 1434577 - RNA, 19 nt, Artificial Sequence
  Description of Artificial Sequence: Synthetic oligonucleotide
augacaggccagcacgccc

SEQ ID NO: 1434578 - RNA, 19 nt, Artificial Sequence
  Description of Artificial Sequence: Synthetic oligonucleotide
gcuggguacacacuggugg

SEQ ID NO: 1434579 - RNA, 19 nt, Artificial Sequence
  Description of Artificial Sequence: Synthetic oligonucleotide
ucugaucaagcuucagggc

SEQ ID NO: 1434580 - RNA, 19 nt, Artificial Sequence
  Description of Artificial Sequence: Synthetic oligonucleotide
caagcuucagggcuacucg

SEQ ID NO: 1434581 - RNA, 19 nt, Artificial Sequence
  Description of Artificial Sequence: Synthetic oligonucleotide
aagcgccaaaugaugaugg

SEQ ID NO: 1434582 - RNA, 19 nt, Artificial Sequence
  Description of Artificial Sequence: Synthetic oligonucleotide
aagaacguggcggagggca

SEQ ID NO: 1434583 - RNA, 19 nt, Artificial Sequence
  Description of Artificial Sequence: Synthetic oligonucleotide
cagaauauacagugccagg

SEQ ID NO: 1434584 - RNA, 19 nt, Artificial Sequence
  Description of Artificial Sequence: Synthetic oligonucleotide
gauugcuuggagccuguag

SEQ ID NO: 1434585 - RNA, 19 nt, Artificial Sequence
  Description of Artificial Sequence: Synthetic oligonucleotide
auagacgaagauguagguc

SEQ ID NO: 1434586 - RNA, 19 nt, Artificial Sequence
  Description of Artificial Sequence: Synthetic oligonucleotide
cucauagacgaagauguag

SEQ ID NO: 1434587 - RNA, 19 nt, Artificial Sequence
  Description of Artificial Sequence: Synthetic oligonucleotide
agacucgaacgacagguag

SEQ ID NO: 1434588 - RNA, 19 nt, Artificial Sequence
  Description of Artificial Sequence: Synthetic oligonucleotide
aggaggccaauuucuggcc

SEQ ID NO: 1434589 - RNA, 19 nt, Artificial Sequence
  Description of Artificial Sequence: Synthetic oligonucleotide
aucaaaaggccagagacau

SEQ ID NO: 1434590 - RNA, 19 nt, Artificial Sequence
  Description of Artificial Sequence: Synthetic oligonucleotide
uauacuugaacaggggaau

SEQ ID NO: 1434591 - RNA, 19 nt, Artificial Sequence
  Description of Artificial Sequence: Synthetic oligonucleotide
ggacaugagcaccagaagc

SEQ ID NO: 1434592 - RNA, 19 nt, Artificial Sequence
  Description of Artificial Sequence: Synthetic oligonucleotide
caaggugaagaagcaaugg

SEQ ID NO: 1434593 - RNA, 19 nt, Artificial Sequence
  Description of Artificial Sequence: Synthetic oligonucleotide
acgacagguagaugauggc

SEQ ID NO: 1434594 - RNA, 19 nt, Artificial Sequence
  Description of Artificial Sequence: Synthetic oligonucleotide
aaccuguaaacuugccagu

SEQ ID NO: 1434595 - RNA, 19 nt, Artificial Sequence
  Description of Artificial Sequence: Synthetic oligonucleotide
ugcccaacgccccagaaua

SEQ ID NO: 1434596 - RNA, 19 nt, Artificial Sequence
  Description of Artificial Sequence: Synthetic oligonucleotide
aggguggcaacucugugug

SEQ ID NO: 1434597 - RNA, 19 nt, Artificial Sequence
  Description of Artificial Sequence: Synthetic oligonucleotide
aagugauucugcacauaac

SEQ ID NO: 1434598 - RNA, 19 nt, Artificial Sequence
  Description of Artificial Sequence: Synthetic oligonucleotide
uacuugaacaggggaaucc

SEQ ID NO: 1434599 - RNA, 19 nt, Artificial Sequence
  Description of Artificial Sequence: Synthetic oligonucleotide
augauacagacucgaacga

SEQ ID NO: 1434600 - RNA, 19 nt, Artificial Sequence
  Description of Artificial Sequence: Synthetic oligonucleotide
gauguaggucaccaaccug

SEQ ID NO: 1434601 - RNA, 19 nt, Artificial Sequence
  Description of Artificial Sequence: Synthetic oligonucleotide
gauacagacucgaacgaca

SEQ ID NO: 1434602 - RNA, 19 nt, Artificial Sequence
  Description of Artificial Sequence: Synthetic oligonucleotide
uuagaugaggguggcaacu

SEQ ID NO: 1434603 - RNA, 19 nt, Artificial Sequence
  Description of Artificial Sequence: Synthetic oligonucleotide
uugcuuggagccuguagcc

SEQ ID NO: 1434604 - RNA, 19 nt, Artificial Sequence
  Description of Artificial Sequence: Synthetic oligonucleotide
acugaaggggaacuucuga

SEQ ID NO: 1434605 - RNA, 19 nt, Artificial Sequence
  Description of Artificial Sequence: Synthetic oligonucleotide
agcgccaaaugaugauggc

SEQ ID NO: 1434606 - RNA, 19 nt, Artificial Sequence
  Description of Artificial Sequence: Synthetic oligonucleotide
gggacauuuaucaaaguac

SEQ ID NO: 1434607 - RNA, 19 nt, Artificial Sequence
  Description of Artificial Sequence: Synthetic oligonucleotide
uugggguuaggaccaaagu

SEQ ID NO: 1434608 - RNA, 19 nt, Artificial Sequence
  Description of Artificial Sequence: Synthetic oligonucleotide
gaugauggcgccacagagc

SEQ ID NO: 1434609 - RNA, 19 nt, Artificial Sequence
  Description of Artificial Sequence: Synthetic oligonucleotide
agaaccugagauauacuug

SEQ ID NO: 1434610 - RNA, 19 nt, Artificial Sequence
  Description of Artificial Sequence: Synthetic oligonucleotide
auauacuugaacaggggaa

SEQ ID NO: 1434611 - RNA, 19 nt, Artificial Sequence
  Description of Artificial Sequence: Synthetic oligonucleotide
ugacuugggguuagaugag

SEQ ID NO: 1434612 - RNA, 19 nt, Artificial Sequence
  Description of Artificial Sequence: Synthetic oligonucleotide
auggccgccagaccuuccc

SEQ ID NO: 1434613 - RNA, 19 nt, Artificial Sequence
  Description of Artificial Sequence: Synthetic oligonucleotide
caaaugaugauggcgccac

SEQ ID NO: 1434614 - RNA, 19 nt, Artificial Sequence
  Description of Artificial Sequence: Synthetic oligonucleotide
aaagguuaacucacagggu

SEQ ID NO: 1434615 - RNA, 19 nt, Artificial Sequence
  Description of Artificial Sequence: Synthetic oligonucleotide
accuuggaagauugcuugg

SEQ ID NO: 1434616 - RNA, 19 nt, Artificial Sequence
  Description of Artificial Sequence: Synthetic oligonucleotide
uuccgcagaagaaccugag

SEQ ID NO: 1434617 - RNA, 19 nt, Artificial Sequence
  Description of Artificial Sequence: Synthetic oligonucleotide
gaggugacucccagcaugg

SEQ ID NO: 1434618 - RNA, 19 nt, Artificial Sequence
  Description of Artificial Sequence: Synthetic oligonucleotide
ugaucaagcuucagggcua

SEQ ID NO: 1434619 - RNA, 19 nt, Artificial Sequence
  Description of Artificial Sequence: Synthetic oligonucleotide
ugauacagacucgaacgac

SEQ ID NO: 1434620 - RNA, 19 nt, Artificial Sequence
  Description of Artificial Sequence: Synthetic oligonucleotide
uuuccgccuaccugcggcg

SEQ ID NO: 1434621 - RNA, 19 nt, Artificial Sequence
  Description of Artificial Sequence: Synthetic oligonucleotide
ugguaaagaucaaggugaa

SEQ ID NO: 1434622 - RNA, 19 nt, Artificial Sequence
  Description of Artificial Sequence: Synthetic oligonucleotide
gguaggaccuuucucugcc

SEQ ID NO: 1434623 - RNA, 19 nt, Artificial Sequence
  Description of Artificial Sequence: Synthetic oligonucleotide
auauagggacauuuaucaa

SEQ ID NO: 1434624 - RNA, 19 nt, Artificial Sequence
  Description of Artificial Sequence: Synthetic oligonucleotide
ggcacuucgggacaugagc

SEQ ID NO: 1434625 - RNA, 19 nt, Artificial Sequence
  Description of Artificial Sequence: Synthetic oligonucleotide
aggucgagggaguagcagu

SEQ ID NO: 1434626 - RNA, 19 nt, Artificial Sequence
  Description of Artificial Sequence: Synthetic oligonucleotide
caauuuccgccuaccugcg

SEQ ID NO: 1434627 - RNA, 19 nt, Artificial Sequence
  Description of Artificial Sequence: Synthetic oligonucleotide
auacagacucgaacgacag

SEQ ID NO: 1434628 - RNA, 19 nt, Artificial Sequence
  Description of Artificial Sequence: Synthetic oligonucleotide
caaaaggccagagacauua

SEQ ID NO: 1434629 - RNA, 19 nt, Artificial Sequence
  Description of Artificial Sequence: Synthetic oligonucleotide
aggguggaccaacaguaug

SEQ ID NO: 1434630 - RNA, 19 nt, Artificial Sequence
  Description of Artificial Sequence: Synthetic oligonucleotide
gacauuuaucaaaguacuc

SEQ ID NO: 1434631 - RNA, 19 nt, Artificial Sequence
  Description of Artificial Sequence: Synthetic oligonucleotide
agcaaagcgccaaaugaug

SEQ ID NO: 1434632 - RNA, 19 nt, Artificial Sequence
  Description of Artificial Sequence: Synthetic oligonucleotide
auacuugaacaggggaauc

SEQ ID NO: 1434633 - RNA, 19 nt, Artificial Sequence
  Description of Artificial Sequence: Synthetic oligonucleotide
acgaagauguaggucacca

SEQ ID NO: 1434634 - RNA, 19 nt, Artificial Sequence
  Description of Artificial Sequence: Synthetic oligonucleotide
agguuaacucacagggugg

SEQ ID NO: 1434635 - RNA, 19 nt, Artificial Sequence
  Description of Artificial Sequence: Synthetic oligonucleotide
gagggaguagcaguaggug

SEQ ID NO: 1434636 - RNA, 19 nt, Artificial Sequence
  Description of Artificial Sequence: Synthetic oligonucleotide
agcgacagccccgaaggcg

SEQ ID NO: 1434637 - RNA, 19 nt, Artificial Sequence
  Description of Artificial Sequence: Synthetic oligonucleotide
guuagaugaggguggcaac

SEQ ID NO: 1434638 - RNA, 19 nt, Artificial Sequence
  Description of Artificial Sequence: Synthetic oligonucleotide
cuguggacuggcuagggca

SEQ ID NO: 1434639 - RNA, 19 nt, Artificial Sequence
  Description of Artificial Sequence: Synthetic oligonucleotide
agcgaugauacagacucga

SEQ ID NO: 1434640 - RNA, 19 nt, Artificial Sequence
  Description of Artificial Sequence: Synthetic oligonucleotide
aaaugaugauggcgccaca

SEQ ID NO: 1434641 - RNA, 19 nt, Artificial Sequence
  Description of Artificial Sequence: Synthetic oligonucleotide
gagguauuuaauaaauaau

SEQ ID NO: 1434642 - RNA, 19 nt, Artificial Sequence
  Description of Artificial Sequence: Synthetic oligonucleotide
aggguucagcuuucggcuc

SEQ ID NO: 1434643 - RNA, 19 nt, Artificial Sequence
  Description of Artificial Sequence: Synthetic oligonucleotide
aacuugccaguugcgcagg

SEQ ID NO: 1434644 - RNA, 19 nt, Artificial Sequence
  Description of Artificial Sequence: Synthetic oligonucleotide
ggcaauuuccgccuaccug

SEQ ID NO: 1434645 - RNA, 19 nt, Artificial Sequence
  Description of Artificial Sequence: Synthetic oligonucleotide
caccaaccuguaaacuugc

SEQ ID NO: 1434646 - RNA, 19 nt, Artificial Sequence
  Description of Artificial Sequence: Synthetic oligonucleotide
gcuuggacagcgaugauac

SEQ ID NO: 1434647 - RNA, 19 nt, Artificial Sequence
  Description of Artificial Sequence: Synthetic oligonucleotide
cucaacagagcuggcacac

SEQ ID NO: 1434648 - RNA, 19 nt, Artificial Sequence
  Description of Artificial Sequence: Synthetic oligonucleotide
gggguuaggaccaaaguga

SEQ ID NO: 1434649 - RNA, 19 nt, Artificial Sequence
  Description of Artificial Sequence: Synthetic oligonucleotide
acacagauauauagggaca

SEQ ID NO: 1434650 - RNA, 19 nt, Artificial Sequence
  Description of Artificial Sequence: Synthetic oligonucleotide
agaucaaggugaagaagca

SEQ ID NO: 1434651 - RNA, 19 nt, Artificial Sequence
  Description of Artificial Sequence: Synthetic oligonucleotide
gcggugaagaacguggcgg

SEQ ID NO: 1434652 - RNA, 19 nt, Artificial Sequence
  Description of Artificial Sequence: Synthetic oligonucleotide
agauauauagggacauuua

SEQ ID NO: 1434653 - RNA, 19 nt, Artificial Sequence
  Description of Artificial Sequence: Synthetic oligonucleotide
cugaucaagcuucagggcu

SEQ ID NO: 1434654 - RNA, 19 nt, Artificial Sequence
  Description of Artificial Sequence: Synthetic oligonucleotide
cgccaaaugaugauggcgc

SEQ ID NO: 1434655 - RNA, 19 nt, Artificial Sequence
  Description of Artificial Sequence: Synthetic oligonucleotide
accugcggcggucuccacg

SEQ ID NO: 1434656 - RNA, 19 nt, Artificial Sequence
  Description of Artificial Sequence: Synthetic oligonucleotide
acucgaacgacagguagau

SEQ ID NO: 1434657 - RNA, 19 nt, Artificial Sequence
  Description of Artificial Sequence: Synthetic oligonucleotide
auacagugccaggacagcu

SEQ ID NO: 1434658 - RNA, 19 nt, Artificial Sequence
  Description of Artificial Sequence: Synthetic oligonucleotide
accaaccuguaaacuugcc

SEQ ID NO: 1434659 - RNA, 19 nt, Artificial Sequence
  Description of Artificial Sequence: Synthetic oligonucleotide
cucauccgagagcggacgg

SEQ ID NO: 1434660 - RNA, 19 nt, Artificial Sequence
  Description of Artificial Sequence: Synthetic oligonucleotide
ucgcucagagaggucgagg

SEQ ID NO: 1434661 - RNA, 19 nt, Artificial Sequence
  Description of Artificial Sequence: Synthetic oligonucleotide
gaggucgagggaguagcag

SEQ ID NO: 1434662 - RNA, 19 nt, Artificial Sequence
  Description of Artificial Sequence: Synthetic oligonucleotide
ucggcaauuuccgccuacc

SEQ ID NO: 1434663 - RNA, 19 nt, Artificial Sequence
  Description of Artificial Sequence: Synthetic oligonucleotide
ccagccucggcaauuuccg

SEQ ID NO: 1434664 - RNA, 19 nt, Artificial Sequence
  Description of Artificial Sequence: Synthetic oligonucleotide
gcugccuugagggcaaacg

SEQ ID NO: 1434665 - RNA, 19 nt, Artificial Sequence
  Description of Artificial Sequence: Synthetic oligonucleotide
ggguggaccaacaguaugc

SEQ ID NO: 1434666 - RNA, 19 nt, Artificial Sequence
  Description of Artificial Sequence: Synthetic oligonucleotide
cacggagguauuuaauaaa

SEQ ID NO: 1434667 - RNA, 19 nt, Artificial Sequence
  Description of Artificial Sequence: Synthetic oligonucleotide
cacuucgggacaugagcac

SEQ ID NO: 1434668 - RNA, 19 nt, Artificial Sequence
  Description of Artificial Sequence: Synthetic oligonucleotide
gacucgaacgacagguaga

SEQ ID NO: 1434669 - RNA, 19 nt, Artificial Sequence
  Description of Artificial Sequence: Synthetic oligonucleotide
uaggaccuuucucugccua

SEQ ID NO: 1434670 - RNA, 19 nt, Artificial Sequence
  Description of Artificial Sequence: Synthetic oligonucleotide
cacgaggacugaaggcacc

SEQ ID NO: 1434671 - RNA, 19 nt, Artificial Sequence
  Description of Artificial Sequence: Synthetic oligonucleotide
uggccgccagaccuucccg

SEQ ID NO: 1434672 - RNA, 19 nt, Artificial Sequence
  Description of Artificial Sequence: Synthetic oligonucleotide
ccagcaaagcgccaaauga

SEQ ID NO: 1434673 - RNA, 19 nt, Artificial Sequence
  Description of Artificial Sequence: Synthetic oligonucleotide
cagcgaugauacagacucg

SEQ ID NO: 1434674 - RNA, 19 nt, Artificial Sequence
  Description of Artificial Sequence: Synthetic oligonucleotide
gaucaaggugaagaagcaa

SEQ ID NO: 1434675 - RNA, 19 nt, Artificial Sequence
  Description of Artificial Sequence: Synthetic oligonucleotide
uagaugaggguggcaacuc

SEQ ID NO: 1434676 - RNA, 19 nt, Artificial Sequence
  Description of Artificial Sequence: Synthetic oligonucleotide
cagguagaugauggcagag

SEQ ID NO: 1434677 - RNA, 19 nt, Artificial Sequence
  Description of Artificial Sequence: Synthetic oligonucleotide
ugcggcggucuccacgggc

SEQ ID NO: 1434678 - RNA, 19 nt, Artificial Sequence
  Description of Artificial Sequence: Synthetic oligonucleotide
gaggguggcaacucugugu

SEQ ID NO: 1434679 - RNA, 19 nt, Artificial Sequence
  Description of Artificial Sequence: Synthetic oligonucleotide
caugugucccggaggccag

SEQ ID NO: 1434680 - RNA, 19 nt, Artificial Sequence
  Description of Artificial Sequence: Synthetic oligonucleotide
gaauccuccucauggcacu

SEQ ID NO: 1434681 - RNA, 19 nt, Artificial Sequence
  Description of Artificial Sequence: Synthetic oligonucleotide
gcgccaaaugaugauggcg

SEQ ID NO: 1434682 - RNA, 19 nt, Artificial Sequence
  Description of Artificial Sequence: Synthetic oligonucleotide
gaccuuucucugccuaaca

SEQ ID NO: 1434683 - RNA, 19 nt, Artificial Sequence
  Description of Artificial Sequence: Synthetic oligonucleotide
uuucucugccuaacaugua

SEQ ID NO: 1434684 - RNA, 19 nt, Artificial Sequence
  Description of Artificial Sequence: Synthetic oligonucleotide
gggcaugugucccggaggc

SEQ ID NO: 1434685 - RNA, 19 nt, Artificial Sequence
  Description of Artificial Sequence: Synthetic oligonucleotide
guacucaacagagcuggca

SEQ ID NO: 1434686 - RNA, 19 nt, Artificial Sequence
  Description of Artificial Sequence: Synthetic oligonucleotide
ggacauuuaucaaaguacu

SEQ ID NO: 1434687 - RNA, 19 nt, Artificial Sequence
  Description of Artificial Sequence: Synthetic oligonucleotide
caacaguaugcugcugcag

SEQ ID NO: 1434688 - RNA, 19 nt, Artificial Sequence
  Description of Artificial Sequence: Synthetic oligonucleotide
cugccuugagggcaaacga

SEQ ID NO: 1434689 - RNA, 19 nt, Artificial Sequence
  Description of Artificial Sequence: Synthetic oligonucleotide
guggaccaacaguaugcug

SEQ ID NO: 1434690 - RNA, 19 nt, Artificial Sequence
  Description of Artificial Sequence: Synthetic oligonucleotide
ggcggugaagaacguggcg

SEQ ID NO: 1434691 - RNA, 19 nt, Artificial Sequence
  Description of Artificial Sequence: Synthetic oligonucleotide
ucauccgagagcggacgga

SEQ ID NO: 1434692 - RNA, 19 nt, Artificial Sequence
  Description of Artificial Sequence: Synthetic oligonucleotide
ucgggacaugagcaccaga

SEQ ID NO: 1434693 - RNA, 19 nt, Artificial Sequence
  Description of Artificial Sequence: Synthetic oligonucleotide
gagcggacggaggugacuc

SEQ ID NO: 1434694 - RNA, 19 nt, Artificial Sequence
  Description of Artificial Sequence: Synthetic oligonucleotide
ggaaugagccaggaggcac

SEQ ID NO: 1434695 - RNA, 19 nt, Artificial Sequence
  Description of Artificial Sequence: Synthetic oligonucleotide
uggguacacacugguggca

SEQ ID NO: 1434696 - RNA, 19 nt, Artificial Sequence
  Description of Artificial Sequence: Synthetic oligonucleotide
cauagacgaagauguaggu

SEQ ID NO: 1434697 - RNA, 19 nt, Artificial Sequence
  Description of Artificial Sequence: Synthetic oligonucleotide
gccaaaugaugauggcgcc

SEQ ID NO: 1434698 - RNA, 19 nt, Artificial Sequence
  Description of Artificial Sequence: Synthetic oligonucleotide
ccauaugacaggccaauca

SEQ ID NO: 1434699 - RNA, 19 nt, Artificial Sequence
  Description of Artificial Sequence: Synthetic oligonucleotide
agcuuggacagcgaugaua

SEQ ID NO: 1434700 - RNA, 19 nt, Artificial Sequence
  Description of Artificial Sequence: Synthetic oligonucleotide
cuucagggcuacucgcuca

SEQ ID NO: 1434701 - RNA, 19 nt, Artificial Sequence
  Description of Artificial Sequence: Synthetic oligonucleotide
ccagaagcgacucgcgggc

SEQ ID NO: 1434702 - RNA, 19 nt, Artificial Sequence
  Description of Artificial Sequence: Synthetic oligonucleotide
agugcccacgguccucuca

SEQ ID NO: 1434703 - RNA, 19 nt, Artificial Sequence
  Description of Artificial Sequence: Synthetic oligonucleotide
ccugcggcggucuccacgg

SEQ ID NO: 1434704 - RNA, 19 nt, Artificial Sequence
  Description of Artificial Sequence: Synthetic oligonucleotide
aacaggcggggccccgaca

SEQ ID NO: 1434705 - RNA, 19 nt, Artificial Sequence
  Description of Artificial Sequence: Synthetic oligonucleotide
aagauugcuuggagccugu

SEQ ID NO: 1434706 - RNA, 19 nt, Artificial Sequence
  Description of Artificial Sequence: Synthetic oligonucleotide
aaggcgccagaggcgacug

SEQ ID NO: 1434707 - RNA, 19 nt, Artificial Sequence
  Description of Artificial Sequence: Synthetic oligonucleotide
gauggggaagggagccugc

SEQ ID NO: 1434708 - RNA, 19 nt, Artificial Sequence
  Description of Artificial Sequence: Synthetic oligonucleotide
uggcaacucuguguggggu

SEQ ID NO: 1434709 - RNA, 19 nt, Artificial Sequence
  Description of Artificial Sequence: Synthetic oligonucleotide
ggaauccuccucauggcac

SEQ ID NO: 1434710 - RNA, 19 nt, Artificial Sequence
  Description of Artificial Sequence: Synthetic oligonucleotide
agcgagagcagggcgguga

SEQ ID NO: 1434711 - RNA, 19 nt, Artificial Sequence
  Description of Artificial Sequence: Synthetic oligonucleotide
gguaaagaucaaggugaag

SEQ ID NO: 1434712 - RNA, 19 nt, Artificial Sequence
  Description of Artificial Sequence: Synthetic oligonucleotide
ccaacgccccagaauauac

SEQ ID NO: 1434713 - RNA, 19 nt, Artificial Sequence
  Description of Artificial Sequence: Synthetic oligonucleotide
agccacagggguaaacccu

SEQ ID NO: 1434714 - RNA, 19 nt, Artificial Sequence
  Description of Artificial Sequence: Synthetic oligonucleotide
ggacagcugauggggaagg

SEQ ID NO: 1434715 - RNA, 19 nt, Artificial Sequence
  Description of Artificial Sequence: Synthetic oligonucleotide
cuugccaguugcgcagggc

SEQ ID NO: 1434716 - RNA, 19 nt, Artificial Sequence
  Description of Artificial Sequence: Synthetic oligonucleotide
accuguaaacuugccaguu

SEQ ID NO: 1434717 - RNA, 19 nt, Artificial Sequence
  Description of Artificial Sequence: Synthetic oligonucleotide
guuaacucacaggguggac

SEQ ID NO: 1434718 - RNA, 19 nt, Artificial Sequence
  Description of Artificial Sequence: Synthetic oligonucleotide
aaccugagauauacuugaa

SEQ ID NO: 1434719 - RNA, 19 nt, Artificial Sequence
  Description of Artificial Sequence: Synthetic oligonucleotide
acgaggacugaaggcacca

SEQ ID NO: 1434720 - RNA, 19 nt, Artificial Sequence
  Description of Artificial Sequence: Synthetic oligonucleotide
cuggccgccagccucggca

SEQ ID NO: 1434721 - RNA, 19 nt, Artificial Sequence
  Description of Artificial Sequence: Synthetic oligonucleotide
ggguaaacccucuggcauc

SEQ ID NO: 1434722 - RNA, 19 nt, Artificial Sequence
  Description of Artificial Sequence: Synthetic oligonucleotide
cacgcccuggcuucaauaa

SEQ ID NO: 1434723 - RNA, 19 nt, Artificial Sequence
  Description of Artificial Sequence: Synthetic oligonucleotide
caacgccccagaauauaca

SEQ ID NO: 1434724 - RNA, 19 nt, Artificial Sequence
  Description of Artificial Sequence: Synthetic oligonucleotide
ggccccgacaccagcagcg

SEQ ID NO: 1434725 - RNA, 19 nt, Artificial Sequence
  Description of Artificial Sequence: Synthetic oligonucleotide
gggaauccuccucauggca

SEQ ID NO: 1434726 - RNA, 19 nt, Artificial Sequence
  Description of Artificial Sequence: Synthetic oligonucleotide
uuccgccuaccugcggcgg

SEQ ID NO: 1434727 - RNA, 19 nt, Artificial Sequence
  Description of Artificial Sequence: Synthetic oligonucleotide
gggcacgaggacugaaggc

SEQ ID NO: 1434728 - RNA, 19 nt, Artificial Sequence
  Description of Artificial Sequence: Synthetic oligonucleotide
gaagaacguggcggagggc

SEQ ID NO: 1434729 - RNA, 19 nt, Artificial Sequence
  Description of Artificial Sequence: Synthetic oligonucleotide
uggcuagggcauggcaacc

SEQ ID NO: 1434730 - RNA, 19 nt, Artificial Sequence
  Description of Artificial Sequence: Synthetic oligonucleotide
uggggugcccaacgcccca

SEQ ID NO: 1434731 - RNA, 19 nt, Artificial Sequence
  Description of Artificial Sequence: Synthetic oligonucleotide
gguuaacucacagggugga

SEQ ID NO: 1434732 - RNA, 19 nt, Artificial Sequence
  Description of Artificial Sequence: Synthetic oligonucleotide
cuugggguuagaugagggu

SEQ ID NO: 1434733 - RNA, 19 nt, Artificial Sequence
  Description of Artificial Sequence: Synthetic oligonucleotide
cagcuuucggcucugugcu

SEQ ID NO: 1434734 - RNA, 19 nt, Artificial Sequence
  Description of Artificial Sequence: Synthetic oligonucleotide
ugugucccggaggccagga

SEQ ID NO: 1434735 - RNA, 19 nt, Artificial Sequence
  Description of Artificial Sequence: Synthetic oligonucleotide
cagccucggcaauuuccgc

SEQ ID NO: 1434736 - RNA, 19 nt, Artificial Sequence
  Description of Artificial Sequence: Synthetic oligonucleotide
gcggagggcacuucgggac

SEQ ID NO: 1434737 - RNA, 19 nt, Artificial Sequence
  Description of Artificial Sequence: Synthetic oligonucleotide
cggacagugcccacggucc

SEQ ID NO: 1434738 - RNA, 19 nt, Artificial Sequence
  Description of Artificial Sequence: Synthetic oligonucleotide
cagcaaagcgccaaaugau

SEQ ID NO: 1434739 - RNA, 19 nt, Artificial Sequence
  Description of Artificial Sequence: Synthetic oligonucleotide
cacuuggguaggaccuuuc

SEQ ID NO: 1434740 - RNA, 19 nt, Artificial Sequence
  Description of Artificial Sequence: Synthetic oligonucleotide
caggggaauccuccucaug

SEQ ID NO: 1434741 - RNA, 19 nt, Artificial Sequence
  Description of Artificial Sequence: Synthetic oligonucleotide
aggcgccagaggcgacugc

SEQ ID NO: 1434742 - RNA, 19 nt, Artificial Sequence
  Description of Artificial Sequence: Synthetic oligonucleotide
uccgccuaccugcggcggu

SEQ ID NO: 1434743 - RNA, 19 nt, Artificial Sequence
  Description of Artificial Sequence: Synthetic oligonucleotide
guggcggagggcacuucgg

SEQ ID NO: 1434744 - RNA, 19 nt, Artificial Sequence
  Description of Artificial Sequence: Synthetic oligonucleotide
agggcacuucgggacauga

SEQ ID NO: 1434745 - RNA, 19 nt, Artificial Sequence
  Description of Artificial Sequence: Synthetic oligonucleotide
gaagaaccugagauauacu

SEQ ID NO: 1434746 - RNA, 19 nt, Artificial Sequence
  Description of Artificial Sequence: Synthetic oligonucleotide
uggcacacggagguauuua

SEQ ID NO: 1434747 - RNA, 19 nt, Artificial Sequence
  Description of Artificial Sequence: Synthetic oligonucleotide
gaacaggcggggccccgac

SEQ ID NO: 1434748 - RNA, 19 nt, Artificial Sequence
  Description of Artificial Sequence: Synthetic oligonucleotide
acugucuggcagaagucua

SEQ ID NO: 1434749 - RNA, 19 nt, Artificial Sequence
  Description of Artificial Sequence: Synthetic oligonucleotide
ucacuuggguaggaccuuu

SEQ ID NO: 1434750 - RNA, 19 nt, Artificial Sequence
  Description of Artificial Sequence: Synthetic oligonucleotide
cacaggguggaccaacagu

SEQ ID NO: 1434751 - RNA, 19 nt, Artificial Sequence
  Description of Artificial Sequence: Synthetic oligonucleotide
guaggucaccaaccuguaa

SEQ ID NO: 1434752 - RNA, 19 nt, Artificial Sequence
  Description of Artificial Sequence: Synthetic oligonucleotide
ggacggaggugacucccag

SEQ ID NO: 1434753 - RNA, 19 nt, Artificial Sequence
  Description of Artificial Sequence: Synthetic oligonucleotide
acgcccuggcuucaauaaa

SEQ ID NO: 1434754 - RNA, 19 nt, Artificial Sequence
  Description of Artificial Sequence: Synthetic oligonucleotide
gccgccagaccuucccgcg

SEQ ID NO: 1434755 - RNA, 19 nt, Artificial Sequence
  Description of Artificial Sequence: Synthetic oligonucleotide
gcacuucgggacaugagca

SEQ ID NO: 1434756 - RNA, 19 nt, Artificial Sequence
  Description of Artificial Sequence: Synthetic oligonucleotide
gcgacagccccgaaggcgc

SEQ ID NO: 1434757 - RNA, 19 nt, Artificial Sequence
  Description of Artificial Sequence: Synthetic oligonucleotide
caaagcgccaaaugaugau

SEQ ID NO: 1434758 - RNA, 19 nt, Artificial Sequence
  Description of Artificial Sequence: Synthetic oligonucleotide
cucgcucagagaggucgag

SEQ ID NO: 1434759 - RNA, 19 nt, Artificial Sequence
  Description of Artificial Sequence: Synthetic oligonucleotide
cauggccgccagaccuucc

SEQ ID NO: 1434760 - RNA, 19 nt, Artificial Sequence
  Description of Artificial Sequence: Synthetic oligonucleotide
agagcggacggaggugacu

SEQ ID NO: 1434761 - RNA, 19 nt, Artificial Sequence
  Description of Artificial Sequence: Synthetic oligonucleotide
gggguaaacccucuggcau

SEQ ID NO: 1434762 - RNA, 19 nt, Artificial Sequence
  Description of Artificial Sequence: Synthetic oligonucleotide
ggcuacucgcucagagagg

SEQ ID NO: 1434763 - RNA, 19 nt, Artificial Sequence
  Description of Artificial Sequence: Synthetic oligonucleotide
cagggugacuugggguuag

SEQ ID NO: 1434764 - RNA, 19 nt, Artificial Sequence
  Description of Artificial Sequence: Synthetic oligonucleotide
gcggacagugcccacgguc

SEQ ID NO: 1434765 - RNA, 19 nt, Artificial Sequence
  Description of Artificial Sequence: Synthetic oligonucleotide
cccagaauauacagugcca

SEQ ID NO: 1434766 - RNA, 19 nt, Artificial Sequence
  Description of Artificial Sequence: Synthetic oligonucleotide
gacagcgaugauacagacu

SEQ ID NO: 1434767 - RNA, 19 nt, Artificial Sequence
  Description of Artificial Sequence: Synthetic oligonucleotide
aacguggcggagggcacuu

SEQ ID NO: 1434768 - RNA, 19 nt, Artificial Sequence
  Description of Artificial Sequence: Synthetic oligonucleotide
agaggucgagggaguagca

SEQ ID NO: 1434769 - RNA, 19 nt, Artificial Sequence
  Description of Artificial Sequence: Synthetic oligonucleotide
ccucauccgagagcggacg

SEQ ID NO: 1434770 - RNA, 19 nt, Artificial Sequence
  Description of Artificial Sequence: Synthetic oligonucleotide
cagcgacagccccgaaggc

SEQ ID NO: 1434771 - RNA, 19 nt, Artificial Sequence
  Description of Artificial Sequence: Synthetic oligonucleotide
gaccuucccgcgcgccgcc

SEQ ID NO: 1434772 - RNA, 19 nt, Artificial Sequence
  Description of Artificial Sequence: Synthetic oligonucleotide
gugucccggaggccaggag

SEQ ID NO: 1434773 - RNA, 19 nt, Artificial Sequence
  Description of Artificial Sequence: Synthetic oligonucleotide
cuaacauguaggagccuuu

SEQ ID NO: 1434774 - RNA, 19 nt, Artificial Sequence
  Description of Artificial Sequence: Synthetic oligonucleotide
cucgcgggcccuggggccg

SEQ ID NO: 1434775 - RNA, 19 nt, Artificial Sequence
  Description of Artificial Sequence: Synthetic oligonucleotide
ccuguagccccuggggugc

SEQ ID NO: 1434776 - RNA, 19 nt, Artificial Sequence
  Description of Artificial Sequence: Synthetic oligonucleotide
acgccccagaauauacagu

SEQ ID NO: 1434777 - RNA, 19 nt, Artificial Sequence
  Description of Artificial Sequence: Synthetic oligonucleotide
gaggcgacugcagcaggaa

SEQ ID NO: 1434778 - RNA, 19 nt, Artificial Sequence
  Description of Artificial Sequence: Synthetic oligonucleotide
uggccgccagccucggcaa

SEQ ID NO: 1434779 - RNA, 19 nt, Artificial Sequence
  Description of Artificial Sequence: Synthetic oligonucleotide
cuaccugcggcggucucca

SEQ ID NO: 1434780 - RNA, 19 nt, Artificial Sequence
  Description of Artificial Sequence: Synthetic oligonucleotide
agcgacucgcgggcccugg

SEQ ID NO: 1434781 - RNA, 19 nt, Artificial Sequence
  Description of Artificial Sequence: Synthetic oligonucleotide
gggguuagaugaggguggc

SEQ ID NO: 1434782 - RNA, 19 nt, Artificial Sequence
  Description of Artificial Sequence: Synthetic oligonucleotide
cucgaacgacagguagaug

SEQ ID NO: 1434783 - RNA, 19 nt, Artificial Sequence
  Description of Artificial Sequence: Synthetic oligonucleotide
cagacucgaacgacaggua

SEQ ID NO: 1434784 - RNA, 19 nt, Artificial Sequence
  Description of Artificial Sequence: Synthetic oligonucleotide
ggguucucauagacgaaga

SEQ ID NO: 1434785 - RNA, 19 nt, Artificial Sequence
  Description of Artificial Sequence: Synthetic oligonucleotide
ggccgccagaccuucccgc

SEQ ID NO: 1434786 - RNA, 19 nt, Artificial Sequence
  Description of Artificial Sequence: Synthetic oligonucleotide
acucgcucagagaggucga

SEQ ID NO: 1434787 - RNA, 19 nt, Artificial Sequence
  Description of Artificial Sequence: Synthetic oligonucleotide
acagggugacuugggguua

SEQ ID NO: 1434788 - RNA, 19 nt, Artificial Sequence
  Description of Artificial Sequence: Synthetic oligonucleotide
gccacagggguaaacccuc

SEQ ID NO: 1434789 - RNA, 19 nt, Artificial Sequence
  Description of Artificial Sequence: Synthetic oligonucleotide
gaaggcgccagaggcgacu

SEQ ID NO: 1434790 - RNA, 19 nt, Artificial Sequence
  Description of Artificial Sequence: Synthetic oligonucleotide
agcacgcccuggcuucaau

SEQ ID NO: 1434791 - RNA, 19 nt, Artificial Sequence
  Description of Artificial Sequence: Synthetic oligonucleotide
ccgcagaagaaccugagau

SEQ ID NO: 1434792 - RNA, 19 nt, Artificial Sequence
  Description of Artificial Sequence: Synthetic oligonucleotide
gagagcggacggaggugac

SEQ ID NO: 1434793 - RNA, 19 nt, Artificial Sequence
  Description of Artificial Sequence: Synthetic oligonucleotide
aagcgacucgcgggcccug

SEQ ID NO: 1434794 - RNA, 19 nt, Artificial Sequence
  Description of Artificial Sequence: Synthetic oligonucleotide
ggcaacucuguguggggua

SEQ ID NO: 1434795 - RNA, 19 nt, Artificial Sequence
  Description of Artificial Sequence: Synthetic oligonucleotide
guaggaccuuucucugccu

SEQ ID NO: 1434796 - RNA, 19 nt, Artificial Sequence
  Description of Artificial Sequence: Synthetic oligonucleotide
ccuaccugcggcggucucc

SEQ ID NO: 1434797 - RNA, 19 nt, Artificial Sequence
  Description of Artificial Sequence: Synthetic oligonucleotide
ggcgccagaggcgacugca

SEQ ID NO: 1434798 - RNA, 19 nt, Artificial Sequence
  Description of Artificial Sequence: Synthetic oligonucleotide
agcaguaggugaggccaua

SEQ ID NO: 1434799 - RNA, 19 nt, Artificial Sequence
  Description of Artificial Sequence: Synthetic oligonucleotide
ggaagauugcuuggagccu

SEQ ID NO: 1434800 - RNA, 19 nt, Artificial Sequence
  Description of Artificial Sequence: Synthetic oligonucleotide
gaagcgacucgcgggcccu

SEQ ID NO: 1434801 - RNA, 19 nt, Artificial Sequence
  Description of Artificial Sequence: Synthetic oligonucleotide
ggucgagggaguagcagua

SEQ ID NO: 1434802 - RNA, 19 nt, Artificial Sequence
  Description of Artificial Sequence: Synthetic oligonucleotide
cccuggcuucaauaaauaa

SEQ ID NO: 1434803 - RNA, 19 nt, Artificial Sequence
  Description of Artificial Sequence: Synthetic oligonucleotide
cgcagcgacagccccgaag

SEQ ID NO: 1434804 - RNA, 19 nt, Artificial Sequence
  Description of Artificial Sequence: Synthetic oligonucleotide
gaacguggcggagggcacu

SEQ ID NO: 1434805 - RNA, 19 nt, Artificial Sequence
  Description of Artificial Sequence: Synthetic oligonucleotide
agauugcuuggagccugua

SEQ ID NO: 1434806 - RNA, 19 nt, Artificial Sequence
  Description of Artificial Sequence: Synthetic oligonucleotide
guagccccuggggugccca

SEQ ID NO: 1434807 - RNA, 19 nt, Artificial Sequence
  Description of Artificial Sequence: Synthetic oligonucleotide
gccauaugacaggccaauc

SEQ ID NO: 1434808 - RNA, 19 nt, Artificial Sequence
  Description of Artificial Sequence: Synthetic oligonucleotide
cgccagaccuucccgcgcg

SEQ ID NO: 1434809 - RNA, 19 nt, Artificial Sequence
  Description of Artificial Sequence: Synthetic oligonucleotide
cugcggcggucuccacggg

SEQ ID NO: 1434810 - RNA, 19 nt, Artificial Sequence
  Description of Artificial Sequence: Synthetic oligonucleotide
cagggcccgccucauccga

SEQ ID NO: 1434811 - RNA, 19 nt, Artificial Sequence
  Description of Artificial Sequence: Synthetic oligonucleotide
ggugcccaacgccccagaa

SEQ ID NO: 1434812 - RNA, 19 nt, Artificial Sequence
  Description of Artificial Sequence: Synthetic oligonucleotide
gcgacucgcgggcccuggg

SEQ ID NO: 1434813 - RNA, 19 nt, Artificial Sequence
  Description of Artificial Sequence: Synthetic oligonucleotide
cauugggguuaggaccaaa

SEQ ID NO: 1434814 - RNA, 19 nt, Artificial Sequence
  Description of Artificial Sequence: Synthetic oligonucleotide
agggugacuugggguuaga

SEQ ID NO: 1434815 - RNA, 19 nt, Artificial Sequence
  Description of Artificial Sequence: Synthetic oligonucleotide
ccaguugcgcagggccucg

SEQ ID NO: 1434816 - RNA, 19 nt, Artificial Sequence
  Description of Artificial Sequence: Synthetic oligonucleotide
ggguuaggaccaaagugau

SEQ ID NO: 1434817 - RNA, 19 nt, Artificial Sequence
  Description of Artificial Sequence: Synthetic oligonucleotide
gcccgccucauccgagagc

SEQ ID NO: 1434818 - RNA, 19 nt, Artificial Sequence
  Description of Artificial Sequence: Synthetic oligonucleotide
cggagguauuuaauaaaua

SEQ ID NO: 1434819 - RNA, 19 nt, Artificial Sequence
  Description of Artificial Sequence: Synthetic oligonucleotide
caggguggaccaacaguau

SEQ ID NO: 1434820 - RNA, 19 nt, Artificial Sequence
  Description of Artificial Sequence: Synthetic oligonucleotide
gccucauccgagagcggac

SEQ ID NO: 1434821 - RNA, 19 nt, Artificial Sequence
  Description of Artificial Sequence: Synthetic oligonucleotide
ggccauaugacaggccaau

SEQ ID NO: 1434822 - RNA, 19 nt, Artificial Sequence
  Description of Artificial Sequence: Synthetic oligonucleotide
gcgaugauacagacucgaa

SEQ ID NO: 1434823 - RNA, 19 nt, Artificial Sequence
  Description of Artificial Sequence: Synthetic oligonucleotide
ccuaacauguaggagccuu

SEQ ID NO: 1434824 - RNA, 19 nt, Artificial Sequence
  Description of Artificial Sequence: Synthetic oligonucleotide
ccgaaggcgccagaggcga

SEQ ID NO: 1434825 - RNA, 19 nt, Artificial Sequence
  Description of Artificial Sequence: Synthetic oligonucleotide
cgacucgcgggcccugggg

SEQ ID NO: 1434826 - RNA, 19 nt, Artificial Sequence
  Description of Artificial Sequence: Synthetic oligonucleotide
gcacgcccuggcuucaaua

SEQ ID NO: 1434827 - RNA, 19 nt, Artificial Sequence
  Description of Artificial Sequence: Synthetic oligonucleotide
ggggugcccaacgccccag

SEQ ID NO: 1434828 - RNA, 19 nt, Artificial Sequence
  Description of Artificial Sequence: Synthetic oligonucleotide
ccgccagaccuucccgcgc

SEQ ID NO: 1434829 - RNA, 19 nt, Artificial Sequence
  Description of Artificial Sequence: Synthetic oligonucleotide
ccccgacaccagcagcgag

SEQ ID NO: 1434830 - RNA, 19 nt, Artificial Sequence
  Description of Artificial Sequence: Synthetic oligonucleotide
ggguuagaugaggguggca

SEQ ID NO: 1434831 - RNA, 19 nt, Artificial Sequence
  Description of Artificial Sequence: Synthetic oligonucleotide
ggcuagggcauggcaaccu

SEQ ID NO: 1434832 - RNA, 19 nt, Artificial Sequence
  Description of Artificial Sequence: Synthetic oligonucleotide
gcgagagcagggcggugaa

SEQ ID NO: 1434833 - RNA, 19 nt, Artificial Sequence
  Description of Artificial Sequence: Synthetic oligonucleotide
ccgagagcggacggaggug

SEQ ID NO: 1434834 - RNA, 19 nt, Artificial Sequence
  Description of Artificial Sequence: Synthetic oligonucleotide
cgagagcggacggagguga

SEQ ID NO: 1434835 - RNA, 19 nt, Artificial Sequence
  Description of Artificial Sequence: Synthetic oligonucleotide
cagcgagagcagggcggug

SEQ ID NO: 1434836 - RNA, 19 nt, Artificial Sequence
  Description of Artificial Sequence: Synthetic oligonucleotide
gcggggccccgacaccagc

SEQ ID NO: 1434837 - RNA, 19 nt, Artificial Sequence
  Description of Artificial Sequence: Synthetic oligonucleotide
gcccuggcuucaauaaaua

SEQ ID NO: 1434838 - RNA, 19 nt, Artificial Sequence
  Description of Artificial Sequence: Synthetic oligonucleotide
ggcggucuccacgggcaac

SEQ ID NO: 1434839 - RNA, 19 nt, Artificial Sequence
  Description of Artificial Sequence: Synthetic oligonucleotide
gguacacacugguggcauu

SEQ ID NO: 1434840 - RNA, 19 nt, Artificial Sequence
  Description of Artificial Sequence: Synthetic oligonucleotide
gcuagggcauggcaaccuu

SEQ ID NO: 1434841 - RNA, 19 nt, Artificial Sequence
  Description of Artificial Sequence: Synthetic oligonucleotide
cucacuuggguaggaccuu

SEQ ID NO: 1434842 - RNA, 19 nt, Artificial Sequence
  Description of Artificial Sequence: Synthetic oligonucleotide
gggugcccaacgccccaga

SEQ ID NO: 1434843 - RNA, 19 nt, Artificial Sequence
  Description of Artificial Sequence: Synthetic oligonucleotide
gguuaggaccaaagugauu

SEQ ID NO: 1434844 - RNA, 19 nt, Artificial Sequence
  Description of Artificial Sequence: Synthetic oligonucleotide
guaaacccucuggcauccu

SEQ ID NO: 1434845 - RNA, 19 nt, Artificial Sequence
  Description of Artificial Sequence: Synthetic oligonucleotide
gcagcgagagcagggcggu

SEQ ID NO: 1434846 - RNA, 19 nt, Artificial Sequence
  Description of Artificial Sequence: Synthetic oligonucleotide
cgacagccccgaaggcgcc

SEQ ID NO: 1434847 - RNA, 19 nt, Artificial Sequence
  Description of Artificial Sequence: Synthetic oligonucleotide
cccaacgccccagaauaua

SEQ ID NO: 1434848 - RNA, 19 nt, Artificial Sequence
  Description of Artificial Sequence: Synthetic oligonucleotide
cuggcacacggagguauuu

SEQ ID NO: 1434849 - RNA, 19 nt, Artificial Sequence
  Description of Artificial Sequence: Synthetic oligonucleotide
ccgccucggcacuggccgc

SEQ ID NO: 1434850 - RNA, 19 nt, Artificial Sequence
  Description of Artificial Sequence: Synthetic oligonucleotide
ggcaaacgacacagauaua

SEQ ID NO: 1434851 - RNA, 19 nt, Artificial Sequence
  Description of Artificial Sequence: Synthetic oligonucleotide
cgcccuggcuucaauaaau

SEQ ID NO: 1434852 - RNA, 19 nt, Artificial Sequence
  Description of Artificial Sequence: Synthetic oligonucleotide
gggugacuugggguuagau

SEQ ID NO: 1434853 - RNA, 19 nt, Artificial Sequence
  Description of Artificial Sequence: Synthetic oligonucleotide
gccuaccugcggcggucuc

SEQ ID NO: 1434854 - RNA, 19 nt, Artificial Sequence
  Description of Artificial Sequence: Synthetic oligonucleotide
cgaaggcgccagaggcgac

SEQ ID NO: 1434855 - RNA, 19 nt, Artificial Sequence
  Description of Artificial Sequence: Synthetic oligonucleotide
ccgccuaccugcggcgguc

SEQ ID NO: 1434856 - RNA, 19 nt, Artificial Sequence
  Description of Artificial Sequence: Synthetic oligonucleotide
gcgccgccucggcacuggc

SEQ ID NO: 1434857 - RNA, 19 nt, Artificial Sequence
  Description of Artificial Sequence: Synthetic oligonucleotide
ccacagggguaaacccucu

SEQ ID NO: 1434858 - RNA, 19 nt, Artificial Sequence
  Description of Artificial Sequence: Synthetic oligonucleotide
cagcuuggacagcgaugau

SEQ ID NO: 1434859 - RNA, 19 nt, Artificial Sequence
  Description of Artificial Sequence: Synthetic oligonucleotide
gcgcagggccucggagcgc

SEQ ID NO: 1434860 - RNA, 19 nt, Artificial Sequence
  Description of Artificial Sequence: Synthetic oligonucleotide
cagcacgcccuggcuucaa

SEQ ID NO: 1434861 - RNA, 19 nt, Artificial Sequence
  Description of Artificial Sequence: Synthetic oligonucleotide
gccuaacauguaggagccu

SEQ ID NO: 1434862 - RNA, 19 nt, Artificial Sequence
  Description of Artificial Sequence: Synthetic oligonucleotide
cggcaauuuccgccuaccu

SEQ ID NO: 1434863 - RNA, 19 nt, Artificial Sequence
  Description of Artificial Sequence: Synthetic oligonucleotide
cgcgccgccucggcacugg

SEQ ID NO: 1434864 - RNA, 19 nt, Artificial Sequence
  Description of Artificial Sequence: Synthetic oligonucleotide
ccucggcaauuuccgccua

SEQ ID NO: 1434865 - RNA, 19 nt, Artificial Sequence
  Description of Artificial Sequence: Synthetic oligonucleotide
gccauggccgccagaccuu

SEQ ID NO: 1434866 - RNA, 19 nt, Artificial Sequence
  Description of Artificial Sequence: Synthetic oligonucleotide
gcccaacgccccagaauau

SEQ ID NO: 1434867 - RNA, 19 nt, Artificial Sequence
  Description of Artificial Sequence: Synthetic oligonucleotide
cggcggucuccacgggcaa

SEQ ID NO: 1434868 - RNA, 19 nt, Artificial Sequence
  Description of Artificial Sequence: Synthetic oligonucleotide
ccgccagccucggcaauuu

SEQ ID NO: 1434869 - RNA, 19 nt, Artificial Sequence
  Description of Artificial Sequence: Synthetic oligonucleotide
cgcgcgccgccucggcacu

SEQ ID NO: 1434870 - RNA, 19 nt, Artificial Sequence
  Description of Artificial Sequence: Synthetic oligonucleotide
cgccuaccugcggcggucu

SEQ ID NO: 1434871 - RNA, 19 nt, Artificial Sequence
  Description of Artificial Sequence: Synthetic oligonucleotide
aaucacaugauuacaagac

SEQ ID NO: 1434872 - RNA, 19 nt, Artificial Sequence
  Description of Artificial Sequence: Synthetic oligonucleotide
auuacacuggaacaacgac

SEQ ID NO: 1434873 - RNA, 19 nt, Artificial Sequence
  Description of Artificial Sequence: Synthetic oligonucleotide
cugccuaaggaaaaggugg

SEQ ID NO: 1434874 - RNA, 19 nt, Artificial Sequence
  Description of Artificial Sequence: Synthetic oligonucleotide
auuacaagacugccuaagg

SEQ ID NO: 1434875 - RNA, 19 nt, Artificial Sequence
  Description of Artificial Sequence: Synthetic oligonucleotide
cuacagauuacacuggaac

SEQ ID NO: 1434876 - RNA, 19 nt, Artificial Sequence
  Description of Artificial Sequence: Synthetic oligonucleotide
uuacacuggaacaacgacu

SEQ ID NO: 1434877 - RNA, 19 nt, Artificial Sequence
  Description of Artificial Sequence: Synthetic oligonucleotide
uacagauuacacuggaaca

SEQ ID NO: 1434878 - RNA, 19 nt, Artificial Sequence
  Description of Artificial Sequence: Synthetic oligonucleotide
uggaacaacgacuuagcca

SEQ ID NO: 1434879 - RNA, 19 nt, Artificial Sequence
  Description of Artificial Sequence: Synthetic oligonucleotide
uuacaagacugccuaagga

SEQ ID NO: 1434880 - RNA, 19 nt, Artificial Sequence
  Description of Artificial Sequence: Synthetic oligonucleotide
cacccuacagauuacacug

SEQ ID NO: 1434881 - RNA, 19 nt, Artificial Sequence
  Description of Artificial Sequence: Synthetic oligonucleotide
acaugauuacaagacugcc

SEQ ID NO: 1434882 - RNA, 19 nt, Artificial Sequence
  Description of Artificial Sequence: Synthetic oligonucleotide
uacaagacugccuaaggaa

SEQ ID NO: 1434883 - RNA, 19 nt, Artificial Sequence
  Description of Artificial Sequence: Synthetic oligonucleotide
gauuacaagacugccuaag

SEQ ID NO: 1434884 - RNA, 19 nt, Artificial Sequence
  Description of Artificial Sequence: Synthetic oligonucleotide
augauuacaagacugccua

SEQ ID NO: 1434885 - RNA, 19 nt, Artificial Sequence
  Description of Artificial Sequence: Synthetic oligonucleotide
cacaugauuacaagacugc

SEQ ID NO: 1434886 - RNA, 19 nt, Artificial Sequence
  Description of Artificial Sequence: Synthetic oligonucleotide
uacacuggaacaacgacuu

SEQ ID NO: 1434887 - RNA, 19 nt, Artificial Sequence
  Description of Artificial Sequence: Synthetic oligonucleotide
ggaacaacgacuuagccaa

SEQ ID NO: 1434888 - RNA, 19 nt, Artificial Sequence
  Description of Artificial Sequence: Synthetic oligonucleotide
acuggaacaacgacuuagc

SEQ ID NO: 1434889 - RNA, 19 nt, Artificial Sequence
  Description of Artificial Sequence: Synthetic oligonucleotide
aucacaugauuacaagacu

SEQ ID NO: 1434890 - RNA, 19 nt, Artificial Sequence
  Description of Artificial Sequence: Synthetic oligonucleotide
aagacugccuaaggaaaag

SEQ ID NO: 1434891 - RNA, 19 nt, Artificial Sequence
  Description of Artificial Sequence: Synthetic oligonucleotide
gagacucggucacaggagc

SEQ ID NO: 1434892 - RNA, 19 nt, Artificial Sequence
  Description of Artificial Sequence: Synthetic oligonucleotide
agauuacacuggaacaacg

SEQ ID NO: 1434893 - RNA, 19 nt, Artificial Sequence
  Description of Artificial Sequence: Synthetic oligonucleotide
cacuggaacaacgacuuag

SEQ ID NO: 1434894 - RNA, 19 nt, Artificial Sequence
  Description of Artificial Sequence: Synthetic oligonucleotide
acagauuacacuggaacaa

SEQ ID NO: 1434895 - RNA, 19 nt, Artificial Sequence
  Description of Artificial Sequence: Synthetic oligonucleotide
gauuacacuggaacaacga

SEQ ID NO: 1434896 - RNA, 19 nt, Artificial Sequence
  Description of Artificial Sequence: Synthetic oligonucleotide
cuggaacaacgacuuagcc

SEQ ID NO: 1434897 - RNA, 19 nt, Artificial Sequence
  Description of Artificial Sequence: Synthetic oligonucleotide
acugccuaaggaaaaggug

SEQ ID NO: 1434898 - RNA, 19 nt, Artificial Sequence
  Description of Artificial Sequence: Synthetic oligonucleotide
agacugccuaaggaaaagg

SEQ ID NO: 1434899 - RNA, 19 nt, Artificial Sequence
  Description of Artificial Sequence: Synthetic oligonucleotide
ggucacaggagccaaucug

SEQ ID NO: 1434900 - RNA, 19 nt, Artificial Sequence
  Description of Artificial Sequence: Synthetic oligonucleotide
ucacaggagccaaucuggu

SEQ ID NO: 1434901 - RNA, 19 nt, Artificial Sequence
  Description of Artificial Sequence: Synthetic oligonucleotide
guggccacccuacagauua

SEQ ID NO: 1434902 - RNA, 19 nt, Artificial Sequence
  Description of Artificial Sequence: Synthetic oligonucleotide
cagauuacacuggaacaac

SEQ ID NO: 1434903 - RNA, 19 nt, Artificial Sequence
  Description of Artificial Sequence: Synthetic oligonucleotide
ugauuacaagacugccuaa

SEQ ID NO: 1434904 - RNA, 19 nt, Artificial Sequence
  Description of Artificial Sequence: Synthetic oligonucleotide
acaagacugccuaaggaaa

SEQ ID NO: 1434905 - RNA, 19 nt, Artificial Sequence
  Description of Artificial Sequence: Synthetic oligonucleotide
agacucggucacaggagcc

SEQ ID NO: 1434906 - RNA, 19 nt, Artificial Sequence
  Description of Artificial Sequence: Synthetic oligonucleotide
agagacucggucacaggag

SEQ ID NO: 1434907 - RNA, 19 nt, Artificial Sequence
  Description of Artificial Sequence: Synthetic oligonucleotide
caugauuacaagacugccu

SEQ ID NO: 1434908 - RNA, 19 nt, Artificial Sequence
  Description of Artificial Sequence: Synthetic oligonucleotide
caagacugccuaaggaaaa

SEQ ID NO: 1434909 - RNA, 19 nt, Artificial Sequence
  Description of Artificial Sequence: Synthetic oligonucleotide
acccuacagauuacacugg

SEQ ID NO: 1434910 - RNA, 19 nt, Artificial Sequence
  Description of Artificial Sequence: Synthetic oligonucleotide
ucggucacaggagccaauc

SEQ ID NO: 1434911 - RNA, 19 nt, Artificial Sequence
  Description of Artificial Sequence: Synthetic oligonucleotide
gacugccuaaggaaaaggu

SEQ ID NO: 1434912 - RNA, 19 nt, Artificial Sequence
  Description of Artificial Sequence: Synthetic oligonucleotide
gacucggucacaggagcca

SEQ ID NO: 1434913 - RNA, 19 nt, Artificial Sequence
  Description of Artificial Sequence: Synthetic oligonucleotide
aggagccaaucugguugac

SEQ ID NO: 1434914 - RNA, 19 nt, Artificial Sequence
  Description of Artificial Sequence: Synthetic oligonucleotide
uggccacccuacagauuac

SEQ ID NO: 1434915 - RNA, 19 nt, Artificial Sequence
  Description of Artificial Sequence: Synthetic oligonucleotide
acucggucacaggagccaa

SEQ ID NO: 1434916 - RNA, 19 nt, Artificial Sequence
  Description of Artificial Sequence: Synthetic oligonucleotide
acacuggaacaacgacuua

SEQ ID NO: 1434917 - RNA, 19 nt, Artificial Sequence
  Description of Artificial Sequence: Synthetic oligonucleotide
ccuacagauuacacuggaa

SEQ ID NO: 1434918 - RNA, 19 nt, Artificial Sequence
  Description of Artificial Sequence: Synthetic oligonucleotide
gccacccuacagauuacac

SEQ ID NO: 1434919 - RNA, 19 nt, Artificial Sequence
  Description of Artificial Sequence: Synthetic oligonucleotide
cccuacagauuacacugga

SEQ ID NO: 1434920 - RNA, 19 nt, Artificial Sequence
  Description of Artificial Sequence: Synthetic oligonucleotide
ccacccuacagauuacacu

SEQ ID NO: 1434921 - RNA, 19 nt, Artificial Sequence
  Description of Artificial Sequence: Synthetic oligonucleotide
cacaggagccaaucugguu

SEQ ID NO: 1434922 - RNA, 19 nt, Artificial Sequence
  Description of Artificial Sequence: Synthetic oligonucleotide
ggccacccuacagauuaca

SEQ ID NO: 1434923 - RNA, 19 nt, Artificial Sequence
  Description of Artificial Sequence: Synthetic oligonucleotide
cucggucacaggagccaau

SEQ ID NO: 1434924 - RNA, 19 nt, Artificial Sequence
  Description of Artificial Sequence: Synthetic oligonucleotide
cggucacaggagccaaucu

SEQ ID NO: 1434925 - RNA, 19 nt, Artificial Sequence
  Description of Artificial Sequence: Synthetic oligonucleotide
uguuaaaugauuauuggca

SEQ ID NO: 1434926 - RNA, 19 nt, Artificial Sequence
  Description of Artificial Sequence: Synthetic oligonucleotide
uuauguuaaaugauuauug

SEQ ID NO: 1434927 - RNA, 19 nt, Artificial Sequence
  Description of Artificial Sequence: Synthetic oligonucleotide
auaaaccuuaaauaauugc

SEQ ID NO: 1434928 - RNA, 19 nt, Artificial Sequence
  Description of Artificial Sequence: Synthetic oligonucleotide
uuugagcucaaaauuaagg

SEQ ID NO: 1434929 - RNA, 19 nt, Artificial Sequence
  Description of Artificial Sequence: Synthetic oligonucleotide
aauaauugcaauuauugua

SEQ ID NO: 1434930 - RNA, 19 nt, Artificial Sequence
  Description of Artificial Sequence: Synthetic oligonucleotide
uauugugugaguuugaaaa

SEQ ID NO: 1434931 - RNA, 19 nt, Artificial Sequence
  Description of Artificial Sequence: Synthetic oligonucleotide
aaaauuaaggcuuggacuu

SEQ ID NO: 1434932 - RNA, 19 nt, Artificial Sequence
  Description of Artificial Sequence: Synthetic oligonucleotide
cuugucuuagaauauaccc

SEQ ID NO: 1434933 - RNA, 19 nt, Artificial Sequence
  Description of Artificial Sequence: Synthetic oligonucleotide
aaaacaucucaguuucccc

SEQ ID NO: 1434934 - RNA, 19 nt, Artificial Sequence
  Description of Artificial Sequence: Synthetic oligonucleotide
ugugauauaauggagaaaa

SEQ ID NO: 1434935 - RNA, 19 nt, Artificial Sequence
  Description of Artificial Sequence: Synthetic oligonucleotide
ucuaaggaauacuaggugc

SEQ ID NO: 1434936 - RNA, 19 nt, Artificial Sequence
  Description of Artificial Sequence: Synthetic oligonucleotide
uuuccuagcuuuaaggacc

SEQ ID NO: 1434937 - RNA, 19 nt, Artificial Sequence
  Description of Artificial Sequence: Synthetic oligonucleotide
uuuggcuuauguuaaauga

SEQ ID NO: 1434938 - RNA, 19 nt, Artificial Sequence
  Description of Artificial Sequence: Synthetic oligonucleotide
uguaucucaucugagaucc

SEQ ID NO: 1434939 - RNA, 19 nt, Artificial Sequence
  Description of Artificial Sequence: Synthetic oligonucleotide
aaacacaccagcccaagag

SEQ ID NO: 1434940 - RNA, 19 nt, Artificial Sequence
  Description of Artificial Sequence: Synthetic oligonucleotide
ucuucagcccucaagauca

SEQ ID NO: 1434941 - RNA, 19 nt, Artificial Sequence
  Description of Artificial Sequence: Synthetic oligonucleotide
ucugcaauggcucugcucu

SEQ ID NO: 1434942 - RNA, 19 nt, Artificial Sequence
  Description of Artificial Sequence: Synthetic oligonucleotide
ugucagucuagauagaaca

SEQ ID NO: 1434943 - RNA, 19 nt, Artificial Sequence
  Description of Artificial Sequence: Synthetic oligonucleotide
aguaaaugcauacuauuug

SEQ ID NO: 1434944 - RNA, 19 nt, Artificial Sequence
  Description of Artificial Sequence: Synthetic oligonucleotide
uccucuaaggaauacuagg

SEQ ID NO: 1434945 - RNA, 19 nt, Artificial Sequence
  Description of Artificial Sequence: Synthetic oligonucleotide
aaaugcauacuauuuggcu

SEQ ID NO: 1434946 - RNA, 19 nt, Artificial Sequence
  Description of Artificial Sequence: Synthetic oligonucleotide
auaauugcaauuauuguag

SEQ ID NO: 1434947 - RNA, 19 nt, Artificial Sequence
  Description of Artificial Sequence: Synthetic oligonucleotide
gagagaguugcuuacauac

SEQ ID NO: 1434948 - RNA, 19 nt, Artificial Sequence
  Description of Artificial Sequence: Synthetic oligonucleotide
acugaaacuugguuagugc

SEQ ID NO: 1434949 - RNA, 19 nt, Artificial Sequence
  Description of Artificial Sequence: Synthetic oligonucleotide
gagaguugcuuacauacgg

SEQ ID NO: 1434950 - RNA, 19 nt, Artificial Sequence
  Description of Artificial Sequence: Synthetic oligonucleotide
ugauauaauggagaaaaca

SEQ ID NO: 1434951 - RNA, 19 nt, Artificial Sequence
  Description of Artificial Sequence: Synthetic oligonucleotide
acuaggugcagcauaaacc

SEQ ID NO: 1434952 - RNA, 19 nt, Artificial Sequence
  Description of Artificial Sequence: Synthetic oligonucleotide
aaugauuauuggcacgaug

SEQ ID NO: 1434953 - RNA, 19 nt, Artificial Sequence
  Description of Artificial Sequence: Synthetic oligonucleotide
cuaguuauugcuuccacac

SEQ ID NO: 1434954 - RNA, 19 nt, Artificial Sequence
  Description of Artificial Sequence: Synthetic oligonucleotide
aucacugaaacuugguuag

SEQ ID NO: 1434955 - RNA, 19 nt, Artificial Sequence
  Description of Artificial Sequence: Synthetic oligonucleotide
auugcaauuauuguagaag

SEQ ID NO: 1434956 - RNA, 19 nt, Artificial Sequence
  Description of Artificial Sequence: Synthetic oligonucleotide
uguauaaaugugauuugca

SEQ ID NO: 1434957 - RNA, 19 nt, Artificial Sequence
  Description of Artificial Sequence: Synthetic oligonucleotide
uuagaguaaaugcauacua

SEQ ID NO: 1434958 - RNA, 19 nt, Artificial Sequence
  Description of Artificial Sequence: Synthetic oligonucleotide
aguuauugcuuccacacug

SEQ ID NO: 1434959 - RNA, 19 nt, Artificial Sequence
  Description of Artificial Sequence: Synthetic oligonucleotide
aaugcauacuauuuggcuu

SEQ ID NO: 1434960 - RNA, 19 nt, Artificial Sequence
  Description of Artificial Sequence: Synthetic oligonucleotide
cuuauacucgccuuuggcc

SEQ ID NO: 1434961 - RNA, 19 nt, Artificial Sequence
  Description of Artificial Sequence: Synthetic oligonucleotide
aaacaucucaguuucccca

SEQ ID NO: 1434962 - RNA, 19 nt, Artificial Sequence
  Description of Artificial Sequence: Synthetic oligonucleotide
uuauuguagaaguuacagc

SEQ ID NO: 1434963 - RNA, 19 nt, Artificial Sequence
  Description of Artificial Sequence: Synthetic oligonucleotide
auuauuggcacgauguuuc

SEQ ID NO: 1434964 - RNA, 19 nt, Artificial Sequence
  Description of Artificial Sequence: Synthetic oligonucleotide
ugaaacuugguuagugcag

SEQ ID NO: 1434965 - RNA, 19 nt, Artificial Sequence
  Description of Artificial Sequence: Synthetic oligonucleotide
aaaaugcgguuguuguugg

SEQ ID NO: 1434966 - RNA, 19 nt, Artificial Sequence
  Description of Artificial Sequence: Synthetic oligonucleotide
uaaaugcauacuauuuggc

SEQ ID NO: 1434967 - RNA, 19 nt, Artificial Sequence
  Description of Artificial Sequence: Synthetic oligonucleotide
ucuagauagaacaguggca

SEQ ID NO: 1434968 - RNA, 19 nt, Artificial Sequence
  Description of Artificial Sequence: Synthetic oligonucleotide
uuauacucgccuuuggcca

SEQ ID NO: 1434969 - RNA, 19 nt, Artificial Sequence
  Description of Artificial Sequence: Synthetic oligonucleotide
guuaaaugauuauuggcac

SEQ ID NO: 1434970 - RNA, 19 nt, Artificial Sequence
  Description of Artificial Sequence: Synthetic oligonucleotide
gagaaauuaacuucuuguc

SEQ ID NO: 1434971 - RNA, 19 nt, Artificial Sequence
  Description of Artificial Sequence: Synthetic oligonucleotide
uauuggaaacaucauucca

SEQ ID NO: 1434972 - RNA, 19 nt, Artificial Sequence
  Description of Artificial Sequence: Synthetic oligonucleotide
agcuuuaaggaccguuucc

SEQ ID NO: 1434973 - RNA, 19 nt, Artificial Sequence
  Description of Artificial Sequence: Synthetic oligonucleotide
gucuagauagaacaguggc

SEQ ID NO: 1434974 - RNA, 19 nt, Artificial Sequence
  Description of Artificial Sequence: Synthetic oligonucleotide
uuugucacucguuuuauuc

SEQ ID NO: 1434975 - RNA, 19 nt, Artificial Sequence
  Description of Artificial Sequence: Synthetic oligonucleotide
uaaaugauuauuggcacga

SEQ ID NO: 1434976 - RNA, 19 nt, Artificial Sequence
  Description of Artificial Sequence: Synthetic oligonucleotide
uuguguaccaguucacucc

SEQ ID NO: 1434977 - RNA, 19 nt, Artificial Sequence
  Description of Artificial Sequence: Synthetic oligonucleotide
auauaauggagaaaacauc

SEQ ID NO: 1434978 - RNA, 19 nt, Artificial Sequence
  Description of Artificial Sequence: Synthetic oligonucleotide
gaguugcuuacauacgggg

SEQ ID NO: 1434979 - RNA, 19 nt, Artificial Sequence
  Description of Artificial Sequence: Synthetic oligonucleotide
agaaguuacagccuacaga

SEQ ID NO: 1434980 - RNA, 19 nt, Artificial Sequence
  Description of Artificial Sequence: Synthetic oligonucleotide
uauugcuuccacacugccg

SEQ ID NO: 1434981 - RNA, 19 nt, Artificial Sequence
  Description of Artificial Sequence: Synthetic oligonucleotide
gaaaaugcgguuguuguug

SEQ ID NO: 1434982 - RNA, 19 nt, Artificial Sequence
  Description of Artificial Sequence: Synthetic oligonucleotide
gaaaacaucucaguuuccc

SEQ ID NO: 1434983 - RNA, 19 nt, Artificial Sequence
  Description of Artificial Sequence: Synthetic oligonucleotide
agauguaggcuggugaccc

SEQ ID NO: 1434984 - RNA, 19 nt, Artificial Sequence
  Description of Artificial Sequence: Synthetic oligonucleotide
guuuagaguaaaugcauac

SEQ ID NO: 1434985 - RNA, 19 nt, Artificial Sequence
  Description of Artificial Sequence: Synthetic oligonucleotide
aauugcaauuauuguagaa

SEQ ID NO: 1434986 - RNA, 19 nt, Artificial Sequence
  Description of Artificial Sequence: Synthetic oligonucleotide
uuuaaggaccguuuccucu

SEQ ID NO: 1434987 - RNA, 19 nt, Artificial Sequence
  Description of Artificial Sequence: Synthetic oligonucleotide
agcaauaauccccaucucu

SEQ ID NO: 1434988 - RNA, 19 nt, Artificial Sequence
  Description of Artificial Sequence: Synthetic oligonucleotide
cauaaaccuuaaauaauug

SEQ ID NO: 1434989 - RNA, 19 nt, Artificial Sequence
  Description of Artificial Sequence: Synthetic oligonucleotide
ugguuagugcaguuuagag

SEQ ID NO: 1434990 - RNA, 19 nt, Artificial Sequence
  Description of Artificial Sequence: Synthetic oligonucleotide
uuuccucuaaggaauacua

SEQ ID NO: 1434991 - RNA, 19 nt, Artificial Sequence
  Description of Artificial Sequence: Synthetic oligonucleotide
auuauuuuggugcccugug

SEQ ID NO: 1434992 - RNA, 19 nt, Artificial Sequence
  Description of Artificial Sequence: Synthetic oligonucleotide
uagaaguuacagccuacag

SEQ ID NO: 1434993 - RNA, 19 nt, Artificial Sequence
  Description of Artificial Sequence: Synthetic oligonucleotide
acauacgggguuuccaagg

SEQ ID NO: 1434994 - RNA, 19 nt, Artificial Sequence
  Description of Artificial Sequence: Synthetic oligonucleotide
aguuuaucugcaauggcuc

SEQ ID NO: 1434995 - RNA, 19 nt, Artificial Sequence
  Description of Artificial Sequence: Synthetic oligonucleotide
augauuauuggcacgaugu

SEQ ID NO: 1434996 - RNA, 19 nt, Artificial Sequence
  Description of Artificial Sequence: Synthetic oligonucleotide
ugcuguugccgaaaaugcg

SEQ ID NO: 1434997 - RNA, 19 nt, Artificial Sequence
  Description of Artificial Sequence: Synthetic oligonucleotide
ugcccugugauauaaugga

SEQ ID NO: 1434998 - RNA, 19 nt, Artificial Sequence
  Description of Artificial Sequence: Synthetic oligonucleotide
uuuagaguaaaugcauacu

SEQ ID NO: 1434999 - RNA, 19 nt, Artificial Sequence
  Description of Artificial Sequence: Synthetic oligonucleotide
gauauaauggagaaaacau

SEQ ID NO: 1435000 - RNA, 19 nt, Artificial Sequence
  Description of Artificial Sequence: Synthetic oligonucleotide
aauuauuuuggugcccugu

SEQ ID NO: 1435001 - RNA, 19 nt, Artificial Sequence
  Description of Artificial Sequence: Synthetic oligonucleotide
auguaucucaucugagauc

SEQ ID NO: 1435002 - RNA, 19 nt, Artificial Sequence
  Description of Artificial Sequence: Synthetic oligonucleotide
cacagaaacuaguuauugc

SEQ ID NO: 1435003 - RNA, 19 nt, Artificial Sequence
  Description of Artificial Sequence: Synthetic oligonucleotide
uagaguaaaugcauacuau

SEQ ID NO: 1435004 - RNA, 19 nt, Artificial Sequence
  Description of Artificial Sequence: Synthetic oligonucleotide
uuugaguagcaugauucag

SEQ ID NO: 1435005 - RNA, 19 nt, Artificial Sequence
  Description of Artificial Sequence: Synthetic oligonucleotide
auggcauuggaacgucgcc

SEQ ID NO: 1435006 - RNA, 19 nt, Artificial Sequence
  Description of Artificial Sequence: Synthetic oligonucleotide
uuccuagcuuuaaggaccg

SEQ ID NO: 1435007 - RNA, 19 nt, Artificial Sequence
  Description of Artificial Sequence: Synthetic oligonucleotide
uacuaggugcagcauaaac

SEQ ID NO: 1435008 - RNA, 19 nt, Artificial Sequence
  Description of Artificial Sequence: Synthetic oligonucleotide
cuggacucagccaaucugc

SEQ ID NO: 1435009 - RNA, 19 nt, Artificial Sequence
  Description of Artificial Sequence: Synthetic oligonucleotide
uuccucuaaggaauacuag

SEQ ID NO: 1435010 - RNA, 19 nt, Artificial Sequence
  Description of Artificial Sequence: Synthetic oligonucleotide
ucacagaaacuaguuauug

SEQ ID NO: 1435011 - RNA, 19 nt, Artificial Sequence
  Description of Artificial Sequence: Synthetic oligonucleotide
auagccuggacucagccaa

SEQ ID NO: 1435012 - RNA, 19 nt, Artificial Sequence
  Description of Artificial Sequence: Synthetic oligonucleotide
cagucuagauagaacagug

SEQ ID NO: 1435013 - RNA, 19 nt, Artificial Sequence
  Description of Artificial Sequence: Synthetic oligonucleotide
aacgucgccgcucauguau

SEQ ID NO: 1435014 - RNA, 19 nt, Artificial Sequence
  Description of Artificial Sequence: Synthetic oligonucleotide
aggaccguuuccucuaagg

SEQ ID NO: 1435015 - RNA, 19 nt, Artificial Sequence
  Description of Artificial Sequence: Synthetic oligonucleotide
cucguuuuauucucagccc

SEQ ID NO: 1435016 - RNA, 19 nt, Artificial Sequence
  Description of Artificial Sequence: Synthetic oligonucleotide
acuaguuauugcuuccaca

SEQ ID NO: 1435017 - RNA, 19 nt, Artificial Sequence
  Description of Artificial Sequence: Synthetic oligonucleotide
gugauuugcacauggguca

SEQ ID NO: 1435018 - RNA, 19 nt, Artificial Sequence
  Description of Artificial Sequence: Synthetic oligonucleotide
uccaugacccuuugaguag

SEQ ID NO: 1435019 - RNA, 19 nt, Artificial Sequence
  Description of Artificial Sequence: Synthetic oligonucleotide
uuguagaaguuacagccua

SEQ ID NO: 1435020 - RNA, 19 nt, Artificial Sequence
  Description of Artificial Sequence: Synthetic oligonucleotide
cacugcauucacuucgagg

SEQ ID NO: 1435021 - RNA, 19 nt, Artificial Sequence
  Description of Artificial Sequence: Synthetic oligonucleotide
cuaaggaauacuaggugca

SEQ ID NO: 1435022 - RNA, 19 nt, Artificial Sequence
  Description of Artificial Sequence: Synthetic oligonucleotide
ucuugaguuucauguauaa

SEQ ID NO: 1435023 - RNA, 19 nt, Artificial Sequence
  Description of Artificial Sequence: Synthetic oligonucleotide
uguguaccaguucacuccu

SEQ ID NO: 1435024 - RNA, 19 nt, Artificial Sequence
  Description of Artificial Sequence: Synthetic oligonucleotide
uuacauacgggguuuccaa

SEQ ID NO: 1435025 - RNA, 19 nt, Artificial Sequence
  Description of Artificial Sequence: Synthetic oligonucleotide
cucuaugcuauugugugag

SEQ ID NO: 1435026 - RNA, 19 nt, Artificial Sequence
  Description of Artificial Sequence: Synthetic oligonucleotide
cucuaaggaauacuaggug

SEQ ID NO: 1435027 - RNA, 19 nt, Artificial Sequence
  Description of Artificial Sequence: Synthetic oligonucleotide
uaauugcaauuauuguaga

SEQ ID NO: 1435028 - RNA, 19 nt, Artificial Sequence
  Description of Artificial Sequence: Synthetic oligonucleotide
auaauggagaaaacaucuc

SEQ ID NO: 1435029 - RNA, 19 nt, Artificial Sequence
  Description of Artificial Sequence: Synthetic oligonucleotide
ucagucuagauagaacagu

SEQ ID NO: 1435030 - RNA, 19 nt, Artificial Sequence
  Description of Artificial Sequence: Synthetic oligonucleotide
accuuaaauaauugcaauu

SEQ ID NO: 1435031 - RNA, 19 nt, Artificial Sequence
  Description of Artificial Sequence: Synthetic oligonucleotide
cauggcauuggaacgucgc

SEQ ID NO: 1435032 - RNA, 19 nt, Artificial Sequence
  Description of Artificial Sequence: Synthetic oligonucleotide
uggcauuggaacgucgccg

SEQ ID NO: 1435033 - RNA, 19 nt, Artificial Sequence
  Description of Artificial Sequence: Synthetic oligonucleotide
uugucagucuagauagaac

SEQ ID NO: 1435034 - RNA, 19 nt, Artificial Sequence
  Description of Artificial Sequence: Synthetic oligonucleotide
aauuaaggcuuggacuugu

SEQ ID NO: 1435035 - RNA, 19 nt, Artificial Sequence
  Description of Artificial Sequence: Synthetic oligonucleotide
uguagaaguuacagccuac

SEQ ID NO: 1435036 - RNA, 19 nt, Artificial Sequence
  Description of Artificial Sequence: Synthetic oligonucleotide
uuuuggugcccugugauau

SEQ ID NO: 1435037 - RNA, 19 nt, Artificial Sequence
  Description of Artificial Sequence: Synthetic oligonucleotide
cacuugucuuagaauauac

SEQ ID NO: 1435038 - RNA, 19 nt, Artificial Sequence
  Description of Artificial Sequence: Synthetic oligonucleotide
gagggaaauucuucagccc

SEQ ID NO: 1435039 - RNA, 19 nt, Artificial Sequence
  Description of Artificial Sequence: Synthetic oligonucleotide
aaacuaguuauugcuucca

SEQ ID NO: 1435040 - RNA, 19 nt, Artificial Sequence
  Description of Artificial Sequence: Synthetic oligonucleotide
uucacaugcacuugucuua

SEQ ID NO: 1435041 - RNA, 19 nt, Artificial Sequence
  Description of Artificial Sequence: Synthetic oligonucleotide
uacauacgggguuuccaag

SEQ ID NO: 1435042 - RNA, 19 nt, Artificial Sequence
  Description of Artificial Sequence: Synthetic oligonucleotide
cacagggcugggcagaucc

SEQ ID NO: 1435043 - RNA, 19 nt, Artificial Sequence
  Description of Artificial Sequence: Synthetic oligonucleotide
aaauuaaggcuuggacuug

SEQ ID NO: 1435044 - RNA, 19 nt, Artificial Sequence
  Description of Artificial Sequence: Synthetic oligonucleotide
aguugcucgagcugcacgu

SEQ ID NO: 1435045 - RNA, 19 nt, Artificial Sequence
  Description of Artificial Sequence: Synthetic oligonucleotide
uauacucgccuuuggccag

SEQ ID NO: 1435046 - RNA, 19 nt, Artificial Sequence
  Description of Artificial Sequence: Synthetic oligonucleotide
ugcacguaguacuuugccu

SEQ ID NO: 1435047 - RNA, 19 nt, Artificial Sequence
  Description of Artificial Sequence: Synthetic oligonucleotide
ucacucguuuuauucucag

SEQ ID NO: 1435048 - RNA, 19 nt, Artificial Sequence
  Description of Artificial Sequence: Synthetic oligonucleotide
acuuguugguccuucucca

SEQ ID NO: 1435049 - RNA, 19 nt, Artificial Sequence
  Description of Artificial Sequence: Synthetic oligonucleotide
cuugguuagugcaguuuag

SEQ ID NO: 1435050 - RNA, 19 nt, Artificial Sequence
  Description of Artificial Sequence: Synthetic oligonucleotide
ugucacucguuuuauucuc

SEQ ID NO: 1435051 - RNA, 19 nt, Artificial Sequence
  Description of Artificial Sequence: Synthetic oligonucleotide
uuaaggaccguuuccucua

SEQ ID NO: 1435052 - RNA, 19 nt, Artificial Sequence
  Description of Artificial Sequence: Synthetic oligonucleotide
cugaaacuugguuagugca

SEQ ID NO: 1435053 - RNA, 19 nt, Artificial Sequence
  Description of Artificial Sequence: Synthetic oligonucleotide
agucuagauagaacagugg

SEQ ID NO: 1435054 - RNA, 19 nt, Artificial Sequence
  Description of Artificial Sequence: Synthetic oligonucleotide
uaguuauugcuuccacacu

SEQ ID NO: 1435055 - RNA, 19 nt, Artificial Sequence
  Description of Artificial Sequence: Synthetic oligonucleotide
ucacaugcacuugucuuag

SEQ ID NO: 1435056 - RNA, 19 nt, Artificial Sequence
  Description of Artificial Sequence: Synthetic oligonucleotide
auaauccccaucucuuccu

SEQ ID NO: 1435057 - RNA, 19 nt, Artificial Sequence
  Description of Artificial Sequence: Synthetic oligonucleotide
aacuggucaggaauuucag

SEQ ID NO: 1435058 - RNA, 19 nt, Artificial Sequence
  Description of Artificial Sequence: Synthetic oligonucleotide
cauacuauuuggcuuaugu

SEQ ID NO: 1435059 - RNA, 19 nt, Artificial Sequence
  Description of Artificial Sequence: Synthetic oligonucleotide
cuaggugcagcauaaaccu

SEQ ID NO: 1435060 - RNA, 19 nt, Artificial Sequence
  Description of Artificial Sequence: Synthetic oligonucleotide
uaccaguucacuccuuguc

SEQ ID NO: 1435061 - RNA, 19 nt, Artificial Sequence
  Description of Artificial Sequence: Synthetic oligonucleotide
agaucacugaaacuugguu

SEQ ID NO: 1435062 - RNA, 19 nt, Artificial Sequence
  Description of Artificial Sequence: Synthetic oligonucleotide
aucucaguuuccccaaaca

SEQ ID NO: 1435063 - RNA, 19 nt, Artificial Sequence
  Description of Artificial Sequence: Synthetic oligonucleotide
auuggaacgucgccgcuca

SEQ ID NO: 1435064 - RNA, 19 nt, Artificial Sequence
  Description of Artificial Sequence: Synthetic oligonucleotide
augcauacuauuuggcuua

SEQ ID NO: 1435065 - RNA, 19 nt, Artificial Sequence
  Description of Artificial Sequence: Synthetic oligonucleotide
agaguugcuuacauacggg

SEQ ID NO: 1435066 - RNA, 19 nt, Artificial Sequence
  Description of Artificial Sequence: Synthetic oligonucleotide
ugccgcauacggcccaugg

SEQ ID NO: 1435067 - RNA, 19 nt, Artificial Sequence
  Description of Artificial Sequence: Synthetic oligonucleotide
aguucacuccuugucuugg

SEQ ID NO: 1435068 - RNA, 19 nt, Artificial Sequence
  Description of Artificial Sequence: Synthetic oligonucleotide
guugccgaaaaugcgguug

SEQ ID NO: 1435069 - RNA, 19 nt, Artificial Sequence
  Description of Artificial Sequence: Synthetic oligonucleotide
ugauuauuggcacgauguu

SEQ ID NO: 1435070 - RNA, 19 nt, Artificial Sequence
  Description of Artificial Sequence: Synthetic oligonucleotide
augcuauugugugaguuug

SEQ ID NO: 1435071 - RNA, 19 nt, Artificial Sequence
  Description of Artificial Sequence: Synthetic oligonucleotide
ugagcauuguagagagagu

SEQ ID NO: 1435072 - RNA, 19 nt, Artificial Sequence
  Description of Artificial Sequence: Synthetic oligonucleotide
uucauguauaaaugugauu

SEQ ID NO: 1435073 - RNA, 19 nt, Artificial Sequence
  Description of Artificial Sequence: Synthetic oligonucleotide
cuucagggcugccuuauac

SEQ ID NO: 1435074 - RNA, 19 nt, Artificial Sequence
  Description of Artificial Sequence: Synthetic oligonucleotide
uagcuuuaaggaccguuuc

SEQ ID NO: 1435075 - RNA, 19 nt, Artificial Sequence
  Description of Artificial Sequence: Synthetic oligonucleotide
agcugcacguaguacuuug

SEQ ID NO: 1435076 - RNA, 19 nt, Artificial Sequence
  Description of Artificial Sequence: Synthetic oligonucleotide
uugguuagugcaguuuaga

SEQ ID NO: 1435077 - RNA, 19 nt, Artificial Sequence
  Description of Artificial Sequence: Synthetic oligonucleotide
gugcccugugauauaaugg

SEQ ID NO: 1435078 - RNA, 19 nt, Artificial Sequence
  Description of Artificial Sequence: Synthetic oligonucleotide
cuuugaguagcaugauuca

SEQ ID NO: 1435079 - RNA, 19 nt, Artificial Sequence
  Description of Artificial Sequence: Synthetic oligonucleotide
uugccgaaaaugcgguugu

SEQ ID NO: 1435080 - RNA, 19 nt, Artificial Sequence
  Description of Artificial Sequence: Synthetic oligonucleotide
guuauugcuuccacacugc

SEQ ID NO: 1435081 - RNA, 19 nt, Artificial Sequence
  Description of Artificial Sequence: Synthetic oligonucleotide
guaguacuuugccuuugag

SEQ ID NO: 1435082 - RNA, 19 nt, Artificial Sequence
  Description of Artificial Sequence: Synthetic oligonucleotide
aauccccucuaugcuauug

SEQ ID NO: 1435083 - RNA, 19 nt, Artificial Sequence
  Description of Artificial Sequence: Synthetic oligonucleotide
agcauaaaccuuaaauaau

SEQ ID NO: 1435084 - RNA, 19 nt, Artificial Sequence
  Description of Artificial Sequence: Synthetic oligonucleotide
uugcucgagcugcacguag

SEQ ID NO: 1435085 - RNA, 19 nt, Artificial Sequence
  Description of Artificial Sequence: Synthetic oligonucleotide
auacgggguuuccaagguc

SEQ ID NO: 1435086 - RNA, 19 nt, Artificial Sequence
  Description of Artificial Sequence: Synthetic oligonucleotide
cugcacguaguacuuugcc

SEQ ID NO: 1435087 - RNA, 19 nt, Artificial Sequence
  Description of Artificial Sequence: Synthetic oligonucleotide
gugaguuugaaaauuauuu

SEQ ID NO: 1435088 - RNA, 19 nt, Artificial Sequence
  Description of Artificial Sequence: Synthetic oligonucleotide
gauggcucgcuugaguuuc

SEQ ID NO: 1435089 - RNA, 19 nt, Artificial Sequence
  Description of Artificial Sequence: Synthetic oligonucleotide
gcauuguagagagaguugc

SEQ ID NO: 1435090 - RNA, 19 nt, Artificial Sequence
  Description of Artificial Sequence: Synthetic oligonucleotide
cuuuaaggaccguuuccuc

SEQ ID NO: 1435091 - RNA, 19 nt, Artificial Sequence
  Description of Artificial Sequence: Synthetic oligonucleotide
uaucucaucugagauccuc

SEQ ID NO: 1435092 - RNA, 19 nt, Artificial Sequence
  Description of Artificial Sequence: Synthetic oligonucleotide
cuauagagccucccacagc

SEQ ID NO: 1435093 - RNA, 19 nt, Artificial Sequence
  Description of Artificial Sequence: Synthetic oligonucleotide
cuuaucagagggaaauucu

SEQ ID NO: 1435094 - RNA, 19 nt, Artificial Sequence
  Description of Artificial Sequence: Synthetic oligonucleotide
uuauuggcacgauguuucu

SEQ ID NO: 1435095 - RNA, 19 nt, Artificial Sequence
  Description of Artificial Sequence: Synthetic oligonucleotide
uagauagaacaguggcaac

SEQ ID NO: 1435096 - RNA, 19 nt, Artificial Sequence
  Description of Artificial Sequence: Synthetic oligonucleotide
auuguaccuggcugcuguc

SEQ ID NO: 1435097 - RNA, 19 nt, Artificial Sequence
  Description of Artificial Sequence: Synthetic oligonucleotide
uucgagggcccaguauugg

SEQ ID NO: 1435098 - RNA, 19 nt, Artificial Sequence
  Description of Artificial Sequence: Synthetic oligonucleotide
uccccucuaugcuauugug

SEQ ID NO: 1435099 - RNA, 19 nt, Artificial Sequence
  Description of Artificial Sequence: Synthetic oligonucleotide
ggugcccugugauauaaug

SEQ ID NO: 1435100 - RNA, 19 nt, Artificial Sequence
  Description of Artificial Sequence: Synthetic oligonucleotide
agccuacagagaaauuaac

SEQ ID NO: 1435101 - RNA, 19 nt, Artificial Sequence
  Description of Artificial Sequence: Synthetic oligonucleotide
cacucguuuuauucucagc

SEQ ID NO: 1435102 - RNA, 19 nt, Artificial Sequence
  Description of Artificial Sequence: Synthetic oligonucleotide
cccuuuccuagcuuuaagg

SEQ ID NO: 1435103 - RNA, 19 nt, Artificial Sequence
  Description of Artificial Sequence: Synthetic oligonucleotide
aaggaccguuuccucuaag

SEQ ID NO: 1435104 - RNA, 19 nt, Artificial Sequence
  Description of Artificial Sequence: Synthetic oligonucleotide
caagcugccgggucuugcc

SEQ ID NO: 1435105 - RNA, 19 nt, Artificial Sequence
  Description of Artificial Sequence: Synthetic oligonucleotide
uguuggcuuugucacucgu

SEQ ID NO: 1435106 - RNA, 19 nt, Artificial Sequence
  Description of Artificial Sequence: Synthetic oligonucleotide
accguuuccucuaaggaau

SEQ ID NO: 1435107 - RNA, 19 nt, Artificial Sequence
  Description of Artificial Sequence: Synthetic oligonucleotide
aaacuugguuagugcaguu

SEQ ID NO: 1435108 - RNA, 19 nt, Artificial Sequence
  Description of Artificial Sequence: Synthetic oligonucleotide
ccuuuugagcauuguagag

SEQ ID NO: 1435109 - RNA, 19 nt, Artificial Sequence
  Description of Artificial Sequence: Synthetic oligonucleotide
agcugccgggucuugccac

SEQ ID NO: 1435110 - RNA, 19 nt, Artificial Sequence
  Description of Artificial Sequence: Synthetic oligonucleotide
acccuggucacaguuuauc

SEQ ID NO: 1435111 - RNA, 19 nt, Artificial Sequence
  Description of Artificial Sequence: Synthetic oligonucleotide
cugccgugcauucuccagc

SEQ ID NO: 1435112 - RNA, 19 nt, Artificial Sequence
  Description of Artificial Sequence: Synthetic oligonucleotide
ugaugugaugcugcccuca

SEQ ID NO: 1435113 - RNA, 19 nt, Artificial Sequence
  Description of Artificial Sequence: Synthetic oligonucleotide
cccucuaugcuauugugug

SEQ ID NO: 1435114 - RNA, 19 nt, Artificial Sequence
  Description of Artificial Sequence: Synthetic oligonucleotide
cuuucacagaaacuaguua

SEQ ID NO: 1435115 - RNA, 19 nt, Artificial Sequence
  Description of Artificial Sequence: Synthetic oligonucleotide
agcauuguagagagaguug

SEQ ID NO: 1435116 - RNA, 19 nt, Artificial Sequence
  Description of Artificial Sequence: Synthetic oligonucleotide
uuggcacgauguuucuuga

SEQ ID NO: 1435117 - RNA, 19 nt, Artificial Sequence
  Description of Artificial Sequence: Synthetic oligonucleotide
aguugcuuacauacggggu

SEQ ID NO: 1435118 - RNA, 19 nt, Artificial Sequence
  Description of Artificial Sequence: Synthetic oligonucleotide
aaaugauuauuggcacgau

SEQ ID NO: 1435119 - RNA, 19 nt, Artificial Sequence
  Description of Artificial Sequence: Synthetic oligonucleotide
cuggcuaaguguccaguuc

SEQ ID NO: 1435120 - RNA, 19 nt, Artificial Sequence
  Description of Artificial Sequence: Synthetic oligonucleotide
aacuugguuagugcaguuu

SEQ ID NO: 1435121 - RNA, 19 nt, Artificial Sequence
  Description of Artificial Sequence: Synthetic oligonucleotide
ucuaugcuauugugugagu

SEQ ID NO: 1435122 - RNA, 19 nt, Artificial Sequence
  Description of Artificial Sequence: Synthetic oligonucleotide
ugccuuauacucgccuuug

SEQ ID NO: 1435123 - RNA, 19 nt, Artificial Sequence
  Description of Artificial Sequence: Synthetic oligonucleotide
auccccucuaugcuauugu

SEQ ID NO: 1435124 - RNA, 19 nt, Artificial Sequence
  Description of Artificial Sequence: Synthetic oligonucleotide
ugccgugcauucuccagcu

SEQ ID NO: 1435125 - RNA, 19 nt, Artificial Sequence
  Description of Artificial Sequence: Synthetic oligonucleotide
gaaacuugguuagugcagu

SEQ ID NO: 1435126 - RNA, 19 nt, Artificial Sequence
  Description of Artificial Sequence: Synthetic oligonucleotide
cccucaagaucacugaaac

SEQ ID NO: 1435127 - RNA, 19 nt, Artificial Sequence
  Description of Artificial Sequence: Synthetic oligonucleotide
ucgagggcccaguauugga

SEQ ID NO: 1435128 - RNA, 19 nt, Artificial Sequence
  Description of Artificial Sequence: Synthetic oligonucleotide
cuuauguuaaaugauuauu

SEQ ID NO: 1435129 - RNA, 19 nt, Artificial Sequence
  Description of Artificial Sequence: Synthetic oligonucleotide
ccacacugccgcuacaggg

SEQ ID NO: 1435130 - RNA, 19 nt, Artificial Sequence
  Description of Artificial Sequence: Synthetic oligonucleotide
cuacagggaauguucugca

SEQ ID NO: 1435131 - RNA, 19 nt, Artificial Sequence
  Description of Artificial Sequence: Synthetic oligonucleotide
gagcucaaaauuaaggcuu

SEQ ID NO: 1435132 - RNA, 19 nt, Artificial Sequence
  Description of Artificial Sequence: Synthetic oligonucleotide
cuuacauacgggguuucca

SEQ ID NO: 1435133 - RNA, 19 nt, Artificial Sequence
  Description of Artificial Sequence: Synthetic oligonucleotide
gugauauaauggagaaaac

SEQ ID NO: 1435134 - RNA, 19 nt, Artificial Sequence
  Description of Artificial Sequence: Synthetic oligonucleotide
gaguaaaugcauacuauuu

SEQ ID NO: 1435135 - RNA, 19 nt, Artificial Sequence
  Description of Artificial Sequence: Synthetic oligonucleotide
uggcaaccauucuucacau

SEQ ID NO: 1435136 - RNA, 19 nt, Artificial Sequence
  Description of Artificial Sequence: Synthetic oligonucleotide
gguuagugcaguuuagagu

SEQ ID NO: 1435137 - RNA, 19 nt, Artificial Sequence
  Description of Artificial Sequence: Synthetic oligonucleotide
uggaacgucgccgcucaug

SEQ ID NO: 1435138 - RNA, 19 nt, Artificial Sequence
  Description of Artificial Sequence: Synthetic oligonucleotide
cacgccacagcccgaggcc

SEQ ID NO: 1435139 - RNA, 19 nt, Artificial Sequence
  Description of Artificial Sequence: Synthetic oligonucleotide
gaauuucagauggacuugu

SEQ ID NO: 1435140 - RNA, 19 nt, Artificial Sequence
  Description of Artificial Sequence: Synthetic oligonucleotide
uagugcaguuuagaguaaa

SEQ ID NO: 1435141 - RNA, 19 nt, Artificial Sequence
  Description of Artificial Sequence: Synthetic oligonucleotide
uaaggaccguuuccucuaa

SEQ ID NO: 1435142 - RNA, 19 nt, Artificial Sequence
  Description of Artificial Sequence: Synthetic oligonucleotide
uuggugcccugugauauaa

SEQ ID NO: 1435143 - RNA, 19 nt, Artificial Sequence
  Description of Artificial Sequence: Synthetic oligonucleotide
caguuuagaguaaaugcau

SEQ ID NO: 1435144 - RNA, 19 nt, Artificial Sequence
  Description of Artificial Sequence: Synthetic oligonucleotide
cuuccuuuugagcauugua

SEQ ID NO: 1435145 - RNA, 19 nt, Artificial Sequence
  Description of Artificial Sequence: Synthetic oligonucleotide
cagcccaagagcucuuauc

SEQ ID NO: 1435146 - RNA, 19 nt, Artificial Sequence
  Description of Artificial Sequence: Synthetic oligonucleotide
guacuuugccuuugagcuc

SEQ ID NO: 1435147 - RNA, 19 nt, Artificial Sequence
  Description of Artificial Sequence: Synthetic oligonucleotide
guuuaucugcaauggcucu

SEQ ID NO: 1435148 - RNA, 19 nt, Artificial Sequence
  Description of Artificial Sequence: Synthetic oligonucleotide
gccacaaauccccucuaug

SEQ ID NO: 1435149 - RNA, 19 nt, Artificial Sequence
  Description of Artificial Sequence: Synthetic oligonucleotide
gagcauuguagagagaguu

SEQ ID NO: 1435150 - RNA, 19 nt, Artificial Sequence
  Description of Artificial Sequence: Synthetic oligonucleotide
acuuguugauggcucgcuu

SEQ ID NO: 1435151 - RNA, 19 nt, Artificial Sequence
  Description of Artificial Sequence: Synthetic oligonucleotide
uugguccuucuccacugau

SEQ ID NO: 1435152 - RNA, 19 nt, Artificial Sequence
  Description of Artificial Sequence: Synthetic oligonucleotide
cauagccuggacucagcca

SEQ ID NO: 1435153 - RNA, 19 nt, Artificial Sequence
  Description of Artificial Sequence: Synthetic oligonucleotide
gcaggcuaaagucaggcua

SEQ ID NO: 1435154 - RNA, 19 nt, Artificial Sequence
  Description of Artificial Sequence: Synthetic oligonucleotide
uuuggugcccugugauaua

SEQ ID NO: 1435155 - RNA, 19 nt, Artificial Sequence
  Description of Artificial Sequence: Synthetic oligonucleotide
auucacuucgagggcccag

SEQ ID NO: 1435156 - RNA, 19 nt, Artificial Sequence
  Description of Artificial Sequence: Synthetic oligonucleotide
gagggcccaguauuggaaa

SEQ ID NO: 1435157 - RNA, 19 nt, Artificial Sequence
  Description of Artificial Sequence: Synthetic oligonucleotide
cuagcuuuaaggaccguuu

SEQ ID NO: 1435158 - RNA, 19 nt, Artificial Sequence
  Description of Artificial Sequence: Synthetic oligonucleotide
cuucacaugcacuugucuu

SEQ ID NO: 1435159 - RNA, 19 nt, Artificial Sequence
  Description of Artificial Sequence: Synthetic oligonucleotide
cauuggaacgucgccgcuc

SEQ ID NO: 1435160 - RNA, 19 nt, Artificial Sequence
  Description of Artificial Sequence: Synthetic oligonucleotide
aguguccaguucuccuccu

SEQ ID NO: 1435161 - RNA, 19 nt, Artificial Sequence
  Description of Artificial Sequence: Synthetic oligonucleotide
uaggugcagcauaaaccuu

SEQ ID NO: 1435162 - RNA, 19 nt, Artificial Sequence
  Description of Artificial Sequence: Synthetic oligonucleotide
ggucauagccuggacucag

SEQ ID NO: 1435163 - RNA, 19 nt, Artificial Sequence
  Description of Artificial Sequence: Synthetic oligonucleotide
agugcaguuuagaguaaau

SEQ ID NO: 1435164 - RNA, 19 nt, Artificial Sequence
  Description of Artificial Sequence: Synthetic oligonucleotide
uguugccgaaaaugcgguu

SEQ ID NO: 1435165 - RNA, 19 nt, Artificial Sequence
  Description of Artificial Sequence: Synthetic oligonucleotide
cccugugauauaauggaga

SEQ ID NO: 1435166 - RNA, 19 nt, Artificial Sequence
  Description of Artificial Sequence: Synthetic oligonucleotide
acucgccuuuggccagggc

SEQ ID NO: 1435167 - RNA, 19 nt, Artificial Sequence
  Description of Artificial Sequence: Synthetic oligonucleotide
auacucgccuuuggccagg

SEQ ID NO: 1435168 - RNA, 19 nt, Artificial Sequence
  Description of Artificial Sequence: Synthetic oligonucleotide
acguaguacuuugccuuug

SEQ ID NO: 1435169 - RNA, 19 nt, Artificial Sequence
  Description of Artificial Sequence: Synthetic oligonucleotide
uuuccaaggucuggcccuc

SEQ ID NO: 1435170 - RNA, 19 nt, Artificial Sequence
  Description of Artificial Sequence: Synthetic oligonucleotide
acaucucaguuuccccaaa

SEQ ID NO: 1435171 - RNA, 19 nt, Artificial Sequence
  Description of Artificial Sequence: Synthetic oligonucleotide
uauuggcacgauguuucuu

SEQ ID NO: 1435172 - RNA, 19 nt, Artificial Sequence
  Description of Artificial Sequence: Synthetic oligonucleotide
aaauccccucuaugcuauu

SEQ ID NO: 1435173 - RNA, 19 nt, Artificial Sequence
  Description of Artificial Sequence: Synthetic oligonucleotide
caguauuggaaacaucauu

SEQ ID NO: 1435174 - RNA, 19 nt, Artificial Sequence
  Description of Artificial Sequence: Synthetic oligonucleotide
ggcuaaagucaggcuauag

SEQ ID NO: 1435175 - RNA, 19 nt, Artificial Sequence
  Description of Artificial Sequence: Synthetic oligonucleotide
gccgaaaaugcgguuguug

SEQ ID NO: 1435176 - RNA, 19 nt, Artificial Sequence
  Description of Artificial Sequence: Synthetic oligonucleotide
ggcacgauguuucuugagu

SEQ ID NO: 1435177 - RNA, 19 nt, Artificial Sequence
  Description of Artificial Sequence: Synthetic oligonucleotide
cucgagcugcacguaguac

SEQ ID NO: 1435178 - RNA, 19 nt, Artificial Sequence
  Description of Artificial Sequence: Synthetic oligonucleotide
cugaugugaugcugcccuc

SEQ ID NO: 1435179 - RNA, 19 nt, Artificial Sequence
  Description of Artificial Sequence: Synthetic oligonucleotide
caaauccccucuaugcuau

SEQ ID NO: 1435180 - RNA, 19 nt, Artificial Sequence
  Description of Artificial Sequence: Synthetic oligonucleotide
ccuuugagcucaaaauuaa

SEQ ID NO: 1435181 - RNA, 19 nt, Artificial Sequence
  Description of Artificial Sequence: Synthetic oligonucleotide
caugcacuugucuuagaau

SEQ ID NO: 1435182 - RNA, 19 nt, Artificial Sequence
  Description of Artificial Sequence: Synthetic oligonucleotide
cagaaacuaguuauugcuu

SEQ ID NO: 1435183 - RNA, 19 nt, Artificial Sequence
  Description of Artificial Sequence: Synthetic oligonucleotide
cagggaacuggucaggaau

SEQ ID NO: 1435184 - RNA, 19 nt, Artificial Sequence
  Description of Artificial Sequence: Synthetic oligonucleotide
caggcuaaagucaggcuau

SEQ ID NO: 1435185 - RNA, 19 nt, Artificial Sequence
  Description of Artificial Sequence: Synthetic oligonucleotide
cauacggcccauggcagca

SEQ ID NO: 1435186 - RNA, 19 nt, Artificial Sequence
  Description of Artificial Sequence: Synthetic oligonucleotide
uacucgccuuuggccaggg

SEQ ID NO: 1435187 - RNA, 19 nt, Artificial Sequence
  Description of Artificial Sequence: Synthetic oligonucleotide
ggaacgucgccgcucaugu

SEQ ID NO: 1435188 - RNA, 19 nt, Artificial Sequence
  Description of Artificial Sequence: Synthetic oligonucleotide
agggaacuggucaggaauu

SEQ ID NO: 1435189 - RNA, 19 nt, Artificial Sequence
  Description of Artificial Sequence: Synthetic oligonucleotide
cuucagcccucaagaucac

SEQ ID NO: 1435190 - RNA, 19 nt, Artificial Sequence
  Description of Artificial Sequence: Synthetic oligonucleotide
ugucagcaauaauccccau

SEQ ID NO: 1435191 - RNA, 19 nt, Artificial Sequence
  Description of Artificial Sequence: Synthetic oligonucleotide
ugcuuacauacgggguuuc

SEQ ID NO: 1435192 - RNA, 19 nt, Artificial Sequence
  Description of Artificial Sequence: Synthetic oligonucleotide
ccucuaaggaauacuaggu

SEQ ID NO: 1435193 - RNA, 19 nt, Artificial Sequence
  Description of Artificial Sequence: Synthetic oligonucleotide
cauacgggguuuccaaggu

SEQ ID NO: 1435194 - RNA, 19 nt, Artificial Sequence
  Description of Artificial Sequence: Synthetic oligonucleotide
cuguugccgaaaaugcggu

SEQ ID NO: 1435195 - RNA, 19 nt, Artificial Sequence
  Description of Artificial Sequence: Synthetic oligonucleotide
ggacucagccaaucugcac

SEQ ID NO: 1435196 - RNA, 19 nt, Artificial Sequence
  Description of Artificial Sequence: Synthetic oligonucleotide
acgucgccgcucauguauc

SEQ ID NO: 1435197 - RNA, 19 nt, Artificial Sequence
  Description of Artificial Sequence: Synthetic oligonucleotide
ggacuuguugguccuucuc

SEQ ID NO: 1435198 - RNA, 19 nt, Artificial Sequence
  Description of Artificial Sequence: Synthetic oligonucleotide
ccagucuggcuaagugucc

SEQ ID NO: 1435199 - RNA, 19 nt, Artificial Sequence
  Description of Artificial Sequence: Synthetic oligonucleotide
cuuggacuuguugauggcu

SEQ ID NO: 1435200 - RNA, 19 nt, Artificial Sequence
  Description of Artificial Sequence: Synthetic oligonucleotide
agcugccgcauacggccca

SEQ ID NO: 1435201 - RNA, 19 nt, Artificial Sequence
  Description of Artificial Sequence: Synthetic oligonucleotide
gcuuacauacgggguuucc

SEQ ID NO: 1435202 - RNA, 19 nt, Artificial Sequence
  Description of Artificial Sequence: Synthetic oligonucleotide
cugugauauaauggagaaa

SEQ ID NO: 1435203 - RNA, 19 nt, Artificial Sequence
  Description of Artificial Sequence: Synthetic oligonucleotide
gacuuguugauggcucgcu

SEQ ID NO: 1435204 - RNA, 19 nt, Artificial Sequence
  Description of Artificial Sequence: Synthetic oligonucleotide
gccuacagagaaauuaacu

SEQ ID NO: 1435205 - RNA, 19 nt, Artificial Sequence
  Description of Artificial Sequence: Synthetic oligonucleotide
ugccgcuacagggaauguu

SEQ ID NO: 1435206 - RNA, 19 nt, Artificial Sequence
  Description of Artificial Sequence: Synthetic oligonucleotide
ccaugacccuuugaguagc

SEQ ID NO: 1435207 - RNA, 19 nt, Artificial Sequence
  Description of Artificial Sequence: Synthetic oligonucleotide
gugaccccagucuggcuaa

SEQ ID NO: 1435208 - RNA, 19 nt, Artificial Sequence
  Description of Artificial Sequence: Synthetic oligonucleotide
ggacuuguugauggcucgc

SEQ ID NO: 1435209 - RNA, 19 nt, Artificial Sequence
  Description of Artificial Sequence: Synthetic oligonucleotide
gcauucacuucgagggccc

SEQ ID NO: 1435210 - RNA, 19 nt, Artificial Sequence
  Description of Artificial Sequence: Synthetic oligonucleotide
ggcaaccauucuucacaug

SEQ ID NO: 1435211 - RNA, 19 nt, Artificial Sequence
  Description of Artificial Sequence: Synthetic oligonucleotide
ccgaaaaugcgguuguugu

SEQ ID NO: 1435212 - RNA, 19 nt, Artificial Sequence
  Description of Artificial Sequence: Synthetic oligonucleotide
gccgcauacggcccauggc

SEQ ID NO: 1435213 - RNA, 19 nt, Artificial Sequence
  Description of Artificial Sequence: Synthetic oligonucleotide
cuaugcuauugugugaguu

SEQ ID NO: 1435214 - RNA, 19 nt, Artificial Sequence
  Description of Artificial Sequence: Synthetic oligonucleotide
ccacgccacagcccgaggc

SEQ ID NO: 1435215 - RNA, 19 nt, Artificial Sequence
  Description of Artificial Sequence: Synthetic oligonucleotide
cagccaaucugcaccauuu

SEQ ID NO: 1435216 - RNA, 19 nt, Artificial Sequence
  Description of Artificial Sequence: Synthetic oligonucleotide
gcugcacguaguacuuugc

SEQ ID NO: 1435217 - RNA, 19 nt, Artificial Sequence
  Description of Artificial Sequence: Synthetic oligonucleotide
uccaagcugccgggucuug

SEQ ID NO: 1435218 - RNA, 19 nt, Artificial Sequence
  Description of Artificial Sequence: Synthetic oligonucleotide
ugaccccagucuggcuaag

SEQ ID NO: 1435219 - RNA, 19 nt, Artificial Sequence
  Description of Artificial Sequence: Synthetic oligonucleotide
acgccacagcccgaggcca

SEQ ID NO: 1435220 - RNA, 19 nt, Artificial Sequence
  Description of Artificial Sequence: Synthetic oligonucleotide
cgcauacggcccauggcag

SEQ ID NO: 1435221 - RNA, 19 nt, Artificial Sequence
  Description of Artificial Sequence: Synthetic oligonucleotide
gauuugcacaugggucaua

SEQ ID NO: 1435222 - RNA, 19 nt, Artificial Sequence
  Description of Artificial Sequence: Synthetic oligonucleotide
cacaugcacuugucuuaga

SEQ ID NO: 1435223 - RNA, 19 nt, Artificial Sequence
  Description of Artificial Sequence: Synthetic oligonucleotide
gcacgauguuucuugaguu

SEQ ID NO: 1435224 - RNA, 19 nt, Artificial Sequence
  Description of Artificial Sequence: Synthetic oligonucleotide
ggcuaaguguccaguucuc

SEQ ID NO: 1435225 - RNA, 19 nt, Artificial Sequence
  Description of Artificial Sequence: Synthetic oligonucleotide
cagccuccaugacccuuug

SEQ ID NO: 1435226 - RNA, 19 nt, Artificial Sequence
  Description of Artificial Sequence: Synthetic oligonucleotide
uuggaacgucgccgcucau

SEQ ID NO: 1435227 - RNA, 19 nt, Artificial Sequence
  Description of Artificial Sequence: Synthetic oligonucleotide
gcacuugucuuagaauaua

SEQ ID NO: 1435228 - RNA, 19 nt, Artificial Sequence
  Description of Artificial Sequence: Synthetic oligonucleotide
gucgccgcucauguaucuc

SEQ ID NO: 1435229 - RNA, 19 nt, Artificial Sequence
  Description of Artificial Sequence: Synthetic oligonucleotide
ugccgaaaaugcgguuguu

SEQ ID NO: 1435230 - RNA, 19 nt, Artificial Sequence
  Description of Artificial Sequence: Synthetic oligonucleotide
caugcccacucccuuuccu

SEQ ID NO: 1435231 - RNA, 19 nt, Artificial Sequence
  Description of Artificial Sequence: Synthetic oligonucleotide
uccuagcuuuaaggaccgu

SEQ ID NO: 1435232 - RNA, 19 nt, Artificial Sequence
  Description of Artificial Sequence: Synthetic oligonucleotide
gaacgucgccgcucaugua

SEQ ID NO: 1435233 - RNA, 19 nt, Artificial Sequence
  Description of Artificial Sequence: Synthetic oligonucleotide
cauucacuucgagggccca

SEQ ID NO: 1435234 - RNA, 19 nt, Artificial Sequence
  Description of Artificial Sequence: Synthetic oligonucleotide
aggcuaaagucaggcuaua

SEQ ID NO: 1435235 - RNA, 19 nt, Artificial Sequence
  Description of Artificial Sequence: Synthetic oligonucleotide
cacguaguacuuugccuuu

SEQ ID NO: 1435236 - RNA, 19 nt, Artificial Sequence
  Description of Artificial Sequence: Synthetic oligonucleotide
gcauacuauuuggcuuaug

SEQ ID NO: 1435237 - RNA, 19 nt, Artificial Sequence
  Description of Artificial Sequence: Synthetic oligonucleotide
cgcuacagggaauguucug

SEQ ID NO: 1435238 - RNA, 19 nt, Artificial Sequence
  Description of Artificial Sequence: Synthetic oligonucleotide
ggcaggcuaaagucaggcu

SEQ ID NO: 1435239 - RNA, 19 nt, Artificial Sequence
  Description of Artificial Sequence: Synthetic oligonucleotide
guugcucgagcugcacgua

SEQ ID NO: 1435240 - RNA, 19 nt, Artificial Sequence
  Description of Artificial Sequence: Synthetic oligonucleotide
gcccucaagaucacugaaa

SEQ ID NO: 1435241 - RNA, 19 nt, Artificial Sequence
  Description of Artificial Sequence: Synthetic oligonucleotide
ccaguauuggaaacaucau

SEQ ID NO: 1435242 - RNA, 19 nt, Artificial Sequence
  Description of Artificial Sequence: Synthetic oligonucleotide
auggcucgcuugaguuucu

SEQ ID NO: 1435243 - RNA, 19 nt, Artificial Sequence
  Description of Artificial Sequence: Synthetic oligonucleotide
accagcccaagagcucuua

SEQ ID NO: 1435244 - RNA, 19 nt, Artificial Sequence
  Description of Artificial Sequence: Synthetic oligonucleotide
auacggcccauggcagcau

SEQ ID NO: 1435245 - RNA, 19 nt, Artificial Sequence
  Description of Artificial Sequence: Synthetic oligonucleotide
cacuucgagggcccaguau

SEQ ID NO: 1435246 - RNA, 19 nt, Artificial Sequence
  Description of Artificial Sequence: Synthetic oligonucleotide
uggcucgcuugaguuucuu

SEQ ID NO: 1435247 - RNA, 19 nt, Artificial Sequence
  Description of Artificial Sequence: Synthetic oligonucleotide
gacacagggcugggcagau

SEQ ID NO: 1435248 - RNA, 19 nt, Artificial Sequence
  Description of Artificial Sequence: Synthetic oligonucleotide
ggaauacuaggugcagcau

SEQ ID NO: 1435249 - RNA, 19 nt, Artificial Sequence
  Description of Artificial Sequence: Synthetic oligonucleotide
ggcccaguauuggaaacau

SEQ ID NO: 1435250 - RNA, 19 nt, Artificial Sequence
  Description of Artificial Sequence: Synthetic oligonucleotide
gugacccuggucacaguuu

SEQ ID NO: 1435251 - RNA, 19 nt, Artificial Sequence
  Description of Artificial Sequence: Synthetic oligonucleotide
gcccaguauuggaaacauc

SEQ ID NO: 1435252 - RNA, 19 nt, Artificial Sequence
  Description of Artificial Sequence: Synthetic oligonucleotide
cugccgcauacggcccaug

SEQ ID NO: 1435253 - RNA, 19 nt, Artificial Sequence
  Description of Artificial Sequence: Synthetic oligonucleotide
ccuagcuuuaaggaccguu

SEQ ID NO: 1435254 - RNA, 19 nt, Artificial Sequence
  Description of Artificial Sequence: Synthetic oligonucleotide
cccacgccacagcccgagg

SEQ ID NO: 1435255 - RNA, 19 nt, Artificial Sequence
  Description of Artificial Sequence: Synthetic oligonucleotide
ccguuuccucuaaggaaua

SEQ ID NO: 1435256 - RNA, 19 nt, Artificial Sequence
  Description of Artificial Sequence: Synthetic oligonucleotide
ccgcuacagggaauguucu

SEQ ID NO: 1435257 - RNA, 19 nt, Artificial Sequence
  Description of Artificial Sequence: Synthetic oligonucleotide
gccgugcauucuccagcuc

SEQ ID NO: 1435258 - RNA, 19 nt, Artificial Sequence
  Description of Artificial Sequence: Synthetic oligonucleotide
cgaaaaugcgguuguuguu

SEQ ID NO: 1435259 - RNA, 19 nt, Artificial Sequence
  Description of Artificial Sequence: Synthetic oligonucleotide
gggcugccuuauacucgcc

SEQ ID NO: 1435260 - RNA, 19 nt, Artificial Sequence
  Description of Artificial Sequence: Synthetic oligonucleotide
cccuuugaguagcaugauu

SEQ ID NO: 1435261 - RNA, 19 nt, Artificial Sequence
  Description of Artificial Sequence: Synthetic oligonucleotide
cgagcugcacguaguacuu

SEQ ID NO: 1435262 - RNA, 19 nt, Artificial Sequence
  Description of Artificial Sequence: Synthetic oligonucleotide
cugccgcuacagggaaugu

SEQ ID NO: 1435263 - RNA, 19 nt, Artificial Sequence
  Description of Artificial Sequence: Synthetic oligonucleotide
ccagcccaagagcucuuau

SEQ ID NO: 1435264 - RNA, 19 nt, Artificial Sequence
  Description of Artificial Sequence: Synthetic oligonucleotide
cgucgccgcucauguaucu

SEQ ID NO: 1435265 - RNA, 19 nt, Artificial Sequence
  Description of Artificial Sequence: Synthetic oligonucleotide
ccccugcuaccaccacugu

SEQ ID NO: 1435266 - RNA, 19 nt, Artificial Sequence
  Description of Artificial Sequence: Synthetic oligonucleotide
aaaguagaugugcaaaacg

SEQ ID NO: 1435267 - RNA, 19 nt, Artificial Sequence
  Description of Artificial Sequence: Synthetic oligonucleotide
aaacuuuccagaugcuucc

SEQ ID NO: 1435268 - RNA, 19 nt, Artificial Sequence
  Description of Artificial Sequence: Synthetic oligonucleotide
aagaagaagccucgcagcc

SEQ ID NO: 1435269 - RNA, 19 nt, Artificial Sequence
  Description of Artificial Sequence: Synthetic oligonucleotide
uuagguaaggccuugggcc

SEQ ID NO: 1435270 - RNA, 19 nt, Artificial Sequence
  Description of Artificial Sequence: Synthetic oligonucleotide
agcccuuugagccaggucc

SEQ ID NO: 1435271 - RNA, 19 nt, Artificial Sequence
  Description of Artificial Sequence: Synthetic oligonucleotide
gugcuaagaaaauagaucc

SEQ ID NO: 1435272 - RNA, 19 nt, Artificial Sequence
  Description of Artificial Sequence: Synthetic oligonucleotide
gaagucaacuaccugaccc

SEQ ID NO: 1435273 - RNA, 19 nt, Artificial Sequence
  Description of Artificial Sequence: Synthetic oligonucleotide
gaaguugaguucauuaucg

SEQ ID NO: 1435274 - RNA, 19 nt, Artificial Sequence
  Description of Artificial Sequence: Synthetic oligonucleotide
aaguagaugugcaaaacgg

SEQ ID NO: 1435275 - RNA, 19 nt, Artificial Sequence
  Description of Artificial Sequence: Synthetic oligonucleotide
ugugacacaggaaugguug

SEQ ID NO: 1435276 - RNA, 19 nt, Artificial Sequence
  Description of Artificial Sequence: Synthetic oligonucleotide
uacaagguuccucagagug

SEQ ID NO: 1435277 - RNA, 19 nt, Artificial Sequence
  Description of Artificial Sequence: Synthetic oligonucleotide
acuaaacugacccggcugc

SEQ ID NO: 1435278 - RNA, 19 nt, Artificial Sequence
  Description of Artificial Sequence: Synthetic oligonucleotide
aacuaccugacccuugagg

SEQ ID NO: 1435279 - RNA, 19 nt, Artificial Sequence
  Description of Artificial Sequence: Synthetic oligonucleotide
aaaaggauguauauagcag

SEQ ID NO: 1435280 - RNA, 19 nt, Artificial Sequence
  Description of Artificial Sequence: Synthetic oligonucleotide
agagccaauugucacuucc

SEQ ID NO: 1435281 - RNA, 19 nt, Artificial Sequence
  Description of Artificial Sequence: Synthetic oligonucleotide
aaaacggcaaccuaacaua

SEQ ID NO: 1435282 - RNA, 19 nt, Artificial Sequence
  Description of Artificial Sequence: Synthetic oligonucleotide
aggacaacagagcagaggu

SEQ ID NO: 1435283 - RNA, 19 nt, Artificial Sequence
  Description of Artificial Sequence: Synthetic oligonucleotide
ccaagaaacacccugaggc

SEQ ID NO: 1435284 - RNA, 19 nt, Artificial Sequence
  Description of Artificial Sequence: Synthetic oligonucleotide
ggcaaccuaacauaaaagg

SEQ ID NO: 1435285 - RNA, 19 nt, Artificial Sequence
  Description of Artificial Sequence: Synthetic oligonucleotide
agaugugcaaaacggcaac

SEQ ID NO: 1435286 - RNA, 19 nt, Artificial Sequence
  Description of Artificial Sequence: Synthetic oligonucleotide
acuaccugacccuugagga

SEQ ID NO: 1435287 - RNA, 19 nt, Artificial Sequence
  Description of Artificial Sequence: Synthetic oligonucleotide
aguagaugugcaaaacggc

SEQ ID NO: 1435288 - RNA, 19 nt, Artificial Sequence
  Description of Artificial Sequence: Synthetic oligonucleotide
agugaucucauucccuggg

SEQ ID NO: 1435289 - RNA, 19 nt, Artificial Sequence
  Description of Artificial Sequence: Synthetic oligonucleotide
auaugcuucaaugaagucu

SEQ ID NO: 1435290 - RNA, 19 nt, Artificial Sequence
  Description of Artificial Sequence: Synthetic oligonucleotide
agagguaguagcuggucgg

SEQ ID NO: 1435291 - RNA, 19 nt, Artificial Sequence
  Description of Artificial Sequence: Synthetic oligonucleotide
aaugccaggacaccugcga

SEQ ID NO: 1435292 - RNA, 19 nt, Artificial Sequence
  Description of Artificial Sequence: Synthetic oligonucleotide
ugucgguagaccacggucc

SEQ ID NO: 1435293 - RNA, 19 nt, Artificial Sequence
  Description of Artificial Sequence: Synthetic oligonucleotide
aaccuaacauaaaaggaug

SEQ ID NO: 1435294 - RNA, 19 nt, Artificial Sequence
  Description of Artificial Sequence: Synthetic oligonucleotide
ucuagcacccucaugggaa

SEQ ID NO: 1435295 - RNA, 19 nt, Artificial Sequence
  Description of Artificial Sequence: Synthetic oligonucleotide
gacagugacacagguaagg

SEQ ID NO: 1435296 - RNA, 19 nt, Artificial Sequence
  Description of Artificial Sequence: Synthetic oligonucleotide
ucuagccaggcuaaugggc

SEQ ID NO: 1435297 - RNA, 19 nt, Artificial Sequence
  Description of Artificial Sequence: Synthetic oligonucleotide
uugaggacaacagagcaga

SEQ ID NO: 1435298 - RNA, 19 nt, Artificial Sequence
  Description of Artificial Sequence: Synthetic oligonucleotide
uacuaaacugacccggcug

SEQ ID NO: 1435299 - RNA, 19 nt, Artificial Sequence
  Description of Artificial Sequence: Synthetic oligonucleotide
ugaugaaacuuuccagaug

SEQ ID NO: 1435300 - RNA, 19 nt, Artificial Sequence
  Description of Artificial Sequence: Synthetic oligonucleotide
agcuaagcugcccucuagc

SEQ ID NO: 1435301 - RNA, 19 nt, Artificial Sequence
  Description of Artificial Sequence: Synthetic oligonucleotide
uucagauagguagagcccc

SEQ ID NO: 1435302 - RNA, 19 nt, Artificial Sequence
  Description of Artificial Sequence: Synthetic oligonucleotide
cacauaugcuucaaugaag

SEQ ID NO: 1435303 - RNA, 19 nt, Artificial Sequence
  Description of Artificial Sequence: Synthetic oligonucleotide
acgcaggagagguaguagc

SEQ ID NO: 1435304 - RNA, 19 nt, Artificial Sequence
  Description of Artificial Sequence: Synthetic oligonucleotide
cuuagguaaggccuugggc

SEQ ID NO: 1435305 - RNA, 19 nt, Artificial Sequence
  Description of Artificial Sequence: Synthetic oligonucleotide
uguacaucacaugagucac

SEQ ID NO: 1435306 - RNA, 19 nt, Artificial Sequence
  Description of Artificial Sequence: Synthetic oligonucleotide
uuacuugaugaaacuuucc

SEQ ID NO: 1435307 - RNA, 19 nt, Artificial Sequence
  Description of Artificial Sequence: Synthetic oligonucleotide
auucagauagguagagccc

SEQ ID NO: 1435308 - RNA, 19 nt, Artificial Sequence
  Description of Artificial Sequence: Synthetic oligonucleotide
ucucaaguccccucccucg

SEQ ID NO: 1435309 - RNA, 19 nt, Artificial Sequence
  Description of Artificial Sequence: Synthetic oligonucleotide
agggguauguuuccagugg

SEQ ID NO: 1435310 - RNA, 19 nt, Artificial Sequence
  Description of Artificial Sequence: Synthetic oligonucleotide
ucaacuaccugacccuuga

SEQ ID NO: 1435311 - RNA, 19 nt, Artificial Sequence
  Description of Artificial Sequence: Synthetic oligonucleotide
uuaucgugguccuacuuac

SEQ ID NO: 1435312 - RNA, 19 nt, Artificial Sequence
  Description of Artificial Sequence: Synthetic oligonucleotide
uggagacucaagacuacag

SEQ ID NO: 1435313 - RNA, 19 nt, Artificial Sequence
  Description of Artificial Sequence: Synthetic oligonucleotide
gagauuccuuacuugauga

SEQ ID NO: 1435314 - RNA, 19 nt, Artificial Sequence
  Description of Artificial Sequence: Synthetic oligonucleotide
cagaaaucacugaggaugc

SEQ ID NO: 1435315 - RNA, 19 nt, Artificial Sequence
  Description of Artificial Sequence: Synthetic oligonucleotide
guaauauguggucauguga

SEQ ID NO: 1435316 - RNA, 19 nt, Artificial Sequence
  Description of Artificial Sequence: Synthetic oligonucleotide
ucccucucuacuuagguaa

SEQ ID NO: 1435317 - RNA, 19 nt, Artificial Sequence
  Description of Artificial Sequence: Synthetic oligonucleotide
gcuaaagugacagugacac

SEQ ID NO: 1435318 - RNA, 19 nt, Artificial Sequence
  Description of Artificial Sequence: Synthetic oligonucleotide
augugagcauaugugacac

SEQ ID NO: 1435319 - RNA, 19 nt, Artificial Sequence
  Description of Artificial Sequence: Synthetic oligonucleotide
uuggagaucucugagugga

SEQ ID NO: 1435320 - RNA, 19 nt, Artificial Sequence
  Description of Artificial Sequence: Synthetic oligonucleotide
acuuagguaaggccuuggg

SEQ ID NO: 1435321 - RNA, 19 nt, Artificial Sequence
  Description of Artificial Sequence: Synthetic oligonucleotide
ugcaaaacggcaaccuaac

SEQ ID NO: 1435322 - RNA, 19 nt, Artificial Sequence
  Description of Artificial Sequence: Synthetic oligonucleotide
acacauaugcuucaaugaa

SEQ ID NO: 1435323 - RNA, 19 nt, Artificial Sequence
  Description of Artificial Sequence: Synthetic oligonucleotide
uggucaugugagcauaugu

SEQ ID NO: 1435324 - RNA, 19 nt, Artificial Sequence
  Description of Artificial Sequence: Synthetic oligonucleotide
agaacacccacgaagaaga

SEQ ID NO: 1435325 - RNA, 19 nt, Artificial Sequence
  Description of Artificial Sequence: Synthetic oligonucleotide
ucuuauaguccccucucaa

SEQ ID NO: 1435326 - RNA, 19 nt, Artificial Sequence
  Description of Artificial Sequence: Synthetic oligonucleotide
cuaaugggcaggcuggcag

SEQ ID NO: 1435327 - RNA, 19 nt, Artificial Sequence
  Description of Artificial Sequence: Synthetic oligonucleotide
cuuguccacucuuauaguc

SEQ ID NO: 1435328 - RNA, 19 nt, Artificial Sequence
  Description of Artificial Sequence: Synthetic oligonucleotide
ggauguauauagcagcccc

SEQ ID NO: 1435329 - RNA, 19 nt, Artificial Sequence
  Description of Artificial Sequence: Synthetic oligonucleotide
uagaugugcaaaacggcaa

SEQ ID NO: 1435330 - RNA, 19 nt, Artificial Sequence
  Description of Artificial Sequence: Synthetic oligonucleotide
auuaucgugguccuacuua

SEQ ID NO: 1435331 - RNA, 19 nt, Artificial Sequence
  Description of Artificial Sequence: Synthetic oligonucleotide
ucugggguacuaaacugac

SEQ ID NO: 1435332 - RNA, 19 nt, Artificial Sequence
  Description of Artificial Sequence: Synthetic oligonucleotide
gcugaugccagaguaagcg

SEQ ID NO: 1435333 - RNA, 19 nt, Artificial Sequence
  Description of Artificial Sequence: Synthetic oligonucleotide
acauaugcuucaaugaagu

SEQ ID NO: 1435334 - RNA, 19 nt, Artificial Sequence
  Description of Artificial Sequence: Synthetic oligonucleotide
cacaggaaugguuggcugg

SEQ ID NO: 1435335 - RNA, 19 nt, Artificial Sequence
  Description of Artificial Sequence: Synthetic oligonucleotide
gauggccaaugccaggaag

SEQ ID NO: 1435336 - RNA, 19 nt, Artificial Sequence
  Description of Artificial Sequence: Synthetic oligonucleotide
ccaauugucacuucccuag

SEQ ID NO: 1435337 - RNA, 19 nt, Artificial Sequence
  Description of Artificial Sequence: Synthetic oligonucleotide
ucuacuuagguaaggccuu

SEQ ID NO: 1435338 - RNA, 19 nt, Artificial Sequence
  Description of Artificial Sequence: Synthetic oligonucleotide
aggaaguugaguucauuau

SEQ ID NO: 1435339 - RNA, 19 nt, Artificial Sequence
  Description of Artificial Sequence: Synthetic oligonucleotide
acggcaaccuaacauaaaa

SEQ ID NO: 1435340 - RNA, 19 nt, Artificial Sequence
  Description of Artificial Sequence: Synthetic oligonucleotide
aagucagcccgguagcggu

SEQ ID NO: 1435341 - RNA, 19 nt, Artificial Sequence
  Description of Artificial Sequence: Synthetic oligonucleotide
aggugcagaaggcagagau

SEQ ID NO: 1435342 - RNA, 19 nt, Artificial Sequence
  Description of Artificial Sequence: Synthetic oligonucleotide
uagguaaggccuugggccc

SEQ ID NO: 1435343 - RNA, 19 nt, Artificial Sequence
  Description of Artificial Sequence: Synthetic oligonucleotide
cucgccaagaaacacccug

SEQ ID NO: 1435344 - RNA, 19 nt, Artificial Sequence
  Description of Artificial Sequence: Synthetic oligonucleotide
gaugaagcuccagacgcag

SEQ ID NO: 1435345 - RNA, 19 nt, Artificial Sequence
  Description of Artificial Sequence: Synthetic oligonucleotide
acuacagcuguagagcucu

SEQ ID NO: 1435346 - RNA, 19 nt, Artificial Sequence
  Description of Artificial Sequence: Synthetic oligonucleotide
cuggucgggucuuugagac

SEQ ID NO: 1435347 - RNA, 19 nt, Artificial Sequence
  Description of Artificial Sequence: Synthetic oligonucleotide
ugggcguagaggcugagua

SEQ ID NO: 1435348 - RNA, 19 nt, Artificial Sequence
  Description of Artificial Sequence: Synthetic oligonucleotide
ucuguucaguuuugcagcu

SEQ ID NO: 1435349 - RNA, 19 nt, Artificial Sequence
  Description of Artificial Sequence: Synthetic oligonucleotide
ugaagucaacuaccugacc

SEQ ID NO: 1435350 - RNA, 19 nt, Artificial Sequence
  Description of Artificial Sequence: Synthetic oligonucleotide
guggagauuccuuacuuga

SEQ ID NO: 1435351 - RNA, 19 nt, Artificial Sequence
  Description of Artificial Sequence: Synthetic oligonucleotide
agaguaagcggcgcggagg

SEQ ID NO: 1435352 - RNA, 19 nt, Artificial Sequence
  Description of Artificial Sequence: Synthetic oligonucleotide
aaugaagucuggggcagca

SEQ ID NO: 1435353 - RNA, 19 nt, Artificial Sequence
  Description of Artificial Sequence: Synthetic oligonucleotide
gaguaagcggcgcggaggc

SEQ ID NO: 1435354 - RNA, 19 nt, Artificial Sequence
  Description of Artificial Sequence: Synthetic oligonucleotide
auauguggucaugugagca

SEQ ID NO: 1435355 - RNA, 19 nt, Artificial Sequence
  Description of Artificial Sequence: Synthetic oligonucleotide
gguggaaaaguagaugugc

SEQ ID NO: 1435356 - RNA, 19 nt, Artificial Sequence
  Description of Artificial Sequence: Synthetic oligonucleotide
aaauggccgcuguauuucu

SEQ ID NO: 1435357 - RNA, 19 nt, Artificial Sequence
  Description of Artificial Sequence: Synthetic oligonucleotide
cucaagacuacagcuguag

SEQ ID NO: 1435358 - RNA, 19 nt, Artificial Sequence
  Description of Artificial Sequence: Synthetic oligonucleotide
gguaauauguggucaugug

SEQ ID NO: 1435359 - RNA, 19 nt, Artificial Sequence
  Description of Artificial Sequence: Synthetic oligonucleotide
ucuuugagacucuggugcu

SEQ ID NO: 1435360 - RNA, 19 nt, Artificial Sequence
  Description of Artificial Sequence: Synthetic oligonucleotide
cagcucugguaauaugugg

SEQ ID NO: 1435361 - RNA, 19 nt, Artificial Sequence
  Description of Artificial Sequence: Synthetic oligonucleotide
ugugcaaaacggcaaccua

SEQ ID NO: 1435362 - RNA, 19 nt, Artificial Sequence
  Description of Artificial Sequence: Synthetic oligonucleotide
cugaugccagaguaagcgg

SEQ ID NO: 1435363 - RNA, 19 nt, Artificial Sequence
  Description of Artificial Sequence: Synthetic oligonucleotide
cucuagccaggcuaauggg

SEQ ID NO: 1435364 - RNA, 19 nt, Artificial Sequence
  Description of Artificial Sequence: Synthetic oligonucleotide
ucgccaagaaacacccuga

SEQ ID NO: 1435365 - RNA, 19 nt, Artificial Sequence
  Description of Artificial Sequence: Synthetic oligonucleotide
cucucuacuuagguaaggc

SEQ ID NO: 1435366 - RNA, 19 nt, Artificial Sequence
  Description of Artificial Sequence: Synthetic oligonucleotide
uauguggucaugugagcau

SEQ ID NO: 1435367 - RNA, 19 nt, Artificial Sequence
  Description of Artificial Sequence: Synthetic oligonucleotide
gaugugcaaaacggcaacc

SEQ ID NO: 1435368 - RNA, 19 nt, Artificial Sequence
  Description of Artificial Sequence: Synthetic oligonucleotide
caggcuaaugggcaggcug

SEQ ID NO: 1435369 - RNA, 19 nt, Artificial Sequence
  Description of Artificial Sequence: Synthetic oligonucleotide
ugccagaguaagcggcgcg

SEQ ID NO: 1435370 - RNA, 19 nt, Artificial Sequence
  Description of Artificial Sequence: Synthetic oligonucleotide
ucgugguccuacuuacaag

SEQ ID NO: 1435371 - RNA, 19 nt, Artificial Sequence
  Description of Artificial Sequence: Synthetic oligonucleotide
uggagugaucucauucccu

SEQ ID NO: 1435372 - RNA, 19 nt, Artificial Sequence
  Description of Artificial Sequence: Synthetic oligonucleotide
ggagugaucucauucccug

SEQ ID NO: 1435373 - RNA, 19 nt, Artificial Sequence
  Description of Artificial Sequence: Synthetic oligonucleotide
ggaaguugaguucauuauc

SEQ ID NO: 1435374 - RNA, 19 nt, Artificial Sequence
  Description of Artificial Sequence: Synthetic oligonucleotide
caaccuaacauaaaaggau

SEQ ID NO: 1435375 - RNA, 19 nt, Artificial Sequence
  Description of Artificial Sequence: Synthetic oligonucleotide
gauuccuuacuugaugaaa

SEQ ID NO: 1435376 - RNA, 19 nt, Artificial Sequence
  Description of Artificial Sequence: Synthetic oligonucleotide
cuaugcucugccacgguuc

SEQ ID NO: 1435377 - RNA, 19 nt, Artificial Sequence
  Description of Artificial Sequence: Synthetic oligonucleotide
auguauauagcagccccug

SEQ ID NO: 1435378 - RNA, 19 nt, Artificial Sequence
  Description of Artificial Sequence: Synthetic oligonucleotide
ucaggucuagccucaucca

SEQ ID NO: 1435379 - RNA, 19 nt, Artificial Sequence
  Description of Artificial Sequence: Synthetic oligonucleotide
caauugucacuucccuagg

SEQ ID NO: 1435380 - RNA, 19 nt, Artificial Sequence
  Description of Artificial Sequence: Synthetic oligonucleotide
guaagcggcgcggaggccg

SEQ ID NO: 1435381 - RNA, 19 nt, Artificial Sequence
  Description of Artificial Sequence: Synthetic oligonucleotide
gacggcugagaagagaaca

SEQ ID NO: 1435382 - RNA, 19 nt, Artificial Sequence
  Description of Artificial Sequence: Synthetic oligonucleotide
cgugguccuacuuacaagg

SEQ ID NO: 1435383 - RNA, 19 nt, Artificial Sequence
  Description of Artificial Sequence: Synthetic oligonucleotide
acgaagaagaagccucgca

SEQ ID NO: 1435384 - RNA, 19 nt, Artificial Sequence
  Description of Artificial Sequence: Synthetic oligonucleotide
aucgugguccuacuuacaa

SEQ ID NO: 1435385 - RNA, 19 nt, Artificial Sequence
  Description of Artificial Sequence: Synthetic oligonucleotide
ucagagugcuaagaaaaua

SEQ ID NO: 1435386 - RNA, 19 nt, Artificial Sequence
  Description of Artificial Sequence: Synthetic oligonucleotide
cugaguggagauuccuuac

SEQ ID NO: 1435387 - RNA, 19 nt, Artificial Sequence
  Description of Artificial Sequence: Synthetic oligonucleotide
ggucuagccucauccaagg

SEQ ID NO: 1435388 - RNA, 19 nt, Artificial Sequence
  Description of Artificial Sequence: Synthetic oligonucleotide
cucuacuuagguaaggccu

SEQ ID NO: 1435389 - RNA, 19 nt, Artificial Sequence
  Description of Artificial Sequence: Synthetic oligonucleotide
guagcggugggcguagagg

SEQ ID NO: 1435390 - RNA, 19 nt, Artificial Sequence
  Description of Artificial Sequence: Synthetic oligonucleotide
cugccuaugcucugccacg

SEQ ID NO: 1435391 - RNA, 19 nt, Artificial Sequence
  Description of Artificial Sequence: Synthetic oligonucleotide
acauaaaaggauguauaua

SEQ ID NO: 1435392 - RNA, 19 nt, Artificial Sequence
  Description of Artificial Sequence: Synthetic oligonucleotide
cuugggcccauguccaaag

SEQ ID NO: 1435393 - RNA, 19 nt, Artificial Sequence
  Description of Artificial Sequence: Synthetic oligonucleotide
uggagauuccuuacuugau

SEQ ID NO: 1435394 - RNA, 19 nt, Artificial Sequence
  Description of Artificial Sequence: Synthetic oligonucleotide
ggguacuaaacugacccgg

SEQ ID NO: 1435395 - RNA, 19 nt, Artificial Sequence
  Description of Artificial Sequence: Synthetic oligonucleotide
agcuggucgggucuuugag

SEQ ID NO: 1435396 - RNA, 19 nt, Artificial Sequence
  Description of Artificial Sequence: Synthetic oligonucleotide
gagguaguagcuggucggg

SEQ ID NO: 1435397 - RNA, 19 nt, Artificial Sequence
  Description of Artificial Sequence: Synthetic oligonucleotide
ccucuagccaggcuaaugg

SEQ ID NO: 1435398 - RNA, 19 nt, Artificial Sequence
  Description of Artificial Sequence: Synthetic oligonucleotide
acggcugagaagagaacac

SEQ ID NO: 1435399 - RNA, 19 nt, Artificial Sequence
  Description of Artificial Sequence: Synthetic oligonucleotide
ugaguaggaaggcccacuu

SEQ ID NO: 1435400 - RNA, 19 nt, Artificial Sequence
  Description of Artificial Sequence: Synthetic oligonucleotide
cucagaagcugaguacagg

SEQ ID NO: 1435401 - RNA, 19 nt, Artificial Sequence
  Description of Artificial Sequence: Synthetic oligonucleotide
auauagcagccccugcccu

SEQ ID NO: 1435402 - RNA, 19 nt, Artificial Sequence
  Description of Artificial Sequence: Synthetic oligonucleotide
guagaccacgguccagacg

SEQ ID NO: 1435403 - RNA, 19 nt, Artificial Sequence
  Description of Artificial Sequence: Synthetic oligonucleotide
ccacacauaugcuucaaug

SEQ ID NO: 1435404 - RNA, 19 nt, Artificial Sequence
  Description of Artificial Sequence: Synthetic oligonucleotide
aaacggcaaccuaacauaa

SEQ ID NO: 1435405 - RNA, 19 nt, Artificial Sequence
  Description of Artificial Sequence: Synthetic oligonucleotide
uacuuagguaaggccuugg

SEQ ID NO: 1435406 - RNA, 19 nt, Artificial Sequence
  Description of Artificial Sequence: Synthetic oligonucleotide
aaacugacccggcugccua

SEQ ID NO: 1435407 - RNA, 19 nt, Artificial Sequence
  Description of Artificial Sequence: Synthetic oligonucleotide
aggcuaaugggcaggcugg

SEQ ID NO: 1435408 - RNA, 19 nt, Artificial Sequence
  Description of Artificial Sequence: Synthetic oligonucleotide
agcucugguaauauguggu

SEQ ID NO: 1435409 - RNA, 19 nt, Artificial Sequence
  Description of Artificial Sequence: Synthetic oligonucleotide
uuacaagguuccucagagu

SEQ ID NO: 1435410 - RNA, 19 nt, Artificial Sequence
  Description of Artificial Sequence: Synthetic oligonucleotide
ucauuaucgugguccuacu

SEQ ID NO: 1435411 - RNA, 19 nt, Artificial Sequence
  Description of Artificial Sequence: Synthetic oligonucleotide
ucaaguccccucccucgcc

SEQ ID NO: 1435412 - RNA, 19 nt, Artificial Sequence
  Description of Artificial Sequence: Synthetic oligonucleotide
ccucgcagcccuuugagcc

SEQ ID NO: 1435413 - RNA, 19 nt, Artificial Sequence
  Description of Artificial Sequence: Synthetic oligonucleotide
uccacucuuauaguccccu

SEQ ID NO: 1435414 - RNA, 19 nt, Artificial Sequence
  Description of Artificial Sequence: Synthetic oligonucleotide
agguccuccaguaauccug

SEQ ID NO: 1435415 - RNA, 19 nt, Artificial Sequence
  Description of Artificial Sequence: Synthetic oligonucleotide
ggcguagaggcugaguagg

SEQ ID NO: 1435416 - RNA, 19 nt, Artificial Sequence
  Description of Artificial Sequence: Synthetic oligonucleotide
uaucgugguccuacuuaca

SEQ ID NO: 1435417 - RNA, 19 nt, Artificial Sequence
  Description of Artificial Sequence: Synthetic oligonucleotide
ugguccuacuuacaagguu

SEQ ID NO: 1435418 - RNA, 19 nt, Artificial Sequence
  Description of Artificial Sequence: Synthetic oligonucleotide
gagacggcugagaagagaa

SEQ ID NO: 1435419 - RNA, 19 nt, Artificial Sequence
  Description of Artificial Sequence: Synthetic oligonucleotide
ugccuaugcucugccacgg

SEQ ID NO: 1435420 - RNA, 19 nt, Artificial Sequence
  Description of Artificial Sequence: Synthetic oligonucleotide
gaguaggaaggcccacuug

SEQ ID NO: 1435421 - RNA, 19 nt, Artificial Sequence
  Description of Artificial Sequence: Synthetic oligonucleotide
agccucauccaaggagucc

SEQ ID NO: 1435422 - RNA, 19 nt, Artificial Sequence
  Description of Artificial Sequence: Synthetic oligonucleotide
cuaccugacccuugaggac

SEQ ID NO: 1435423 - RNA, 19 nt, Artificial Sequence
  Description of Artificial Sequence: Synthetic oligonucleotide
ccaagacccacaaugccag

SEQ ID NO: 1435424 - RNA, 19 nt, Artificial Sequence
  Description of Artificial Sequence: Synthetic oligonucleotide
gagcuaagcugcccucuag

SEQ ID NO: 1435425 - RNA, 19 nt, Artificial Sequence
  Description of Artificial Sequence: Synthetic oligonucleotide
augugcaaaacggcaaccu

SEQ ID NO: 1435426 - RNA, 19 nt, Artificial Sequence
  Description of Artificial Sequence: Synthetic oligonucleotide
ggcagugaccccuucaaca

SEQ ID NO: 1435427 - RNA, 19 nt, Artificial Sequence
  Description of Artificial Sequence: Synthetic oligonucleotide
aucucauucccugggucag

SEQ ID NO: 1435428 - RNA, 19 nt, Artificial Sequence
  Description of Artificial Sequence: Synthetic oligonucleotide
auugccgcaguccccggcu

SEQ ID NO: 1435429 - RNA, 19 nt, Artificial Sequence
  Description of Artificial Sequence: Synthetic oligonucleotide
gcaaccuaacauaaaagga

SEQ ID NO: 1435430 - RNA, 19 nt, Artificial Sequence
  Description of Artificial Sequence: Synthetic oligonucleotide
accuaacauaaaaggaugu

SEQ ID NO: 1435431 - RNA, 19 nt, Artificial Sequence
  Description of Artificial Sequence: Synthetic oligonucleotide
gacgcaggagagguaguag

SEQ ID NO: 1435432 - RNA, 19 nt, Artificial Sequence
  Description of Artificial Sequence: Synthetic oligonucleotide
caaaacggcaaccuaacau

SEQ ID NO: 1435433 - RNA, 19 nt, Artificial Sequence
  Description of Artificial Sequence: Synthetic oligonucleotide
agauuccuuacuugaugaa

SEQ ID NO: 1435434 - RNA, 19 nt, Artificial Sequence
  Description of Artificial Sequence: Synthetic oligonucleotide
gguccuacuuacaagguuc

SEQ ID NO: 1435435 - RNA, 19 nt, Artificial Sequence
  Description of Artificial Sequence: Synthetic oligonucleotide
guggaaaaguagaugugca

SEQ ID NO: 1435436 - RNA, 19 nt, Artificial Sequence
  Description of Artificial Sequence: Synthetic oligonucleotide
ggaaaaguagaugugcaaa

SEQ ID NO: 1435437 - RNA, 19 nt, Artificial Sequence
  Description of Artificial Sequence: Synthetic oligonucleotide
uguggucaugugagcauau

SEQ ID NO: 1435438 - RNA, 19 nt, Artificial Sequence
  Description of Artificial Sequence: Synthetic oligonucleotide
agccucgcagcccuuugag

SEQ ID NO: 1435439 - RNA, 19 nt, Artificial Sequence
  Description of Artificial Sequence: Synthetic oligonucleotide
uccuuacuugaugaaacuu

SEQ ID NO: 1435440 - RNA, 19 nt, Artificial Sequence
  Description of Artificial Sequence: Synthetic oligonucleotide
caaugccaggacaccugcg

SEQ ID NO: 1435441 - RNA, 19 nt, Artificial Sequence
  Description of Artificial Sequence: Synthetic oligonucleotide
gcuaagcugcccucuagcc

SEQ ID NO: 1435442 - RNA, 19 nt, Artificial Sequence
  Description of Artificial Sequence: Synthetic oligonucleotide
uaaacugacccggcugccu

SEQ ID NO: 1435443 - RNA, 19 nt, Artificial Sequence
  Description of Artificial Sequence: Synthetic oligonucleotide
gccaagaaacacccugagg

SEQ ID NO: 1435444 - RNA, 19 nt, Artificial Sequence
  Description of Artificial Sequence: Synthetic oligonucleotide
aagccucgcagcccuuuga

SEQ ID NO: 1435445 - RNA, 19 nt, Artificial Sequence
  Description of Artificial Sequence: Synthetic oligonucleotide
uccagacgaagaagaugga

SEQ ID NO: 1435446 - RNA, 19 nt, Artificial Sequence
  Description of Artificial Sequence: Synthetic oligonucleotide
gggguacuaaacugacccg

SEQ ID NO: 1435447 - RNA, 19 nt, Artificial Sequence
  Description of Artificial Sequence: Synthetic oligonucleotide
acgguccagacgaagaaga

SEQ ID NO: 1435448 - RNA, 19 nt, Artificial Sequence
  Description of Artificial Sequence: Synthetic oligonucleotide
cacccacgaagaagaagcc

SEQ ID NO: 1435449 - RNA, 19 nt, Artificial Sequence
  Description of Artificial Sequence: Synthetic oligonucleotide
gaguacagguccugaggga

SEQ ID NO: 1435450 - RNA, 19 nt, Artificial Sequence
  Description of Artificial Sequence: Synthetic oligonucleotide
agccagguccuccaguaau

SEQ ID NO: 1435451 - RNA, 19 nt, Artificial Sequence
  Description of Artificial Sequence: Synthetic oligonucleotide
aggagagacacuggauucu

SEQ ID NO: 1435452 - RNA, 19 nt, Artificial Sequence
  Description of Artificial Sequence: Synthetic oligonucleotide
gaagccucgcagcccuuug

SEQ ID NO: 1435453 - RNA, 19 nt, Artificial Sequence
  Description of Artificial Sequence: Synthetic oligonucleotide
gacccggcugccuaugcuc

SEQ ID NO: 1435454 - RNA, 19 nt, Artificial Sequence
  Description of Artificial Sequence: Synthetic oligonucleotide
aauggccgcuguauuucug

SEQ ID NO: 1435455 - RNA, 19 nt, Artificial Sequence
  Description of Artificial Sequence: Synthetic oligonucleotide
agcuccagacgcaggagag

SEQ ID NO: 1435456 - RNA, 19 nt, Artificial Sequence
  Description of Artificial Sequence: Synthetic oligonucleotide
guccuacuuacaagguucc

SEQ ID NO: 1435457 - RNA, 19 nt, Artificial Sequence
  Description of Artificial Sequence: Synthetic oligonucleotide
ggcuggagugaucucauuc

SEQ ID NO: 1435458 - RNA, 19 nt, Artificial Sequence
  Description of Artificial Sequence: Synthetic oligonucleotide
ccucagagugcuaagaaaa

SEQ ID NO: 1435459 - RNA, 19 nt, Artificial Sequence
  Description of Artificial Sequence: Synthetic oligonucleotide
gguacuaaacugacccggc

SEQ ID NO: 1435460 - RNA, 19 nt, Artificial Sequence
  Description of Artificial Sequence: Synthetic oligonucleotide
cagugacacagguaaggca

SEQ ID NO: 1435461 - RNA, 19 nt, Artificial Sequence
  Description of Artificial Sequence: Synthetic oligonucleotide
caagacccacaaugccagg

SEQ ID NO: 1435462 - RNA, 19 nt, Artificial Sequence
  Description of Artificial Sequence: Synthetic oligonucleotide
ugacccggcugccuaugcu

SEQ ID NO: 1435463 - RNA, 19 nt, Artificial Sequence
  Description of Artificial Sequence: Synthetic oligonucleotide
gcugccuaugcucugccac

SEQ ID NO: 1435464 - RNA, 19 nt, Artificial Sequence
  Description of Artificial Sequence: Synthetic oligonucleotide
gauguauauagcagccccu

SEQ ID NO: 1435465 - RNA, 19 nt, Artificial Sequence
  Description of Artificial Sequence: Synthetic oligonucleotide
cagaguaagcggcgcggag

SEQ ID NO: 1435466 - RNA, 19 nt, Artificial Sequence
  Description of Artificial Sequence: Synthetic oligonucleotide
aacugacccggcugccuau

SEQ ID NO: 1435467 - RNA, 19 nt, Artificial Sequence
  Description of Artificial Sequence: Synthetic oligonucleotide
gagaucucugaguggagau

SEQ ID NO: 1435468 - RNA, 19 nt, Artificial Sequence
  Description of Artificial Sequence: Synthetic oligonucleotide
cuuugagacucuggugcug

SEQ ID NO: 1435469 - RNA, 19 nt, Artificial Sequence
  Description of Artificial Sequence: Synthetic oligonucleotide
cacgguccagacgaagaag

SEQ ID NO: 1435470 - RNA, 19 nt, Artificial Sequence
  Description of Artificial Sequence: Synthetic oligonucleotide
ccacuugagagagaugaag

SEQ ID NO: 1435471 - RNA, 19 nt, Artificial Sequence
  Description of Artificial Sequence: Synthetic oligonucleotide
guacaucacaugagucacc

SEQ ID NO: 1435472 - RNA, 19 nt, Artificial Sequence
  Description of Artificial Sequence: Synthetic oligonucleotide
augccaggaaggugcagaa

SEQ ID NO: 1435473 - RNA, 19 nt, Artificial Sequence
  Description of Artificial Sequence: Synthetic oligonucleotide
cuaaagugacagugacaca

SEQ ID NO: 1435474 - RNA, 19 nt, Artificial Sequence
  Description of Artificial Sequence: Synthetic oligonucleotide
gguuccucagagugcuaag

SEQ ID NO: 1435475 - RNA, 19 nt, Artificial Sequence
  Description of Artificial Sequence: Synthetic oligonucleotide
cacgaagaagaagccucgc

SEQ ID NO: 1435476 - RNA, 19 nt, Artificial Sequence
  Description of Artificial Sequence: Synthetic oligonucleotide
aguaagcggcgcggaggcc

SEQ ID NO: 1435477 - RNA, 19 nt, Artificial Sequence
  Description of Artificial Sequence: Synthetic oligonucleotide
agugaccccuucaacaguu

SEQ ID NO: 1435478 - RNA, 19 nt, Artificial Sequence
  Description of Artificial Sequence: Synthetic oligonucleotide
ucacuucccuaggaacuga

SEQ ID NO: 1435479 - RNA, 19 nt, Artificial Sequence
  Description of Artificial Sequence: Synthetic oligonucleotide
agacggcugagaagagaac

SEQ ID NO: 1435480 - RNA, 19 nt, Artificial Sequence
  Description of Artificial Sequence: Synthetic oligonucleotide
aacggcaaccuaacauaaa

SEQ ID NO: 1435481 - RNA, 19 nt, Artificial Sequence
  Description of Artificial Sequence: Synthetic oligonucleotide
caugagucaccaagaccca

SEQ ID NO: 1435482 - RNA, 19 nt, Artificial Sequence
  Description of Artificial Sequence: Synthetic oligonucleotide
cuacuuagguaaggccuug

SEQ ID NO: 1435483 - RNA, 19 nt, Artificial Sequence
  Description of Artificial Sequence: Synthetic oligonucleotide
ggucgggucuuugagacuc

SEQ ID NO: 1435484 - RNA, 19 nt, Artificial Sequence
  Description of Artificial Sequence: Synthetic oligonucleotide
ccuacuuacaagguuccuc

SEQ ID NO: 1435485 - RNA, 19 nt, Artificial Sequence
  Description of Artificial Sequence: Synthetic oligonucleotide
uaagcggcgcggaggccga

SEQ ID NO: 1435486 - RNA, 19 nt, Artificial Sequence
  Description of Artificial Sequence: Synthetic oligonucleotide
uccaguaauccugcaugua

SEQ ID NO: 1435487 - RNA, 19 nt, Artificial Sequence
  Description of Artificial Sequence: Synthetic oligonucleotide
guaauccugcauguacauc

SEQ ID NO: 1435488 - RNA, 19 nt, Artificial Sequence
  Description of Artificial Sequence: Synthetic oligonucleotide
gaggccgagcugcccgccg

SEQ ID NO: 1435489 - RNA, 19 nt, Artificial Sequence
  Description of Artificial Sequence: Synthetic oligonucleotide
gaccacgguccagacgaag

SEQ ID NO: 1435490 - RNA, 19 nt, Artificial Sequence
  Description of Artificial Sequence: Synthetic oligonucleotide
ccagacgaagaagauggag

SEQ ID NO: 1435491 - RNA, 19 nt, Artificial Sequence
  Description of Artificial Sequence: Synthetic oligonucleotide
gucaacuaccugacccuug

SEQ ID NO: 1435492 - RNA, 19 nt, Artificial Sequence
  Description of Artificial Sequence: Synthetic oligonucleotide
uccuacuuacaagguuccu

SEQ ID NO: 1435493 - RNA, 19 nt, Artificial Sequence
  Description of Artificial Sequence: Synthetic oligonucleotide
gacuacagcuguagagcuc

SEQ ID NO: 1435494 - RNA, 19 nt, Artificial Sequence
  Description of Artificial Sequence: Synthetic oligonucleotide
caacuaccugacccuugag

SEQ ID NO: 1435495 - RNA, 19 nt, Artificial Sequence
  Description of Artificial Sequence: Synthetic oligonucleotide
ucgcagcccuuugagccag

SEQ ID NO: 1435496 - RNA, 19 nt, Artificial Sequence
  Description of Artificial Sequence: Synthetic oligonucleotide
gaaaggggaccagauggcu

SEQ ID NO: 1435497 - RNA, 19 nt, Artificial Sequence
  Description of Artificial Sequence: Synthetic oligonucleotide
gcucugguaauaugugguc

SEQ ID NO: 1435498 - RNA, 19 nt, Artificial Sequence
  Description of Artificial Sequence: Synthetic oligonucleotide
ugcccucccucucuacuua

SEQ ID NO: 1435499 - RNA, 19 nt, Artificial Sequence
  Description of Artificial Sequence: Synthetic oligonucleotide
cucuagcacccucauggga

SEQ ID NO: 1435500 - RNA, 19 nt, Artificial Sequence
  Description of Artificial Sequence: Synthetic oligonucleotide
cuggcagugaccccuucaa

SEQ ID NO: 1435501 - RNA, 19 nt, Artificial Sequence
  Description of Artificial Sequence: Synthetic oligonucleotide
guacuaaacugacccggcu

SEQ ID NO: 1435502 - RNA, 19 nt, Artificial Sequence
  Description of Artificial Sequence: Synthetic oligonucleotide
ucgggucuuugagacucug

SEQ ID NO: 1435503 - RNA, 19 nt, Artificial Sequence
  Description of Artificial Sequence: Synthetic oligonucleotide
gccgcuguauuucugcuaa

SEQ ID NO: 1435504 - RNA, 19 nt, Artificial Sequence
  Description of Artificial Sequence: Synthetic oligonucleotide
gguagcggugggcguagag

SEQ ID NO: 1435505 - RNA, 19 nt, Artificial Sequence
  Description of Artificial Sequence: Synthetic oligonucleotide
uugccgcaguccccggcug

SEQ ID NO: 1435506 - RNA, 19 nt, Artificial Sequence
  Description of Artificial Sequence: Synthetic oligonucleotide
auguggucaugugagcaua

SEQ ID NO: 1435507 - RNA, 19 nt, Artificial Sequence
  Description of Artificial Sequence: Synthetic oligonucleotide
cugacccuugaggacaaca

SEQ ID NO: 1435508 - RNA, 19 nt, Artificial Sequence
  Description of Artificial Sequence: Synthetic oligonucleotide
ggaggagagacacuggauu

SEQ ID NO: 1435509 - RNA, 19 nt, Artificial Sequence
  Description of Artificial Sequence: Synthetic oligonucleotide
cacucuuauaguccccucu

SEQ ID NO: 1435510 - RNA, 19 nt, Artificial Sequence
  Description of Artificial Sequence: Synthetic oligonucleotide
uggucgggucuuugagacu

SEQ ID NO: 1435511 - RNA, 19 nt, Artificial Sequence
  Description of Artificial Sequence: Synthetic oligonucleotide
cuggagacucaagacuaca

SEQ ID NO: 1435512 - RNA, 19 nt, Artificial Sequence
  Description of Artificial Sequence: Synthetic oligonucleotide
agucaacuaccugacccuu

SEQ ID NO: 1435513 - RNA, 19 nt, Artificial Sequence
  Description of Artificial Sequence: Synthetic oligonucleotide
caggucuagccucauccaa

SEQ ID NO: 1435514 - RNA, 19 nt, Artificial Sequence
  Description of Artificial Sequence: Synthetic oligonucleotide
cggcaaccuaacauaaaag

SEQ ID NO: 1435515 - RNA, 19 nt, Artificial Sequence
  Description of Artificial Sequence: Synthetic oligonucleotide
acaucacaugagucaccaa

SEQ ID NO: 1435516 - RNA, 19 nt, Artificial Sequence
  Description of Artificial Sequence: Synthetic oligonucleotide
cccauugccgcaguccccg

SEQ ID NO: 1435517 - RNA, 19 nt, Artificial Sequence
  Description of Artificial Sequence: Synthetic oligonucleotide
uccagacgcaggagaggua

SEQ ID NO: 1435518 - RNA, 19 nt, Artificial Sequence
  Description of Artificial Sequence: Synthetic oligonucleotide
cucgcagcccuuugagcca

SEQ ID NO: 1435519 - RNA, 19 nt, Artificial Sequence
  Description of Artificial Sequence: Synthetic oligonucleotide
cucagagugcuaagaaaau

SEQ ID NO: 1435520 - RNA, 19 nt, Artificial Sequence
  Description of Artificial Sequence: Synthetic oligonucleotide
gcccauguccaaaggcugg

SEQ ID NO: 1435521 - RNA, 19 nt, Artificial Sequence
  Description of Artificial Sequence: Synthetic oligonucleotide
agacgcaggagagguagua

SEQ ID NO: 1435522 - RNA, 19 nt, Artificial Sequence
  Description of Artificial Sequence: Synthetic oligonucleotide
gaaugguuggcuggcucua

SEQ ID NO: 1435523 - RNA, 19 nt, Artificial Sequence
  Description of Artificial Sequence: Synthetic oligonucleotide
gcugggugauggccaaugc

SEQ ID NO: 1435524 - RNA, 19 nt, Artificial Sequence
  Description of Artificial Sequence: Synthetic oligonucleotide
gucuagccucauccaagga

SEQ ID NO: 1435525 - RNA, 19 nt, Artificial Sequence
  Description of Artificial Sequence: Synthetic oligonucleotide
gaguccagcucugguaaua

SEQ ID NO: 1435526 - RNA, 19 nt, Artificial Sequence
  Description of Artificial Sequence: Synthetic oligonucleotide
ggcuggagacucaagacua

SEQ ID NO: 1435527 - RNA, 19 nt, Artificial Sequence
  Description of Artificial Sequence: Synthetic oligonucleotide
ggcccauguccaaaggcug

SEQ ID NO: 1435528 - RNA, 19 nt, Artificial Sequence
  Description of Artificial Sequence: Synthetic oligonucleotide
cucccucucuacuuaggua

SEQ ID NO: 1435529 - RNA, 19 nt, Artificial Sequence
  Description of Artificial Sequence: Synthetic oligonucleotide
gcuggucgggucuuugaga

SEQ ID NO: 1435530 - RNA, 19 nt, Artificial Sequence
  Description of Artificial Sequence: Synthetic oligonucleotide
cuaucccaaaacccuugua

SEQ ID NO: 1435531 - RNA, 19 nt, Artificial Sequence
  Description of Artificial Sequence: Synthetic oligonucleotide
gugcuggggugggauuugg

SEQ ID NO: 1435532 - RNA, 19 nt, Artificial Sequence
  Description of Artificial Sequence: Synthetic oligonucleotide
ccucucuacuuagguaagg

SEQ ID NO: 1435533 - RNA, 19 nt, Artificial Sequence
  Description of Artificial Sequence: Synthetic oligonucleotide
aggggaccagauggcuuuc

SEQ ID NO: 1435534 - RNA, 19 nt, Artificial Sequence
  Description of Artificial Sequence: Synthetic oligonucleotide
ggcuuucugggguacuaaa

SEQ ID NO: 1435535 - RNA, 19 nt, Artificial Sequence
  Description of Artificial Sequence: Synthetic oligonucleotide
ccuuacuugaugaaacuuu

SEQ ID NO: 1435536 - RNA, 19 nt, Artificial Sequence
  Description of Artificial Sequence: Synthetic oligonucleotide
cccucucuacuuagguaag

SEQ ID NO: 1435537 - RNA, 19 nt, Artificial Sequence
  Description of Artificial Sequence: Synthetic oligonucleotide
cagugguccucaggucuag

SEQ ID NO: 1435538 - RNA, 19 nt, Artificial Sequence
  Description of Artificial Sequence: Synthetic oligonucleotide
cuacagcuguagagcucuc

SEQ ID NO: 1435539 - RNA, 19 nt, Artificial Sequence
  Description of Artificial Sequence: Synthetic oligonucleotide
cuccagacgcaggagaggu

SEQ ID NO: 1435540 - RNA, 19 nt, Artificial Sequence
  Description of Artificial Sequence: Synthetic oligonucleotide
cagcccuuugagccagguc

SEQ ID NO: 1435541 - RNA, 19 nt, Artificial Sequence
  Description of Artificial Sequence: Synthetic oligonucleotide
gccaauugucacuucccua

SEQ ID NO: 1435542 - RNA, 19 nt, Artificial Sequence
  Description of Artificial Sequence: Synthetic oligonucleotide
ccccucucaaguccccucc

SEQ ID NO: 1435543 - RNA, 19 nt, Artificial Sequence
  Description of Artificial Sequence: Synthetic oligonucleotide
ccuaacauaaaaggaugua

SEQ ID NO: 1435544 - RNA, 19 nt, Artificial Sequence
  Description of Artificial Sequence: Synthetic oligonucleotide
gggguauguuuccaguggu

SEQ ID NO: 1435545 - RNA, 19 nt, Artificial Sequence
  Description of Artificial Sequence: Synthetic oligonucleotide
uccccggcugucgguagac

SEQ ID NO: 1435546 - RNA, 19 nt, Artificial Sequence
  Description of Artificial Sequence: Synthetic oligonucleotide
augaagucuggggcagcaa

SEQ ID NO: 1435547 - RNA, 19 nt, Artificial Sequence
  Description of Artificial Sequence: Synthetic oligonucleotide
gaacacccacgaagaagaa

SEQ ID NO: 1435548 - RNA, 19 nt, Artificial Sequence
  Description of Artificial Sequence: Synthetic oligonucleotide
cacgguucuggagucccca

SEQ ID NO: 1435549 - RNA, 19 nt, Artificial Sequence
  Description of Artificial Sequence: Synthetic oligonucleotide
acucaagacuacagcugua

SEQ ID NO: 1435550 - RNA, 19 nt, Artificial Sequence
  Description of Artificial Sequence: Synthetic oligonucleotide
acccggcugccuaugcucu

SEQ ID NO: 1435551 - RNA, 19 nt, Artificial Sequence
  Description of Artificial Sequence: Synthetic oligonucleotide
ggcuaaugggcaggcuggc

SEQ ID NO: 1435552 - RNA, 19 nt, Artificial Sequence
  Description of Artificial Sequence: Synthetic oligonucleotide
cgagcugcccgccgggacg

SEQ ID NO: 1435553 - RNA, 19 nt, Artificial Sequence
  Description of Artificial Sequence: Synthetic oligonucleotide
aaacacccugaggcugaua

SEQ ID NO: 1435554 - RNA, 19 nt, Artificial Sequence
  Description of Artificial Sequence: Synthetic oligonucleotide
cgccaagaaacacccugag

SEQ ID NO: 1435555 - RNA, 19 nt, Artificial Sequence
  Description of Artificial Sequence: Synthetic oligonucleotide
cauuaucgugguccuacuu

SEQ ID NO: 1435556 - RNA, 19 nt, Artificial Sequence
  Description of Artificial Sequence: Synthetic oligonucleotide
gcagggguauguuuccagu

SEQ ID NO: 1435557 - RNA, 19 nt, Artificial Sequence
  Description of Artificial Sequence: Synthetic oligonucleotide
ggcugucgguagaccacgg

SEQ ID NO: 1435558 - RNA, 19 nt, Artificial Sequence
  Description of Artificial Sequence: Synthetic oligonucleotide
aggcuggagugaucucauu

SEQ ID NO: 1435559 - RNA, 19 nt, Artificial Sequence
  Description of Artificial Sequence: Synthetic oligonucleotide
gugguccuacuuacaaggu

SEQ ID NO: 1435560 - RNA, 19 nt, Artificial Sequence
  Description of Artificial Sequence: Synthetic oligonucleotide
cagguccuccaguaauccu

SEQ ID NO: 1435561 - RNA, 19 nt, Artificial Sequence
  Description of Artificial Sequence: Synthetic oligonucleotide
cagcccgguagcggugggc

SEQ ID NO: 1435562 - RNA, 19 nt, Artificial Sequence
  Description of Artificial Sequence: Synthetic oligonucleotide
ccacgguucuggagucccc

SEQ ID NO: 1435563 - RNA, 19 nt, Artificial Sequence
  Description of Artificial Sequence: Synthetic oligonucleotide
aagaagccucgcagcccuu

SEQ ID NO: 1435564 - RNA, 19 nt, Artificial Sequence
  Description of Artificial Sequence: Synthetic oligonucleotide
guaggugcagggguauguu

SEQ ID NO: 1435565 - RNA, 19 nt, Artificial Sequence
  Description of Artificial Sequence: Synthetic oligonucleotide
ccacgguccagacgaagaa

SEQ ID NO: 1435566 - RNA, 19 nt, Artificial Sequence
  Description of Artificial Sequence: Synthetic oligonucleotide
ggccgcuguauuucugcua

SEQ ID NO: 1435567 - RNA, 19 nt, Artificial Sequence
  Description of Artificial Sequence: Synthetic oligonucleotide
cgcaguccccggcugucgg

SEQ ID NO: 1435568 - RNA, 19 nt, Artificial Sequence
  Description of Artificial Sequence: Synthetic oligonucleotide
gcguagaggcugaguagga

SEQ ID NO: 1435569 - RNA, 19 nt, Artificial Sequence
  Description of Artificial Sequence: Synthetic oligonucleotide
cccacuugagagagaugaa

SEQ ID NO: 1435570 - RNA, 19 nt, Artificial Sequence
  Description of Artificial Sequence: Synthetic oligonucleotide
cagacgcaggagagguagu

SEQ ID NO: 1435571 - RNA, 19 nt, Artificial Sequence
  Description of Artificial Sequence: Synthetic oligonucleotide
ccuaucccaaaacccuugu

SEQ ID NO: 1435572 - RNA, 19 nt, Artificial Sequence
  Description of Artificial Sequence: Synthetic oligonucleotide
ccuuguccacucuuauagu

SEQ ID NO: 1435573 - RNA, 19 nt, Artificial Sequence
  Description of Artificial Sequence: Synthetic oligonucleotide
ccucccucucuacuuaggu

SEQ ID NO: 1435574 - RNA, 19 nt, Artificial Sequence
  Description of Artificial Sequence: Synthetic oligonucleotide
ccagaguaagcggcgcgga

SEQ ID NO: 1435575 - RNA, 19 nt, Artificial Sequence
  Description of Artificial Sequence: Synthetic oligonucleotide
ggaggccgagcugcccgcc

SEQ ID NO: 1435576 - RNA, 19 nt, Artificial Sequence
  Description of Artificial Sequence: Synthetic oligonucleotide
caguccccggcugucggua

SEQ ID NO: 1435577 - RNA, 19 nt, Artificial Sequence
  Description of Artificial Sequence: Synthetic oligonucleotide
cgguagaccacgguccaga

SEQ ID NO: 1435578 - RNA, 19 nt, Artificial Sequence
  Description of Artificial Sequence: Synthetic oligonucleotide
caggaaugguuggcuggcu

SEQ ID NO: 1435579 - RNA, 19 nt, Artificial Sequence
  Description of Artificial Sequence: Synthetic oligonucleotide
gucgggucuuugagacucu

SEQ ID NO: 1435580 - RNA, 19 nt, Artificial Sequence
  Description of Artificial Sequence: Synthetic oligonucleotide
gcccuuugagccagguccu

SEQ ID NO: 1435581 - RNA, 19 nt, Artificial Sequence
  Description of Artificial Sequence: Synthetic oligonucleotide
gccuaugcucugccacggu

SEQ ID NO: 1435582 - RNA, 19 nt, Artificial Sequence
  Description of Artificial Sequence: Synthetic oligonucleotide
gcggcgcggaggccgagcu

SEQ ID NO: 1435583 - RNA, 19 nt, Artificial Sequence
  Description of Artificial Sequence: Synthetic oligonucleotide
ccccuaucccaaaacccuu

SEQ ID NO: 1435584 - RNA, 19 nt, Artificial Sequence
  Description of Artificial Sequence: Synthetic oligonucleotide
cgccgggacggggccaugg

SEQ ID NO: 1435585 - RNA, 19 nt, Artificial Sequence
  Description of Artificial Sequence: Synthetic oligonucleotide
ggggaccagauggcuuucu

SEQ ID NO: 1435586 - RNA, 19 nt, Artificial Sequence
  Description of Artificial Sequence: Synthetic oligonucleotide
ccgcuguauuucugcuaaa

SEQ ID NO: 1435587 - RNA, 19 nt, Artificial Sequence
  Description of Artificial Sequence: Synthetic oligonucleotide
gguaaggccuugggcccau

SEQ ID NO: 1435588 - RNA, 19 nt, Artificial Sequence
  Description of Artificial Sequence: Synthetic oligonucleotide
gguuuggggcaggcucacu

SEQ ID NO: 1435589 - RNA, 19 nt, Artificial Sequence
  Description of Artificial Sequence: Synthetic oligonucleotide
gccgagcugcccgccggga

SEQ ID NO: 1435590 - RNA, 19 nt, Artificial Sequence
  Description of Artificial Sequence: Synthetic oligonucleotide
ccucgccaagaaacacccu

SEQ ID NO: 1435591 - RNA, 19 nt, Artificial Sequence
  Description of Artificial Sequence: Synthetic oligonucleotide
cgguccagacgaagaagau

SEQ ID NO: 1435592 - RNA, 19 nt, Artificial Sequence
  Description of Artificial Sequence: Synthetic oligonucleotide
gcccucuagccaggcuaau

SEQ ID NO: 1435593 - RNA, 19 nt, Artificial Sequence
  Description of Artificial Sequence: Synthetic oligonucleotide
ccgccgggacggggccaug

SEQ ID NO: 1435594 - RNA, 19 nt, Artificial Sequence
  Description of Artificial Sequence: Synthetic oligonucleotide
cccgccgggacggggccau

SEQ ID NO: 1435595 - RNA, 19 nt, Artificial Sequence
  Description of Artificial Sequence: Synthetic oligonucleotide
aacaggaccacacauaacc

SEQ ID NO: 1435596 - RNA, 19 nt, Artificial Sequence
  Description of Artificial Sequence: Synthetic oligonucleotide
aauauuacacgcucgggcc

SEQ ID NO: 1435597 - RNA, 19 nt, Artificial Sequence
  Description of Artificial Sequence: Synthetic oligonucleotide
acaauaaucggucuaaagg

SEQ ID NO: 1435598 - RNA, 19 nt, Artificial Sequence
  Description of Artificial Sequence: Synthetic oligonucleotide
uauacuaugcacauuuggg

SEQ ID NO: 1435599 - RNA, 19 nt, Artificial Sequence
  Description of Artificial Sequence: Synthetic oligonucleotide
aaucucauggacuacuggg

SEQ ID NO: 1435600 - RNA, 19 nt, Artificial Sequence
  Description of Artificial Sequence: Synthetic oligonucleotide
aauacauauugucuggcuc

SEQ ID NO: 1435601 - RNA, 19 nt, Artificial Sequence
  Description of Artificial Sequence: Synthetic oligonucleotide
aagaauuaaaucuccagca

SEQ ID NO: 1435602 - RNA, 19 nt, Artificial Sequence
  Description of Artificial Sequence: Synthetic oligonucleotide
aaaaggaucgguguauugc

SEQ ID NO: 1435603 - RNA, 19 nt, Artificial Sequence
  Description of Artificial Sequence: Synthetic oligonucleotide
uaugaugaauauuacacgc

SEQ ID NO: 1435604 - RNA, 19 nt, Artificial Sequence
  Description of Artificial Sequence: Synthetic oligonucleotide
aaauagauguaacagcugu

SEQ ID NO: 1435605 - RNA, 19 nt, Artificial Sequence
  Description of Artificial Sequence: Synthetic oligonucleotide
auaagguugaaauuauuuc

SEQ ID NO: 1435606 - RNA, 19 nt, Artificial Sequence
  Description of Artificial Sequence: Synthetic oligonucleotide
aaaauugcccaucaauaag

SEQ ID NO: 1435607 - RNA, 19 nt, Artificial Sequence
  Description of Artificial Sequence: Synthetic oligonucleotide
aaaauagggcaucugcgcg

SEQ ID NO: 1435608 - RNA, 19 nt, Artificial Sequence
  Description of Artificial Sequence: Synthetic oligonucleotide
uauuggacuauaaugacac

SEQ ID NO: 1435609 - RNA, 19 nt, Artificial Sequence
  Description of Artificial Sequence: Synthetic oligonucleotide
uuaugaugaauauuacacg

SEQ ID NO: 1435610 - RNA, 19 nt, Artificial Sequence
  Description of Artificial Sequence: Synthetic oligonucleotide
caauaaucggucuaaaggc

SEQ ID NO: 1435611 - RNA, 19 nt, Artificial Sequence
  Description of Artificial Sequence: Synthetic oligonucleotide
uaucauagcauucauuucu

SEQ ID NO: 1435612 - RNA, 19 nt, Artificial Sequence
  Description of Artificial Sequence: Synthetic oligonucleotide
uugcccaucaauaagguug

SEQ ID NO: 1435613 - RNA, 19 nt, Artificial Sequence
  Description of Artificial Sequence: Synthetic oligonucleotide
cucgauuagaauuuauugg

SEQ ID NO: 1435614 - RNA, 19 nt, Artificial Sequence
  Description of Artificial Sequence: Synthetic oligonucleotide
uggcaagcaaacaagacag

SEQ ID NO: 1435615 - RNA, 19 nt, Artificial Sequence
  Description of Artificial Sequence: Synthetic oligonucleotide
uugaaauuauuuccuaaag

SEQ ID NO: 1435616 - RNA, 19 nt, Artificial Sequence
  Description of Artificial Sequence: Synthetic oligonucleotide
aaauagggcaucugcgcgc

SEQ ID NO: 1435617 - RNA, 19 nt, Artificial Sequence
  Description of Artificial Sequence: Synthetic oligonucleotide
ucuguaauacauauugucu

SEQ ID NO: 1435618 - RNA, 19 nt, Artificial Sequence
  Description of Artificial Sequence: Synthetic oligonucleotide
ucgauuagaauuuauugga

SEQ ID NO: 1435619 - RNA, 19 nt, Artificial Sequence
  Description of Artificial Sequence: Synthetic oligonucleotide
ugaaauuauuuccuaaagu

SEQ ID NO: 1435620 - RNA, 19 nt, Artificial Sequence
  Description of Artificial Sequence: Synthetic oligonucleotide
aaauugcccaucaauaagg

SEQ ID NO: 1435621 - RNA, 19 nt, Artificial Sequence
  Description of Artificial Sequence: Synthetic oligonucleotide
ugcaauuaaggcuacggag

SEQ ID NO: 1435622 - RNA, 19 nt, Artificial Sequence
  Description of Artificial Sequence: Synthetic oligonucleotide
uguuucacaaaauucauua

SEQ ID NO: 1435623 - RNA, 19 nt, Artificial Sequence
  Description of Artificial Sequence: Synthetic oligonucleotide
cuaaaauagggcaucugcg

SEQ ID NO: 1435624 - RNA, 19 nt, Artificial Sequence
  Description of Artificial Sequence: Synthetic oligonucleotide
uguguaauggcuuuccaug

SEQ ID NO: 1435625 - RNA, 19 nt, Artificial Sequence
  Description of Artificial Sequence: Synthetic oligonucleotide
gaauauuacacgcucgggc

SEQ ID NO: 1435626 - RNA, 19 nt, Artificial Sequence
  Description of Artificial Sequence: Synthetic oligonucleotide
ucaugaaccagacuagcag

SEQ ID NO: 1435627 - RNA, 19 nt, Artificial Sequence
  Description of Artificial Sequence: Synthetic oligonucleotide
uuuucuuucgacccuagcu

SEQ ID NO: 1435628 - RNA, 19 nt, Artificial Sequence
  Description of Artificial Sequence: Synthetic oligonucleotide
uguguuuccaauccgugcc

SEQ ID NO: 1435629 - RNA, 19 nt, Artificial Sequence
  Description of Artificial Sequence: Synthetic oligonucleotide
cacauaaccaucaggauac

SEQ ID NO: 1435630 - RNA, 19 nt, Artificial Sequence
  Description of Artificial Sequence: Synthetic oligonucleotide
acuugcaucgucaauaacg

SEQ ID NO: 1435631 - RNA, 19 nt, Artificial Sequence
  Description of Artificial Sequence: Synthetic oligonucleotide
uuucuuucgacccuagcug

SEQ ID NO: 1435632 - RNA, 19 nt, Artificial Sequence
  Description of Artificial Sequence: Synthetic oligonucleotide
ucuucaauaacuuggguua

SEQ ID NO: 1435633 - RNA, 19 nt, Artificial Sequence
  Description of Artificial Sequence: Synthetic oligonucleotide
augaauauuacacgcucgg

SEQ ID NO: 1435634 - RNA, 19 nt, Artificial Sequence
  Description of Artificial Sequence: Synthetic oligonucleotide
ucacuaggcuaaaauaggg

SEQ ID NO: 1435635 - RNA, 19 nt, Artificial Sequence
  Description of Artificial Sequence: Synthetic oligonucleotide
uaaaauagggcaucugcgc

SEQ ID NO: 1435636 - RNA, 19 nt, Artificial Sequence
  Description of Artificial Sequence: Synthetic oligonucleotide
uucuaaugucuucauacag

SEQ ID NO: 1435637 - RNA, 19 nt, Artificial Sequence
  Description of Artificial Sequence: Synthetic oligonucleotide
guaguauucggacaugucc

SEQ ID NO: 1435638 - RNA, 19 nt, Artificial Sequence
  Description of Artificial Sequence: Synthetic oligonucleotide
uccaauacaucaucuauga

SEQ ID NO: 1435639 - RNA, 19 nt, Artificial Sequence
  Description of Artificial Sequence: Synthetic oligonucleotide
uuugaggaaacugugauau

SEQ ID NO: 1435640 - RNA, 19 nt, Artificial Sequence
  Description of Artificial Sequence: Synthetic oligonucleotide
uuugguuaucugcacauga

SEQ ID NO: 1435641 - RNA, 19 nt, Artificial Sequence
  Description of Artificial Sequence: Synthetic oligonucleotide
ucauuuaucucuugugagc

SEQ ID NO: 1435642 - RNA, 19 nt, Artificial Sequence
  Description of Artificial Sequence: Synthetic oligonucleotide
cauagcauucauuucuggg

SEQ ID NO: 1435643 - RNA, 19 nt, Artificial Sequence
  Description of Artificial Sequence: Synthetic oligonucleotide
aagaacaggaagaauuguc

SEQ ID NO: 1435644 - RNA, 19 nt, Artificial Sequence
  Description of Artificial Sequence: Synthetic oligonucleotide
ucugcaauuaaggcuacgg

SEQ ID NO: 1435645 - RNA, 19 nt, Artificial Sequence
  Description of Artificial Sequence: Synthetic oligonucleotide
gaagaaauucaccacgcac

SEQ ID NO: 1435646 - RNA, 19 nt, Artificial Sequence
  Description of Artificial Sequence: Synthetic oligonucleotide
auauugucuggcucugucc

SEQ ID NO: 1435647 - RNA, 19 nt, Artificial Sequence
  Description of Artificial Sequence: Synthetic oligonucleotide
aaaggaucgguguauugcu

SEQ ID NO: 1435648 - RNA, 19 nt, Artificial Sequence
  Description of Artificial Sequence: Synthetic oligonucleotide
auagcauucauuucuggga

SEQ ID NO: 1435649 - RNA, 19 nt, Artificial Sequence
  Description of Artificial Sequence: Synthetic oligonucleotide
acuaggcuaaaauagggca

SEQ ID NO: 1435650 - RNA, 19 nt, Artificial Sequence
  Description of Artificial Sequence: Synthetic oligonucleotide
uccagccaaguuuaaaagg

SEQ ID NO: 1435651 - RNA, 19 nt, Artificial Sequence
  Description of Artificial Sequence: Synthetic oligonucleotide
augaggugaaguccaauac

SEQ ID NO: 1435652 - RNA, 19 nt, Artificial Sequence
  Description of Artificial Sequence: Synthetic oligonucleotide
aguuuaaaaggaucggugu

SEQ ID NO: 1435653 - RNA, 19 nt, Artificial Sequence
  Description of Artificial Sequence: Synthetic oligonucleotide
uucauacagaccuuucaag

SEQ ID NO: 1435654 - RNA, 19 nt, Artificial Sequence
  Description of Artificial Sequence: Synthetic oligonucleotide
ucauacagaccuuucaagu

SEQ ID NO: 1435655 - RNA, 19 nt, Artificial Sequence
  Description of Artificial Sequence: Synthetic oligonucleotide
ugggcauuaacaauguaaa

SEQ ID NO: 1435656 - RNA, 19 nt, Artificial Sequence
  Description of Artificial Sequence: Synthetic oligonucleotide
cuuggguuaaaauagaugu

SEQ ID NO: 1435657 - RNA, 19 nt, Artificial Sequence
  Description of Artificial Sequence: Synthetic oligonucleotide
aaguuuaaaaggaucggug

SEQ ID NO: 1435658 - RNA, 19 nt, Artificial Sequence
  Description of Artificial Sequence: Synthetic oligonucleotide
uaguauucggacauguccu

SEQ ID NO: 1435659 - RNA, 19 nt, Artificial Sequence
  Description of Artificial Sequence: Synthetic oligonucleotide
aaaaccgauguuaaagucu

SEQ ID NO: 1435660 - RNA, 19 nt, Artificial Sequence
  Description of Artificial Sequence: Synthetic oligonucleotide
gaugaauauuacacgcucg

SEQ ID NO: 1435661 - RNA, 19 nt, Artificial Sequence
  Description of Artificial Sequence: Synthetic oligonucleotide
gaucauuucugcaauuaag

SEQ ID NO: 1435662 - RNA, 19 nt, Artificial Sequence
  Description of Artificial Sequence: Synthetic oligonucleotide
uauugucuggcucugucca

SEQ ID NO: 1435663 - RNA, 19 nt, Artificial Sequence
  Description of Artificial Sequence: Synthetic oligonucleotide
ugcacaugaagcaaauagu

SEQ ID NO: 1435664 - RNA, 19 nt, Artificial Sequence
  Description of Artificial Sequence: Synthetic oligonucleotide
auuuguguaauggcuuucc

SEQ ID NO: 1435665 - RNA, 19 nt, Artificial Sequence
  Description of Artificial Sequence: Synthetic oligonucleotide
ugaggaaacugugauauac

SEQ ID NO: 1435666 - RNA, 19 nt, Artificial Sequence
  Description of Artificial Sequence: Synthetic oligonucleotide
auacauauugucuggcucu

SEQ ID NO: 1435667 - RNA, 19 nt, Artificial Sequence
  Description of Artificial Sequence: Synthetic oligonucleotide
auacuaugcacauuuggga

SEQ ID NO: 1435668 - RNA, 19 nt, Artificial Sequence
  Description of Artificial Sequence: Synthetic oligonucleotide
ugugauauacuaugcacau

SEQ ID NO: 1435669 - RNA, 19 nt, Artificial Sequence
  Description of Artificial Sequence: Synthetic oligonucleotide
aauagcugccagaaagaac

SEQ ID NO: 1435670 - RNA, 19 nt, Artificial Sequence
  Description of Artificial Sequence: Synthetic oligonucleotide
agaaaguuggaugagggca

SEQ ID NO: 1435671 - RNA, 19 nt, Artificial Sequence
  Description of Artificial Sequence: Synthetic oligonucleotide
aucaauaagguugaaauua

SEQ ID NO: 1435672 - RNA, 19 nt, Artificial Sequence
  Description of Artificial Sequence: Synthetic oligonucleotide
guaauggcuuuccaugugg

SEQ ID NO: 1435673 - RNA, 19 nt, Artificial Sequence
  Description of Artificial Sequence: Synthetic oligonucleotide
auaaccaucaggauaccuc

SEQ ID NO: 1435674 - RNA, 19 nt, Artificial Sequence
  Description of Artificial Sequence: Synthetic oligonucleotide
aaacugaaccgucucauua

SEQ ID NO: 1435675 - RNA, 19 nt, Artificial Sequence
  Description of Artificial Sequence: Synthetic oligonucleotide
uguggcuaagccuagcuuc

SEQ ID NO: 1435676 - RNA, 19 nt, Artificial Sequence
  Description of Artificial Sequence: Synthetic oligonucleotide
uguuugacuacaacagcac

SEQ ID NO: 1435677 - RNA, 19 nt, Artificial Sequence
  Description of Artificial Sequence: Synthetic oligonucleotide
ugcuuuacaacuguuggcu

SEQ ID NO: 1435678 - RNA, 19 nt, Artificial Sequence
  Description of Artificial Sequence: Synthetic oligonucleotide
cugaagaaauucaccacgc

SEQ ID NO: 1435679 - RNA, 19 nt, Artificial Sequence
  Description of Artificial Sequence: Synthetic oligonucleotide
uccaauccgugccagaacu

SEQ ID NO: 1435680 - RNA, 19 nt, Artificial Sequence
  Description of Artificial Sequence: Synthetic oligonucleotide
aauaaucggucuaaaggcu

SEQ ID NO: 1435681 - RNA, 19 nt, Artificial Sequence
  Description of Artificial Sequence: Synthetic oligonucleotide
uaucucgggaguuauuaug

SEQ ID NO: 1435682 - RNA, 19 nt, Artificial Sequence
  Description of Artificial Sequence: Synthetic oligonucleotide
aauuaaggcuacggagcgc

SEQ ID NO: 1435683 - RNA, 19 nt, Artificial Sequence
  Description of Artificial Sequence: Synthetic oligonucleotide
gaaggucuuuucaagguag

SEQ ID NO: 1435684 - RNA, 19 nt, Artificial Sequence
  Description of Artificial Sequence: Synthetic oligonucleotide
agcaaauaguguuucacaa

SEQ ID NO: 1435685 - RNA, 19 nt, Artificial Sequence
  Description of Artificial Sequence: Synthetic oligonucleotide
guuaucugcacaugaagca

SEQ ID NO: 1435686 - RNA, 19 nt, Artificial Sequence
  Description of Artificial Sequence: Synthetic oligonucleotide
gcuaaaauagggcaucugc

SEQ ID NO: 1435687 - RNA, 19 nt, Artificial Sequence
  Description of Artificial Sequence: Synthetic oligonucleotide
caucuaugagcugaaaagc

SEQ ID NO: 1435688 - RNA, 19 nt, Artificial Sequence
  Description of Artificial Sequence: Synthetic oligonucleotide
gaaaaccgauguuaaaguc

SEQ ID NO: 1435689 - RNA, 19 nt, Artificial Sequence
  Description of Artificial Sequence: Synthetic oligonucleotide
guauguuuuccucuucgag

SEQ ID NO: 1435690 - RNA, 19 nt, Artificial Sequence
  Description of Artificial Sequence: Synthetic oligonucleotide
ugaauauuacacgcucggg

SEQ ID NO: 1435691 - RNA, 19 nt, Artificial Sequence
  Description of Artificial Sequence: Synthetic oligonucleotide
uuuaaaaggaucgguguau

SEQ ID NO: 1435692 - RNA, 19 nt, Artificial Sequence
  Description of Artificial Sequence: Synthetic oligonucleotide
uguaauggcuuuccaugug

SEQ ID NO: 1435693 - RNA, 19 nt, Artificial Sequence
  Description of Artificial Sequence: Synthetic oligonucleotide
gaagcaaauaguguuucac

SEQ ID NO: 1435694 - RNA, 19 nt, Artificial Sequence
  Description of Artificial Sequence: Synthetic oligonucleotide
ggugaaguccaauacauca

SEQ ID NO: 1435695 - RNA, 19 nt, Artificial Sequence
  Description of Artificial Sequence: Synthetic oligonucleotide
guugaaauuauuuccuaaa

SEQ ID NO: 1435696 - RNA, 19 nt, Artificial Sequence
  Description of Artificial Sequence: Synthetic oligonucleotide
aauagggcaucugcgcgcg

SEQ ID NO: 1435697 - RNA, 19 nt, Artificial Sequence
  Description of Artificial Sequence: Synthetic oligonucleotide
auaacgucaucaugaacca

SEQ ID NO: 1435698 - RNA, 19 nt, Artificial Sequence
  Description of Artificial Sequence: Synthetic oligonucleotide
agaacuauggacgcugcag

SEQ ID NO: 1435699 - RNA, 19 nt, Artificial Sequence
  Description of Artificial Sequence: Synthetic oligonucleotide
agcaccacaauaaucgguc

SEQ ID NO: 1435700 - RNA, 19 nt, Artificial Sequence
  Description of Artificial Sequence: Synthetic oligonucleotide
ucuaugagcugaaaagcua

SEQ ID NO: 1435701 - RNA, 19 nt, Artificial Sequence
  Description of Artificial Sequence: Synthetic oligonucleotide
agaauuaaaucuccagcaa

SEQ ID NO: 1435702 - RNA, 19 nt, Artificial Sequence
  Description of Artificial Sequence: Synthetic oligonucleotide
uuucaagucucuccagcca

SEQ ID NO: 1435703 - RNA, 19 nt, Artificial Sequence
  Description of Artificial Sequence: Synthetic oligonucleotide
guagguuguuuguugcacg

SEQ ID NO: 1435704 - RNA, 19 nt, Artificial Sequence
  Description of Artificial Sequence: Synthetic oligonucleotide
gauuagaauuuauuggacu

SEQ ID NO: 1435705 - RNA, 19 nt, Artificial Sequence
  Description of Artificial Sequence: Synthetic oligonucleotide
cauacagaccuuucaaguc

SEQ ID NO: 1435706 - RNA, 19 nt, Artificial Sequence
  Description of Artificial Sequence: Synthetic oligonucleotide
aauagauguaacagcugug

SEQ ID NO: 1435707 - RNA, 19 nt, Artificial Sequence
  Description of Artificial Sequence: Synthetic oligonucleotide
auuuaucucuugugagcac

SEQ ID NO: 1435708 - RNA, 19 nt, Artificial Sequence
  Description of Artificial Sequence: Synthetic oligonucleotide
aacuugcaucgucaauaac

SEQ ID NO: 1435709 - RNA, 19 nt, Artificial Sequence
  Description of Artificial Sequence: Synthetic oligonucleotide
aacugaaccgucucauuau

SEQ ID NO: 1435710 - RNA, 19 nt, Artificial Sequence
  Description of Artificial Sequence: Synthetic oligonucleotide
uuugccaucgaaguaguau

SEQ ID NO: 1435711 - RNA, 19 nt, Artificial Sequence
  Description of Artificial Sequence: Synthetic oligonucleotide
cacuaggcuaaaauagggc

SEQ ID NO: 1435712 - RNA, 19 nt, Artificial Sequence
  Description of Artificial Sequence: Synthetic oligonucleotide
acacgcucgggccauuagc

SEQ ID NO: 1435713 - RNA, 19 nt, Artificial Sequence
  Description of Artificial Sequence: Synthetic oligonucleotide
gccaaguuuaaaaggaucg

SEQ ID NO: 1435714 - RNA, 19 nt, Artificial Sequence
  Description of Artificial Sequence: Synthetic oligonucleotide
ggcauuaacaauguaaaca

SEQ ID NO: 1435715 - RNA, 19 nt, Artificial Sequence
  Description of Artificial Sequence: Synthetic oligonucleotide
uuuguguaauggcuuucca

SEQ ID NO: 1435716 - RNA, 19 nt, Artificial Sequence
  Description of Artificial Sequence: Synthetic oligonucleotide
gagguagguuguuuguugc

SEQ ID NO: 1435717 - RNA, 19 nt, Artificial Sequence
  Description of Artificial Sequence: Synthetic oligonucleotide
uucaagucucuccagccaa

SEQ ID NO: 1435718 - RNA, 19 nt, Artificial Sequence
  Description of Artificial Sequence: Synthetic oligonucleotide
uagguuguuuguugcacgc

SEQ ID NO: 1435719 - RNA, 19 nt, Artificial Sequence
  Description of Artificial Sequence: Synthetic oligonucleotide
gggaaaaccgauguuaaag

SEQ ID NO: 1435720 - RNA, 19 nt, Artificial Sequence
  Description of Artificial Sequence: Synthetic oligonucleotide
aucaggauaccucgauuag

SEQ ID NO: 1435721 - RNA, 19 nt, Artificial Sequence
  Description of Artificial Sequence: Synthetic oligonucleotide
ucggacauguccuucaauu

SEQ ID NO: 1435722 - RNA, 19 nt, Artificial Sequence
  Description of Artificial Sequence: Synthetic oligonucleotide
aaccagacuagcagugugg

SEQ ID NO: 1435723 - RNA, 19 nt, Artificial Sequence
  Description of Artificial Sequence: Synthetic oligonucleotide
uucuuucgacccuagcuga

SEQ ID NO: 1435724 - RNA, 19 nt, Artificial Sequence
  Description of Artificial Sequence: Synthetic oligonucleotide
cucuucgagaacuugcauc

SEQ ID NO: 1435725 - RNA, 19 nt, Artificial Sequence
  Description of Artificial Sequence: Synthetic oligonucleotide
auuaaggcuacggagcgcu

SEQ ID NO: 1435726 - RNA, 19 nt, Artificial Sequence
  Description of Artificial Sequence: Synthetic oligonucleotide
cugugauauacuaugcaca

SEQ ID NO: 1435727 - RNA, 19 nt, Artificial Sequence
  Description of Artificial Sequence: Synthetic oligonucleotide
uuauuuguguaauggcuuu

SEQ ID NO: 1435728 - RNA, 19 nt, Artificial Sequence
  Description of Artificial Sequence: Synthetic oligonucleotide
cauuagcaccacaauaauc

SEQ ID NO: 1435729 - RNA, 19 nt, Artificial Sequence
  Description of Artificial Sequence: Synthetic oligonucleotide
auacugauaggcaaucuca

SEQ ID NO: 1435730 - RNA, 19 nt, Artificial Sequence
  Description of Artificial Sequence: Synthetic oligonucleotide
ugaaccgucucauuaucau

SEQ ID NO: 1435731 - RNA, 19 nt, Artificial Sequence
  Description of Artificial Sequence: Synthetic oligonucleotide
gaacuauggacgcugcaga

SEQ ID NO: 1435732 - RNA, 19 nt, Artificial Sequence
  Description of Artificial Sequence: Synthetic oligonucleotide
ucugggaacugcuggcaag

SEQ ID NO: 1435733 - RNA, 19 nt, Artificial Sequence
  Description of Artificial Sequence: Synthetic oligonucleotide
cagacuagcaguguggauc

SEQ ID NO: 1435734 - RNA, 19 nt, Artificial Sequence
  Description of Artificial Sequence: Synthetic oligonucleotide
ugcuggcaagcaaacaaga

SEQ ID NO: 1435735 - RNA, 19 nt, Artificial Sequence
  Description of Artificial Sequence: Synthetic oligonucleotide
uggcuugcccaucugguca

SEQ ID NO: 1435736 - RNA, 19 nt, Artificial Sequence
  Description of Artificial Sequence: Synthetic oligonucleotide
uuucgacccuagcugaaga

SEQ ID NO: 1435737 - RNA, 19 nt, Artificial Sequence
  Description of Artificial Sequence: Synthetic oligonucleotide
uuaucucuugugagcacac

SEQ ID NO: 1435738 - RNA, 19 nt, Artificial Sequence
  Description of Artificial Sequence: Synthetic oligonucleotide
aucgguguauugcucacca

SEQ ID NO: 1435739 - RNA, 19 nt, Artificial Sequence
  Description of Artificial Sequence: Synthetic oligonucleotide
cgugccagaacuauggacg

SEQ ID NO: 1435740 - RNA, 19 nt, Artificial Sequence
  Description of Artificial Sequence: Synthetic oligonucleotide
uuguguaauggcuuuccau

SEQ ID NO: 1435741 - RNA, 19 nt, Artificial Sequence
  Description of Artificial Sequence: Synthetic oligonucleotide
aacuauggacgcugcagaa

SEQ ID NO: 1435742 - RNA, 19 nt, Artificial Sequence
  Description of Artificial Sequence: Synthetic oligonucleotide
accgucucauuaucauagc

SEQ ID NO: 1435743 - RNA, 19 nt, Artificial Sequence
  Description of Artificial Sequence: Synthetic oligonucleotide
aggaagaauugucauuuau

SEQ ID NO: 1435744 - RNA, 19 nt, Artificial Sequence
  Description of Artificial Sequence: Synthetic oligonucleotide
guaauacauauugucuggc

SEQ ID NO: 1435745 - RNA, 19 nt, Artificial Sequence
  Description of Artificial Sequence: Synthetic oligonucleotide
gguuaucugcacaugaagc

SEQ ID NO: 1435746 - RNA, 19 nt, Artificial Sequence
  Description of Artificial Sequence: Synthetic oligonucleotide
cuggcaagcaaacaagaca

SEQ ID NO: 1435747 - RNA, 19 nt, Artificial Sequence
  Description of Artificial Sequence: Synthetic oligonucleotide
uaaggcuacggagcgcugg

SEQ ID NO: 1435748 - RNA, 19 nt, Artificial Sequence
  Description of Artificial Sequence: Synthetic oligonucleotide
uuggguuaaaauagaugua

SEQ ID NO: 1435749 - RNA, 19 nt, Artificial Sequence
  Description of Artificial Sequence: Synthetic oligonucleotide
cagucugguaaaauagcug

SEQ ID NO: 1435750 - RNA, 19 nt, Artificial Sequence
  Description of Artificial Sequence: Synthetic oligonucleotide
agaaauucaccacgcacua

SEQ ID NO: 1435751 - RNA, 19 nt, Artificial Sequence
  Description of Artificial Sequence: Synthetic oligonucleotide
acgcacuaaaucuucaaua

SEQ ID NO: 1435752 - RNA, 19 nt, Artificial Sequence
  Description of Artificial Sequence: Synthetic oligonucleotide
gcaauuaaggcuacggagc

SEQ ID NO: 1435753 - RNA, 19 nt, Artificial Sequence
  Description of Artificial Sequence: Synthetic oligonucleotide
uggucagaacaugagguga

SEQ ID NO: 1435754 - RNA, 19 nt, Artificial Sequence
  Description of Artificial Sequence: Synthetic oligonucleotide
ucucuugugagcacacuuu

SEQ ID NO: 1435755 - RNA, 19 nt, Artificial Sequence
  Description of Artificial Sequence: Synthetic oligonucleotide
acuuggguuaaaauagaug

SEQ ID NO: 1435756 - RNA, 19 nt, Artificial Sequence
  Description of Artificial Sequence: Synthetic oligonucleotide
uugccaucgaaguaguauu

SEQ ID NO: 1435757 - RNA, 19 nt, Artificial Sequence
  Description of Artificial Sequence: Synthetic oligonucleotide
agccaaguuuaaaaggauc

SEQ ID NO: 1435758 - RNA, 19 nt, Artificial Sequence
  Description of Artificial Sequence: Synthetic oligonucleotide
auccgugccagaacuaugg

SEQ ID NO: 1435759 - RNA, 19 nt, Artificial Sequence
  Description of Artificial Sequence: Synthetic oligonucleotide
cauauugucuggcucuguc

SEQ ID NO: 1435760 - RNA, 19 nt, Artificial Sequence
  Description of Artificial Sequence: Synthetic oligonucleotide
cauuuaucucuugugagca

SEQ ID NO: 1435761 - RNA, 19 nt, Artificial Sequence
  Description of Artificial Sequence: Synthetic oligonucleotide
ugcucuaaguuuccugauc

SEQ ID NO: 1435762 - RNA, 19 nt, Artificial Sequence
  Description of Artificial Sequence: Synthetic oligonucleotide
uuguugcacgccaucacuc

SEQ ID NO: 1435763 - RNA, 19 nt, Artificial Sequence
  Description of Artificial Sequence: Synthetic oligonucleotide
guccaauacaucaucuaug

SEQ ID NO: 1435764 - RNA, 19 nt, Artificial Sequence
  Description of Artificial Sequence: Synthetic oligonucleotide
aggaccacacauaaccauc

SEQ ID NO: 1435765 - RNA, 19 nt, Artificial Sequence
  Description of Artificial Sequence: Synthetic oligonucleotide
aucuaugagcugaaaagcu

SEQ ID NO: 1435766 - RNA, 19 nt, Artificial Sequence
  Description of Artificial Sequence: Synthetic oligonucleotide
acccuagcugaagaaauuc

SEQ ID NO: 1435767 - RNA, 19 nt, Artificial Sequence
  Description of Artificial Sequence: Synthetic oligonucleotide
aguguggaucauuucugca

SEQ ID NO: 1435768 - RNA, 19 nt, Artificial Sequence
  Description of Artificial Sequence: Synthetic oligonucleotide
guguuugacuacaacagca

SEQ ID NO: 1435769 - RNA, 19 nt, Artificial Sequence
  Description of Artificial Sequence: Synthetic oligonucleotide
aguuauuaugaugaauauu

SEQ ID NO: 1435770 - RNA, 19 nt, Artificial Sequence
  Description of Artificial Sequence: Synthetic oligonucleotide
cucgggaguuauuaugaug

SEQ ID NO: 1435771 - RNA, 19 nt, Artificial Sequence
  Description of Artificial Sequence: Synthetic oligonucleotide
guuuaaaaggaucggugua

SEQ ID NO: 1435772 - RNA, 19 nt, Artificial Sequence
  Description of Artificial Sequence: Synthetic oligonucleotide
uguugcacgccaucacucu

SEQ ID NO: 1435773 - RNA, 19 nt, Artificial Sequence
  Description of Artificial Sequence: Synthetic oligonucleotide
ucaggauaccucgauuaga

SEQ ID NO: 1435774 - RNA, 19 nt, Artificial Sequence
  Description of Artificial Sequence: Synthetic oligonucleotide
guuugacuacaacagcaca

SEQ ID NO: 1435775 - RNA, 19 nt, Artificial Sequence
  Description of Artificial Sequence: Synthetic oligonucleotide
ccacacauaaccaucagga

SEQ ID NO: 1435776 - RNA, 19 nt, Artificial Sequence
  Description of Artificial Sequence: Synthetic oligonucleotide
aguaguauucggacauguc

SEQ ID NO: 1435777 - RNA, 19 nt, Artificial Sequence
  Description of Artificial Sequence: Synthetic oligonucleotide
uaggcuaaaauagggcauc

SEQ ID NO: 1435778 - RNA, 19 nt, Artificial Sequence
  Description of Artificial Sequence: Synthetic oligonucleotide
gguaaaauagcugccagaa

SEQ ID NO: 1435779 - RNA, 19 nt, Artificial Sequence
  Description of Artificial Sequence: Synthetic oligonucleotide
uggcuugcauaucucggga

SEQ ID NO: 1435780 - RNA, 19 nt, Artificial Sequence
  Description of Artificial Sequence: Synthetic oligonucleotide
auaggcaaucucauggacu

SEQ ID NO: 1435781 - RNA, 19 nt, Artificial Sequence
  Description of Artificial Sequence: Synthetic oligonucleotide
cuucauacagaccuuucaa

SEQ ID NO: 1435782 - RNA, 19 nt, Artificial Sequence
  Description of Artificial Sequence: Synthetic oligonucleotide
aaggaucgguguauugcuc

SEQ ID NO: 1435783 - RNA, 19 nt, Artificial Sequence
  Description of Artificial Sequence: Synthetic oligonucleotide
aaggcuacggagcgcuggu

SEQ ID NO: 1435784 - RNA, 19 nt, Artificial Sequence
  Description of Artificial Sequence: Synthetic oligonucleotide
agacuggccgucuucuuga

SEQ ID NO: 1435785 - RNA, 19 nt, Artificial Sequence
  Description of Artificial Sequence: Synthetic oligonucleotide
caggauaccucgauuagaa

SEQ ID NO: 1435786 - RNA, 19 nt, Artificial Sequence
  Description of Artificial Sequence: Synthetic oligonucleotide
augaugaauauuacacgcu

SEQ ID NO: 1435787 - RNA, 19 nt, Artificial Sequence
  Description of Artificial Sequence: Synthetic oligonucleotide
aacuuggguuaaaauagau

SEQ ID NO: 1435788 - RNA, 19 nt, Artificial Sequence
  Description of Artificial Sequence: Synthetic oligonucleotide
uaaucggucuaaaggcuuu

SEQ ID NO: 1435789 - RNA, 19 nt, Artificial Sequence
  Description of Artificial Sequence: Synthetic oligonucleotide
uacauauugucuggcucug

SEQ ID NO: 1435790 - RNA, 19 nt, Artificial Sequence
  Description of Artificial Sequence: Synthetic oligonucleotide
caucaggauaccucgauua

SEQ ID NO: 1435791 - RNA, 19 nt, Artificial Sequence
  Description of Artificial Sequence: Synthetic oligonucleotide
uuuucaccccagauuuuau

SEQ ID NO: 1435792 - RNA, 19 nt, Artificial Sequence
  Description of Artificial Sequence: Synthetic oligonucleotide
uugcacgccaucacucugu

SEQ ID NO: 1435793 - RNA, 19 nt, Artificial Sequence
  Description of Artificial Sequence: Synthetic oligonucleotide
aucucgggaguuauuauga

SEQ ID NO: 1435794 - RNA, 19 nt, Artificial Sequence
  Description of Artificial Sequence: Synthetic oligonucleotide
uauggacgcugcagaaaga

SEQ ID NO: 1435795 - RNA, 19 nt, Artificial Sequence
  Description of Artificial Sequence: Synthetic oligonucleotide
uuaaaaggaucgguguauu

SEQ ID NO: 1435796 - RNA, 19 nt, Artificial Sequence
  Description of Artificial Sequence: Synthetic oligonucleotide
ugcacagcuccuuucuaau

SEQ ID NO: 1435797 - RNA, 19 nt, Artificial Sequence
  Description of Artificial Sequence: Synthetic oligonucleotide
gauaccucgauuagaauuu

SEQ ID NO: 1435798 - RNA, 19 nt, Artificial Sequence
  Description of Artificial Sequence: Synthetic oligonucleotide
augaaccagacuagcagug

SEQ ID NO: 1435799 - RNA, 19 nt, Artificial Sequence
  Description of Artificial Sequence: Synthetic oligonucleotide
caugaggugaaguccaaua

SEQ ID NO: 1435800 - RNA, 19 nt, Artificial Sequence
  Description of Artificial Sequence: Synthetic oligonucleotide
auaucucgggaguuauuau

SEQ ID NO: 1435801 - RNA, 19 nt, Artificial Sequence
  Description of Artificial Sequence: Synthetic oligonucleotide
aauccgugccagaacuaug

SEQ ID NO: 1435802 - RNA, 19 nt, Artificial Sequence
  Description of Artificial Sequence: Synthetic oligonucleotide
uguuggcuaucagacuggc

SEQ ID NO: 1435803 - RNA, 19 nt, Artificial Sequence
  Description of Artificial Sequence: Synthetic oligonucleotide
auuggacuauaaugacacu

SEQ ID NO: 1435804 - RNA, 19 nt, Artificial Sequence
  Description of Artificial Sequence: Synthetic oligonucleotide
uacacgcucgggccauuag

SEQ ID NO: 1435805 - RNA, 19 nt, Artificial Sequence
  Description of Artificial Sequence: Synthetic oligonucleotide
uuacaacuguuggcuauca

SEQ ID NO: 1435806 - RNA, 19 nt, Artificial Sequence
  Description of Artificial Sequence: Synthetic oligonucleotide
ugcuggcguccuuugagga

SEQ ID NO: 1435807 - RNA, 19 nt, Artificial Sequence
  Description of Artificial Sequence: Synthetic oligonucleotide
aucaugaaccagacuagca

SEQ ID NO: 1435808 - RNA, 19 nt, Artificial Sequence
  Description of Artificial Sequence: Synthetic oligonucleotide
agguugaaauuauuuccua

SEQ ID NO: 1435809 - RNA, 19 nt, Artificial Sequence
  Description of Artificial Sequence: Synthetic oligonucleotide
ucuuucgacccuagcugaa

SEQ ID NO: 1435810 - RNA, 19 nt, Artificial Sequence
  Description of Artificial Sequence: Synthetic oligonucleotide
uucugcaauuaaggcuacg

SEQ ID NO: 1435811 - RNA, 19 nt, Artificial Sequence
  Description of Artificial Sequence: Synthetic oligonucleotide
uucgacccuagcugaagaa

SEQ ID NO: 1435812 - RNA, 19 nt, Artificial Sequence
  Description of Artificial Sequence: Synthetic oligonucleotide
gguuguuuguugcacgcca

SEQ ID NO: 1435813 - RNA, 19 nt, Artificial Sequence
  Description of Artificial Sequence: Synthetic oligonucleotide
aucucauggacuacugggu

SEQ ID NO: 1435814 - RNA, 19 nt, Artificial Sequence
  Description of Artificial Sequence: Synthetic oligonucleotide
ccaaguuuaaaaggaucgg

SEQ ID NO: 1435815 - RNA, 19 nt, Artificial Sequence
  Description of Artificial Sequence: Synthetic oligonucleotide
aauucaccacgcacuaaau

SEQ ID NO: 1435816 - RNA, 19 nt, Artificial Sequence
  Description of Artificial Sequence: Synthetic oligonucleotide
agguagguuguuuguugca

SEQ ID NO: 1435817 - RNA, 19 nt, Artificial Sequence
  Description of Artificial Sequence: Synthetic oligonucleotide
aaggucuuuucaagguagu

SEQ ID NO: 1435818 - RNA, 19 nt, Artificial Sequence
  Description of Artificial Sequence: Synthetic oligonucleotide
guugcacgccaucacucug

SEQ ID NO: 1435819 - RNA, 19 nt, Artificial Sequence
  Description of Artificial Sequence: Synthetic oligonucleotide
cauaucucgggaguuauua

SEQ ID NO: 1435820 - RNA, 19 nt, Artificial Sequence
  Description of Artificial Sequence: Synthetic oligonucleotide
ccagauuuuauuaacugua

SEQ ID NO: 1435821 - RNA, 19 nt, Artificial Sequence
  Description of Artificial Sequence: Synthetic oligonucleotide
ggaaaaccgauguuaaagu

SEQ ID NO: 1435822 - RNA, 19 nt, Artificial Sequence
  Description of Artificial Sequence: Synthetic oligonucleotide
uaacgucaucaugaaccag

SEQ ID NO: 1435823 - RNA, 19 nt, Artificial Sequence
  Description of Artificial Sequence: Synthetic oligonucleotide
aagccuagcuucaggucug

SEQ ID NO: 1435824 - RNA, 19 nt, Artificial Sequence
  Description of Artificial Sequence: Synthetic oligonucleotide
uggcuaucagacuggccgu

SEQ ID NO: 1435825 - RNA, 19 nt, Artificial Sequence
  Description of Artificial Sequence: Synthetic oligonucleotide
cugcaauuaaggcuacgga

SEQ ID NO: 1435826 - RNA, 19 nt, Artificial Sequence
  Description of Artificial Sequence: Synthetic oligonucleotide
auaaugacacugguuuaau

SEQ ID NO: 1435827 - RNA, 19 nt, Artificial Sequence
  Description of Artificial Sequence: Synthetic oligonucleotide
ucacucuguaauacauauu

SEQ ID NO: 1435828 - RNA, 19 nt, Artificial Sequence
  Description of Artificial Sequence: Synthetic oligonucleotide
cuuucgacccuagcugaag

SEQ ID NO: 1435829 - RNA, 19 nt, Artificial Sequence
  Description of Artificial Sequence: Synthetic oligonucleotide
acgcucgggccauuagcac

SEQ ID NO: 1435830 - RNA, 19 nt, Artificial Sequence
  Description of Artificial Sequence: Synthetic oligonucleotide
uugucuggcucuguccaca

SEQ ID NO: 1435831 - RNA, 19 nt, Artificial Sequence
  Description of Artificial Sequence: Synthetic oligonucleotide
caugaaccagacuagcagu

SEQ ID NO: 1435832 - RNA, 19 nt, Artificial Sequence
  Description of Artificial Sequence: Synthetic oligonucleotide
ccaucaauaagguugaaau

SEQ ID NO: 1435833 - RNA, 19 nt, Artificial Sequence
  Description of Artificial Sequence: Synthetic oligonucleotide
ugucuucauacagaccuuu

SEQ ID NO: 1435834 - RNA, 19 nt, Artificial Sequence
  Description of Artificial Sequence: Synthetic oligonucleotide
ccuagcuucaggucugcag

SEQ ID NO: 1435835 - RNA, 19 nt, Artificial Sequence
  Description of Artificial Sequence: Synthetic oligonucleotide
uuaaggcuacggagcgcug

SEQ ID NO: 1435836 - RNA, 19 nt, Artificial Sequence
  Description of Artificial Sequence: Synthetic oligonucleotide
ucgacccuagcugaagaaa

SEQ ID NO: 1435837 - RNA, 19 nt, Artificial Sequence
  Description of Artificial Sequence: Synthetic oligonucleotide
uccgugccagaacuaugga

SEQ ID NO: 1435838 - RNA, 19 nt, Artificial Sequence
  Description of Artificial Sequence: Synthetic oligonucleotide
cagcuguguuuccaauccg

SEQ ID NO: 1435839 - RNA, 19 nt, Artificial Sequence
  Description of Artificial Sequence: Synthetic oligonucleotide
auggacgcugcagaaagaa

SEQ ID NO: 1435840 - RNA, 19 nt, Artificial Sequence
  Description of Artificial Sequence: Synthetic oligonucleotide
aucggucuaaaggcuuuuc

SEQ ID NO: 1435841 - RNA, 19 nt, Artificial Sequence
  Description of Artificial Sequence: Synthetic oligonucleotide
gaaccgucucauuaucaua

SEQ ID NO: 1435842 - RNA, 19 nt, Artificial Sequence
  Description of Artificial Sequence: Synthetic oligonucleotide
gaucgguguauugcucacc

SEQ ID NO: 1435843 - RNA, 19 nt, Artificial Sequence
  Description of Artificial Sequence: Synthetic oligonucleotide
auugcccaucaauaagguu

SEQ ID NO: 1435844 - RNA, 19 nt, Artificial Sequence
  Description of Artificial Sequence: Synthetic oligonucleotide
gcuacggagcgcugguugg

SEQ ID NO: 1435845 - RNA, 19 nt, Artificial Sequence
  Description of Artificial Sequence: Synthetic oligonucleotide
auaaucggucuaaaggcuu

SEQ ID NO: 1435846 - RNA, 19 nt, Artificial Sequence
  Description of Artificial Sequence: Synthetic oligonucleotide
cugaaccgucucauuauca

SEQ ID NO: 1435847 - RNA, 19 nt, Artificial Sequence
  Description of Artificial Sequence: Synthetic oligonucleotide
gacccgagcagucccgcac

SEQ ID NO: 1435848 - RNA, 19 nt, Artificial Sequence
  Description of Artificial Sequence: Synthetic oligonucleotide
uaccucgauuagaauuuau

SEQ ID NO: 1435849 - RNA, 19 nt, Artificial Sequence
  Description of Artificial Sequence: Synthetic oligonucleotide
cacgccaucacucuguaau

SEQ ID NO: 1435850 - RNA, 19 nt, Artificial Sequence
  Description of Artificial Sequence: Synthetic oligonucleotide
uauuacacgcucgggccau

SEQ ID NO: 1435851 - RNA, 19 nt, Artificial Sequence
  Description of Artificial Sequence: Synthetic oligonucleotide
caagguagugggcaaaccu

SEQ ID NO: 1435852 - RNA, 19 nt, Artificial Sequence
  Description of Artificial Sequence: Synthetic oligonucleotide
cuuugaggaaacugugaua

SEQ ID NO: 1435853 - RNA, 19 nt, Artificial Sequence
  Description of Artificial Sequence: Synthetic oligonucleotide
ggcuaagccuagcuucagg

SEQ ID NO: 1435854 - RNA, 19 nt, Artificial Sequence
  Description of Artificial Sequence: Synthetic oligonucleotide
accagacuagcagugugga

SEQ ID NO: 1435855 - RNA, 19 nt, Artificial Sequence
  Description of Artificial Sequence: Synthetic oligonucleotide
cacgcucgggccauuagca

SEQ ID NO: 1435856 - RNA, 19 nt, Artificial Sequence
  Description of Artificial Sequence: Synthetic oligonucleotide
ggauaccucgauuagaauu

SEQ ID NO: 1435857 - RNA, 19 nt, Artificial Sequence
  Description of Artificial Sequence: Synthetic oligonucleotide
caccacgcacuaaaucuuc

SEQ ID NO: 1435858 - RNA, 19 nt, Artificial Sequence
  Description of Artificial Sequence: Synthetic oligonucleotide
gguagguuguuuguugcac

SEQ ID NO: 1435859 - RNA, 19 nt, Artificial Sequence
  Description of Artificial Sequence: Synthetic oligonucleotide
uucggacauguccuucaau

SEQ ID NO: 1435860 - RNA, 19 nt, Artificial Sequence
  Description of Artificial Sequence: Synthetic oligonucleotide
agcuguguuuccaauccgu

SEQ ID NO: 1435861 - RNA, 19 nt, Artificial Sequence
  Description of Artificial Sequence: Synthetic oligonucleotide
ccccagauuuuauuaacug

SEQ ID NO: 1435862 - RNA, 19 nt, Artificial Sequence
  Description of Artificial Sequence: Synthetic oligonucleotide
caaguuuaaaaggaucggu

SEQ ID NO: 1435863 - RNA, 19 nt, Artificial Sequence
  Description of Artificial Sequence: Synthetic oligonucleotide
gccaucgaaguaguauucg

SEQ ID NO: 1435864 - RNA, 19 nt, Artificial Sequence
  Description of Artificial Sequence: Synthetic oligonucleotide
ugugggcauuaacaaugua

SEQ ID NO: 1435865 - RNA, 19 nt, Artificial Sequence
  Description of Artificial Sequence: Synthetic oligonucleotide
ggcacagucugguaaaaua

SEQ ID NO: 1435866 - RNA, 19 nt, Artificial Sequence
  Description of Artificial Sequence: Synthetic oligonucleotide
gucuucacuaggcuaaaau

SEQ ID NO: 1435867 - RNA, 19 nt, Artificial Sequence
  Description of Artificial Sequence: Synthetic oligonucleotide
accccagauuuuauuaacu

SEQ ID NO: 1435868 - RNA, 19 nt, Artificial Sequence
  Description of Artificial Sequence: Synthetic oligonucleotide
accucgauuagaauuuauu

SEQ ID NO: 1435869 - RNA, 19 nt, Artificial Sequence
  Description of Artificial Sequence: Synthetic oligonucleotide
cgauuagaauuuauuggac

SEQ ID NO: 1435870 - RNA, 19 nt, Artificial Sequence
  Description of Artificial Sequence: Synthetic oligonucleotide
gggcauuaacaauguaaac

SEQ ID NO: 1435871 - RNA, 19 nt, Artificial Sequence
  Description of Artificial Sequence: Synthetic oligonucleotide
gguguauugcucaccacuc

SEQ ID NO: 1435872 - RNA, 19 nt, Artificial Sequence
  Description of Artificial Sequence: Synthetic oligonucleotide
acuauggacgcugcagaaa

SEQ ID NO: 1435873 - RNA, 19 nt, Artificial Sequence
  Description of Artificial Sequence: Synthetic oligonucleotide
gaaaguuggaugagggcau

SEQ ID NO: 1435874 - RNA, 19 nt, Artificial Sequence
  Description of Artificial Sequence: Synthetic oligonucleotide
ggcuugcauaucucgggag

SEQ ID NO: 1435875 - RNA, 19 nt, Artificial Sequence
  Description of Artificial Sequence: Synthetic oligonucleotide
cuaggcuaaaauagggcau

SEQ ID NO: 1435876 - RNA, 19 nt, Artificial Sequence
  Description of Artificial Sequence: Synthetic oligonucleotide
aggauaccucgauuagaau

SEQ ID NO: 1435877 - RNA, 19 nt, Artificial Sequence
  Description of Artificial Sequence: Synthetic oligonucleotide
ggacauguccuucaauucu

SEQ ID NO: 1435878 - RNA, 19 nt, Artificial Sequence
  Description of Artificial Sequence: Synthetic oligonucleotide
aaucggucuaaaggcuuuu

SEQ ID NO: 1435879 - RNA, 19 nt, Artificial Sequence
  Description of Artificial Sequence: Synthetic oligonucleotide
ggcuacggagcgcugguug

SEQ ID NO: 1435880 - RNA, 19 nt, Artificial Sequence
  Description of Artificial Sequence: Synthetic oligonucleotide
gggcaaaccuuucauucuc

SEQ ID NO: 1435881 - RNA, 19 nt, Artificial Sequence
  Description of Artificial Sequence: Synthetic oligonucleotide
uugcauaucucgggaguua

SEQ ID NO: 1435882 - RNA, 19 nt, Artificial Sequence
  Description of Artificial Sequence: Synthetic oligonucleotide
ucgguguauugcucaccac

SEQ ID NO: 1435883 - RNA, 19 nt, Artificial Sequence
  Description of Artificial Sequence: Synthetic oligonucleotide
ccgauguuaaagucuucac

SEQ ID NO: 1435884 - RNA, 19 nt, Artificial Sequence
  Description of Artificial Sequence: Synthetic oligonucleotide
uaugcacauuugggaaaac

SEQ ID NO: 1435885 - RNA, 19 nt, Artificial Sequence
  Description of Artificial Sequence: Synthetic oligonucleotide
aggcaaucucauggacuac

SEQ ID NO: 1435886 - RNA, 19 nt, Artificial Sequence
  Description of Artificial Sequence: Synthetic oligonucleotide
augugggcauuaacaaugu

SEQ ID NO: 1435887 - RNA, 19 nt, Artificial Sequence
  Description of Artificial Sequence: Synthetic oligonucleotide
guuuccaauccgugccaga

SEQ ID NO: 1435888 - RNA, 19 nt, Artificial Sequence
  Description of Artificial Sequence: Synthetic oligonucleotide
guggcuaagccuagcuuca

SEQ ID NO: 1435889 - RNA, 19 nt, Artificial Sequence
  Description of Artificial Sequence: Synthetic oligonucleotide
ugcacgccaucacucugua

SEQ ID NO: 1435890 - RNA, 19 nt, Artificial Sequence
  Description of Artificial Sequence: Synthetic oligonucleotide
ccaauacaucaucuaugag

SEQ ID NO: 1435891 - RNA, 19 nt, Artificial Sequence
  Description of Artificial Sequence: Synthetic oligonucleotide
guauucggacauguccuuc

SEQ ID NO: 1435892 - RNA, 19 nt, Artificial Sequence
  Description of Artificial Sequence: Synthetic oligonucleotide
guuggcuaucagacuggcc

SEQ ID NO: 1435893 - RNA, 19 nt, Artificial Sequence
  Description of Artificial Sequence: Synthetic oligonucleotide
agccuagcuucaggucugc

SEQ ID NO: 1435894 - RNA, 19 nt, Artificial Sequence
  Description of Artificial Sequence: Synthetic oligonucleotide
acuagcaguguggaucauu

SEQ ID NO: 1435895 - RNA, 19 nt, Artificial Sequence
  Description of Artificial Sequence: Synthetic oligonucleotide
cauuaucauagcauucauu

SEQ ID NO: 1435896 - RNA, 19 nt, Artificial Sequence
  Description of Artificial Sequence: Synthetic oligonucleotide
cauccccuggcaaacugaa

SEQ ID NO: 1435897 - RNA, 19 nt, Artificial Sequence
  Description of Artificial Sequence: Synthetic oligonucleotide
cagaccuuucaagucucuc

SEQ ID NO: 1435898 - RNA, 19 nt, Artificial Sequence
  Description of Artificial Sequence: Synthetic oligonucleotide
cuacggagcgcugguuggc

SEQ ID NO: 1435899 - RNA, 19 nt, Artificial Sequence
  Description of Artificial Sequence: Synthetic oligonucleotide
acccgagcagucccgcaca

SEQ ID NO: 1435900 - RNA, 19 nt, Artificial Sequence
  Description of Artificial Sequence: Synthetic oligonucleotide
gggcgagguagguuguuug

SEQ ID NO: 1435901 - RNA, 19 nt, Artificial Sequence
  Description of Artificial Sequence: Synthetic oligonucleotide
ggaucgguguauugcucac

SEQ ID NO: 1435902 - RNA, 19 nt, Artificial Sequence
  Description of Artificial Sequence: Synthetic oligonucleotide
cgcacuaaaucuucaauaa

SEQ ID NO: 1435903 - RNA, 19 nt, Artificial Sequence
  Description of Artificial Sequence: Synthetic oligonucleotide
uggcguccuuugaggaaac

SEQ ID NO: 1435904 - RNA, 19 nt, Artificial Sequence
  Description of Artificial Sequence: Synthetic oligonucleotide
aucugcacaugaagcaaau

SEQ ID NO: 1435905 - RNA, 19 nt, Artificial Sequence
  Description of Artificial Sequence: Synthetic oligonucleotide
gcuggcaagcaaacaagac

SEQ ID NO: 1435906 - RNA, 19 nt, Artificial Sequence
  Description of Artificial Sequence: Synthetic oligonucleotide
auccccuggcaaacugaac

SEQ ID NO: 1435907 - RNA, 19 nt, Artificial Sequence
  Description of Artificial Sequence: Synthetic oligonucleotide
gcguccuuugaggaaacug

SEQ ID NO: 1435908 - RNA, 19 nt, Artificial Sequence
  Description of Artificial Sequence: Synthetic oligonucleotide
acauauugucuggcucugu

SEQ ID NO: 1435909 - RNA, 19 nt, Artificial Sequence
  Description of Artificial Sequence: Synthetic oligonucleotide
ugcgcgcggguguccgagg

SEQ ID NO: 1435910 - RNA, 19 nt, Artificial Sequence
  Description of Artificial Sequence: Synthetic oligonucleotide
ggucuaaaggcuuuuccuu

SEQ ID NO: 1435911 - RNA, 19 nt, Artificial Sequence
  Description of Artificial Sequence: Synthetic oligonucleotide
ccagaacuauggacgcugc

SEQ ID NO: 1435912 - RNA, 19 nt, Artificial Sequence
  Description of Artificial Sequence: Synthetic oligonucleotide
ugccagaacuauggacgcu

SEQ ID NO: 1435913 - RNA, 19 nt, Artificial Sequence
  Description of Artificial Sequence: Synthetic oligonucleotide
cugcuucguggcaguacug

SEQ ID NO: 1435914 - RNA, 19 nt, Artificial Sequence
  Description of Artificial Sequence: Synthetic oligonucleotide
cacugcuucguggcaguac

SEQ ID NO: 1435915 - RNA, 19 nt, Artificial Sequence
  Description of Artificial Sequence: Synthetic oligonucleotide
cgucaauaacgucaucaug

SEQ ID NO: 1435916 - RNA, 19 nt, Artificial Sequence
  Description of Artificial Sequence: Synthetic oligonucleotide
accacgcacuaaaucuuca

SEQ ID NO: 1435917 - RNA, 19 nt, Artificial Sequence
  Description of Artificial Sequence: Synthetic oligonucleotide
ccuggcaaacugaaccguc

SEQ ID NO: 1435918 - RNA, 19 nt, Artificial Sequence
  Description of Artificial Sequence: Synthetic oligonucleotide
ccgugccagaacuauggac

SEQ ID NO: 1435919 - RNA, 19 nt, Artificial Sequence
  Description of Artificial Sequence: Synthetic oligonucleotide
cuggcguccuuugaggaaa

SEQ ID NO: 1435920 - RNA, 19 nt, Artificial Sequence
  Description of Artificial Sequence: Synthetic oligonucleotide
caccacaauaaucggucua

SEQ ID NO: 1435921 - RNA, 19 nt, Artificial Sequence
  Description of Artificial Sequence: Synthetic oligonucleotide
cagaacuauggacgcugca

SEQ ID NO: 1435922 - RNA, 19 nt, Artificial Sequence
  Description of Artificial Sequence: Synthetic oligonucleotide
guguccgaggcggcgcgcg

SEQ ID NO: 1435923 - RNA, 19 nt, Artificial Sequence
  Description of Artificial Sequence: Synthetic oligonucleotide
uguccgaggcggcgcgcga

SEQ ID NO: 1435924 - RNA, 19 nt, Artificial Sequence
  Description of Artificial Sequence: Synthetic oligonucleotide
ggacuauaaugacacuggu

SEQ ID NO: 1435925 - RNA, 19 nt, Artificial Sequence
  Description of Artificial Sequence: Synthetic oligonucleotide
gugaaguccaauacaucau

SEQ ID NO: 1435926 - RNA, 19 nt, Artificial Sequence
  Description of Artificial Sequence: Synthetic oligonucleotide
auaccucgauuagaauuua

SEQ ID NO: 1435927 - RNA, 19 nt, Artificial Sequence
  Description of Artificial Sequence: Synthetic oligonucleotide
cacgcacuaaaucuucaau

SEQ ID NO: 1435928 - RNA, 19 nt, Artificial Sequence
  Description of Artificial Sequence: Synthetic oligonucleotide
cccuagcugaagaaauuca

SEQ ID NO: 1435929 - RNA, 19 nt, Artificial Sequence
  Description of Artificial Sequence: Synthetic oligonucleotide
uuacacgcucgggccauua

SEQ ID NO: 1435930 - RNA, 19 nt, Artificial Sequence
  Description of Artificial Sequence: Synthetic oligonucleotide
cauaaccaucaggauaccu

SEQ ID NO: 1435931 - RNA, 19 nt, Artificial Sequence
  Description of Artificial Sequence: Synthetic oligonucleotide
cgcucgggccauuagcacc

SEQ ID NO: 1435932 - RNA, 19 nt, Artificial Sequence
  Description of Artificial Sequence: Synthetic oligonucleotide
gguagugggcaaaccuuuc

SEQ ID NO: 1435933 - RNA, 19 nt, Artificial Sequence
  Description of Artificial Sequence: Synthetic oligonucleotide
cucucacugcuucguggca

SEQ ID NO: 1435934 - RNA, 19 nt, Artificial Sequence
  Description of Artificial Sequence: Synthetic oligonucleotide
gcuuuacaacuguuggcua

SEQ ID NO: 1435935 - RNA, 19 nt, Artificial Sequence
  Description of Artificial Sequence: Synthetic oligonucleotide
cagauguuggcuugcccau

SEQ ID NO: 1435936 - RNA, 19 nt, Artificial Sequence
  Description of Artificial Sequence: Synthetic oligonucleotide
ggcaaaccuuucauucuca

SEQ ID NO: 1435937 - RNA, 19 nt, Artificial Sequence
  Description of Artificial Sequence: Synthetic oligonucleotide
ccuuugaggaaacugugau

SEQ ID NO: 1435938 - RNA, 19 nt, Artificial Sequence
  Description of Artificial Sequence: Synthetic oligonucleotide
ccgucucauuaucauagca

SEQ ID NO: 1435939 - RNA, 19 nt, Artificial Sequence
  Description of Artificial Sequence: Synthetic oligonucleotide
gacuggccgucuucuugaa

SEQ ID NO: 1435940 - RNA, 19 nt, Artificial Sequence
  Description of Artificial Sequence: Synthetic oligonucleotide
agacugcuuuacaacuguu

SEQ ID NO: 1435941 - RNA, 19 nt, Artificial Sequence
  Description of Artificial Sequence: Synthetic oligonucleotide
gcgcggguguccgaggcgg

SEQ ID NO: 1435942 - RNA, 19 nt, Artificial Sequence
  Description of Artificial Sequence: Synthetic oligonucleotide
cuuugccaucgaaguagua

SEQ ID NO: 1435943 - RNA, 19 nt, Artificial Sequence
  Description of Artificial Sequence: Synthetic oligonucleotide
guuguuuguugcacgccau

SEQ ID NO: 1435944 - RNA, 19 nt, Artificial Sequence
  Description of Artificial Sequence: Synthetic oligonucleotide
cguccuuugaggaaacugu

SEQ ID NO: 1435945 - RNA, 19 nt, Artificial Sequence
  Description of Artificial Sequence: Synthetic oligonucleotide
caauccgugccagaacuau

SEQ ID NO: 1435946 - RNA, 19 nt, Artificial Sequence
  Description of Artificial Sequence: Synthetic oligonucleotide
cuugcauaucucgggaguu

SEQ ID NO: 1435947 - RNA, 19 nt, Artificial Sequence
  Description of Artificial Sequence: Synthetic oligonucleotide
gacccuagcugaagaaauu

SEQ ID NO: 1435948 - RNA, 19 nt, Artificial Sequence
  Description of Artificial Sequence: Synthetic oligonucleotide
gaggcggcgcgcgacccga

SEQ ID NO: 1435949 - RNA, 19 nt, Artificial Sequence
  Description of Artificial Sequence: Synthetic oligonucleotide
ggcgagguagguuguuugu

SEQ ID NO: 1435950 - RNA, 19 nt, Artificial Sequence
  Description of Artificial Sequence: Synthetic oligonucleotide
gggaguuauuaugaugaau

SEQ ID NO: 1435951 - RNA, 19 nt, Artificial Sequence
  Description of Artificial Sequence: Synthetic oligonucleotide
cgucucauuaucauagcau

SEQ ID NO: 1435952 - RNA, 19 nt, Artificial Sequence
  Description of Artificial Sequence: Synthetic oligonucleotide
cccaucaauaagguugaaa

SEQ ID NO: 1435953 - RNA, 19 nt, Artificial Sequence
  Description of Artificial Sequence: Synthetic oligonucleotide
gcgcgacccgagcaguccc

SEQ ID NO: 1435954 - RNA, 19 nt, Artificial Sequence
  Description of Artificial Sequence: Synthetic oligonucleotide
ggcuaucagacuggccguc

SEQ ID NO: 1435955 - RNA, 19 nt, Artificial Sequence
  Description of Artificial Sequence: Synthetic oligonucleotide
gugauauacuaugcacauu

SEQ ID NO: 1435956 - RNA, 19 nt, Artificial Sequence
  Description of Artificial Sequence: Synthetic oligonucleotide
ccacgcacuaaaucuucaa

SEQ ID NO: 1435957 - RNA, 19 nt, Artificial Sequence
  Description of Artificial Sequence: Synthetic oligonucleotide
gcaccacaauaaucggucu

SEQ ID NO: 1435958 - RNA, 19 nt, Artificial Sequence
  Description of Artificial Sequence: Synthetic oligonucleotide
cgguguauugcucaccacu

SEQ ID NO: 1435959 - RNA, 19 nt, Artificial Sequence
  Description of Artificial Sequence: Synthetic oligonucleotide
gcgcugguuggcuugcaua

SEQ ID NO: 1435960 - RNA, 19 nt, Artificial Sequence
  Description of Artificial Sequence: Synthetic oligonucleotide
ggcaucugcgcgcgggugu

SEQ ID NO: 1435961 - RNA, 19 nt, Artificial Sequence
  Description of Artificial Sequence: Synthetic oligonucleotide
auuacacgcucgggccauu

SEQ ID NO: 1435962 - RNA, 19 nt, Artificial Sequence
  Description of Artificial Sequence: Synthetic oligonucleotide
guccgaggcggcgcgcgac

SEQ ID NO: 1435963 - RNA, 19 nt, Artificial Sequence
  Description of Artificial Sequence: Synthetic oligonucleotide
ccaugugggcauuaacaau

SEQ ID NO: 1435964 - RNA, 19 nt, Artificial Sequence
  Description of Artificial Sequence: Synthetic oligonucleotide
cccgagcagucccgcacag

SEQ ID NO: 1435965 - RNA, 19 nt, Artificial Sequence
  Description of Artificial Sequence: Synthetic oligonucleotide
gggcaacucaggacagaga

SEQ ID NO: 1435966 - RNA, 19 nt, Artificial Sequence
  Description of Artificial Sequence: Synthetic oligonucleotide
cuucgagaacuugcaucgu

SEQ ID NO: 1435967 - RNA, 19 nt, Artificial Sequence
  Description of Artificial Sequence: Synthetic oligonucleotide
ccuuugccaucgaaguagu

SEQ ID NO: 1435968 - RNA, 19 nt, Artificial Sequence
  Description of Artificial Sequence: Synthetic oligonucleotide
gcuaucagacuggccgucu

SEQ ID NO: 1435969 - RNA, 19 nt, Artificial Sequence
  Description of Artificial Sequence: Synthetic oligonucleotide
aggcuacggagcgcugguu

SEQ ID NO: 1435970 - RNA, 19 nt, Artificial Sequence
  Description of Artificial Sequence: Synthetic oligonucleotide
ccaauccgugccagaacua

SEQ ID NO: 1435971 - RNA, 19 nt, Artificial Sequence
  Description of Artificial Sequence: Synthetic oligonucleotide
cgacccuagcugaagaaau

SEQ ID NO: 1435972 - RNA, 19 nt, Artificial Sequence
  Description of Artificial Sequence: Synthetic oligonucleotide
gguguccgaggcggcgcgc

SEQ ID NO: 1435973 - RNA, 19 nt, Artificial Sequence
  Description of Artificial Sequence: Synthetic oligonucleotide
cgcugguuggcuugcauau

SEQ ID NO: 1435974 - RNA, 19 nt, Artificial Sequence
  Description of Artificial Sequence: Synthetic oligonucleotide
ccauacugauaggcaaucu

SEQ ID NO: 1435975 - RNA, 19 nt, Artificial Sequence
  Description of Artificial Sequence: Synthetic oligonucleotide
cgcgcgacccgagcagucc

SEQ ID NO: 1435976 - RNA, 19 nt, Artificial Sequence
  Description of Artificial Sequence: Synthetic oligonucleotide
gcacgccaucacucuguaa

SEQ ID NO: 1435977 - RNA, 19 nt, Artificial Sequence
  Description of Artificial Sequence: Synthetic oligonucleotide
ccaucaggauaccucgauu

SEQ ID NO: 1435978 - RNA, 19 nt, Artificial Sequence
  Description of Artificial Sequence: Synthetic oligonucleotide
cgaggcggcgcgcgacccg

SEQ ID NO: 1435979 - RNA, 19 nt, Artificial Sequence
  Description of Artificial Sequence: Synthetic oligonucleotide
gcgagguagguuguuuguu

SEQ ID NO: 1435980 - RNA, 19 nt, Artificial Sequence
  Description of Artificial Sequence: Synthetic oligonucleotide
gacuagcaguguggaucau

SEQ ID NO: 1435981 - RNA, 19 nt, Artificial Sequence
  Description of Artificial Sequence: Synthetic oligonucleotide
cggguguccgaggcggcgc

SEQ ID NO: 1435982 - RNA, 19 nt, Artificial Sequence
  Description of Artificial Sequence: Synthetic oligonucleotide
cuacugggucagggcaacu

SEQ ID NO: 1435983 - RNA, 19 nt, Artificial Sequence
  Description of Artificial Sequence: Synthetic oligonucleotide
ccgaggcggcgcgcgaccc

SEQ ID NO: 1435984 - RNA, 19 nt, Artificial Sequence
  Description of Artificial Sequence: Synthetic oligonucleotide
gccuagcuucaggucugca

SEQ ID NO: 1435985 - RNA, 19 nt, Artificial Sequence
  Description of Artificial Sequence: Synthetic oligonucleotide
aggcggcgcgcgacccgag

SEQ ID NO: 1435986 - RNA, 19 nt, Artificial Sequence
  Description of Artificial Sequence: Synthetic oligonucleotide
gcauaucucgggaguuauu

SEQ ID NO: 1435987 - RNA, 19 nt, Artificial Sequence
  Description of Artificial Sequence: Synthetic oligonucleotide
ggcguccuuugaggaaacu

SEQ ID NO: 1435988 - RNA, 19 nt, Artificial Sequence
  Description of Artificial Sequence: Synthetic oligonucleotide
cgacccgagcagucccgca

SEQ ID NO: 1435989 - RNA, 19 nt, Artificial Sequence
  Description of Artificial Sequence: Synthetic oligonucleotide
uaaagauacagacaggagg

SEQ ID NO: 1435990 - RNA, 19 nt, Artificial Sequence
  Description of Artificial Sequence: Synthetic oligonucleotide
aaaguauaagcccaaagca

SEQ ID NO: 1435991 - RNA, 19 nt, Artificial Sequence
  Description of Artificial Sequence: Synthetic oligonucleotide
cuccaaaucaacaagagag

SEQ ID NO: 1435992 - RNA, 19 nt, Artificial Sequence
  Description of Artificial Sequence: Synthetic oligonucleotide
ucaaccuugacuugggucg

SEQ ID NO: 1435993 - RNA, 19 nt, Artificial Sequence
  Description of Artificial Sequence: Synthetic oligonucleotide
aggguaaagauacagacag

SEQ ID NO: 1435994 - RNA, 19 nt, Artificial Sequence
  Description of Artificial Sequence: Synthetic oligonucleotide
guaacuaaaguauaagccc

SEQ ID NO: 1435995 - RNA, 19 nt, Artificial Sequence
  Description of Artificial Sequence: Synthetic oligonucleotide
augggauauauuuaugugg

SEQ ID NO: 1435996 - RNA, 19 nt, Artificial Sequence
  Description of Artificial Sequence: Synthetic oligonucleotide
uagaccucgaucuugcugg

SEQ ID NO: 1435997 - RNA, 19 nt, Artificial Sequence
  Description of Artificial Sequence: Synthetic oligonucleotide
uggguuguaaaucuggacc

SEQ ID NO: 1435998 - RNA, 19 nt, Artificial Sequence
  Description of Artificial Sequence: Synthetic oligonucleotide
uguugugugacuugaauug

SEQ ID NO: 1435999 - RNA, 19 nt, Artificial Sequence
  Description of Artificial Sequence: Synthetic oligonucleotide
ugaaucucaaccuugacuu

SEQ ID NO: 1436000 - RNA, 19 nt, Artificial Sequence
  Description of Artificial Sequence: Synthetic oligonucleotide
aaagaauugucaagcaaac

SEQ ID NO: 1436001 - RNA, 19 nt, Artificial Sequence
  Description of Artificial Sequence: Synthetic oligonucleotide
gaacaggugaguuaagcag

SEQ ID NO: 1436002 - RNA, 19 nt, Artificial Sequence
  Description of Artificial Sequence: Synthetic oligonucleotide
ugucaagcaaacuugggca

SEQ ID NO: 1436003 - RNA, 19 nt, Artificial Sequence
  Description of Artificial Sequence: Synthetic oligonucleotide
aaagauacagacaggagga

SEQ ID NO: 1436004 - RNA, 19 nt, Artificial Sequence
  Description of Artificial Sequence: Synthetic oligonucleotide
uucacuggagcauagguga

SEQ ID NO: 1436005 - RNA, 19 nt, Artificial Sequence
  Description of Artificial Sequence: Synthetic oligonucleotide
aaggguaccguccaugaug

SEQ ID NO: 1436006 - RNA, 19 nt, Artificial Sequence
  Description of Artificial Sequence: Synthetic oligonucleotide
aacccauacacguucaccu

SEQ ID NO: 1436007 - RNA, 19 nt, Artificial Sequence
  Description of Artificial Sequence: Synthetic oligonucleotide
uucaggguaacuaaaguau

SEQ ID NO: 1436008 - RNA, 19 nt, Artificial Sequence
  Description of Artificial Sequence: Synthetic oligonucleotide
aauugucaagcaaacuugg

SEQ ID NO: 1436009 - RNA, 19 nt, Artificial Sequence
  Description of Artificial Sequence: Synthetic oligonucleotide
cuugaauugggguugcagc

SEQ ID NO: 1436010 - RNA, 19 nt, Artificial Sequence
  Description of Artificial Sequence: Synthetic oligonucleotide
aguuguaaccccuaauucu

SEQ ID NO: 1436011 - RNA, 19 nt, Artificial Sequence
  Description of Artificial Sequence: Synthetic oligonucleotide
aaucucaaccuugacuugg

SEQ ID NO: 1436012 - RNA, 19 nt, Artificial Sequence
  Description of Artificial Sequence: Synthetic oligonucleotide
aagauauaggggcugugug

SEQ ID NO: 1436013 - RNA, 19 nt, Artificial Sequence
  Description of Artificial Sequence: Synthetic oligonucleotide
auugccucggcugucagcc

SEQ ID NO: 1436014 - RNA, 19 nt, Artificial Sequence
  Description of Artificial Sequence: Synthetic oligonucleotide
uuacucaccagcccguuag

SEQ ID NO: 1436015 - RNA, 19 nt, Artificial Sequence
  Description of Artificial Sequence: Synthetic oligonucleotide
aacaggugaguuaagcagg

SEQ ID NO: 1436016 - RNA, 19 nt, Artificial Sequence
  Description of Artificial Sequence: Synthetic oligonucleotide
gguaacuaaaguauaagcc

SEQ ID NO: 1436017 - RNA, 19 nt, Artificial Sequence
  Description of Artificial Sequence: Synthetic oligonucleotide
gaauugucaagcaaacuug

SEQ ID NO: 1436018 - RNA, 19 nt, Artificial Sequence
  Description of Artificial Sequence: Synthetic oligonucleotide
ucaacaagagagcuagaga

SEQ ID NO: 1436019 - RNA, 19 nt, Artificial Sequence
  Description of Artificial Sequence: Synthetic oligonucleotide
gauugguggagacagcggc

SEQ ID NO: 1436020 - RNA, 19 nt, Artificial Sequence
  Description of Artificial Sequence: Synthetic oligonucleotide
aaucggaucuguccuguag

SEQ ID NO: 1436021 - RNA, 19 nt, Artificial Sequence
  Description of Artificial Sequence: Synthetic oligonucleotide
ucccucaugauaaaguuau

SEQ ID NO: 1436022 - RNA, 19 nt, Artificial Sequence
  Description of Artificial Sequence: Synthetic oligonucleotide
auccacauuagguccaggg

SEQ ID NO: 1436023 - RNA, 19 nt, Artificial Sequence
  Description of Artificial Sequence: Synthetic oligonucleotide
uccuugagucgcaugauug

SEQ ID NO: 1436024 - RNA, 19 nt, Artificial Sequence
  Description of Artificial Sequence: Synthetic oligonucleotide
gagaaagagaagcuccgcc

SEQ ID NO: 1436025 - RNA, 19 nt, Artificial Sequence
  Description of Artificial Sequence: Synthetic oligonucleotide
aguuaagcaggguaaagau

SEQ ID NO: 1436026 - RNA, 19 nt, Artificial Sequence
  Description of Artificial Sequence: Synthetic oligonucleotide
gacaguagaagugagggca

SEQ ID NO: 1436027 - RNA, 19 nt, Artificial Sequence
  Description of Artificial Sequence: Synthetic oligonucleotide
gauaaaguuauggccgucc

SEQ ID NO: 1436028 - RNA, 19 nt, Artificial Sequence
  Description of Artificial Sequence: Synthetic oligonucleotide
aaagauauaggggcugugu

SEQ ID NO: 1436029 - RNA, 19 nt, Artificial Sequence
  Description of Artificial Sequence: Synthetic oligonucleotide
uggagcauaggugaaucgg

SEQ ID NO: 1436030 - RNA, 19 nt, Artificial Sequence
  Description of Artificial Sequence: Synthetic oligonucleotide
acauguagugcaaagaaga

SEQ ID NO: 1436031 - RNA, 19 nt, Artificial Sequence
  Description of Artificial Sequence: Synthetic oligonucleotide
gagucaugcaaguagcuuc

SEQ ID NO: 1436032 - RNA, 19 nt, Artificial Sequence
  Description of Artificial Sequence: Synthetic oligonucleotide
aucaacaagagagcuagag

SEQ ID NO: 1436033 - RNA, 19 nt, Artificial Sequence
  Description of Artificial Sequence: Synthetic oligonucleotide
agaacaggugaguuaagca

SEQ ID NO: 1436034 - RNA, 19 nt, Artificial Sequence
  Description of Artificial Sequence: Synthetic oligonucleotide
cugagaaagagaagcuccg

SEQ ID NO: 1436035 - RNA, 19 nt, Artificial Sequence
  Description of Artificial Sequence: Synthetic oligonucleotide
gauauaggggcugugugug

SEQ ID NO: 1436036 - RNA, 19 nt, Artificial Sequence
  Description of Artificial Sequence: Synthetic oligonucleotide
gaagcugacauuggcaggc

SEQ ID NO: 1436037 - RNA, 19 nt, Artificial Sequence
  Description of Artificial Sequence: Synthetic oligonucleotide
cauguagugcaaagaagag

SEQ ID NO: 1436038 - RNA, 19 nt, Artificial Sequence
  Description of Artificial Sequence: Synthetic oligonucleotide
aagagcaccagcauuccug

SEQ ID NO: 1436039 - RNA, 19 nt, Artificial Sequence
  Description of Artificial Sequence: Synthetic oligonucleotide
aaguauaagcccaaagcaa

SEQ ID NO: 1436040 - RNA, 19 nt, Artificial Sequence
  Description of Artificial Sequence: Synthetic oligonucleotide
agcaugucaaugauguggg

SEQ ID NO: 1436041 - RNA, 19 nt, Artificial Sequence
  Description of Artificial Sequence: Synthetic oligonucleotide
cacauguagugcaaagaag

SEQ ID NO: 1436042 - RNA, 19 nt, Artificial Sequence
  Description of Artificial Sequence: Synthetic oligonucleotide
agauauaggggcugugugu

SEQ ID NO: 1436043 - RNA, 19 nt, Artificial Sequence
  Description of Artificial Sequence: Synthetic oligonucleotide
ugcaaagaauugucaagca

SEQ ID NO: 1436044 - RNA, 19 nt, Artificial Sequence
  Description of Artificial Sequence: Synthetic oligonucleotide
ggguaacuaaaguauaagc

SEQ ID NO: 1436045 - RNA, 19 nt, Artificial Sequence
  Description of Artificial Sequence: Synthetic oligonucleotide
ugagucgcaugauuggcug

SEQ ID NO: 1436046 - RNA, 19 nt, Artificial Sequence
  Description of Artificial Sequence: Synthetic oligonucleotide
uccacucgaaggaaggacu

SEQ ID NO: 1436047 - RNA, 19 nt, Artificial Sequence
  Description of Artificial Sequence: Synthetic oligonucleotide
agauacagacaggaggagg

SEQ ID NO: 1436048 - RNA, 19 nt, Artificial Sequence
  Description of Artificial Sequence: Synthetic oligonucleotide
ucaugcaaguagcuuccag

SEQ ID NO: 1436049 - RNA, 19 nt, Artificial Sequence
  Description of Artificial Sequence: Synthetic oligonucleotide
agcauaggugaaucggauc

SEQ ID NO: 1436050 - RNA, 19 nt, Artificial Sequence
  Description of Artificial Sequence: Synthetic oligonucleotide
uguggaaggguaccgucca

SEQ ID NO: 1436051 - RNA, 19 nt, Artificial Sequence
  Description of Artificial Sequence: Synthetic oligonucleotide
uggcaauccacauuagguc

SEQ ID NO: 1436052 - RNA, 19 nt, Artificial Sequence
  Description of Artificial Sequence: Synthetic oligonucleotide
gggacaguagaagugaggg

SEQ ID NO: 1436053 - RNA, 19 nt, Artificial Sequence
  Description of Artificial Sequence: Synthetic oligonucleotide
ugauuggcugagaaagaga

SEQ ID NO: 1436054 - RNA, 19 nt, Artificial Sequence
  Description of Artificial Sequence: Synthetic oligonucleotide
acugaaucucaaccuugac

SEQ ID NO: 1436055 - RNA, 19 nt, Artificial Sequence
  Description of Artificial Sequence: Synthetic oligonucleotide
aggguaccguccaugaugc

SEQ ID NO: 1436056 - RNA, 19 nt, Artificial Sequence
  Description of Artificial Sequence: Synthetic oligonucleotide
guuagaacaggugaguuaa

SEQ ID NO: 1436057 - RNA, 19 nt, Artificial Sequence
  Description of Artificial Sequence: Synthetic oligonucleotide
gaaggguaccagcacgaag

SEQ ID NO: 1436058 - RNA, 19 nt, Artificial Sequence
  Description of Artificial Sequence: Synthetic oligonucleotide
agaagcuccgcccaacggu

SEQ ID NO: 1436059 - RNA, 19 nt, Artificial Sequence
  Description of Artificial Sequence: Synthetic oligonucleotide
cuagagagaaagccagggc

SEQ ID NO: 1436060 - RNA, 19 nt, Artificial Sequence
  Description of Artificial Sequence: Synthetic oligonucleotide
augauaaaguuauggccgu

SEQ ID NO: 1436061 - RNA, 19 nt, Artificial Sequence
  Description of Artificial Sequence: Synthetic oligonucleotide
ugcaaguagcuuccaguug

SEQ ID NO: 1436062 - RNA, 19 nt, Artificial Sequence
  Description of Artificial Sequence: Synthetic oligonucleotide
gguaaagauacagacagga

SEQ ID NO: 1436063 - RNA, 19 nt, Artificial Sequence
  Description of Artificial Sequence: Synthetic oligonucleotide
uaaaguuauggccguccac

SEQ ID NO: 1436064 - RNA, 19 nt, Artificial Sequence
  Description of Artificial Sequence: Synthetic oligonucleotide
auaaaguuauggccgucca

SEQ ID NO: 1436065 - RNA, 19 nt, Artificial Sequence
  Description of Artificial Sequence: Synthetic oligonucleotide
agagaagcuccgcccaacg

SEQ ID NO: 1436066 - RNA, 19 nt, Artificial Sequence
  Description of Artificial Sequence: Synthetic oligonucleotide
guuauggccguccacaucu

SEQ ID NO: 1436067 - RNA, 19 nt, Artificial Sequence
  Description of Artificial Sequence: Synthetic oligonucleotide
aguauaagcccaaagcaaa

SEQ ID NO: 1436068 - RNA, 19 nt, Artificial Sequence
  Description of Artificial Sequence: Synthetic oligonucleotide
ggcaauccacauuaggucc

SEQ ID NO: 1436069 - RNA, 19 nt, Artificial Sequence
  Description of Artificial Sequence: Synthetic oligonucleotide
aaggccugcaaagaauugu

SEQ ID NO: 1436070 - RNA, 19 nt, Artificial Sequence
  Description of Artificial Sequence: Synthetic oligonucleotide
ucgccuuagggccaaagau

SEQ ID NO: 1436071 - RNA, 19 nt, Artificial Sequence
  Description of Artificial Sequence: Synthetic oligonucleotide
uugggucgagucaugcaag

SEQ ID NO: 1436072 - RNA, 19 nt, Artificial Sequence
  Description of Artificial Sequence: Synthetic oligonucleotide
guugugugacuugaauugg

SEQ ID NO: 1436073 - RNA, 19 nt, Artificial Sequence
  Description of Artificial Sequence: Synthetic oligonucleotide
aaggucagacgcugagaag

SEQ ID NO: 1436074 - RNA, 19 nt, Artificial Sequence
  Description of Artificial Sequence: Synthetic oligonucleotide
ggucgagucaugcaaguag

SEQ ID NO: 1436075 - RNA, 19 nt, Artificial Sequence
  Description of Artificial Sequence: Synthetic oligonucleotide
agugugucccucccggcgg

SEQ ID NO: 1436076 - RNA, 19 nt, Artificial Sequence
  Description of Artificial Sequence: Synthetic oligonucleotide
aggguaacuaaaguauaag

SEQ ID NO: 1436077 - RNA, 19 nt, Artificial Sequence
  Description of Artificial Sequence: Synthetic oligonucleotide
uugagucgcaugauuggcu

SEQ ID NO: 1436078 - RNA, 19 nt, Artificial Sequence
  Description of Artificial Sequence: Synthetic oligonucleotide
ucggaucuguccuguagag

SEQ ID NO: 1436079 - RNA, 19 nt, Artificial Sequence
  Description of Artificial Sequence: Synthetic oligonucleotide
acagcgccggcacuguugg

SEQ ID NO: 1436080 - RNA, 19 nt, Artificial Sequence
  Description of Artificial Sequence: Synthetic oligonucleotide
auaccgguuguucucccag

SEQ ID NO: 1436081 - RNA, 19 nt, Artificial Sequence
  Description of Artificial Sequence: Synthetic oligonucleotide
ucgaaggaaggacuucacu

SEQ ID NO: 1436082 - RNA, 19 nt, Artificial Sequence
  Description of Artificial Sequence: Synthetic oligonucleotide
agugcaaagaagagcacca

SEQ ID NO: 1436083 - RNA, 19 nt, Artificial Sequence
  Description of Artificial Sequence: Synthetic oligonucleotide
accccuaauucuuuacuca

SEQ ID NO: 1436084 - RNA, 19 nt, Artificial Sequence
  Description of Artificial Sequence: Synthetic oligonucleotide
gagaagcuccgcccaacgg

SEQ ID NO: 1436085 - RNA, 19 nt, Artificial Sequence
  Description of Artificial Sequence: Synthetic oligonucleotide
cucaaccuugacuuggguc

SEQ ID NO: 1436086 - RNA, 19 nt, Artificial Sequence
  Description of Artificial Sequence: Synthetic oligonucleotide
acuugaauugggguugcag

SEQ ID NO: 1436087 - RNA, 19 nt, Artificial Sequence
  Description of Artificial Sequence: Synthetic oligonucleotide
guagaccucgaucuugcug

SEQ ID NO: 1436088 - RNA, 19 nt, Artificial Sequence
  Description of Artificial Sequence: Synthetic oligonucleotide
cuugagucgcaugauuggc

SEQ ID NO: 1436089 - RNA, 19 nt, Artificial Sequence
  Description of Artificial Sequence: Synthetic oligonucleotide
aucggaucuguccuguaga

SEQ ID NO: 1436090 - RNA, 19 nt, Artificial Sequence
  Description of Artificial Sequence: Synthetic oligonucleotide
caguuguaaccccuaauuc

SEQ ID NO: 1436091 - RNA, 19 nt, Artificial Sequence
  Description of Artificial Sequence: Synthetic oligonucleotide
ucaugcacgccugucuucc

SEQ ID NO: 1436092 - RNA, 19 nt, Artificial Sequence
  Description of Artificial Sequence: Synthetic oligonucleotide
gaacccauacacguucacc

SEQ ID NO: 1436093 - RNA, 19 nt, Artificial Sequence
  Description of Artificial Sequence: Synthetic oligonucleotide
gaaucucaaccuugacuug

SEQ ID NO: 1436094 - RNA, 19 nt, Artificial Sequence
  Description of Artificial Sequence: Synthetic oligonucleotide
ccucaugauaaaguuaugg

SEQ ID NO: 1436095 - RNA, 19 nt, Artificial Sequence
  Description of Artificial Sequence: Synthetic oligonucleotide
aacucgcccgcauaccggu

SEQ ID NO: 1436096 - RNA, 19 nt, Artificial Sequence
  Description of Artificial Sequence: Synthetic oligonucleotide
ucggcugucagccccgaac

SEQ ID NO: 1436097 - RNA, 19 nt, Artificial Sequence
  Description of Artificial Sequence: Synthetic oligonucleotide
agguacaugcacaggcagc

SEQ ID NO: 1436098 - RNA, 19 nt, Artificial Sequence
  Description of Artificial Sequence: Synthetic oligonucleotide
guagaagugagggcacacg

SEQ ID NO: 1436099 - RNA, 19 nt, Artificial Sequence
  Description of Artificial Sequence: Synthetic oligonucleotide
cuggaaaguggguuagaac

SEQ ID NO: 1436100 - RNA, 19 nt, Artificial Sequence
  Description of Artificial Sequence: Synthetic oligonucleotide
ccacauuagguccagggcc

SEQ ID NO: 1436101 - RNA, 19 nt, Artificial Sequence
  Description of Artificial Sequence: Synthetic oligonucleotide
agagagcuagagagaaagc

SEQ ID NO: 1436102 - RNA, 19 nt, Artificial Sequence
  Description of Artificial Sequence: Synthetic oligonucleotide
gagacagcggcgccggaag

SEQ ID NO: 1436103 - RNA, 19 nt, Artificial Sequence
  Description of Artificial Sequence: Synthetic oligonucleotide
cuucaggguaacuaaagua

SEQ ID NO: 1436104 - RNA, 19 nt, Artificial Sequence
  Description of Artificial Sequence: Synthetic oligonucleotide
gugccaauugccucggcug

SEQ ID NO: 1436105 - RNA, 19 nt, Artificial Sequence
  Description of Artificial Sequence: Synthetic oligonucleotide
aggugaguuaagcagggua

SEQ ID NO: 1436106 - RNA, 19 nt, Artificial Sequence
  Description of Artificial Sequence: Synthetic oligonucleotide
accucgaucuugcuggccu

SEQ ID NO: 1436107 - RNA, 19 nt, Artificial Sequence
  Description of Artificial Sequence: Synthetic oligonucleotide
ggaacucgcccgcauaccg

SEQ ID NO: 1436108 - RNA, 19 nt, Artificial Sequence
  Description of Artificial Sequence: Synthetic oligonucleotide
cuggguuguaaaucuggac

SEQ ID NO: 1436109 - RNA, 19 nt, Artificial Sequence
  Description of Artificial Sequence: Synthetic oligonucleotide
cuggagcauaggugaaucg

SEQ ID NO: 1436110 - RNA, 19 nt, Artificial Sequence
  Description of Artificial Sequence: Synthetic oligonucleotide
cugucuuccggaacucgcc

SEQ ID NO: 1436111 - RNA, 19 nt, Artificial Sequence
  Description of Artificial Sequence: Synthetic oligonucleotide
guggguuagaacaggugag

SEQ ID NO: 1436112 - RNA, 19 nt, Artificial Sequence
  Description of Artificial Sequence: Synthetic oligonucleotide
guaaccccuaauucuuuac

SEQ ID NO: 1436113 - RNA, 19 nt, Artificial Sequence
  Description of Artificial Sequence: Synthetic oligonucleotide
aaggacuucacuggagcau

SEQ ID NO: 1436114 - RNA, 19 nt, Artificial Sequence
  Description of Artificial Sequence: Synthetic oligonucleotide
ucgagucaugcaaguagcu

SEQ ID NO: 1436115 - RNA, 19 nt, Artificial Sequence
  Description of Artificial Sequence: Synthetic oligonucleotide
ugccaauugccucggcugu

SEQ ID NO: 1436116 - RNA, 19 nt, Artificial Sequence
  Description of Artificial Sequence: Synthetic oligonucleotide
gguaccagcacgaagcuga

SEQ ID NO: 1436117 - RNA, 19 nt, Artificial Sequence
  Description of Artificial Sequence: Synthetic oligonucleotide
ugaugugggccucgaaguc

SEQ ID NO: 1436118 - RNA, 19 nt, Artificial Sequence
  Description of Artificial Sequence: Synthetic oligonucleotide
gucgagucaugcaaguagc

SEQ ID NO: 1436119 - RNA, 19 nt, Artificial Sequence
  Description of Artificial Sequence: Synthetic oligonucleotide
auugguggagacagcggcg

SEQ ID NO: 1436120 - RNA, 19 nt, Artificial Sequence
  Description of Artificial Sequence: Synthetic oligonucleotide
uccaguuguaaccccuaau

SEQ ID NO: 1436121 - RNA, 19 nt, Artificial Sequence
  Description of Artificial Sequence: Synthetic oligonucleotide
acgcugagaaggugguggg

SEQ ID NO: 1436122 - RNA, 19 nt, Artificial Sequence
  Description of Artificial Sequence: Synthetic oligonucleotide
uggccguccacaucuugcc

SEQ ID NO: 1436123 - RNA, 19 nt, Artificial Sequence
  Description of Artificial Sequence: Synthetic oligonucleotide
uuccuguggaaggguaccg

SEQ ID NO: 1436124 - RNA, 19 nt, Artificial Sequence
  Description of Artificial Sequence: Synthetic oligonucleotide
agucgcaugauuggcugag

SEQ ID NO: 1436125 - RNA, 19 nt, Artificial Sequence
  Description of Artificial Sequence: Synthetic oligonucleotide
uauggccguccacaucuug

SEQ ID NO: 1436126 - RNA, 19 nt, Artificial Sequence
  Description of Artificial Sequence: Synthetic oligonucleotide
caggguaaagauacagaca

SEQ ID NO: 1436127 - RNA, 19 nt, Artificial Sequence
  Description of Artificial Sequence: Synthetic oligonucleotide
cuguuggggaucccggaag

SEQ ID NO: 1436128 - RNA, 19 nt, Artificial Sequence
  Description of Artificial Sequence: Synthetic oligonucleotide
uggguuagaacaggugagu

SEQ ID NO: 1436129 - RNA, 19 nt, Artificial Sequence
  Description of Artificial Sequence: Synthetic oligonucleotide
agcuccgcccaacgguagc

SEQ ID NO: 1436130 - RNA, 19 nt, Artificial Sequence
  Description of Artificial Sequence: Synthetic oligonucleotide
guccaugaugcucugucca

SEQ ID NO: 1436131 - RNA, 19 nt, Artificial Sequence
  Description of Artificial Sequence: Synthetic oligonucleotide
uggaaggguaccguccaug

SEQ ID NO: 1436132 - RNA, 19 nt, Artificial Sequence
  Description of Artificial Sequence: Synthetic oligonucleotide
ugugugugccugagugagc

SEQ ID NO: 1436133 - RNA, 19 nt, Artificial Sequence
  Description of Artificial Sequence: Synthetic oligonucleotide
gaacucgcccgcauaccgg

SEQ ID NO: 1436134 - RNA, 19 nt, Artificial Sequence
  Description of Artificial Sequence: Synthetic oligonucleotide
uuuacucaccagcccguua

SEQ ID NO: 1436135 - RNA, 19 nt, Artificial Sequence
  Description of Artificial Sequence: Synthetic oligonucleotide
ugggccucgaagucggcgu

SEQ ID NO: 1436136 - RNA, 19 nt, Artificial Sequence
  Description of Artificial Sequence: Synthetic oligonucleotide
agcaaacuugggcagccau

SEQ ID NO: 1436137 - RNA, 19 nt, Artificial Sequence
  Description of Artificial Sequence: Synthetic oligonucleotide
ccuugagucgcaugauugg

SEQ ID NO: 1436138 - RNA, 19 nt, Artificial Sequence
  Description of Artificial Sequence: Synthetic oligonucleotide
cacgaagcugacauuggca

SEQ ID NO: 1436139 - RNA, 19 nt, Artificial Sequence
  Description of Artificial Sequence: Synthetic oligonucleotide
gugaaucggaucuguccug

SEQ ID NO: 1436140 - RNA, 19 nt, Artificial Sequence
  Description of Artificial Sequence: Synthetic oligonucleotide
ucucaaccuugacuugggu

SEQ ID NO: 1436141 - RNA, 19 nt, Artificial Sequence
  Description of Artificial Sequence: Synthetic oligonucleotide
caugauuggcugagaaaga

SEQ ID NO: 1436142 - RNA, 19 nt, Artificial Sequence
  Description of Artificial Sequence: Synthetic oligonucleotide
ccuaauucuuuacucacca

SEQ ID NO: 1436143 - RNA, 19 nt, Artificial Sequence
  Description of Artificial Sequence: Synthetic oligonucleotide
uuccaguuguaaccccuaa

SEQ ID NO: 1436144 - RNA, 19 nt, Artificial Sequence
  Description of Artificial Sequence: Synthetic oligonucleotide
caggguaacuaaaguauaa

SEQ ID NO: 1436145 - RNA, 19 nt, Artificial Sequence
  Description of Artificial Sequence: Synthetic oligonucleotide
ggggaguacuuucuguggc

SEQ ID NO: 1436146 - RNA, 19 nt, Artificial Sequence
  Description of Artificial Sequence: Synthetic oligonucleotide
ugggucgagucaugcaagu

SEQ ID NO: 1436147 - RNA, 19 nt, Artificial Sequence
  Description of Artificial Sequence: Synthetic oligonucleotide
cucgaaggaaggacuucac

SEQ ID NO: 1436148 - RNA, 19 nt, Artificial Sequence
  Description of Artificial Sequence: Synthetic oligonucleotide
gacuugggucgagucaugc

SEQ ID NO: 1436149 - RNA, 19 nt, Artificial Sequence
  Description of Artificial Sequence: Synthetic oligonucleotide
uuguaaccccuaauucuuu

SEQ ID NO: 1436150 - RNA, 19 nt, Artificial Sequence
  Description of Artificial Sequence: Synthetic oligonucleotide
agcaggguaaagauacaga

SEQ ID NO: 1436151 - RNA, 19 nt, Artificial Sequence
  Description of Artificial Sequence: Synthetic oligonucleotide
ucaguucccucgguagacc

SEQ ID NO: 1436152 - RNA, 19 nt, Artificial Sequence
  Description of Artificial Sequence: Synthetic oligonucleotide
gcauaggugaaucggaucu

SEQ ID NO: 1436153 - RNA, 19 nt, Artificial Sequence
  Description of Artificial Sequence: Synthetic oligonucleotide
uagggguucucgccaggca

SEQ ID NO: 1436154 - RNA, 19 nt, Artificial Sequence
  Description of Artificial Sequence: Synthetic oligonucleotide
ugacuugaauugggguugc

SEQ ID NO: 1436155 - RNA, 19 nt, Artificial Sequence
  Description of Artificial Sequence: Synthetic oligonucleotide
cccguuaggggcuggaaag

SEQ ID NO: 1436156 - RNA, 19 nt, Artificial Sequence
  Description of Artificial Sequence: Synthetic oligonucleotide
ggugaaucggaucuguccu

SEQ ID NO: 1436157 - RNA, 19 nt, Artificial Sequence
  Description of Artificial Sequence: Synthetic oligonucleotide
cauaggugaaucggaucug

SEQ ID NO: 1436158 - RNA, 19 nt, Artificial Sequence
  Description of Artificial Sequence: Synthetic oligonucleotide
aagcaagaggcugccugcu

SEQ ID NO: 1436159 - RNA, 19 nt, Artificial Sequence
  Description of Artificial Sequence: Synthetic oligonucleotide
gguugccugaguuucccac

SEQ ID NO: 1436160 - RNA, 19 nt, Artificial Sequence
  Description of Artificial Sequence: Synthetic oligonucleotide
ggacaguagaagugagggc

SEQ ID NO: 1436161 - RNA, 19 nt, Artificial Sequence
  Description of Artificial Sequence: Synthetic oligonucleotide
ugcacgccugucuuccgga

SEQ ID NO: 1436162 - RNA, 19 nt, Artificial Sequence
  Description of Artificial Sequence: Synthetic oligonucleotide
agaccaucacugaagcccu

SEQ ID NO: 1436163 - RNA, 19 nt, Artificial Sequence
  Description of Artificial Sequence: Synthetic oligonucleotide
acagcggcgccggaaguuc

SEQ ID NO: 1436164 - RNA, 19 nt, Artificial Sequence
  Description of Artificial Sequence: Synthetic oligonucleotide
caggcacgaucugaaacag

SEQ ID NO: 1436165 - RNA, 19 nt, Artificial Sequence
  Description of Artificial Sequence: Synthetic oligonucleotide
cacagcgccggcacuguug

SEQ ID NO: 1436166 - RNA, 19 nt, Artificial Sequence
  Description of Artificial Sequence: Synthetic oligonucleotide
cccuaauucuuuacucacc

SEQ ID NO: 1436167 - RNA, 19 nt, Artificial Sequence
  Description of Artificial Sequence: Synthetic oligonucleotide
ugauaaaguuauggccguc

SEQ ID NO: 1436168 - RNA, 19 nt, Artificial Sequence
  Description of Artificial Sequence: Synthetic oligonucleotide
caaagauauaggggcugug

SEQ ID NO: 1436169 - RNA, 19 nt, Artificial Sequence
  Description of Artificial Sequence: Synthetic oligonucleotide
aaguagcuuccaguuguaa

SEQ ID NO: 1436170 - RNA, 19 nt, Artificial Sequence
  Description of Artificial Sequence: Synthetic oligonucleotide
ugcucucgccuuagggcca

SEQ ID NO: 1436171 - RNA, 19 nt, Artificial Sequence
  Description of Artificial Sequence: Synthetic oligonucleotide
cuuggcacucucccucaug

SEQ ID NO: 1436172 - RNA, 19 nt, Artificial Sequence
  Description of Artificial Sequence: Synthetic oligonucleotide
acgaucugaaacagcuucu

SEQ ID NO: 1436173 - RNA, 19 nt, Artificial Sequence
  Description of Artificial Sequence: Synthetic oligonucleotide
aggcacgaucugaaacagc

SEQ ID NO: 1436174 - RNA, 19 nt, Artificial Sequence
  Description of Artificial Sequence: Synthetic oligonucleotide
gguuagaacaggugaguua

SEQ ID NO: 1436175 - RNA, 19 nt, Artificial Sequence
  Description of Artificial Sequence: Synthetic oligonucleotide
ccccuaauucuuuacucac

SEQ ID NO: 1436176 - RNA, 19 nt, Artificial Sequence
  Description of Artificial Sequence: Synthetic oligonucleotide
gcacgaagcugacauuggc

SEQ ID NO: 1436177 - RNA, 19 nt, Artificial Sequence
  Description of Artificial Sequence: Synthetic oligonucleotide
uaccgguuguucucccagu

SEQ ID NO: 1436178 - RNA, 19 nt, Artificial Sequence
  Description of Artificial Sequence: Synthetic oligonucleotide
guuguaaccccuaauucuu

SEQ ID NO: 1436179 - RNA, 19 nt, Artificial Sequence
  Description of Artificial Sequence: Synthetic oligonucleotide
gguaccguccaugaugcuc

SEQ ID NO: 1436180 - RNA, 19 nt, Artificial Sequence
  Description of Artificial Sequence: Synthetic oligonucleotide
aaccuugacuugggucgag

SEQ ID NO: 1436181 - RNA, 19 nt, Artificial Sequence
  Description of Artificial Sequence: Synthetic oligonucleotide
gagagggcgcuggcaaucc

SEQ ID NO: 1436182 - RNA, 19 nt, Artificial Sequence
  Description of Artificial Sequence: Synthetic oligonucleotide
ggguaaagauacagacagg

SEQ ID NO: 1436183 - RNA, 19 nt, Artificial Sequence
  Description of Artificial Sequence: Synthetic oligonucleotide
ugaaggguaccagcacgaa

SEQ ID NO: 1436184 - RNA, 19 nt, Artificial Sequence
  Description of Artificial Sequence: Synthetic oligonucleotide
ccaccugucauggauguac

SEQ ID NO: 1436185 - RNA, 19 nt, Artificial Sequence
  Description of Artificial Sequence: Synthetic oligonucleotide
cacauuagguccagggccu

SEQ ID NO: 1436186 - RNA, 19 nt, Artificial Sequence
  Description of Artificial Sequence: Synthetic oligonucleotide
cucgcccgcauaccgguug

SEQ ID NO: 1436187 - RNA, 19 nt, Artificial Sequence
  Description of Artificial Sequence: Synthetic oligonucleotide
gagucgcaugauuggcuga

SEQ ID NO: 1436188 - RNA, 19 nt, Artificial Sequence
  Description of Artificial Sequence: Synthetic oligonucleotide
aggacuucacuggagcaua

SEQ ID NO: 1436189 - RNA, 19 nt, Artificial Sequence
  Description of Artificial Sequence: Synthetic oligonucleotide
gugugacuugaauuggggu

SEQ ID NO: 1436190 - RNA, 19 nt, Artificial Sequence
  Description of Artificial Sequence: Synthetic oligonucleotide
cucgccuuagggccaaaga

SEQ ID NO: 1436191 - RNA, 19 nt, Artificial Sequence
  Description of Artificial Sequence: Synthetic oligonucleotide
uccggaacucgcccgcaua

SEQ ID NO: 1436192 - RNA, 19 nt, Artificial Sequence
  Description of Artificial Sequence: Synthetic oligonucleotide
aguucccucgguagaccuc

SEQ ID NO: 1436193 - RNA, 19 nt, Artificial Sequence
  Description of Artificial Sequence: Synthetic oligonucleotide
guaccguccaugaugcucu

SEQ ID NO: 1436194 - RNA, 19 nt, Artificial Sequence
  Description of Artificial Sequence: Synthetic oligonucleotide
uccuguagagagggcgcug

SEQ ID NO: 1436195 - RNA, 19 nt, Artificial Sequence
  Description of Artificial Sequence: Synthetic oligonucleotide
accgguuguucucccagua

SEQ ID NO: 1436196 - RNA, 19 nt, Artificial Sequence
  Description of Artificial Sequence: Synthetic oligonucleotide
guagugcaaagaagagcac

SEQ ID NO: 1436197 - RNA, 19 nt, Artificial Sequence
  Description of Artificial Sequence: Synthetic oligonucleotide
gaagcuccgcccaacggua

SEQ ID NO: 1436198 - RNA, 19 nt, Artificial Sequence
  Description of Artificial Sequence: Synthetic oligonucleotide
cucccucaugauaaaguua

SEQ ID NO: 1436199 - RNA, 19 nt, Artificial Sequence
  Description of Artificial Sequence: Synthetic oligonucleotide
uagcacgggcagcucaguu

SEQ ID NO: 1436200 - RNA, 19 nt, Artificial Sequence
  Description of Artificial Sequence: Synthetic oligonucleotide
cauaccgguuguucuccca

SEQ ID NO: 1436201 - RNA, 19 nt, Artificial Sequence
  Description of Artificial Sequence: Synthetic oligonucleotide
aagcuccgcccaacgguag

SEQ ID NO: 1436202 - RNA, 19 nt, Artificial Sequence
  Description of Artificial Sequence: Synthetic oligonucleotide
guaguggugccaauugccu

SEQ ID NO: 1436203 - RNA, 19 nt, Artificial Sequence
  Description of Artificial Sequence: Synthetic oligonucleotide
cacgccugucuuccggaac

SEQ ID NO: 1436204 - RNA, 19 nt, Artificial Sequence
  Description of Artificial Sequence: Synthetic oligonucleotide
agagccccgaagguugccu

SEQ ID NO: 1436205 - RNA, 19 nt, Artificial Sequence
  Description of Artificial Sequence: Synthetic oligonucleotide
gggguucucgccaggcacg

SEQ ID NO: 1436206 - RNA, 19 nt, Artificial Sequence
  Description of Artificial Sequence: Synthetic oligonucleotide
gucagacgcugagaaggug

SEQ ID NO: 1436207 - RNA, 19 nt, Artificial Sequence
  Description of Artificial Sequence: Synthetic oligonucleotide
cccgaacccauacacguuc

SEQ ID NO: 1436208 - RNA, 19 nt, Artificial Sequence
  Description of Artificial Sequence: Synthetic oligonucleotide
uuccggaacucgcccgcau

SEQ ID NO: 1436209 - RNA, 19 nt, Artificial Sequence
  Description of Artificial Sequence: Synthetic oligonucleotide
cauuagguccagggccuug

SEQ ID NO: 1436210 - RNA, 19 nt, Artificial Sequence
  Description of Artificial Sequence: Synthetic oligonucleotide
uuauggccguccacaucuu

SEQ ID NO: 1436211 - RNA, 19 nt, Artificial Sequence
  Description of Artificial Sequence: Synthetic oligonucleotide
accugucauggauguacuu

SEQ ID NO: 1436212 - RNA, 19 nt, Artificial Sequence
  Description of Artificial Sequence: Synthetic oligonucleotide
cuuccaguuguaaccccua

SEQ ID NO: 1436213 - RNA, 19 nt, Artificial Sequence
  Description of Artificial Sequence: Synthetic oligonucleotide
guacaugcacaggcagcug

SEQ ID NO: 1436214 - RNA, 19 nt, Artificial Sequence
  Description of Artificial Sequence: Synthetic oligonucleotide
ugucccucccggcgguguc

SEQ ID NO: 1436215 - RNA, 19 nt, Artificial Sequence
  Description of Artificial Sequence: Synthetic oligonucleotide
gcgcuggcaauccacauua

SEQ ID NO: 1436216 - RNA, 19 nt, Artificial Sequence
  Description of Artificial Sequence: Synthetic oligonucleotide
ccuguggaaggguaccguc

SEQ ID NO: 1436217 - RNA, 19 nt, Artificial Sequence
  Description of Artificial Sequence: Synthetic oligonucleotide
cgaagguugccugaguuuc

SEQ ID NO: 1436218 - RNA, 19 nt, Artificial Sequence
  Description of Artificial Sequence: Synthetic oligonucleotide
ccuugacuugggucgaguc

SEQ ID NO: 1436219 - RNA, 19 nt, Artificial Sequence
  Description of Artificial Sequence: Synthetic oligonucleotide
agagggcgcuggcaaucca

SEQ ID NO: 1436220 - RNA, 19 nt, Artificial Sequence
  Description of Artificial Sequence: Synthetic oligonucleotide
uaccguccaugaugcucug

SEQ ID NO: 1436221 - RNA, 19 nt, Artificial Sequence
  Description of Artificial Sequence: Synthetic oligonucleotide
guauaagcccaaagcaaau

SEQ ID NO: 1436222 - RNA, 19 nt, Artificial Sequence
  Description of Artificial Sequence: Synthetic oligonucleotide
gaaucggaucuguccugua

SEQ ID NO: 1436223 - RNA, 19 nt, Artificial Sequence
  Description of Artificial Sequence: Synthetic oligonucleotide
ccucgguagaccucgaucu

SEQ ID NO: 1436224 - RNA, 19 nt, Artificial Sequence
  Description of Artificial Sequence: Synthetic oligonucleotide
uugccucggcugucagccc

SEQ ID NO: 1436225 - RNA, 19 nt, Artificial Sequence
  Description of Artificial Sequence: Synthetic oligonucleotide
gagcauaggugaaucggau

SEQ ID NO: 1436226 - RNA, 19 nt, Artificial Sequence
  Description of Artificial Sequence: Synthetic oligonucleotide
ucccucgguagaccucgau

SEQ ID NO: 1436227 - RNA, 19 nt, Artificial Sequence
  Description of Artificial Sequence: Synthetic oligonucleotide
agacgcugagaagguggug

SEQ ID NO: 1436228 - RNA, 19 nt, Artificial Sequence
  Description of Artificial Sequence: Synthetic oligonucleotide
gccugaguuucccaccaca

SEQ ID NO: 1436229 - RNA, 19 nt, Artificial Sequence
  Description of Artificial Sequence: Synthetic oligonucleotide
guccaccugucauggaugu

SEQ ID NO: 1436230 - RNA, 19 nt, Artificial Sequence
  Description of Artificial Sequence: Synthetic oligonucleotide
gccggaaguucuccuugag

SEQ ID NO: 1436231 - RNA, 19 nt, Artificial Sequence
  Description of Artificial Sequence: Synthetic oligonucleotide
ggaucgaggccccgccgcc

SEQ ID NO: 1436232 - RNA, 19 nt, Artificial Sequence
  Description of Artificial Sequence: Synthetic oligonucleotide
accaucacugaagcccuuu

SEQ ID NO: 1436233 - RNA, 19 nt, Artificial Sequence
  Description of Artificial Sequence: Synthetic oligonucleotide
gcuggaaaguggguuagaa

SEQ ID NO: 1436234 - RNA, 19 nt, Artificial Sequence
  Description of Artificial Sequence: Synthetic oligonucleotide
ggugccaauugccucggcu

SEQ ID NO: 1436235 - RNA, 19 nt, Artificial Sequence
  Description of Artificial Sequence: Synthetic oligonucleotide
ggggaucgaggccccgccg

SEQ ID NO: 1436236 - RNA, 19 nt, Artificial Sequence
  Description of Artificial Sequence: Synthetic oligonucleotide
gaaggguaccguccaugau

SEQ ID NO: 1436237 - RNA, 19 nt, Artificial Sequence
  Description of Artificial Sequence: Synthetic oligonucleotide
agggcgcuggcaauccaca

SEQ ID NO: 1436238 - RNA, 19 nt, Artificial Sequence
  Description of Artificial Sequence: Synthetic oligonucleotide
ccaaaucaacaagagagcu

SEQ ID NO: 1436239 - RNA, 19 nt, Artificial Sequence
  Description of Artificial Sequence: Synthetic oligonucleotide
ccgguuguucucccaguag

SEQ ID NO: 1436240 - RNA, 19 nt, Artificial Sequence
  Description of Artificial Sequence: Synthetic oligonucleotide
uucccucgguagaccucga

SEQ ID NO: 1436241 - RNA, 19 nt, Artificial Sequence
  Description of Artificial Sequence: Synthetic oligonucleotide
ccggaacucgcccgcauac

SEQ ID NO: 1436242 - RNA, 19 nt, Artificial Sequence
  Description of Artificial Sequence: Synthetic oligonucleotide
agagcgcgugccgccgccg

SEQ ID NO: 1436243 - RNA, 19 nt, Artificial Sequence
  Description of Artificial Sequence: Synthetic oligonucleotide
gcauaccgguuguucuccc

SEQ ID NO: 1436244 - RNA, 19 nt, Artificial Sequence
  Description of Artificial Sequence: Synthetic oligonucleotide
cccucgguagaccucgauc

SEQ ID NO: 1436245 - RNA, 19 nt, Artificial Sequence
  Description of Artificial Sequence: Synthetic oligonucleotide
gacuugaauugggguugca

SEQ ID NO: 1436246 - RNA, 19 nt, Artificial Sequence
  Description of Artificial Sequence: Synthetic oligonucleotide
ccaguuguaaccccuaauu

SEQ ID NO: 1436247 - RNA, 19 nt, Artificial Sequence
  Description of Artificial Sequence: Synthetic oligonucleotide
cacgggcagcucaguuccc

SEQ ID NO: 1436248 - RNA, 19 nt, Artificial Sequence
  Description of Artificial Sequence: Synthetic oligonucleotide
caaccuugacuugggucga

SEQ ID NO: 1436249 - RNA, 19 nt, Artificial Sequence
  Description of Artificial Sequence: Synthetic oligonucleotide
caccucauugguguugugu

SEQ ID NO: 1436250 - RNA, 19 nt, Artificial Sequence
  Description of Artificial Sequence: Synthetic oligonucleotide
ccgcauaccgguuguucuc

SEQ ID NO: 1436251 - RNA, 19 nt, Artificial Sequence
  Description of Artificial Sequence: Synthetic oligonucleotide
cccaacgguagcacgggca

SEQ ID NO: 1436252 - RNA, 19 nt, Artificial Sequence
  Description of Artificial Sequence: Synthetic oligonucleotide
gucaugcaaguagcuucca

SEQ ID NO: 1436253 - RNA, 19 nt, Artificial Sequence
  Description of Artificial Sequence: Synthetic oligonucleotide
gccaugauugguggagaca

SEQ ID NO: 1436254 - RNA, 19 nt, Artificial Sequence
  Description of Artificial Sequence: Synthetic oligonucleotide
agccaccaaucugcuccuc

SEQ ID NO: 1436255 - RNA, 19 nt, Artificial Sequence
  Description of Artificial Sequence: Synthetic oligonucleotide
caccugucauggauguacu

SEQ ID NO: 1436256 - RNA, 19 nt, Artificial Sequence
  Description of Artificial Sequence: Synthetic oligonucleotide
cuccgcccaacgguagcac

SEQ ID NO: 1436257 - RNA, 19 nt, Artificial Sequence
  Description of Artificial Sequence: Synthetic oligonucleotide
uccgccgggcagagcgcgu

SEQ ID NO: 1436258 - RNA, 19 nt, Artificial Sequence
  Description of Artificial Sequence: Synthetic oligonucleotide
cauugguguugugugacuu

SEQ ID NO: 1436259 - RNA, 19 nt, Artificial Sequence
  Description of Artificial Sequence: Synthetic oligonucleotide
gucgcaugauuggcugaga

SEQ ID NO: 1436260 - RNA, 19 nt, Artificial Sequence
  Description of Artificial Sequence: Synthetic oligonucleotide
cgcauaccgguuguucucc

SEQ ID NO: 1436261 - RNA, 19 nt, Artificial Sequence
  Description of Artificial Sequence: Synthetic oligonucleotide
gcccguuaggggcuggaaa

SEQ ID NO: 1436262 - RNA, 19 nt, Artificial Sequence
  Description of Artificial Sequence: Synthetic oligonucleotide
accguccaugaugcucugu

SEQ ID NO: 1436263 - RNA, 19 nt, Artificial Sequence
  Description of Artificial Sequence: Synthetic oligonucleotide
ccaggccaucugcaaggcc

SEQ ID NO: 1436264 - RNA, 19 nt, Artificial Sequence
  Description of Artificial Sequence: Synthetic oligonucleotide
gcuuccaguuguaaccccu

SEQ ID NO: 1436265 - RNA, 19 nt, Artificial Sequence
  Description of Artificial Sequence: Synthetic oligonucleotide
cuccuugagucgcaugauu

SEQ ID NO: 1436266 - RNA, 19 nt, Artificial Sequence
  Description of Artificial Sequence: Synthetic oligonucleotide
agcccguuaggggcuggaa

SEQ ID NO: 1436267 - RNA, 19 nt, Artificial Sequence
  Description of Artificial Sequence: Synthetic oligonucleotide
gcccaacgguagcacgggc

SEQ ID NO: 1436268 - RNA, 19 nt, Artificial Sequence
  Description of Artificial Sequence: Synthetic oligonucleotide
gccccgaagguugccugag

SEQ ID NO: 1436269 - RNA, 19 nt, Artificial Sequence
  Description of Artificial Sequence: Synthetic oligonucleotide
ggccaaagauauaggggcu

SEQ ID NO: 1436270 - RNA, 19 nt, Artificial Sequence
  Description of Artificial Sequence: Synthetic oligonucleotide
cgccuuagggccaaagaua

SEQ ID NO: 1436271 - RNA, 19 nt, Artificial Sequence
  Description of Artificial Sequence: Synthetic oligonucleotide
cgaacccauacacguucac

SEQ ID NO: 1436272 - RNA, 19 nt, Artificial Sequence
  Description of Artificial Sequence: Synthetic oligonucleotide
ucccucccggcggugucau

SEQ ID NO: 1436273 - RNA, 19 nt, Artificial Sequence
  Description of Artificial Sequence: Synthetic oligonucleotide
ccgaacccauacacguuca

SEQ ID NO: 1436274 - RNA, 19 nt, Artificial Sequence
  Description of Artificial Sequence: Synthetic oligonucleotide
gcauuccuguggaagggua

SEQ ID NO: 1436275 - RNA, 19 nt, Artificial Sequence
  Description of Artificial Sequence: Synthetic oligonucleotide
gacagcggcgccggaaguu

SEQ ID NO: 1436276 - RNA, 19 nt, Artificial Sequence
  Description of Artificial Sequence: Synthetic oligonucleotide
gaucgaggccccgccgccu

SEQ ID NO: 1436277 - RNA, 19 nt, Artificial Sequence
  Description of Artificial Sequence: Synthetic oligonucleotide
ggguuagaacaggugaguu

SEQ ID NO: 1436278 - RNA, 19 nt, Artificial Sequence
  Description of Artificial Sequence: Synthetic oligonucleotide
ggucagacgcugagaaggu

SEQ ID NO: 1436279 - RNA, 19 nt, Artificial Sequence
  Description of Artificial Sequence: Synthetic oligonucleotide
cccgcauaccgguuguucu

SEQ ID NO: 1436280 - RNA, 19 nt, Artificial Sequence
  Description of Artificial Sequence: Synthetic oligonucleotide
gcccgcauaccgguuguuc

SEQ ID NO: 1436281 - RNA, 19 nt, Artificial Sequence
  Description of Artificial Sequence: Synthetic oligonucleotide
gcgccggcacuguugggga

SEQ ID NO: 1436282 - RNA, 19 nt, Artificial Sequence
  Description of Artificial Sequence: Synthetic oligonucleotide
gccaauugccucggcuguc

SEQ ID NO: 1436283 - RNA, 19 nt, Artificial Sequence
  Description of Artificial Sequence: Synthetic oligonucleotide
caccagcccguuaggggcu

SEQ ID NO: 1436284 - RNA, 19 nt, Artificial Sequence
  Description of Artificial Sequence: Synthetic oligonucleotide
gcuccgcccaacgguagca

SEQ ID NO: 1436285 - RNA, 19 nt, Artificial Sequence
  Description of Artificial Sequence: Synthetic oligonucleotide
gugugucccucccggcggu

SEQ ID NO: 1436286 - RNA, 19 nt, Artificial Sequence
  Description of Artificial Sequence: Synthetic oligonucleotide
gucccucccggcgguguca

SEQ ID NO: 1436287 - RNA, 19 nt, Artificial Sequence
  Description of Artificial Sequence: Synthetic oligonucleotide
caccagcauuccuguggaa

SEQ ID NO: 1436288 - RNA, 19 nt, Artificial Sequence
  Description of Artificial Sequence: Synthetic oligonucleotide
cacuggagcauaggugaau

SEQ ID NO: 1436289 - RNA, 19 nt, Artificial Sequence
  Description of Artificial Sequence: Synthetic oligonucleotide
gccgccgccgccgccgccg

SEQ ID NO: 1436290 - RNA, 19 nt, Artificial Sequence
  Description of Artificial Sequence: Synthetic oligonucleotide
cgguuguucucccaguagu

SEQ ID NO: 1436291 - RNA, 19 nt, Artificial Sequence
  Description of Artificial Sequence: Synthetic oligonucleotide
cccacugaaucucaaccuu

SEQ ID NO: 1436292 - RNA, 19 nt, Artificial Sequence
  Description of Artificial Sequence: Synthetic oligonucleotide
ugccgccgccgccgccgcc

SEQ ID NO: 1436293 - RNA, 19 nt, Artificial Sequence
  Description of Artificial Sequence: Synthetic oligonucleotide
gggucgagucaugcaagua

SEQ ID NO: 1436294 - RNA, 19 nt, Artificial Sequence
  Description of Artificial Sequence: Synthetic oligonucleotide
cgcccaacgguagcacggg

SEQ ID NO: 1436295 - RNA, 19 nt, Artificial Sequence
  Description of Artificial Sequence: Synthetic oligonucleotide
cggaacucgcccgcauacc

SEQ ID NO: 1436296 - RNA, 19 nt, Artificial Sequence
  Description of Artificial Sequence: Synthetic oligonucleotide
guagcacgggcagcucagu

SEQ ID NO: 1436297 - RNA, 19 nt, Artificial Sequence
  Description of Artificial Sequence: Synthetic oligonucleotide
cgcuggcaauccacauuag

SEQ ID NO: 1436298 - RNA, 19 nt, Artificial Sequence
  Description of Artificial Sequence: Synthetic oligonucleotide
ggccucgaagucggcguca

SEQ ID NO: 1436299 - RNA, 19 nt, Artificial Sequence
  Description of Artificial Sequence: Synthetic oligonucleotide
gugccgccgccgccgccgc

SEQ ID NO: 1436300 - RNA, 19 nt, Artificial Sequence
  Description of Artificial Sequence: Synthetic oligonucleotide
cgggcagagcgcgugccgc

SEQ ID NO: 1436301 - RNA, 19 nt, Artificial Sequence
  Description of Artificial Sequence: Synthetic oligonucleotide
caggugaguuaagcagggu

SEQ ID NO: 1436302 - RNA, 19 nt, Artificial Sequence
  Description of Artificial Sequence: Synthetic oligonucleotide
ccacucgaaggaaggacuu

SEQ ID NO: 1436303 - RNA, 19 nt, Artificial Sequence
  Description of Artificial Sequence: Synthetic oligonucleotide
cucggcugucagccccgaa

SEQ ID NO: 1436304 - RNA, 19 nt, Artificial Sequence
  Description of Artificial Sequence: Synthetic oligonucleotide
gaccaucacugaagcccuu

SEQ ID NO: 1436305 - RNA, 19 nt, Artificial Sequence
  Description of Artificial Sequence: Synthetic oligonucleotide
ggggaucccggaagcggua

SEQ ID NO: 1436306 - RNA, 19 nt, Artificial Sequence
  Description of Artificial Sequence: Synthetic oligonucleotide
gcacgaucugaaacagcuu

SEQ ID NO: 1436307 - RNA, 19 nt, Artificial Sequence
  Description of Artificial Sequence: Synthetic oligonucleotide
ccgccgggcagagcgcgug

SEQ ID NO: 1436308 - RNA, 19 nt, Artificial Sequence
  Description of Artificial Sequence: Synthetic oligonucleotide
cgucaugcacgccugucuu

SEQ ID NO: 1436309 - RNA, 19 nt, Artificial Sequence
  Description of Artificial Sequence: Synthetic oligonucleotide
ggguaccguccaugaugcu

SEQ ID NO: 1436310 - RNA, 19 nt, Artificial Sequence
  Description of Artificial Sequence: Synthetic oligonucleotide
ccagcacgaagcugacauu

SEQ ID NO: 1436311 - RNA, 19 nt, Artificial Sequence
  Description of Artificial Sequence: Synthetic oligonucleotide
ccccgaacccauacacguu

SEQ ID NO: 1436312 - RNA, 19 nt, Artificial Sequence
  Description of Artificial Sequence: Synthetic oligonucleotide
cucucgccuuagggccaaa

SEQ ID NO: 1436313 - RNA, 19 nt, Artificial Sequence
  Description of Artificial Sequence: Synthetic oligonucleotide
ccgccgccgccgccgccgc

SEQ ID NO: 1436314 - RNA, 19 nt, Artificial Sequence
  Description of Artificial Sequence: Synthetic oligonucleotide
ccucggcugucagccccga

SEQ ID NO: 1436315 - RNA, 19 nt, Artificial Sequence
  Description of Artificial Sequence: Synthetic oligonucleotide
cgccgccgccgccgccgcc

SEQ ID NO: 1436316 - RNA, 19 nt, Artificial Sequence
  Description of Artificial Sequence: Synthetic oligonucleotide
cgccggcacuguuggggau

SEQ ID NO: 1436317 - RNA, 19 nt, Artificial Sequence
  Description of Artificial Sequence: Synthetic oligonucleotide
cgcccgcauaccgguuguu

SEQ ID NO: 1436318 - RNA, 19 nt, Artificial Sequence
  Description of Artificial Sequence: Synthetic oligonucleotide
aaagaaagacuccuggcgg

SEQ ID NO: 1436319 - RNA, 19 nt, Artificial Sequence
  Description of Artificial Sequence: Synthetic oligonucleotide
ucaugguuaaagaagcagg

SEQ ID NO: 1436320 - RNA, 19 nt, Artificial Sequence
  Description of Artificial Sequence: Synthetic oligonucleotide
agcaauaguacucuccacc

SEQ ID NO: 1436321 - RNA, 19 nt, Artificial Sequence
  Description of Artificial Sequence: Synthetic oligonucleotide
aucaaugcgcuccacaccc

SEQ ID NO: 1436322 - RNA, 19 nt, Artificial Sequence
  Description of Artificial Sequence: Synthetic oligonucleotide
uucauucccacuuuuacag

SEQ ID NO: 1436323 - RNA, 19 nt, Artificial Sequence
  Description of Artificial Sequence: Synthetic oligonucleotide
uggucgaugaaguagauuc

SEQ ID NO: 1436324 - RNA, 19 nt, Artificial Sequence
  Description of Artificial Sequence: Synthetic oligonucleotide
acccaugucaaacaggcac

SEQ ID NO: 1436325 - RNA, 19 nt, Artificial Sequence
  Description of Artificial Sequence: Synthetic oligonucleotide
gauacggucggccagccgg

SEQ ID NO: 1436326 - RNA, 19 nt, Artificial Sequence
  Description of Artificial Sequence: Synthetic oligonucleotide
acuguuagucacuacgacg

SEQ ID NO: 1436327 - RNA, 19 nt, Artificial Sequence
  Description of Artificial Sequence: Synthetic oligonucleotide
uuuuacagccuucauuacc

SEQ ID NO: 1436328 - RNA, 19 nt, Artificial Sequence
  Description of Artificial Sequence: Synthetic oligonucleotide
gacucgacgacaccgaagg

SEQ ID NO: 1436329 - RNA, 19 nt, Artificial Sequence
  Description of Artificial Sequence: Synthetic oligonucleotide
aacgcugcgucucuucccc

SEQ ID NO: 1436330 - RNA, 19 nt, Artificial Sequence
  Description of Artificial Sequence: Synthetic oligonucleotide
gaauggaucuuucccaucc

SEQ ID NO: 1436331 - RNA, 19 nt, Artificial Sequence
  Description of Artificial Sequence: Synthetic oligonucleotide
aacacgacaagggagccgg

SEQ ID NO: 1436332 - RNA, 19 nt, Artificial Sequence
  Description of Artificial Sequence: Synthetic oligonucleotide
acgucgugcacaucgaggc

SEQ ID NO: 1436333 - RNA, 19 nt, Artificial Sequence
  Description of Artificial Sequence: Synthetic oligonucleotide
aucugguacucuuucauuc

SEQ ID NO: 1436334 - RNA, 19 nt, Artificial Sequence
  Description of Artificial Sequence: Synthetic oligonucleotide
uucaauuuccuccacgguc

SEQ ID NO: 1436335 - RNA, 19 nt, Artificial Sequence
  Description of Artificial Sequence: Synthetic oligonucleotide
aauaguacucuccacccau

SEQ ID NO: 1436336 - RNA, 19 nt, Artificial Sequence
  Description of Artificial Sequence: Synthetic oligonucleotide
ugcaacacgacaagggagc

SEQ ID NO: 1436337 - RNA, 19 nt, Artificial Sequence
  Description of Artificial Sequence: Synthetic oligonucleotide
augucaaacaggcacauau

SEQ ID NO: 1436338 - RNA, 19 nt, Artificial Sequence
  Description of Artificial Sequence: Synthetic oligonucleotide
cuucauuaccucacggugg

SEQ ID NO: 1436339 - RNA, 19 nt, Artificial Sequence
  Description of Artificial Sequence: Synthetic oligonucleotide
guugacaccacgcaaggug

SEQ ID NO: 1436340 - RNA, 19 nt, Artificial Sequence
  Description of Artificial Sequence: Synthetic oligonucleotide
uguguagcgcaaaaccucc

SEQ ID NO: 1436341 - RNA, 19 nt, Artificial Sequence
  Description of Artificial Sequence: Synthetic oligonucleotide
aagaugauggagguaucgg

SEQ ID NO: 1436342 - RNA, 19 nt, Artificial Sequence
  Description of Artificial Sequence: Synthetic oligonucleotide
agcaccgccucguaaaugg

SEQ ID NO: 1436343 - RNA, 19 nt, Artificial Sequence
  Description of Artificial Sequence: Synthetic oligonucleotide
accucaugguuaaagaagc

SEQ ID NO: 1436344 - RNA, 19 nt, Artificial Sequence
  Description of Artificial Sequence: Synthetic oligonucleotide
ucguaaauggccuucuggu

SEQ ID NO: 1436345 - RNA, 19 nt, Artificial Sequence
  Description of Artificial Sequence: Synthetic oligonucleotide
uggcggaagaugauggagg

SEQ ID NO: 1436346 - RNA, 19 nt, Artificial Sequence
  Description of Artificial Sequence: Synthetic oligonucleotide
aaucucgucgguguacugg

SEQ ID NO: 1436347 - RNA, 19 nt, Artificial Sequence
  Description of Artificial Sequence: Synthetic oligonucleotide
uguaccgcugcauucuucc

SEQ ID NO: 1436348 - RNA, 19 nt, Artificial Sequence
  Description of Artificial Sequence: Synthetic oligonucleotide
uaucggugcaguaacgcug

SEQ ID NO: 1436349 - RNA, 19 nt, Artificial Sequence
  Description of Artificial Sequence: Synthetic oligonucleotide
ucgaugaaguagauucccg

SEQ ID NO: 1436350 - RNA, 19 nt, Artificial Sequence
  Description of Artificial Sequence: Synthetic oligonucleotide
cauucccacuuuuacagcc

SEQ ID NO: 1436351 - RNA, 19 nt, Artificial Sequence
  Description of Artificial Sequence: Synthetic oligonucleotide
uugcaacacgacaagggag

SEQ ID NO: 1436352 - RNA, 19 nt, Artificial Sequence
  Description of Artificial Sequence: Synthetic oligonucleotide
auggcgucuacacugccac

SEQ ID NO: 1436353 - RNA, 19 nt, Artificial Sequence
  Description of Artificial Sequence: Synthetic oligonucleotide
ugguuaaagaagcaggcuu

SEQ ID NO: 1436354 - RNA, 19 nt, Artificial Sequence
  Description of Artificial Sequence: Synthetic oligonucleotide
uuguugacauugaacuugc

SEQ ID NO: 1436355 - RNA, 19 nt, Artificial Sequence
  Description of Artificial Sequence: Synthetic oligonucleotide
agaaucguguuguugacau

SEQ ID NO: 1436356 - RNA, 19 nt, Artificial Sequence
  Description of Artificial Sequence: Synthetic oligonucleotide
auagcagccugacucgacg

SEQ ID NO: 1436357 - RNA, 19 nt, Artificial Sequence
  Description of Artificial Sequence: Synthetic oligonucleotide
aacaguaguguuggaacag

SEQ ID NO: 1436358 - RNA, 19 nt, Artificial Sequence
  Description of Artificial Sequence: Synthetic oligonucleotide
uuagucacuacgacguccu

SEQ ID NO: 1436359 - RNA, 19 nt, Artificial Sequence
  Description of Artificial Sequence: Synthetic oligonucleotide
ucgacgacaccgaaggccc

SEQ ID NO: 1436360 - RNA, 19 nt, Artificial Sequence
  Description of Artificial Sequence: Synthetic oligonucleotide
aagaaagacuccuggcgga

SEQ ID NO: 1436361 - RNA, 19 nt, Artificial Sequence
  Description of Artificial Sequence: Synthetic oligonucleotide
agaagcgaagcaauaguac

SEQ ID NO: 1436362 - RNA, 19 nt, Artificial Sequence
  Description of Artificial Sequence: Synthetic oligonucleotide
uguagcgcaaaaccuccag

SEQ ID NO: 1436363 - RNA, 19 nt, Artificial Sequence
  Description of Artificial Sequence: Synthetic oligonucleotide
ggagguauggcgcaugccg

SEQ ID NO: 1436364 - RNA, 19 nt, Artificial Sequence
  Description of Artificial Sequence: Synthetic oligonucleotide
uccuccucgauccggaccc

SEQ ID NO: 1436365 - RNA, 19 nt, Artificial Sequence
  Description of Artificial Sequence: Synthetic oligonucleotide
caccauagcagccugacuc

SEQ ID NO: 1436366 - RNA, 19 nt, Artificial Sequence
  Description of Artificial Sequence: Synthetic oligonucleotide
agugaccgagcccaugugg

SEQ ID NO: 1436367 - RNA, 19 nt, Artificial Sequence
  Description of Artificial Sequence: Synthetic oligonucleotide
ugggugaagaaucguguug

SEQ ID NO: 1436368 - RNA, 19 nt, Artificial Sequence
  Description of Artificial Sequence: Synthetic oligonucleotide
ugaaguagauucccggcuc

SEQ ID NO: 1436369 - RNA, 19 nt, Artificial Sequence
  Description of Artificial Sequence: Synthetic oligonucleotide
accauagcagccugacucg

SEQ ID NO: 1436370 - RNA, 19 nt, Artificial Sequence
  Description of Artificial Sequence: Synthetic oligonucleotide
caggcuuuccaucugguac

SEQ ID NO: 1436371 - RNA, 19 nt, Artificial Sequence
  Description of Artificial Sequence: Synthetic oligonucleotide
ggaguaacaguaguguugg

SEQ ID NO: 1436372 - RNA, 19 nt, Artificial Sequence
  Description of Artificial Sequence: Synthetic oligonucleotide
augaaguagauucccggcu

SEQ ID NO: 1436373 - RNA, 19 nt, Artificial Sequence
  Description of Artificial Sequence: Synthetic oligonucleotide
uugaacacccggcauucca

SEQ ID NO: 1436374 - RNA, 19 nt, Artificial Sequence
  Description of Artificial Sequence: Synthetic oligonucleotide
guuaaagaagcaggcuugg

SEQ ID NO: 1436375 - RNA, 19 nt, Artificial Sequence
  Description of Artificial Sequence: Synthetic oligonucleotide
uuaaagaagcaggcuuggg

SEQ ID NO: 1436376 - RNA, 19 nt, Artificial Sequence
  Description of Artificial Sequence: Synthetic oligonucleotide
aaggaggccucucugcaga

SEQ ID NO: 1436377 - RNA, 19 nt, Artificial Sequence
  Description of Artificial Sequence: Synthetic oligonucleotide
gaaguagauucccggcucc

SEQ ID NO: 1436378 - RNA, 19 nt, Artificial Sequence
  Description of Artificial Sequence: Synthetic oligonucleotide
gagguaucggugcaguaac

SEQ ID NO: 1436379 - RNA, 19 nt, Artificial Sequence
  Description of Artificial Sequence: Synthetic oligonucleotide
ucacuggagauccgguuug

SEQ ID NO: 1436380 - RNA, 19 nt, Artificial Sequence
  Description of Artificial Sequence: Synthetic oligonucleotide
guggcaugaagacugcccc

SEQ ID NO: 1436381 - RNA, 19 nt, Artificial Sequence
  Description of Artificial Sequence: Synthetic oligonucleotide
gucgguguacuggacaucg

SEQ ID NO: 1436382 - RNA, 19 nt, Artificial Sequence
  Description of Artificial Sequence: Synthetic oligonucleotide
uggagauccgguuugugua

SEQ ID NO: 1436383 - RNA, 19 nt, Artificial Sequence
  Description of Artificial Sequence: Synthetic oligonucleotide
gaagaaucguguuguugac

SEQ ID NO: 1436384 - RNA, 19 nt, Artificial Sequence
  Description of Artificial Sequence: Synthetic oligonucleotide
ugucaaacaggcacauauc

SEQ ID NO: 1436385 - RNA, 19 nt, Artificial Sequence
  Description of Artificial Sequence: Synthetic oligonucleotide
gaucuuucccauccaggug

SEQ ID NO: 1436386 - RNA, 19 nt, Artificial Sequence
  Description of Artificial Sequence: Synthetic oligonucleotide
caggcacauaucuccaucc

SEQ ID NO: 1436387 - RNA, 19 nt, Artificial Sequence
  Description of Artificial Sequence: Synthetic oligonucleotide
uggaucguccggucguugg

SEQ ID NO: 1436388 - RNA, 19 nt, Artificial Sequence
  Description of Artificial Sequence: Synthetic oligonucleotide
uucagcaccgccucguaaa

SEQ ID NO: 1436389 - RNA, 19 nt, Artificial Sequence
  Description of Artificial Sequence: Synthetic oligonucleotide
cauuaccucacggugggcc

SEQ ID NO: 1436390 - RNA, 19 nt, Artificial Sequence
  Description of Artificial Sequence: Synthetic oligonucleotide
cacuacgacguccuccucg

SEQ ID NO: 1436391 - RNA, 19 nt, Artificial Sequence
  Description of Artificial Sequence: Synthetic oligonucleotide
agcgcaaaaccuccagcuc

SEQ ID NO: 1436392 - RNA, 19 nt, Artificial Sequence
  Description of Artificial Sequence: Synthetic oligonucleotide
aguaacaguaguguuggaa

SEQ ID NO: 1436393 - RNA, 19 nt, Artificial Sequence
  Description of Artificial Sequence: Synthetic oligonucleotide
ugaacacccggcauuccac

SEQ ID NO: 1436394 - RNA, 19 nt, Artificial Sequence
  Description of Artificial Sequence: Synthetic oligonucleotide
cucgacgacaccgaaggcc

SEQ ID NO: 1436395 - RNA, 19 nt, Artificial Sequence
  Description of Artificial Sequence: Synthetic oligonucleotide
cucacggugggccucacug

SEQ ID NO: 1436396 - RNA, 19 nt, Artificial Sequence
  Description of Artificial Sequence: Synthetic oligonucleotide
guagcuggaaggaagccug

SEQ ID NO: 1436397 - RNA, 19 nt, Artificial Sequence
  Description of Artificial Sequence: Synthetic oligonucleotide
guuagucacuacgacgucc

SEQ ID NO: 1436398 - RNA, 19 nt, Artificial Sequence
  Description of Artificial Sequence: Synthetic oligonucleotide
ugacucgacgacaccgaag

SEQ ID NO: 1436399 - RNA, 19 nt, Artificial Sequence
  Description of Artificial Sequence: Synthetic oligonucleotide
cacgucgugcacaucgagg

SEQ ID NO: 1436400 - RNA, 19 nt, Artificial Sequence
  Description of Artificial Sequence: Synthetic oligonucleotide
acaguaguguuggaacagg

SEQ ID NO: 1436401 - RNA, 19 nt, Artificial Sequence
  Description of Artificial Sequence: Synthetic oligonucleotide
ccauguggcaugaagacug

SEQ ID NO: 1436402 - RNA, 19 nt, Artificial Sequence
  Description of Artificial Sequence: Synthetic oligonucleotide
acaccgaaggcccagugaa

SEQ ID NO: 1436403 - RNA, 19 nt, Artificial Sequence
  Description of Artificial Sequence: Synthetic oligonucleotide
gcacauaucuccauccugg

SEQ ID NO: 1436404 - RNA, 19 nt, Artificial Sequence
  Description of Artificial Sequence: Synthetic oligonucleotide
ccuugcaacacgacaaggg

SEQ ID NO: 1436405 - RNA, 19 nt, Artificial Sequence
  Description of Artificial Sequence: Synthetic oligonucleotide
aggaccucaugguuaaaga

SEQ ID NO: 1436406 - RNA, 19 nt, Artificial Sequence
  Description of Artificial Sequence: Synthetic oligonucleotide
aguguuggaacaggcuuuc

SEQ ID NO: 1436407 - RNA, 19 nt, Artificial Sequence
  Description of Artificial Sequence: Synthetic oligonucleotide
ucagccgcucacacaggcg

SEQ ID NO: 1436408 - RNA, 19 nt, Artificial Sequence
  Description of Artificial Sequence: Synthetic oligonucleotide
ucauucccacuuuuacagc

SEQ ID NO: 1436409 - RNA, 19 nt, Artificial Sequence
  Description of Artificial Sequence: Synthetic oligonucleotide
guacuggacaucguccacg

SEQ ID NO: 1436410 - RNA, 19 nt, Artificial Sequence
  Description of Artificial Sequence: Synthetic oligonucleotide
uaggagguauggcgcaugc

SEQ ID NO: 1436411 - RNA, 19 nt, Artificial Sequence
  Description of Artificial Sequence: Synthetic oligonucleotide
aagaaucguguuguugaca

SEQ ID NO: 1436412 - RNA, 19 nt, Artificial Sequence
  Description of Artificial Sequence: Synthetic oligonucleotide
gucgaugaaguagauuccc

SEQ ID NO: 1436413 - RNA, 19 nt, Artificial Sequence
  Description of Artificial Sequence: Synthetic oligonucleotide
gguuaaagaagcaggcuug

SEQ ID NO: 1436414 - RNA, 19 nt, Artificial Sequence
  Description of Artificial Sequence: Synthetic oligonucleotide
agauccgguuuguguagcg

SEQ ID NO: 1436415 - RNA, 19 nt, Artificial Sequence
  Description of Artificial Sequence: Synthetic oligonucleotide
gugaugucagaagcgaagc

SEQ ID NO: 1436416 - RNA, 19 nt, Artificial Sequence
  Description of Artificial Sequence: Synthetic oligonucleotide
auggccguagugcagcaca

SEQ ID NO: 1436417 - RNA, 19 nt, Artificial Sequence
  Description of Artificial Sequence: Synthetic oligonucleotide
guagcgcaaaaccuccagc

SEQ ID NO: 1436418 - RNA, 19 nt, Artificial Sequence
  Description of Artificial Sequence: Synthetic oligonucleotide
acuacgacguccuccucga

SEQ ID NO: 1436419 - RNA, 19 nt, Artificial Sequence
  Description of Artificial Sequence: Synthetic oligonucleotide
ugccaugcaggcuucaauu

SEQ ID NO: 1436420 - RNA, 19 nt, Artificial Sequence
  Description of Artificial Sequence: Synthetic oligonucleotide
aaaugcuccuuggaaugga

SEQ ID NO: 1436421 - RNA, 19 nt, Artificial Sequence
  Description of Artificial Sequence: Synthetic oligonucleotide
uccauccuggaucguccgg

SEQ ID NO: 1436422 - RNA, 19 nt, Artificial Sequence
  Description of Artificial Sequence: Synthetic oligonucleotide
agcagccugacucgacgac

SEQ ID NO: 1436423 - RNA, 19 nt, Artificial Sequence
  Description of Artificial Sequence: Synthetic oligonucleotide
uuccccgccuugcaacacg

SEQ ID NO: 1436424 - RNA, 19 nt, Artificial Sequence
  Description of Artificial Sequence: Synthetic oligonucleotide
uacgacguccuccucgauc

SEQ ID NO: 1436425 - RNA, 19 nt, Artificial Sequence
  Description of Artificial Sequence: Synthetic oligonucleotide
accgaaggcccagugaaag

SEQ ID NO: 1436426 - RNA, 19 nt, Artificial Sequence
  Description of Artificial Sequence: Synthetic oligonucleotide
agccggugcaugucaggcc

SEQ ID NO: 1436427 - RNA, 19 nt, Artificial Sequence
  Description of Artificial Sequence: Synthetic oligonucleotide
auccgguuuguguagcgca

SEQ ID NO: 1436428 - RNA, 19 nt, Artificial Sequence
  Description of Artificial Sequence: Synthetic oligonucleotide
uccuggaucguccggucgu

SEQ ID NO: 1436429 - RNA, 19 nt, Artificial Sequence
  Description of Artificial Sequence: Synthetic oligonucleotide
ugucagaagcgaagcaaua

SEQ ID NO: 1436430 - RNA, 19 nt, Artificial Sequence
  Description of Artificial Sequence: Synthetic oligonucleotide
ugucuugaacacccggcau

SEQ ID NO: 1436431 - RNA, 19 nt, Artificial Sequence
  Description of Artificial Sequence: Synthetic oligonucleotide
ugcaguaacgcugcgucuc

SEQ ID NO: 1436432 - RNA, 19 nt, Artificial Sequence
  Description of Artificial Sequence: Synthetic oligonucleotide
ucuuucccauccagguggc

SEQ ID NO: 1436433 - RNA, 19 nt, Artificial Sequence
  Description of Artificial Sequence: Synthetic oligonucleotide
uauggcgcaugccgccccg

SEQ ID NO: 1436434 - RNA, 19 nt, Artificial Sequence
  Description of Artificial Sequence: Synthetic oligonucleotide
cacuguuagucacuacgac

SEQ ID NO: 1436435 - RNA, 19 nt, Artificial Sequence
  Description of Artificial Sequence: Synthetic oligonucleotide
gaccccgccaaaguugcgg

SEQ ID NO: 1436436 - RNA, 19 nt, Artificial Sequence
  Description of Artificial Sequence: Synthetic oligonucleotide
cacgguccgaggcacacag

SEQ ID NO: 1436437 - RNA, 19 nt, Artificial Sequence
  Description of Artificial Sequence: Synthetic oligonucleotide
gauucccggcuccacaguc

SEQ ID NO: 1436438 - RNA, 19 nt, Artificial Sequence
  Description of Artificial Sequence: Synthetic oligonucleotide
acagccgcguucucaccac

SEQ ID NO: 1436439 - RNA, 19 nt, Artificial Sequence
  Description of Artificial Sequence: Synthetic oligonucleotide
gaucguccggucguugggg

SEQ ID NO: 1436440 - RNA, 19 nt, Artificial Sequence
  Description of Artificial Sequence: Synthetic oligonucleotide
ccuucauuaccucacggug

SEQ ID NO: 1436441 - RNA, 19 nt, Artificial Sequence
  Description of Artificial Sequence: Synthetic oligonucleotide
acucgacgacaccgaaggc

SEQ ID NO: 1436442 - RNA, 19 nt, Artificial Sequence
  Description of Artificial Sequence: Synthetic oligonucleotide
gacaccauagcagccugac

SEQ ID NO: 1436443 - RNA, 19 nt, Artificial Sequence
  Description of Artificial Sequence: Synthetic oligonucleotide
ucauugugcucaucacagu

SEQ ID NO: 1436444 - RNA, 19 nt, Artificial Sequence
  Description of Artificial Sequence: Synthetic oligonucleotide
ugccuguucagggcgaaca

SEQ ID NO: 1436445 - RNA, 19 nt, Artificial Sequence
  Description of Artificial Sequence: Synthetic oligonucleotide
gcccacgucgugcacaucg

SEQ ID NO: 1436446 - RNA, 19 nt, Artificial Sequence
  Description of Artificial Sequence: Synthetic oligonucleotide
gggaguaacaguaguguug

SEQ ID NO: 1436447 - RNA, 19 nt, Artificial Sequence
  Description of Artificial Sequence: Synthetic oligonucleotide
ugcgggucaguuccuccag

SEQ ID NO: 1436448 - RNA, 19 nt, Artificial Sequence
  Description of Artificial Sequence: Synthetic oligonucleotide
uaccgcugcauucuuccuc

SEQ ID NO: 1436449 - RNA, 19 nt, Artificial Sequence
  Description of Artificial Sequence: Synthetic oligonucleotide
caugcccggcuccaggugc

SEQ ID NO: 1436450 - RNA, 19 nt, Artificial Sequence
  Description of Artificial Sequence: Synthetic oligonucleotide
uccgaggcacacaggucag

SEQ ID NO: 1436451 - RNA, 19 nt, Artificial Sequence
  Description of Artificial Sequence: Synthetic oligonucleotide
gagguauggcgcaugccgc

SEQ ID NO: 1436452 - RNA, 19 nt, Artificial Sequence
  Description of Artificial Sequence: Synthetic oligonucleotide
cauguggcaugaagacugc

SEQ ID NO: 1436453 - RNA, 19 nt, Artificial Sequence
  Description of Artificial Sequence: Synthetic oligonucleotide
uguuagucacuacgacguc

SEQ ID NO: 1436454 - RNA, 19 nt, Artificial Sequence
  Description of Artificial Sequence: Synthetic oligonucleotide
acgacaagggagccggccu

SEQ ID NO: 1436455 - RNA, 19 nt, Artificial Sequence
  Description of Artificial Sequence: Synthetic oligonucleotide
ucuuccccgccuugcaaca

SEQ ID NO: 1436456 - RNA, 19 nt, Artificial Sequence
  Description of Artificial Sequence: Synthetic oligonucleotide
gacaucguccacggcauac

SEQ ID NO: 1436457 - RNA, 19 nt, Artificial Sequence
  Description of Artificial Sequence: Synthetic oligonucleotide
cucuuccccgccuugcaac

SEQ ID NO: 1436458 - RNA, 19 nt, Artificial Sequence
  Description of Artificial Sequence: Synthetic oligonucleotide
cuggcggaagaugauggag

SEQ ID NO: 1436459 - RNA, 19 nt, Artificial Sequence
  Description of Artificial Sequence: Synthetic oligonucleotide
caccgccucguaaauggcc

SEQ ID NO: 1436460 - RNA, 19 nt, Artificial Sequence
  Description of Artificial Sequence: Synthetic oligonucleotide
caauuuccuccacgguccg

SEQ ID NO: 1436461 - RNA, 19 nt, Artificial Sequence
  Description of Artificial Sequence: Synthetic oligonucleotide
uggccguagugcagcacag

SEQ ID NO: 1436462 - RNA, 19 nt, Artificial Sequence
  Description of Artificial Sequence: Synthetic oligonucleotide
gauccgguuuguguagcgc

SEQ ID NO: 1436463 - RNA, 19 nt, Artificial Sequence
  Description of Artificial Sequence: Synthetic oligonucleotide
acauaucuccauccuggau

SEQ ID NO: 1436464 - RNA, 19 nt, Artificial Sequence
  Description of Artificial Sequence: Synthetic oligonucleotide
uccgguuuguguagcgcaa

SEQ ID NO: 1436465 - RNA, 19 nt, Artificial Sequence
  Description of Artificial Sequence: Synthetic oligonucleotide
cagaagcgaagcaauagua

SEQ ID NO: 1436466 - RNA, 19 nt, Artificial Sequence
  Description of Artificial Sequence: Synthetic oligonucleotide
gugcaugucaggccaccag

SEQ ID NO: 1436467 - RNA, 19 nt, Artificial Sequence
  Description of Artificial Sequence: Synthetic oligonucleotide
gacaccgaaggcccaguga

SEQ ID NO: 1436468 - RNA, 19 nt, Artificial Sequence
  Description of Artificial Sequence: Synthetic oligonucleotide
auacagguguaggagguau

SEQ ID NO: 1436469 - RNA, 19 nt, Artificial Sequence
  Description of Artificial Sequence: Synthetic oligonucleotide
gguaucggugcaguaacgc

SEQ ID NO: 1436470 - RNA, 19 nt, Artificial Sequence
  Description of Artificial Sequence: Synthetic oligonucleotide
gaugacaccauagcagccu

SEQ ID NO: 1436471 - RNA, 19 nt, Artificial Sequence
  Description of Artificial Sequence: Synthetic oligonucleotide
aaguagauucccggcucca

SEQ ID NO: 1436472 - RNA, 19 nt, Artificial Sequence
  Description of Artificial Sequence: Synthetic oligonucleotide
ggcacauaucuccauccug

SEQ ID NO: 1436473 - RNA, 19 nt, Artificial Sequence
  Description of Artificial Sequence: Synthetic oligonucleotide
gguggauacggucggccag

SEQ ID NO: 1436474 - RNA, 19 nt, Artificial Sequence
  Description of Artificial Sequence: Synthetic oligonucleotide
ugucacagccugccaugca

SEQ ID NO: 1436475 - RNA, 19 nt, Artificial Sequence
  Description of Artificial Sequence: Synthetic oligonucleotide
uagcagccugacucgacga

SEQ ID NO: 1436476 - RNA, 19 nt, Artificial Sequence
  Description of Artificial Sequence: Synthetic oligonucleotide
gauccggaccccgccaaag

SEQ ID NO: 1436477 - RNA, 19 nt, Artificial Sequence
  Description of Artificial Sequence: Synthetic oligonucleotide
cagccugacucgacgacac

SEQ ID NO: 1436478 - RNA, 19 nt, Artificial Sequence
  Description of Artificial Sequence: Synthetic oligonucleotide
ugacaccauagcagccuga

SEQ ID NO: 1436479 - RNA, 19 nt, Artificial Sequence
  Description of Artificial Sequence: Synthetic oligonucleotide
agguggauacggucggcca

SEQ ID NO: 1436480 - RNA, 19 nt, Artificial Sequence
  Description of Artificial Sequence: Synthetic oligonucleotide
gccguagugcagcacagcc

SEQ ID NO: 1436481 - RNA, 19 nt, Artificial Sequence
  Description of Artificial Sequence: Synthetic oligonucleotide
agccugacucgacgacacc

SEQ ID NO: 1436482 - RNA, 19 nt, Artificial Sequence
  Description of Artificial Sequence: Synthetic oligonucleotide
gcaggugaugucagaagcg

SEQ ID NO: 1436483 - RNA, 19 nt, Artificial Sequence
  Description of Artificial Sequence: Synthetic oligonucleotide
uccucgauccggaccccgc

SEQ ID NO: 1436484 - RNA, 19 nt, Artificial Sequence
  Description of Artificial Sequence: Synthetic oligonucleotide
augcgggucaguuccucca

SEQ ID NO: 1436485 - RNA, 19 nt, Artificial Sequence
  Description of Artificial Sequence: Synthetic oligonucleotide
ucucuuccccgccuugcaa

SEQ ID NO: 1436486 - RNA, 19 nt, Artificial Sequence
  Description of Artificial Sequence: Synthetic oligonucleotide
acaccacgcaaggugagga

SEQ ID NO: 1436487 - RNA, 19 nt, Artificial Sequence
  Description of Artificial Sequence: Synthetic oligonucleotide
ucaaugcgcuccacacccu

SEQ ID NO: 1436488 - RNA, 19 nt, Artificial Sequence
  Description of Artificial Sequence: Synthetic oligonucleotide
gacgacaccgaaggcccag

SEQ ID NO: 1436489 - RNA, 19 nt, Artificial Sequence
  Description of Artificial Sequence: Synthetic oligonucleotide
caacacgacaagggagccg

SEQ ID NO: 1436490 - RNA, 19 nt, Artificial Sequence
  Description of Artificial Sequence: Synthetic oligonucleotide
gagauccgguuuguguagc

SEQ ID NO: 1436491 - RNA, 19 nt, Artificial Sequence
  Description of Artificial Sequence: Synthetic oligonucleotide
caauaguacucuccaccca

SEQ ID NO: 1436492 - RNA, 19 nt, Artificial Sequence
  Description of Artificial Sequence: Synthetic oligonucleotide
uguugacaccacgcaaggu

SEQ ID NO: 1436493 - RNA, 19 nt, Artificial Sequence
  Description of Artificial Sequence: Synthetic oligonucleotide
uagugcagcacagccgcgu

SEQ ID NO: 1436494 - RNA, 19 nt, Artificial Sequence
  Description of Artificial Sequence: Synthetic oligonucleotide
guagccgcccacgucgugc

SEQ ID NO: 1436495 - RNA, 19 nt, Artificial Sequence
  Description of Artificial Sequence: Synthetic oligonucleotide
ccacugucuguguugacac

SEQ ID NO: 1436496 - RNA, 19 nt, Artificial Sequence
  Description of Artificial Sequence: Synthetic oligonucleotide
cagguggauacggucggcc

SEQ ID NO: 1436497 - RNA, 19 nt, Artificial Sequence
  Description of Artificial Sequence: Synthetic oligonucleotide
ccacgcaaggugaggaggg

SEQ ID NO: 1436498 - RNA, 19 nt, Artificial Sequence
  Description of Artificial Sequence: Synthetic oligonucleotide
auaguacucuccacccaug

SEQ ID NO: 1436499 - RNA, 19 nt, Artificial Sequence
  Description of Artificial Sequence: Synthetic oligonucleotide
uggcgcaugccgccccggg

SEQ ID NO: 1436500 - RNA, 19 nt, Artificial Sequence
  Description of Artificial Sequence: Synthetic oligonucleotide
ucgauccggaccccgccaa

SEQ ID NO: 1436501 - RNA, 19 nt, Artificial Sequence
  Description of Artificial Sequence: Synthetic oligonucleotide
cagccggugcaugucaggc

SEQ ID NO: 1436502 - RNA, 19 nt, Artificial Sequence
  Description of Artificial Sequence: Synthetic oligonucleotide
agguaucggugcaguaacg

SEQ ID NO: 1436503 - RNA, 19 nt, Artificial Sequence
  Description of Artificial Sequence: Synthetic oligonucleotide
cacgacaagggagccggcc

SEQ ID NO: 1436504 - RNA, 19 nt, Artificial Sequence
  Description of Artificial Sequence: Synthetic oligonucleotide
uccggaccccgccaaaguu

SEQ ID NO: 1436505 - RNA, 19 nt, Artificial Sequence
  Description of Artificial Sequence: Synthetic oligonucleotide
ucggugcaguaacgcugcg

SEQ ID NO: 1436506 - RNA, 19 nt, Artificial Sequence
  Description of Artificial Sequence: Synthetic oligonucleotide
aaguugcggaagcgcugca

SEQ ID NO: 1436507 - RNA, 19 nt, Artificial Sequence
  Description of Artificial Sequence: Synthetic oligonucleotide
caccacgcaaggugaggag

SEQ ID NO: 1436508 - RNA, 19 nt, Artificial Sequence
  Description of Artificial Sequence: Synthetic oligonucleotide
ggguugacuuuccaguguc

SEQ ID NO: 1436509 - RNA, 19 nt, Artificial Sequence
  Description of Artificial Sequence: Synthetic oligonucleotide
cacauaucuccauccugga

SEQ ID NO: 1436510 - RNA, 19 nt, Artificial Sequence
  Description of Artificial Sequence: Synthetic oligonucleotide
guaucggugcaguaacgcu

SEQ ID NO: 1436511 - RNA, 19 nt, Artificial Sequence
  Description of Artificial Sequence: Synthetic oligonucleotide
ggucgaugaaguagauucc

SEQ ID NO: 1436512 - RNA, 19 nt, Artificial Sequence
  Description of Artificial Sequence: Synthetic oligonucleotide
cugugcgcaggcuccgcag

SEQ ID NO: 1436513 - RNA, 19 nt, Artificial Sequence
  Description of Artificial Sequence: Synthetic oligonucleotide
caggugaugucagaagcga

SEQ ID NO: 1436514 - RNA, 19 nt, Artificial Sequence
  Description of Artificial Sequence: Synthetic oligonucleotide
gcccauguggcaugaagac

SEQ ID NO: 1436515 - RNA, 19 nt, Artificial Sequence
  Description of Artificial Sequence: Synthetic oligonucleotide
caaugcgcuccacacccuc

SEQ ID NO: 1436516 - RNA, 19 nt, Artificial Sequence
  Description of Artificial Sequence: Synthetic oligonucleotide
ggcgaacagugccaguggc

SEQ ID NO: 1436517 - RNA, 19 nt, Artificial Sequence
  Description of Artificial Sequence: Synthetic oligonucleotide
acaucguccacggcauacu

SEQ ID NO: 1436518 - RNA, 19 nt, Artificial Sequence
  Description of Artificial Sequence: Synthetic oligonucleotide
accgccucguaaauggccu

SEQ ID NO: 1436519 - RNA, 19 nt, Artificial Sequence
  Description of Artificial Sequence: Synthetic oligonucleotide
cucgucgguguacuggaca

SEQ ID NO: 1436520 - RNA, 19 nt, Artificial Sequence
  Description of Artificial Sequence: Synthetic oligonucleotide
agccggccuguaccgcugc

SEQ ID NO: 1436521 - RNA, 19 nt, Artificial Sequence
  Description of Artificial Sequence: Synthetic oligonucleotide
ccacucaggaggccaaugc

SEQ ID NO: 1436522 - RNA, 19 nt, Artificial Sequence
  Description of Artificial Sequence: Synthetic oligonucleotide
gccaaaguugcggaagcgc

SEQ ID NO: 1436523 - RNA, 19 nt, Artificial Sequence
  Description of Artificial Sequence: Synthetic oligonucleotide
accgagcccauguggcaug

SEQ ID NO: 1436524 - RNA, 19 nt, Artificial Sequence
  Description of Artificial Sequence: Synthetic oligonucleotide
auccggaccccgccaaagu

SEQ ID NO: 1436525 - RNA, 19 nt, Artificial Sequence
  Description of Artificial Sequence: Synthetic oligonucleotide
guaggagguauggcgcaug

SEQ ID NO: 1436526 - RNA, 19 nt, Artificial Sequence
  Description of Artificial Sequence: Synthetic oligonucleotide
cagugaaagaaagacuccu

SEQ ID NO: 1436527 - RNA, 19 nt, Artificial Sequence
  Description of Artificial Sequence: Synthetic oligonucleotide
ccguagugcagcacagccg

SEQ ID NO: 1436528 - RNA, 19 nt, Artificial Sequence
  Description of Artificial Sequence: Synthetic oligonucleotide
agacuccuggcggaagaug

SEQ ID NO: 1436529 - RNA, 19 nt, Artificial Sequence
  Description of Artificial Sequence: Synthetic oligonucleotide
cauugugcucaucacaguu

SEQ ID NO: 1436530 - RNA, 19 nt, Artificial Sequence
  Description of Artificial Sequence: Synthetic oligonucleotide
ucgguguacuggacaucgu

SEQ ID NO: 1436531 - RNA, 19 nt, Artificial Sequence
  Description of Artificial Sequence: Synthetic oligonucleotide
caaucucgucgguguacug

SEQ ID NO: 1436532 - RNA, 19 nt, Artificial Sequence
  Description of Artificial Sequence: Synthetic oligonucleotide
cauccuggaucguccgguc

SEQ ID NO: 1436533 - RNA, 19 nt, Artificial Sequence
  Description of Artificial Sequence: Synthetic oligonucleotide
gcggaagcgcugcaggacc

SEQ ID NO: 1436534 - RNA, 19 nt, Artificial Sequence
  Description of Artificial Sequence: Synthetic oligonucleotide
ggugccuugcugugcgcag

SEQ ID NO: 1436535 - RNA, 19 nt, Artificial Sequence
  Description of Artificial Sequence: Synthetic oligonucleotide
cuccuggcggaagaugaug

SEQ ID NO: 1436536 - RNA, 19 nt, Artificial Sequence
  Description of Artificial Sequence: Synthetic oligonucleotide
gcguucucaccacugcagc

SEQ ID NO: 1436537 - RNA, 19 nt, Artificial Sequence
  Description of Artificial Sequence: Synthetic oligonucleotide
cacagccgcguucucacca

SEQ ID NO: 1436538 - RNA, 19 nt, Artificial Sequence
  Description of Artificial Sequence: Synthetic oligonucleotide
cacgaucucugggugaaga

SEQ ID NO: 1436539 - RNA, 19 nt, Artificial Sequence
  Description of Artificial Sequence: Synthetic oligonucleotide
ggcauggccguagugcagc

SEQ ID NO: 1436540 - RNA, 19 nt, Artificial Sequence
  Description of Artificial Sequence: Synthetic oligonucleotide
uggauacggucggccagcc

SEQ ID NO: 1436541 - RNA, 19 nt, Artificial Sequence
  Description of Artificial Sequence: Synthetic oligonucleotide
uggagguaucggugcagua

SEQ ID NO: 1436542 - RNA, 19 nt, Artificial Sequence
  Description of Artificial Sequence: Synthetic oligonucleotide
ggagguaucggugcaguaa

SEQ ID NO: 1436543 - RNA, 19 nt, Artificial Sequence
  Description of Artificial Sequence: Synthetic oligonucleotide
cacccggcauuccacgauc

SEQ ID NO: 1436544 - RNA, 19 nt, Artificial Sequence
  Description of Artificial Sequence: Synthetic oligonucleotide
gaguaacaguaguguugga

SEQ ID NO: 1436545 - RNA, 19 nt, Artificial Sequence
  Description of Artificial Sequence: Synthetic oligonucleotide
ggaauggaucuuucccauc

SEQ ID NO: 1436546 - RNA, 19 nt, Artificial Sequence
  Description of Artificial Sequence: Synthetic oligonucleotide
acgcaaggugaggagggca

SEQ ID NO: 1436547 - RNA, 19 nt, Artificial Sequence
  Description of Artificial Sequence: Synthetic oligonucleotide
gccuugcaacacgacaagg

SEQ ID NO: 1436548 - RNA, 19 nt, Artificial Sequence
  Description of Artificial Sequence: Synthetic oligonucleotide
cccgggaguaacaguagug

SEQ ID NO: 1436549 - RNA, 19 nt, Artificial Sequence
  Description of Artificial Sequence: Synthetic oligonucleotide
cguaaauggccuucugguc

SEQ ID NO: 1436550 - RNA, 19 nt, Artificial Sequence
  Description of Artificial Sequence: Synthetic oligonucleotide
gucuugaacacccggcauu

SEQ ID NO: 1436551 - RNA, 19 nt, Artificial Sequence
  Description of Artificial Sequence: Synthetic oligonucleotide
ggcgucuacacugccacuc

SEQ ID NO: 1436552 - RNA, 19 nt, Artificial Sequence
  Description of Artificial Sequence: Synthetic oligonucleotide
ccacuguuagucacuacga

SEQ ID NO: 1436553 - RNA, 19 nt, Artificial Sequence
  Description of Artificial Sequence: Synthetic oligonucleotide
cacggugggccucacugga

SEQ ID NO: 1436554 - RNA, 19 nt, Artificial Sequence
  Description of Artificial Sequence: Synthetic oligonucleotide
cacgcaaggugaggagggc

SEQ ID NO: 1436555 - RNA, 19 nt, Artificial Sequence
  Description of Artificial Sequence: Synthetic oligonucleotide
ccaggaagugaccgagccc

SEQ ID NO: 1436556 - RNA, 19 nt, Artificial Sequence
  Description of Artificial Sequence: Synthetic oligonucleotide
gggugaagaaucguguugu

SEQ ID NO: 1436557 - RNA, 19 nt, Artificial Sequence
  Description of Artificial Sequence: Synthetic oligonucleotide
ggagcaggugaugucagaa

SEQ ID NO: 1436558 - RNA, 19 nt, Artificial Sequence
  Description of Artificial Sequence: Synthetic oligonucleotide
uggcgucuacacugccacu

SEQ ID NO: 1436559 - RNA, 19 nt, Artificial Sequence
  Description of Artificial Sequence: Synthetic oligonucleotide
aggugaugucagaagcgaa

SEQ ID NO: 1436560 - RNA, 19 nt, Artificial Sequence
  Description of Artificial Sequence: Synthetic oligonucleotide
ucacuacgacguccuccuc

SEQ ID NO: 1436561 - RNA, 19 nt, Artificial Sequence
  Description of Artificial Sequence: Synthetic oligonucleotide
gcaacacgacaagggagcc

SEQ ID NO: 1436562 - RNA, 19 nt, Artificial Sequence
  Description of Artificial Sequence: Synthetic oligonucleotide
acacgacaagggagccggc

SEQ ID NO: 1436563 - RNA, 19 nt, Artificial Sequence
  Description of Artificial Sequence: Synthetic oligonucleotide
ggauacggucggccagccg

SEQ ID NO: 1436564 - RNA, 19 nt, Artificial Sequence
  Description of Artificial Sequence: Synthetic oligonucleotide
cgcguucucaccacugcag

SEQ ID NO: 1436565 - RNA, 19 nt, Artificial Sequence
  Description of Artificial Sequence: Synthetic oligonucleotide
ccgccaaaguugcggaagc

SEQ ID NO: 1436566 - RNA, 19 nt, Artificial Sequence
  Description of Artificial Sequence: Synthetic oligonucleotide
gccgcguucucaccacugc

SEQ ID NO: 1436567 - RNA, 19 nt, Artificial Sequence
  Description of Artificial Sequence: Synthetic oligonucleotide
ccggaccccgccaaaguug

SEQ ID NO: 1436568 - RNA, 19 nt, Artificial Sequence
  Description of Artificial Sequence: Synthetic oligonucleotide
aacuugccauuggcaggga

SEQ ID NO: 1436569 - RNA, 19 nt, Artificial Sequence
  Description of Artificial Sequence: Synthetic oligonucleotide
ccaaaguugcggaagcgcu

SEQ ID NO: 1436570 - RNA, 19 nt, Artificial Sequence
  Description of Artificial Sequence: Synthetic oligonucleotide
ugccgccccgggaguaaca

SEQ ID NO: 1436571 - RNA, 19 nt, Artificial Sequence
  Description of Artificial Sequence: Synthetic oligonucleotide
cucgauccggaccccgcca

SEQ ID NO: 1436572 - RNA, 19 nt, Artificial Sequence
  Description of Artificial Sequence: Synthetic oligonucleotide
augccgccccgggaguaac

SEQ ID NO: 1436573 - RNA, 19 nt, Artificial Sequence
  Description of Artificial Sequence: Synthetic oligonucleotide
auacggucggccagccggu

SEQ ID NO: 1436574 - RNA, 19 nt, Artificial Sequence
  Description of Artificial Sequence: Synthetic oligonucleotide
cccgccaaaguugcggaag

SEQ ID NO: 1436575 - RNA, 19 nt, Artificial Sequence
  Description of Artificial Sequence: Synthetic oligonucleotide
agccgcguucucaccacug

SEQ ID NO: 1436576 - RNA, 19 nt, Artificial Sequence
  Description of Artificial Sequence: Synthetic oligonucleotide
ugcugugcgcaggcuccgc

SEQ ID NO: 1436577 - RNA, 19 nt, Artificial Sequence
  Description of Artificial Sequence: Synthetic oligonucleotide
cauggccguagugcagcac

SEQ ID NO: 1436578 - RNA, 19 nt, Artificial Sequence
  Description of Artificial Sequence: Synthetic oligonucleotide
ccagccggugcaugucagg

SEQ ID NO: 1436579 - RNA, 19 nt, Artificial Sequence
  Description of Artificial Sequence: Synthetic oligonucleotide
cuggaucguccggucguug

SEQ ID NO: 1436580 - RNA, 19 nt, Artificial Sequence
  Description of Artificial Sequence: Synthetic oligonucleotide
cggaccccgccaaaguugc

SEQ ID NO: 1436581 - RNA, 19 nt, Artificial Sequence
  Description of Artificial Sequence: Synthetic oligonucleotide
ccucaugguuaaagaagca

SEQ ID NO: 1436582 - RNA, 19 nt, Artificial Sequence
  Description of Artificial Sequence: Synthetic oligonucleotide
cuuccccgccuugcaacac

SEQ ID NO: 1436583 - RNA, 19 nt, Artificial Sequence
  Description of Artificial Sequence: Synthetic oligonucleotide
cugggugaagaaucguguu

SEQ ID NO: 1436584 - RNA, 19 nt, Artificial Sequence
  Description of Artificial Sequence: Synthetic oligonucleotide
cagcaccgccucguaaaug

SEQ ID NO: 1436585 - RNA, 19 nt, Artificial Sequence
  Description of Artificial Sequence: Synthetic oligonucleotide
guguagcgcaaaaccucca

SEQ ID NO: 1436586 - RNA, 19 nt, Artificial Sequence
  Description of Artificial Sequence: Synthetic oligonucleotide
ccugacucgacgacaccga

SEQ ID NO: 1436587 - RNA, 19 nt, Artificial Sequence
  Description of Artificial Sequence: Synthetic oligonucleotide
uacggucggccagccggug

SEQ ID NO: 1436588 - RNA, 19 nt, Artificial Sequence
  Description of Artificial Sequence: Synthetic oligonucleotide
auggcgcaugccgccccgg

SEQ ID NO: 1436589 - RNA, 19 nt, Artificial Sequence
  Description of Artificial Sequence: Synthetic oligonucleotide
ccucgauccggaccccgcc

SEQ ID NO: 1436590 - RNA, 19 nt, Artificial Sequence
  Description of Artificial Sequence: Synthetic oligonucleotide
acgacaccgaaggcccagu

SEQ ID NO: 1436591 - RNA, 19 nt, Artificial Sequence
  Description of Artificial Sequence: Synthetic oligonucleotide
ccacgucgugcacaucgag

SEQ ID NO: 1436592 - RNA, 19 nt, Artificial Sequence
  Description of Artificial Sequence: Synthetic oligonucleotide
gcgucuacacugccacuca

SEQ ID NO: 1436593 - RNA, 19 nt, Artificial Sequence
  Description of Artificial Sequence: Synthetic oligonucleotide
gcagccugacucgacgaca

SEQ ID NO: 1436594 - RNA, 19 nt, Artificial Sequence
  Description of Artificial Sequence: Synthetic oligonucleotide
caccgaaggcccagugaaa

SEQ ID NO: 1436595 - RNA, 19 nt, Artificial Sequence
  Description of Artificial Sequence: Synthetic oligonucleotide
gcgugaaggccuugucaca

SEQ ID NO: 1436596 - RNA, 19 nt, Artificial Sequence
  Description of Artificial Sequence: Synthetic oligonucleotide
ugccacucaggaggccaau

SEQ ID NO: 1436597 - RNA, 19 nt, Artificial Sequence
  Description of Artificial Sequence: Synthetic oligonucleotide
guaccgcugcauucuuccu

SEQ ID NO: 1436598 - RNA, 19 nt, Artificial Sequence
  Description of Artificial Sequence: Synthetic oligonucleotide
caugucaaacaggcacaua

SEQ ID NO: 1436599 - RNA, 19 nt, Artificial Sequence
  Description of Artificial Sequence: Synthetic oligonucleotide
cgccuugcaacacgacaag

SEQ ID NO: 1436600 - RNA, 19 nt, Artificial Sequence
  Description of Artificial Sequence: Synthetic oligonucleotide
ccaggcucaucaaugcgcu

SEQ ID NO: 1436601 - RNA, 19 nt, Artificial Sequence
  Description of Artificial Sequence: Synthetic oligonucleotide
gcugugcgcaggcuccgca

SEQ ID NO: 1436602 - RNA, 19 nt, Artificial Sequence
  Description of Artificial Sequence: Synthetic oligonucleotide
gcaaucucgucgguguacu

SEQ ID NO: 1436603 - RNA, 19 nt, Artificial Sequence
  Description of Artificial Sequence: Synthetic oligonucleotide
gccgccccgggaguaacag

SEQ ID NO: 1436604 - RNA, 19 nt, Artificial Sequence
  Description of Artificial Sequence: Synthetic oligonucleotide
gcacagccgcguucucacc

SEQ ID NO: 1436605 - RNA, 19 nt, Artificial Sequence
  Description of Artificial Sequence: Synthetic oligonucleotide
aggaagugaccgagcccau

SEQ ID NO: 1436606 - RNA, 19 nt, Artificial Sequence
  Description of Artificial Sequence: Synthetic oligonucleotide
gccagccggugcaugucag

SEQ ID NO: 1436607 - RNA, 19 nt, Artificial Sequence
  Description of Artificial Sequence: Synthetic oligonucleotide
gcaguaacgcugcgucucu

SEQ ID NO: 1436608 - RNA, 19 nt, Artificial Sequence
  Description of Artificial Sequence: Synthetic oligonucleotide
ggagccggccuguaccgcu

SEQ ID NO: 1436609 - RNA, 19 nt, Artificial Sequence
  Description of Artificial Sequence: Synthetic oligonucleotide
ccgaaggcccagugaaaga

SEQ ID NO: 1436610 - RNA, 19 nt, Artificial Sequence
  Description of Artificial Sequence: Synthetic oligonucleotide
ggugaagaaucguguuguu

SEQ ID NO: 1436611 - RNA, 19 nt, Artificial Sequence
  Description of Artificial Sequence: Synthetic oligonucleotide
gcaccgccucguaaauggc

SEQ ID NO: 1436612 - RNA, 19 nt, Artificial Sequence
  Description of Artificial Sequence: Synthetic oligonucleotide
gcauggccguagugcagca

SEQ ID NO: 1436613 - RNA, 19 nt, Artificial Sequence
  Description of Artificial Sequence: Synthetic oligonucleotide
gccgcucacacaggcgcug

SEQ ID NO: 1436614 - RNA, 19 nt, Artificial Sequence
  Description of Artificial Sequence: Synthetic oligonucleotide
ggcgcaugccgccccggga

SEQ ID NO: 1436615 - RNA, 19 nt, Artificial Sequence
  Description of Artificial Sequence: Synthetic oligonucleotide
gccuguaccgcugcauucu

SEQ ID NO: 1436616 - RNA, 19 nt, Artificial Sequence
  Description of Artificial Sequence: Synthetic oligonucleotide
ccgggaguaacaguagugu

SEQ ID NO: 1436617 - RNA, 19 nt, Artificial Sequence
  Description of Artificial Sequence: Synthetic oligonucleotide
ugcccggcuccaggugccu

SEQ ID NO: 1436618 - RNA, 19 nt, Artificial Sequence
  Description of Artificial Sequence: Synthetic oligonucleotide
gaccuggagcauggcgucu

SEQ ID NO: 1436619 - RNA, 19 nt, Artificial Sequence
  Description of Artificial Sequence: Synthetic oligonucleotide
ggaccccgccaaaguugcg

SEQ ID NO: 1436620 - RNA, 19 nt, Artificial Sequence
  Description of Artificial Sequence: Synthetic oligonucleotide
ggccccggcauggccguag

SEQ ID NO: 1436621 - RNA, 19 nt, Artificial Sequence
  Description of Artificial Sequence: Synthetic oligonucleotide
caugccgccccgggaguaa

SEQ ID NO: 1436622 - RNA, 19 nt, Artificial Sequence
  Description of Artificial Sequence: Synthetic oligonucleotide
ccggugcaugucaggccac

SEQ ID NO: 1436623 - RNA, 19 nt, Artificial Sequence
  Description of Artificial Sequence: Synthetic oligonucleotide
cgacaccgaaggcccagug

SEQ ID NO: 1436624 - RNA, 19 nt, Artificial Sequence
  Description of Artificial Sequence: Synthetic oligonucleotide
ccggcuccacagucagcac

SEQ ID NO: 1436625 - RNA, 19 nt, Artificial Sequence
  Description of Artificial Sequence: Synthetic oligonucleotide
gccgcccacgucgugcaca

SEQ ID NO: 1436626 - RNA, 19 nt, Artificial Sequence
  Description of Artificial Sequence: Synthetic oligonucleotide
cacuggagauccgguuugu

SEQ ID NO: 1436627 - RNA, 19 nt, Artificial Sequence
  Description of Artificial Sequence: Synthetic oligonucleotide
cugcgucucuuccccgccu

SEQ ID NO: 1436628 - RNA, 19 nt, Artificial Sequence
  Description of Artificial Sequence: Synthetic oligonucleotide
ccauccuggaucguccggu

SEQ ID NO: 1436629 - RNA, 19 nt, Artificial Sequence
  Description of Artificial Sequence: Synthetic oligonucleotide
cggugcaugucaggccacc

SEQ ID NO: 1436630 - RNA, 19 nt, Artificial Sequence
  Description of Artificial Sequence: Synthetic oligonucleotide
gccucguaaauggccuucu

SEQ ID NO: 1436631 - RNA, 19 nt, Artificial Sequence
  Description of Artificial Sequence: Synthetic oligonucleotide
cgguuuguguagcgcaaaa

SEQ ID NO: 1436632 - RNA, 19 nt, Artificial Sequence
  Description of Artificial Sequence: Synthetic oligonucleotide
cacacaggcgcugccuguu

SEQ ID NO: 1436633 - RNA, 19 nt, Artificial Sequence
  Description of Artificial Sequence: Synthetic oligonucleotide
gcggaagaugauggaggua

SEQ ID NO: 1436634 - RNA, 19 nt, Artificial Sequence
  Description of Artificial Sequence: Synthetic oligonucleotide
ccuguucagggcgaacagu

SEQ ID NO: 1436635 - RNA, 19 nt, Artificial Sequence
  Description of Artificial Sequence: Synthetic oligonucleotide
ccccgccuugcaacacgac

SEQ ID NO: 1436636 - RNA, 19 nt, Artificial Sequence
  Description of Artificial Sequence: Synthetic oligonucleotide
ccacgcugaugacaccaua

SEQ ID NO: 1436637 - RNA, 19 nt, Artificial Sequence
  Description of Artificial Sequence: Synthetic oligonucleotide
cacuggcaaucucgucggu

SEQ ID NO: 1436638 - RNA, 19 nt, Artificial Sequence
  Description of Artificial Sequence: Synthetic oligonucleotide
cagccgcguucucaccacu

SEQ ID NO: 1436639 - RNA, 19 nt, Artificial Sequence
  Description of Artificial Sequence: Synthetic oligonucleotide
ccuccucgauccggacccc

SEQ ID NO: 1436640 - RNA, 19 nt, Artificial Sequence
  Description of Artificial Sequence: Synthetic oligonucleotide
gccggccuguaccgcugca

SEQ ID NO: 1436641 - RNA, 19 nt, Artificial Sequence
  Description of Artificial Sequence: Synthetic oligonucleotide
ccacuuuuacagccuucau

SEQ ID NO: 1436642 - RNA, 19 nt, Artificial Sequence
  Description of Artificial Sequence: Synthetic oligonucleotide
cgucgguguacuggacauc

SEQ ID NO: 1436643 - RNA, 19 nt, Artificial Sequence
  Description of Artificial Sequence: Synthetic oligonucleotide
ccccggcauggccguagug

SEQ ID NO: 1436644 - RNA, 19 nt, Artificial Sequence
  Description of Artificial Sequence: Synthetic oligonucleotide
ccccgggaguaacaguagu

SEQ ID NO: 1436645 - RNA, 19 nt, Artificial Sequence
  Description of Artificial Sequence: Synthetic oligonucleotide
ccaaugcgggucaguuccu

SEQ ID NO: 1436646 - RNA, 19 nt, Artificial Sequence
  Description of Artificial Sequence: Synthetic oligonucleotide
gcuuuccaucugguacucu

SEQ ID NO: 1436647 - RNA, 19 nt, Artificial Sequence
  Description of Artificial Sequence: Synthetic oligonucleotide
cuacgacguccuccucgau

SEQ ID NO: 1436648 - RNA, 19 nt, Artificial Sequence
  Description of Artificial Sequence: Synthetic oligonucleotide
ggggccccggcauggccgu

SEQ ID NO: 1436649 - RNA, 19 nt, Artificial Sequence
  Description of Artificial Sequence: Synthetic oligonucleotide
gcaugccgccccgggagua

SEQ ID NO: 1436650 - RNA, 19 nt, Artificial Sequence
  Description of Artificial Sequence: Synthetic oligonucleotide
caguaacgcugcgucucuu

SEQ ID NO: 1436651 - RNA, 19 nt, Artificial Sequence
  Description of Artificial Sequence: Synthetic oligonucleotide
ccgagcccauguggcauga

SEQ ID NO: 1436652 - RNA, 19 nt, Artificial Sequence
  Description of Artificial Sequence: Synthetic oligonucleotide
cgacgacaccgaaggccca

SEQ ID NO: 1436653 - RNA, 19 nt, Artificial Sequence
  Description of Artificial Sequence: Synthetic oligonucleotide
ggguagccgcccacgucgu

SEQ ID NO: 1436654 - RNA, 19 nt, Artificial Sequence
  Description of Artificial Sequence: Synthetic oligonucleotide
cgugcacaucgaggcccag

SEQ ID NO: 1436655 - RNA, 19 nt, Artificial Sequence
  Description of Artificial Sequence: Synthetic oligonucleotide
ccuguaccgcugcauucuu

SEQ ID NO: 1436656 - RNA, 19 nt, Artificial Sequence
  Description of Artificial Sequence: Synthetic oligonucleotide
cgauccggaccccgccaaa

SEQ ID NO: 1436657 - RNA, 19 nt, Artificial Sequence
  Description of Artificial Sequence: Synthetic oligonucleotide
gccccggcauggccguagu

SEQ ID NO: 1436658 - RNA, 19 nt, Artificial Sequence
  Description of Artificial Sequence: Synthetic oligonucleotide
cggugcaguaacgcugcgu

SEQ ID NO: 1436659 - RNA, 19 nt, Artificial Sequence
  Description of Artificial Sequence: Synthetic oligonucleotide
cggccuguaccgcugcauu

SEQ ID NO: 1436660 - RNA, 19 nt, Artificial Sequence
  Description of Artificial Sequence: Synthetic oligonucleotide
ccgccccgggaguaacagu

SEQ ID NO: 1436661 - RNA, 19 nt, Artificial Sequence
  Description of Artificial Sequence: Synthetic oligonucleotide
ccuggaucguccggucguu

SEQ ID NO: 1436662 - RNA, 19 nt, Artificial Sequence
  Description of Artificial Sequence: Synthetic oligonucleotide
ccgccucguaaauggccuu

SEQ ID NO: 1436663 - RNA, 19 nt, Artificial Sequence
  Description of Artificial Sequence: Synthetic oligonucleotide
cgcaugccgccccgggagu

SEQ ID NO: 1436664 - RNA, 19 nt, Artificial Sequence
  Description of Artificial Sequence: Synthetic oligonucleotide
gcccggcuccaggugccuu

SEQ ID NO: 1436665 - RNA, 19 nt, Artificial Sequence
  Description of Artificial Sequence: Synthetic oligonucleotide
auaucaacgacauacacgc

SEQ ID NO: 1436666 - RNA, 19 nt, Artificial Sequence
  Description of Artificial Sequence: Synthetic oligonucleotide
aaagaggaaauaaacagcc

SEQ ID NO: 1436667 - RNA, 19 nt, Artificial Sequence
  Description of Artificial Sequence: Synthetic oligonucleotide
gaaaauaucaacgacauac

SEQ ID NO: 1436668 - RNA, 19 nt, Artificial Sequence
  Description of Artificial Sequence: Synthetic oligonucleotide
aagguaaugaaagaaacac

SEQ ID NO: 1436669 - RNA, 19 nt, Artificial Sequence
  Description of Artificial Sequence: Synthetic oligonucleotide
uuagaaaauaucaacgaca

SEQ ID NO: 1436670 - RNA, 19 nt, Artificial Sequence
  Description of Artificial Sequence: Synthetic oligonucleotide
gaagguaggauauucagag

SEQ ID NO: 1436671 - RNA, 19 nt, Artificial Sequence
  Description of Artificial Sequence: Synthetic oligonucleotide
aaguuagaaaauaucaacg

SEQ ID NO: 1436672 - RNA, 19 nt, Artificial Sequence
  Description of Artificial Sequence: Synthetic oligonucleotide
uuuaggacggaaaugggag

SEQ ID NO: 1436673 - RNA, 19 nt, Artificial Sequence
  Description of Artificial Sequence: Synthetic oligonucleotide
agugaaagagcccugcccc

SEQ ID NO: 1436674 - RNA, 19 nt, Artificial Sequence
  Description of Artificial Sequence: Synthetic oligonucleotide
aauaucaacgacauacacg

SEQ ID NO: 1436675 - RNA, 19 nt, Artificial Sequence
  Description of Artificial Sequence: Synthetic oligonucleotide
ugaguauuuggcaacagca

SEQ ID NO: 1436676 - RNA, 19 nt, Artificial Sequence
  Description of Artificial Sequence: Synthetic oligonucleotide
ucagcuagcggucaaauga

SEQ ID NO: 1436677 - RNA, 19 nt, Artificial Sequence
  Description of Artificial Sequence: Synthetic oligonucleotide
aacacuuucucuuguagca

SEQ ID NO: 1436678 - RNA, 19 nt, Artificial Sequence
  Description of Artificial Sequence: Synthetic oligonucleotide
aaaugaaggccauguuacc

SEQ ID NO: 1436679 - RNA, 19 nt, Artificial Sequence
  Description of Artificial Sequence: Synthetic oligonucleotide
aaugaaagaaacacccgac

SEQ ID NO: 1436680 - RNA, 19 nt, Artificial Sequence
  Description of Artificial Sequence: Synthetic oligonucleotide
ugugcuaccacaugaacug

SEQ ID NO: 1436681 - RNA, 19 nt, Artificial Sequence
  Description of Artificial Sequence: Synthetic oligonucleotide
auugguagagucuccuugc

SEQ ID NO: 1436682 - RNA, 19 nt, Artificial Sequence
  Description of Artificial Sequence: Synthetic oligonucleotide
aaagaaacacccgacucgg

SEQ ID NO: 1436683 - RNA, 19 nt, Artificial Sequence
  Description of Artificial Sequence: Synthetic oligonucleotide
agaaacacccgacucggcc

SEQ ID NO: 1436684 - RNA, 19 nt, Artificial Sequence
  Description of Artificial Sequence: Synthetic oligonucleotide
aaguuaucuccacaaagug

SEQ ID NO: 1436685 - RNA, 19 nt, Artificial Sequence
  Description of Artificial Sequence: Synthetic oligonucleotide
aguuagaaaauaucaacga

SEQ ID NO: 1436686 - RNA, 19 nt, Artificial Sequence
  Description of Artificial Sequence: Synthetic oligonucleotide
caaaugaaggccauguuac

SEQ ID NO: 1436687 - RNA, 19 nt, Artificial Sequence
  Description of Artificial Sequence: Synthetic oligonucleotide
uuuguaagccccaucugag

SEQ ID NO: 1436688 - RNA, 19 nt, Artificial Sequence
  Description of Artificial Sequence: Synthetic oligonucleotide
ucuuguagcauccccagga

SEQ ID NO: 1436689 - RNA, 19 nt, Artificial Sequence
  Description of Artificial Sequence: Synthetic oligonucleotide
ucuugaacaaagauuccug

SEQ ID NO: 1436690 - RNA, 19 nt, Artificial Sequence
  Description of Artificial Sequence: Synthetic oligonucleotide
guuaaaaggucuuuaggac

SEQ ID NO: 1436691 - RNA, 19 nt, Artificial Sequence
  Description of Artificial Sequence: Synthetic oligonucleotide
uuuguuacauugcuuuuga

SEQ ID NO: 1436692 - RNA, 19 nt, Artificial Sequence
  Description of Artificial Sequence: Synthetic oligonucleotide
guagaagucaauugcaaac

SEQ ID NO: 1436693 - RNA, 19 nt, Artificial Sequence
  Description of Artificial Sequence: Synthetic oligonucleotide
agguuaaaaggucuuuagg

SEQ ID NO: 1436694 - RNA, 19 nt, Artificial Sequence
  Description of Artificial Sequence: Synthetic oligonucleotide
aguuaucuccacaaagugc

SEQ ID NO: 1436695 - RNA, 19 nt, Artificial Sequence
  Description of Artificial Sequence: Synthetic oligonucleotide
ugaaagaaacacccgacuc

SEQ ID NO: 1436696 - RNA, 19 nt, Artificial Sequence
  Description of Artificial Sequence: Synthetic oligonucleotide
ugcuuuguaagccccaucu

SEQ ID NO: 1436697 - RNA, 19 nt, Artificial Sequence
  Description of Artificial Sequence: Synthetic oligonucleotide
gaagguauggaugggaggc

SEQ ID NO: 1436698 - RNA, 19 nt, Artificial Sequence
  Description of Artificial Sequence: Synthetic oligonucleotide
cugagcaguacuaagccag

SEQ ID NO: 1436699 - RNA, 19 nt, Artificial Sequence
  Description of Artificial Sequence: Synthetic oligonucleotide
cuagcggucaaaugaaggc

SEQ ID NO: 1436700 - RNA, 19 nt, Artificial Sequence
  Description of Artificial Sequence: Synthetic oligonucleotide
uguagcauccccaggagaa

SEQ ID NO: 1436701 - RNA, 19 nt, Artificial Sequence
  Description of Artificial Sequence: Synthetic oligonucleotide
uucaguccgagucugaguc

SEQ ID NO: 1436702 - RNA, 19 nt, Artificial Sequence
  Description of Artificial Sequence: Synthetic oligonucleotide
aaagauuccugaaaguuau

SEQ ID NO: 1436703 - RNA, 19 nt, Artificial Sequence
  Description of Artificial Sequence: Synthetic oligonucleotide
uuagaauaggcccgggacu

SEQ ID NO: 1436704 - RNA, 19 nt, Artificial Sequence
  Description of Artificial Sequence: Synthetic oligonucleotide
aggucucagaccuacaaug

SEQ ID NO: 1436705 - RNA, 19 nt, Artificial Sequence
  Description of Artificial Sequence: Synthetic oligonucleotide
agacugauuccucugucgg

SEQ ID NO: 1436706 - RNA, 19 nt, Artificial Sequence
  Description of Artificial Sequence: Synthetic oligonucleotide
uucagagugcccuaaugug

SEQ ID NO: 1436707 - RNA, 19 nt, Artificial Sequence
  Description of Artificial Sequence: Synthetic oligonucleotide
uuaccaguaggccugucca

SEQ ID NO: 1436708 - RNA, 19 nt, Artificial Sequence
  Description of Artificial Sequence: Synthetic oligonucleotide
ucuuuaggacggaaauggg

SEQ ID NO: 1436709 - RNA, 19 nt, Artificial Sequence
  Description of Artificial Sequence: Synthetic oligonucleotide
gguuaaaaggucuuuagga

SEQ ID NO: 1436710 - RNA, 19 nt, Artificial Sequence
  Description of Artificial Sequence: Synthetic oligonucleotide
guuagaauaggcccgggac

SEQ ID NO: 1436711 - RNA, 19 nt, Artificial Sequence
  Description of Artificial Sequence: Synthetic oligonucleotide
auucagagugcccuaaugu

SEQ ID NO: 1436712 - RNA, 19 nt, Artificial Sequence
  Description of Artificial Sequence: Synthetic oligonucleotide
gagacugauuccucugucg

SEQ ID NO: 1436713 - RNA, 19 nt, Artificial Sequence
  Description of Artificial Sequence: Synthetic oligonucleotide
aucagguagaagucaauug

SEQ ID NO: 1436714 - RNA, 19 nt, Artificial Sequence
  Description of Artificial Sequence: Synthetic oligonucleotide
cucagaccuacaauggagg

SEQ ID NO: 1436715 - RNA, 19 nt, Artificial Sequence
  Description of Artificial Sequence: Synthetic oligonucleotide
uauucagagugcccuaaug

SEQ ID NO: 1436716 - RNA, 19 nt, Artificial Sequence
  Description of Artificial Sequence: Synthetic oligonucleotide
ccaauuuugagagugaggc

SEQ ID NO: 1436717 - RNA, 19 nt, Artificial Sequence
  Description of Artificial Sequence: Synthetic oligonucleotide
accucgucgagccucggcc

SEQ ID NO: 1436718 - RNA, 19 nt, Artificial Sequence
  Description of Artificial Sequence: Synthetic oligonucleotide
agcaguacuaagccagcac

SEQ ID NO: 1436719 - RNA, 19 nt, Artificial Sequence
  Description of Artificial Sequence: Synthetic oligonucleotide
ugcggaggacaccacauag

SEQ ID NO: 1436720 - RNA, 19 nt, Artificial Sequence
  Description of Artificial Sequence: Synthetic oligonucleotide
acgacauacacgcuaucag

SEQ ID NO: 1436721 - RNA, 19 nt, Artificial Sequence
  Description of Artificial Sequence: Synthetic oligonucleotide
guaaugaaagaaacacccg

SEQ ID NO: 1436722 - RNA, 19 nt, Artificial Sequence
  Description of Artificial Sequence: Synthetic oligonucleotide
aaguccaucaugggccagc

SEQ ID NO: 1436723 - RNA, 19 nt, Artificial Sequence
  Description of Artificial Sequence: Synthetic oligonucleotide
aaacccgcugugcggaagg

SEQ ID NO: 1436724 - RNA, 19 nt, Artificial Sequence
  Description of Artificial Sequence: Synthetic oligonucleotide
ugggaauccacugccaugc

SEQ ID NO: 1436725 - RNA, 19 nt, Artificial Sequence
  Description of Artificial Sequence: Synthetic oligonucleotide
augaaagaaacacccgacu

SEQ ID NO: 1436726 - RNA, 19 nt, Artificial Sequence
  Description of Artificial Sequence: Synthetic oligonucleotide
aacgacauacacgcuauca

SEQ ID NO: 1436727 - RNA, 19 nt, Artificial Sequence
  Description of Artificial Sequence: Synthetic oligonucleotide
aaugugcuagcugagcagu

SEQ ID NO: 1436728 - RNA, 19 nt, Artificial Sequence
  Description of Artificial Sequence: Synthetic oligonucleotide
gguagagucuccuugcuug

SEQ ID NO: 1436729 - RNA, 19 nt, Artificial Sequence
  Description of Artificial Sequence: Synthetic oligonucleotide
ugccauuuguuacauugcu

SEQ ID NO: 1436730 - RNA, 19 nt, Artificial Sequence
  Description of Artificial Sequence: Synthetic oligonucleotide
cauacacgcuaucagcuag

SEQ ID NO: 1436731 - RNA, 19 nt, Artificial Sequence
  Description of Artificial Sequence: Synthetic oligonucleotide
uguaagccccaucugagua

SEQ ID NO: 1436732 - RNA, 19 nt, Artificial Sequence
  Description of Artificial Sequence: Synthetic oligonucleotide
aagugggguuagaauaggc

SEQ ID NO: 1436733 - RNA, 19 nt, Artificial Sequence
  Description of Artificial Sequence: Synthetic oligonucleotide
aagguauggaugggaggcc

SEQ ID NO: 1436734 - RNA, 19 nt, Artificial Sequence
  Description of Artificial Sequence: Synthetic oligonucleotide
uugagcgagcagaggaagg

SEQ ID NO: 1436735 - RNA, 19 nt, Artificial Sequence
  Description of Artificial Sequence: Synthetic oligonucleotide
aguagaugagggcagcagu

SEQ ID NO: 1436736 - RNA, 19 nt, Artificial Sequence
  Description of Artificial Sequence: Synthetic oligonucleotide
aggaggcgaccuuugagcg

SEQ ID NO: 1436737 - RNA, 19 nt, Artificial Sequence
  Description of Artificial Sequence: Synthetic oligonucleotide
ugccacuugucauucagcu

SEQ ID NO: 1436738 - RNA, 19 nt, Artificial Sequence
  Description of Artificial Sequence: Synthetic oligonucleotide
gucccuguuagugaaagag

SEQ ID NO: 1436739 - RNA, 19 nt, Artificial Sequence
  Description of Artificial Sequence: Synthetic oligonucleotide
ucaacgacauacacgcuau

SEQ ID NO: 1436740 - RNA, 19 nt, Artificial Sequence
  Description of Artificial Sequence: Synthetic oligonucleotide
ucccuguuagugaaagagc

SEQ ID NO: 1436741 - RNA, 19 nt, Artificial Sequence
  Description of Artificial Sequence: Synthetic oligonucleotide
aggauauucagagugcccu

SEQ ID NO: 1436742 - RNA, 19 nt, Artificial Sequence
  Description of Artificial Sequence: Synthetic oligonucleotide
aaguagaugagggcagcag

SEQ ID NO: 1436743 - RNA, 19 nt, Artificial Sequence
  Description of Artificial Sequence: Synthetic oligonucleotide
auggcaucggcaaagagga

SEQ ID NO: 1436744 - RNA, 19 nt, Artificial Sequence
  Description of Artificial Sequence: Synthetic oligonucleotide
ugucuguuagccccgguaa

SEQ ID NO: 1436745 - RNA, 19 nt, Artificial Sequence
  Description of Artificial Sequence: Synthetic oligonucleotide
cugaguauuuggcaacagc

SEQ ID NO: 1436746 - RNA, 19 nt, Artificial Sequence
  Description of Artificial Sequence: Synthetic oligonucleotide
caggaggcgaccuuugagc

SEQ ID NO: 1436747 - RNA, 19 nt, Artificial Sequence
  Description of Artificial Sequence: Synthetic oligonucleotide
cagacaggccuucaguccg

SEQ ID NO: 1436748 - RNA, 19 nt, Artificial Sequence
  Description of Artificial Sequence: Synthetic oligonucleotide
agugcccuaaugugcuagc

SEQ ID NO: 1436749 - RNA, 19 nt, Artificial Sequence
  Description of Artificial Sequence: Synthetic oligonucleotide
aucaacgacauacacgcua

SEQ ID NO: 1436750 - RNA, 19 nt, Artificial Sequence
  Description of Artificial Sequence: Synthetic oligonucleotide
cuuuguaagccccaucuga

SEQ ID NO: 1436751 - RNA, 19 nt, Artificial Sequence
  Description of Artificial Sequence: Synthetic oligonucleotide
guuaccaguaggccugucc

SEQ ID NO: 1436752 - RNA, 19 nt, Artificial Sequence
  Description of Artificial Sequence: Synthetic oligonucleotide
uagguuuuccccuguuuca

SEQ ID NO: 1436753 - RNA, 19 nt, Artificial Sequence
  Description of Artificial Sequence: Synthetic oligonucleotide
ucagaccuacaauggagga

SEQ ID NO: 1436754 - RNA, 19 nt, Artificial Sequence
  Description of Artificial Sequence: Synthetic oligonucleotide
uguagugacugguuccagu

SEQ ID NO: 1436755 - RNA, 19 nt, Artificial Sequence
  Description of Artificial Sequence: Synthetic oligonucleotide
cuuuaggacggaaauggga

SEQ ID NO: 1436756 - RNA, 19 nt, Artificial Sequence
  Description of Artificial Sequence: Synthetic oligonucleotide
aagguaggauauucagagu

SEQ ID NO: 1436757 - RNA, 19 nt, Artificial Sequence
  Description of Artificial Sequence: Synthetic oligonucleotide
uccaguugaugugucugcg

SEQ ID NO: 1436758 - RNA, 19 nt, Artificial Sequence
  Description of Artificial Sequence: Synthetic oligonucleotide
uggcuaguuagguuuuccc

SEQ ID NO: 1436759 - RNA, 19 nt, Artificial Sequence
  Description of Artificial Sequence: Synthetic oligonucleotide
cacgcuaucagcuagcggu

SEQ ID NO: 1436760 - RNA, 19 nt, Artificial Sequence
  Description of Artificial Sequence: Synthetic oligonucleotide
aggucuuuaggacggaaau

SEQ ID NO: 1436761 - RNA, 19 nt, Artificial Sequence
  Description of Artificial Sequence: Synthetic oligonucleotide
uuaucuccacaaagugcag

SEQ ID NO: 1436762 - RNA, 19 nt, Artificial Sequence
  Description of Artificial Sequence: Synthetic oligonucleotide
uuaggacggaaaugggaga

SEQ ID NO: 1436763 - RNA, 19 nt, Artificial Sequence
  Description of Artificial Sequence: Synthetic oligonucleotide
aggccauguuaccaguagg

SEQ ID NO: 1436764 - RNA, 19 nt, Artificial Sequence
  Description of Artificial Sequence: Synthetic oligonucleotide
caucugaguauuuggcaac

SEQ ID NO: 1436765 - RNA, 19 nt, Artificial Sequence
  Description of Artificial Sequence: Synthetic oligonucleotide
uucaugggaccucuugggu

SEQ ID NO: 1436766 - RNA, 19 nt, Artificial Sequence
  Description of Artificial Sequence: Synthetic oligonucleotide
ugcccuaaugugcuagcug

SEQ ID NO: 1436767 - RNA, 19 nt, Artificial Sequence
  Description of Artificial Sequence: Synthetic oligonucleotide
uagcggucaaaugaaggcc

SEQ ID NO: 1436768 - RNA, 19 nt, Artificial Sequence
  Description of Artificial Sequence: Synthetic oligonucleotide
caccucgagagacugauuc

SEQ ID NO: 1436769 - RNA, 19 nt, Artificial Sequence
  Description of Artificial Sequence: Synthetic oligonucleotide
gaagaucagguagaaguca

SEQ ID NO: 1436770 - RNA, 19 nt, Artificial Sequence
  Description of Artificial Sequence: Synthetic oligonucleotide
cccuguuagugaaagagcc

SEQ ID NO: 1436771 - RNA, 19 nt, Artificial Sequence
  Description of Artificial Sequence: Synthetic oligonucleotide
acauagcggcgcuaccucg

SEQ ID NO: 1436772 - RNA, 19 nt, Artificial Sequence
  Description of Artificial Sequence: Synthetic oligonucleotide
gaagcggaaacccgcugug

SEQ ID NO: 1436773 - RNA, 19 nt, Artificial Sequence
  Description of Artificial Sequence: Synthetic oligonucleotide
cuacaauggaggacuuggc

SEQ ID NO: 1436774 - RNA, 19 nt, Artificial Sequence
  Description of Artificial Sequence: Synthetic oligonucleotide
ugugggaauccacugccau

SEQ ID NO: 1436775 - RNA, 19 nt, Artificial Sequence
  Description of Artificial Sequence: Synthetic oligonucleotide
ucgagagacugauuccucu

SEQ ID NO: 1436776 - RNA, 19 nt, Artificial Sequence
  Description of Artificial Sequence: Synthetic oligonucleotide
agguuuuccccuguuucac

SEQ ID NO: 1436777 - RNA, 19 nt, Artificial Sequence
  Description of Artificial Sequence: Synthetic oligonucleotide
gacugauuccucugucggc

SEQ ID NO: 1436778 - RNA, 19 nt, Artificial Sequence
  Description of Artificial Sequence: Synthetic oligonucleotide
ccuacaauggaggacuugg

SEQ ID NO: 1436779 - RNA, 19 nt, Artificial Sequence
  Description of Artificial Sequence: Synthetic oligonucleotide
cuuguagcauccccaggag

SEQ ID NO: 1436780 - RNA, 19 nt, Artificial Sequence
  Description of Artificial Sequence: Synthetic oligonucleotide
ugagguuaaaaggucuuua

SEQ ID NO: 1436781 - RNA, 19 nt, Artificial Sequence
  Description of Artificial Sequence: Synthetic oligonucleotide
ucucauugguagagucucc

SEQ ID NO: 1436782 - RNA, 19 nt, Artificial Sequence
  Description of Artificial Sequence: Synthetic oligonucleotide
caaagauuccugaaaguua

SEQ ID NO: 1436783 - RNA, 19 nt, Artificial Sequence
  Description of Artificial Sequence: Synthetic oligonucleotide
ugaugugucugcgucugug

SEQ ID NO: 1436784 - RNA, 19 nt, Artificial Sequence
  Description of Artificial Sequence: Synthetic oligonucleotide
uagaauaggcccgggacuc

SEQ ID NO: 1436785 - RNA, 19 nt, Artificial Sequence
  Description of Artificial Sequence: Synthetic oligonucleotide
uuugagagugaggcucagg

SEQ ID NO: 1436786 - RNA, 19 nt, Artificial Sequence
  Description of Artificial Sequence: Synthetic oligonucleotide
aagaucagguagaagucaa

SEQ ID NO: 1436787 - RNA, 19 nt, Artificial Sequence
  Description of Artificial Sequence: Synthetic oligonucleotide
aagaaacacccgacucggc

SEQ ID NO: 1436788 - RNA, 19 nt, Artificial Sequence
  Description of Artificial Sequence: Synthetic oligonucleotide
ggcuaguuagguuuucccc

SEQ ID NO: 1436789 - RNA, 19 nt, Artificial Sequence
  Description of Artificial Sequence: Synthetic oligonucleotide
gagggaagcggaaacccgc

SEQ ID NO: 1436790 - RNA, 19 nt, Artificial Sequence
  Description of Artificial Sequence: Synthetic oligonucleotide
uccgaguuggaauuaucuu

SEQ ID NO: 1436791 - RNA, 19 nt, Artificial Sequence
  Description of Artificial Sequence: Synthetic oligonucleotide
aucagcuagcggucaaaug

SEQ ID NO: 1436792 - RNA, 19 nt, Artificial Sequence
  Description of Artificial Sequence: Synthetic oligonucleotide
cacugcacugguuggcucc

SEQ ID NO: 1436793 - RNA, 19 nt, Artificial Sequence
  Description of Artificial Sequence: Synthetic oligonucleotide
uuguaagccccaucugagu

SEQ ID NO: 1436794 - RNA, 19 nt, Artificial Sequence
  Description of Artificial Sequence: Synthetic oligonucleotide
ugaaggccauguuaccagu

SEQ ID NO: 1436795 - RNA, 19 nt, Artificial Sequence
  Description of Artificial Sequence: Synthetic oligonucleotide
aagauuccugaaaguuauc

SEQ ID NO: 1436796 - RNA, 19 nt, Artificial Sequence
  Description of Artificial Sequence: Synthetic oligonucleotide
acuguagugacugguucca

SEQ ID NO: 1436797 - RNA, 19 nt, Artificial Sequence
  Description of Artificial Sequence: Synthetic oligonucleotide
ggcgcuaccucgucgagcc

SEQ ID NO: 1436798 - RNA, 19 nt, Artificial Sequence
  Description of Artificial Sequence: Synthetic oligonucleotide
acagugagaagggaaacuu

SEQ ID NO: 1436799 - RNA, 19 nt, Artificial Sequence
  Description of Artificial Sequence: Synthetic oligonucleotide
uaggacggaaaugggagaa

SEQ ID NO: 1436800 - RNA, 19 nt, Artificial Sequence
  Description of Artificial Sequence: Synthetic oligonucleotide
cugucggcucuucuguggg

SEQ ID NO: 1436801 - RNA, 19 nt, Artificial Sequence
  Description of Artificial Sequence: Synthetic oligonucleotide
ccgaguuggaauuaucuuc

SEQ ID NO: 1436802 - RNA, 19 nt, Artificial Sequence
  Description of Artificial Sequence: Synthetic oligonucleotide
aggacuuggcuaguuaggu

SEQ ID NO: 1436803 - RNA, 19 nt, Artificial Sequence
  Description of Artificial Sequence: Synthetic oligonucleotide
ggucucagaccuacaaugg

SEQ ID NO: 1436804 - RNA, 19 nt, Artificial Sequence
  Description of Artificial Sequence: Synthetic oligonucleotide
gcuagcggucaaaugaagg

SEQ ID NO: 1436805 - RNA, 19 nt, Artificial Sequence
  Description of Artificial Sequence: Synthetic oligonucleotide
gagugcccuaaugugcuag

SEQ ID NO: 1436806 - RNA, 19 nt, Artificial Sequence
  Description of Artificial Sequence: Synthetic oligonucleotide
acacgcuaucagcuagcgg

SEQ ID NO: 1436807 - RNA, 19 nt, Artificial Sequence
  Description of Artificial Sequence: Synthetic oligonucleotide
agugaggcucaggaguguc

SEQ ID NO: 1436808 - RNA, 19 nt, Artificial Sequence
  Description of Artificial Sequence: Synthetic oligonucleotide
ugcuagcugagcaguacua

SEQ ID NO: 1436809 - RNA, 19 nt, Artificial Sequence
  Description of Artificial Sequence: Synthetic oligonucleotide
gaccuuugagcgagcagag

SEQ ID NO: 1436810 - RNA, 19 nt, Artificial Sequence
  Description of Artificial Sequence: Synthetic oligonucleotide
agcccgggcacuguccugc

SEQ ID NO: 1436811 - RNA, 19 nt, Artificial Sequence
  Description of Artificial Sequence: Synthetic oligonucleotide
gacucauccuccgcugucc

SEQ ID NO: 1436812 - RNA, 19 nt, Artificial Sequence
  Description of Artificial Sequence: Synthetic oligonucleotide
acugcacugguuggcuccc

SEQ ID NO: 1436813 - RNA, 19 nt, Artificial Sequence
  Description of Artificial Sequence: Synthetic oligonucleotide
gcaguacuaagccagcaca

SEQ ID NO: 1436814 - RNA, 19 nt, Artificial Sequence
  Description of Artificial Sequence: Synthetic oligonucleotide
ugagcccgggcacuguccu

SEQ ID NO: 1436815 - RNA, 19 nt, Artificial Sequence
  Description of Artificial Sequence: Synthetic oligonucleotide
auagcggcgcuaccucguc

SEQ ID NO: 1436816 - RNA, 19 nt, Artificial Sequence
  Description of Artificial Sequence: Synthetic oligonucleotide
ggagaugacgaaguagaug

SEQ ID NO: 1436817 - RNA, 19 nt, Artificial Sequence
  Description of Artificial Sequence: Synthetic oligonucleotide
gauauucagagugcccuaa

SEQ ID NO: 1436818 - RNA, 19 nt, Artificial Sequence
  Description of Artificial Sequence: Synthetic oligonucleotide
gugggaauccacugccaug

SEQ ID NO: 1436819 - RNA, 19 nt, Artificial Sequence
  Description of Artificial Sequence: Synthetic oligonucleotide
acggaaaugggagaaggua

SEQ ID NO: 1436820 - RNA, 19 nt, Artificial Sequence
  Description of Artificial Sequence: Synthetic oligonucleotide
uguccagaggaaacacuuu

SEQ ID NO: 1436821 - RNA, 19 nt, Artificial Sequence
  Description of Artificial Sequence: Synthetic oligonucleotide
gcucaggagugucaccucg

SEQ ID NO: 1436822 - RNA, 19 nt, Artificial Sequence
  Description of Artificial Sequence: Synthetic oligonucleotide
uuuugagagugaggcucag

SEQ ID NO: 1436823 - RNA, 19 nt, Artificial Sequence
  Description of Artificial Sequence: Synthetic oligonucleotide
uaucaacgacauacacgcu

SEQ ID NO: 1436824 - RNA, 19 nt, Artificial Sequence
  Description of Artificial Sequence: Synthetic oligonucleotide
acauacacgcuaucagcua

SEQ ID NO: 1436825 - RNA, 19 nt, Artificial Sequence
  Description of Artificial Sequence: Synthetic oligonucleotide
auauucagagugcccuaau

SEQ ID NO: 1436826 - RNA, 19 nt, Artificial Sequence
  Description of Artificial Sequence: Synthetic oligonucleotide
gacgcagcgcaggaagucc

SEQ ID NO: 1436827 - RNA, 19 nt, Artificial Sequence
  Description of Artificial Sequence: Synthetic oligonucleotide
ugacugguuccaguugaug

SEQ ID NO: 1436828 - RNA, 19 nt, Artificial Sequence
  Description of Artificial Sequence: Synthetic oligonucleotide
uaguuagguuuuccccugu

SEQ ID NO: 1436829 - RNA, 19 nt, Artificial Sequence
  Description of Artificial Sequence: Synthetic oligonucleotide
agcggucaaaugaaggcca

SEQ ID NO: 1436830 - RNA, 19 nt, Artificial Sequence
  Description of Artificial Sequence: Synthetic oligonucleotide
aauaggcccgggacucauc

SEQ ID NO: 1436831 - RNA, 19 nt, Artificial Sequence
  Description of Artificial Sequence: Synthetic oligonucleotide
uggaggacuuggcuaguua

SEQ ID NO: 1436832 - RNA, 19 nt, Artificial Sequence
  Description of Artificial Sequence: Synthetic oligonucleotide
ugucccuguuagugaaaga

SEQ ID NO: 1436833 - RNA, 19 nt, Artificial Sequence
  Description of Artificial Sequence: Synthetic oligonucleotide
gcccuaaugugcuagcuga

SEQ ID NO: 1436834 - RNA, 19 nt, Artificial Sequence
  Description of Artificial Sequence: Synthetic oligonucleotide
ccugaguggcuccaguugc

SEQ ID NO: 1436835 - RNA, 19 nt, Artificial Sequence
  Description of Artificial Sequence: Synthetic oligonucleotide
ggccauguuaccaguaggc

SEQ ID NO: 1436836 - RNA, 19 nt, Artificial Sequence
  Description of Artificial Sequence: Synthetic oligonucleotide
ugacugggccugcccagcc

SEQ ID NO: 1436837 - RNA, 19 nt, Artificial Sequence
  Description of Artificial Sequence: Synthetic oligonucleotide
cuuugagcgagcagaggaa

SEQ ID NO: 1436838 - RNA, 19 nt, Artificial Sequence
  Description of Artificial Sequence: Synthetic oligonucleotide
ugguagagucuccuugcuu

SEQ ID NO: 1436839 - RNA, 19 nt, Artificial Sequence
  Description of Artificial Sequence: Synthetic oligonucleotide
gccccaucugaguauuugg

SEQ ID NO: 1436840 - RNA, 19 nt, Artificial Sequence
  Description of Artificial Sequence: Synthetic oligonucleotide
cagaggaaggcgcgcgcgg

SEQ ID NO: 1436841 - RNA, 19 nt, Artificial Sequence
  Description of Artificial Sequence: Synthetic oligonucleotide
cacauagcggcgcuaccuc

SEQ ID NO: 1436842 - RNA, 19 nt, Artificial Sequence
  Description of Artificial Sequence: Synthetic oligonucleotide
cgacauacacgcuaucagc

SEQ ID NO: 1436843 - RNA, 19 nt, Artificial Sequence
  Description of Artificial Sequence: Synthetic oligonucleotide
ugucaccucgagagacuga

SEQ ID NO: 1436844 - RNA, 19 nt, Artificial Sequence
  Description of Artificial Sequence: Synthetic oligonucleotide
cucgagagacugauuccuc

SEQ ID NO: 1436845 - RNA, 19 nt, Artificial Sequence
  Description of Artificial Sequence: Synthetic oligonucleotide
uaccucgucgagccucggc

SEQ ID NO: 1436846 - RNA, 19 nt, Artificial Sequence
  Description of Artificial Sequence: Synthetic oligonucleotide
agcggcgcuaccucgucga

SEQ ID NO: 1436847 - RNA, 19 nt, Artificial Sequence
  Description of Artificial Sequence: Synthetic oligonucleotide
ccuuugagcgagcagagga

SEQ ID NO: 1436848 - RNA, 19 nt, Artificial Sequence
  Description of Artificial Sequence: Synthetic oligonucleotide
aguccgaguuggaauuauc

SEQ ID NO: 1436849 - RNA, 19 nt, Artificial Sequence
  Description of Artificial Sequence: Synthetic oligonucleotide
cuguuagugaaagagcccu

SEQ ID NO: 1436850 - RNA, 19 nt, Artificial Sequence
  Description of Artificial Sequence: Synthetic oligonucleotide
gcuaguuagguuuuccccu

SEQ ID NO: 1436851 - RNA, 19 nt, Artificial Sequence
  Description of Artificial Sequence: Synthetic oligonucleotide
uccagguguccagaggaaa

SEQ ID NO: 1436852 - RNA, 19 nt, Artificial Sequence
  Description of Artificial Sequence: Synthetic oligonucleotide
gaaacccgcugugcggaag

SEQ ID NO: 1436853 - RNA, 19 nt, Artificial Sequence
  Description of Artificial Sequence: Synthetic oligonucleotide
ucugucccuguuagugaaa

SEQ ID NO: 1436854 - RNA, 19 nt, Artificial Sequence
  Description of Artificial Sequence: Synthetic oligonucleotide
uccuauuggcuguggucuc

SEQ ID NO: 1436855 - RNA, 19 nt, Artificial Sequence
  Description of Artificial Sequence: Synthetic oligonucleotide
cacuguccugccacuucgg

SEQ ID NO: 1436856 - RNA, 19 nt, Artificial Sequence
  Description of Artificial Sequence: Synthetic oligonucleotide
agccccaucugaguauuug

SEQ ID NO: 1436857 - RNA, 19 nt, Artificial Sequence
  Description of Artificial Sequence: Synthetic oligonucleotide
cuggaucaggcuccggcuc

SEQ ID NO: 1436858 - RNA, 19 nt, Artificial Sequence
  Description of Artificial Sequence: Synthetic oligonucleotide
guccuauuggcuguggucu

SEQ ID NO: 1436859 - RNA, 19 nt, Artificial Sequence
  Description of Artificial Sequence: Synthetic oligonucleotide
ggagggaagcggaaacccg

SEQ ID NO: 1436860 - RNA, 19 nt, Artificial Sequence
  Description of Artificial Sequence: Synthetic oligonucleotide
aacacccgacucggccagc

SEQ ID NO: 1436861 - RNA, 19 nt, Artificial Sequence
  Description of Artificial Sequence: Synthetic oligonucleotide
accuuugagcgagcagagg

SEQ ID NO: 1436862 - RNA, 19 nt, Artificial Sequence
  Description of Artificial Sequence: Synthetic oligonucleotide
ugcauggcaucggcaaaga

SEQ ID NO: 1436863 - RNA, 19 nt, Artificial Sequence
  Description of Artificial Sequence: Synthetic oligonucleotide
gguuagaauaggcccggga

SEQ ID NO: 1436864 - RNA, 19 nt, Artificial Sequence
  Description of Artificial Sequence: Synthetic oligonucleotide
aaacaggucucugggccuu

SEQ ID NO: 1436865 - RNA, 19 nt, Artificial Sequence
  Description of Artificial Sequence: Synthetic oligonucleotide
aggacggaaaugggagaag

SEQ ID NO: 1436866 - RNA, 19 nt, Artificial Sequence
  Description of Artificial Sequence: Synthetic oligonucleotide
gugaaagagcccugcccca

SEQ ID NO: 1436867 - RNA, 19 nt, Artificial Sequence
  Description of Artificial Sequence: Synthetic oligonucleotide
gcuuuguaagccccaucug

SEQ ID NO: 1436868 - RNA, 19 nt, Artificial Sequence
  Description of Artificial Sequence: Synthetic oligonucleotide
acgcuaucagcuagcgguc

SEQ ID NO: 1436869 - RNA, 19 nt, Artificial Sequence
  Description of Artificial Sequence: Synthetic oligonucleotide
caggcuccggcucugcguc

SEQ ID NO: 1436870 - RNA, 19 nt, Artificial Sequence
  Description of Artificial Sequence: Synthetic oligonucleotide
guagugacugguuccaguu

SEQ ID NO: 1436871 - RNA, 19 nt, Artificial Sequence
  Description of Artificial Sequence: Synthetic oligonucleotide
cucugucggcucuucugug

SEQ ID NO: 1436872 - RNA, 19 nt, Artificial Sequence
  Description of Artificial Sequence: Synthetic oligonucleotide
gucuccuugcuugagaaau

SEQ ID NO: 1436873 - RNA, 19 nt, Artificial Sequence
  Description of Artificial Sequence: Synthetic oligonucleotide
ugacgcagcgcaggaaguc

SEQ ID NO: 1436874 - RNA, 19 nt, Artificial Sequence
  Description of Artificial Sequence: Synthetic oligonucleotide
agcuagcggucaaaugaag

SEQ ID NO: 1436875 - RNA, 19 nt, Artificial Sequence
  Description of Artificial Sequence: Synthetic oligonucleotide
caucaugggccagcacagg

SEQ ID NO: 1436876 - RNA, 19 nt, Artificial Sequence
  Description of Artificial Sequence: Synthetic oligonucleotide
gcggaaacccgcugugcgg

SEQ ID NO: 1436877 - RNA, 19 nt, Artificial Sequence
  Description of Artificial Sequence: Synthetic oligonucleotide
ugucggcucuucuguggga

SEQ ID NO: 1436878 - RNA, 19 nt, Artificial Sequence
  Description of Artificial Sequence: Synthetic oligonucleotide
ccuaaugugcuagcugagc

SEQ ID NO: 1436879 - RNA, 19 nt, Artificial Sequence
  Description of Artificial Sequence: Synthetic oligonucleotide
cagagugcccuaaugugcu

SEQ ID NO: 1436880 - RNA, 19 nt, Artificial Sequence
  Description of Artificial Sequence: Synthetic oligonucleotide
cagcuagcggucaaaugaa

SEQ ID NO: 1436881 - RNA, 19 nt, Artificial Sequence
  Description of Artificial Sequence: Synthetic oligonucleotide
gcagaugcggaggacacca

SEQ ID NO: 1436882 - RNA, 19 nt, Artificial Sequence
  Description of Artificial Sequence: Synthetic oligonucleotide
caauuuugagagugaggcu

SEQ ID NO: 1436883 - RNA, 19 nt, Artificial Sequence
  Description of Artificial Sequence: Synthetic oligonucleotide
accuacaauggaggacuug

SEQ ID NO: 1436884 - RNA, 19 nt, Artificial Sequence
  Description of Artificial Sequence: Synthetic oligonucleotide
cugauuccucugucggcuc

SEQ ID NO: 1436885 - RNA, 19 nt, Artificial Sequence
  Description of Artificial Sequence: Synthetic oligonucleotide
gaaguccaucaugggccag

SEQ ID NO: 1436886 - RNA, 19 nt, Artificial Sequence
  Description of Artificial Sequence: Synthetic oligonucleotide
cucaggagugucaccucga

SEQ ID NO: 1436887 - RNA, 19 nt, Artificial Sequence
  Description of Artificial Sequence: Synthetic oligonucleotide
ccauuuguuacauugcuuu

SEQ ID NO: 1436888 - RNA, 19 nt, Artificial Sequence
  Description of Artificial Sequence: Synthetic oligonucleotide
ggaaacacuuucucuugua

SEQ ID NO: 1436889 - RNA, 19 nt, Artificial Sequence
  Description of Artificial Sequence: Synthetic oligonucleotide
gaugcggaggacaccacau

SEQ ID NO: 1436890 - RNA, 19 nt, Artificial Sequence
  Description of Artificial Sequence: Synthetic oligonucleotide
cuguagugacugguuccag

SEQ ID NO: 1436891 - RNA, 19 nt, Artificial Sequence
  Description of Artificial Sequence: Synthetic oligonucleotide
cugcuuuguaagccccauc

SEQ ID NO: 1436892 - RNA, 19 nt, Artificial Sequence
  Description of Artificial Sequence: Synthetic oligonucleotide
cuuggcuaguuagguuuuc

SEQ ID NO: 1436893 - RNA, 19 nt, Artificial Sequence
  Description of Artificial Sequence: Synthetic oligonucleotide
guccggggacucuggauca

SEQ ID NO: 1436894 - RNA, 19 nt, Artificial Sequence
  Description of Artificial Sequence: Synthetic oligonucleotide
agaauaggcccgggacuca

SEQ ID NO: 1436895 - RNA, 19 nt, Artificial Sequence
  Description of Artificial Sequence: Synthetic oligonucleotide
augcggaggacaccacaua

SEQ ID NO: 1436896 - RNA, 19 nt, Artificial Sequence
  Description of Artificial Sequence: Synthetic oligonucleotide
cauccuccgcugucccgcc

SEQ ID NO: 1436897 - RNA, 19 nt, Artificial Sequence
  Description of Artificial Sequence: Synthetic oligonucleotide
guaagccccaucugaguau

SEQ ID NO: 1436898 - RNA, 19 nt, Artificial Sequence
  Description of Artificial Sequence: Synthetic oligonucleotide
caacgacauacacgcuauc

SEQ ID NO: 1436899 - RNA, 19 nt, Artificial Sequence
  Description of Artificial Sequence: Synthetic oligonucleotide
gacggaaaugggagaaggu

SEQ ID NO: 1436900 - RNA, 19 nt, Artificial Sequence
  Description of Artificial Sequence: Synthetic oligonucleotide
gcuaccucgucgagccucg

SEQ ID NO: 1436901 - RNA, 19 nt, Artificial Sequence
  Description of Artificial Sequence: Synthetic oligonucleotide
agggaagcggaaacccgcu

SEQ ID NO: 1436902 - RNA, 19 nt, Artificial Sequence
  Description of Artificial Sequence: Synthetic oligonucleotide
cugugggaauccacugcca

SEQ ID NO: 1436903 - RNA, 19 nt, Artificial Sequence
  Description of Artificial Sequence: Synthetic oligonucleotide
cccuaaugugcuagcugag

SEQ ID NO: 1436904 - RNA, 19 nt, Artificial Sequence
  Description of Artificial Sequence: Synthetic oligonucleotide
guuggcucccugucuguua

SEQ ID NO: 1436905 - RNA, 19 nt, Artificial Sequence
  Description of Artificial Sequence: Synthetic oligonucleotide
ucggcucuucugugggaau

SEQ ID NO: 1436906 - RNA, 19 nt, Artificial Sequence
  Description of Artificial Sequence: Synthetic oligonucleotide
gcgagcagaggaaggcgcg

SEQ ID NO: 1436907 - RNA, 19 nt, Artificial Sequence
  Description of Artificial Sequence: Synthetic oligonucleotide
ggaagcggaaacccgcugu

SEQ ID NO: 1436908 - RNA, 19 nt, Artificial Sequence
  Description of Artificial Sequence: Synthetic oligonucleotide
uccggggacucuggaucag

SEQ ID NO: 1436909 - RNA, 19 nt, Artificial Sequence
  Description of Artificial Sequence: Synthetic oligonucleotide
gugcuagcugagcaguacu

SEQ ID NO: 1436910 - RNA, 19 nt, Artificial Sequence
  Description of Artificial Sequence: Synthetic oligonucleotide
cucgucgagccucggccuc

SEQ ID NO: 1436911 - RNA, 19 nt, Artificial Sequence
  Description of Artificial Sequence: Synthetic oligonucleotide
gucaccucgagagacugau

SEQ ID NO: 1436912 - RNA, 19 nt, Artificial Sequence
  Description of Artificial Sequence: Synthetic oligonucleotide
ugucugcgucuguggggca

SEQ ID NO: 1436913 - RNA, 19 nt, Artificial Sequence
  Description of Artificial Sequence: Synthetic oligonucleotide
gcgaccuuugagcgagcag

SEQ ID NO: 1436914 - RNA, 19 nt, Artificial Sequence
  Description of Artificial Sequence: Synthetic oligonucleotide
ucgucgagccucggccuca

SEQ ID NO: 1436915 - RNA, 19 nt, Artificial Sequence
  Description of Artificial Sequence: Synthetic oligonucleotide
agagugcccuaaugugcua

SEQ ID NO: 1436916 - RNA, 19 nt, Artificial Sequence
  Description of Artificial Sequence: Synthetic oligonucleotide
ggcuugacugggccugccc

SEQ ID NO: 1436917 - RNA, 19 nt, Artificial Sequence
  Description of Artificial Sequence: Synthetic oligonucleotide
acccgcugugcggaaggag

SEQ ID NO: 1436918 - RNA, 19 nt, Artificial Sequence
  Description of Artificial Sequence: Synthetic oligonucleotide
gggaagcggaaacccgcug

SEQ ID NO: 1436919 - RNA, 19 nt, Artificial Sequence
  Description of Artificial Sequence: Synthetic oligonucleotide
gcggaggacaccacauagc

SEQ ID NO: 1436920 - RNA, 19 nt, Artificial Sequence
  Description of Artificial Sequence: Synthetic oligonucleotide
uggcaucggcaaagaggaa

SEQ ID NO: 1436921 - RNA, 19 nt, Artificial Sequence
  Description of Artificial Sequence: Synthetic oligonucleotide
cauagcggcgcuaccucgu

SEQ ID NO: 1436922 - RNA, 19 nt, Artificial Sequence
  Description of Artificial Sequence: Synthetic oligonucleotide
cuaucagcuagcggucaaa

SEQ ID NO: 1436923 - RNA, 19 nt, Artificial Sequence
  Description of Artificial Sequence: Synthetic oligonucleotide
acacccgacucggccagca

SEQ ID NO: 1436924 - RNA, 19 nt, Artificial Sequence
  Description of Artificial Sequence: Synthetic oligonucleotide
cgaccuuugagcgagcaga

SEQ ID NO: 1436925 - RNA, 19 nt, Artificial Sequence
  Description of Artificial Sequence: Synthetic oligonucleotide
gcuagcugagcaguacuaa

SEQ ID NO: 1436926 - RNA, 19 nt, Artificial Sequence
  Description of Artificial Sequence: Synthetic oligonucleotide
ggaggcgaccuuugagcga

SEQ ID NO: 1436927 - RNA, 19 nt, Artificial Sequence
  Description of Artificial Sequence: Synthetic oligonucleotide
cagggcgcugagcccgggc

SEQ ID NO: 1436928 - RNA, 19 nt, Artificial Sequence
  Description of Artificial Sequence: Synthetic oligonucleotide
uguuaccaguaggccuguc

SEQ ID NO: 1436929 - RNA, 19 nt, Artificial Sequence
  Description of Artificial Sequence: Synthetic oligonucleotide
gcuaucagcuagcggucaa

SEQ ID NO: 1436930 - RNA, 19 nt, Artificial Sequence
  Description of Artificial Sequence: Synthetic oligonucleotide
ggguuagaauaggcccggg

SEQ ID NO: 1436931 - RNA, 19 nt, Artificial Sequence
  Description of Artificial Sequence: Synthetic oligonucleotide
agacaggccuucaguccga

SEQ ID NO: 1436932 - RNA, 19 nt, Artificial Sequence
  Description of Artificial Sequence: Synthetic oligonucleotide
aacaggucucugggccuuu

SEQ ID NO: 1436933 - RNA, 19 nt, Artificial Sequence
  Description of Artificial Sequence: Synthetic oligonucleotide
cacccgacucggccagcag

SEQ ID NO: 1436934 - RNA, 19 nt, Artificial Sequence
  Description of Artificial Sequence: Synthetic oligonucleotide
uagccccgguaaacagguc

SEQ ID NO: 1436935 - RNA, 19 nt, Artificial Sequence
  Description of Artificial Sequence: Synthetic oligonucleotide
ggucucauugguagagucu

SEQ ID NO: 1436936 - RNA, 19 nt, Artificial Sequence
  Description of Artificial Sequence: Synthetic oligonucleotide
gaauaggcccgggacucau

SEQ ID NO: 1436937 - RNA, 19 nt, Artificial Sequence
  Description of Artificial Sequence: Synthetic oligonucleotide
gugagguuaaaaggucuuu

SEQ ID NO: 1436938 - RNA, 19 nt, Artificial Sequence
  Description of Artificial Sequence: Synthetic oligonucleotide
gcgcgcgggcagcagggcg

SEQ ID NO: 1436939 - RNA, 19 nt, Artificial Sequence
  Description of Artificial Sequence: Synthetic oligonucleotide
gaguccgaguuggaauuau

SEQ ID NO: 1436940 - RNA, 19 nt, Artificial Sequence
  Description of Artificial Sequence: Synthetic oligonucleotide
aggcgaccuuugagcgagc

SEQ ID NO: 1436941 - RNA, 19 nt, Artificial Sequence
  Description of Artificial Sequence: Synthetic oligonucleotide
ggcccgggacucauccucc

SEQ ID NO: 1436942 - RNA, 19 nt, Artificial Sequence
  Description of Artificial Sequence: Synthetic oligonucleotide
gugcccuaaugugcuagcu

SEQ ID NO: 1436943 - RNA, 19 nt, Artificial Sequence
  Description of Artificial Sequence: Synthetic oligonucleotide
gccccgguaaacaggucuc

SEQ ID NO: 1436944 - RNA, 19 nt, Artificial Sequence
  Description of Artificial Sequence: Synthetic oligonucleotide
ggcgaccuuugagcgagca

SEQ ID NO: 1436945 - RNA, 19 nt, Artificial Sequence
  Description of Artificial Sequence: Synthetic oligonucleotide
gugacgcagcgcaggaagu

SEQ ID NO: 1436946 - RNA, 19 nt, Artificial Sequence
  Description of Artificial Sequence: Synthetic oligonucleotide
ggacuuggcuaguuagguu

SEQ ID NO: 1436947 - RNA, 19 nt, Artificial Sequence
  Description of Artificial Sequence: Synthetic oligonucleotide
ccggggacucuggaucagg

SEQ ID NO: 1436948 - RNA, 19 nt, Artificial Sequence
  Description of Artificial Sequence: Synthetic oligonucleotide
gugcuaccacaugaacugu

SEQ ID NO: 1436949 - RNA, 19 nt, Artificial Sequence
  Description of Artificial Sequence: Synthetic oligonucleotide
cccgggacucauccuccgc

SEQ ID NO: 1436950 - RNA, 19 nt, Artificial Sequence
  Description of Artificial Sequence: Synthetic oligonucleotide
ccucgagagacugauuccu

SEQ ID NO: 1436951 - RNA, 19 nt, Artificial Sequence
  Description of Artificial Sequence: Synthetic oligonucleotide
ccuauuggcuguggucuca

SEQ ID NO: 1436952 - RNA, 19 nt, Artificial Sequence
  Description of Artificial Sequence: Synthetic oligonucleotide
ggaaacccgcugugcggaa

SEQ ID NO: 1436953 - RNA, 19 nt, Artificial Sequence
  Description of Artificial Sequence: Synthetic oligonucleotide
cuaagccagcacagccaau

SEQ ID NO: 1436954 - RNA, 19 nt, Artificial Sequence
  Description of Artificial Sequence: Synthetic oligonucleotide
gugacugguuccaguugau

SEQ ID NO: 1436955 - RNA, 19 nt, Artificial Sequence
  Description of Artificial Sequence: Synthetic oligonucleotide
gccauuuguuacauugcuu

SEQ ID NO: 1436956 - RNA, 19 nt, Artificial Sequence
  Description of Artificial Sequence: Synthetic oligonucleotide
ccaguugaugugucugcgu

SEQ ID NO: 1436957 - RNA, 19 nt, Artificial Sequence
  Description of Artificial Sequence: Synthetic oligonucleotide
cagugacgcagcgcaggaa

SEQ ID NO: 1436958 - RNA, 19 nt, Artificial Sequence
  Description of Artificial Sequence: Synthetic oligonucleotide
cgcuaccucgucgagccuc

SEQ ID NO: 1436959 - RNA, 19 nt, Artificial Sequence
  Description of Artificial Sequence: Synthetic oligonucleotide
gaccuacaauggaggacuu

SEQ ID NO: 1436960 - RNA, 19 nt, Artificial Sequence
  Description of Artificial Sequence: Synthetic oligonucleotide
ccgcugugcggaaggagaa

SEQ ID NO: 1436961 - RNA, 19 nt, Artificial Sequence
  Description of Artificial Sequence: Synthetic oligonucleotide
cggaaacccgcugugcgga

SEQ ID NO: 1436962 - RNA, 19 nt, Artificial Sequence
  Description of Artificial Sequence: Synthetic oligonucleotide
gcccgggcacuguccugcc

SEQ ID NO: 1436963 - RNA, 19 nt, Artificial Sequence
  Description of Artificial Sequence: Synthetic oligonucleotide
gcgguccggggacucugga

SEQ ID NO: 1436964 - RNA, 19 nt, Artificial Sequence
  Description of Artificial Sequence: Synthetic oligonucleotide
ccacccugugcuaccacau

SEQ ID NO: 1436965 - RNA, 19 nt, Artificial Sequence
  Description of Artificial Sequence: Synthetic oligonucleotide
gcagggcgcugagcccggg

SEQ ID NO: 1436966 - RNA, 19 nt, Artificial Sequence
  Description of Artificial Sequence: Synthetic oligonucleotide
ccucgucgagccucggccu

SEQ ID NO: 1436967 - RNA, 19 nt, Artificial Sequence
  Description of Artificial Sequence: Synthetic oligonucleotide
ccccacccugugcuaccac

SEQ ID NO: 1436968 - RNA, 19 nt, Artificial Sequence
  Description of Artificial Sequence: Synthetic oligonucleotide
gcggucaaaugaaggccau

SEQ ID NO: 1436969 - RNA, 19 nt, Artificial Sequence
  Description of Artificial Sequence: Synthetic oligonucleotide
cgcuaucagcuagcgguca

SEQ ID NO: 1436970 - RNA, 19 nt, Artificial Sequence
  Description of Artificial Sequence: Synthetic oligonucleotide
ccucacugccucacccagu

SEQ ID NO: 1436971 - RNA, 19 nt, Artificial Sequence
  Description of Artificial Sequence: Synthetic oligonucleotide
gucgagccucggccucacu

SEQ ID NO: 1436972 - RNA, 19 nt, Artificial Sequence
  Description of Artificial Sequence: Synthetic oligonucleotide
guggggcagugagguuaaa

SEQ ID NO: 1436973 - RNA, 19 nt, Artificial Sequence
  Description of Artificial Sequence: Synthetic oligonucleotide
gcccagccauuugugacuu

SEQ ID NO: 1436974 - RNA, 19 nt, Artificial Sequence
  Description of Artificial Sequence: Synthetic oligonucleotide
cgucgagccucggccucac

SEQ ID NO: 1436975 - RNA, 19 nt, Artificial Sequence
  Description of Artificial Sequence: Synthetic oligonucleotide
cccgggcacuguccugcca

SEQ ID NO: 1436976 - RNA, 19 nt, Artificial Sequence
  Description of Artificial Sequence: Synthetic oligonucleotide
ccccgguaaacaggucucu

SEQ ID NO: 1436977 - RNA, 19 nt, Artificial Sequence
  Description of Artificial Sequence: Synthetic oligonucleotide
cgcugugcggaaggagaaa

SEQ ID NO: 1436978 - RNA, 19 nt, Artificial Sequence
  Description of Artificial Sequence: Synthetic oligonucleotide
gcgcuaccucgucgagccu

SEQ ID NO: 1436979 - RNA, 19 nt, Artificial Sequence
  Description of Artificial Sequence: Synthetic oligonucleotide
aagaaugugccaucgggcg

SEQ ID NO: 1436980 - RNA, 19 nt, Artificial Sequence
  Description of Artificial Sequence: Synthetic oligonucleotide
ucagucucguucuugaucc

SEQ ID NO: 1436981 - RNA, 19 nt, Artificial Sequence
  Description of Artificial Sequence: Synthetic oligonucleotide
uguucuucgaagaucuuga

SEQ ID NO: 1436982 - RNA, 19 nt, Artificial Sequence
  Description of Artificial Sequence: Synthetic oligonucleotide
ugggaaaugagcuccacca

SEQ ID NO: 1436983 - RNA, 19 nt, Artificial Sequence
  Description of Artificial Sequence: Synthetic oligonucleotide
uggugguagaccuugagcu

SEQ ID NO: 1436984 - RNA, 19 nt, Artificial Sequence
  Description of Artificial Sequence: Synthetic oligonucleotide
ucucggaccaagaaugugc

SEQ ID NO: 1436985 - RNA, 19 nt, Artificial Sequence
  Description of Artificial Sequence: Synthetic oligonucleotide
ugcguaacagccucgcugg

SEQ ID NO: 1436986 - RNA, 19 nt, Artificial Sequence
  Description of Artificial Sequence: Synthetic oligonucleotide
uucagugacgcguacaggu

SEQ ID NO: 1436987 - RNA, 19 nt, Artificial Sequence
  Description of Artificial Sequence: Synthetic oligonucleotide
ugaauacugguccucaguc

SEQ ID NO: 1436988 - RNA, 19 nt, Artificial Sequence
  Description of Artificial Sequence: Synthetic oligonucleotide
gacgcguacagguuguagg

SEQ ID NO: 1436989 - RNA, 19 nt, Artificial Sequence
  Description of Artificial Sequence: Synthetic oligonucleotide
cuuggugucgccauccacc

SEQ ID NO: 1436990 - RNA, 19 nt, Artificial Sequence
  Description of Artificial Sequence: Synthetic oligonucleotide
gaaaugagcuccaccacgg

SEQ ID NO: 1436991 - RNA, 19 nt, Artificial Sequence
  Description of Artificial Sequence: Synthetic oligonucleotide
aaauacuccuugcugcacu

SEQ ID NO: 1436992 - RNA, 19 nt, Artificial Sequence
  Description of Artificial Sequence: Synthetic oligonucleotide
uugaucagcuuguuguucc

SEQ ID NO: 1436993 - RNA, 19 nt, Artificial Sequence
  Description of Artificial Sequence: Synthetic oligonucleotide
aggugugcgcaguaggagc

SEQ ID NO: 1436994 - RNA, 19 nt, Artificial Sequence
  Description of Artificial Sequence: Synthetic oligonucleotide
caagaaugugccaucgggc

SEQ ID NO: 1436995 - RNA, 19 nt, Artificial Sequence
  Description of Artificial Sequence: Synthetic oligonucleotide
ugacuugagccgcucagag

SEQ ID NO: 1436996 - RNA, 19 nt, Artificial Sequence
  Description of Artificial Sequence: Synthetic oligonucleotide
agcugaucguauucgcggc

SEQ ID NO: 1436997 - RNA, 19 nt, Artificial Sequence
  Description of Artificial Sequence: Synthetic oligonucleotide
uugaucuuccucugucggg

SEQ ID NO: 1436998 - RNA, 19 nt, Artificial Sequence
  Description of Artificial Sequence: Synthetic oligonucleotide
uucaccucuucccuggaga

SEQ ID NO: 1436999 - RNA, 19 nt, Artificial Sequence
  Description of Artificial Sequence: Synthetic oligonucleotide
guauucgcggcucuugucc

SEQ ID NO: 1437000 - RNA, 19 nt, Artificial Sequence
  Description of Artificial Sequence: Synthetic oligonucleotide
guagugggaaaugagcucc

SEQ ID NO: 1437001 - RNA, 19 nt, Artificial Sequence
  Description of Artificial Sequence: Synthetic oligonucleotide
cagcugaucguauucgcgg

SEQ ID NO: 1437002 - RNA, 19 nt, Artificial Sequence
  Description of Artificial Sequence: Synthetic oligonucleotide
augcguaacagccucgcug

SEQ ID NO: 1437003 - RNA, 19 nt, Artificial Sequence
  Description of Artificial Sequence: Synthetic oligonucleotide
cugucgggcaccuuucugg

SEQ ID NO: 1437004 - RNA, 19 nt, Artificial Sequence
  Description of Artificial Sequence: Synthetic oligonucleotide
acgcguacagguuguaggg

SEQ ID NO: 1437005 - RNA, 19 nt, Artificial Sequence
  Description of Artificial Sequence: Synthetic oligonucleotide
cugguacuuggacacaggg

SEQ ID NO: 1437006 - RNA, 19 nt, Artificial Sequence
  Description of Artificial Sequence: Synthetic oligonucleotide
uacgccaggagcugugggg

SEQ ID NO: 1437007 - RNA, 19 nt, Artificial Sequence
  Description of Artificial Sequence: Synthetic oligonucleotide
uuuccugagggugagcgug

SEQ ID NO: 1437008 - RNA, 19 nt, Artificial Sequence
  Description of Artificial Sequence: Synthetic oligonucleotide
ugaucuugcccacguacca

SEQ ID NO: 1437009 - RNA, 19 nt, Artificial Sequence
  Description of Artificial Sequence: Synthetic oligonucleotide
uguuguucccgccuuuccu

SEQ ID NO: 1437010 - RNA, 19 nt, Artificial Sequence
  Description of Artificial Sequence: Synthetic oligonucleotide
ugcaucucggaccaagaau

SEQ ID NO: 1437011 - RNA, 19 nt, Artificial Sequence
  Description of Artificial Sequence: Synthetic oligonucleotide
auacagcugaucguauucg

SEQ ID NO: 1437012 - RNA, 19 nt, Artificial Sequence
  Description of Artificial Sequence: Synthetic oligonucleotide
cauacagcugaucguauuc

SEQ ID NO: 1437013 - RNA, 19 nt, Artificial Sequence
  Description of Artificial Sequence: Synthetic oligonucleotide
guaacagccucgcuggcug

SEQ ID NO: 1437014 - RNA, 19 nt, Artificial Sequence
  Description of Artificial Sequence: Synthetic oligonucleotide
cucauugcccucucgccgg

SEQ ID NO: 1437015 - RNA, 19 nt, Artificial Sequence
  Description of Artificial Sequence: Synthetic oligonucleotide
uuugccuuagaggguuugg

SEQ ID NO: 1437016 - RNA, 19 nt, Artificial Sequence
  Description of Artificial Sequence: Synthetic oligonucleotide
ucugcgaugcgugacuuga

SEQ ID NO: 1437017 - RNA, 19 nt, Artificial Sequence
  Description of Artificial Sequence: Synthetic oligonucleotide
gacucguggcgguaguggg

SEQ ID NO: 1437018 - RNA, 19 nt, Artificial Sequence
  Description of Artificial Sequence: Synthetic oligonucleotide
guuguacugggccagcgac

SEQ ID NO: 1437019 - RNA, 19 nt, Artificial Sequence
  Description of Artificial Sequence: Synthetic oligonucleotide
uacagcugaucguauucgc

SEQ ID NO: 1437020 - RNA, 19 nt, Artificial Sequence
  Description of Artificial Sequence: Synthetic oligonucleotide
uugccuuagaggguuuggg

SEQ ID NO: 1437021 - RNA, 19 nt, Artificial Sequence
  Description of Artificial Sequence: Synthetic oligonucleotide
uuagcaagauccucugcau

SEQ ID NO: 1437022 - RNA, 19 nt, Artificial Sequence
  Description of Artificial Sequence: Synthetic oligonucleotide
auuucugcgaugcgugacu

SEQ ID NO: 1437023 - RNA, 19 nt, Artificial Sequence
  Description of Artificial Sequence: Synthetic oligonucleotide
gaucucacgguuguccgag

SEQ ID NO: 1437024 - RNA, 19 nt, Artificial Sequence
  Description of Artificial Sequence: Synthetic oligonucleotide
agucucguucuugaucccc

SEQ ID NO: 1437025 - RNA, 19 nt, Artificial Sequence
  Description of Artificial Sequence: Synthetic oligonucleotide
uccgcgaagccgaagccug

SEQ ID NO: 1437026 - RNA, 19 nt, Artificial Sequence
  Description of Artificial Sequence: Synthetic oligonucleotide
ucguugaucuuccucuguc

SEQ ID NO: 1437027 - RNA, 19 nt, Artificial Sequence
  Description of Artificial Sequence: Synthetic oligonucleotide
uccaguuuugugcggcucu

SEQ ID NO: 1437028 - RNA, 19 nt, Artificial Sequence
  Description of Artificial Sequence: Synthetic oligonucleotide
uuuuccugcgucuggcccu

SEQ ID NO: 1437029 - RNA, 19 nt, Artificial Sequence
  Description of Artificial Sequence: Synthetic oligonucleotide
gaccaagaaugugccaucg

SEQ ID NO: 1437030 - RNA, 19 nt, Artificial Sequence
  Description of Artificial Sequence: Synthetic oligonucleotide
guuguucccgccuuuccug

SEQ ID NO: 1437031 - RNA, 19 nt, Artificial Sequence
  Description of Artificial Sequence: Synthetic oligonucleotide
agccguaguggccaucccg

SEQ ID NO: 1437032 - RNA, 19 nt, Artificial Sequence
  Description of Artificial Sequence: Synthetic oligonucleotide
uuacgccaggagcuguggg

SEQ ID NO: 1437033 - RNA, 19 nt, Artificial Sequence
  Description of Artificial Sequence: Synthetic oligonucleotide
gagcguguacucuccuugg

SEQ ID NO: 1437034 - RNA, 19 nt, Artificial Sequence
  Description of Artificial Sequence: Synthetic oligonucleotide
ucucacgguuguccgaggc

SEQ ID NO: 1437035 - RNA, 19 nt, Artificial Sequence
  Description of Artificial Sequence: Synthetic oligonucleotide
ugggugagccacacgaggu

SEQ ID NO: 1437036 - RNA, 19 nt, Artificial Sequence
  Description of Artificial Sequence: Synthetic oligonucleotide
ucuauggggagguccgugu

SEQ ID NO: 1437037 - RNA, 19 nt, Artificial Sequence
  Description of Artificial Sequence: Synthetic oligonucleotide
agaccuugagcugggcacc

SEQ ID NO: 1437038 - RNA, 19 nt, Artificial Sequence
  Description of Artificial Sequence: Synthetic oligonucleotide
cugggugagccacacgagg

SEQ ID NO: 1437039 - RNA, 19 nt, Artificial Sequence
  Description of Artificial Sequence: Synthetic oligonucleotide
uagggcuccgcgaagccga

SEQ ID NO: 1437040 - RNA, 19 nt, Artificial Sequence
  Description of Artificial Sequence: Synthetic oligonucleotide
aaggucccgucccguuugc

SEQ ID NO: 1437041 - RNA, 19 nt, Artificial Sequence
  Description of Artificial Sequence: Synthetic oligonucleotide
gaaugugccaucgggcgug

SEQ ID NO: 1437042 - RNA, 19 nt, Artificial Sequence
  Description of Artificial Sequence: Synthetic oligonucleotide
acggagcaugcguaacagc

SEQ ID NO: 1437043 - RNA, 19 nt, Artificial Sequence
  Description of Artificial Sequence: Synthetic oligonucleotide
cauccugaagcgaggcggg

SEQ ID NO: 1437044 - RNA, 19 nt, Artificial Sequence
  Description of Artificial Sequence: Synthetic oligonucleotide
cuugucgaucucacgguug

SEQ ID NO: 1437045 - RNA, 19 nt, Artificial Sequence
  Description of Artificial Sequence: Synthetic oligonucleotide
ggugucgccauccaccacc

SEQ ID NO: 1437046 - RNA, 19 nt, Artificial Sequence
  Description of Artificial Sequence: Synthetic oligonucleotide
ccuuagaggguuugggugg

SEQ ID NO: 1437047 - RNA, 19 nt, Artificial Sequence
  Description of Artificial Sequence: Synthetic oligonucleotide
gaaggucccgucccguuug

SEQ ID NO: 1437048 - RNA, 19 nt, Artificial Sequence
  Description of Artificial Sequence: Synthetic oligonucleotide
aagccguaguggccauccc

SEQ ID NO: 1437049 - RNA, 19 nt, Artificial Sequence
  Description of Artificial Sequence: Synthetic oligonucleotide
ugccuuagaggguuugggu

SEQ ID NO: 1437050 - RNA, 19 nt, Artificial Sequence
  Description of Artificial Sequence: Synthetic oligonucleotide
ucugucgggcaccuuucug

SEQ ID NO: 1437051 - RNA, 19 nt, Artificial Sequence
  Description of Artificial Sequence: Synthetic oligonucleotide
acagcugaucguauucgcg

SEQ ID NO: 1437052 - RNA, 19 nt, Artificial Sequence
  Description of Artificial Sequence: Synthetic oligonucleotide
gcaucucggaccaagaaug

SEQ ID NO: 1437053 - RNA, 19 nt, Artificial Sequence
  Description of Artificial Sequence: Synthetic oligonucleotide
cucagucucguucuugauc

SEQ ID NO: 1437054 - RNA, 19 nt, Artificial Sequence
  Description of Artificial Sequence: Synthetic oligonucleotide
uauggggagguccgugugu

SEQ ID NO: 1437055 - RNA, 19 nt, Artificial Sequence
  Description of Artificial Sequence: Synthetic oligonucleotide
aagcgaggcggguucccuc

SEQ ID NO: 1437056 - RNA, 19 nt, Artificial Sequence
  Description of Artificial Sequence: Synthetic oligonucleotide
ugcacuuuuccugcgucug

SEQ ID NO: 1437057 - RNA, 19 nt, Artificial Sequence
  Description of Artificial Sequence: Synthetic oligonucleotide
cacacgagguacugguccc

SEQ ID NO: 1437058 - RNA, 19 nt, Artificial Sequence
  Description of Artificial Sequence: Synthetic oligonucleotide
agguacuggucccggaucu

SEQ ID NO: 1437059 - RNA, 19 nt, Artificial Sequence
  Description of Artificial Sequence: Synthetic oligonucleotide
agaaugugccaucgggcgu

SEQ ID NO: 1437060 - RNA, 19 nt, Artificial Sequence
  Description of Artificial Sequence: Synthetic oligonucleotide
gagcaugcguaacagccuc

SEQ ID NO: 1437061 - RNA, 19 nt, Artificial Sequence
  Description of Artificial Sequence: Synthetic oligonucleotide
gaccgugagcgcaucauug

SEQ ID NO: 1437062 - RNA, 19 nt, Artificial Sequence
  Description of Artificial Sequence: Synthetic oligonucleotide
gauuucugcgaugcgugac

SEQ ID NO: 1437063 - RNA, 19 nt, Artificial Sequence
  Description of Artificial Sequence: Synthetic oligonucleotide
uauucgcggcucuuguccu

SEQ ID NO: 1437064 - RNA, 19 nt, Artificial Sequence
  Description of Artificial Sequence: Synthetic oligonucleotide
agcgaguggacagcugugg

SEQ ID NO: 1437065 - RNA, 19 nt, Artificial Sequence
  Description of Artificial Sequence: Synthetic oligonucleotide
uccucugucgggcaccuuu

SEQ ID NO: 1437066 - RNA, 19 nt, Artificial Sequence
  Description of Artificial Sequence: Synthetic oligonucleotide
cggcguuugccuuagaggg

SEQ ID NO: 1437067 - RNA, 19 nt, Artificial Sequence
  Description of Artificial Sequence: Synthetic oligonucleotide
aguuuugugcggcucucau

SEQ ID NO: 1437068 - RNA, 19 nt, Artificial Sequence
  Description of Artificial Sequence: Synthetic oligonucleotide
ugaucguauucgcggcucu

SEQ ID NO: 1437069 - RNA, 19 nt, Artificial Sequence
  Description of Artificial Sequence: Synthetic oligonucleotide
auugcccucucgccggaag

SEQ ID NO: 1437070 - RNA, 19 nt, Artificial Sequence
  Description of Artificial Sequence: Synthetic oligonucleotide
ugugugcgguugaucuugc

SEQ ID NO: 1437071 - RNA, 19 nt, Artificial Sequence
  Description of Artificial Sequence: Synthetic oligonucleotide
auuacgccaggagcugugg

SEQ ID NO: 1437072 - RNA, 19 nt, Artificial Sequence
  Description of Artificial Sequence: Synthetic oligonucleotide
uccauuacgccaggagcug

SEQ ID NO: 1437073 - RNA, 19 nt, Artificial Sequence
  Description of Artificial Sequence: Synthetic oligonucleotide
cauuacgccaggagcugug

SEQ ID NO: 1437074 - RNA, 19 nt, Artificial Sequence
  Description of Artificial Sequence: Synthetic oligonucleotide
cucacgguuguccgaggcc

SEQ ID NO: 1437075 - RNA, 19 nt, Artificial Sequence
  Description of Artificial Sequence: Synthetic oligonucleotide
guuguccgaggccugcgcc

SEQ ID NO: 1437076 - RNA, 19 nt, Artificial Sequence
  Description of Artificial Sequence: Synthetic oligonucleotide
ccuccauuacgccaggagc

SEQ ID NO: 1437077 - RNA, 19 nt, Artificial Sequence
  Description of Artificial Sequence: Synthetic oligonucleotide
cuugauccccagccacucg

SEQ ID NO: 1437078 - RNA, 19 nt, Artificial Sequence
  Description of Artificial Sequence: Synthetic oligonucleotide
uggcccuguucuucgaaga

SEQ ID NO: 1437079 - RNA, 19 nt, Artificial Sequence
  Description of Artificial Sequence: Synthetic oligonucleotide
cugugugcgguugaucuug

SEQ ID NO: 1437080 - RNA, 19 nt, Artificial Sequence
  Description of Artificial Sequence: Synthetic oligonucleotide
uagugggaaaugagcucca

SEQ ID NO: 1437081 - RNA, 19 nt, Artificial Sequence
  Description of Artificial Sequence: Synthetic oligonucleotide
accgugagcgcaucauugu

SEQ ID NO: 1437082 - RNA, 19 nt, Artificial Sequence
  Description of Artificial Sequence: Synthetic oligonucleotide
agugggaaaugagcuccac

SEQ ID NO: 1437083 - RNA, 19 nt, Artificial Sequence
  Description of Artificial Sequence: Synthetic oligonucleotide
gaauacugguccucagucu

SEQ ID NO: 1437084 - RNA, 19 nt, Artificial Sequence
  Description of Artificial Sequence: Synthetic oligonucleotide
ugcgcaguaggagcggccc

SEQ ID NO: 1437085 - RNA, 19 nt, Artificial Sequence
  Description of Artificial Sequence: Synthetic oligonucleotide
uugcccucucgccggaagc

SEQ ID NO: 1437086 - RNA, 19 nt, Artificial Sequence
  Description of Artificial Sequence: Synthetic oligonucleotide
ugacgcguacagguuguag

SEQ ID NO: 1437087 - RNA, 19 nt, Artificial Sequence
  Description of Artificial Sequence: Synthetic oligonucleotide
cacucguugaucuuccucu

SEQ ID NO: 1437088 - RNA, 19 nt, Artificial Sequence
  Description of Artificial Sequence: Synthetic oligonucleotide
ugcccucucgccggaagcg

SEQ ID NO: 1437089 - RNA, 19 nt, Artificial Sequence
  Description of Artificial Sequence: Synthetic oligonucleotide
ggugugcgcaguaggagcg

SEQ ID NO: 1437090 - RNA, 19 nt, Artificial Sequence
  Description of Artificial Sequence: Synthetic oligonucleotide
gaggcgugcugguagugca

SEQ ID NO: 1437091 - RNA, 19 nt, Artificial Sequence
  Description of Artificial Sequence: Synthetic oligonucleotide
ggugguagaccuugagcug

SEQ ID NO: 1437092 - RNA, 19 nt, Artificial Sequence
  Description of Artificial Sequence: Synthetic oligonucleotide
ugcgcgagggugaccguga

SEQ ID NO: 1437093 - RNA, 19 nt, Artificial Sequence
  Description of Artificial Sequence: Synthetic oligonucleotide
ucgggcgugucccggaguc

SEQ ID NO: 1437094 - RNA, 19 nt, Artificial Sequence
  Description of Artificial Sequence: Synthetic oligonucleotide
cacggagcaugcguaacag

SEQ ID NO: 1437095 - RNA, 19 nt, Artificial Sequence
  Description of Artificial Sequence: Synthetic oligonucleotide
cucguucuugauccccagc

SEQ ID NO: 1437096 - RNA, 19 nt, Artificial Sequence
  Description of Artificial Sequence: Synthetic oligonucleotide
gcggguucccuccauuacg

SEQ ID NO: 1437097 - RNA, 19 nt, Artificial Sequence
  Description of Artificial Sequence: Synthetic oligonucleotide
accacgugcgcuccucgug

SEQ ID NO: 1437098 - RNA, 19 nt, Artificial Sequence
  Description of Artificial Sequence: Synthetic oligonucleotide
cuccauuacgccaggagcu

SEQ ID NO: 1437099 - RNA, 19 nt, Artificial Sequence
  Description of Artificial Sequence: Synthetic oligonucleotide
ccguuugccacucagcauc

SEQ ID NO: 1437100 - RNA, 19 nt, Artificial Sequence
  Description of Artificial Sequence: Synthetic oligonucleotide
ccacacgagguacuggucc

SEQ ID NO: 1437101 - RNA, 19 nt, Artificial Sequence
  Description of Artificial Sequence: Synthetic oligonucleotide
guaccacgugcgcuccucg

SEQ ID NO: 1437102 - RNA, 19 nt, Artificial Sequence
  Description of Artificial Sequence: Synthetic oligonucleotide
gaugcaucucggaccaaga

SEQ ID NO: 1437103 - RNA, 19 nt, Artificial Sequence
  Description of Artificial Sequence: Synthetic oligonucleotide
accacggagcaugcguaac

SEQ ID NO: 1437104 - RNA, 19 nt, Artificial Sequence
  Description of Artificial Sequence: Synthetic oligonucleotide
ccguguguauuccucauac

SEQ ID NO: 1437105 - RNA, 19 nt, Artificial Sequence
  Description of Artificial Sequence: Synthetic oligonucleotide
ccggcguuugccuuagagg

SEQ ID NO: 1437106 - RNA, 19 nt, Artificial Sequence
  Description of Artificial Sequence: Synthetic oligonucleotide
agguccguguguauuccuc

SEQ ID NO: 1437107 - RNA, 19 nt, Artificial Sequence
  Description of Artificial Sequence: Synthetic oligonucleotide
caaauacuccuugcugcac

SEQ ID NO: 1437108 - RNA, 19 nt, Artificial Sequence
  Description of Artificial Sequence: Synthetic oligonucleotide
ugaccgugagcgcaucauu

SEQ ID NO: 1437109 - RNA, 19 nt, Artificial Sequence
  Description of Artificial Sequence: Synthetic oligonucleotide
gagggugaccgugagcgca

SEQ ID NO: 1437110 - RNA, 19 nt, Artificial Sequence
  Description of Artificial Sequence: Synthetic oligonucleotide
uccguguguauuccucaua

SEQ ID NO: 1437111 - RNA, 19 nt, Artificial Sequence
  Description of Artificial Sequence: Synthetic oligonucleotide
ccgcucagaguuuagcaag

SEQ ID NO: 1437112 - RNA, 19 nt, Artificial Sequence
  Description of Artificial Sequence: Synthetic oligonucleotide
aucucacgguuguccgagg

SEQ ID NO: 1437113 - RNA, 19 nt, Artificial Sequence
  Description of Artificial Sequence: Synthetic oligonucleotide
uuugugcggcucucaugga

SEQ ID NO: 1437114 - RNA, 19 nt, Artificial Sequence
  Description of Artificial Sequence: Synthetic oligonucleotide
ucccgguggaagacuuuga

SEQ ID NO: 1437115 - RNA, 19 nt, Artificial Sequence
  Description of Artificial Sequence: Synthetic oligonucleotide
ggcuccgcgaagccgaagc

SEQ ID NO: 1437116 - RNA, 19 nt, Artificial Sequence
  Description of Artificial Sequence: Synthetic oligonucleotide
uggcgguagugggaaauga

SEQ ID NO: 1437117 - RNA, 19 nt, Artificial Sequence
  Description of Artificial Sequence: Synthetic oligonucleotide
uaccacucugcauccugaa

SEQ ID NO: 1437118 - RNA, 19 nt, Artificial Sequence
  Description of Artificial Sequence: Synthetic oligonucleotide
cgaugcgugacuugagccg

SEQ ID NO: 1437119 - RNA, 19 nt, Artificial Sequence
  Description of Artificial Sequence: Synthetic oligonucleotide
gguucccuccauuacgcca

SEQ ID NO: 1437120 - RNA, 19 nt, Artificial Sequence
  Description of Artificial Sequence: Synthetic oligonucleotide
gcguguguccagcuuggcg

SEQ ID NO: 1437121 - RNA, 19 nt, Artificial Sequence
  Description of Artificial Sequence: Synthetic oligonucleotide
gggugcgcgagggugaccg

SEQ ID NO: 1437122 - RNA, 19 nt, Artificial Sequence
  Description of Artificial Sequence: Synthetic oligonucleotide
guuugccuuagaggguuug

SEQ ID NO: 1437123 - RNA, 19 nt, Artificial Sequence
  Description of Artificial Sequence: Synthetic oligonucleotide
gucccgucccguuugccac

SEQ ID NO: 1437124 - RNA, 19 nt, Artificial Sequence
  Description of Artificial Sequence: Synthetic oligonucleotide
ggaagcgcuccaaauacuc

SEQ ID NO: 1437125 - RNA, 19 nt, Artificial Sequence
  Description of Artificial Sequence: Synthetic oligonucleotide
gcucggagaagccguagug

SEQ ID NO: 1437126 - RNA, 19 nt, Artificial Sequence
  Description of Artificial Sequence: Synthetic oligonucleotide
gccguaguggccaucccgg

SEQ ID NO: 1437127 - RNA, 19 nt, Artificial Sequence
  Description of Artificial Sequence: Synthetic oligonucleotide
agugacgcguacagguugu

SEQ ID NO: 1437128 - RNA, 19 nt, Artificial Sequence
  Description of Artificial Sequence: Synthetic oligonucleotide
ugcaugagguccggcuuga

SEQ ID NO: 1437129 - RNA, 19 nt, Artificial Sequence
  Description of Artificial Sequence: Synthetic oligonucleotide
cacccaccagccuccacac

SEQ ID NO: 1437130 - RNA, 19 nt, Artificial Sequence
  Description of Artificial Sequence: Synthetic oligonucleotide
agcaugcguaacagccucg

SEQ ID NO: 1437131 - RNA, 19 nt, Artificial Sequence
  Description of Artificial Sequence: Synthetic oligonucleotide
cugaucguauucgcggcuc

SEQ ID NO: 1437132 - RNA, 19 nt, Artificial Sequence
  Description of Artificial Sequence: Synthetic oligonucleotide
gugagcgcaucauugugcu

SEQ ID NO: 1437133 - RNA, 19 nt, Artificial Sequence
  Description of Artificial Sequence: Synthetic oligonucleotide
gccucuauggggagguccg

SEQ ID NO: 1437134 - RNA, 19 nt, Artificial Sequence
  Description of Artificial Sequence: Synthetic oligonucleotide
cgugagcgcaucauugugc

SEQ ID NO: 1437135 - RNA, 19 nt, Artificial Sequence
  Description of Artificial Sequence: Synthetic oligonucleotide
ccaguaccacucugcaucc

SEQ ID NO: 1437136 - RNA, 19 nt, Artificial Sequence
  Description of Artificial Sequence: Synthetic oligonucleotide
cacgagguacuggucccgg

SEQ ID NO: 1437137 - RNA, 19 nt, Artificial Sequence
  Description of Artificial Sequence: Synthetic oligonucleotide
ugccaucgggcgugucccg

SEQ ID NO: 1437138 - RNA, 19 nt, Artificial Sequence
  Description of Artificial Sequence: Synthetic oligonucleotide
cucuauggggagguccgug

SEQ ID NO: 1437139 - RNA, 19 nt, Artificial Sequence
  Description of Artificial Sequence: Synthetic oligonucleotide
gccggcguuugccuuagag

SEQ ID NO: 1437140 - RNA, 19 nt, Artificial Sequence
  Description of Artificial Sequence: Synthetic oligonucleotide
cugcgaugcgugacuugag

SEQ ID NO: 1437141 - RNA, 19 nt, Artificial Sequence
  Description of Artificial Sequence: Synthetic oligonucleotide
uaccacgugcgcuccucgu

SEQ ID NO: 1437142 - RNA, 19 nt, Artificial Sequence
  Description of Artificial Sequence: Synthetic oligonucleotide
cagcgaguggacagcugug

SEQ ID NO: 1437143 - RNA, 19 nt, Artificial Sequence
  Description of Artificial Sequence: Synthetic oligonucleotide
cagucucguucuugauccc

SEQ ID NO: 1437144 - RNA, 19 nt, Artificial Sequence
  Description of Artificial Sequence: Synthetic oligonucleotide
gcggcucuuguccugguac

SEQ ID NO: 1437145 - RNA, 19 nt, Artificial Sequence
  Description of Artificial Sequence: Synthetic oligonucleotide
cagugaauacugguccuca

SEQ ID NO: 1437146 - RNA, 19 nt, Artificial Sequence
  Description of Artificial Sequence: Synthetic oligonucleotide
uugagccgcucagaguuua

SEQ ID NO: 1437147 - RNA, 19 nt, Artificial Sequence
  Description of Artificial Sequence: Synthetic oligonucleotide
gguccguguguauuccuca

SEQ ID NO: 1437148 - RNA, 19 nt, Artificial Sequence
  Description of Artificial Sequence: Synthetic oligonucleotide
cuggcggaggugugcgcag

SEQ ID NO: 1437149 - RNA, 19 nt, Artificial Sequence
  Description of Artificial Sequence: Synthetic oligonucleotide
aaugugccaucgggcgugu

SEQ ID NO: 1437150 - RNA, 19 nt, Artificial Sequence
  Description of Artificial Sequence: Synthetic oligonucleotide
ggaccaagaaugugccauc

SEQ ID NO: 1437151 - RNA, 19 nt, Artificial Sequence
  Description of Artificial Sequence: Synthetic oligonucleotide
ucgccggaagcgcuccaaa

SEQ ID NO: 1437152 - RNA, 19 nt, Artificial Sequence
  Description of Artificial Sequence: Synthetic oligonucleotide
uguacucuccuuggaucuu

SEQ ID NO: 1437153 - RNA, 19 nt, Artificial Sequence
  Description of Artificial Sequence: Synthetic oligonucleotide
uggccgugcgguagaugac

SEQ ID NO: 1437154 - RNA, 19 nt, Artificial Sequence
  Description of Artificial Sequence: Synthetic oligonucleotide
ccacgugcgcuccucgugg

SEQ ID NO: 1437155 - RNA, 19 nt, Artificial Sequence
  Description of Artificial Sequence: Synthetic oligonucleotide
ugucccggagucucucauu

SEQ ID NO: 1437156 - RNA, 19 nt, Artificial Sequence
  Description of Artificial Sequence: Synthetic oligonucleotide
ccacggagcagaaggugag

SEQ ID NO: 1437157 - RNA, 19 nt, Artificial Sequence
  Description of Artificial Sequence: Synthetic oligonucleotide
guggcgguagugggaaaug

SEQ ID NO: 1437158 - RNA, 19 nt, Artificial Sequence
  Description of Artificial Sequence: Synthetic oligonucleotide
acgagguacuggucccgga

SEQ ID NO: 1437159 - RNA, 19 nt, Artificial Sequence
  Description of Artificial Sequence: Synthetic oligonucleotide
aaggcgcuggccagcgagu

SEQ ID NO: 1437160 - RNA, 19 nt, Artificial Sequence
  Description of Artificial Sequence: Synthetic oligonucleotide
cccggagucucucauucac

SEQ ID NO: 1437161 - RNA, 19 nt, Artificial Sequence
  Description of Artificial Sequence: Synthetic oligonucleotide
ugaggcuguucaugcgcuu

SEQ ID NO: 1437162 - RNA, 19 nt, Artificial Sequence
  Description of Artificial Sequence: Synthetic oligonucleotide
agcgacucguggcgguagu

SEQ ID NO: 1437163 - RNA, 19 nt, Artificial Sequence
  Description of Artificial Sequence: Synthetic oligonucleotide
gccugugugcgguugaucu

SEQ ID NO: 1437164 - RNA, 19 nt, Artificial Sequence
  Description of Artificial Sequence: Synthetic oligonucleotide
cugagggugagcguguacu

SEQ ID NO: 1437165 - RNA, 19 nt, Artificial Sequence
  Description of Artificial Sequence: Synthetic oligonucleotide
ggauuucugcgaugcguga

SEQ ID NO: 1437166 - RNA, 19 nt, Artificial Sequence
  Description of Artificial Sequence: Synthetic oligonucleotide
aggaaggucccgucccguu

SEQ ID NO: 1437167 - RNA, 19 nt, Artificial Sequence
  Description of Artificial Sequence: Synthetic oligonucleotide
cuucgaagaucuugauggu

SEQ ID NO: 1437168 - RNA, 19 nt, Artificial Sequence
  Description of Artificial Sequence: Synthetic oligonucleotide
cgugacuugagccgcucag

SEQ ID NO: 1437169 - RNA, 19 nt, Artificial Sequence
  Description of Artificial Sequence: Synthetic oligonucleotide
cacgguuguccgaggccug

SEQ ID NO: 1437170 - RNA, 19 nt, Artificial Sequence
  Description of Artificial Sequence: Synthetic oligonucleotide
gcaugcguaacagccucgc

SEQ ID NO: 1437171 - RNA, 19 nt, Artificial Sequence
  Description of Artificial Sequence: Synthetic oligonucleotide
ccggagucucucauucacc

SEQ ID NO: 1437172 - RNA, 19 nt, Artificial Sequence
  Description of Artificial Sequence: Synthetic oligonucleotide
cacguaccacgugcgcucc

SEQ ID NO: 1437173 - RNA, 19 nt, Artificial Sequence
  Description of Artificial Sequence: Synthetic oligonucleotide
ggccucuauggggaggucc

SEQ ID NO: 1437174 - RNA, 19 nt, Artificial Sequence
  Description of Artificial Sequence: Synthetic oligonucleotide
ucccgucccguuugccacu

SEQ ID NO: 1437175 - RNA, 19 nt, Artificial Sequence
  Description of Artificial Sequence: Synthetic oligonucleotide
ggaggugugcgcaguagga

SEQ ID NO: 1437176 - RNA, 19 nt, Artificial Sequence
  Description of Artificial Sequence: Synthetic oligonucleotide
cggguucccuccauuacgc

SEQ ID NO: 1437177 - RNA, 19 nt, Artificial Sequence
  Description of Artificial Sequence: Synthetic oligonucleotide
ccacguaccacgugcgcuc

SEQ ID NO: 1437178 - RNA, 19 nt, Artificial Sequence
  Description of Artificial Sequence: Synthetic oligonucleotide
gaggccugcgcccgcaggu

SEQ ID NO: 1437179 - RNA, 19 nt, Artificial Sequence
  Description of Artificial Sequence: Synthetic oligonucleotide
gccgcucagaguuuagcaa

SEQ ID NO: 1437180 - RNA, 19 nt, Artificial Sequence
  Description of Artificial Sequence: Synthetic oligonucleotide
ucucgccggaagcgcucca

SEQ ID NO: 1437181 - RNA, 19 nt, Artificial Sequence
  Description of Artificial Sequence: Synthetic oligonucleotide
acgugcgcuccucguggug

SEQ ID NO: 1437182 - RNA, 19 nt, Artificial Sequence
  Description of Artificial Sequence: Synthetic oligonucleotide
ggcggguucccuccauuac

SEQ ID NO: 1437183 - RNA, 19 nt, Artificial Sequence
  Description of Artificial Sequence: Synthetic oligonucleotide
aucgggcgugucccggagu

SEQ ID NO: 1437184 - RNA, 19 nt, Artificial Sequence
  Description of Artificial Sequence: Synthetic oligonucleotide
cucguggcgguagugggaa

SEQ ID NO: 1437185 - RNA, 19 nt, Artificial Sequence
  Description of Artificial Sequence: Synthetic oligonucleotide
gagggugagcguguacucu

SEQ ID NO: 1437186 - RNA, 19 nt, Artificial Sequence
  Description of Artificial Sequence: Synthetic oligonucleotide
ccaaaggcgcuggccagcg

SEQ ID NO: 1437187 - RNA, 19 nt, Artificial Sequence
  Description of Artificial Sequence: Synthetic oligonucleotide
ggguucccuccauuacgcc

SEQ ID NO: 1437188 - RNA, 19 nt, Artificial Sequence
  Description of Artificial Sequence: Synthetic oligonucleotide
ugcgucuggcccuguucuu

SEQ ID NO: 1437189 - RNA, 19 nt, Artificial Sequence
  Description of Artificial Sequence: Synthetic oligonucleotide
gcuccgcgaagccgaagcc

SEQ ID NO: 1437190 - RNA, 19 nt, Artificial Sequence
  Description of Artificial Sequence: Synthetic oligonucleotide
aggcgcuggccagcgagug

SEQ ID NO: 1437191 - RNA, 19 nt, Artificial Sequence
  Description of Artificial Sequence: Synthetic oligonucleotide
ugccugugugcgguugauc

SEQ ID NO: 1437192 - RNA, 19 nt, Artificial Sequence
  Description of Artificial Sequence: Synthetic oligonucleotide
ccgugagcgcaucauugug

SEQ ID NO: 1437193 - RNA, 19 nt, Artificial Sequence
  Description of Artificial Sequence: Synthetic oligonucleotide
ggcgcgcacagggugcgcg

SEQ ID NO: 1437194 - RNA, 19 nt, Artificial Sequence
  Description of Artificial Sequence: Synthetic oligonucleotide
cagcgacucguggcgguag

SEQ ID NO: 1437195 - RNA, 19 nt, Artificial Sequence
  Description of Artificial Sequence: Synthetic oligonucleotide
gagguccguguguauuccu

SEQ ID NO: 1437196 - RNA, 19 nt, Artificial Sequence
  Description of Artificial Sequence: Synthetic oligonucleotide
cucauacagcugaucguau

SEQ ID NO: 1437197 - RNA, 19 nt, Artificial Sequence
  Description of Artificial Sequence: Synthetic oligonucleotide
gugcgcaguaggagcggcc

SEQ ID NO: 1437198 - RNA, 19 nt, Artificial Sequence
  Description of Artificial Sequence: Synthetic oligonucleotide
cugcacuuuuccugcgucu

SEQ ID NO: 1437199 - RNA, 19 nt, Artificial Sequence
  Description of Artificial Sequence: Synthetic oligonucleotide
cggagaagccguaguggcc

SEQ ID NO: 1437200 - RNA, 19 nt, Artificial Sequence
  Description of Artificial Sequence: Synthetic oligonucleotide
uccgaggccugcgcccgca

SEQ ID NO: 1437201 - RNA, 19 nt, Artificial Sequence
  Description of Artificial Sequence: Synthetic oligonucleotide
ucccgccuuuccugagggu

SEQ ID NO: 1437202 - RNA, 19 nt, Artificial Sequence
  Description of Artificial Sequence: Synthetic oligonucleotide
gggugagcguguacucucc

SEQ ID NO: 1437203 - RNA, 19 nt, Artificial Sequence
  Description of Artificial Sequence: Synthetic oligonucleotide
caccacggagcaugcguaa

SEQ ID NO: 1437204 - RNA, 19 nt, Artificial Sequence
  Description of Artificial Sequence: Synthetic oligonucleotide
caccaccacggagcaugcg

SEQ ID NO: 1437205 - RNA, 19 nt, Artificial Sequence
  Description of Artificial Sequence: Synthetic oligonucleotide
cucguugaucuuccucugu

SEQ ID NO: 1437206 - RNA, 19 nt, Artificial Sequence
  Description of Artificial Sequence: Synthetic oligonucleotide
ugcggcucucauggauuuc

SEQ ID NO: 1437207 - RNA, 19 nt, Artificial Sequence
  Description of Artificial Sequence: Synthetic oligonucleotide
caguuuugugcggcucuca

SEQ ID NO: 1437208 - RNA, 19 nt, Artificial Sequence
  Description of Artificial Sequence: Synthetic oligonucleotide
gaagcgaggcggguucccu

SEQ ID NO: 1437209 - RNA, 19 nt, Artificial Sequence
  Description of Artificial Sequence: Synthetic oligonucleotide
cgacucguggcgguagugg

SEQ ID NO: 1437210 - RNA, 19 nt, Artificial Sequence
  Description of Artificial Sequence: Synthetic oligonucleotide
uccugagggugagcgugua

SEQ ID NO: 1437211 - RNA, 19 nt, Artificial Sequence
  Description of Artificial Sequence: Synthetic oligonucleotide
agggugaccgugagcgcau

SEQ ID NO: 1437212 - RNA, 19 nt, Artificial Sequence
  Description of Artificial Sequence: Synthetic oligonucleotide
cguaguggccaucccggug

SEQ ID NO: 1437213 - RNA, 19 nt, Artificial Sequence
  Description of Artificial Sequence: Synthetic oligonucleotide
gcgcacagggugcgcgagg

SEQ ID NO: 1437214 - RNA, 19 nt, Artificial Sequence
  Description of Artificial Sequence: Synthetic oligonucleotide
ucguggcgguagugggaaa

SEQ ID NO: 1437215 - RNA, 19 nt, Artificial Sequence
  Description of Artificial Sequence: Synthetic oligonucleotide
cgucccguuugccacucag

SEQ ID NO: 1437216 - RNA, 19 nt, Artificial Sequence
  Description of Artificial Sequence: Synthetic oligonucleotide
gggugagccacacgaggua

SEQ ID NO: 1437217 - RNA, 19 nt, Artificial Sequence
  Description of Artificial Sequence: Synthetic oligonucleotide
cgguagugggaaaugagcu

SEQ ID NO: 1437218 - RNA, 19 nt, Artificial Sequence
  Description of Artificial Sequence: Synthetic oligonucleotide
caugcguaacagccucgcu

SEQ ID NO: 1437219 - RNA, 19 nt, Artificial Sequence
  Description of Artificial Sequence: Synthetic oligonucleotide
gguccuguuccaguuuugu

SEQ ID NO: 1437220 - RNA, 19 nt, Artificial Sequence
  Description of Artificial Sequence: Synthetic oligonucleotide
ggcaccuuucugggugagc

SEQ ID NO: 1437221 - RNA, 19 nt, Artificial Sequence
  Description of Artificial Sequence: Synthetic oligonucleotide
gcccacguaccacgugcgc

SEQ ID NO: 1437222 - RNA, 19 nt, Artificial Sequence
  Description of Artificial Sequence: Synthetic oligonucleotide
cagguccuguuccaguuuu

SEQ ID NO: 1437223 - RNA, 19 nt, Artificial Sequence
  Description of Artificial Sequence: Synthetic oligonucleotide
ccagcgaguggacagcugu

SEQ ID NO: 1437224 - RNA, 19 nt, Artificial Sequence
  Description of Artificial Sequence: Synthetic oligonucleotide
gcugaucguauucgcggcu

SEQ ID NO: 1437225 - RNA, 19 nt, Artificial Sequence
  Description of Artificial Sequence: Synthetic oligonucleotide
cagugcuuggugucgccau

SEQ ID NO: 1437226 - RNA, 19 nt, Artificial Sequence
  Description of Artificial Sequence: Synthetic oligonucleotide
gcguaacagccucgcuggc

SEQ ID NO: 1437227 - RNA, 19 nt, Artificial Sequence
  Description of Artificial Sequence: Synthetic oligonucleotide
ggccagcgacucguggcgg

SEQ ID NO: 1437228 - RNA, 19 nt, Artificial Sequence
  Description of Artificial Sequence: Synthetic oligonucleotide
augugccaucgggcguguc

SEQ ID NO: 1437229 - RNA, 19 nt, Artificial Sequence
  Description of Artificial Sequence: Synthetic oligonucleotide
gaucguauucgcggcucuu

SEQ ID NO: 1437230 - RNA, 19 nt, Artificial Sequence
  Description of Artificial Sequence: Synthetic oligonucleotide
gggcgugucccggagucuc

SEQ ID NO: 1437231 - RNA, 19 nt, Artificial Sequence
  Description of Artificial Sequence: Synthetic oligonucleotide
gugucccggagucucucau

SEQ ID NO: 1437232 - RNA, 19 nt, Artificial Sequence
  Description of Artificial Sequence: Synthetic oligonucleotide
gcguguacucuccuuggau

SEQ ID NO: 1437233 - RNA, 19 nt, Artificial Sequence
  Description of Artificial Sequence: Synthetic oligonucleotide
ggcucggagaagccguagu

SEQ ID NO: 1437234 - RNA, 19 nt, Artificial Sequence
  Description of Artificial Sequence: Synthetic oligonucleotide
gggcucggagaagccguag

SEQ ID NO: 1437235 - RNA, 19 nt, Artificial Sequence
  Description of Artificial Sequence: Synthetic oligonucleotide
gugcggcucucauggauuu

SEQ ID NO: 1437236 - RNA, 19 nt, Artificial Sequence
  Description of Artificial Sequence: Synthetic oligonucleotide
cgcguacagguuguagggc

SEQ ID NO: 1437237 - RNA, 19 nt, Artificial Sequence
  Description of Artificial Sequence: Synthetic oligonucleotide
ggugagcguguacucuccu

SEQ ID NO: 1437238 - RNA, 19 nt, Artificial Sequence
  Description of Artificial Sequence: Synthetic oligonucleotide
aggugcucugcgggccaca

SEQ ID NO: 1437239 - RNA, 19 nt, Artificial Sequence
  Description of Artificial Sequence: Synthetic oligonucleotide
caaaggcgcuggccagcga

SEQ ID NO: 1437240 - RNA, 19 nt, Artificial Sequence
  Description of Artificial Sequence: Synthetic oligonucleotide
gaggcggguucccuccauu

SEQ ID NO: 1437241 - RNA, 19 nt, Artificial Sequence
  Description of Artificial Sequence: Synthetic oligonucleotide
guccgaggccugcgcccgc

SEQ ID NO: 1437242 - RNA, 19 nt, Artificial Sequence
  Description of Artificial Sequence: Synthetic oligonucleotide
gcgugacuugagccgcuca

SEQ ID NO: 1437243 - RNA, 19 nt, Artificial Sequence
  Description of Artificial Sequence: Synthetic oligonucleotide
gcuugucgaucucacgguu

SEQ ID NO: 1437244 - RNA, 19 nt, Artificial Sequence
  Description of Artificial Sequence: Synthetic oligonucleotide
gcgacucguggcgguagug

SEQ ID NO: 1437245 - RNA, 19 nt, Artificial Sequence
  Description of Artificial Sequence: Synthetic oligonucleotide
cuugagccgcucagaguuu

SEQ ID NO: 1437246 - RNA, 19 nt, Artificial Sequence
  Description of Artificial Sequence: Synthetic oligonucleotide
ccaccacggagcaugcgua

SEQ ID NO: 1437247 - RNA, 19 nt, Artificial Sequence
  Description of Artificial Sequence: Synthetic oligonucleotide
ggcccuguucuucgaagau

SEQ ID NO: 1437248 - RNA, 19 nt, Artificial Sequence
  Description of Artificial Sequence: Synthetic oligonucleotide
ggcguguguccagcuuggc

SEQ ID NO: 1437249 - RNA, 19 nt, Artificial Sequence
  Description of Artificial Sequence: Synthetic oligonucleotide
gcaugagguccggcuugag

SEQ ID NO: 1437250 - RNA, 19 nt, Artificial Sequence
  Description of Artificial Sequence: Synthetic oligonucleotide
cguuguacugggccagcga

SEQ ID NO: 1437251 - RNA, 19 nt, Artificial Sequence
  Description of Artificial Sequence: Synthetic oligonucleotide
gggcaccuuucugggugag

SEQ ID NO: 1437252 - RNA, 19 nt, Artificial Sequence
  Description of Artificial Sequence: Synthetic oligonucleotide
gccacacgagguacugguc

SEQ ID NO: 1437253 - RNA, 19 nt, Artificial Sequence
  Description of Artificial Sequence: Synthetic oligonucleotide
gcguuugccuuagaggguu

SEQ ID NO: 1437254 - RNA, 19 nt, Artificial Sequence
  Description of Artificial Sequence: Synthetic oligonucleotide
gggagggcguccucauccu

SEQ ID NO: 1437255 - RNA, 19 nt, Artificial Sequence
  Description of Artificial Sequence: Synthetic oligonucleotide
gcgcaguaggagcggccca

SEQ ID NO: 1437256 - RNA, 19 nt, Artificial Sequence
  Description of Artificial Sequence: Synthetic oligonucleotide
ggcguuugccuuagagggu

SEQ ID NO: 1437257 - RNA, 19 nt, Artificial Sequence
  Description of Artificial Sequence: Synthetic oligonucleotide
gccagcgaguggacagcug

SEQ ID NO: 1437258 - RNA, 19 nt, Artificial Sequence
  Description of Artificial Sequence: Synthetic oligonucleotide
cgaucucacgguuguccga

SEQ ID NO: 1437259 - RNA, 19 nt, Artificial Sequence
  Description of Artificial Sequence: Synthetic oligonucleotide
ggcacccaccagccuccac

SEQ ID NO: 1437260 - RNA, 19 nt, Artificial Sequence
  Description of Artificial Sequence: Synthetic oligonucleotide
ggggccggcguuugccuua

SEQ ID NO: 1437261 - RNA, 19 nt, Artificial Sequence
  Description of Artificial Sequence: Synthetic oligonucleotide
gugacgcguacagguugua

SEQ ID NO: 1437262 - RNA, 19 nt, Artificial Sequence
  Description of Artificial Sequence: Synthetic oligonucleotide
ccaucgggcgugucccgga

SEQ ID NO: 1437263 - RNA, 19 nt, Artificial Sequence
  Description of Artificial Sequence: Synthetic oligonucleotide
ggagcggcccaaaggcgcu

SEQ ID NO: 1437264 - RNA, 19 nt, Artificial Sequence
  Description of Artificial Sequence: Synthetic oligonucleotide
cccgguggaagacuuugau

SEQ ID NO: 1437265 - RNA, 19 nt, Artificial Sequence
  Description of Artificial Sequence: Synthetic oligonucleotide
ccaccacggagcagaaggu

SEQ ID NO: 1437266 - RNA, 19 nt, Artificial Sequence
  Description of Artificial Sequence: Synthetic oligonucleotide
agggcuccgcgaagccgaa

SEQ ID NO: 1437267 - RNA, 19 nt, Artificial Sequence
  Description of Artificial Sequence: Synthetic oligonucleotide
gcgugucccggagucucuc

SEQ ID NO: 1437268 - RNA, 19 nt, Artificial Sequence
  Description of Artificial Sequence: Synthetic oligonucleotide
cgcgaagccgaagccugug

SEQ ID NO: 1437269 - RNA, 19 nt, Artificial Sequence
  Description of Artificial Sequence: Synthetic oligonucleotide
gcgcgcacagggugcgcga

SEQ ID NO: 1437270 - RNA, 19 nt, Artificial Sequence
  Description of Artificial Sequence: Synthetic oligonucleotide
ccgaagccuguggccgugc

SEQ ID NO: 1437271 - RNA, 19 nt, Artificial Sequence
  Description of Artificial Sequence: Synthetic oligonucleotide
cccacguaccacgugcgcu

SEQ ID NO: 1437272 - RNA, 19 nt, Artificial Sequence
  Description of Artificial Sequence: Synthetic oligonucleotide
cguuugccacucagcaucu

SEQ ID NO: 1437273 - RNA, 19 nt, Artificial Sequence
  Description of Artificial Sequence: Synthetic oligonucleotide
gccaucccgguggaagacu

SEQ ID NO: 1437274 - RNA, 19 nt, Artificial Sequence
  Description of Artificial Sequence: Synthetic oligonucleotide
gcgcaucauugugcugcac

SEQ ID NO: 1437275 - RNA, 19 nt, Artificial Sequence
  Description of Artificial Sequence: Synthetic oligonucleotide
gggugaccgugagcgcauc

SEQ ID NO: 1437276 - RNA, 19 nt, Artificial Sequence
  Description of Artificial Sequence: Synthetic oligonucleotide
ccgaggccugcgcccgcag

SEQ ID NO: 1437277 - RNA, 19 nt, Artificial Sequence
  Description of Artificial Sequence: Synthetic oligonucleotide
cgcgcacagggugcgcgag

SEQ ID NO: 1437278 - RNA, 19 nt, Artificial Sequence
  Description of Artificial Sequence: Synthetic oligonucleotide
cguaacagccucgcuggcu

SEQ ID NO: 1437279 - RNA, 19 nt, Artificial Sequence
  Description of Artificial Sequence: Synthetic oligonucleotide
ccauuacgccaggagcugu

SEQ ID NO: 1437280 - RNA, 19 nt, Artificial Sequence
  Description of Artificial Sequence: Synthetic oligonucleotide
cugccugugugcgguugau

SEQ ID NO: 1437281 - RNA, 19 nt, Artificial Sequence
  Description of Artificial Sequence: Synthetic oligonucleotide
gguacuggucccggaucuu

SEQ ID NO: 1437282 - RNA, 19 nt, Artificial Sequence
  Description of Artificial Sequence: Synthetic oligonucleotide
ggugcgcgagggugaccgu

SEQ ID NO: 1437283 - RNA, 19 nt, Artificial Sequence
  Description of Artificial Sequence: Synthetic oligonucleotide
ccguaguggccaucccggu

SEQ ID NO: 1437284 - RNA, 19 nt, Artificial Sequence
  Description of Artificial Sequence: Synthetic oligonucleotide
ggcgugucccggagucucu

SEQ ID NO: 1437285 - RNA, 19 nt, Artificial Sequence
  Description of Artificial Sequence: Synthetic oligonucleotide
ccccaguaccacucugcau

SEQ ID NO: 1437286 - RNA, 19 nt, Artificial Sequence
  Description of Artificial Sequence: Synthetic oligonucleotide
cuguggccgugcgguagau

SEQ ID NO: 1437287 - RNA, 19 nt, Artificial Sequence
  Description of Artificial Sequence: Synthetic oligonucleotide
cguggcgguagugggaaau

SEQ ID NO: 1437288 - RNA, 19 nt, Artificial Sequence
  Description of Artificial Sequence: Synthetic oligonucleotide
ccagcgacucguggcggua

SEQ ID NO: 1437289 - RNA, 19 nt, Artificial Sequence
  Description of Artificial Sequence: Synthetic oligonucleotide
ccgcgaagccgaagccugu

SEQ ID NO: 1437290 - RNA, 19 nt, Artificial Sequence
  Description of Artificial Sequence: Synthetic oligonucleotide
ccucuauggggagguccgu

SEQ ID NO: 1437291 - RNA, 19 nt, Artificial Sequence
  Description of Artificial Sequence: Synthetic oligonucleotide
ggccggcguuugccuuaga

SEQ ID NO: 1437292 - RNA, 19 nt, Artificial Sequence
  Description of Artificial Sequence: Synthetic oligonucleotide
cgcggcucuuguccuggua

SEQ ID NO: 1437293 - RNA, 19 nt, Artificial Sequence
  Description of Artificial Sequence: Synthetic oligonucleotide
ccgucccguuugccacuca

SEQ ID NO: 1437294 - RNA, 19 nt, Artificial Sequence
  Description of Artificial Sequence: Synthetic oligonucleotide
cgggcgugucccggagucu

SEQ ID NO: 1437295 - RNA, 19 nt, Artificial Sequence
  Description of Artificial Sequence: Synthetic oligonucleotide
aggauuguugacuaaagcc

SEQ ID NO: 1437296 - RNA, 19 nt, Artificial Sequence
  Description of Artificial Sequence: Synthetic oligonucleotide
agaagaaauacccugucgc

SEQ ID NO: 1437297 - RNA, 19 nt, Artificial Sequence
  Description of Artificial Sequence: Synthetic oligonucleotide
aucaggacgauuuacaaac

SEQ ID NO: 1437298 - RNA, 19 nt, Artificial Sequence
  Description of Artificial Sequence: Synthetic oligonucleotide
auugaauccacagugacgc

SEQ ID NO: 1437299 - RNA, 19 nt, Artificial Sequence
  Description of Artificial Sequence: Synthetic oligonucleotide
aaauauugcauccagcacu

SEQ ID NO: 1437300 - RNA, 19 nt, Artificial Sequence
  Description of Artificial Sequence: Synthetic oligonucleotide
uuggaauaaagaaauauug

SEQ ID NO: 1437301 - RNA, 19 nt, Artificial Sequence
  Description of Artificial Sequence: Synthetic oligonucleotide
uuucauguaauucacaauc

SEQ ID NO: 1437302 - RNA, 19 nt, Artificial Sequence
  Description of Artificial Sequence: Synthetic oligonucleotide
aacugaauuuccuaacuuc

SEQ ID NO: 1437303 - RNA, 19 nt, Artificial Sequence
  Description of Artificial Sequence: Synthetic oligonucleotide
aaagccucagucauuagcc

SEQ ID NO: 1437304 - RNA, 19 nt, Artificial Sequence
  Description of Artificial Sequence: Synthetic oligonucleotide
aaguuaaccgauccauugc

SEQ ID NO: 1437305 - RNA, 19 nt, Artificial Sequence
  Description of Artificial Sequence: Synthetic oligonucleotide
agcgcuuucaaguuaaccg

SEQ ID NO: 1437306 - RNA, 19 nt, Artificial Sequence
  Description of Artificial Sequence: Synthetic oligonucleotide
uguacuuuggcuugaaggc

SEQ ID NO: 1437307 - RNA, 19 nt, Artificial Sequence
  Description of Artificial Sequence: Synthetic oligonucleotide
cauugugagucuuaaaccg

SEQ ID NO: 1437308 - RNA, 19 nt, Artificial Sequence
  Description of Artificial Sequence: Synthetic oligonucleotide
uucuauguccucuagcagg

SEQ ID NO: 1437309 - RNA, 19 nt, Artificial Sequence
  Description of Artificial Sequence: Synthetic oligonucleotide
aaggauguguaucuccucg

SEQ ID NO: 1437310 - RNA, 19 nt, Artificial Sequence
  Description of Artificial Sequence: Synthetic oligonucleotide
uguucuaaagcaauagaga

SEQ ID NO: 1437311 - RNA, 19 nt, Artificial Sequence
  Description of Artificial Sequence: Synthetic oligonucleotide
ucuaaagcaauagagaaaa

SEQ ID NO: 1437312 - RNA, 19 nt, Artificial Sequence
  Description of Artificial Sequence: Synthetic oligonucleotide
cugcauagaagaaauaccc

SEQ ID NO: 1437313 - RNA, 19 nt, Artificial Sequence
  Description of Artificial Sequence: Synthetic oligonucleotide
aacugaacugcuccucucc

SEQ ID NO: 1437314 - RNA, 19 nt, Artificial Sequence
  Description of Artificial Sequence: Synthetic oligonucleotide
caagcaugaggaaagaccc

SEQ ID NO: 1437315 - RNA, 19 nt, Artificial Sequence
  Description of Artificial Sequence: Synthetic oligonucleotide
aaucuuagcaagaacacca

SEQ ID NO: 1437316 - RNA, 19 nt, Artificial Sequence
  Description of Artificial Sequence: Synthetic oligonucleotide
uuugugacgucccaaacac

SEQ ID NO: 1437317 - RNA, 19 nt, Artificial Sequence
  Description of Artificial Sequence: Synthetic oligonucleotide
uuuugaauagcucucuguc

SEQ ID NO: 1437318 - RNA, 19 nt, Artificial Sequence
  Description of Artificial Sequence: Synthetic oligonucleotide
ucuaugacuucaaucuuag

SEQ ID NO: 1437319 - RNA, 19 nt, Artificial Sequence
  Description of Artificial Sequence: Synthetic oligonucleotide
agucauuagccauuguuuc

SEQ ID NO: 1437320 - RNA, 19 nt, Artificial Sequence
  Description of Artificial Sequence: Synthetic oligonucleotide
auuuccuaacuucuuaaag

SEQ ID NO: 1437321 - RNA, 19 nt, Artificial Sequence
  Description of Artificial Sequence: Synthetic oligonucleotide
auugcuaugaucugcauuu

SEQ ID NO: 1437322 - RNA, 19 nt, Artificial Sequence
  Description of Artificial Sequence: Synthetic oligonucleotide
uaauucacaaucuuagcaa

SEQ ID NO: 1437323 - RNA, 19 nt, Artificial Sequence
  Description of Artificial Sequence: Synthetic oligonucleotide
uuaaaggauguguaucucc

SEQ ID NO: 1437324 - RNA, 19 nt, Artificial Sequence
  Description of Artificial Sequence: Synthetic oligonucleotide
aaugacugccacuguuccc

SEQ ID NO: 1437325 - RNA, 19 nt, Artificial Sequence
  Description of Artificial Sequence: Synthetic oligonucleotide
cuugaguccaauaucuaag

SEQ ID NO: 1437326 - RNA, 19 nt, Artificial Sequence
  Description of Artificial Sequence: Synthetic oligonucleotide
ucuccuccaaaguuaaagg

SEQ ID NO: 1437327 - RNA, 19 nt, Artificial Sequence
  Description of Artificial Sequence: Synthetic oligonucleotide
aguuaaaggauguguaucu

SEQ ID NO: 1437328 - RNA, 19 nt, Artificial Sequence
  Description of Artificial Sequence: Synthetic oligonucleotide
uugacuaaagccucaguca

SEQ ID NO: 1437329 - RNA, 19 nt, Artificial Sequence
  Description of Artificial Sequence: Synthetic oligonucleotide
aagcuuggauccauaaugc

SEQ ID NO: 1437330 - RNA, 19 nt, Artificial Sequence
  Description of Artificial Sequence: Synthetic oligonucleotide
ugugacgucccaaacaccu

SEQ ID NO: 1437331 - RNA, 19 nt, Artificial Sequence
  Description of Artificial Sequence: Synthetic oligonucleotide
aaucuuaggauuguugacu

SEQ ID NO: 1437332 - RNA, 19 nt, Artificial Sequence
  Description of Artificial Sequence: Synthetic oligonucleotide
aauuggggagcccuucuuc

SEQ ID NO: 1437333 - RNA, 19 nt, Artificial Sequence
  Description of Artificial Sequence: Synthetic oligonucleotide
uuaggauuguugacuaaag

SEQ ID NO: 1437334 - RNA, 19 nt, Artificial Sequence
  Description of Artificial Sequence: Synthetic oligonucleotide
ggaaucaagaaccaucuag

SEQ ID NO: 1437335 - RNA, 19 nt, Artificial Sequence
  Description of Artificial Sequence: Synthetic oligonucleotide
ugcuaagugucuuucuagg

SEQ ID NO: 1437336 - RNA, 19 nt, Artificial Sequence
  Description of Artificial Sequence: Synthetic oligonucleotide
gucgugguuauccagaagc

SEQ ID NO: 1437337 - RNA, 19 nt, Artificial Sequence
  Description of Artificial Sequence: Synthetic oligonucleotide
uacaaacaguaucuggucc

SEQ ID NO: 1437338 - RNA, 19 nt, Artificial Sequence
  Description of Artificial Sequence: Synthetic oligonucleotide
ggaauaaagaaauauugca

SEQ ID NO: 1437339 - RNA, 19 nt, Artificial Sequence
  Description of Artificial Sequence: Synthetic oligonucleotide
aacuuauauccagagcuuc

SEQ ID NO: 1437340 - RNA, 19 nt, Artificial Sequence
  Description of Artificial Sequence: Synthetic oligonucleotide
aagauccuccuacaaauga

SEQ ID NO: 1437341 - RNA, 19 nt, Artificial Sequence
  Description of Artificial Sequence: Synthetic oligonucleotide
auguaauucacaaucuuag

SEQ ID NO: 1437342 - RNA, 19 nt, Artificial Sequence
  Description of Artificial Sequence: Synthetic oligonucleotide
ucuguucuaaagcaauaga

SEQ ID NO: 1437343 - RNA, 19 nt, Artificial Sequence
  Description of Artificial Sequence: Synthetic oligonucleotide
caaacuuauauccagagcu

SEQ ID NO: 1437344 - RNA, 19 nt, Artificial Sequence
  Description of Artificial Sequence: Synthetic oligonucleotide
uucccugcuauuuucaaga

SEQ ID NO: 1437345 - RNA, 19 nt, Artificial Sequence
  Description of Artificial Sequence: Synthetic oligonucleotide
guugacuaaagccucaguc

SEQ ID NO: 1437346 - RNA, 19 nt, Artificial Sequence
  Description of Artificial Sequence: Synthetic oligonucleotide
ugccaaucuguucuaaagc

SEQ ID NO: 1437347 - RNA, 19 nt, Artificial Sequence
  Description of Artificial Sequence: Synthetic oligonucleotide
agcacuaucugccaaucug

SEQ ID NO: 1437348 - RNA, 19 nt, Artificial Sequence
  Description of Artificial Sequence: Synthetic oligonucleotide
uugcuuagcuuauuaacca

SEQ ID NO: 1437349 - RNA, 19 nt, Artificial Sequence
  Description of Artificial Sequence: Synthetic oligonucleotide
uccaauaucuaagugcugu

SEQ ID NO: 1437350 - RNA, 19 nt, Artificial Sequence
  Description of Artificial Sequence: Synthetic oligonucleotide
gacguuaacaggaacagga

SEQ ID NO: 1437351 - RNA, 19 nt, Artificial Sequence
  Description of Artificial Sequence: Synthetic oligonucleotide
acaggaaucaagaaccauc

SEQ ID NO: 1437352 - RNA, 19 nt, Artificial Sequence
  Description of Artificial Sequence: Synthetic oligonucleotide
uccuaguccucgcuggucg

SEQ ID NO: 1437353 - RNA, 19 nt, Artificial Sequence
  Description of Artificial Sequence: Synthetic oligonucleotide
agcaauagagaaaacagga

SEQ ID NO: 1437354 - RNA, 19 nt, Artificial Sequence
  Description of Artificial Sequence: Synthetic oligonucleotide
aaucaagaaccaucuagaa

SEQ ID NO: 1437355 - RNA, 19 nt, Artificial Sequence
  Description of Artificial Sequence: Synthetic oligonucleotide
uuugaauagcucucugucu

SEQ ID NO: 1437356 - RNA, 19 nt, Artificial Sequence
  Description of Artificial Sequence: Synthetic oligonucleotide
aguguaauuuuauugcuua

SEQ ID NO: 1437357 - RNA, 19 nt, Artificial Sequence
  Description of Artificial Sequence: Synthetic oligonucleotide
ugcccuaccaaccaaugac

SEQ ID NO: 1437358 - RNA, 19 nt, Artificial Sequence
  Description of Artificial Sequence: Synthetic oligonucleotide
gaaauauugcauccagcac

SEQ ID NO: 1437359 - RNA, 19 nt, Artificial Sequence
  Description of Artificial Sequence: Synthetic oligonucleotide
ugagucuuaaaccggcgcu

SEQ ID NO: 1437360 - RNA, 19 nt, Artificial Sequence
  Description of Artificial Sequence: Synthetic oligonucleotide
guuuagagccugaugaucc

SEQ ID NO: 1437361 - RNA, 19 nt, Artificial Sequence
  Description of Artificial Sequence: Synthetic oligonucleotide
uccgaguaauccuucagca

SEQ ID NO: 1437362 - RNA, 19 nt, Artificial Sequence
  Description of Artificial Sequence: Synthetic oligonucleotide
agcaggaucccuccuaguc

SEQ ID NO: 1437363 - RNA, 19 nt, Artificial Sequence
  Description of Artificial Sequence: Synthetic oligonucleotide
uaagugucuuucuagggaa

SEQ ID NO: 1437364 - RNA, 19 nt, Artificial Sequence
  Description of Artificial Sequence: Synthetic oligonucleotide
ugugagucuuaaaccggcg

SEQ ID NO: 1437365 - RNA, 19 nt, Artificial Sequence
  Description of Artificial Sequence: Synthetic oligonucleotide
ugacuaaagccucagucau

SEQ ID NO: 1437366 - RNA, 19 nt, Artificial Sequence
  Description of Artificial Sequence: Synthetic oligonucleotide
uuauauccagagcuuccag

SEQ ID NO: 1437367 - RNA, 19 nt, Artificial Sequence
  Description of Artificial Sequence: Synthetic oligonucleotide
gaaucaagaaccaucuaga

SEQ ID NO: 1437368 - RNA, 19 nt, Artificial Sequence
  Description of Artificial Sequence: Synthetic oligonucleotide
ugcauagaagaaauacccu

SEQ ID NO: 1437369 - RNA, 19 nt, Artificial Sequence
  Description of Artificial Sequence: Synthetic oligonucleotide
aguaucugguccccuaaag

SEQ ID NO: 1437370 - RNA, 19 nt, Artificial Sequence
  Description of Artificial Sequence: Synthetic oligonucleotide
uccauugcuaugaucugca

SEQ ID NO: 1437371 - RNA, 19 nt, Artificial Sequence
  Description of Artificial Sequence: Synthetic oligonucleotide
aguuaaccgauccauugcu

SEQ ID NO: 1437372 - RNA, 19 nt, Artificial Sequence
  Description of Artificial Sequence: Synthetic oligonucleotide
augaucugcauuuuguuua

SEQ ID NO: 1437373 - RNA, 19 nt, Artificial Sequence
  Description of Artificial Sequence: Synthetic oligonucleotide
ugacucaucuuugugacgu

SEQ ID NO: 1437374 - RNA, 19 nt, Artificial Sequence
  Description of Artificial Sequence: Synthetic oligonucleotide
uuaucaggacgauuuacaa

SEQ ID NO: 1437375 - RNA, 19 nt, Artificial Sequence
  Description of Artificial Sequence: Synthetic oligonucleotide
auguguaucuccucguuga

SEQ ID NO: 1437376 - RNA, 19 nt, Artificial Sequence
  Description of Artificial Sequence: Synthetic oligonucleotide
cugaauagaggccacuuuc

SEQ ID NO: 1437377 - RNA, 19 nt, Artificial Sequence
  Description of Artificial Sequence: Synthetic oligonucleotide
aguccaauaucuaagugcu

SEQ ID NO: 1437378 - RNA, 19 nt, Artificial Sequence
  Description of Artificial Sequence: Synthetic oligonucleotide
aaaaucuccuccaaaguua

SEQ ID NO: 1437379 - RNA, 19 nt, Artificial Sequence
  Description of Artificial Sequence: Synthetic oligonucleotide
ugaucugcauuuuguuuag

SEQ ID NO: 1437380 - RNA, 19 nt, Artificial Sequence
  Description of Artificial Sequence: Synthetic oligonucleotide
acuaucugccaaucuguuc

SEQ ID NO: 1437381 - RNA, 19 nt, Artificial Sequence
  Description of Artificial Sequence: Synthetic oligonucleotide
gauguguaucuccucguug

SEQ ID NO: 1437382 - RNA, 19 nt, Artificial Sequence
  Description of Artificial Sequence: Synthetic oligonucleotide
ugcuuagcuuauuaaccag

SEQ ID NO: 1437383 - RNA, 19 nt, Artificial Sequence
  Description of Artificial Sequence: Synthetic oligonucleotide
cugugucucauccaaaauc

SEQ ID NO: 1437384 - RNA, 19 nt, Artificial Sequence
  Description of Artificial Sequence: Synthetic oligonucleotide
uauugcauccagcacuauc

SEQ ID NO: 1437385 - RNA, 19 nt, Artificial Sequence
  Description of Artificial Sequence: Synthetic oligonucleotide
uuaaccgauccauugcuau

SEQ ID NO: 1437386 - RNA, 19 nt, Artificial Sequence
  Description of Artificial Sequence: Synthetic oligonucleotide
guaauuuuauugcuuagcu

SEQ ID NO: 1437387 - RNA, 19 nt, Artificial Sequence
  Description of Artificial Sequence: Synthetic oligonucleotide
gguaauguccgaguaaucc

SEQ ID NO: 1437388 - RNA, 19 nt, Artificial Sequence
  Description of Artificial Sequence: Synthetic oligonucleotide
gcauagaagaaauacccug

SEQ ID NO: 1437389 - RNA, 19 nt, Artificial Sequence
  Description of Artificial Sequence: Synthetic oligonucleotide
aauacccugucgcuugaga

SEQ ID NO: 1437390 - RNA, 19 nt, Artificial Sequence
  Description of Artificial Sequence: Synthetic oligonucleotide
ugguaaugcacuccuguuc

SEQ ID NO: 1437391 - RNA, 19 nt, Artificial Sequence
  Description of Artificial Sequence: Synthetic oligonucleotide
uguccgaguaauccuucag

SEQ ID NO: 1437392 - RNA, 19 nt, Artificial Sequence
  Description of Artificial Sequence: Synthetic oligonucleotide
ccaagcaugaggaaagacc

SEQ ID NO: 1437393 - RNA, 19 nt, Artificial Sequence
  Description of Artificial Sequence: Synthetic oligonucleotide
aaccgauccauugcuauga

SEQ ID NO: 1437394 - RNA, 19 nt, Artificial Sequence
  Description of Artificial Sequence: Synthetic oligonucleotide
gagucauacccuguguucc

SEQ ID NO: 1437395 - RNA, 19 nt, Artificial Sequence
  Description of Artificial Sequence: Synthetic oligonucleotide
aaagcuggauuugguaaug

SEQ ID NO: 1437396 - RNA, 19 nt, Artificial Sequence
  Description of Artificial Sequence: Synthetic oligonucleotide
cuaagugucuuucuaggga

SEQ ID NO: 1437397 - RNA, 19 nt, Artificial Sequence
  Description of Artificial Sequence: Synthetic oligonucleotide
uaaaccggcgcuucuucug

SEQ ID NO: 1437398 - RNA, 19 nt, Artificial Sequence
  Description of Artificial Sequence: Synthetic oligonucleotide
guguaauuuuauugcuuag

SEQ ID NO: 1437399 - RNA, 19 nt, Artificial Sequence
  Description of Artificial Sequence: Synthetic oligonucleotide
aauguccgaguaauccuuc

SEQ ID NO: 1437400 - RNA, 19 nt, Artificial Sequence
  Description of Artificial Sequence: Synthetic oligonucleotide
aggacguuaacaggaacag

SEQ ID NO: 1437401 - RNA, 19 nt, Artificial Sequence
  Description of Artificial Sequence: Synthetic oligonucleotide
ucuuaucaggacgauuuac

SEQ ID NO: 1437402 - RNA, 19 nt, Artificial Sequence
  Description of Artificial Sequence: Synthetic oligonucleotide
aauauugcauccagcacua

SEQ ID NO: 1437403 - RNA, 19 nt, Artificial Sequence
  Description of Artificial Sequence: Synthetic oligonucleotide
aaagauccuccuacaaaug

SEQ ID NO: 1437404 - RNA, 19 nt, Artificial Sequence
  Description of Artificial Sequence: Synthetic oligonucleotide
ucuuugugacgucccaaac

SEQ ID NO: 1437405 - RNA, 19 nt, Artificial Sequence
  Description of Artificial Sequence: Synthetic oligonucleotide
augaggaaagacccugaug

SEQ ID NO: 1437406 - RNA, 19 nt, Artificial Sequence
  Description of Artificial Sequence: Synthetic oligonucleotide
ucaucuuugugacguccca

SEQ ID NO: 1437407 - RNA, 19 nt, Artificial Sequence
  Description of Artificial Sequence: Synthetic oligonucleotide
agcaagaacaccaaacuua

SEQ ID NO: 1437408 - RNA, 19 nt, Artificial Sequence
  Description of Artificial Sequence: Synthetic oligonucleotide
uucccacuagccuggcugg

SEQ ID NO: 1437409 - RNA, 19 nt, Artificial Sequence
  Description of Artificial Sequence: Synthetic oligonucleotide
ugggugacaaagcuggauu

SEQ ID NO: 1437410 - RNA, 19 nt, Artificial Sequence
  Description of Artificial Sequence: Synthetic oligonucleotide
cauguaauucacaaucuua

SEQ ID NO: 1437411 - RNA, 19 nt, Artificial Sequence
  Description of Artificial Sequence: Synthetic oligonucleotide
uaaccgauccauugcuaug

SEQ ID NO: 1437412 - RNA, 19 nt, Artificial Sequence
  Description of Artificial Sequence: Synthetic oligonucleotide
guuaacaggaacaggaacu

SEQ ID NO: 1437413 - RNA, 19 nt, Artificial Sequence
  Description of Artificial Sequence: Synthetic oligonucleotide
aaaccggcgcuucuucugu

SEQ ID NO: 1437414 - RNA, 19 nt, Artificial Sequence
  Description of Artificial Sequence: Synthetic oligonucleotide
ugaugccguguuuucaugu

SEQ ID NO: 1437415 - RNA, 19 nt, Artificial Sequence
  Description of Artificial Sequence: Synthetic oligonucleotide
guccgaguaauccuucagc

SEQ ID NO: 1437416 - RNA, 19 nt, Artificial Sequence
  Description of Artificial Sequence: Synthetic oligonucleotide
uaucuaagugcugugucuc

SEQ ID NO: 1437417 - RNA, 19 nt, Artificial Sequence
  Description of Artificial Sequence: Synthetic oligonucleotide
uguuuagagccugaugauc

SEQ ID NO: 1437418 - RNA, 19 nt, Artificial Sequence
  Description of Artificial Sequence: Synthetic oligonucleotide
ucugaauagaggccacuuu

SEQ ID NO: 1437419 - RNA, 19 nt, Artificial Sequence
  Description of Artificial Sequence: Synthetic oligonucleotide
aagaaauacccugucgcuu

SEQ ID NO: 1437420 - RNA, 19 nt, Artificial Sequence
  Description of Artificial Sequence: Synthetic oligonucleotide
aacaguaucugguccccua

SEQ ID NO: 1437421 - RNA, 19 nt, Artificial Sequence
  Description of Artificial Sequence: Synthetic oligonucleotide
cuucagaucccaagcauga

SEQ ID NO: 1437422 - RNA, 19 nt, Artificial Sequence
  Description of Artificial Sequence: Synthetic oligonucleotide
ucuagcaggaucccuccua

SEQ ID NO: 1437423 - RNA, 19 nt, Artificial Sequence
  Description of Artificial Sequence: Synthetic oligonucleotide
ugaauagcucucugucucu

SEQ ID NO: 1437424 - RNA, 19 nt, Artificial Sequence
  Description of Artificial Sequence: Synthetic oligonucleotide
acuaaagccucagucauua

SEQ ID NO: 1437425 - RNA, 19 nt, Artificial Sequence
  Description of Artificial Sequence: Synthetic oligonucleotide
uggauuugguaaugcacuc

SEQ ID NO: 1437426 - RNA, 19 nt, Artificial Sequence
  Description of Artificial Sequence: Synthetic oligonucleotide
cagaucccaagcaugagga

SEQ ID NO: 1437427 - RNA, 19 nt, Artificial Sequence
  Description of Artificial Sequence: Synthetic oligonucleotide
augacugccacuguucccu

SEQ ID NO: 1437428 - RNA, 19 nt, Artificial Sequence
  Description of Artificial Sequence: Synthetic oligonucleotide
gugagucuuaaaccggcgc

SEQ ID NO: 1437429 - RNA, 19 nt, Artificial Sequence
  Description of Artificial Sequence: Synthetic oligonucleotide
uuaaaccggcgcuucuucu

SEQ ID NO: 1437430 - RNA, 19 nt, Artificial Sequence
  Description of Artificial Sequence: Synthetic oligonucleotide
ucaggacgauuuacaaaca

SEQ ID NO: 1437431 - RNA, 19 nt, Artificial Sequence
  Description of Artificial Sequence: Synthetic oligonucleotide
cuuugugacgucccaaaca

SEQ ID NO: 1437432 - RNA, 19 nt, Artificial Sequence
  Description of Artificial Sequence: Synthetic oligonucleotide
uuguuuagagccugaugau

SEQ ID NO: 1437433 - RNA, 19 nt, Artificial Sequence
  Description of Artificial Sequence: Synthetic oligonucleotide
agggcaacucagaaggcac

SEQ ID NO: 1437434 - RNA, 19 nt, Artificial Sequence
  Description of Artificial Sequence: Synthetic oligonucleotide
caggacguuaacaggaaca

SEQ ID NO: 1437435 - RNA, 19 nt, Artificial Sequence
  Description of Artificial Sequence: Synthetic oligonucleotide
ugaauccacagugacgcuc

SEQ ID NO: 1437436 - RNA, 19 nt, Artificial Sequence
  Description of Artificial Sequence: Synthetic oligonucleotide
aaacuuauauccagagcuu

SEQ ID NO: 1437437 - RNA, 19 nt, Artificial Sequence
  Description of Artificial Sequence: Synthetic oligonucleotide
aucuuugugacgucccaaa

SEQ ID NO: 1437438 - RNA, 19 nt, Artificial Sequence
  Description of Artificial Sequence: Synthetic oligonucleotide
gauagcgcuuucaaguuaa

SEQ ID NO: 1437439 - RNA, 19 nt, Artificial Sequence
  Description of Artificial Sequence: Synthetic oligonucleotide
cauagaagaaauacccugu

SEQ ID NO: 1437440 - RNA, 19 nt, Artificial Sequence
  Description of Artificial Sequence: Synthetic oligonucleotide
uugaaggcguauuucccau

SEQ ID NO: 1437441 - RNA, 19 nt, Artificial Sequence
  Description of Artificial Sequence: Synthetic oligonucleotide
acagugacgcuccuccaca

SEQ ID NO: 1437442 - RNA, 19 nt, Artificial Sequence
  Description of Artificial Sequence: Synthetic oligonucleotide
cuaaagcaauagagaaaac

SEQ ID NO: 1437443 - RNA, 19 nt, Artificial Sequence
  Description of Artificial Sequence: Synthetic oligonucleotide
cuuaaaccggcgcuucuuc

SEQ ID NO: 1437444 - RNA, 19 nt, Artificial Sequence
  Description of Artificial Sequence: Synthetic oligonucleotide
agucuuaaaccggcgcuuc

SEQ ID NO: 1437445 - RNA, 19 nt, Artificial Sequence
  Description of Artificial Sequence: Synthetic oligonucleotide
aagacaccugcaugccaug

SEQ ID NO: 1437446 - RNA, 19 nt, Artificial Sequence
  Description of Artificial Sequence: Synthetic oligonucleotide
cuauuugccagggguaaug

SEQ ID NO: 1437447 - RNA, 19 nt, Artificial Sequence
  Description of Artificial Sequence: Synthetic oligonucleotide
agacaccugcaugccaugc

SEQ ID NO: 1437448 - RNA, 19 nt, Artificial Sequence
  Description of Artificial Sequence: Synthetic oligonucleotide
aggcguauuucccaucuau

SEQ ID NO: 1437449 - RNA, 19 nt, Artificial Sequence
  Description of Artificial Sequence: Synthetic oligonucleotide
uagaggccacuuucuuugg

SEQ ID NO: 1437450 - RNA, 19 nt, Artificial Sequence
  Description of Artificial Sequence: Synthetic oligonucleotide
cuggauuugguaaugcacu

SEQ ID NO: 1437451 - RNA, 19 nt, Artificial Sequence
  Description of Artificial Sequence: Synthetic oligonucleotide
uugaugccguguuuucaug

SEQ ID NO: 1437452 - RNA, 19 nt, Artificial Sequence
  Description of Artificial Sequence: Synthetic oligonucleotide
agcuuggauccauaaugcu

SEQ ID NO: 1437453 - RNA, 19 nt, Artificial Sequence
  Description of Artificial Sequence: Synthetic oligonucleotide
guaauguccgaguaauccu

SEQ ID NO: 1437454 - RNA, 19 nt, Artificial Sequence
  Description of Artificial Sequence: Synthetic oligonucleotide
uagcgcuuucaaguuaacc

SEQ ID NO: 1437455 - RNA, 19 nt, Artificial Sequence
  Description of Artificial Sequence: Synthetic oligonucleotide
uugugacgucccaaacacc

SEQ ID NO: 1437456 - RNA, 19 nt, Artificial Sequence
  Description of Artificial Sequence: Synthetic oligonucleotide
ucgcuggucgugguuaucc

SEQ ID NO: 1437457 - RNA, 19 nt, Artificial Sequence
  Description of Artificial Sequence: Synthetic oligonucleotide
ucaacaagcuuggauccau

SEQ ID NO: 1437458 - RNA, 19 nt, Artificial Sequence
  Description of Artificial Sequence: Synthetic oligonucleotide
ugccguguuuucauguaau

SEQ ID NO: 1437459 - RNA, 19 nt, Artificial Sequence
  Description of Artificial Sequence: Synthetic oligonucleotide
aggauguguaucuccucgu

SEQ ID NO: 1437460 - RNA, 19 nt, Artificial Sequence
  Description of Artificial Sequence: Synthetic oligonucleotide
uucagaucccaagcaugag

SEQ ID NO: 1437461 - RNA, 19 nt, Artificial Sequence
  Description of Artificial Sequence: Synthetic oligonucleotide
uguguaucuccucguugau

SEQ ID NO: 1437462 - RNA, 19 nt, Artificial Sequence
  Description of Artificial Sequence: Synthetic oligonucleotide
ugccuauuugccaggggua

SEQ ID NO: 1437463 - RNA, 19 nt, Artificial Sequence
  Description of Artificial Sequence: Synthetic oligonucleotide
uguucccugcuauuuucaa

SEQ ID NO: 1437464 - RNA, 19 nt, Artificial Sequence
  Description of Artificial Sequence: Synthetic oligonucleotide
ucuuaggauuguugacuaa

SEQ ID NO: 1437465 - RNA, 19 nt, Artificial Sequence
  Description of Artificial Sequence: Synthetic oligonucleotide
ccaaacuuauauccagagc

SEQ ID NO: 1437466 - RNA, 19 nt, Artificial Sequence
  Description of Artificial Sequence: Synthetic oligonucleotide
uaccaaccaaugacugcca

SEQ ID NO: 1437467 - RNA, 19 nt, Artificial Sequence
  Description of Artificial Sequence: Synthetic oligonucleotide
guaaacugaacugcuccuc

SEQ ID NO: 1437468 - RNA, 19 nt, Artificial Sequence
  Description of Artificial Sequence: Synthetic oligonucleotide
gguccagauuccugcauag

SEQ ID NO: 1437469 - RNA, 19 nt, Artificial Sequence
  Description of Artificial Sequence: Synthetic oligonucleotide
guuaaaggauguguaucuc

SEQ ID NO: 1437470 - RNA, 19 nt, Artificial Sequence
  Description of Artificial Sequence: Synthetic oligonucleotide
caaacugaauuuccuaacu

SEQ ID NO: 1437471 - RNA, 19 nt, Artificial Sequence
  Description of Artificial Sequence: Synthetic oligonucleotide
ucuaagugcugugucucau

SEQ ID NO: 1437472 - RNA, 19 nt, Artificial Sequence
  Description of Artificial Sequence: Synthetic oligonucleotide
gaaagacccugaugguguc

SEQ ID NO: 1437473 - RNA, 19 nt, Artificial Sequence
  Description of Artificial Sequence: Synthetic oligonucleotide
ggauuguugacuaaagccu

SEQ ID NO: 1437474 - RNA, 19 nt, Artificial Sequence
  Description of Artificial Sequence: Synthetic oligonucleotide
caugcuaagugucuuucua

SEQ ID NO: 1437475 - RNA, 19 nt, Artificial Sequence
  Description of Artificial Sequence: Synthetic oligonucleotide
gucugcaaccuuguuugag

SEQ ID NO: 1437476 - RNA, 19 nt, Artificial Sequence
  Description of Artificial Sequence: Synthetic oligonucleotide
cagaagccugagcaaggcc

SEQ ID NO: 1437477 - RNA, 19 nt, Artificial Sequence
  Description of Artificial Sequence: Synthetic oligonucleotide
ugcuugaguccaauaucua

SEQ ID NO: 1437478 - RNA, 19 nt, Artificial Sequence
  Description of Artificial Sequence: Synthetic oligonucleotide
gaaauacccugucgcuuga

SEQ ID NO: 1437479 - RNA, 19 nt, Artificial Sequence
  Description of Artificial Sequence: Synthetic oligonucleotide
ugcugccuauuugccaggg

SEQ ID NO: 1437480 - RNA, 19 nt, Artificial Sequence
  Description of Artificial Sequence: Synthetic oligonucleotide
agauagcgcuuucaaguua

SEQ ID NO: 1437481 - RNA, 19 nt, Artificial Sequence
  Description of Artificial Sequence: Synthetic oligonucleotide
gaucccuccuaguccucgc

SEQ ID NO: 1437482 - RNA, 19 nt, Artificial Sequence
  Description of Artificial Sequence: Synthetic oligonucleotide
cccaucuaugacuucaauc

SEQ ID NO: 1437483 - RNA, 19 nt, Artificial Sequence
  Description of Artificial Sequence: Synthetic oligonucleotide
uggucgugguuauccagaa

SEQ ID NO: 1437484 - RNA, 19 nt, Artificial Sequence
  Description of Artificial Sequence: Synthetic oligonucleotide
ucuuaaaccggcgcuucuu

SEQ ID NO: 1437485 - RNA, 19 nt, Artificial Sequence
  Description of Artificial Sequence: Synthetic oligonucleotide
ugaggccgagggcaacuca

SEQ ID NO: 1437486 - RNA, 19 nt, Artificial Sequence
  Description of Artificial Sequence: Synthetic oligonucleotide
aaacaguaucugguccccu

SEQ ID NO: 1437487 - RNA, 19 nt, Artificial Sequence
  Description of Artificial Sequence: Synthetic oligonucleotide
caccaaacuuauauccaga

SEQ ID NO: 1437488 - RNA, 19 nt, Artificial Sequence
  Description of Artificial Sequence: Synthetic oligonucleotide
gaugccguguuuucaugua

SEQ ID NO: 1437489 - RNA, 19 nt, Artificial Sequence
  Description of Artificial Sequence: Synthetic oligonucleotide
agauccuccuacaaaugau

SEQ ID NO: 1437490 - RNA, 19 nt, Artificial Sequence
  Description of Artificial Sequence: Synthetic oligonucleotide
ccuaccaaccaaugacugc

SEQ ID NO: 1437491 - RNA, 19 nt, Artificial Sequence
  Description of Artificial Sequence: Synthetic oligonucleotide
ucguugaugccguguuuuc

SEQ ID NO: 1437492 - RNA, 19 nt, Artificial Sequence
  Description of Artificial Sequence: Synthetic oligonucleotide
ugcaaccuuguuugaggau

SEQ ID NO: 1437493 - RNA, 19 nt, Artificial Sequence
  Description of Artificial Sequence: Synthetic oligonucleotide
cugcaaccuuguuugagga

SEQ ID NO: 1437494 - RNA, 19 nt, Artificial Sequence
  Description of Artificial Sequence: Synthetic oligonucleotide
cuucuuaaagauccuccua

SEQ ID NO: 1437495 - RNA, 19 nt, Artificial Sequence
  Description of Artificial Sequence: Synthetic oligonucleotide
ggaacaggaacuguuccca

SEQ ID NO: 1437496 - RNA, 19 nt, Artificial Sequence
  Description of Artificial Sequence: Synthetic oligonucleotide
agaggccacuuucuuuggu

SEQ ID NO: 1437497 - RNA, 19 nt, Artificial Sequence
  Description of Artificial Sequence: Synthetic oligonucleotide
ucauacccuguguuccaaa

SEQ ID NO: 1437498 - RNA, 19 nt, Artificial Sequence
  Description of Artificial Sequence: Synthetic oligonucleotide
uugaauccacagugacgcu

SEQ ID NO: 1437499 - RNA, 19 nt, Artificial Sequence
  Description of Artificial Sequence: Synthetic oligonucleotide
guaauccuucagcacucca

SEQ ID NO: 1437500 - RNA, 19 nt, Artificial Sequence
  Description of Artificial Sequence: Synthetic oligonucleotide
gcgcuuucaaguuaaccga

SEQ ID NO: 1437501 - RNA, 19 nt, Artificial Sequence
  Description of Artificial Sequence: Synthetic oligonucleotide
ucccaucuaugacuucaau

SEQ ID NO: 1437502 - RNA, 19 nt, Artificial Sequence
  Description of Artificial Sequence: Synthetic oligonucleotide
ucccugcuauuuucaagaa

SEQ ID NO: 1437503 - RNA, 19 nt, Artificial Sequence
  Description of Artificial Sequence: Synthetic oligonucleotide
guugaugccguguuuucau

SEQ ID NO: 1437504 - RNA, 19 nt, Artificial Sequence
  Description of Artificial Sequence: Synthetic oligonucleotide
agugacgcuccuccacagu

SEQ ID NO: 1437505 - RNA, 19 nt, Artificial Sequence
  Description of Artificial Sequence: Synthetic oligonucleotide
ccaauaucuaagugcugug

SEQ ID NO: 1437506 - RNA, 19 nt, Artificial Sequence
  Description of Artificial Sequence: Synthetic oligonucleotide
uguccucuagcaggauccc

SEQ ID NO: 1437507 - RNA, 19 nt, Artificial Sequence
  Description of Artificial Sequence: Synthetic oligonucleotide
ggacguuaacaggaacagg

SEQ ID NO: 1437508 - RNA, 19 nt, Artificial Sequence
  Description of Artificial Sequence: Synthetic oligonucleotide
ugacgcuccuccacaguuu

SEQ ID NO: 1437509 - RNA, 19 nt, Artificial Sequence
  Description of Artificial Sequence: Synthetic oligonucleotide
aaggcguauuucccaucua

SEQ ID NO: 1437510 - RNA, 19 nt, Artificial Sequence
  Description of Artificial Sequence: Synthetic oligonucleotide
auagcgcuuucaaguuaac

SEQ ID NO: 1437511 - RNA, 19 nt, Artificial Sequence
  Description of Artificial Sequence: Synthetic oligonucleotide
aagugucuuucuagggaaa

SEQ ID NO: 1437512 - RNA, 19 nt, Artificial Sequence
  Description of Artificial Sequence: Synthetic oligonucleotide
cugagcaaggccuucuuau

SEQ ID NO: 1437513 - RNA, 19 nt, Artificial Sequence
  Description of Artificial Sequence: Synthetic oligonucleotide
caaccuuguuugaggauaa

SEQ ID NO: 1437514 - RNA, 19 nt, Artificial Sequence
  Description of Artificial Sequence: Synthetic oligonucleotide
cugccuauuugccaggggu

SEQ ID NO: 1437515 - RNA, 19 nt, Artificial Sequence
  Description of Artificial Sequence: Synthetic oligonucleotide
gacucaucuuugugacguc

SEQ ID NO: 1437516 - RNA, 19 nt, Artificial Sequence
  Description of Artificial Sequence: Synthetic oligonucleotide
ggcguauuucccaucuaug

SEQ ID NO: 1437517 - RNA, 19 nt, Artificial Sequence
  Description of Artificial Sequence: Synthetic oligonucleotide
aucuuagcaagaacaccaa

SEQ ID NO: 1437518 - RNA, 19 nt, Artificial Sequence
  Description of Artificial Sequence: Synthetic oligonucleotide
ugggaauuggggagcccuu

SEQ ID NO: 1437519 - RNA, 19 nt, Artificial Sequence
  Description of Artificial Sequence: Synthetic oligonucleotide
ugccaugcuaagugucuuu

SEQ ID NO: 1437520 - RNA, 19 nt, Artificial Sequence
  Description of Artificial Sequence: Synthetic oligonucleotide
augaggccgagggcaacuc

SEQ ID NO: 1437521 - RNA, 19 nt, Artificial Sequence
  Description of Artificial Sequence: Synthetic oligonucleotide
gucccaaacaccugcccua

SEQ ID NO: 1437522 - RNA, 19 nt, Artificial Sequence
  Description of Artificial Sequence: Synthetic oligonucleotide
ucccaagcaugaggaaaga

SEQ ID NO: 1437523 - RNA, 19 nt, Artificial Sequence
  Description of Artificial Sequence: Synthetic oligonucleotide
cuaugaucugcauuuuguu

SEQ ID NO: 1437524 - RNA, 19 nt, Artificial Sequence
  Description of Artificial Sequence: Synthetic oligonucleotide
uucuucuuaucaggacgau

SEQ ID NO: 1437525 - RNA, 19 nt, Artificial Sequence
  Description of Artificial Sequence: Synthetic oligonucleotide
ucugggaauuggggagccc

SEQ ID NO: 1437526 - RNA, 19 nt, Artificial Sequence
  Description of Artificial Sequence: Synthetic oligonucleotide
aucccuccuaguccucgcu

SEQ ID NO: 1437527 - RNA, 19 nt, Artificial Sequence
  Description of Artificial Sequence: Synthetic oligonucleotide
accggcgcuucuucuguga

SEQ ID NO: 1437528 - RNA, 19 nt, Artificial Sequence
  Description of Artificial Sequence: Synthetic oligonucleotide
ccgaguaauccuucagcac

SEQ ID NO: 1437529 - RNA, 19 nt, Artificial Sequence
  Description of Artificial Sequence: Synthetic oligonucleotide
cccuaccaaccaaugacug

SEQ ID NO: 1437530 - RNA, 19 nt, Artificial Sequence
  Description of Artificial Sequence: Synthetic oligonucleotide
caaacaccugcccuaccaa

SEQ ID NO: 1437531 - RNA, 19 nt, Artificial Sequence
  Description of Artificial Sequence: Synthetic oligonucleotide
ggaaagacccugauggugu

SEQ ID NO: 1437532 - RNA, 19 nt, Artificial Sequence
  Description of Artificial Sequence: Synthetic oligonucleotide
caauaucuaagugcugugu

SEQ ID NO: 1437533 - RNA, 19 nt, Artificial Sequence
  Description of Artificial Sequence: Synthetic oligonucleotide
cagcacuccagccaagugu

SEQ ID NO: 1437534 - RNA, 19 nt, Artificial Sequence
  Description of Artificial Sequence: Synthetic oligonucleotide
gcaaccuuguuugaggaua

SEQ ID NO: 1437535 - RNA, 19 nt, Artificial Sequence
  Description of Artificial Sequence: Synthetic oligonucleotide
cuuccagauagcgcuuuca

SEQ ID NO: 1437536 - RNA, 19 nt, Artificial Sequence
  Description of Artificial Sequence: Synthetic oligonucleotide
caggaucccuccuaguccu

SEQ ID NO: 1437537 - RNA, 19 nt, Artificial Sequence
  Description of Artificial Sequence: Synthetic oligonucleotide
gcugccuauuugccagggg

SEQ ID NO: 1437538 - RNA, 19 nt, Artificial Sequence
  Description of Artificial Sequence: Synthetic oligonucleotide
accgauccauugcuaugau

SEQ ID NO: 1437539 - RNA, 19 nt, Artificial Sequence
  Description of Artificial Sequence: Synthetic oligonucleotide
ggucgugguuauccagaag

SEQ ID NO: 1437540 - RNA, 19 nt, Artificial Sequence
  Description of Artificial Sequence: Synthetic oligonucleotide
cucauccauugaauccaca

SEQ ID NO: 1437541 - RNA, 19 nt, Artificial Sequence
  Description of Artificial Sequence: Synthetic oligonucleotide
ccguguuuucauguaauuc

SEQ ID NO: 1437542 - RNA, 19 nt, Artificial Sequence
  Description of Artificial Sequence: Synthetic oligonucleotide
guccaauaucuaagugcug

SEQ ID NO: 1437543 - RNA, 19 nt, Artificial Sequence
  Description of Artificial Sequence: Synthetic oligonucleotide
guuaaccgauccauugcua

SEQ ID NO: 1437544 - RNA, 19 nt, Artificial Sequence
  Description of Artificial Sequence: Synthetic oligonucleotide
cauugcuaugaucugcauu

SEQ ID NO: 1437545 - RNA, 19 nt, Artificial Sequence
  Description of Artificial Sequence: Synthetic oligonucleotide
gccauuguuucugcuugag

SEQ ID NO: 1437546 - RNA, 19 nt, Artificial Sequence
  Description of Artificial Sequence: Synthetic oligonucleotide
aguccucgcuggucguggu

SEQ ID NO: 1437547 - RNA, 19 nt, Artificial Sequence
  Description of Artificial Sequence: Synthetic oligonucleotide
gacgggaaggcagagucuu

SEQ ID NO: 1437548 - RNA, 19 nt, Artificial Sequence
  Description of Artificial Sequence: Synthetic oligonucleotide
uugcuaugaucugcauuuu

SEQ ID NO: 1437549 - RNA, 19 nt, Artificial Sequence
  Description of Artificial Sequence: Synthetic oligonucleotide
ccugcccuaccaaccaaug

SEQ ID NO: 1437550 - RNA, 19 nt, Artificial Sequence
  Description of Artificial Sequence: Synthetic oligonucleotide
gaauuggggagcccuucuu

SEQ ID NO: 1437551 - RNA, 19 nt, Artificial Sequence
  Description of Artificial Sequence: Synthetic oligonucleotide
caucuuugugacgucccaa

SEQ ID NO: 1437552 - RNA, 19 nt, Artificial Sequence
  Description of Artificial Sequence: Synthetic oligonucleotide
cgaguaauccuucagcacu

SEQ ID NO: 1437553 - RNA, 19 nt, Artificial Sequence
  Description of Artificial Sequence: Synthetic oligonucleotide
cugguccccuaaagccuug

SEQ ID NO: 1437554 - RNA, 19 nt, Artificial Sequence
  Description of Artificial Sequence: Synthetic oligonucleotide
cacuagccuggcuggguga

SEQ ID NO: 1437555 - RNA, 19 nt, Artificial Sequence
  Description of Artificial Sequence: Synthetic oligonucleotide
gccagggguaauguccgag

SEQ ID NO: 1437556 - RNA, 19 nt, Artificial Sequence
  Description of Artificial Sequence: Synthetic oligonucleotide
gagucuuaaaccggcgcuu

SEQ ID NO: 1437557 - RNA, 19 nt, Artificial Sequence
  Description of Artificial Sequence: Synthetic oligonucleotide
ccaggacguuaacaggaac

SEQ ID NO: 1437558 - RNA, 19 nt, Artificial Sequence
  Description of Artificial Sequence: Synthetic oligonucleotide
caccugcaugccaugcuaa

SEQ ID NO: 1437559 - RNA, 19 nt, Artificial Sequence
  Description of Artificial Sequence: Synthetic oligonucleotide
caguaucugguccccuaaa

SEQ ID NO: 1437560 - RNA, 19 nt, Artificial Sequence
  Description of Artificial Sequence: Synthetic oligonucleotide
cuccuaguccucgcugguc

SEQ ID NO: 1437561 - RNA, 19 nt, Artificial Sequence
  Description of Artificial Sequence: Synthetic oligonucleotide
gucuuaaaccggcgcuucu

SEQ ID NO: 1437562 - RNA, 19 nt, Artificial Sequence
  Description of Artificial Sequence: Synthetic oligonucleotide
caacaagcuuggauccaua

SEQ ID NO: 1437563 - RNA, 19 nt, Artificial Sequence
  Description of Artificial Sequence: Synthetic oligonucleotide
accugcccuaccaaccaau

SEQ ID NO: 1437564 - RNA, 19 nt, Artificial Sequence
  Description of Artificial Sequence: Synthetic oligonucleotide
agcuuccagauagcgcuuu

SEQ ID NO: 1437565 - RNA, 19 nt, Artificial Sequence
  Description of Artificial Sequence: Synthetic oligonucleotide
ccaaaaucuccuccaaagu

SEQ ID NO: 1437566 - RNA, 19 nt, Artificial Sequence
  Description of Artificial Sequence: Synthetic oligonucleotide
ggaauuggggagcccuucu

SEQ ID NO: 1437567 - RNA, 19 nt, Artificial Sequence
  Description of Artificial Sequence: Synthetic oligonucleotide
agggguggaaagagcucgu

SEQ ID NO: 1437568 - RNA, 19 nt, Artificial Sequence
  Description of Artificial Sequence: Synthetic oligonucleotide
gcacuaucugccaaucugu

SEQ ID NO: 1437569 - RNA, 19 nt, Artificial Sequence
  Description of Artificial Sequence: Synthetic oligonucleotide
gucauacccuguguuccaa

SEQ ID NO: 1437570 - RNA, 19 nt, Artificial Sequence
  Description of Artificial Sequence: Synthetic oligonucleotide
auauugcauccagcacuau

SEQ ID NO: 1437571 - RNA, 19 nt, Artificial Sequence
  Description of Artificial Sequence: Synthetic oligonucleotide
cuaaagccuugacugcuuu

SEQ ID NO: 1437572 - RNA, 19 nt, Artificial Sequence
  Description of Artificial Sequence: Synthetic oligonucleotide
ccgauccauugcuaugauc

SEQ ID NO: 1437573 - RNA, 19 nt, Artificial Sequence
  Description of Artificial Sequence: Synthetic oligonucleotide
gggaauuggggagcccuuc

SEQ ID NO: 1437574 - RNA, 19 nt, Artificial Sequence
  Description of Artificial Sequence: Synthetic oligonucleotide
gccugaugauccuccaugu

SEQ ID NO: 1437575 - RNA, 19 nt, Artificial Sequence
  Description of Artificial Sequence: Synthetic oligonucleotide
cucguugaugccguguuuu

SEQ ID NO: 1437576 - RNA, 19 nt, Artificial Sequence
  Description of Artificial Sequence: Synthetic oligonucleotide
cacuaucugccaaucuguu

SEQ ID NO: 1437577 - RNA, 19 nt, Artificial Sequence
  Description of Artificial Sequence: Synthetic oligonucleotide
gccuauuugccagggguaa

SEQ ID NO: 1437578 - RNA, 19 nt, Artificial Sequence
  Description of Artificial Sequence: Synthetic oligonucleotide
gggugacaaagcuggauuu

SEQ ID NO: 1437579 - RNA, 19 nt, Artificial Sequence
  Description of Artificial Sequence: Synthetic oligonucleotide
gagccugaugauccuccau

SEQ ID NO: 1437580 - RNA, 19 nt, Artificial Sequence
  Description of Artificial Sequence: Synthetic oligonucleotide
ccagcacuaucugccaauc

SEQ ID NO: 1437581 - RNA, 19 nt, Artificial Sequence
  Description of Artificial Sequence: Synthetic oligonucleotide
ggguaauguccgaguaauc

SEQ ID NO: 1437582 - RNA, 19 nt, Artificial Sequence
  Description of Artificial Sequence: Synthetic oligonucleotide
ggauguguaucuccucguu

SEQ ID NO: 1437583 - RNA, 19 nt, Artificial Sequence
  Description of Artificial Sequence: Synthetic oligonucleotide
cucgcuggucgugguuauc

SEQ ID NO: 1437584 - RNA, 19 nt, Artificial Sequence
  Description of Artificial Sequence: Synthetic oligonucleotide
cuagccuggcugggugaca

SEQ ID NO: 1437585 - RNA, 19 nt, Artificial Sequence
  Description of Artificial Sequence: Synthetic oligonucleotide
gcccuaccaaccaaugacu

SEQ ID NO: 1437586 - RNA, 19 nt, Artificial Sequence
  Description of Artificial Sequence: Synthetic oligonucleotide
cucagucauuagccauugu

SEQ ID NO: 1437587 - RNA, 19 nt, Artificial Sequence
  Description of Artificial Sequence: Synthetic oligonucleotide
gccguguuuucauguaauu

SEQ ID NO: 1437588 - RNA, 19 nt, Artificial Sequence
  Description of Artificial Sequence: Synthetic oligonucleotide
ccauuguuucugcuugagu

SEQ ID NO: 1437589 - RNA, 19 nt, Artificial Sequence
  Description of Artificial Sequence: Synthetic oligonucleotide
cguugaugccguguuuuca

SEQ ID NO: 1437590 - RNA, 19 nt, Artificial Sequence
  Description of Artificial Sequence: Synthetic oligonucleotide
cgucccaaacaccugcccu

SEQ ID NO: 1437591 - RNA, 19 nt, Artificial Sequence
  Description of Artificial Sequence: Synthetic oligonucleotide
ccugcaugccaugcuaagu

SEQ ID NO: 1437592 - RNA, 19 nt, Artificial Sequence
  Description of Artificial Sequence: Synthetic oligonucleotide
gccacuguucccugcuauu

SEQ ID NO: 1437593 - RNA, 19 nt, Artificial Sequence
  Description of Artificial Sequence: Synthetic oligonucleotide
ccuaaagccuugacugcuu

SEQ ID NO: 1437594 - RNA, 19 nt, Artificial Sequence
  Description of Artificial Sequence: Synthetic oligonucleotide
gcagacgggaaggcagagu

SEQ ID NO: 1437595 - RNA, 19 nt, Artificial Sequence
  Description of Artificial Sequence: Synthetic oligonucleotide
ccacaguuucuggaauucu

SEQ ID NO: 1437596 - RNA, 19 nt, Artificial Sequence
  Description of Artificial Sequence: Synthetic oligonucleotide
ccggcgcuucuucugugaa

SEQ ID NO: 1437597 - RNA, 19 nt, Artificial Sequence
  Description of Artificial Sequence: Synthetic oligonucleotide
ccuaguccucgcuggucgu

SEQ ID NO: 1437598 - RNA, 19 nt, Artificial Sequence
  Description of Artificial Sequence: Synthetic oligonucleotide
ccauugcuaugaucugcau

SEQ ID NO: 1437599 - RNA, 19 nt, Artificial Sequence
  Description of Artificial Sequence: Synthetic oligonucleotide
ccuccuaguccucgcuggu

SEQ ID NO: 1437600 - RNA, 19 nt, Artificial Sequence
  Description of Artificial Sequence: Synthetic oligonucleotide
ccuauuugccagggguaau

SEQ ID NO: 1437601 - RNA, 19 nt, Artificial Sequence
  Description of Artificial Sequence: Synthetic oligonucleotide
ccucgcuggucgugguuau

SEQ ID NO: 1437602 - RNA, 19 nt, Artificial Sequence
  Description of Artificial Sequence: Synthetic oligonucleotide
auagucaucagcccgagcc

SEQ ID NO: 1437603 - RNA, 19 nt, Artificial Sequence
  Description of Artificial Sequence: Synthetic oligonucleotide
auaaucuguacucugaagg

SEQ ID NO: 1437604 - RNA, 19 nt, Artificial Sequence
  Description of Artificial Sequence: Synthetic oligonucleotide
aauggcuguaaacauaggg

SEQ ID NO: 1437605 - RNA, 19 nt, Artificial Sequence
  Description of Artificial Sequence: Synthetic oligonucleotide
guaguaaucagcuacauuc

SEQ ID NO: 1437606 - RNA, 19 nt, Artificial Sequence
  Description of Artificial Sequence: Synthetic oligonucleotide
uuagaacacuagaagaugg

SEQ ID NO: 1437607 - RNA, 19 nt, Artificial Sequence
  Description of Artificial Sequence: Synthetic oligonucleotide
ugaguuagaacacuagaag

SEQ ID NO: 1437608 - RNA, 19 nt, Artificial Sequence
  Description of Artificial Sequence: Synthetic oligonucleotide
agaacaaugugcuacacug

SEQ ID NO: 1437609 - RNA, 19 nt, Artificial Sequence
  Description of Artificial Sequence: Synthetic oligonucleotide
aaguaggggaauuuuauug

SEQ ID NO: 1437610 - RNA, 19 nt, Artificial Sequence
  Description of Artificial Sequence: Synthetic oligonucleotide
agacaagugagccaugagc

SEQ ID NO: 1437611 - RNA, 19 nt, Artificial Sequence
  Description of Artificial Sequence: Synthetic oligonucleotide
aauguugcgacauuccugu

SEQ ID NO: 1437612 - RNA, 19 nt, Artificial Sequence
  Description of Artificial Sequence: Synthetic oligonucleotide
aaguucagcgauugaacgc

SEQ ID NO: 1437613 - RNA, 19 nt, Artificial Sequence
  Description of Artificial Sequence: Synthetic oligonucleotide
auaguugucgaucuuggcg

SEQ ID NO: 1437614 - RNA, 19 nt, Artificial Sequence
  Description of Artificial Sequence: Synthetic oligonucleotide
auuaucucgauguucaucu

SEQ ID NO: 1437615 - RNA, 19 nt, Artificial Sequence
  Description of Artificial Sequence: Synthetic oligonucleotide
guagcuauaaguaaugaag

SEQ ID NO: 1437616 - RNA, 19 nt, Artificial Sequence
  Description of Artificial Sequence: Synthetic oligonucleotide
agcgauugaacgcuggugc

SEQ ID NO: 1437617 - RNA, 19 nt, Artificial Sequence
  Description of Artificial Sequence: Synthetic oligonucleotide
uguucuuuuagcuucacaa

SEQ ID NO: 1437618 - RNA, 19 nt, Artificial Sequence
  Description of Artificial Sequence: Synthetic oligonucleotide
ucaucgaugacugacacug

SEQ ID NO: 1437619 - RNA, 19 nt, Artificial Sequence
  Description of Artificial Sequence: Synthetic oligonucleotide
uucuuagacaugucaaugg

SEQ ID NO: 1437620 - RNA, 19 nt, Artificial Sequence
  Description of Artificial Sequence: Synthetic oligonucleotide
agggacaugaaaaugacac

SEQ ID NO: 1437621 - RNA, 19 nt, Artificial Sequence
  Description of Artificial Sequence: Synthetic oligonucleotide
uaggauaggacacauggca

SEQ ID NO: 1437622 - RNA, 19 nt, Artificial Sequence
  Description of Artificial Sequence: Synthetic oligonucleotide
uguggaaagagcuuggcac

SEQ ID NO: 1437623 - RNA, 19 nt, Artificial Sequence
  Description of Artificial Sequence: Synthetic oligonucleotide
cacguugaaauaaagcucc

SEQ ID NO: 1437624 - RNA, 19 nt, Artificial Sequence
  Description of Artificial Sequence: Synthetic oligonucleotide
aggauugcuaccugcaccc

SEQ ID NO: 1437625 - RNA, 19 nt, Artificial Sequence
  Description of Artificial Sequence: Synthetic oligonucleotide
ugagaugcaauccuggaaa

SEQ ID NO: 1437626 - RNA, 19 nt, Artificial Sequence
  Description of Artificial Sequence: Synthetic oligonucleotide
ucccuaaucccuuuguagg

SEQ ID NO: 1437627 - RNA, 19 nt, Artificial Sequence
  Description of Artificial Sequence: Synthetic oligonucleotide
ggaaccuugaguuagaaca

SEQ ID NO: 1437628 - RNA, 19 nt, Artificial Sequence
  Description of Artificial Sequence: Synthetic oligonucleotide
cacguugucaaucauguag

SEQ ID NO: 1437629 - RNA, 19 nt, Artificial Sequence
  Description of Artificial Sequence: Synthetic oligonucleotide
ucaaucauguagcuauaag

SEQ ID NO: 1437630 - RNA, 19 nt, Artificial Sequence
  Description of Artificial Sequence: Synthetic oligonucleotide
uuagggagggacaugaaaa

SEQ ID NO: 1437631 - RNA, 19 nt, Artificial Sequence
  Description of Artificial Sequence: Synthetic oligonucleotide
agauaggccuuguacagcg

SEQ ID NO: 1437632 - RNA, 19 nt, Artificial Sequence
  Description of Artificial Sequence: Synthetic oligonucleotide
aacacuagaagauggggau

SEQ ID NO: 1437633 - RNA, 19 nt, Artificial Sequence
  Description of Artificial Sequence: Synthetic oligonucleotide
uugaguuagaacacuagaa

SEQ ID NO: 1437634 - RNA, 19 nt, Artificial Sequence
  Description of Artificial Sequence: Synthetic oligonucleotide
auggcuguaaacauagggc

SEQ ID NO: 1437635 - RNA, 19 nt, Artificial Sequence
  Description of Artificial Sequence: Synthetic oligonucleotide
auccacacaauguugcgac

SEQ ID NO: 1437636 - RNA, 19 nt, Artificial Sequence
  Description of Artificial Sequence: Synthetic oligonucleotide
aaacucuaggauaggacac

SEQ ID NO: 1437637 - RNA, 19 nt, Artificial Sequence
  Description of Artificial Sequence: Synthetic oligonucleotide
caaguucagcgauugaacg

SEQ ID NO: 1437638 - RNA, 19 nt, Artificial Sequence
  Description of Artificial Sequence: Synthetic oligonucleotide
uagaacacuagaagauggg

SEQ ID NO: 1437639 - RNA, 19 nt, Artificial Sequence
  Description of Artificial Sequence: Synthetic oligonucleotide
ugacacaaguuucuuagac

SEQ ID NO: 1437640 - RNA, 19 nt, Artificial Sequence
  Description of Artificial Sequence: Synthetic oligonucleotide
uuugggaaccuugaguuag

SEQ ID NO: 1437641 - RNA, 19 nt, Artificial Sequence
  Description of Artificial Sequence: Synthetic oligonucleotide
gaguuagaacacuagaaga

SEQ ID NO: 1437642 - RNA, 19 nt, Artificial Sequence
  Description of Artificial Sequence: Synthetic oligonucleotide
aaucauguagcuauaagua

SEQ ID NO: 1437643 - RNA, 19 nt, Artificial Sequence
  Description of Artificial Sequence: Synthetic oligonucleotide
ucauguagcuauaaguaau

SEQ ID NO: 1437644 - RNA, 19 nt, Artificial Sequence
  Description of Artificial Sequence: Synthetic oligonucleotide
acuaaucccuccaaguagc

SEQ ID NO: 1437645 - RNA, 19 nt, Artificial Sequence
  Description of Artificial Sequence: Synthetic oligonucleotide
cuaaucuucccacugcccc

SEQ ID NO: 1437646 - RNA, 19 nt, Artificial Sequence
  Description of Artificial Sequence: Synthetic oligonucleotide
ucaaacucuaggauaggac

SEQ ID NO: 1437647 - RNA, 19 nt, Artificial Sequence
  Description of Artificial Sequence: Synthetic oligonucleotide
caaugugcuacacuguacc

SEQ ID NO: 1437648 - RNA, 19 nt, Artificial Sequence
  Description of Artificial Sequence: Synthetic oligonucleotide
gucugugcgauguucacgg

SEQ ID NO: 1437649 - RNA, 19 nt, Artificial Sequence
  Description of Artificial Sequence: Synthetic oligonucleotide
gaaucgguccuccagaguc

SEQ ID NO: 1437650 - RNA, 19 nt, Artificial Sequence
  Description of Artificial Sequence: Synthetic oligonucleotide
acaaguuucuuagacaugu

SEQ ID NO: 1437651 - RNA, 19 nt, Artificial Sequence
  Description of Artificial Sequence: Synthetic oligonucleotide
aaauaaagcuccgggaaga

SEQ ID NO: 1437652 - RNA, 19 nt, Artificial Sequence
  Description of Artificial Sequence: Synthetic oligonucleotide
guugccauaaucuguacuc

SEQ ID NO: 1437653 - RNA, 19 nt, Artificial Sequence
  Description of Artificial Sequence: Synthetic oligonucleotide
aggggaauuuuauugucuc

SEQ ID NO: 1437654 - RNA, 19 nt, Artificial Sequence
  Description of Artificial Sequence: Synthetic oligonucleotide
aguaggggaauuuuauugu

SEQ ID NO: 1437655 - RNA, 19 nt, Artificial Sequence
  Description of Artificial Sequence: Synthetic oligonucleotide
cuugggcacaaguucagcg

SEQ ID NO: 1437656 - RNA, 19 nt, Artificial Sequence
  Description of Artificial Sequence: Synthetic oligonucleotide
uggcuguaaacauagggcu

SEQ ID NO: 1437657 - RNA, 19 nt, Artificial Sequence
  Description of Artificial Sequence: Synthetic oligonucleotide
uauugguccauucuucauc

SEQ ID NO: 1437658 - RNA, 19 nt, Artificial Sequence
  Description of Artificial Sequence: Synthetic oligonucleotide
uguagcuauaaguaaugaa

SEQ ID NO: 1437659 - RNA, 19 nt, Artificial Sequence
  Description of Artificial Sequence: Synthetic oligonucleotide
cuccaaguagccauugucc

SEQ ID NO: 1437660 - RNA, 19 nt, Artificial Sequence
  Description of Artificial Sequence: Synthetic oligonucleotide
uuguacagcguauugcgga

SEQ ID NO: 1437661 - RNA, 19 nt, Artificial Sequence
  Description of Artificial Sequence: Synthetic oligonucleotide
ucucuaaucuucccacugc

SEQ ID NO: 1437662 - RNA, 19 nt, Artificial Sequence
  Description of Artificial Sequence: Synthetic oligonucleotide
agaacacuagaagaugggg

SEQ ID NO: 1437663 - RNA, 19 nt, Artificial Sequence
  Description of Artificial Sequence: Synthetic oligonucleotide
uagaagauggggauauagu

SEQ ID NO: 1437664 - RNA, 19 nt, Artificial Sequence
  Description of Artificial Sequence: Synthetic oligonucleotide
ucaugcucaaagaaucggu

SEQ ID NO: 1437665 - RNA, 19 nt, Artificial Sequence
  Description of Artificial Sequence: Synthetic oligonucleotide
acaaguucagcgauugaac

SEQ ID NO: 1437666 - RNA, 19 nt, Artificial Sequence
  Description of Artificial Sequence: Synthetic oligonucleotide
guggaaagagcuuggcacg

SEQ ID NO: 1437667 - RNA, 19 nt, Artificial Sequence
  Description of Artificial Sequence: Synthetic oligonucleotide
caaacucuaggauaggaca

SEQ ID NO: 1437668 - RNA, 19 nt, Artificial Sequence
  Description of Artificial Sequence: Synthetic oligonucleotide
gauauugguccauucuuca

SEQ ID NO: 1437669 - RNA, 19 nt, Artificial Sequence
  Description of Artificial Sequence: Synthetic oligonucleotide
uguucaucucaucaagguc

SEQ ID NO: 1437670 - RNA, 19 nt, Artificial Sequence
  Description of Artificial Sequence: Synthetic oligonucleotide
uaguaaucagcuacauucu

SEQ ID NO: 1437671 - RNA, 19 nt, Artificial Sequence
  Description of Artificial Sequence: Synthetic oligonucleotide
aucgaugacugacacuguc

SEQ ID NO: 1437672 - RNA, 19 nt, Artificial Sequence
  Description of Artificial Sequence: Synthetic oligonucleotide
gagcaguuuguauuccggg

SEQ ID NO: 1437673 - RNA, 19 nt, Artificial Sequence
  Description of Artificial Sequence: Synthetic oligonucleotide
ugugcgauguucacggccu

SEQ ID NO: 1437674 - RNA, 19 nt, Artificial Sequence
  Description of Artificial Sequence: Synthetic oligonucleotide
uguaccaggucagacaagu

SEQ ID NO: 1437675 - RNA, 19 nt, Artificial Sequence
  Description of Artificial Sequence: Synthetic oligonucleotide
aaugugcuacacuguacca

SEQ ID NO: 1437676 - RNA, 19 nt, Artificial Sequence
  Description of Artificial Sequence: Synthetic oligonucleotide
cuaagagcaguuccagagg

SEQ ID NO: 1437677 - RNA, 19 nt, Artificial Sequence
  Description of Artificial Sequence: Synthetic oligonucleotide
gcuauaaguaaugaagucc

SEQ ID NO: 1437678 - RNA, 19 nt, Artificial Sequence
  Description of Artificial Sequence: Synthetic oligonucleotide
cauaaucuguacucugaag

SEQ ID NO: 1437679 - RNA, 19 nt, Artificial Sequence
  Description of Artificial Sequence: Synthetic oligonucleotide
cuugucaucgaugacugac

SEQ ID NO: 1437680 - RNA, 19 nt, Artificial Sequence
  Description of Artificial Sequence: Synthetic oligonucleotide
uuucucauguggcggaacu

SEQ ID NO: 1437681 - RNA, 19 nt, Artificial Sequence
  Description of Artificial Sequence: Synthetic oligonucleotide
cacuaaucccuccaaguag

SEQ ID NO: 1437682 - RNA, 19 nt, Artificial Sequence
  Description of Artificial Sequence: Synthetic oligonucleotide
aaguugccauaaucuguac

SEQ ID NO: 1437683 - RNA, 19 nt, Artificial Sequence
  Description of Artificial Sequence: Synthetic oligonucleotide
uuccggguaguaaucagcu

SEQ ID NO: 1437684 - RNA, 19 nt, Artificial Sequence
  Description of Artificial Sequence: Synthetic oligonucleotide
aucauguagcuauaaguaa

SEQ ID NO: 1437685 - RNA, 19 nt, Artificial Sequence
  Description of Artificial Sequence: Synthetic oligonucleotide
ugcuucaaacucuaggaua

SEQ ID NO: 1437686 - RNA, 19 nt, Artificial Sequence
  Description of Artificial Sequence: Synthetic oligonucleotide
uguccacguugaaauaaag

SEQ ID NO: 1437687 - RNA, 19 nt, Artificial Sequence
  Description of Artificial Sequence: Synthetic oligonucleotide
aagaacgacauggcugcgg

SEQ ID NO: 1437688 - RNA, 19 nt, Artificial Sequence
  Description of Artificial Sequence: Synthetic oligonucleotide
uucagcgauugaacgcugg

SEQ ID NO: 1437689 - RNA, 19 nt, Artificial Sequence
  Description of Artificial Sequence: Synthetic oligonucleotide
uugucaucgaugacugaca

SEQ ID NO: 1437690 - RNA, 19 nt, Artificial Sequence
  Description of Artificial Sequence: Synthetic oligonucleotide
gucccuaaucccuuuguag

SEQ ID NO: 1437691 - RNA, 19 nt, Artificial Sequence
  Description of Artificial Sequence: Synthetic oligonucleotide
aguuagaacacuagaagau

SEQ ID NO: 1437692 - RNA, 19 nt, Artificial Sequence
  Description of Artificial Sequence: Synthetic oligonucleotide
uguauuccggguaguaauc

SEQ ID NO: 1437693 - RNA, 19 nt, Artificial Sequence
  Description of Artificial Sequence: Synthetic oligonucleotide
uauuccggguaguaaucag

SEQ ID NO: 1437694 - RNA, 19 nt, Artificial Sequence
  Description of Artificial Sequence: Synthetic oligonucleotide
ugaugcuucauuggccagg

SEQ ID NO: 1437695 - RNA, 19 nt, Artificial Sequence
  Description of Artificial Sequence: Synthetic oligonucleotide
ugucaucgaugacugacac

SEQ ID NO: 1437696 - RNA, 19 nt, Artificial Sequence
  Description of Artificial Sequence: Synthetic oligonucleotide
auuccggguaguaaucagc

SEQ ID NO: 1437697 - RNA, 19 nt, Artificial Sequence
  Description of Artificial Sequence: Synthetic oligonucleotide
aggcauaaaagacaccaaa

SEQ ID NO: 1437698 - RNA, 19 nt, Artificial Sequence
  Description of Artificial Sequence: Synthetic oligonucleotide
uguugcgacauuccuguuc

SEQ ID NO: 1437699 - RNA, 19 nt, Artificial Sequence
  Description of Artificial Sequence: Synthetic oligonucleotide
ucaggccgcgcacuaaucc

SEQ ID NO: 1437700 - RNA, 19 nt, Artificial Sequence
  Description of Artificial Sequence: Synthetic oligonucleotide
cguauugcggauuaucucg

SEQ ID NO: 1437701 - RNA, 19 nt, Artificial Sequence
  Description of Artificial Sequence: Synthetic oligonucleotide
cuugaguuagaacacuaga

SEQ ID NO: 1437702 - RNA, 19 nt, Artificial Sequence
  Description of Artificial Sequence: Synthetic oligonucleotide
acaagugagccaugagcuc

SEQ ID NO: 1437703 - RNA, 19 nt, Artificial Sequence
  Description of Artificial Sequence: Synthetic oligonucleotide
guaaucagcuacauucuug

SEQ ID NO: 1437704 - RNA, 19 nt, Artificial Sequence
  Description of Artificial Sequence: Synthetic oligonucleotide
caugcucaaagaaucgguc

SEQ ID NO: 1437705 - RNA, 19 nt, Artificial Sequence
  Description of Artificial Sequence: Synthetic oligonucleotide
uaggacacauggcaucagc

SEQ ID NO: 1437706 - RNA, 19 nt, Artificial Sequence
  Description of Artificial Sequence: Synthetic oligonucleotide
aauccacacaauguugcga

SEQ ID NO: 1437707 - RNA, 19 nt, Artificial Sequence
  Description of Artificial Sequence: Synthetic oligonucleotide
aguucagcgauugaacgcu

SEQ ID NO: 1437708 - RNA, 19 nt, Artificial Sequence
  Description of Artificial Sequence: Synthetic oligonucleotide
uugggcacaaguucagcga

SEQ ID NO: 1437709 - RNA, 19 nt, Artificial Sequence
  Description of Artificial Sequence: Synthetic oligonucleotide
ugcucaaagcugccuagug

SEQ ID NO: 1437710 - RNA, 19 nt, Artificial Sequence
  Description of Artificial Sequence: Synthetic oligonucleotide
augguuucucauguggcgg

SEQ ID NO: 1437711 - RNA, 19 nt, Artificial Sequence
  Description of Artificial Sequence: Synthetic oligonucleotide
cacucucuaaucuucccac

SEQ ID NO: 1437712 - RNA, 19 nt, Artificial Sequence
  Description of Artificial Sequence: Synthetic oligonucleotide
caccagaauggcauuguag

SEQ ID NO: 1437713 - RNA, 19 nt, Artificial Sequence
  Description of Artificial Sequence: Synthetic oligonucleotide
agcaguuuguauuccgggu

SEQ ID NO: 1437714 - RNA, 19 nt, Artificial Sequence
  Description of Artificial Sequence: Synthetic oligonucleotide
ugccauaaucuguacucug

SEQ ID NO: 1437715 - RNA, 19 nt, Artificial Sequence
  Description of Artificial Sequence: Synthetic oligonucleotide
cagagucucgcacugcacc

SEQ ID NO: 1437716 - RNA, 19 nt, Artificial Sequence
  Description of Artificial Sequence: Synthetic oligonucleotide
uauugucucagagggucag

SEQ ID NO: 1437717 - RNA, 19 nt, Artificial Sequence
  Description of Artificial Sequence: Synthetic oligonucleotide
ugucugugcgauguucacg

SEQ ID NO: 1437718 - RNA, 19 nt, Artificial Sequence
  Description of Artificial Sequence: Synthetic oligonucleotide
aaaaugacacaaguuucuu

SEQ ID NO: 1437719 - RNA, 19 nt, Artificial Sequence
  Description of Artificial Sequence: Synthetic oligonucleotide
ggcauaaaagacaccaaag

SEQ ID NO: 1437720 - RNA, 19 nt, Artificial Sequence
  Description of Artificial Sequence: Synthetic oligonucleotide
uugucucagagggucagag

SEQ ID NO: 1437721 - RNA, 19 nt, Artificial Sequence
  Description of Artificial Sequence: Synthetic oligonucleotide
ucauaggcaugguuucuca

SEQ ID NO: 1437722 - RNA, 19 nt, Artificial Sequence
  Description of Artificial Sequence: Synthetic oligonucleotide
aguugucgaucuuggcgcg

SEQ ID NO: 1437723 - RNA, 19 nt, Artificial Sequence
  Description of Artificial Sequence: Synthetic oligonucleotide
gaucuuggcgcgauggcgc

SEQ ID NO: 1437724 - RNA, 19 nt, Artificial Sequence
  Description of Artificial Sequence: Synthetic oligonucleotide
aggggagaggucccuaauc

SEQ ID NO: 1437725 - RNA, 19 nt, Artificial Sequence
  Description of Artificial Sequence: Synthetic oligonucleotide
ucucauguggcggaacucu

SEQ ID NO: 1437726 - RNA, 19 nt, Artificial Sequence
  Description of Artificial Sequence: Synthetic oligonucleotide
uguaggucuaagagcaguu

SEQ ID NO: 1437727 - RNA, 19 nt, Artificial Sequence
  Description of Artificial Sequence: Synthetic oligonucleotide
uugaccuguucauagucau

SEQ ID NO: 1437728 - RNA, 19 nt, Artificial Sequence
  Description of Artificial Sequence: Synthetic oligonucleotide
ucaggguagagucggccac

SEQ ID NO: 1437729 - RNA, 19 nt, Artificial Sequence
  Description of Artificial Sequence: Synthetic oligonucleotide
caguuuguauuccggguag

SEQ ID NO: 1437730 - RNA, 19 nt, Artificial Sequence
  Description of Artificial Sequence: Synthetic oligonucleotide
ucagacaagugagccauga

SEQ ID NO: 1437731 - RNA, 19 nt, Artificial Sequence
  Description of Artificial Sequence: Synthetic oligonucleotide
gauuaucucgauguucauc

SEQ ID NO: 1437732 - RNA, 19 nt, Artificial Sequence
  Description of Artificial Sequence: Synthetic oligonucleotide
auaaagcuccgggaagaac

SEQ ID NO: 1437733 - RNA, 19 nt, Artificial Sequence
  Description of Artificial Sequence: Synthetic oligonucleotide
gacaagugagccaugagcu

SEQ ID NO: 1437734 - RNA, 19 nt, Artificial Sequence
  Description of Artificial Sequence: Synthetic oligonucleotide
aacucuaggauaggacaca

SEQ ID NO: 1437735 - RNA, 19 nt, Artificial Sequence
  Description of Artificial Sequence: Synthetic oligonucleotide
ccuuuguaggucuaagagc

SEQ ID NO: 1437736 - RNA, 19 nt, Artificial Sequence
  Description of Artificial Sequence: Synthetic oligonucleotide
acacacucucuaaucuucc

SEQ ID NO: 1437737 - RNA, 19 nt, Artificial Sequence
  Description of Artificial Sequence: Synthetic oligonucleotide
agugcauuugggaaccuug

SEQ ID NO: 1437738 - RNA, 19 nt, Artificial Sequence
  Description of Artificial Sequence: Synthetic oligonucleotide
gaaccuugaguuagaacac

SEQ ID NO: 1437739 - RNA, 19 nt, Artificial Sequence
  Description of Artificial Sequence: Synthetic oligonucleotide
ucagcgauugaacgcuggu

SEQ ID NO: 1437740 - RNA, 19 nt, Artificial Sequence
  Description of Artificial Sequence: Synthetic oligonucleotide
uuguaggucuaagagcagu

SEQ ID NO: 1437741 - RNA, 19 nt, Artificial Sequence
  Description of Artificial Sequence: Synthetic oligonucleotide
caaugugccugugaugagc

SEQ ID NO: 1437742 - RNA, 19 nt, Artificial Sequence
  Description of Artificial Sequence: Synthetic oligonucleotide
gaacuuguagaaggacucc

SEQ ID NO: 1437743 - RNA, 19 nt, Artificial Sequence
  Description of Artificial Sequence: Synthetic oligonucleotide
auuguccacguugaaauaa

SEQ ID NO: 1437744 - RNA, 19 nt, Artificial Sequence
  Description of Artificial Sequence: Synthetic oligonucleotide
cuaaucccuccaaguagcc

SEQ ID NO: 1437745 - RNA, 19 nt, Artificial Sequence
  Description of Artificial Sequence: Synthetic oligonucleotide
cacucagcaauccacacaa

SEQ ID NO: 1437746 - RNA, 19 nt, Artificial Sequence
  Description of Artificial Sequence: Synthetic oligonucleotide
ugagccaagcccucagggu

SEQ ID NO: 1437747 - RNA, 19 nt, Artificial Sequence
  Description of Artificial Sequence: Synthetic oligonucleotide
ucauguggcggaacucuac

SEQ ID NO: 1437748 - RNA, 19 nt, Artificial Sequence
  Description of Artificial Sequence: Synthetic oligonucleotide
ugcacccucaaagagcagu

SEQ ID NO: 1437749 - RNA, 19 nt, Artificial Sequence
  Description of Artificial Sequence: Synthetic oligonucleotide
guaggggaauuuuauuguc

SEQ ID NO: 1437750 - RNA, 19 nt, Artificial Sequence
  Description of Artificial Sequence: Synthetic oligonucleotide
uguacagcguauugcggau

SEQ ID NO: 1437751 - RNA, 19 nt, Artificial Sequence
  Description of Artificial Sequence: Synthetic oligonucleotide
cugugcgauguucacggcc

SEQ ID NO: 1437752 - RNA, 19 nt, Artificial Sequence
  Description of Artificial Sequence: Synthetic oligonucleotide
aauaaagcuccgggaagaa

SEQ ID NO: 1437753 - RNA, 19 nt, Artificial Sequence
  Description of Artificial Sequence: Synthetic oligonucleotide
guccacguugaaauaaagc

SEQ ID NO: 1437754 - RNA, 19 nt, Artificial Sequence
  Description of Artificial Sequence: Synthetic oligonucleotide
agagucucgcacugcacca

SEQ ID NO: 1437755 - RNA, 19 nt, Artificial Sequence
  Description of Artificial Sequence: Synthetic oligonucleotide
uacagcguauugcggauua

SEQ ID NO: 1437756 - RNA, 19 nt, Artificial Sequence
  Description of Artificial Sequence: Synthetic oligonucleotide
cacagugcauuugggaacc

SEQ ID NO: 1437757 - RNA, 19 nt, Artificial Sequence
  Description of Artificial Sequence: Synthetic oligonucleotide
aaccuugaguuagaacacu

SEQ ID NO: 1437758 - RNA, 19 nt, Artificial Sequence
  Description of Artificial Sequence: Synthetic oligonucleotide
uagacaugucaauggcugu

SEQ ID NO: 1437759 - RNA, 19 nt, Artificial Sequence
  Description of Artificial Sequence: Synthetic oligonucleotide
ugguuucucauguggcgga

SEQ ID NO: 1437760 - RNA, 19 nt, Artificial Sequence
  Description of Artificial Sequence: Synthetic oligonucleotide
ucgaucuuggcgcgauggc

SEQ ID NO: 1437761 - RNA, 19 nt, Artificial Sequence
  Description of Artificial Sequence: Synthetic oligonucleotide
agucucgcacugcaccagg

SEQ ID NO: 1437762 - RNA, 19 nt, Artificial Sequence
  Description of Artificial Sequence: Synthetic oligonucleotide
gggaagaacgacauggcug

SEQ ID NO: 1437763 - RNA, 19 nt, Artificial Sequence
  Description of Artificial Sequence: Synthetic oligonucleotide
gugaugaugaaggcgcggc

SEQ ID NO: 1437764 - RNA, 19 nt, Artificial Sequence
  Description of Artificial Sequence: Synthetic oligonucleotide
cacacucucuaaucuuccc

SEQ ID NO: 1437765 - RNA, 19 nt, Artificial Sequence
  Description of Artificial Sequence: Synthetic oligonucleotide
caguguggaaagagcuugg

SEQ ID NO: 1437766 - RNA, 19 nt, Artificial Sequence
  Description of Artificial Sequence: Synthetic oligonucleotide
uaaugaaguccaggaagcu

SEQ ID NO: 1437767 - RNA, 19 nt, Artificial Sequence
  Description of Artificial Sequence: Synthetic oligonucleotide
ggugaugcuucauuggcca

SEQ ID NO: 1437768 - RNA, 19 nt, Artificial Sequence
  Description of Artificial Sequence: Synthetic oligonucleotide
agcguauugcggauuaucu

SEQ ID NO: 1437769 - RNA, 19 nt, Artificial Sequence
  Description of Artificial Sequence: Synthetic oligonucleotide
cauuugggaaccuugaguu

SEQ ID NO: 1437770 - RNA, 19 nt, Artificial Sequence
  Description of Artificial Sequence: Synthetic oligonucleotide
guuagggagggacaugaaa

SEQ ID NO: 1437771 - RNA, 19 nt, Artificial Sequence
  Description of Artificial Sequence: Synthetic oligonucleotide
agguuagggagggacauga

SEQ ID NO: 1437772 - RNA, 19 nt, Artificial Sequence
  Description of Artificial Sequence: Synthetic oligonucleotide
uugaacgcuggugcaaugu

SEQ ID NO: 1437773 - RNA, 19 nt, Artificial Sequence
  Description of Artificial Sequence: Synthetic oligonucleotide
aaagcagccaggggcgugu

SEQ ID NO: 1437774 - RNA, 19 nt, Artificial Sequence
  Description of Artificial Sequence: Synthetic oligonucleotide
guugcgacauuccuguucu

SEQ ID NO: 1437775 - RNA, 19 nt, Artificial Sequence
  Description of Artificial Sequence: Synthetic oligonucleotide
agagucuugucuccaggau

SEQ ID NO: 1437776 - RNA, 19 nt, Artificial Sequence
  Description of Artificial Sequence: Synthetic oligonucleotide
cuuguagaaggacuccaga

SEQ ID NO: 1437777 - RNA, 19 nt, Artificial Sequence
  Description of Artificial Sequence: Synthetic oligonucleotide
aaagcuccgggaagaacga

SEQ ID NO: 1437778 - RNA, 19 nt, Artificial Sequence
  Description of Artificial Sequence: Synthetic oligonucleotide
ugucagaggugaugcuuca

SEQ ID NO: 1437779 - RNA, 19 nt, Artificial Sequence
  Description of Artificial Sequence: Synthetic oligonucleotide
cucugugccgaaagaguug

SEQ ID NO: 1437780 - RNA, 19 nt, Artificial Sequence
  Description of Artificial Sequence: Synthetic oligonucleotide
uugccauaaucuguacucu

SEQ ID NO: 1437781 - RNA, 19 nt, Artificial Sequence
  Description of Artificial Sequence: Synthetic oligonucleotide
gaacgacauggcugcggcg

SEQ ID NO: 1437782 - RNA, 19 nt, Artificial Sequence
  Description of Artificial Sequence: Synthetic oligonucleotide
auugaacgcuggugcaaug

SEQ ID NO: 1437783 - RNA, 19 nt, Artificial Sequence
  Description of Artificial Sequence: Synthetic oligonucleotide
ggcacuugggcacaaguuc

SEQ ID NO: 1437784 - RNA, 19 nt, Artificial Sequence
  Description of Artificial Sequence: Synthetic oligonucleotide
acucucuaaucuucccacu

SEQ ID NO: 1437785 - RNA, 19 nt, Artificial Sequence
  Description of Artificial Sequence: Synthetic oligonucleotide
uugggaaccuugaguuaga

SEQ ID NO: 1437786 - RNA, 19 nt, Artificial Sequence
  Description of Artificial Sequence: Synthetic oligonucleotide
aucugcucaaagcugccua

SEQ ID NO: 1437787 - RNA, 19 nt, Artificial Sequence
  Description of Artificial Sequence: Synthetic oligonucleotide
ccggguaguaaucagcuac

SEQ ID NO: 1437788 - RNA, 19 nt, Artificial Sequence
  Description of Artificial Sequence: Synthetic oligonucleotide
caggccgcgcacuaauccc

SEQ ID NO: 1437789 - RNA, 19 nt, Artificial Sequence
  Description of Artificial Sequence: Synthetic oligonucleotide
gaugcuucauuggccagga

SEQ ID NO: 1437790 - RNA, 19 nt, Artificial Sequence
  Description of Artificial Sequence: Synthetic oligonucleotide
ccacguugaaauaaagcuc

SEQ ID NO: 1437791 - RNA, 19 nt, Artificial Sequence
  Description of Artificial Sequence: Synthetic oligonucleotide
ggaauuuuauugucucaga

SEQ ID NO: 1437792 - RNA, 19 nt, Artificial Sequence
  Description of Artificial Sequence: Synthetic oligonucleotide
gagaugcaauccuggaaaa

SEQ ID NO: 1437793 - RNA, 19 nt, Artificial Sequence
  Description of Artificial Sequence: Synthetic oligonucleotide
cuuggcgcgauggcgcugg

SEQ ID NO: 1437794 - RNA, 19 nt, Artificial Sequence
  Description of Artificial Sequence: Synthetic oligonucleotide
cuuagacaugucaauggcu

SEQ ID NO: 1437795 - RNA, 19 nt, Artificial Sequence
  Description of Artificial Sequence: Synthetic oligonucleotide
aaucgguccuccagagucu

SEQ ID NO: 1437796 - RNA, 19 nt, Artificial Sequence
  Description of Artificial Sequence: Synthetic oligonucleotide
gagucggccacagugugga

SEQ ID NO: 1437797 - RNA, 19 nt, Artificial Sequence
  Description of Artificial Sequence: Synthetic oligonucleotide
uccacacaauguugcgaca

SEQ ID NO: 1437798 - RNA, 19 nt, Artificial Sequence
  Description of Artificial Sequence: Synthetic oligonucleotide
aggucuaagagcaguucca

SEQ ID NO: 1437799 - RNA, 19 nt, Artificial Sequence
  Description of Artificial Sequence: Synthetic oligonucleotide
ugucuccaggauugcuacc

SEQ ID NO: 1437800 - RNA, 19 nt, Artificial Sequence
  Description of Artificial Sequence: Synthetic oligonucleotide
agaaucgguccuccagagu

SEQ ID NO: 1437801 - RNA, 19 nt, Artificial Sequence
  Description of Artificial Sequence: Synthetic oligonucleotide
ugguuccacccaauagagu

SEQ ID NO: 1437802 - RNA, 19 nt, Artificial Sequence
  Description of Artificial Sequence: Synthetic oligonucleotide
ggggauauaguugucgauc

SEQ ID NO: 1437803 - RNA, 19 nt, Artificial Sequence
  Description of Artificial Sequence: Synthetic oligonucleotide
auggcgcugggcgaugcac

SEQ ID NO: 1437804 - RNA, 19 nt, Artificial Sequence
  Description of Artificial Sequence: Synthetic oligonucleotide
gaggucccuaaucccuuug

SEQ ID NO: 1437805 - RNA, 19 nt, Artificial Sequence
  Description of Artificial Sequence: Synthetic oligonucleotide
gaagaacgacauggcugcg

SEQ ID NO: 1437806 - RNA, 19 nt, Artificial Sequence
  Description of Artificial Sequence: Synthetic oligonucleotide
acguugaaauaaagcuccg

SEQ ID NO: 1437807 - RNA, 19 nt, Artificial Sequence
  Description of Artificial Sequence: Synthetic oligonucleotide
aggucccuaaucccuuugu

SEQ ID NO: 1437808 - RNA, 19 nt, Artificial Sequence
  Description of Artificial Sequence: Synthetic oligonucleotide
cucuaggauaggacacaug

SEQ ID NO: 1437809 - RNA, 19 nt, Artificial Sequence
  Description of Artificial Sequence: Synthetic oligonucleotide
ggucuaagagcaguuccag

SEQ ID NO: 1437810 - RNA, 19 nt, Artificial Sequence
  Description of Artificial Sequence: Synthetic oligonucleotide
gugaugcuucauuggccag

SEQ ID NO: 1437811 - RNA, 19 nt, Artificial Sequence
  Description of Artificial Sequence: Synthetic oligonucleotide
ugcgacauuccuguucuuu

SEQ ID NO: 1437812 - RNA, 19 nt, Artificial Sequence
  Description of Artificial Sequence: Synthetic oligonucleotide
ugggcaaccccagaacaau

SEQ ID NO: 1437813 - RNA, 19 nt, Artificial Sequence
  Description of Artificial Sequence: Synthetic oligonucleotide
cucaggguagagucggcca

SEQ ID NO: 1437814 - RNA, 19 nt, Artificial Sequence
  Description of Artificial Sequence: Synthetic oligonucleotide
guauuccggguaguaauca

SEQ ID NO: 1437815 - RNA, 19 nt, Artificial Sequence
  Description of Artificial Sequence: Synthetic oligonucleotide
ucugugcgauguucacggc

SEQ ID NO: 1437816 - RNA, 19 nt, Artificial Sequence
  Description of Artificial Sequence: Synthetic oligonucleotide
ugcgauguucacggccucc

SEQ ID NO: 1437817 - RNA, 19 nt, Artificial Sequence
  Description of Artificial Sequence: Synthetic oligonucleotide
guaggucuaagagcaguuc

SEQ ID NO: 1437818 - RNA, 19 nt, Artificial Sequence
  Description of Artificial Sequence: Synthetic oligonucleotide
cauagucaucagcccgagc

SEQ ID NO: 1437819 - RNA, 19 nt, Artificial Sequence
  Description of Artificial Sequence: Synthetic oligonucleotide
uaaucccuuuguaggucua

SEQ ID NO: 1437820 - RNA, 19 nt, Artificial Sequence
  Description of Artificial Sequence: Synthetic oligonucleotide
uggcgcugggcgaugcacu

SEQ ID NO: 1437821 - RNA, 19 nt, Artificial Sequence
  Description of Artificial Sequence: Synthetic oligonucleotide
gagucucgcacugcaccag

SEQ ID NO: 1437822 - RNA, 19 nt, Artificial Sequence
  Description of Artificial Sequence: Synthetic oligonucleotide
uucaggccgcgcacuaauc

SEQ ID NO: 1437823 - RNA, 19 nt, Artificial Sequence
  Description of Artificial Sequence: Synthetic oligonucleotide
uucucauguggcggaacuc

SEQ ID NO: 1437824 - RNA, 19 nt, Artificial Sequence
  Description of Artificial Sequence: Synthetic oligonucleotide
cagcgauugaacgcuggug

SEQ ID NO: 1437825 - RNA, 19 nt, Artificial Sequence
  Description of Artificial Sequence: Synthetic oligonucleotide
cauaccccaaagacacaca

SEQ ID NO: 1437826 - RNA, 19 nt, Artificial Sequence
  Description of Artificial Sequence: Synthetic oligonucleotide
acucuaggauaggacacau

SEQ ID NO: 1437827 - RNA, 19 nt, Artificial Sequence
  Description of Artificial Sequence: Synthetic oligonucleotide
agcuccgggaagaacgaca

SEQ ID NO: 1437828 - RNA, 19 nt, Artificial Sequence
  Description of Artificial Sequence: Synthetic oligonucleotide
cagcguauugcggauuauc

SEQ ID NO: 1437829 - RNA, 19 nt, Artificial Sequence
  Description of Artificial Sequence: Synthetic oligonucleotide
aucuuggcgcgauggcgcu

SEQ ID NO: 1437830 - RNA, 19 nt, Artificial Sequence
  Description of Artificial Sequence: Synthetic oligonucleotide
ggcuguaaacauagggcug

SEQ ID NO: 1437831 - RNA, 19 nt, Artificial Sequence
  Description of Artificial Sequence: Synthetic oligonucleotide
ggcggucugcuucaaacuc

SEQ ID NO: 1437832 - RNA, 19 nt, Artificial Sequence
  Description of Artificial Sequence: Synthetic oligonucleotide
ggcacgguccuccuuggac

SEQ ID NO: 1437833 - RNA, 19 nt, Artificial Sequence
  Description of Artificial Sequence: Synthetic oligonucleotide
ccauaccccaaagacacac

SEQ ID NO: 1437834 - RNA, 19 nt, Artificial Sequence
  Description of Artificial Sequence: Synthetic oligonucleotide
ccagagucuugucuccagg

SEQ ID NO: 1437835 - RNA, 19 nt, Artificial Sequence
  Description of Artificial Sequence: Synthetic oligonucleotide
agccaagcccucaggguag

SEQ ID NO: 1437836 - RNA, 19 nt, Artificial Sequence
  Description of Artificial Sequence: Synthetic oligonucleotide
ugggaaccuugaguuagaa

SEQ ID NO: 1437837 - RNA, 19 nt, Artificial Sequence
  Description of Artificial Sequence: Synthetic oligonucleotide
augaaggcgcggcggucug

SEQ ID NO: 1437838 - RNA, 19 nt, Artificial Sequence
  Description of Artificial Sequence: Synthetic oligonucleotide
uugucgaucuuggcgcgau

SEQ ID NO: 1437839 - RNA, 19 nt, Artificial Sequence
  Description of Artificial Sequence: Synthetic oligonucleotide
gcggcggucugcuucaaac

SEQ ID NO: 1437840 - RNA, 19 nt, Artificial Sequence
  Description of Artificial Sequence: Synthetic oligonucleotide
gggaaccuugaguuagaac

SEQ ID NO: 1437841 - RNA, 19 nt, Artificial Sequence
  Description of Artificial Sequence: Synthetic oligonucleotide
ggccacaguguggaaagag

SEQ ID NO: 1437842 - RNA, 19 nt, Artificial Sequence
  Description of Artificial Sequence: Synthetic oligonucleotide
gcaguuuguauuccgggua

SEQ ID NO: 1437843 - RNA, 19 nt, Artificial Sequence
  Description of Artificial Sequence: Synthetic oligonucleotide
caagguccugcucugagau

SEQ ID NO: 1437844 - RNA, 19 nt, Artificial Sequence
  Description of Artificial Sequence: Synthetic oligonucleotide
uccggguaguaaucagcua

SEQ ID NO: 1437845 - RNA, 19 nt, Artificial Sequence
  Description of Artificial Sequence: Synthetic oligonucleotide
gcacuaaucccuccaagua

SEQ ID NO: 1437846 - RNA, 19 nt, Artificial Sequence
  Description of Artificial Sequence: Synthetic oligonucleotide
gauugaacgcuggugcaau

SEQ ID NO: 1437847 - RNA, 19 nt, Artificial Sequence
  Description of Artificial Sequence: Synthetic oligonucleotide
gaugaaggcgcggcggucu

SEQ ID NO: 1437848 - RNA, 19 nt, Artificial Sequence
  Description of Artificial Sequence: Synthetic oligonucleotide
auugucucagagggucaga

SEQ ID NO: 1437849 - RNA, 19 nt, Artificial Sequence
  Description of Artificial Sequence: Synthetic oligonucleotide
ugacacugucagaggugau

SEQ ID NO: 1437850 - RNA, 19 nt, Artificial Sequence
  Description of Artificial Sequence: Synthetic oligonucleotide
guuucucauguggcggaac

SEQ ID NO: 1437851 - RNA, 19 nt, Artificial Sequence
  Description of Artificial Sequence: Synthetic oligonucleotide
accuugaguuagaacacua

SEQ ID NO: 1437852 - RNA, 19 nt, Artificial Sequence
  Description of Artificial Sequence: Synthetic oligonucleotide
agaggucccuaaucccuuu

SEQ ID NO: 1437853 - RNA, 19 nt, Artificial Sequence
  Description of Artificial Sequence: Synthetic oligonucleotide
gccauaaucuguacucuga

SEQ ID NO: 1437854 - RNA, 19 nt, Artificial Sequence
  Description of Artificial Sequence: Synthetic oligonucleotide
guaccaggucagacaagug

SEQ ID NO: 1437855 - RNA, 19 nt, Artificial Sequence
  Description of Artificial Sequence: Synthetic oligonucleotide
acacuagaagauggggaua

SEQ ID NO: 1437856 - RNA, 19 nt, Artificial Sequence
  Description of Artificial Sequence: Synthetic oligonucleotide
cauuguccacguugaaaua

SEQ ID NO: 1437857 - RNA, 19 nt, Artificial Sequence
  Description of Artificial Sequence: Synthetic oligonucleotide
cauucuugaccuguucaua

SEQ ID NO: 1437858 - RNA, 19 nt, Artificial Sequence
  Description of Artificial Sequence: Synthetic oligonucleotide
guagagucggccacagugu

SEQ ID NO: 1437859 - RNA, 19 nt, Artificial Sequence
  Description of Artificial Sequence: Synthetic oligonucleotide
ggggauauugguccauucu

SEQ ID NO: 1437860 - RNA, 19 nt, Artificial Sequence
  Description of Artificial Sequence: Synthetic oligonucleotide
gggauauugguccauucuu

SEQ ID NO: 1437861 - RNA, 19 nt, Artificial Sequence
  Description of Artificial Sequence: Synthetic oligonucleotide
guucagcgauugaacgcug

SEQ ID NO: 1437862 - RNA, 19 nt, Artificial Sequence
  Description of Artificial Sequence: Synthetic oligonucleotide
gcgcacuaaucccuccaag

SEQ ID NO: 1437863 - RNA, 19 nt, Artificial Sequence
  Description of Artificial Sequence: Synthetic oligonucleotide
uggacagcucugugccgaa

SEQ ID NO: 1437864 - RNA, 19 nt, Artificial Sequence
  Description of Artificial Sequence: Synthetic oligonucleotide
ugccuaguggguggcacuu

SEQ ID NO: 1437865 - RNA, 19 nt, Artificial Sequence
  Description of Artificial Sequence: Synthetic oligonucleotide
gcggaacucuacuaccauc

SEQ ID NO: 1437866 - RNA, 19 nt, Artificial Sequence
  Description of Artificial Sequence: Synthetic oligonucleotide
cacuagaagauggggauau

SEQ ID NO: 1437867 - RNA, 19 nt, Artificial Sequence
  Description of Artificial Sequence: Synthetic oligonucleotide
gauggcgcugggcgaugca

SEQ ID NO: 1437868 - RNA, 19 nt, Artificial Sequence
  Description of Artificial Sequence: Synthetic oligonucleotide
uggcacgguccuccuugga

SEQ ID NO: 1437869 - RNA, 19 nt, Artificial Sequence
  Description of Artificial Sequence: Synthetic oligonucleotide
gcgauugaacgcuggugca

SEQ ID NO: 1437870 - RNA, 19 nt, Artificial Sequence
  Description of Artificial Sequence: Synthetic oligonucleotide
aagcuggcaagcggcucau

SEQ ID NO: 1437871 - RNA, 19 nt, Artificial Sequence
  Description of Artificial Sequence: Synthetic oligonucleotide
uuggcgcgauggcgcuggg

SEQ ID NO: 1437872 - RNA, 19 nt, Artificial Sequence
  Description of Artificial Sequence: Synthetic oligonucleotide
cucauguggcggaacucua

SEQ ID NO: 1437873 - RNA, 19 nt, Artificial Sequence
  Description of Artificial Sequence: Synthetic oligonucleotide
gugggcaaccccagaacaa

SEQ ID NO: 1437874 - RNA, 19 nt, Artificial Sequence
  Description of Artificial Sequence: Synthetic oligonucleotide
ggagaggucccuaaucccu

SEQ ID NO: 1437875 - RNA, 19 nt, Artificial Sequence
  Description of Artificial Sequence: Synthetic oligonucleotide
aggccgcgcacuaaucccu

SEQ ID NO: 1437876 - RNA, 19 nt, Artificial Sequence
  Description of Artificial Sequence: Synthetic oligonucleotide
aggggcguguccaccagaa

SEQ ID NO: 1437877 - RNA, 19 nt, Artificial Sequence
  Description of Artificial Sequence: Synthetic oligonucleotide
cagcuacauucuugaccug

SEQ ID NO: 1437878 - RNA, 19 nt, Artificial Sequence
  Description of Artificial Sequence: Synthetic oligonucleotide
acuagaagauggggauaua

SEQ ID NO: 1437879 - RNA, 19 nt, Artificial Sequence
  Description of Artificial Sequence: Synthetic oligonucleotide
accccagaacaaugugcua

SEQ ID NO: 1437880 - RNA, 19 nt, Artificial Sequence
  Description of Artificial Sequence: Synthetic oligonucleotide
ggucccuaaucccuuugua

SEQ ID NO: 1437881 - RNA, 19 nt, Artificial Sequence
  Description of Artificial Sequence: Synthetic oligonucleotide
ggcgaugcacucagcaauc

SEQ ID NO: 1437882 - RNA, 19 nt, Artificial Sequence
  Description of Artificial Sequence: Synthetic oligonucleotide
cauaggcaugguuucucau

SEQ ID NO: 1437883 - RNA, 19 nt, Artificial Sequence
  Description of Artificial Sequence: Synthetic oligonucleotide
ccucaggguagagucggcc

SEQ ID NO: 1437884 - RNA, 19 nt, Artificial Sequence
  Description of Artificial Sequence: Synthetic oligonucleotide
gggcaaccccagaacaaug

SEQ ID NO: 1437885 - RNA, 19 nt, Artificial Sequence
  Description of Artificial Sequence: Synthetic oligonucleotide
ccagagucucgcacugcac

SEQ ID NO: 1437886 - RNA, 19 nt, Artificial Sequence
  Description of Artificial Sequence: Synthetic oligonucleotide
guugucgaucuuggcgcga

SEQ ID NO: 1437887 - RNA, 19 nt, Artificial Sequence
  Description of Artificial Sequence: Synthetic oligonucleotide
aucgguccuccagagucuu

SEQ ID NO: 1437888 - RNA, 19 nt, Artificial Sequence
  Description of Artificial Sequence: Synthetic oligonucleotide
acagcguauugcggauuau

SEQ ID NO: 1437889 - RNA, 19 nt, Artificial Sequence
  Description of Artificial Sequence: Synthetic oligonucleotide
gcugccuaguggguggcac

SEQ ID NO: 1437890 - RNA, 19 nt, Artificial Sequence
  Description of Artificial Sequence: Synthetic oligonucleotide
ccaaagacacacacucucu

SEQ ID NO: 1437891 - RNA, 19 nt, Artificial Sequence
  Description of Artificial Sequence: Synthetic oligonucleotide
gguaguccgccuggcugag

SEQ ID NO: 1437892 - RNA, 19 nt, Artificial Sequence
  Description of Artificial Sequence: Synthetic oligonucleotide
cggaacucuacuaccaucu

SEQ ID NO: 1437893 - RNA, 19 nt, Artificial Sequence
  Description of Artificial Sequence: Synthetic oligonucleotide
acagugcauuugggaaccu

SEQ ID NO: 1437894 - RNA, 19 nt, Artificial Sequence
  Description of Artificial Sequence: Synthetic oligonucleotide
gugcgauguucacggccuc

SEQ ID NO: 1437895 - RNA, 19 nt, Artificial Sequence
  Description of Artificial Sequence: Synthetic oligonucleotide
ggcgcugggcgaugcacuc

SEQ ID NO: 1437896 - RNA, 19 nt, Artificial Sequence
  Description of Artificial Sequence: Synthetic oligonucleotide
ggcaaccccagaacaaugu

SEQ ID NO: 1437897 - RNA, 19 nt, Artificial Sequence
  Description of Artificial Sequence: Synthetic oligonucleotide
cagcugugguuccacccaa

SEQ ID NO: 1437898 - RNA, 19 nt, Artificial Sequence
  Description of Artificial Sequence: Synthetic oligonucleotide
gagaggucccuaaucccuu

SEQ ID NO: 1437899 - RNA, 19 nt, Artificial Sequence
  Description of Artificial Sequence: Synthetic oligonucleotide
cggguaguaaucagcuaca

SEQ ID NO: 1437900 - RNA, 19 nt, Artificial Sequence
  Description of Artificial Sequence: Synthetic oligonucleotide
uugcgacauuccuguucuu

SEQ ID NO: 1437901 - RNA, 19 nt, Artificial Sequence
  Description of Artificial Sequence: Synthetic oligonucleotide
caucgaugacugacacugu

SEQ ID NO: 1437902 - RNA, 19 nt, Artificial Sequence
  Description of Artificial Sequence: Synthetic oligonucleotide
gcgacauuccuguucuuuu

SEQ ID NO: 1437903 - RNA, 19 nt, Artificial Sequence
  Description of Artificial Sequence: Synthetic oligonucleotide
cgcugggcgaugcacucag

SEQ ID NO: 1437904 - RNA, 19 nt, Artificial Sequence
  Description of Artificial Sequence: Synthetic oligonucleotide
ggcgcggcggucugcuuca

SEQ ID NO: 1437905 - RNA, 19 nt, Artificial Sequence
  Description of Artificial Sequence: Synthetic oligonucleotide
caguuccagagggaguugu

SEQ ID NO: 1437906 - RNA, 19 nt, Artificial Sequence
  Description of Artificial Sequence: Synthetic oligonucleotide
gcacaaguucagcgauuga

SEQ ID NO: 1437907 - RNA, 19 nt, Artificial Sequence
  Description of Artificial Sequence: Synthetic oligonucleotide
cccuaaucccuuuguaggu

SEQ ID NO: 1437908 - RNA, 19 nt, Artificial Sequence
  Description of Artificial Sequence: Synthetic oligonucleotide
gcaguuccagagggaguug

SEQ ID NO: 1437909 - RNA, 19 nt, Artificial Sequence
  Description of Artificial Sequence: Synthetic oligonucleotide
gccgcgcacuaaucccucc

SEQ ID NO: 1437910 - RNA, 19 nt, Artificial Sequence
  Description of Artificial Sequence: Synthetic oligonucleotide
uugcucuggaggggauauu

SEQ ID NO: 1437911 - RNA, 19 nt, Artificial Sequence
  Description of Artificial Sequence: Synthetic oligonucleotide
gcuuucaggccgcgcacua

SEQ ID NO: 1437912 - RNA, 19 nt, Artificial Sequence
  Description of Artificial Sequence: Synthetic oligonucleotide
cgcacuaaucccuccaagu

SEQ ID NO: 1437913 - RNA, 19 nt, Artificial Sequence
  Description of Artificial Sequence: Synthetic oligonucleotide
gguuucucauguggcggaa

SEQ ID NO: 1437914 - RNA, 19 nt, Artificial Sequence
  Description of Artificial Sequence: Synthetic oligonucleotide
caggggcguguccaccaga

SEQ ID NO: 1437915 - RNA, 19 nt, Artificial Sequence
  Description of Artificial Sequence: Synthetic oligonucleotide
ggauuaucucgauguucau

SEQ ID NO: 1437916 - RNA, 19 nt, Artificial Sequence
  Description of Artificial Sequence: Synthetic oligonucleotide
ggcggaacucuacuaccau

SEQ ID NO: 1437917 - RNA, 19 nt, Artificial Sequence
  Description of Artificial Sequence: Synthetic oligonucleotide
gugcuacacuguaccaggu

SEQ ID NO: 1437918 - RNA, 19 nt, Artificial Sequence
  Description of Artificial Sequence: Synthetic oligonucleotide
cugcucaaagcugccuagu

SEQ ID NO: 1437919 - RNA, 19 nt, Artificial Sequence
  Description of Artificial Sequence: Synthetic oligonucleotide
cccucaggguagagucggc

SEQ ID NO: 1437920 - RNA, 19 nt, Artificial Sequence
  Description of Artificial Sequence: Synthetic oligonucleotide
ggaucacguugucaaucau

SEQ ID NO: 1437921 - RNA, 19 nt, Artificial Sequence
  Description of Artificial Sequence: Synthetic oligonucleotide
gcggucugcuucaaacucu

SEQ ID NO: 1437922 - RNA, 19 nt, Artificial Sequence
  Description of Artificial Sequence: Synthetic oligonucleotide
gccuaguggguggcacuug

SEQ ID NO: 1437923 - RNA, 19 nt, Artificial Sequence
  Description of Artificial Sequence: Synthetic oligonucleotide
gucagaggugaugcuucau

SEQ ID NO: 1437924 - RNA, 19 nt, Artificial Sequence
  Description of Artificial Sequence: Synthetic oligonucleotide
guacagcguauugcggauu

SEQ ID NO: 1437925 - RNA, 19 nt, Artificial Sequence
  Description of Artificial Sequence: Synthetic oligonucleotide
ccgcgcacuaaucccucca

SEQ ID NO: 1437926 - RNA, 19 nt, Artificial Sequence
  Description of Artificial Sequence: Synthetic oligonucleotide
cccauaccccaaagacaca

SEQ ID NO: 1437927 - RNA, 19 nt, Artificial Sequence
  Description of Artificial Sequence: Synthetic oligonucleotide
gcgcgauggcgcugggcga

SEQ ID NO: 1437928 - RNA, 19 nt, Artificial Sequence
  Description of Artificial Sequence: Synthetic oligonucleotide
ccaagcccucaggguagag

SEQ ID NO: 1437929 - RNA, 19 nt, Artificial Sequence
  Description of Artificial Sequence: Synthetic oligonucleotide
cgauugaacgcuggugcaa

SEQ ID NO: 1437930 - RNA, 19 nt, Artificial Sequence
  Description of Artificial Sequence: Synthetic oligonucleotide
ggccgcgcacuaaucccuc

SEQ ID NO: 1437931 - RNA, 19 nt, Artificial Sequence
  Description of Artificial Sequence: Synthetic oligonucleotide
cagugcauuugggaaccuu

SEQ ID NO: 1437932 - RNA, 19 nt, Artificial Sequence
  Description of Artificial Sequence: Synthetic oligonucleotide
ggcuuucaggccgcgcacu

SEQ ID NO: 1437933 - RNA, 19 nt, Artificial Sequence
  Description of Artificial Sequence: Synthetic oligonucleotide
ggaggggauauugguccau

SEQ ID NO: 1437934 - RNA, 19 nt, Artificial Sequence
  Description of Artificial Sequence: Synthetic oligonucleotide
ggcugagcaccccggcuuu

SEQ ID NO: 1437935 - RNA, 19 nt, Artificial Sequence
  Description of Artificial Sequence: Synthetic oligonucleotide
cccggcuuucaggccgcgc

SEQ ID NO: 1437936 - RNA, 19 nt, Artificial Sequence
  Description of Artificial Sequence: Synthetic oligonucleotide
cgcgcacuaaucccuccaa

SEQ ID NO: 1437937 - RNA, 19 nt, Artificial Sequence
  Description of Artificial Sequence: Synthetic oligonucleotide
gcgcugggcgaugcacuca

SEQ ID NO: 1437938 - RNA, 19 nt, Artificial Sequence
  Description of Artificial Sequence: Synthetic oligonucleotide
ggggcguguccaccagaau

SEQ ID NO: 1437939 - RNA, 19 nt, Artificial Sequence
  Description of Artificial Sequence: Synthetic oligonucleotide
cggcggucugcuucaaacu

SEQ ID NO: 1437940 - RNA, 19 nt, Artificial Sequence
  Description of Artificial Sequence: Synthetic oligonucleotide
gggcacaaguucagcgauu

SEQ ID NO: 1437941 - RNA, 19 nt, Artificial Sequence
  Description of Artificial Sequence: Synthetic oligonucleotide
ggguggcacuugggcacaa

SEQ ID NO: 1437942 - RNA, 19 nt, Artificial Sequence
  Description of Artificial Sequence: Synthetic oligonucleotide
ccccggcuuucaggccgcg

SEQ ID NO: 1437943 - RNA, 19 nt, Artificial Sequence
  Description of Artificial Sequence: Synthetic oligonucleotide
cgcggcggucugcuucaaa

SEQ ID NO: 1437944 - RNA, 19 nt, Artificial Sequence
  Description of Artificial Sequence: Synthetic oligonucleotide
gcgcggcggucugcuucaa

SEQ ID NO: 1437945 - RNA, 19 nt, Artificial Sequence
  Description of Artificial Sequence: Synthetic oligonucleotide
aaugccaccaaucuuguac

SEQ ID NO: 1437946 - RNA, 19 nt, Artificial Sequence
  Description of Artificial Sequence: Synthetic oligonucleotide
ugaaccauggcauauuggg

SEQ ID NO: 1437947 - RNA, 19 nt, Artificial Sequence
  Description of Artificial Sequence: Synthetic oligonucleotide
aaugagcugcuuuacgccc

SEQ ID NO: 1437948 - RNA, 19 nt, Artificial Sequence
  Description of Artificial Sequence: Synthetic oligonucleotide
aaugaugguaauguaguac

SEQ ID NO: 1437949 - RNA, 19 nt, Artificial Sequence
  Description of Artificial Sequence: Synthetic oligonucleotide
aucaccagauuucagagac

SEQ ID NO: 1437950 - RNA, 19 nt, Artificial Sequence
  Description of Artificial Sequence: Synthetic oligonucleotide
uuuacuggugcaaagguca

SEQ ID NO: 1437951 - RNA, 19 nt, Artificial Sequence
  Description of Artificial Sequence: Synthetic oligonucleotide
acaaugagcugcuuuacgc

SEQ ID NO: 1437952 - RNA, 19 nt, Artificial Sequence
  Description of Artificial Sequence: Synthetic oligonucleotide
guaauguaguacuuggugg

SEQ ID NO: 1437953 - RNA, 19 nt, Artificial Sequence
  Description of Artificial Sequence: Synthetic oligonucleotide
auuuguaaaugagauggcc

SEQ ID NO: 1437954 - RNA, 19 nt, Artificial Sequence
  Description of Artificial Sequence: Synthetic oligonucleotide
uuuguaaaugagauggccu

SEQ ID NO: 1437955 - RNA, 19 nt, Artificial Sequence
  Description of Artificial Sequence: Synthetic oligonucleotide
augguaauguaguacuugg

SEQ ID NO: 1437956 - RNA, 19 nt, Artificial Sequence
  Description of Artificial Sequence: Synthetic oligonucleotide
auauuuaaaggaccccuuc

SEQ ID NO: 1437957 - RNA, 19 nt, Artificial Sequence
  Description of Artificial Sequence: Synthetic oligonucleotide
aguccaucuuguuaacacc

SEQ ID NO: 1437958 - RNA, 19 nt, Artificial Sequence
  Description of Artificial Sequence: Synthetic oligonucleotide
aaaugagauggccuguugu

SEQ ID NO: 1437959 - RNA, 19 nt, Artificial Sequence
  Description of Artificial Sequence: Synthetic oligonucleotide
ugugacagucgauaacugg

SEQ ID NO: 1437960 - RNA, 19 nt, Artificial Sequence
  Description of Artificial Sequence: Synthetic oligonucleotide
uuuaaaggaccccuucccc

SEQ ID NO: 1437961 - RNA, 19 nt, Artificial Sequence
  Description of Artificial Sequence: Synthetic oligonucleotide
auaacuggugaguagccag

SEQ ID NO: 1437962 - RNA, 19 nt, Artificial Sequence
  Description of Artificial Sequence: Synthetic oligonucleotide
augaugguaauguaguacu

SEQ ID NO: 1437963 - RNA, 19 nt, Artificial Sequence
  Description of Artificial Sequence: Synthetic oligonucleotide
auccuugacggacacauuc

SEQ ID NO: 1437964 - RNA, 19 nt, Artificial Sequence
  Description of Artificial Sequence: Synthetic oligonucleotide
gauaccagucuccacucgg

SEQ ID NO: 1437965 - RNA, 19 nt, Artificial Sequence
  Description of Artificial Sequence: Synthetic oligonucleotide
uggccaaugaccacaaugu

SEQ ID NO: 1437966 - RNA, 19 nt, Artificial Sequence
  Description of Artificial Sequence: Synthetic oligonucleotide
uaauguaguacuugguggu

SEQ ID NO: 1437967 - RNA, 19 nt, Artificial Sequence
  Description of Artificial Sequence: Synthetic oligonucleotide
uugacggacacauucuuca

SEQ ID NO: 1437968 - RNA, 19 nt, Artificial Sequence
  Description of Artificial Sequence: Synthetic oligonucleotide
uuugccccggcgaauaucc

SEQ ID NO: 1437969 - RNA, 19 nt, Artificial Sequence
  Description of Artificial Sequence: Synthetic oligonucleotide
ugugugacagucgauaacu

SEQ ID NO: 1437970 - RNA, 19 nt, Artificial Sequence
  Description of Artificial Sequence: Synthetic oligonucleotide
agcuccgcaaacuugcagg

SEQ ID NO: 1437971 - RNA, 19 nt, Artificial Sequence
  Description of Artificial Sequence: Synthetic oligonucleotide
guugaugugugucuucucc

SEQ ID NO: 1437972 - RNA, 19 nt, Artificial Sequence
  Description of Artificial Sequence: Synthetic oligonucleotide
uugcauuuccuuccuugcg

SEQ ID NO: 1437973 - RNA, 19 nt, Artificial Sequence
  Description of Artificial Sequence: Synthetic oligonucleotide
gguaauguaguacuuggug

SEQ ID NO: 1437974 - RNA, 19 nt, Artificial Sequence
  Description of Artificial Sequence: Synthetic oligonucleotide
uuaaaggaccccuucccca

SEQ ID NO: 1437975 - RNA, 19 nt, Artificial Sequence
  Description of Artificial Sequence: Synthetic oligonucleotide
uugaaccauggcauauugg

SEQ ID NO: 1437976 - RNA, 19 nt, Artificial Sequence
  Description of Artificial Sequence: Synthetic oligonucleotide
uguggugauguuuacuggu

SEQ ID NO: 1437977 - RNA, 19 nt, Artificial Sequence
  Description of Artificial Sequence: Synthetic oligonucleotide
aucauagcgcuucucacug

SEQ ID NO: 1437978 - RNA, 19 nt, Artificial Sequence
  Description of Artificial Sequence: Synthetic oligonucleotide
ucgauaacuggugaguagc

SEQ ID NO: 1437979 - RNA, 19 nt, Artificial Sequence
  Description of Artificial Sequence: Synthetic oligonucleotide
acaauguugaugugugucu

SEQ ID NO: 1437980 - RNA, 19 nt, Artificial Sequence
  Description of Artificial Sequence: Synthetic oligonucleotide
caccauaccaggccgaagg

SEQ ID NO: 1437981 - RNA, 19 nt, Artificial Sequence
  Description of Artificial Sequence: Synthetic oligonucleotide
agcgcuucucacuguaggc

SEQ ID NO: 1437982 - RNA, 19 nt, Artificial Sequence
  Description of Artificial Sequence: Synthetic oligonucleotide
cagucugccgcauaucgcg

SEQ ID NO: 1437983 - RNA, 19 nt, Artificial Sequence
  Description of Artificial Sequence: Synthetic oligonucleotide
gaugguaauguaguacuug

SEQ ID NO: 1437984 - RNA, 19 nt, Artificial Sequence
  Description of Artificial Sequence: Synthetic oligonucleotide
caaugagcugcuuuacgcc

SEQ ID NO: 1437985 - RNA, 19 nt, Artificial Sequence
  Description of Artificial Sequence: Synthetic oligonucleotide
ucuacuuuccagcccuuga

SEQ ID NO: 1437986 - RNA, 19 nt, Artificial Sequence
  Description of Artificial Sequence: Synthetic oligonucleotide
ugacagucgauaacuggug

SEQ ID NO: 1437987 - RNA, 19 nt, Artificial Sequence
  Description of Artificial Sequence: Synthetic oligonucleotide
cuugggauuguccuccagc

SEQ ID NO: 1437988 - RNA, 19 nt, Artificial Sequence
  Description of Artificial Sequence: Synthetic oligonucleotide
cuuucugcgccuucugugc

SEQ ID NO: 1437989 - RNA, 19 nt, Artificial Sequence
  Description of Artificial Sequence: Synthetic oligonucleotide
uuguacacguccugcagug

SEQ ID NO: 1437990 - RNA, 19 nt, Artificial Sequence
  Description of Artificial Sequence: Synthetic oligonucleotide
acagacauuugccccggcg

SEQ ID NO: 1437991 - RNA, 19 nt, Artificial Sequence
  Description of Artificial Sequence: Synthetic oligonucleotide
uaaaugagauggccuguug

SEQ ID NO: 1437992 - RNA, 19 nt, Artificial Sequence
  Description of Artificial Sequence: Synthetic oligonucleotide
ucgaugguccuuuugucga

SEQ ID NO: 1437993 - RNA, 19 nt, Artificial Sequence
  Description of Artificial Sequence: Synthetic oligonucleotide
acagucgauaacuggugag

SEQ ID NO: 1437994 - RNA, 19 nt, Artificial Sequence
  Description of Artificial Sequence: Synthetic oligonucleotide
uggugauguuuacuggugc

SEQ ID NO: 1437995 - RNA, 19 nt, Artificial Sequence
  Description of Artificial Sequence: Synthetic oligonucleotide
ggacacauucuucacauug

SEQ ID NO: 1437996 - RNA, 19 nt, Artificial Sequence
  Description of Artificial Sequence: Synthetic oligonucleotide
uugaugacgcccacggcca

SEQ ID NO: 1437997 - RNA, 19 nt, Artificial Sequence
  Description of Artificial Sequence: Synthetic oligonucleotide
uuucugcgccuucugugcg

SEQ ID NO: 1437998 - RNA, 19 nt, Artificial Sequence
  Description of Artificial Sequence: Synthetic oligonucleotide
uaacuggugaguagccagc

SEQ ID NO: 1437999 - RNA, 19 nt, Artificial Sequence
  Description of Artificial Sequence: Synthetic oligonucleotide
gagacaucaaugaugguaa

SEQ ID NO: 1438000 - RNA, 19 nt, Artificial Sequence
  Description of Artificial Sequence: Synthetic oligonucleotide
guacacguccugcaguggg

SEQ ID NO: 1438001 - RNA, 19 nt, Artificial Sequence
  Description of Artificial Sequence: Synthetic oligonucleotide
cagauuucagagacuuggg

SEQ ID NO: 1438002 - RNA, 19 nt, Artificial Sequence
  Description of Artificial Sequence: Synthetic oligonucleotide
aggauaccagucuccacuc

SEQ ID NO: 1438003 - RNA, 19 nt, Artificial Sequence
  Description of Artificial Sequence: Synthetic oligonucleotide
aacuggugaguagccagcg

SEQ ID NO: 1438004 - RNA, 19 nt, Artificial Sequence
  Description of Artificial Sequence: Synthetic oligonucleotide
ucuucuugauguaggcgcu

SEQ ID NO: 1438005 - RNA, 19 nt, Artificial Sequence
  Description of Artificial Sequence: Synthetic oligonucleotide
uucacuugcccgcuuucug

SEQ ID NO: 1438006 - RNA, 19 nt, Artificial Sequence
  Description of Artificial Sequence: Synthetic oligonucleotide
ucacuugcccgcuuucugc

SEQ ID NO: 1438007 - RNA, 19 nt, Artificial Sequence
  Description of Artificial Sequence: Synthetic oligonucleotide
cacaaugagcugcuuuacg

SEQ ID NO: 1438008 - RNA, 19 nt, Artificial Sequence
  Description of Artificial Sequence: Synthetic oligonucleotide
ugagauggccuguuguggu

SEQ ID NO: 1438009 - RNA, 19 nt, Artificial Sequence
  Description of Artificial Sequence: Synthetic oligonucleotide
auggcauauugggugaggg

SEQ ID NO: 1438010 - RNA, 19 nt, Artificial Sequence
  Description of Artificial Sequence: Synthetic oligonucleotide
ugcgcucuacuuuccagcc

SEQ ID NO: 1438011 - RNA, 19 nt, Artificial Sequence
  Description of Artificial Sequence: Synthetic oligonucleotide
ugguaauguaguacuuggu

SEQ ID NO: 1438012 - RNA, 19 nt, Artificial Sequence
  Description of Artificial Sequence: Synthetic oligonucleotide
auaucgcgcacggcgaagc

SEQ ID NO: 1438013 - RNA, 19 nt, Artificial Sequence
  Description of Artificial Sequence: Synthetic oligonucleotide
acggacacauucuucacau

SEQ ID NO: 1438014 - RNA, 19 nt, Artificial Sequence
  Description of Artificial Sequence: Synthetic oligonucleotide
uguaggcugguuccgugga

SEQ ID NO: 1438015 - RNA, 19 nt, Artificial Sequence
  Description of Artificial Sequence: Synthetic oligonucleotide
gucgauaacuggugaguag

SEQ ID NO: 1438016 - RNA, 19 nt, Artificial Sequence
  Description of Artificial Sequence: Synthetic oligonucleotide
cuguggugauguuuacugg

SEQ ID NO: 1438017 - RNA, 19 nt, Artificial Sequence
  Description of Artificial Sequence: Synthetic oligonucleotide
uuuccggggaccaucucaa

SEQ ID NO: 1438018 - RNA, 19 nt, Artificial Sequence
  Description of Artificial Sequence: Synthetic oligonucleotide
uccuugacggacacauucu

SEQ ID NO: 1438019 - RNA, 19 nt, Artificial Sequence
  Description of Artificial Sequence: Synthetic oligonucleotide
accacaauguugaugugug

SEQ ID NO: 1438020 - RNA, 19 nt, Artificial Sequence
  Description of Artificial Sequence: Synthetic oligonucleotide
cccaaugccaccaaucuug

SEQ ID NO: 1438021 - RNA, 19 nt, Artificial Sequence
  Description of Artificial Sequence: Synthetic oligonucleotide
gguacugugagaaacucuc

SEQ ID NO: 1438022 - RNA, 19 nt, Artificial Sequence
  Description of Artificial Sequence: Synthetic oligonucleotide
uucuagcagggacacgcca

SEQ ID NO: 1438023 - RNA, 19 nt, Artificial Sequence
  Description of Artificial Sequence: Synthetic oligonucleotide
ugccgcauaucgcgcacgg

SEQ ID NO: 1438024 - RNA, 19 nt, Artificial Sequence
  Description of Artificial Sequence: Synthetic oligonucleotide
cuugcgcucuacuuuccag

SEQ ID NO: 1438025 - RNA, 19 nt, Artificial Sequence
  Description of Artificial Sequence: Synthetic oligonucleotide
cucgcugagcgccucgugg

SEQ ID NO: 1438026 - RNA, 19 nt, Artificial Sequence
  Description of Artificial Sequence: Synthetic oligonucleotide
uuccuugcgcucuacuuuc

SEQ ID NO: 1438027 - RNA, 19 nt, Artificial Sequence
  Description of Artificial Sequence: Synthetic oligonucleotide
cuugacggacacauucuuc

SEQ ID NO: 1438028 - RNA, 19 nt, Artificial Sequence
  Description of Artificial Sequence: Synthetic oligonucleotide
uggugaguagccagcgcug

SEQ ID NO: 1438029 - RNA, 19 nt, Artificial Sequence
  Description of Artificial Sequence: Synthetic oligonucleotide
uuguguccagggcuucuag

SEQ ID NO: 1438030 - RNA, 19 nt, Artificial Sequence
  Description of Artificial Sequence: Synthetic oligonucleotide
auaccaggccgaaggauac

SEQ ID NO: 1438031 - RNA, 19 nt, Artificial Sequence
  Description of Artificial Sequence: Synthetic oligonucleotide
gagggcaugucccgguuug

SEQ ID NO: 1438032 - RNA, 19 nt, Artificial Sequence
  Description of Artificial Sequence: Synthetic oligonucleotide
uugucgaugccccgcauuu

SEQ ID NO: 1438033 - RNA, 19 nt, Artificial Sequence
  Description of Artificial Sequence: Synthetic oligonucleotide
agaacgccggucaaucuuc

SEQ ID NO: 1438034 - RNA, 19 nt, Artificial Sequence
  Description of Artificial Sequence: Synthetic oligonucleotide
acacgccacuugcauuucc

SEQ ID NO: 1438035 - RNA, 19 nt, Artificial Sequence
  Description of Artificial Sequence: Synthetic oligonucleotide
cuguaggcugguuccgugg

SEQ ID NO: 1438036 - RNA, 19 nt, Artificial Sequence
  Description of Artificial Sequence: Synthetic oligonucleotide
gcugauuugcccagggugg

SEQ ID NO: 1438037 - RNA, 19 nt, Artificial Sequence
  Description of Artificial Sequence: Synthetic oligonucleotide
agcgcugauuugcccaggg

SEQ ID NO: 1438038 - RNA, 19 nt, Artificial Sequence
  Description of Artificial Sequence: Synthetic oligonucleotide
ugugcggacuuggugaccu

SEQ ID NO: 1438039 - RNA, 19 nt, Artificial Sequence
  Description of Artificial Sequence: Synthetic oligonucleotide
gacagucgauaacugguga

SEQ ID NO: 1438040 - RNA, 19 nt, Artificial Sequence
  Description of Artificial Sequence: Synthetic oligonucleotide
uuacuggugcaaaggucac

SEQ ID NO: 1438041 - RNA, 19 nt, Artificial Sequence
  Description of Artificial Sequence: Synthetic oligonucleotide
uaucgcgcacggcgaagcg

SEQ ID NO: 1438042 - RNA, 19 nt, Artificial Sequence
  Description of Artificial Sequence: Synthetic oligonucleotide
acagucugccgcauaucgc

SEQ ID NO: 1438043 - RNA, 19 nt, Artificial Sequence
  Description of Artificial Sequence: Synthetic oligonucleotide
augaugaccugggagguga

SEQ ID NO: 1438044 - RNA, 19 nt, Artificial Sequence
  Description of Artificial Sequence: Synthetic oligonucleotide
uuugcccguucuuggagac

SEQ ID NO: 1438045 - RNA, 19 nt, Artificial Sequence
  Description of Artificial Sequence: Synthetic oligonucleotide
accauggcauauuggguga

SEQ ID NO: 1438046 - RNA, 19 nt, Artificial Sequence
  Description of Artificial Sequence: Synthetic oligonucleotide
ugaugguaauguaguacuu

SEQ ID NO: 1438047 - RNA, 19 nt, Artificial Sequence
  Description of Artificial Sequence: Synthetic oligonucleotide
gacggacacauucuucaca

SEQ ID NO: 1438048 - RNA, 19 nt, Artificial Sequence
  Description of Artificial Sequence: Synthetic oligonucleotide
gagacuugggauuguccuc

SEQ ID NO: 1438049 - RNA, 19 nt, Artificial Sequence
  Description of Artificial Sequence: Synthetic oligonucleotide
ucugugcggacuuggugac

SEQ ID NO: 1438050 - RNA, 19 nt, Artificial Sequence
  Description of Artificial Sequence: Synthetic oligonucleotide
aacgccggucaaucuucuc
